United States Patent Application Publication US 2005/0118625 A1 - sequence listing, part 11

SEQ ID NO: 229348 - DNA, 25 bp, Probe Sequence
gacggcgagaactatgttgtgcttc

SEQ ID NO: 229349 - DNA, 25 bp, Probe Sequence
gactggctgaaagttgggttcacct

SEQ ID NO: 229350 - DNA, 25 bp, Probe Sequence
gagctggtattaggggagacacccc

SEQ ID NO: 229351 - DNA, 25 bp, Probe Sequence
gacggtgtctaggagggatgacccc

SEQ ID NO: 229352 - DNA, 25 bp, Probe Sequence
gacggctgctgcggaaaggaaaccc

SEQ ID NO: 229353 - DNA, 25 bp, Probe Sequence
gacgaccctggacatcgtcagagcc

SEQ ID NO: 229354 - DNA, 25 bp, Probe Sequence
gacggtcctggaaatctcacatggt

SEQ ID NO: 229355 - DNA, 25 bp, Probe Sequence
gacgtgtccttgacacatctgacct

SEQ ID NO: 229356 - DNA, 25 bp, Probe Sequence
gacgtggactttagcatgcagagca

SEQ ID NO: 229357 - DNA, 25 bp, Probe Sequence
gactggctactggttgtcagagcgc

SEQ ID NO: 229358 - DNA, 25 bp, Probe Sequence
gacgagtgagcgggtgaagtgccac

SEQ ID NO: 229359 - DNA, 25 bp, Probe Sequence
gacgagggtgcgctgtggacacagc

SEQ ID NO: 229360 - DNA, 25 bp, Probe Sequence
gacgaggcttgaggtgggctcaggc

SEQ ID NO: 229361 - DNA, 25 bp, Probe Sequence
gacgtggctctgggtgaggtaggcg

SEQ ID NO: 229362 - DNA, 25 bp, Probe Sequence
gacgtggagctcgtggagaccaggc

SEQ ID NO: 229363 - DNA, 25 bp, Probe Sequence
gacgtggagctcgtggagaccaggc

SEQ ID NO: 229364 - DNA, 25 bp, Probe Sequence
gacggtgatcttgggcagaacatac

SEQ ID NO: 229365 - DNA, 25 bp, Probe Sequence
gacgtggagctgggccgaaccacgt

SEQ ID NO: 229366 - DNA, 25 bp, Probe Sequence
gacgtggaggcagccgtcaacagcc

SEQ ID NO: 229367 - DNA, 25 bp, Probe Sequence
gacgtgctgggaccaactcaagacc

SEQ ID NO: 229368 - DNA, 25 bp, Probe Sequence
gacgcgctggcgttacagcgcaaca

SEQ ID NO: 229369 - DNA, 25 bp, Probe Sequence
gactggttgcagttgaaatgacctg

SEQ ID NO: 229370 - DNA, 25 bp, Probe Sequence
gacgctttgaaagatgatgacagtg

SEQ ID NO: 229371 - DNA, 25 bp, Probe Sequence
gactggccttattaatggacagctt

SEQ ID NO: 229372 - DNA, 25 bp, Probe Sequence
gacgggcggatctcgagatcacgga

SEQ ID NO: 229373 - DNA, 25 bp, Probe Sequence
gacggagggcatgctcagagacctg

SEQ ID NO: 229374 - DNA, 25 bp, Probe Sequence
gactggacatggtcactcagtaccg

SEQ ID NO: 229375 - DNA, 25 bp, Probe Sequence
gactggacatggtcactcagtaccg

SEQ ID NO: 229376 - DNA, 25 bp, Probe Sequence
gactggcaactgttttgtagcaaga

SEQ ID NO: 229377 - DNA, 25 bp, Probe Sequence
gactggcaactgttttgtagcaaga

SEQ ID NO: 229378 - DNA, 25 bp, Probe Sequence
gactggcaggcttcacaatgtgtga

SEQ ID NO: 229379 - DNA, 25 bp, Probe Sequence
gacgcagcgagtttcagtcgtgact

SEQ ID NO: 229380 - DNA, 25 bp, Probe Sequence
gacggcagagtccagactcgttctc

SEQ ID NO: 229381 - DNA, 25 bp, Probe Sequence
gacgacaggttcatctctatttaaa

SEQ ID NO: 229382 - DNA, 25 bp, Probe Sequence
gactggcactgatgcctttgatttg

SEQ ID NO: 229383 - DNA, 25 bp, Probe Sequence
gacggatctagctcctgtatatata

SEQ ID NO: 229384 - DNA, 25 bp, Probe Sequence
gacggagccggaagttatttattgg

SEQ ID NO: 229385 - DNA, 25 bp, Probe Sequence
gacgtcaatgggagtttgttttggc

SEQ ID NO: 229386 - DNA, 25 bp, Probe Sequence
gacgtcaatgggagtttgttttggc

SEQ ID NO: 229387 - DNA, 25 bp, Probe Sequence
gacgtcaatgggagtttgttttggc

SEQ ID NO: 229388 - DNA, 25 bp, Probe Sequence
gacgtcaatgggtggagtattacgg

SEQ ID NO: 229389 - DNA, 25 bp, Probe Sequence
gacgtcaatgggtggagtatttacg

SEQ ID NO: 229390 - DNA, 25 bp, Probe Sequence
gacgtcaatgggtggagtatttacg

SEQ ID NO: 229391 - DNA, 25 bp, Probe Sequence
gacgtcaatgggtggagtatttacg

SEQ ID NO: 229392 - DNA, 25 bp, Probe Sequence
gacgtcaatgggtggagtatttacg

SEQ ID NO: 229393 - DNA, 25 bp, Probe Sequence
gaggtcacgtggagggtacgttcat

SEQ ID NO: 229394 - DNA, 25 bp, Probe Sequence
gagagcttcttgaaccggtaaacta

SEQ ID NO: 229395 - DNA, 25 bp, Probe Sequence
gagacttcctttcagtgtaagagct

SEQ ID NO: 229396 - DNA, 25 bp, Probe Sequence
gagcctttttcacagtgcataagca

SEQ ID NO: 229397 - DNA, 25 bp, Probe Sequence
gacgctgcttttaccaggaaagact

SEQ ID NO: 229398 - DNA, 25 bp, Probe Sequence
gacctgtaatgtgccggacttaccc

SEQ ID NO: 229399 - DNA, 25 bp, Probe Sequence
gaccagtttttcgagacagcctacg

SEQ ID NO: 229400 - DNA, 25 bp, Probe Sequence
gaccctggtcttcaatggttagcag

SEQ ID NO: 229401 - DNA, 25 bp, Probe Sequence
gaccctggtcttcaatggttagcag

SEQ ID NO: 229402 - DNA, 25 bp, Probe Sequence
gacccatcagatctcaaaggactat

SEQ ID NO: 229403 - DNA, 25 bp, Probe Sequence
gacccattatggggacaggagctga

SEQ ID NO: 229404 - DNA, 25 bp, Probe Sequence
gacgcgttctagcagacactgactg

SEQ ID NO: 229405 - DNA, 25 bp, Probe Sequence
gacggctctgcaacatcgagcctga

SEQ ID NO: 229406 - DNA, 25 bp, Probe Sequence
gacgtgctgcacaagaaggcgctgc

SEQ ID NO: 229407 - DNA, 25 bp, Probe Sequence
gacgtggtgcgagatgcgctgcagc

SEQ ID NO: 229408 - DNA, 25 bp, Probe Sequence
gacggtgtgcagaaaggtgcggcca

SEQ ID NO: 229409 - DNA, 25 bp, Probe Sequence
gacgctgcggcagaaggctgaggcc

SEQ ID NO: 229410 - DNA, 25 bp, Probe Sequence
gacgctatgacacacagcgcgagcc

SEQ ID NO: 229411 - DNA, 25 bp, Probe Sequence
gacgtgaagcaggtcatgccagacc

SEQ ID NO: 229412 - DNA, 25 bp, Probe Sequence
gacgtgagagatctcctcgatctga

SEQ ID NO: 229413 - DNA, 25 bp, Probe Sequence
gacggtgctgatggacttcgatgcg

SEQ ID NO: 229414 - DNA, 25 bp, Probe Sequence
gacggttgaaactagagatggacag

SEQ ID NO: 229415 - DNA, 25 bp, Probe Sequence
gacggtgtgacctcagggtcaatga

SEQ ID NO: 229416 - DNA, 25 bp, Probe Sequence
gacggtgtaccagcagtgtgtcagg

SEQ ID NO: 229417 - DNA, 25 bp, Probe Sequence
gacggtgtaccagcagtgtgtcagg

SEQ ID NO: 229418 - DNA, 25 bp, Probe Sequence
gaccgagtgtcctcagtatatcagg

SEQ ID NO: 229419 - DNA, 25 bp, Probe Sequence
gacccaggtggctagcaaattagaa

SEQ ID NO: 229420 - DNA, 25 bp, Probe Sequence
gacccaaggaaccaaaattgcatct

SEQ ID NO: 229421 - DNA, 25 bp, Probe Sequence
gagcccggaaaacggttcatgtctc

SEQ ID NO: 229422 - DNA, 25 bp, Probe Sequence
gagcaccggcgatggtggttaactc

SEQ ID NO: 229423 - DNA, 25 bp, Probe Sequence
gacccgtccattgtgggtagcaatc

SEQ ID NO: 229424 - DNA, 25 bp, Probe Sequence
gaccctgtgggtgtcgaccacagta

SEQ ID NO: 229425 - DNA, 25 bp, Probe Sequence
gaccctctgggtgcattgaaaagaa

SEQ ID NO: 229426 - DNA, 25 bp, Probe Sequence
gaccgctcgacggacatcgtgaaag

SEQ ID NO: 229427 - DNA, 25 bp, Probe Sequence
gaccgtagacactttcgtcactgta

SEQ ID NO: 229428 - DNA, 25 bp, Probe Sequence
gacctatggaactgtcctacttgca

SEQ ID NO: 229429 - DNA, 25 bp, Probe Sequence
gatcgtagtacatcttacaactccg

SEQ ID NO: 229430 - DNA, 25 bp, Probe Sequence
gacgtgaggcaatatgaagtaccca

SEQ ID NO: 229431 - DNA, 25 bp, Probe Sequence
gacgtgagatcaataagaagaacct

SEQ ID NO: 229432 - DNA, 25 bp, Probe Sequence
gaccgatgtcggcagaaaactcgaa

SEQ ID NO: 229433 - DNA, 25 bp, Probe Sequence
gagctccatgtcccagataaactca

SEQ ID NO: 229434 - DNA, 25 bp, Probe Sequence
gacgctcaatctacagtttattcat

SEQ ID NO: 229435 - DNA, 25 bp, Probe Sequence
gacgctatattatgagtgtacacat

SEQ ID NO: 229436 - DNA, 25 bp, Probe Sequence
gacgtgtcatgtacatttgtatcaa

SEQ ID NO: 229437 - DNA, 25 bp, Probe Sequence
gacgcatgtggtaactttcagtagg

SEQ ID NO: 229438 - DNA, 25 bp, Probe Sequence
gacgctatttagactttgcagttgc

SEQ ID NO: 229439 - DNA, 25 bp, Probe Sequence
gacgcttcgatttttctgattctga

SEQ ID NO: 229440 - DNA, 25 bp, Probe Sequence
gacctatggactgtcctactggcag

SEQ ID NO: 229441 - DNA, 25 bp, Probe Sequence
gacgtcatgtcagtactccaaaagt

SEQ ID NO: 229442 - DNA, 25 bp, Probe Sequence
gacgcagctgtgatatgcaccagaa

SEQ ID NO: 229443 - DNA, 25 bp, Probe Sequence
gacgactatacaatcccagatgagt

SEQ ID NO: 229444 - DNA, 25 bp, Probe Sequence
gacgacacatcacgcatggaagaag

SEQ ID NO: 229445 - DNA, 25 bp, Probe Sequence
gactggccatgaagtgaggagatgg

SEQ ID NO: 229446 - DNA, 25 bp, Probe Sequence
gacggctctgacctgagctatgtgg

SEQ ID NO: 229447 - DNA, 25 bp, Probe Sequence
gacgtcgtgtctcagatgatgatgg

SEQ ID NO: 229448 - DNA, 25 bp, Probe Sequence
gacgccaagactcacgcatgtgtga

SEQ ID NO: 229449 - DNA, 25 bp, Probe Sequence
gacgccttgagtcgagggcatgtgc

SEQ ID NO: 229450 - DNA, 25 bp, Probe Sequence
gacgcattgtggagagggatggcct

SEQ ID NO: 229451 - DNA, 25 bp, Probe Sequence
gacgagttggtggcatgggaaggat

SEQ ID NO: 229452 - DNA, 25 bp, Probe Sequence
gacgaggacgtggtgaaggaggatg

SEQ ID NO: 229453 - DNA, 25 bp, Probe Sequence
gacgcagtacgtggtgatgggggag

SEQ ID NO: 229454 - DNA, 25 bp, Probe Sequence
gaccctaagctgctggagcgcgggt

SEQ ID NO: 229455 - DNA, 25 bp, Probe Sequence
gacggcaacactgtggagctgaagc

SEQ ID NO: 229456 - DNA, 25 bp, Probe Sequence
gacggcttcagtttgaaggagcagc

SEQ ID NO: 229457 - DNA, 25 bp, Probe Sequence
gatcgaggttgtttgcaacgaccgt

SEQ ID NO: 229458 - DNA, 25 bp, Probe Sequence
gacgcaagttgtatgtaccccgttc

SEQ ID NO: 229459 - DNA, 25 bp, Probe Sequence
gacgcaatttaaatgccatctcctc

SEQ ID NO: 229460 - DNA, 25 bp, Probe Sequence
gacggatattagtcatcatcacgcc

SEQ ID NO: 229461 - DNA, 25 bp, Probe Sequence
gacggcaaggattatctcaccctga

SEQ ID NO: 229462 - DNA, 25 bp, Probe Sequence
gacggatgacgatttcacacaggga

SEQ ID NO: 229463 - DNA, 25 bp, Probe Sequence
gacggatgaacaatgttcacacagg

SEQ ID NO: 229464 - DNA, 25 bp, Probe Sequence
gacggataacaatttcacaacagga

SEQ ID NO: 229465 - DNA, 25 bp, Probe Sequence
gacggataacaatttcacacaggga

SEQ ID NO: 229466 - DNA, 25 bp, Probe Sequence
gacggataacaatttcacacaggaa

SEQ ID NO: 229467 - DNA, 25 bp, Probe Sequence
gacggataacaatttcacacaggaa

SEQ ID NO: 229468 - DNA, 25 bp, Probe Sequence
gacggataacaatttcacacaggaa

SEQ ID NO: 229469 - DNA, 25 bp, Probe Sequence
gacggataacaatttcacacaggaa

SEQ ID NO: 229470 - DNA, 25 bp, Probe Sequence
gacggataacaatttcacacaggaa

SEQ ID NO: 229471 - DNA, 25 bp, Probe Sequence
gacggataacaatttcacacaggaa

SEQ ID NO: 229472 - DNA, 25 bp, Probe Sequence
gacggataacaatttcacacaggaa

SEQ ID NO: 229473 - DNA, 25 bp, Probe Sequence
gacggataacaatttcacacaggaa

SEQ ID NO: 229474 - DNA, 25 bp, Probe Sequence
gacggataacaatttcacacaggaa

SEQ ID NO: 229475 - DNA, 25 bp, Probe Sequence
gacggataacaatttcacacaggaa

SEQ ID NO: 229476 - DNA, 25 bp, Probe Sequence
gacggataacaatttcacacaggaa

SEQ ID NO: 229477 - DNA, 25 bp, Probe Sequence
gacggataacaatttcacacaggaa

SEQ ID NO: 229478 - DNA, 25 bp, Probe Sequence
gacggataacaatttcacacaggaa

SEQ ID NO: 229479 - DNA, 25 bp, Probe Sequence
gacggataacaatttcacacaggaa

SEQ ID NO: 229480 - DNA, 25 bp, Probe Sequence
gacgttgaaccatttgacagtgcca

SEQ ID NO: 229481 - DNA, 25 bp, Probe Sequence
gaccctgccacatatggacagttct

SEQ ID NO: 229482 - DNA, 25 bp, Probe Sequence
gaccctgcaatcagatggaccagct

SEQ ID NO: 229483 - DNA, 25 bp, Probe Sequence
gaccctgttcacgatggaccgggtg

SEQ ID NO: 229484 - DNA, 25 bp, Probe Sequence
gacccgtccatttggcaggggtggc

SEQ ID NO: 229485 - DNA, 25 bp, Probe Sequence
tgaccacggcgtggggcggggatta

SEQ ID NO: 229486 - DNA, 25 bp, Probe Sequence
gacgaaggagtaggtggtgggatct

SEQ ID NO: 229487 - DNA, 25 bp, Probe Sequence
gacgcggtcgtaagggctgaggatt

SEQ ID NO: 229488 - DNA, 25 bp, Probe Sequence
gacgtcgtggtgatcgacagcggca

SEQ ID NO: 229489 - DNA, 25 bp, Probe Sequence
gacgtcacgggtccagatgaggaga

SEQ ID NO: 229490 - DNA, 25 bp, Probe Sequence
gacgtcacgggtccagatgaggaga

SEQ ID NO: 229491 - DNA, 25 bp, Probe Sequence
tgtgcatgaatttttgctggaaagc

SEQ ID NO: 229492 - DNA, 25 bp, Probe Sequence
gacgcagagaggcttctgtgcaggc

SEQ ID NO: 229493 - DNA, 25 bp, Probe Sequence
gacggggatctgagctggcaggatg

SEQ ID NO: 229494 - DNA, 25 bp, Probe Sequence
gacgtgggatcgtttccagatgaga

SEQ ID NO: 229495 - DNA, 25 bp, Probe Sequence
gacgtcggacattttaaagatgcag

SEQ ID NO: 229496 - DNA, 25 bp, Probe Sequence
gacctccacaccattaacaagatga

SEQ ID NO: 229497 - DNA, 25 bp, Probe Sequence
gatccttaccctatgataaataata

SEQ ID NO: 229498 - DNA, 25 bp, Probe Sequence
gaccttacacttactccttaaatag

SEQ ID NO: 229499 - DNA, 25 bp, Probe Sequence
gaccttaaagtcaccattgggaaga

SEQ ID NO: 229500 - DNA, 25 bp, Probe Sequence
gaccggaaagtcattatctggagag

SEQ ID NO: 229501 - DNA, 25 bp, Probe Sequence
gaccagtgaattacgatatttaaag

SEQ ID NO: 229502 - DNA, 25 bp, Probe Sequence
gaccgtactctcacatgtggcaaaa

SEQ ID NO: 229503 - DNA, 25 bp, Probe Sequence
gaccgcgacgtcacagtgacggcca

SEQ ID NO: 229504 - DNA, 25 bp, Probe Sequence
gagccgcaccttgtcatgtaccatc

SEQ ID NO: 229505 - DNA, 25 bp, Probe Sequence
gagcggcaagttcaagatccacatc

SEQ ID NO: 229506 - DNA, 25 bp, Probe Sequence
gacgtcaagttggctgaggcacacc

SEQ ID NO: 229507 - DNA, 25 bp, Probe Sequence
gacgccaagcacttatgaggcacct

SEQ ID NO: 229508 - DNA, 25 bp, Probe Sequence
gacgtcagagactatgtggtccatc

SEQ ID NO: 229509 - DNA, 25 bp, Probe Sequence
gacccaggtgctttggtcattcctt

SEQ ID NO: 229510 - DNA, 25 bp, Probe Sequence
gacccaactcaatggattgctactt

SEQ ID NO: 229511 - DNA, 25 bp, Probe Sequence
gacctcaaccattgggaccatatca

SEQ ID NO: 229512 - DNA, 25 bp, Probe Sequence
gacgctgaactagtaaggctcagta

SEQ ID NO: 229513 - DNA, 25 bp, Probe Sequence
gacctgtgaaaagacgtcaatatct

SEQ ID NO: 229514 - DNA, 25 bp, Probe Sequence
gacccacagtaagagcagcttgttt

SEQ ID NO: 229515 - DNA, 25 bp, Probe Sequence
gacccccgaaggcagatttgtgtgg

SEQ ID NO: 229516 - DNA, 25 bp, Probe Sequence
gacccgtggattggcaagttattgt

SEQ ID NO: 229517 - DNA, 25 bp, Probe Sequence
gacccgtgtcacatcgtgaatattt

SEQ ID NO: 229518 - DNA, 25 bp, Probe Sequence
gaccggtctcagaactgtttgtttc

SEQ ID NO: 229519 - DNA, 25 bp, Probe Sequence
gacccagcttagagttcttctttct

SEQ ID NO: 229520 - DNA, 25 bp, Probe Sequence
gaccctgctaatatcctttcttagt

SEQ ID NO: 229521 - DNA, 25 bp, Probe Sequence
gacctggtttaacccttctgatagg

SEQ ID NO: 229522 - DNA, 25 bp, Probe Sequence
gatcctgggtctgcaactttggaaa

SEQ ID NO: 229523 - DNA, 25 bp, Probe Sequence
gacctggttaccagtctgggaattc

SEQ ID NO: 229524 - DNA, 25 bp, Probe Sequence
gtcacggttatcccaggagggactg

SEQ ID NO: 229525 - DNA, 25 bp, Probe Sequence
gaccgagattcccgacgagagagac

SEQ ID NO: 229526 - DNA, 25 bp, Probe Sequence
gacgctcaatcttccgaatgaatgg

SEQ ID NO: 229527 - DNA, 25 bp, Probe Sequence
gacgctcaatcttccgaatgaatgg

SEQ ID NO: 229528 - DNA, 25 bp, Probe Sequence
gacgcagaacttcagccatgaaggt

SEQ ID NO: 229529 - DNA, 25 bp, Probe Sequence
gacgaaagcttggctccaaagcatc

SEQ ID NO: 229530 - DNA, 25 bp, Probe Sequence
gacgtacgttgatttaacaatctta

SEQ ID NO: 229531 - DNA, 25 bp, Probe Sequence
gacgctagccttattaacgctatta

SEQ ID NO: 229532 - DNA, 25 bp, Probe Sequence
gacgtgagccttatgggagcgtttc

SEQ ID NO: 229533 - DNA, 25 bp, Probe Sequence
gacgtgcagacgtccctgagaggtt

SEQ ID NO: 229534 - DNA, 25 bp, Probe Sequence
gacgtgcagacgtccctgagaggtt

SEQ ID NO: 229535 - DNA, 25 bp, Probe Sequence
gacggtgacttgattgagagtttcc

SEQ ID NO: 229536 - DNA, 25 bp, Probe Sequence
gacggttcataaatggctgatttat

SEQ ID NO: 229537 - DNA, 25 bp, Probe Sequence
gacgagtccataagtgaacaatttt

SEQ ID NO: 229538 - DNA, 25 bp, Probe Sequence
gacgagtcctgaggagagaaccggt

SEQ ID NO: 229539 - DNA, 25 bp, Probe Sequence
gacgagtgccgagagctgaaccagc

SEQ ID NO: 229540 - DNA, 25 bp, Probe Sequence
gatcgaacggactgtgaatccgctc

SEQ ID NO: 229541 - DNA, 25 bp, Probe Sequence
gacgcacacgggcgagaagcgcttc

SEQ ID NO: 229542 - DNA, 25 bp, Probe Sequence
gacgccgccggaaagcgtgccaatc

SEQ ID NO: 229543 - DNA, 25 bp, Probe Sequence
gacgccacggagattcagaacattc

SEQ ID NO: 229544 - DNA, 25 bp, Probe Sequence
gacgacaagaactttagcaaatgtg

SEQ ID NO: 229545 - DNA, 25 bp, Probe Sequence
gacccaagtactttccaatctcagt

SEQ ID NO: 229546 - DNA, 25 bp, Probe Sequence
gacccaagtactttccaatctcagt

SEQ ID NO: 229547 - DNA, 25 bp, Probe Sequence
gacccaagtagctgctaccttcttt

SEQ ID NO: 229548 - DNA, 25 bp, Probe Sequence
gacctgggctacatgtacttttacc

SEQ ID NO: 229549 - DNA, 25 bp, Probe Sequence
gtccagtttactattctttaactct

SEQ ID NO: 229550 - DNA, 25 bp, Probe Sequence
gaccaacttcccatttatttatctt

SEQ ID NO: 229551 - DNA, 25 bp, Probe Sequence
gacccaaaggccatctttattttct

SEQ ID NO: 229552 - DNA, 25 bp, Probe Sequence
gacccaaagggcctgttacttgtgc

SEQ ID NO: 229553 - DNA, 25 bp, Probe Sequence
gatgaccagggggttttattttgca

SEQ ID NO: 229554 - DNA, 25 bp, Probe Sequence
gagaaagggtcctgcattttctgga

SEQ ID NO: 229555 - DNA, 25 bp, Probe Sequence
gagaaaggtttgcttcacttcgggg

SEQ ID NO: 229556 - DNA, 25 bp, Probe Sequence
gagaaagataacagtaacttcggtt

SEQ ID NO: 229557 - DNA, 25 bp, Probe Sequence
gaccgcagatttcggaaacttctgg

SEQ ID NO: 229558 - DNA, 25 bp, Probe Sequence
gacccaagtatgctgaagagttcca

SEQ ID NO: 229559 - DNA, 25 bp, Probe Sequence
gacccagccttgagacagctgctgt

SEQ ID NO: 229560 - DNA, 25 bp, Probe Sequence
gacccagccttgagacagctgctgt

SEQ ID NO: 229561 - DNA, 25 bp, Probe Sequence
gacccagccttgagacagctgctgt

SEQ ID NO: 229562 - DNA, 25 bp, Probe Sequence
gacccactctttgaagctgttggga

SEQ ID NO: 229563 - DNA, 25 bp, Probe Sequence
gacctttcatttgagatccgaagga

SEQ ID NO: 229564 - DNA, 25 bp, Probe Sequence
gacctttatgttgtcctggcaaaaa

SEQ ID NO: 229565 - DNA, 25 bp, Probe Sequence
gaccgttcatgctgcctataggcat

SEQ ID NO: 229566 - DNA, 25 bp, Probe Sequence
gaccctgtatgatcctagtagcaat

SEQ ID NO: 229567 - DNA, 25 bp, Probe Sequence
gacccatgtatttttggcatgagga

SEQ ID NO: 229568 - DNA, 25 bp, Probe Sequence
gacccttttataatgcacatattcc

SEQ ID NO: 229569 - DNA, 25 bp, Probe Sequence
gacccttttgtataatgtacagcaa

SEQ ID NO: 229570 - DNA, 25 bp, Probe Sequence
gaccctcagtgtcaaaactactgca

SEQ ID NO: 229571 - DNA, 25 bp, Probe Sequence
gacccttctgatcaggaggttctgc

SEQ ID NO: 229572 - DNA, 25 bp, Probe Sequence
gacctttcattcagaagctgtttcg

SEQ ID NO: 229573 - DNA, 25 bp, Probe Sequence
gaccatactttccagtagctgtagg

SEQ ID NO: 229574 - DNA, 25 bp, Probe Sequence
gaccatactttccagtagctgtagg

SEQ ID NO: 229575 - DNA, 25 bp, Probe Sequence
gaccatcctttattgtagtattagt

SEQ ID NO: 229576 - DNA, 25 bp, Probe Sequence
gaccccccataggtagtatctcatc

SEQ ID NO: 229577 - DNA, 25 bp, Probe Sequence
gaccctctccatgggtcattctttg

SEQ ID NO: 229578 - DNA, 25 bp, Probe Sequence
gacgtgttctgagggtctgcatctt

SEQ ID NO: 229579 - DNA, 25 bp, Probe Sequence
gagcagctgttccgggttacggact

SEQ ID NO: 229580 - DNA, 25 bp, Probe Sequence
gacgtgctctcgcgagatttgggtc

SEQ ID NO: 229581 - DNA, 25 bp, Probe Sequence
gacgtcatcctgataattattggac

SEQ ID NO: 229582 - DNA, 25 bp, Probe Sequence
gacgtcatgggaatttgtttggcac

SEQ ID NO: 229583 - DNA, 25 bp, Probe Sequence
gacgtcatgggagtttgttgtggca

SEQ ID NO: 229584 - DNA, 25 bp, Probe Sequence
gacgtctggtgaccattgatgcccc

SEQ ID NO: 229585 - DNA, 25 bp, Probe Sequence
gacgctgatggtggccaggatgctc

SEQ ID NO: 229586 - DNA, 25 bp, Probe Sequence
gacgaggcagtggccgagatctgca

SEQ ID NO: 229587 - DNA, 25 bp, Probe Sequence
gacgatgaatctcccatgtgtctga

SEQ ID NO: 229588 - DNA, 25 bp, Probe Sequence
gacgatgatgattcacctgatcctg

SEQ ID NO: 229589 - DNA, 25 bp, Probe Sequence
gacgatggctacattgaccttcagt

SEQ ID NO: 229590 - DNA, 25 bp, Probe Sequence
gacgatggctacattgaccttcagt

SEQ ID NO: 229591 - DNA, 25 bp, Probe Sequence
gacgaggctaataatcaactatcag

SEQ ID NO: 229592 - DNA, 25 bp, Probe Sequence
gacgaggagcgaacactgcactaag

SEQ ID NO: 229593 - DNA, 25 bp, Probe Sequence
gacgaggagcgaacactgcactaag

SEQ ID NO: 229594 - DNA, 25 bp, Probe Sequence
gacgaaaggatgccaaatctgtcaa

SEQ ID NO: 229595 - DNA, 25 bp, Probe Sequence
gacgaaaccatgaagagcctgatcc

SEQ ID NO: 229596 - DNA, 25 bp, Probe Sequence
gacgtgaagctgaatggagccggcc

SEQ ID NO: 229597 - DNA, 25 bp, Probe Sequence
gacgtgcaactcaaagacctggaaa

SEQ ID NO: 229598 - DNA, 25 bp, Probe Sequence
gacgcatgaagtttcgcaacatgga

SEQ ID NO: 229599 - DNA, 25 bp, Probe Sequence
gacgcagacaagtactaagagtgaa

SEQ ID NO: 229600 - DNA, 25 bp, Probe Sequence
gacgcaggcggatcacttgaggtca

SEQ ID NO: 229601 - DNA, 25 bp, Probe Sequence
gacgctggggtatcccaatgtgcac

SEQ ID NO: 229602 - DNA, 25 bp, Probe Sequence
gacctgtggtaagcaacctggcatc

SEQ ID NO: 229603 - DNA, 25 bp, Probe Sequence
gacctgtggtaagcaacctgggcat

SEQ ID NO: 229604 - DNA, 25 bp, Probe Sequence
gacctggttacggaacagcggtgtt

SEQ ID NO: 229605 - DNA, 25 bp, Probe Sequence
gacgttttgccagacacatgggctg

SEQ ID NO: 229606 - DNA, 25 bp, Probe Sequence
gaggtacttgatgaacactagggcc

SEQ ID NO: 229607 - DNA, 25 bp, Probe Sequence
gacgaacgggaagccgggagctcgg

SEQ ID NO: 229608 - DNA, 25 bp, Probe Sequence
gagaatcactttaacccgggaggtg

SEQ ID NO: 229609 - DNA, 25 bp, Probe Sequence
gatacgggtttgactcacgggggat

SEQ ID NO: 229610 - DNA, 25 bp, Probe Sequence
ggcctggactttcccaatgtgggga

SEQ ID NO: 229611 - DNA, 25 bp, Probe Sequence
gacctcaactttggccaagtggtgg

SEQ ID NO: 229612 - DNA, 25 bp, Probe Sequence
gacgccaacaacgccaaggctgtgg

SEQ ID NO: 229613 - DNA, 25 bp, Probe Sequence
gacgagacagcaaagaccaaggcct

SEQ ID NO: 229614 - DNA, 25 bp, Probe Sequence
gacgaacatcaagaccgtgtgcaca

SEQ ID NO: 229615 - DNA, 25 bp, Probe Sequence
gacgaacatcacagtacattggtat

SEQ ID NO: 229616 - DNA, 25 bp, Probe Sequence
gacgaacatcacagtacattggtat

SEQ ID NO: 229617 - DNA, 25 bp, Probe Sequence
gacgaacatcacagtacattggtat

SEQ ID NO: 229618 - DNA, 25 bp, Probe Sequence
gacgatctccagatgtactgtgatg

SEQ ID NO: 229619 - DNA, 25 bp, Probe Sequence
gacgtcagcctgtttgagctgagtg

SEQ ID NO: 229620 - DNA, 25 bp, Probe Sequence
gacgtcagcctgtttgagctgagtg

SEQ ID NO: 229621 - DNA, 25 bp, Probe Sequence
gacgtcagcaacttcgacgaggagt

SEQ ID NO: 229622 - DNA, 25 bp, Probe Sequence
gacccgcaaccaggacgaggggatc

SEQ ID NO: 229623 - DNA, 25 bp, Probe Sequence
gacccctacagcctacgagaaggaa

SEQ ID NO: 229624 - DNA, 25 bp, Probe Sequence
gacccctgaggtcacagaatgaata

SEQ ID NO: 229625 - DNA, 25 bp, Probe Sequence
gaccggtgtggtcacggatggtgtg

SEQ ID NO: 229626 - DNA, 25 bp, Probe Sequence
gaccctttgtggtagcaggtggtgg

SEQ ID NO: 229627 - DNA, 25 bp, Probe Sequence
gaccgttctttggagcattgttcta

SEQ ID NO: 229628 - DNA, 25 bp, Probe Sequence
gacctgtgacattctggactatttc

SEQ ID NO: 229629 - DNA, 25 bp, Probe Sequence
gaccctgacatgtgacatctacctc

SEQ ID NO: 229630 - DNA, 25 bp, Probe Sequence
gacccatactgctgacagaaaagaa

SEQ ID NO: 229631 - DNA, 25 bp, Probe Sequence
gaccccaggacgtcgatgaactgat

SEQ ID NO: 229632 - DNA, 25 bp, Probe Sequence
gacccgtggggtgtacagtgaagag

SEQ ID NO: 229633 - DNA, 25 bp, Probe Sequence
tacccggggtgtttgcaacaacaga

SEQ ID NO: 229634 - DNA, 25 bp, Probe Sequence
gacccggggtggcccagaaaagcat

SEQ ID NO: 229635 - DNA, 25 bp, Probe Sequence
gacccgggaagaaccatgaagtggc

SEQ ID NO: 229636 - DNA, 25 bp, Probe Sequence
gacccagtgaacaaatccgggggca

SEQ ID NO: 229637 - DNA, 25 bp, Probe Sequence
gacccaggcaaacataccgggagcc

SEQ ID NO: 229638 - DNA, 25 bp, Probe Sequence
gacgcctaagaagaaccggattgcc

SEQ ID NO: 229639 - DNA, 25 bp, Probe Sequence
gaccgccaaacagctactcagctgc

SEQ ID NO: 229640 - DNA, 25 bp, Probe Sequence
gaccgccaaacagctactcagctgc

SEQ ID NO: 229641 - DNA, 25 bp, Probe Sequence
gacgctgagcaaagcagactacgag

SEQ ID NO: 229642 - DNA, 25 bp, Probe Sequence
gagcgaggcactggtgacgtcaagc

SEQ ID NO: 229643 - DNA, 25 bp, Probe Sequence
gacgatagcaatgtgaagccagact

SEQ ID NO: 229644 - DNA, 25 bp, Probe Sequence
gaccgagaacaaacaccagactctg

SEQ ID NO: 229645 - DNA, 25 bp, Probe Sequence
gacctgaaaaactatccgattcata

SEQ ID NO: 229646 - DNA, 25 bp, Probe Sequence
gaccttatctaactaccagaccaac

SEQ ID NO: 229647 - DNA, 25 bp, Probe Sequence
gaccttccccaaaggatggtcacac

SEQ ID NO: 229648 - DNA, 25 bp, Probe Sequence
gaccgctccaagaaaagattctccc

SEQ ID NO: 229649 - DNA, 25 bp, Probe Sequence
gacccctgctcagtaaagcacttgc

SEQ ID NO: 229650 - DNA, 25 bp, Probe Sequence
gaccgtcatccagagacgcctggat

SEQ ID NO: 229651 - DNA, 25 bp, Probe Sequence
gacgcaccaagcggaactgcgctta

SEQ ID NO: 229652 - DNA, 25 bp, Probe Sequence
gagcagcctttcgagaaacgttcat

SEQ ID NO: 229653 - DNA, 25 bp, Probe Sequence
gaccctttaacagcatctgcttcat

SEQ ID NO: 229654 - DNA, 25 bp, Probe Sequence
gacccattcgaacgtctgccctatc

SEQ ID NO: 229655 - DNA, 25 bp, Probe Sequence
gacccattcgaacgtctgccctatc

SEQ ID NO: 229656 - DNA, 25 bp, Probe Sequence
tgaaacttccaaccatcctagtatc

SEQ ID NO: 229657 - DNA, 25 bp, Probe Sequence
gagaagctataggaaacccagtacc

SEQ ID NO: 229658 - DNA, 25 bp, Probe Sequence
gagtaccaaggaaactctgaaacca

SEQ ID NO: 229659 - DNA, 25 bp, Probe Sequence
gagctacacattgagaacctgaaca

SEQ ID NO: 229660 - DNA, 25 bp, Probe Sequence
gagcagccagttaaaacctaaacct

SEQ ID NO: 229661 - DNA, 25 bp, Probe Sequence
gacccagctcgcaaagcactttaac

SEQ ID NO: 229662 - DNA, 25 bp, Probe Sequence
gaccatagcgatactagccctttac

SEQ ID NO: 229663 - DNA, 25 bp, Probe Sequence
gacctacagcactgagcccaataac

SEQ ID NO: 229664 - DNA, 25 bp, Probe Sequence
gacccatgatactagaccactaaat

SEQ ID NO: 229665 - DNA, 25 bp, Probe Sequence
gaccctcaaatacggagcgaagcat

SEQ ID NO: 229666 - DNA, 25 bp, Probe Sequence
gaccctaaagaatggccgagccttg

SEQ ID NO: 229667 - DNA, 25 bp, Probe Sequence
gaccttaaggcaaaaggcagaggct

SEQ ID NO: 229668 - DNA, 25 bp, Probe Sequence
gacgttccgggcaaatgccagggcc

SEQ ID NO: 229669 - DNA, 25 bp, Probe Sequence
gaccctcctgggaaggcaagtggcc

SEQ ID NO: 229670 - DNA, 25 bp, Probe Sequence
gaccctcctgggaaggcaagtggcc

SEQ ID NO: 229671 - DNA, 25 bp, Probe Sequence
gacgccgcctaaaggatattgggcc

SEQ ID NO: 229672 - DNA, 25 bp, Probe Sequence
gacgaccctagggccatggtgggcc

SEQ ID NO: 229673 - DNA, 25 bp, Probe Sequence
gacgaccctagggccatggtgggcc

SEQ ID NO: 229674 - DNA, 25 bp, Probe Sequence
gacctgcccggggcgttgggcaggc

SEQ ID NO: 229675 - DNA, 25 bp, Probe Sequence
gacccactgccagggagtatggagg

SEQ ID NO: 229676 - DNA, 25 bp, Probe Sequence
gacccaagcctgtgatgacatggtg

SEQ ID NO: 229677 - DNA, 25 bp, Probe Sequence
gaccgaatgtttcatcactggctgg

SEQ ID NO: 229678 - DNA, 25 bp, Probe Sequence
gacctacaatttttgcctatgctgc

SEQ ID NO: 229679 - DNA, 25 bp, Probe Sequence
gacccaaagctttaggcatgattcc

SEQ ID NO: 229680 - DNA, 25 bp, Probe Sequence
gaccgaacaggtgatggcaagatcc

SEQ ID NO: 229681 - DNA, 25 bp, Probe Sequence
gaccgaacaggtgatggcaagatcc

SEQ ID NO: 229682 - DNA, 25 bp, Probe Sequence
gaccgagaaggtgctggctgctgtc

SEQ ID NO: 229683 - DNA, 25 bp, Probe Sequence
gaccgagaaggtgctggctgctgtc

SEQ ID NO: 229684 - DNA, 25 bp, Probe Sequence
gaccgagaaggtgctggctgctgtc

SEQ ID NO: 229685 - DNA, 25 bp, Probe Sequence
gacgctggaagttgggttctcatcc

SEQ ID NO: 229686 - DNA, 25 bp, Probe Sequence
gaccggatcattttagtgtctttgc

SEQ ID NO: 229687 - DNA, 25 bp, Probe Sequence
gaccggagcttgtccggaagattgc

SEQ ID NO: 229688 - DNA, 25 bp, Probe Sequence
gacccagacatcccgaggaagttcc

SEQ ID NO: 229689 - DNA, 25 bp, Probe Sequence
gaccctggagcaccgaggattcaag

SEQ ID NO: 229690 - DNA, 25 bp, Probe Sequence
gacgcctgagacgcaagcagatcaa

SEQ ID NO: 229691 - DNA, 25 bp, Probe Sequence
gacgcctgcacacgtcaggaagcag

SEQ ID NO: 229692 - DNA, 25 bp, Probe Sequence
gacgctcctgactatgacagaagcc

SEQ ID NO: 229693 - DNA, 25 bp, Probe Sequence
gacgctcctgactatgacagaagcc

SEQ ID NO: 229694 - DNA, 25 bp, Probe Sequence
gacgctcctgactatgacagaagcc

SEQ ID NO: 229695 - DNA, 25 bp, Probe Sequence
gacgatcctcatgaatgactatcct

SEQ ID NO: 229696 - DNA, 25 bp, Probe Sequence
gacgagacattccaatagttcacag

SEQ ID NO: 229697 - DNA, 25 bp, Probe Sequence
gacgaggattctcaacgtccagtcc

SEQ ID NO: 229698 - DNA, 25 bp, Probe Sequence
gacgactattcttgcaagtgtcctt

SEQ ID NO: 229699 - DNA, 25 bp, Probe Sequence
gaccaccaggcttaactttttagct

SEQ ID NO: 229700 - DNA, 25 bp, Probe Sequence
gaccctcggtaaggcttcttggtct

SEQ ID NO: 229701 - DNA, 25 bp, Probe Sequence
gaccccggaagaggctggctgggac

SEQ ID NO: 229702 - DNA, 25 bp, Probe Sequence
gaccccggaagaggctggctgggac

SEQ ID NO: 229703 - DNA, 25 bp, Probe Sequence
gaccccggaatatctggagctcaaa

SEQ ID NO: 229704 - DNA, 25 bp, Probe Sequence
gaccagctctgtgtaggtaaccaga

SEQ ID NO: 229705 - DNA, 25 bp, Probe Sequence
gacctgccgtctagaaaaacctgcc

SEQ ID NO: 229706 - DNA, 25 bp, Probe Sequence
gacctgccgtctagaaaaacctgcc

SEQ ID NO: 229707 - DNA, 25 bp, Probe Sequence
gagcgtcctgtttagcaataacggc

SEQ ID NO: 229708 - DNA, 25 bp, Probe Sequence
gacccttgtgtataaagacgggagt

SEQ ID NO: 229709 - DNA, 25 bp, Probe Sequence
gacctctattttttgaagaccgagc

SEQ ID NO: 229710 - DNA, 25 bp, Probe Sequence
gaccctttgttacttagattggcag

SEQ ID NO: 229711 - DNA, 25 bp, Probe Sequence
gaccctgtctaaaggctgaattggc

SEQ ID NO: 229712 - DNA, 25 bp, Probe Sequence
gacgcttgttagttttaatatcgca

SEQ ID NO: 229713 - DNA, 25 bp, Probe Sequence
gaccttgtattgtgtttttggcctt

SEQ ID NO: 229714 - DNA, 25 bp, Probe Sequence
gacgctgggacgcgtttgtagctcc

SEQ ID NO: 229715 - DNA, 25 bp, Probe Sequence
gacctggagacccgcaatgcggagt

SEQ ID NO: 229716 - DNA, 25 bp, Probe Sequence
gaccttgaaccggaacctgagtgac

SEQ ID NO: 229717 - DNA, 25 bp, Probe Sequence
gagccttgaacccaaatcagcttag

SEQ ID NO: 229718 - DNA, 25 bp, Probe Sequence
gacctatcaacccaacattttgctc

SEQ ID NO: 229719 - DNA, 25 bp, Probe Sequence
gaccgtacaccaaaatttgcctgca

SEQ ID NO: 229720 - DNA, 25 bp, Probe Sequence
gacctatacaaaatacacttcggca

SEQ ID NO: 229721 - DNA, 25 bp, Probe Sequence
gacccaaacattaatcagttcttca

SEQ ID NO: 229722 - DNA, 25 bp, Probe Sequence
gacgacaaagctgctaaatctccta

SEQ ID NO: 229723 - DNA, 25 bp, Probe Sequence
gacgacgaacatatcgactccctgt

SEQ ID NO: 229724 - DNA, 25 bp, Probe Sequence
gaccggtatgagatcaattccctgg

SEQ ID NO: 229725 - DNA, 25 bp, Probe Sequence
gaccgtcaatggagcagaggcgggg

SEQ ID NO: 229726 - DNA, 25 bp, Probe Sequence
gacccttgatggaggatacggagat

SEQ ID NO: 229727 - DNA, 25 bp, Probe Sequence
gacgaggtgaagagtggccggagca

SEQ ID NO: 229728 - DNA, 25 bp, Probe Sequence
gaccgcaggaagaagggccaggagg

SEQ ID NO: 229729 - DNA, 25 bp, Probe Sequence
gacccatggctagcagggaagggcc

SEQ ID NO: 229730 - DNA, 25 bp, Probe Sequence
gacctccgtacagggaagaagagcc

SEQ ID NO: 229731 - DNA, 25 bp, Probe Sequence
gaccacctggtcggggaggagacca

SEQ ID NO: 229732 - DNA, 25 bp, Probe Sequence
gaccctggggtgggatcagggacca

SEQ ID NO: 229733 - DNA, 25 bp, Probe Sequence
gacgcgctgtgcgagtttgacgcgg

SEQ ID NO: 229734 - DNA, 25 bp, Probe Sequence
gacgccatggggtaatcactgggca

SEQ ID NO: 229735 - DNA, 25 bp, Probe Sequence
gacccagggtgatgacctgtggacc

SEQ ID NO: 229736 - DNA, 25 bp, Probe Sequence
gacctattggaaaagatctgggact

SEQ ID NO: 229737 - DNA, 25 bp, Probe Sequence
gacccatttaataatgctcttgtgt

SEQ ID NO: 229738 - DNA, 25 bp, Probe Sequence
gacgcacattatgcaaatctcttta

SEQ ID NO: 229739 - DNA, 25 bp, Probe Sequence
gacgatgttgaccataacttctcca

SEQ ID NO: 229740 - DNA, 25 bp, Probe Sequence
gacctttaagcaaactactacagcc

SEQ ID NO: 229741 - DNA, 25 bp, Probe Sequence
gacgctattaccaacattttcctgt

SEQ ID NO: 229742 - DNA, 25 bp, Probe Sequence
gaccctgcatgaccaaatttgacct

SEQ ID NO: 229743 - DNA, 25 bp, Probe Sequence
gacgcctcatagcacaaattgtagc

SEQ ID NO: 229744 - DNA, 25 bp, Probe Sequence
gaccctcatgaggcaacgtgttatg

SEQ ID NO: 229745 - DNA, 25 bp, Probe Sequence
gaccctcatgaggcaacgtgttatg

SEQ ID NO: 229746 - DNA, 25 bp, Probe Sequence
gaccctcatgaggcaacgtgttatg

SEQ ID NO: 229747 - DNA, 25 bp, Probe Sequence
gacgccatcgagcaacagtggacag

SEQ ID NO: 229748 - DNA, 25 bp, Probe Sequence
gacgccatcgcggagattgggaacc

SEQ ID NO: 229749 - DNA, 25 bp, Probe Sequence
gacgctgtgcgggagatgaacgacc

SEQ ID NO: 229750 - DNA, 25 bp, Probe Sequence
gacgatggcagcggtatgaagcgag

SEQ ID NO: 229751 - DNA, 25 bp, Probe Sequence
gacgaggcccagagcaagagaggca

SEQ ID NO: 229752 - DNA, 25 bp, Probe Sequence
gacctggaccagtgtagagatggca

SEQ ID NO: 229753 - DNA, 25 bp, Probe Sequence
gacgctggggcatcttagagcatcc

SEQ ID NO: 229754 - DNA, 25 bp, Probe Sequence
gacctgggatgctgatctggagata

SEQ ID NO: 229755 - DNA, 25 bp, Probe Sequence
gacctggggggtagggacagggcag

SEQ ID NO: 229756 - DNA, 25 bp, Probe Sequence
gatcctggggggagggaggcagggg

SEQ ID NO: 229757 - DNA, 25 bp, Probe Sequence
gacccgggttgagaggagctctggt

SEQ ID NO: 229758 - DNA, 25 bp, Probe Sequence
gaccacagtgacttatttgtagttg

SEQ ID NO: 229759 - DNA, 25 bp, Probe Sequence
gacccagccatcccattactgggta

SEQ ID NO: 229760 - DNA, 25 bp, Probe Sequence
gacccaggtcttcaagctgggcttg

SEQ ID NO: 229761 - DNA, 25 bp, Probe Sequence
gaccgcagagttcaaggaggccttc

SEQ ID NO: 229762 - DNA, 25 bp, Probe Sequence
gacccagatcttcttgagaggccag

SEQ ID NO: 229763 - DNA, 25 bp, Probe Sequence
gacctagctttcataaatgccacag

SEQ ID NO: 229764 - DNA, 25 bp, Probe Sequence
gacctggttctcaacagacccagtg

SEQ ID NO: 229765 - DNA, 25 bp, Probe Sequence
gacctggcggataaagtggccagtg

SEQ ID NO: 229766 - DNA, 25 bp, Probe Sequence
gaccctggtgaagaattgcatcgtg

SEQ ID NO: 229767 - DNA, 25 bp, Probe Sequence
gaccctggtgaagaattgcatcgtg

SEQ ID NO: 229768 - DNA, 25 bp, Probe Sequence
gacctagggaggaccttatctgtgc

SEQ ID NO: 229769 - DNA, 25 bp, Probe Sequence
gaccgatgtggacatcgtcttctcc

SEQ ID NO: 229770 - DNA, 25 bp, Probe Sequence
gaccgtgagagacatgctgtcagcc

SEQ ID NO: 229771 - DNA, 25 bp, Probe Sequence
gacctgtgcatgtgctatgcctagg

SEQ ID NO: 229772 - DNA, 25 bp, Probe Sequence
gaccatattttgtatccaaggatcc

SEQ ID NO: 229773 - DNA, 25 bp, Probe Sequence
gaccgttttagtagtcgcagacctc

SEQ ID NO: 229774 - DNA, 25 bp, Probe Sequence
gaccgttttagtagtcgcagacctc

SEQ ID NO: 229775 - DNA, 25 bp, Probe Sequence
gaccagttcctatgcagtgggaccc

SEQ ID NO: 229776 - DNA, 25 bp, Probe Sequence
gacccccttagaagatgggacacca

SEQ ID NO: 229777 - DNA, 25 bp, Probe Sequence
gacccgcaatgtcggagttggagca

SEQ ID NO: 229778 - DNA, 25 bp, Probe Sequence
gacgcttgcaagggagattcgggag

SEQ ID NO: 229779 - DNA, 25 bp, Probe Sequence
gacgcaagcagatcaagttcgagaa

SEQ ID NO: 229780 - DNA, 25 bp, Probe Sequence
gacgcgcacaatccaggagtagaga

SEQ ID NO: 229781 - DNA, 25 bp, Probe Sequence
gacgctcaaatactggactgcggcc

SEQ ID NO: 229782 - DNA, 25 bp, Probe Sequence
gacctaatgtagcacagcgggactc

SEQ ID NO: 229783 - DNA, 25 bp, Probe Sequence
gaccgctataaggccagtcggactg

SEQ ID NO: 229784 - DNA, 25 bp, Probe Sequence
gacgcagctgtatgacaagcagcgg

SEQ ID NO: 229785 - DNA, 25 bp, Probe Sequence
gacgcaatatataatctcagaggag

SEQ ID NO: 229786 - DNA, 25 bp, Probe Sequence
gaccagatttgatctcagcctgatg

SEQ ID NO: 229787 - DNA, 25 bp, Probe Sequence
gaccgtatgtcaccaagagatgatg

SEQ ID NO: 229788 - DNA, 25 bp, Probe Sequence
gaccgaaaagccgtatgatgatgtt

SEQ ID NO: 229789 - DNA, 25 bp, Probe Sequence
gacgcagcaaaagcaggtggtgagt

SEQ ID NO: 229790 - DNA, 25 bp, Probe Sequence
gacgcagaagacggggattgtgagc

SEQ ID NO: 229791 - DNA, 25 bp, Probe Sequence
gaccctgacacgggagagtgctggc

SEQ ID NO: 229792 - DNA, 25 bp, Probe Sequence
gaccctgcagccgcagagatgttga

SEQ ID NO: 229793 - DNA, 25 bp, Probe Sequence
gaccctgcagccgcagagatgttga

SEQ ID NO: 229794 - DNA, 25 bp, Probe Sequence
gacccgtgacctgagatgtgtgatt

SEQ ID NO: 229795 - DNA, 25 bp, Probe Sequence
gacccgtgacctgagatgtgtgatt

SEQ ID NO: 229796 - DNA, 25 bp, Probe Sequence
gacccgtgacctgagatgtgtgatt

SEQ ID NO: 229797 - DNA, 25 bp, Probe Sequence
gacctgcttgaccgaaggatttctg

SEQ ID NO: 229798 - DNA, 25 bp, Probe Sequence
gaccattacacgcaaagatattcaa

SEQ ID NO: 229799 - DNA, 25 bp, Probe Sequence
gaccttcgccagcaacaatgtgacc

SEQ ID NO: 229800 - DNA, 25 bp, Probe Sequence
gacgcttgagccagaatctcaggac

SEQ ID NO: 229801 - DNA, 25 bp, Probe Sequence
gaccttagccatggtttgcaagtga

SEQ ID NO: 229802 - DNA, 25 bp, Probe Sequence
gaccatctagttagttccacaaaga

SEQ ID NO: 229803 - DNA, 25 bp, Probe Sequence
gacccaacttggcttcactaataat

SEQ ID NO: 229804 - DNA, 25 bp, Probe Sequence
gacccaactaaccttgactgtattc

SEQ ID NO: 229805 - DNA, 25 bp, Probe Sequence
gacgcaaaaaggcctctacagaatt

SEQ ID NO: 229806 - DNA, 25 bp, Probe Sequence
gaccataaatagcgtatacgagcct

SEQ ID NO: 229807 - DNA, 25 bp, Probe Sequence
gacccaagcattggtatctacggcc

SEQ ID NO: 229808 - DNA, 25 bp, Probe Sequence
gaccctgcagcaattattcatgact

SEQ ID NO: 229809 - DNA, 25 bp, Probe Sequence
gacccaacagttaccatgatgcagg

SEQ ID NO: 229810 - DNA, 25 bp, Probe Sequence
gacgcccaagtgaagcgcatgcgca

SEQ ID NO: 229811 - DNA, 25 bp, Probe Sequence
gacccagtcaggacacagcatggac

SEQ ID NO: 229812 - DNA, 25 bp, Probe Sequence
gacccagtgggtgatatatgccatc

SEQ ID NO: 229813 - DNA, 25 bp, Probe Sequence
gacccaatggcgtgtaactcgccgc

SEQ ID NO: 229814 - DNA, 25 bp, Probe Sequence
gacccaggagcactggtacacttcc

SEQ ID NO: 229815 - DNA, 25 bp, Probe Sequence
gacccagtgatacaaacctgtcctg

SEQ ID NO: 229816 - DNA, 25 bp, Probe Sequence
gacccaggcatacttgaaggagccc

SEQ ID NO: 229817 - DNA, 25 bp, Probe Sequence
gagccccctgagagaatggagttca

SEQ ID NO: 229818 - DNA, 25 bp, Probe Sequence
gacccacacggacgagaggccgtac

SEQ ID NO: 229819 - DNA, 25 bp, Probe Sequence
gaccaaaaggagcgagacgtgatca

SEQ ID NO: 229820 - DNA, 25 bp, Probe Sequence
gacgcgaatgggctgtaggcgtgta

SEQ ID NO: 229821 - DNA, 25 bp, Probe Sequence
gacgcaaatgggcggtaggcgtgta

SEQ ID NO: 229822 - DNA, 25 bp, Probe Sequence
gaccagagccggcaaggcggggctc

SEQ ID NO: 229823 - DNA, 25 bp, Probe Sequence
gaccgaagtgctgaagccacggacc

SEQ ID NO: 229824 - DNA, 25 bp, Probe Sequence
gacccaaggatcaaaatccctacct

SEQ ID NO: 229825 - DNA, 25 bp, Probe Sequence
gacccaagagtgagtcaccttacct

SEQ ID NO: 229826 - DNA, 25 bp, Probe Sequence
gaccgccttggaagtaccagtagcc

SEQ ID NO: 229827 - DNA, 25 bp, Probe Sequence
gacccttatggaactggaagacgtc

SEQ ID NO: 229828 - DNA, 25 bp, Probe Sequence
gacccttatggaactggaagacgtc

SEQ ID NO: 229829 - DNA, 25 bp, Probe Sequence
gacccatttgagtacgctaaaaggc

SEQ ID NO: 229830 - DNA, 25 bp, Probe Sequence
gaccctatctcagacagtgaaagtg

SEQ ID NO: 229831 - DNA, 25 bp, Probe Sequence
gacccctgccattcataatgaaagt

SEQ ID NO: 229832 - DNA, 25 bp, Probe Sequence
gacccattgcctatggctaatagtc

SEQ ID NO: 229833 - DNA, 25 bp, Probe Sequence
gaccaaggtcatgtgcttagaagtc

SEQ ID NO: 229834 - DNA, 25 bp, Probe Sequence
gacgctggggatgctggtacaagtt

SEQ ID NO: 229835 - DNA, 25 bp, Probe Sequence
gacgcgatggcaaagtggataaagc

SEQ ID NO: 229836 - DNA, 25 bp, Probe Sequence
gacctgagagtactcatggaaaagg

SEQ ID NO: 229837 - DNA, 25 bp, Probe Sequence
gacccagagccaccagaaaaagagt

SEQ ID NO: 229838 - DNA, 25 bp, Probe Sequence
gacctcaggcactctaaacatatgt

SEQ ID NO: 229839 - DNA, 25 bp, Probe Sequence
gacccagagcatgtttaccagtttg

SEQ ID NO: 229840 - DNA, 25 bp, Probe Sequence
gacccagatcatgtttgagaccttc

SEQ ID NO: 229841 - DNA, 25 bp, Probe Sequence
gacccctatttgtctgaggttctca

SEQ ID NO: 229842 - DNA, 25 bp, Probe Sequence
gacccgtatgtttccagttttgatc

SEQ ID NO: 229843 - DNA, 25 bp, Probe Sequence
gaccaggccattttctttatgtttc

SEQ ID NO: 229844 - DNA, 25 bp, Probe Sequence
gacctgaccttgttatttattagat

SEQ ID NO: 229845 - DNA, 25 bp, Probe Sequence
gacctacttgtgatatttaaatgat

SEQ ID NO: 229846 - DNA, 25 bp, Probe Sequence
gacctattagtgcatttgtaactgg

SEQ ID NO: 229847 - DNA, 25 bp, Probe Sequence
gaccaaaatgtcattcctaatgtgg

SEQ ID NO: 229848 - DNA, 25 bp, Probe Sequence
gaccccaatgtcagtaggaatcttg

SEQ ID NO: 229849 - DNA, 25 bp, Probe Sequence
gacccctttctttagccatattaga

SEQ ID NO: 229850 - DNA, 25 bp, Probe Sequence
gaccccttcattgacctcaactaca

SEQ ID NO: 229851 - DNA, 25 bp, Probe Sequence
gacctcctaaatgccccatattaaa

SEQ ID NO: 229852 - DNA, 25 bp, Probe Sequence
gaccaagtacaagcccgaatcggag

SEQ ID NO: 229853 - DNA, 25 bp, Probe Sequence
gaccaaggtggagcccgagtttgag

SEQ ID NO: 229854 - DNA, 25 bp, Probe Sequence
gaccaaagggaggcccagaccttgg

SEQ ID NO: 229855 - DNA, 25 bp, Probe Sequence
gaccaggaggatagccccaaggttt

SEQ ID NO: 229856 - DNA, 25 bp, Probe Sequence
gacctggtggtagatccacctgttt

SEQ ID NO: 229857 - DNA, 25 bp, Probe Sequence
gacctggaggaagattcccctttgt

SEQ ID NO: 229858 - DNA, 25 bp, Probe Sequence
gacctagacaaagacccttctgggc

SEQ ID NO: 229859 - DNA, 25 bp, Probe Sequence
gacccagacatattgtactctttct

SEQ ID NO: 229860 - DNA, 25 bp, Probe Sequence
gacctctgacatcatggtgttttct

SEQ ID NO: 229861 - DNA, 25 bp, Probe Sequence
gaccttaggcaaattgttttctctt

SEQ ID NO: 229862 - DNA, 25 bp, Probe Sequence
gaccttcacacgttctttgtttgtg

SEQ ID NO: 229863 - DNA, 25 bp, Probe Sequence
gacctttatcctattgtttattgag

SEQ ID NO: 229864 - DNA, 25 bp, Probe Sequence
gaccctataactaatttcctttctg

SEQ ID NO: 229865 - DNA, 25 bp, Probe Sequence
gaccctgaagacatttatcaagatt

SEQ ID NO: 229866 - DNA, 25 bp, Probe Sequence
gacccgaacagattttgtcaaactc

SEQ ID NO: 229867 - DNA, 25 bp, Probe Sequence
gaccctgcagggatatttaaactca

SEQ ID NO: 229868 - DNA, 25 bp, Probe Sequence
gacctcaggtgagttacttaaggct

SEQ ID NO: 229869 - DNA, 25 bp, Probe Sequence
gacccagatgatggttcctttacag

SEQ ID NO: 229870 - DNA, 25 bp, Probe Sequence
gacccaaaggttcctctgtgacaag

SEQ ID NO: 229871 - DNA, 25 bp, Probe Sequence
gacgcataatgacgtatggtccata

SEQ ID NO: 229872 - DNA, 25 bp, Probe Sequence
gacgctgatagacgtcctgctcatt

SEQ ID NO: 229873 - DNA, 25 bp, Probe Sequence
gacgctaagagcttcgtgctgaacc

SEQ ID NO: 229874 - DNA, 25 bp, Probe Sequence
gacgcataagacttgcttgaacccg

SEQ ID NO: 229875 - DNA, 25 bp, Probe Sequence
gacgctacaacttgcaatgaacctc

SEQ ID NO: 229876 - DNA, 25 bp, Probe Sequence
gacgctgccagatggaaggacgctc

SEQ ID NO: 229877 - DNA, 25 bp, Probe Sequence
gacgctggctgatgatacaaccctg

SEQ ID NO: 229878 - DNA, 25 bp, Probe Sequence
gacgctggctgatgatacaaccctg

SEQ ID NO: 229879 - DNA, 25 bp, Probe Sequence
gacgctggctgatgatgtaaccctg

SEQ ID NO: 229880 - DNA, 25 bp, Probe Sequence
gacgctggctgatgatgtaaccctg

SEQ ID NO: 229881 - DNA, 25 bp, Probe Sequence
gacgctggctgctagggaagctttg

SEQ ID NO: 229882 - DNA, 25 bp, Probe Sequence
gacgcttcatgataggaaggactga

SEQ ID NO: 229883 - DNA, 25 bp, Probe Sequence
gacctcctggactgtaggactatat

SEQ ID NO: 229884 - DNA, 25 bp, Probe Sequence
gacctcctgacctgggtggttgagg

SEQ ID NO: 229885 - DNA, 25 bp, Probe Sequence
gacgcttggacaacgggcaagttgg

SEQ ID NO: 229886 - DNA, 25 bp, Probe Sequence
gaccttgtagccgagggctactggg

SEQ ID NO: 229887 - DNA, 25 bp, Probe Sequence
gaccttgtaggtggagatgaatttt

SEQ ID NO: 229888 - DNA, 25 bp, Probe Sequence
gacctttaatgacactacattttca

SEQ ID NO: 229889 - DNA, 25 bp, Probe Sequence
gacccttaacccttagcatggaaat

SEQ ID NO: 229890 - DNA, 25 bp, Probe Sequence
gaccaaccgactacttcagaggaaa

SEQ ID NO: 229891 - DNA, 25 bp, Probe Sequence
gacccaccaactaggtaatgtgact

SEQ ID NO: 229892 - DNA, 25 bp, Probe Sequence
gacctaccacacatggtcaagagtt

SEQ ID NO: 229893 - DNA, 25 bp, Probe Sequence
gacctgattttctgtgtcaaagtat

SEQ ID NO: 229894 - DNA, 25 bp, Probe Sequence
gacctgtttggcagtgacaatgagg

SEQ ID NO: 229895 - DNA, 25 bp, Probe Sequence
gacctgtttggcagtgacaatgagg

SEQ ID NO: 229896 - DNA, 25 bp, Probe Sequence
gacgctgctcctgcagaggaaaggg

SEQ ID NO: 229897 - DNA, 25 bp, Probe Sequence
gacgctgctcctgcagaggaaaggg

SEQ ID NO: 229898 - DNA, 25 bp, Probe Sequence
gacgccacggccgaggaagagggcg

SEQ ID NO: 229899 - DNA, 25 bp, Probe Sequence
gagccccttggtgccacagagggct

SEQ ID NO: 229900 - DNA, 25 bp, Probe Sequence
gagccccttggtgccacagagggct

SEQ ID NO: 229901 - DNA, 25 bp, Probe Sequence
gagcccccgagaggataaagcggct

SEQ ID NO: 229902 - DNA, 25 bp, Probe Sequence
gaccacccggcgaaagaagtagctg

SEQ ID NO: 229903 - DNA, 25 bp, Probe Sequence
gacccgcttggccaagagaggcatc

SEQ ID NO: 229904 - DNA, 25 bp, Probe Sequence
gacctggctttgcctacaggacatt

SEQ ID NO: 229905 - DNA, 25 bp, Probe Sequence
gacgctgggatttctaagtccttag

SEQ ID NO: 229906 - DNA, 25 bp, Probe Sequence
gacctaaatttgtacagtcccattg

SEQ ID NO: 229907 - DNA, 25 bp, Probe Sequence
gacctgaaatgtagcctctgtcctt

SEQ ID NO: 229908 - DNA, 25 bp, Probe Sequence
gacctgagctttaggcctggtatcc

SEQ ID NO: 229909 - DNA, 25 bp, Probe Sequence
gacccaggcactaggccttggtgac

SEQ ID NO: 229910 - DNA, 25 bp, Probe Sequence
gacccaggcctggctgtgggttaca

SEQ ID NO: 229911 - DNA, 25 bp, Probe Sequence
gacccagtctctactgttggtggca

SEQ ID NO: 229912 - DNA, 25 bp, Probe Sequence
gaccggctccaagtttgactgtgcc

SEQ ID NO: 229913 - DNA, 25 bp, Probe Sequence
gacgctgatgctcaagctgttgaca

SEQ ID NO: 229914 - DNA, 25 bp, Probe Sequence
gacctgatcccaaccttgaagaaag

SEQ ID NO: 229915 - DNA, 25 bp, Probe Sequence
gagccgtttccaattctaaaacaga

SEQ ID NO: 229916 - DNA, 25 bp, Probe Sequence
gaccgaataccaattcaaccaccaa

SEQ ID NO: 229917 - DNA, 25 bp, Probe Sequence
gacccaaaaatgttcatacccacaa

SEQ ID NO: 229918 - DNA, 25 bp, Probe Sequence
gacccaataaattaagccctcgaat

SEQ ID NO: 229919 - DNA, 25 bp, Probe Sequence
gagcccaataacttgaaggcccgca

SEQ ID NO: 229920 - DNA, 25 bp, Probe Sequence
gaccgcaccaacagaaagcattcag

SEQ ID NO: 229921 - DNA, 25 bp, Probe Sequence
gaccctccactcacagagagaatga

SEQ ID NO: 229922 - DNA, 25 bp, Probe Sequence
gaccctggcgcccagcagggaatat

SEQ ID NO: 229923 - DNA, 25 bp, Probe Sequence
gaccatttggtgcaggttaatataa

SEQ ID NO: 229924 - DNA, 25 bp, Probe Sequence
gaccattttgataagttttttcata

SEQ ID NO: 229925 - DNA, 25 bp, Probe Sequence
gaccagtttgaatctatttatcttc

SEQ ID NO: 229926 - DNA, 25 bp, Probe Sequence
gaccacttggaagttgttgctttcc

SEQ ID NO: 229927 - DNA, 25 bp, Probe Sequence
gacccttgagaagctgccatatctt

SEQ ID NO: 229928 - DNA, 25 bp, Probe Sequence
gaccgggagaacaagcgaatggctg

SEQ ID NO: 229929 - DNA, 25 bp, Probe Sequence
gaccgtggagcttaagccactgcct

SEQ ID NO: 229930 - DNA, 25 bp, Probe Sequence
gaccctgactggtaagaccatcact

SEQ ID NO: 229931 - DNA, 25 bp, Probe Sequence
gacccagagctataatcatccatca

SEQ ID NO: 229932 - DNA, 25 bp, Probe Sequence
gacccatggcctgtatcaacagcaa

SEQ ID NO: 229933 - DNA, 25 bp, Probe Sequence
gacccaggaatggtacatcttgcat

SEQ ID NO: 229934 - DNA, 25 bp, Probe Sequence
gacctcagggtggaattctctgtta

SEQ ID NO: 229935 - DNA, 25 bp, Probe Sequence
gacccagatgttggatattctccaa

SEQ ID NO: 229936 - DNA, 25 bp, Probe Sequence
gacccacttatgttcagtgctgaaa

SEQ ID NO: 229937 - DNA, 25 bp, Probe Sequence
gacccatttaatgcagcttgcaaaa

SEQ ID NO: 229938 - DNA, 25 bp, Probe Sequence
gacctgcatttaatctcagttaagc

SEQ ID NO: 229939 - DNA, 25 bp, Probe Sequence
gacctgcatgttctattttggcagc

SEQ ID NO: 229940 - DNA, 25 bp, Probe Sequence
gaccagctgattgttttcatggcat

SEQ ID NO: 229941 - DNA, 25 bp, Probe Sequence
gaccctgagtcttctcttcaggttc

SEQ ID NO: 229942 - DNA, 25 bp, Probe Sequence
gacccagagtttaattagcagtgac

SEQ ID NO: 229943 - DNA, 25 bp, Probe Sequence
gacgccatagggactttccattgac

SEQ ID NO: 229944 - DNA, 25 bp, Probe Sequence
gacctgtatgggactttcctatctt

SEQ ID NO: 229945 - DNA, 25 bp, Probe Sequence
gacctctatttacttaacttcatat

SEQ ID NO: 229946 - DNA, 25 bp, Probe Sequence
gacctgttattaccattagcattct

SEQ ID NO: 229947 - DNA, 25 bp, Probe Sequence
gaccttttgctgtgcttgatgttgc

SEQ ID NO: 229948 - DNA, 25 bp, Probe Sequence
gaccctttgctatgtagtctcatgg

SEQ ID NO: 229949 - DNA, 25 bp, Probe Sequence
gaccactttggctttaatccagaga

SEQ ID NO: 229950 - DNA, 25 bp, Probe Sequence
gaccattccgaggggagtccagagg

SEQ ID NO: 229951 - DNA, 25 bp, Probe Sequence
gaccttcgggaaggagttcacagaa

SEQ ID NO: 229952 - DNA, 25 bp, Probe Sequence
gaccttcgggaaggagttcacagaa

SEQ ID NO: 229953 - DNA, 25 bp, Probe Sequence
gaccttcgggtcaaggcagaggcag

SEQ ID NO: 229954 - DNA, 25 bp, Probe Sequence
gaccctcggtgcagagtgcagaggc

SEQ ID NO: 229955 - DNA, 25 bp, Probe Sequence
gaccgtcacgtcgagattgagatag

SEQ ID NO: 229956 - DNA, 25 bp, Probe Sequence
gaccctacaaccatcatgaatgcag

SEQ ID NO: 229957 - DNA, 25 bp, Probe Sequence
gacccactgaaggcccaaatgagca

SEQ ID NO: 229958 - DNA, 25 bp, Probe Sequence
gaccaagctggagatcaaacgaact

SEQ ID NO: 229959 - DNA, 25 bp, Probe Sequence
gagccggtgtacatctaaataaatc

SEQ ID NO: 229960 - DNA, 25 bp, Probe Sequence
gaccggagtactagccagcacaaaa

SEQ ID NO: 229961 - DNA, 25 bp, Probe Sequence
gacctgggaccttgtcatgtcagaa

SEQ ID NO: 229962 - DNA, 25 bp, Probe Sequence
gacctggcgactctggatggtcaga

SEQ ID NO: 229963 - DNA, 25 bp, Probe Sequence
gacctgatctaccttggacggaaac

SEQ ID NO: 229964 - DNA, 25 bp, Probe Sequence
gaccatgttcacattctttctaacc

SEQ ID NO: 229965 - DNA, 25 bp, Probe Sequence
gacctgatgtaaatgtttgtcatac

SEQ ID NO: 229966 - DNA, 25 bp, Probe Sequence
gaccattgtgaagtttctgtccctt

SEQ ID NO: 229967 - DNA, 25 bp, Probe Sequence
gaccattggaacccctgttccaggc

SEQ ID NO: 229968 - DNA, 25 bp, Probe Sequence
gaccagtgtaataccctgaatcccc

SEQ ID NO: 229969 - DNA, 25 bp, Probe Sequence
gaccaggaaactcagctagatcccc

SEQ ID NO: 229970 - DNA, 25 bp, Probe Sequence
gaccagggcaactttgtcaacggca

SEQ ID NO: 229971 - DNA, 25 bp, Probe Sequence
gacccgagcagagtttgccgagagg

SEQ ID NO: 229972 - DNA, 25 bp, Probe Sequence
gacccgagcagagtttgccgagagg

SEQ ID NO: 229973 - DNA, 25 bp, Probe Sequence
gacctggtgctaatagtccagagat

SEQ ID NO: 229974 - DNA, 25 bp, Probe Sequence
gaccgagtctggcagatccagtctt

SEQ ID NO: 229975 - DNA, 25 bp, Probe Sequence
gaccgaactggtttcgctgtcattc

SEQ ID NO: 229976 - DNA, 25 bp, Probe Sequence
gaccgtagctttatgggatctgcgt

SEQ ID NO: 229977 - DNA, 25 bp, Probe Sequence
gaccaggagcctatactggactctt

SEQ ID NO: 229978 - DNA, 25 bp, Probe Sequence
gaccggtgagtcatttgcatcactc

SEQ ID NO: 229979 - DNA, 25 bp, Probe Sequence
gacctgatcatagactttgacagct

SEQ ID NO: 229980 - DNA, 25 bp, Probe Sequence
gaccgcaatggcagcgggacgctgg

SEQ ID NO: 229981 - DNA, 25 bp, Probe Sequence
gacctgaagggcgtggtgacttggc

SEQ ID NO: 229982 - DNA, 25 bp, Probe Sequence
gaccacaagggctatgggaccaccc

SEQ ID NO: 229983 - DNA, 25 bp, Probe Sequence
gaccgagggctgctgcataagccct

SEQ ID NO: 229984 - DNA, 25 bp, Probe Sequence
gaccccgcagagctgcattgactac

SEQ ID NO: 229985 - DNA, 25 bp, Probe Sequence
gaccccgcagagctgcattgactac

SEQ ID NO: 229986 - DNA, 25 bp, Probe Sequence
gaccccgaaggtctggatcatgcta

SEQ ID NO: 229987 - DNA, 25 bp, Probe Sequence
gaccgccatgaagctgggcttcagt

SEQ ID NO: 229988 - DNA, 25 bp, Probe Sequence
gaccctgcatgatactggaatgctc

SEQ ID NO: 229989 - DNA, 25 bp, Probe Sequence
gaccgcttggcaacatgcggagccc

SEQ ID NO: 229990 - DNA, 25 bp, Probe Sequence
gacccatctagcaaagaggacaacc

SEQ ID NO: 229991 - DNA, 25 bp, Probe Sequence
gacccacgctgtacaagtaacatcc

SEQ ID NO: 229992 - DNA, 25 bp, Probe Sequence
gaccctcacgtaagattaacatcta

SEQ ID NO: 229993 - DNA, 25 bp, Probe Sequence
gacctgtccagatggttaccatttg

SEQ ID NO: 229994 - DNA, 25 bp, Probe Sequence
gacctgtgatcaaaattgaaccatt

SEQ ID NO: 229995 - DNA, 25 bp, Probe Sequence
gacctgtgactgtatcattaactgc

SEQ ID NO: 229996 - DNA, 25 bp, Probe Sequence
gacctgtcctgcaagatcaatagag

SEQ ID NO: 229997 - DNA, 25 bp, Probe Sequence
gacctgtacagccgctacaagaagc

SEQ ID NO: 229998 - DNA, 25 bp, Probe Sequence
gaccgtgcacagcctaacggtggca

SEQ ID NO: 229999 - DNA, 25 bp, Probe Sequence
gatctgggactgcctcaacgggcag

SEQ ID NO: 230000 - DNA, 25 bp, Probe Sequence
gagctacgagctgcctgacggccag

SEQ ID NO: 230001 - DNA, 25 bp, Probe Sequence
gagcgtgcgagtgcacgtccgttat

SEQ ID NO: 230002 - DNA, 25 bp, Probe Sequence
gaccctgattgcccgtaggttaaga

SEQ ID NO: 230003 - DNA, 25 bp, Probe Sequence
gaccctatatgcctgcatctaatgt

SEQ ID NO: 230004 - DNA, 25 bp, Probe Sequence
gacccgatgagcctgctatacaaca

SEQ ID NO: 230005 - DNA, 25 bp, Probe Sequence
gacccgagaggtgcagacaaatgac

SEQ ID NO: 230006 - DNA, 25 bp, Probe Sequence
gacccagtgagattacagaggaagt

SEQ ID NO: 230007 - DNA, 25 bp, Probe Sequence
gaccgtgtgcacatactgggaggat

SEQ ID NO: 230008 - DNA, 25 bp, Probe Sequence
gaccgttggaataatgttgcagtgt

SEQ ID NO: 230009 - DNA, 25 bp, Probe Sequence
gaccctctggaaatatgtaatgctt

SEQ ID NO: 230010 - DNA, 25 bp, Probe Sequence
gaccctgtgcgactctagatagatc

SEQ ID NO: 230011 - DNA, 25 bp, Probe Sequence
gaccctgaggtcgtcaatgatgagt

SEQ ID NO: 230012 - DNA, 25 bp, Probe Sequence
gacccataggacttccatacgtcaa

SEQ ID NO: 230013 - DNA, 25 bp, Probe Sequence
gacctacaggaatcgcttctggaag

SEQ ID NO: 230014 - DNA, 25 bp, Probe Sequence
gaccaaaggacattcgtggcttagc

SEQ ID NO: 230015 - DNA, 25 bp, Probe Sequence
gaggaaatctagtggtgactatagg

SEQ ID NO: 230016 - DNA, 25 bp, Probe Sequence
gagctcaagttagcctagtctaagg

SEQ ID NO: 230017 - DNA, 25 bp, Probe Sequence
gagcgcaaactcatcctttataaag

SEQ ID NO: 230018 - DNA, 25 bp, Probe Sequence
gaccataaccgtacatcttttcaag

SEQ ID NO: 230019 - DNA, 25 bp, Probe Sequence
gaccaagaggcgtttctttcaaagc

SEQ ID NO: 230020 - DNA, 25 bp, Probe Sequence
gacctcaagataacatttttcatta

SEQ ID NO: 230021 - DNA, 25 bp, Probe Sequence
gacccattgtgcatcttttactgaa

SEQ ID NO: 230022 - DNA, 25 bp, Probe Sequence
gaccctggtggatgtgttcacgaag

SEQ ID NO: 230023 - DNA, 25 bp, Probe Sequence
gacccggtccaaggtatctggaagc

SEQ ID NO: 230024 - DNA, 25 bp, Probe Sequence
gacccgttcaaattatcttgctgaa

SEQ ID NO: 230025 - DNA, 25 bp, Probe Sequence
gaccgagttctgtagattcttgtta

SEQ ID NO: 230026 - DNA, 25 bp, Probe Sequence
gaccaagtttaatccacgttagcct

SEQ ID NO: 230027 - DNA, 25 bp, Probe Sequence
gaccctgttaactactacgttgaca

SEQ ID NO: 230028 - DNA, 25 bp, Probe Sequence
gaccctggtcaagaagcatcgtctg

SEQ ID NO: 230029 - DNA, 25 bp, Probe Sequence
gaccctggaagggacacctgtgttc

SEQ ID NO: 230030 - DNA, 25 bp, Probe Sequence
gaccacgggagggacaaggcttctc

SEQ ID NO: 230031 - DNA, 25 bp, Probe Sequence
gagccccgtgggtaaaggttctgca

SEQ ID NO: 230032 - DNA, 25 bp, Probe Sequence
gaccccaggggactacatggtgact

SEQ ID NO: 230033 - DNA, 25 bp, Probe Sequence
gaccctggagggctagcaaggcctt

SEQ ID NO: 230034 - DNA, 25 bp, Probe Sequence
gacccttgaaggaatcaaacagttt

SEQ ID NO: 230035 - DNA, 25 bp, Probe Sequence
gaccttatttggcatataaaatttt

SEQ ID NO: 230036 - DNA, 25 bp, Probe Sequence
gaccttaatgtacataagataattc

SEQ ID NO: 230037 - DNA, 25 bp, Probe Sequence
gaccttatctgtgcgtgaaacacac

SEQ ID NO: 230038 - DNA, 25 bp, Probe Sequence
gacccttgttaccaaaacacaatag

SEQ ID NO: 230039 - DNA, 25 bp, Probe Sequence
gaccctggttacaactctgaaccta

SEQ ID NO: 230040 - DNA, 25 bp, Probe Sequence
gacccatgtgtcaaaaatcttactt

SEQ ID NO: 230041 - DNA, 25 bp, Probe Sequence
gacccatcttggcaatggatatgac

SEQ ID NO: 230042 - DNA, 25 bp, Probe Sequence
gaccctgttgggaatgacattgaac

SEQ ID NO: 230043 - DNA, 25 bp, Probe Sequence
gaccttgcttggaagagcctggaca

SEQ ID NO: 230044 - DNA, 25 bp, Probe Sequence
gacctggctttagggcctgatggca

SEQ ID NO: 230045 - DNA, 25 bp, Probe Sequence
gacctgggcttgatgggctatgtca

SEQ ID NO: 230046 - DNA, 25 bp, Probe Sequence
gacctggccagtgtggattttcagc

SEQ ID NO: 230047 - DNA, 25 bp, Probe Sequence
gacccccagagctgttttatgacga

SEQ ID NO: 230048 - DNA, 25 bp, Probe Sequence
gacctggaagagcgtctctacagcc

SEQ ID NO: 230049 - DNA, 25 bp, Probe Sequence
gacctggaagatgagctctatgccc

SEQ ID NO: 230050 - DNA, 25 bp, Probe Sequence
gacctgcccagatttctgcatgtgc

SEQ ID NO: 230051 - DNA, 25 bp, Probe Sequence
gacctgtcagaggaatcagctgatg

SEQ ID NO: 230052 - DNA, 25 bp, Probe Sequence
gacctgtcaaggaactcagagaaca

SEQ ID NO: 230053 - DNA, 25 bp, Probe Sequence
gacctcaaggctcagctcagggagc

SEQ ID NO: 230054 - DNA, 25 bp, Probe Sequence
gaccctcagagctacagccagggat

SEQ ID NO: 230055 - DNA, 25 bp, Probe Sequence
gaccctcaggaattgcaaaggctct

SEQ ID NO: 230056 - DNA, 25 bp, Probe Sequence
gaccgctgagtatatgcaaagccat

SEQ ID NO: 230057 - DNA, 25 bp, Probe Sequence
gaccacgggaatactactgccatgt

SEQ ID NO: 230058 - DNA, 25 bp, Probe Sequence
gaccccggattaaaagcctcatcca

SEQ ID NO: 230059 - DNA, 25 bp, Probe Sequence
gacccctggattaaagtcctaatca

SEQ ID NO: 230060 - DNA, 25 bp, Probe Sequence
gaccccaggttaatgagacatctta

SEQ ID NO: 230061 - DNA, 25 bp, Probe Sequence
gaccccacctattctagaattaaag

SEQ ID NO: 230062 - DNA, 25 bp, Probe Sequence
gaccctcagtcttctcatgaataaa

SEQ ID NO: 230063 - DNA, 25 bp, Probe Sequence
gaccccagcctagatgacagaatga

SEQ ID NO: 230064 - DNA, 25 bp, Probe Sequence
gaccagcccccaaatgtcgaagaat

SEQ ID NO: 230065 - DNA, 25 bp, Probe Sequence
gaccacgtgaccaacatgcacgaga

SEQ ID NO: 230066 - DNA, 25 bp, Probe Sequence
gaccaagtgaccaccgtgaagtgcc

SEQ ID NO: 230067 - DNA, 25 bp, Probe Sequence
gaccaagtacaacgccaacaagacc

SEQ ID NO: 230068 - DNA, 25 bp, Probe Sequence
gaccgcgtccaaggacaacacagcc

SEQ ID NO: 230069 - DNA, 25 bp, Probe Sequence
gaccgagaaaaggagcaactcagct

SEQ ID NO: 230070 - DNA, 25 bp, Probe Sequence
gaccgagggatcggagaatgctccc

SEQ ID NO: 230071 - DNA, 25 bp, Probe Sequence
gacctcagggtcaatgaactcctcg

SEQ ID NO: 230072 - DNA, 25 bp, Probe Sequence
gacctcacggctggcaaaatccaag

SEQ ID NO: 230073 - DNA, 25 bp, Probe Sequence
gaccctcggagcaaattatccacaa

SEQ ID NO: 230074 - DNA, 25 bp, Probe Sequence
gaccgtctgtggctataatgaccaa

SEQ ID NO: 230075 - DNA, 25 bp, Probe Sequence
gaccagtcttggccttaagctgact

SEQ ID NO: 230076 - DNA, 25 bp, Probe Sequence
gaccagatgttggctgctgtactta

SEQ ID NO: 230077 - DNA, 25 bp, Probe Sequence
gacctatatgtctggatactttaat

SEQ ID NO: 230078 - DNA, 25 bp, Probe Sequence
gacctttgacatttgacctttgcag

SEQ ID NO: 230079 - DNA, 25 bp, Probe Sequence
gacctattaatcctgacacttcaca

SEQ ID NO: 230080 - DNA, 25 bp, Probe Sequence
gacctgaccaaggtgccagctattc

SEQ ID NO: 230081 - DNA, 25 bp, Probe Sequence
gaccttgtcagagttctcagtagtc

SEQ ID NO: 230082 - DNA, 25 bp, Probe Sequence
gaccgagtgcatggtagagcagtac

SEQ ID NO: 230083 - DNA, 25 bp, Probe Sequence
gacccgagatggtgacagtgcactt

SEQ ID NO: 230084 - DNA, 25 bp, Probe Sequence
gaccccgagctgttgaggtacttgc

SEQ ID NO: 230085 - DNA, 25 bp, Probe Sequence
gagcgacctttgggcaggtttctgc

SEQ ID NO: 230086 - DNA, 25 bp, Probe Sequence
gaccaccctgcgatcaggtgtttgc

SEQ ID NO: 230087 - DNA, 25 bp, Probe Sequence
gaccagcagaggcataaggttcggg

SEQ ID NO: 230088 - DNA, 25 bp, Probe Sequence
tgcaccaccgggtaaagttcacggg

SEQ ID NO: 230089 - DNA, 25 bp, Probe Sequence
gaccccggtgaaacagtaggtggag

SEQ ID NO: 230090 - DNA, 25 bp, Probe Sequence
gaccttccggaagcagcgagtggga

SEQ ID NO: 230091 - DNA, 25 bp, Probe Sequence
gaccattcaccggggccaagtggtg

SEQ ID NO: 230092 - DNA, 25 bp, Probe Sequence
gaccatgcttccgggagacggtgtg

SEQ ID NO: 230093 - DNA, 25 bp, Probe Sequence
gaccatcgtcatcgtgggactgact

SEQ ID NO: 230094 - DNA, 25 bp, Probe Sequence
gaccatcctcacgagctatagtggc

SEQ ID NO: 230095 - DNA, 25 bp, Probe Sequence
gacctcccagtactcaagagaccag

SEQ ID NO: 230096 - DNA, 25 bp, Probe Sequence
gacctaccagtattatggcttctcg

SEQ ID NO: 230097 - DNA, 25 bp, Probe Sequence
gacctaactgaatacagtctcatct

SEQ ID NO: 230098 - DNA, 25 bp, Probe Sequence
gaccttagctaaaccatggcaattc

SEQ ID NO: 230099 - DNA, 25 bp, Probe Sequence
gacctatagctaaaccttaatgtgt

SEQ ID NO: 230100 - DNA, 25 bp, Probe Sequence
gacctgataggcaaactctaatgtg

SEQ ID NO: 230101 - DNA, 25 bp, Probe Sequence
gacctgcatgttgagttctgtattg

SEQ ID NO: 230102 - DNA, 25 bp, Probe Sequence
gaccatgcaggaacagtgactaatt

SEQ ID NO: 230103 - DNA, 25 bp, Probe Sequence
gaccgcgtggactatgacagacagt

SEQ ID NO: 230104 - DNA, 25 bp, Probe Sequence
gacctggctggatgagccgccactg

SEQ ID NO: 230105 - DNA, 25 bp, Probe Sequence
gaccgtgagcgagatgccgctcatc

SEQ ID NO: 230106 - DNA, 25 bp, Probe Sequence
gaccgtgcaaatgagctctgctcta

SEQ ID NO: 230107 - DNA, 25 bp, Probe Sequence
gaccgtgcaaatgagctctgctcta

SEQ ID NO: 230108 - DNA, 25 bp, Probe Sequence
gaccctgaccagcagtacttgattt

SEQ ID NO: 230109 - DNA, 25 bp, Probe Sequence
gacctctggacgcagaacttcagcc

SEQ ID NO: 230110 - DNA, 25 bp, Probe Sequence
gagccatcatcgcgccaaattttgc

SEQ ID NO: 230111 - DNA, 25 bp, Probe Sequence
gagccatcatcgcgccaaattttgc

SEQ ID NO: 230112 - DNA, 25 bp, Probe Sequence
gaccatatcagcccaatgttcctgt

SEQ ID NO: 230113 - DNA, 25 bp, Probe Sequence
gaccattaggcctatttaggtgaca

SEQ ID NO: 230114 - DNA, 25 bp, Probe Sequence
gaccattaggcctatttaggtgaca

SEQ ID NO: 230115 - DNA, 25 bp, Probe Sequence
gaccattaggcctatttaggtgaca

SEQ ID NO: 230116 - DNA, 25 bp, Probe Sequence
gaccattaggcctatttaggtgaca

SEQ ID NO: 230117 - DNA, 25 bp, Probe Sequence
gaccattaggcctatttaggtgaca

SEQ ID NO: 230118 - DNA, 25 bp, Probe Sequence
gaccattaggcctatttaggtgaca

SEQ ID NO: 230119 - DNA, 25 bp, Probe Sequence
gaccattaggcctatttaggtgaca

SEQ ID NO: 230120 - DNA, 25 bp, Probe Sequence
gaccttaaacttttacagctgacgg

SEQ ID NO: 230121 - DNA, 25 bp, Probe Sequence
gacctggcaaacatcaaccaatggg

SEQ ID NO: 230122 - DNA, 25 bp, Probe Sequence
gaccaggtaacatcatcaggccggg

SEQ ID NO: 230123 - DNA, 25 bp, Probe Sequence
gaccaggtcaagggacgttctgtgg

SEQ ID NO: 230124 - DNA, 25 bp, Probe Sequence
gacctgggaggcggaggttgcggtg

SEQ ID NO: 230125 - DNA, 25 bp, Probe Sequence
gaccgtgggtgagggtgtgcggctc

SEQ ID NO: 230126 - DNA, 25 bp, Probe Sequence
gaccgagagtgggtggagcgggtct

SEQ ID NO: 230127 - DNA, 25 bp, Probe Sequence
gaccgcatcagggtgggggaggtgc

SEQ ID NO: 230128 - DNA, 25 bp, Probe Sequence
gacctggcagcgggatggggaggac

SEQ ID NO: 230129 - DNA, 25 bp, Probe Sequence
gacctggcagcgggatggggaggac

SEQ ID NO: 230130 - DNA, 25 bp, Probe Sequence
gacctgggcgcgtgagtgcagggtc

SEQ ID NO: 230131 - DNA, 25 bp, Probe Sequence
gacctggggctgccgaagaagtctc

SEQ ID NO: 230132 - DNA, 25 bp, Probe Sequence
gagccgggcagcacggaaaggcaga

SEQ ID NO: 230133 - DNA, 25 bp, Probe Sequence
gaccgcggagcatccaagaactgga

SEQ ID NO: 230134 - DNA, 25 bp, Probe Sequence
gacctcagaagatccagtgaccatg

SEQ ID NO: 230135 - DNA, 25 bp, Probe Sequence
gagcctcatgaagccaactaagtgt

SEQ ID NO: 230136 - DNA, 25 bp, Probe Sequence
gacctgcatgaagttctacgcacgc

SEQ ID NO: 230137 - DNA, 25 bp, Probe Sequence
gaccatctgcaattacgaagcatct

SEQ ID NO: 230138 - DNA, 25 bp, Probe Sequence
gaccttccagatcctggtgatgctg

SEQ ID NO: 230139 - DNA, 25 bp, Probe Sequence
gaccttaagtgccgtgtgctggaac

SEQ ID NO: 230140 - DNA, 25 bp, Probe Sequence
gaccccaaggccagtgggcaagaga

SEQ ID NO: 230141 - DNA, 25 bp, Probe Sequence
gacccgaagtccaagtggcgaagca

SEQ ID NO: 230142 - DNA, 25 bp, Probe Sequence
gaccccaagcccaagatcaatgagg

SEQ ID NO: 230143 - DNA, 25 bp, Probe Sequence
gagcccctgacagaggaaattggga

SEQ ID NO: 230144 - DNA, 25 bp, Probe Sequence
gaccgctcgggcatggagaattccg

SEQ ID NO: 230145 - DNA, 25 bp, Probe Sequence
gaccgctggaaggtggagagcctcc

SEQ ID NO: 230146 - DNA, 25 bp, Probe Sequence
gacctgtggcaaatgtggctaccct

SEQ ID NO: 230147 - DNA, 25 bp, Probe Sequence
gacctggtgcgaaggcacccgacat

SEQ ID NO: 230148 - DNA, 25 bp, Probe Sequence
gaccccatctgaaggtcaccaacac

SEQ ID NO: 230149 - DNA, 25 bp, Probe Sequence
gacctctcacttagggcaagagcca

SEQ ID NO: 230150 - DNA, 25 bp, Probe Sequence
gacctgaggtttcagagcgcagcca

SEQ ID NO: 230151 - DNA, 25 bp, Probe Sequence
gaccagaggtaacacggcagcacag

SEQ ID NO: 230152 - DNA, 25 bp, Probe Sequence
gaccaccttataccagcgttatgag

SEQ ID NO: 230153 - DNA, 25 bp, Probe Sequence
gaccaccttataccagcgttatgag

SEQ ID NO: 230154 - DNA, 25 bp, Probe Sequence
gaccaccttataccagcgttatgag

SEQ ID NO: 230155 - DNA, 25 bp, Probe Sequence
gacctccgattccacagtgtatgat

SEQ ID NO: 230156 - DNA, 25 bp, Probe Sequence
gatcctttgtgagcaagttctattt

SEQ ID NO: 230157 - DNA, 25 bp, Probe Sequence
gaccttattcaggagagtttcaatg

SEQ ID NO: 230158 - DNA, 25 bp, Probe Sequence
gacctctatgtctcagatgcattcc

SEQ ID NO: 230159 - DNA, 25 bp, Probe Sequence
gacctggtgtcaaagatgcttcatg

SEQ ID NO: 230160 - DNA, 25 bp, Probe Sequence
gacctcgtggagaagtttgtggaac

SEQ ID NO: 230161 - DNA, 25 bp, Probe Sequence
gacctcgatggtgtggtctgtggag

SEQ ID NO: 230162 - DNA, 25 bp, Probe Sequence
gacccgcatccaggtgagactggga

SEQ ID NO: 230163 - DNA, 25 bp, Probe Sequence
gaccagcggccaggtggaggagtat

SEQ ID NO: 230164 - DNA, 25 bp, Probe Sequence
gaccaaggccaggacgtggaggtgg

SEQ ID NO: 230165 - DNA, 25 bp, Probe Sequence
gagccaacctcggtcgtgttggtgt

SEQ ID NO: 230166 - DNA, 25 bp, Probe Sequence
gaccagcaaatcggtgcactgatcg

SEQ ID NO: 230167 - DNA, 25 bp, Probe Sequence
gaccagatatctgtgctactactgt

SEQ ID NO: 230168 - DNA, 25 bp, Probe Sequence
gaccatgactctgtggataagcttg

SEQ ID NO: 230169 - DNA, 25 bp, Probe Sequence
gacctgcgcaatgtttatatgcttt

SEQ ID NO: 230170 - DNA, 25 bp, Probe Sequence
gacctgcgcaatgtttatatgcttt

SEQ ID NO: 230171 - DNA, 25 bp, Probe Sequence
gacctgtcacagttttatcatcaat

SEQ ID NO: 230172 - DNA, 25 bp, Probe Sequence
gaccgaaggatttctgacagactat

SEQ ID NO: 230173 - DNA, 25 bp, Probe Sequence
gaccacagactgactttgaaattat

SEQ ID NO: 230174 - DNA, 25 bp, Probe Sequence
gacctcaactacatggtttacatgt

SEQ ID NO: 230175 - DNA, 25 bp, Probe Sequence
gacctgcaactcaaaggctttttta

SEQ ID NO: 230176 - DNA, 25 bp, Probe Sequence
gaccagccactcaaaggaactttct

SEQ ID NO: 230177 - DNA, 25 bp, Probe Sequence
gaccagccactcaaaggaactttct

SEQ ID NO: 230178 - DNA, 25 bp, Probe Sequence
gaccagccactcaaaggaactttct

SEQ ID NO: 230179 - DNA, 25 bp, Probe Sequence
gagccgccacctaagagaaggttgc

SEQ ID NO: 230180 - DNA, 25 bp, Probe Sequence
gaccccccattctggatgtatatca

SEQ ID NO: 230181 - DNA, 25 bp, Probe Sequence
gaccaccccattgtggagacgctgc

SEQ ID NO: 230182 - DNA, 25 bp, Probe Sequence
gaccccagaactgtggagtcagtgg

SEQ ID NO: 230183 - DNA, 25 bp, Probe Sequence
gaccccagaggtttgaggtgactgg

SEQ ID NO: 230184 - DNA, 25 bp, Probe Sequence
gaccccatagcaggattcagtttcg

SEQ ID NO: 230185 - DNA, 25 bp, Probe Sequence
gaccccagaaaggtcagccttcctg

SEQ ID NO: 230186 - DNA, 25 bp, Probe Sequence
gagccgaagaagtttcctttcctat

SEQ ID NO: 230187 - DNA, 25 bp, Probe Sequence
gagccagtaaaactcatcgttacca

SEQ ID NO: 230188 - DNA, 25 bp, Probe Sequence
gagcccgaatcctcatctttaatat

SEQ ID NO: 230189 - DNA, 25 bp, Probe Sequence
gagcccgaatcctcatctttaatat

SEQ ID NO: 230190 - DNA, 25 bp, Probe Sequence
gaccaaatattctaatcttttttca

SEQ ID NO: 230191 - DNA, 25 bp, Probe Sequence
gaccaatgcattgcgtttctttccc

SEQ ID NO: 230192 - DNA, 25 bp, Probe Sequence
gaccaaatgacctctgcattcttca

SEQ ID NO: 230193 - DNA, 25 bp, Probe Sequence
gagccagaaacgtggttcttcaagt

SEQ ID NO: 230194 - DNA, 25 bp, Probe Sequence
gagccagaaacgtggttcttcaagt

SEQ ID NO: 230195 - DNA, 25 bp, Probe Sequence
gagccaaagcccaggagattaccag

SEQ ID NO: 230196 - DNA, 25 bp, Probe Sequence
gaccaatggcctctgaaaaagcaca

SEQ ID NO: 230197 - DNA, 25 bp, Probe Sequence
gaccgaggcctctataaacaaggac

SEQ ID NO: 230198 - DNA, 25 bp, Probe Sequence
gacctggagcctgatgaagaactgg

SEQ ID NO: 230199 - DNA, 25 bp, Probe Sequence
gagcccgagcctgagaatgactatg

SEQ ID NO: 230200 - DNA, 25 bp, Probe Sequence
gaccgagccttgtatgtatgttatg

SEQ ID NO: 230201 - DNA, 25 bp, Probe Sequence
gacctgcccttgtttatggcaagaa

SEQ ID NO: 230202 - DNA, 25 bp, Probe Sequence
gacctgttcttgttctacagagaat

SEQ ID NO: 230203 - DNA, 25 bp, Probe Sequence
gacctgtgatcatgtttcaggaagg

SEQ ID NO: 230204 - DNA, 25 bp, Probe Sequence
gacctgctgacatagtggatggaca

SEQ ID NO: 230205 - DNA, 25 bp, Probe Sequence
gaccgcattatttatggggaaaaga

SEQ ID NO: 230206 - DNA, 25 bp, Probe Sequence
gaccgattgatttaggtgcatgcaa

SEQ ID NO: 230207 - DNA, 25 bp, Probe Sequence
gaccgcttctataacaatcatgcat

SEQ ID NO: 230208 - DNA, 25 bp, Probe Sequence
gaccagttgaataaaagtgcacacc

SEQ ID NO: 230209 - DNA, 25 bp, Probe Sequence
gaccgaagtgtttcaagtggatctc

SEQ ID NO: 230210 - DNA, 25 bp, Probe Sequence
gacctgattggttaaatggagatat

SEQ ID NO: 230211 - DNA, 25 bp, Probe Sequence
gaccggtggttcaaaagtgcattat

SEQ ID NO: 230212 - DNA, 25 bp, Probe Sequence
gagccgggtttcatctggaattaac

SEQ ID NO: 230213 - DNA, 25 bp, Probe Sequence
gagctaaggttaaggctggtctaaa

SEQ ID NO: 230214 - DNA, 25 bp, Probe Sequence
gaccaatggattaaactggcatttc

SEQ ID NO: 230215 - DNA, 25 bp, Probe Sequence
gaccactttgtatgaccgtttgcag

SEQ ID NO: 230216 - DNA, 25 bp, Probe Sequence
gacctctattggaaacctttgttca

SEQ ID NO: 230217 - DNA, 25 bp, Probe Sequence
gaccttttgtttttgctttgcattt

SEQ ID NO: 230218 - DNA, 25 bp, Probe Sequence
gaccgtttgttacttgtggtgtgat

SEQ ID NO: 230219 - DNA, 25 bp, Probe Sequence
gacctgtgttgatactggggggttg

SEQ ID NO: 230220 - DNA, 25 bp, Probe Sequence
gacctttaacagggtcggtggtgag

SEQ ID NO: 230221 - DNA, 25 bp, Probe Sequence
gacctcgaggaagagtggggggaag

SEQ ID NO: 230222 - DNA, 25 bp, Probe Sequence
gagcctaaggaagcgtggggtagca

SEQ ID NO: 230223 - DNA, 25 bp, Probe Sequence
gagcctgtgggaacttcaggggttc

SEQ ID NO: 230224 - DNA, 25 bp, Probe Sequence
gaccggtggcgatgtcagcggatgt

SEQ ID NO: 230225 - DNA, 25 bp, Probe Sequence
gacctggctactcagaactggtgtg

SEQ ID NO: 230226 - DNA, 25 bp, Probe Sequence
gaccggctcacagagaccatggagg

SEQ ID NO: 230227 - DNA, 25 bp, Probe Sequence
gacctggtcaactggttcaaggctc

SEQ ID NO: 230228 - DNA, 25 bp, Probe Sequence
gacctggtctatcaggtctccaggt

SEQ ID NO: 230229 - DNA, 25 bp, Probe Sequence
gaccggctcaacaaggttatcagtg

SEQ ID NO: 230230 - DNA, 25 bp, Probe Sequence
gaccggcgcaagacggaccagagcg

SEQ ID NO: 230231 - DNA, 25 bp, Probe Sequence
gaccggcgcaagacggaccagagcg

SEQ ID NO: 230232 - DNA, 25 bp, Probe Sequence
gaccgaggcgcatagagaccgaggc

SEQ ID NO: 230233 - DNA, 25 bp, Probe Sequence
gaccaaggcgcagagcaactatcag

SEQ ID NO: 230234 - DNA, 25 bp, Probe Sequence
gaccacagagttggatccctcatga

SEQ ID NO: 230235 - DNA, 25 bp, Probe Sequence
gacctcagactaatgacatcctggc

SEQ ID NO: 230236 - DNA, 25 bp, Probe Sequence
gacctccatagaagacaccggggcc

SEQ ID NO: 230237 - DNA, 25 bp, Probe Sequence
gacctccatagaagacaccgggacc

SEQ ID NO: 230238 - DNA, 25 bp, Probe Sequence
gacctccatagaagacaccgggacc

SEQ ID NO: 230239 - DNA, 25 bp, Probe Sequence
gacctccatagaagacaccgggacc

SEQ ID NO: 230240 - DNA, 25 bp, Probe Sequence
gacctccatagaagacaccgggacc

SEQ ID NO: 230241 - DNA, 25 bp, Probe Sequence
gacctccatagaagacaccgggacc

SEQ ID NO: 230242 - DNA, 25 bp, Probe Sequence
gacctccatagaagacaccgggacc

SEQ ID NO: 230243 - DNA, 25 bp, Probe Sequence
gacctccatagaagacaccgggacc

SEQ ID NO: 230244 - DNA, 25 bp, Probe Sequence
gacctccatagaagacaccgggacc

SEQ ID NO: 230245 - DNA, 25 bp, Probe Sequence
gacctccatagaagacaccgggacc

SEQ ID NO: 230246 - DNA, 25 bp, Probe Sequence
gacctccatagaagacaccgggacc

SEQ ID NO: 230247 - DNA, 25 bp, Probe Sequence
gacctccatagaagacaccgggacc

SEQ ID NO: 230248 - DNA, 25 bp, Probe Sequence
gacctccatagaagacaccgggacc

SEQ ID NO: 230249 - DNA, 25 bp, Probe Sequence
gacctccatagaagacaccgggacc

SEQ ID NO: 230250 - DNA, 25 bp, Probe Sequence
gacctccatagaagacaccgggacc

SEQ ID NO: 230251 - DNA, 25 bp, Probe Sequence
gacctccatagaagacaccgggacc

SEQ ID NO: 230252 - DNA, 25 bp, Probe Sequence
gacctccatagaagacaccgggacc

SEQ ID NO: 230253 - DNA, 25 bp, Probe Sequence
gacctccatagaagacaccgggacc

SEQ ID NO: 230254 - DNA, 25 bp, Probe Sequence
gacctccatagaagacaccgggacc

SEQ ID NO: 230255 - DNA, 25 bp, Probe Sequence
gacctccatagaagacaccgggacc

SEQ ID NO: 230256 - DNA, 25 bp, Probe Sequence
gacctccatagaagacaccgggacc

SEQ ID NO: 230257 - DNA, 25 bp, Probe Sequence
gacctccatagaagacaccgggacc

SEQ ID NO: 230258 - DNA, 25 bp, Probe Sequence
gacctccatagaagacaccgggacc

SEQ ID NO: 230259 - DNA, 25 bp, Probe Sequence
gacctccatagaagacaccgggacc

SEQ ID NO: 230260 - DNA, 25 bp, Probe Sequence
gacctccatagaagacaccgggacc

SEQ ID NO: 230261 - DNA, 25 bp, Probe Sequence
gacctccatagaagacaccgggacc

SEQ ID NO: 230262 - DNA, 25 bp, Probe Sequence
gacctccatagaagacaccgggacc

SEQ ID NO: 230263 - DNA, 25 bp, Probe Sequence
gacctccatagaagacaccgggacc

SEQ ID NO: 230264 - DNA, 25 bp, Probe Sequence
gacctccatagaagacaccgggacc

SEQ ID NO: 230265 - DNA, 25 bp, Probe Sequence
gacctccatagaagacaccgggacc

SEQ ID NO: 230266 - DNA, 25 bp, Probe Sequence
gacctccatagaagacaccgggacc

SEQ ID NO: 230267 - DNA, 25 bp, Probe Sequence
gacctccatagaagacaccgggacc

SEQ ID NO: 230268 - DNA, 25 bp, Probe Sequence
gacctccatagaagacaccgggacc

SEQ ID NO: 230269 - DNA, 25 bp, Probe Sequence
gacctccatagaagacaccgggacc

SEQ ID NO: 230270 - DNA, 25 bp, Probe Sequence
gacctccatagaagacaccgggacc

SEQ ID NO: 230271 - DNA, 25 bp, Probe Sequence
gacctccatagaagacaccgggacc

SEQ ID NO: 230272 - DNA, 25 bp, Probe Sequence
gacctccatagaagacaccgggacc

SEQ ID NO: 230273 - DNA, 25 bp, Probe Sequence
gacctccatagaagacaccgggacc

SEQ ID NO: 230274 - DNA, 25 bp, Probe Sequence
gacctccatagaagacaccgggacc

SEQ ID NO: 230275 - DNA, 25 bp, Probe Sequence
gacctccatagaagacaccgggacc

SEQ ID NO: 230276 - DNA, 25 bp, Probe Sequence
gacctccatagaagacaccgggacc

SEQ ID NO: 230277 - DNA, 25 bp, Probe Sequence
gacctccatagaagacaccgggacc

SEQ ID NO: 230278 - DNA, 25 bp, Probe Sequence
gacctccatagaagacaccgggacc

SEQ ID NO: 230279 - DNA, 25 bp, Probe Sequence
gacctccatagaagacaccgggacc

SEQ ID NO: 230280 - DNA, 25 bp, Probe Sequence
gacctccatagaagacaccgggacc

SEQ ID NO: 230281 - DNA, 25 bp, Probe Sequence
gacctccatagaagacaccgggacc

SEQ ID NO: 230282 - DNA, 25 bp, Probe Sequence
gacctccatagaagacaccgggacc

SEQ ID NO: 230283 - DNA, 25 bp, Probe Sequence
gacctccatagaagacaccgggacc

SEQ ID NO: 230284 - DNA, 25 bp, Probe Sequence
gacctccatagaagacaccgggacc

SEQ ID NO: 230285 - DNA, 25 bp, Probe Sequence
gacctccatagaagacaccgggacc

SEQ ID NO: 230286 - DNA, 25 bp, Probe Sequence
gacctccatagaagacaccgggacc

SEQ ID NO: 230287 - DNA, 25 bp, Probe Sequence
gacctccatagaagacaccgggacc

SEQ ID NO: 230288 - DNA, 25 bp, Probe Sequence
gacctccatagaagacaccgggacc

SEQ ID NO: 230289 - DNA, 25 bp, Probe Sequence
gacctccatagaagacaccgggacc

SEQ ID NO: 230290 - DNA, 25 bp, Probe Sequence
gacctccatagaagacaccgggacc

SEQ ID NO: 230291 - DNA, 25 bp, Probe Sequence
gacctccatagaagacaccgggacc

SEQ ID NO: 230292 - DNA, 25 bp, Probe Sequence
gacctccatagaagacaccgggacc

SEQ ID NO: 230293 - DNA, 25 bp, Probe Sequence
gacctccatagaagacaccgggacc

SEQ ID NO: 230294 - DNA, 25 bp, Probe Sequence
gacctccatagaagacaccgggacc

SEQ ID NO: 230295 - DNA, 25 bp, Probe Sequence
gacctccatagaagacaccgggacc

SEQ ID NO: 230296 - DNA, 25 bp, Probe Sequence
gacctccatagaagacaccgggacc

SEQ ID NO: 230297 - DNA, 25 bp, Probe Sequence
gacctccatagaagacaccgggacc

SEQ ID NO: 230298 - DNA, 25 bp, Probe Sequence
gacctccatagaagacaccgggacc

SEQ ID NO: 230299 - DNA, 25 bp, Probe Sequence
gacctccatagaagacaccgggacc

SEQ ID NO: 230300 - DNA, 25 bp, Probe Sequence
gacctccatagaagacaccgggacc

SEQ ID NO: 230301 - DNA, 25 bp, Probe Sequence
gacctccatagaagacaccgggacc

SEQ ID NO: 230302 - DNA, 25 bp, Probe Sequence
gacctccatagaagacaccgggacc

SEQ ID NO: 230303 - DNA, 25 bp, Probe Sequence
gacctccatagaagacaccgggacc

SEQ ID NO: 230304 - DNA, 25 bp, Probe Sequence
gacctccatagaagacaccgggacc

SEQ ID NO: 230305 - DNA, 25 bp, Probe Sequence
gacctccatagaagacaccgggacc

SEQ ID NO: 230306 - DNA, 25 bp, Probe Sequence
gacctccatagaagacaccgggacc

SEQ ID NO: 230307 - DNA, 25 bp, Probe Sequence
gacctccatagaagacaccgggacc

SEQ ID NO: 230308 - DNA, 25 bp, Probe Sequence
gacctccatagaagacaccgggacc

SEQ ID NO: 230309 - DNA, 25 bp, Probe Sequence
gacctccatagaagacaccgggacc

SEQ ID NO: 230310 - DNA, 25 bp, Probe Sequence
gacctccatagaagacaccgggacc

SEQ ID NO: 230311 - DNA, 25 bp, Probe Sequence
gacctccatagaagacaccgggacc

SEQ ID NO: 230312 - DNA, 25 bp, Probe Sequence
gacctccatagaagacaccgggacc

SEQ ID NO: 230313 - DNA, 25 bp, Probe Sequence
gacctccatagaagacaccgggacc

SEQ ID NO: 230314 - DNA, 25 bp, Probe Sequence
gacctcacacgaagaagtctggaag

SEQ ID NO: 230315 - DNA, 25 bp, Probe Sequence
gacctgagactgtcgcagaggctgt

SEQ ID NO: 230316 - DNA, 25 bp, Probe Sequence
gacctgacagcttgagaagggtcac

SEQ ID NO: 230317 - DNA, 25 bp, Probe Sequence
gaccagtactatctgcgggtcacca

SEQ ID NO: 230318 - DNA, 25 bp, Probe Sequence
gaccatcttgttctgcaaggtgacc

SEQ ID NO: 230319 - DNA, 25 bp, Probe Sequence
gaccttgtgcctctaagcagtggac

SEQ ID NO: 230320 - DNA, 25 bp, Probe Sequence
gacctaagccacgttaagtccaagg

SEQ ID NO: 230321 - DNA, 25 bp, Probe Sequence
gacctgaagcacgacttccaggcac

SEQ ID NO: 230322 - DNA, 25 bp, Probe Sequence
gacctgaagaagactctctcctaca

SEQ ID NO: 230323 - DNA, 25 bp, Probe Sequence
gacctgaggaaggtcacccgcatcg

SEQ ID NO: 230324 - DNA, 25 bp, Probe Sequence
gaccggcagaaggagcagacctttc

SEQ ID NO: 230325 - DNA, 25 bp, Probe Sequence
gaccagggacaagtgctgaattttc

SEQ ID NO: 230326 - DNA, 25 bp, Probe Sequence
gaccagagacacttctggagggtgc

SEQ ID NO: 230327 - DNA, 25 bp, Probe Sequence
gagcccagcgacttctgaagggccc

SEQ ID NO: 230328 - DNA, 25 bp, Probe Sequence
gagccctgccactcaatgggagaat

SEQ ID NO: 230329 - DNA, 25 bp, Probe Sequence
gaccagtccatgggcaattggcaga

SEQ ID NO: 230330 - DNA, 25 bp, Probe Sequence
gaccagtccatgggcaattggcaga

SEQ ID NO: 230331 - DNA, 25 bp, Probe Sequence
gaccattccgcttcaaggcagagca

SEQ ID NO: 230332 - DNA, 25 bp, Probe Sequence
gacctctgcgtcatcagcaagaaca

SEQ ID NO: 230333 - DNA, 25 bp, Probe Sequence
gaccatccaatcacagctaaagcta

SEQ ID NO: 230334 - DNA, 25 bp, Probe Sequence
gaccatcaagtccaacaagcaaaga

SEQ ID NO: 230335 - DNA, 25 bp, Probe Sequence
gaccagaattctgaaaattacacca

SEQ ID NO: 230336 - DNA, 25 bp, Probe Sequence
gaccaattatctacagagaaaatca

SEQ ID NO: 230337 - DNA, 25 bp, Probe Sequence
gacctcatctctaccaaaaattaaa

SEQ ID NO: 230338 - DNA, 25 bp, Probe Sequence
gaccatctcacaaaaacgagtttag

SEQ ID NO: 230339 - DNA, 25 bp, Probe Sequence
gaccaccagacaattactgcatttt

SEQ ID NO: 230340 - DNA, 25 bp, Probe Sequence
gaccaccagccaactacacattggt

SEQ ID NO: 230341 - DNA, 25 bp, Probe Sequence
gaccaccaataaaatcctctgctga

SEQ ID NO: 230342 - DNA, 25 bp, Probe Sequence
gaccactaatcaaatgttctctgga

SEQ ID NO: 230343 - DNA, 25 bp, Probe Sequence
gacctctcaacacagtatgccaagt

SEQ ID NO: 230344 - DNA, 25 bp, Probe Sequence
gacctctcttatcaagagcacactt

SEQ ID NO: 230345 - DNA, 25 bp, Probe Sequence
gaccttctcatcaatagatcgccct

SEQ ID NO: 230346 - DNA, 25 bp, Probe Sequence
gacctcccatagaagacacccggga

SEQ ID NO: 230347 - DNA, 25 bp, Probe Sequence
gacctccgatgagtagtgacaccgg

SEQ ID NO: 230348 - DNA, 25 bp, Probe Sequence
gacctcctggactagttcggcgagg

SEQ ID NO: 230349 - DNA, 25 bp, Probe Sequence
gataacctgaagggtctggaagagc

SEQ ID NO: 230350 - DNA, 25 bp, Probe Sequence
gaccacctaagaatgtctggagatg

SEQ ID NO: 230351 - DNA, 25 bp, Probe Sequence
gaccacctatacagctgcttattcg

SEQ ID NO: 230352 - DNA, 25 bp, Probe Sequence
gaccaggtaattactgcttgtctct

SEQ ID NO: 230353 - DNA, 25 bp, Probe Sequence
gacctgatgtaaacagtgtcttctt

SEQ ID NO: 230354 - DNA, 25 bp, Probe Sequence
gaccatcattgacgacactatcttc

SEQ ID NO: 230355 - DNA, 25 bp, Probe Sequence
gaccattgctggcatgacgtttaca

SEQ ID NO: 230356 - DNA, 25 bp, Probe Sequence
gaccattgctggcatgacgtttaca

SEQ ID NO: 230357 - DNA, 25 bp, Probe Sequence
gaccatcctggctaacacggtgaaa

SEQ ID NO: 230358 - DNA, 25 bp, Probe Sequence
gaccaatatccgcaacgtggagaga

SEQ ID NO: 230359 - DNA, 25 bp, Probe Sequence
gaccacgacctcaaacgttgtcagt

SEQ ID NO: 230360 - DNA, 25 bp, Probe Sequence
gaccaaacttcaaaggcattcctgt

SEQ ID NO: 230361 - DNA, 25 bp, Probe Sequence
gaccaaaatgccgcggattccttgg

SEQ ID NO: 230362 - DNA, 25 bp, Probe Sequence
gaccagaagagagacttattcgctt

SEQ ID NO: 230363 - DNA, 25 bp, Probe Sequence
gagccagaaaggcacttggggtctt

SEQ ID NO: 230364 - DNA, 25 bp, Probe Sequence
gacctgtctaggcactaagggagtt

SEQ ID NO: 230365 - DNA, 25 bp, Probe Sequence
gacctgtgtgacgcctagggatgac

SEQ ID NO: 230366 - DNA, 25 bp, Probe Sequence
gacctgtgcatgaggctttgggaga

SEQ ID NO: 230367 - DNA, 25 bp, Probe Sequence
gaccttggattgccagtgtggggat

SEQ ID NO: 230368 - DNA, 25 bp, Probe Sequence
gaccttgcggatggcgtttcaggtg

SEQ ID NO: 230369 - DNA, 25 bp, Probe Sequence
gaccttctgtctgggactcaggagt

SEQ ID NO: 230370 - DNA, 25 bp, Probe Sequence
gacctggtgggagacatcagtagtg

SEQ ID NO: 230371 - DNA, 25 bp, Probe Sequence
gacctgcttggatctagacagcatc

SEQ ID NO: 230372 - DNA, 25 bp, Probe Sequence
gacctgctgggatcagtgaatgcct

SEQ ID NO: 230373 - DNA, 25 bp, Probe Sequence
gaccactggcactcagggtgtttgc

SEQ ID NO: 230374 - DNA, 25 bp, Probe Sequence
gaccagtatgactcaagtttggagg

SEQ ID NO: 230375 - DNA, 25 bp, Probe Sequence
gaccattaatttgattttggatgaa

SEQ ID NO: 230376 - DNA, 25 bp, Probe Sequence
gaccatttttatgtccattggatac

SEQ ID NO: 230377 - DNA, 25 bp, Probe Sequence
gacctttagctaacttagtgcaaac

SEQ ID NO: 230378 - DNA, 25 bp, Probe Sequence
gacctttacattcctgaagataaac

SEQ ID NO: 230379 - DNA, 25 bp, Probe Sequence
gacctcttaattactagacctcagt

SEQ ID NO: 230380 - DNA, 25 bp, Probe Sequence
gacctcttaataatgattgttgcca

SEQ ID NO: 230381 - DNA, 25 bp, Probe Sequence
gacctcattaaagtgcatggaaatc

SEQ ID NO: 230382 - DNA, 25 bp, Probe Sequence
gacctcattaaagtgcatggaaatc

SEQ ID NO: 230383 - DNA, 25 bp, Probe Sequence
gacctcattaaagtgcatggaaatc

SEQ ID NO: 230384 - DNA, 25 bp, Probe Sequence
gacctgattgaacatgcgagtacac

SEQ ID NO: 230385 - DNA, 25 bp, Probe Sequence
gaccttgtctcacactgatgatacc

SEQ ID NO: 230386 - DNA, 25 bp, Probe Sequence
gacctgctgtcataaatgtgtgaac

SEQ ID NO: 230387 - DNA, 25 bp, Probe Sequence
gagcctaggaaatttgggaacatga

SEQ ID NO: 230388 - DNA, 25 bp, Probe Sequence
gacctaggaaacacgctggagaaga

SEQ ID NO: 230389 - DNA, 25 bp, Probe Sequence
gacctcgcttaagggcagggagaag

SEQ ID NO: 230390 - DNA, 25 bp, Probe Sequence
gacctcggtgaaagccgacaggaga

SEQ ID NO: 230391 - DNA, 25 bp, Probe Sequence
gaccaagggaattctcaggatggaa

SEQ ID NO: 230392 - DNA, 25 bp, Probe Sequence
gaccaggcggaaagcttggtggcca

SEQ ID NO: 230393 - DNA, 25 bp, Probe Sequence
gagcgagtgcggaaacggggcttcg

SEQ ID NO: 230394 - DNA, 25 bp, Probe Sequence
gatccggggcacaaagagggtgggg

SEQ ID NO: 230395 - DNA, 25 bp, Probe Sequence
gagccagggagacaagggagtcggt

SEQ ID NO: 230396 - DNA, 25 bp, Probe Sequence
gaccaggctacactgacaggaagct

SEQ ID NO: 230397 - DNA, 25 bp, Probe Sequence
gacctactcatctgacaaagggcta

SEQ ID NO: 230398 - DNA, 25 bp, Probe Sequence
gacctagtcagatgtaagaggcctc

SEQ ID NO: 230399 - DNA, 25 bp, Probe Sequence
gaccatggagcataagcaaaggatc

SEQ ID NO: 230400 - DNA, 25 bp, Probe Sequence
gacctgacagcattccaataaagca

SEQ ID NO: 230401 - DNA, 25 bp, Probe Sequence
gacctcaagcaaccatgaactcagc

SEQ ID NO: 230402 - DNA, 25 bp, Probe Sequence
gaccaatgagcatgctcaggagtag

SEQ ID NO: 230403 - DNA, 25 bp, Probe Sequence
gaccagggtggtaggcaggcatcaa

SEQ ID NO: 230404 - DNA, 25 bp, Probe Sequence
gagcccggtgcgtggaattccacgc

SEQ ID NO: 230405 - DNA, 25 bp, Probe Sequence
gaggccgaggcagaaaaaccaccca

SEQ ID NO: 230406 - DNA, 25 bp, Probe Sequence
gagtgcccggcagaaaattgccaaa

SEQ ID NO: 230407 - DNA, 25 bp, Probe Sequence
gagcccctgcgacagaagttggctg

SEQ ID NO: 230408 - DNA, 25 bp, Probe Sequence
gaccatcccgagctgaatatcgggg

SEQ ID NO: 230409 - DNA, 25 bp, Probe Sequence
gaccatcccgagctgaatatcgggg

SEQ ID NO: 230410 - DNA, 25 bp, Probe Sequence
gaccacatccggatgcacaaggtgc

SEQ ID NO: 230411 - DNA, 25 bp, Probe Sequence
gacctgcaccgcaaggtctcggtgc

SEQ ID NO: 230412 - DNA, 25 bp, Probe Sequence
gaccatgacctgaggttggtggact

SEQ ID NO: 230413 - DNA, 25 bp, Probe Sequence
gaccacaccatcagagagggtgaag

SEQ ID NO: 230414 - DNA, 25 bp, Probe Sequence
gaccactgcctgaaaggtttgtaca

SEQ ID NO: 230415 - DNA, 25 bp, Probe Sequence
gaccacgagccatgagttttcaaaa

SEQ ID NO: 230416 - DNA, 25 bp, Probe Sequence
gaccacgagccatgagttttcaaaa

SEQ ID NO: 230417 - DNA, 25 bp, Probe Sequence
gaccataacccaggtttctcaattg

SEQ ID NO: 230418 - DNA, 25 bp, Probe Sequence
gagccaaaaccaggagttcatgcca

SEQ ID NO: 230419 - DNA, 25 bp, Probe Sequence
gaccagatcaaggaggaactgccgg

SEQ ID NO: 230420 - DNA, 25 bp, Probe Sequence
gatgacgatctaaagacccgggagc

SEQ ID NO: 230421 - DNA, 25 bp, Probe Sequence
gatgacgatctaaagacccgggagc

SEQ ID NO: 230422 - DNA, 25 bp, Probe Sequence
gagccgattaaaagaccgtgtgaaa

SEQ ID NO: 230423 - DNA, 25 bp, Probe Sequence
gatgccgttccctgaacataggaaa

SEQ ID NO: 230424 - DNA, 25 bp, Probe Sequence
gagccgtgtcgtatgacctagtaaa

SEQ ID NO: 230425 - DNA, 25 bp, Probe Sequence
gagcccgatgacgctgaactagtaa

SEQ ID NO: 230426 - DNA, 25 bp, Probe Sequence
gacctctgagtagctaattgattca

SEQ ID NO: 230427 - DNA, 25 bp, Probe Sequence
gaccaaatgggcctcaaagattcag

SEQ ID NO: 230428 - DNA, 25 bp, Probe Sequence
gaccaaatgaacagaaagtctcagc

SEQ ID NO: 230429 - DNA, 25 bp, Probe Sequence
gacctaaatacactgaaagactctt

SEQ ID NO: 230430 - DNA, 25 bp, Probe Sequence
gagcgcttactacatgccaagcact

SEQ ID NO: 230431 - DNA, 25 bp, Probe Sequence
gagccttacactctgcgaataaagc

SEQ ID NO: 230432 - DNA, 25 bp, Probe Sequence
gacctatgacagtttgtcaaaaagt

SEQ ID NO: 230433 - DNA, 25 bp, Probe Sequence
gagccgagatagcttcctgaaacgt

SEQ ID NO: 230434 - DNA, 25 bp, Probe Sequence
gaccagtggagcctttctgacaatt

SEQ ID NO: 230435 - DNA, 25 bp, Probe Sequence
gaccagtgtgacttcattagataac

SEQ ID NO: 230436 - DNA, 25 bp, Probe Sequence
gaccagctgaccaatatagagaaac

SEQ ID NO: 230437 - DNA, 25 bp, Probe Sequence
gaccagctgaccaaggtatcctact

SEQ ID NO: 230438 - DNA, 25 bp, Probe Sequence
gaccatgccaggcatggcttcctcc

SEQ ID NO: 230439 - DNA, 25 bp, Probe Sequence
gaccttagcatactgttgatccatc

SEQ ID NO: 230440 - DNA, 25 bp, Probe Sequence
gaccatgcaaaagttctgacactca

SEQ ID NO: 230441 - DNA, 25 bp, Probe Sequence
gaccatgcaaaagttctgacactca

SEQ ID NO: 230442 - DNA, 25 bp, Probe Sequence
gacctcagacggctctgagccttat

SEQ ID NO: 230443 - DNA, 25 bp, Probe Sequence
gacctcgaccagctgctggacatgt

SEQ ID NO: 230444 - DNA, 25 bp, Probe Sequence
gacctagagtcaaggatggatctgg

SEQ ID NO: 230445 - DNA, 25 bp, Probe Sequence
gacctagatgagtcaggataacaga

SEQ ID NO: 230446 - DNA, 25 bp, Probe Sequence
gacctatgatgaagcggtgcaagct

SEQ ID NO: 230447 - DNA, 25 bp, Probe Sequence
gaccttgatgatattcacacacatt

SEQ ID NO: 230448 - DNA, 25 bp, Probe Sequence
gaccttagatgcagcatccagctct

SEQ ID NO: 230449 - DNA, 25 bp, Probe Sequence
gacctcataatgggcacagtgcaga

SEQ ID NO: 230450 - DNA, 25 bp, Probe Sequence
gacctaaacgtggaatgcatgtgac

SEQ ID NO: 230451 - DNA, 25 bp, Probe Sequence
gacctcaaaccatagagggagcccc

SEQ ID NO: 230452 - DNA, 25 bp, Probe Sequence
gaccatcaacaagaagaggaacctg

SEQ ID NO: 230453 - DNA, 25 bp, Probe Sequence
gaccatcagttacagagaatttcct

SEQ ID NO: 230454 - DNA, 25 bp, Probe Sequence
gaccatcgatttctcagaaacgccc

SEQ ID NO: 230455 - DNA, 25 bp, Probe Sequence
gagcccgttcggtctgaggaaggcc

SEQ ID NO: 230456 - DNA, 25 bp, Probe Sequence
gagcccgttcggtctgaggaaggcc

SEQ ID NO: 230457 - DNA, 25 bp, Probe Sequence
gagcgggaccgagagagagaagagg

SEQ ID NO: 230458 - DNA, 25 bp, Probe Sequence
gagccaagacggaggaggggaaggg

SEQ ID NO: 230459 - DNA, 25 bp, Probe Sequence
gagcagaaatcgggggtggggttgg

SEQ ID NO: 230460 - DNA, 25 bp, Probe Sequence
gagccagagccgtgggttttggtgg

SEQ ID NO: 230461 - DNA, 25 bp, Probe Sequence
gaccaagactgctctagtttgaggg

SEQ ID NO: 230462 - DNA, 25 bp, Probe Sequence
gaccaaagtgcattctgagtttttt

SEQ ID NO: 230463 - DNA, 25 bp, Probe Sequence
gaccaggaggattgcctttaatatt

SEQ ID NO: 230464 - DNA, 25 bp, Probe Sequence
gagccaggcttttggcttccaaatc

SEQ ID NO: 230465 - DNA, 25 bp, Probe Sequence
gagcccgcttgtcagttctgaaatg

SEQ ID NO: 230466 - DNA, 25 bp, Probe Sequence
gagccctttgaactttccaaagtgc

SEQ ID NO: 230467 - DNA, 25 bp, Probe Sequence
gagcccctcgaggccttaaaaagct

SEQ ID NO: 230468 - DNA, 25 bp, Probe Sequence
gagcctcccgaaggattaaacgacg

SEQ ID NO: 230469 - DNA, 25 bp, Probe Sequence
gagcccccgtatgagaataaatatt

SEQ ID NO: 230470 - DNA, 25 bp, Probe Sequence
gagccttcccatttagattaaagat

SEQ ID NO: 230471 - DNA, 25 bp, Probe Sequence
gatctttcccatcttgcaaactaag

SEQ ID NO: 230472 - DNA, 25 bp, Probe Sequence
gacctttccatccttgaaaaaatgg

SEQ ID NO: 230473 - DNA, 25 bp, Probe Sequence
gagccaattccaactctgtaaaaaa

SEQ ID NO: 230474 - DNA, 25 bp, Probe Sequence
gagcgagaccctgcctcaaaaaaaa

SEQ ID NO: 230475 - DNA, 25 bp, Probe Sequence
gagcgagatccctccaaaatcaagt

SEQ ID NO: 230476 - DNA, 25 bp, Probe Sequence
gagcgagactccatctcaaaaaaaa

SEQ ID NO: 230477 - DNA, 25 bp, Probe Sequence
gagctgaagtcgcttgagaaagaaa

SEQ ID NO: 230478 - DNA, 25 bp, Probe Sequence
gagcgaaatcctttatatcaagtaa

SEQ ID NO: 230479 - DNA, 25 bp, Probe Sequence
gaccaaaaaattcatgagagatcca

SEQ ID NO: 230480 - DNA, 25 bp, Probe Sequence
gaccaaaagttaaagggcatccatt

SEQ ID NO: 230481 - DNA, 25 bp, Probe Sequence
gaccaaaagcctgcatttgtacctc

SEQ ID NO: 230482 - DNA, 25 bp, Probe Sequence
gagccgagattgcacctttgtactc

SEQ ID NO: 230483 - DNA, 25 bp, Probe Sequence
gagccgagattgcacctttgtactc

SEQ ID NO: 230484 - DNA, 25 bp, Probe Sequence
gaccttattggacttttctaccttg

SEQ ID NO: 230485 - DNA, 25 bp, Probe Sequence
gaccttatgggactttcctactgca

SEQ ID NO: 230486 - DNA, 25 bp, Probe Sequence
tgaccttatgggactttcctacttg

SEQ ID NO: 230487 - DNA, 25 bp, Probe Sequence
tgaccttatgggactttcctacttg

SEQ ID NO: 230488 - DNA, 25 bp, Probe Sequence
tgaccttatgggactttcctacttg

SEQ ID NO: 230489 - DNA, 25 bp, Probe Sequence
gaccttatgggactttcctacttgg

SEQ ID NO: 230490 - DNA, 25 bp, Probe Sequence
gaccttatgggactttcctacttgg

SEQ ID NO: 230491 - DNA, 25 bp, Probe Sequence
gaccttatgggactttcctacttgg

SEQ ID NO: 230492 - DNA, 25 bp, Probe Sequence
gaccttatgggactttcctacttgg

SEQ ID NO: 230493 - DNA, 25 bp, Probe Sequence
gaccttatgggactttcctacttgg

SEQ ID NO: 230494 - DNA, 25 bp, Probe Sequence
gaccttatgggactttcctacttgg

SEQ ID NO: 230495 - DNA, 25 bp, Probe Sequence
gaccttatgggactttcctacttgg

SEQ ID NO: 230496 - DNA, 25 bp, Probe Sequence
gaccttatgggactttcctacttgg

SEQ ID NO: 230497 - DNA, 25 bp, Probe Sequence
gaccttatgggactttcctacttgg

SEQ ID NO: 230498 - DNA, 25 bp, Probe Sequence
gaccttatgggactttcctacttgc

SEQ ID NO: 230499 - DNA, 25 bp, Probe Sequence
gaccttatgggacttcctaactggc

SEQ ID NO: 230500 - DNA, 25 bp, Probe Sequence
gaccttagggactttctacttggca

SEQ ID NO: 230501 - DNA, 25 bp, Probe Sequence
gacctttgtggagtacatcccttgt

SEQ ID NO: 230502 - DNA, 25 bp, Probe Sequence
gaccttatacatttcaatccctttt

SEQ ID NO: 230503 - DNA, 25 bp, Probe Sequence
gacctctatataattatcaccgttt

SEQ ID NO: 230504 - DNA, 25 bp, Probe Sequence
gacctcgcatatgtatgacatcctg

SEQ ID NO: 230505 - DNA, 25 bp, Probe Sequence
gacctcgatgatgatgatgatgatg

SEQ ID NO: 230506 - DNA, 25 bp, Probe Sequence
gacctcagtgatgtggagcttgatg

SEQ ID NO: 230507 - DNA, 25 bp, Probe Sequence
gaccaccgtgaagtgcctatgatga

SEQ ID NO: 230508 - DNA, 25 bp, Probe Sequence
gagccattcaggggtacttgtgcat

SEQ ID NO: 230509 - DNA, 25 bp, Probe Sequence
gaccatgttagtgctacattgtgca

SEQ ID NO: 230510 - DNA, 25 bp, Probe Sequence
gaccattccatgtgtatcattccat

SEQ ID NO: 230511 - DNA, 25 bp, Probe Sequence
gaccataatcagtgttaagctccag

SEQ ID NO: 230512 - DNA, 25 bp, Probe Sequence
gacctactcagggtctctgactacc

SEQ ID NO: 230513 - DNA, 25 bp, Probe Sequence
gaccaaccagtgggaaactgcccca

SEQ ID NO: 230514 - DNA, 25 bp, Probe Sequence
gaccaacacggaaaaatcatgtctc

SEQ ID NO: 230515 - DNA, 25 bp, Probe Sequence
gaccaccagggccaataggcattcc

SEQ ID NO: 230516 - DNA, 25 bp, Probe Sequence
gaccaccaagatgtaatgatgattc

SEQ ID NO: 230517 - DNA, 25 bp, Probe Sequence
gaccaccaggaggctggtcgtgctc

SEQ ID NO: 230518 - DNA, 25 bp, Probe Sequence
gagccaggatgggactggtcgtgtt

SEQ ID NO: 230519 - DNA, 25 bp, Probe Sequence
gaccaggtgacgtgggcgtggtcac

SEQ ID NO: 230520 - DNA, 25 bp, Probe Sequence
gaccaagatctatgggggacgtcag

SEQ ID NO: 230521 - DNA, 25 bp, Probe Sequence
gaccaagatctatgggggacgtcag

SEQ ID NO: 230522 - DNA, 25 bp, Probe Sequence
gagccaggatactggggtccttttc

SEQ ID NO: 230523 - DNA, 25 bp, Probe Sequence
gagccaacaagaagcaggggcctct

SEQ ID NO: 230524 - DNA, 25 bp, Probe Sequence
gacctcgctcaaagagcggctcctt

SEQ ID NO: 230525 - DNA, 25 bp, Probe Sequence
gaccttgcctgaatggcggcacatg

SEQ ID NO: 230526 - DNA, 25 bp, Probe Sequence
gagcagttacaagggcctgcatcat

SEQ ID NO: 230527 - DNA, 25 bp, Probe Sequence
gagaattcacaagcgactcattgac

SEQ ID NO: 230528 - DNA, 25 bp, Probe Sequence
gagcagattaacacagcctctggca

SEQ ID NO: 230529 - DNA, 25 bp, Probe Sequence
gaccaactacattaccatgctgtgc

SEQ ID NO: 230530 - DNA, 25 bp, Probe Sequence
gacctaaacatgtaaccatgcccta

SEQ ID NO: 230531 - DNA, 25 bp, Probe Sequence
gaccaatgtaatttcacaacaccta

SEQ ID NO: 230532 - DNA, 25 bp, Probe Sequence
gaccttgtctagtctccaaacttaa

SEQ ID NO: 230533 - DNA, 25 bp, Probe Sequence
gaccttttcaccatggaatcagtaa

SEQ ID NO: 230534 - DNA, 25 bp, Probe Sequence
gagcctgtttcagaggaacatcgtc

SEQ ID NO: 230535 - DNA, 25 bp, Probe Sequence
gagccagctctcaatgaagccaact

SEQ ID NO: 230536 - DNA, 25 bp, Probe Sequence
gagccactcgtaacagcgaacggtc

SEQ ID NO: 230537 - DNA, 25 bp, Probe Sequence
gaccatcctgaaagagcagaagggt

SEQ ID NO: 230538 - DNA, 25 bp, Probe Sequence
gaccactctagaatctgagcaaagg

SEQ ID NO: 230539 - DNA, 25 bp, Probe Sequence
gaccattctcaggatcagcaaatag

SEQ ID NO: 230540 - DNA, 25 bp, Probe Sequence
gaccttcctggcaatcaagtatgtt

SEQ ID NO: 230541 - DNA, 25 bp, Probe Sequence
gacctagccaggtaagcaggatggt

SEQ ID NO: 230542 - DNA, 25 bp, Probe Sequence
gacctatgctctaaaacatgaatgc

SEQ ID NO: 230543 - DNA, 25 bp, Probe Sequence
gacctagcgatgaaccacagagcct

SEQ ID NO: 230544 - DNA, 25 bp, Probe Sequence
gaccaactgatgaaccagaatcctt

SEQ ID NO: 230545 - DNA, 25 bp, Probe Sequence
gaccaacctgattcgctagattttt

SEQ ID NO: 230546 - DNA, 25 bp, Probe Sequence
gacctacactgttggctgtgaggaa

SEQ ID NO: 230547 - DNA, 25 bp, Probe Sequence
gacctacactgttggctgtgaggaa

SEQ ID NO: 230548 - DNA, 25 bp, Probe Sequence
gacctactctgtctgctgtgattaa

SEQ ID NO: 230549 - DNA, 25 bp, Probe Sequence
gaccttctctatatcatgctttaaa

SEQ ID NO: 230550 - DNA, 25 bp, Probe Sequence
gaccttgctgaatgtttccaataga

SEQ ID NO: 230551 - DNA, 25 bp, Probe Sequence
gaccttctgcaatgcattttgactc

SEQ ID NO: 230552 - DNA, 25 bp, Probe Sequence
gacctctcaggcatgacctggagcc

SEQ ID NO: 230553 - DNA, 25 bp, Probe Sequence
gaccattgcactgtgacctgtgttg

SEQ ID NO: 230554 - DNA, 25 bp, Probe Sequence
gaccagtcacaaatacgagtcttgg

SEQ ID NO: 230555 - DNA, 25 bp, Probe Sequence
gaccatgccaagagactggccggga

SEQ ID NO: 230556 - DNA, 25 bp, Probe Sequence
gagccccaagggtagggctgccgat

SEQ ID NO: 230557 - DNA, 25 bp, Probe Sequence
gacctacagaatcaacggctgccgg

SEQ ID NO: 230558 - DNA, 25 bp, Probe Sequence
gaccattcagaacagacaggcccag

SEQ ID NO: 230559 - DNA, 25 bp, Probe Sequence
gacctagcagaactaacagatgcct

SEQ ID NO: 230560 - DNA, 25 bp, Probe Sequence
gacctacgcacacgagaacatgcct

SEQ ID NO: 230561 - DNA, 25 bp, Probe Sequence
gaccttcatcacagacaacagcctg

SEQ ID NO: 230562 - DNA, 25 bp, Probe Sequence
gaccattcttgctatgacaaggcct

SEQ ID NO: 230563 - DNA, 25 bp, Probe Sequence
gaccattattgctaccaaatcaatg

SEQ ID NO: 230564 - DNA, 25 bp, Probe Sequence
gaccttaccaagccaatcattgata

SEQ ID NO: 230565 - DNA, 25 bp, Probe Sequence
gacctttatcatagccccattgaat

SEQ ID NO: 230566 - DNA, 25 bp, Probe Sequence
gaccatgaaaatacgcccagttgat

SEQ ID NO: 230567 - DNA, 25 bp, Probe Sequence
gaccatgcaagactgtcagtgccaa

SEQ ID NO: 230568 - DNA, 25 bp, Probe Sequence
gacctaagtgtgactgcagcaggca

SEQ ID NO: 230569 - DNA, 25 bp, Probe Sequence
gaccaacagaggaatccaggcacct

SEQ ID NO: 230570 - DNA, 25 bp, Probe Sequence
gacctcacaggccgacaagatacct

SEQ ID NO: 230571 - DNA, 25 bp, Probe Sequence
gacctcatgcagcttggcagatatc

SEQ ID NO: 230572 - DNA, 25 bp, Probe Sequence
gacctcataggctgcagaaatctgg

SEQ ID NO: 230573 - DNA, 25 bp, Probe Sequence
gacctcagacgctcagattatgcta

SEQ ID NO: 230574 - DNA, 25 bp, Probe Sequence
gacctagatggaacacatgctctga

SEQ ID NO: 230575 - DNA, 25 bp, Probe Sequence
gaccagtgcatgcatatactgtctc

SEQ ID NO: 230576 - DNA, 25 bp, Probe Sequence
gaccagcagaggttgatctttgccg

SEQ ID NO: 230577 - DNA, 25 bp, Probe Sequence
gaccatgagaagctttttgagctca

SEQ ID NO: 230578 - DNA, 25 bp, Probe Sequence
gagccatgaacacgtttaaatctgc

SEQ ID NO: 230579 - DNA, 25 bp, Probe Sequence
gagccttccttgagctaaactcggc

SEQ ID NO: 230580 - DNA, 25 bp, Probe Sequence
gagcctggttctgctgctagaactt

SEQ ID NO: 230581 - DNA, 25 bp, Probe Sequence
gagcggttccagactctgaagactg

SEQ ID NO: 230582 - DNA, 25 bp, Probe Sequence
gagctggttgctacattttcaggat

SEQ ID NO: 230583 - DNA, 25 bp, Probe Sequence
gagctggtactgacagttacatcat

SEQ ID NO: 230584 - DNA, 25 bp, Probe Sequence
gagcgtctacagacagctcaccatt

SEQ ID NO: 230585 - DNA, 25 bp, Probe Sequence
gaccatgtagtggcaagcagccttt

SEQ ID NO: 230586 - DNA, 25 bp, Probe Sequence
gaccttcttcacaagatgacttgct

SEQ ID NO: 230587 - DNA, 25 bp, Probe Sequence
gacctttgtacagtgtgatgctcga

SEQ ID NO: 230588 - DNA, 25 bp, Probe Sequence
gaccacttgtgagctgtgatgttag

SEQ ID NO: 230589 - DNA, 25 bp, Probe Sequence
gaccagctggtgttcagcgtgtctg

SEQ ID NO: 230590 - DNA, 25 bp, Probe Sequence
gaccattcagggccactggattgcc

SEQ ID NO: 230591 - DNA, 25 bp, Probe Sequence
gaccttcggcatgacattgatcgcc

SEQ ID NO: 230592 - DNA, 25 bp, Probe Sequence
gacctttgcagtgtcatgtgagggc

SEQ ID NO: 230593 - DNA, 25 bp, Probe Sequence
gagccgttcagtgtttagagagtgg

SEQ ID NO: 230594 - DNA, 25 bp, Probe Sequence
gagcctgtctaaactttcggaggga

SEQ ID NO: 230595 - DNA, 25 bp, Probe Sequence
gagctccttaaggctcttttgtaag

SEQ ID NO: 230596 - DNA, 25 bp, Probe Sequence
gaccagctctaaggacattacgaaa

SEQ ID NO: 230597 - DNA, 25 bp, Probe Sequence
gaccactgcatgaactgcttctaaa

SEQ ID NO: 230598 - DNA, 25 bp, Probe Sequence
gaccatcagcattttgtagtaataa

SEQ ID NO: 230599 - DNA, 25 bp, Probe Sequence
gaccaccatatgttctttgactata

SEQ ID NO: 230600 - DNA, 25 bp, Probe Sequence
gaccagccatcatgacatttaccat

SEQ ID NO: 230601 - DNA, 25 bp, Probe Sequence
gaccagcactacggctggacagcca

SEQ ID NO: 230602 - DNA, 25 bp, Probe Sequence
gaccatgccaacttgcagtacagcc

SEQ ID NO: 230603 - DNA, 25 bp, Probe Sequence
gaccaggacatcatgctgttgcgcc

SEQ ID NO: 230604 - DNA, 25 bp, Probe Sequence
gaccatggggcaggcttagccccgg

SEQ ID NO: 230605 - DNA, 25 bp, Probe Sequence
gaccaggaagttgatcaatcccgag

SEQ ID NO: 230606 - DNA, 25 bp, Probe Sequence
gaccaagaatttgacaactcacaag

SEQ ID NO: 230607 - DNA, 25 bp, Probe Sequence
gaccatgtggacagccaggactcca

SEQ ID NO: 230608 - DNA, 25 bp, Probe Sequence
gaccatggcagagaacagcaaccca

SEQ ID NO: 230609 - DNA, 25 bp, Probe Sequence
gaccatggagaggaaactggagggc

SEQ ID NO: 230610 - DNA, 25 bp, Probe Sequence
gaccatcgaggcttctaccggaagc

SEQ ID NO: 230611 - DNA, 25 bp, Probe Sequence
gagctatctaggtttgtctggaaag

SEQ ID NO: 230612 - DNA, 25 bp, Probe Sequence
gagccacatcctgttgactgaaagt

SEQ ID NO: 230613 - DNA, 25 bp, Probe Sequence
gagccaatcccagatttcgcaattc

SEQ ID NO: 230614 - DNA, 25 bp, Probe Sequence
gagttcctgctagatttcgtattct

SEQ ID NO: 230615 - DNA, 25 bp, Probe Sequence
gagcaggccgtcttaattattcctt

SEQ ID NO: 230616 - DNA, 25 bp, Probe Sequence
gagggactttgctgatttcccctct

SEQ ID NO: 230617 - DNA, 25 bp, Probe Sequence
gagcgagactctagtttttcctctc

SEQ ID NO: 230618 - DNA, 25 bp, Probe Sequence
gaccaactgggatattgcccacatg

SEQ ID NO: 230619 - DNA, 25 bp, Probe Sequence
gacctacggagggagctggaaattc

SEQ ID NO: 230620 - DNA, 25 bp, Probe Sequence
gagccaacggagaggtgaatcccca

SEQ ID NO: 230621 - DNA, 25 bp, Probe Sequence
gagccaaggcgggtgctggaagcca

SEQ ID NO: 230622 - DNA, 25 bp, Probe Sequence
gagccaaggcgggtgctggaagcca

SEQ ID NO: 230623 - DNA, 25 bp, Probe Sequence
gagcccgaaggcgtcatcgagagta

SEQ ID NO: 230624 - DNA, 25 bp, Probe Sequence
gagcccgataggtgtggcagaccaa

SEQ ID NO: 230625 - DNA, 25 bp, Probe Sequence
gaccaccttgaatttggcacacaca

SEQ ID NO: 230626 - DNA, 25 bp, Probe Sequence
gaccatccattattctagagcactc

SEQ ID NO: 230627 - DNA, 25 bp, Probe Sequence
gaccatgcctgaccattggagagct

SEQ ID NO: 230628 - DNA, 25 bp, Probe Sequence
gaccatccattgcagatgcgcagac

SEQ ID NO: 230629 - DNA, 25 bp, Probe Sequence
gaccacactcagcagtggcttcttc

SEQ ID NO: 230630 - DNA, 25 bp, Probe Sequence
gaccaagaccaatgtctatgtgatc

SEQ ID NO: 230631 - DNA, 25 bp, Probe Sequence
gaccaatcaccatggaccttactgg

SEQ ID NO: 230632 - DNA, 25 bp, Probe Sequence
gaccagatacactggatcctgcttt

SEQ ID NO: 230633 - DNA, 25 bp, Probe Sequence
gaccaatacgattgcataacgcatt

SEQ ID NO: 230634 - DNA, 25 bp, Probe Sequence
gaccaatacgattgcataacgcatt

SEQ ID NO: 230635 - DNA, 25 bp, Probe Sequence
gaccatatcaccaagctaaggttcc

SEQ ID NO: 230636 - DNA, 25 bp, Probe Sequence
gagcgatacatcacgcatgagagtg

SEQ ID NO: 230637 - DNA, 25 bp, Probe Sequence
gatctgtaatcatctctattggcct

SEQ ID NO: 230638 - DNA, 25 bp, Probe Sequence
gagctgttcacagccagactggcac

SEQ ID NO: 230639 - DNA, 25 bp, Probe Sequence
gagctgggggccaagatggccacca

SEQ ID NO: 230640 - DNA, 25 bp, Probe Sequence
gagcggggcgccagtgaattaataa

SEQ ID NO: 230641 - DNA, 25 bp, Probe Sequence
gagccacttcccagtgaactacata

SEQ ID NO: 230642 - DNA, 25 bp, Probe Sequence
gaccaggtgctagtaggaagctact

SEQ ID NO: 230643 - DNA, 25 bp, Probe Sequence
gaccaggcagatatctcgacacaac

SEQ ID NO: 230644 - DNA, 25 bp, Probe Sequence
gaccagaagcttgacgcaccaagcg

SEQ ID NO: 230645 - DNA, 25 bp, Probe Sequence
gaccagaagtctctctgggcaggtg

SEQ ID NO: 230646 - DNA, 25 bp, Probe Sequence
gaccagacagtgctgttggtgactg

SEQ ID NO: 230647 - DNA, 25 bp, Probe Sequence
gaccagacttgtacttaatgcagcc

SEQ ID NO: 230648 - DNA, 25 bp, Probe Sequence
gagctctacgatggccttaagcaca

SEQ ID NO: 230649 - DNA, 25 bp, Probe Sequence
gagctctacgatggccttaagcaca

SEQ ID NO: 230650 - DNA, 25 bp, Probe Sequence
gagcgtaactgccacttaagcggcg

SEQ ID NO: 230651 - DNA, 25 bp, Probe Sequence
gagcgtcaggtggactctcaagggt

SEQ ID NO: 230652 - DNA, 25 bp, Probe Sequence
gaccaatatagcccaattggaggcc

SEQ ID NO: 230653 - DNA, 25 bp, Probe Sequence
gaccaaacacaccaagttcgtgcgg

SEQ ID NO: 230654 - DNA, 25 bp, Probe Sequence
gagcccagtcaagacgattcgctga

SEQ ID NO: 230655 - DNA, 25 bp, Probe Sequence
gaccacagacatttacgctacagta

SEQ ID NO: 230656 - DNA, 25 bp, Probe Sequence
gaccaagagcaggactcgctacgtc

SEQ ID NO: 230657 - DNA, 25 bp, Probe Sequence
gaccaaagggagtctgccagggccc

SEQ ID NO: 230658 - DNA, 25 bp, Probe Sequence
gaccaaagagctgcctcttggtggc

SEQ ID NO: 230659 - DNA, 25 bp, Probe Sequence
gaccatagatgactccgtttgcatt

SEQ ID NO: 230660 - DNA, 25 bp, Probe Sequence
gaccaaggagtcgagctttctctca

SEQ ID NO: 230661 - DNA, 25 bp, Probe Sequence
gaccaaggtgccagctattcaacag

SEQ ID NO: 230662 - DNA, 25 bp, Probe Sequence
gaccactgtgctcaagtaccagaag

SEQ ID NO: 230663 - DNA, 25 bp, Probe Sequence
gaccatctgcatccaaaggaccgtc

SEQ ID NO: 230664 - DNA, 25 bp, Probe Sequence
gagcctctgttctgaagagccgtgc

SEQ ID NO: 230665 - DNA, 25 bp, Probe Sequence
gagccctgttaaacaagatttctaa

SEQ ID NO: 230666 - DNA, 25 bp, Probe Sequence
gagcacttttaaaagagtggcttat

SEQ ID NO: 230667 - DNA, 25 bp, Probe Sequence
gagccgtatgttgtcaggtggcttt

SEQ ID NO: 230668 - DNA, 25 bp, Probe Sequence
gaccaccgttcttgagtgtggattt

SEQ ID NO: 230669 - DNA, 25 bp, Probe Sequence
gaccatacgttggaggatgaggatg

SEQ ID NO: 230670 - DNA, 25 bp, Probe Sequence
gaccttcagcgggatggatcaggtg

SEQ ID NO: 230671 - DNA, 25 bp, Probe Sequence
gaccttgcaggctgtggagcaagag

SEQ ID NO: 230672 - DNA, 25 bp, Probe Sequence
gaccttggagaatgtcacagtgcag

SEQ ID NO: 230673 - DNA, 25 bp, Probe Sequence
gaccttgcggaatttgctaagaagc

SEQ ID NO: 230674 - DNA, 25 bp, Probe Sequence
gaccttccgaagatcatgcagagaa

SEQ ID NO: 230675 - DNA, 25 bp, Probe Sequence
gaccttctgcggccgatgagaagaa

SEQ ID NO: 230676 - DNA, 25 bp, Probe Sequence
gaccattctgtgtagtcataaaaga

SEQ ID NO: 230677 - DNA, 25 bp, Probe Sequence
gagccaaggctatcatatattaata

SEQ ID NO: 230678 - DNA, 25 bp, Probe Sequence
gaccaatgtgcctcaatatcttatt

SEQ ID NO: 230679 - DNA, 25 bp, Probe Sequence
gaccagattctactacaacactttg

SEQ ID NO: 230680 - DNA, 25 bp, Probe Sequence
gagctcgcatttgtcaatgacagtt

SEQ ID NO: 230681 - DNA, 25 bp, Probe Sequence
gagccaatgttggaaacacctctgc

SEQ ID NO: 230682 - DNA, 25 bp, Probe Sequence
gagccagatttcagggcaggtctgc

SEQ ID NO: 230683 - DNA, 25 bp, Probe Sequence
gagccagtcccaggggcatgtattg

SEQ ID NO: 230684 - DNA, 25 bp, Probe Sequence
gaccagagccagcctagtcattatt

SEQ ID NO: 230685 - DNA, 25 bp, Probe Sequence
gaccacaccggatgtcatctttgta

SEQ ID NO: 230686 - DNA, 25 bp, Probe Sequence
gaccacaccggatgtcatctttgta

SEQ ID NO: 230687 - DNA, 25 bp, Probe Sequence
gaccaagccgagatgccattctctt

SEQ ID NO: 230688 - DNA, 25 bp, Probe Sequence
gaccatgtggggatacattcttttg

SEQ ID NO: 230689 - DNA, 25 bp, Probe Sequence
gaccatgctgggagtcgcaatgtgt

SEQ ID NO: 230690 - DNA, 25 bp, Probe Sequence
gaccatgcgcagggttctgatgtgt

SEQ ID NO: 230691 - DNA, 25 bp, Probe Sequence
gaccttgcatgagttgccatgagag

SEQ ID NO: 230692 - DNA, 25 bp, Probe Sequence
gaccttcagcatctgctatgcagag

SEQ ID NO: 230693 - DNA, 25 bp, Probe Sequence
gagcctgccaggatgtgatcaactg

SEQ ID NO: 230694 - DNA, 25 bp, Probe Sequence
gagcccatggctagtggctcatccc

SEQ ID NO: 230695 - DNA, 25 bp, Probe Sequence
gagccctggttcagtcacccaggga

SEQ ID NO: 230696 - DNA, 25 bp, Probe Sequence
ggcccggatgacagtaccgaaacag

SEQ ID NO: 230697 - DNA, 25 bp, Probe Sequence
gagcccctatgaaaagaccagaaac

SEQ ID NO: 230698 - DNA, 25 bp, Probe Sequence
gagcccttgaaatatggccaataca

SEQ ID NO: 230699 - DNA, 25 bp, Probe Sequence
gagccctcaaaatgtcctgattaca

SEQ ID NO: 230700 - DNA, 25 bp, Probe Sequence
gagctcgccaatggaattcctgact

SEQ ID NO: 230701 - DNA, 25 bp, Probe Sequence
gagctcgccattcactgattggaag

SEQ ID NO: 230702 - DNA, 25 bp, Probe Sequence
gaccatgcacatgaaccactggacg

SEQ ID NO: 230703 - DNA, 25 bp, Probe Sequence
gaccagcagatggccagtcacgaga

SEQ ID NO: 230704 - DNA, 25 bp, Probe Sequence
gaccagcggcaggtgtacaggacgt

SEQ ID NO: 230705 - DNA, 25 bp, Probe Sequence
gaccagcgacagaagtccatggggc

SEQ ID NO: 230706 - DNA, 25 bp, Probe Sequence
gagccgcgacaaggccaagcggcgc

SEQ ID NO: 230707 - DNA, 25 bp, Probe Sequence
gagcagcctgattacccagggctgc

SEQ ID NO: 230708 - DNA, 25 bp, Probe Sequence
gagctggcaaggtcaccaagtctgc

SEQ ID NO: 230709 - DNA, 25 bp, Probe Sequence
gagctggcaaggtcaccaagtctgc

SEQ ID NO: 230710 - DNA, 25 bp, Probe Sequence
gagctggcaaggtcaccaagtctgc

SEQ ID NO: 230711 - DNA, 25 bp, Probe Sequence
gagctggtaaacacaaatcatgtca

SEQ ID NO: 230712 - DNA, 25 bp, Probe Sequence
gagcgtgggtagggatatatgagta

SEQ ID NO: 230713 - DNA, 25 bp, Probe Sequence
gagcgaggggagctgcatcagtggc

SEQ ID NO: 230714 - DNA, 25 bp, Probe Sequence
gagctgctgctgctgcagtgatgtc

SEQ ID NO: 230715 - DNA, 25 bp, Probe Sequence
gagctgtctctgacaaattctctcc

SEQ ID NO: 230716 - DNA, 25 bp, Probe Sequence
gagctggattaatttcctgtcacct

SEQ ID NO: 230717 - DNA, 25 bp, Probe Sequence
gagaaaaaacttccttccgatacag

SEQ ID NO: 230718 - DNA, 25 bp, Probe Sequence
gagggaaattttgagtcactggacc

SEQ ID NO: 230719 - DNA, 25 bp, Probe Sequence
gaggtttagtttacagtctctgaac

SEQ ID NO: 230720 - DNA, 25 bp, Probe Sequence
gagccttattggagtcatgttctca

SEQ ID NO: 230721 - DNA, 25 bp, Probe Sequence
gagccttccatggacggcaggctcc

SEQ ID NO: 230722 - DNA, 25 bp, Probe Sequence
gaccttcctcgcagagaggccaggt

SEQ ID NO: 230723 - DNA, 25 bp, Probe Sequence
gagaattcaccgagcgtgagcaagg

SEQ ID NO: 230724 - DNA, 25 bp, Probe Sequence
gagaattccggttagtggtatgtaa

SEQ ID NO: 230725 - DNA, 25 bp, Probe Sequence
gagcaacccggatcaggcggatgtg

SEQ ID NO: 230726 - DNA, 25 bp, Probe Sequence
gaccagggaggaaatggcggcagct

SEQ ID NO: 230727 - DNA, 25 bp, Probe Sequence
gaccatgtggggatagaggcgctgt

SEQ ID NO: 230728 - DNA, 25 bp, Probe Sequence
gaccattggagagctacagcagagt

SEQ ID NO: 230729 - DNA, 25 bp, Probe Sequence
gaccactgaagaattcaggcaggtg

SEQ ID NO: 230730 - DNA, 25 bp, Probe Sequence
gaccactgaagaattcaggcaggtg

SEQ ID NO: 230731 - DNA, 25 bp, Probe Sequence
gaccacgtgcatgtctatggcatgg

SEQ ID NO: 230732 - DNA, 25 bp, Probe Sequence
gagctacctcatctctagaagctgg

SEQ ID NO: 230733 - DNA, 25 bp, Probe Sequence
gagccaagccagatctacgagataa

SEQ ID NO: 230734 - DNA, 25 bp, Probe Sequence
gaccaagccattgtgagcgcagttg

SEQ ID NO: 230735 - DNA, 25 bp, Probe Sequence
gagccacagccatgatacaggcctc

SEQ ID NO: 230736 - DNA, 25 bp, Probe Sequence
gaccacggctaaaaatctcttcctg

SEQ ID NO: 230737 - DNA, 25 bp, Probe Sequence
gagcccggctgataaagcactttct

SEQ ID NO: 230738 - DNA, 25 bp, Probe Sequence
gagccaagagcttcaaattactcta

SEQ ID NO: 230739 - DNA, 25 bp, Probe Sequence
gagcctgcggcttaatttgactcaa

SEQ ID NO: 230740 - DNA, 25 bp, Probe Sequence
gaccatcggcatttctgtggatccg

SEQ ID NO: 230741 - DNA, 25 bp, Probe Sequence
gaccatcgatgccagcgtgtggatc

SEQ ID NO: 230742 - DNA, 25 bp, Probe Sequence
gaccatggcatcccagtgagtgtca

SEQ ID NO: 230743 - DNA, 25 bp, Probe Sequence
gaccatcctggccagcatggtgaaa

SEQ ID NO: 230744 - DNA, 25 bp, Probe Sequence
gaccagcctggctaatgtggcataa

SEQ ID NO: 230745 - DNA, 25 bp, Probe Sequence
gaccagccaggatatgctctcaatc

SEQ ID NO: 230746 - DNA, 25 bp, Probe Sequence
gaccactccagcgatatgttcaact

SEQ ID NO: 230747 - DNA, 25 bp, Probe Sequence
gaccactggatcgtcgacacagact

SEQ ID NO: 230748 - DNA, 25 bp, Probe Sequence
gaccagtcagatagtaaagagagct

SEQ ID NO: 230749 - DNA, 25 bp, Probe Sequence
gaccagcacgcaaggcaaaagcatt

SEQ ID NO: 230750 - DNA, 25 bp, Probe Sequence
gaccaacagcaactggataggccat

SEQ ID NO: 230751 - DNA, 25 bp, Probe Sequence
gaccacagactacttataggagcat

SEQ ID NO: 230752 - DNA, 25 bp, Probe Sequence
gagcgcactagttttaaagtcatta

SEQ ID NO: 230753 - DNA, 25 bp, Probe Sequence
gagccgtggttttaaggatcaaatc

SEQ ID NO: 230754 - DNA, 25 bp, Probe Sequence
gatccagtgttttaaaactgacacc

SEQ ID NO: 230755 - DNA, 25 bp, Probe Sequence
gaccagtttgtctaagtcctggctc

SEQ ID NO: 230756 - DNA, 25 bp, Probe Sequence
gaccactttgccaaagctctgggtg

SEQ ID NO: 230757 - DNA, 25 bp, Probe Sequence
gagcctatgtatgtcaagttggtgg

SEQ ID NO: 230758 - DNA, 25 bp, Probe Sequence
gagccattgtagatcatagaaggtc

SEQ ID NO: 230759 - DNA, 25 bp, Probe Sequence
gagctattgacaattcacaaacgta

SEQ ID NO: 230760 - DNA, 25 bp, Probe Sequence
gagcctttatgtggcaccaactgtg

SEQ ID NO: 230761 - DNA, 25 bp, Probe Sequence
gggatggtgacggaccaatttggaa

SEQ ID NO: 230762 - DNA, 25 bp, Probe Sequence
gagctggggactggacaatttgggg

SEQ ID NO: 230763 - DNA, 25 bp, Probe Sequence
gagccgagcggtgatcacttgaggt

SEQ ID NO: 230764 - DNA, 25 bp, Probe Sequence
gagccaatctgtgcagtctttagga

SEQ ID NO: 230765 - DNA, 25 bp, Probe Sequence
gaccaatcactggcatccattgtca

SEQ ID NO: 230766 - DNA, 25 bp, Probe Sequence
gagccaatcctgccagaaattcatt

SEQ ID NO: 230767 - DNA, 25 bp, Probe Sequence
gaccaggcctgaccaacatacatgg

SEQ ID NO: 230768 - DNA, 25 bp, Probe Sequence
gaccagagcccaagagaatccagga

SEQ ID NO: 230769 - DNA, 25 bp, Probe Sequence
gaccatgaggtcaggagattgagac

SEQ ID NO: 230770 - DNA, 25 bp, Probe Sequence
gagccaagtctcagcggattgcaaa

SEQ ID NO: 230771 - DNA, 25 bp, Probe Sequence
gagccaacctgcagcgagagagaag

SEQ ID NO: 230772 - DNA, 25 bp, Probe Sequence
gaccagaactgcacgcaagagtgcg

SEQ ID NO: 230773 - DNA, 25 bp, Probe Sequence
gagccaatgaacaggcatgcaagtg

SEQ ID NO: 230774 - DNA, 25 bp, Probe Sequence
gaccagaatagctgtggcacattgt

SEQ ID NO: 230775 - DNA, 25 bp, Probe Sequence
gaccatgactaactggagccattga

SEQ ID NO: 230776 - DNA, 25 bp, Probe Sequence
gaccatgatcccaggggatggcatc

SEQ ID NO: 230777 - DNA, 25 bp, Probe Sequence
gaccagtacatcaatgggcgtggat

SEQ ID NO: 230778 - DNA, 25 bp, Probe Sequence
gaccagctgaacatgttgggagaga

SEQ ID NO: 230779 - DNA, 25 bp, Probe Sequence
gaccatgtgaagacaaaggtagaga

SEQ ID NO: 230780 - DNA, 25 bp, Probe Sequence
gaccagtaaagccagattatagaag

SEQ ID NO: 230781 - DNA, 25 bp, Probe Sequence
gagccagattaacaggaatgaagaa

SEQ ID NO: 230782 - DNA, 25 bp, Probe Sequence
gaccagaatgaacagggctattact

SEQ ID NO: 230783 - DNA, 25 bp, Probe Sequence
gaccagggagactatgggactgtga

SEQ ID NO: 230784 - DNA, 25 bp, Probe Sequence
gagccgcgcgagatatggcccgcgc

SEQ ID NO: 230785 - DNA, 25 bp, Probe Sequence
gagcctcgtgagaggtcaccgggat

SEQ ID NO: 230786 - DNA, 25 bp, Probe Sequence
gaccaccagatgagggaccagagcg

SEQ ID NO: 230787 - DNA, 25 bp, Probe Sequence
gaccaccgtgttggtgcagagcacc

SEQ ID NO: 230788 - DNA, 25 bp, Probe Sequence
gaccatctaggttaagcaagagcac

SEQ ID NO: 230789 - DNA, 25 bp, Probe Sequence
gaccatcggcaggaaacacagcagc

SEQ ID NO: 230790 - DNA, 25 bp, Probe Sequence
gaccactgaggagaccatagagcgg

SEQ ID NO: 230791 - DNA, 25 bp, Probe Sequence
gaccactgaggagaccatagagcgg

SEQ ID NO: 230792 - DNA, 25 bp, Probe Sequence
gagccacaagaagagccggagaggg

SEQ ID NO: 230793 - DNA, 25 bp, Probe Sequence
gaccacactcaactactgcgtatgg

SEQ ID NO: 230794 - DNA, 25 bp, Probe Sequence
gaccacactcaactactgcgtatgg

SEQ ID NO: 230795 - DNA, 25 bp, Probe Sequence
gaccacactcaactactgcgtatgg

SEQ ID NO: 230796 - DNA, 25 bp, Probe Sequence
gaccacagtgggacactggtcatgg

SEQ ID NO: 230797 - DNA, 25 bp, Probe Sequence
gaccagcgtttgccagtggatatga

SEQ ID NO: 230798 - DNA, 25 bp, Probe Sequence
gagacgtgattaccgggttgggcgg

SEQ ID NO: 230799 - DNA, 25 bp, Probe Sequence
gagccccatctaaccgggtgaaggg

SEQ ID NO: 230800 - DNA, 25 bp, Probe Sequence
gagtccgacaaccattggggtgggg

SEQ ID NO: 230801 - DNA, 25 bp, Probe Sequence
gagccctacaaggagtggagtgctg

SEQ ID NO: 230802 - DNA, 25 bp, Probe Sequence
gagcctccctcaacaggaggcgcag

SEQ ID NO: 230803 - DNA, 25 bp, Probe Sequence
gagcctgcctcttgaagagggggtt

SEQ ID NO: 230804 - DNA, 25 bp, Probe Sequence
gagccagtcactggtgagggggggt

SEQ ID NO: 230805 - DNA, 25 bp, Probe Sequence
gaccagacagatgggggctgggccc

SEQ ID NO: 230806 - DNA, 25 bp, Probe Sequence
gaccaacagagactgcggcgagtgt

SEQ ID NO: 230807 - DNA, 25 bp, Probe Sequence
gaccagtcacagattcaggagttca

SEQ ID NO: 230808 - DNA, 25 bp, Probe Sequence
gagcggataaattcttggcgcttct

SEQ ID NO: 230809 - DNA, 25 bp, Probe Sequence
gagctcgacaaaatttactcacatt

SEQ ID NO: 230810 - DNA, 25 bp, Probe Sequence
gagccgagaagattattcaatccag

SEQ ID NO: 230811 - DNA, 25 bp, Probe Sequence
gagccaggagcgttatcaacgcaag

SEQ ID NO: 230812 - DNA, 25 bp, Probe Sequence
gagccaaactgactatatctccaga

SEQ ID NO: 230813 - DNA, 25 bp, Probe Sequence
gagccaaactgactatatctccaga

SEQ ID NO: 230814 - DNA, 25 bp, Probe Sequence
gaccagagccaaattatcccaagag

SEQ ID NO: 230815 - DNA, 25 bp, Probe Sequence
gaccagcagcctatagacaaggaga

SEQ ID NO: 230816 - DNA, 25 bp, Probe Sequence
gaccagcaggtgtttgaaaggcatg

SEQ ID NO: 230817 - DNA, 25 bp, Probe Sequence
gaccagcaggtgtttgaaaggcatg

SEQ ID NO: 230818 - DNA, 25 bp, Probe Sequence
gagccagcgttgttttgaaggtact

SEQ ID NO: 230819 - DNA, 25 bp, Probe Sequence
gagccacggcttcttgtggttactg

SEQ ID NO: 230820 - DNA, 25 bp, Probe Sequence
gagccacggcttcttgtggttactg

SEQ ID NO: 230821 - DNA, 25 bp, Probe Sequence
gagccccagttttctgggcttagtt

SEQ ID NO: 230822 - DNA, 25 bp, Probe Sequence
gagccctcaattcatagaggttact

SEQ ID NO: 230823 - DNA, 25 bp, Probe Sequence
gagccaccagaaaaagagtttacgc

SEQ ID NO: 230824 - DNA, 25 bp, Probe Sequence
gagccagccaaaatagaagctttcc

SEQ ID NO: 230825 - DNA, 25 bp, Probe Sequence
gagccttcaaacttgtagttatcct

SEQ ID NO: 230826 - DNA, 25 bp, Probe Sequence
gagccactaaacttgttttacctag

SEQ ID NO: 230827 - DNA, 25 bp, Probe Sequence
gagccacgaaatgctgttattcctc

SEQ ID NO: 230828 - DNA, 25 bp, Probe Sequence
gaccacataattattctattcctcc

SEQ ID NO: 230829 - DNA, 25 bp, Probe Sequence
gagctaatattactctttttccgcc

SEQ ID NO: 230830 - DNA, 25 bp, Probe Sequence
gagctcagaagttttcctttacacc

SEQ ID NO: 230831 - DNA, 25 bp, Probe Sequence
gaccagaagtttgccatctacatcc

SEQ ID NO: 230832 - DNA, 25 bp, Probe Sequence
gagccgaaattgtgccacttcactc

SEQ ID NO: 230833 - DNA, 25 bp, Probe Sequence
gagcagtaaatcaatggaacatccc

SEQ ID NO: 230834 - DNA, 25 bp, Probe Sequence
gagcctaaaatacgaacacccagga

SEQ ID NO: 230835 - DNA, 25 bp, Probe Sequence
gagctgcttatacgaaaacccacat

SEQ ID NO: 230836 - DNA, 25 bp, Probe Sequence
gagcttgaaaggaaaatcacctatg

SEQ ID NO: 230837 - DNA, 25 bp, Probe Sequence
gagcctgaaccacaggtaccagatg

SEQ ID NO: 230838 - DNA, 25 bp, Probe Sequence
gagtcaatccctcagtaagtcagtg

SEQ ID NO: 230839 - DNA, 25 bp, Probe Sequence
gaccagactctttacttgcagtagg

SEQ ID NO: 230840 - DNA, 25 bp, Probe Sequence
gaccatgttcattataatctcaaag

SEQ ID NO: 230841 - DNA, 25 bp, Probe Sequence
gaccagtgtcatccatttaggtagc

SEQ ID NO: 230842 - DNA, 25 bp, Probe Sequence
gaccaatgctccaatatgtatgtga

SEQ ID NO: 230843 - DNA, 25 bp, Probe Sequence
gaccacatggatgatatggatgatg

SEQ ID NO: 230844 - DNA, 25 bp, Probe Sequence
gaccagagtgttaatgagatgttat

SEQ ID NO: 230845 - DNA, 25 bp, Probe Sequence
gaccagtcatgtactataatgcttt

SEQ ID NO: 230846 - DNA, 25 bp, Probe Sequence
gaccagtctggtcaacatggcaaaa

SEQ ID NO: 230847 - DNA, 25 bp, Probe Sequence
gaccagcctggacaacatagtaata

SEQ ID NO: 230848 - DNA, 25 bp, Probe Sequence
gaccagcttggcccataaggtgaaa

SEQ ID NO: 230849 - DNA, 25 bp, Probe Sequence
gaccagcctggccaataaggtgaaa

SEQ ID NO: 230850 - DNA, 25 bp, Probe Sequence
gaccagcctggccaacatggtgaaa

SEQ ID NO: 230851 - DNA, 25 bp, Probe Sequence
gagccaccgagcgagcagctcggtc

SEQ ID NO: 230852 - DNA, 25 bp, Probe Sequence
gagccacaggggaagtgcggtacca

SEQ ID NO: 230853 - DNA, 25 bp, Probe Sequence
gagcccaggaggtggaggtttcagc

SEQ ID NO: 230854 - DNA, 25 bp, Probe Sequence
gagcccaggagttcaaagctgtagt

SEQ ID NO: 230855 - DNA, 25 bp, Probe Sequence
gagcctaggaggtcacagctgcgat

SEQ ID NO: 230856 - DNA, 25 bp, Probe Sequence
gagccatgtaagcacgcagtgggtg

SEQ ID NO: 230857 - DNA, 25 bp, Probe Sequence
gagccagttcagtacctggaggagg

SEQ ID NO: 230858 - DNA, 25 bp, Probe Sequence
gagccagttcagtacctggaggagg

SEQ ID NO: 230859 - DNA, 25 bp, Probe Sequence
gagcgcaagtactccgtgtggatcg

SEQ ID NO: 230860 - DNA, 25 bp, Probe Sequence
gagcgttaggagacgcgggcgacgc

SEQ ID NO: 230861 - DNA, 25 bp, Probe Sequence
gagctgttgaggtacttgctgggac

SEQ ID NO: 230862 - DNA, 25 bp, Probe Sequence
gagctctttgaggatctgttaaggc

SEQ ID NO: 230863 - DNA, 25 bp, Probe Sequence
gagctgtacgggaagtctcactggc

SEQ ID NO: 230864 - DNA, 25 bp, Probe Sequence
gagcctacctggaagacacatgcgt

SEQ ID NO: 230865 - DNA, 25 bp, Probe Sequence
gagccaaagtggaatgaactcattc

SEQ ID NO: 230866 - DNA, 25 bp, Probe Sequence
gaccacagtatgctgaaattcttgc

SEQ ID NO: 230867 - DNA, 25 bp, Probe Sequence
gaccactgtatgtttacttctcacc

SEQ ID NO: 230868 - DNA, 25 bp, Probe Sequence
gaccagcttcatttgtcagctttgc

SEQ ID NO: 230869 - DNA, 25 bp, Probe Sequence
gagccagattcagagtaatcttgac

SEQ ID NO: 230870 - DNA, 25 bp, Probe Sequence
gagccagagtgccaggaacactgtg

SEQ ID NO: 230871 - DNA, 25 bp, Probe Sequence
gaccacaatgccagcatggactttg

SEQ ID NO: 230872 - DNA, 25 bp, Probe Sequence
gagcccaagcacacatgcatggcat

SEQ ID NO: 230873 - DNA, 25 bp, Probe Sequence
gagccctgagagaccagttctttta

SEQ ID NO: 230874 - DNA, 25 bp, Probe Sequence
gagcctaaggaccattctagattta

SEQ ID NO: 230875 - DNA, 25 bp, Probe Sequence
gagcctattccaagagtctggttta

SEQ ID NO: 230876 - DNA, 25 bp, Probe Sequence
gagccacttaacagctctgggtccc

SEQ ID NO: 230877 - DNA, 25 bp, Probe Sequence
gagcctcagtaaacccatggaacac

SEQ ID NO: 230878 - DNA, 25 bp, Probe Sequence
gaccaagtggaaggcgatgcacaac

SEQ ID NO: 230879 - DNA, 25 bp, Probe Sequence
gaccagacagtcaaggtgatcaacc

SEQ ID NO: 230880 - DNA, 25 bp, Probe Sequence
gaccagacagtcaaggtgatcaacc

SEQ ID NO: 230881 - DNA, 25 bp, Probe Sequence
gagccatacattaaggatgagctat

SEQ ID NO: 230882 - DNA, 25 bp, Probe Sequence
gaccacatctctacaggatacatta

SEQ ID NO: 230883 - DNA, 25 bp, Probe Sequence
gagccactcaccaaggatgacatcc

SEQ ID NO: 230884 - DNA, 25 bp, Probe Sequence
gagccagatggcaagagggtgacag

SEQ ID NO: 230885 - DNA, 25 bp, Probe Sequence
gagccagcaggtgcaagcttcaagg

SEQ ID NO: 230886 - DNA, 25 bp, Probe Sequence
gagccacattgaacacaattgaatg

SEQ ID NO: 230887 - DNA, 25 bp, Probe Sequence
gaccaagtgacagcaatgctgtttc

SEQ ID NO: 230888 - DNA, 25 bp, Probe Sequence
gagccacaataagccactggtatct

SEQ ID NO: 230889 - DNA, 25 bp, Probe Sequence
gagcccagtgacaccatcgagaatg

SEQ ID NO: 230890 - DNA, 25 bp, Probe Sequence
gagcccagtgacaccatcgagaatg

SEQ ID NO: 230891 - DNA, 25 bp, Probe Sequence
gagcggaggaacgccgagcagtaca

SEQ ID NO: 230892 - DNA, 25 bp, Probe Sequence
gagccagggctgtgcacctggcagt

SEQ ID NO: 230893 - DNA, 25 bp, Probe Sequence
gagccactatggaacaccatgccaa

SEQ ID NO: 230894 - DNA, 25 bp, Probe Sequence
gagccgcctggataccgcagctagg

SEQ ID NO: 230895 - DNA, 25 bp, Probe Sequence
gatgcctgtcggcacttctgaaagg

SEQ ID NO: 230896 - DNA, 25 bp, Probe Sequence
gagccgcatggctgtttcgaaagag

SEQ ID NO: 230897 - DNA, 25 bp, Probe Sequence
gagccctggattaaggcaaaatgag

SEQ ID NO: 230898 - DNA, 25 bp, Probe Sequence
gagcccggatgtggtacaatttcag

SEQ ID NO: 230899 - DNA, 25 bp, Probe Sequence
gagcctgcagggccagtagttatcc

SEQ ID NO: 230900 - DNA, 25 bp, Probe Sequence
gagccgcagatgcaagttcttgagc

SEQ ID NO: 230901 - DNA, 25 bp, Probe Sequence
gagccatgcgattgattgttcatct

SEQ ID NO: 230902 - DNA, 25 bp, Probe Sequence
gaccacagtatgtcgcaggcattac

SEQ ID NO: 230903 - DNA, 25 bp, Probe Sequence
gaccactttgtcaagctcatttcct

SEQ ID NO: 230904 - DNA, 25 bp, Probe Sequence
gaccactctagccacagtatattgc

SEQ ID NO: 230905 - DNA, 25 bp, Probe Sequence
gaccaacatatctcatgaatattcg

SEQ ID NO: 230906 - DNA, 25 bp, Probe Sequence
gagccaacaatgtaagctaatgggc

SEQ ID NO: 230907 - DNA, 25 bp, Probe Sequence
gagccaacaatctagacttctctga

SEQ ID NO: 230908 - DNA, 25 bp, Probe Sequence
gagccaggcattaaacattttgcat

SEQ ID NO: 230909 - DNA, 25 bp, Probe Sequence
gagcctgtgctcaaagccatgtttt

SEQ ID NO: 230910 - DNA, 25 bp, Probe Sequence
gagcctggacactaacaattctaca

SEQ ID NO: 230911 - DNA, 25 bp, Probe Sequence
gagcgcgcgcgagaaaatctctcag

SEQ ID NO: 230912 - DNA, 25 bp, Probe Sequence
gagcggcagcgaaaaattcgacagc

SEQ ID NO: 230913 - DNA, 25 bp, Probe Sequence
gagcgtaggtaatgttctgtgagtt

SEQ ID NO: 230914 - DNA, 25 bp, Probe Sequence
gagcagtctggggacggtttggtca

SEQ ID NO: 230915 - DNA, 25 bp, Probe Sequence
gagaatctggagttctggttggctt

SEQ ID NO: 230916 - DNA, 25 bp, Probe Sequence
gagctatctggcaccttttgtgctc

SEQ ID NO: 230917 - DNA, 25 bp, Probe Sequence
gagccattggatctttatttttgat

SEQ ID NO: 230918 - DNA, 25 bp, Probe Sequence
gagccttcaatgttgaattttttct

SEQ ID NO: 230919 - DNA, 25 bp, Probe Sequence
gagctcttgggacgaaagtaattgg

SEQ ID NO: 230920 - DNA, 25 bp, Probe Sequence
gagctttcgaggaaggagtacttac

SEQ ID NO: 230921 - DNA, 25 bp, Probe Sequence
gagctcattcgacagttaaagccat

SEQ ID NO: 230922 - DNA, 25 bp, Probe Sequence
gagctactaggatgtcttccagcct

SEQ ID NO: 230923 - DNA, 25 bp, Probe Sequence
gagcttctaatgagatgcacccctt

SEQ ID NO: 230924 - DNA, 25 bp, Probe Sequence
gagccagtatacagtaccatcctct

SEQ ID NO: 230925 - DNA, 25 bp, Probe Sequence
gagctcagttcaaggcgaaccaccc

SEQ ID NO: 230926 - DNA, 25 bp, Probe Sequence
gagctcgttttagtgaaccgtcaga

SEQ ID NO: 230927 - DNA, 25 bp, Probe Sequence
gagctcgtttagtgaaccgtcagat

SEQ ID NO: 230928 - DNA, 25 bp, Probe Sequence
gagctcgtttagtgaaccgtcagat

SEQ ID NO: 230929 - DNA, 25 bp, Probe Sequence
gagctcgtttagtgaaccgtcagat

SEQ ID NO: 230930 - DNA, 25 bp, Probe Sequence
gagctcgtttagtgaaccgtcagat

SEQ ID NO: 230931 - DNA, 25 bp, Probe Sequence
gagctcgtttagtgaaccgtcagat

SEQ ID NO: 230932 - DNA, 25 bp, Probe Sequence
gagctcgtttagtgaaccgtcagat

SEQ ID NO: 230933 - DNA, 25 bp, Probe Sequence
gagctcgtttagtgaaccgtcagat

SEQ ID NO: 230934 - DNA, 25 bp, Probe Sequence
gagctcgtttagtgaaccgtcagat

SEQ ID NO: 230935 - DNA, 25 bp, Probe Sequence
gagctcgtttagtgaaccgtcagat

SEQ ID NO: 230936 - DNA, 25 bp, Probe Sequence
gagctcgtttagtgaaccgtcagat

SEQ ID NO: 230937 - DNA, 25 bp, Probe Sequence
gagctcgtttagtgaaccgtcagat

SEQ ID NO: 230938 - DNA, 25 bp, Probe Sequence
gagctcgtttagtgaaccgtcagat

SEQ ID NO: 230939 - DNA, 25 bp, Probe Sequence
gagctcgtttagtgaaccgtcagat

SEQ ID NO: 230940 - DNA, 25 bp, Probe Sequence
gagctcgtttagtgaaccgtcagat

SEQ ID NO: 230941 - DNA, 25 bp, Probe Sequence
gagctcgtttagtgaaccgtcagat

SEQ ID NO: 230942 - DNA, 25 bp, Probe Sequence
gagctcgtttagtgaaccgtcagat

SEQ ID NO: 230943 - DNA, 25 bp, Probe Sequence
gagctcgtttagtgaaccgtcagat

SEQ ID NO: 230944 - DNA, 25 bp, Probe Sequence
gagctcgtttagtgaaccgtcagat

SEQ ID NO: 230945 - DNA, 25 bp, Probe Sequence
gagctcgtttagtgaaccgtcagat

SEQ ID NO: 230946 - DNA, 25 bp, Probe Sequence
gagctggctttctggaagcctacgt

SEQ ID NO: 230947 - DNA, 25 bp, Probe Sequence
gagctggcgttagagacgattacaa

SEQ ID NO: 230948 - DNA, 25 bp, Probe Sequence
gagctgtgcagttttagcgggtaca

SEQ ID NO: 230949 - DNA, 25 bp, Probe Sequence
gagcttgaattttaagggattccct

SEQ ID NO: 230950 - DNA, 25 bp, Probe Sequence
gagcttgtgtctaaagggtaattcc

SEQ ID NO: 230951 - DNA, 25 bp, Probe Sequence
gagcgggctcgaagaaaataattct

SEQ ID NO: 230952 - DNA, 25 bp, Probe Sequence
gagcttggtggaagaagtcgccttt

SEQ ID NO: 230953 - DNA, 25 bp, Probe Sequence
gagcttggtggaagaagtcgccttt

SEQ ID NO: 230954 - DNA, 25 bp, Probe Sequence
gagcctgggaatggagagccactct

SEQ ID NO: 230955 - DNA, 25 bp, Probe Sequence
gagccttatagtggcagtgcgtgcc

SEQ ID NO: 230956 - DNA, 25 bp, Probe Sequence
gagcttattatttcctgtggccagt

SEQ ID NO: 230957 - DNA, 25 bp, Probe Sequence
gagctttttgctgtgattgcgcacg

SEQ ID NO: 230958 - DNA, 25 bp, Probe Sequence
gagcttatatgcccctatttggcga

SEQ ID NO: 230959 - DNA, 25 bp, Probe Sequence
gagcttgaagctcgacgtcattcag

SEQ ID NO: 230960 - DNA, 25 bp, Probe Sequence
gagctgtagagaggcctgcctccag

SEQ ID NO: 230961 - DNA, 25 bp, Probe Sequence
gagctggggaggttcatgctacgtt

SEQ ID NO: 230962 - DNA, 25 bp, Probe Sequence
gagctggggaggttcatgctacgtt

SEQ ID NO: 230963 - DNA, 25 bp, Probe Sequence
gagctgggtagcaccatttctttca

SEQ ID NO: 230964 - DNA, 25 bp, Probe Sequence
gagctggaaagcagccgtttctcct

SEQ ID NO: 230965 - DNA, 25 bp, Probe Sequence
gagctgggaacttggtgttgccccc

SEQ ID NO: 230966 - DNA, 25 bp, Probe Sequence
gagctggcgaccaagagattccagg

SEQ ID NO: 230967 - DNA, 25 bp, Probe Sequence
gagctcggcacaacgaactctgaag

SEQ ID NO: 230968 - DNA, 25 bp, Probe Sequence
gaccaagcagatcaaacctgacatg

SEQ ID NO: 230969 - DNA, 25 bp, Probe Sequence
gaccacagcaaatgacccaagcatg

SEQ ID NO: 230970 - DNA, 25 bp, Probe Sequence
gaccacatcgagttacaacaataga

SEQ ID NO: 230971 - DNA, 25 bp, Probe Sequence
gagccactaatgtaagatacagaaa

SEQ ID NO: 230972 - DNA, 25 bp, Probe Sequence
gagcccaaagagagcaacggcacaa

SEQ ID NO: 230973 - DNA, 25 bp, Probe Sequence
gagcttaaagatccaaactgagaaa

SEQ ID NO: 230974 - DNA, 25 bp, Probe Sequence
gagcttattagtcatagtaaacata

SEQ ID NO: 230975 - DNA, 25 bp, Probe Sequence
gagcagtttttgcaagaaaggatca

SEQ ID NO: 230976 - DNA, 25 bp, Probe Sequence
gagcagtttttgcaagaaaggatca

SEQ ID NO: 230977 - DNA, 25 bp, Probe Sequence
gagcaggtttgggaacacagaggga

SEQ ID NO: 230978 - DNA, 25 bp, Probe Sequence
gagcatgttctcgccaacaatgatg

SEQ ID NO: 230979 - DNA, 25 bp, Probe Sequence
gagccatgtcacacaaactgatgat

SEQ ID NO: 230980 - DNA, 25 bp, Probe Sequence
gagccagctcaaagcatgtttggct

SEQ ID NO: 230981 - DNA, 25 bp, Probe Sequence
gagcctgctagactgagtgactgca

SEQ ID NO: 230982 - DNA, 25 bp, Probe Sequence
gagctgcgcaagctggaagctgcag

SEQ ID NO: 230983 - DNA, 25 bp, Probe Sequence
gagcagctatagagagagcaccagc

SEQ ID NO: 230984 - DNA, 25 bp, Probe Sequence
gagcctatcagagttgctgcaaacc

SEQ ID NO: 230985 - DNA, 25 bp, Probe Sequence
gagcctaagagttcgagaccagccc

SEQ ID NO: 230986 - DNA, 25 bp, Probe Sequence
gagccaacagagtaagaatcacacg

SEQ ID NO: 230987 - DNA, 25 bp, Probe Sequence
gagcctccaggaggaactcaagagg

SEQ ID NO: 230988 - DNA, 25 bp, Probe Sequence
gagccttcccattgaattgaagggg

SEQ ID NO: 230989 - DNA, 25 bp, Probe Sequence
gagcctcctcagtgaaggtggtggg

SEQ ID NO: 230990 - DNA, 25 bp, Probe Sequence
gagccacttatatgtatgggactgg

SEQ ID NO: 230991 - DNA, 25 bp, Probe Sequence
gagctccttaaatatggatgaggtc

SEQ ID NO: 230992 - DNA, 25 bp, Probe Sequence
gagctccttgcaagaactttaccac

SEQ ID NO: 230993 - DNA, 25 bp, Probe Sequence
gagctggttgaatactttgaaaaat

SEQ ID NO: 230994 - DNA, 25 bp, Probe Sequence
gagcatttccgattactttggaaaa

SEQ ID NO: 230995 - DNA, 25 bp, Probe Sequence
gagcgttccagacagctctgtggtt

SEQ ID NO: 230996 - DNA, 25 bp, Probe Sequence
gagcctcattcaggtatgctggggt

SEQ ID NO: 230997 - DNA, 25 bp, Probe Sequence
gagccgctacatactcatcatgggg

SEQ ID NO: 230998 - DNA, 25 bp, Probe Sequence
gagcctgccaagatcacagatgttg

SEQ ID NO: 230999 - DNA, 25 bp, Probe Sequence
gagcctgagaataaatggtgcctgc

SEQ ID NO: 231000 - DNA, 25 bp, Probe Sequence
gagccatggcaaagaatggacttgt

SEQ ID NO: 231001 - DNA, 25 bp, Probe Sequence
gagccggaagggtgactgtgtgcct

SEQ ID NO: 231002 - DNA, 25 bp, Probe Sequence
gagcctgggaggcggaagttgcagt

SEQ ID NO: 231003 - DNA, 25 bp, Probe Sequence
gagcctgggaggcggaggttgcagt

SEQ ID NO: 231004 - DNA, 25 bp, Probe Sequence
gagcctgcaggcaggtgggggctgc

SEQ ID NO: 231005 - DNA, 25 bp, Probe Sequence
gagccgcaagcggagttggtgggcg

SEQ ID NO: 231006 - DNA, 25 bp, Probe Sequence
gagcttccagcagcggtatgttggg

SEQ ID NO: 231007 - DNA, 25 bp, Probe Sequence
gagctgctcaccatgtggtttgggg

SEQ ID NO: 231008 - DNA, 25 bp, Probe Sequence
gagcctgagtgggtggtttgcgagg

SEQ ID NO: 231009 - DNA, 25 bp, Probe Sequence
gagccgctgtggacaggtttctggc

SEQ ID NO: 231010 - DNA, 25 bp, Probe Sequence
gagccgctgtggcagcgtatgctgc

SEQ ID NO: 231011 - DNA, 25 bp, Probe Sequence
gagcgcgtgctgaagagtgtggctg

SEQ ID NO: 231012 - DNA, 25 bp, Probe Sequence
gagctggttgtgggtgtgagtgggg

SEQ ID NO: 231013 - DNA, 25 bp, Probe Sequence
gagccaatttggctgatcttgggtg

SEQ ID NO: 231014 - DNA, 25 bp, Probe Sequence
gagccaatttatccatctgggtggt

SEQ ID NO: 231015 - DNA, 25 bp, Probe Sequence
gagcccattgttctcatgggggttt

SEQ ID NO: 231016 - DNA, 25 bp, Probe Sequence
gagcccatttctcactggagaggaa

SEQ ID NO: 231017 - DNA, 25 bp, Probe Sequence
gagcccatcttggctgacggggcta

SEQ ID NO: 231018 - DNA, 25 bp, Probe Sequence
gagcctcttctgccaagagagggcc

SEQ ID NO: 231019 - DNA, 25 bp, Probe Sequence
gagcctcatctgcaatgtaggggcc

SEQ ID NO: 231020 - DNA, 25 bp, Probe Sequence
gagcctactgaggatgtggggccca

SEQ ID NO: 231021 - DNA, 25 bp, Probe Sequence
gaccaacatgcacgagatgggagcg

SEQ ID NO: 231022 - DNA, 25 bp, Probe Sequence
gagccagaagactgattggagggcc

SEQ ID NO: 231023 - DNA, 25 bp, Probe Sequence
gagcctgggcaggacactccagggc

SEQ ID NO: 231024 - DNA, 25 bp, Probe Sequence
gagcctggatgcagaagtcgcacaa

SEQ ID NO: 231025 - DNA, 25 bp, Probe Sequence
gagcttgcagagatgaaggccgcca

SEQ ID NO: 231026 - DNA, 25 bp, Probe Sequence
gagcgtgggcaacgaggccgagatc

SEQ ID NO: 231027 - DNA, 25 bp, Probe Sequence
gagcgtggctatgacaaggtagaca

SEQ ID NO: 231028 - DNA, 25 bp, Probe Sequence
gagcgaggtgtattccatggacatg

SEQ ID NO: 231029 - DNA, 25 bp, Probe Sequence
gagccatggtgtgtttgtaataata

SEQ ID NO: 231030 - DNA, 25 bp, Probe Sequence
gagctagtggatgtgtttgtctaca

SEQ ID NO: 231031 - DNA, 25 bp, Probe Sequence
gagctggatggtatcccgttgatcc

SEQ ID NO: 231032 - DNA, 25 bp, Probe Sequence
gagctgagggacaccatcctagact

SEQ ID NO: 231033 - DNA, 25 bp, Probe Sequence
gagctgagggacaccatcctagact

SEQ ID NO: 231034 - DNA, 25 bp, Probe Sequence
gagctcgggaagtcgaggctacagt

SEQ ID NO: 231035 - DNA, 25 bp, Probe Sequence
gagccgggagacgaaggttgcagat

SEQ ID NO: 231036 - DNA, 25 bp, Probe Sequence
gagcctaggagatggaagttgcagt

SEQ ID NO: 231037 - DNA, 25 bp, Probe Sequence
gaccaacgcagctggcaagcgggat

SEQ ID NO: 231038 - DNA, 25 bp, Probe Sequence
gagcacataaaatgccaaggggtgt

SEQ ID NO: 231039 - DNA, 25 bp, Probe Sequence
gagcctcaagaacccaacaaggtgc

SEQ ID NO: 231040 - DNA, 25 bp, Probe Sequence
gagccaaggaagccgcagaacagga

SEQ ID NO: 231041 - DNA, 25 bp, Probe Sequence
gagccacaggaagttacagacacaa

SEQ ID NO: 231042 - DNA, 25 bp, Probe Sequence
gagcccatggacgttgacaaaggac

SEQ ID NO: 231043 - DNA, 25 bp, Probe Sequence
gagacttcggcggaccattaggaat

SEQ ID NO: 231044 - DNA, 25 bp, Probe Sequence
gagcgcggggcagacgcaaagtgaa

SEQ ID NO: 231045 - DNA, 25 bp, Probe Sequence
gagcgggcaggggactcagaggctc

SEQ ID NO: 231046 - DNA, 25 bp, Probe Sequence
gagccccatggacacacagatggct

SEQ ID NO: 231047 - DNA, 25 bp, Probe Sequence
gagccggttgcagctaagaggccgg

SEQ ID NO: 231048 - DNA, 25 bp, Probe Sequence
gagccagactctgttcaaaggcgca

SEQ ID NO: 231049 - DNA, 25 bp, Probe Sequence
gagctgaccctcaaatacggagcga

SEQ ID NO: 231050 - DNA, 25 bp, Probe Sequence
gagcggacctcggatggggagagac

SEQ ID NO: 231051 - DNA, 25 bp, Probe Sequence
gagcggcagctcagcaagtggtgga

SEQ ID NO: 231052 - DNA, 25 bp, Probe Sequence
gagccacctgcagcaatggtatctg

SEQ ID NO: 231053 - DNA, 25 bp, Probe Sequence
gagccacattgtccagatgtgtaca

SEQ ID NO: 231054 - DNA, 25 bp, Probe Sequence
gagccacaatgaatcaacgtagcca

SEQ ID NO: 231055 - DNA, 25 bp, Probe Sequence
gagccaaacatcctacaagacacag

SEQ ID NO: 231056 - DNA, 25 bp, Probe Sequence
gagctaaagtccaagagaggatccg

SEQ ID NO: 231057 - DNA, 25 bp, Probe Sequence
gagctgagacagataagagaatacc

SEQ ID NO: 231058 - DNA, 25 bp, Probe Sequence
gagctgcaatctcatcactggaatg

SEQ ID NO: 231059 - DNA, 25 bp, Probe Sequence
gagctgcactgtgacaagctgcacg

SEQ ID NO: 231060 - DNA, 25 bp, Probe Sequence
gagccaatgatggacattcagactc

SEQ ID NO: 231061 - DNA, 25 bp, Probe Sequence
gagcgcatgtatgacgtgacaccgc

SEQ ID NO: 231062 - DNA, 25 bp, Probe Sequence
gagctcattaggtcgatgacagcat

SEQ ID NO: 231063 - DNA, 25 bp, Probe Sequence
gagccttgtggtggctgtacaggac

SEQ ID NO: 231064 - DNA, 25 bp, Probe Sequence
gagcccttgaacctgtcatcgggct

SEQ ID NO: 231065 - DNA, 25 bp, Probe Sequence
gagccctacaaggtgtatcagttgc

SEQ ID NO: 231066 - DNA, 25 bp, Probe Sequence
gagcctcctgaaggtggaagctatg

SEQ ID NO: 231067 - DNA, 25 bp, Probe Sequence
gagcatctgaccacttggaagttgt

SEQ ID NO: 231068 - DNA, 25 bp, Probe Sequence
gagcctacctcaggtctgagagtct

SEQ ID NO: 231069 - DNA, 25 bp, Probe Sequence
gagcgtttccatgtgctaatgttgc

SEQ ID NO: 231070 - DNA, 25 bp, Probe Sequence
gagctgttccctgggtagagctagc

SEQ ID NO: 231071 - DNA, 25 bp, Probe Sequence
gagccctaagcatgtgttgatctac

SEQ ID NO: 231072 - DNA, 25 bp, Probe Sequence
gagccattgtgggggtcgatcatga

SEQ ID NO: 231073 - DNA, 25 bp, Probe Sequence
gagccagcttggggtaggaagttaa

SEQ ID NO: 231074 - DNA, 25 bp, Probe Sequence
gagccagtgtggttgtagagattgt

SEQ ID NO: 231075 - DNA, 25 bp, Probe Sequence
gagccatgtggtctggcagatgact

SEQ ID NO: 231076 - DNA, 25 bp, Probe Sequence
gagcctgccaggtgtcaatgacttt

SEQ ID NO: 231077 - DNA, 25 bp, Probe Sequence
gagccttgattgtgtcactgcactc

SEQ ID NO: 231078 - DNA, 25 bp, Probe Sequence
gagcttagatttttgcatcagccct

SEQ ID NO: 231079 - DNA, 25 bp, Probe Sequence
gagcttcaaacagcgctctgacctc

SEQ ID NO: 231080 - DNA, 25 bp, Probe Sequence
gagcctcaacatttcctagagcctt

SEQ ID NO: 231081 - DNA, 25 bp, Probe Sequence
gagccctagatgttcctggaagttg

SEQ ID NO: 231082 - DNA, 25 bp, Probe Sequence
gagcctctgctgaattggatgaaag

SEQ ID NO: 231083 - DNA, 25 bp, Probe Sequence
gagctgcagctgagtatgggaaatg

SEQ ID NO: 231084 - DNA, 25 bp, Probe Sequence
gagctcattgatgagatgcggaaga

SEQ ID NO: 231085 - DNA, 25 bp, Probe Sequence
gagctatttgcattcatcagtcaca

SEQ ID NO: 231086 - DNA, 25 bp, Probe Sequence
gagctgatgctattgtacttgcaca

SEQ ID NO: 231087 - DNA, 25 bp, Probe Sequence
gagctcatcgatatcagcatcgcac

SEQ ID NO: 231088 - DNA, 25 bp, Probe Sequence
gagcgcatgcgtacagagcaaggtt

SEQ ID NO: 231089 - DNA, 25 bp, Probe Sequence
gagcgctgcgtcatcagctaggagc

SEQ ID NO: 231090 - DNA, 25 bp, Probe Sequence
gagcgatgcgacaggcatgatggag

SEQ ID NO: 231091 - DNA, 25 bp, Probe Sequence
gagctaggtctactgatatacaata

SEQ ID NO: 231092 - DNA, 25 bp, Probe Sequence
gagctacgccttgatgaaagaaccg

SEQ ID NO: 231093 - DNA, 25 bp, Probe Sequence
gagctacctattggcataaaagaat

SEQ ID NO: 231094 - DNA, 25 bp, Probe Sequence
gagctgtcacttccgagtaaatgaa

SEQ ID NO: 231095 - DNA, 25 bp, Probe Sequence
gagcgtggttccgagttgagacaaa

SEQ ID NO: 231096 - DNA, 25 bp, Probe Sequence
gagcgtggttccgagttgagacaaa

SEQ ID NO: 231097 - DNA, 25 bp, Probe Sequence
gagctgggcttcagcaggtgtgact

SEQ ID NO: 231098 - DNA, 25 bp, Probe Sequence
gagctgggtctttggatatttggtt

SEQ ID NO: 231099 - DNA, 25 bp, Probe Sequence
gagccggactattcagatattttct

SEQ ID NO: 231100 - DNA, 25 bp, Probe Sequence
gagcccacacaagcagatattgcct

SEQ ID NO: 231101 - DNA, 25 bp, Probe Sequence
gagccccaagatgagaataaccttc

SEQ ID NO: 231102 - DNA, 25 bp, Probe Sequence
gagccctcagttgaggtaaactact

SEQ ID NO: 231103 - DNA, 25 bp, Probe Sequence
gagcccatcgttgagttaccaagac

SEQ ID NO: 231104 - DNA, 25 bp, Probe Sequence
gagcctttgttgctatcaatccaag

SEQ ID NO: 231105 - DNA, 25 bp, Probe Sequence
gagcctttgttgctaatcaaatccg

SEQ ID NO: 231106 - DNA, 25 bp, Probe Sequence
gagcttcgggagatattcaatgacc

SEQ ID NO: 231107 - DNA, 25 bp, Probe Sequence
gagctgacgggcttttagcagcatg

SEQ ID NO: 231108 - DNA, 25 bp, Probe Sequence
gagctgccgggaatctagacttgga

SEQ ID NO: 231109 - DNA, 25 bp, Probe Sequence
gagctcccctgtactatagatttga

SEQ ID NO: 231110 - DNA, 25 bp, Probe Sequence
gagctttcatcctcttgagtgtatg

SEQ ID NO: 231111 - DNA, 25 bp, Probe Sequence
gagctttcatcctcttgagtgtatg

SEQ ID NO: 231112 - DNA, 25 bp, Probe Sequence
gagccaggatccttgttggtctagc

SEQ ID NO: 231113 - DNA, 25 bp, Probe Sequence
gagccagcgaacatggggtgatcct

SEQ ID NO: 231114 - DNA, 25 bp, Probe Sequence
gagcttcgtgagatcgggtatgact

SEQ ID NO: 231115 - DNA, 25 bp, Probe Sequence
gagcttattgggtgccatttgatat

SEQ ID NO: 231116 - DNA, 25 bp, Probe Sequence
gagctgtttggtttgaaccgtgaac

SEQ ID NO: 231117 - DNA, 25 bp, Probe Sequence
gagctttaggatttacgcgcaggaa

SEQ ID NO: 231118 - DNA, 25 bp, Probe Sequence
gagccattcaaatttttggagccaa

SEQ ID NO: 231119 - DNA, 25 bp, Probe Sequence
gagccattaaattcatagctttcgc

SEQ ID NO: 231120 - DNA, 25 bp, Probe Sequence
gagccaaagatattgaactctctcc

SEQ ID NO: 231121 - DNA, 25 bp, Probe Sequence
gagccaagatatgtggactctctcc

SEQ ID NO: 231122 - DNA, 25 bp, Probe Sequence
gagccaagatcacaggagccactgc

SEQ ID NO: 231123 - DNA, 25 bp, Probe Sequence
gagccataatccttggagcaactcc

SEQ ID NO: 231124 - DNA, 25 bp, Probe Sequence
gagccagcaatcagatggagattct

SEQ ID NO: 231125 - DNA, 25 bp, Probe Sequence
gagccagcagatcaagcaaatgtct

SEQ ID NO: 231126 - DNA, 25 bp, Probe Sequence
gagccatgagtcaaaccactgcaat

SEQ ID NO: 231127 - DNA, 25 bp, Probe Sequence
gagccagtgatcacctgagtcagag

SEQ ID NO: 231128 - DNA, 25 bp, Probe Sequence
gagccaagctgactcctgaggaaga

SEQ ID NO: 231129 - DNA, 25 bp, Probe Sequence
gagccaagctgactcctgaggaaga

SEQ ID NO: 231130 - DNA, 25 bp, Probe Sequence
gagaaggctgactctgagaaccaag

SEQ ID NO: 231131 - DNA, 25 bp, Probe Sequence
gagcggtgtgttgaagaactcaagc

SEQ ID NO: 231132 - DNA, 25 bp, Probe Sequence
gagcgagtggaagggaaagtgcagg

SEQ ID NO: 231133 - DNA, 25 bp, Probe Sequence
gagctggggcaacagccaagctcac

SEQ ID NO: 231134 - DNA, 25 bp, Probe Sequence
gagctgggcctagagctcagtcaca

SEQ ID NO: 231135 - DNA, 25 bp, Probe Sequence
gagctggcacccacatcctgtgcat

SEQ ID NO: 231136 - DNA, 25 bp, Probe Sequence
gagcatgacacagctcgggctgtca

SEQ ID NO: 231137 - DNA, 25 bp, Probe Sequence
gaggagaaggcctggtctaagtatc

SEQ ID NO: 231138 - DNA, 25 bp, Probe Sequence
gaggaaaatccagcttctaagttca

SEQ ID NO: 231139 - DNA, 25 bp, Probe Sequence
gagcgcaaaatgcagctttatactt

SEQ ID NO: 231140 - DNA, 25 bp, Probe Sequence
gagcctacttctagctgtatttttt

SEQ ID NO: 231141 - DNA, 25 bp, Probe Sequence
gagcctacttctagctgtatttttt

SEQ ID NO: 231142 - DNA, 25 bp, Probe Sequence
gagcctgaatgttggtggtttttga

SEQ ID NO: 231143 - DNA, 25 bp, Probe Sequence
gagcctctttatttggattttgtgc

SEQ ID NO: 231144 - DNA, 25 bp, Probe Sequence
gagcctctttcatgtgacttgtgtc

SEQ ID NO: 231145 - DNA, 25 bp, Probe Sequence
gagcctcctatgtgtgacttatgac

SEQ ID NO: 231146 - DNA, 25 bp, Probe Sequence
gagcctcctatgtgtgacttatgac

SEQ ID NO: 231147 - DNA, 25 bp, Probe Sequence
gagcccattcatttgctgattatac

SEQ ID NO: 231148 - DNA, 25 bp, Probe Sequence
gagctcctgacagttctgatttcct

SEQ ID NO: 231149 - DNA, 25 bp, Probe Sequence
gagctgtagacgaactgtttctcta

SEQ ID NO: 231150 - DNA, 25 bp, Probe Sequence
gagcgtatggaggactttactgatt

SEQ ID NO: 231151 - DNA, 25 bp, Probe Sequence
gagctgttcacggtcttatactatt

SEQ ID NO: 231152 - DNA, 25 bp, Probe Sequence
gagcgtccacgaggttaatctaaag

SEQ ID NO: 231153 - DNA, 25 bp, Probe Sequence
gagcccccgacaaatgaagctgaga

SEQ ID NO: 231154 - DNA, 25 bp, Probe Sequence
gagcgcctccagtctagaaggcata

SEQ ID NO: 231155 - DNA, 25 bp, Probe Sequence
gagcgcagccaagttgaagaggaaa

SEQ ID NO: 231156 - DNA, 25 bp, Probe Sequence
gagcgcacggtggtagcagagtcga

SEQ ID NO: 231157 - DNA, 25 bp, Probe Sequence
gagccagtgtacgaagcagagcctg

SEQ ID NO: 231158 - DNA, 25 bp, Probe Sequence
gagccagatgattctagagatgagg

SEQ ID NO: 231159 - DNA, 25 bp, Probe Sequence
gagccaggagttgaggtggaagtca

SEQ ID NO: 231160 - DNA, 25 bp, Probe Sequence
gagccgtgtgtcccagggaaagtct

SEQ ID NO: 231161 - DNA, 25 bp, Probe Sequence
gagccagcatgcctggccagtggat

SEQ ID NO: 231162 - DNA, 25 bp, Probe Sequence
gagccactgctgatgtagcttgttc

SEQ ID NO: 231163 - DNA, 25 bp, Probe Sequence
gagccctctgatgatggcattctcc

SEQ ID NO: 231164 - DNA, 25 bp, Probe Sequence
gagccctctgatgatggcattctcc

SEQ ID NO: 231165 - DNA, 25 bp, Probe Sequence
gagctgcctcttggtggcagtattc

SEQ ID NO: 231166 - DNA, 25 bp, Probe Sequence
gagctgagctcaagttagcctagtc

SEQ ID NO: 231167 - DNA, 25 bp, Probe Sequence
gagcgagtctaataatccagctact

SEQ ID NO: 231168 - DNA, 25 bp, Probe Sequence
gagcccctaaacatcaagcaatctg

SEQ ID NO: 231169 - DNA, 25 bp, Probe Sequence
gagcccctaaacatcaagcaatctg

SEQ ID NO: 231170 - DNA, 25 bp, Probe Sequence
gagcccctaaacatcaagcaatctg

SEQ ID NO: 231171 - DNA, 25 bp, Probe Sequence
gagctctgctctaaaattgttgaca

SEQ ID NO: 231172 - DNA, 25 bp, Probe Sequence
gagctctgctctaaaattgttgaca

SEQ ID NO: 231173 - DNA, 25 bp, Probe Sequence
gagctcctaagaaatatgcttcaaa

SEQ ID NO: 231174 - DNA, 25 bp, Probe Sequence
gagctcccattgtacagcatgctat

SEQ ID NO: 231175 - DNA, 25 bp, Probe Sequence
gagccatctcaattaccatatatac

SEQ ID NO: 231176 - DNA, 25 bp, Probe Sequence
gagccttacttatgtaatacaaccc

SEQ ID NO: 231177 - DNA, 25 bp, Probe Sequence
gagccttcaaattcagtaatacata

SEQ ID NO: 231178 - DNA, 25 bp, Probe Sequence
gagctctccaacatgattacaatta

SEQ ID NO: 231179 - DNA, 25 bp, Probe Sequence
gagtcatccgaagaacaaatttttt

SEQ ID NO: 231180 - DNA, 25 bp, Probe Sequence
gagcctcctgaagaatcgattcctc

SEQ ID NO: 231181 - DNA, 25 bp, Probe Sequence
gagcctaagaatggcagccgtttct

SEQ ID NO: 231182 - DNA, 25 bp, Probe Sequence
gagcctcagcagatgggcaaggttt

SEQ ID NO: 231183 - DNA, 25 bp, Probe Sequence
gagccatcacacttgaccaattttt

SEQ ID NO: 231184 - DNA, 25 bp, Probe Sequence
gagccatacacaaactctctgttct

SEQ ID NO: 231185 - DNA, 25 bp, Probe Sequence
gagccattactgaattcacatatgt

SEQ ID NO: 231186 - DNA, 25 bp, Probe Sequence
gagcctgacctgaattaaagtactg

SEQ ID NO: 231187 - DNA, 25 bp, Probe Sequence
gagcctgcattctatttacagtgta

SEQ ID NO: 231188 - DNA, 25 bp, Probe Sequence
gagcccatggcatcatagttgtgta

SEQ ID NO: 231189 - DNA, 25 bp, Probe Sequence
gagctcctggaaagagttgctgact

SEQ ID NO: 231190 - DNA, 25 bp, Probe Sequence
gagctcctggaaagagttgctgact

SEQ ID NO: 231191 - DNA, 25 bp, Probe Sequence
gagccttgggctaatctggctgagt

SEQ ID NO: 231192 - DNA, 25 bp, Probe Sequence
gagccttgcagactttcatttggag

SEQ ID NO: 231193 - DNA, 25 bp, Probe Sequence
gagctgcttgagattatcaacgagg

SEQ ID NO: 231194 - DNA, 25 bp, Probe Sequence
gagccttcacgcataagaggcagtg

SEQ ID NO: 231195 - DNA, 25 bp, Probe Sequence
gagcctgctgcccattaacaggggc

SEQ ID NO: 231196 - DNA, 25 bp, Probe Sequence
gagccctccagacataaggaggcca

SEQ ID NO: 231197 - DNA, 25 bp, Probe Sequence
gagccctctggcacaaatggaagaa

SEQ ID NO: 231198 - DNA, 25 bp, Probe Sequence
gagcctttgccagtagaagaggaga

SEQ ID NO: 231199 - DNA, 25 bp, Probe Sequence
gagccttctaatgccaagcagcaga

SEQ ID NO: 231200 - DNA, 25 bp, Probe Sequence
gagccttctgaagcatcaaagcctt

SEQ ID NO: 231201 - DNA, 25 bp, Probe Sequence
gagctctgtctgtcaagtgcataac

SEQ ID NO: 231202 - DNA, 25 bp, Probe Sequence
gagcctgctatacaacatgaacgac

SEQ ID NO: 231203 - DNA, 25 bp, Probe Sequence
gagcctgcaaactcactgctcaaga

SEQ ID NO: 231204 - DNA, 25 bp, Probe Sequence
gagcctgataaattcctcatagcaa

SEQ ID NO: 231205 - DNA, 25 bp, Probe Sequence
gagcctgatagacattgtcacagag

SEQ ID NO: 231206 - DNA, 25 bp, Probe Sequence
gagactggcagaccttggcctaaag

SEQ ID NO: 231207 - DNA, 25 bp, Probe Sequence
gagccggcgagcgtttgagaagagg

SEQ ID NO: 231208 - DNA, 25 bp, Probe Sequence
gagccggagagggaatgagtaatgg

SEQ ID NO: 231209 - DNA, 25 bp, Probe Sequence
gagcctgagaagtggagattgcaat

SEQ ID NO: 231210 - DNA, 25 bp, Probe Sequence
gagccggacagaagtgagcaacaac

SEQ ID NO: 231211 - DNA, 25 bp, Probe Sequence
gagcctggcccaacatggcaaaacc

SEQ ID NO: 231212 - DNA, 25 bp, Probe Sequence
gagcctggactcatcatcaataaac

SEQ ID NO: 231213 - DNA, 25 bp, Probe Sequence
gagcgagatgccgctcatcatcatg

SEQ ID NO: 231214 - DNA, 25 bp, Probe Sequence
gagctcagcagcagtcttcataaac

SEQ ID NO: 231215 - DNA, 25 bp, Probe Sequence
gagctcagcagcagtcttcataaac

SEQ ID NO: 231216 - DNA, 25 bp, Probe Sequence
gagccatgaaggccttgtgctgacc

SEQ ID NO: 231217 - DNA, 25 bp, Probe Sequence
gagcctgaactggttgtgcagaaca

SEQ ID NO: 231218 - DNA, 25 bp, Probe Sequence
gagcctgaactctcttagtcataaa

SEQ ID NO: 231219 - DNA, 25 bp, Probe Sequence
gagcaggaattcggtgtggacatag

SEQ ID NO: 231220 - DNA, 25 bp, Probe Sequence
gagctggagactggcagtgtcccaa

SEQ ID NO: 231221 - DNA, 25 bp, Probe Sequence
gagcatgtggagctgagtgacacca

SEQ ID NO: 231222 - DNA, 25 bp, Probe Sequence
gagcgtgatgatctagcctccatca

SEQ ID NO: 231223 - DNA, 25 bp, Probe Sequence
gagcagtgatgtggtcaccagcctc

SEQ ID NO: 231224 - DNA, 25 bp, Probe Sequence
gagcactctgtgctgatccatgagt

SEQ ID NO: 231225 - DNA, 25 bp, Probe Sequence
gagcgcatcagtgttctctgaggtc

SEQ ID NO: 231226 - DNA, 25 bp, Probe Sequence
gagccctgtgaaatgcatcaaggtc

SEQ ID NO: 231227 - DNA, 25 bp, Probe Sequence
gagccgtggataatggaaggtgaat

SEQ ID NO: 231228 - DNA, 25 bp, Probe Sequence
gagcctgatggttgtaagagtggaa

SEQ ID NO: 231229 - DNA, 25 bp, Probe Sequence
gagcttgacgtcccaagagagtgag

SEQ ID NO: 231230 - DNA, 25 bp, Probe Sequence
gagcctgggatcaccagagctgtga

SEQ ID NO: 231231 - DNA, 25 bp, Probe Sequence
gagcctgtgttcatctagaagtagt

SEQ ID NO: 231232 - DNA, 25 bp, Probe Sequence
gagcctgtgttcatctagaagtagt

SEQ ID NO: 231233 - DNA, 25 bp, Probe Sequence
gagcggctttagtatagtattgagt

SEQ ID NO: 231234 - DNA, 25 bp, Probe Sequence
gagctgagcttttcaaagttccgaa

SEQ ID NO: 231235 - DNA, 25 bp, Probe Sequence
gagctgacagtgtccacaggttcca

SEQ ID NO: 231236 - DNA, 25 bp, Probe Sequence
gagctgaagtgggaatcagtacatc

SEQ ID NO: 231237 - DNA, 25 bp, Probe Sequence
gagcagcacgtagaatagtaactta

SEQ ID NO: 231238 - DNA, 25 bp, Probe Sequence
gagcgactccaggaagctaagcact

SEQ ID NO: 231239 - DNA, 25 bp, Probe Sequence
gagcgagattaccaagtataagata

SEQ ID NO: 231240 - DNA, 25 bp, Probe Sequence
gagcggttgcaatttgtaacaatga

SEQ ID NO: 231241 - DNA, 25 bp, Probe Sequence
gagctgtgttaattctatctccagt

SEQ ID NO: 231242 - DNA, 25 bp, Probe Sequence
gagctatgtagagacttcagccagt

SEQ ID NO: 231243 - DNA, 25 bp, Probe Sequence
gagcgaggatatgcacttcatccta

SEQ ID NO: 231244 - DNA, 25 bp, Probe Sequence
gagcgagagcaatgctgctacaact

SEQ ID NO: 231245 - DNA, 25 bp, Probe Sequence
gagccggctgaaatgctccaacttt

SEQ ID NO: 231246 - DNA, 25 bp, Probe Sequence
gagccttgcaaaacctgcacaatca

SEQ ID NO: 231247 - DNA, 25 bp, Probe Sequence
gagccttggatcaactctgctagat

SEQ ID NO: 231248 - DNA, 25 bp, Probe Sequence
gagcttctgggaagtcctcagagta

SEQ ID NO: 231249 - DNA, 25 bp, Probe Sequence
gagcttattggaaatatctcagtta

SEQ ID NO: 231250 - DNA, 25 bp, Probe Sequence
gagcctcttctgataactcaggatt

SEQ ID NO: 231251 - DNA, 25 bp, Probe Sequence
gagccccctagtagtctagtgacta

SEQ ID NO: 231252 - DNA, 25 bp, Probe Sequence
gagacttcttagctttggtactgac

SEQ ID NO: 231253 - DNA, 25 bp, Probe Sequence
gagaacctgtagatttcttacccta

SEQ ID NO: 231254 - DNA, 25 bp, Probe Sequence
gatacaaccctgatttttgaccttg

SEQ ID NO: 231255 - DNA, 25 bp, Probe Sequence
gagaaagccttgttttttcccagag

SEQ ID NO: 231256 - DNA, 25 bp, Probe Sequence
gagaaacggttaatttattcaatgt

SEQ ID NO: 231257 - DNA, 25 bp, Probe Sequence
gagcctaaggttgatgctgtattac

SEQ ID NO: 231258 - DNA, 25 bp, Probe Sequence
gagccgaaggacatatggtttatct

SEQ ID NO: 231259 - DNA, 25 bp, Probe Sequence
gagcccaagaatattagatttcctc

SEQ ID NO: 231260 - DNA, 25 bp, Probe Sequence
gatgcccggaatatctggggtccaa

SEQ ID NO: 231261 - DNA, 25 bp, Probe Sequence
gagcctcgatgacaatctgggagtg

SEQ ID NO: 231262 - DNA, 25 bp, Probe Sequence
gagcccaagatctgacggaagctga

SEQ ID NO: 231263 - DNA, 25 bp, Probe Sequence
gagcctacatgcgcagacaggacag

SEQ ID NO: 231264 - DNA, 25 bp, Probe Sequence
gagcctacatggccaaagatgtctt

SEQ ID NO: 231265 - DNA, 25 bp, Probe Sequence
gagcacttatggcaaggcatctcga

SEQ ID NO: 231266 - DNA, 25 bp, Probe Sequence
gagcgcattatggtagagggcttcc

SEQ ID NO: 231267 - DNA, 25 bp, Probe Sequence
gagctcaatccagtatgggcctttt

SEQ ID NO: 231268 - DNA, 25 bp, Probe Sequence
gagcataacccacaggcgttttttc

SEQ ID NO: 231269 - DNA, 25 bp, Probe Sequence
gagacaatcttacccgcaggttttc

SEQ ID NO: 231270 - DNA, 25 bp, Probe Sequence
gagaccaattacaggccgtctctct

SEQ ID NO: 231271 - DNA, 25 bp, Probe Sequence
gagaccaattacaggccgtctctct

SEQ ID NO: 231272 - DNA, 25 bp, Probe Sequence
gagctaaattacaattgtcatttat

SEQ ID NO: 231273 - DNA, 25 bp, Probe Sequence
gagctataacttacttctgtattaa

SEQ ID NO: 231274 - DNA, 25 bp, Probe Sequence
gagctatgatttcatgatacatgta

SEQ ID NO: 231275 - DNA, 25 bp, Probe Sequence
gagctgatattaactccatctgtca

SEQ ID NO: 231276 - DNA, 25 bp, Probe Sequence
gagctgattgccaactcactggcca

SEQ ID NO: 231277 - DNA, 25 bp, Probe Sequence
gagctgttggcaaaactatctcaga

SEQ ID NO: 231278 - DNA, 25 bp, Probe Sequence
gagctgcttggacctattaaagata

SEQ ID NO: 231279 - DNA, 25 bp, Probe Sequence
gagcttttgcacggtagaaggaaca

SEQ ID NO: 231280 - DNA, 25 bp, Probe Sequence
gagcctggccaagtgaggaaggaaa

SEQ ID NO: 231281 - DNA, 25 bp, Probe Sequence
gagcctggccagagagggaagacac

SEQ ID NO: 231282 - DNA, 25 bp, Probe Sequence
gagccgccactggcgggaacgtcac

SEQ ID NO: 231283 - DNA, 25 bp, Probe Sequence
gagcctgtctggggaggagactgga

SEQ ID NO: 231284 - DNA, 25 bp, Probe Sequence
gagcctgataggttgtgcggcctcg

SEQ ID NO: 231285 - DNA, 25 bp, Probe Sequence
gagccgaaggacctgctgatattcc

SEQ ID NO: 231286 - DNA, 25 bp, Probe Sequence
gagcctacagatttctgctatcatt

SEQ ID NO: 231287 - DNA, 25 bp, Probe Sequence
gagcattaggtcttcctacttaggt

SEQ ID NO: 231288 - DNA, 25 bp, Probe Sequence
gagcttaagcaccttctaattgatg

SEQ ID NO: 231289 - DNA, 25 bp, Probe Sequence
gagctgtacagatattcttttgatt

SEQ ID NO: 231290 - DNA, 25 bp, Probe Sequence
gagcgcaaatgtcctcagattgggg

SEQ ID NO: 231291 - DNA, 25 bp, Probe Sequence
gagcgccgaggcatggaggaggtgg

SEQ ID NO: 231292 - DNA, 25 bp, Probe Sequence
gagcgacagggcaaggcccaggtgg

SEQ ID NO: 231293 - DNA, 25 bp, Probe Sequence
gagcgaaggagactacctaggtgga

SEQ ID NO: 231294 - DNA, 25 bp, Probe Sequence
gagcgggaactaatccagaggagga

SEQ ID NO: 231295 - DNA, 25 bp, Probe Sequence
gagcggtagggagtccacggagaag

SEQ ID NO: 231296 - DNA, 25 bp, Probe Sequence
gagcggtcagggatcatgagggaga

SEQ ID NO: 231297 - DNA, 25 bp, Probe Sequence
gagcggctagagctctgtgatgagc

SEQ ID NO: 231298 - DNA, 25 bp, Probe Sequence
gagctccataagaactgtgctgact

SEQ ID NO: 231299 - DNA, 25 bp, Probe Sequence
gagctgccggaggactgggacaagc

SEQ ID NO: 231300 - DNA, 25 bp, Probe Sequence
gagctgccggaggactgggacaagc

SEQ ID NO: 231301 - DNA, 25 bp, Probe Sequence
gagctgccggagacagtttgacaac

SEQ ID NO: 231302 - DNA, 25 bp, Probe Sequence
gagcgctgcgggaagacactgaccc

SEQ ID NO: 231303 - DNA, 25 bp, Probe Sequence
gagcccgagggatgatctagcctga

SEQ ID NO: 231304 - DNA, 25 bp, Probe Sequence
gagccctgcacgggagacaggtctg

SEQ ID NO: 231305 - DNA, 25 bp, Probe Sequence
gagccctgacatggtgaccagagcc

SEQ ID NO: 231306 - DNA, 25 bp, Probe Sequence
gagccgctgaagatgacgcgggcat

SEQ ID NO: 231307 - DNA, 25 bp, Probe Sequence
gagcggtgatcacttgaggtcagga

SEQ ID NO: 231308 - DNA, 25 bp, Probe Sequence
gagcttgatgccagtaggctcaact

SEQ ID NO: 231309 - DNA, 25 bp, Probe Sequence
gagcttgtccggaagattgcaaata

SEQ ID NO: 231310 - DNA, 25 bp, Probe Sequence
gagcggttgatggaagttgaacagg

SEQ ID NO: 231311 - DNA, 25 bp, Probe Sequence
gagcgtggtgatgcagtgactaaag

SEQ ID NO: 231312 - DNA, 25 bp, Probe Sequence
gagcgtgcacttgtgatcctaaaat

SEQ ID NO: 231313 - DNA, 25 bp, Probe Sequence
gagcgtgactgggttctaaatgaat

SEQ ID NO: 231314 - DNA, 25 bp, Probe Sequence
gagctctcctggggtcagaacaaag

SEQ ID NO: 231315 - DNA, 25 bp, Probe Sequence
gagctccttgggtcccatgaaactg

SEQ ID NO: 231316 - DNA, 25 bp, Probe Sequence
gagctacatatggcgatactattaa

SEQ ID NO: 231317 - DNA, 25 bp, Probe Sequence
gagctatcattcacatactatacat

SEQ ID NO: 231318 - DNA, 25 bp, Probe Sequence
gagctacatttgcccatatctgcaa

SEQ ID NO: 231319 - DNA, 25 bp, Probe Sequence
gagcatagcagtggcagccacacca

SEQ ID NO: 231320 - DNA, 25 bp, Probe Sequence
gagccgagatcgcgccactgcactc

SEQ ID NO: 231321 - DNA, 25 bp, Probe Sequence
gagccgagatggaggcctcatttgt

SEQ ID NO: 231322 - DNA, 25 bp, Probe Sequence
gagcggaaggagcagtcctgcgtta

SEQ ID NO: 231323 - DNA, 25 bp, Probe Sequence
gagctggaacgggagttcttcttca

SEQ ID NO: 231324 - DNA, 25 bp, Probe Sequence
gagctggagaaagaattcctcttca

SEQ ID NO: 231325 - DNA, 25 bp, Probe Sequence
gagctggaggagacagaaccgcccc

SEQ ID NO: 231326 - DNA, 25 bp, Probe Sequence
gagctggaaggagaactccccactg

SEQ ID NO: 231327 - DNA, 25 bp, Probe Sequence
gagcttggaggctttagtcattccc

SEQ ID NO: 231328 - DNA, 25 bp, Probe Sequence
gagcttgcacaggatttcgtgaaca

SEQ ID NO: 231329 - DNA, 25 bp, Probe Sequence
gagcttatcacctttcatggatcac

SEQ ID NO: 231330 - DNA, 25 bp, Probe Sequence
gagcttgtcctttaagcaggaccat

SEQ ID NO: 231331 - DNA, 25 bp, Probe Sequence
gagcttggcttttatggagagtgtt

SEQ ID NO: 231332 - DNA, 25 bp, Probe Sequence
gagcttggaattggggcgggggagg

SEQ ID NO: 231333 - DNA, 25 bp, Probe Sequence
gagctcggacgaggagccggtggag

SEQ ID NO: 231334 - DNA, 25 bp, Probe Sequence
gagccgggcagctaaggcagccgga

SEQ ID NO: 231335 - DNA, 25 bp, Probe Sequence
gagcgggatcatgaaagcccaggca

SEQ ID NO: 231336 - DNA, 25 bp, Probe Sequence
gagctggcatttgcacaaacacggc

SEQ ID NO: 231337 - DNA, 25 bp, Probe Sequence
gagctggtgtgagacgagacaatcc

SEQ ID NO: 231338 - DNA, 25 bp, Probe Sequence
gagcttgctccctacgatgagaact

SEQ ID NO: 231339 - DNA, 25 bp, Probe Sequence
gagcttgctccctacgatgagaact

SEQ ID NO: 231340 - DNA, 25 bp, Probe Sequence
gagcttgctccctacgatgagaact

SEQ ID NO: 231341 - DNA, 25 bp, Probe Sequence
gagcttgattagaagccaagacagt

SEQ ID NO: 231342 - DNA, 25 bp, Probe Sequence
gagctggataagagcgcaaggcatc

SEQ ID NO: 231343 - DNA, 25 bp, Probe Sequence
gagcgctggaaggccatcaaatgcc

SEQ ID NO: 231344 - DNA, 25 bp, Probe Sequence
gagctctggtaccgcaagatctgcg

SEQ ID NO: 231345 - DNA, 25 bp, Probe Sequence
gagatgctgctgaagcgcgaggagc

SEQ ID NO: 231346 - DNA, 25 bp, Probe Sequence
gagctgctcatcaacatcacggagc

SEQ ID NO: 231347 - DNA, 25 bp, Probe Sequence
gagctgcgatttacacggcgggaat

SEQ ID NO: 231348 - DNA, 25 bp, Probe Sequence
gagctggatgatgacatggacggga

SEQ ID NO: 231349 - DNA, 25 bp, Probe Sequence
gagctggtaccactggaagggcttc

SEQ ID NO: 231350 - DNA, 25 bp, Probe Sequence
gagcaggaactcaggaacgtgtatt

SEQ ID NO: 231351 - DNA, 25 bp, Probe Sequence
gagcgagaagccaaggccaggttct

SEQ ID NO: 231352 - DNA, 25 bp, Probe Sequence
gagcgagaagccaaggccaggttct

SEQ ID NO: 231353 - DNA, 25 bp, Probe Sequence
gagctggtaggcattccagctcctc

SEQ ID NO: 231354 - DNA, 25 bp, Probe Sequence
gagcagcaaaggatccagttcccat

SEQ ID NO: 231355 - DNA, 25 bp, Probe Sequence
gagaacaacagcattcatttccatt

SEQ ID NO: 231356 - DNA, 25 bp, Probe Sequence
gagctaatagatcttttaccactaa

SEQ ID NO: 231357 - DNA, 25 bp, Probe Sequence
gagcggaagactctaatacccatag

SEQ ID NO: 231358 - DNA, 25 bp, Probe Sequence
gagcaccaatgagcttactacccaa

SEQ ID NO: 231359 - DNA, 25 bp, Probe Sequence
gagcatccggaggttcacaacctct

SEQ ID NO: 231360 - DNA, 25 bp, Probe Sequence
gagctgccctacgttaacaacaaat

SEQ ID NO: 231361 - DNA, 25 bp, Probe Sequence
gagctgttcgacgtaaagaacgcct

SEQ ID NO: 231362 - DNA, 25 bp, Probe Sequence
gagttgcccacagtgaagtgaatcc

SEQ ID NO: 231363 - DNA, 25 bp, Probe Sequence
gagcacccccaggcaagtgcaaata

SEQ ID NO: 231364 - DNA, 25 bp, Probe Sequence
gagcgtcacctgaacaagatgcaga

SEQ ID NO: 231365 - DNA, 25 bp, Probe Sequence
gagcgtctgttgaaaagactgcagc

SEQ ID NO: 231366 - DNA, 25 bp, Probe Sequence
gagcccagatggaaatcagaccact

SEQ ID NO: 231367 - DNA, 25 bp, Probe Sequence
gagcccagaagatcaaggctgcagt

SEQ ID NO: 231368 - DNA, 25 bp, Probe Sequence
gagcccaggagatcaaggctgcagt

SEQ ID NO: 231369 - DNA, 25 bp, Probe Sequence
gagcccaggagttggaggctgcatt

SEQ ID NO: 231370 - DNA, 25 bp, Probe Sequence
gagcttcctgagcagcgaggtgttg

SEQ ID NO: 231371 - DNA, 25 bp, Probe Sequence
gagctaggccaggaatgggtgcctg

SEQ ID NO: 231372 - DNA, 25 bp, Probe Sequence
gagctagcccaactgtgggcagccg

SEQ ID NO: 231373 - DNA, 25 bp, Probe Sequence
gagcccatctcaacatttggcagtc

SEQ ID NO: 231374 - DNA, 25 bp, Probe Sequence
gagcaccactgaacttagacctctc

SEQ ID NO: 231375 - DNA, 25 bp, Probe Sequence
gagcccgcatggacagtgagagcct

SEQ ID NO: 231376 - DNA, 25 bp, Probe Sequence
gagcccagctccaaggggaatcaga

SEQ ID NO: 231377 - DNA, 25 bp, Probe Sequence
gagctaagcccaaggtgtacatcat

SEQ ID NO: 231378 - DNA, 25 bp, Probe Sequence
gagctgaacctcatgtgttccactc

SEQ ID NO: 231379 - DNA, 25 bp, Probe Sequence
gagctgacttcctcatgtgttactc

SEQ ID NO: 231380 - DNA, 25 bp, Probe Sequence
gagctgcattgactaccagatttat

SEQ ID NO: 231381 - DNA, 25 bp, Probe Sequence
gagctcatctagcaatcagattttc

SEQ ID NO: 231382 - DNA, 25 bp, Probe Sequence
gagctatggggattcattgtattac

SEQ ID NO: 231383 - DNA, 25 bp, Probe Sequence
gagccgcgaggatcagtatcactac

SEQ ID NO: 231384 - DNA, 25 bp, Probe Sequence
gagacctgaccttgcagtacaacat

SEQ ID NO: 231385 - DNA, 25 bp, Probe Sequence
gagccccagctgacatggaaataca

SEQ ID NO: 231386 - DNA, 25 bp, Probe Sequence
gagccccatcttacaaaacacaaaa

SEQ ID NO: 231387 - DNA, 25 bp, Probe Sequence
gagcccacatattacaacttcagaa

SEQ ID NO: 231388 - DNA, 25 bp, Probe Sequence
gagctcagagcaattaaaccactat

SEQ ID NO: 231389 - DNA, 25 bp, Probe Sequence
gagcccagactggacaacacagtat

SEQ ID NO: 231390 - DNA, 25 bp, Probe Sequence
gagccctgaagaacgagccagatac

SEQ ID NO: 231391 - DNA, 25 bp, Probe Sequence
gagctcctgaggatggatctgcaga

SEQ ID NO: 231392 - DNA, 25 bp, Probe Sequence
gagctcagcgacttttattgcagat

SEQ ID NO: 231393 - DNA, 25 bp, Probe Sequence
gagcgcaggcatctttacatatgtg

SEQ ID NO: 231394 - DNA, 25 bp, Probe Sequence
gagcacaggctggtttaccatggtg

SEQ ID NO: 231395 - DNA, 25 bp, Probe Sequence
gagcaccaggtggtctcctctgact

SEQ ID NO: 231396 - DNA, 25 bp, Probe Sequence
gagcattagcagatgtccactgcgt

SEQ ID NO: 231397 - DNA, 25 bp, Probe Sequence
gagctgatgaggttgctgcagcccc

SEQ ID NO: 231398 - DNA, 25 bp, Probe Sequence
gagctggaggcatttgcacaccgcc

SEQ ID NO: 231399 - DNA, 25 bp, Probe Sequence
gagctgtgggagttggcactctgtc

SEQ ID NO: 231400 - DNA, 25 bp, Probe Sequence
gagctgtgggagttggcactctgtc

SEQ ID NO: 231401 - DNA, 25 bp, Probe Sequence
gagctgagatggcataggccttagc

SEQ ID NO: 231402 - DNA, 25 bp, Probe Sequence
gagctgagatggcataggccttagc

SEQ ID NO: 231403 - DNA, 25 bp, Probe Sequence
gagctggaggctcaggcagcttcag

SEQ ID NO: 231404 - DNA, 25 bp, Probe Sequence
gagctgaagactgagagctaatcag

SEQ ID NO: 231405 - DNA, 25 bp, Probe Sequence
gagctgtgacctgatgccaaatgag

SEQ ID NO: 231406 - DNA, 25 bp, Probe Sequence
gagctgctaccacatgacagacaca

SEQ ID NO: 231407 - DNA, 25 bp, Probe Sequence
gagctcgaggccatgagcagatata

SEQ ID NO: 231408 - DNA, 25 bp, Probe Sequence
gagctctaggcccaaaacgacctta

SEQ ID NO: 231409 - DNA, 25 bp, Probe Sequence
gagctctatgggcagatctacccct

SEQ ID NO: 231410 - DNA, 25 bp, Probe Sequence
gagctatagtggcgcacaagcgctc

SEQ ID NO: 231411 - DNA, 25 bp, Probe Sequence
gagctgaatgtggctacagcaactg

SEQ ID NO: 231412 - DNA, 25 bp, Probe Sequence
gagcatagatgcatgaagcgaacat

SEQ ID NO: 231413 - DNA, 25 bp, Probe Sequence
gagctgtgagaaaagcgagcctctt

SEQ ID NO: 231414 - DNA, 25 bp, Probe Sequence
gagctggagacattagggcagagta

SEQ ID NO: 231415 - DNA, 25 bp, Probe Sequence
gagctagagacattgccggtatgcg

SEQ ID NO: 231416 - DNA, 25 bp, Probe Sequence
gagctaaacattatgcgtcatgaga

SEQ ID NO: 231417 - DNA, 25 bp, Probe Sequence
gagcatagtacttgactactctaga

SEQ ID NO: 231418 - DNA, 25 bp, Probe Sequence
gagcaagtagttgacatttatcagc

SEQ ID NO: 231419 - DNA, 25 bp, Probe Sequence
gagaagtgggcttcagatttaaggc

SEQ ID NO: 231420 - DNA, 25 bp, Probe Sequence
gagcaaagtggttagtggaaaactt

SEQ ID NO: 231421 - DNA, 25 bp, Probe Sequence
gagcgggtggtaattgtggctaaat

SEQ ID NO: 231422 - DNA, 25 bp, Probe Sequence
gagccctgggtaaatgtggtgagaa

SEQ ID NO: 231423 - DNA, 25 bp, Probe Sequence
gagcccgaggtgagaatggtgaatg

SEQ ID NO: 231424 - DNA, 25 bp, Probe Sequence
gagcccaggagtttgagaccgacat

SEQ ID NO: 231425 - DNA, 25 bp, Probe Sequence
gagcccatgggtttgagaccagcct

SEQ ID NO: 231426 - DNA, 25 bp, Probe Sequence
gagcccaggagttgaagtccagcct

SEQ ID NO: 231427 - DNA, 25 bp, Probe Sequence
gagcccaggagttgaagaacgtggc

SEQ ID NO: 231428 - DNA, 25 bp, Probe Sequence
gagccctgtgagtgcaaggagtgtg

SEQ ID NO: 231429 - DNA, 25 bp, Probe Sequence
gagcgtttgagaagagggcatggcg

SEQ ID NO: 231430 - DNA, 25 bp, Probe Sequence
gagcttttgaaaggcggcgggaggc

SEQ ID NO: 231431 - DNA, 25 bp, Probe Sequence
gagctttagaagtgtggatggccag

SEQ ID NO: 231432 - DNA, 25 bp, Probe Sequence
gagctttggggctttgaaggcaggt

SEQ ID NO: 231433 - DNA, 25 bp, Probe Sequence
gagcccaggagactttgaatgatca

SEQ ID NO: 231434 - DNA, 25 bp, Probe Sequence
gagcgcaaggcatctttacatatgt

SEQ ID NO: 231435 - DNA, 25 bp, Probe Sequence
gagcgagcccattttgtggattgtg

SEQ ID NO: 231436 - DNA, 25 bp, Probe Sequence
gagcagggcatttttttacgctggg

SEQ ID NO: 231437 - DNA, 25 bp, Probe Sequence
gagctcttcatttattttgactgtg

SEQ ID NO: 231438 - DNA, 25 bp, Probe Sequence
gagcgcttgcaggagtttgtgttgg

SEQ ID NO: 231439 - DNA, 25 bp, Probe Sequence
gagcgggagagtctgtgtgtatgtg

SEQ ID NO: 231440 - DNA, 25 bp, Probe Sequence
gagcggaaagtgagtatgcggctgc

SEQ ID NO: 231441 - DNA, 25 bp, Probe Sequence
gagctgcagaagcgatatgggggct

SEQ ID NO: 231442 - DNA, 25 bp, Probe Sequence
gagctggaaggagtgagaggggaca

SEQ ID NO: 231443 - DNA, 25 bp, Probe Sequence
gagctggaccggaaggtggctgacc

SEQ ID NO: 231444 - DNA, 25 bp, Probe Sequence
gagctggcacatggggaggaggttc

SEQ ID NO: 231445 - DNA, 25 bp, Probe Sequence
gagcggatcacaaggtcaggagttc

SEQ ID NO: 231446 - DNA, 25 bp, Probe Sequence
gagcggatcacaaggtcaggagttc

SEQ ID NO: 231447 - DNA, 25 bp, Probe Sequence
gagctgtggccaaggtcaagcctgt

SEQ ID NO: 231448 - DNA, 25 bp, Probe Sequence
gagctggcaccaaaactagccatgc

SEQ ID NO: 231449 - DNA, 25 bp, Probe Sequence
gagcaggcccatgagttacgatgag

SEQ ID NO: 231450 - DNA, 25 bp, Probe Sequence
gagcgacaacatgcagacagccgtg

SEQ ID NO: 231451 - DNA, 25 bp, Probe Sequence
gagcaacagagcaaaaccccgtctc

SEQ ID NO: 231452 - DNA, 25 bp, Probe Sequence
gagaagccactttattccctgtgga

SEQ ID NO: 231453 - DNA, 25 bp, Probe Sequence
gagacccactttattcagttctgta

SEQ ID NO: 231454 - DNA, 25 bp, Probe Sequence
gagactaagttcagttactcgggat

SEQ ID NO: 231455 - DNA, 25 bp, Probe Sequence
gagaccgttattctaactcagggat

SEQ ID NO: 231456 - DNA, 25 bp, Probe Sequence
gagacaccttaagaacaccatggag

SEQ ID NO: 231457 - DNA, 25 bp, Probe Sequence
gagaccctggaaaaacattatggaa

SEQ ID NO: 231458 - DNA, 25 bp, Probe Sequence
gagaacaagggatataccattggat

SEQ ID NO: 231459 - DNA, 25 bp, Probe Sequence
gagaactagggttaaccttgactat

SEQ ID NO: 231460 - DNA, 25 bp, Probe Sequence
gagaactagggttaaccttgactat

SEQ ID NO: 231461 - DNA, 25 bp, Probe Sequence
gagagactcggttctaacttcgaaa

SEQ ID NO: 231462 - DNA, 25 bp, Probe Sequence
gagctgactcgtaagtgaacgttgc

SEQ ID NO: 231463 - DNA, 25 bp, Probe Sequence
gagctttctgtcaaggaccgtatca

SEQ ID NO: 231464 - DNA, 25 bp, Probe Sequence
gagcgtcctgtaagggcctaatgct

SEQ ID NO: 231465 - DNA, 25 bp, Probe Sequence
gagcgtctctgaaattgagtctcgg

SEQ ID NO: 231466 - DNA, 25 bp, Probe Sequence
gagcggcataatatctacacggggt

SEQ ID NO: 231467 - DNA, 25 bp, Probe Sequence
gagcggcataaagcaggccggtccg

SEQ ID NO: 231468 - DNA, 25 bp, Probe Sequence
gaggtcaagagacaggttgttccga

SEQ ID NO: 231469 - DNA, 25 bp, Probe Sequence
gagcggaaggcagaggtcgtccaag

SEQ ID NO: 231470 - DNA, 25 bp, Probe Sequence
gagctcaaaaatgcgttcttccaca

SEQ ID NO: 231471 - DNA, 25 bp, Probe Sequence
gagctcagaaaaaaggtacatccag

SEQ ID NO: 231472 - DNA, 25 bp, Probe Sequence
gagcgcaacaaaagtgcccacatcc

SEQ ID NO: 231473 - DNA, 25 bp, Probe Sequence
gagcgccaagaagatgtcacttgcc

SEQ ID NO: 231474 - DNA, 25 bp, Probe Sequence
gagcccatgaaagatgacatcaccg

SEQ ID NO: 231475 - DNA, 25 bp, Probe Sequence
gagctccaagacctaagcaaccagt

SEQ ID NO: 231476 - DNA, 25 bp, Probe Sequence
gagcatgaacaagaagacaaatagt

SEQ ID NO: 231477 - DNA, 25 bp, Probe Sequence
gagctcccagcagaaggcacggagt

SEQ ID NO: 231478 - DNA, 25 bp, Probe Sequence
gagctgcgcccataagatcacaggt

SEQ ID NO: 231479 - DNA, 25 bp, Probe Sequence
gagctctgtacataatgttgtgggt

SEQ ID NO: 231480 - DNA, 25 bp, Probe Sequence
gagctcctacatctatggctatgtt

SEQ ID NO: 231481 - DNA, 25 bp, Probe Sequence
gagcgcctatctcattcagaatatt

SEQ ID NO: 231482 - DNA, 25 bp, Probe Sequence
gagcgcctatctcattcagaatatt

SEQ ID NO: 231483 - DNA, 25 bp, Probe Sequence
gagcttctcattgtgtagaatttct

SEQ ID NO: 231484 - DNA, 25 bp, Probe Sequence
gagcttctcattgtgtagaatttct

SEQ ID NO: 231485 - DNA, 25 bp, Probe Sequence
gagcttctcattgtgtagaatttct

SEQ ID NO: 231486 - DNA, 25 bp, Probe Sequence
gagcagccctaggtaaggattatgc

SEQ ID NO: 231487 - DNA, 25 bp, Probe Sequence
gagctcgcctcctacaaggaggaga

SEQ ID NO: 231488 - DNA, 25 bp, Probe Sequence
gagctagcctcctatgatatgcggc

SEQ ID NO: 231489 - DNA, 25 bp, Probe Sequence
gagctagcctcctatgatatgcggc

SEQ ID NO: 231490 - DNA, 25 bp, Probe Sequence
gagctccagctaggatgatcgaggt

SEQ ID NO: 231491 - DNA, 25 bp, Probe Sequence
gagcgacagtaggctgcatctggag

SEQ ID NO: 231492 - DNA, 25 bp, Probe Sequence
gagcggcaggcagagatcatggata

SEQ ID NO: 231493 - DNA, 25 bp, Probe Sequence
gagcccagagatggagccagctgaa

SEQ ID NO: 231494 - DNA, 25 bp, Probe Sequence
gagcccagaagagacactgaggaca

SEQ ID NO: 231495 - DNA, 25 bp, Probe Sequence
gagctacaagaagaaggactacacc

SEQ ID NO: 231496 - DNA, 25 bp, Probe Sequence
gagcgagacgaagctgtggttaaac

SEQ ID NO: 231497 - DNA, 25 bp, Probe Sequence
gagcgggctgaatgcgatggattac

SEQ ID NO: 231498 - DNA, 25 bp, Probe Sequence
gagcgggctgaatgcaatggagtgt

SEQ ID NO: 231499 - DNA, 25 bp, Probe Sequence
gagctgtgtctgtatacactgggta

SEQ ID NO: 231500 - DNA, 25 bp, Probe Sequence
gagctgttggattatcttgacagta

SEQ ID NO: 231501 - DNA, 25 bp, Probe Sequence
gagctgtatagtgcctgctgactta

SEQ ID NO: 231502 - DNA, 25 bp, Probe Sequence
gagctgtaaatccatgctgtgacaa

SEQ ID NO: 231503 - DNA, 25 bp, Probe Sequence
gagctgatcaaactattatagctaa

SEQ ID NO: 231504 - DNA, 25 bp, Probe Sequence
gagcatgtccgcatggtcatcatta

SEQ ID NO: 231505 - DNA, 25 bp, Probe Sequence
gagcatgtcttattgagtccctaat

SEQ ID NO: 231506 - DNA, 25 bp, Probe Sequence
gagcatatttcagtgctgtcaccgt

SEQ ID NO: 231507 - DNA, 25 bp, Probe Sequence
gagctgcaattacgtgtcaactgtg

SEQ ID NO: 231508 - DNA, 25 bp, Probe Sequence
gagctgagacagaagtacaacgtgc

SEQ ID NO: 231509 - DNA, 25 bp, Probe Sequence
gagctgaacgggaagctcactggca

SEQ ID NO: 231510 - DNA, 25 bp, Probe Sequence
gagctgaagtgcctggatgctccgg

SEQ ID NO: 231511 - DNA, 25 bp, Probe Sequence
gagctgaagtgcctggatgctccgg

SEQ ID NO: 231512 - DNA, 25 bp, Probe Sequence
gagcgatggtgtcagcatttcggtc

SEQ ID NO: 231513 - DNA, 25 bp, Probe Sequence
gagcgcttattgcgatttcagcctc

SEQ ID NO: 231514 - DNA, 25 bp, Probe Sequence
gagcgctccatacagttctcagagc

SEQ ID NO: 231515 - DNA, 25 bp, Probe Sequence
gagcttccaaaacttatggatcttc

SEQ ID NO: 231516 - DNA, 25 bp, Probe Sequence
gagcttcaacagtactgtatgcaga

SEQ ID NO: 231517 - DNA, 25 bp, Probe Sequence
gagctcccaagatttgcttgaggct

SEQ ID NO: 231518 - DNA, 25 bp, Probe Sequence
gagctggtacagtagtgttggactg

SEQ ID NO: 231519 - DNA, 25 bp, Probe Sequence
gagcagcgatacctagggcggaagt

SEQ ID NO: 231520 - DNA, 25 bp, Probe Sequence
gagcaaccaccatggaccagaagtc

SEQ ID NO: 231521 - DNA, 25 bp, Probe Sequence
gagcatagccaagagagatgccatc

SEQ ID NO: 231522 - DNA, 25 bp, Probe Sequence
gagctagcgagcgagaggcagccgc

SEQ ID NO: 231523 - DNA, 25 bp, Probe Sequence
gagctacgtggccatacagctggcc

SEQ ID NO: 231524 - DNA, 25 bp, Probe Sequence
gagctacttgggccatagctcctgc

SEQ ID NO: 231525 - DNA, 25 bp, Probe Sequence
gagcatacctggaaaatgcttctgt

SEQ ID NO: 231526 - DNA, 25 bp, Probe Sequence
gagctcaccagtaacacctgtgtgt

SEQ ID NO: 231527 - DNA, 25 bp, Probe Sequence
gagctcgccaggaagcacctggctg

SEQ ID NO: 231528 - DNA, 25 bp, Probe Sequence
gagcttgcacagatcagaccgagaa

SEQ ID NO: 231529 - DNA, 25 bp, Probe Sequence
gagcttgcacagatcagaccgagaa

SEQ ID NO: 231530 - DNA, 25 bp, Probe Sequence
gagctggaaggatgacactgagaga

SEQ ID NO: 231531 - DNA, 25 bp, Probe Sequence
gagctggaaggatgacactgagaga

SEQ ID NO: 231532 - DNA, 25 bp, Probe Sequence
gagcgtgcagagcaagaacagcagc

SEQ ID NO: 231533 - DNA, 25 bp, Probe Sequence
gagcagcgcatcagacagaacgtgc

SEQ ID NO: 231534 - DNA, 25 bp, Probe Sequence
gagctggtgcaaggagaagcgtcat

SEQ ID NO: 231535 - DNA, 25 bp, Probe Sequence
gagcaggtagagactgaagccacac

SEQ ID NO: 231536 - DNA, 25 bp, Probe Sequence
gagcatgtgtgcgtatctgaaccat

SEQ ID NO: 231537 - DNA, 25 bp, Probe Sequence
gagctgttgcgtactgtatcatatt

SEQ ID NO: 231538 - DNA, 25 bp, Probe Sequence
gagctgactggtacagtcaaatgac

SEQ ID NO: 231539 - DNA, 25 bp, Probe Sequence
gagctgaggtgtacaggcatgcact

SEQ ID NO: 231540 - DNA, 25 bp, Probe Sequence
gagctgaagctaacgctgcatgatc

SEQ ID NO: 231541 - DNA, 25 bp, Probe Sequence
gagctgggcatctatccagctgtgg

SEQ ID NO: 231542 - DNA, 25 bp, Probe Sequence
gagcagatggcagatgcacatgttg

SEQ ID NO: 231543 - DNA, 25 bp, Probe Sequence
gagcacatcgctgacgctgattgtg

SEQ ID NO: 231544 - DNA, 25 bp, Probe Sequence
gagcagatctcagacagtgtgcggc

SEQ ID NO: 231545 - DNA, 25 bp, Probe Sequence
gagcaattcagatgtgattcgacaa

SEQ ID NO: 231546 - DNA, 25 bp, Probe Sequence
gagcatattcactggtttatttgca

SEQ ID NO: 231547 - DNA, 25 bp, Probe Sequence
gagcatgttaccaaggctttttgtc

SEQ ID NO: 231548 - DNA, 25 bp, Probe Sequence
gagcattgcttacaggttttttgtt

SEQ ID NO: 231549 - DNA, 25 bp, Probe Sequence
gagcattgcattgaagttttaagtt

SEQ ID NO: 231550 - DNA, 25 bp, Probe Sequence
gagcttgcaaatatgttttactttc

SEQ ID NO: 231551 - DNA, 25 bp, Probe Sequence
gagcttaggtgacttttttcttgtt

SEQ ID NO: 231552 - DNA, 25 bp, Probe Sequence
gagctgtagagtgttattttatttt

SEQ ID NO: 231553 - DNA, 25 bp, Probe Sequence
gagctgtgggatatttcttgcttta

SEQ ID NO: 231554 - DNA, 25 bp, Probe Sequence
gagctgtctagtttcattcattctt

SEQ ID NO: 231555 - DNA, 25 bp, Probe Sequence
gagcatttatgcggtattcattggt

SEQ ID NO: 231556 - DNA, 25 bp, Probe Sequence
gagctttggaagtaattttgtgtct

SEQ ID NO: 231557 - DNA, 25 bp, Probe Sequence
gagcatttggaagtcaatttgaggt

SEQ ID NO: 231558 - DNA, 25 bp, Probe Sequence
gagcatttggtggctaaaggagtta

SEQ ID NO: 231559 - DNA, 25 bp, Probe Sequence
gagaagggtgcctcatgggagtcat

SEQ ID NO: 231560 - DNA, 25 bp, Probe Sequence
gagatacgggcacatacggattctt

SEQ ID NO: 231561 - DNA, 25 bp, Probe Sequence
gagaattacagacaacgcgcttttg

SEQ ID NO: 231562 - DNA, 25 bp, Probe Sequence
gagaggtcaagaaaacgtgtctttt

SEQ ID NO: 231563 - DNA, 25 bp, Probe Sequence
gagctcgaaataaaacagatccttc

SEQ ID NO: 231564 - DNA, 25 bp, Probe Sequence
gagctctggctaaataacttcccac

SEQ ID NO: 231565 - DNA, 25 bp, Probe Sequence
gagcttctgccaaatttcattcctc

SEQ ID NO: 231566 - DNA, 25 bp, Probe Sequence
gagctgcttgtcagtttgttcgtct

SEQ ID NO: 231567 - DNA, 25 bp, Probe Sequence
gagctgctcttcatttgatttcgag

SEQ ID NO: 231568 - DNA, 25 bp, Probe Sequence
gagctctggtctgttgtatctctag

SEQ ID NO: 231569 - DNA, 25 bp, Probe Sequence
gagcatctgcagatattggtatcgg

SEQ ID NO: 231570 - DNA, 25 bp, Probe Sequence
gagctccagctcaatgcgagctccg

SEQ ID NO: 231571 - DNA, 25 bp, Probe Sequence
gagctccatttccgagctcctaaga

SEQ ID NO: 231572 - DNA, 25 bp, Probe Sequence
gagctctcaggaagggccctgagga

SEQ ID NO: 231573 - DNA, 25 bp, Probe Sequence
gagctccaggaaatgtccaatcagg

SEQ ID NO: 231574 - DNA, 25 bp, Probe Sequence
gagctgcgttaaattccaagagcat

SEQ ID NO: 231575 - DNA, 25 bp, Probe Sequence
gagcttgtctcaatggatctagaac

SEQ ID NO: 231576 - DNA, 25 bp, Probe Sequence
gagctctgcattcaggcagctgcaa

SEQ ID NO: 231577 - DNA, 25 bp, Probe Sequence
gagcttgcatagtcggcactcagta

SEQ ID NO: 231578 - DNA, 25 bp, Probe Sequence
gagcatagtgactggcacatagtag

SEQ ID NO: 231579 - DNA, 25 bp, Probe Sequence
gagctacagccagggatagagcaga

SEQ ID NO: 231580 - DNA, 25 bp, Probe Sequence
gagcattcagactccaaacagaccc

SEQ ID NO: 231581 - DNA, 25 bp, Probe Sequence
gagcattaaagttcctaagacccag

SEQ ID NO: 231582 - DNA, 25 bp, Probe Sequence
gagcatttcaaggtggccagagaac

SEQ ID NO: 231583 - DNA, 25 bp, Probe Sequence
gagcttgatcgccagtggaagaaga

SEQ ID NO: 231584 - DNA, 25 bp, Probe Sequence
gagcttgactggatggagacaggac

SEQ ID NO: 231585 - DNA, 25 bp, Probe Sequence
gagcttgactctagtttgacattgt

SEQ ID NO: 231586 - DNA, 25 bp, Probe Sequence
gagcttgcccaggacttggcatttc

SEQ ID NO: 231587 - DNA, 25 bp, Probe Sequence
gagcttcaacggccattgagctttg

SEQ ID NO: 231588 - DNA, 25 bp, Probe Sequence
gagcttctaccatcatggacctatt

SEQ ID NO: 231589 - DNA, 25 bp, Probe Sequence
gatctgggactatctgaaactagtg

SEQ ID NO: 231590 - DNA, 25 bp, Probe Sequence
gatctgggattatgtggccttaggt

SEQ ID NO: 231591 - DNA, 25 bp, Probe Sequence
gagcatgggcttcggaggcctatag

SEQ ID NO: 231592 - DNA, 25 bp, Probe Sequence
gagctgcaggtactgctaggcaact

SEQ ID NO: 231593 - DNA, 25 bp, Probe Sequence
gagctgcatggtagttggggatcca

SEQ ID NO: 231594 - DNA, 25 bp, Probe Sequence
gagctgatctgtataggggaggcaa

SEQ ID NO: 231595 - DNA, 25 bp, Probe Sequence
gagctgcttgtttgagtggtgtaaa

SEQ ID NO: 231596 - DNA, 25 bp, Probe Sequence
gagcttcttatgtgttgagtccaaa

SEQ ID NO: 231597 - DNA, 25 bp, Probe Sequence
gagctgtctttgtcgtggagatctg

SEQ ID NO: 231598 - DNA, 25 bp, Probe Sequence
gagctgctcctttgggggaatgttt

SEQ ID NO: 231599 - DNA, 25 bp, Probe Sequence
gagctctcccttggtaagacttatt

SEQ ID NO: 231600 - DNA, 25 bp, Probe Sequence
gagctttcacttgggacaacaacaa

SEQ ID NO: 231601 - DNA, 25 bp, Probe Sequence
gagctctgtcacaagggtactccac

SEQ ID NO: 231602 - DNA, 25 bp, Probe Sequence
gagctgaatatcggggtcattgcca

SEQ ID NO: 231603 - DNA, 25 bp, Probe Sequence
gagctgaacattgggtggtgtccac

SEQ ID NO: 231604 - DNA, 25 bp, Probe Sequence
gagctggagacggcgatggagaccc

SEQ ID NO: 231605 - DNA, 25 bp, Probe Sequence
gagcgggacgacgttgaagccatgg

SEQ ID NO: 231606 - DNA, 25 bp, Probe Sequence
gagctgggaaccgaagagggcagtg

SEQ ID NO: 231607 - DNA, 25 bp, Probe Sequence
gagcaggagcaacagcaacgaggga

SEQ ID NO: 231608 - DNA, 25 bp, Probe Sequence
gagctactgcaacaaaccaagggat

SEQ ID NO: 231609 - DNA, 25 bp, Probe Sequence
gagctactgcggcagaaccagaggg

SEQ ID NO: 231610 - DNA, 25 bp, Probe Sequence
gagctggcgggcaaatacgcagagc

SEQ ID NO: 231611 - DNA, 25 bp, Probe Sequence
gagctgcctggggaatacagcatga

SEQ ID NO: 231612 - DNA, 25 bp, Probe Sequence
gagctggcgttggataccagtaaaa

SEQ ID NO: 231613 - DNA, 25 bp, Probe Sequence
gagcttgcgattgaggagatgtaaa

SEQ ID NO: 231614 - DNA, 25 bp, Probe Sequence
gagctggcaattgcaagcagtaaga

SEQ ID NO: 231615 - DNA, 25 bp, Probe Sequence
gagcaggctatgggaagacggagat

SEQ ID NO: 231616 - DNA, 25 bp, Probe Sequence
gagcacgcctggcaggacatagcag

SEQ ID NO: 231617 - DNA, 25 bp, Probe Sequence
gagcactcatcagggaggacagtca

SEQ ID NO: 231618 - DNA, 25 bp, Probe Sequence
gagcaccatatgtgcattatttcac

SEQ ID NO: 231619 - DNA, 25 bp, Probe Sequence
gagcaacatcaggcctgatttctcc

SEQ ID NO: 231620 - DNA, 25 bp, Probe Sequence
gagcagaacaggggcttccccaagt

SEQ ID NO: 231621 - DNA, 25 bp, Probe Sequence
gagcagagagcagaactccgcagcc

SEQ ID NO: 231622 - DNA, 25 bp, Probe Sequence
gagcatggagcagttcatcgtcagc

SEQ ID NO: 231623 - DNA, 25 bp, Probe Sequence
gagcatgactcaagtgcctgaagcc

SEQ ID NO: 231624 - DNA, 25 bp, Probe Sequence
gagctcaagcaacttcgaagccaaa

SEQ ID NO: 231625 - DNA, 25 bp, Probe Sequence
gagctttgcatactctgagaggcta

SEQ ID NO: 231626 - DNA, 25 bp, Probe Sequence
gagcatctccacctcagtatggaag

SEQ ID NO: 231627 - DNA, 25 bp, Probe Sequence
gagctctcgcccatgatggtgaagc

SEQ ID NO: 231628 - DNA, 25 bp, Probe Sequence
gagctgtcccctagtgagggactgt

SEQ ID NO: 231629 - DNA, 25 bp, Probe Sequence
gagcttcctcctaacagtaggctta

SEQ ID NO: 231630 - DNA, 25 bp, Probe Sequence
gagctgtctttctaacagaagcttt

SEQ ID NO: 231631 - DNA, 25 bp, Probe Sequence
gagctgtctccagagaagattctca

SEQ ID NO: 231632 - DNA, 25 bp, Probe Sequence
gagctgcttcctgagacagatgctc

SEQ ID NO: 231633 - DNA, 25 bp, Probe Sequence
gagcagcttgttgagacctgtcgat

SEQ ID NO: 231634 - DNA, 25 bp, Probe Sequence
gagcagcttgttgagacctgtcgat

SEQ ID NO: 231635 - DNA, 25 bp, Probe Sequence
gagctctttatgtgacctgtcagat

SEQ ID NO: 231636 - DNA, 25 bp, Probe Sequence
gagctcttaataggctaatgtatgt

SEQ ID NO: 231637 - DNA, 25 bp, Probe Sequence
gagctgcctaatagtcatacaggtg

SEQ ID NO: 231638 - DNA, 25 bp, Probe Sequence
gagctccgagcattgtcattcaagg

SEQ ID NO: 231639 - DNA, 25 bp, Probe Sequence
gagctgccgatgtggtgcttagtga

SEQ ID NO: 231640 - DNA, 25 bp, Probe Sequence
gagctcagcagctaaggctttatct

SEQ ID NO: 231641 - DNA, 25 bp, Probe Sequence
gagctcaagagcaggccgtcttaat

SEQ ID NO: 231642 - DNA, 25 bp, Probe Sequence
gagcactagagctcgctcgtgtaat

SEQ ID NO: 231643 - DNA, 25 bp, Probe Sequence
gagctgcaaatgccctctctggtga

SEQ ID NO: 231644 - DNA, 25 bp, Probe Sequence
gagctaatcagaagttctcagatga

SEQ ID NO: 231645 - DNA, 25 bp, Probe Sequence
gagctatatacggctgttgcagcag

SEQ ID NO: 231646 - DNA, 25 bp, Probe Sequence
gagctacagctgggctgggagcatg

SEQ ID NO: 231647 - DNA, 25 bp, Probe Sequence
gagctctagctggatgggcgcagag

SEQ ID NO: 231648 - DNA, 25 bp, Probe Sequence
gagctgtcagtggtggagagtgtct

SEQ ID NO: 231649 - DNA, 25 bp, Probe Sequence
gagctgtcagtggtggagagtgtct

SEQ ID NO: 231650 - DNA, 25 bp, Probe Sequence
gagctgtgcagggaggaaggggtga

SEQ ID NO: 231651 - DNA, 25 bp, Probe Sequence
gagctggaggcggaggagtgcggga

SEQ ID NO: 231652 - DNA, 25 bp, Probe Sequence
gagctggaggcggaggagtgcggga

SEQ ID NO: 231653 - DNA, 25 bp, Probe Sequence
gagcaagaccggcgaggcggagacc

SEQ ID NO: 231654 - DNA, 25 bp, Probe Sequence
gagaagacttctggcagcaacgtaa

SEQ ID NO: 231655 - DNA, 25 bp, Probe Sequence
gagcaagatcttgtgcaaaccctga

SEQ ID NO: 231656 - DNA, 25 bp, Probe Sequence
gagcatttcttccatgcaagcactc

SEQ ID NO: 231657 - DNA, 25 bp, Probe Sequence
gagcagtctcataccatggagagat

SEQ ID NO: 231658 - DNA, 25 bp, Probe Sequence
gagcttcatgcatcctgggagactc

SEQ ID NO: 231659 - DNA, 25 bp, Probe Sequence
gagctcataggaacaggtagacttt

SEQ ID NO: 231660 - DNA, 25 bp, Probe Sequence
gagctcaaggacaggtagagccacc

SEQ ID NO: 231661 - DNA, 25 bp, Probe Sequence
gagctcaaggacaggctacaataca

SEQ ID NO: 231662 - DNA, 25 bp, Probe Sequence
gagctcaatgtgataagcccaacaa

SEQ ID NO: 231663 - DNA, 25 bp, Probe Sequence
gagctgattgtgctaagccctgtca

SEQ ID NO: 231664 - DNA, 25 bp, Probe Sequence
gagcatttggccagaggcactgaca

SEQ ID NO: 231665 - DNA, 25 bp, Probe Sequence
gagcatgtaggcaaacagaggcgaa

SEQ ID NO: 231666 - DNA, 25 bp, Probe Sequence
gagcagtgaagccaagccaggaaac

SEQ ID NO: 231667 - DNA, 25 bp, Probe Sequence
gagcagttagctcatttgagataaa

SEQ ID NO: 231668 - DNA, 25 bp, Probe Sequence
gagcagttagctcatttgagataaa

SEQ ID NO: 231669 - DNA, 25 bp, Probe Sequence
gagcagttagctcatttgagataaa

SEQ ID NO: 231670 - DNA, 25 bp, Probe Sequence
gagcagttagctcatttgagataaa

SEQ ID NO: 231671 - DNA, 25 bp, Probe Sequence
gagcaggtgattctatgtccaagac

SEQ ID NO: 231672 - DNA, 25 bp, Probe Sequence
gagctcgtggctcattgaggacggc

SEQ ID NO: 231673 - DNA, 25 bp, Probe Sequence
gagctggtggcgggagggacagccc

SEQ ID NO: 231674 - DNA, 25 bp, Probe Sequence
gagctggggagaggtggcagagggc

SEQ ID NO: 231675 - DNA, 25 bp, Probe Sequence
gagctcgaggagcggatgcagcggt

SEQ ID NO: 231676 - DNA, 25 bp, Probe Sequence
gagcatcgagtgctcaggcaggcgc

SEQ ID NO: 231677 - DNA, 25 bp, Probe Sequence
gagcatctgaagaacgccaaccagc

SEQ ID NO: 231678 - DNA, 25 bp, Probe Sequence
gagcacatgaagtcatccgaacaca

SEQ ID NO: 231679 - DNA, 25 bp, Probe Sequence
gagcacagctgagcatctgaagaac

SEQ ID NO: 231680 - DNA, 25 bp, Probe Sequence
gagcagatcaggacacttagcaaat

SEQ ID NO: 231681 - DNA, 25 bp, Probe Sequence
gagcaactggacgcacacagtattt

SEQ ID NO: 231682 - DNA, 25 bp, Probe Sequence
gagaaagtgactgaccacctggaag

SEQ ID NO: 231683 - DNA, 25 bp, Probe Sequence
gagaaaaagctgaaccaggcccttt

SEQ ID NO: 231684 - DNA, 25 bp, Probe Sequence
gagtatccatgggaaccaagcccct

SEQ ID NO: 231685 - DNA, 25 bp, Probe Sequence
gagttacttcctaaaaggccactct

SEQ ID NO: 231686 - DNA, 25 bp, Probe Sequence
gagcttggctcttttttaggaactt

SEQ ID NO: 231687 - DNA, 25 bp, Probe Sequence
gaggttgtttccactaggagatttt

SEQ ID NO: 231688 - DNA, 25 bp, Probe Sequence
gaggttgtttccactaggagatttt

SEQ ID NO: 231689 - DNA, 25 bp, Probe Sequence
gagcagtagcatttgccttttgggt

SEQ ID NO: 231690 - DNA, 25 bp, Probe Sequence
gagctgtcagcaagacggtgtatgg

SEQ ID NO: 231691 - DNA, 25 bp, Probe Sequence
gagctgcaaaatccggtgtaggcac

SEQ ID NO: 231692 - DNA, 25 bp, Probe Sequence
gagacgaaattcagattaggagata

SEQ ID NO: 231693 - DNA, 25 bp, Probe Sequence
gagaagaaacctactacagaggaga

SEQ ID NO: 231694 - DNA, 25 bp, Probe Sequence
gagctagattcatatcctaagtaaa

SEQ ID NO: 231695 - DNA, 25 bp, Probe Sequence
gagctcacatctttaacagaagaaa

SEQ ID NO: 231696 - DNA, 25 bp, Probe Sequence
gagcatcaatcttgttactgctgat

SEQ ID NO: 231697 - DNA, 25 bp, Probe Sequence
gagcatcaatcttgttactgctgat

SEQ ID NO: 231698 - DNA, 25 bp, Probe Sequence
gagctgagatcgtgctactgcagtc

SEQ ID NO: 231699 - DNA, 25 bp, Probe Sequence
gagctgagaagaggccagtgcactc

SEQ ID NO: 231700 - DNA, 25 bp, Probe Sequence
gagctgagatcatgccactacactc

SEQ ID NO: 231701 - DNA, 25 bp, Probe Sequence
gagctatgatgatgccactgtactg

SEQ ID NO: 231702 - DNA, 25 bp, Probe Sequence
gagctgactaatcatgctgttctgc

SEQ ID NO: 231703 - DNA, 25 bp, Probe Sequence
gagctacttagagtgtggtctcccc

SEQ ID NO: 231704 - DNA, 25 bp, Probe Sequence
gagctgcacttaactgttctctttc

SEQ ID NO: 231705 - DNA, 25 bp, Probe Sequence
gagcatgtatttgcttttgagtctc

SEQ ID NO: 231706 - DNA, 25 bp, Probe Sequence
gagcattccgatgtgattgatagtc

SEQ ID NO: 231707 - DNA, 25 bp, Probe Sequence
gagcagttccagcagggcaagcttc

SEQ ID NO: 231708 - DNA, 25 bp, Probe Sequence
gagcagttccagcagggcaagcttc

SEQ ID NO: 231709 - DNA, 25 bp, Probe Sequence
gagagactacgcaggaaagccccag

SEQ ID NO: 231710 - DNA, 25 bp, Probe Sequence
gagagatcgtacgggactttcccag

SEQ ID NO: 231711 - DNA, 25 bp, Probe Sequence
gagaacttacggcagaggagccaga

SEQ ID NO: 231712 - DNA, 25 bp, Probe Sequence
gagagcagttactggggtcacccaa

SEQ ID NO: 231713 - DNA, 25 bp, Probe Sequence
gagaagtttgaggacaggtccccag

SEQ ID NO: 231714 - DNA, 25 bp, Probe Sequence
gagaggatttagttaggtcattaag

SEQ ID NO: 231715 - DNA, 25 bp, Probe Sequence
gagataaattaacacgatgattaca

SEQ ID NO: 231716 - DNA, 25 bp, Probe Sequence
gagttacactaacaaacttgaaagt

SEQ ID NO: 231717 - DNA, 25 bp, Probe Sequence
gagattaaatacttgaaattggaaa

SEQ ID NO: 231718 - DNA, 25 bp, Probe Sequence
gaggtcaaaatcaagttattggcag

SEQ ID NO: 231719 - DNA, 25 bp, Probe Sequence
gagcagtcaagagccaaggagaaag

SEQ ID NO: 231720 - DNA, 25 bp, Probe Sequence
gagactccaggcactaaggaaagct

SEQ ID NO: 231721 - DNA, 25 bp, Probe Sequence
gagaagccaatcattaaggtgacag

SEQ ID NO: 231722 - DNA, 25 bp, Probe Sequence
gagaatgtcctatttgggagggcag

SEQ ID NO: 231723 - DNA, 25 bp, Probe Sequence
gagctcatcaacacctgggtggcca

SEQ ID NO: 231724 - DNA, 25 bp, Probe Sequence
gagctgctaaagtcctaccagtgga

SEQ ID NO: 231725 - DNA, 25 bp, Probe Sequence
gagctccgaatgtgcttaagtggaa

SEQ ID NO: 231726 - DNA, 25 bp, Probe Sequence
gagctccagaagcgcttggacaggc

SEQ ID NO: 231727 - DNA, 25 bp, Probe Sequence
gagctacatgatcaacttggaggtg

SEQ ID NO: 231728 - DNA, 25 bp, Probe Sequence
gagctgagctgattaagctgagtgg

SEQ ID NO: 231729 - DNA, 25 bp, Probe Sequence
gagctgacgatgaagttgatgtgga

SEQ ID NO: 231730 - DNA, 25 bp, Probe Sequence
gagctgactatgaagctgagcgtgg

SEQ ID NO: 231731 - DNA, 25 bp, Probe Sequence
gagctactctcaggctgcaatgtga

SEQ ID NO: 231732 - DNA, 25 bp, Probe Sequence
gagctactctcaggctgcaatgtga

SEQ ID NO: 231733 - DNA, 25 bp, Probe Sequence
gagctaatcattgcatgtgcatgga

SEQ ID NO: 231734 - DNA, 25 bp, Probe Sequence
gagctgagctcattcttgatggatg

SEQ ID NO: 231735 - DNA, 25 bp, Probe Sequence
gagcatcgtcattcttcaggattgc

SEQ ID NO: 231736 - DNA, 25 bp, Probe Sequence
gagcatcgtcattcttcaggattgc

SEQ ID NO: 231737 - DNA, 25 bp, Probe Sequence
gagcatcgtcattcttcaggattgc

SEQ ID NO: 231738 - DNA, 25 bp, Probe Sequence
gagcatcgtcattcttcaggattgc

SEQ ID NO: 231739 - DNA, 25 bp, Probe Sequence
gagcaccattccttaggtagagact

SEQ ID NO: 231740 - DNA, 25 bp, Probe Sequence
gagcttctttcacagtgttgatgac

SEQ ID NO: 231741 - DNA, 25 bp, Probe Sequence
gagctttattatcagtttaaccctc

SEQ ID NO: 231742 - DNA, 25 bp, Probe Sequence
gagctttatttggtgcatttaacgc

SEQ ID NO: 231743 - DNA, 25 bp, Probe Sequence
gatctctaatttgtttataaaggtg

SEQ ID NO: 231744 - DNA, 25 bp, Probe Sequence
gagctcttctagccctttataaaag

SEQ ID NO: 231745 - DNA, 25 bp, Probe Sequence
gagcatgcttttctttattaaaatt

SEQ ID NO: 231746 - DNA, 25 bp, Probe Sequence
gagcatgttttcagtcttttaggat

SEQ ID NO: 231747 - DNA, 25 bp, Probe Sequence
gagcattccagtaacttttttgtgt

SEQ ID NO: 231748 - DNA, 25 bp, Probe Sequence
gagctccacagatccatttttaggg

SEQ ID NO: 231749 - DNA, 25 bp, Probe Sequence
gagttccacaacttttttagtagct

SEQ ID NO: 231750 - DNA, 25 bp, Probe Sequence
gagttgaaaacgtttgtctatgtaa

SEQ ID NO: 231751 - DNA, 25 bp, Probe Sequence
gagcttaagatctggtgttttgtta

SEQ ID NO: 231752 - DNA, 25 bp, Probe Sequence
gagcttagtggatgggtgtgtgtgt

SEQ ID NO: 231753 - DNA, 25 bp, Probe Sequence
gagcttagtggatgggtgtgtgtgt

SEQ ID NO: 231754 - DNA, 25 bp, Probe Sequence
gagctctttggcaaactggcgagtg

SEQ ID NO: 231755 - DNA, 25 bp, Probe Sequence
gagcatctttgtagtaggacgcgtg

SEQ ID NO: 231756 - DNA, 25 bp, Probe Sequence
gagctttctgctaacatggggaggt

SEQ ID NO: 231757 - DNA, 25 bp, Probe Sequence
gagctcttctctgagctggcagaag

SEQ ID NO: 231758 - DNA, 25 bp, Probe Sequence
gagcacatttgggagctggagaaca

SEQ ID NO: 231759 - DNA, 25 bp, Probe Sequence
gagcactgtgtatgactgaaatttc

SEQ ID NO: 231760 - DNA, 25 bp, Probe Sequence
gagcacgagctaaagtaaaatatct

SEQ ID NO: 231761 - DNA, 25 bp, Probe Sequence
gagctcagagcctaaggaaagactg

SEQ ID NO: 231762 - DNA, 25 bp, Probe Sequence
gagctgctatgattaagtcaataca

SEQ ID NO: 231763 - DNA, 25 bp, Probe Sequence
gagctgcatagatccagtaatgtac

SEQ ID NO: 231764 - DNA, 25 bp, Probe Sequence
gagctgcagcaataaaagtgctatg

SEQ ID NO: 231765 - DNA, 25 bp, Probe Sequence
gagctcaggaggttaaggctgcagt

SEQ ID NO: 231766 - DNA, 25 bp, Probe Sequence
gagcactgggggtggtgccagtttg

SEQ ID NO: 231767 - DNA, 25 bp, Probe Sequence
gagaaggaggagtgtgcccgtgttg

SEQ ID NO: 231768 - DNA, 25 bp, Probe Sequence
gagtagggggccagagcactttgat

SEQ ID NO: 231769 - DNA, 25 bp, Probe Sequence
gagtcagagtcctgggaccatcttg

SEQ ID NO: 231770 - DNA, 25 bp, Probe Sequence
gagaagatgacccgtggaacacttg

SEQ ID NO: 231771 - DNA, 25 bp, Probe Sequence
gagtatgggctccggaataaacgtg

SEQ ID NO: 231772 - DNA, 25 bp, Probe Sequence
gagtatgggctccggaacaaacgtg

SEQ ID NO: 231773 - DNA, 25 bp, Probe Sequence
gagcaaggcccttatgccaaaacgt

SEQ ID NO: 231774 - DNA, 25 bp, Probe Sequence
gagcataagtcctctccaacagaat

SEQ ID NO: 231775 - DNA, 25 bp, Probe Sequence
gagataacatacgcccaaataatag

SEQ ID NO: 231776 - DNA, 25 bp, Probe Sequence
gagaaactccctaaaaacaaagcat

SEQ ID NO: 231777 - DNA, 25 bp, Probe Sequence
gaggaaacccacactaacgagttca

SEQ ID NO: 231778 - DNA, 25 bp, Probe Sequence
gagaagaactaagcctttgggtcca

SEQ ID NO: 231779 - DNA, 25 bp, Probe Sequence
gagacaacctaacactttggacatc

SEQ ID NO: 231780 - DNA, 25 bp, Probe Sequence
gagaatacctagctactatttaagc

SEQ ID NO: 231781 - DNA, 25 bp, Probe Sequence
gagcagatgtcctagaaggttttag

SEQ ID NO: 231782 - DNA, 25 bp, Probe Sequence
gagagttcctaaagggttactggct

SEQ ID NO: 231783 - DNA, 25 bp, Probe Sequence
gagcagtttaactgggtgtcccggc

SEQ ID NO: 231784 - DNA, 25 bp, Probe Sequence
gagcatgcttttttaaggtatcacc

SEQ ID NO: 231785 - DNA, 25 bp, Probe Sequence
gagcaccactttgagggcattgccc

SEQ ID NO: 231786 - DNA, 25 bp, Probe Sequence
gagcagaagtatgcaagactgattc

SEQ ID NO: 231787 - DNA, 25 bp, Probe Sequence
gagcttgaatcaaccaatctgatct

SEQ ID NO: 231788 - DNA, 25 bp, Probe Sequence
gagcttaagtcccatgcatttgctc

SEQ ID NO: 231789 - DNA, 25 bp, Probe Sequence
gagcttaactctgacatatgatgtg

SEQ ID NO: 231790 - DNA, 25 bp, Probe Sequence
gagggacactcaggagctcattttc

SEQ ID NO: 231791 - DNA, 25 bp, Probe Sequence
gagaaatgcctagtgtctattttat

SEQ ID NO: 231792 - DNA, 25 bp, Probe Sequence
gtgaagtccccatctaaattgcagg

SEQ ID NO: 231793 - DNA, 25 bp, Probe Sequence
gagcaggtccctttctagagatagg

SEQ ID NO: 231794 - DNA, 25 bp, Probe Sequence
gagcaaggtccttccatagtgacgc

SEQ ID NO: 231795 - DNA, 25 bp, Probe Sequence
gagcaaggtccatggataaagtcat

SEQ ID NO: 231796 - DNA, 25 bp, Probe Sequence
gagaaggctcactggaaggttcctg

SEQ ID NO: 231797 - DNA, 25 bp, Probe Sequence
gagaaggattatgaggaggttggtg

SEQ ID NO: 231798 - DNA, 25 bp, Probe Sequence
gagcacagggttgggggtaaggtca

SEQ ID NO: 231799 - DNA, 25 bp, Probe Sequence
gagaagaggttgaggagtaagctta

SEQ ID NO: 231800 - DNA, 25 bp, Probe Sequence
gagaaagtgttcatctgaggactgc

SEQ ID NO: 231801 - DNA, 25 bp, Probe Sequence
gagaaagtgttcatctgaggactgc

SEQ ID NO: 231802 - DNA, 25 bp, Probe Sequence
gagttagatttcagagtccaggccc

SEQ ID NO: 231803 - DNA, 25 bp, Probe Sequence
gagactaatttgagagtacaggtgc

SEQ ID NO: 231804 - DNA, 25 bp, Probe Sequence
gagcagaacattttggtctagggtg

SEQ ID NO: 231805 - DNA, 25 bp, Probe Sequence
gagcagatagctattcattccagat

SEQ ID NO: 231806 - DNA, 25 bp, Probe Sequence
gagcagatagctattcattccagat

SEQ ID NO: 231807 - DNA, 25 bp, Probe Sequence
gagcagatagctattcattccagat

SEQ ID NO: 231808 - DNA, 25 bp, Probe Sequence
gagcacacagctcttcttaaaattg

SEQ ID NO: 231809 - DNA, 25 bp, Probe Sequence
gagaagcatgcaccagtcatgtgaa

SEQ ID NO: 231810 - DNA, 25 bp, Probe Sequence
gagcagagatcacaccactgcactc

SEQ ID NO: 231811 - DNA, 25 bp, Probe Sequence
gagcaacatgcagatctacagcgcc

SEQ ID NO: 231812 - DNA, 25 bp, Probe Sequence
gagcttcatcatgaccagaagcttg

SEQ ID NO: 231813 - DNA, 25 bp, Probe Sequence
gatcgccatcatgaacgacaccgta

SEQ ID NO: 231814 - DNA, 25 bp, Probe Sequence
gatcggcgagtatgggctccggaac

SEQ ID NO: 231815 - DNA, 25 bp, Probe Sequence
gagcagtggaaatggttccttgcaa

SEQ ID NO: 231816 - DNA, 25 bp, Probe Sequence
gagcagtcaaaatttattccctggg

SEQ ID NO: 231817 - DNA, 25 bp, Probe Sequence
gagcagtccatatagtactactttt

SEQ ID NO: 231818 - DNA, 25 bp, Probe Sequence
gagcagtcactctcagaatcttgat

SEQ ID NO: 231819 - DNA, 25 bp, Probe Sequence
gagcaggattcactaaacttgtgtt

SEQ ID NO: 231820 - DNA, 25 bp, Probe Sequence
gagcagtcagtacataccagtttct

SEQ ID NO: 231821 - DNA, 25 bp, Probe Sequence
gagcattcactgtgttccaggtctt

SEQ ID NO: 231822 - DNA, 25 bp, Probe Sequence
gagctaacttgaactctcagtctct

SEQ ID NO: 231823 - DNA, 25 bp, Probe Sequence
gagcaaactagggtctcagtattga

SEQ ID NO: 231824 - DNA, 25 bp, Probe Sequence
gagcatggactcttggtccgttctc

SEQ ID NO: 231825 - DNA, 25 bp, Probe Sequence
gagcaggttagtctcacagttgctg

SEQ ID NO: 231826 - DNA, 25 bp, Probe Sequence
gagcagcggacaagttcaatggtgt

SEQ ID NO: 231827 - DNA, 25 bp, Probe Sequence
gagcagaggcagagtatttgtctta

SEQ ID NO: 231828 - DNA, 25 bp, Probe Sequence
gagcatagacaattctattgtgctt

SEQ ID NO: 231829 - DNA, 25 bp, Probe Sequence
gagcattagatttctcatttgccaa

SEQ ID NO: 231830 - DNA, 25 bp, Probe Sequence
gagcattacatcattttgtccataa

SEQ ID NO: 231831 - DNA, 25 bp, Probe Sequence
gagcatcttgccctttaatcagcat

SEQ ID NO: 231832 - DNA, 25 bp, Probe Sequence
gagctcatgggcctcaaacaggtat

SEQ ID NO: 231833 - DNA, 25 bp, Probe Sequence
gagctcatgggattacataactgtg

SEQ ID NO: 231834 - DNA, 25 bp, Probe Sequence
gagcttgctggacgacatgaaccac

SEQ ID NO: 231835 - DNA, 25 bp, Probe Sequence
gagcacctggagcgcatgaagcggc

SEQ ID NO: 231836 - DNA, 25 bp, Probe Sequence
gagcacttagtgctgcaacagaagc

SEQ ID NO: 231837 - DNA, 25 bp, Probe Sequence
gagcaggttgcttccataagacagc

SEQ ID NO: 231838 - DNA, 25 bp, Probe Sequence
gagagctgtagcaaccattaaatgg

SEQ ID NO: 231839 - DNA, 25 bp, Probe Sequence
gagcagctgttcgaatcatctgata

SEQ ID NO: 231840 - DNA, 25 bp, Probe Sequence
gagcatggatatagaacatttcatc

SEQ ID NO: 231841 - DNA, 25 bp, Probe Sequence
gagcattgtgcaatacagtttcatt

SEQ ID NO: 231842 - DNA, 25 bp, Probe Sequence
gagcatctctataacatgatcatcc

SEQ ID NO: 231843 - DNA, 25 bp, Probe Sequence
gagctatgtatgaccaacacctctg

SEQ ID NO: 231844 - DNA, 25 bp, Probe Sequence
gagaatgctgatgccataactttat

SEQ ID NO: 231845 - DNA, 25 bp, Probe Sequence
gagactgatgatgtcccatctaaac

SEQ ID NO: 231846 - DNA, 25 bp, Probe Sequence
gagcatctggattctgcctaataaa

SEQ ID NO: 231847 - DNA, 25 bp, Probe Sequence
gagcatctggattctgcctaataaa

SEQ ID NO: 231848 - DNA, 25 bp, Probe Sequence
gagcatctggattctgcctaataaa

SEQ ID NO: 231849 - DNA, 25 bp, Probe Sequence
gagcactggattggatctttagcca

SEQ ID NO: 231850 - DNA, 25 bp, Probe Sequence
gagcatcatgaactcgtttgtaaac

SEQ ID NO: 231851 - DNA, 25 bp, Probe Sequence
gagcatataacccagacttgaaaaa

SEQ ID NO: 231852 - DNA, 25 bp, Probe Sequence
gagaataacctcatagtaccaacat

SEQ ID NO: 231853 - DNA, 25 bp, Probe Sequence
gagtcaaagtatctcaaacctgaat

SEQ ID NO: 231854 - DNA, 25 bp, Probe Sequence
gatgactacagactttgcgaacgct

SEQ ID NO: 231855 - DNA, 25 bp, Probe Sequence
gagcagctcagcttggttgaaactg

SEQ ID NO: 231856 - DNA, 25 bp, Probe Sequence
gagactcagaatggtttactctaac

SEQ ID NO: 231857 - DNA, 25 bp, Probe Sequence
gagcaggcagtgattttgttccaaa

SEQ ID NO: 231858 - DNA, 25 bp, Probe Sequence
gagcagtgaggtttgttctttccag

SEQ ID NO: 231859 - DNA, 25 bp, Probe Sequence
gagcaggaagattctgagacatttc

SEQ ID NO: 231860 - DNA, 25 bp, Probe Sequence
gagcagggaatgttgtatctttgga

SEQ ID NO: 231861 - DNA, 25 bp, Probe Sequence
gagcagggacagtcattttttaaat

SEQ ID NO: 231862 - DNA, 25 bp, Probe Sequence
gagcagggacagtcattttttaaat

SEQ ID NO: 231863 - DNA, 25 bp, Probe Sequence
gagcagaggatggatcttatttata

SEQ ID NO: 231864 - DNA, 25 bp, Probe Sequence
gagcataggatgcattcttattgaa

SEQ ID NO: 231865 - DNA, 25 bp, Probe Sequence
gagcataggatgcattcttattgaa

SEQ ID NO: 231866 - DNA, 25 bp, Probe Sequence
gagcatatgcgtgtgattatttgga

SEQ ID NO: 231867 - DNA, 25 bp, Probe Sequence
gagaaggctggggctcatttgcagg

SEQ ID NO: 231868 - DNA, 25 bp, Probe Sequence
gagaaggctggggctcatttgcagg

SEQ ID NO: 231869 - DNA, 25 bp, Probe Sequence
gagaattggctagccatgtgcagag

SEQ ID NO: 231870 - DNA, 25 bp, Probe Sequence
gagaatttccaccattgtagagaat

SEQ ID NO: 231871 - DNA, 25 bp, Probe Sequence
gagaatttccaacgtatactaactt

SEQ ID NO: 231872 - DNA, 25 bp, Probe Sequence
gagagattcctatagttcaccgagt

SEQ ID NO: 231873 - DNA, 25 bp, Probe Sequence
gagaacattcttcagtttccctgct

SEQ ID NO: 231874 - DNA, 25 bp, Probe Sequence
gagaacgtgcttaagaatccactat

SEQ ID NO: 231875 - DNA, 25 bp, Probe Sequence
gagaacgtgcttaagaatccactat

SEQ ID NO: 231876 - DNA, 25 bp, Probe Sequence
gagcaggcgccattataaatatcaa

SEQ ID NO: 231877 - DNA, 25 bp, Probe Sequence
gagcaggagccatcaaagaagcaga

SEQ ID NO: 231878 - DNA, 25 bp, Probe Sequence
gatagggccaaggagaaaacaacca

SEQ ID NO: 231879 - DNA, 25 bp, Probe Sequence
gagaaggcccagggaaccctgacca

SEQ ID NO: 231880 - DNA, 25 bp, Probe Sequence
gagaagggacaagccaccttgaccg

SEQ ID NO: 231881 - DNA, 25 bp, Probe Sequence
taggacagggaacacctttgcccca

SEQ ID NO: 231882 - DNA, 25 bp, Probe Sequence
taggacagggaacacctttgcccca

SEQ ID NO: 231883 - DNA, 25 bp, Probe Sequence
gatctgggggaacacgtctttagtc

SEQ ID NO: 231884 - DNA, 25 bp, Probe Sequence
gatttcgttatatcccctttagaat

SEQ ID NO: 231885 - DNA, 25 bp, Probe Sequence
gagactgtgtttatctccctttaaa

SEQ ID NO: 231886 - DNA, 25 bp, Probe Sequence
gagatttttataaaccctctccagc

SEQ ID NO: 231887 - DNA, 25 bp, Probe Sequence
gagatttttataaaccctctccagc

SEQ ID NO: 231888 - DNA, 25 bp, Probe Sequence
gagctagttgttaaacctttaccag

SEQ ID NO: 231889 - DNA, 25 bp, Probe Sequence
gagctagttctttagtagttaaaca

SEQ ID NO: 231890 - DNA, 25 bp, Probe Sequence
gagcatatttttattagttaatgtc

SEQ ID NO: 231891 - DNA, 25 bp, Probe Sequence
gagaattcctctatttgttcagatc

SEQ ID NO: 231892 - DNA, 25 bp, Probe Sequence
gagaattcacacttattgagtaact

SEQ ID NO: 231893 - DNA, 25 bp, Probe Sequence
gagcaaacaccagttgtggttcatg

SEQ ID NO: 231894 - DNA, 25 bp, Probe Sequence
gagcaaaaactatgggttgtaattt

SEQ ID NO: 231895 - DNA, 25 bp, Probe Sequence
gagctaaaactctaacctcttaata

SEQ ID NO: 231896 - DNA, 25 bp, Probe Sequence
gagctaaaactctaacctcttaata

SEQ ID NO: 231897 - DNA, 25 bp, Probe Sequence
gagtggcaaacttcagacggttcca

SEQ ID NO: 231898 - DNA, 25 bp, Probe Sequence
gaggccaagatttaccacgtttgcc

SEQ ID NO: 231899 - DNA, 25 bp, Probe Sequence
gagtctcagggcaaaccctttcgag

SEQ ID NO: 231900 - DNA, 25 bp, Probe Sequence
gagcacgaaggcaaaccctactgca

SEQ ID NO: 231901 - DNA, 25 bp, Probe Sequence
gagcactgaccagaacacttcgctc

SEQ ID NO: 231902 - DNA, 25 bp, Probe Sequence
gagaatactacaaacacctctacgc

SEQ ID NO: 231903 - DNA, 25 bp, Probe Sequence
gagaaatctgaaaaccccatttgct

SEQ ID NO: 231904 - DNA, 25 bp, Probe Sequence
gagaaatatggaaaccgtcttaatt

SEQ ID NO: 231905 - DNA, 25 bp, Probe Sequence
gagcagagtttacagctcctttaat

SEQ ID NO: 231906 - DNA, 25 bp, Probe Sequence
gagaagccttaaagcatcctttctt

SEQ ID NO: 231907 - DNA, 25 bp, Probe Sequence
gagaagccttaaagcatcctttctt

SEQ ID NO: 231908 - DNA, 25 bp, Probe Sequence
gagaagccttaaagcatcctttctt

SEQ ID NO: 231909 - DNA, 25 bp, Probe Sequence
gagaaccttaaagccaatgtctgcg

SEQ ID NO: 231910 - DNA, 25 bp, Probe Sequence
gagaagtcttactcttctaggtccc

SEQ ID NO: 231911 - DNA, 25 bp, Probe Sequence
gagaatggtgtaccctttatttctt

SEQ ID NO: 231912 - DNA, 25 bp, Probe Sequence
gagaaggtggggactttgtttgctg

SEQ ID NO: 231913 - DNA, 25 bp, Probe Sequence
gagagaggtggagctccttgtttcc

SEQ ID NO: 231914 - DNA, 25 bp, Probe Sequence
gagaggagatggaccctggtattac

SEQ ID NO: 231915 - DNA, 25 bp, Probe Sequence
gagagtgaggacacctacttgtaac

SEQ ID NO: 231916 - DNA, 25 bp, Probe Sequence
gagcaagagaagaccctcactagta

SEQ ID NO: 231917 - DNA, 25 bp, Probe Sequence
gagcagatgtacacccgagtagaag

SEQ ID NO: 231918 - DNA, 25 bp, Probe Sequence
gagcagcataataatcccgggagaa

SEQ ID NO: 231919 - DNA, 25 bp, Probe Sequence
gagcagcagagatgtccagggtaca

SEQ ID NO: 231920 - DNA, 25 bp, Probe Sequence
gagcagagcagcagctccgtgaaga

SEQ ID NO: 231921 - DNA, 25 bp, Probe Sequence
gagcagaacttggcagcggcagagg

SEQ ID NO: 231922 - DNA, 25 bp, Probe Sequence
gagcagaaagtgtttcagcagagca

SEQ ID NO: 231923 - DNA, 25 bp, Probe Sequence
gagcagaaggtgacatctccaatgt

SEQ ID NO: 231924 - DNA, 25 bp, Probe Sequence
gagcataaggtttatctcaagtctc

SEQ ID NO: 231925 - DNA, 25 bp, Probe Sequence
gagcttcaggtatatcccagtgctg

SEQ ID NO: 231926 - DNA, 25 bp, Probe Sequence
gagttccgttatgccaagatgccag

SEQ ID NO: 231927 - DNA, 25 bp, Probe Sequence
gagcttcagcggaattcgaaatggc

SEQ ID NO: 231928 - DNA, 25 bp, Probe Sequence
gagctaaagattttggtcatgtaca

SEQ ID NO: 231929 - DNA, 25 bp, Probe Sequence
gagcatctgaaattttgtttgtaca

SEQ ID NO: 231930 - DNA, 25 bp, Probe Sequence
gagcatgcagattttgcaggtgtgg

SEQ ID NO: 231931 - DNA, 25 bp, Probe Sequence
gatctgcaatggtcagctgtgcttg

SEQ ID NO: 231932 - DNA, 25 bp, Probe Sequence
gagcagagatgcatcagctcgcctg

SEQ ID NO: 231933 - DNA, 25 bp, Probe Sequence
gagaagagctacgagctgcctgacg

SEQ ID NO: 231934 - DNA, 25 bp, Probe Sequence
gagcatggacaagggcttctgaggc

SEQ ID NO: 231935 - DNA, 25 bp, Probe Sequence
gagcaggcacatagtgagcccgggc

SEQ ID NO: 231936 - DNA, 25 bp, Probe Sequence
gagcaggcagaaggacaccaagcgc

SEQ ID NO: 231937 - DNA, 25 bp, Probe Sequence
gagcaggctgcagagagactaaggg

SEQ ID NO: 231938 - DNA, 25 bp, Probe Sequence
gagcagctctgggggaataagggca

SEQ ID NO: 231939 - DNA, 25 bp, Probe Sequence
gagcatgcgggggaagagaactgac

SEQ ID NO: 231940 - DNA, 25 bp, Probe Sequence
gagcagctcggggtcagagagcaca

SEQ ID NO: 231941 - DNA, 25 bp, Probe Sequence
gagcatgccagtgagggagcacacc

SEQ ID NO: 231942 - DNA, 25 bp, Probe Sequence
gagcatccatctagcagggggaggc

SEQ ID NO: 231943 - DNA, 25 bp, Probe Sequence
gagcacgtgcattgcagggaggaga

SEQ ID NO: 231944 - DNA, 25 bp, Probe Sequence
gagcactgctcatgtgtggatgccc

SEQ ID NO: 231945 - DNA, 25 bp, Probe Sequence
gagcactgcttcattgtggctcagc

SEQ ID NO: 231946 - DNA, 25 bp, Probe Sequence
gagcacctgctagtctggtgtcagc

SEQ ID NO: 231947 - DNA, 25 bp, Probe Sequence
gagcatcttccaggctgagatgtcg

SEQ ID NO: 231948 - DNA, 25 bp, Probe Sequence
gagactgctccccagagatttgaat

SEQ ID NO: 231949 - DNA, 25 bp, Probe Sequence
gagcagctggaggccgaagttggag

SEQ ID NO: 231950 - DNA, 25 bp, Probe Sequence
gagcagctggaggccgaagttggag

SEQ ID NO: 231951 - DNA, 25 bp, Probe Sequence
gagcagcttgatggcctagaaaaga

SEQ ID NO: 231952 - DNA, 25 bp, Probe Sequence
gagaattcttgcctaggaaaacagg

SEQ ID NO: 231953 - DNA, 25 bp, Probe Sequence
gagaaccaagcccggaagtacatga

SEQ ID NO: 231954 - DNA, 25 bp, Probe Sequence
gagaacctcaccagaaagtattcaa

SEQ ID NO: 231955 - DNA, 25 bp, Probe Sequence
gagaacttcccttgcaaattatttt

SEQ ID NO: 231956 - DNA, 25 bp, Probe Sequence
gagcaactttccagcagtacatttg

SEQ ID NO: 231957 - DNA, 25 bp, Probe Sequence
gagcaactttccagcagtacatttg

SEQ ID NO: 231958 - DNA, 25 bp, Probe Sequence
gagaagttacgagactacatctgga

SEQ ID NO: 231959 - DNA, 25 bp, Probe Sequence
gagacaaaacgagacttcatttaaa

SEQ ID NO: 231960 - DNA, 25 bp, Probe Sequence
gagcaagaacagcagctacttcgtg

SEQ ID NO: 231961 - DNA, 25 bp, Probe Sequence
gagcatagacactcacttcatattt

SEQ ID NO: 231962 - DNA, 25 bp, Probe Sequence
gagcaggaacttctgtgtatatctg

SEQ ID NO: 231963 - DNA, 25 bp, Probe Sequence
gagagggatcgtcctcattcagact

SEQ ID NO: 231964 - DNA, 25 bp, Probe Sequence
gagagggaccatccaaatacctaag

SEQ ID NO: 231965 - DNA, 25 bp, Probe Sequence
gagatgggcccaaccaaaatctgcc

SEQ ID NO: 231966 - DNA, 25 bp, Probe Sequence
gagcttccccaactcataaatgcca

SEQ ID NO: 231967 - DNA, 25 bp, Probe Sequence
gagctattcacgttgccattaatgc

SEQ ID NO: 231968 - DNA, 25 bp, Probe Sequence
gagcatttcctgtgagcatacaacc

SEQ ID NO: 231969 - DNA, 25 bp, Probe Sequence
gagcttgacctaaggatatgcatta

SEQ ID NO: 231970 - DNA, 25 bp, Probe Sequence
gagctatgggataagagcattgcat

SEQ ID NO: 231971 - DNA, 25 bp, Probe Sequence
gagctagaggccaagtgcactgaat

SEQ ID NO: 231972 - DNA, 25 bp, Probe Sequence
gagcaagggccacgatgacagatta

SEQ ID NO: 231973 - DNA, 25 bp, Probe Sequence
gagaagcgccacaagaacatgtctg

SEQ ID NO: 231974 - DNA, 25 bp, Probe Sequence
gagagggtaccagagagcatctgcg

SEQ ID NO: 231975 - DNA, 25 bp, Probe Sequence
gagcaggtgtgaaatacaggcctcc

SEQ ID NO: 231976 - DNA, 25 bp, Probe Sequence
gagcacctggtatacagagcttcgg

SEQ ID NO: 231977 - DNA, 25 bp, Probe Sequence
gagcacctactatatgcagaagggg

SEQ ID NO: 231978 - DNA, 25 bp, Probe Sequence
gagcagctgtaaatacagaggaggc

SEQ ID NO: 231979 - DNA, 25 bp, Probe Sequence
gagcagttaacatctgaagtgtcta

SEQ ID NO: 231980 - DNA, 25 bp, Probe Sequence
gagcaggtagactcttcagctgcct

SEQ ID NO: 231981 - DNA, 25 bp, Probe Sequence
gagcagagtggaggcctggactccc

SEQ ID NO: 231982 - DNA, 25 bp, Probe Sequence
gagcagagtggaggcctggactccc

SEQ ID NO: 231983 - DNA, 25 bp, Probe Sequence
gagaagtgcagggggagccttccag

SEQ ID NO: 231984 - DNA, 25 bp, Probe Sequence
gagaggatcatgagggactcccctg

SEQ ID NO: 231985 - DNA, 25 bp, Probe Sequence
gagggaagttgggagatgcccccac

SEQ ID NO: 231986 - DNA, 25 bp, Probe Sequence
gaggaaggccgggacatggcgaacc

SEQ ID NO: 231987 - DNA, 25 bp, Probe Sequence
gaggaaggccgggacatggcgaacc

SEQ ID NO: 231988 - DNA, 25 bp, Probe Sequence
gaggaacacgggaacaagtgcaagc

SEQ ID NO: 231989 - DNA, 25 bp, Probe Sequence
gagaaccagggggacatgcaagaag

SEQ ID NO: 231990 - DNA, 25 bp, Probe Sequence
gagaagttgggggccaggtacagtg

SEQ ID NO: 231991 - DNA, 25 bp, Probe Sequence
gagaattctgggagccagtctgcca

SEQ ID NO: 231992 - DNA, 25 bp, Probe Sequence
gagaaattcgagaccattttgcaag

SEQ ID NO: 231993 - DNA, 25 bp, Probe Sequence
gataaagtcgttccaacttcaccaa

SEQ ID NO: 231994 - DNA, 25 bp, Probe Sequence
gagaaggttgttctacaccctaact

SEQ ID NO: 231995 - DNA, 25 bp, Probe Sequence
gagaaggttgttctacaccctaact

SEQ ID NO: 231996 - DNA, 25 bp, Probe Sequence
gagaaggtggttctacaccctaact

SEQ ID NO: 231997 - DNA, 25 bp, Probe Sequence
gagcaatgttggcttatacacctct

SEQ ID NO: 231998 - DNA, 25 bp, Probe Sequence
gagcagtcttcagtattaaaaccac

SEQ ID NO: 231999 - DNA, 25 bp, Probe Sequence
gagcagtcttcagtattaaaaccac

SEQ ID NO: 232000 - DNA, 25 bp, Probe Sequence
gagagatcaccgattacagaacccg

SEQ ID NO: 232001 - DNA, 25 bp, Probe Sequence
gagaacaccgaaaacaataactcct

SEQ ID NO: 232002 - DNA, 25 bp, Probe Sequence
gagcaaccacagcagaacagtacac

SEQ ID NO: 232003 - DNA, 25 bp, Probe Sequence
gagcatgatgcctactgatgaacag

SEQ ID NO: 232004 - DNA, 25 bp, Probe Sequence
gagcatgctcagtatcattgtggag

SEQ ID NO: 232005 - DNA, 25 bp, Probe Sequence
gagcaatctgagacaggtgcggcaa

SEQ ID NO: 232006 - DNA, 25 bp, Probe Sequence
gagcaacttgttcgtgggtcatcgg

SEQ ID NO: 232007 - DNA, 25 bp, Probe Sequence
gagcattcatcgtgaggggtctttg

SEQ ID NO: 232008 - DNA, 25 bp, Probe Sequence
gagcattccgaaagatgggactggt

SEQ ID NO: 232009 - DNA, 25 bp, Probe Sequence
gagcacagtcgggagagggacaggg

SEQ ID NO: 232010 - DNA, 25 bp, Probe Sequence
gagcaactgggctgtagggcagggc

SEQ ID NO: 232011 - DNA, 25 bp, Probe Sequence
gagcaagctcgagtcttcgtggatg

SEQ ID NO: 232012 - DNA, 25 bp, Probe Sequence
gagagacactgattccaagtccatg

SEQ ID NO: 232013 - DNA, 25 bp, Probe Sequence
gagaagccatgtgagcaagtccagt

SEQ ID NO: 232014 - DNA, 25 bp, Probe Sequence
gagaatccagtgggaaatacacatt

SEQ ID NO: 232015 - DNA, 25 bp, Probe Sequence
gagaaccccacgaaatcatgcaaat

SEQ ID NO: 232016 - DNA, 25 bp, Probe Sequence
gagaacatccgccgtgtgttcaacg

SEQ ID NO: 232017 - DNA, 25 bp, Probe Sequence
gagaacatccgccgtgtgttcaacg

SEQ ID NO: 232018 - DNA, 25 bp, Probe Sequence
gagcacactgcccacaatgaatgta

SEQ ID NO: 232019 - DNA, 25 bp, Probe Sequence
gagcagactctcatcatgcaaatta

SEQ ID NO: 232020 - DNA, 25 bp, Probe Sequence
gagcagactccatctcatgttaaac

SEQ ID NO: 232021 - DNA, 25 bp, Probe Sequence
gagcacagcatgctatcacttctca

SEQ ID NO: 232022 - DNA, 25 bp, Probe Sequence
gagaatgcattttgagcatttcaaa

SEQ ID NO: 232023 - DNA, 25 bp, Probe Sequence
gagaagcttgtaagtatcaatacca

SEQ ID NO: 232024 - DNA, 25 bp, Probe Sequence
gagaatgcacagaaattcaaaacaa

SEQ ID NO: 232025 - DNA, 25 bp, Probe Sequence
gagcagaccaaaacataaacaataa

SEQ ID NO: 232026 - DNA, 25 bp, Probe Sequence
gagaaccggatgaatataagcaatg

SEQ ID NO: 232027 - DNA, 25 bp, Probe Sequence
gagaatgcccagcttaatagcaagg

SEQ ID NO: 232028 - DNA, 25 bp, Probe Sequence
gagaaggcctgtatgaatcaatgca

SEQ ID NO: 232029 - DNA, 25 bp, Probe Sequence
gagaagtgcctttagttgaagagca

SEQ ID NO: 232030 - DNA, 25 bp, Probe Sequence
gagaagtgacgtttgtataatagca

SEQ ID NO: 232031 - DNA, 25 bp, Probe Sequence
gagaaggaggtgttgagtcagttgt

SEQ ID NO: 232032 - DNA, 25 bp, Probe Sequence
gagacggggtttcactgtggtctcg

SEQ ID NO: 232033 - DNA, 25 bp, Probe Sequence
gagacggggtttcaccatgttagcc

SEQ ID NO: 232034 - DNA, 25 bp, Probe Sequence
gagacagggtttcaccgtgttagcc

SEQ ID NO: 232035 - DNA, 25 bp, Probe Sequence
gagacagggtttcactacgttggcc

SEQ ID NO: 232036 - DNA, 25 bp, Probe Sequence
gagacagggtttcaccatattggtc

SEQ ID NO: 232037 - DNA, 25 bp, Probe Sequence
gagatggggtttcaccatgttggtc

SEQ ID NO: 232038 - DNA, 25 bp, Probe Sequence
gagatggggtttcactatgttggcc

SEQ ID NO: 232039 - DNA, 25 bp, Probe Sequence
gagagccggattcaccgtttggctc

SEQ ID NO: 232040 - DNA, 25 bp, Probe Sequence
gagaaagagggctcctgttctgacc

SEQ ID NO: 232041 - DNA, 25 bp, Probe Sequence
gagaaaagggagtcatgcattttgc

SEQ ID NO: 232042 - DNA, 25 bp, Probe Sequence
gagcatcaaagcctatgtcagcact

SEQ ID NO: 232043 - DNA, 25 bp, Probe Sequence
gagcatggatacctctggcatgaga

SEQ ID NO: 232044 - DNA, 25 bp, Probe Sequence
gagcatatatacccacgctgacaac

SEQ ID NO: 232045 - DNA, 25 bp, Probe Sequence
gagcatagtgtccacttgtgacata

SEQ ID NO: 232046 - DNA, 25 bp, Probe Sequence
gagaatggtcctaagctggcaagcc

SEQ ID NO: 232047 - DNA, 25 bp, Probe Sequence
gagacatttcaggtgactggccaac

SEQ ID NO: 232048 - DNA, 25 bp, Probe Sequence
gagacatttcaggtgactggccaac

SEQ ID NO: 232049 - DNA, 25 bp, Probe Sequence
gagaattcaggcaaacgtccacaaa

SEQ ID NO: 232050 - DNA, 25 bp, Probe Sequence
gagaagtcaggcacgtagctcagcg

SEQ ID NO: 232051 - DNA, 25 bp, Probe Sequence
gagaagaacatcaacgggcaccagg

SEQ ID NO: 232052 - DNA, 25 bp, Probe Sequence
gagaagaacatcaacgggcaccagg

SEQ ID NO: 232053 - DNA, 25 bp, Probe Sequence
gagaatcaactcctcaactcacaag

SEQ ID NO: 232054 - DNA, 25 bp, Probe Sequence
gagaaaactgtccacccaaagggtg

SEQ ID NO: 232055 - DNA, 25 bp, Probe Sequence
gagaaaagcatgattcccacaagga

SEQ ID NO: 232056 - DNA, 25 bp, Probe Sequence
gagaaaagtactccacattccagag

SEQ ID NO: 232057 - DNA, 25 bp, Probe Sequence
taaaagggagccgcttacaagaaat

SEQ ID NO: 232058 - DNA, 25 bp, Probe Sequence
gagaaagcgggtctcggaaggaaat

SEQ ID NO: 232059 - DNA, 25 bp, Probe Sequence
gagaaagattggggtaggacagaaa

SEQ ID NO: 232060 - DNA, 25 bp, Probe Sequence
gagcaagaagggtaagctgggcaga

SEQ ID NO: 232061 - DNA, 25 bp, Probe Sequence
gagcaagaagggtaagctgggcaga

SEQ ID NO: 232062 - DNA, 25 bp, Probe Sequence
gagcatcaaaggaagttgtgggcaa

SEQ ID NO: 232063 - DNA, 25 bp, Probe Sequence
gagcacagtaggaggtgagggcaca

SEQ ID NO: 232064 - DNA, 25 bp, Probe Sequence
gagcatagaaggcaggtgagcaacc

SEQ ID NO: 232065 - DNA, 25 bp, Probe Sequence
gagaacaaggccgaggagaaccgct

SEQ ID NO: 232066 - DNA, 25 bp, Probe Sequence
gagataaaggcaccgaacagcgttg

SEQ ID NO: 232067 - DNA, 25 bp, Probe Sequence
gagaaagtggcagctaccaggcagg

SEQ ID NO: 232068 - DNA, 25 bp, Probe Sequence
gagcagggatgaccacataccagga

SEQ ID NO: 232069 - DNA, 25 bp, Probe Sequence
gagcaggtatggaagacagccatgt

SEQ ID NO: 232070 - DNA, 25 bp, Probe Sequence
gagaagttggagcaatgaatgtaga

SEQ ID NO: 232071 - DNA, 25 bp, Probe Sequence
gagaagttgtagctctgatgtctag

SEQ ID NO: 232072 - DNA, 25 bp, Probe Sequence
gagaattaggagctctatgtttaaa

SEQ ID NO: 232073 - DNA, 25 bp, Probe Sequence
gagcagccttcgagttttttaaatt

SEQ ID NO: 232074 - DNA, 25 bp, Probe Sequence
gagcagttctggaggttttatagcc

SEQ ID NO: 232075 - DNA, 25 bp, Probe Sequence
gagcactttgtttggttctgtcatc

SEQ ID NO: 232076 - DNA, 25 bp, Probe Sequence
gagcactagacgtgttgtcattgcc

SEQ ID NO: 232077 - DNA, 25 bp, Probe Sequence
gagcacctgaagttattttagccct

SEQ ID NO: 232078 - DNA, 25 bp, Probe Sequence
gagcacctgaagttattttagccct

SEQ ID NO: 232079 - DNA, 25 bp, Probe Sequence
gagcacctgaagttattttagccct

SEQ ID NO: 232080 - DNA, 25 bp, Probe Sequence
gagcaactgaaacagattcctacac

SEQ ID NO: 232081 - DNA, 25 bp, Probe Sequence
gagaaagacaagtgaatggcaatcc

SEQ ID NO: 232082 - DNA, 25 bp, Probe Sequence
gagcagaagacacgtgagctgcagg

SEQ ID NO: 232083 - DNA, 25 bp, Probe Sequence
gagcaaagtgacttgagcatctgaa

SEQ ID NO: 232084 - DNA, 25 bp, Probe Sequence
gagcaggggcaggtgacttgcaacc

SEQ ID NO: 232085 - DNA, 25 bp, Probe Sequence
gagcagctggcgtgtgaggctgccc

SEQ ID NO: 232086 - DNA, 25 bp, Probe Sequence
gagcagtggccaaggaagctgtaca

SEQ ID NO: 232087 - DNA, 25 bp, Probe Sequence
gagcaggcccaacgattctcgtcat

SEQ ID NO: 232088 - DNA, 25 bp, Probe Sequence
gagcaatgcccatagacctgaatgt

SEQ ID NO: 232089 - DNA, 25 bp, Probe Sequence
gagaaagcccaatcctatatgttta

SEQ ID NO: 232090 - DNA, 25 bp, Probe Sequence
gagaactgccccagtcaatagtcta

SEQ ID NO: 232091 - DNA, 25 bp, Probe Sequence
gagagactacttatgaataagttaa

SEQ ID NO: 232092 - DNA, 25 bp, Probe Sequence
gagcaggtagttaaaatattggtga

SEQ ID NO: 232093 - DNA, 25 bp, Probe Sequence
gagcaacttgttcccaaagctggag

SEQ ID NO: 232094 - DNA, 25 bp, Probe Sequence
gagcaacttggacagcaacagggac

SEQ ID NO: 232095 - DNA, 25 bp, Probe Sequence
gagaacctgagacctcaacatggcc

SEQ ID NO: 232096 - DNA, 25 bp, Probe Sequence
gagaaccagcttccaaagtgactga

SEQ ID NO: 232097 - DNA, 25 bp, Probe Sequence
gagaagacggtcgaaactgacatct

SEQ ID NO: 232098 - DNA, 25 bp, Probe Sequence
gagaagaaggttaaactgtttccat

SEQ ID NO: 232099 - DNA, 25 bp, Probe Sequence
gagaatgtctttgtaactgtttaat

SEQ ID NO: 232100 - DNA, 25 bp, Probe Sequence
gagaaactgttatatctttttaatg

SEQ ID NO: 232101 - DNA, 25 bp, Probe Sequence
gagacagcctgcgttaatttttttt

SEQ ID NO: 232102 - DNA, 25 bp, Probe Sequence
gagacacacttcagggttaatgttt

SEQ ID NO: 232103 - DNA, 25 bp, Probe Sequence
gagaatcactatatggactttagaa

SEQ ID NO: 232104 - DNA, 25 bp, Probe Sequence
tgaaacacgtttctaattggaatgc

SEQ ID NO: 232105 - DNA, 25 bp, Probe Sequence
gagaacctttctgtgacattggaag

SEQ ID NO: 232106 - DNA, 25 bp, Probe Sequence
gagaactacattcatggtttggaag

SEQ ID NO: 232107 - DNA, 25 bp, Probe Sequence
gagaagtaaccatggacgtcagaag

SEQ ID NO: 232108 - DNA, 25 bp, Probe Sequence
gagtaataaaaacgacctagtatgg

SEQ ID NO: 232109 - DNA, 25 bp, Probe Sequence
ggtcagtaagaatgcccatccagtt

SEQ ID NO: 232110 - DNA, 25 bp, Probe Sequence
gggcagaaaaatgcccctcagtctg

SEQ ID NO: 232111 - DNA, 25 bp, Probe Sequence
gagggaacaaagtcgccgtcaagtg

SEQ ID NO: 232112 - DNA, 25 bp, Probe Sequence
gagaggaaaacggcacctgggagaa

SEQ ID NO: 232113 - DNA, 25 bp, Probe Sequence
gagcaccaagacagacagccgggat

SEQ ID NO: 232114 - DNA, 25 bp, Probe Sequence
gagcaccacgacaaacacagctaga

SEQ ID NO: 232115 - DNA, 25 bp, Probe Sequence
gagcaacaccacaatgactgtctaa

SEQ ID NO: 232116 - DNA, 25 bp, Probe Sequence
gagcatacccaaagatcagcatcag

SEQ ID NO: 232117 - DNA, 25 bp, Probe Sequence
gagaatcctcaaagatcctctggtt

SEQ ID NO: 232118 - DNA, 25 bp, Probe Sequence
gagaaccaagctttcccgatgttca

SEQ ID NO: 232119 - DNA, 25 bp, Probe Sequence
gagacactagttttggccaacttaa

SEQ ID NO: 232120 - DNA, 25 bp, Probe Sequence
gagcacctccttttgtgcaaagtta

SEQ ID NO: 232121 - DNA, 25 bp, Probe Sequence
gagcaccttctaaatctaagattct

SEQ ID NO: 232122 - DNA, 25 bp, Probe Sequence
gagaactcccaaactcagcagtatt

SEQ ID NO: 232123 - DNA, 25 bp, Probe Sequence
gagaatttatcctcaagagtcagct

SEQ ID NO: 232124 - DNA, 25 bp, Probe Sequence
gagactttagccttggcgttactgt

SEQ ID NO: 232125 - DNA, 25 bp, Probe Sequence
gagcaccatatccttttgctgttga

SEQ ID NO: 232126 - DNA, 25 bp, Probe Sequence
gagcaagagtctcatgatcctggtg

SEQ ID NO: 232127 - DNA, 25 bp, Probe Sequence
gagaaggtcagcctacactggaatg

SEQ ID NO: 232128 - DNA, 25 bp, Probe Sequence
gagcaaagctaccagggggacatgt

SEQ ID NO: 232129 - DNA, 25 bp, Probe Sequence
gagcaaagagaccagctatggggtg

SEQ ID NO: 232130 - DNA, 25 bp, Probe Sequence
gagcaaagagcaccatgattccaat

SEQ ID NO: 232131 - DNA, 25 bp, Probe Sequence
gagaagaagatcttattctgcaatg

SEQ ID NO: 232132 - DNA, 25 bp, Probe Sequence
gagagcacggtctgaatctgcacag

SEQ ID NO: 232133 - DNA, 25 bp, Probe Sequence
gagaactcggcatacatctgcagcc

SEQ ID NO: 232134 - DNA, 25 bp, Probe Sequence
gagcagtcattgacaccacctgcat

SEQ ID NO: 232135 - DNA, 25 bp, Probe Sequence
gagcagacattaatatccatgccat

SEQ ID NO: 232136 - DNA, 25 bp, Probe Sequence
gagcatgtcacttaatctctcagat

SEQ ID NO: 232137 - DNA, 25 bp, Probe Sequence
gagcatgctacttaatctatatgtt

SEQ ID NO: 232138 - DNA, 25 bp, Probe Sequence
gagcatgctcacttttttatattaa

SEQ ID NO: 232139 - DNA, 25 bp, Probe Sequence
gagcatgaaatgtttttattttatt

SEQ ID NO: 232140 - DNA, 25 bp, Probe Sequence
gagagaaagactggttatttctcct

SEQ ID NO: 232141 - DNA, 25 bp, Probe Sequence
gagactaaactttatacttcatttt

SEQ ID NO: 232142 - DNA, 25 bp, Probe Sequence
gagactcgagaactttcattttttt

SEQ ID NO: 232143 - DNA, 25 bp, Probe Sequence
gagcaccgtgggtttatttcatttt

SEQ ID NO: 232144 - DNA, 25 bp, Probe Sequence
gagcaccttcggttaacttgcatct

SEQ ID NO: 232145 - DNA, 25 bp, Probe Sequence
gagcaccttcattagtacagcttgc

SEQ ID NO: 232146 - DNA, 25 bp, Probe Sequence
gagcactgcacagaatgtcaccttc

SEQ ID NO: 232147 - DNA, 25 bp, Probe Sequence
gagcacatcagggagtggctgttct

SEQ ID NO: 232148 - DNA, 25 bp, Probe Sequence
gagaatgctgtgggaggtgtctgcc

SEQ ID NO: 232149 - DNA, 25 bp, Probe Sequence
gagaatgcagtgttgggctcctggc

SEQ ID NO: 232150 - DNA, 25 bp, Probe Sequence
gagaatggatcaatggtgccacgga

SEQ ID NO: 232151 - DNA, 25 bp, Probe Sequence
gagcacaagatcttcgttcagggca

SEQ ID NO: 232152 - DNA, 25 bp, Probe Sequence
gagcaacttcagagtgtcaaacaac

SEQ ID NO: 232153 - DNA, 25 bp, Probe Sequence
gagaacgatcagaggatctctactg

SEQ ID NO: 232154 - DNA, 25 bp, Probe Sequence
gagaacgccatgattgctgctggac

SEQ ID NO: 232155 - DNA, 25 bp, Probe Sequence
gagaacgccatgattgctgctggac

SEQ ID NO: 232156 - DNA, 25 bp, Probe Sequence
gagaaggaagtgttctctgcccagc

SEQ ID NO: 232157 - DNA, 25 bp, Probe Sequence
gagaaggagagcaagctccctgcca

SEQ ID NO: 232158 - DNA, 25 bp, Probe Sequence
gagaggccagaaaggccctcgaggc

SEQ ID NO: 232159 - DNA, 25 bp, Probe Sequence
gagcaggcgaaagagcgcgctcgga

SEQ ID NO: 232160 - DNA, 25 bp, Probe Sequence
gagaacgaagacactcagccggagt

SEQ ID NO: 232161 - DNA, 25 bp, Probe Sequence
gagaagctgtgctacgtcgccctgg

SEQ ID NO: 232162 - DNA, 25 bp, Probe Sequence
gagaagatggtgtcaatggcccgaa

SEQ ID NO: 232163 - DNA, 25 bp, Probe Sequence
gagaaatgtgtaaaggcccgggagc

SEQ ID NO: 232164 - DNA, 25 bp, Probe Sequence
gagaattgcattgaaccccaggagg

SEQ ID NO: 232165 - DNA, 25 bp, Probe Sequence
gagaattgcttgaacccaggaggtg

SEQ ID NO: 232166 - DNA, 25 bp, Probe Sequence
gagaattgcttgaacccaggaggcg

SEQ ID NO: 232167 - DNA, 25 bp, Probe Sequence
gagaatagcttgaacctgggaagca

SEQ ID NO: 232168 - DNA, 25 bp, Probe Sequence
gagcaatggtaaacctcgagacaac

SEQ ID NO: 232169 - DNA, 25 bp, Probe Sequence
gagactttaagaacctgaagaacct

SEQ ID NO: 232170 - DNA, 25 bp, Probe Sequence
gagactcaaagagactccaagattc

SEQ ID NO: 232171 - DNA, 25 bp, Probe Sequence
gagacaggtggaaaccaaagttcga

SEQ ID NO: 232172 - DNA, 25 bp, Probe Sequence
gagaagggagggagagaattttatt

SEQ ID NO: 232173 - DNA, 25 bp, Probe Sequence
gagaaggggccttggtatttatatt

SEQ ID NO: 232174 - DNA, 25 bp, Probe Sequence
gagacggagccggaagttatttatt

SEQ ID NO: 232175 - DNA, 25 bp, Probe Sequence
gagaccgagtctcaactatattgtc

SEQ ID NO: 232176 - DNA, 25 bp, Probe Sequence
gggactgcaactcatgactatcctg

SEQ ID NO: 232177 - DNA, 25 bp, Probe Sequence
gagaatctaactcatgcctgtccag

SEQ ID NO: 232178 - DNA, 25 bp, Probe Sequence
gagaatctgataccgagcagctcca

SEQ ID NO: 232179 - DNA, 25 bp, Probe Sequence
gagaatcatgaaagctcaagcccta

SEQ ID NO: 232180 - DNA, 25 bp, Probe Sequence
gagaacagcaacccaatggttttta

SEQ ID NO: 232181 - DNA, 25 bp, Probe Sequence
gagaacccatagccaatagagtttt

SEQ ID NO: 232182 - DNA, 25 bp, Probe Sequence
gagaacctcgaacttaatgtactgt

SEQ ID NO: 232183 - DNA, 25 bp, Probe Sequence
gagaacgtcgagattcaccagacct

SEQ ID NO: 232184 - DNA, 25 bp, Probe Sequence
gagaaacctggtttgccacagaaca

SEQ ID NO: 232185 - DNA, 25 bp, Probe Sequence
gagcagaacctctgattgaccaaaa

SEQ ID NO: 232186 - DNA, 25 bp, Probe Sequence
gagcaaaactaagatgccctagaga

SEQ ID NO: 232187 - DNA, 25 bp, Probe Sequence
gagaaaagccaagatccactaccgg

SEQ ID NO: 232188 - DNA, 25 bp, Probe Sequence
gataaaacccatgacaattcctcat

SEQ ID NO: 232189 - DNA, 25 bp, Probe Sequence
gagaaaagtcctgctcatttgcact

SEQ ID NO: 232190 - DNA, 25 bp, Probe Sequence
gagaaaattaacttatgtggactgt

SEQ ID NO: 232191 - DNA, 25 bp, Probe Sequence
gagaaaatgattagtgtactgtttg

SEQ ID NO: 232192 - DNA, 25 bp, Probe Sequence
gagcaggaatgttttgaccgagtct

SEQ ID NO: 232193 - DNA, 25 bp, Probe Sequence
gagaatgtgatttgctacccaggtt

SEQ ID NO: 232194 - DNA, 25 bp, Probe Sequence
gagactcagttactacccagtttgt

SEQ ID NO: 232195 - DNA, 25 bp, Probe Sequence
gagaatcagttcctactaaacctac

SEQ ID NO: 232196 - DNA, 25 bp, Probe Sequence
gagaatcatgttgaagctaaaccca

SEQ ID NO: 232197 - DNA, 25 bp, Probe Sequence
gagaatctgtccaaggttataccac

SEQ ID NO: 232198 - DNA, 25 bp, Probe Sequence
gagaatctgtccaaggttataccac

SEQ ID NO: 232199 - DNA, 25 bp, Probe Sequence
gagaatttttcacactaacacagcg

SEQ ID NO: 232200 - DNA, 25 bp, Probe Sequence
gagaactcaaaacacaaatccactg

SEQ ID NO: 232201 - DNA, 25 bp, Probe Sequence
gagcaaaagaaacacaatatagagg

SEQ ID NO: 232202 - DNA, 25 bp, Probe Sequence
gagaaaaacaatccccattatgacc

SEQ ID NO: 232203 - DNA, 25 bp, Probe Sequence
gagaattaaaatcgtagcttgtaca

SEQ ID NO: 232204 - DNA, 25 bp, Probe Sequence
gagacatttctactggtaccttacc

SEQ ID NO: 232205 - DNA, 25 bp, Probe Sequence
gagacatttctactggtaccttacc

SEQ ID NO: 232206 - DNA, 25 bp, Probe Sequence
gagacatttctactggtaccttacc

SEQ ID NO: 232207 - DNA, 25 bp, Probe Sequence
gagacattttttctatgcgctctaa

SEQ ID NO: 232208 - DNA, 25 bp, Probe Sequence
gagcacttgttccgggatggtgtgg

SEQ ID NO: 232209 - DNA, 25 bp, Probe Sequence
gagcacgtttgccgtggacgggaaa

SEQ ID NO: 232210 - DNA, 25 bp, Probe Sequence
gagcactatttcatggatgggagga

SEQ ID NO: 232211 - DNA, 25 bp, Probe Sequence
gagcactactggatgtcagcggaga

SEQ ID NO: 232212 - DNA, 25 bp, Probe Sequence
gagcacacctatattcacatagaga

SEQ ID NO: 232213 - DNA, 25 bp, Probe Sequence
gagcaggtgctgagttccatgaagg

SEQ ID NO: 232214 - DNA, 25 bp, Probe Sequence
gagcaggtgctgagttccatgaagg

SEQ ID NO: 232215 - DNA, 25 bp, Probe Sequence
gagcaggtgctgagttccatgaagg

SEQ ID NO: 232216 - DNA, 25 bp, Probe Sequence
gagcaagtgagcagatcctccgagg

SEQ ID NO: 232217 - DNA, 25 bp, Probe Sequence
gagcaagatcaccgtgacatccgag

SEQ ID NO: 232218 - DNA, 25 bp, Probe Sequence
gagcaagatcaccgtgacatccgag

SEQ ID NO: 232219 - DNA, 25 bp, Probe Sequence
gagcacaagaaccagactatcgagc

SEQ ID NO: 232220 - DNA, 25 bp, Probe Sequence
gagcacattaagcattctaagagcc

SEQ ID NO: 232221 - DNA, 25 bp, Probe Sequence
gagaattcaggcctttcagagatga

SEQ ID NO: 232222 - DNA, 25 bp, Probe Sequence
gagcacttctggccttagatgaaac

SEQ ID NO: 232223 - DNA, 25 bp, Probe Sequence
gagactgactgatgcactagtatag

SEQ ID NO: 232224 - DNA, 25 bp, Probe Sequence
gagacagagcgtgcacacgtagagt

SEQ ID NO: 232225 - DNA, 25 bp, Probe Sequence
gagaagcgtatggccacagaagttg

SEQ ID NO: 232226 - DNA, 25 bp, Probe Sequence
gagcaagcgtccaacagggtgttgt

SEQ ID NO: 232227 - DNA, 25 bp, Probe Sequence
gagaaggtctcattcggtgttttgg

SEQ ID NO: 232228 - DNA, 25 bp, Probe Sequence
gagaaggcttctgtagtcttagtgg

SEQ ID NO: 232229 - DNA, 25 bp, Probe Sequence
gagaaggttgtcccgctttatgggc

SEQ ID NO: 232230 - DNA, 25 bp, Probe Sequence
gagacaggttgttccgatttgacag

SEQ ID NO: 232231 - DNA, 25 bp, Probe Sequence
gagacacggtgttctccgagtaagt

SEQ ID NO: 232232 - DNA, 25 bp, Probe Sequence
gagacagaggtgtgtccgggagaga

SEQ ID NO: 232233 - DNA, 25 bp, Probe Sequence
gagacagaagtaagtggggttgcaa

SEQ ID NO: 232234 - DNA, 25 bp, Probe Sequence
gtcacgtttcaacaggtttgcaagt

SEQ ID NO: 232235 - DNA, 25 bp, Probe Sequence
gagtcttttcaacatggtcttcaac

SEQ ID NO: 232236 - DNA, 25 bp, Probe Sequence
gaggcttttagagaggtgttataca

SEQ ID NO: 232237 - DNA, 25 bp, Probe Sequence
gatgagtttcttgtaaggttaccgt

SEQ ID NO: 232238 - DNA, 25 bp, Probe Sequence
gagagttagcttcataatctgttaa

SEQ ID NO: 232239 - DNA, 25 bp, Probe Sequence
gagacgtcgtgtccttgatttcaaa

SEQ ID NO: 232240 - DNA, 25 bp, Probe Sequence
gagcacaccgtttcctgattgctca

SEQ ID NO: 232241 - DNA, 25 bp, Probe Sequence
gagaagccaggaagccggtcatcac

SEQ ID NO: 232242 - DNA, 25 bp, Probe Sequence
gagaagccggaagtggtgaagacgc

SEQ ID NO: 232243 - DNA, 25 bp, Probe Sequence
gagaaccgagaccttggaatgttcc

SEQ ID NO: 232244 - DNA, 25 bp, Probe Sequence
gagaaggccaaccatgaagaagtct

SEQ ID NO: 232245 - DNA, 25 bp, Probe Sequence
gagaagcagctatacaaagagagcc

SEQ ID NO: 232246 - DNA, 25 bp, Probe Sequence
gagaaaccagcattaaacaagacag

SEQ ID NO: 232247 - DNA, 25 bp, Probe Sequence
gagcaatcctaagaacaaagcagag

SEQ ID NO: 232248 - DNA, 25 bp, Probe Sequence
gagcagatattacaagaagacacaa

SEQ ID NO: 232249 - DNA, 25 bp, Probe Sequence
gagcacatttgcctactaatggaaa

SEQ ID NO: 232250 - DNA, 25 bp, Probe Sequence
gagcaagattccatctcaaaaaaaa

SEQ ID NO: 232251 - DNA, 25 bp, Probe Sequence
gagcaacacttcgtctcagaaaaaa

SEQ ID NO: 232252 - DNA, 25 bp, Probe Sequence
gagcacacagcaacttctcagtcaa

SEQ ID NO: 232253 - DNA, 25 bp, Probe Sequence
gagcagctccacgtgagagcattaa

SEQ ID NO: 232254 - DNA, 25 bp, Probe Sequence
gagcacgcaacgtagatgcatcaca

SEQ ID NO: 232255 - DNA, 25 bp, Probe Sequence
gagcagccacctaagagcataacta

SEQ ID NO: 232256 - DNA, 25 bp, Probe Sequence
gagcagcacaatcaggaatacagcc

SEQ ID NO: 232257 - DNA, 25 bp, Probe Sequence
gagcagcacaatcaggaatacagcc

SEQ ID NO: 232258 - DNA, 25 bp, Probe Sequence
gagcaaaatttgcctgtccagctcc

SEQ ID NO: 232259 - DNA, 25 bp, Probe Sequence
gagaaaaaagctcgtccatgtccgc

SEQ ID NO: 232260 - DNA, 25 bp, Probe Sequence
gagaagacaataaagtcgctccgca

SEQ ID NO: 232261 - DNA, 25 bp, Probe Sequence
gagaattcaagtgtgaccctcatga

SEQ ID NO: 232262 - DNA, 25 bp, Probe Sequence
gagaattcaagtgtgaccctcatga

SEQ ID NO: 232263 - DNA, 25 bp, Probe Sequence
gagaattctagtgagatgcccaaat

SEQ ID NO: 232264 - DNA, 25 bp, Probe Sequence
gagaagtctggtcagagccacaggg

SEQ ID NO: 232265 - DNA, 25 bp, Probe Sequence
gagactgtattgttatgagcctagg

SEQ ID NO: 232266 - DNA, 25 bp, Probe Sequence
gagaatttgcgctttggcttgatgg

SEQ ID NO: 232267 - DNA, 25 bp, Probe Sequence
gagaataatgtgtatcctgttgatt

SEQ ID NO: 232268 - DNA, 25 bp, Probe Sequence
gagaatcttgtgaaccaggctgcat

SEQ ID NO: 232269 - DNA, 25 bp, Probe Sequence
gagcacagctggaggctcagcgtgc

SEQ ID NO: 232270 - DNA, 25 bp, Probe Sequence
gagaagctgactgggcaagagtggg

SEQ ID NO: 232271 - DNA, 25 bp, Probe Sequence
gagcacctgagggtcattggggctg

SEQ ID NO: 232272 - DNA, 25 bp, Probe Sequence
gagactgtggagatatcctgaggct

SEQ ID NO: 232273 - DNA, 25 bp, Probe Sequence
gagactgaagaaggacttgagggcc

SEQ ID NO: 232274 - DNA, 25 bp, Probe Sequence
tgaaaaagcgaggcttcggggccgg

SEQ ID NO: 232275 - DNA, 25 bp, Probe Sequence
gagaacactggggtataggggccgg

SEQ ID NO: 232276 - DNA, 25 bp, Probe Sequence
gagcaaccagttggctaggggagca

SEQ ID NO: 232277 - DNA, 25 bp, Probe Sequence
gagcaatggcagatgagtctgggga

SEQ ID NO: 232278 - DNA, 25 bp, Probe Sequence
gagcaaggagagtatgtttagtcag

SEQ ID NO: 232279 - DNA, 25 bp, Probe Sequence
gagcaagcaggctaagtttgcctac

SEQ ID NO: 232280 - DNA, 25 bp, Probe Sequence
gagcacaagtgccattgtttgcctt

SEQ ID NO: 232281 - DNA, 25 bp, Probe Sequence
gagcagaaatgctattcttgtggag

SEQ ID NO: 232282 - DNA, 25 bp, Probe Sequence
gagcagcaaatcttgtagggatatc

SEQ ID NO: 232283 - DNA, 25 bp, Probe Sequence
gagcacattacttgctgcatgggag

SEQ ID NO: 232284 - DNA, 25 bp, Probe Sequence
gagcagcaggtcagagcaggcgagc

SEQ ID NO: 232285 - DNA, 25 bp, Probe Sequence
gagcacagaggcaaggcgtcagcag

SEQ ID NO: 232286 - DNA, 25 bp, Probe Sequence
gagcagcagaggattcgtgcagaga

SEQ ID NO: 232287 - DNA, 25 bp, Probe Sequence
gagcagccattgatcggtatgtgca

SEQ ID NO: 232288 - DNA, 25 bp, Probe Sequence
gagcagcgctggatcaagaattgcc

SEQ ID NO: 232289 - DNA, 25 bp, Probe Sequence
gagcagcaggggatagactatgcac

SEQ ID NO: 232290 - DNA, 25 bp, Probe Sequence
gagcacaaggcgtgagagcctgcca

SEQ ID NO: 232291 - DNA, 25 bp, Probe Sequence
gagcaaagcgcgagtccgcttcaac

SEQ ID NO: 232292 - DNA, 25 bp, Probe Sequence
gagcaaactgtgagatccacctcca

SEQ ID NO: 232293 - DNA, 25 bp, Probe Sequence
gagaataatggcacataacactcca

SEQ ID NO: 232294 - DNA, 25 bp, Probe Sequence
gagaatattggcataaggacagata

SEQ ID NO: 232295 - DNA, 25 bp, Probe Sequence
gagaatctttgcatgcagaggaggt

SEQ ID NO: 232296 - DNA, 25 bp, Probe Sequence
gagacatcgttcataaggcacagca

SEQ ID NO: 232297 - DNA, 25 bp, Probe Sequence
gagacatcggctgtgaccagcacac

SEQ ID NO: 232298 - DNA, 25 bp, Probe Sequence
gagacatcggctgtgaccagcacac

SEQ ID NO: 232299 - DNA, 25 bp, Probe Sequence
gagcaagctggtttggccagacagt

SEQ ID NO: 232300 - DNA, 25 bp, Probe Sequence
gagcactctgagtttaccatttgta

SEQ ID NO: 232301 - DNA, 25 bp, Probe Sequence
gagaatctgagtacaaacaggtgta

SEQ ID NO: 232302 - DNA, 25 bp, Probe Sequence
gagaattagtagatgcagagttata

SEQ ID NO: 232303 - DNA, 25 bp, Probe Sequence
gagaaactagagggcaggtgttcat

SEQ ID NO: 232304 - DNA, 25 bp, Probe Sequence
gagaaactaggatcaggagacacct

SEQ ID NO: 232305 - DNA, 25 bp, Probe Sequence
gagaaattcaggtacgaaaccatca

SEQ ID NO: 232306 - DNA, 25 bp, Probe Sequence
gagaaatggatgtttccaaattcca

SEQ ID NO: 232307 - DNA, 25 bp, Probe Sequence
gagaaatggatgattccaggtctgt

SEQ ID NO: 232308 - DNA, 25 bp, Probe Sequence
gagaagatggctgctttcacttccc

SEQ ID NO: 232309 - DNA, 25 bp, Probe Sequence
gagaagatggctgctttcacttccc

SEQ ID NO: 232310 - DNA, 25 bp, Probe Sequence
gagaaatgtgctggggtcgcgtgtc

SEQ ID NO: 232311 - DNA, 25 bp, Probe Sequence
gagaagggtcgtggtccagagctcc

SEQ ID NO: 232312 - DNA, 25 bp, Probe Sequence
gatgagacggtctgggagaggccac

SEQ ID NO: 232313 - DNA, 25 bp, Probe Sequence
gagaagcggcttgaagcagggctcc

SEQ ID NO: 232314 - DNA, 25 bp, Probe Sequence
gagaagaggttcgagactgggtgct

SEQ ID NO: 232315 - DNA, 25 bp, Probe Sequence
gagaaagggtcccagtgccagagtt

SEQ ID NO: 232316 - DNA, 25 bp, Probe Sequence
gagaaaagggtccgagcacaagcca

SEQ ID NO: 232317 - DNA, 25 bp, Probe Sequence
gagaacaaacttgggcagccggaac

SEQ ID NO: 232318 - DNA, 25 bp, Probe Sequence
gagaagcaaatcattggagccaata

SEQ ID NO: 232319 - DNA, 25 bp, Probe Sequence
gagaacgagactccatctcaaaata

SEQ ID NO: 232320 - DNA, 25 bp, Probe Sequence
gagaaaatactccagcaaaatgaag

SEQ ID NO: 232321 - DNA, 25 bp, Probe Sequence
gagaagaaacgactcgaaaattgtc

SEQ ID NO: 232322 - DNA, 25 bp, Probe Sequence
gagcaacaaaaatccaagcaacttc

SEQ ID NO: 232323 - DNA, 25 bp, Probe Sequence
gagaccattaaatccaaacacttgt

SEQ ID NO: 232324 - DNA, 25 bp, Probe Sequence
gagcacctaaacatataaagcaatt

SEQ ID NO: 232325 - DNA, 25 bp, Probe Sequence
gagaactaatatgttaattgcctta

SEQ ID NO: 232326 - DNA, 25 bp, Probe Sequence
gagaacttaatgattctattggatt

SEQ ID NO: 232327 - DNA, 25 bp, Probe Sequence
gagaattatggactccttactggtt

SEQ ID NO: 232328 - DNA, 25 bp, Probe Sequence
gagaagcctgaactctttactgggt

SEQ ID NO: 232329 - DNA, 25 bp, Probe Sequence
gagaagcctatacatttagctgaca

SEQ ID NO: 232330 - DNA, 25 bp, Probe Sequence
gagaagcactacagttgtcaagaat

SEQ ID NO: 232331 - DNA, 25 bp, Probe Sequence
gagaacagagacagttaccccaggg

SEQ ID NO: 232332 - DNA, 25 bp, Probe Sequence
gagaaacacaaagtctacgcctgcg

SEQ ID NO: 232333 - DNA, 25 bp, Probe Sequence
gagacaacacacaaactaagcctac

SEQ ID NO: 232334 - DNA, 25 bp, Probe Sequence
gagcaatatccagaagctattctct

SEQ ID NO: 232335 - DNA, 25 bp, Probe Sequence
gagcaaatcatacagactttcctca

SEQ ID NO: 232336 - DNA, 25 bp, Probe Sequence
gagcaaagagagccatacgtcccat

SEQ ID NO: 232337 - DNA, 25 bp, Probe Sequence
gagcacacaaagccacagctctgtc

SEQ ID NO: 232338 - DNA, 25 bp, Probe Sequence
gagcacaataagcacctggatggca

SEQ ID NO: 232339 - DNA, 25 bp, Probe Sequence
gagcaacatgaatgacctggtatct

SEQ ID NO: 232340 - DNA, 25 bp, Probe Sequence
gagcaactgaaactctcatatgtta

SEQ ID NO: 232341 - DNA, 25 bp, Probe Sequence
gagcaactatgcattgtcattgtcg

SEQ ID NO: 232342 - DNA, 25 bp, Probe Sequence
gagaacttcagttgcttgactcgtt

SEQ ID NO: 232343 - DNA, 25 bp, Probe Sequence
gagaactttgccgttgaagctgcta

SEQ ID NO: 232344 - DNA, 25 bp, Probe Sequence
gagaatctcgatttcattgaagtta

SEQ ID NO: 232345 - DNA, 25 bp, Probe Sequence
gagaatcttttgcactaagtcatgc

SEQ ID NO: 232346 - DNA, 25 bp, Probe Sequence
gagaattgtaagtgctcagagcttg

SEQ ID NO: 232347 - DNA, 25 bp, Probe Sequence
gagaattgttgcaaagtagtgaatg

SEQ ID NO: 232348 - DNA, 25 bp, Probe Sequence
gagaattgtggcagatgttgtgtgt

SEQ ID NO: 232349 - DNA, 25 bp, Probe Sequence
gagaatattggctgctgattgttgc

SEQ ID NO: 232350 - DNA, 25 bp, Probe Sequence
gagacatattaacttgtgctgtcgc

SEQ ID NO: 232351 - DNA, 25 bp, Probe Sequence
gagaatgttcaagatttgctgctct

SEQ ID NO: 232352 - DNA, 25 bp, Probe Sequence
gagaagattcattaaaacatgtttc

SEQ ID NO: 232353 - DNA, 25 bp, Probe Sequence
gagcaaatctgtatgataacatttt

SEQ ID NO: 232354 - DNA, 25 bp, Probe Sequence
gagaacatcttcacaaagaattata

SEQ ID NO: 232355 - DNA, 25 bp, Probe Sequence
gagaaccttctaacataagctgtaa

SEQ ID NO: 232356 - DNA, 25 bp, Probe Sequence
gagaaccttattctatagtggcaga

SEQ ID NO: 232357 - DNA, 25 bp, Probe Sequence
gataatcccttccggtatgttcagg

SEQ ID NO: 232358 - DNA, 25 bp, Probe Sequence
gataatcccttccggtatgttcagg

SEQ ID NO: 232359 - DNA, 25 bp, Probe Sequence
gagaacccattgggcggtttcagga

SEQ ID NO: 232360 - DNA, 25 bp, Probe Sequence
gagaacccaaaggggagttgctgga

SEQ ID NO: 232361 - DNA, 25 bp, Probe Sequence
gagacacatcgccaacctgggtgtc

SEQ ID NO: 232362 - DNA, 25 bp, Probe Sequence
gagaagatagcatacggggatgtga

SEQ ID NO: 232363 - DNA, 25 bp, Probe Sequence
gagaatggagacggggaggtggact

SEQ ID NO: 232364 - DNA, 25 bp, Probe Sequence
gagcaagaggagagggatgtcgggg

SEQ ID NO: 232365 - DNA, 25 bp, Probe Sequence
gagcaacaggaaaggcgagacgccg

SEQ ID NO: 232366 - DNA, 25 bp, Probe Sequence
gagcaacagaaaaaggcggccatca

SEQ ID NO: 232367 - DNA, 25 bp, Probe Sequence
gagaacgagtctgcagaggctccat

SEQ ID NO: 232368 - DNA, 25 bp, Probe Sequence
gagaacgagtcctaggtttctgcca

SEQ ID NO: 232369 - DNA, 25 bp, Probe Sequence
gagaaaaactcgtgtgttcagcaga

SEQ ID NO: 232370 - DNA, 25 bp, Probe Sequence
gagaacaaactggagggcacaagga

SEQ ID NO: 232371 - DNA, 25 bp, Probe Sequence
gagaaacatttggtgcccagaagtc

SEQ ID NO: 232372 - DNA, 25 bp, Probe Sequence
gagaaatgaattgctggtcaaaatg

SEQ ID NO: 232373 - DNA, 25 bp, Probe Sequence
gagaactatattgcggacattgagg

SEQ ID NO: 232374 - DNA, 25 bp, Probe Sequence
gagacaccattaatcagtgtttaga

SEQ ID NO: 232375 - DNA, 25 bp, Probe Sequence
gagacacctgtatttgggtgtggac

SEQ ID NO: 232376 - DNA, 25 bp, Probe Sequence
gagcacacttctttgctggttgctc

SEQ ID NO: 232377 - DNA, 25 bp, Probe Sequence
gagagcctattctgggctggattct

SEQ ID NO: 232378 - DNA, 25 bp, Probe Sequence
gagaacttatcatgttggtgtgtta

SEQ ID NO: 232379 - DNA, 25 bp, Probe Sequence
gagaacctagattctatagttgtat

SEQ ID NO: 232380 - DNA, 25 bp, Probe Sequence
gagaacttaattatttgcaaaggta

SEQ ID NO: 232381 - DNA, 25 bp, Probe Sequence
gagaattttgattttttaaagtgtg

SEQ ID NO: 232382 - DNA, 25 bp, Probe Sequence
gataatgttagaggttttaaagtga

SEQ ID NO: 232383 - DNA, 25 bp, Probe Sequence
tgacacgttttggtatttagtagga

SEQ ID NO: 232384 - DNA, 25 bp, Probe Sequence
tgacacgttttggtatttagtagga

SEQ ID NO: 232385 - DNA, 25 bp, Probe Sequence
gagcaatgttttcagtcttttagga

SEQ ID NO: 232386 - DNA, 25 bp, Probe Sequence
gagcaagttactcgttgttttacaa

SEQ ID NO: 232387 - DNA, 25 bp, Probe Sequence
gagcaacttactagtttgttgcaaa

SEQ ID NO: 232388 - DNA, 25 bp, Probe Sequence
gagaggttttagattattcagaagc

SEQ ID NO: 232389 - DNA, 25 bp, Probe Sequence
gagagaggattgtgggtttagaaga

SEQ ID NO: 232390 - DNA, 25 bp, Probe Sequence
gagaagagagactcggttctaactt

SEQ ID NO: 232391 - DNA, 25 bp, Probe Sequence
gagcaagagatggccacggctgctt

SEQ ID NO: 232392 - DNA, 25 bp, Probe Sequence
gagaagagggcatggcgctggagtg

SEQ ID NO: 232393 - DNA, 25 bp, Probe Sequence
gagacaaagtcacttgccatgggtc

SEQ ID NO: 232394 - DNA, 25 bp, Probe Sequence
gagacaagtgtcacagcctggttgg

SEQ ID NO: 232395 - DNA, 25 bp, Probe Sequence
gagaatatggccatcacctgaaaag

SEQ ID NO: 232396 - DNA, 25 bp, Probe Sequence
gagaaagcaggcatcaagctgaaca

SEQ ID NO: 232397 - DNA, 25 bp, Probe Sequence
gagactagcctgaccaacatggaga

SEQ ID NO: 232398 - DNA, 25 bp, Probe Sequence
gagacatggactcagaaaatgcaaa

SEQ ID NO: 232399 - DNA, 25 bp, Probe Sequence
gagcaagagacttcaaaaagacata

SEQ ID NO: 232400 - DNA, 25 bp, Probe Sequence
gagaaaactatcacaaggacagaaa

SEQ ID NO: 232401 - DNA, 25 bp, Probe Sequence
gagaatagaatcaccagaggaaatt

SEQ ID NO: 232402 - DNA, 25 bp, Probe Sequence
gagaatagacattagacagggacct

SEQ ID NO: 232403 - DNA, 25 bp, Probe Sequence
gagaagagacatgtaccttgaccat

SEQ ID NO: 232404 - DNA, 25 bp, Probe Sequence
gagaaggaatgggaccttctaatct

SEQ ID NO: 232405 - DNA, 25 bp, Probe Sequence
gagaaggcagcaggcggcctttgtt

SEQ ID NO: 232406 - DNA, 25 bp, Probe Sequence
gagaaggagaggcgccgccaggaga

SEQ ID NO: 232407 - DNA, 25 bp, Probe Sequence
gagaagagataggcggtcacccaaa

SEQ ID NO: 232408 - DNA, 25 bp, Probe Sequence
gagaagcaggaggggaattctcact

SEQ ID NO: 232409 - DNA, 25 bp, Probe Sequence
gagaatgggggccaatattcaacat

SEQ ID NO: 232410 - DNA, 25 bp, Probe Sequence
gagaatgaagtgtgcaatcactata

SEQ ID NO: 232411 - DNA, 25 bp, Probe Sequence
gagaatggcatgcattagctcactt

SEQ ID NO: 232412 - DNA, 25 bp, Probe Sequence
gagaatagctgactgtcccaattaa

SEQ ID NO: 232413 - DNA, 25 bp, Probe Sequence
gagaaagctcctcagctttagaaaa

SEQ ID NO: 232414 - DNA, 25 bp, Probe Sequence
gagcaataccctgtctttaaaaata

SEQ ID NO: 232415 - DNA, 25 bp, Probe Sequence
gagcaagaacctgtctcaaaaaaaa

SEQ ID NO: 232416 - DNA, 25 bp, Probe Sequence
gagcaaaacattgggccacttccta

SEQ ID NO: 232417 - DNA, 25 bp, Probe Sequence
gagagaaacttgggaacttccatga

SEQ ID NO: 232418 - DNA, 25 bp, Probe Sequence
gagaagaccttctgcaatgcatttt

SEQ ID NO: 232419 - DNA, 25 bp, Probe Sequence
gagaagaccacctgaattctcatcc

SEQ ID NO: 232420 - DNA, 25 bp, Probe Sequence
gagaaacccatttatactctactct

SEQ ID NO: 232421 - DNA, 25 bp, Probe Sequence
gagaatacggttttggtgtcctgct

SEQ ID NO: 232422 - DNA, 25 bp, Probe Sequence
gagaatacctgtttagtgttgcact

SEQ ID NO: 232423 - DNA, 25 bp, Probe Sequence
gagaacacctctttatggcttaccc

SEQ ID NO: 232424 - DNA, 25 bp, Probe Sequence
gagaaccccagcaaagcgctgttcg

SEQ ID NO: 232425 - DNA, 25 bp, Probe Sequence
gagaacttactaaaggcacttcctt

SEQ ID NO: 232426 - DNA, 25 bp, Probe Sequence
gagaactaaatcacagtactcaact

SEQ ID NO: 232427 - DNA, 25 bp, Probe Sequence
gagaaataaataaattgcctccctt

SEQ ID NO: 232428 - DNA, 25 bp, Probe Sequence
gagagaatcaaatgagtttactttt

SEQ ID NO: 232429 - DNA, 25 bp, Probe Sequence
gagaactgagaatgaggtttttttt

SEQ ID NO: 232430 - DNA, 25 bp, Probe Sequence
gagaattatacaatgacttattttt

SEQ ID NO: 232431 - DNA, 25 bp, Probe Sequence
gagaattatcacaacctaatgacat

SEQ ID NO: 232432 - DNA, 25 bp, Probe Sequence
gagaactattggactctaattgctt

SEQ ID NO: 232433 - DNA, 25 bp, Probe Sequence
gagaacggtatgacttaattttaga

SEQ ID NO: 232434 - DNA, 25 bp, Probe Sequence
gagaggggatgagaaatagttttga

SEQ ID NO: 232435 - DNA, 25 bp, Probe Sequence
gagaagatgttagaaatgattgtgt

SEQ ID NO: 232436 - DNA, 25 bp, Probe Sequence
gagaatggttactaaagtgtgcttt

SEQ ID NO: 232437 - DNA, 25 bp, Probe Sequence
gagaagtatttttatgagactcttt

SEQ ID NO: 232438 - DNA, 25 bp, Probe Sequence
gagaagtctttccaagaaggcctta

SEQ ID NO: 232439 - DNA, 25 bp, Probe Sequence
gagaatccttttttgacaagccttg

SEQ ID NO: 232440 - DNA, 25 bp, Probe Sequence
gagcaatcctgttatagtacatctg

SEQ ID NO: 232441 - DNA, 25 bp, Probe Sequence
gagaatcccttgtggactggggaca

SEQ ID NO: 232442 - DNA, 25 bp, Probe Sequence
gagaatcctgtccggaattggggaa

SEQ ID NO: 232443 - DNA, 25 bp, Probe Sequence
gagagacctgtcctagatgttgggg

SEQ ID NO: 232444 - DNA, 25 bp, Probe Sequence
gagagatgcctctcttatgtcttca

SEQ ID NO: 232445 - DNA, 25 bp, Probe Sequence
gagcaattctactttatatcttcag

SEQ ID NO: 232446 - DNA, 25 bp, Probe Sequence
gagaatcatgtgtacctaactaagg

SEQ ID NO: 232447 - DNA, 25 bp, Probe Sequence
gagaatatgagtgccatgcatccaa

SEQ ID NO: 232448 - DNA, 25 bp, Probe Sequence
gagcaatgacagaaccagctgcacc

SEQ ID NO: 232449 - DNA, 25 bp, Probe Sequence
gagaaatgcagcattcactctccct

SEQ ID NO: 232450 - DNA, 25 bp, Probe Sequence
gagaactgcatggaacccatctcgg

SEQ ID NO: 232451 - DNA, 25 bp, Probe Sequence
gagaactgcatggaacccatctcgg

SEQ ID NO: 232452 - DNA, 25 bp, Probe Sequence
gagaatctagtgtagcagcctccag

SEQ ID NO: 232453 - DNA, 25 bp, Probe Sequence
gagaactaatgcaaggctggccgga

SEQ ID NO: 232454 - DNA, 25 bp, Probe Sequence
gagaactcaaaatgtccccagagga

SEQ ID NO: 232455 - DNA, 25 bp, Probe Sequence
gagaaccaacattaattccatatga

SEQ ID NO: 232456 - DNA, 25 bp, Probe Sequence
gagaatcccacattagcttgttagt

SEQ ID NO: 232457 - DNA, 25 bp, Probe Sequence
gagaatatacaatactctttattat

SEQ ID NO: 232458 - DNA, 25 bp, Probe Sequence
gagaaatccacgtaacctttgcttt

SEQ ID NO: 232459 - DNA, 25 bp, Probe Sequence
gagacttacacgttcaacttttgcc

SEQ ID NO: 232460 - DNA, 25 bp, Probe Sequence
gagacaatacacattccaactatgg

SEQ ID NO: 232461 - DNA, 25 bp, Probe Sequence
gagacaaccagtgtcagtacatctg

SEQ ID NO: 232462 - DNA, 25 bp, Probe Sequence
gagactagccctggtgggaacgact

SEQ ID NO: 232463 - DNA, 25 bp, Probe Sequence
gagaaagccctggggatgaagctgc

SEQ ID NO: 232464 - DNA, 25 bp, Probe Sequence
gagaagtaccggaagatcaagctgc

SEQ ID NO: 232465 - DNA, 25 bp, Probe Sequence
gagaatgtaacgaataatccactat

SEQ ID NO: 232466 - DNA, 25 bp, Probe Sequence
gagaagatagaccctaatatataat

SEQ ID NO: 232467 - DNA, 25 bp, Probe Sequence
gagaattctgcccactttttataaa

SEQ ID NO: 232468 - DNA, 25 bp, Probe Sequence
gagaattctgcccactttttataaa

SEQ ID NO: 232469 - DNA, 25 bp, Probe Sequence
gagaattccctatttatttgacaaa

SEQ ID NO: 232470 - DNA, 25 bp, Probe Sequence
gagaacccttacaaattcgaagaat

SEQ ID NO: 232471 - DNA, 25 bp, Probe Sequence
gagactctctaaagcaaattcgaag

SEQ ID NO: 232472 - DNA, 25 bp, Probe Sequence
gagacttctacaggcaacacttcaa

SEQ ID NO: 232473 - DNA, 25 bp, Probe Sequence
gagactatgggaggaaagctccgga

SEQ ID NO: 232474 - DNA, 25 bp, Probe Sequence
gagagattggccagcaaaaactgtg

SEQ ID NO: 232475 - DNA, 25 bp, Probe Sequence
gagaatcttcctaaaaggactgtgt

SEQ ID NO: 232476 - DNA, 25 bp, Probe Sequence
gagaacttcatcctaaagcatacgg

SEQ ID NO: 232477 - DNA, 25 bp, Probe Sequence
gagaatcttcagctcatattaatct

SEQ ID NO: 232478 - DNA, 25 bp, Probe Sequence
gagaacttctgattagctctcagtc

SEQ ID NO: 232479 - DNA, 25 bp, Probe Sequence
gagaattgactattatgtgtgtgta

SEQ ID NO: 232480 - DNA, 25 bp, Probe Sequence
gagaattcactgacgtgtggcttaa

SEQ ID NO: 232481 - DNA, 25 bp, Probe Sequence
gagagacgactgatttccttagatg

SEQ ID NO: 232482 - DNA, 25 bp, Probe Sequence
gagacactcactcgtgttcttttca

SEQ ID NO: 232483 - DNA, 25 bp, Probe Sequence
gagacagtgcatttgggttttctgg

SEQ ID NO: 232484 - DNA, 25 bp, Probe Sequence
gagacgtgatgctgggcgattaccg

SEQ ID NO: 232485 - DNA, 25 bp, Probe Sequence
gagacaaggcattgctgcgcagatt

SEQ ID NO: 232486 - DNA, 25 bp, Probe Sequence
gagaaggtcttggctgctgtgtaca

SEQ ID NO: 232487 - DNA, 25 bp, Probe Sequence
gagaagtgtatggagttgtgaaagc

SEQ ID NO: 232488 - DNA, 25 bp, Probe Sequence
gagaaggctgaaatttctgaaagca

SEQ ID NO: 232489 - DNA, 25 bp, Probe Sequence
gagaagagggcagtggttgaaaaac

SEQ ID NO: 232490 - DNA, 25 bp, Probe Sequence
gagaaatatggctgtgggaaaacac

SEQ ID NO: 232491 - DNA, 25 bp, Probe Sequence
gagaaaagagagcagccgaacaaca

SEQ ID NO: 232492 - DNA, 25 bp, Probe Sequence
gagagaaaaatgtttcgacagccaa

SEQ ID NO: 232493 - DNA, 25 bp, Probe Sequence
gagaacagaagacctgggaagtgca

SEQ ID NO: 232494 - DNA, 25 bp, Probe Sequence
gagaccagaagctctctgagttaga

SEQ ID NO: 232495 - DNA, 25 bp, Probe Sequence
gagaatcacaactgtatgtctatag

SEQ ID NO: 232496 - DNA, 25 bp, Probe Sequence
gagaatcatcggggtcaggtcagtg

SEQ ID NO: 232497 - DNA, 25 bp, Probe Sequence
gagaagcatcgaggctataggacgc

SEQ ID NO: 232498 - DNA, 25 bp, Probe Sequence
gagaatgcaggacctggacgaggat

SEQ ID NO: 232499 - DNA, 25 bp, Probe Sequence
gagaagagagcgactggacaattgt

SEQ ID NO: 232500 - DNA, 25 bp, Probe Sequence
gagaagaagccactcggctcttggc

SEQ ID NO: 232501 - DNA, 25 bp, Probe Sequence
gagaagtcagccagcaggctcttgg

SEQ ID NO: 232502 - DNA, 25 bp, Probe Sequence
gagaagggcatcactgtgcctgaga

SEQ ID NO: 232503 - DNA, 25 bp, Probe Sequence
gagaagctgtaggactgtttgtgac

SEQ ID NO: 232504 - DNA, 25 bp, Probe Sequence
gagaagctgtaggactgtttgtgac

SEQ ID NO: 232505 - DNA, 25 bp, Probe Sequence
gagaatgctgcagaatttttgaagc

SEQ ID NO: 232506 - DNA, 25 bp, Probe Sequence
gagaagatgctgtgtattgttgaag

SEQ ID NO: 232507 - DNA, 25 bp, Probe Sequence
gagaagctgcgctgtgactttgagg

SEQ ID NO: 232508 - DNA, 25 bp, Probe Sequence
gagaatgcagaccatgatgactttg

SEQ ID NO: 232509 - DNA, 25 bp, Probe Sequence
gagaagaactcattgccttcatcaa

SEQ ID NO: 232510 - DNA, 25 bp, Probe Sequence
gagaaacagtgttggtgtcatgggt

SEQ ID NO: 232511 - DNA, 25 bp, Probe Sequence
gagaagaccgtgagttgatgccagt

SEQ ID NO: 232512 - DNA, 25 bp, Probe Sequence
gagaaacctggtgatattgccagca

SEQ ID NO: 232513 - DNA, 25 bp, Probe Sequence
gagaccaactgggatattgcccaca

SEQ ID NO: 232514 - DNA, 25 bp, Probe Sequence
gagactctaaaatatagccaccagt

SEQ ID NO: 232515 - DNA, 25 bp, Probe Sequence
gagactaaaaccattcctcactgct

SEQ ID NO: 232516 - DNA, 25 bp, Probe Sequence
gagacaggaatagctgttcctagct

SEQ ID NO: 232517 - DNA, 25 bp, Probe Sequence
gagagcaagtaagctgtccctttta

SEQ ID NO: 232518 - DNA, 25 bp, Probe Sequence
gagaaaggcaaactgtcactcttca

SEQ ID NO: 232519 - DNA, 25 bp, Probe Sequence
gagaaaggctacgtgactcctgtga

SEQ ID NO: 232520 - DNA, 25 bp, Probe Sequence
gagaaaggctacgtgactcctgtga

SEQ ID NO: 232521 - DNA, 25 bp, Probe Sequence
gagaagggcgtagaccatctgacaa

SEQ ID NO: 232522 - DNA, 25 bp, Probe Sequence
gagaatgggttagcatcacatgctg

SEQ ID NO: 232523 - DNA, 25 bp, Probe Sequence
gagaagtggacatcccacatgttct

SEQ ID NO: 232524 - DNA, 25 bp, Probe Sequence
gagaagggtcactactgcatttata

SEQ ID NO: 232525 - DNA, 25 bp, Probe Sequence
gagaagtttgactgccactactgca

SEQ ID NO: 232526 - DNA, 25 bp, Probe Sequence
gagaagtttgattttcgcaaccacc

SEQ ID NO: 232527 - DNA, 25 bp, Probe Sequence
gagaaggcttattgtgtcagcagca

SEQ ID NO: 232528 - DNA, 25 bp, Probe Sequence
gagaaggcttattgtgtcagcagca

SEQ ID NO: 232529 - DNA, 25 bp, Probe Sequence
gagaagacaccttgtgctcatgggc

SEQ ID NO: 232530 - DNA, 25 bp, Probe Sequence
gagaatgtaactgatctgcagtggc

SEQ ID NO: 232531 - DNA, 25 bp, Probe Sequence
gagaatgttccttatctgagttgta

SEQ ID NO: 232532 - DNA, 25 bp, Probe Sequence
gagaagttcctgcactgtgtatctt

SEQ ID NO: 232533 - DNA, 25 bp, Probe Sequence
gagaagatttgccaatggtgctttg

SEQ ID NO: 232534 - DNA, 25 bp, Probe Sequence
gagaagcaacatgcactggctcatt

SEQ ID NO: 232535 - DNA, 25 bp, Probe Sequence
gagaaggcagcatactgaccagtgg

SEQ ID NO: 232536 - DNA, 25 bp, Probe Sequence
gagagcaaggggagcccagtgggcc

SEQ ID NO: 232537 - DNA, 25 bp, Probe Sequence
gagacgggatggagacacggggcag

SEQ ID NO: 232538 - DNA, 25 bp, Probe Sequence
gagacccagctggaaacctggcttc

SEQ ID NO: 232539 - DNA, 25 bp, Probe Sequence
gagactcccctagggagcttgctct

SEQ ID NO: 232540 - DNA, 25 bp, Probe Sequence
gagacccttcgagaagtgctccatt

SEQ ID NO: 232541 - DNA, 25 bp, Probe Sequence
gagacccttcgagaaatctcgtctc

SEQ ID NO: 232542 - DNA, 25 bp, Probe Sequence
gagaccctgttaactactacgttga

SEQ ID NO: 232543 - DNA, 25 bp, Probe Sequence
gagacctccgtctctactaaaatac

SEQ ID NO: 232544 - DNA, 25 bp, Probe Sequence
gagaagcacctgttccaactaagac

SEQ ID NO: 232545 - DNA, 25 bp, Probe Sequence
gagaatcactcaattcctattggag

SEQ ID NO: 232546 - DNA, 25 bp, Probe Sequence
gagaatcacttgaacccaggaggtg

SEQ ID NO: 232547 - DNA, 25 bp, Probe Sequence
gagaatcgcttgagcccaggaggcg

SEQ ID NO: 232548 - DNA, 25 bp, Probe Sequence
gagaatcgcttgagcccaggaggcg

SEQ ID NO: 232549 - DNA, 25 bp, Probe Sequence
gagacccttttcacaagatggcgcc

SEQ ID NO: 232550 - DNA, 25 bp, Probe Sequence
gagagcagcctgattacccagggct

SEQ ID NO: 232551 - DNA, 25 bp, Probe Sequence
gagacagccatgatcttcgctggcg

SEQ ID NO: 232552 - DNA, 25 bp, Probe Sequence
gagaagagcatctttctcgtggccc

SEQ ID NO: 232553 - DNA, 25 bp, Probe Sequence
gagacagagtctcactctgtcgccc

SEQ ID NO: 232554 - DNA, 25 bp, Probe Sequence
gagacagagttggaaaccctcacca

SEQ ID NO: 232555 - DNA, 25 bp, Probe Sequence
gagaaggtagaggagatgccacata

SEQ ID NO: 232556 - DNA, 25 bp, Probe Sequence
gagaagtgataaaagcaggctacaa

SEQ ID NO: 232557 - DNA, 25 bp, Probe Sequence
gagaagtgaaggacagaggcattga

SEQ ID NO: 232558 - DNA, 25 bp, Probe Sequence
gagaagtagtgtccaggcacattgt

SEQ ID NO: 232559 - DNA, 25 bp, Probe Sequence
gagaagaatggtagcagccacaagt

SEQ ID NO: 232560 - DNA, 25 bp, Probe Sequence
gagaatgacatgaatccagcaaata

SEQ ID NO: 232561 - DNA, 25 bp, Probe Sequence
gagaatggcatgaacacaggaggta

SEQ ID NO: 232562 - DNA, 25 bp, Probe Sequence
gagaatggcatgaacctgggaggcg

SEQ ID NO: 232563 - DNA, 25 bp, Probe Sequence
gagaatcgcttgaactctggaggcg

SEQ ID NO: 232564 - DNA, 25 bp, Probe Sequence
gagaatggcttgaacctgggaggtg

SEQ ID NO: 232565 - DNA, 25 bp, Probe Sequence
gagaatcgctggaacctgggaggca

SEQ ID NO: 232566 - DNA, 25 bp, Probe Sequence
gagaagcacgaccttcatgttacct

SEQ ID NO: 232567 - DNA, 25 bp, Probe Sequence
gagacgaggcaactgtttttccatc

SEQ ID NO: 232568 - DNA, 25 bp, Probe Sequence
gagactgagtacaagttgttcctta

SEQ ID NO: 232569 - DNA, 25 bp, Probe Sequence
gagacagagtaatttgcagtttgtt

SEQ ID NO: 232570 - DNA, 25 bp, Probe Sequence
gagaagtttgtcttgcaatgtattt

SEQ ID NO: 232571 - DNA, 25 bp, Probe Sequence
gagaagattcttttggatgcacaac

SEQ ID NO: 232572 - DNA, 25 bp, Probe Sequence
gagaagcttcaaactgctggatcag

SEQ ID NO: 232573 - DNA, 25 bp, Probe Sequence
gagaccttcagcgggatggatcagg

SEQ ID NO: 232574 - DNA, 25 bp, Probe Sequence
gagaccccatctgaaggtcaccaac

SEQ ID NO: 232575 - DNA, 25 bp, Probe Sequence
gagaccgccttgtaccggaaaatgc

SEQ ID NO: 232576 - DNA, 25 bp, Probe Sequence
gagacacggccagaacggcaagagt

SEQ ID NO: 232577 - DNA, 25 bp, Probe Sequence
gagaagggctcagagaggacaaaat

SEQ ID NO: 232578 - DNA, 25 bp, Probe Sequence
gagaagggctcagagaggacaaaat

SEQ ID NO: 232579 - DNA, 25 bp, Probe Sequence
gagaagggctcagagaggaccaaaa

SEQ ID NO: 232580 - DNA, 25 bp, Probe Sequence
gagaagacctcagaaaccgaaagaa

SEQ ID NO: 232581 - DNA, 25 bp, Probe Sequence
gagaaagcttcatcaaaggtaaaaa

SEQ ID NO: 232582 - DNA, 25 bp, Probe Sequence
gagaagatggctaacgactggtcaa

SEQ ID NO: 232583 - DNA, 25 bp, Probe Sequence
gagaagaggaaacgtcagcgccaaa

SEQ ID NO: 232584 - DNA, 25 bp, Probe Sequence
gagagatgggaaaggtagtggaagg

SEQ ID NO: 232585 - DNA, 25 bp, Probe Sequence
gagaaggtcacatggatgaggagaa

SEQ ID NO: 232586 - DNA, 25 bp, Probe Sequence
gagacagacccaggaatggtacatc

SEQ ID NO: 232587 - DNA, 25 bp, Probe Sequence
gagaatgcagcttcaagaaggtaag

SEQ ID NO: 232588 - DNA, 25 bp, Probe Sequence
gagaccagtgcccatgaaggtcaga

SEQ ID NO: 232589 - DNA, 25 bp, Probe Sequence
gagacatcactggcctataataaat

SEQ ID NO: 232590 - DNA, 25 bp, Probe Sequence
gagacatagagggtgtagaataagt

SEQ ID NO: 232591 - DNA, 25 bp, Probe Sequence
gagaagatggtgctgtcatgaaata

SEQ ID NO: 232592 - DNA, 25 bp, Probe Sequence
gagaaaggaggcttatgagagagaa

SEQ ID NO: 232593 - DNA, 25 bp, Probe Sequence
gagaaggctggaagtcggcaggaat

SEQ ID NO: 232594 - DNA, 25 bp, Probe Sequence
gagacatgggccagggccaggagtg

SEQ ID NO: 232595 - DNA, 25 bp, Probe Sequence
gagaacagggcttgggccactttgg

SEQ ID NO: 232596 - DNA, 25 bp, Probe Sequence
gagaaagattctggggctgtcttat

SEQ ID NO: 232597 - DNA, 25 bp, Probe Sequence
gagacaaacctcatatgcagactta

SEQ ID NO: 232598 - DNA, 25 bp, Probe Sequence
gagaatgaataagctatgcaaggta

SEQ ID NO: 232599 - DNA, 25 bp, Probe Sequence
gagaagcaacaagtttaaggacatt

SEQ ID NO: 232600 - DNA, 25 bp, Probe Sequence
gagacaaaccaatttaattccatgt

SEQ ID NO: 232601 - DNA, 25 bp, Probe Sequence
gagacagaatcccaataatagtccc

SEQ ID NO: 232602 - DNA, 25 bp, Probe Sequence
gagaaattctgctcaaatagtacgg

SEQ ID NO: 232603 - DNA, 25 bp, Probe Sequence
acacgagagccttctaatgccaagc

SEQ ID NO: 232604 - DNA, 25 bp, Probe Sequence
gagaactatgctgcccataaacacg

SEQ ID NO: 232605 - DNA, 25 bp, Probe Sequence
gagaacatcactgctccaaagaccc

SEQ ID NO: 232606 - DNA, 25 bp, Probe Sequence
gagagcaccactgaacttagacctc

SEQ ID NO: 232607 - DNA, 25 bp, Probe Sequence
gagaacaactgagatgtgctaacct

SEQ ID NO: 232608 - DNA, 25 bp, Probe Sequence
gagaagaatcagtaagtgtaaggtg

SEQ ID NO: 232609 - DNA, 25 bp, Probe Sequence
gagaagatgacctaagtgtgactgc

SEQ ID NO: 232610 - DNA, 25 bp, Probe Sequence
gagacagggtctcactgtgttgcct

SEQ ID NO: 232611 - DNA, 25 bp, Probe Sequence
gagacagggtctcactgtgttgcct

SEQ ID NO: 232612 - DNA, 25 bp, Probe Sequence
gagacagggtctcactgtgttgcct

SEQ ID NO: 232613 - DNA, 25 bp, Probe Sequence
gagaagggttgatcctgcatctggg

SEQ ID NO: 232614 - DNA, 25 bp, Probe Sequence
gagacgggtcaggaactagcggaat

SEQ ID NO: 232615 - DNA, 25 bp, Probe Sequence
gagacgttcgaggtgaaggggacat

SEQ ID NO: 232616 - DNA, 25 bp, Probe Sequence
gagacttacggcaagaaggcatttt

SEQ ID NO: 232617 - DNA, 25 bp, Probe Sequence
gagacctaccagtattatggcttct

SEQ ID NO: 232618 - DNA, 25 bp, Probe Sequence
gagaacatagatcaattatactact

SEQ ID NO: 232619 - DNA, 25 bp, Probe Sequence
gagacactggactttttacccattt

SEQ ID NO: 232620 - DNA, 25 bp, Probe Sequence
gagaaggggtttggttccctgtctg

SEQ ID NO: 232621 - DNA, 25 bp, Probe Sequence
gattagggtgacctagttccacatg

SEQ ID NO: 232622 - DNA, 25 bp, Probe Sequence
gattaggactcctgagttgcccatg

SEQ ID NO: 232623 - DNA, 25 bp, Probe Sequence
gttggctgagggtgggagccacggc

SEQ ID NO: 232624 - DNA, 25 bp, Probe Sequence
gatccgctaccgagtggaggacagt

SEQ ID NO: 232625 - DNA, 25 bp, Probe Sequence
gaggcctataccattcaaggacagt

SEQ ID NO: 232626 - DNA, 25 bp, Probe Sequence
gagagcacttcctgtaccagggaga

SEQ ID NO: 232627 - DNA, 25 bp, Probe Sequence
gagagacgctgcttttaccaggaaa

SEQ ID NO: 232628 - DNA, 25 bp, Probe Sequence
gagaacgtctgttttcaagaacaac

SEQ ID NO: 232629 - DNA, 25 bp, Probe Sequence
gagaactctctggaaccattaaaga

SEQ ID NO: 232630 - DNA, 25 bp, Probe Sequence
gatgaagattcgggaaattaaggaa

SEQ ID NO: 232631 - DNA, 25 bp, Probe Sequence
gagaaggtcgggtacttcaagaaga

SEQ ID NO: 232632 - DNA, 25 bp, Probe Sequence
gagaacagacgggaagcgtacgaag

SEQ ID NO: 232633 - DNA, 25 bp, Probe Sequence
gagaaggacgggcaggtcacactgg

SEQ ID NO: 232634 - DNA, 25 bp, Probe Sequence
gagacggagggaacagagaccactg

SEQ ID NO: 232635 - DNA, 25 bp, Probe Sequence
gagagcgctgggttgactaacctct

SEQ ID NO: 232636 - DNA, 25 bp, Probe Sequence
gagagcgctgggttgactaacctct

SEQ ID NO: 232637 - DNA, 25 bp, Probe Sequence
gagacggatgtctatgttaacaatg

SEQ ID NO: 232638 - DNA, 25 bp, Probe Sequence
gagaagagcagatattgtttcaatc

SEQ ID NO: 232639 - DNA, 25 bp, Probe Sequence
gagacgacaggaatattactaacca

SEQ ID NO: 232640 - DNA, 25 bp, Probe Sequence
gagaaccaggctatggacgtctcca

SEQ ID NO: 232641 - DNA, 25 bp, Probe Sequence
gagacccaagtgaagatatggttcc

SEQ ID NO: 232642 - DNA, 25 bp, Probe Sequence
gagaccaaagtgtgtgactagtcaa

SEQ ID NO: 232643 - DNA, 25 bp, Probe Sequence
gagacacaagaagcggatccaggaa

SEQ ID NO: 232644 - DNA, 25 bp, Probe Sequence
gagacagctcatgaggcgtgaccgg

SEQ ID NO: 232645 - DNA, 25 bp, Probe Sequence
gagagagctcggacgaggagccggt

SEQ ID NO: 232646 - DNA, 25 bp, Probe Sequence
gagagagctcggacgaggagccggt

SEQ ID NO: 232647 - DNA, 25 bp, Probe Sequence
gagagagcatcgggttctaccggtc

SEQ ID NO: 232648 - DNA, 25 bp, Probe Sequence
gagaacatgcctcttgcaaagggtc

SEQ ID NO: 232649 - DNA, 25 bp, Probe Sequence
gagacaccacttttcaaaggacttc

SEQ ID NO: 232650 - DNA, 25 bp, Probe Sequence
gagacaccactacatatcaatgaga

SEQ ID NO: 232651 - DNA, 25 bp, Probe Sequence
gagacatccacctgtgatatttgcc

SEQ ID NO: 232652 - DNA, 25 bp, Probe Sequence
gagaaccactgctgcatatatttgt

SEQ ID NO: 232653 - DNA, 25 bp, Probe Sequence
gagaacctctgcaagctcatgaaag

SEQ ID NO: 232654 - DNA, 25 bp, Probe Sequence
gagaaactcctagtttagacaactg

SEQ ID NO: 232655 - DNA, 25 bp, Probe Sequence
gagaacacgcgtatttacagccagt

SEQ ID NO: 232656 - DNA, 25 bp, Probe Sequence
gagaaagcttgtacttcttcaccag

SEQ ID NO: 232657 - DNA, 25 bp, Probe Sequence
gagaactgatgtttcaatttacccc

SEQ ID NO: 232658 - DNA, 25 bp, Probe Sequence
gagaacttaaaactgtatgacaccc

SEQ ID NO: 232659 - DNA, 25 bp, Probe Sequence
gagaagctttatgagtctcagaacc

SEQ ID NO: 232660 - DNA, 25 bp, Probe Sequence
gagaaattaaccttcatcaatgatc

SEQ ID NO: 232661 - DNA, 25 bp, Probe Sequence
gagaagatctagacctaccacacat

SEQ ID NO: 232662 - DNA, 25 bp, Probe Sequence
gagaccttgatgatattcacacaca

SEQ ID NO: 232663 - DNA, 25 bp, Probe Sequence
gagaaatctagcatatacacacaca

SEQ ID NO: 232664 - DNA, 25 bp, Probe Sequence
gagacaatcgaggaatgaggacaat

SEQ ID NO: 232665 - DNA, 25 bp, Probe Sequence
gagaagccaaagagatgcatgaaag

SEQ ID NO: 232666 - DNA, 25 bp, Probe Sequence
gagaagcctctctggaatggcacag

SEQ ID NO: 232667 - DNA, 25 bp, Probe Sequence
gagaacacctgcaggaagtgaatca

SEQ ID NO: 232668 - DNA, 25 bp, Probe Sequence
gagaccacaggcaagggaacaacag

SEQ ID NO: 232669 - DNA, 25 bp, Probe Sequence
gagaaaggccaagtggaccacagct

SEQ ID NO: 232670 - DNA, 25 bp, Probe Sequence
gagaaaggccaacttcaaagaccag

SEQ ID NO: 232671 - DNA, 25 bp, Probe Sequence
gagaaaggctcctccaagaagctgg

SEQ ID NO: 232672 - DNA, 25 bp, Probe Sequence
gagaaagccctaccacaagaagcgg

SEQ ID NO: 232673 - DNA, 25 bp, Probe Sequence
gagagctacctattggcataaaaga

SEQ ID NO: 232674 - DNA, 25 bp, Probe Sequence
gagagctaccagaatgagtgttacc

SEQ ID NO: 232675 - DNA, 25 bp, Probe Sequence
gagactcccatgaagccttttgaaa

SEQ ID NO: 232676 - DNA, 25 bp, Probe Sequence
gagactggactgagactttgtgaga

SEQ ID NO: 232677 - DNA, 25 bp, Probe Sequence
gagagccaagttgacttcaggaact

SEQ ID NO: 232678 - DNA, 25 bp, Probe Sequence
gagaccaagttggacctcattagca

SEQ ID NO: 232679 - DNA, 25 bp, Probe Sequence
gagaaaactggagtcctatttgcag

SEQ ID NO: 232680 - DNA, 25 bp, Probe Sequence
gagaacaacttggtcatgaatttag

SEQ ID NO: 232681 - DNA, 25 bp, Probe Sequence
gagaacaactacgtgatgaatgcac

SEQ ID NO: 232682 - DNA, 25 bp, Probe Sequence
gagacagctatcaccacatgtatca

SEQ ID NO: 232683 - DNA, 25 bp, Probe Sequence
gagacaggctggactcagctacatc

SEQ ID NO: 232684 - DNA, 25 bp, Probe Sequence
gagaacaggtgaatcagctgaattt

SEQ ID NO: 232685 - DNA, 25 bp, Probe Sequence
gagaacatggacaatgccgcagact

SEQ ID NO: 232686 - DNA, 25 bp, Probe Sequence
gagaccagtgagctcactgtgaccc

SEQ ID NO: 232687 - DNA, 25 bp, Probe Sequence
gagaccactggattagcagaccctg

SEQ ID NO: 232688 - DNA, 25 bp, Probe Sequence
gagaaactgcgtttgcagagccaca

SEQ ID NO: 232689 - DNA, 25 bp, Probe Sequence
gagactagagttgtcacagcccacc

SEQ ID NO: 232690 - DNA, 25 bp, Probe Sequence
gagactataactaggccagatatca

SEQ ID NO: 232691 - DNA, 25 bp, Probe Sequence
gagagcctatttacaacagctaagg

SEQ ID NO: 232692 - DNA, 25 bp, Probe Sequence
gagaccattgtaagcatgacccaac

SEQ ID NO: 232693 - DNA, 25 bp, Probe Sequence
gagaccattgcaatgaatccccaat

SEQ ID NO: 232694 - DNA, 25 bp, Probe Sequence
gagacagcaatgacatgtacagcca

SEQ ID NO: 232695 - DNA, 25 bp, Probe Sequence
gagacacaggtcagcacaacattaa

SEQ ID NO: 232696 - DNA, 25 bp, Probe Sequence
gagacacagagttgtgacacaaaaa

SEQ ID NO: 232697 - DNA, 25 bp, Probe Sequence
gagacacagagtacatggtaagaca

SEQ ID NO: 232698 - DNA, 25 bp, Probe Sequence
gagaacgagctgcatggggagaagc

SEQ ID NO: 232699 - DNA, 25 bp, Probe Sequence
gagaagcggatgctggtgtctggac

SEQ ID NO: 232700 - DNA, 25 bp, Probe Sequence
gagaagcgcgaggcatgggtgcgcg

SEQ ID NO: 232701 - DNA, 25 bp, Probe Sequence
gagaagagcgagtcgtcgtgagcgc

SEQ ID NO: 232702 - DNA, 25 bp, Probe Sequence
gagaagctggagcggcagctggccc

SEQ ID NO: 232703 - DNA, 25 bp, Probe Sequence
gagaacagtggcccggagagctgcc

SEQ ID NO: 232704 - DNA, 25 bp, Probe Sequence
gagaccgtggcggagaaagcgctgc

SEQ ID NO: 232705 - DNA, 25 bp, Probe Sequence
gagactttgggcagaatcatgaatg

SEQ ID NO: 232706 - DNA, 25 bp, Probe Sequence
gagacacttgggactactagagata

SEQ ID NO: 232707 - DNA, 25 bp, Probe Sequence
gagagagttgcaggggagccgagtt

SEQ ID NO: 232708 - DNA, 25 bp, Probe Sequence
gagagttctagggaatggaggagta

SEQ ID NO: 232709 - DNA, 25 bp, Probe Sequence
gagagtactggttccttcagtagtg

SEQ ID NO: 232710 - DNA, 25 bp, Probe Sequence
gagacataagtgagcttttgactgg

SEQ ID NO: 232711 - DNA, 25 bp, Probe Sequence
gagacaatgatgctagtttgcatat

SEQ ID NO: 232712 - DNA, 25 bp, Probe Sequence
gagaacatgtgatagttgtcttttc

SEQ ID NO: 232713 - DNA, 25 bp, Probe Sequence
gagagaatgtatttggtgtctgcca

SEQ ID NO: 232714 - DNA, 25 bp, Probe Sequence
gagacattgtgaaaggttgccccag

SEQ ID NO: 232715 - DNA, 25 bp, Probe Sequence
gagaacgggaagcttgtcatcaatg

SEQ ID NO: 232716 - DNA, 25 bp, Probe Sequence
gagaacgggaagcttgtcatcaatg

SEQ ID NO: 232717 - DNA, 25 bp, Probe Sequence
gagacacgggaaaatttatgacatg

SEQ ID NO: 232718 - DNA, 25 bp, Probe Sequence
gagacctgggaggaattgatgaacc

SEQ ID NO: 232719 - DNA, 25 bp, Probe Sequence
gagaccagggagtcaaatgtgaccc

SEQ ID NO: 232720 - DNA, 25 bp, Probe Sequence
gagacaagggagtcggtgtccctga

SEQ ID NO: 232721 - DNA, 25 bp, Probe Sequence
tgaacggggagccggtgaacgggcg

SEQ ID NO: 232722 - DNA, 25 bp, Probe Sequence
gataggggaccccttggcatagggc

SEQ ID NO: 232723 - DNA, 25 bp, Probe Sequence
gagagggtgacctctctgggcaagg

SEQ ID NO: 232724 - DNA, 25 bp, Probe Sequence
gagactggtattgtggctgtgccag

SEQ ID NO: 232725 - DNA, 25 bp, Probe Sequence
gagacggtgaaggtgtggcttcagg

SEQ ID NO: 232726 - DNA, 25 bp, Probe Sequence
gagacaggtgctaaagttgaacgag

SEQ ID NO: 232727 - DNA, 25 bp, Probe Sequence
gagacgagtcatgagacctaaggag

SEQ ID NO: 232728 - DNA, 25 bp, Probe Sequence
gagacaaccacagatcctacaggac

SEQ ID NO: 232729 - DNA, 25 bp, Probe Sequence
gagaaacacatcttccctagagggt

SEQ ID NO: 232730 - DNA, 25 bp, Probe Sequence
gagaggtcagactcctaaggtggcc

SEQ ID NO: 232731 - DNA, 25 bp, Probe Sequence
gagacagaaacaacctcaaggtgcc

SEQ ID NO: 232732 - DNA, 25 bp, Probe Sequence
gagagagaaagaatcccacagggca

SEQ ID NO: 232733 - DNA, 25 bp, Probe Sequence
gagaagcgcaagaacgcccatggcg

SEQ ID NO: 232734 - DNA, 25 bp, Probe Sequence
gagaaagcaattgaagccaggcatg

SEQ ID NO: 232735 - DNA, 25 bp, Probe Sequence
gagaaacacttatatgactgtcaaa

SEQ ID NO: 232736 - DNA, 25 bp, Probe Sequence
gagacaatcctttctatcactgttt

SEQ ID NO: 232737 - DNA, 25 bp, Probe Sequence
gagaacttttgcacatgccatgttt

SEQ ID NO: 232738 - DNA, 25 bp, Probe Sequence
gagaacttgtttcctgctatttgga

SEQ ID NO: 232739 - DNA, 25 bp, Probe Sequence
gagaactttattactcttgttctgt

SEQ ID NO: 232740 - DNA, 25 bp, Probe Sequence
gagaacttggagaatagtttttgct

SEQ ID NO: 232741 - DNA, 25 bp, Probe Sequence
gagaagctctaagtacactcgtctt

SEQ ID NO: 232742 - DNA, 25 bp, Probe Sequence
gagacagttctagacctttgtgata

SEQ ID NO: 232743 - DNA, 25 bp, Probe Sequence
gagacctttagctaacttagtgcaa

SEQ ID NO: 232744 - DNA, 25 bp, Probe Sequence
gagactccgtcaggaagttactggg

SEQ ID NO: 232745 - DNA, 25 bp, Probe Sequence
gagactccgtcaggaagttactggg

SEQ ID NO: 232746 - DNA, 25 bp, Probe Sequence
gagactcagaaagaagttccacagg

SEQ ID NO: 232747 - DNA, 25 bp, Probe Sequence
gagaccagaaacactgatgtcccac

SEQ ID NO: 232748 - DNA, 25 bp, Probe Sequence
gagacagaaagagactgtatcttaa

SEQ ID NO: 232749 - DNA, 25 bp, Probe Sequence
gagaaaactatggactgtgctgctg

SEQ ID NO: 232750 - DNA, 25 bp, Probe Sequence
gagaaagacaactgttctgcgggtt

SEQ ID NO: 232751 - DNA, 25 bp, Probe Sequence
gagaaaaacacatgctgcctggcct

SEQ ID NO: 232752 - DNA, 25 bp, Probe Sequence
gagaacaaactctgtcactgggcat

SEQ ID NO: 232753 - DNA, 25 bp, Probe Sequence
gagaacaatatttgtgtcataagac

SEQ ID NO: 232754 - DNA, 25 bp, Probe Sequence
gagaacattatgtgtacacgagccc

SEQ ID NO: 232755 - DNA, 25 bp, Probe Sequence
gagactattatgagtaactatgtgc

SEQ ID NO: 232756 - DNA, 25 bp, Probe Sequence
gagactgtctggcagttgcctatgt

SEQ ID NO: 232757 - DNA, 25 bp, Probe Sequence
gagactctctggagttcagagagat

SEQ ID NO: 232758 - DNA, 25 bp, Probe Sequence
gagactccttgatatgcttcagaga

SEQ ID NO: 232759 - DNA, 25 bp, Probe Sequence
gagacctcttaagttctaagattaa

SEQ ID NO: 232760 - DNA, 25 bp, Probe Sequence
gagacccttggatttagaattatag

SEQ ID NO: 232761 - DNA, 25 bp, Probe Sequence
gagagcctttgacataaggtctatc

SEQ ID NO: 232762 - DNA, 25 bp, Probe Sequence
gagacgtttgccatgagggctgttc

SEQ ID NO: 232763 - DNA, 25 bp, Probe Sequence
gagacgcattccattgggcgagatt

SEQ ID NO: 232764 - DNA, 25 bp, Probe Sequence
gagagcctgtgtcattggtgggaag

SEQ ID NO: 232765 - DNA, 25 bp, Probe Sequence
gagagggtatctatgcagggaaggg

SEQ ID NO: 232766 - DNA, 25 bp, Probe Sequence
gagaggactacacatcagggcttga

SEQ ID NO: 232767 - DNA, 25 bp, Probe Sequence
gagaggaaaaggtataggcttgcct

SEQ ID NO: 232768 - DNA, 25 bp, Probe Sequence
gagaaaagcaatcaacggctgtcaa

SEQ ID NO: 232769 - DNA, 25 bp, Probe Sequence
gagagaaagcaacaactagttgtga

SEQ ID NO: 232770 - DNA, 25 bp, Probe Sequence
gagaaagcagagaagaactacctta

SEQ ID NO: 232771 - DNA, 25 bp, Probe Sequence
gagaaagcaggcgaatactccctct

SEQ ID NO: 232772 - DNA, 25 bp, Probe Sequence
gagaaaggtgcaggaactcttccag

SEQ ID NO: 232773 - DNA, 25 bp, Probe Sequence
gagaacagtgcgcaggacacattcc

SEQ ID NO: 232774 - DNA, 25 bp, Probe Sequence
gagaaagtgctgcgctacgagacct

SEQ ID NO: 232775 - DNA, 25 bp, Probe Sequence
gagaaattgatgaagctgtagaacc

SEQ ID NO: 232776 - DNA, 25 bp, Probe Sequence
gagaaacatggcaggtagagatcaa

SEQ ID NO: 232777 - DNA, 25 bp, Probe Sequence
gagaaatttctcgggtgaatgcaat

SEQ ID NO: 232778 - DNA, 25 bp, Probe Sequence
gagagaatttctagggaagtcatct

SEQ ID NO: 232779 - DNA, 25 bp, Probe Sequence
gagagcaacttgggagccaacaact

SEQ ID NO: 232780 - DNA, 25 bp, Probe Sequence
gagaacagtatcagagccaaacaca

SEQ ID NO: 232781 - DNA, 25 bp, Probe Sequence
gagaactgtagaaagccacacacta

SEQ ID NO: 232782 - DNA, 25 bp, Probe Sequence
gagacctgtagataccagcctttca

SEQ ID NO: 232783 - DNA, 25 bp, Probe Sequence
gagaccttagaaggcagcgcttccc

SEQ ID NO: 232784 - DNA, 25 bp, Probe Sequence
gagacctaataattggccttcgatt

SEQ ID NO: 232785 - DNA, 25 bp, Probe Sequence
gagacctgaagataccttcatcgct

SEQ ID NO: 232786 - DNA, 25 bp, Probe Sequence
gagagactgtagttccctattttaa

SEQ ID NO: 232787 - DNA, 25 bp, Probe Sequence
gagagatcgttaatgcccttgaagt

SEQ ID NO: 232788 - DNA, 25 bp, Probe Sequence
gagagacagtacatgccctgggagg

SEQ ID NO: 232789 - DNA, 25 bp, Probe Sequence
gagaaagtccttggtcagagccagg

SEQ ID NO: 232790 - DNA, 25 bp, Probe Sequence
gagaacagcttcaggtgcagaccga

SEQ ID NO: 232791 - DNA, 25 bp, Probe Sequence
gagaacatgcggggtgtgcgcttcg

SEQ ID NO: 232792 - DNA, 25 bp, Probe Sequence
gagaaatgagtgaatgtgggtgatc

SEQ ID NO: 232793 - DNA, 25 bp, Probe Sequence
gagaactgaatgagctagggtccaa

SEQ ID NO: 232794 - DNA, 25 bp, Probe Sequence
gagaactgaagtactggggcctcct

SEQ ID NO: 232795 - DNA, 25 bp, Probe Sequence
gagagactgaagattcgaggctccc

SEQ ID NO: 232796 - DNA, 25 bp, Probe Sequence
gagaactacaacttcgagctctacg

SEQ ID NO: 232797 - DNA, 25 bp, Probe Sequence
gagaactacaacttcgagctctacg

SEQ ID NO: 232798 - DNA, 25 bp, Probe Sequence
gagacaccccactggagctgggtga

SEQ ID NO: 232799 - DNA, 25 bp, Probe Sequence
gagagaatcccttgtggactgggga

SEQ ID NO: 232800 - DNA, 25 bp, Probe Sequence
gagagcaaggccaagctgtcatcgg

SEQ ID NO: 232801 - DNA, 25 bp, Probe Sequence
gagagcggtctgacagtggacgccc

SEQ ID NO: 232802 - DNA, 25 bp, Probe Sequence
gagactggttgtcgggacattccac

SEQ ID NO: 232803 - DNA, 25 bp, Probe Sequence
gagacttgagttcgggacagtaagc

SEQ ID NO: 232804 - DNA, 25 bp, Probe Sequence
gagacttgagcttgacctaaggata

SEQ ID NO: 232805 - DNA, 25 bp, Probe Sequence
gagacatggcatgaagccagagagt

SEQ ID NO: 232806 - DNA, 25 bp, Probe Sequence
gagagcccatcaaatcctgagtgtc

SEQ ID NO: 232807 - DNA, 25 bp, Probe Sequence
gagaccctgaaacgtaatgtcaaca

SEQ ID NO: 232808 - DNA, 25 bp, Probe Sequence
gagacccgcaagtcctggagaaagc

SEQ ID NO: 232809 - DNA, 25 bp, Probe Sequence
gagacccaggcatacttgaaggagc

SEQ ID NO: 232810 - DNA, 25 bp, Probe Sequence
gagaactcggcatgctcgatgaagt

SEQ ID NO: 232811 - DNA, 25 bp, Probe Sequence
gagaaacagtgctctggtgacatga

SEQ ID NO: 232812 - DNA, 25 bp, Probe Sequence
gagaacatagtgtctagagtgtaaa

SEQ ID NO: 232813 - DNA, 25 bp, Probe Sequence
gagaactcaggtgaggcattagcta

SEQ ID NO: 232814 - DNA, 25 bp, Probe Sequence
gagaactctggacagttgatcagct

SEQ ID NO: 232815 - DNA, 25 bp, Probe Sequence
gagaactcagttctgcaggtctgtg

SEQ ID NO: 232816 - DNA, 25 bp, Probe Sequence
gagaactatgacctgcagcaactct

SEQ ID NO: 232817 - DNA, 25 bp, Probe Sequence
gagaaatgatacgcaacctctccat

SEQ ID NO: 232818 - DNA, 25 bp, Probe Sequence
gagaacaaacaccagactctgctcc

SEQ ID NO: 232819 - DNA, 25 bp, Probe Sequence
gagaacagaatcccagcaccattct

SEQ ID NO: 232820 - DNA, 25 bp, Probe Sequence
gagaacagattctactacaattcag

SEQ ID NO: 232821 - DNA, 25 bp, Probe Sequence
gagaaagattgagtcttcctgtcac

SEQ ID NO: 232822 - DNA, 25 bp, Probe Sequence
gagaaagctgatggccttgtttcaa

SEQ ID NO: 232823 - DNA, 25 bp, Probe Sequence
gagagaaggtagggtgtgtatatat

SEQ ID NO: 232824 - DNA, 25 bp, Probe Sequence
gagaggagagtccctgtggttatta

SEQ ID NO: 232825 - DNA, 25 bp, Probe Sequence
gggaaagtcaacatagtggttagga

SEQ ID NO: 232826 - DNA, 25 bp, Probe Sequence
gaggaaaactacacaactttattga

SEQ ID NO: 232827 - DNA, 25 bp, Probe Sequence
gagagaaactctttctccctttgca

SEQ ID NO: 232828 - DNA, 25 bp, Probe Sequence
gagaaaactgtactgtttgccatta

SEQ ID NO: 232829 - DNA, 25 bp, Probe Sequence
gagaaacacagtttgtcctctcctt

SEQ ID NO: 232830 - DNA, 25 bp, Probe Sequence
gagaaacactgatttcatccaactc

SEQ ID NO: 232831 - DNA, 25 bp, Probe Sequence
gagacacccataattcccataatgt

SEQ ID NO: 232832 - DNA, 25 bp, Probe Sequence
gagagcacagcatatgttcccaagg

SEQ ID NO: 232833 - DNA, 25 bp, Probe Sequence
gagaaagctctacttctctcgatgc

SEQ ID NO: 232834 - DNA, 25 bp, Probe Sequence
gagaaagccttgaactctatcatcg

SEQ ID NO: 232835 - DNA, 25 bp, Probe Sequence
gagaaactcctaaattgcatcagtg

SEQ ID NO: 232836 - DNA, 25 bp, Probe Sequence
gagaaactgcttacgtacacattgc

SEQ ID NO: 232837 - DNA, 25 bp, Probe Sequence
gagaaacagatctggttcacttacg

SEQ ID NO: 232838 - DNA, 25 bp, Probe Sequence
gagacaccatagtggaaactggggc

SEQ ID NO: 232839 - DNA, 25 bp, Probe Sequence
gagaccaaagggaccagactggggt

SEQ ID NO: 232840 - DNA, 25 bp, Probe Sequence
gaggccaaacgccaacaacttggga

SEQ ID NO: 232841 - DNA, 25 bp, Probe Sequence
gaggccattacctgaaatttccaga

SEQ ID NO: 232842 - DNA, 25 bp, Probe Sequence
gagaggttcccattaaggatgtcga

SEQ ID NO: 232843 - DNA, 25 bp, Probe Sequence
gagacttctcctctatgaaatgggc

SEQ ID NO: 232844 - DNA, 25 bp, Probe Sequence
gagacttaccgcatattacagtgga

SEQ ID NO: 232845 - DNA, 25 bp, Probe Sequence
gagacattttatcttgtccgtgaag

SEQ ID NO: 232846 - DNA, 25 bp, Probe Sequence
gagactattttcctgtgtggggcac

SEQ ID NO: 232847 - DNA, 25 bp, Probe Sequence
gagaaattgtgtggagtgacggaac

SEQ ID NO: 232848 - DNA, 25 bp, Probe Sequence
gagagaatcttgtgaggccaggtat

SEQ ID NO: 232849 - DNA, 25 bp, Probe Sequence
gagaaactcgcaaaggccagttccc

SEQ ID NO: 232850 - DNA, 25 bp, Probe Sequence
gagacatacttgaagggccagagcc

SEQ ID NO: 232851 - DNA, 25 bp, Probe Sequence
gagactgacctgcaggacgaaacca

SEQ ID NO: 232852 - DNA, 25 bp, Probe Sequence
gagactcacggtcaagctaaggcga

SEQ ID NO: 232853 - DNA, 25 bp, Probe Sequence
gagagccctgggtgacttcaggtgg

SEQ ID NO: 232854 - DNA, 25 bp, Probe Sequence
gagacgacgggaagtttctggtgga

SEQ ID NO: 232855 - DNA, 25 bp, Probe Sequence
gagacagacgggggatctggctggt

SEQ ID NO: 232856 - DNA, 25 bp, Probe Sequence
gagaacacggagtgcttgcatctgg

SEQ ID NO: 232857 - DNA, 25 bp, Probe Sequence
gagagaccggaaggctgagcactgg

SEQ ID NO: 232858 - DNA, 25 bp, Probe Sequence
gagaacatcacgtacctgaagcacg

SEQ ID NO: 232859 - DNA, 25 bp, Probe Sequence
gagaacatccaggtcctgaagatcg

SEQ ID NO: 232860 - DNA, 25 bp, Probe Sequence
gagaccacactggtcctggaatcag

SEQ ID NO: 232861 - DNA, 25 bp, Probe Sequence
gagactgacctttctcaggaatatt

SEQ ID NO: 232862 - DNA, 25 bp, Probe Sequence
gagacgtccttataatgatgatgca

SEQ ID NO: 232863 - DNA, 25 bp, Probe Sequence
gagacgcctcatagcacaaattgta

SEQ ID NO: 232864 - DNA, 25 bp, Probe Sequence
gagacatcgcatcatcaaaagttat

SEQ ID NO: 232865 - DNA, 25 bp, Probe Sequence
gagagcaggcaattcaaattttttc

SEQ ID NO: 232866 - DNA, 25 bp, Probe Sequence
gagacatggatattgcaaagttgaa

SEQ ID NO: 232867 - DNA, 25 bp, Probe Sequence
gagacaaattcttaactctgacaca

SEQ ID NO: 232868 - DNA, 25 bp, Probe Sequence
gagaaaatctctcagcgctgtggca

SEQ ID NO: 232869 - DNA, 25 bp, Probe Sequence
gagaaaataatgttgctggtgagat

SEQ ID NO: 232870 - DNA, 25 bp, Probe Sequence
gagacaatgtaatactgttggtcca

SEQ ID NO: 232871 - DNA, 25 bp, Probe Sequence
gagacattggaatacttcttgctgc

SEQ ID NO: 232872 - DNA, 25 bp, Probe Sequence
gagactttgaccacaatcttcagct

SEQ ID NO: 232873 - DNA, 25 bp, Probe Sequence
gagactttggtcagattgttcgata

SEQ ID NO: 232874 - DNA, 25 bp, Probe Sequence
gagactttctactagaggacttgaa

SEQ ID NO: 232875 - DNA, 25 bp, Probe Sequence
gagactttatctgacagcagacgtg

SEQ ID NO: 232876 - DNA, 25 bp, Probe Sequence
gagacttggcattcatcaagcacat

SEQ ID NO: 232877 - DNA, 25 bp, Probe Sequence
gagagctgctggatcacgatgctat

SEQ ID NO: 232878 - DNA, 25 bp, Probe Sequence
gagagctctggtctgttgtatctct

SEQ ID NO: 232879 - DNA, 25 bp, Probe Sequence
gagacccatgtccatgttgtactat

SEQ ID NO: 232880 - DNA, 25 bp, Probe Sequence
gagacccatgtccatgttgtactat

SEQ ID NO: 232881 - DNA, 25 bp, Probe Sequence
gagagcatcctgactctgttgacat

SEQ ID NO: 232882 - DNA, 25 bp, Probe Sequence
gagacatcctctccatgggatgatg

SEQ ID NO: 232883 - DNA, 25 bp, Probe Sequence
gagacaagctcaccgaaatggccgc

SEQ ID NO: 232884 - DNA, 25 bp, Probe Sequence
gagaaaccaccactcaagggctgga

SEQ ID NO: 232885 - DNA, 25 bp, Probe Sequence
gagaaaccagcgcagaaaggctgaa

SEQ ID NO: 232886 - DNA, 25 bp, Probe Sequence
gagaaaccagggacacacagggaca

SEQ ID NO: 232887 - DNA, 25 bp, Probe Sequence
gagacaccaagaagaagctgcggga

SEQ ID NO: 232888 - DNA, 25 bp, Probe Sequence
gagacactgaagagcctgtgccgga

SEQ ID NO: 232889 - DNA, 25 bp, Probe Sequence
gagacagtacatgccctgggaggcc

SEQ ID NO: 232890 - DNA, 25 bp, Probe Sequence
gagacatctgagaccctcagaaagg

SEQ ID NO: 232891 - DNA, 25 bp, Probe Sequence
gagactagcctgggccaaataggaa

SEQ ID NO: 232892 - DNA, 25 bp, Probe Sequence
gatcctacctatcaagcactaaaaa

SEQ ID NO: 232893 - DNA, 25 bp, Probe Sequence
gagacttccttgcaagcattaaaac

SEQ ID NO: 232894 - DNA, 25 bp, Probe Sequence
gagacttctattgtacctcaaatag

SEQ ID NO: 232895 - DNA, 25 bp, Probe Sequence
gagaaacttgggaacttccatgaag

SEQ ID NO: 232896 - DNA, 25 bp, Probe Sequence
gagaaatttagtaatttgccaaagc

SEQ ID NO: 232897 - DNA, 25 bp, Probe Sequence
gagaaatttattgtccagcaccacc

SEQ ID NO: 232898 - DNA, 25 bp, Probe Sequence
gagaaactttgtgctacatgacgac

SEQ ID NO: 232899 - DNA, 25 bp, Probe Sequence
gagaaactttgtgctacatgacgac

SEQ ID NO: 232900 - DNA, 25 bp, Probe Sequence
gagaaactttgtgctacatgacgac

SEQ ID NO: 232901 - DNA, 25 bp, Probe Sequence
gagaaagactttatgagcaaaacta

SEQ ID NO: 232902 - DNA, 25 bp, Probe Sequence
gagaaatgacttttatatgccaaga

SEQ ID NO: 232903 - DNA, 25 bp, Probe Sequence
gagaaatgaccgtatgtcaccaaga

SEQ ID NO: 232904 - DNA, 25 bp, Probe Sequence
gagaaagtcgagttgtatcgcatta

SEQ ID NO: 232905 - DNA, 25 bp, Probe Sequence
gagaaaattggtatatcatgcagat

SEQ ID NO: 232906 - DNA, 25 bp, Probe Sequence
gagacaatattgtcttcctgcgaga

SEQ ID NO: 232907 - DNA, 25 bp, Probe Sequence
gagacattaaccttcagctgagaca

SEQ ID NO: 232908 - DNA, 25 bp, Probe Sequence
gagacgtacacaggccactggaagc

SEQ ID NO: 232909 - DNA, 25 bp, Probe Sequence
gatgacgtgaacatcacctcgacca

SEQ ID NO: 232910 - DNA, 25 bp, Probe Sequence
gagacgtgagagatctcctcgatct

SEQ ID NO: 232911 - DNA, 25 bp, Probe Sequence
gagactgcaggaggagtcccagacc

SEQ ID NO: 232912 - DNA, 25 bp, Probe Sequence
gagactgcaggaggagtcccagacc

SEQ ID NO: 232913 - DNA, 25 bp, Probe Sequence
gagaccagggtaccatcaatatggc

SEQ ID NO: 232914 - DNA, 25 bp, Probe Sequence
gagagcctgaggagccattttgagc

SEQ ID NO: 232915 - DNA, 25 bp, Probe Sequence
gagactgtaggatgccaatgggact

SEQ ID NO: 232916 - DNA, 25 bp, Probe Sequence
gagacaggaggattgcctgaggcca

SEQ ID NO: 232917 - DNA, 25 bp, Probe Sequence
gagacatcggcgagctgctagtgcc

SEQ ID NO: 232918 - DNA, 25 bp, Probe Sequence
gagacatctgtgcattgtttggcat

SEQ ID NO: 232919 - DNA, 25 bp, Probe Sequence
gagaaatctcaagttactggctttt

SEQ ID NO: 232920 - DNA, 25 bp, Probe Sequence
gagaaagtcacatttagggtttatt

SEQ ID NO: 232921 - DNA, 25 bp, Probe Sequence
gagacaactcaacaatgggttacat

SEQ ID NO: 232922 - DNA, 25 bp, Probe Sequence
gagacaggtcaaaatctggtttcag

SEQ ID NO: 232923 - DNA, 25 bp, Probe Sequence
gagacaggactatctccgatattca

SEQ ID NO: 232924 - DNA, 25 bp, Probe Sequence
gagacggacatagtcgtggatcact

SEQ ID NO: 232925 - DNA, 25 bp, Probe Sequence
gagacgttctcagtcattgaacacc

SEQ ID NO: 232926 - DNA, 25 bp, Probe Sequence
gagacgctattctcagtgatgcccg

SEQ ID NO: 232927 - DNA, 25 bp, Probe Sequence
gagagaagctactcagtgatccctg

SEQ ID NO: 232928 - DNA, 25 bp, Probe Sequence
gagacatagtaatcagaggccaatg

SEQ ID NO: 232929 - DNA, 25 bp, Probe Sequence
gagacattattgtaccaggcctgct

SEQ ID NO: 232930 - DNA, 25 bp, Probe Sequence
gagaaaactgcatcacagtcccatt

SEQ ID NO: 232931 - DNA, 25 bp, Probe Sequence
gagagaaactcttcagcgaatcctt

SEQ ID NO: 232932 - DNA, 25 bp, Probe Sequence
gagaaagaatcccacagggcactat

SEQ ID NO: 232933 - DNA, 25 bp, Probe Sequence
gagtatcagcaagggcaaaggaggt

SEQ ID NO: 232934 - DNA, 25 bp, Probe Sequence
gagtatcagaagtggctacgaggtg

SEQ ID NO: 232935 - DNA, 25 bp, Probe Sequence
gagactcagaagtaggacatgccag

SEQ ID NO: 232936 - DNA, 25 bp, Probe Sequence
gagagcgctgaacctggacaagcag

SEQ ID NO: 232937 - DNA, 25 bp, Probe Sequence
gagagcgctgaacctggacaagcag

SEQ ID NO: 232938 - DNA, 25 bp, Probe Sequence
gagagcgctgaacctggacaagcag

SEQ ID NO: 232939 - DNA, 25 bp, Probe Sequence
gagaggctgagtctaggaagttgag

SEQ ID NO: 232940 - DNA, 25 bp, Probe Sequence
gagagtgtggtgttctggaagctga

SEQ ID NO: 232941 - DNA, 25 bp, Probe Sequence
gagacattgccggtatgcgagattg

SEQ ID NO: 232942 - DNA, 25 bp, Probe Sequence
gagacttcaccaggggagatggcac

SEQ ID NO: 232943 - DNA, 25 bp, Probe Sequence
gagacaacaccagaggaatgatgac

SEQ ID NO: 232944 - DNA, 25 bp, Probe Sequence
gagaaatgcaacacagtgcacatgt

SEQ ID NO: 232945 - DNA, 25 bp, Probe Sequence
gagaaatcacttaaggcagcatttg

SEQ ID NO: 232946 - DNA, 25 bp, Probe Sequence
gagacaagtcttagagctggctttt

SEQ ID NO: 232947 - DNA, 25 bp, Probe Sequence
gagagcaagatcattctcgatcttc

SEQ ID NO: 232948 - DNA, 25 bp, Probe Sequence
gagagagcagtcagaccgagctttc

SEQ ID NO: 232949 - DNA, 25 bp, Probe Sequence
gagagagaacttacccactatctcc

SEQ ID NO: 232950 - DNA, 25 bp, Probe Sequence
gagagcaaaaggccctagatacccc

SEQ ID NO: 232951 - DNA, 25 bp, Probe Sequence
gagaggaagggagtccagatcccat

SEQ ID NO: 232952 - DNA, 25 bp, Probe Sequence
gagacggagggcatgctcagagacc

SEQ ID NO: 232953 - DNA, 25 bp, Probe Sequence
gagacgggtggcatggggagcagct

SEQ ID NO: 232954 - DNA, 25 bp, Probe Sequence
gagactcagttgcttgggaaatgct

SEQ ID NO: 232955 - DNA, 25 bp, Probe Sequence
gagacacagttactttgagaagcca

SEQ ID NO: 232956 - DNA, 25 bp, Probe Sequence
gagacaccaatttctatggcaaaca

SEQ ID NO: 232957 - DNA, 25 bp, Probe Sequence
gagacccatactgctgacagaaaag

SEQ ID NO: 232958 - DNA, 25 bp, Probe Sequence
gagacaacttcccaaagcacaaagc

SEQ ID NO: 232959 - DNA, 25 bp, Probe Sequence
gagacagagttcggcaaaagcaagg

SEQ ID NO: 232960 - DNA, 25 bp, Probe Sequence
gagacggtccagacaggaacaagac

SEQ ID NO: 232961 - DNA, 25 bp, Probe Sequence
gagacctgtctccataaaaaaacta

SEQ ID NO: 232962 - DNA, 25 bp, Probe Sequence
gagactctgtctcaaaaaacaaaac

SEQ ID NO: 232963 - DNA, 25 bp, Probe Sequence
gagacgccatctctacaaaagtata

SEQ ID NO: 232964 - DNA, 25 bp, Probe Sequence
gagacattatatctaaaagacgtat

SEQ ID NO: 232965 - DNA, 25 bp, Probe Sequence
gagacatcttacagaataaaggtgt

SEQ ID NO: 232966 - DNA, 25 bp, Probe Sequence
gagagcacgtaccaataaaaatgtt

SEQ ID NO: 232967 - DNA, 25 bp, Probe Sequence
gagaccctatctctattaaaaaaat

SEQ ID NO: 232968 - DNA, 25 bp, Probe Sequence
gagatcccttctcttaaaaataata

SEQ ID NO: 232969 - DNA, 25 bp, Probe Sequence
gagacgcggtctgagtgaaaaaaaa

SEQ ID NO: 232970 - DNA, 25 bp, Probe Sequence
gagaggctgagtacggatgggaaac

SEQ ID NO: 232971 - DNA, 25 bp, Probe Sequence
gagacggcgttgggataggtatgac

SEQ ID NO: 232972 - DNA, 25 bp, Probe Sequence
gagagccgcggggagaaggccatca

SEQ ID NO: 232973 - DNA, 25 bp, Probe Sequence
gagaccagcaagatgaaagtcctca

SEQ ID NO: 232974 - DNA, 25 bp, Probe Sequence
gagaccagagagactgtagttccct

SEQ ID NO: 232975 - DNA, 25 bp, Probe Sequence
gagacgcggagtggtagtgctcacg

SEQ ID NO: 232976 - DNA, 25 bp, Probe Sequence
gagacacaggggctgcattgctggc

SEQ ID NO: 232977 - DNA, 25 bp, Probe Sequence
gagactcagggtactgctttgcatt

SEQ ID NO: 232978 - DNA, 25 bp, Probe Sequence
gagacaatggcaaacatgctttgat

SEQ ID NO: 232979 - DNA, 25 bp, Probe Sequence
gagagacatccatcatctgcttaat

SEQ ID NO: 232980 - DNA, 25 bp, Probe Sequence
gagagactctgagacttcttccatc

SEQ ID NO: 232981 - DNA, 25 bp, Probe Sequence
gagagactctgagacttcttccatc

SEQ ID NO: 232982 - DNA, 25 bp, Probe Sequence
gagagcactctatttattgtactgt

SEQ ID NO: 232983 - DNA, 25 bp, Probe Sequence
gagagcactctatttattgtactgt

SEQ ID NO: 232984 - DNA, 25 bp, Probe Sequence
gagagctgacaatcaattcacattt

SEQ ID NO: 232985 - DNA, 25 bp, Probe Sequence
gagaggacacaaaattatcatcagc

SEQ ID NO: 232986 - DNA, 25 bp, Probe Sequence
gagagaagcactacagttgtcaaga

SEQ ID NO: 232987 - DNA, 25 bp, Probe Sequence
gagaaagcactgacctgtcatgccc

SEQ ID NO: 232988 - DNA, 25 bp, Probe Sequence
gagacagagtctcgctctgtcgccc

SEQ ID NO: 232989 - DNA, 25 bp, Probe Sequence
gagacagagtctcgctctgttgccc

SEQ ID NO: 232990 - DNA, 25 bp, Probe Sequence
gagacagtctcatcgcagtctcagc

SEQ ID NO: 232991 - DNA, 25 bp, Probe Sequence
gagacagtagtctgcatacatcgct

SEQ ID NO: 232992 - DNA, 25 bp, Probe Sequence
gagacgtgagactgacatatgccat

SEQ ID NO: 232993 - DNA, 25 bp, Probe Sequence
gagacggatgagtttgcaatcgctg

SEQ ID NO: 232994 - DNA, 25 bp, Probe Sequence
gagagggctgaagttcaattcggta

SEQ ID NO: 232995 - DNA, 25 bp, Probe Sequence
gagagcggaaagtgagtatgcggct

SEQ ID NO: 232996 - DNA, 25 bp, Probe Sequence
gagagagcggaaagtgagtatgcgg

SEQ ID NO: 232997 - DNA, 25 bp, Probe Sequence
gagagacgcaacaagggtgctgccc

SEQ ID NO: 232998 - DNA, 25 bp, Probe Sequence
gagagacaccacagaaggagaccca

SEQ ID NO: 232999 - DNA, 25 bp, Probe Sequence
gagagacggagaaacacgagtccca

SEQ ID NO: 233000 - DNA, 25 bp, Probe Sequence
gagagcccgaacaaggggttgccat

SEQ ID NO: 233001 - DNA, 25 bp, Probe Sequence
gagaccccatcagaggaggtggcct

SEQ ID NO: 233002 - DNA, 25 bp, Probe Sequence
gagactctccatgggagggggagca

SEQ ID NO: 233003 - DNA, 25 bp, Probe Sequence
gagactcacaagaggggaagctgac

SEQ ID NO: 233004 - DNA, 25 bp, Probe Sequence
gagacacacaaaactgttgggcaac

SEQ ID NO: 233005 - DNA, 25 bp, Probe Sequence
gagacaccaatgtcttggtgtacat

SEQ ID NO: 233006 - DNA, 25 bp, Probe Sequence
gagacagccaacctcaggcttagat

SEQ ID NO: 233007 - DNA, 25 bp, Probe Sequence
gagacaagaagcccaaccttctggc

SEQ ID NO: 233008 - DNA, 25 bp, Probe Sequence
gagactagaagcccaagtcaacagg

SEQ ID NO: 233009 - DNA, 25 bp, Probe Sequence
gagaggatgcaagaccagactgaag

SEQ ID NO: 233010 - DNA, 25 bp, Probe Sequence
gagacctgaactgggcagactgcaa

SEQ ID NO: 233011 - DNA, 25 bp, Probe Sequence
gagacagcagaaactagcagacaga

SEQ ID NO: 233012 - DNA, 25 bp, Probe Sequence
gagacaagaatcagagcagtagcaa

SEQ ID NO: 233013 - DNA, 25 bp, Probe Sequence
gagacagcagcagaagtgggagcga

SEQ ID NO: 233014 - DNA, 25 bp, Probe Sequence
gagacagatgctcaagtgaggctgc

SEQ ID NO: 233015 - DNA, 25 bp, Probe Sequence
gagacgtggtaagtgcggtgcagtt

SEQ ID NO: 233016 - DNA, 25 bp, Probe Sequence
gagactgtgattcagcaaggtgatg

SEQ ID NO: 233017 - DNA, 25 bp, Probe Sequence
gagacggcaatgaagccaagtctgg

SEQ ID NO: 233018 - DNA, 25 bp, Probe Sequence
gagagggagagggcccagttgctgg

SEQ ID NO: 233019 - DNA, 25 bp, Probe Sequence
gagagaggggaaaatcagctgcagt

SEQ ID NO: 233020 - DNA, 25 bp, Probe Sequence
gagaggtcagacaaagtgccggata

SEQ ID NO: 233021 - DNA, 25 bp, Probe Sequence
gagagagacaaaagactggcggcca

SEQ ID NO: 233022 - DNA, 25 bp, Probe Sequence
gagaggaagttcaatttggtgccat

SEQ ID NO: 233023 - DNA, 25 bp, Probe Sequence
gagagggaagttcttgactctacca

SEQ ID NO: 233024 - DNA, 25 bp, Probe Sequence
gagaggtaggtaagggaagcccgca

SEQ ID NO: 233025 - DNA, 25 bp, Probe Sequence
gagagtgattcgcgtgggtacccgc

SEQ ID NO: 233026 - DNA, 25 bp, Probe Sequence
gagaggttaggagtgggttcataca

SEQ ID NO: 233027 - DNA, 25 bp, Probe Sequence
gatgtggccgtggaggggcttaacg

SEQ ID NO: 233028 - DNA, 25 bp, Probe Sequence
gagagaccagtgcagggctgttaac

SEQ ID NO: 233029 - DNA, 25 bp, Probe Sequence
gagagaaatgcccgggctgctgtag

SEQ ID NO: 233030 - DNA, 25 bp, Probe Sequence
gagacaaagctgaaggagctcccag

SEQ ID NO: 233031 - DNA, 25 bp, Probe Sequence
gagacacaagtgcaatggccctgag

SEQ ID NO: 233032 - DNA, 25 bp, Probe Sequence
gagaccacctgactgaggctagtgg

SEQ ID NO: 233033 - DNA, 25 bp, Probe Sequence
gagaccatcctggctaacaaggtga

SEQ ID NO: 233034 - DNA, 25 bp, Probe Sequence
gagaccatcctggctaacatggtga

SEQ ID NO: 233035 - DNA, 25 bp, Probe Sequence
gagaccatcctggctaacatggtga

SEQ ID NO: 233036 - DNA, 25 bp, Probe Sequence
gagaccatcctggctaacatggtga

SEQ ID NO: 233037 - DNA, 25 bp, Probe Sequence
gagatagtcctggaagacacgtggc

SEQ ID NO: 233038 - DNA, 25 bp, Probe Sequence
gagaaatcactcagagcaactggac

SEQ ID NO: 233039 - DNA, 25 bp, Probe Sequence
gagagaaaggctcagcaacgtgaaa

SEQ ID NO: 233040 - DNA, 25 bp, Probe Sequence
gagagaagggcccagcagattacca

SEQ ID NO: 233041 - DNA, 25 bp, Probe Sequence
gagagaagggcccagcagattacca

SEQ ID NO: 233042 - DNA, 25 bp, Probe Sequence
gagagacaggcagctcggattcaac

SEQ ID NO: 233043 - DNA, 25 bp, Probe Sequence
gagagcggagcagcagaggattcgt

SEQ ID NO: 233044 - DNA, 25 bp, Probe Sequence
gagacgcgagagacgtgcttccgaa

SEQ ID NO: 233045 - DNA, 25 bp, Probe Sequence
gagacaggggactccccaagaacgt

SEQ ID NO: 233046 - DNA, 25 bp, Probe Sequence
gatgcttggggagaccaatccagca

SEQ ID NO: 233047 - DNA, 25 bp, Probe Sequence
gagactgggagagcacaatatcgaa

SEQ ID NO: 233048 - DNA, 25 bp, Probe Sequence
gagactgggagagcacaacatcgaa

SEQ ID NO: 233049 - DNA, 25 bp, Probe Sequence
gagactgggagagcacaacatcgaa

SEQ ID NO: 233050 - DNA, 25 bp, Probe Sequence
gagactgggagagcacaacatcgaa

SEQ ID NO: 233051 - DNA, 25 bp, Probe Sequence
gagactgggagagcacaacatcaaa

SEQ ID NO: 233052 - DNA, 25 bp, Probe Sequence
gagactggccgggacaagataaacg

SEQ ID NO: 233053 - DNA, 25 bp, Probe Sequence
gagacagtacctgtaatgagaaaca

SEQ ID NO: 233054 - DNA, 25 bp, Probe Sequence
gagagagaccctgtcaatcaaccaa

SEQ ID NO: 233055 - DNA, 25 bp, Probe Sequence
gagagaacccttacaaattcgaaga

SEQ ID NO: 233056 - DNA, 25 bp, Probe Sequence
gagagaaaccctacaaatgtggaga

SEQ ID NO: 233057 - DNA, 25 bp, Probe Sequence
gagagaagccccactgggatctgag

SEQ ID NO: 233058 - DNA, 25 bp, Probe Sequence
gagagagaccctcactgctggggag

SEQ ID NO: 233059 - DNA, 25 bp, Probe Sequence
gagagagaccctcactgctggggag

SEQ ID NO: 233060 - DNA, 25 bp, Probe Sequence
gagacaacccacactgtgtctgagg

SEQ ID NO: 233061 - DNA, 25 bp, Probe Sequence
gagacacaacccattgtttatggtc

SEQ ID NO: 233062 - DNA, 25 bp, Probe Sequence
gagacaccacccatggtggttgtgg

SEQ ID NO: 233063 - DNA, 25 bp, Probe Sequence
gagaccctctacagtggtcttgctg

SEQ ID NO: 233064 - DNA, 25 bp, Probe Sequence
gagacgtattacaacttttagctgc

SEQ ID NO: 233065 - DNA, 25 bp, Probe Sequence
gagactatgattttacatctactac

SEQ ID NO: 233066 - DNA, 25 bp, Probe Sequence
gagactatgatataacatgtgtatg

SEQ ID NO: 233067 - DNA, 25 bp, Probe Sequence
gagacttgcataaaagcagaggttt

SEQ ID NO: 233068 - DNA, 25 bp, Probe Sequence
gagactcgattttacatgatatttt

SEQ ID NO: 233069 - DNA, 25 bp, Probe Sequence
gagacataatcctcctgttatactc

SEQ ID NO: 233070 - DNA, 25 bp, Probe Sequence
gagacatgaatgcagtgccttcaaa

SEQ ID NO: 233071 - DNA, 25 bp, Probe Sequence
gagacatcattgacagtctttctag

SEQ ID NO: 233072 - DNA, 25 bp, Probe Sequence
gagagaccggagaatttgtagttta

SEQ ID NO: 233073 - DNA, 25 bp, Probe Sequence
gagagatcctaagagctagtatgtt

SEQ ID NO: 233074 - DNA, 25 bp, Probe Sequence
gagactccgtactactggatgtttt

SEQ ID NO: 233075 - DNA, 25 bp, Probe Sequence
gagactcttatttaatgggcttttg

SEQ ID NO: 233076 - DNA, 25 bp, Probe Sequence
gagacctttgttgggaggcggtttg

SEQ ID NO: 233077 - DNA, 25 bp, Probe Sequence
gagacgcctgtgagaagaaccgctt

SEQ ID NO: 233078 - DNA, 25 bp, Probe Sequence
gagactccgtaaccaaactcttcgg

SEQ ID NO: 233079 - DNA, 25 bp, Probe Sequence
gagactcttgttagtcaacacatct

SEQ ID NO: 233080 - DNA, 25 bp, Probe Sequence
gagaccttgttggtattcagctgtg

SEQ ID NO: 233081 - DNA, 25 bp, Probe Sequence
gagacctttagagatgatcaggatg

SEQ ID NO: 233082 - DNA, 25 bp, Probe Sequence
gagacttttatgcacattctgtcat

SEQ ID NO: 233083 - DNA, 25 bp, Probe Sequence
gagactttgtcacttatttccttat

SEQ ID NO: 233084 - DNA, 25 bp, Probe Sequence
gatgtctttgacattttccctggaa

SEQ ID NO: 233085 - DNA, 25 bp, Probe Sequence
gagacttcgctcgaattgtctcctg

SEQ ID NO: 233086 - DNA, 25 bp, Probe Sequence
gagactatcagcggcagatctctcc

SEQ ID NO: 233087 - DNA, 25 bp, Probe Sequence
gagactatggagcagcagctctcct

SEQ ID NO: 233088 - DNA, 25 bp, Probe Sequence
gagagcaatgggcccatctatgcct

SEQ ID NO: 233089 - DNA, 25 bp, Probe Sequence
gagagagatgggagctcctctcctg

SEQ ID NO: 233090 - DNA, 25 bp, Probe Sequence
gagagaatcgagaagcgccgtgcag

SEQ ID NO: 233091 - DNA, 25 bp, Probe Sequence
gagagcctggtgaagcggctggctg

SEQ ID NO: 233092 - DNA, 25 bp, Probe Sequence
gagaccatggagaaggtgcgtgtaa

SEQ ID NO: 233093 - DNA, 25 bp, Probe Sequence
gagacgcaggcacaactctttatac

SEQ ID NO: 233094 - DNA, 25 bp, Probe Sequence
gagacgcaggcacaactctttatac

SEQ ID NO: 233095 - DNA, 25 bp, Probe Sequence
gagagtctgcagcacaacttttaac

SEQ ID NO: 233096 - DNA, 25 bp, Probe Sequence
gagagattgacgccaaggttttcta

SEQ ID NO: 233097 - DNA, 25 bp, Probe Sequence
gagagactactccaaatggtgtttg

SEQ ID NO: 233098 - DNA, 25 bp, Probe Sequence
gagagaatcactcaattcctattgg

SEQ ID NO: 233099 - DNA, 25 bp, Probe Sequence
gagagacaaatatagtccatactga

SEQ ID NO: 233100 - DNA, 25 bp, Probe Sequence
gagagataaagctatggtccaacca

SEQ ID NO: 233101 - DNA, 25 bp, Probe Sequence
gagagaatcaggcatgagttagaga

SEQ ID NO: 233102 - DNA, 25 bp, Probe Sequence
gagatggatcagtggatattaagat

SEQ ID NO: 233103 - DNA, 25 bp, Probe Sequence
gagaggtagaggttattccaggaga

SEQ ID NO: 233104 - DNA, 25 bp, Probe Sequence
gagaggaaaagtaaccatcactggt

SEQ ID NO: 233105 - DNA, 25 bp, Probe Sequence
gagacccaatcagttcactcattcc

SEQ ID NO: 233106 - DNA, 25 bp, Probe Sequence
gagagattaagcattcatcatttgg

SEQ ID NO: 233107 - DNA, 25 bp, Probe Sequence
gagacttcaaggactcagtttggtt

SEQ ID NO: 233108 - DNA, 25 bp, Probe Sequence
gagacctacaggaatcgcttctgga

SEQ ID NO: 233109 - DNA, 25 bp, Probe Sequence
gagaccatcatagagatcgattctt

SEQ ID NO: 233110 - DNA, 25 bp, Probe Sequence
gagactcataaggccatccaggccc

SEQ ID NO: 233111 - DNA, 25 bp, Probe Sequence
gagactgatgcaggcctaccagtcc

SEQ ID NO: 233112 - DNA, 25 bp, Probe Sequence
gagacgtggctgctgaacagctgca

SEQ ID NO: 233113 - DNA, 25 bp, Probe Sequence
gagactgaggctgtaagacgcattg

SEQ ID NO: 233114 - DNA, 25 bp, Probe Sequence
gagactgttctggctaaaccagtga

SEQ ID NO: 233115 - DNA, 25 bp, Probe Sequence
gagacatttcgcctgagatataagt

SEQ ID NO: 233116 - DNA, 25 bp, Probe Sequence
gagagcatgtccgcatggtcatcat

SEQ ID NO: 233117 - DNA, 25 bp, Probe Sequence
gagagatgtcccctgtgataatgtc

SEQ ID NO: 233118 - DNA, 25 bp, Probe Sequence
gagagatgtcccctgtgataatgtc

SEQ ID NO: 233119 - DNA, 25 bp, Probe Sequence
gagagtgtgaccaggaccattcagg

SEQ ID NO: 233120 - DNA, 25 bp, Probe Sequence
gagagctgatacttttgacctccaa

SEQ ID NO: 233121 - DNA, 25 bp, Probe Sequence
gagagctgatacttttgacctccaa

SEQ ID NO: 233122 - DNA, 25 bp, Probe Sequence
gagactgatatctctgtggctctca

SEQ ID NO: 233123 - DNA, 25 bp, Probe Sequence
gagactgaatgctacttactatatt

SEQ ID NO: 233124 - DNA, 25 bp, Probe Sequence
gagactggatgctgcttatcgttcc

SEQ ID NO: 233125 - DNA, 25 bp, Probe Sequence
gagactggcaagattactgatttca

SEQ ID NO: 233126 - DNA, 25 bp, Probe Sequence
gagactggcaagattactgatttca

SEQ ID NO: 233127 - DNA, 25 bp, Probe Sequence
gagactggagagatctcgttctata

SEQ ID NO: 233128 - DNA, 25 bp, Probe Sequence
gagacagaagacacgggcatatcat

SEQ ID NO: 233129 - DNA, 25 bp, Probe Sequence
gagacagataaattccaggcaacta

SEQ ID NO: 233130 - DNA, 25 bp, Probe Sequence
gagaccacacaatacctgaactcct

SEQ ID NO: 233131 - DNA, 25 bp, Probe Sequence
gagaccacacaatacctgaactcct

SEQ ID NO: 233132 - DNA, 25 bp, Probe Sequence
gagactgcaaaatcccgagtgaccc

SEQ ID NO: 233133 - DNA, 25 bp, Probe Sequence
gagaccaacaaggtgcagggtgcac

SEQ ID NO: 233134 - DNA, 25 bp, Probe Sequence
gagaccaacaaggtgcagggtgcac

SEQ ID NO: 233135 - DNA, 25 bp, Probe Sequence
gagactcagcagaaggtgcaggacc

SEQ ID NO: 233136 - DNA, 25 bp, Probe Sequence
gagacatcagagatgcgctcggcac

SEQ ID NO: 233137 - DNA, 25 bp, Probe Sequence
gagatcatgagagcctgtagccacc

SEQ ID NO: 233138 - DNA, 25 bp, Probe Sequence
gagacattagccagtagctcactct

SEQ ID NO: 233139 - DNA, 25 bp, Probe Sequence
gagagcctacctggatggcacgtgc

SEQ ID NO: 233140 - DNA, 25 bp, Probe Sequence
gagagacacatcattgtggcctgtg

SEQ ID NO: 233141 - DNA, 25 bp, Probe Sequence
gagagacaattatgttcctgaggtc

SEQ ID NO: 233142 - DNA, 25 bp, Probe Sequence
gagaggcatatatacttccgaggca

SEQ ID NO: 233143 - DNA, 25 bp, Probe Sequence
gagagagcaaataaagacctgagaa

SEQ ID NO: 233144 - DNA, 25 bp, Probe Sequence
gagacgcaggttttgatagcataga

SEQ ID NO: 233145 - DNA, 25 bp, Probe Sequence
gagactagcccctatgtcaaagaat

SEQ ID NO: 233146 - DNA, 25 bp, Probe Sequence
gagacatcagcccagaattctatat

SEQ ID NO: 233147 - DNA, 25 bp, Probe Sequence
gagactcatgcacaagcttcaatag

SEQ ID NO: 233148 - DNA, 25 bp, Probe Sequence
gagagccatcagttagctatcagac

SEQ ID NO: 233149 - DNA, 25 bp, Probe Sequence
gagatggcacagactgcaaataggc

SEQ ID NO: 233150 - DNA, 25 bp, Probe Sequence
gagatgcggcagccgctgagctggg

SEQ ID NO: 233151 - DNA, 25 bp, Probe Sequence
gagatgccaggggtatggggcgccg

SEQ ID NO: 233152 - DNA, 25 bp, Probe Sequence
gagagcctggatgtgatggcgtcac

SEQ ID NO: 233153 - DNA, 25 bp, Probe Sequence
gagactgtatatgtgatgtggatgc

SEQ ID NO: 233154 - DNA, 25 bp, Probe Sequence
gagactcgcaaggtggtgctgatgc

SEQ ID NO: 233155 - DNA, 25 bp, Probe Sequence
gagagcacagacaagggctcctccc

SEQ ID NO: 233156 - DNA, 25 bp, Probe Sequence
gagagacatgaatgcagtgccttca

SEQ ID NO: 233157 - DNA, 25 bp, Probe Sequence
gagagattcacatggtgttgcacaa

SEQ ID NO: 233158 - DNA, 25 bp, Probe Sequence
gagagaagagcatgtctttacttga

SEQ ID NO: 233159 - DNA, 25 bp, Probe Sequence
gagagaactcttatttatgctgagc

SEQ ID NO: 233160 - DNA, 25 bp, Probe Sequence
gagagagacgttatatatgtgctga

SEQ ID NO: 233161 - DNA, 25 bp, Probe Sequence
gagaggctcgtcaacaagcactgtt

SEQ ID NO: 233162 - DNA, 25 bp, Probe Sequence
gagaggtgagtaacttgctcagtta

SEQ ID NO: 233163 - DNA, 25 bp, Probe Sequence
gagaggtgttatacagggcgatttt

SEQ ID NO: 233164 - DNA, 25 bp, Probe Sequence
gagatgttccaaaaggcctgcattc

SEQ ID NO: 233165 - DNA, 25 bp, Probe Sequence
gagttgtccaaagggtcgcttaagg

SEQ ID NO: 233166 - DNA, 25 bp, Probe Sequence
gagaggtcccaaggaacgccatagg

SEQ ID NO: 233167 - DNA, 25 bp, Probe Sequence
gagagaacaaaaaacaccacaaggc

SEQ ID NO: 233168 - DNA, 25 bp, Probe Sequence
gagagaagaatataaagccccagaa

SEQ ID NO: 233169 - DNA, 25 bp, Probe Sequence
gagagggaaatacttcagctccggg

SEQ ID NO: 233170 - DNA, 25 bp, Probe Sequence
gagagggatactgaggcccctgagc

SEQ ID NO: 233171 - DNA, 25 bp, Probe Sequence
gagagagaggtccaaggtgccctac

SEQ ID NO: 233172 - DNA, 25 bp, Probe Sequence
gagagaagtctcgaaaggctccacc

SEQ ID NO: 233173 - DNA, 25 bp, Probe Sequence
gagagaggcagacaaacccatcagc

SEQ ID NO: 233174 - DNA, 25 bp, Probe Sequence
gagactggggaataccccagttgtg

SEQ ID NO: 233175 - DNA, 25 bp, Probe Sequence
gagacgggagtttaccccgatcaca

SEQ ID NO: 233176 - DNA, 25 bp, Probe Sequence
gagacgtgcggtcacattctaagtc

SEQ ID NO: 233177 - DNA, 25 bp, Probe Sequence
gagacctttttcttttagactctgc

SEQ ID NO: 233178 - DNA, 25 bp, Probe Sequence
gagacctttttcttttagactctgc

SEQ ID NO: 233179 - DNA, 25 bp, Probe Sequence
gagacctttcttgtaatgtagtcat

SEQ ID NO: 233180 - DNA, 25 bp, Probe Sequence
gagaccttgtctcgaaaaggaatct

SEQ ID NO: 233181 - DNA, 25 bp, Probe Sequence
gagacctttgtaaccaatggaatta

SEQ ID NO: 233182 - DNA, 25 bp, Probe Sequence
gagaccttgtggatcaacagaagtt

SEQ ID NO: 233183 - DNA, 25 bp, Probe Sequence
gagaccatcgatttctcagaaacgc

SEQ ID NO: 233184 - DNA, 25 bp, Probe Sequence
gagaggctctactatgctatgaaag

SEQ ID NO: 233185 - DNA, 25 bp, Probe Sequence
gagagctgcttatacgaaaacccac

SEQ ID NO: 233186 - DNA, 25 bp, Probe Sequence
gagagtttgggaccaagaacaccca

SEQ ID NO: 233187 - DNA, 25 bp, Probe Sequence
gagagtattctggccgataaatccc

SEQ ID NO: 233188 - DNA, 25 bp, Probe Sequence
gagagatttctaaccgatcaacctc

SEQ ID NO: 233189 - DNA, 25 bp, Probe Sequence
gagagattcagaaccaagatggccc

SEQ ID NO: 233190 - DNA, 25 bp, Probe Sequence
gagagatgatatacccgaagctgct

SEQ ID NO: 233191 - DNA, 25 bp, Probe Sequence
gagactgatctcaaatctgaactgc

SEQ ID NO: 233192 - DNA, 25 bp, Probe Sequence
gagactgagtctcattctatcaccc

SEQ ID NO: 233193 - DNA, 25 bp, Probe Sequence
gagacgagtcagtaagcattcattc

SEQ ID NO: 233194 - DNA, 25 bp, Probe Sequence
gagactgatgcacaaactgtcactt

SEQ ID NO: 233195 - DNA, 25 bp, Probe Sequence
gagatctgcagaagaaacgcaatct

SEQ ID NO: 233196 - DNA, 25 bp, Probe Sequence
gagaccaatgaaatcgccaatgcca

SEQ ID NO: 233197 - DNA, 25 bp, Probe Sequence
gagagcgacgaaatgcgcccatgct

SEQ ID NO: 233198 - DNA, 25 bp, Probe Sequence
gagatcgacacgtcatggaccatga

SEQ ID NO: 233199 - DNA, 25 bp, Probe Sequence
gagatcaggagttcgagaccagtct

SEQ ID NO: 233200 - DNA, 25 bp, Probe Sequence
gagagaggagctacagattccgttc

SEQ ID NO: 233201 - DNA, 25 bp, Probe Sequence
gagagtggacttacatttccttttt

SEQ ID NO: 233202 - DNA, 25 bp, Probe Sequence
gagattggagtttccatcccatgtt

SEQ ID NO: 233203 - DNA, 25 bp, Probe Sequence
gagttgactgaaatcctggtcaggt

SEQ ID NO: 233204 - DNA, 25 bp, Probe Sequence
gagagccactaatgtaagatacaga

SEQ ID NO: 233205 - DNA, 25 bp, Probe Sequence
gagaccagttcttttagaagccacc

SEQ ID NO: 233206 - DNA, 25 bp, Probe Sequence
gagacctgtcctagatgttggggca

SEQ ID NO: 233207 - DNA, 25 bp, Probe Sequence
gagacgctgtcagacatgtttgagc

SEQ ID NO: 233208 - DNA, 25 bp, Probe Sequence
gagacgattgatgcaggatattaca

SEQ ID NO: 233209 - DNA, 25 bp, Probe Sequence
gagagtgcttatgaggtgatcaaac

SEQ ID NO: 233210 - DNA, 25 bp, Probe Sequence
gagagcagcctcgaggtggagaaga

SEQ ID NO: 233211 - DNA, 25 bp, Probe Sequence
gagagacttctggcgtgaacacaga

SEQ ID NO: 233212 - DNA, 25 bp, Probe Sequence
gagagactacgggagggacagacac

SEQ ID NO: 233213 - DNA, 25 bp, Probe Sequence
gagacgctggggagggagagaacta

SEQ ID NO: 233214 - DNA, 25 bp, Probe Sequence
gagacgctggggagggagagaacta

SEQ ID NO: 233215 - DNA, 25 bp, Probe Sequence
gagacctggggctgccgaagaagct

SEQ ID NO: 233216 - DNA, 25 bp, Probe Sequence
gagacggtggttgcagtgagcgaag

SEQ ID NO: 233217 - DNA, 25 bp, Probe Sequence
gagataggggttcctggatgagaag

SEQ ID NO: 233218 - DNA, 25 bp, Probe Sequence
gagacgggtactttggtggacatga

SEQ ID NO: 233219 - DNA, 25 bp, Probe Sequence
gagaccgcattatttatggggaaaa

SEQ ID NO: 233220 - DNA, 25 bp, Probe Sequence
gagagggcagtatctttgggaaaag

SEQ ID NO: 233221 - DNA, 25 bp, Probe Sequence
gagagggagtattgtattgggaaga

SEQ ID NO: 233222 - DNA, 25 bp, Probe Sequence
gagagggcaagtttgttgtggacag

SEQ ID NO: 233223 - DNA, 25 bp, Probe Sequence
gagagggccagatttgtggtggaaa

SEQ ID NO: 233224 - DNA, 25 bp, Probe Sequence
gagaggcccaagtaccgtggaaggt

SEQ ID NO: 233225 - DNA, 25 bp, Probe Sequence
gagaccccaagaactcggggtgtca

SEQ ID NO: 233226 - DNA, 25 bp, Probe Sequence
gagaccagccactaactggggcgta

SEQ ID NO: 233227 - DNA, 25 bp, Probe Sequence
gagacgcagacaagtactaagagtg

SEQ ID NO: 233228 - DNA, 25 bp, Probe Sequence
gagaccagaccagtgtctacagatt

SEQ ID NO: 233229 - DNA, 25 bp, Probe Sequence
gagagacgggcggtgtgacagcctt

SEQ ID NO: 233230 - DNA, 25 bp, Probe Sequence
gagagccgtgaggcctgtgaggagt

SEQ ID NO: 233231 - DNA, 25 bp, Probe Sequence
gagatccctgcagctaaggcggaaa

SEQ ID NO: 233232 - DNA, 25 bp, Probe Sequence
gagagtggtgcagattagccggaaa

SEQ ID NO: 233233 - DNA, 25 bp, Probe Sequence
gagaggcagtgcgtaaaccttgaaa

SEQ ID NO: 233234 - DNA, 25 bp, Probe Sequence
gagagctcagaggatcaaggcctcg

SEQ ID NO: 233235 - DNA, 25 bp, Probe Sequence
gagagctatgacctcaaggacacgt

SEQ ID NO: 233236 - DNA, 25 bp, Probe Sequence
gagagctatgacctcaaggacacgt

SEQ ID NO: 233237 - DNA, 25 bp, Probe Sequence
gagactgaacctctggaaagccaag

SEQ ID NO: 233238 - DNA, 25 bp, Probe Sequence
gagactgagaccacggagaatcgct

SEQ ID NO: 233239 - DNA, 25 bp, Probe Sequence
gagtcagacacttacaggtaatcca

SEQ ID NO: 233240 - DNA, 25 bp, Probe Sequence
gagtacacattgaactagtaacata

SEQ ID NO: 233241 - DNA, 25 bp, Probe Sequence
gagtaattggcaactaagtaaattt

SEQ ID NO: 233242 - DNA, 25 bp, Probe Sequence
gagataatcccttcaagttaaattg

SEQ ID NO: 233243 - DNA, 25 bp, Probe Sequence
gagagttgtcactactagattataa

SEQ ID NO: 233244 - DNA, 25 bp, Probe Sequence
gaggtcgtccaagtgatccgaaacc

SEQ ID NO: 233245 - DNA, 25 bp, Probe Sequence
gaggtcttctaatgtctggaaagca

SEQ ID NO: 233246 - DNA, 25 bp, Probe Sequence
gagagtcatgtctaagaggctgcag

SEQ ID NO: 233247 - DNA, 25 bp, Probe Sequence
gagagctgagcagtcaagatgtgtg

SEQ ID NO: 233248 - DNA, 25 bp, Probe Sequence
gagagcgacagtaggctgcatctgg

SEQ ID NO: 233249 - DNA, 25 bp, Probe Sequence
gagagagcaatgcgagcagttggag

SEQ ID NO: 233250 - DNA, 25 bp, Probe Sequence
gagagcgcgtgcagagacttggtgg

SEQ ID NO: 233251 - DNA, 25 bp, Probe Sequence
gagactggtttgactcgtgctgtga

SEQ ID NO: 233252 - DNA, 25 bp, Probe Sequence
gagactggttacatcagtgatggag

SEQ ID NO: 233253 - DNA, 25 bp, Probe Sequence
gagactgagctgcatggtagttggg

SEQ ID NO: 233254 - DNA, 25 bp, Probe Sequence
gagagcggcagggatgtaggtgctg

SEQ ID NO: 233255 - DNA, 25 bp, Probe Sequence
gagacgtgaggcaactgtggcaggg

SEQ ID NO: 233256 - DNA, 25 bp, Probe Sequence
gagactcagaagaagtgggccgagc

SEQ ID NO: 233257 - DNA, 25 bp, Probe Sequence
gagagttgactgaagttggcccaca

SEQ ID NO: 233258 - DNA, 25 bp, Probe Sequence
gagatgcgggatattcgtccccaag

SEQ ID NO: 233259 - DNA, 25 bp, Probe Sequence
gagatgcggcagttctgccagtccc

SEQ ID NO: 233260 - DNA, 25 bp, Probe Sequence
gagagggatgtcgggcagttcccat

SEQ ID NO: 233261 - DNA, 25 bp, Probe Sequence
gagatgtgggcttgaagccttccca

SEQ ID NO: 233262 - DNA, 25 bp, Probe Sequence
gagatcgtacgggactttcccagat

SEQ ID NO: 233263 - DNA, 25 bp, Probe Sequence
gagaggttcagttacttacccagga

SEQ ID NO: 233264 - DNA, 25 bp, Probe Sequence
gagactgttagggtctctaacaaaa

SEQ ID NO: 233265 - DNA, 25 bp, Probe Sequence
gagaccttggcgctacaaaataaag

SEQ ID NO: 233266 - DNA, 25 bp, Probe Sequence
gagagtctgtagtgcgacaaaaaga

SEQ ID NO: 233267 - DNA, 25 bp, Probe Sequence
gagaccagtgtgggcgacaaagcaa

SEQ ID NO: 233268 - DNA, 25 bp, Probe Sequence
gagaccactctgagccacaaaaaaa

SEQ ID NO: 233269 - DNA, 25 bp, Probe Sequence
gagacccaccttgctcataaacaaa

SEQ ID NO: 233270 - DNA, 25 bp, Probe Sequence
gagagccacactttcaagtaaacca

SEQ ID NO: 233271 - DNA, 25 bp, Probe Sequence
gagaggcacactgtcagaggtgacc

SEQ ID NO: 233272 - DNA, 25 bp, Probe Sequence
gagatgggctctgctctgagagtag

SEQ ID NO: 233273 - DNA, 25 bp, Probe Sequence
gagagggcatatgcatcctctgtcc

SEQ ID NO: 233274 - DNA, 25 bp, Probe Sequence
gagagaggcagtgtacttgccccca

SEQ ID NO: 233275 - DNA, 25 bp, Probe Sequence
gagagctgggtgcagactgtgctcc

SEQ ID NO: 233276 - DNA, 25 bp, Probe Sequence
gagactgagcggctgcagtctacaa

SEQ ID NO: 233277 - DNA, 25 bp, Probe Sequence
gagaccaggagcatctgatttaaca

SEQ ID NO: 233278 - DNA, 25 bp, Probe Sequence
gagagcccaggccttatgttaaaat

SEQ ID NO: 233279 - DNA, 25 bp, Probe Sequence
gagacccagggtttgatttgcgact

SEQ ID NO: 233280 - DNA, 25 bp, Probe Sequence
gagaccgccgagttgtgattatcga

SEQ ID NO: 233281 - DNA, 25 bp, Probe Sequence
gagaccgccgagttgtgattatcga

SEQ ID NO: 233282 - DNA, 25 bp, Probe Sequence
gagaggccccagtatgctgaaatcc

SEQ ID NO: 233283 - DNA, 25 bp, Probe Sequence
gagatggtaccaaagctgatgaagt

SEQ ID NO: 233284 - DNA, 25 bp, Probe Sequence
gagatggctataacacagcggacat

SEQ ID NO: 233285 - DNA, 25 bp, Probe Sequence
gagagttattacaccagatctgagt

SEQ ID NO: 233286 - DNA, 25 bp, Probe Sequence
gagagcttcgttatccatgtggatg

SEQ ID NO: 233287 - DNA, 25 bp, Probe Sequence
gagagcatccacaggtcctgggatg

SEQ ID NO: 233288 - DNA, 25 bp, Probe Sequence
gagagtccctaggaatctgggcatc

SEQ ID NO: 233289 - DNA, 25 bp, Probe Sequence
gagagaccatgcaggaacagtgact

SEQ ID NO: 233290 - DNA, 25 bp, Probe Sequence
gagagttctgctgggcaatgaggcc

SEQ ID NO: 233291 - DNA, 25 bp, Probe Sequence
gagagtcttcgcagaatgcaatgat

SEQ ID NO: 233292 - DNA, 25 bp, Probe Sequence
gagaccctcgcaaaatgatgtgaaa

SEQ ID NO: 233293 - DNA, 25 bp, Probe Sequence
gagagaagcttcaaaattgtcacaa

SEQ ID NO: 233294 - DNA, 25 bp, Probe Sequence
gagagaagcttcaaaattgtcacaa

SEQ ID NO: 233295 - DNA, 25 bp, Probe Sequence
gagagaactttctgtgagtagccat

SEQ ID NO: 233296 - DNA, 25 bp, Probe Sequence
gagaccagtttggctgaatgtactt

SEQ ID NO: 233297 - DNA, 25 bp, Probe Sequence
gagacgcagtttccttgttaatgac

SEQ ID NO: 233298 - DNA, 25 bp, Probe Sequence
gagttgagcttgtccttatctagaa

SEQ ID NO: 233299 - DNA, 25 bp, Probe Sequence
gagttgagcttgtccttatctagaa

SEQ ID NO: 233300 - DNA, 25 bp, Probe Sequence
gagtctagttcaccactgacatacg

SEQ ID NO: 233301 - DNA, 25 bp, Probe Sequence
gagagttcctgacagcatagcatac

SEQ ID NO: 233302 - DNA, 25 bp, Probe Sequence
gagatgtatcctgcaagatggccga

SEQ ID NO: 233303 - DNA, 25 bp, Probe Sequence
gagatgttgcctgatggatggaaag

SEQ ID NO: 233304 - DNA, 25 bp, Probe Sequence
gagagtcgcatctcagtgcaggaga

SEQ ID NO: 233305 - DNA, 25 bp, Probe Sequence
gagagtgccttcgagtgcgaggcga

SEQ ID NO: 233306 - DNA, 25 bp, Probe Sequence
gagagtcacaggtagtgggtctgct

SEQ ID NO: 233307 - DNA, 25 bp, Probe Sequence
gagagatagggtaatgagtgtagtc

SEQ ID NO: 233308 - DNA, 25 bp, Probe Sequence
gagagagagcggaaagtgagtatgc

SEQ ID NO: 233309 - DNA, 25 bp, Probe Sequence
gagaggcaggtgtcagaggcagagg

SEQ ID NO: 233310 - DNA, 25 bp, Probe Sequence
gagagagagtcttcgggagaggagg

SEQ ID NO: 233311 - DNA, 25 bp, Probe Sequence
gagactggtcagaggtaagatggga

SEQ ID NO: 233312 - DNA, 25 bp, Probe Sequence
gagagtgggcgagtgagttgacggc

SEQ ID NO: 233313 - DNA, 25 bp, Probe Sequence
gagagtcggccatcaatgtggcaga

SEQ ID NO: 233314 - DNA, 25 bp, Probe Sequence
gagagtcgaggtggacatggtgcga

SEQ ID NO: 233315 - DNA, 25 bp, Probe Sequence
gagagctcgagtacagaacctgcta

SEQ ID NO: 233316 - DNA, 25 bp, Probe Sequence
gagactggagtttcacagcctggag

SEQ ID NO: 233317 - DNA, 25 bp, Probe Sequence
gagaggataatttccactgtgtgga

SEQ ID NO: 233318 - DNA, 25 bp, Probe Sequence
gagagaaagctttatatttgtgtga

SEQ ID NO: 233319 - DNA, 25 bp, Probe Sequence
gagaggaagagtctgagttgtctgt

SEQ ID NO: 233320 - DNA, 25 bp, Probe Sequence
gagagccaaagtctgcagttgcatt

SEQ ID NO: 233321 - DNA, 25 bp, Probe Sequence
gagagccagttgtgtgcatctcttt

SEQ ID NO: 233322 - DNA, 25 bp, Probe Sequence
gagaccagatgttggctgctgtact

SEQ ID NO: 233323 - DNA, 25 bp, Probe Sequence
gagagacaagactagcctgtcacgt

SEQ ID NO: 233324 - DNA, 25 bp, Probe Sequence
gagagacggcaggcagcttgatcct

SEQ ID NO: 233325 - DNA, 25 bp, Probe Sequence
gagatgccggaggacagcagcactc

SEQ ID NO: 233326 - DNA, 25 bp, Probe Sequence
gagatcaagcgggagcagaggctca

SEQ ID NO: 233327 - DNA, 25 bp, Probe Sequence
gagagcatagcagtggcagccacac

SEQ ID NO: 233328 - DNA, 25 bp, Probe Sequence
gagagatacaagacaggcaagaaca

SEQ ID NO: 233329 - DNA, 25 bp, Probe Sequence
gagagagagacccagacaagcaaac

SEQ ID NO: 233330 - DNA, 25 bp, Probe Sequence
gagagtgtcacacagaaaatgaaat

SEQ ID NO: 233331 - DNA, 25 bp, Probe Sequence
gagatcttcattaagtacccaaatg

SEQ ID NO: 233332 - DNA, 25 bp, Probe Sequence
gagatcatgctactgcataccagcc

SEQ ID NO: 233333 - DNA, 25 bp, Probe Sequence
gagagctctgctggcatgagccaca

SEQ ID NO: 233334 - DNA, 25 bp, Probe Sequence
gagagcacactcaagagccacaaac

SEQ ID NO: 233335 - DNA, 25 bp, Probe Sequence
gagagcatcaggaagtgccagggaa

SEQ ID NO: 233336 - DNA, 25 bp, Probe Sequence
gagagaaggcgagctcaggcgtgaa

SEQ ID NO: 233337 - DNA, 25 bp, Probe Sequence
gagagtgaggcgttctttggtttaa

SEQ ID NO: 233338 - DNA, 25 bp, Probe Sequence
gagagaatgacgcagctttggtttc

SEQ ID NO: 233339 - DNA, 25 bp, Probe Sequence
gagaggagacagcgctcatcgagtc

SEQ ID NO: 233340 - DNA, 25 bp, Probe Sequence
gagagagggcagggaacaggctact

SEQ ID NO: 233341 - DNA, 25 bp, Probe Sequence
gagagagggcagggaacaggctact

SEQ ID NO: 233342 - DNA, 25 bp, Probe Sequence
gagagggagcgccagaacagactgg

SEQ ID NO: 233343 - DNA, 25 bp, Probe Sequence
gagagctttggttacacaactgatg

SEQ ID NO: 233344 - DNA, 25 bp, Probe Sequence
gagagtttggtgtaactactggaag

SEQ ID NO: 233345 - DNA, 25 bp, Probe Sequence
gagagtgttggcagaactagaaaac

SEQ ID NO: 233346 - DNA, 25 bp, Probe Sequence
gagagtgacggagaaggagagaaag

SEQ ID NO: 233347 - DNA, 25 bp, Probe Sequence
gagagtgagtgggaccggaggggcg

SEQ ID NO: 233348 - DNA, 25 bp, Probe Sequence
gagagtaaggggacgagggccagct

SEQ ID NO: 233349 - DNA, 25 bp, Probe Sequence
gagagtattggggattataggcacc

SEQ ID NO: 233350 - DNA, 25 bp, Probe Sequence
gagagaatgtggagatgtgtcaagg

SEQ ID NO: 233351 - DNA, 25 bp, Probe Sequence
gagagatgttgacttgagatttcag

SEQ ID NO: 233352 - DNA, 25 bp, Probe Sequence
gagagtgtgtgcctgatgagattgt

SEQ ID NO: 233353 - DNA, 25 bp, Probe Sequence
gagagtggttaatgtattcaaatgt

SEQ ID NO: 233354 - DNA, 25 bp, Probe Sequence
gagatctgtgtcttaaaacttactg

SEQ ID NO: 233355 - DNA, 25 bp, Probe Sequence
gagttcatggaataaatcccactgg

SEQ ID NO: 233356 - DNA, 25 bp, Probe Sequence
gagatatctatgcagactaacccct

SEQ ID NO: 233357 - DNA, 25 bp, Probe Sequence
gagatcatcggtggacagaggcccc

SEQ ID NO: 233358 - DNA, 25 bp, Probe Sequence
gagatcgcggccagcaagtgccgcc

SEQ ID NO: 233359 - DNA, 25 bp, Probe Sequence
gagatcggggcccaatggagcatcc

SEQ ID NO: 233360 - DNA, 25 bp, Probe Sequence
gagagcggtggccaggatggggcag

SEQ ID NO: 233361 - DNA, 25 bp, Probe Sequence
gagagcggtggccaggatggggcag

SEQ ID NO: 233362 - DNA, 25 bp, Probe Sequence
gtagcggttggataggaacagagca

SEQ ID NO: 233363 - DNA, 25 bp, Probe Sequence
gagagggcttggatagagttgagga

SEQ ID NO: 233364 - DNA, 25 bp, Probe Sequence
gagagggtgaggaagaaggagagga

SEQ ID NO: 233365 - DNA, 25 bp, Probe Sequence
gagaggactattagacaaccaagtg

SEQ ID NO: 233366 - DNA, 25 bp, Probe Sequence
gagagacactgtaaacgacacaaga

SEQ ID NO: 233367 - DNA, 25 bp, Probe Sequence
gagagatcctgaacatcaaccagaa

SEQ ID NO: 233368 - DNA, 25 bp, Probe Sequence
gagagatccagaaactgagagcaga

SEQ ID NO: 233369 - DNA, 25 bp, Probe Sequence
gagagcatactggtacatgagagca

SEQ ID NO: 233370 - DNA, 25 bp, Probe Sequence
gagagcaagagcagcgcatggacct

SEQ ID NO: 233371 - DNA, 25 bp, Probe Sequence
gagaggcagctgaggcaggacagtg

SEQ ID NO: 233372 - DNA, 25 bp, Probe Sequence
gagaccagctaaggcaacacagtga

SEQ ID NO: 233373 - DNA, 25 bp, Probe Sequence
gagaccagcctgggcaatgtggtga

SEQ ID NO: 233374 - DNA, 25 bp, Probe Sequence
gagaccatcctgggcaatatggcaa

SEQ ID NO: 233375 - DNA, 25 bp, Probe Sequence
gagagagtcctggagaatgtggaac

SEQ ID NO: 233376 - DNA, 25 bp, Probe Sequence
gagagagtccactgctggtgtttca

SEQ ID NO: 233377 - DNA, 25 bp, Probe Sequence
gagagaacttggttggttttcagga

SEQ ID NO: 233378 - DNA, 25 bp, Probe Sequence
gagataatctggcttggtttacccc

SEQ ID NO: 233379 - DNA, 25 bp, Probe Sequence
gagataatcgaagaacttttctccc

SEQ ID NO: 233380 - DNA, 25 bp, Probe Sequence
gagttgacataagaaccatagttcc

SEQ ID NO: 233381 - DNA, 25 bp, Probe Sequence
gagttaaaagcagagttagttcagc

SEQ ID NO: 233382 - DNA, 25 bp, Probe Sequence
gagttacgaattacgttacttccag

SEQ ID NO: 233383 - DNA, 25 bp, Probe Sequence
gagttacgaattacgttacttccag

SEQ ID NO: 233384 - DNA, 25 bp, Probe Sequence
gagatgaaaaattacgttcctccca

SEQ ID NO: 233385 - DNA, 25 bp, Probe Sequence
gagagaataacgttgcagttcccac

SEQ ID NO: 233386 - DNA, 25 bp, Probe Sequence
gagagagcaaggtcgtagttccccc

SEQ ID NO: 233387 - DNA, 25 bp, Probe Sequence
gagagcacaacgtcgaagttctgga

SEQ ID NO: 233388 - DNA, 25 bp, Probe Sequence
gagagcacaacatcaaagtcctgga

SEQ ID NO: 233389 - DNA, 25 bp, Probe Sequence
gagagcacaatatcgaagtcctgga

SEQ ID NO: 233390 - DNA, 25 bp, Probe Sequence
gagagatccaattcgaattctggtg

SEQ ID NO: 233391 - DNA, 25 bp, Probe Sequence
gagatgaacaataccgtatcatgtg

SEQ ID NO: 233392 - DNA, 25 bp, Probe Sequence
gagacccatattcgggaaatgcctt

SEQ ID NO: 233393 - DNA, 25 bp, Probe Sequence
gagagcctcatgttggtgggtttcc

SEQ ID NO: 233394 - DNA, 25 bp, Probe Sequence
gagagactcggtggttctgttttgc

SEQ ID NO: 233395 - DNA, 25 bp, Probe Sequence
gagaggtctggatggttttatagca

SEQ ID NO: 233396 - DNA, 25 bp, Probe Sequence
gagaggactggaatggtatcaaata

SEQ ID NO: 233397 - DNA, 25 bp, Probe Sequence
gagaggccctgggtgtctacaatag

SEQ ID NO: 233398 - DNA, 25 bp, Probe Sequence
gagagccccagggagttgacgtgga

SEQ ID NO: 233399 - DNA, 25 bp, Probe Sequence
gagaccatggggggttactgtggct

SEQ ID NO: 233400 - DNA, 25 bp, Probe Sequence
gagacctggcagctcgaaactgttt

SEQ ID NO: 233401 - DNA, 25 bp, Probe Sequence
gagacctggacttaagagaatttgc

SEQ ID NO: 233402 - DNA, 25 bp, Probe Sequence
gagaccctatattcagggaagttgc

SEQ ID NO: 233403 - DNA, 25 bp, Probe Sequence
gagagcgctgtatttgggagagagt

SEQ ID NO: 233404 - DNA, 25 bp, Probe Sequence
gagagggatgagtttgagggagttt

SEQ ID NO: 233405 - DNA, 25 bp, Probe Sequence
gagaggggaagtggggcctgtgctc

SEQ ID NO: 233406 - DNA, 25 bp, Probe Sequence
gagagggggaggggaggagtccagg

SEQ ID NO: 233407 - DNA, 25 bp, Probe Sequence
gagagggggaggggaggagtccagg

SEQ ID NO: 233408 - DNA, 25 bp, Probe Sequence
gagagggggaggggaggagtccagg

SEQ ID NO: 233409 - DNA, 25 bp, Probe Sequence
gagagagacgggcggtgtgacagcc

SEQ ID NO: 233410 - DNA, 25 bp, Probe Sequence
gagagcaaagttggaagtgctacac

SEQ ID NO: 233411 - DNA, 25 bp, Probe Sequence
gagagccgagttggactggctaccc

SEQ ID NO: 233412 - DNA, 25 bp, Probe Sequence
gagagactggtgggtctgtctacct

SEQ ID NO: 233413 - DNA, 25 bp, Probe Sequence
gagagaatggtggtgttgagctgat

SEQ ID NO: 233414 - DNA, 25 bp, Probe Sequence
gagaggtggctgttggtcaggacgg

SEQ ID NO: 233415 - DNA, 25 bp, Probe Sequence
gagagagagccttgggacggcaggg

SEQ ID NO: 233416 - DNA, 25 bp, Probe Sequence
gagagacagtcttgtgagggagatc

SEQ ID NO: 233417 - DNA, 25 bp, Probe Sequence
gagagcagtggcagtgggaggcatc

SEQ ID NO: 233418 - DNA, 25 bp, Probe Sequence
gagagcactagaaggccaaagcatc

SEQ ID NO: 233419 - DNA, 25 bp, Probe Sequence
gagatcacttgagcccagaagatca

SEQ ID NO: 233420 - DNA, 25 bp, Probe Sequence
gagatcgttgagagccgagtgttta

SEQ ID NO: 233421 - DNA, 25 bp, Probe Sequence
gagatcagaaggcaccaggtatttc

SEQ ID NO: 233422 - DNA, 25 bp, Probe Sequence
gagagaaagcatgcacttgttattt

SEQ ID NO: 233423 - DNA, 25 bp, Probe Sequence
gagagctaaattacaattgtcattt

SEQ ID NO: 233424 - DNA, 25 bp, Probe Sequence
gagagtaaagcaaagtatgtgtatt

SEQ ID NO: 233425 - DNA, 25 bp, Probe Sequence
gagagctggtagttagtagcatgtt

SEQ ID NO: 233426 - DNA, 25 bp, Probe Sequence
gagagcagagtacctgtgccagatg

SEQ ID NO: 233427 - DNA, 25 bp, Probe Sequence
gagagcagatgtatcttgtcaatac

SEQ ID NO: 233428 - DNA, 25 bp, Probe Sequence
gagagcagatggctttggagacaat

SEQ ID NO: 233429 - DNA, 25 bp, Probe Sequence
gagaggatggcctcagagctgactt

SEQ ID NO: 233430 - DNA, 25 bp, Probe Sequence
gagggcatggcgttaactaattaca

SEQ ID NO: 233431 - DNA, 25 bp, Probe Sequence
gagagtagcacgtgataaagttaca

SEQ ID NO: 233432 - DNA, 25 bp, Probe Sequence
gagagctggaggttaaatactacca

SEQ ID NO: 233433 - DNA, 25 bp, Probe Sequence
gagagaggatatttaaccccctcag

SEQ ID NO: 233434 - DNA, 25 bp, Probe Sequence
gagagaccatattttagccccactc

SEQ ID NO: 233435 - DNA, 25 bp, Probe Sequence
gagagatccaaacttcaagcactcc

SEQ ID NO: 233436 - DNA, 25 bp, Probe Sequence
gagagatctcctcgatctgaacctc

SEQ ID NO: 233437 - DNA, 25 bp, Probe Sequence
gagatgatcacagctcctgaacgtc

SEQ ID NO: 233438 - DNA, 25 bp, Probe Sequence
gagatgacgatgactccgacgagga

SEQ ID NO: 233439 - DNA, 25 bp, Probe Sequence
gagagcacacagataagacagaggg

SEQ ID NO: 233440 - DNA, 25 bp, Probe Sequence
gagagctcatcaaggatagctagag

SEQ ID NO: 233441 - DNA, 25 bp, Probe Sequence
gagagctatgacacagagtcagagt

SEQ ID NO: 233442 - DNA, 25 bp, Probe Sequence
gagagcgtgtgtagagtgtcgatgt

SEQ ID NO: 233443 - DNA, 25 bp, Probe Sequence
gagatgctgttcaagcacttcctgg

SEQ ID NO: 233444 - DNA, 25 bp, Probe Sequence
gagttgctttcagtcattcagggaa

SEQ ID NO: 233445 - DNA, 25 bp, Probe Sequence
gagtttctccctgccaaggcaaaaa

SEQ ID NO: 233446 - DNA, 25 bp, Probe Sequence
gagttgtaccacccaatgaaaaaag

SEQ ID NO: 233447 - DNA, 25 bp, Probe Sequence
gagttttgccaaatgttaaagggag

SEQ ID NO: 233448 - DNA, 25 bp, Probe Sequence
gatgttttccaaatcctggacggaa

SEQ ID NO: 233449 - DNA, 25 bp, Probe Sequence
gaggattcccaggatcctgggtctg

SEQ ID NO: 233450 - DNA, 25 bp, Probe Sequence
gagagtataaaggatctggaggttg

SEQ ID NO: 233451 - DNA, 25 bp, Probe Sequence
gagagtcttcgtgactgtaagattg

SEQ ID NO: 233452 - DNA, 25 bp, Probe Sequence
gagagacttgggaacagctacacag

SEQ ID NO: 233453 - DNA, 25 bp, Probe Sequence
gagagactcagggtactgctttgca

SEQ ID NO: 233454 - DNA, 25 bp, Probe Sequence
gagagactaagggcacttcctgagg

SEQ ID NO: 233455 - DNA, 25 bp, Probe Sequence
gagagaagaaggacggttatcagag

SEQ ID NO: 233456 - DNA, 25 bp, Probe Sequence
gagagccgaatgcagaggttccaag

SEQ ID NO: 233457 - DNA, 25 bp, Probe Sequence
gagaccaaaccaagtgcttccaaat

SEQ ID NO: 233458 - DNA, 25 bp, Probe Sequence
gagaggaaactactgcctttagaaa

SEQ ID NO: 233459 - DNA, 25 bp, Probe Sequence
gagagagagaaattgtgcctgttga

SEQ ID NO: 233460 - DNA, 25 bp, Probe Sequence
gagatgcgaataaactgctttgtga

SEQ ID NO: 233461 - DNA, 25 bp, Probe Sequence
gagaggagagaccacagatttgtgc

SEQ ID NO: 233462 - DNA, 25 bp, Probe Sequence
gagatggggtcttgccatatttgcc

SEQ ID NO: 233463 - DNA, 25 bp, Probe Sequence
gagagggagacttctttttgttggt

SEQ ID NO: 233464 - DNA, 25 bp, Probe Sequence
gagagaagaacttcatttggtttta

SEQ ID NO: 233465 - DNA, 25 bp, Probe Sequence
gagagaaggtctcattcggtgtttt

SEQ ID NO: 233466 - DNA, 25 bp, Probe Sequence
gagagaaagattctggggctgtctt

SEQ ID NO: 233467 - DNA, 25 bp, Probe Sequence
gagagaaagattctggggctgtctt

SEQ ID NO: 233468 - DNA, 25 bp, Probe Sequence
gagagcaaaaagagtgtgacctcta

SEQ ID NO: 233469 - DNA, 25 bp, Probe Sequence
gagagcagcaaaatttatgtaaatc

SEQ ID NO: 233470 - DNA, 25 bp, Probe Sequence
gagagccagaagattgctgtcagaa

SEQ ID NO: 233471 - DNA, 25 bp, Probe Sequence
gagaccagtatgatgtctgtgccat

SEQ ID NO: 233472 - DNA, 25 bp, Probe Sequence
gagaggactatgatgagcgtgtgct

SEQ ID NO: 233473 - DNA, 25 bp, Probe Sequence
gagatggattgcatatacagtgtgc

SEQ ID NO: 233474 - DNA, 25 bp, Probe Sequence
gagagaatcatgcctacctggactt

SEQ ID NO: 233475 - DNA, 25 bp, Probe Sequence
gagatggacagtcatgactacactt

SEQ ID NO: 233476 - DNA, 25 bp, Probe Sequence
gagagagccatgaaggacatccact

SEQ ID NO: 233477 - DNA, 25 bp, Probe Sequence
gagagatgcactgaagacagaattc

SEQ ID NO: 233478 - DNA, 25 bp, Probe Sequence
gagttgcacataaaaaataccgaag

SEQ ID NO: 233479 - DNA, 25 bp, Probe Sequence
gagttacaaccagaagacccacatg

SEQ ID NO: 233480 - DNA, 25 bp, Probe Sequence
tgacttatttccagagggcccagag

SEQ ID NO: 233481 - DNA, 25 bp, Probe Sequence
gagttgagttcccgagagggccggg

SEQ ID NO: 233482 - DNA, 25 bp, Probe Sequence
gagttagaccctgtggttgggtatg

SEQ ID NO: 233483 - DNA, 25 bp, Probe Sequence
gagttcttacgggtggagtgtgggg

SEQ ID NO: 233484 - DNA, 25 bp, Probe Sequence
gagatccatctgtcctgtgtggaat

SEQ ID NO: 233485 - DNA, 25 bp, Probe Sequence
gagaggcatctgttcattggagcat

SEQ ID NO: 233486 - DNA, 25 bp, Probe Sequence
gagatgccattttccgagacattct

SEQ ID NO: 233487 - DNA, 25 bp, Probe Sequence
gagagaacttttcgacatatttcct

SEQ ID NO: 233488 - DNA, 25 bp, Probe Sequence
gatgaacctcttggagactttcctc

SEQ ID NO: 233489 - DNA, 25 bp, Probe Sequence
gagttcgcctgtggagaggttactt

SEQ ID NO: 233490 - DNA, 25 bp, Probe Sequence
gagattcgggtggacctttatcttg

SEQ ID NO: 233491 - DNA, 25 bp, Probe Sequence
gagatctaagaacacaattattatt

SEQ ID NO: 233492 - DNA, 25 bp, Probe Sequence
gagatttctaaggtaatttctagtc

SEQ ID NO: 233493 - DNA, 25 bp, Probe Sequence
gagtattccacataacttcttaatt

SEQ ID NO: 233494 - DNA, 25 bp, Probe Sequence
gagtcttaacttttgctcttggatt

SEQ ID NO: 233495 - DNA, 25 bp, Probe Sequence
gagagcttagaggataagtctctgg

SEQ ID NO: 233496 - DNA, 25 bp, Probe Sequence
gagaggtaggagcagagccactatc

SEQ ID NO: 233497 - DNA, 25 bp, Probe Sequence
gagagggcagggcaatggcagtgac

SEQ ID NO: 233498 - DNA, 25 bp, Probe Sequence
gagatgggagctgccaaggtgtggg

SEQ ID NO: 233499 - DNA, 25 bp, Probe Sequence
gagagtgaggccgcagcgtttgatg

SEQ ID NO: 233500 - DNA, 25 bp, Probe Sequence
gagagggccacagctagttcatagt

SEQ ID NO: 233501 - DNA, 25 bp, Probe Sequence
gatcaaggtccagatcagttgacag

SEQ ID NO: 233502 - DNA, 25 bp, Probe Sequence
gaggggtccaaatggtgaatgctca

SEQ ID NO: 233503 - DNA, 25 bp, Probe Sequence
gagagtgtgaccaaaagttacatgt

SEQ ID NO: 233504 - DNA, 25 bp, Probe Sequence
gagttctgactaaaggttacctgtt

SEQ ID NO: 233505 - DNA, 25 bp, Probe Sequence
gagtcttactttgagttagtgccat

SEQ ID NO: 233506 - DNA, 25 bp, Probe Sequence
tattgtaacttaggaggtgaacgac

SEQ ID NO: 233507 - DNA, 25 bp, Probe Sequence
tcagttaacttaccgggaggctcag

SEQ ID NO: 233508 - DNA, 25 bp, Probe Sequence
gagttcaagtccacacttggctcta

SEQ ID NO: 233509 - DNA, 25 bp, Probe Sequence
gagatgtcaggaaagccatttggcc

SEQ ID NO: 233510 - DNA, 25 bp, Probe Sequence
gagagccaggaatggctcttagcag

SEQ ID NO: 233511 - DNA, 25 bp, Probe Sequence
gagaggcataggtaggttccacagt

SEQ ID NO: 233512 - DNA, 25 bp, Probe Sequence
ggacctaggctatcttaccatgaag

SEQ ID NO: 233513 - DNA, 25 bp, Probe Sequence
gagatgttctacaaacttaccagtg

SEQ ID NO: 233514 - DNA, 25 bp, Probe Sequence
gagagtttgtcaccagttaagcagg

SEQ ID NO: 233515 - DNA, 25 bp, Probe Sequence
gagagcttttgacatgattaatcga

SEQ ID NO: 233516 - DNA, 25 bp, Probe Sequence
gagagctttgaggccatgatctctg

SEQ ID NO: 233517 - DNA, 25 bp, Probe Sequence
gagatctattggatctgattccctc

SEQ ID NO: 233518 - DNA, 25 bp, Probe Sequence
gagatgccagtgctgagtgactcca

SEQ ID NO: 233519 - DNA, 25 bp, Probe Sequence
gagaggcagtttggtggcatgctac

SEQ ID NO: 233520 - DNA, 25 bp, Probe Sequence
gagaggcagtgcactgggcatgtca

SEQ ID NO: 233521 - DNA, 25 bp, Probe Sequence
gagatggagtgagctgagacagata

SEQ ID NO: 233522 - DNA, 25 bp, Probe Sequence
gagagtgactcagctgactaatgga

SEQ ID NO: 233523 - DNA, 25 bp, Probe Sequence
gagagcaacctggtcatctgagggg

SEQ ID NO: 233524 - DNA, 25 bp, Probe Sequence
gatccccgcatggtgttgggggtgc

SEQ ID NO: 233525 - DNA, 25 bp, Probe Sequence
gagatccccaagtttgaggagcgcg

SEQ ID NO: 233526 - DNA, 25 bp, Probe Sequence
gagatccgtcagatgtctggggcgc

SEQ ID NO: 233527 - DNA, 25 bp, Probe Sequence
gagatccgtcagatgtctggggcgc

SEQ ID NO: 233528 - DNA, 25 bp, Probe Sequence
gagatccagttctctcaggacggta

SEQ ID NO: 233529 - DNA, 25 bp, Probe Sequence
gagagcttgattcaccagtacagga

SEQ ID NO: 233530 - DNA, 25 bp, Probe Sequence
gagagattgttgaaggccatcacgt

SEQ ID NO: 233531 - DNA, 25 bp, Probe Sequence
gagagattttataaggatcaactaa

SEQ ID NO: 233532 - DNA, 25 bp, Probe Sequence
gagagtttgttttgctaccaatatc

SEQ ID NO: 233533 - DNA, 25 bp, Probe Sequence
gagagttttctgtactttgcctacg

SEQ ID NO: 233534 - DNA, 25 bp, Probe Sequence
gagagttttctgtactttgcctacg

SEQ ID NO: 233535 - DNA, 25 bp, Probe Sequence
gagatgtgtttatatctggttctat

SEQ ID NO: 233536 - DNA, 25 bp, Probe Sequence
gagagtttctatggattcacttcta

SEQ ID NO: 233537 - DNA, 25 bp, Probe Sequence
gagagttttctggtcaagcttttac

SEQ ID NO: 233538 - DNA, 25 bp, Probe Sequence
gagggtgttcactcaacttggatct

SEQ ID NO: 233539 - DNA, 25 bp, Probe Sequence
ggggttacaattcacattcctttat

SEQ ID NO: 233540 - DNA, 25 bp, Probe Sequence
gggtaagactttgaacaagcttgtt

SEQ ID NO: 233541 - DNA, 25 bp, Probe Sequence
gagatttacctaaccaacagacttg

SEQ ID NO: 233542 - DNA, 25 bp, Probe Sequence
gatgataaaccttagaaacattata

SEQ ID NO: 233543 - DNA, 25 bp, Probe Sequence
gagagaacactttcaaactcatttt

SEQ ID NO: 233544 - DNA, 25 bp, Probe Sequence
gagagagaacttttgcacatgccat

SEQ ID NO: 233545 - DNA, 25 bp, Probe Sequence
gagagagaattctaggcacacctct

SEQ ID NO: 233546 - DNA, 25 bp, Probe Sequence
gagagttatcaccatggataccctt

SEQ ID NO: 233547 - DNA, 25 bp, Probe Sequence
gagagttgatacctgcagtcagcct

SEQ ID NO: 233548 - DNA, 25 bp, Probe Sequence
gagagctatatacggctgttgcagc

SEQ ID NO: 233549 - DNA, 25 bp, Probe Sequence
gagagcaagcaacggtgtgtctgga

SEQ ID NO: 233550 - DNA, 25 bp, Probe Sequence
gagagtgaggagggggcctgagact

SEQ ID NO: 233551 - DNA, 25 bp, Probe Sequence
gagagctatggaagggccgctggca

SEQ ID NO: 233552 - DNA, 25 bp, Probe Sequence
gagagattgagagggatgtcgggca

SEQ ID NO: 233553 - DNA, 25 bp, Probe Sequence
gagaggcatgttggagacttgggca

SEQ ID NO: 233554 - DNA, 25 bp, Probe Sequence
gagagatcgcttgagcctaggagcc

SEQ ID NO: 233555 - DNA, 25 bp, Probe Sequence
gagagaccctcactgctggggagtc

SEQ ID NO: 233556 - DNA, 25 bp, Probe Sequence
gagagtcttgtgatgctgaggagca

SEQ ID NO: 233557 - DNA, 25 bp, Probe Sequence
gagagcacttggattatggatctga

SEQ ID NO: 233558 - DNA, 25 bp, Probe Sequence
gagatcacgctggatttagggtagg

SEQ ID NO: 233559 - DNA, 25 bp, Probe Sequence
gagtcactccgttctaaggttgatg

SEQ ID NO: 233560 - DNA, 25 bp, Probe Sequence
gagtcactccgttctaaggttgatg

SEQ ID NO: 233561 - DNA, 25 bp, Probe Sequence
gagattctacgtattagttatcgct

SEQ ID NO: 233562 - DNA, 25 bp, Probe Sequence
gagagtctgggtgtgtggatttcct

SEQ ID NO: 233563 - DNA, 25 bp, Probe Sequence
gagagtatacagtcctagagaattc

SEQ ID NO: 233564 - DNA, 25 bp, Probe Sequence
gagaggtaagctcatttgcatgcat

SEQ ID NO: 233565 - DNA, 25 bp, Probe Sequence
gagatgggaactccagatgtgcgca

SEQ ID NO: 233566 - DNA, 25 bp, Probe Sequence
gagagtgagaaaagtaggcgcatga

SEQ ID NO: 233567 - DNA, 25 bp, Probe Sequence
gagtctggagtctagacggctcaga

SEQ ID NO: 233568 - DNA, 25 bp, Probe Sequence
gagattcagaatgagtcggcctgtg

SEQ ID NO: 233569 - DNA, 25 bp, Probe Sequence
gagatagaaatggaagctagtgctt

SEQ ID NO: 233570 - DNA, 25 bp, Probe Sequence
gagagacaaactagagctgagcttt

SEQ ID NO: 233571 - DNA, 25 bp, Probe Sequence
gagattcaagcattgacactgacta

SEQ ID NO: 233572 - DNA, 25 bp, Probe Sequence
gagagtgaatgttcagcctgagcta

SEQ ID NO: 233573 - DNA, 25 bp, Probe Sequence
gagatgtagatgtcctttcagctgc

SEQ ID NO: 233574 - DNA, 25 bp, Probe Sequence
gagatggaagcagtcttccctgccc

SEQ ID NO: 233575 - DNA, 25 bp, Probe Sequence
gagatggaagcagtcttccctgccc

SEQ ID NO: 233576 - DNA, 25 bp, Probe Sequence
gagatggctagtgcttcatccagcc

SEQ ID NO: 233577 - DNA, 25 bp, Probe Sequence
gagatggctagtgcttcatccagcc

SEQ ID NO: 233578 - DNA, 25 bp, Probe Sequence
gagatggccacggctgcttccagct

SEQ ID NO: 233579 - DNA, 25 bp, Probe Sequence
gagatggcacacgttcatcatccag

SEQ ID NO: 233580 - DNA, 25 bp, Probe Sequence
gagatcctcaagcacatcaacgagc

SEQ ID NO: 233581 - DNA, 25 bp, Probe Sequence
gagatctcaagaggcgttacgcgca

SEQ ID NO: 233582 - DNA, 25 bp, Probe Sequence
gagttcacagggctagatcacccca

SEQ ID NO: 233583 - DNA, 25 bp, Probe Sequence
gagattacgaggcgaggctcgcgcg

SEQ ID NO: 233584 - DNA, 25 bp, Probe Sequence
gagagaagcgtgtggagtccgtgtg

SEQ ID NO: 233585 - DNA, 25 bp, Probe Sequence
gagagtggaatgttggctgtccgtg

SEQ ID NO: 233586 - DNA, 25 bp, Probe Sequence
gaggggtcaggagtgcttcctggtg

SEQ ID NO: 233587 - DNA, 25 bp, Probe Sequence
gagagaggtctggattcttattttt

SEQ ID NO: 233588 - DNA, 25 bp, Probe Sequence
gagagagtgcttgcctcttattctc

SEQ ID NO: 233589 - DNA, 25 bp, Probe Sequence
gagagaagtatggctacctttcact

SEQ ID NO: 233590 - DNA, 25 bp, Probe Sequence
gagagaagtatggctacctttcact

SEQ ID NO: 233591 - DNA, 25 bp, Probe Sequence
gagatggcagtcggctagcctttgc

SEQ ID NO: 233592 - DNA, 25 bp, Probe Sequence
gagatgtgagttgtgaggcactggg

SEQ ID NO: 233593 - DNA, 25 bp, Probe Sequence
gagatgatggtgtggattattgggc

SEQ ID NO: 233594 - DNA, 25 bp, Probe Sequence
gagatgatggttatgcaattaagga

SEQ ID NO: 233595 - DNA, 25 bp, Probe Sequence
gagatacttttggcatgttaagaga

SEQ ID NO: 233596 - DNA, 25 bp, Probe Sequence
gagatgtcctttgcattgcttggaa

SEQ ID NO: 233597 - DNA, 25 bp, Probe Sequence
gagatcatgcgaactacagtttgga

SEQ ID NO: 233598 - DNA, 25 bp, Probe Sequence
gagattggccaatcagtttgcaatt

SEQ ID NO: 233599 - DNA, 25 bp, Probe Sequence
gagttgggacaaggcttcacataaa

SEQ ID NO: 233600 - DNA, 25 bp, Probe Sequence
gagtctcggtcatgacttatcccga

SEQ ID NO: 233601 - DNA, 25 bp, Probe Sequence
gagatctggccaaagacataacctc

SEQ ID NO: 233602 - DNA, 25 bp, Probe Sequence
gagatcatggtataataaatccctt

SEQ ID NO: 233603 - DNA, 25 bp, Probe Sequence
gagtgacttacatttaaagccaggt

SEQ ID NO: 233604 - DNA, 25 bp, Probe Sequence
gaggactgtaactactatttaggtt

SEQ ID NO: 233605 - DNA, 25 bp, Probe Sequence
gaggtctctggatagctatttaaat

SEQ ID NO: 233606 - DNA, 25 bp, Probe Sequence
gagttcttggtttcgactcagaaaa

SEQ ID NO: 233607 - DNA, 25 bp, Probe Sequence
gagttccctttccgattcaagaaag

SEQ ID NO: 233608 - DNA, 25 bp, Probe Sequence
gagtatccaacttagggtcaaaata

SEQ ID NO: 233609 - DNA, 25 bp, Probe Sequence
gaggcatacaccacttagtaaacta

SEQ ID NO: 233610 - DNA, 25 bp, Probe Sequence
gagagatcccctggcttgcagaaaa

SEQ ID NO: 233611 - DNA, 25 bp, Probe Sequence
gagatcccctggcttgcagaaaatc

SEQ ID NO: 233612 - DNA, 25 bp, Probe Sequence
gagatcctactactatggaaaattc

SEQ ID NO: 233613 - DNA, 25 bp, Probe Sequence
gagatggtacaactgggagccaaag

SEQ ID NO: 233614 - DNA, 25 bp, Probe Sequence
gagaggataaagcggctgctcgaac

SEQ ID NO: 233615 - DNA, 25 bp, Probe Sequence
gagatggaaacattggctgctgctc

SEQ ID NO: 233616 - DNA, 25 bp, Probe Sequence
gagatggaagtctatgacctgaaca

SEQ ID NO: 233617 - DNA, 25 bp, Probe Sequence
gagatggagaataatgccaatgcaa

SEQ ID NO: 233618 - DNA, 25 bp, Probe Sequence
gagagatagccaagtgccatcagac

SEQ ID NO: 233619 - DNA, 25 bp, Probe Sequence
gagagatgcctcaggcttcagacct

SEQ ID NO: 233620 - DNA, 25 bp, Probe Sequence
gagagactgctcagattctaagttg

SEQ ID NO: 233621 - DNA, 25 bp, Probe Sequence
gagagactctgaagttctacctgcg

SEQ ID NO: 233622 - DNA, 25 bp, Probe Sequence
gagagagatgctcaatatgccccag

SEQ ID NO: 233623 - DNA, 25 bp, Probe Sequence
gagagatagcatcacctgtctcacg

SEQ ID NO: 233624 - DNA, 25 bp, Probe Sequence
gagaggatgctttcctgttcatggg

SEQ ID NO: 233625 - DNA, 25 bp, Probe Sequence
gagaggaggtgatctgttctccctc

SEQ ID NO: 233626 - DNA, 25 bp, Probe Sequence
gagatggagtcttgatctgtcgccc

SEQ ID NO: 233627 - DNA, 25 bp, Probe Sequence
gagatgtgaacacatcagcttgccc

SEQ ID NO: 233628 - DNA, 25 bp, Probe Sequence
gagataaagcaacagcctgcccaga

SEQ ID NO: 233629 - DNA, 25 bp, Probe Sequence
gagatcaaactgcaaggcggcagcg

SEQ ID NO: 233630 - DNA, 25 bp, Probe Sequence
gagaggagagtgccgagcaggtgcc

SEQ ID NO: 233631 - DNA, 25 bp, Probe Sequence
gagaggagcttgcaggatgccagcc

SEQ ID NO: 233632 - DNA, 25 bp, Probe Sequence
gagagggctgtgcccgtaaggggaa

SEQ ID NO: 233633 - DNA, 25 bp, Probe Sequence
gagagggtagcctgtacagcgagga

SEQ ID NO: 233634 - DNA, 25 bp, Probe Sequence
gagatgggtagttggtaggggtgaa

SEQ ID NO: 233635 - DNA, 25 bp, Probe Sequence
gagatgggaatgaggtgggaggtgg

SEQ ID NO: 233636 - DNA, 25 bp, Probe Sequence
gagatgaggcaaccggtgggacagg

SEQ ID NO: 233637 - DNA, 25 bp, Probe Sequence
gagagagccaagacggaggagggga

SEQ ID NO: 233638 - DNA, 25 bp, Probe Sequence
gagagataagtgctggggagggaaa

SEQ ID NO: 233639 - DNA, 25 bp, Probe Sequence
gagagtttctgcatcgtggggaaaa

SEQ ID NO: 233640 - DNA, 25 bp, Probe Sequence
gagagtgttcaattaggggagagag

SEQ ID NO: 233641 - DNA, 25 bp, Probe Sequence
gagatgcattcagaaagggagggcc

SEQ ID NO: 233642 - DNA, 25 bp, Probe Sequence
gagatcccagaaaacctgatggacc

SEQ ID NO: 233643 - DNA, 25 bp, Probe Sequence
gagatcccagataattttaaacaac

SEQ ID NO: 233644 - DNA, 25 bp, Probe Sequence
gagatcacctcacatccattaagat

SEQ ID NO: 233645 - DNA, 25 bp, Probe Sequence
gagtaagctgggactcaccagaagc

SEQ ID NO: 233646 - DNA, 25 bp, Probe Sequence
gagttagatcctgctggcaagaagg

SEQ ID NO: 233647 - DNA, 25 bp, Probe Sequence
gagttggatgccatcggcaccaagc

SEQ ID NO: 233648 - DNA, 25 bp, Probe Sequence
gagtatatgaccccagggcctgaga

SEQ ID NO: 233649 - DNA, 25 bp, Probe Sequence
gagatcaagatgtcccaggtcctgg

SEQ ID NO: 233650 - DNA, 25 bp, Probe Sequence
gagatcaagatgaccaagatgtata

SEQ ID NO: 233651 - DNA, 25 bp, Probe Sequence
gagatcaagatgaccaagatgtata

SEQ ID NO: 233652 - DNA, 25 bp, Probe Sequence
gagatcaaggctgcagtgagttatg

SEQ ID NO: 233653 - DNA, 25 bp, Probe Sequence
gagatggaggcatcatgtctgttag

SEQ ID NO: 233654 - DNA, 25 bp, Probe Sequence
gagatggaggctcagtcgtgagagg

SEQ ID NO: 233655 - DNA, 25 bp, Probe Sequence
gagagtggcgtgaaatcaggaggcg

SEQ ID NO: 233656 - DNA, 25 bp, Probe Sequence
gagattgtgcgggaacaagggctga

SEQ ID NO: 233657 - DNA, 25 bp, Probe Sequence
gagatcagggccaaacaaggctctg

SEQ ID NO: 233658 - DNA, 25 bp, Probe Sequence
gagatgggacctttgcataggccat

SEQ ID NO: 233659 - DNA, 25 bp, Probe Sequence
gagatgggaccagctctaaggacat

SEQ ID NO: 233660 - DNA, 25 bp, Probe Sequence
gagatgagggaatcacttgaggcca

SEQ ID NO: 233661 - DNA, 25 bp, Probe Sequence
gagatgggagaatagcttgaacctg

SEQ ID NO: 233662 - DNA, 25 bp, Probe Sequence
gagaggatgaggggagcctacgcct

SEQ ID NO: 233663 - DNA, 25 bp, Probe Sequence
gagatggatgaggacgggcttcctc

SEQ ID NO: 233664 - DNA, 25 bp, Probe Sequence
gagatggtgaggcatagacaaccag

SEQ ID NO: 233665 - DNA, 25 bp, Probe Sequence
gagagagagaggagagagaggagag

SEQ ID NO: 233666 - DNA, 25 bp, Probe Sequence
gagaggagagaggagagagggaggg

SEQ ID NO: 233667 - DNA, 25 bp, Probe Sequence
gagaggaggaagattgagctggggc

SEQ ID NO: 233668 - DNA, 25 bp, Probe Sequence
gagagagaggacagcttgagccggg

SEQ ID NO: 233669 - DNA, 25 bp, Probe Sequence
gagatgggagatcacttgagcccag

SEQ ID NO: 233670 - DNA, 25 bp, Probe Sequence
gagagggccatgcaattcatcccag

SEQ ID NO: 233671 - DNA, 25 bp, Probe Sequence
gagaggccacatgagttctggcctg

SEQ ID NO: 233672 - DNA, 25 bp, Probe Sequence
gagatgagaactgcactttggatca

SEQ ID NO: 233673 - DNA, 25 bp, Probe Sequence
gagagtatggctgtccttgtatcac

SEQ ID NO: 233674 - DNA, 25 bp, Probe Sequence
gagagttggctgttcacatgattat

SEQ ID NO: 233675 - DNA, 25 bp, Probe Sequence
gagagtctgtcttaaatatcattgc

SEQ ID NO: 233676 - DNA, 25 bp, Probe Sequence
gagatgttgtcctgacacttgtggc

SEQ ID NO: 233677 - DNA, 25 bp, Probe Sequence
gagatagcttcctgaaacgtgtgaa

SEQ ID NO: 233678 - DNA, 25 bp, Probe Sequence
gagatacctcaccatggatgacttg

SEQ ID NO: 233679 - DNA, 25 bp, Probe Sequence
gagataggtctccagaggatcttca

SEQ ID NO: 233680 - DNA, 25 bp, Probe Sequence
gagagagcgagcaacaagcgaccca

SEQ ID NO: 233681 - DNA, 25 bp, Probe Sequence
gagagagcgagcaacaagcgaccca

SEQ ID NO: 233682 - DNA, 25 bp, Probe Sequence
gagatcgcgagttcaacatgaccaa

SEQ ID NO: 233683 - DNA, 25 bp, Probe Sequence
gagatcgatgtgagcaacccgcaaa

SEQ ID NO: 233684 - DNA, 25 bp, Probe Sequence
gagatcgatgtgagcaacccgcaaa

SEQ ID NO: 233685 - DNA, 25 bp, Probe Sequence
gagatcagatggaacagacaatgcc

SEQ ID NO: 233686 - DNA, 25 bp, Probe Sequence
gagatcaggcgttcaagccagtctg

SEQ ID NO: 233687 - DNA, 25 bp, Probe Sequence
gagatcatatcctcagaccaggtgg

SEQ ID NO: 233688 - DNA, 25 bp, Probe Sequence
gagatagcatctggggacaagtgga

SEQ ID NO: 233689 - DNA, 25 bp, Probe Sequence
gagagagccttgtggcaggcagaca

SEQ ID NO: 233690 - DNA, 25 bp, Probe Sequence
gagaggcggcgagaccgcagaattc

SEQ ID NO: 233691 - DNA, 25 bp, Probe Sequence
gagagaggaaaccactccaaaatcg

SEQ ID NO: 233692 - DNA, 25 bp, Probe Sequence
gagttggaaaccctcaccaactggc

SEQ ID NO: 233693 - DNA, 25 bp, Probe Sequence
gagttggttactcacaacaaatcct

SEQ ID NO: 233694 - DNA, 25 bp, Probe Sequence
gagtaagtaaataacataaggccac

SEQ ID NO: 233695 - DNA, 25 bp, Probe Sequence
gaggaagaccaagacatacagggag

SEQ ID NO: 233696 - DNA, 25 bp, Probe Sequence
gagagattaaaagacatactgtggg

SEQ ID NO: 233697 - DNA, 25 bp, Probe Sequence
gagagatgtgagataaattttgggg

SEQ ID NO: 233698 - DNA, 25 bp, Probe Sequence
gagagtggcagaaaaactttgagga

SEQ ID NO: 233699 - DNA, 25 bp, Probe Sequence
gagagggaaaaactatttgtctgta

SEQ ID NO: 233700 - DNA, 25 bp, Probe Sequence
gagagggatctctagtttttgtggt

SEQ ID NO: 233701 - DNA, 25 bp, Probe Sequence
gagagaccatcttttgtgttttgtg

SEQ ID NO: 233702 - DNA, 25 bp, Probe Sequence
gagatgaaattactatggtttatga

SEQ ID NO: 233703 - DNA, 25 bp, Probe Sequence
gagagatatttattgcgttttagca

SEQ ID NO: 233704 - DNA, 25 bp, Probe Sequence
gagatatttttacctgcctaaaata

SEQ ID NO: 233705 - DNA, 25 bp, Probe Sequence
gagattttttatcacctttattgta

SEQ ID NO: 233706 - DNA, 25 bp, Probe Sequence
gagattcctttagctatctatctat

SEQ ID NO: 233707 - DNA, 25 bp, Probe Sequence
gagttcacttccattttcaaatttt

SEQ ID NO: 233708 - DNA, 25 bp, Probe Sequence
gagttcctctgggtttctaagcagt

SEQ ID NO: 233709 - DNA, 25 bp, Probe Sequence
gagttcactccattgtactctagcc

SEQ ID NO: 233710 - DNA, 25 bp, Probe Sequence
gagagattctctttgtatctctcac

SEQ ID NO: 233711 - DNA, 25 bp, Probe Sequence
gagagattcgtcgttatcagaagtc

SEQ ID NO: 233712 - DNA, 25 bp, Probe Sequence
gaggcttcgtccttatagtagtcag

SEQ ID NO: 233713 - DNA, 25 bp, Probe Sequence
gagtttgagctattaaagtacttct

SEQ ID NO: 233714 - DNA, 25 bp, Probe Sequence
gagatttactgctatcccaggatgt

SEQ ID NO: 233715 - DNA, 25 bp, Probe Sequence
gagttgtttgttgctaagaggtagt

SEQ ID NO: 233716 - DNA, 25 bp, Probe Sequence
gagttttttacctcagtggtgcagg

SEQ ID NO: 233717 - DNA, 25 bp, Probe Sequence
gagatgctctttaaccaaaggagga

SEQ ID NO: 233718 - DNA, 25 bp, Probe Sequence
gagatcgtacatatcaagtagtagg

SEQ ID NO: 233719 - DNA, 25 bp, Probe Sequence
gagatttaatcaggctcagtcgggg

SEQ ID NO: 233720 - DNA, 25 bp, Probe Sequence
gagatcttaaaggtcatggcaattg

SEQ ID NO: 233721 - DNA, 25 bp, Probe Sequence
gagttgtatacaaatagagaactaa

SEQ ID NO: 233722 - DNA, 25 bp, Probe Sequence
gagttttacttctctggactgatcc

SEQ ID NO: 233723 - DNA, 25 bp, Probe Sequence
gagttcttagtaacaggggcagttc

SEQ ID NO: 233724 - DNA, 25 bp, Probe Sequence
gagagtttaggattagggccagggc

SEQ ID NO: 233725 - DNA, 25 bp, Probe Sequence
gagaggttgagtaattggcccatcc

SEQ ID NO: 233726 - DNA, 25 bp, Probe Sequence
gagaggtctgaggcagattctcctc

SEQ ID NO: 233727 - DNA, 25 bp, Probe Sequence
gagatgaggctagcgattgccctgt

SEQ ID NO: 233728 - DNA, 25 bp, Probe Sequence
gagatacagcaaggatatacccagt

SEQ ID NO: 233729 - DNA, 25 bp, Probe Sequence
gagatcatccaagaatcgccgaaaa

SEQ ID NO: 233730 - DNA, 25 bp, Probe Sequence
gagtcccagaaatgcccagtaatca

SEQ ID NO: 233731 - DNA, 25 bp, Probe Sequence
gagatcccagatagtagccagttaa

SEQ ID NO: 233732 - DNA, 25 bp, Probe Sequence
gagatcgccgggtgtatggcaagac

SEQ ID NO: 233733 - DNA, 25 bp, Probe Sequence
gagatccgggatttgtatgttaaca

SEQ ID NO: 233734 - DNA, 25 bp, Probe Sequence
gagttggaggtattttctctgcacc

SEQ ID NO: 233735 - DNA, 25 bp, Probe Sequence
gagtcgtcgttaaatgcctgtctcc

SEQ ID NO: 233736 - DNA, 25 bp, Probe Sequence
gagtcccaggaaacagtgctttccg

SEQ ID NO: 233737 - DNA, 25 bp, Probe Sequence
gagtttagtaacagtgcagattcca

SEQ ID NO: 233738 - DNA, 25 bp, Probe Sequence
gagtttagtcaacgtagcaaaacca

SEQ ID NO: 233739 - DNA, 25 bp, Probe Sequence
gagatttttccacctcagtaacacc

SEQ ID NO: 233740 - DNA, 25 bp, Probe Sequence
gagtttcaaagaccacgttaagcct

SEQ ID NO: 233741 - DNA, 25 bp, Probe Sequence
gagatttaagagatacgttagagat

SEQ ID NO: 233742 - DNA, 25 bp, Probe Sequence
gagattcaaaagttgacctgaaagt

SEQ ID NO: 233743 - DNA, 25 bp, Probe Sequence
gagatctacacatgttgccttgcat

SEQ ID NO: 233744 - DNA, 25 bp, Probe Sequence
gagatcaacaacaagatgctctatt

SEQ ID NO: 233745 - DNA, 25 bp, Probe Sequence
gagatgcaaaacagctgctagtctg

SEQ ID NO: 233746 - DNA, 25 bp, Probe Sequence
gagatcgaacacgtcatgtaccatg

SEQ ID NO: 233747 - DNA, 25 bp, Probe Sequence
gagatctactcagacaggaccttcg

SEQ ID NO: 233748 - DNA, 25 bp, Probe Sequence
gagatctactcagacaggaccttcg

SEQ ID NO: 233749 - DNA, 25 bp, Probe Sequence
gagatgttgctgcagccaggagtct

SEQ ID NO: 233750 - DNA, 25 bp, Probe Sequence
gagattttgccacagatagtttgag

SEQ ID NO: 233751 - DNA, 25 bp, Probe Sequence
gagatgtggctggaaagtactttgg

SEQ ID NO: 233752 - DNA, 25 bp, Probe Sequence
gagatcatgagtttgtttacacttg

SEQ ID NO: 233753 - DNA, 25 bp, Probe Sequence
gagatcagtttggttttcctgttaa

SEQ ID NO: 233754 - DNA, 25 bp, Probe Sequence
gagataattatcgccctttttgtac

SEQ ID NO: 233755 - DNA, 25 bp, Probe Sequence
gagatgaactgaggtccttgttttg

SEQ ID NO: 233756 - DNA, 25 bp, Probe Sequence
gagatgtgattattgtcctggctct

SEQ ID NO: 233757 - DNA, 25 bp, Probe Sequence
gagatgctggtaatggccatggtac

SEQ ID NO: 233758 - DNA, 25 bp, Probe Sequence
gagagatacctcaccatggatgact

SEQ ID NO: 233759 - DNA, 25 bp, Probe Sequence
gagatgatccctaacatactgtact

SEQ ID NO: 233760 - DNA, 25 bp, Probe Sequence
gagatacatagcaaccatcactgat

SEQ ID NO: 233761 - DNA, 25 bp, Probe Sequence
gagtcaattcatgttcctgatcctg

SEQ ID NO: 233762 - DNA, 25 bp, Probe Sequence
gagatcttgtctgtggactgttcca

SEQ ID NO: 233763 - DNA, 25 bp, Probe Sequence
gagatgattcgtctgaactgattaa

SEQ ID NO: 233764 - DNA, 25 bp, Probe Sequence
gagatgtgtgatttttagtcattaa

SEQ ID NO: 233765 - DNA, 25 bp, Probe Sequence
gagatgtgtgatttttagtcattaa

SEQ ID NO: 233766 - DNA, 25 bp, Probe Sequence
gagatgtgtgatttttagtcattaa

SEQ ID NO: 233767 - DNA, 25 bp, Probe Sequence
gagaggtgaatccccagtacgatag

SEQ ID NO: 233768 - DNA, 25 bp, Probe Sequence
gagaggtggattaccagtattgttc

SEQ ID NO: 233769 - DNA, 25 bp, Probe Sequence
gagagtctgacaaacactctatttt

SEQ ID NO: 233770 - DNA, 25 bp, Probe Sequence
gagatggatggcaaaccccattttt

SEQ ID NO: 233771 - DNA, 25 bp, Probe Sequence
gagtttgagctgaagccccgtatat

SEQ ID NO: 233772 - DNA, 25 bp, Probe Sequence
gagattctgagagagcaaccggaca

SEQ ID NO: 233773 - DNA, 25 bp, Probe Sequence
gagatactgtattatcagaccagga

SEQ ID NO: 233774 - DNA, 25 bp, Probe Sequence
gagatcactattttgaagcacagct

SEQ ID NO: 233775 - DNA, 25 bp, Probe Sequence
gagttgctaatgtgaataatgctgc

SEQ ID NO: 233776 - DNA, 25 bp, Probe Sequence
gagttgctccagtgaagcttcttgg

SEQ ID NO: 233777 - DNA, 25 bp, Probe Sequence
gagattgataattcagaacttcttc

SEQ ID NO: 233778 - DNA, 25 bp, Probe Sequence
gagagttatgacttggagcctttcc

SEQ ID NO: 233779 - DNA, 25 bp, Probe Sequence
gagagtgtattttcatagcctttcc

SEQ ID NO: 233780 - DNA, 25 bp, Probe Sequence
gagatggatattctgatcccgaatc

SEQ ID NO: 233781 - DNA, 25 bp, Probe Sequence
gagatatgaattcaactcctcacat

SEQ ID NO: 233782 - DNA, 25 bp, Probe Sequence
gagagataagttgatgtccatgaga

SEQ ID NO: 233783 - DNA, 25 bp, Probe Sequence
gagagggagtctggtgtcttgaaat

SEQ ID NO: 233784 - DNA, 25 bp, Probe Sequence
gagagtggaaggggctttgaatctt

SEQ ID NO: 233785 - DNA, 25 bp, Probe Sequence
gagatttgaacttgtttggaacttg

SEQ ID NO: 233786 - DNA, 25 bp, Probe Sequence
gagattttagcattgccttggcata

SEQ ID NO: 233787 - DNA, 25 bp, Probe Sequence
gagagtacgacattgctgttgtgca

SEQ ID NO: 233788 - DNA, 25 bp, Probe Sequence
gagatggacccattctggcagagag

SEQ ID NO: 233789 - DNA, 25 bp, Probe Sequence
gagattgacgagaacttcaaggccc

SEQ ID NO: 233790 - DNA, 25 bp, Probe Sequence
gagattggctgggagttcaagacca

SEQ ID NO: 233791 - DNA, 25 bp, Probe Sequence
gagattgtgagccgtgtgtcgaagc

SEQ ID NO: 233792 - DNA, 25 bp, Probe Sequence
gagatctcgacgctggtgcagaagc

SEQ ID NO: 233793 - DNA, 25 bp, Probe Sequence
gagatcctgaggaccgagcagtggc

SEQ ID NO: 233794 - DNA, 25 bp, Probe Sequence
gagttctgcagagtgctgggcatgt

SEQ ID NO: 233795 - DNA, 25 bp, Probe Sequence
gagttctctcaattggaaggccaac

SEQ ID NO: 233796 - DNA, 25 bp, Probe Sequence
gagattcacaaagtgcctaacctag

SEQ ID NO: 233797 - DNA, 25 bp, Probe Sequence
gagtgtccaaacactgcagagtgaa

SEQ ID NO: 233798 - DNA, 25 bp, Probe Sequence
gagatgacccttttcatcagagtca

SEQ ID NO: 233799 - DNA, 25 bp, Probe Sequence
gagatgaggctttacctcagacaag

SEQ ID NO: 233800 - DNA, 25 bp, Probe Sequence
gagatgcaggaattactgtaacaaa

SEQ ID NO: 233801 - DNA, 25 bp, Probe Sequence
gagatgggattgggctgtgaaaagg

SEQ ID NO: 233802 - DNA, 25 bp, Probe Sequence
gagatgattggtggactggacaaac

SEQ ID NO: 233803 - DNA, 25 bp, Probe Sequence
gagatcattggacactggacacact

SEQ ID NO: 233804 - DNA, 25 bp, Probe Sequence
gagatgcttagagacaggacacctg

SEQ ID NO: 233805 - DNA, 25 bp, Probe Sequence
gagtgcctatgataaaccacctggg

SEQ ID NO: 233806 - DNA, 25 bp, Probe Sequence
gagggtaaaaaagccccagcaggct

SEQ ID NO: 233807 - DNA, 25 bp, Probe Sequence
gagggtgaagaataagtccccaaga

SEQ ID NO: 233808 - DNA, 25 bp, Probe Sequence
gagagttacaaccagaagacccaca

SEQ ID NO: 233809 - DNA, 25 bp, Probe Sequence
gagagtttgctctgaaacacctgcc

SEQ ID NO: 233810 - DNA, 25 bp, Probe Sequence
gagatgtatttcttagggctcaccc

SEQ ID NO: 233811 - DNA, 25 bp, Probe Sequence
gagatgagaaatttgaatgacaccc

SEQ ID NO: 233812 - DNA, 25 bp, Probe Sequence
gagatagagacacgtaaacccttct

SEQ ID NO: 233813 - DNA, 25 bp, Probe Sequence
gagattgtggggtatatcccctatc

SEQ ID NO: 233814 - DNA, 25 bp, Probe Sequence
gagattggcgggtaacctagcaacg

SEQ ID NO: 233815 - DNA, 25 bp, Probe Sequence
gagtaggtgggtagccctgatgggg

SEQ ID NO: 233816 - DNA, 25 bp, Probe Sequence
gagttggtctgttactcggtggtgg

SEQ ID NO: 233817 - DNA, 25 bp, Probe Sequence
gagttggtctgttactcggtggtgg

SEQ ID NO: 233818 - DNA, 25 bp, Probe Sequence
gagtcggttgatcacctgagttggg

SEQ ID NO: 233819 - DNA, 25 bp, Probe Sequence
gagtactgttgatcccaagttgaat

SEQ ID NO: 233820 - DNA, 25 bp, Probe Sequence
gagtatcgcttgagcccaggagttt

SEQ ID NO: 233821 - DNA, 25 bp, Probe Sequence
gagagtctctggagcccaggatgcc

SEQ ID NO: 233822 - DNA, 25 bp, Probe Sequence
gagagtcctggaagcagcacagaag

SEQ ID NO: 233823 - DNA, 25 bp, Probe Sequence
gagagtgtccgaagatgaaggcatg

SEQ ID NO: 233824 - DNA, 25 bp, Probe Sequence
gagatgtacacgaagacaggagtca

SEQ ID NO: 233825 - DNA, 25 bp, Probe Sequence
gagattgacttgattcagagagaca

SEQ ID NO: 233826 - DNA, 25 bp, Probe Sequence
gagatgattttattcctaatgacat

SEQ ID NO: 233827 - DNA, 25 bp, Probe Sequence
gagatgttttggtcccatgtgcaca

SEQ ID NO: 233828 - DNA, 25 bp, Probe Sequence
gatgtttttgaggccaaggcccggc

SEQ ID NO: 233829 - DNA, 25 bp, Probe Sequence
gagttacctgaggccatagctgccc

SEQ ID NO: 233830 - DNA, 25 bp, Probe Sequence
gagttactcatgagaccagtgccca

SEQ ID NO: 233831 - DNA, 25 bp, Probe Sequence
gagtacgtcaagaagccgatcatcc

SEQ ID NO: 233832 - DNA, 25 bp, Probe Sequence
gatgtacatgctcaatacccatccc

SEQ ID NO: 233833 - DNA, 25 bp, Probe Sequence
gagtagctggtattacaggatttca

SEQ ID NO: 233834 - DNA, 25 bp, Probe Sequence
gagttcggtaaagggcatagctaat

SEQ ID NO: 233835 - DNA, 25 bp, Probe Sequence
gagatccaggtacactcctgggagt

SEQ ID NO: 233836 - DNA, 25 bp, Probe Sequence
gagtccctgggaggaccatgggagt

SEQ ID NO: 233837 - DNA, 25 bp, Probe Sequence
gagtaggtggtgggatctcaccgtg

SEQ ID NO: 233838 - DNA, 25 bp, Probe Sequence
gagtacgtcgtggagtccactggcg

SEQ ID NO: 233839 - DNA, 25 bp, Probe Sequence
gagtgggtccttaggatactggccc

SEQ ID NO: 233840 - DNA, 25 bp, Probe Sequence
gagtagaggcctaagttgacactgc

SEQ ID NO: 233841 - DNA, 25 bp, Probe Sequence
gagtatgacagggaacttgccctgc

SEQ ID NO: 233842 - DNA, 25 bp, Probe Sequence
gagatgccaaaacgccagatgaaag

SEQ ID NO: 233843 - DNA, 25 bp, Probe Sequence
gagatccagataagagttaaaacct

SEQ ID NO: 233844 - DNA, 25 bp, Probe Sequence
gagatcggtgaagtcttgagaaact

SEQ ID NO: 233845 - DNA, 25 bp, Probe Sequence
gagatcagcgctattttgtaaaccg

SEQ ID NO: 233846 - DNA, 25 bp, Probe Sequence
gagatcttctacagttcttcaagcc

SEQ ID NO: 233847 - DNA, 25 bp, Probe Sequence
gagattggtattagttttcatagct

SEQ ID NO: 233848 - DNA, 25 bp, Probe Sequence
gagtctggctcaaagccaatttata

SEQ ID NO: 233849 - DNA, 25 bp, Probe Sequence
gagtgaggtcacttccacttcaaac

SEQ ID NO: 233850 - DNA, 25 bp, Probe Sequence
gagtgaagcatcaacctacttagaa

SEQ ID NO: 233851 - DNA, 25 bp, Probe Sequence
gagatgatagaaccggacctagcat

SEQ ID NO: 233852 - DNA, 25 bp, Probe Sequence
gagataagaggctggccaccaaaca

SEQ ID NO: 233853 - DNA, 25 bp, Probe Sequence
gatgctaacaggggcgccgtaaagc

SEQ ID NO: 233854 - DNA, 25 bp, Probe Sequence
gatgaaactggttggtcctttcagt

SEQ ID NO: 233855 - DNA, 25 bp, Probe Sequence
gagttactgtttctccatacacaga

SEQ ID NO: 233856 - DNA, 25 bp, Probe Sequence
gagttactttcaatggactgaacca

SEQ ID NO: 233857 - DNA, 25 bp, Probe Sequence
gagttactgtaaaagacgtgaacca

SEQ ID NO: 233858 - DNA, 25 bp, Probe Sequence
gagttactgtaaaagacgtgaacca

SEQ ID NO: 233859 - DNA, 25 bp, Probe Sequence
gagttcactgtacaaatttgacaac

SEQ ID NO: 233860 - DNA, 25 bp, Probe Sequence
gagttgcccttcaaaggtgatgaca

SEQ ID NO: 233861 - DNA, 25 bp, Probe Sequence
gagttcccatttaggggtggagact

SEQ ID NO: 233862 - DNA, 25 bp, Probe Sequence
gagttgggcgttaggggcaggcaga

SEQ ID NO: 233863 - DNA, 25 bp, Probe Sequence
gagtagcggctaaagctgggggata

SEQ ID NO: 233864 - DNA, 25 bp, Probe Sequence
gagtacatgtttacgggaggcgctt

SEQ ID NO: 233865 - DNA, 25 bp, Probe Sequence
gagtccgtatctgtttcgggcattc

SEQ ID NO: 233866 - DNA, 25 bp, Probe Sequence
gagtcaaaagcttgtcttcgtccat

SEQ ID NO: 233867 - DNA, 25 bp, Probe Sequence
gagtacagaacctgctaaggccatc

SEQ ID NO: 233868 - DNA, 25 bp, Probe Sequence
gagttaagacccctatggactcctt

SEQ ID NO: 233869 - DNA, 25 bp, Probe Sequence
gagattattacctgttgttcctttt

SEQ ID NO: 233870 - DNA, 25 bp, Probe Sequence
gagttatttcctattctgtggtttt

SEQ ID NO: 233871 - DNA, 25 bp, Probe Sequence
gagttttgtttcactttgacatttg

SEQ ID NO: 233872 - DNA, 25 bp, Probe Sequence
gagtttttctgaacctgatagtttt

SEQ ID NO: 233873 - DNA, 25 bp, Probe Sequence
gagttgttcggaacctcaattaatc

SEQ ID NO: 233874 - DNA, 25 bp, Probe Sequence
gagttattccgatagtacttttcca

SEQ ID NO: 233875 - DNA, 25 bp, Probe Sequence
gagttcaacctttagtacgtgtggc

SEQ ID NO: 233876 - DNA, 25 bp, Probe Sequence
gagttcaggttaccagaaccagtac

SEQ ID NO: 233877 - DNA, 25 bp, Probe Sequence
gagattcgtgtcaaagcagaaccat

SEQ ID NO: 233878 - DNA, 25 bp, Probe Sequence
gagattcgtgtcaaagcagaaccat

SEQ ID NO: 233879 - DNA, 25 bp, Probe Sequence
gagttcagttgttataaaccattgt

SEQ ID NO: 233880 - DNA, 25 bp, Probe Sequence
gagttagtttccaggcatccatttc

SEQ ID NO: 233881 - DNA, 25 bp, Probe Sequence
gagattatcctttcattgagccttt

SEQ ID NO: 233882 - DNA, 25 bp, Probe Sequence
gagatttctgtttctgatgggagta

SEQ ID NO: 233883 - DNA, 25 bp, Probe Sequence
gagatttagtcccaggggcagataa

SEQ ID NO: 233884 - DNA, 25 bp, Probe Sequence
gagatatctggtaccttgctggaat

SEQ ID NO: 233885 - DNA, 25 bp, Probe Sequence
gagatttggctagttgtgtgtgtaa

SEQ ID NO: 233886 - DNA, 25 bp, Probe Sequence
gagattgggtgtactggctgttctg

SEQ ID NO: 233887 - DNA, 25 bp, Probe Sequence
gggttgggacagggtgctttggaat

SEQ ID NO: 233888 - DNA, 25 bp, Probe Sequence
gggcctggggaatctgttggcgaat

SEQ ID NO: 233889 - DNA, 25 bp, Probe Sequence
ggttaggggaactgattggagaaag

SEQ ID NO: 233890 - DNA, 25 bp, Probe Sequence
gggtagttggaagggactgaaattg

SEQ ID NO: 233891 - DNA, 25 bp, Probe Sequence
gagttaatggggtggactgggttgg

SEQ ID NO: 233892 - DNA, 25 bp, Probe Sequence
gagatctaattgggtagggcgggtg

SEQ ID NO: 233893 - DNA, 25 bp, Probe Sequence
gagtttcagctgggttggggtggat

SEQ ID NO: 233894 - DNA, 25 bp, Probe Sequence
gagtttcacccagtctggggagtct

SEQ ID NO: 233895 - DNA, 25 bp, Probe Sequence
gagtttcaacgaggtgggcaagctc

SEQ ID NO: 233896 - DNA, 25 bp, Probe Sequence
gagatctttagtacgtggagtcacc

SEQ ID NO: 233897 - DNA, 25 bp, Probe Sequence
gagatttgctcaatacctggcctca

SEQ ID NO: 233898 - DNA, 25 bp, Probe Sequence
gagatgttgtctatagctatgtcta

SEQ ID NO: 233899 - DNA, 25 bp, Probe Sequence
gagtttgttcagaacctctctcaga

SEQ ID NO: 233900 - DNA, 25 bp, Probe Sequence
gagtctttaaacactcctcaaaact

SEQ ID NO: 233901 - DNA, 25 bp, Probe Sequence
gagtttacaaacacatcacctgacg

SEQ ID NO: 233902 - DNA, 25 bp, Probe Sequence
gagtttagaagtcactcacctaaaa

SEQ ID NO: 233903 - DNA, 25 bp, Probe Sequence
gagattctgtaagttacccagtaaa

SEQ ID NO: 233904 - DNA, 25 bp, Probe Sequence
gagttggtagatgtccttcagataa

SEQ ID NO: 233905 - DNA, 25 bp, Probe Sequence
gagagggtagtcagcatctccaatt

SEQ ID NO: 233906 - DNA, 25 bp, Probe Sequence
gagaggaatagcatcgacatcacga

SEQ ID NO: 233907 - DNA, 25 bp, Probe Sequence
gagaggcgatgctattggccatcac

SEQ ID NO: 233908 - DNA, 25 bp, Probe Sequence
gagatggagagctatgatgaggcca

SEQ ID NO: 233909 - DNA, 25 bp, Probe Sequence
gagatgtgagccttgtgcatgtggg

SEQ ID NO: 233910 - DNA, 25 bp, Probe Sequence
gagatgtagccttgtaggctgggtt

SEQ ID NO: 233911 - DNA, 25 bp, Probe Sequence
gagttggcatcttgtaactctcctt

SEQ ID NO: 233912 - DNA, 25 bp, Probe Sequence
gagttggcatgtcaaatgcatcctc

SEQ ID NO: 233913 - DNA, 25 bp, Probe Sequence
gagttggcatgtcaaatgcatcctc

SEQ ID NO: 233914 - DNA, 25 bp, Probe Sequence
gagttgagactgatgatgtcccatc

SEQ ID NO: 233915 - DNA, 25 bp, Probe Sequence
gagattcaaggtagatatcctcatc

SEQ ID NO: 233916 - DNA, 25 bp, Probe Sequence
gatgtaccaggtaaagccctatcac

SEQ ID NO: 233917 - DNA, 25 bp, Probe Sequence
gagtcaccagcgagagaacctgatc

SEQ ID NO: 233918 - DNA, 25 bp, Probe Sequence
gagattcccgacgagagagactgag

SEQ ID NO: 233919 - DNA, 25 bp, Probe Sequence
gagatccccacatctgtggactgga

SEQ ID NO: 233920 - DNA, 25 bp, Probe Sequence
gagatccccacatctgtggactgga

SEQ ID NO: 233921 - DNA, 25 bp, Probe Sequence
gagatcaccaagtttgaggagcacg

SEQ ID NO: 233922 - DNA, 25 bp, Probe Sequence
gagatcctcaagtcagtggtggctc

SEQ ID NO: 233923 - DNA, 25 bp, Probe Sequence
gagatgcgctcaaacagagccttgt

SEQ ID NO: 233924 - DNA, 25 bp, Probe Sequence
gagaggcacaaggaacagctgctgg

SEQ ID NO: 233925 - DNA, 25 bp, Probe Sequence
gagatggcagcaaggaacccaggtc

SEQ ID NO: 233926 - DNA, 25 bp, Probe Sequence
gagattgcccattgaaatgccaggt

SEQ ID NO: 233927 - DNA, 25 bp, Probe Sequence
gagattcccattggacataatggtc

SEQ ID NO: 233928 - DNA, 25 bp, Probe Sequence
gagatatcgagcagtactattccac

SEQ ID NO: 233929 - DNA, 25 bp, Probe Sequence
gagatcatatggaatgtactatttt

SEQ ID NO: 233930 - DNA, 25 bp, Probe Sequence
gagatcattgccgaggactatgacg

SEQ ID NO: 233931 - DNA, 25 bp, Probe Sequence
ggtcaaccaaaagagacgcattcca

SEQ ID NO: 233932 - DNA, 25 bp, Probe Sequence
gagtaaccaaaacagaccagatgaa

SEQ ID NO: 233933 - DNA, 25 bp, Probe Sequence
gagattactttatgtaactctgaga

SEQ ID NO: 233934 - DNA, 25 bp, Probe Sequence
gagattatccatgtggttaactgga

SEQ ID NO: 233935 - DNA, 25 bp, Probe Sequence
gagatttaacttgggtaacatggct

SEQ ID NO: 233936 - DNA, 25 bp, Probe Sequence
gagtttgtcaccagttaagcaggct

SEQ ID NO: 233937 - DNA, 25 bp, Probe Sequence
gagttggtgttcaagtttacagata

SEQ ID NO: 233938 - DNA, 25 bp, Probe Sequence
gagtccgtgtatgggtttttatgaa

SEQ ID NO: 233939 - DNA, 25 bp, Probe Sequence
gatgtccggctgaaggttcttttag

SEQ ID NO: 233940 - DNA, 25 bp, Probe Sequence
gagataacactgaggttgcatattt

SEQ ID NO: 233941 - DNA, 25 bp, Probe Sequence
gagatgaaagtgaggatcaactact

SEQ ID NO: 233942 - DNA, 25 bp, Probe Sequence
gagataaaactctgagagactactt

SEQ ID NO: 233943 - DNA, 25 bp, Probe Sequence
gagtacctcaccgcagaggtacttg

SEQ ID NO: 233944 - DNA, 25 bp, Probe Sequence
gagattctcaaggcctcgagttcac

SEQ ID NO: 233945 - DNA, 25 bp, Probe Sequence
gagattaacgtactgtggctgcacc

SEQ ID NO: 233946 - DNA, 25 bp, Probe Sequence
gagatcgaacggactgtgaatccgc

SEQ ID NO: 233947 - DNA, 25 bp, Probe Sequence
gagtccaacggccagaagacgcatc

SEQ ID NO: 233948 - DNA, 25 bp, Probe Sequence
gagttagacgaccgtgcagacgcac

SEQ ID NO: 233949 - DNA, 25 bp, Probe Sequence
gtgttgagtcagtggggaccagcct

SEQ ID NO: 233950 - DNA, 25 bp, Probe Sequence
gagtatgactcgcgggtgaaggcca

SEQ ID NO: 233951 - DNA, 25 bp, Probe Sequence
gagttaactgtgcaagtgaagccag

SEQ ID NO: 233952 - DNA, 25 bp, Probe Sequence
gagattggactggctaaggacgatc

SEQ ID NO: 233953 - DNA, 25 bp, Probe Sequence
gagattacactggcataaactctag

SEQ ID NO: 233954 - DNA, 25 bp, Probe Sequence
gagatccaaacttcaagcactccag

SEQ ID NO: 233955 - DNA, 25 bp, Probe Sequence
gagatgccaaactagacaagtcaca

SEQ ID NO: 233956 - DNA, 25 bp, Probe Sequence
gagatggcacaactagaaactaata

SEQ ID NO: 233957 - DNA, 25 bp, Probe Sequence
gagtgacccgtaaaatctaggattt

SEQ ID NO: 233958 - DNA, 25 bp, Probe Sequence
gagtgaccaagggaattctcaggat

SEQ ID NO: 233959 - DNA, 25 bp, Probe Sequence
gagatgcctgcaaaggagattcggg

SEQ ID NO: 233960 - DNA, 25 bp, Probe Sequence
gagattgccatccgtgtgttccggg

SEQ ID NO: 233961 - DNA, 25 bp, Probe Sequence
gagatctgcacggagatgctgcgtc

SEQ ID NO: 233962 - DNA, 25 bp, Probe Sequence
gagatacacgtgccatgtgcagcat

SEQ ID NO: 233963 - DNA, 25 bp, Probe Sequence
gagatacacgtgccatgtgcagcat

SEQ ID NO: 233964 - DNA, 25 bp, Probe Sequence
gagatacacgtgccatgtgcagcat

SEQ ID NO: 233965 - DNA, 25 bp, Probe Sequence
gagatacacctgccatgtgcagcat

SEQ ID NO: 233966 - DNA, 25 bp, Probe Sequence
gagatgagacgcctcatagcacaaa

SEQ ID NO: 233967 - DNA, 25 bp, Probe Sequence
gagatgcagaccatgaaaccatcaa

SEQ ID NO: 233968 - DNA, 25 bp, Probe Sequence
gagatactccagccaaaaatgcaca

SEQ ID NO: 233969 - DNA, 25 bp, Probe Sequence
gagatctcttgggcagaatcccaca

SEQ ID NO: 233970 - DNA, 25 bp, Probe Sequence
gagatctcgttctataatgccacag

SEQ ID NO: 233971 - DNA, 25 bp, Probe Sequence
gagatcatgattacatatagaccac

SEQ ID NO: 233972 - DNA, 25 bp, Probe Sequence
gagatcatatcttacaggcagctac

SEQ ID NO: 233973 - DNA, 25 bp, Probe Sequence
gagatatcatgtcacaccagttaga

SEQ ID NO: 233974 - DNA, 25 bp, Probe Sequence
gagatgtagatgggccgcagatcgg

SEQ ID NO: 233975 - DNA, 25 bp, Probe Sequence
gagatgaagatgtaggccgggtgat

SEQ ID NO: 233976 - DNA, 25 bp, Probe Sequence
gagatgaatgtgaaggtgctggact

SEQ ID NO: 233977 - DNA, 25 bp, Probe Sequence
gagatgaatgtgaaggtgctggact

SEQ ID NO: 233978 - DNA, 25 bp, Probe Sequence
gagatgaagatgaggaagctgagtc

SEQ ID NO: 233979 - DNA, 25 bp, Probe Sequence
gagatgtgggggaacagcatgcagc

SEQ ID NO: 233980 - DNA, 25 bp, Probe Sequence
gagatgtgcagactgggaccagcgc

SEQ ID NO: 233981 - DNA, 25 bp, Probe Sequence
gaggtaattggctaaccagccaaga

SEQ ID NO: 233982 - DNA, 25 bp, Probe Sequence
gaggattaccagtaaccaccagaac

SEQ ID NO: 233983 - DNA, 25 bp, Probe Sequence
gagtattacttgtatattcccaaga

SEQ ID NO: 233984 - DNA, 25 bp, Probe Sequence
gatgttattgttgaacctccaagtg

SEQ ID NO: 233985 - DNA, 25 bp, Probe Sequence
gaggttgtttgcaacgaccgtctgg

SEQ ID NO: 233986 - DNA, 25 bp, Probe Sequence
gaggttgtttgcaacgaccgtctgg

SEQ ID NO: 233987 - DNA, 25 bp, Probe Sequence
gagttttgtggcgggaagcttctgc

SEQ ID NO: 233988 - DNA, 25 bp, Probe Sequence
gagatgatttttggggacatgttgg

SEQ ID NO: 233989 - DNA, 25 bp, Probe Sequence
gagatcttttgaggtggatatgtgc

SEQ ID NO: 233990 - DNA, 25 bp, Probe Sequence
gagatggtctggtggatgtgatgtg

SEQ ID NO: 233991 - DNA, 25 bp, Probe Sequence
gagatgggtgggcgttgtgaatttg

SEQ ID NO: 233992 - DNA, 25 bp, Probe Sequence
gagatgtgttggtaatgggtagatt

SEQ ID NO: 233993 - DNA, 25 bp, Probe Sequence
gagatgtattggattagactagatg

SEQ ID NO: 233994 - DNA, 25 bp, Probe Sequence
gagattttggtattacactgtattt

SEQ ID NO: 233995 - DNA, 25 bp, Probe Sequence
gagatttcatggaactacactcttg

SEQ ID NO: 233996 - DNA, 25 bp, Probe Sequence
gagttcgggacagtaagccaggggt

SEQ ID NO: 233997 - DNA, 25 bp, Probe Sequence
gagttgcagggacaatggcacatga

SEQ ID NO: 233998 - DNA, 25 bp, Probe Sequence
gagttgagggagcagacggtgcact

SEQ ID NO: 233999 - DNA, 25 bp, Probe Sequence
gagtccagggagaggcgggatcacg

SEQ ID NO: 234000 - DNA, 25 bp, Probe Sequence
gagtaaggcgcgagcggaacaagct

SEQ ID NO: 234001 - DNA, 25 bp, Probe Sequence
gagtcaaagggtagagtgaacagga

SEQ ID NO: 234002 - DNA, 25 bp, Probe Sequence
gagatcttcgcgggaagaagaagga

SEQ ID NO: 234003 - DNA, 25 bp, Probe Sequence
gagattcacgcccagaaaggagcag

SEQ ID NO: 234004 - DNA, 25 bp, Probe Sequence
gagtctcactggccaagaaaattgc

SEQ ID NO: 234005 - DNA, 25 bp, Probe Sequence
gagatcaccttcgaggttaatggct

SEQ ID NO: 234006 - DNA, 25 bp, Probe Sequence
gagatgctcctttaaataaagcgtt

SEQ ID NO: 234007 - DNA, 25 bp, Probe Sequence
gagatgctgttgttgatggagaaaa

SEQ ID NO: 234008 - DNA, 25 bp, Probe Sequence
gagatgtcatagttgtgatggtcaa

SEQ ID NO: 234009 - DNA, 25 bp, Probe Sequence
gagatgtctgagagtgatggcatac

SEQ ID NO: 234010 - DNA, 25 bp, Probe Sequence
gagtctctgatcaagcagattccac

SEQ ID NO: 234011 - DNA, 25 bp, Probe Sequence
gagatgccgatgaacgttgctgatc

SEQ ID NO: 234012 - DNA, 25 bp, Probe Sequence
gagatctccatgactgtgtgttgtg

SEQ ID NO: 234013 - DNA, 25 bp, Probe Sequence
gagatacctggcctggtctggacac

SEQ ID NO: 234014 - DNA, 25 bp, Probe Sequence
gagatcaccaatctggactgtactc

SEQ ID NO: 234015 - DNA, 25 bp, Probe Sequence
gagatctccattcaatgatcgtttc

SEQ ID NO: 234016 - DNA, 25 bp, Probe Sequence
gagatctgtactcacatgctcagtt

SEQ ID NO: 234017 - DNA, 25 bp, Probe Sequence
gagatatcgaatccctgccgttagc

SEQ ID NO: 234018 - DNA, 25 bp, Probe Sequence
gagtttatatggctctctgttagcc

SEQ ID NO: 234019 - DNA, 25 bp, Probe Sequence
gatggttaagctaccttcattaagc

SEQ ID NO: 234020 - DNA, 25 bp, Probe Sequence
gagttggaatcggtttgcatttacg

SEQ ID NO: 234021 - DNA, 25 bp, Probe Sequence
gagttctaataagtcttcatttatg

SEQ ID NO: 234022 - DNA, 25 bp, Probe Sequence
gagatgttaagcccactttgttctt

SEQ ID NO: 234023 - DNA, 25 bp, Probe Sequence
gagatgtttcacgaagtttgttcat

SEQ ID NO: 234024 - DNA, 25 bp, Probe Sequence
gagatgtttagctctggtacagcct

SEQ ID NO: 234025 - DNA, 25 bp, Probe Sequence
gagatgatttagcaagtatacagga

SEQ ID NO: 234026 - DNA, 25 bp, Probe Sequence
gagatacttagcaaatgccattcat

SEQ ID NO: 234027 - DNA, 25 bp, Probe Sequence
gagatgacggaaaatcgttcagtcg

SEQ ID NO: 234028 - DNA, 25 bp, Probe Sequence
gagataccgatacatcttctgcata

SEQ ID NO: 234029 - DNA, 25 bp, Probe Sequence
gagataacaatccaatcccatgata

SEQ ID NO: 234030 - DNA, 25 bp, Probe Sequence
gagatagcacagatggaccaaaggt

SEQ ID NO: 234031 - DNA, 25 bp, Probe Sequence
gagatgttgcaactggcctcaaagg

SEQ ID NO: 234032 - DNA, 25 bp, Probe Sequence
gagatgcgtagggggtcataaggat

SEQ ID NO: 234033 - DNA, 25 bp, Probe Sequence
gggcgatcgcgagcggcaaaaaaaa

SEQ ID NO: 234034 - DNA, 25 bp, Probe Sequence
gaggctttggagcggctaaaaacct

SEQ ID NO: 234035 - DNA, 25 bp, Probe Sequence
gagtggttgtggagttaagacccct

SEQ ID NO: 234036 - DNA, 25 bp, Probe Sequence
gagtgtccttggagtttaattacct

SEQ ID NO: 234037 - DNA, 25 bp, Probe Sequence
gatggttgccgggtcatgttaattg

SEQ ID NO: 234038 - DNA, 25 bp, Probe Sequence
gagtttggaggaagagttgagttgt

SEQ ID NO: 234039 - DNA, 25 bp, Probe Sequence
gagtttgtgcagttaatggtctgtt

SEQ ID NO: 234040 - DNA, 25 bp, Probe Sequence
gagttcctcatgttgcagggtttaa

SEQ ID NO: 234041 - DNA, 25 bp, Probe Sequence
gagatgtgtaattctgagaggagtt

SEQ ID NO: 234042 - DNA, 25 bp, Probe Sequence
gagttgtatgagtggcggcatgttg

SEQ ID NO: 234043 - DNA, 25 bp, Probe Sequence
gagttgggagtttctggagcttgga

SEQ ID NO: 234044 - DNA, 25 bp, Probe Sequence
gagtttgggagtgctgattgctcgg

SEQ ID NO: 234045 - DNA, 25 bp, Probe Sequence
gagtttcggaatccttctctgggaa

SEQ ID NO: 234046 - DNA, 25 bp, Probe Sequence
gagtttgggaatctgacgcggatgc

SEQ ID NO: 234047 - DNA, 25 bp, Probe Sequence
gagtaggggaatctaagcacaatgc

SEQ ID NO: 234048 - DNA, 25 bp, Probe Sequence
gatgtcgggaaaactcaaccacctc

SEQ ID NO: 234049 - DNA, 25 bp, Probe Sequence
gatgtcgggaaaactcaaccacctc

SEQ ID NO: 234050 - DNA, 25 bp, Probe Sequence
gagttggctcaatattgcaaccacc

SEQ ID NO: 234051 - DNA, 25 bp, Probe Sequence
gagattaccagttatacaccatcac

SEQ ID NO: 234052 - DNA, 25 bp, Probe Sequence
gagataacaggttttcccaagtgga

SEQ ID NO: 234053 - DNA, 25 bp, Probe Sequence
gagtaacagggattataggcgcgtg

SEQ ID NO: 234054 - DNA, 25 bp, Probe Sequence
gagtgaaagggatcgtgggtcaggg

SEQ ID NO: 234055 - DNA, 25 bp, Probe Sequence
gagataccagtttgggtggggggtg

SEQ ID NO: 234056 - DNA, 25 bp, Probe Sequence
gagtcccacgtgggggaggaggagg

SEQ ID NO: 234057 - DNA, 25 bp, Probe Sequence
gagtccccaggggaggaggaccagg

SEQ ID NO: 234058 - DNA, 25 bp, Probe Sequence
gagtttccggccggagagagccttg

SEQ ID NO: 234059 - DNA, 25 bp, Probe Sequence
gagtctctgagctgaccgaggagcc

SEQ ID NO: 234060 - DNA, 25 bp, Probe Sequence
gagttatgatcgcaccactgtactc

SEQ ID NO: 234061 - DNA, 25 bp, Probe Sequence
gagatttgattgctcaacatgcata

SEQ ID NO: 234062 - DNA, 25 bp, Probe Sequence
gagatatgtaccttcatattcagaa

SEQ ID NO: 234063 - DNA, 25 bp, Probe Sequence
gagtattctgaagtatatctgcaaa

SEQ ID NO: 234064 - DNA, 25 bp, Probe Sequence
gagatattcttatttcactaaatgt

SEQ ID NO: 234065 - DNA, 25 bp, Probe Sequence
gagatattcttatttcactaaatgt

SEQ ID NO: 234066 - DNA, 25 bp, Probe Sequence
gagatcattccttttacaggcacgt

SEQ ID NO: 234067 - DNA, 25 bp, Probe Sequence
gagattcccaatattcaaagctgct

SEQ ID NO: 234068 - DNA, 25 bp, Probe Sequence
gagattccgagaattcccaatcgct

SEQ ID NO: 234069 - DNA, 25 bp, Probe Sequence
gagattacggagcagcgcaagattg

SEQ ID NO: 234070 - DNA, 25 bp, Probe Sequence
gagattagggagtcacacaagagat

SEQ ID NO: 234071 - DNA, 25 bp, Probe Sequence
gagatacaaagactacatccaaatc

SEQ ID NO: 234072 - DNA, 25 bp, Probe Sequence
gagatacgcaaacacaccgatgcac

SEQ ID NO: 234073 - DNA, 25 bp, Probe Sequence
gagataccatttcacaccagttaga

SEQ ID NO: 234074 - DNA, 25 bp, Probe Sequence
gatgtacactctaggtaccgttgta

SEQ ID NO: 234075 - DNA, 25 bp, Probe Sequence
gagatataagttgtactgcgtatgc

SEQ ID NO: 234076 - DNA, 25 bp, Probe Sequence
gagattaacttcctacaggggccaa

SEQ ID NO: 234077 - DNA, 25 bp, Probe Sequence
gagattctacattgcattgactggg

SEQ ID NO: 234078 - DNA, 25 bp, Probe Sequence
gagatcttcatctcggtctggagac

SEQ ID NO: 234079 - DNA, 25 bp, Probe Sequence
gagatgctttctacagttatggagt

SEQ ID NO: 234080 - DNA, 25 bp, Probe Sequence
gagatattttctctttgttgccaac

SEQ ID NO: 234081 - DNA, 25 bp, Probe Sequence
gagatttttatgattttctaaagta

SEQ ID NO: 234082 - DNA, 25 bp, Probe Sequence
gagttgttagcaatttcattcaaaa

SEQ ID NO: 234083 - DNA, 25 bp, Probe Sequence
gagtaattccaggtctcttgaaaaa

SEQ ID NO: 234084 - DNA, 25 bp, Probe Sequence
gagtagtctcccacctaaatatcaa

SEQ ID NO: 234085 - DNA, 25 bp, Probe Sequence
gagttgttttgcacctaaatcgacg

SEQ ID NO: 234086 - DNA, 25 bp, Probe Sequence
gagtttggtgccaccttattggccc

SEQ ID NO: 234087 - DNA, 25 bp, Probe Sequence
gagttcaggacctacctggagggcg

SEQ ID NO: 234088 - DNA, 25 bp, Probe Sequence
gagtttgacaactccagtgaggact

SEQ ID NO: 234089 - DNA, 25 bp, Probe Sequence
gagtatttcaggtactgggaaactg

SEQ ID NO: 234090 - DNA, 25 bp, Probe Sequence
gatgtactccaggaaatagaaaatt

SEQ ID NO: 234091 - DNA, 25 bp, Probe Sequence
gagtacttgaaatatcaagacaatt

SEQ ID NO: 234092 - DNA, 25 bp, Probe Sequence
gagtacttaaacctcactgtgaaat

SEQ ID NO: 234093 - DNA, 25 bp, Probe Sequence
gagtaaacaaacttattctgcaaag

SEQ ID NO: 234094 - DNA, 25 bp, Probe Sequence
gagttaccatgtacgtattccacta

SEQ ID NO: 234095 - DNA, 25 bp, Probe Sequence
gagattccaactctgatttccttaa

SEQ ID NO: 234096 - DNA, 25 bp, Probe Sequence
gagattgaagctttttgttgcctta

SEQ ID NO: 234097 - DNA, 25 bp, Probe Sequence
gagattagattactttcttctcctt

SEQ ID NO: 234098 - DNA, 25 bp, Probe Sequence
gagatctgaaatagttttcttccac

SEQ ID NO: 234099 - DNA, 25 bp, Probe Sequence
gagatctagaatcttatattttcca

SEQ ID NO: 234100 - DNA, 25 bp, Probe Sequence
gagtcgggatcccgtcattgtactc

SEQ ID NO: 234101 - DNA, 25 bp, Probe Sequence
gagtccaggactactgttctgtccc

SEQ ID NO: 234102 - DNA, 25 bp, Probe Sequence
gagatacggacttgatggtgctgtt

SEQ ID NO: 234103 - DNA, 25 bp, Probe Sequence
gagtatcaggaagtggcccctttcc

SEQ ID NO: 234104 - DNA, 25 bp, Probe Sequence
gagtaagcttataacccttttcaca

SEQ ID NO: 234105 - DNA, 25 bp, Probe Sequence
gagtaattatatgaacagtttttat

SEQ ID NO: 234106 - DNA, 25 bp, Probe Sequence
gatgttttacactcacgtttgtaga

SEQ ID NO: 234107 - DNA, 25 bp, Probe Sequence
gagtatccttccttcagggtttaat

SEQ ID NO: 234108 - DNA, 25 bp, Probe Sequence
gagtctccaaccttcaggaattccg

SEQ ID NO: 234109 - DNA, 25 bp, Probe Sequence
gagatctcaaatgttaggattttct

SEQ ID NO: 234110 - DNA, 25 bp, Probe Sequence
gagatctgaaagtttatggcttcat

SEQ ID NO: 234111 - DNA, 25 bp, Probe Sequence
gagatcgattcttgtatattgattt

SEQ ID NO: 234112 - DNA, 25 bp, Probe Sequence
gagatcatgatctttatactgtgaa

SEQ ID NO: 234113 - DNA, 25 bp, Probe Sequence
gagatctgcctaggcaacatcatga

SEQ ID NO: 234114 - DNA, 25 bp, Probe Sequence
gagatcatgcttggtcgactctcag

SEQ ID NO: 234115 - DNA, 25 bp, Probe Sequence
gagatgcatgcctggggatcatcaa

SEQ ID NO: 234116 - DNA, 25 bp, Probe Sequence
gagatcagccatgtgggcaatcagt

SEQ ID NO: 234117 - DNA, 25 bp, Probe Sequence
gagttacactcaggctgcaagcagt

SEQ ID NO: 234118 - DNA, 25 bp, Probe Sequence
gagttgtgcaattcacagcaaagta

SEQ ID NO: 234119 - DNA, 25 bp, Probe Sequence
gagttgactctacagcaaaggttgc

SEQ ID NO: 234120 - DNA, 25 bp, Probe Sequence
gagttacctcgtccgagtggtgagc

SEQ ID NO: 234121 - DNA, 25 bp, Probe Sequence
gagtttcatccccactgagtggtga

SEQ ID NO: 234122 - DNA, 25 bp, Probe Sequence
gagttcctgaccagctgtgatggtg

SEQ ID NO: 234123 - DNA, 25 bp, Probe Sequence
gagtctcctttctgagtgcaagctg

SEQ ID NO: 234124 - DNA, 25 bp, Probe Sequence
gagttactctggtctgagtcaactt

SEQ ID NO: 234125 - DNA, 25 bp, Probe Sequence
gagattttcattttagtgtatcttt

SEQ ID NO: 234126 - DNA, 25 bp, Probe Sequence
gagattgttttttcacttatttatt

SEQ ID NO: 234127 - DNA, 25 bp, Probe Sequence
gagatatttttgtacgttatatatt

SEQ ID NO: 234128 - DNA, 25 bp, Probe Sequence
gagttcttgttgtgggtagactgtg

SEQ ID NO: 234129 - DNA, 25 bp, Probe Sequence
gagattgcttggcagagaagtacca

SEQ ID NO: 234130 - DNA, 25 bp, Probe Sequence
gagatcctcgattattgaactacca

SEQ ID NO: 234131 - DNA, 25 bp, Probe Sequence
gagtctctgcgttacaaactcctag

SEQ ID NO: 234132 - DNA, 25 bp, Probe Sequence
gagtcttgccaggtcaatacttggg

SEQ ID NO: 234133 - DNA, 25 bp, Probe Sequence
gagtcttgccaggtcaatacttggg

SEQ ID NO: 234134 - DNA, 25 bp, Probe Sequence
gagttgtccagagaagacagtggca

SEQ ID NO: 234135 - DNA, 25 bp, Probe Sequence
gagttgtccagagaagacagtggca

SEQ ID NO: 234136 - DNA, 25 bp, Probe Sequence
gagttggaacagcattgccagggaa

SEQ ID NO: 234137 - DNA, 25 bp, Probe Sequence
gagatatgaaccagactctaggaga

SEQ ID NO: 234138 - DNA, 25 bp, Probe Sequence
gagtcatgaagctaaatccttgggc

SEQ ID NO: 234139 - DNA, 25 bp, Probe Sequence
gagtccaagaagctccttgtcaggc

SEQ ID NO: 234140 - DNA, 25 bp, Probe Sequence
ggtcgcagacgaggtcggcctcgtc

SEQ ID NO: 234141 - DNA, 25 bp, Probe Sequence
gagtagatgacgggttgggccaggg

SEQ ID NO: 234142 - DNA, 25 bp, Probe Sequence
gagatagtgcaggaaaggggcctcg

SEQ ID NO: 234143 - DNA, 25 bp, Probe Sequence
gagatcttcactttagggggctcgc

SEQ ID NO: 234144 - DNA, 25 bp, Probe Sequence
gagattgtcactgatggggaggagc

SEQ ID NO: 234145 - DNA, 25 bp, Probe Sequence
gagttgtagctgcagacggggacca

SEQ ID NO: 234146 - DNA, 25 bp, Probe Sequence
gagtttgagaccagcctgggcacca

SEQ ID NO: 234147 - DNA, 25 bp, Probe Sequence
gagttcgataccagcctgggcaacc

SEQ ID NO: 234148 - DNA, 25 bp, Probe Sequence
gagttcgagaccagcctggacagca

SEQ ID NO: 234149 - DNA, 25 bp, Probe Sequence
gagttcaagaccagcctggccaaca

SEQ ID NO: 234150 - DNA, 25 bp, Probe Sequence
gagttcgaggccagcctggccaaca

SEQ ID NO: 234151 - DNA, 25 bp, Probe Sequence
gagttcgaggccagcctggccaaca

SEQ ID NO: 234152 - DNA, 25 bp, Probe Sequence
gagtttgaggccaaccttgacaaca

SEQ ID NO: 234153 - DNA, 25 bp, Probe Sequence
gagttatagggcaagtctgaattac

SEQ ID NO: 234154 - DNA, 25 bp, Probe Sequence
gagttatatggtcatgtctgaataa

SEQ ID NO: 234155 - DNA, 25 bp, Probe Sequence
gagttattggatctgagcttgtaca

SEQ ID NO: 234156 - DNA, 25 bp, Probe Sequence
gagtcagaatggagcgatttgtagt

SEQ ID NO: 234157 - DNA, 25 bp, Probe Sequence
gagatatataggagatgtttgttta

SEQ ID NO: 234158 - DNA, 25 bp, Probe Sequence
gagattattggggctgttcatatta

SEQ ID NO: 234159 - DNA, 25 bp, Probe Sequence
gagttactgaaggtctccaaggaca

SEQ ID NO: 234160 - DNA, 25 bp, Probe Sequence
gagtgtactaattcccaaaatgcca

SEQ ID NO: 234161 - DNA, 25 bp, Probe Sequence
gagtgtccttggtaataagaagtca

SEQ ID NO: 234162 - DNA, 25 bp, Probe Sequence
gagtccctgtggttattagaagccc

SEQ ID NO: 234163 - DNA, 25 bp, Probe Sequence
gagtaggagccatttctttgtaccc

SEQ ID NO: 234164 - DNA, 25 bp, Probe Sequence
gagtcaagactctttcttaagggcc

SEQ ID NO: 234165 - DNA, 25 bp, Probe Sequence
gagtacaaccttgctgtgaaggagg

SEQ ID NO: 234166 - DNA, 25 bp, Probe Sequence
gagtacgaccgtgctgtgaaggagg

SEQ ID NO: 234167 - DNA, 25 bp, Probe Sequence
ggttagacggtccctgagagtcaga

SEQ ID NO: 234168 - DNA, 25 bp, Probe Sequence
gagtctgaggggacccgagagtcgg

SEQ ID NO: 234169 - DNA, 25 bp, Probe Sequence
gagtcattgagtgtcaccagagacc

SEQ ID NO: 234170 - DNA, 25 bp, Probe Sequence
gagtgttggtgttaagcatgaaaca

SEQ ID NO: 234171 - DNA, 25 bp, Probe Sequence
gaggcttggcttgaagcctaccacg

SEQ ID NO: 234172 - DNA, 25 bp, Probe Sequence
gagtgcttagttgaacagggccctg

SEQ ID NO: 234173 - DNA, 25 bp, Probe Sequence
gagtttcgtttatggaggctgcttg

SEQ ID NO: 234174 - DNA, 25 bp, Probe Sequence
gagttactttaattaccgcgcattg

SEQ ID NO: 234175 - DNA, 25 bp, Probe Sequence
gagtattttctcattaccattttgg

SEQ ID NO: 234176 - DNA, 25 bp, Probe Sequence
gagtaatttatgccttagtcttgtt

SEQ ID NO: 234177 - DNA, 25 bp, Probe Sequence
gagtattgcccaactgaactttgct

SEQ ID NO: 234178 - DNA, 25 bp, Probe Sequence
gagtttagcacatttgaacgttgct

SEQ ID NO: 234179 - DNA, 25 bp, Probe Sequence
gagtttgaaatttgcaacagaagct

SEQ ID NO: 234180 - DNA, 25 bp, Probe Sequence
gagataatgaccgtacatagaaggt

SEQ ID NO: 234181 - DNA, 25 bp, Probe Sequence
gagataaattccaagaagaactgct

SEQ ID NO: 234182 - DNA, 25 bp, Probe Sequence
gagataaagtccaatgcccaacact

SEQ ID NO: 234183 - DNA, 25 bp, Probe Sequence
gagataaagtcaaatgccaaacact

SEQ ID NO: 234184 - DNA, 25 bp, Probe Sequence
gagtttagttgaatgctcaattcct

SEQ ID NO: 234185 - DNA, 25 bp, Probe Sequence
gagattgagagtggacttacatttc

SEQ ID NO: 234186 - DNA, 25 bp, Probe Sequence
gagattgagagtggacttacatttc

SEQ ID NO: 234187 - DNA, 25 bp, Probe Sequence
gagatcaccgtggagcttagctgtg

SEQ ID NO: 234188 - DNA, 25 bp, Probe Sequence
gagatctacacgcacttcacgtgcg

SEQ ID NO: 234189 - DNA, 25 bp, Probe Sequence
gagatttacagactttccttctggg

SEQ ID NO: 234190 - DNA, 25 bp, Probe Sequence
gagatttagcagctttgtcgtcatg

SEQ ID NO: 234191 - DNA, 25 bp, Probe Sequence
gagtttatgagctgatttggtcacc

SEQ ID NO: 234192 - DNA, 25 bp, Probe Sequence
gagatcattgcattttgctttggta

SEQ ID NO: 234193 - DNA, 25 bp, Probe Sequence
gagtcactcttcagtttgggagctg

SEQ ID NO: 234194 - DNA, 25 bp, Probe Sequence
gagatcacttgtcttgtggtgggga

SEQ ID NO: 234195 - DNA, 25 bp, Probe Sequence
gagatatttgtgataggggtggtga

SEQ ID NO: 234196 - DNA, 25 bp, Probe Sequence
gagataagtgaggagagtggggagt

SEQ ID NO: 234197 - DNA, 25 bp, Probe Sequence
gagatagttcatgaagtgggtatta

SEQ ID NO: 234198 - DNA, 25 bp, Probe Sequence
gagtatgttcttatgcgggtttcct

SEQ ID NO: 234199 - DNA, 25 bp, Probe Sequence
gagtttgtctacaggcggtttctct

SEQ ID NO: 234200 - DNA, 25 bp, Probe Sequence
gagtttgtgtccatgggtgttatct

SEQ ID NO: 234201 - DNA, 25 bp, Probe Sequence
gagatttaaacactgaggtttctgt

SEQ ID NO: 234202 - DNA, 25 bp, Probe Sequence
gagtttagaacaggggcttgtcatg

SEQ ID NO: 234203 - DNA, 25 bp, Probe Sequence
gagttgtgaactggtgggccgtatg

SEQ ID NO: 234204 - DNA, 25 bp, Probe Sequence
gagttgtgaactggtgggccgtatg

SEQ ID NO: 234205 - DNA, 25 bp, Probe Sequence
gagttcgagactagtctggccgaca

SEQ ID NO: 234206 - DNA, 25 bp, Probe Sequence
gagttctgagaccagcctggcttac

SEQ ID NO: 234207 - DNA, 25 bp, Probe Sequence
gagttacagactaccggattacaga

SEQ ID NO: 234208 - DNA, 25 bp, Probe Sequence
gaggcagatcagattccgatttgac

SEQ ID NO: 234209 - DNA, 25 bp, Probe Sequence
gagtaaacatcaatgctcagagtta

SEQ ID NO: 234210 - DNA, 25 bp, Probe Sequence
gagattcaaaagactctgtgtattc

SEQ ID NO: 234211 - DNA, 25 bp, Probe Sequence
gagattatattatgcctggtgatcc

SEQ ID NO: 234212 - DNA, 25 bp, Probe Sequence
gagattaattcactgacgcctcatt

SEQ ID NO: 234213 - DNA, 25 bp, Probe Sequence
gagataatatctgtgaggtgctgat

SEQ ID NO: 234214 - DNA, 25 bp, Probe Sequence
gagataaatctgaagaggcttctcc

SEQ ID NO: 234215 - DNA, 25 bp, Probe Sequence
gagattcacaatacaaggtcagccc

SEQ ID NO: 234216 - DNA, 25 bp, Probe Sequence
gagttgcacattaatcagattagcc

SEQ ID NO: 234217 - DNA, 25 bp, Probe Sequence
gagattgccattgatgacattcgga

SEQ ID NO: 234218 - DNA, 25 bp, Probe Sequence
gagattgccattgatgacattcgga

SEQ ID NO: 234219 - DNA, 25 bp, Probe Sequence
gagattccagtggtgacttcactga

SEQ ID NO: 234220 - DNA, 25 bp, Probe Sequence
gagattccagtggtgacttcactga

SEQ ID NO: 234221 - DNA, 25 bp, Probe Sequence
gagttcacagagttcgcagtatgtg

SEQ ID NO: 234222 - DNA, 25 bp, Probe Sequence
gagttcgcagtggggagaagtgctg

SEQ ID NO: 234223 - DNA, 25 bp, Probe Sequence
gagatttgtgtgatgggcaactgga

SEQ ID NO: 234224 - DNA, 25 bp, Probe Sequence
gagttgattgagaagaggacattgg

SEQ ID NO: 234225 - DNA, 25 bp, Probe Sequence
gagttgtctgcgagattgtaggtgc

SEQ ID NO: 234226 - DNA, 25 bp, Probe Sequence
gagatattcatcgaggttttcagtc

SEQ ID NO: 234227 - DNA, 25 bp, Probe Sequence
gagttccatcaccagcattattata

SEQ ID NO: 234228 - DNA, 25 bp, Probe Sequence
gagtagctctcctgacttttaatgt

SEQ ID NO: 234229 - DNA, 25 bp, Probe Sequence
gagtagctctcctgacttttaatgt

SEQ ID NO: 234230 - DNA, 25 bp, Probe Sequence
gagataccttgttttcattttttct

SEQ ID NO: 234231 - DNA, 25 bp, Probe Sequence
gagtacctgttagttagtattattt

SEQ ID NO: 234232 - DNA, 25 bp, Probe Sequence
gagtacctttgtgttggatgaattt

SEQ ID NO: 234233 - DNA, 25 bp, Probe Sequence
gagtacctttgtgttggatgaattt

SEQ ID NO: 234234 - DNA, 25 bp, Probe Sequence
gagtccctttggtgtgtgaatatgt

SEQ ID NO: 234235 - DNA, 25 bp, Probe Sequence
gagtccgctttaaggttgtcaaagt

SEQ ID NO: 234236 - DNA, 25 bp, Probe Sequence
gatgattcgtctgaactgattaaaa

SEQ ID NO: 234237 - DNA, 25 bp, Probe Sequence
gagttgcccgtctctatggcaaaat

SEQ ID NO: 234238 - DNA, 25 bp, Probe Sequence
gagtttcggctcaacttgacgataa

SEQ ID NO: 234239 - DNA, 25 bp, Probe Sequence
gagtttactcgaactagaagtagat

SEQ ID NO: 234240 - DNA, 25 bp, Probe Sequence
gagtctttacaaaatagccagttat

SEQ ID NO: 234241 - DNA, 25 bp, Probe Sequence
gagtctttcaccaataaacagttgt

SEQ ID NO: 234242 - DNA, 25 bp, Probe Sequence
gagtccttaaaaaatagagtgcagt

SEQ ID NO: 234243 - DNA, 25 bp, Probe Sequence
gagtcctatggagtagtaagtggcg

SEQ ID NO: 234244 - DNA, 25 bp, Probe Sequence
gagtttttgttagtactttggatgc

SEQ ID NO: 234245 - DNA, 25 bp, Probe Sequence
ggttcgtaccaagaccctggtgaag

SEQ ID NO: 234246 - DNA, 25 bp, Probe Sequence
ggttcgtaccaagaccctggtgaag

SEQ ID NO: 234247 - DNA, 25 bp, Probe Sequence
ggggtgtacctagagccaaggaaat

SEQ ID NO: 234248 - DNA, 25 bp, Probe Sequence
gagttgtgtactccaaagctaagga

SEQ ID NO: 234249 - DNA, 25 bp, Probe Sequence
gagtttggcacgggaagataatgag

SEQ ID NO: 234250 - DNA, 25 bp, Probe Sequence
gagattctatccagggcaataagaa

SEQ ID NO: 234251 - DNA, 25 bp, Probe Sequence
gagtatcaacaatgccgaaaagaga

SEQ ID NO: 234252 - DNA, 25 bp, Probe Sequence
gagttctagaaacagagtgaaggca

SEQ ID NO: 234253 - DNA, 25 bp, Probe Sequence
gagattcggaaatttgccatgaagg

SEQ ID NO: 234254 - DNA, 25 bp, Probe Sequence
gagttgcggacaatcctcaatagga

SEQ ID NO: 234255 - DNA, 25 bp, Probe Sequence
gagtagctgagtttcctagtagcaa

SEQ ID NO: 234256 - DNA, 25 bp, Probe Sequence
gagtacatgtgtttgtctggtcaga

SEQ ID NO: 234257 - DNA, 25 bp, Probe Sequence
gagttagcagtcttttagacaatgg

SEQ ID NO: 234258 - DNA, 25 bp, Probe Sequence
gatcttggctgtatttaatggcata

SEQ ID NO: 234259 - DNA, 25 bp, Probe Sequence
gagtataatgatgttctagggcata

SEQ ID NO: 234260 - DNA, 25 bp, Probe Sequence
gagtctggtcatcttgccaaggatt

SEQ ID NO: 234261 - DNA, 25 bp, Probe Sequence
gagttgcgatgatattgccacctac

SEQ ID NO: 234262 - DNA, 25 bp, Probe Sequence
gagttgcagctacgagtgcgacagc

SEQ ID NO: 234263 - DNA, 25 bp, Probe Sequence
gagttgagtgatagagctaaccctt

SEQ ID NO: 234264 - DNA, 25 bp, Probe Sequence
gagttagctggaagccacagccctg

SEQ ID NO: 234265 - DNA, 25 bp, Probe Sequence
gagttttgattaccactgacctgct

SEQ ID NO: 234266 - DNA, 25 bp, Probe Sequence
gagttcttgcattggaactggcact

SEQ ID NO: 234267 - DNA, 25 bp, Probe Sequence
gagttacgatgagaagcggcagctg

SEQ ID NO: 234268 - DNA, 25 bp, Probe Sequence
gagttcacagaggacgagctgccct

SEQ ID NO: 234269 - DNA, 25 bp, Probe Sequence
gagtcttcgtggatgatgtgaccat

SEQ ID NO: 234270 - DNA, 25 bp, Probe Sequence
gagtatcctagggtgtgtatccatc

SEQ ID NO: 234271 - DNA, 25 bp, Probe Sequence
gagtaccctcaggttgatgacctac

SEQ ID NO: 234272 - DNA, 25 bp, Probe Sequence
gagtcaaccttgggtgatgccttcc

SEQ ID NO: 234273 - DNA, 25 bp, Probe Sequence
gagtccaacctatgatgtgtcttcc

SEQ ID NO: 234274 - DNA, 25 bp, Probe Sequence
gagtacattcgtaagatttgtcttc

SEQ ID NO: 234275 - DNA, 25 bp, Probe Sequence
gagtacatatagtctttctggtttc

SEQ ID NO: 234276 - DNA, 25 bp, Probe Sequence
gagtaatgatggtccctgtggtata

SEQ ID NO: 234277 - DNA, 25 bp, Probe Sequence
gagtataatgagcccgtgaggatga

SEQ ID NO: 234278 - DNA, 25 bp, Probe Sequence
gagtcacttgaaccggggaggcgga

SEQ ID NO: 234279 - DNA, 25 bp, Probe Sequence
gagtacttgaatacaggtgggggaa

SEQ ID NO: 234280 - DNA, 25 bp, Probe Sequence
gagtactggaatacgggaaccgagg

SEQ ID NO: 234281 - DNA, 25 bp, Probe Sequence
gagtcctaagtttgttgaacctact

SEQ ID NO: 234282 - DNA, 25 bp, Probe Sequence
gagtcactatagattatttggttat

SEQ ID NO: 234283 - DNA, 25 bp, Probe Sequence
gagtagttaatgttagtagagtctt

SEQ ID NO: 234284 - DNA, 25 bp, Probe Sequence
gatgaatgggaaagtgtgggacctt

SEQ ID NO: 234285 - DNA, 25 bp, Probe Sequence
gagttgtgtcagggggaagatcctt

SEQ ID NO: 234286 - DNA, 25 bp, Probe Sequence
gagttgagtaccgtggatgttccta

SEQ ID NO: 234287 - DNA, 25 bp, Probe Sequence
gagttgatgaacactgagtgcctca

SEQ ID NO: 234288 - DNA, 25 bp, Probe Sequence
gagattgtgatcgagttaactgtgc

SEQ ID NO: 234289 - DNA, 25 bp, Probe Sequence
gagattggcatggctttatttgttt

SEQ ID NO: 234290 - DNA, 25 bp, Probe Sequence
gagattgatgtgttttcactggatt

SEQ ID NO: 234291 - DNA, 25 bp, Probe Sequence
gagattattgagcttcatcatgacc

SEQ ID NO: 234292 - DNA, 25 bp, Probe Sequence
gagattagagaaatatgctatgaga

SEQ ID NO: 234293 - DNA, 25 bp, Probe Sequence
gagatttggaatacacatgcaggac

SEQ ID NO: 234294 - DNA, 25 bp, Probe Sequence
gagttagttaccaacaggacatctc

SEQ ID NO: 234295 - DNA, 25 bp, Probe Sequence
gagtcatggaaaagtcaaggccttc

SEQ ID NO: 234296 - DNA, 25 bp, Probe Sequence
gagtcgtcagaaactccagaccagt

SEQ ID NO: 234297 - DNA, 25 bp, Probe Sequence
gagtcgtcagaaactccagaccagt

SEQ ID NO: 234298 - DNA, 25 bp, Probe Sequence
gagtcggaaaacttcgaagcagctg

SEQ ID NO: 234299 - DNA, 25 bp, Probe Sequence
gagtcggaaaacttcgaagcagctg

SEQ ID NO: 234300 - DNA, 25 bp, Probe Sequence
gagttggacacatcgttaggctctt

SEQ ID NO: 234301 - DNA, 25 bp, Probe Sequence
gagtttgaaaccgtcatacctcctt

SEQ ID NO: 234302 - DNA, 25 bp, Probe Sequence
gagttgtgaaggtgtctaccattct

SEQ ID NO: 234303 - DNA, 25 bp, Probe Sequence
gagtaagaagcctgccttgctgttc

SEQ ID NO: 234304 - DNA, 25 bp, Probe Sequence
gagtcagaggcagaacctagtcttg

SEQ ID NO: 234305 - DNA, 25 bp, Probe Sequence
gagtcaaggcatatacacactttct

SEQ ID NO: 234306 - DNA, 25 bp, Probe Sequence
gagtcaatcctctgatacagcttta

SEQ ID NO: 234307 - DNA, 25 bp, Probe Sequence
gagtcaacctcatgtgacaccttac

SEQ ID NO: 234308 - DNA, 25 bp, Probe Sequence
gagtaggcactctttaatccattac

SEQ ID NO: 234309 - DNA, 25 bp, Probe Sequence
gagttggactcttgttatctctgtg

SEQ ID NO: 234310 - DNA, 25 bp, Probe Sequence
gagattctactattgttcattgctt

SEQ ID NO: 234311 - DNA, 25 bp, Probe Sequence
gagatttcagctatgctagaggctt

SEQ ID NO: 234312 - DNA, 25 bp, Probe Sequence
gagatttgcaagatgctcagtccct

SEQ ID NO: 234313 - DNA, 25 bp, Probe Sequence
gagtttgcatcacctgactatacct

SEQ ID NO: 234314 - DNA, 25 bp, Probe Sequence
gagttacatacatacagctaccatt

SEQ ID NO: 234315 - DNA, 25 bp, Probe Sequence
gagtacatatactgacagctcattt

SEQ ID NO: 234316 - DNA, 25 bp, Probe Sequence
gagtactttcaggaagactgactta

SEQ ID NO: 234317 - DNA, 25 bp, Probe Sequence
gagtacttaacgaacattcacatta

SEQ ID NO: 234318 - DNA, 25 bp, Probe Sequence
gagtactttgactacgagtccagaa

SEQ ID NO: 234319 - DNA, 25 bp, Probe Sequence
gagtacactaggtgcaaaccagaac

SEQ ID NO: 234320 - DNA, 25 bp, Probe Sequence
gagttcctaatgctcagaacatgga

SEQ ID NO: 234321 - DNA, 25 bp, Probe Sequence
gagttcctgaaatttatatctggca

SEQ ID NO: 234322 - DNA, 25 bp, Probe Sequence
gagttgttcacagcctagtcaggca

SEQ ID NO: 234323 - DNA, 25 bp, Probe Sequence
gagtccttcatagagctcagtcagg

SEQ ID NO: 234324 - DNA, 25 bp, Probe Sequence
gagtccttcatagagctcagtcagg

SEQ ID NO: 234325 - DNA, 25 bp, Probe Sequence
gagtccttcatagagctcagtcagg

SEQ ID NO: 234326 - DNA, 25 bp, Probe Sequence
gagtacattaaggaccagagaggtt

SEQ ID NO: 234327 - DNA, 25 bp, Probe Sequence
gagtgacttaaggggtgcaaagcta

SEQ ID NO: 234328 - DNA, 25 bp, Probe Sequence
gagttcacagaagcggtggaagcca

SEQ ID NO: 234329 - DNA, 25 bp, Probe Sequence
gagtcacccaactgtgtggaagaca

SEQ ID NO: 234330 - DNA, 25 bp, Probe Sequence
gagtcacccaactgtgtggaagaca

SEQ ID NO: 234331 - DNA, 25 bp, Probe Sequence
gagtctcggaagtgtagaaaatacc

SEQ ID NO: 234332 - DNA, 25 bp, Probe Sequence
gagtctctggacaagtgggaacgtc

SEQ ID NO: 234333 - DNA, 25 bp, Probe Sequence
gagtcactgacagagggaacagcag

SEQ ID NO: 234334 - DNA, 25 bp, Probe Sequence
gagtcctctcaatgggaacctgatt

SEQ ID NO: 234335 - DNA, 25 bp, Probe Sequence
gagtcaatctctttggtacacagga

SEQ ID NO: 234336 - DNA, 25 bp, Probe Sequence
gagttatcattaaagtcacttggaa

SEQ ID NO: 234337 - DNA, 25 bp, Probe Sequence
gagttataaataggtcagtcttgac

SEQ ID NO: 234338 - DNA, 25 bp, Probe Sequence
gagtttggtagtgtcagtcttccta

SEQ ID NO: 234339 - DNA, 25 bp, Probe Sequence
gagtttctgtagtattcactactcc

SEQ ID NO: 234340 - DNA, 25 bp, Probe Sequence
gagtttattcactgtcttatctgca

SEQ ID NO: 234341 - DNA, 25 bp, Probe Sequence
gagtatagttcaacagttttgctga

SEQ ID NO: 234342 - DNA, 25 bp, Probe Sequence
gagtatatgttcagcaatgttgatc

SEQ ID NO: 234343 - DNA, 25 bp, Probe Sequence
gagtatttttggaagcatttggagg

SEQ ID NO: 234344 - DNA, 25 bp, Probe Sequence
gagtttatttagaaagtatcatagt

SEQ ID NO: 234345 - DNA, 25 bp, Probe Sequence
gagtttcactgtttaagtctaagta

SEQ ID NO: 234346 - DNA, 25 bp, Probe Sequence
gatgtttccttcatacattaaacta

SEQ ID NO: 234347 - DNA, 25 bp, Probe Sequence
gagtttgccccagaattcagagttc

SEQ ID NO: 234348 - DNA, 25 bp, Probe Sequence
gagtttcttaatgtcacgagcgttc

SEQ ID NO: 234349 - DNA, 25 bp, Probe Sequence
gagtttcttaacccgtgagctctaa

SEQ ID NO: 234350 - DNA, 25 bp, Probe Sequence
gaggttcctaacttcagtgagccaa

SEQ ID NO: 234351 - DNA, 25 bp, Probe Sequence
gagttccctacattgatcagttcta

SEQ ID NO: 234352 - DNA, 25 bp, Probe Sequence
gagttgtcctacatgcaagtacatg

SEQ ID NO: 234353 - DNA, 25 bp, Probe Sequence
gagttgttgctgtcattagcagtag

SEQ ID NO: 234354 - DNA, 25 bp, Probe Sequence
gagtgacttcttatcgcaattggat

SEQ ID NO: 234355 - DNA, 25 bp, Probe Sequence
gagttgtgctttatggccactgaga

SEQ ID NO: 234356 - DNA, 25 bp, Probe Sequence
gagttgtgcttttgtgttatttgtt

SEQ ID NO: 234357 - DNA, 25 bp, Probe Sequence
gagttgtgcttttgtgttatttgtt

SEQ ID NO: 234358 - DNA, 25 bp, Probe Sequence
gagtattgataaactttgaattttt

SEQ ID NO: 234359 - DNA, 25 bp, Probe Sequence
gagtttaattttgtgaatctattgt

SEQ ID NO: 234360 - DNA, 25 bp, Probe Sequence
gagttttctatttcactaatcatga

SEQ ID NO: 234361 - DNA, 25 bp, Probe Sequence
gagttgttcctttactggctgaaag

SEQ ID NO: 234362 - DNA, 25 bp, Probe Sequence
gaggcttttctgaaacggcgaggac

SEQ ID NO: 234363 - DNA, 25 bp, Probe Sequence
gaggccttcgtggaagtggggcgac

SEQ ID NO: 234364 - DNA, 25 bp, Probe Sequence
gaggcactaagtctcaggggccagc

SEQ ID NO: 234365 - DNA, 25 bp, Probe Sequence
gaggacgatattcaccgttccatta

SEQ ID NO: 234366 - DNA, 25 bp, Probe Sequence
gaggacgatactctgaccgttttag

SEQ ID NO: 234367 - DNA, 25 bp, Probe Sequence
gagttgcagtaccattaccagtaat

SEQ ID NO: 234368 - DNA, 25 bp, Probe Sequence
gagttcctgatggcattagtcatat

SEQ ID NO: 234369 - DNA, 25 bp, Probe Sequence
gagttcttgatgtaccagcatatct

SEQ ID NO: 234370 - DNA, 25 bp, Probe Sequence
gagttgtgtgaccacgtgcatgtct

SEQ ID NO: 234371 - DNA, 25 bp, Probe Sequence
gagttgttgggcaaggatgctgtca

SEQ ID NO: 234372 - DNA, 25 bp, Probe Sequence
gagttggtgggcgctatgctatcac

SEQ ID NO: 234373 - DNA, 25 bp, Probe Sequence
gagttggctgttcacatgattattc

SEQ ID NO: 234374 - DNA, 25 bp, Probe Sequence
gagttgctgcatgtagaagtttgtc

SEQ ID NO: 234375 - DNA, 25 bp, Probe Sequence
gagttctatataagcagagctcgtt

SEQ ID NO: 234376 - DNA, 25 bp, Probe Sequence
gagttctgaatcactggcctgaatt

SEQ ID NO: 234377 - DNA, 25 bp, Probe Sequence
gatgtcctttcagctgccttgaaag

SEQ ID NO: 234378 - DNA, 25 bp, Probe Sequence
gagtcttattgatcccttaacaggt

SEQ ID NO: 234379 - DNA, 25 bp, Probe Sequence
gagttatataaaccacttcccagag

SEQ ID NO: 234380 - DNA, 25 bp, Probe Sequence
gagtttgataaatccctcagtcagc

SEQ ID NO: 234381 - DNA, 25 bp, Probe Sequence
gagtatatcagaacacacccttcca

SEQ ID NO: 234382 - DNA, 25 bp, Probe Sequence
gagtaacacatatcctgcctttact

SEQ ID NO: 234383 - DNA, 25 bp, Probe Sequence
gagtaaaccatgtattcccttatct

SEQ ID NO: 234384 - DNA, 25 bp, Probe Sequence
gagtaaaccatgtattcccttatct

SEQ ID NO: 234385 - DNA, 25 bp, Probe Sequence
gagtaatcacaccatttcatacttc

SEQ ID NO: 234386 - DNA, 25 bp, Probe Sequence
gagttgacatccctattgactcttt

SEQ ID NO: 234387 - DNA, 25 bp, Probe Sequence
gagttcagacccttctgaactctgt

SEQ ID NO: 234388 - DNA, 25 bp, Probe Sequence
gagttcagaccggagtaatccaggt

SEQ ID NO: 234389 - DNA, 25 bp, Probe Sequence
gaggtagcacgggagtacaaaggcc

SEQ ID NO: 234390 - DNA, 25 bp, Probe Sequence
gaggctacaaggggtgtgtaaccgt

SEQ ID NO: 234391 - DNA, 25 bp, Probe Sequence
gaggttaatgggtttccattccaat

SEQ ID NO: 234392 - DNA, 25 bp, Probe Sequence
gagtttatagggttctaatcttaag

SEQ ID NO: 234393 - DNA, 25 bp, Probe Sequence
gagtaattgactggatttagattta

SEQ ID NO: 234394 - DNA, 25 bp, Probe Sequence
gagttctatgttggaagtattcttc

SEQ ID NO: 234395 - DNA, 25 bp, Probe Sequence
gagttgatttctggaatgccttttc

SEQ ID NO: 234396 - DNA, 25 bp, Probe Sequence
gagttatttctaggtggttcttcag

SEQ ID NO: 234397 - DNA, 25 bp, Probe Sequence
gagttaacttcagtcctttcttagg

SEQ ID NO: 234398 - DNA, 25 bp, Probe Sequence
gagttcagacttatcaccattctta

SEQ ID NO: 234399 - DNA, 25 bp, Probe Sequence
gagtccaactgtatacctgcatcag

SEQ ID NO: 234400 - DNA, 25 bp, Probe Sequence
gagtcatctattcaagcacttacag

SEQ ID NO: 234401 - DNA, 25 bp, Probe Sequence
gagtagtagtaaacacttacataca

SEQ ID NO: 234402 - DNA, 25 bp, Probe Sequence
gagttgtcactactagattataaaa

SEQ ID NO: 234403 - DNA, 25 bp, Probe Sequence
gagttgtcctctctgtctaaagagt

SEQ ID NO: 234404 - DNA, 25 bp, Probe Sequence
gagtatgttttgctatgtaataatg

SEQ ID NO: 234405 - DNA, 25 bp, Probe Sequence
gagtcagtttgtgcccatgaataat

SEQ ID NO: 234406 - DNA, 25 bp, Probe Sequence
gagtcagatctttctccttgaatat

SEQ ID NO: 234407 - DNA, 25 bp, Probe Sequence
gagtagtttacatcttcactttctg

SEQ ID NO: 234408 - DNA, 25 bp, Probe Sequence
gagtactctaagctctctacttact

SEQ ID NO: 234409 - DNA, 25 bp, Probe Sequence
gagttcttaataatctctggcttac

SEQ ID NO: 234410 - DNA, 25 bp, Probe Sequence
gagttctgaagatatccggtgcaaa

SEQ ID NO: 234411 - DNA, 25 bp, Probe Sequence
gagttctaatgttacatctgaggaa

SEQ ID NO: 234412 - DNA, 25 bp, Probe Sequence
gagttgctctgttagaaggagcgga

SEQ ID NO: 234413 - DNA, 25 bp, Probe Sequence
gagtatgtttagtcaggcagagctg

SEQ ID NO: 234414 - DNA, 25 bp, Probe Sequence
gagttattagcactaccgatgctga

SEQ ID NO: 234415 - DNA, 25 bp, Probe Sequence
gagttgtgacagccaatcggatgct

SEQ ID NO: 234416 - DNA, 25 bp, Probe Sequence
gagtatgtagggtcatgggatttta

SEQ ID NO: 234417 - DNA, 25 bp, Probe Sequence
gagttgtatcgtgtggtgtattttt

SEQ ID NO: 234418 - DNA, 25 bp, Probe Sequence
gagttgcttcttcttgtggagattt

SEQ ID NO: 234419 - DNA, 25 bp, Probe Sequence
gagttgtcatttttactgccaattt

SEQ ID NO: 234420 - DNA, 25 bp, Probe Sequence
tgggttaatttctccctatgtttat

SEQ ID NO: 234421 - DNA, 25 bp, Probe Sequence
gggcttaattcctcggtgatgaagt

SEQ ID NO: 234422 - DNA, 25 bp, Probe Sequence
gaggttgaaccctcggatacgatag

SEQ ID NO: 234423 - DNA, 25 bp, Probe Sequence
gagtttaacccaataggaaagacat

SEQ ID NO: 234424 - DNA, 25 bp, Probe Sequence
gagtcttccagagcctaagaaaatc

SEQ ID NO: 234425 - DNA, 25 bp, Probe Sequence
gagtttcagcaagcagtatggcaaa

SEQ ID NO: 234426 - DNA, 25 bp, Probe Sequence
gagttctcctcataggaggatgatt

SEQ ID NO: 234427 - DNA, 25 bp, Probe Sequence
gagtattcactagagtggcaagtct

SEQ ID NO: 234428 - DNA, 25 bp, Probe Sequence
gagtaccatgaagggctaaagtcaa

SEQ ID NO: 234429 - DNA, 25 bp, Probe Sequence
gagtattcagaaaggctcaacagaa

SEQ ID NO: 234430 - DNA, 25 bp, Probe Sequence
gagttcaaggaaggatctaagcaat

SEQ ID NO: 234431 - DNA, 25 bp, Probe Sequence
gagtatctaggatgccatgatgaat

SEQ ID NO: 234432 - DNA, 25 bp, Probe Sequence
gagtatgccaccttgcgtgatgtaa

SEQ ID NO: 234433 - DNA, 25 bp, Probe Sequence
gagtaccaacgtggcaattgcaacc

SEQ ID NO: 234434 - DNA, 25 bp, Probe Sequence
gagtacacatctgtcctatatcaac

SEQ ID NO: 234435 - DNA, 25 bp, Probe Sequence
gagttacatcagatcctcaatcaaa

SEQ ID NO: 234436 - DNA, 25 bp, Probe Sequence
gagttacacacatttctatagtgaa

SEQ ID NO: 234437 - DNA, 25 bp, Probe Sequence
gaggaacaacaaattaagtagacca

SEQ ID NO: 234438 - DNA, 25 bp, Probe Sequence
gagtaccaagccatgtaatggtaac

SEQ ID NO: 234439 - DNA, 25 bp, Probe Sequence
gagtaccacgtccttcaagaagaac

SEQ ID NO: 234440 - DNA, 25 bp, Probe Sequence
gagttccaccacctctggaacaaga

SEQ ID NO: 234441 - DNA, 25 bp, Probe Sequence
gagttacaccaaccaggacagaaat

SEQ ID NO: 234442 - DNA, 25 bp, Probe Sequence
gagttaatgccaccacaggcaggaa

SEQ ID NO: 234443 - DNA, 25 bp, Probe Sequence
gagtttatgaccgaaggcaggagcc

SEQ ID NO: 234444 - DNA, 25 bp, Probe Sequence
gagtttgggaccgaggtggagcccg

SEQ ID NO: 234445 - DNA, 25 bp, Probe Sequence
gagtttgggacaacaaagtgccccg

SEQ ID NO: 234446 - DNA, 25 bp, Probe Sequence
gagtttgggaccaagaacacccatg

SEQ ID NO: 234447 - DNA, 25 bp, Probe Sequence
gagtctttgtccttaaaagcctatc

SEQ ID NO: 234448 - DNA, 25 bp, Probe Sequence
gaggcttttcttcgggatacctact

SEQ ID NO: 234449 - DNA, 25 bp, Probe Sequence
gagtatattgtcaggtttccctcct

SEQ ID NO: 234450 - DNA, 25 bp, Probe Sequence
gagtagatgttactggacctcacct

SEQ ID NO: 234451 - DNA, 25 bp, Probe Sequence
gagtagagtgaacctatgactgcag

SEQ ID NO: 234452 - DNA, 25 bp, Probe Sequence
gagtcgaggacatcaaacatagcta

SEQ ID NO: 234453 - DNA, 25 bp, Probe Sequence
gagtcggagactgagacctacacag

SEQ ID NO: 234454 - DNA, 25 bp, Probe Sequence
gagtctgtgccagtgggacctaaag

SEQ ID NO: 234455 - DNA, 25 bp, Probe Sequence
gagtctggtcatgtggaggtggggt

SEQ ID NO: 234456 - DNA, 25 bp, Probe Sequence
gagtcggcttggggggagagtgttc

SEQ ID NO: 234457 - DNA, 25 bp, Probe Sequence
gagttgcggtggcgggcagaggact

SEQ ID NO: 234458 - DNA, 25 bp, Probe Sequence
gagtatgctggaggcagagggcaag

SEQ ID NO: 234459 - DNA, 25 bp, Probe Sequence
gagttctccatggctgagaaaatgc

SEQ ID NO: 234460 - DNA, 25 bp, Probe Sequence
gagttctcctgggcatgaaaaagcg

SEQ ID NO: 234461 - DNA, 25 bp, Probe Sequence
gagtgttccaatggctgacagaaac

SEQ ID NO: 234462 - DNA, 25 bp, Probe Sequence
gagttaccagaggatgatagagagc

SEQ ID NO: 234463 - DNA, 25 bp, Probe Sequence
gagttgatcaagtccatcaatgaaa

SEQ ID NO: 234464 - DNA, 25 bp, Probe Sequence
gagtcatgatccttgctgataaata

SEQ ID NO: 234465 - DNA, 25 bp, Probe Sequence
gagtatatcccactgacacatcaga

SEQ ID NO: 234466 - DNA, 25 bp, Probe Sequence
gagtaaccagatagagcacaagcat

SEQ ID NO: 234467 - DNA, 25 bp, Probe Sequence
gagttatcatcagaggacaagtccc

SEQ ID NO: 234468 - DNA, 25 bp, Probe Sequence
gagttgatgctctggtacaaccaca

SEQ ID NO: 234469 - DNA, 25 bp, Probe Sequence
gagttgagctctcggaactgcatgc

SEQ ID NO: 234470 - DNA, 25 bp, Probe Sequence
gagtagcactctctgagagctccaa

SEQ ID NO: 234471 - DNA, 25 bp, Probe Sequence
gagtgcagccgtttgagaagaaaac

SEQ ID NO: 234472 - DNA, 25 bp, Probe Sequence
gatgtccctgtcttgtgggagatgc

SEQ ID NO: 234473 - DNA, 25 bp, Probe Sequence
gagtccctccaaagggcagtgggtg

SEQ ID NO: 234474 - DNA, 25 bp, Probe Sequence
gagtccctccaaagggcagtgggtg

SEQ ID NO: 234475 - DNA, 25 bp, Probe Sequence
gagtccctccaaagggcagtgggtg

SEQ ID NO: 234476 - DNA, 25 bp, Probe Sequence
gagtcatcgacctcagttagtggtt

SEQ ID NO: 234477 - DNA, 25 bp, Probe Sequence
gagtccaatcactctgttggggcta

SEQ ID NO: 234478 - DNA, 25 bp, Probe Sequence
gagtccaaggcagcctatgtcctct

SEQ ID NO: 234479 - DNA, 25 bp, Probe Sequence
gagtccaaagcagcacctgacgata

SEQ ID NO: 234480 - DNA, 25 bp, Probe Sequence
gagtaatcacatatgcacagtatct

SEQ ID NO: 234481 - DNA, 25 bp, Probe Sequence
gagtaatgagcatgatcacagtaaa

SEQ ID NO: 234482 - DNA, 25 bp, Probe Sequence
gagtaagagctcacacagaaaagaa

SEQ ID NO: 234483 - DNA, 25 bp, Probe Sequence
gagtaagcggatcccgttcagacca

SEQ ID NO: 234484 - DNA, 25 bp, Probe Sequence
gagttagctctactcttttggacca

SEQ ID NO: 234485 - DNA, 25 bp, Probe Sequence
gagttgagcttctttcgcttgatac

SEQ ID NO: 234486 - DNA, 25 bp, Probe Sequence
gagttgctgcttttttcatatttat

SEQ ID NO: 234487 - DNA, 25 bp, Probe Sequence
gagttaaatctattatcttttgacc

SEQ ID NO: 234488 - DNA, 25 bp, Probe Sequence
gagtatcacaatgttagctttctaa

SEQ ID NO: 234489 - DNA, 25 bp, Probe Sequence
gagtatcacaatgttagctttctaa

SEQ ID NO: 234490 - DNA, 25 bp, Probe Sequence
gagtatcatacaggtagaggttaaa

SEQ ID NO: 234491 - DNA, 25 bp, Probe Sequence
gagtcacatagagaagccgttgaag

SEQ ID NO: 234492 - DNA, 25 bp, Probe Sequence
gagtcacactgagatagtcagttgt

SEQ ID NO: 234493 - DNA, 25 bp, Probe Sequence
gagtcttctgcagtctaacagttac

SEQ ID NO: 234494 - DNA, 25 bp, Probe Sequence
gagtatgcccagataaaccaagcct

SEQ ID NO: 234495 - DNA, 25 bp, Probe Sequence
gagttcccacataagaaatcagcag

SEQ ID NO: 234496 - DNA, 25 bp, Probe Sequence
gagtatttatcaaaacaatcagcaa

SEQ ID NO: 234497 - DNA, 25 bp, Probe Sequence
gagtttttaggccaaatcatcgaaa

SEQ ID NO: 234498 - DNA, 25 bp, Probe Sequence
gagttttctaggcagccacacacca

SEQ ID NO: 234499 - DNA, 25 bp, Probe Sequence
gagtcttttatataggcaaaggacc

SEQ ID NO: 234500 - DNA, 25 bp, Probe Sequence
gagggtggtatatagggaagggcca

SEQ ID NO: 234501 - DNA, 25 bp, Probe Sequence
gagtagtggtctcagagctggaaag

SEQ ID NO: 234502 - DNA, 25 bp, Probe Sequence
gagtactgtttttagatgtgaaata

SEQ ID NO: 234503 - DNA, 25 bp, Probe Sequence
gagtccgcttcaacttgatggaaaa

SEQ ID NO: 234504 - DNA, 25 bp, Probe Sequence
gagtcaccttaccttgttaagcttt

SEQ ID NO: 234505 - DNA, 25 bp, Probe Sequence
gagttcctagagcttggctgggtct

SEQ ID NO: 234506 - DNA, 25 bp, Probe Sequence
gagttaagaagtcgtggctaggtgt

SEQ ID NO: 234507 - DNA, 25 bp, Probe Sequence
gagtttaacagtgtgttggcgcttt

SEQ ID NO: 234508 - DNA, 25 bp, Probe Sequence
gagtatttacgttaactgcccactt

SEQ ID NO: 234509 - DNA, 25 bp, Probe Sequence
gagtatttacggtaactgcccactt

SEQ ID NO: 234510 - DNA, 25 bp, Probe Sequence
gagttttacggcaatatcatcacca

SEQ ID NO: 234511 - DNA, 25 bp, Probe Sequence
gagtctgtgaccgatgcaattctac

SEQ ID NO: 234512 - DNA, 25 bp, Probe Sequence
gagtctgactccaatgaattttctg

SEQ ID NO: 234513 - DNA, 25 bp, Probe Sequence
gagtcatactcgttggatgtatttt

SEQ ID NO: 234514 - DNA, 25 bp, Probe Sequence
gagtattcagcgttggatgaattac

SEQ ID NO: 234515 - DNA, 25 bp, Probe Sequence
gagtttcgctgttatgtgaattatg

SEQ ID NO: 234516 - DNA, 25 bp, Probe Sequence
gagtttcaggctcgtgctaagctag

SEQ ID NO: 234517 - DNA, 25 bp, Probe Sequence
gagtttgcttacctgtacagccagt

SEQ ID NO: 234518 - DNA, 25 bp, Probe Sequence
gagtccatttagcttgacacacagt

SEQ ID NO: 234519 - DNA, 25 bp, Probe Sequence
gaggccatttttcagtcaatttccc

SEQ ID NO: 234520 - DNA, 25 bp, Probe Sequence
gagtgctttactccaagaagctttc

SEQ ID NO: 234521 - DNA, 25 bp, Probe Sequence
gagttaaatctcaaataggctatta

SEQ ID NO: 234522 - DNA, 25 bp, Probe Sequence
gagttaactgcatgcactagtgttt

SEQ ID NO: 234523 - DNA, 25 bp, Probe Sequence
gagttaactgagtagcatgctttat

SEQ ID NO: 234524 - DNA, 25 bp, Probe Sequence
gagttacactgttagaccttatgat

SEQ ID NO: 234525 - DNA, 25 bp, Probe Sequence
gagttcaacatgaccaacttggtga

SEQ ID NO: 234526 - DNA, 25 bp, Probe Sequence
gagttcataggacctgacttcagtg

SEQ ID NO: 234527 - DNA, 25 bp, Probe Sequence
gagtttagcgatttttaagatggaa

SEQ ID NO: 234528 - DNA, 25 bp, Probe Sequence
gaggtatatcgaattccaaagaaaa

SEQ ID NO: 234529 - DNA, 25 bp, Probe Sequence
gagggaaggcttcctcaagggagaa

SEQ ID NO: 234530 - DNA, 25 bp, Probe Sequence
gaggtttggctttccagagggcagt

SEQ ID NO: 234531 - DNA, 25 bp, Probe Sequence
gaggttgtggtgagccgagattgca

SEQ ID NO: 234532 - DNA, 25 bp, Probe Sequence
gaggttgtggtgagccgagattgca

SEQ ID NO: 234533 - DNA, 25 bp, Probe Sequence
gagtttgatgaggacgacgagcagg

SEQ ID NO: 234534 - DNA, 25 bp, Probe Sequence
gagtcatctaagtttaccatgcagt

SEQ ID NO: 234535 - DNA, 25 bp, Probe Sequence
gagtctacaatgttacccagcatgc

SEQ ID NO: 234536 - DNA, 25 bp, Probe Sequence
gagttacttgaatgcaagcactgca

SEQ ID NO: 234537 - DNA, 25 bp, Probe Sequence
gagttatttgatctctcagcctgct

SEQ ID NO: 234538 - DNA, 25 bp, Probe Sequence
gagttatctagtgatatgacctcac

SEQ ID NO: 234539 - DNA, 25 bp, Probe Sequence
gagtttctgaggatcagcactgcca

SEQ ID NO: 234540 - DNA, 25 bp, Probe Sequence
gagttttatggaatacctggtacta

SEQ ID NO: 234541 - DNA, 25 bp, Probe Sequence
gagtttctttttccacggtagtcag

SEQ ID NO: 234542 - DNA, 25 bp, Probe Sequence
gagttttttttgccaccaaatcacg

SEQ ID NO: 234543 - DNA, 25 bp, Probe Sequence
gagggccttttagccctaatgacct

SEQ ID NO: 234544 - DNA, 25 bp, Probe Sequence
gagggagtttatcacccatacaacc

SEQ ID NO: 234545 - DNA, 25 bp, Probe Sequence
gagggaactatgggatccgaaaaca

SEQ ID NO: 234546 - DNA, 25 bp, Probe Sequence
gagtagaactttgactctaagagtt

SEQ ID NO: 234547 - DNA, 25 bp, Probe Sequence
gagtcagggtttcaccatattggtc

SEQ ID NO: 234548 - DNA, 25 bp, Probe Sequence
gagtaaggcttttgtgtatttaatc

SEQ ID NO: 234549 - DNA, 25 bp, Probe Sequence
gagtgatcaggcaattcggtcaatt

SEQ ID NO: 234550 - DNA, 25 bp, Probe Sequence
gagttcaggatctgcaattcagttc

SEQ ID NO: 234551 - DNA, 25 bp, Probe Sequence
gagttagatatatgtcatctcctat

SEQ ID NO: 234552 - DNA, 25 bp, Probe Sequence
gagtctaactgaagtctctccttcc

SEQ ID NO: 234553 - DNA, 25 bp, Probe Sequence
gagtctcaggtaatgctttcctgca

SEQ ID NO: 234554 - DNA, 25 bp, Probe Sequence
gagtaacatgtcttctcattgccca

SEQ ID NO: 234555 - DNA, 25 bp, Probe Sequence
gagtatgacacttttcttcttgcat

SEQ ID NO: 234556 - DNA, 25 bp, Probe Sequence
gagtatacagtcccatctgttgtga

SEQ ID NO: 234557 - DNA, 25 bp, Probe Sequence
gagttacagtatacagctatgtggt

SEQ ID NO: 234558 - DNA, 25 bp, Probe Sequence
gagttcactgaaacggaatgccttc

SEQ ID NO: 234559 - DNA, 25 bp, Probe Sequence
gagtcccaggcaagcggattgcttt

SEQ ID NO: 234560 - DNA, 25 bp, Probe Sequence
gagtcctcattgaaaggtagtatgt

SEQ ID NO: 234561 - DNA, 25 bp, Probe Sequence
gagtagctcttgaaagcagctttga

SEQ ID NO: 234562 - DNA, 25 bp, Probe Sequence
gagtagctcttgaaagcagctttga

SEQ ID NO: 234563 - DNA, 25 bp, Probe Sequence
gagtaccatcggaaagctgtgtgag

SEQ ID NO: 234564 - DNA, 25 bp, Probe Sequence
gagtaccaatgccagaacttgtatc

SEQ ID NO: 234565 - DNA, 25 bp, Probe Sequence
gagtaccaatgccagaacttgtatc

SEQ ID NO: 234566 - DNA, 25 bp, Probe Sequence
gagtatcaaatgccatgcagcactt

SEQ ID NO: 234567 - DNA, 25 bp, Probe Sequence
gagtcatcaattctgcagctctcag

SEQ ID NO: 234568 - DNA, 25 bp, Probe Sequence
gagtactgtgtgcagcagctcaagg

SEQ ID NO: 234569 - DNA, 25 bp, Probe Sequence
gagtaccgtgagaagatagaggcag

SEQ ID NO: 234570 - DNA, 25 bp, Probe Sequence
gagtaccgtgagaagatagaggcag

SEQ ID NO: 234571 - DNA, 25 bp, Probe Sequence
gagtaactctggtagtaggatggaa

SEQ ID NO: 234572 - DNA, 25 bp, Probe Sequence
gagtaaccttgagattgggaggaat

SEQ ID NO: 234573 - DNA, 25 bp, Probe Sequence
gagtattacattggccttgggggac

SEQ ID NO: 234574 - DNA, 25 bp, Probe Sequence
gagtttatgtcctctgtcgggacat

SEQ ID NO: 234575 - DNA, 25 bp, Probe Sequence
gagttttttgcagatgtctggagaa

SEQ ID NO: 234576 - DNA, 25 bp, Probe Sequence
gagttatttattgttctgtagatgg

SEQ ID NO: 234577 - DNA, 25 bp, Probe Sequence
gagttattttatgtcatttattggt

SEQ ID NO: 234578 - DNA, 25 bp, Probe Sequence
gagttatggcttagagtcttttctt

SEQ ID NO: 234579 - DNA, 25 bp, Probe Sequence
gagttatcgcagagttatgcctttt

SEQ ID NO: 234580 - DNA, 25 bp, Probe Sequence
gagtctgacaactgttagttttctg

SEQ ID NO: 234581 - DNA, 25 bp, Probe Sequence
gagtataccaccacattgcatttct

SEQ ID NO: 234582 - DNA, 25 bp, Probe Sequence
gagtttgcaaccacagtattccttt

SEQ ID NO: 234583 - DNA, 25 bp, Probe Sequence
gagtttcaaacaacgctctgacctc

SEQ ID NO: 234584 - DNA, 25 bp, Probe Sequence
gagtgtgaaaactgcgactgcctgc

SEQ ID NO: 234585 - DNA, 25 bp, Probe Sequence
gagtagaccaagtgaggtcccgccc

SEQ ID NO: 234586 - DNA, 25 bp, Probe Sequence
gagtagatcggagtcagatgagtac

SEQ ID NO: 234587 - DNA, 25 bp, Probe Sequence
gagtcagtgctggatcgggagtggc

SEQ ID NO: 234588 - DNA, 25 bp, Probe Sequence
gagtcatgagctgtctgggaagaat

SEQ ID NO: 234589 - DNA, 25 bp, Probe Sequence
gagtatgagtcttctgtaaaaaaaa

SEQ ID NO: 234590 - DNA, 25 bp, Probe Sequence
gagtatgagtcttctgtaattcatt

SEQ ID NO: 234591 - DNA, 25 bp, Probe Sequence
gagtatgagtcttctgtaattcatt

SEQ ID NO: 234592 - DNA, 25 bp, Probe Sequence
gagtatgagtcttctgtaattcatt

SEQ ID NO: 234593 - DNA, 25 bp, Probe Sequence
gagtatgagtcttctgtaattcatt

SEQ ID NO: 234594 - DNA, 25 bp, Probe Sequence
gagtatgcaggctatggttaccata

SEQ ID NO: 234595 - DNA, 25 bp, Probe Sequence
gagtacagggatcgggactatgatg

SEQ ID NO: 234596 - DNA, 25 bp, Probe Sequence
gagtacagggggcagcccagcatgt

SEQ ID NO: 234597 - DNA, 25 bp, Probe Sequence
gagtcggaggagcaagtccaggtcc

SEQ ID NO: 234598 - DNA, 25 bp, Probe Sequence
gagtcttgagggaaaaccagtgtgc

SEQ ID NO: 234599 - DNA, 25 bp, Probe Sequence
gagtcctgaggagagaaccggtgcg

SEQ ID NO: 234600 - DNA, 25 bp, Probe Sequence
gagtcctgtggactcaatagccagc

SEQ ID NO: 234601 - DNA, 25 bp, Probe Sequence
gagtccattgagggcaagcagggca

SEQ ID NO: 234602 - DNA, 25 bp, Probe Sequence
gagtcaatgtcagacatcaggcctc

SEQ ID NO: 234603 - DNA, 25 bp, Probe Sequence
gagtcagcatttcacaagacctcca

SEQ ID NO: 234604 - DNA, 25 bp, Probe Sequence
gagtcagcacctacacaaatgcctt

SEQ ID NO: 234605 - DNA, 25 bp, Probe Sequence
gagtcgcgccttacaaatcataaat

SEQ ID NO: 234606 - DNA, 25 bp, Probe Sequence
gagtactcctgacaacatataaata

SEQ ID NO: 234607 - DNA, 25 bp, Probe Sequence
gagtatcttcgtcacacatctaaat

SEQ ID NO: 234608 - DNA, 25 bp, Probe Sequence
gagttttccatagcctctgagactc

SEQ ID NO: 234609 - DNA, 25 bp, Probe Sequence
gagtacttccaacagttgctgactc

SEQ ID NO: 234610 - DNA, 25 bp, Probe Sequence
gagttttgcacacgaagttgccctc

SEQ ID NO: 234611 - DNA, 25 bp, Probe Sequence
gaggatcctgtacacagttccacta

SEQ ID NO: 234612 - DNA, 25 bp, Probe Sequence
gaggtcctgctacccagtaaaaatc

SEQ ID NO: 234613 - DNA, 25 bp, Probe Sequence
gagtgatgcctgaagatctcagtga

SEQ ID NO: 234614 - DNA, 25 bp, Probe Sequence
gagggctgctattgcagatcatctg

SEQ ID NO: 234615 - DNA, 25 bp, Probe Sequence
gagtgcagtgacaggatctcggctc

SEQ ID NO: 234616 - DNA, 25 bp, Probe Sequence
gagtcattgtttggatctgttgctg

SEQ ID NO: 234617 - DNA, 25 bp, Probe Sequence
gagtcacttggtggatgcgcacact

SEQ ID NO: 234618 - DNA, 25 bp, Probe Sequence
gagtgcagcgaggtcatgagcaaca

SEQ ID NO: 234619 - DNA, 25 bp, Probe Sequence
gagtgcaaatgtacattgctaagat

SEQ ID NO: 234620 - DNA, 25 bp, Probe Sequence
gagtgcttattaactgccacagata

SEQ ID NO: 234621 - DNA, 25 bp, Probe Sequence
gagtctgttttatcaatcacaaaat

SEQ ID NO: 234622 - DNA, 25 bp, Probe Sequence
gagttattctttacccacaaacatt

SEQ ID NO: 234623 - DNA, 25 bp, Probe Sequence
gagtttgttttggcaccaaaatcaa

SEQ ID NO: 234624 - DNA, 25 bp, Probe Sequence
gagtttgtttctggcatcctaaatc

SEQ ID NO: 234625 - DNA, 25 bp, Probe Sequence
gagtttgttttgctaccaatatcat

SEQ ID NO: 234626 - DNA, 25 bp, Probe Sequence
gagtttggttaggtatctacatgta

SEQ ID NO: 234627 - DNA, 25 bp, Probe Sequence
gagttatggtgaatggttgcatgga

SEQ ID NO: 234628 - DNA, 25 bp, Probe Sequence
gagtgctatgtgctgggtacatgga

SEQ ID NO: 234629 - DNA, 25 bp, Probe Sequence
gagtctgagtgggggagcatcttat

SEQ ID NO: 234630 - DNA, 25 bp, Probe Sequence
gagtggttggctctgaacttattca

SEQ ID NO: 234631 - DNA, 25 bp, Probe Sequence
gagtggttggctctgaacttattca

SEQ ID NO: 234632 - DNA, 25 bp, Probe Sequence
gagtgttgctgttgcaccatacttt

SEQ ID NO: 234633 - DNA, 25 bp, Probe Sequence
gagtttgcgtagactatactttcca

SEQ ID NO: 234634 - DNA, 25 bp, Probe Sequence
gagtttggaggggaacgtgtcagag

SEQ ID NO: 234635 - DNA, 25 bp, Probe Sequence
gagtctgtggaagaggtggttcgag

SEQ ID NO: 234636 - DNA, 25 bp, Probe Sequence
gagtcttaagagtaggtcaggccaa

SEQ ID NO: 234637 - DNA, 25 bp, Probe Sequence
gagtgttatgggaatggaagggaag

SEQ ID NO: 234638 - DNA, 25 bp, Probe Sequence
gagtgtagtgtggtaggacccggcg

SEQ ID NO: 234639 - DNA, 25 bp, Probe Sequence
gagtgtagtgtggtaggaccccggc

SEQ ID NO: 234640 - DNA, 25 bp, Probe Sequence
gaggctgaggcagaaaaaccacgca

SEQ ID NO: 234641 - DNA, 25 bp, Probe Sequence
gagggacgccaataggcatgccgcc

SEQ ID NO: 234642 - DNA, 25 bp, Probe Sequence
gaggaacggcttaagaacctgcgga

SEQ ID NO: 234643 - DNA, 25 bp, Probe Sequence
gaggaactactacgaacaatgggga

SEQ ID NO: 234644 - DNA, 25 bp, Probe Sequence
gagggccttcgacaaaagtgtgtat

SEQ ID NO: 234645 - DNA, 25 bp, Probe Sequence
gagtggcccttagaaaactttatgg

SEQ ID NO: 234646 - DNA, 25 bp, Probe Sequence
gagggtccattaaaatatccggttg

SEQ ID NO: 234647 - DNA, 25 bp, Probe Sequence
gatggtgtcctttgaaggacccgta

SEQ ID NO: 234648 - DNA, 25 bp, Probe Sequence
gatgtcctcctcagcaatgggagcc

SEQ ID NO: 234649 - DNA, 25 bp, Probe Sequence
gagtccctcatcagatacagatgcc

SEQ ID NO: 234650 - DNA, 25 bp, Probe Sequence
gagtaccagctgattgactgtgccc

SEQ ID NO: 234651 - DNA, 25 bp, Probe Sequence
gagtaccagctgattgactgtgccc

SEQ ID NO: 234652 - DNA, 25 bp, Probe Sequence
gagtaccagctggtgtgccaattcc

SEQ ID NO: 234653 - DNA, 25 bp, Probe Sequence
gagtaggcagctcatgtgcacgttt

SEQ ID NO: 234654 - DNA, 25 bp, Probe Sequence
gagtaggcactgtagctgaagctgt

SEQ ID NO: 234655 - DNA, 25 bp, Probe Sequence
gagtcgtgattgtgccactgcactc

SEQ ID NO: 234656 - DNA, 25 bp, Probe Sequence
gagtcagaaagggctcctgcactga

SEQ ID NO: 234657 - DNA, 25 bp, Probe Sequence
gagtcaacacagcttttgccagaag

SEQ ID NO: 234658 - DNA, 25 bp, Probe Sequence
gagtagatagctctttcttgagagg

SEQ ID NO: 234659 - DNA, 25 bp, Probe Sequence
gagtctgctacaccatttttgattt

SEQ ID NO: 234660 - DNA, 25 bp, Probe Sequence
gagtcattgacttcattttatattt

SEQ ID NO: 234661 - DNA, 25 bp, Probe Sequence
gagtctctgatccaatatgttttta

SEQ ID NO: 234662 - DNA, 25 bp, Probe Sequence
gagtgtcttagcatattttaatgca

SEQ ID NO: 234663 - DNA, 25 bp, Probe Sequence
gagtttccagtcattgttagacaac

SEQ ID NO: 234664 - DNA, 25 bp, Probe Sequence
gagtactccagtgtcatgtcataga

SEQ ID NO: 234665 - DNA, 25 bp, Probe Sequence
gagtccccagatgttgtatactgta

SEQ ID NO: 234666 - DNA, 25 bp, Probe Sequence
gagtcccaattgtctgtgttagtca

SEQ ID NO: 234667 - DNA, 25 bp, Probe Sequence
gagtaatcagattactgctttaatc

SEQ ID NO: 234668 - DNA, 25 bp, Probe Sequence
gagtaaggaataccatttagtcatc

SEQ ID NO: 234669 - DNA, 25 bp, Probe Sequence
gagtatatgctagtttcttgtagat

SEQ ID NO: 234670 - DNA, 25 bp, Probe Sequence
gagtactgaagtggcttttagcaat

SEQ ID NO: 234671 - DNA, 25 bp, Probe Sequence
gagtactcaagctctgaggtccaca

SEQ ID NO: 234672 - DNA, 25 bp, Probe Sequence
gagggtctaagtagggtcgaacaca

SEQ ID NO: 234673 - DNA, 25 bp, Probe Sequence
gagggtctaagtagggtcgaacaca

SEQ ID NO: 234674 - DNA, 25 bp, Probe Sequence
gatggttctagggtgggtttacagc

SEQ ID NO: 234675 - DNA, 25 bp, Probe Sequence
gagggtgatcggggtgactgttccc

SEQ ID NO: 234676 - DNA, 25 bp, Probe Sequence
gagtggaggggcatagcctttccct

SEQ ID NO: 234677 - DNA, 25 bp, Probe Sequence
gagtagactaggattccttctctta

SEQ ID NO: 234678 - DNA, 25 bp, Probe Sequence
gagtacctatggtatgttctctttt

SEQ ID NO: 234679 - DNA, 25 bp, Probe Sequence
gaggtaccaagattgtttctttgtt

SEQ ID NO: 234680 - DNA, 25 bp, Probe Sequence
gagggttaggagggtttcattgtct

SEQ ID NO: 234681 - DNA, 25 bp, Probe Sequence
gagggcgtaggaattatatccttct

SEQ ID NO: 234682 - DNA, 25 bp, Probe Sequence
gagtttgttgtaattttcttcttga

SEQ ID NO: 234683 - DNA, 25 bp, Probe Sequence
gagtgtttagtaattacctatctta

SEQ ID NO: 234684 - DNA, 25 bp, Probe Sequence
gagtttgtgtgttttatgccttcca

SEQ ID NO: 234685 - DNA, 25 bp, Probe Sequence
gagtcagggattgtttggcaccaaa

SEQ ID NO: 234686 - DNA, 25 bp, Probe Sequence
gagtcaggagaatggtgtgaacccg

SEQ ID NO: 234687 - DNA, 25 bp, Probe Sequence
gagtagaggacatggctgtcttcta

SEQ ID NO: 234688 - DNA, 25 bp, Probe Sequence
gagtaggtgacatatgcttcccaga

SEQ ID NO: 234689 - DNA, 25 bp, Probe Sequence
gagtagattagctcaatgatcccag

SEQ ID NO: 234690 - DNA, 25 bp, Probe Sequence
gagtgagattaccacttcctctagt

SEQ ID NO: 234691 - DNA, 25 bp, Probe Sequence
gagtgaaacaggcctctcacacaag

SEQ ID NO: 234692 - DNA, 25 bp, Probe Sequence
gagtgaattagtgctcggcagctac

SEQ ID NO: 234693 - DNA, 25 bp, Probe Sequence
gagtcaccaattgacaggcactatt

SEQ ID NO: 234694 - DNA, 25 bp, Probe Sequence
gagtcctcaaagaccaggccatttt

SEQ ID NO: 234695 - DNA, 25 bp, Probe Sequence
gagtcccaaaggccatgccaaggat

SEQ ID NO: 234696 - DNA, 25 bp, Probe Sequence
gagtgccttcgagtgcgaggcgagg

SEQ ID NO: 234697 - DNA, 25 bp, Probe Sequence
gagtgcctgccggatgtgcaggcct

SEQ ID NO: 234698 - DNA, 25 bp, Probe Sequence
gagtgacaactggagggagatctta

SEQ ID NO: 234699 - DNA, 25 bp, Probe Sequence
gagtcgcaatgtgtgcttggatcat

SEQ ID NO: 234700 - DNA, 25 bp, Probe Sequence
gagtagccatgtgtgttgatcagat

SEQ ID NO: 234701 - DNA, 25 bp, Probe Sequence
gagtacactgtgtctctatgtgaat

SEQ ID NO: 234702 - DNA, 25 bp, Probe Sequence
gagtacctgatggcactgtggagtg

SEQ ID NO: 234703 - DNA, 25 bp, Probe Sequence
gagtatctcatgacccttcatggag

SEQ ID NO: 234704 - DNA, 25 bp, Probe Sequence
gagtttctgtccaatgagcaggaag

SEQ ID NO: 234705 - DNA, 25 bp, Probe Sequence
gagtttcatcatgtgtgtccgttga

SEQ ID NO: 234706 - DNA, 25 bp, Probe Sequence
gagtatctcaattttatccgtggtg

SEQ ID NO: 234707 - DNA, 25 bp, Probe Sequence
gaggctcactatttttagaggggga

SEQ ID NO: 234708 - DNA, 25 bp, Probe Sequence
gagtgtcatccttgtgcttaagaaa

SEQ ID NO: 234709 - DNA, 25 bp, Probe Sequence
gagtgtcacacaagtccaaaagcta

SEQ ID NO: 234710 - DNA, 25 bp, Probe Sequence
gagtcaccatcatgcccaaagacat

SEQ ID NO: 234711 - DNA, 25 bp, Probe Sequence
gagtgaacatcattcaaagacaaat

SEQ ID NO: 234712 - DNA, 25 bp, Probe Sequence
gagtaactcagtaatttcaaaatac

SEQ ID NO: 234713 - DNA, 25 bp, Probe Sequence
gatgtaaccattaatagtctgtaac

SEQ ID NO: 234714 - DNA, 25 bp, Probe Sequence
gatggataccattttagttggacca

SEQ ID NO: 234715 - DNA, 25 bp, Probe Sequence
gagtctcaccattctgatgaatctg

SEQ ID NO: 234716 - DNA, 25 bp, Probe Sequence
gatgttcctgcagtgctgaaattca

SEQ ID NO: 234717 - DNA, 25 bp, Probe Sequence
gagtcttctgcatcagattattgca

SEQ ID NO: 234718 - DNA, 25 bp, Probe Sequence
gagtcattctcatgcttttctttat

SEQ ID NO: 234719 - DNA, 25 bp, Probe Sequence
gagtgattatgctgtttttgttgtt

SEQ ID NO: 234720 - DNA, 25 bp, Probe Sequence
gagtatttggtgtgttctttgtcta

SEQ ID NO: 234721 - DNA, 25 bp, Probe Sequence
gaggatatcggtgttttatattaaa

SEQ ID NO: 234722 - DNA, 25 bp, Probe Sequence
gagggtcctgtctgttagaaggaaa

SEQ ID NO: 234723 - DNA, 25 bp, Probe Sequence
gaggttcttgtctctgtgtaagggc

SEQ ID NO: 234724 - DNA, 25 bp, Probe Sequence
gagtatttttctttggctaatgtgg

SEQ ID NO: 234725 - DNA, 25 bp, Probe Sequence
gagtatcctttcagtgttattagtg

SEQ ID NO: 234726 - DNA, 25 bp, Probe Sequence
gagtaggctttcagttcttggatct

SEQ ID NO: 234727 - DNA, 25 bp, Probe Sequence
gagtaggcttaagtatgtgctggta

SEQ ID NO: 234728 - DNA, 25 bp, Probe Sequence
gagtacctctataatttgggtgacc

SEQ ID NO: 234729 - DNA, 25 bp, Probe Sequence
gagtagccctaaaatatggatgtgc

SEQ ID NO: 234730 - DNA, 25 bp, Probe Sequence
gagtatccctttcgatgaggctgtt

SEQ ID NO: 234731 - DNA, 25 bp, Probe Sequence
gagtaactaattctgtggctgttgt

SEQ ID NO: 234732 - DNA, 25 bp, Probe Sequence
gagtaactggttcttatgctgctgt

SEQ ID NO: 234733 - DNA, 25 bp, Probe Sequence
gagtaactacacttgcttattcttt

SEQ ID NO: 234734 - DNA, 25 bp, Probe Sequence
gagtccttgcatcaatttttcttat

SEQ ID NO: 234735 - DNA, 25 bp, Probe Sequence
gagtctcctgacaaaagttacttat

SEQ ID NO: 234736 - DNA, 25 bp, Probe Sequence
gagtctgggtgtgtggatttccttc

SEQ ID NO: 234737 - DNA, 25 bp, Probe Sequence
gagtcttgttgtctgatatttgcca

SEQ ID NO: 234738 - DNA, 25 bp, Probe Sequence
gagtcagagttcacggagttcacag

SEQ ID NO: 234739 - DNA, 25 bp, Probe Sequence
gagtcagtgaacttttagtgtcagg

SEQ ID NO: 234740 - DNA, 25 bp, Probe Sequence
gagtactgagacttcttagctttgg

SEQ ID NO: 234741 - DNA, 25 bp, Probe Sequence
gagtactgagtcttctgtaacttca

SEQ ID NO: 234742 - DNA, 25 bp, Probe Sequence
gagtatttgctgtttgtccagttca

SEQ ID NO: 234743 - DNA, 25 bp, Probe Sequence
gagtatttctcatagtgcagcttta

SEQ ID NO: 234744 - DNA, 25 bp, Probe Sequence
gagtatttctcatagtgcagcttta

SEQ ID NO: 234745 - DNA, 25 bp, Probe Sequence
gagtatttctatgtggggctgtatg

SEQ ID NO: 234746 - DNA, 25 bp, Probe Sequence
gagtattataagctgcggctggggc

SEQ ID NO: 234747 - DNA, 25 bp, Probe Sequence
gagtcatgtcattatttgctggtgg

SEQ ID NO: 234748 - DNA, 25 bp, Probe Sequence
gagtcagtcagcgagtgcttgggat

SEQ ID NO: 234749 - DNA, 25 bp, Probe Sequence
gagtgcgacatcgagagcttcgtgc

SEQ ID NO: 234750 - DNA, 25 bp, Probe Sequence
gagtgcaatgacgtgatctccgctc

SEQ ID NO: 234751 - DNA, 25 bp, Probe Sequence
gagtatagcatcgtgatccagcagc

SEQ ID NO: 234752 - DNA, 25 bp, Probe Sequence
gagtcagaggcagtatccgcacata

SEQ ID NO: 234753 - DNA, 25 bp, Probe Sequence
gagtatgaggcgggatccacagcac

SEQ ID NO: 234754 - DNA, 25 bp, Probe Sequence
gagtcgccgtctggatgaccagagg

SEQ ID NO: 234755 - DNA, 25 bp, Probe Sequence
gagtccagcctctgatgaagcagga

SEQ ID NO: 234756 - DNA, 25 bp, Probe Sequence
gagtccagctcagacagcgaaggca

SEQ ID NO: 234757 - DNA, 25 bp, Probe Sequence
gagtccagctcagacagcgaaggca

SEQ ID NO: 234758 - DNA, 25 bp, Probe Sequence
gagtcatcagccaacagactgaatg

SEQ ID NO: 234759 - DNA, 25 bp, Probe Sequence
gagtacaccagaagcacttcatggg

SEQ ID NO: 234760 - DNA, 25 bp, Probe Sequence
gagtgaaccagacacctgtgtgcct

SEQ ID NO: 234761 - DNA, 25 bp, Probe Sequence
gagtgaccgtgacatcacgccatgc

SEQ ID NO: 234762 - DNA, 25 bp, Probe Sequence
gagtgaggttgtcatggcctcagct

SEQ ID NO: 234763 - DNA, 25 bp, Probe Sequence
gagtacaatattcatgtcctaagac

SEQ ID NO: 234764 - DNA, 25 bp, Probe Sequence
gagtatgaatttctgtcctttgtac

SEQ ID NO: 234765 - DNA, 25 bp, Probe Sequence
gagtatatatttacatgtcttttta

SEQ ID NO: 234766 - DNA, 25 bp, Probe Sequence
gagggctatttaaggcctgaactag

SEQ ID NO: 234767 - DNA, 25 bp, Probe Sequence
gagggcaataaaactgaagaccaag

SEQ ID NO: 234768 - DNA, 25 bp, Probe Sequence
gagggcgtttagcaaatggccagag

SEQ ID NO: 234769 - DNA, 25 bp, Probe Sequence
gaggctgggttgagaggtcgccggt

SEQ ID NO: 234770 - DNA, 25 bp, Probe Sequence
gaggcctgagaagggtggttcgggt

SEQ ID NO: 234771 - DNA, 25 bp, Probe Sequence
gaggccggaacacacctttatggct

SEQ ID NO: 234772 - DNA, 25 bp, Probe Sequence
gaggccgtgaaacagccgtttgagt

SEQ ID NO: 234773 - DNA, 25 bp, Probe Sequence
gagtcctgaagatcaagccagttct

SEQ ID NO: 234774 - DNA, 25 bp, Probe Sequence
gagtatcgccaataagaacatcgcc

SEQ ID NO: 234775 - DNA, 25 bp, Probe Sequence
gagtcatagaagtaaaaactggcag

SEQ ID NO: 234776 - DNA, 25 bp, Probe Sequence
gagtcatagaaacatacagcacaac

SEQ ID NO: 234777 - DNA, 25 bp, Probe Sequence
gagtaagaaatgctgcccatgccac

SEQ ID NO: 234778 - DNA, 25 bp, Probe Sequence
gagtatgaagaacttgccgctctcc

SEQ ID NO: 234779 - DNA, 25 bp, Probe Sequence
gagtatgtggtgcttgtggctgctc

SEQ ID NO: 234780 - DNA, 25 bp, Probe Sequence
gagtctgcagagtgttgggtctgta

SEQ ID NO: 234781 - DNA, 25 bp, Probe Sequence
gagggcacaggtgatggggtgccag

SEQ ID NO: 234782 - DNA, 25 bp, Probe Sequence
gagggatgcaggtgggccggaagat

SEQ ID NO: 234783 - DNA, 25 bp, Probe Sequence
gagtctggcgtgaggcgccggaatg

SEQ ID NO: 234784 - DNA, 25 bp, Probe Sequence
gagtcatgaaggatgacgtcggaca

SEQ ID NO: 234785 - DNA, 25 bp, Probe Sequence
gagtatagaagaatatccttggaag

SEQ ID NO: 234786 - DNA, 25 bp, Probe Sequence
gagtatggacagtttctcgtgaact

SEQ ID NO: 234787 - DNA, 25 bp, Probe Sequence
gagtaagaagattcctgctacaact

SEQ ID NO: 234788 - DNA, 25 bp, Probe Sequence
gagtgaagacgtccacgtgcactcc

SEQ ID NO: 234789 - DNA, 25 bp, Probe Sequence
gagtacagccgtccaggagctactc

SEQ ID NO: 234790 - DNA, 25 bp, Probe Sequence
gagtcaccaagttcagtgatctcac

SEQ ID NO: 234791 - DNA, 25 bp, Probe Sequence
gagtctgtaaggtcatgtgcttcca

SEQ ID NO: 234792 - DNA, 25 bp, Probe Sequence
gagtctctatagaactgtcctcata

SEQ ID NO: 234793 - DNA, 25 bp, Probe Sequence
gagtgctttagtgagtcctcagcca

SEQ ID NO: 234794 - DNA, 25 bp, Probe Sequence
gagtccattgagaccgtggtcacca

SEQ ID NO: 234795 - DNA, 25 bp, Probe Sequence
gagtacaaggtagtgggtcgctgcc

SEQ ID NO: 234796 - DNA, 25 bp, Probe Sequence
gagtgaaagggactgggccagctca

SEQ ID NO: 234797 - DNA, 25 bp, Probe Sequence
gagtccacagaaggtatggtagaca

SEQ ID NO: 234798 - DNA, 25 bp, Probe Sequence
gagtgctgccagaaatttgaacaac

SEQ ID NO: 234799 - DNA, 25 bp, Probe Sequence
gagtctcggtaatgatgaagaactg

SEQ ID NO: 234800 - DNA, 25 bp, Probe Sequence
gagtccgcgatggagagagaaaagg

SEQ ID NO: 234801 - DNA, 25 bp, Probe Sequence
gagtagtccgcgccaggaagagagc

SEQ ID NO: 234802 - DNA, 25 bp, Probe Sequence
gagtacagacagcccggtagagtgt

SEQ ID NO: 234803 - DNA, 25 bp, Probe Sequence
gagtaggtcgcccagagtggtggat

SEQ ID NO: 234804 - DNA, 25 bp, Probe Sequence
gagtaggtcacccctgatattgtct

SEQ ID NO: 234805 - DNA, 25 bp, Probe Sequence
ggtaggtaccctataattgttctat

SEQ ID NO: 234806 - DNA, 25 bp, Probe Sequence
ggcgaggggcatgtttaatttactt

SEQ ID NO: 234807 - DNA, 25 bp, Probe Sequence
gggtggggcttctcgaatttatgta

SEQ ID NO: 234808 - DNA, 25 bp, Probe Sequence
ggggatgggtcctctagacttgagg

SEQ ID NO: 234809 - DNA, 25 bp, Probe Sequence
gagggggagacggcgttgggatagg

SEQ ID NO: 234810 - DNA, 25 bp, Probe Sequence
gagtgcgggaagggcttcgggcacg

SEQ ID NO: 234811 - DNA, 25 bp, Probe Sequence
gagtgggcgagtgagttgacggcct

SEQ ID NO: 234812 - DNA, 25 bp, Probe Sequence
gagtggactggagcgtaactgccac

SEQ ID NO: 234813 - DNA, 25 bp, Probe Sequence
gagtggtctgttattaagcccaatg

SEQ ID NO: 234814 - DNA, 25 bp, Probe Sequence
gagtgtttttggttagagccaagat

SEQ ID NO: 234815 - DNA, 25 bp, Probe Sequence
gagtgtttttgtgtccagctcagta

SEQ ID NO: 234816 - DNA, 25 bp, Probe Sequence
gagtctttgatcttgaaccgatact

SEQ ID NO: 234817 - DNA, 25 bp, Probe Sequence
gagtctttgatcttgaaccgatact

SEQ ID NO: 234818 - DNA, 25 bp, Probe Sequence
gagtcttgtacacacaacttcagct

SEQ ID NO: 234819 - DNA, 25 bp, Probe Sequence
gagtctgtattaggagaacttcgtc

SEQ ID NO: 234820 - DNA, 25 bp, Probe Sequence
gagtcactgatttgaagaactgtct

SEQ ID NO: 234821 - DNA, 25 bp, Probe Sequence
gagtacaatgtgaaaggcatcttct

SEQ ID NO: 234822 - DNA, 25 bp, Probe Sequence
gagtgacttgtttctggatgattct

SEQ ID NO: 234823 - DNA, 25 bp, Probe Sequence
gagtaatgtgtgctctgtaagtttg

SEQ ID NO: 234824 - DNA, 25 bp, Probe Sequence
gagtcagatgttctttgcagagtct

SEQ ID NO: 234825 - DNA, 25 bp, Probe Sequence
gagtcagtcctgcatttaatgtctt

SEQ ID NO: 234826 - DNA, 25 bp, Probe Sequence
gagtcagtcctgcatttaatgtctt

SEQ ID NO: 234827 - DNA, 25 bp, Probe Sequence
gagtctgtcctggtgtgtgaaggct

SEQ ID NO: 234828 - DNA, 25 bp, Probe Sequence
gagtgtctaggcctttgaatggcat

SEQ ID NO: 234829 - DNA, 25 bp, Probe Sequence
gagtgtgtcagggtgtttgtgcctc

SEQ ID NO: 234830 - DNA, 25 bp, Probe Sequence
gagtgactgcaagcatttttccatc

SEQ ID NO: 234831 - DNA, 25 bp, Probe Sequence
gagtccatccagactgttctatcca

SEQ ID NO: 234832 - DNA, 25 bp, Probe Sequence
gagtctcactagattgactgaggaa

SEQ ID NO: 234833 - DNA, 25 bp, Probe Sequence
gagtctaagtgttctgagctggagg

SEQ ID NO: 234834 - DNA, 25 bp, Probe Sequence
gagtctgtgcagattcttcgggatt

SEQ ID NO: 234835 - DNA, 25 bp, Probe Sequence
gagtctgtgcagattcttcgggatt

SEQ ID NO: 234836 - DNA, 25 bp, Probe Sequence
gagtcaggagttttactgcctgtag

SEQ ID NO: 234837 - DNA, 25 bp, Probe Sequence
gagtgtggaggtctgacagggtagg

SEQ ID NO: 234838 - DNA, 25 bp, Probe Sequence
gagtccgggatgttggaggctgtag

SEQ ID NO: 234839 - DNA, 25 bp, Probe Sequence
gagtcggaggagtcggacgaggata

SEQ ID NO: 234840 - DNA, 25 bp, Probe Sequence
gagtcggagggaggagtcagacgag

SEQ ID NO: 234841 - DNA, 25 bp, Probe Sequence
gagtctgagcaaggaggggccaggc

SEQ ID NO: 234842 - DNA, 25 bp, Probe Sequence
gagtgtgtgtacgagggggcgtgcg

SEQ ID NO: 234843 - DNA, 25 bp, Probe Sequence
gagtcagagaacaaggacgctggtg

SEQ ID NO: 234844 - DNA, 25 bp, Probe Sequence
gagtcaagatgcccgagggtcctga

SEQ ID NO: 234845 - DNA, 25 bp, Probe Sequence
gagtaactgctctctgagttttgca

SEQ ID NO: 234846 - DNA, 25 bp, Probe Sequence
gagtagtcagtcttctagattgttc

SEQ ID NO: 234847 - DNA, 25 bp, Probe Sequence
gagtaacagctggcttaattgttga

SEQ ID NO: 234848 - DNA, 25 bp, Probe Sequence
gagtaatcattgggtcattcgtctg

SEQ ID NO: 234849 - DNA, 25 bp, Probe Sequence
gagtaatcatgtggtgtgcgtgtgt

SEQ ID NO: 234850 - DNA, 25 bp, Probe Sequence
gagtgaatgtgggtgatctgctttt

SEQ ID NO: 234851 - DNA, 25 bp, Probe Sequence
gagtcaagtgaatatcgtttgttta

SEQ ID NO: 234852 - DNA, 25 bp, Probe Sequence
gagtcaacttactctgttgctggct

SEQ ID NO: 234853 - DNA, 25 bp, Probe Sequence
gagtaatctgtttacattctgttct

SEQ ID NO: 234854 - DNA, 25 bp, Probe Sequence
gagtaatttctatatgtctctttaa

SEQ ID NO: 234855 - DNA, 25 bp, Probe Sequence
gagtaattgtttttggcaccagtac

SEQ ID NO: 234856 - DNA, 25 bp, Probe Sequence
gagtcagatttttggggacatcagg

SEQ ID NO: 234857 - DNA, 25 bp, Probe Sequence
gagtcaagttgctatatggtcaaag

SEQ ID NO: 234858 - DNA, 25 bp, Probe Sequence
gagtcaagattgctgtggtcaccaa

SEQ ID NO: 234859 - DNA, 25 bp, Probe Sequence
gagtcacaggtagtgggtctgctgc

SEQ ID NO: 234860 - DNA, 25 bp, Probe Sequence
gatggacatggcttcggacatcctg

SEQ ID NO: 234861 - DNA, 25 bp, Probe Sequence
gagtgaatgctcgcatagatcacct

SEQ ID NO: 234862 - DNA, 25 bp, Probe Sequence
gagtgaagtggtgcagaacactgaa

SEQ ID NO: 234863 - DNA, 25 bp, Probe Sequence
gagggcagtactgctatgaactgga

SEQ ID NO: 234864 - DNA, 25 bp, Probe Sequence
gagtgcacgtccgttatttcagtga

SEQ ID NO: 234865 - DNA, 25 bp, Probe Sequence
gagtctcttcaggatgtgtttcgtg

SEQ ID NO: 234866 - DNA, 25 bp, Probe Sequence
gagtcctacacaaggcctttgtgga

SEQ ID NO: 234867 - DNA, 25 bp, Probe Sequence
gagtcagattccaggtttatgtaga

SEQ ID NO: 234868 - DNA, 25 bp, Probe Sequence
gagtcagctggcaggtttgttgaaa

SEQ ID NO: 234869 - DNA, 25 bp, Probe Sequence
gagtacttgaccttaagtgtgaaat

SEQ ID NO: 234870 - DNA, 25 bp, Probe Sequence
gagtaattgcccatgacacaggaac

SEQ ID NO: 234871 - DNA, 25 bp, Probe Sequence
gagtgattttaggctgataaggtcc

SEQ ID NO: 234872 - DNA, 25 bp, Probe Sequence
gagtgcatctttaaggagaggccct

SEQ ID NO: 234873 - DNA, 25 bp, Probe Sequence
gagtcctgttaatattgatgtccta

SEQ ID NO: 234874 - DNA, 25 bp, Probe Sequence
gagtcgtgttcagcatctatgatgt

SEQ ID NO: 234875 - DNA, 25 bp, Probe Sequence
gagtcggcctgtggcctagatgtgg

SEQ ID NO: 234876 - DNA, 25 bp, Probe Sequence
gagtcggggcttggcttatggagat

SEQ ID NO: 234877 - DNA, 25 bp, Probe Sequence
gagtgtgggcttaggtttgggacta

SEQ ID NO: 234878 - DNA, 25 bp, Probe Sequence
gagtcttcctctatgtttgacgaat

SEQ ID NO: 234879 - DNA, 25 bp, Probe Sequence
gagtcggcccattctgtttagaaat

SEQ ID NO: 234880 - DNA, 25 bp, Probe Sequence
gagtcgtcaccatcatgtattggaa

SEQ ID NO: 234881 - DNA, 25 bp, Probe Sequence
gagtcagttgaattagtactggaca

SEQ ID NO: 234882 - DNA, 25 bp, Probe Sequence
gagtgagttatataaacttacttcc

SEQ ID NO: 234883 - DNA, 25 bp, Probe Sequence
gagtgagccttataagaggacgttc

SEQ ID NO: 234884 - DNA, 25 bp, Probe Sequence
gagtctgctttctccagaggggtat

SEQ ID NO: 234885 - DNA, 25 bp, Probe Sequence
gagtcttttcacttcagtggggtga

SEQ ID NO: 234886 - DNA, 25 bp, Probe Sequence
gagtctgtttcccaagctagactgt

SEQ ID NO: 234887 - DNA, 25 bp, Probe Sequence
gagtctgtcctcctaagaaatctgc

SEQ ID NO: 234888 - DNA, 25 bp, Probe Sequence
gagtctgctactgctaaagctgttg

SEQ ID NO: 234889 - DNA, 25 bp, Probe Sequence
gagtgcctacagcagaaagcctgtg

SEQ ID NO: 234890 - DNA, 25 bp, Probe Sequence
gagtgcctatcagagaaggagacgg

SEQ ID NO: 234891 - DNA, 25 bp, Probe Sequence
gagtccgtcagcaagaaggggagag

SEQ ID NO: 234892 - DNA, 25 bp, Probe Sequence
gagtccagctgcctaattctgaata

SEQ ID NO: 234893 - DNA, 25 bp, Probe Sequence
gagtccaggaagacttgcgcactca

SEQ ID NO: 234894 - DNA, 25 bp, Probe Sequence
gagtcaatggattctttggcaccaa

SEQ ID NO: 234895 - DNA, 25 bp, Probe Sequence
gagtcagatgagtacatgtttacgg

SEQ ID NO: 234896 - DNA, 25 bp, Probe Sequence
gagtcagatgctttcatttacacag

SEQ ID NO: 234897 - DNA, 25 bp, Probe Sequence
gagtcagatgattccattctccgat

SEQ ID NO: 234898 - DNA, 25 bp, Probe Sequence
gagtcacagtagtcttcagcacagt

SEQ ID NO: 234899 - DNA, 25 bp, Probe Sequence
gagtgccagtcagcagtcatgcacg

SEQ ID NO: 234900 - DNA, 25 bp, Probe Sequence
gagtgtgcaattgagagcatagcag

SEQ ID NO: 234901 - DNA, 25 bp, Probe Sequence
gagtgctaatgtgagaaacccagtt

SEQ ID NO: 234902 - DNA, 25 bp, Probe Sequence
gagtctactttgaaggcacctcatg

SEQ ID NO: 234903 - DNA, 25 bp, Probe Sequence
gagtcatcaattcatagagcacact

SEQ ID NO: 234904 - DNA, 25 bp, Probe Sequence
gagtacagtgatctagccatgcagc

SEQ ID NO: 234905 - DNA, 25 bp, Probe Sequence
gagtacggagcactcaacagagttc

SEQ ID NO: 234906 - DNA, 25 bp, Probe Sequence
gagtgcccgagccatatagcaggca

SEQ ID NO: 234907 - DNA, 25 bp, Probe Sequence
gagtccacgatcgagcatatgttgc

SEQ ID NO: 234908 - DNA, 25 bp, Probe Sequence
gagtcacacacaaagcattgtgctg

SEQ ID NO: 234909 - DNA, 25 bp, Probe Sequence
gagtgacgcagcttgcagttgcagt

SEQ ID NO: 234910 - DNA, 25 bp, Probe Sequence
gatcgacgcgcttctgtatgggcgc

SEQ ID NO: 234911 - DNA, 25 bp, Probe Sequence
gagtgacagcctatttgctggccct

SEQ ID NO: 234912 - DNA, 25 bp, Probe Sequence
gagggacccctaatgcagggactag

SEQ ID NO: 234913 - DNA, 25 bp, Probe Sequence
gaggaaaccccactgaaatgcatct

SEQ ID NO: 234914 - DNA, 25 bp, Probe Sequence
gaggtcaatgccgacgtggtagact

SEQ ID NO: 234915 - DNA, 25 bp, Probe Sequence
gagtgtccaggggcttggagagacc

SEQ ID NO: 234916 - DNA, 25 bp, Probe Sequence
gagggtccgacctggaggaccacag

SEQ ID NO: 234917 - DNA, 25 bp, Probe Sequence
gaggtgttcccgctggaggtaattg

SEQ ID NO: 234918 - DNA, 25 bp, Probe Sequence
gggagttaccggataagtcgcatct

SEQ ID NO: 234919 - DNA, 25 bp, Probe Sequence
ggggtacccttgataaaccatctct

SEQ ID NO: 234920 - DNA, 25 bp, Probe Sequence
ggggtacccttgataaaccatctct

SEQ ID NO: 234921 - DNA, 25 bp, Probe Sequence
gagggttgaactcaataaaccttca

SEQ ID NO: 234922 - DNA, 25 bp, Probe Sequence
gagggtggaattcttagaaccaaag

SEQ ID NO: 234923 - DNA, 25 bp, Probe Sequence
gagggggaattggagtcaaaccact

SEQ ID NO: 234924 - DNA, 25 bp, Probe Sequence
gagtcggggtctcagcagaacccca

SEQ ID NO: 234925 - DNA, 25 bp, Probe Sequence
gagtctgcagaggctccataggaca

SEQ ID NO: 234926 - DNA, 25 bp, Probe Sequence
gagtctgagatggcaccactagcac

SEQ ID NO: 234927 - DNA, 25 bp, Probe Sequence
gagtgctgacgccttactggcaatg

SEQ ID NO: 234928 - DNA, 25 bp, Probe Sequence
gagtctatctggtaacactggagct

SEQ ID NO: 234929 - DNA, 25 bp, Probe Sequence
gagtgataagtgtcagatcaataac

SEQ ID NO: 234930 - DNA, 25 bp, Probe Sequence
gagtctaagtattgtatgaagtgcc

SEQ ID NO: 234931 - DNA, 25 bp, Probe Sequence
gagtgttacaattcaatgaacagca

SEQ ID NO: 234932 - DNA, 25 bp, Probe Sequence
gagtgctaactactctaggagagat

SEQ ID NO: 234933 - DNA, 25 bp, Probe Sequence
gagtgctacttatatagagaggtta

SEQ ID NO: 234934 - DNA, 25 bp, Probe Sequence
gagtgcaatccttacttgagaactt

SEQ ID NO: 234935 - DNA, 25 bp, Probe Sequence
gagtgtgacctctattggaaacctt

SEQ ID NO: 234936 - DNA, 25 bp, Probe Sequence
gagggatccgacagagaagaccatt

SEQ ID NO: 234937 - DNA, 25 bp, Probe Sequence
gagggtaacaagcgaataacatgta

SEQ ID NO: 234938 - DNA, 25 bp, Probe Sequence
gagggtaacaagcgaataacatgta

SEQ ID NO: 234939 - DNA, 25 bp, Probe Sequence
gagggtagacaaacggactaagtcg

SEQ ID NO: 234940 - DNA, 25 bp, Probe Sequence
gaggtgtagatggaacgctaaaagg

SEQ ID NO: 234941 - DNA, 25 bp, Probe Sequence
gagtggagaatggcacaccctactg

SEQ ID NO: 234942 - DNA, 25 bp, Probe Sequence
gagtgcgatcaagaacccatgacag

SEQ ID NO: 234943 - DNA, 25 bp, Probe Sequence
gagtcagagcgagaagcccggaggt

SEQ ID NO: 234944 - DNA, 25 bp, Probe Sequence
gagtccagcgagattcgcctgctgg

SEQ ID NO: 234945 - DNA, 25 bp, Probe Sequence
gagtgccgagagctgaaccagcgcg

SEQ ID NO: 234946 - DNA, 25 bp, Probe Sequence
gagtgagctactctgaagctgcaag

SEQ ID NO: 234947 - DNA, 25 bp, Probe Sequence
gagtgaaacccttaatcaatcagtc

SEQ ID NO: 234948 - DNA, 25 bp, Probe Sequence
gagtgtaagctccttttctcatttc

SEQ ID NO: 234949 - DNA, 25 bp, Probe Sequence
gagtccacattcctgtttgtaatcc

SEQ ID NO: 234950 - DNA, 25 bp, Probe Sequence
gagtcaacatatgtgattgttccat

SEQ ID NO: 234951 - DNA, 25 bp, Probe Sequence
gagtcatacatattccatttgtcct

SEQ ID NO: 234952 - DNA, 25 bp, Probe Sequence
gagtgcaagaatagccagcatttcc

SEQ ID NO: 234953 - DNA, 25 bp, Probe Sequence
gagtgaacagaaggcagatcctcct

SEQ ID NO: 234954 - DNA, 25 bp, Probe Sequence
gagtgactagaagaccagtcctaaa

SEQ ID NO: 234955 - DNA, 25 bp, Probe Sequence
gagtgtcttggagggacagcatcct

SEQ ID NO: 234956 - DNA, 25 bp, Probe Sequence
gagtctcttgtgaggagaatccaca

SEQ ID NO: 234957 - DNA, 25 bp, Probe Sequence
gagtcccttgcgggaagactgccaa

SEQ ID NO: 234958 - DNA, 25 bp, Probe Sequence
gagtcctgcatcatttgaaaatgtc

SEQ ID NO: 234959 - DNA, 25 bp, Probe Sequence
gagtctcctaatcttatcaattctg

SEQ ID NO: 234960 - DNA, 25 bp, Probe Sequence
gagtccacttttgtcacaattcatt

SEQ ID NO: 234961 - DNA, 25 bp, Probe Sequence
gagtcagactttgtgttcatttcat

SEQ ID NO: 234962 - DNA, 25 bp, Probe Sequence
gagtggtctttggtcgtatttacgc

SEQ ID NO: 234963 - DNA, 25 bp, Probe Sequence
gagggtcctctcatcgttactgaag

SEQ ID NO: 234964 - DNA, 25 bp, Probe Sequence
gagtggatcttccaggccataaaga

SEQ ID NO: 234965 - DNA, 25 bp, Probe Sequence
gagtgctgattgctcgggtcaaaga

SEQ ID NO: 234966 - DNA, 25 bp, Probe Sequence
gagtctaagcactgcggtgaagaag

SEQ ID NO: 234967 - DNA, 25 bp, Probe Sequence
gagtccccagatagcgagtaaaatg

SEQ ID NO: 234968 - DNA, 25 bp, Probe Sequence
gaggccccaaaggaaaaagcacaag

SEQ ID NO: 234969 - DNA, 25 bp, Probe Sequence
gaggtccgttaggaaaaacagcctg

SEQ ID NO: 234970 - DNA, 25 bp, Probe Sequence
gaggcctgggctgggaaaaactttg

SEQ ID NO: 234971 - DNA, 25 bp, Probe Sequence
gagggctcagttcactaaacattct

SEQ ID NO: 234972 - DNA, 25 bp, Probe Sequence
gagtggctcagtgacacggagacat

SEQ ID NO: 234973 - DNA, 25 bp, Probe Sequence
gagtgttcagctgtccagaaagcaa

SEQ ID NO: 234974 - DNA, 25 bp, Probe Sequence
gagtctatgctgtcttgtcaaagag

SEQ ID NO: 234975 - DNA, 25 bp, Probe Sequence
gagtgggtatttggcacaatgagga

SEQ ID NO: 234976 - DNA, 25 bp, Probe Sequence
gagtggagtgtcattccagcattcc

SEQ ID NO: 234977 - DNA, 25 bp, Probe Sequence
gagtgtcctgatatcccaatatctt

SEQ ID NO: 234978 - DNA, 25 bp, Probe Sequence
gagtgatcctccaacttcatttgat

SEQ ID NO: 234979 - DNA, 25 bp, Probe Sequence
gagtgtttccatacaatgcttttac

SEQ ID NO: 234980 - DNA, 25 bp, Probe Sequence
gagtgtttactagacttggtgcctc

SEQ ID NO: 234981 - DNA, 25 bp, Probe Sequence
gagtggatttgtctactttggctgt

SEQ ID NO: 234982 - DNA, 25 bp, Probe Sequence
gagggcattttgctaccaagcctct

SEQ ID NO: 234983 - DNA, 25 bp, Probe Sequence
gagggaacttgggtcccagcagtgt

SEQ ID NO: 234984 - DNA, 25 bp, Probe Sequence
gagggagcagttcagaaccacggta

SEQ ID NO: 234985 - DNA, 25 bp, Probe Sequence
gagtgagagcagcccaaggatccag

SEQ ID NO: 234986 - DNA, 25 bp, Probe Sequence
gagtggaactgtacagggcctggta

SEQ ID NO: 234987 - DNA, 25 bp, Probe Sequence
gaggggactttcagtcacaggattt

SEQ ID NO: 234988 - DNA, 25 bp, Probe Sequence
gagtgggacattgcaggtccgcaaa

SEQ ID NO: 234989 - DNA, 25 bp, Probe Sequence
gagtgaggacattcaaaagcccatg

SEQ ID NO: 234990 - DNA, 25 bp, Probe Sequence
gagtgaggacatccagctagcctcc

SEQ ID NO: 234991 - DNA, 25 bp, Probe Sequence
gagtgtgggcatagcattagctgct

SEQ ID NO: 234992 - DNA, 25 bp, Probe Sequence
gagtgcatcggtacttgagcaatgc

SEQ ID NO: 234993 - DNA, 25 bp, Probe Sequence
gagtgatctggtgtcgaataggagg

SEQ ID NO: 234994 - DNA, 25 bp, Probe Sequence
gagggctgcgtatttgtaaatagcc

SEQ ID NO: 234995 - DNA, 25 bp, Probe Sequence
gaggtgctcaggttggaataaagtg

SEQ ID NO: 234996 - DNA, 25 bp, Probe Sequence
gatgaggtaggtaggcaggaaaacg

SEQ ID NO: 234997 - DNA, 25 bp, Probe Sequence
gtagttcaggttcctggaaaacgca

SEQ ID NO: 234998 - DNA, 25 bp, Probe Sequence
gaggttatggttccccaagatacgc

SEQ ID NO: 234999 - DNA, 25 bp, Probe Sequence
gaggcctagtttgggtgcaagtagg

SEQ ID NO: 235000 - DNA, 25 bp, Probe Sequence
gaggactagtatggggtgggaggcc

SEQ ID NO: 235001 - DNA, 25 bp, Probe Sequence
gaggaggttgggaggtggaggccca

SEQ ID NO: 235002 - DNA, 25 bp, Probe Sequence
gagggggagaaggtgggtgggctca

SEQ ID NO: 235003 - DNA, 25 bp, Probe Sequence
gagggaggcaagccagtcgggtttc

SEQ ID NO: 235004 - DNA, 25 bp, Probe Sequence
gaggggacatatcctagggttttca

SEQ ID NO: 235005 - DNA, 25 bp, Probe Sequence
gagtgggaattttttcctaatcatg

SEQ ID NO: 235006 - DNA, 25 bp, Probe Sequence
gagtgggattcctactttatgtaat

SEQ ID NO: 235007 - DNA, 25 bp, Probe Sequence
gagggtcattttcctttctgtatta

SEQ ID NO: 235008 - DNA, 25 bp, Probe Sequence
gagggtttctgatctgtactttgtg

SEQ ID NO: 235009 - DNA, 25 bp, Probe Sequence
gaggttttgtcaactggagtacgta

SEQ ID NO: 235010 - DNA, 25 bp, Probe Sequence
gaggagttggttcagaagtacagta

SEQ ID NO: 235011 - DNA, 25 bp, Probe Sequence
gagtgagggggtaagtagatgtaaa

SEQ ID NO: 235012 - DNA, 25 bp, Probe Sequence
gagtgcatgagctggaaagggtgaa

SEQ ID NO: 235013 - DNA, 25 bp, Probe Sequence
gagtgggataggagcagtgagtgac

SEQ ID NO: 235014 - DNA, 25 bp, Probe Sequence
gagtcggaagaggtgtggcggcatc

SEQ ID NO: 235015 - DNA, 25 bp, Probe Sequence
gagtccaaagcaggctggttggcat

SEQ ID NO: 235016 - DNA, 25 bp, Probe Sequence
gagtctcagaaccgtggtgtgtaca

SEQ ID NO: 235017 - DNA, 25 bp, Probe Sequence
gttctaaaacgtagttctgaatcca

SEQ ID NO: 235018 - DNA, 25 bp, Probe Sequence
gttgtaaaatacagcccgaactgca

SEQ ID NO: 235019 - DNA, 25 bp, Probe Sequence
gatgggaaaaacaccttgaaacaga

SEQ ID NO: 235020 - DNA, 25 bp, Probe Sequence
gaggaggtaaatatcctttttcagg

SEQ ID NO: 235021 - DNA, 25 bp, Probe Sequence
gaggggacgaatatccacttttcca

SEQ ID NO: 235022 - DNA, 25 bp, Probe Sequence
gagggaactaatgcattcctttgag

SEQ ID NO: 235023 - DNA, 25 bp, Probe Sequence
gaggaacagtaactcttccttcggg

SEQ ID NO: 235024 - DNA, 25 bp, Probe Sequence
gagtgaacatgtacattctctccct

SEQ ID NO: 235025 - DNA, 25 bp, Probe Sequence
gatgcagagctttacctcttagcac

SEQ ID NO: 235026 - DNA, 25 bp, Probe Sequence
gatgaagttagaccattagccccaa

SEQ ID NO: 235027 - DNA, 25 bp, Probe Sequence
gatgagggtggcagtgtacccgtca

SEQ ID NO: 235028 - DNA, 25 bp, Probe Sequence
gagtgaggctgggggttctcacacc

SEQ ID NO: 235029 - DNA, 25 bp, Probe Sequence
gaggaagttgctgaactgtacccca

SEQ ID NO: 235030 - DNA, 25 bp, Probe Sequence
gagtgtgttactgaactgtacccac

SEQ ID NO: 235031 - DNA, 25 bp, Probe Sequence
gaggagtttctcattgctggaaaac

SEQ ID NO: 235032 - DNA, 25 bp, Probe Sequence
gagtggtttccaatgtgttcaatag

SEQ ID NO: 235033 - DNA, 25 bp, Probe Sequence
gagtggaatataaactgtacacata

SEQ ID NO: 235034 - DNA, 25 bp, Probe Sequence
gagtggactattaaatgtgcctaaa

SEQ ID NO: 235035 - DNA, 25 bp, Probe Sequence
gagtggacttctgcaatgctgacca

SEQ ID NO: 235036 - DNA, 25 bp, Probe Sequence
gagtggcactgttctaatcattcac

SEQ ID NO: 235037 - DNA, 25 bp, Probe Sequence
gagtggcaattattgaatcctcttg

SEQ ID NO: 235038 - DNA, 25 bp, Probe Sequence
gagtgaagataatctctcctatctg

SEQ ID NO: 235039 - DNA, 25 bp, Probe Sequence
gagtgatagagctaacccttatctg

SEQ ID NO: 235040 - DNA, 25 bp, Probe Sequence
gagtgctgggcatgtgcctggaact

SEQ ID NO: 235041 - DNA, 25 bp, Probe Sequence
gagtggtggctcatgcctgtaatcc

SEQ ID NO: 235042 - DNA, 25 bp, Probe Sequence
gagtgttggctcatatgctgttgat

SEQ ID NO: 235043 - DNA, 25 bp, Probe Sequence
gagtgttatgttacatgatgtttag

SEQ ID NO: 235044 - DNA, 25 bp, Probe Sequence
gagtgcttatgatatacttgtctgc

SEQ ID NO: 235045 - DNA, 25 bp, Probe Sequence
gagtcttgtgttaaatatgctctgt

SEQ ID NO: 235046 - DNA, 25 bp, Probe Sequence
gagtctatgttttactaattctttg

SEQ ID NO: 235047 - DNA, 25 bp, Probe Sequence
gagtctattaaatctatatcatctt

SEQ ID NO: 235048 - DNA, 25 bp, Probe Sequence
gagtcttatcaaaagctatatgcca

SEQ ID NO: 235049 - DNA, 25 bp, Probe Sequence
gagtcttcaatgatatgcttgcaaa

SEQ ID NO: 235050 - DNA, 25 bp, Probe Sequence
gagtcttctgtaattcattgagcag

SEQ ID NO: 235051 - DNA, 25 bp, Probe Sequence
gagtcttggaatgtctgatggcatg

SEQ ID NO: 235052 - DNA, 25 bp, Probe Sequence
gagtctggtgaagctcacttctggg

SEQ ID NO: 235053 - DNA, 25 bp, Probe Sequence
gagtctgggagaactccaatgctga

SEQ ID NO: 235054 - DNA, 25 bp, Probe Sequence
gaggggatggatactccatttaccg

SEQ ID NO: 235055 - DNA, 25 bp, Probe Sequence
gagggctctagagcccatgtcttct

SEQ ID NO: 235056 - DNA, 25 bp, Probe Sequence
gagggcttactgtgtatgtcttctt

SEQ ID NO: 235057 - DNA, 25 bp, Probe Sequence
gagggctatacatggtagccagttg

SEQ ID NO: 235058 - DNA, 25 bp, Probe Sequence
gagggctaaatccatgaagtttgtg

SEQ ID NO: 235059 - DNA, 25 bp, Probe Sequence
gagggctaaatccatgaagtttgtg

SEQ ID NO: 235060 - DNA, 25 bp, Probe Sequence
gaggtccaaatactgtctgtcaatg

SEQ ID NO: 235061 - DNA, 25 bp, Probe Sequence
gagtgcttcaacaagatttcgagag

SEQ ID NO: 235062 - DNA, 25 bp, Probe Sequence
gaggcttccctagtttacaagtcag

SEQ ID NO: 235063 - DNA, 25 bp, Probe Sequence
gagtctacaccaaggtctacaacta

SEQ ID NO: 235064 - DNA, 25 bp, Probe Sequence
gagtctacaccaaggtctacaacta

SEQ ID NO: 235065 - DNA, 25 bp, Probe Sequence
gagtcattcaccaggtggcaccact

SEQ ID NO: 235066 - DNA, 25 bp, Probe Sequence
gagtcccatgaaaggtggctccacg

SEQ ID NO: 235067 - DNA, 25 bp, Probe Sequence
gagtgccgaggcaggtggatcacaa

SEQ ID NO: 235068 - DNA, 25 bp, Probe Sequence
gagtgccaaggcaggtggatcacct

SEQ ID NO: 235069 - DNA, 25 bp, Probe Sequence
gagtcctaggcacagctctaagcct

SEQ ID NO: 235070 - DNA, 25 bp, Probe Sequence
gagtccatgagcctttttaacacag

SEQ ID NO: 235071 - DNA, 25 bp, Probe Sequence
gagtcctcagctcttactaaacata

SEQ ID NO: 235072 - DNA, 25 bp, Probe Sequence
gagtctcatccttactaccaagaaa

SEQ ID NO: 235073 - DNA, 25 bp, Probe Sequence
gatgtccaccatgactccaaaaata

SEQ ID NO: 235074 - DNA, 25 bp, Probe Sequence
gagtgctcccacaattacaaagaat

SEQ ID NO: 235075 - DNA, 25 bp, Probe Sequence
gagtgagactccatctaaaaaaaca

SEQ ID NO: 235076 - DNA, 25 bp, Probe Sequence
gagggatacctgtctgcataataaa

SEQ ID NO: 235077 - DNA, 25 bp, Probe Sequence
gagtgtgaccgtttgctaaataaag

SEQ ID NO: 235078 - DNA, 25 bp, Probe Sequence
gaggtactagttccaagcaacaaac

SEQ ID NO: 235079 - DNA, 25 bp, Probe Sequence
gagggcccagttgctggaagagcaa

SEQ ID NO: 235080 - DNA, 25 bp, Probe Sequence
gagggcgaaggtaccgaaagcacag

SEQ ID NO: 235081 - DNA, 25 bp, Probe Sequence
gagggggaagtgagaagggctcaga

SEQ ID NO: 235082 - DNA, 25 bp, Probe Sequence
gagggggaagtgagaagggctcaga

SEQ ID NO: 235083 - DNA, 25 bp, Probe Sequence
gaggggggtgtggaaaggccacaga

SEQ ID NO: 235084 - DNA, 25 bp, Probe Sequence
gggtgggggagatagcaaccaagtc

SEQ ID NO: 235085 - DNA, 25 bp, Probe Sequence
gagtggggccggcaacaactgggcc

SEQ ID NO: 235086 - DNA, 25 bp, Probe Sequence
gaggggtcggggagaaatcaggctc

SEQ ID NO: 235087 - DNA, 25 bp, Probe Sequence
gagggttgcctgagtttaagaggtt

SEQ ID NO: 235088 - DNA, 25 bp, Probe Sequence
gagggttcctgtagacctagggagg

SEQ ID NO: 235089 - DNA, 25 bp, Probe Sequence
gagggttccagacaaaggaggggat

SEQ ID NO: 235090 - DNA, 25 bp, Probe Sequence
gagggcctccagactaataggaagc

SEQ ID NO: 235091 - DNA, 25 bp, Probe Sequence
gaggagcctcctgaaggtggaagct

SEQ ID NO: 235092 - DNA, 25 bp, Probe Sequence
gagggcttcctgtagggcataaacc

SEQ ID NO: 235093 - DNA, 25 bp, Probe Sequence
gagggttcctgtttggattagacca

SEQ ID NO: 235094 - DNA, 25 bp, Probe Sequence
gagggttcctggtgcgagaagactt

SEQ ID NO: 235095 - DNA, 25 bp, Probe Sequence
gagggttattggaaaacagagcagt

SEQ ID NO: 235096 - DNA, 25 bp, Probe Sequence
gagggtggacggactgtcaaggagt

SEQ ID NO: 235097 - DNA, 25 bp, Probe Sequence
gagtgctggacctcattaaagtgca

SEQ ID NO: 235098 - DNA, 25 bp, Probe Sequence
gagtgctggacctcattaaagtgca

SEQ ID NO: 235099 - DNA, 25 bp, Probe Sequence
gagtgctggacctcattaaagtgca

SEQ ID NO: 235100 - DNA, 25 bp, Probe Sequence
gagtgactgtcagcaactaagagta

SEQ ID NO: 235101 - DNA, 25 bp, Probe Sequence
gagtggatgccagaactgtaggtta

SEQ ID NO: 235102 - DNA, 25 bp, Probe Sequence
gagtgtgcccaggaactcagagagg

SEQ ID NO: 235103 - DNA, 25 bp, Probe Sequence
gaggtggccagatcacctgaggtca

SEQ ID NO: 235104 - DNA, 25 bp, Probe Sequence
gagtgggcaatgtacgccaagttcg

SEQ ID NO: 235105 - DNA, 25 bp, Probe Sequence
gagtggatcaaagatgacaagggcc

SEQ ID NO: 235106 - DNA, 25 bp, Probe Sequence
gagtggatcaaagatgacaagggcc

SEQ ID NO: 235107 - DNA, 25 bp, Probe Sequence
gagtgccagaagagatacagaggac

SEQ ID NO: 235108 - DNA, 25 bp, Probe Sequence
gagtccacgctgatgacgcagaaga

SEQ ID NO: 235109 - DNA, 25 bp, Probe Sequence
gagtcgcatctcagtgcaggagaga

SEQ ID NO: 235110 - DNA, 25 bp, Probe Sequence
gagtctgcctatgtggcaggagaaa

SEQ ID NO: 235111 - DNA, 25 bp, Probe Sequence
gagtgccagctatgtgaggtagaaa

SEQ ID NO: 235112 - DNA, 25 bp, Probe Sequence
gagtgcaactcaaatgtgttgaaga

SEQ ID NO: 235113 - DNA, 25 bp, Probe Sequence
gagtcggctcaatctggtgcagaga

SEQ ID NO: 235114 - DNA, 25 bp, Probe Sequence
gagtctgaccacaactgagggctgg

SEQ ID NO: 235115 - DNA, 25 bp, Probe Sequence
gagtctactcagaactgtgttgtgg

SEQ ID NO: 235116 - DNA, 25 bp, Probe Sequence
gagtgcaacagcctacagtttgtgt

SEQ ID NO: 235117 - DNA, 25 bp, Probe Sequence
gagtggacacagcacatgtttcaga

SEQ ID NO: 235118 - DNA, 25 bp, Probe Sequence
gagtgtgaagttacaaagcctgaga

SEQ ID NO: 235119 - DNA, 25 bp, Probe Sequence
gagtgtttgctttcaaatgccatgg

SEQ ID NO: 235120 - DNA, 25 bp, Probe Sequence
gagtcctatgccttcaacatgaaag

SEQ ID NO: 235121 - DNA, 25 bp, Probe Sequence
gagtcctgtggcatccacgaaacta

SEQ ID NO: 235122 - DNA, 25 bp, Probe Sequence
gagtgcctgttgttctcattacaac

SEQ ID NO: 235123 - DNA, 25 bp, Probe Sequence
gagggctgctttatcatattgtact

SEQ ID NO: 235124 - DNA, 25 bp, Probe Sequence
gaggtgcgctttttatgtactttta

SEQ ID NO: 235125 - DNA, 25 bp, Probe Sequence
gagtggccaaatgaagtactttgtc

SEQ ID NO: 235126 - DNA, 25 bp, Probe Sequence
gagtgtgacaagagaaatcactttg

SEQ ID NO: 235127 - DNA, 25 bp, Probe Sequence
gaggcagagaagagacccctttaga

SEQ ID NO: 235128 - DNA, 25 bp, Probe Sequence
gaggataaaattcacctttctgata

SEQ ID NO: 235129 - DNA, 25 bp, Probe Sequence
gagtgaatacactcctgttgtttta

SEQ ID NO: 235130 - DNA, 25 bp, Probe Sequence
gagggacgacacctctggtttttca

SEQ ID NO: 235131 - DNA, 25 bp, Probe Sequence
gaggtaataccctggtttctttctg

SEQ ID NO: 235132 - DNA, 25 bp, Probe Sequence
gaggtaaagtccatggttccctggc

SEQ ID NO: 235133 - DNA, 25 bp, Probe Sequence
gagtgctaaatttttaactgccttt

SEQ ID NO: 235134 - DNA, 25 bp, Probe Sequence
gagtgtactatatactattaccttt

SEQ ID NO: 235135 - DNA, 25 bp, Probe Sequence
gagtgtttcaagtgccattcaccta

SEQ ID NO: 235136 - DNA, 25 bp, Probe Sequence
gaggttgagtaattggcccatccat

SEQ ID NO: 235137 - DNA, 25 bp, Probe Sequence
gagggtggtgagcagtgtccttatc

SEQ ID NO: 235138 - DNA, 25 bp, Probe Sequence
gaggggaggaggtgggcatttccta

SEQ ID NO: 235139 - DNA, 25 bp, Probe Sequence
gagtgaggagtgcggggagcttctc

SEQ ID NO: 235140 - DNA, 25 bp, Probe Sequence
gagtgtgggtcagagagccaaactg

SEQ ID NO: 235141 - DNA, 25 bp, Probe Sequence
gagtctgggtatgctgggaaaatca

SEQ ID NO: 235142 - DNA, 25 bp, Probe Sequence
gagtgctgcggtaccttgtagaagt

SEQ ID NO: 235143 - DNA, 25 bp, Probe Sequence
gagtgtcggtagttcttgcagtagg

SEQ ID NO: 235144 - DNA, 25 bp, Probe Sequence
gagtgtacaaagtgttgcagggctg

SEQ ID NO: 235145 - DNA, 25 bp, Probe Sequence
gagtggaaaaacgctctgagacgtt

SEQ ID NO: 235146 - DNA, 25 bp, Probe Sequence
gagtgaatgtaatagtcttgcagaa

SEQ ID NO: 235147 - DNA, 25 bp, Probe Sequence
gagtgaactacagcagtgatctggg

SEQ ID NO: 235148 - DNA, 25 bp, Probe Sequence
gagtgcctatgaggacagtgtccgc

SEQ ID NO: 235149 - DNA, 25 bp, Probe Sequence
gagtgcctatgaggacagtgtccgc

SEQ ID NO: 235150 - DNA, 25 bp, Probe Sequence
gagggactactatgtgtccacagct

SEQ ID NO: 235151 - DNA, 25 bp, Probe Sequence
gagtggatctcacagttgctccacc

SEQ ID NO: 235152 - DNA, 25 bp, Probe Sequence
gagtgttcatagcagtagcattcat

SEQ ID NO: 235153 - DNA, 25 bp, Probe Sequence
gagtgcttcaagtgtggacgatctg

SEQ ID NO: 235154 - DNA, 25 bp, Probe Sequence
gagtgtctctagggtgatacgtggg

SEQ ID NO: 235155 - DNA, 25 bp, Probe Sequence
gagtcctgttcttgttacggcagtc

SEQ ID NO: 235156 - DNA, 25 bp, Probe Sequence
gagtcctgttcttgttacggcagtc

SEQ ID NO: 235157 - DNA, 25 bp, Probe Sequence
gagtcctgtgtttgtgagtcgtttc

SEQ ID NO: 235158 - DNA, 25 bp, Probe Sequence
gagtcctcttgttgagagtgtgtct

SEQ ID NO: 235159 - DNA, 25 bp, Probe Sequence
gagtgctggttttgagagttgtttt

SEQ ID NO: 235160 - DNA, 25 bp, Probe Sequence
gagtctgagtatagagagaatggct

SEQ ID NO: 235161 - DNA, 25 bp, Probe Sequence
gagtctgatgtgtcttagagcatgt

SEQ ID NO: 235162 - DNA, 25 bp, Probe Sequence
gagtcgatgatgctaaggcactgat

SEQ ID NO: 235163 - DNA, 25 bp, Probe Sequence
gagtcgagaagcacagagcctgagt

SEQ ID NO: 235164 - DNA, 25 bp, Probe Sequence
gagtcgagaagcacagagcctgagt

SEQ ID NO: 235165 - DNA, 25 bp, Probe Sequence
gagtcgaggtggacatggtgcgagt

SEQ ID NO: 235166 - DNA, 25 bp, Probe Sequence
gagtctgtgaggctattgtgtaatc

SEQ ID NO: 235167 - DNA, 25 bp, Probe Sequence
gagtctggaggctgttagctaactt

SEQ ID NO: 235168 - DNA, 25 bp, Probe Sequence
gagtgggggtatttgacatatttta

SEQ ID NO: 235169 - DNA, 25 bp, Probe Sequence
gaggggtggtattaaacaagtcaat

SEQ ID NO: 235170 - DNA, 25 bp, Probe Sequence
gagggttgttaatccatcacaagca

SEQ ID NO: 235171 - DNA, 25 bp, Probe Sequence
gagtggtggatggactaccagaaac

SEQ ID NO: 235172 - DNA, 25 bp, Probe Sequence
gagtggggaagagttgccgccaacc

SEQ ID NO: 235173 - DNA, 25 bp, Probe Sequence
gagtggtttgtggattccctcaacc

SEQ ID NO: 235174 - DNA, 25 bp, Probe Sequence
gagtgatgttggaatagtccctcta

SEQ ID NO: 235175 - DNA, 25 bp, Probe Sequence
gagtggttggcagagtcctcattga

SEQ ID NO: 235176 - DNA, 25 bp, Probe Sequence
gagtgcatgttgaaggaatcctctt

SEQ ID NO: 235177 - DNA, 25 bp, Probe Sequence
gagtgctctctgagagaatcactca

SEQ ID NO: 235178 - DNA, 25 bp, Probe Sequence
gagtgtgcgtgagtgtgagccacct

SEQ ID NO: 235179 - DNA, 25 bp, Probe Sequence
gagtgtgataaggctgctgccacct

SEQ ID NO: 235180 - DNA, 25 bp, Probe Sequence
gagtgatgtgaaagcctctcacccc

SEQ ID NO: 235181 - DNA, 25 bp, Probe Sequence
gaggtgtcaactgttagccacgcag

SEQ ID NO: 235182 - DNA, 25 bp, Probe Sequence
gagggaacactctgtaggcccatgg

SEQ ID NO: 235183 - DNA, 25 bp, Probe Sequence
gagggaacatctgggttatgccttt

SEQ ID NO: 235184 - DNA, 25 bp, Probe Sequence
ggggaaatgcttctttttgtttgtg

SEQ ID NO: 235185 - DNA, 25 bp, Probe Sequence
gaggagaagtttcttatttggagtc

SEQ ID NO: 235186 - DNA, 25 bp, Probe Sequence
gaggagaattttgctggatttcaga

SEQ ID NO: 235187 - DNA, 25 bp, Probe Sequence
gatggagcaaggattcttaattagg

SEQ ID NO: 235188 - DNA, 25 bp, Probe Sequence
gaggacgggaagattcaatggggga

SEQ ID NO: 235189 - DNA, 25 bp, Probe Sequence
gagtgactgggagtgtttccgtcgc

SEQ ID NO: 235190 - DNA, 25 bp, Probe Sequence
gagggtaggaatatctgcactggcc

SEQ ID NO: 235191 - DNA, 25 bp, Probe Sequence
gagtgcagtagtgcgttctcagctc

SEQ ID NO: 235192 - DNA, 25 bp, Probe Sequence
gagtgcagtggtgcagtcttggctc

SEQ ID NO: 235193 - DNA, 25 bp, Probe Sequence
gagtgcagtggtgcgatctctgctc

SEQ ID NO: 235194 - DNA, 25 bp, Probe Sequence
gagtgcagtcgtgtgattggcctca

SEQ ID NO: 235195 - DNA, 25 bp, Probe Sequence
gagtgcgacgtgagtctgagtctga

SEQ ID NO: 235196 - DNA, 25 bp, Probe Sequence
gagtgcgacagctggtggaacaagt

SEQ ID NO: 235197 - DNA, 25 bp, Probe Sequence
gagtgtggcacagagggagccaact

SEQ ID NO: 235198 - DNA, 25 bp, Probe Sequence
gagtgtgacatggtacctgggcaac

SEQ ID NO: 235199 - DNA, 25 bp, Probe Sequence
gagggaagggacagaggaagctatt

SEQ ID NO: 235200 - DNA, 25 bp, Probe Sequence
gagtgaaagggagccagaagactga

SEQ ID NO: 235201 - DNA, 25 bp, Probe Sequence
gagtgaggagggggcctgagactgg

SEQ ID NO: 235202 - DNA, 25 bp, Probe Sequence
gagtgggggccattaattactctgc

SEQ ID NO: 235203 - DNA, 25 bp, Probe Sequence
gagtgtgggtgctcatagagttgcc

SEQ ID NO: 235204 - DNA, 25 bp, Probe Sequence
gagtgtgggtgctcatagagttgcc

SEQ ID NO: 235205 - DNA, 25 bp, Probe Sequence
gagtgtggtggcaccatcatggctc

SEQ ID NO: 235206 - DNA, 25 bp, Probe Sequence
gagtggtgttgcatcactggtgcgc

SEQ ID NO: 235207 - DNA, 25 bp, Probe Sequence
gagtggtttgagaacatagtgtcta

SEQ ID NO: 235208 - DNA, 25 bp, Probe Sequence
gaggggggaagatcaggtcatacta

SEQ ID NO: 235209 - DNA, 25 bp, Probe Sequence
gaggggggggcagcaagagagccta

SEQ ID NO: 235210 - DNA, 25 bp, Probe Sequence
gtgcggggcagggcctaacaaggaa

SEQ ID NO: 235211 - DNA, 25 bp, Probe Sequence
gagggtggcgtggcctataacgtga

SEQ ID NO: 235212 - DNA, 25 bp, Probe Sequence
gaggcgtgtgttgactgattgaccc

SEQ ID NO: 235213 - DNA, 25 bp, Probe Sequence
gagtgggttttagtgttggtcacag

SEQ ID NO: 235214 - DNA, 25 bp, Probe Sequence
gagggagttcttcttttgtgagaga

SEQ ID NO: 235215 - DNA, 25 bp, Probe Sequence
gagggtgtacttcttgttggagtga

SEQ ID NO: 235216 - DNA, 25 bp, Probe Sequence
gaggtggatccttatcttttaggta

SEQ ID NO: 235217 - DNA, 25 bp, Probe Sequence
gaggtgggccgagttcttttggata

SEQ ID NO: 235218 - DNA, 25 bp, Probe Sequence
gagggggtgcaggttcagtttatat

SEQ ID NO: 235219 - DNA, 25 bp, Probe Sequence
gagtggccttatcttcactttatcg

SEQ ID NO: 235220 - DNA, 25 bp, Probe Sequence
gaggtccaacagctctgatcatttt

SEQ ID NO: 235221 - DNA, 25 bp, Probe Sequence
gagggccaaacttctggcttgtgct

SEQ ID NO: 235222 - DNA, 25 bp, Probe Sequence
gaggggcaaatcctgtgacttgtgc

SEQ ID NO: 235223 - DNA, 25 bp, Probe Sequence
gagtgggaaggacttggtcgcgccc

SEQ ID NO: 235224 - DNA, 25 bp, Probe Sequence
gagtggatgaatggactgttgaagc

SEQ ID NO: 235225 - DNA, 25 bp, Probe Sequence
gagtgtggagcggctctgtgtggac

SEQ ID NO: 235226 - DNA, 25 bp, Probe Sequence
gaggtggattccgagtggtgacagg

SEQ ID NO: 235227 - DNA, 25 bp, Probe Sequence
gaggtggattccgagtggtgacagg

SEQ ID NO: 235228 - DNA, 25 bp, Probe Sequence
gaggtggatcctcactgggaaacat

SEQ ID NO: 235229 - DNA, 25 bp, Probe Sequence
gagtccagacgggactggagaaact

SEQ ID NO: 235230 - DNA, 25 bp, Probe Sequence
gagtccaacaggggtcaatgagtac

SEQ ID NO: 235231 - DNA, 25 bp, Probe Sequence
gagggcaaaggcgtgtttgactgca

SEQ ID NO: 235232 - DNA, 25 bp, Probe Sequence
gagtggggagaggttgggcagtgag

SEQ ID NO: 235233 - DNA, 25 bp, Probe Sequence
gagtgaggggattaggggagaagca

SEQ ID NO: 235234 - DNA, 25 bp, Probe Sequence
gagtgggtggtttgcgaggatgagg

SEQ ID NO: 235235 - DNA, 25 bp, Probe Sequence
gagtgtgagggtagggatgccatgg

SEQ ID NO: 235236 - DNA, 25 bp, Probe Sequence
gagtgtgatgaggccgaggctgcct

SEQ ID NO: 235237 - DNA, 25 bp, Probe Sequence
gagtgtgatgaggccgaggctgcct

SEQ ID NO: 235238 - DNA, 25 bp, Probe Sequence
gagtggctagtgaaggacgcctttt

SEQ ID NO: 235239 - DNA, 25 bp, Probe Sequence
gagggccagctggaggacagcagcc

SEQ ID NO: 235240 - DNA, 25 bp, Probe Sequence
gagggcatcataggccagacaggcc

SEQ ID NO: 235241 - DNA, 25 bp, Probe Sequence
gagtgcagccttggctagagaactc

SEQ ID NO: 235242 - DNA, 25 bp, Probe Sequence
gagtggacatctcctaagtgcatct

SEQ ID NO: 235243 - DNA, 25 bp, Probe Sequence
gatgggacacttgacagtgacttga

SEQ ID NO: 235244 - DNA, 25 bp, Probe Sequence
gagggcaacattccacagctgccct

SEQ ID NO: 235245 - DNA, 25 bp, Probe Sequence
gagtgagttcattgaccagtcacgc

SEQ ID NO: 235246 - DNA, 25 bp, Probe Sequence
gagtgggtaaaggcagccaggcgtg

SEQ ID NO: 235247 - DNA, 25 bp, Probe Sequence
gagtggggccaaaggctgcgaggtt

SEQ ID NO: 235248 - DNA, 25 bp, Probe Sequence
gagtgagttcacaatctttggggtt

SEQ ID NO: 235249 - DNA, 25 bp, Probe Sequence
gagggttcatctgatcgtggcaggt

SEQ ID NO: 235250 - DNA, 25 bp, Probe Sequence
gaggtactgaaccacgatggctgtt

SEQ ID NO: 235251 - DNA, 25 bp, Probe Sequence
gaggtttaattgtaatggcagtctt

SEQ ID NO: 235252 - DNA, 25 bp, Probe Sequence
gaggttctataataagccatgagct

SEQ ID NO: 235253 - DNA, 25 bp, Probe Sequence
gagtggtcattacatttgccatatc

SEQ ID NO: 235254 - DNA, 25 bp, Probe Sequence
gagtgctgtcattatttcctcttat

SEQ ID NO: 235255 - DNA, 25 bp, Probe Sequence
gagtgagtgtattttccttgtgtat

SEQ ID NO: 235256 - DNA, 25 bp, Probe Sequence
gagtgggaatatctgctctctgtta

SEQ ID NO: 235257 - DNA, 25 bp, Probe Sequence
gagtgacagtgtaaggctctgtctt

SEQ ID NO: 235258 - DNA, 25 bp, Probe Sequence
gagtgtatttatagcttctctgctg

SEQ ID NO: 235259 - DNA, 25 bp, Probe Sequence
gagggtgttattgattcatctgaca

SEQ ID NO: 235260 - DNA, 25 bp, Probe Sequence
gagggtgttattgattcatctgaca

SEQ ID NO: 235261 - DNA, 25 bp, Probe Sequence
gagggctgtaactgtttccaagtac

SEQ ID NO: 235262 - DNA, 25 bp, Probe Sequence
gagggttaatcacatagtccaaaat

SEQ ID NO: 235263 - DNA, 25 bp, Probe Sequence
gaggtttcctagcatggtcctcaat

SEQ ID NO: 235264 - DNA, 25 bp, Probe Sequence
gaggtttttgagcatagtacttgac

SEQ ID NO: 235265 - DNA, 25 bp, Probe Sequence
gaggatgattgctggtttcccttac

SEQ ID NO: 235266 - DNA, 25 bp, Probe Sequence
gagggatgtcgggcagttcccatta

SEQ ID NO: 235267 - DNA, 25 bp, Probe Sequence
gagggcatggggtggtccctcaaga

SEQ ID NO: 235268 - DNA, 25 bp, Probe Sequence
gagggcagggagtgggagccaatga

SEQ ID NO: 235269 - DNA, 25 bp, Probe Sequence
gagggcaaagagttggagttctatc

SEQ ID NO: 235270 - DNA, 25 bp, Probe Sequence
gagggcaaagagttggagttctatc

SEQ ID NO: 235271 - DNA, 25 bp, Probe Sequence
gaggtgaaagagttcagacttatca

SEQ ID NO: 235272 - DNA, 25 bp, Probe Sequence
gagtgggagaagttagtctgtgcta

SEQ ID NO: 235273 - DNA, 25 bp, Probe Sequence
gagtgggtgcagcaggtgtcaggct

SEQ ID NO: 235274 - DNA, 25 bp, Probe Sequence
gagtgtgcctgcaaagatggtagag

SEQ ID NO: 235275 - DNA, 25 bp, Probe Sequence
gagtgtcctcagtatatcaggaaaa

SEQ ID NO: 235276 - DNA, 25 bp, Probe Sequence
gaggtccgtgtttcggaagaaggag

SEQ ID NO: 235277 - DNA, 25 bp, Probe Sequence
gaggtcggggtatgataggtcgggg

SEQ ID NO: 235278 - DNA, 25 bp, Probe Sequence
gaggtgggtagatcacaaggtcagg

SEQ ID NO: 235279 - DNA, 25 bp, Probe Sequence
gagggtgcggaggcagcaaatgtta

SEQ ID NO: 235280 - DNA, 25 bp, Probe Sequence
gagggacatggactataacgttgat

SEQ ID NO: 235281 - DNA, 25 bp, Probe Sequence
gaggaactttctcaacgcattgcat

SEQ ID NO: 235282 - DNA, 25 bp, Probe Sequence
gaggtattttctctgcaccaagagc

SEQ ID NO: 235283 - DNA, 25 bp, Probe Sequence
gagggattctaccctgaacatacct

SEQ ID NO: 235284 - DNA, 25 bp, Probe Sequence
gagggtattatcccgataccccaca

SEQ ID NO: 235285 - DNA, 25 bp, Probe Sequence
gatggggattcatacgacccctatg

SEQ ID NO: 235286 - DNA, 25 bp, Probe Sequence
gagggcaagccaccaaattacctag

SEQ ID NO: 235287 - DNA, 25 bp, Probe Sequence
gagggccacagacaaagatatcact

SEQ ID NO: 235288 - DNA, 25 bp, Probe Sequence
gagggcgaagtgaaggagacaccgt

SEQ ID NO: 235289 - DNA, 25 bp, Probe Sequence
gagggaaagggagagccacctggta

SEQ ID NO: 235290 - DNA, 25 bp, Probe Sequence
gagggaagagagctgtagcaaccat

SEQ ID NO: 235291 - DNA, 25 bp, Probe Sequence
gagggaagagatagcatggcatgca

SEQ ID NO: 235292 - DNA, 25 bp, Probe Sequence
gagggcgacatgaagatgcactgct

SEQ ID NO: 235293 - DNA, 25 bp, Probe Sequence
gagtgagctgtatagtgcctgctga

SEQ ID NO: 235294 - DNA, 25 bp, Probe Sequence
gagtgaagtgactgatcctgagaaa

SEQ ID NO: 235295 - DNA, 25 bp, Probe Sequence
gagtgcgtggaggtgttcatggaga

SEQ ID NO: 235296 - DNA, 25 bp, Probe Sequence
gagtgggcgtggcattcagtaaatg

SEQ ID NO: 235297 - DNA, 25 bp, Probe Sequence
gagtgacgttgtctaagatgtaatg

SEQ ID NO: 235298 - DNA, 25 bp, Probe Sequence
gagtgatcggtctgtagagagtcat

SEQ ID NO: 235299 - DNA, 25 bp, Probe Sequence
gagtgacgctgtggtgtgaggtgtt

SEQ ID NO: 235300 - DNA, 25 bp, Probe Sequence
gagtgatcattagggctgaggtctg

SEQ ID NO: 235301 - DNA, 25 bp, Probe Sequence
gagtgccagatactgtgctgagtgt

SEQ ID NO: 235302 - DNA, 25 bp, Probe Sequence
gagtgcctgtacaagctgatgtttt

SEQ ID NO: 235303 - DNA, 25 bp, Probe Sequence
gagtgactggagacagggatgatgg

SEQ ID NO: 235304 - DNA, 25 bp, Probe Sequence
gaggtctagatgtgggtatgggaaa

SEQ ID NO: 235305 - DNA, 25 bp, Probe Sequence
gagtgtgtaagctgagcgatttcta

SEQ ID NO: 235306 - DNA, 25 bp, Probe Sequence
gagtgaagagaatgacgattactac

SEQ ID NO: 235307 - DNA, 25 bp, Probe Sequence
gagtgagattacttatctggtacca

SEQ ID NO: 235308 - DNA, 25 bp, Probe Sequence
gagtgactagagctcactgtctact

SEQ ID NO: 235309 - DNA, 25 bp, Probe Sequence
gagtgatctaagctcagtaaagcct

SEQ ID NO: 235310 - DNA, 25 bp, Probe Sequence
gagtgtctcaaactgagttagactt

SEQ ID NO: 235311 - DNA, 25 bp, Probe Sequence
ggtgactataggtgtgggttttgct

SEQ ID NO: 235312 - DNA, 25 bp, Probe Sequence
tggtcattaaggtggggccctaatc

SEQ ID NO: 235313 - DNA, 25 bp, Probe Sequence
tcgggttaggatgaggtgacctgag

SEQ ID NO: 235314 - DNA, 25 bp, Probe Sequence
gatgggttggggcagttacctggtt

SEQ ID NO: 235315 - DNA, 25 bp, Probe Sequence
gagggagggaggagttccctgggct

SEQ ID NO: 235316 - DNA, 25 bp, Probe Sequence
gagggaggagacgaggttctcttgg

SEQ ID NO: 235317 - DNA, 25 bp, Probe Sequence
gagggggaaacaggtatgctctttt

SEQ ID NO: 235318 - DNA, 25 bp, Probe Sequence
gaggaggtacaaaagttactattgc

SEQ ID NO: 235319 - DNA, 25 bp, Probe Sequence
gaggtggtgaaattcgtgaactttt

SEQ ID NO: 235320 - DNA, 25 bp, Probe Sequence
gaggttgggaaaccgctaatatttg

SEQ ID NO: 235321 - DNA, 25 bp, Probe Sequence
gatggtttaaagttcctaacagatc

SEQ ID NO: 235322 - DNA, 25 bp, Probe Sequence
gaggtcgtggtacttttcaacgtgg

SEQ ID NO: 235323 - DNA, 25 bp, Probe Sequence
gaggtgtgtggggttctccaaagag

SEQ ID NO: 235324 - DNA, 25 bp, Probe Sequence
gaggggcaagggaatctccccagga

SEQ ID NO: 235325 - DNA, 25 bp, Probe Sequence
gaggggaacagatacactccgagag

SEQ ID NO: 235326 - DNA, 25 bp, Probe Sequence
gagtggggtcagaagattctcctgg

SEQ ID NO: 235327 - DNA, 25 bp, Probe Sequence
gagtggtgttcgacatgtacgtaga

SEQ ID NO: 235328 - DNA, 25 bp, Probe Sequence
gagtggtgatagcgcctaagcatag

SEQ ID NO: 235329 - DNA, 25 bp, Probe Sequence
gagtgcatggtagagcagtacagca

SEQ ID NO: 235330 - DNA, 25 bp, Probe Sequence
gagtggcagtgagatgagtggcaaa

SEQ ID NO: 235331 - DNA, 25 bp, Probe Sequence
gagtgctcgttactggggatatgaa

SEQ ID NO: 235332 - DNA, 25 bp, Probe Sequence
gagtgcatcgcacagtggaagcaaa

SEQ ID NO: 235333 - DNA, 25 bp, Probe Sequence
gagtgcacatcaaaatggccaaatc

SEQ ID NO: 235334 - DNA, 25 bp, Probe Sequence
gagtgacacagaaatggccagcgca

SEQ ID NO: 235335 - DNA, 25 bp, Probe Sequence
gagtgacacgcagagctgaagccat

SEQ ID NO: 235336 - DNA, 25 bp, Probe Sequence
gagggaccagtactgaagactctgc

SEQ ID NO: 235337 - DNA, 25 bp, Probe Sequence
gagggtcctgctgggagaaactggc

SEQ ID NO: 235338 - DNA, 25 bp, Probe Sequence
gagggacagaccgtcagaaactgga

SEQ ID NO: 235339 - DNA, 25 bp, Probe Sequence
gaggaccagtccatgggcaattggc

SEQ ID NO: 235340 - DNA, 25 bp, Probe Sequence
gaggaccagtccatgggcaattggc

SEQ ID NO: 235341 - DNA, 25 bp, Probe Sequence
gaggtctcagctcttggaggagggc

SEQ ID NO: 235342 - DNA, 25 bp, Probe Sequence
gagtgactgcctcctaggaggacat

SEQ ID NO: 235343 - DNA, 25 bp, Probe Sequence
gagggtgccatgcacattcaggaat

SEQ ID NO: 235344 - DNA, 25 bp, Probe Sequence
gagtgtatcctgaaatatctggttg

SEQ ID NO: 235345 - DNA, 25 bp, Probe Sequence
gagggacttcagttagcatggtggg

SEQ ID NO: 235346 - DNA, 25 bp, Probe Sequence
gagggacttcaatcacatcaatgta

SEQ ID NO: 235347 - DNA, 25 bp, Probe Sequence
gagggcacctaatcagagggtatta

SEQ ID NO: 235348 - DNA, 25 bp, Probe Sequence
gagggagttaagccataggaatttg

SEQ ID NO: 235349 - DNA, 25 bp, Probe Sequence
gaggaagtataacgtaccctaatga

SEQ ID NO: 235350 - DNA, 25 bp, Probe Sequence
gagggagtagaactttgactctaag

SEQ ID NO: 235351 - DNA, 25 bp, Probe Sequence
gaggtggaacaacttgttgcggaag

SEQ ID NO: 235352 - DNA, 25 bp, Probe Sequence
gatgggcccaaactcgtacgggaat

SEQ ID NO: 235353 - DNA, 25 bp, Probe Sequence
gatgggcccaaactcgtacgggaat

SEQ ID NO: 235354 - DNA, 25 bp, Probe Sequence
gagggccgcaagccccaaatggaaa

SEQ ID NO: 235355 - DNA, 25 bp, Probe Sequence
gaggtccgcaaggcaagggggaaga

SEQ ID NO: 235356 - DNA, 25 bp, Probe Sequence
gagggcaccgagacagagggttaaa

SEQ ID NO: 235357 - DNA, 25 bp, Probe Sequence
gagggagggaatcagggtttataga

SEQ ID NO: 235358 - DNA, 25 bp, Probe Sequence
gagtggtggggaggagggtttatgg

SEQ ID NO: 235359 - DNA, 25 bp, Probe Sequence
gagtgtgtctgactgggaggagttt

SEQ ID NO: 235360 - DNA, 25 bp, Probe Sequence
gagggtctagttaacagcaggctta

SEQ ID NO: 235361 - DNA, 25 bp, Probe Sequence
gagggtcttgtaaagagtctgcctt

SEQ ID NO: 235362 - DNA, 25 bp, Probe Sequence
gaggttccagtaatgatggtttgct

SEQ ID NO: 235363 - DNA, 25 bp, Probe Sequence
gagtgtctccttttgatagggattg

SEQ ID NO: 235364 - DNA, 25 bp, Probe Sequence
gagtgttcagattttttgctggtat

SEQ ID NO: 235365 - DNA, 25 bp, Probe Sequence
gagtgttatcatattggtgctgagt

SEQ ID NO: 235366 - DNA, 25 bp, Probe Sequence
gagtgtgtattcttggatggctgat

SEQ ID NO: 235367 - DNA, 25 bp, Probe Sequence
gagggcagtctttctatgtgcagat

SEQ ID NO: 235368 - DNA, 25 bp, Probe Sequence
gagggcagctgccttgtgttatgtc

SEQ ID NO: 235369 - DNA, 25 bp, Probe Sequence
gagggcacattttgctgtaaatctg

SEQ ID NO: 235370 - DNA, 25 bp, Probe Sequence
gagggagctatttgtgtaagactgc

SEQ ID NO: 235371 - DNA, 25 bp, Probe Sequence
gaggaactaacagtccattactcta

SEQ ID NO: 235372 - DNA, 25 bp, Probe Sequence
gaggttgtaacagtttctactctag

SEQ ID NO: 235373 - DNA, 25 bp, Probe Sequence
gaggtccataaagatttactgctat

SEQ ID NO: 235374 - DNA, 25 bp, Probe Sequence
gaggtgccataaaggagttatcatc

SEQ ID NO: 235375 - DNA, 25 bp, Probe Sequence
gagtgttcaactgtgagtttcatca

SEQ ID NO: 235376 - DNA, 25 bp, Probe Sequence
gagtgttcttagggatgtgttatag

SEQ ID NO: 235377 - DNA, 25 bp, Probe Sequence
gagtgtaattgagtaatattctata

SEQ ID NO: 235378 - DNA, 25 bp, Probe Sequence
gagtgtgtatgaacataccaatcta

SEQ ID NO: 235379 - DNA, 25 bp, Probe Sequence
gagtggcttgatagcataggaaatg

SEQ ID NO: 235380 - DNA, 25 bp, Probe Sequence
gagtgactctatatagctgatcagt

SEQ ID NO: 235381 - DNA, 25 bp, Probe Sequence
gagtgaacatacaatgatggggata

SEQ ID NO: 235382 - DNA, 25 bp, Probe Sequence
gagtgataaacaattgggctaatga

SEQ ID NO: 235383 - DNA, 25 bp, Probe Sequence
gagtgaaaattttgaggctcctctg

SEQ ID NO: 235384 - DNA, 25 bp, Probe Sequence
gagggaaatgtgttagagggtctgg

SEQ ID NO: 235385 - DNA, 25 bp, Probe Sequence
gaggtgaaagtctccgtggtggaca

SEQ ID NO: 235386 - DNA, 25 bp, Probe Sequence
gagggcaaagtggacgggagtggac

SEQ ID NO: 235387 - DNA, 25 bp, Probe Sequence
gagggtatgaatgccgggatgctgt

SEQ ID NO: 235388 - DNA, 25 bp, Probe Sequence
gagtggcattaatcacggcgtgaag

SEQ ID NO: 235389 - DNA, 25 bp, Probe Sequence
gagtggactacatcctgagtgtgat

SEQ ID NO: 235390 - DNA, 25 bp, Probe Sequence
gagtggactacatcctgagtgtgat

SEQ ID NO: 235391 - DNA, 25 bp, Probe Sequence
gagtggagggctgcaccaagtgcat

SEQ ID NO: 235392 - DNA, 25 bp, Probe Sequence
gagggtcggctctaccaagtagaat

SEQ ID NO: 235393 - DNA, 25 bp, Probe Sequence
gagtggctgcctacaacaaagccaa

SEQ ID NO: 235394 - DNA, 25 bp, Probe Sequence
gagggctgctgcataagccctgctt

SEQ ID NO: 235395 - DNA, 25 bp, Probe Sequence
gagggctgctgcataagccctgctt

SEQ ID NO: 235396 - DNA, 25 bp, Probe Sequence
gagggctgcagagtaagtgccgcct

SEQ ID NO: 235397 - DNA, 25 bp, Probe Sequence
gagggctatcagaacagatccggga

SEQ ID NO: 235398 - DNA, 25 bp, Probe Sequence
gagggacatcagacaacaccagtgc

SEQ ID NO: 235399 - DNA, 25 bp, Probe Sequence
gagggaccgcattgatgtccagcag

SEQ ID NO: 235400 - DNA, 25 bp, Probe Sequence
gagtgatgtacagtctattccatag

SEQ ID NO: 235401 - DNA, 25 bp, Probe Sequence
gaggtttcatatgatatcatctata

SEQ ID NO: 235402 - DNA, 25 bp, Probe Sequence
gaggtattattcttctctatatccg

SEQ ID NO: 235403 - DNA, 25 bp, Probe Sequence
gaggttgatttcctttttcatcgat

SEQ ID NO: 235404 - DNA, 25 bp, Probe Sequence
gaggttgatttcctttttcatcgat

SEQ ID NO: 235405 - DNA, 25 bp, Probe Sequence
gaggtggtttctcttgagactcgtt

SEQ ID NO: 235406 - DNA, 25 bp, Probe Sequence
gaggggcccattcataagaaagtgt

SEQ ID NO: 235407 - DNA, 25 bp, Probe Sequence
gagggagcctgtagggaattaaagt

SEQ ID NO: 235408 - DNA, 25 bp, Probe Sequence
gagggcgcactgtgtgaggagaaca

SEQ ID NO: 235409 - DNA, 25 bp, Probe Sequence
gaggtggcaggttaggaagaaattg

SEQ ID NO: 235410 - DNA, 25 bp, Probe Sequence
gagggggcagtttggagagtttgga

SEQ ID NO: 235411 - DNA, 25 bp, Probe Sequence
gagggcgaaggccattgggtttggg

SEQ ID NO: 235412 - DNA, 25 bp, Probe Sequence
gagggcggcatgccgaagggtctgt

SEQ ID NO: 235413 - DNA, 25 bp, Probe Sequence
gatgtgggtatgggaaactggcgtt

SEQ ID NO: 235414 - DNA, 25 bp, Probe Sequence
gagtgggtagtggagagcatcgcgg

SEQ ID NO: 235415 - DNA, 25 bp, Probe Sequence
gagtggagtcaggtgaggcatcttt

SEQ ID NO: 235416 - DNA, 25 bp, Probe Sequence
gagtggagctgagctgtggacctct

SEQ ID NO: 235417 - DNA, 25 bp, Probe Sequence
gagtggagctgagctgtggacctct

SEQ ID NO: 235418 - DNA, 25 bp, Probe Sequence
gagtggagctgagctgtggacctct

SEQ ID NO: 235419 - DNA, 25 bp, Probe Sequence
gaggggggtgcagatgactctgctg

SEQ ID NO: 235420 - DNA, 25 bp, Probe Sequence
gagggtggatgggttacttgcccac

SEQ ID NO: 235421 - DNA, 25 bp, Probe Sequence
gagtggggagtggtaccttgaaaat

SEQ ID NO: 235422 - DNA, 25 bp, Probe Sequence
gaggggaggtggagttggaaatgtg

SEQ ID NO: 235423 - DNA, 25 bp, Probe Sequence
gagggggagtggaggggcatagcct

SEQ ID NO: 235424 - DNA, 25 bp, Probe Sequence
gggtgggatggagaaggacggtccg

SEQ ID NO: 235425 - DNA, 25 bp, Probe Sequence
gagggggagtacgaatacacgggcg

SEQ ID NO: 235426 - DNA, 25 bp, Probe Sequence
gagtggctggtgaaccaacaccgcg

SEQ ID NO: 235427 - DNA, 25 bp, Probe Sequence
gagtggtgggagaaccagccgactg

SEQ ID NO: 235428 - DNA, 25 bp, Probe Sequence
gagtggtgggacaactgcagccaga

SEQ ID NO: 235429 - DNA, 25 bp, Probe Sequence
gagtgggagacagtcatgtgaccag

SEQ ID NO: 235430 - DNA, 25 bp, Probe Sequence
gaggtcgaggctgcagtgagccatg

SEQ ID NO: 235431 - DNA, 25 bp, Probe Sequence
gagtgttgggtctgtagccagcaaa

SEQ ID NO: 235432 - DNA, 25 bp, Probe Sequence
gagtgttgggtctgtagccagcaaa

SEQ ID NO: 235433 - DNA, 25 bp, Probe Sequence
gaggttagagagattggccagcaaa

SEQ ID NO: 235434 - DNA, 25 bp, Probe Sequence
gaggttagagagattggccagcaaa

SEQ ID NO: 235435 - DNA, 25 bp, Probe Sequence
gaggttagagagattggccagcaaa

SEQ ID NO: 235436 - DNA, 25 bp, Probe Sequence
gaggctaaggcgaggggatcacgag

SEQ ID NO: 235437 - DNA, 25 bp, Probe Sequence
gggtcaagtcgtgttctgatcacta

SEQ ID NO: 235438 - DNA, 25 bp, Probe Sequence
gaggtccagagcagaacctgaactc

SEQ ID NO: 235439 - DNA, 25 bp, Probe Sequence
gaggttcgacagggactcaaagcct

SEQ ID NO: 235440 - DNA, 25 bp, Probe Sequence
gaggtggccaacaaagtcaaggtcc

SEQ ID NO: 235441 - DNA, 25 bp, Probe Sequence
gaggggggactaagagacaggacgt

SEQ ID NO: 235442 - DNA, 25 bp, Probe Sequence
gagggcggatcacaaggtcaggaga

SEQ ID NO: 235443 - DNA, 25 bp, Probe Sequence
gagggcagtaatcacaggctgcagg

SEQ ID NO: 235444 - DNA, 25 bp, Probe Sequence
gagggagctaagaacttgctaattc

SEQ ID NO: 235445 - DNA, 25 bp, Probe Sequence
gaggtggcttaaccctgtgaattcc

SEQ ID NO: 235446 - DNA, 25 bp, Probe Sequence
gaggtggagttcacctggatcttcc

SEQ ID NO: 235447 - DNA, 25 bp, Probe Sequence
gaggggagaatcccctcctgttcac

SEQ ID NO: 235448 - DNA, 25 bp, Probe Sequence
gaggggagaatcccctcctgttcac

SEQ ID NO: 235449 - DNA, 25 bp, Probe Sequence
gaggggagaatcccctcctgttcac

SEQ ID NO: 235450 - DNA, 25 bp, Probe Sequence
gagtggagaggtttacacctgccaa

SEQ ID NO: 235451 - DNA, 25 bp, Probe Sequence
gagtggagaggtttacacctgccaa

SEQ ID NO: 235452 - DNA, 25 bp, Probe Sequence
gagtggagaggtttacacctgccaa

SEQ ID NO: 235453 - DNA, 25 bp, Probe Sequence
gagtggggagatgggtccctgcact

SEQ ID NO: 235454 - DNA, 25 bp, Probe Sequence
gagtggctggaggggatcaactccc

SEQ ID NO: 235455 - DNA, 25 bp, Probe Sequence
gagtggctggaatgagagcacttcc

SEQ ID NO: 235456 - DNA, 25 bp, Probe Sequence
gaggatctggaatatggttctcccc

SEQ ID NO: 235457 - DNA, 25 bp, Probe Sequence
gaggagcttatatttggaaccgacc

SEQ ID NO: 235458 - DNA, 25 bp, Probe Sequence
gagggctttgaaaacatacactgag

SEQ ID NO: 235459 - DNA, 25 bp, Probe Sequence
gagggcgttcaggatggcatgaact

SEQ ID NO: 235460 - DNA, 25 bp, Probe Sequence
gagggagctctacaggctgaactgg

SEQ ID NO: 235461 - DNA, 25 bp, Probe Sequence
gaggagattctagcaggggacagga

SEQ ID NO: 235462 - DNA, 25 bp, Probe Sequence
gagggtatctatgcagggaaggggg

SEQ ID NO: 235463 - DNA, 25 bp, Probe Sequence
gagggtttactgtgaagtgctgagg

SEQ ID NO: 235464 - DNA, 25 bp, Probe Sequence
gagtgtgttctaacccaattcaagg

SEQ ID NO: 235465 - DNA, 25 bp, Probe Sequence
gaggattgtctaccctgaagtccat

SEQ ID NO: 235466 - DNA, 25 bp, Probe Sequence
gagtgtcatgtttccacaaagggct

SEQ ID NO: 235467 - DNA, 25 bp, Probe Sequence
gagtgtatgtccccatagtgggccc

SEQ ID NO: 235468 - DNA, 25 bp, Probe Sequence
gagtgtatgtccccatagtgggccc

SEQ ID NO: 235469 - DNA, 25 bp, Probe Sequence
gagtgtattttcttattgaggccct

SEQ ID NO: 235470 - DNA, 25 bp, Probe Sequence
gagggatttttcagtgggaagcatt

SEQ ID NO: 235471 - DNA, 25 bp, Probe Sequence
gagggaagtttatgctgagagaaca

SEQ ID NO: 235472 - DNA, 25 bp, Probe Sequence
gagggtagcctgtacagcgaggata

SEQ ID NO: 235473 - DNA, 25 bp, Probe Sequence
gagggtgatttgtcactgggctgtc

SEQ ID NO: 235474 - DNA, 25 bp, Probe Sequence
gagtgggatttaacagatgtcttca

SEQ ID NO: 235475 - DNA, 25 bp, Probe Sequence
gagtggaatgttaataaatttcagt

SEQ ID NO: 235476 - DNA, 25 bp, Probe Sequence
gagggaatgttaatctagtttcttt

SEQ ID NO: 235477 - DNA, 25 bp, Probe Sequence
gagtgtgagtgggaatgtggttttg

SEQ ID NO: 235478 - DNA, 25 bp, Probe Sequence
gagggaggggaaatgtaatactgga

SEQ ID NO: 235479 - DNA, 25 bp, Probe Sequence
gagggtggccgatgatgtaaccctg

SEQ ID NO: 235480 - DNA, 25 bp, Probe Sequence
gagggtgagcccaatggctagaggg

SEQ ID NO: 235481 - DNA, 25 bp, Probe Sequence
gaggtgaagaccatcacggaggctg

SEQ ID NO: 235482 - DNA, 25 bp, Probe Sequence
gagggagatgaggcaaccggtggga

SEQ ID NO: 235483 - DNA, 25 bp, Probe Sequence
gagggagaggagggagagggggagg

SEQ ID NO: 235484 - DNA, 25 bp, Probe Sequence
gagggagaggagggagagggggagg

SEQ ID NO: 235485 - DNA, 25 bp, Probe Sequence
gagggagaggagggagagggggagg

SEQ ID NO: 235486 - DNA, 25 bp, Probe Sequence
gaggtagagaggggactgggggact

SEQ ID NO: 235487 - DNA, 25 bp, Probe Sequence
gaggataaggtgtggtttggcaggt

SEQ ID NO: 235488 - DNA, 25 bp, Probe Sequence
gagggagtgaagttggtttggggtg

SEQ ID NO: 235489 - DNA, 25 bp, Probe Sequence
gagggagtgaagttggtttggggtg

SEQ ID NO: 235490 - DNA, 25 bp, Probe Sequence
gagggagtgaagttggtttggggtg

SEQ ID NO: 235491 - DNA, 25 bp, Probe Sequence
gagggagtgaacttgctgattctgt

SEQ ID NO: 235492 - DNA, 25 bp, Probe Sequence
gagggagagtgtctctgttcttttg

SEQ ID NO: 235493 - DNA, 25 bp, Probe Sequence
gagggattgtggtgttggcttttgc

SEQ ID NO: 235494 - DNA, 25 bp, Probe Sequence
gagggtcgggcaggttgacatattt

SEQ ID NO: 235495 - DNA, 25 bp, Probe Sequence
gagggccattggagcttgcagctca

SEQ ID NO: 235496 - DNA, 25 bp, Probe Sequence
gaggggcttggagggtcacataggt

SEQ ID NO: 235497 - DNA, 25 bp, Probe Sequence
gagtggggatggtcgagtatctcag

SEQ ID NO: 235498 - DNA, 25 bp, Probe Sequence
gatgggggaggctgagttctaataa

SEQ ID NO: 235499 - DNA, 25 bp, Probe Sequence
gaggtcagtacctgagctgtctaaa

SEQ ID NO: 235500 - DNA, 25 bp, Probe Sequence
gaggtcatggagctctgatctgtgc

SEQ ID NO: 235501 - DNA, 25 bp, Probe Sequence
gagtgtgaggtgccactcatgggct

SEQ ID NO: 235502 - DNA, 25 bp, Probe Sequence
gagtggcaggtgcttatgtgcggct

SEQ ID NO: 235503 - DNA, 25 bp, Probe Sequence
gagtgtgcagggattgctggtggtg

SEQ ID NO: 235504 - DNA, 25 bp, Probe Sequence
gagtggcattggaggcttcgtgctg

SEQ ID NO: 235505 - DNA, 25 bp, Probe Sequence
gagggcagtgtagagctttatgctg

SEQ ID NO: 235506 - DNA, 25 bp, Probe Sequence
gagtggtgtctagatttatcagagt

SEQ ID NO: 235507 - DNA, 25 bp, Probe Sequence
gagggcttgccatgaaaatgcaact

SEQ ID NO: 235508 - DNA, 25 bp, Probe Sequence
gagggctgtgcccgtaaggggaagt

SEQ ID NO: 235509 - DNA, 25 bp, Probe Sequence
gggaattccggtcagggtcaagtcg

SEQ ID NO: 235510 - DNA, 25 bp, Probe Sequence
ggcgaattacggagggttctggaag

SEQ ID NO: 235511 - DNA, 25 bp, Probe Sequence
gagggttcagggaatggtttcggat

SEQ ID NO: 235512 - DNA, 25 bp, Probe Sequence
gagggttcagggaatggtttcggat

SEQ ID NO: 235513 - DNA, 25 bp, Probe Sequence
gagtggtccagtgttctgatttggg

SEQ ID NO: 235514 - DNA, 25 bp, Probe Sequence
gagggaccctggatggatgtagggc

SEQ ID NO: 235515 - DNA, 25 bp, Probe Sequence
gaggcatcacccagttgtttggagg

SEQ ID NO: 235516 - DNA, 25 bp, Probe Sequence
gggcatccgcctggataatgcttcc

SEQ ID NO: 235517 - DNA, 25 bp, Probe Sequence
gggagccgcaccttgtcatgtacca

SEQ ID NO: 235518 - DNA, 25 bp, Probe Sequence
gggagcggccaggtgtttacaccaa

SEQ ID NO: 235519 - DNA, 25 bp, Probe Sequence
gaggagggcaccaagttttccatta

SEQ ID NO: 235520 - DNA, 25 bp, Probe Sequence
gaggggtgacacagtgttccctcct

SEQ ID NO: 235521 - DNA, 25 bp, Probe Sequence
gaggggagaagtcatgttgccccta

SEQ ID NO: 235522 - DNA, 25 bp, Probe Sequence
gagggacagaagtgatccgcgggct

SEQ ID NO: 235523 - DNA, 25 bp, Probe Sequence
gagggacaagcatttcatcttggga

SEQ ID NO: 235524 - DNA, 25 bp, Probe Sequence
gaggggagagaaatatctacaggta

SEQ ID NO: 235525 - DNA, 25 bp, Probe Sequence
gaggtatgtgataactgagtaaggt

SEQ ID NO: 235526 - DNA, 25 bp, Probe Sequence
gaggtgctacatagttggtaatgct

SEQ ID NO: 235527 - DNA, 25 bp, Probe Sequence
gagggtacatggatgaggcaggtgg

SEQ ID NO: 235528 - DNA, 25 bp, Probe Sequence
gagggatgacggaaaggatgggggc

SEQ ID NO: 235529 - DNA, 25 bp, Probe Sequence
gaggggacgtaacggaggcaggttg

SEQ ID NO: 235530 - DNA, 25 bp, Probe Sequence
gagggcctcttaactgtaacaatgt

SEQ ID NO: 235531 - DNA, 25 bp, Probe Sequence
gagggcctgaaatatgtgacaaatg

SEQ ID NO: 235532 - DNA, 25 bp, Probe Sequence
gagggcctgaaatatgtgacaaatg

SEQ ID NO: 235533 - DNA, 25 bp, Probe Sequence
gaggtccaagaattcccaaagatga

SEQ ID NO: 235534 - DNA, 25 bp, Probe Sequence
gaggtcaccaaggtcaccaaattca

SEQ ID NO: 235535 - DNA, 25 bp, Probe Sequence
gaggtggccaggattctcaacctaa

SEQ ID NO: 235536 - DNA, 25 bp, Probe Sequence
gaggctggtactcaatctcaactca

SEQ ID NO: 235537 - DNA, 25 bp, Probe Sequence
gaggggtagctgggatcatgctagt

SEQ ID NO: 235538 - DNA, 25 bp, Probe Sequence
gaggggcatttggaacatctgcatt

SEQ ID NO: 235539 - DNA, 25 bp, Probe Sequence
gagggacattttgagttgctaatgt

SEQ ID NO: 235540 - DNA, 25 bp, Probe Sequence
gagggacttttggagctcctattgc

SEQ ID NO: 235541 - DNA, 25 bp, Probe Sequence
gaggtgcacttcgtggaacactacc

SEQ ID NO: 235542 - DNA, 25 bp, Probe Sequence
gaggtgcacttcgtggaacactacc

SEQ ID NO: 235543 - DNA, 25 bp, Probe Sequence
gagggaggtgcaggaaaagcagaca

SEQ ID NO: 235544 - DNA, 25 bp, Probe Sequence
gagggcaagacggagagggcagagc

SEQ ID NO: 235545 - DNA, 25 bp, Probe Sequence
gagggcagcagaagggggtggtgtc

SEQ ID NO: 235546 - DNA, 25 bp, Probe Sequence
gagggaccatatgatgtggtggttc

SEQ ID NO: 235547 - DNA, 25 bp, Probe Sequence
gagtggcactcattgcttgtggacg

SEQ ID NO: 235548 - DNA, 25 bp, Probe Sequence
gagtggcactcattgcttgtggacg

SEQ ID NO: 235549 - DNA, 25 bp, Probe Sequence
gagggcagccatagtgtgccgactc

SEQ ID NO: 235550 - DNA, 25 bp, Probe Sequence
gagggcagcacacatattcagtgcc

SEQ ID NO: 235551 - DNA, 25 bp, Probe Sequence
gaggggcacatgctgaactgtacat

SEQ ID NO: 235552 - DNA, 25 bp, Probe Sequence
gaggtagcacgctgcaagttagtga

SEQ ID NO: 235553 - DNA, 25 bp, Probe Sequence
gatgttaactgagctactagagata

SEQ ID NO: 235554 - DNA, 25 bp, Probe Sequence
gaggtgaactggtctcactggaacc

SEQ ID NO: 235555 - DNA, 25 bp, Probe Sequence
gaggtagactggatcaatgtgggtc

SEQ ID NO: 235556 - DNA, 25 bp, Probe Sequence
gagggaggcattctcattaacagtc

SEQ ID NO: 235557 - DNA, 25 bp, Probe Sequence
gagggcgacttcctcattagggaca

SEQ ID NO: 235558 - DNA, 25 bp, Probe Sequence
gaggtggactcaactttttgccaca

SEQ ID NO: 235559 - DNA, 25 bp, Probe Sequence
gaggtgggcagacatcttttcaaaa

SEQ ID NO: 235560 - DNA, 25 bp, Probe Sequence
gagggggaggagaatctttatcaga

SEQ ID NO: 235561 - DNA, 25 bp, Probe Sequence
gaggggaagggcatcttcgacagca

SEQ ID NO: 235562 - DNA, 25 bp, Probe Sequence
gaggggaagtgtggacttaactcat

SEQ ID NO: 235563 - DNA, 25 bp, Probe Sequence
gagggaaacttggatgctaaaatta

SEQ ID NO: 235564 - DNA, 25 bp, Probe Sequence
gagggaagacacagatgatgaagct

SEQ ID NO: 235565 - DNA, 25 bp, Probe Sequence
gagggacagcccactgagaagtcaa

SEQ ID NO: 235566 - DNA, 25 bp, Probe Sequence
gaggtatcgcacaaccaaggacatc

SEQ ID NO: 235567 - DNA, 25 bp, Probe Sequence
gagggatcctgcaagcaaaagatca

SEQ ID NO: 235568 - DNA, 25 bp, Probe Sequence
gagtggaagctgaagcctgcacagt

SEQ ID NO: 235569 - DNA, 25 bp, Probe Sequence
gagggataaaagactgcacagtagg

SEQ ID NO: 235570 - DNA, 25 bp, Probe Sequence
gagggaggagcacgttgctgagtaa

SEQ ID NO: 235571 - DNA, 25 bp, Probe Sequence
gagggagctaagcttgggctgggct

SEQ ID NO: 235572 - DNA, 25 bp, Probe Sequence
gaggggctgaagagagagttgcagg

SEQ ID NO: 235573 - DNA, 25 bp, Probe Sequence
gagggcccgagcaggaattcggtgt

SEQ ID NO: 235574 - DNA, 25 bp, Probe Sequence
gagggccctgggaagaatttgccat

SEQ ID NO: 235575 - DNA, 25 bp, Probe Sequence
gagggtaatctggaagagtttcctg

SEQ ID NO: 235576 - DNA, 25 bp, Probe Sequence
gagtggtacttagagttgtttctgg

SEQ ID NO: 235577 - DNA, 25 bp, Probe Sequence
gagtggcccctatgagtttatattt

SEQ ID NO: 235578 - DNA, 25 bp, Probe Sequence
gagggctggtctacaagttctagag

SEQ ID NO: 235579 - DNA, 25 bp, Probe Sequence
gagggagggctttggcagccaaagt

SEQ ID NO: 235580 - DNA, 25 bp, Probe Sequence
gaggggtagtacaacagctccaagt

SEQ ID NO: 235581 - DNA, 25 bp, Probe Sequence
gaggagcggaccgaccgctccaagt

SEQ ID NO: 235582 - DNA, 25 bp, Probe Sequence
gagggcagagactgatcggctgcgc

SEQ ID NO: 235583 - DNA, 25 bp, Probe Sequence
gagggatgagatgcgagccttggca

SEQ ID NO: 235584 - DNA, 25 bp, Probe Sequence
gagggctgcaatggtgacttcatgg

SEQ ID NO: 235585 - DNA, 25 bp, Probe Sequence
gagtggctgaagcctacttcactcc

SEQ ID NO: 235586 - DNA, 25 bp, Probe Sequence
gagtggttcatccatactctcattc

SEQ ID NO: 235587 - DNA, 25 bp, Probe Sequence
gagtggattccgtatgttcttcata

SEQ ID NO: 235588 - DNA, 25 bp, Probe Sequence
gagggctaaagattgttcttctggg

SEQ ID NO: 235589 - DNA, 25 bp, Probe Sequence
gaggtgtaaagttgttcgccgcgtg

SEQ ID NO: 235590 - DNA, 25 bp, Probe Sequence
gaggcttaaactttactgttaatga

SEQ ID NO: 235591 - DNA, 25 bp, Probe Sequence
gaggtataaacctataattcagtaa

SEQ ID NO: 235592 - DNA, 25 bp, Probe Sequence
gagggtcagaattcaaaatccagaa

SEQ ID NO: 235593 - DNA, 25 bp, Probe Sequence
gagggtctgacttgctcaaaccaga

SEQ ID NO: 235594 - DNA, 25 bp, Probe Sequence
gagggttactggcagatcaccgtgg

SEQ ID NO: 235595 - DNA, 25 bp, Probe Sequence
gaggggcttctgggaagaccctggt

SEQ ID NO: 235596 - DNA, 25 bp, Probe Sequence
gaggggctaccaggaaagcgcctcc

SEQ ID NO: 235597 - DNA, 25 bp, Probe Sequence
gaggggcccatggattaacgccctc

SEQ ID NO: 235598 - DNA, 25 bp, Probe Sequence
gaggtgacaccatcattaaggattc

SEQ ID NO: 235599 - DNA, 25 bp, Probe Sequence
gagggaacatcatgctgagccagaa

SEQ ID NO: 235600 - DNA, 25 bp, Probe Sequence
gaggattcaatcttgtagccagtat

SEQ ID NO: 235601 - DNA, 25 bp, Probe Sequence
gaggttcccttgtgagcttgaatca

SEQ ID NO: 235602 - DNA, 25 bp, Probe Sequence
gaggttccttgtacgattgtagata

SEQ ID NO: 235603 - DNA, 25 bp, Probe Sequence
gaggctgtccttttttttgaggaat

SEQ ID NO: 235604 - DNA, 25 bp, Probe Sequence
gggcattccttgagctgtacgggaa

SEQ ID NO: 235605 - DNA, 25 bp, Probe Sequence
gaggtaccttgctgtgtaggaggat

SEQ ID NO: 235606 - DNA, 25 bp, Probe Sequence
gaggttcactctttgtgctacaaag

SEQ ID NO: 235607 - DNA, 25 bp, Probe Sequence
gaggtgtccgcatagtgaaaaagca

SEQ ID NO: 235608 - DNA, 25 bp, Probe Sequence
gaggtctgggctaggtagaaaaagg

SEQ ID NO: 235609 - DNA, 25 bp, Probe Sequence
gagggctgtgtcttactagaaacaa

SEQ ID NO: 235610 - DNA, 25 bp, Probe Sequence
gagggctgtgtcttactagaaacaa

SEQ ID NO: 235611 - DNA, 25 bp, Probe Sequence
gaggttgtgtttacaatgtagaaac

SEQ ID NO: 235612 - DNA, 25 bp, Probe Sequence
gaggtctcagacagaaattaggaac

SEQ ID NO: 235613 - DNA, 25 bp, Probe Sequence
gaggtctagcacttcctagtaggat

SEQ ID NO: 235614 - DNA, 25 bp, Probe Sequence
gatgccgaggacttcctattgggct

SEQ ID NO: 235615 - DNA, 25 bp, Probe Sequence
gagggagggctggcccataggtgct

SEQ ID NO: 235616 - DNA, 25 bp, Probe Sequence
gagggagggctggcccataggtgct

SEQ ID NO: 235617 - DNA, 25 bp, Probe Sequence
gaggatatgttcacacctagcgtca

SEQ ID NO: 235618 - DNA, 25 bp, Probe Sequence
gaggttcttcatattccagagtcac

SEQ ID NO: 235619 - DNA, 25 bp, Probe Sequence
gaggtgtctgcctatgcttaaagcc

SEQ ID NO: 235620 - DNA, 25 bp, Probe Sequence
gagggatagcattaggagatatacc

SEQ ID NO: 235621 - DNA, 25 bp, Probe Sequence
gagggtggcctaagagttgagctct

SEQ ID NO: 235622 - DNA, 25 bp, Probe Sequence
gagggctgggctaggaatggccttg

SEQ ID NO: 235623 - DNA, 25 bp, Probe Sequence
gagggcttggtcagcagcatggagt

SEQ ID NO: 235624 - DNA, 25 bp, Probe Sequence
gagggcattgtgacacaactctgtg

SEQ ID NO: 235625 - DNA, 25 bp, Probe Sequence
gagggatggtatgccgcatctggag

SEQ ID NO: 235626 - DNA, 25 bp, Probe Sequence
gagggtagattagctgctccagaat

SEQ ID NO: 235627 - DNA, 25 bp, Probe Sequence
gagggtatatataactccaccaaac

SEQ ID NO: 235628 - DNA, 25 bp, Probe Sequence
gagggggctattaacacccagtaca

SEQ ID NO: 235629 - DNA, 25 bp, Probe Sequence
gagggagtttcttaacccgtgagct

SEQ ID NO: 235630 - DNA, 25 bp, Probe Sequence
gaggtggttctttctatcctagtac

SEQ ID NO: 235631 - DNA, 25 bp, Probe Sequence
gaggatttttttgtttgagtgttga

SEQ ID NO: 235632 - DNA, 25 bp, Probe Sequence
gaggtgtttcataagttttttggtg

SEQ ID NO: 235633 - DNA, 25 bp, Probe Sequence
gaggttcaatttgtgaagttctggg

SEQ ID NO: 235634 - DNA, 25 bp, Probe Sequence
gaggtctgttttgtgagggtttggg

SEQ ID NO: 235635 - DNA, 25 bp, Probe Sequence
gaggttgagtttgctgccaggattc

SEQ ID NO: 235636 - DNA, 25 bp, Probe Sequence
gaggttgagtttgctgccaggattc

SEQ ID NO: 235637 - DNA, 25 bp, Probe Sequence
gaggtttgttctttccagtgaatgg

SEQ ID NO: 235638 - DNA, 25 bp, Probe Sequence
gatggacttgttctgggaaaaggta

SEQ ID NO: 235639 - DNA, 25 bp, Probe Sequence
gatggggtttttctgactaaaatga

SEQ ID NO: 235640 - DNA, 25 bp, Probe Sequence
gagggggtatttctgagtcaatctg

SEQ ID NO: 235641 - DNA, 25 bp, Probe Sequence
gagggggtcaccctagagtttgctc

SEQ ID NO: 235642 - DNA, 25 bp, Probe Sequence
gagggctgaacatgtccgagtttgt

SEQ ID NO: 235643 - DNA, 25 bp, Probe Sequence
gagggagaactctatctgtggttta

SEQ ID NO: 235644 - DNA, 25 bp, Probe Sequence
gatgagggttccttaatggttgtga

SEQ ID NO: 235645 - DNA, 25 bp, Probe Sequence
gatagaccttaaataagtgtcctaa

SEQ ID NO: 235646 - DNA, 25 bp, Probe Sequence
gagggcctttggaaacttcttggag

SEQ ID NO: 235647 - DNA, 25 bp, Probe Sequence
gagggttattgggctgactttattg

SEQ ID NO: 235648 - DNA, 25 bp, Probe Sequence
gaggaggttggtgtggattctgttg

SEQ ID NO: 235649 - DNA, 25 bp, Probe Sequence
gagggcagtatgagctttttgctgt

SEQ ID NO: 235650 - DNA, 25 bp, Probe Sequence
gaggtggatatgtgcattttagaat

SEQ ID NO: 235651 - DNA, 25 bp, Probe Sequence
gagggactatggccagttgggactg

SEQ ID NO: 235652 - DNA, 25 bp, Probe Sequence
gagggaaaggggaggtgatcagttt

SEQ ID NO: 235653 - DNA, 25 bp, Probe Sequence
gaggagaaaggaggactgggatact

SEQ ID NO: 235654 - DNA, 25 bp, Probe Sequence
gagggtacaagggtatggtaatgct

SEQ ID NO: 235655 - DNA, 25 bp, Probe Sequence
gaggttaaaatttatagtcattcta

SEQ ID NO: 235656 - DNA, 25 bp, Probe Sequence
gaggttaaaattttgtctgcacttg

SEQ ID NO: 235657 - DNA, 25 bp, Probe Sequence
gagggacaaaacttagcatctaatt

SEQ ID NO: 235658 - DNA, 25 bp, Probe Sequence
gagggaagcaaagttactgtctatt

SEQ ID NO: 235659 - DNA, 25 bp, Probe Sequence
gatgggacccaagaactttattcat

SEQ ID NO: 235660 - DNA, 25 bp, Probe Sequence
gaggggcaccaagaatcctacctcc

SEQ ID NO: 235661 - DNA, 25 bp, Probe Sequence
gagggacagcgaaagactcctagcc

SEQ ID NO: 235662 - DNA, 25 bp, Probe Sequence
gagggacagcgatgtggccctctgt

SEQ ID NO: 235663 - DNA, 25 bp, Probe Sequence
gagggcaacagcaggttcacttaca

SEQ ID NO: 235664 - DNA, 25 bp, Probe Sequence
gaggtaatgatcacgttccatccaa

SEQ ID NO: 235665 - DNA, 25 bp, Probe Sequence
gaggtaggggaggtatccattcata

SEQ ID NO: 235666 - DNA, 25 bp, Probe Sequence
gagggtgggggtgatactactagat

SEQ ID NO: 235667 - DNA, 25 bp, Probe Sequence
gagggtttgggtgtgacctcacagt

SEQ ID NO: 235668 - DNA, 25 bp, Probe Sequence
gtgcggttccgggaagaagccacac

SEQ ID NO: 235669 - DNA, 25 bp, Probe Sequence
gtgcggttccgggaagaagccacac

SEQ ID NO: 235670 - DNA, 25 bp, Probe Sequence
gatgggttcccagagacaagaagcc

SEQ ID NO: 235671 - DNA, 25 bp, Probe Sequence
gagggtacttcagctgacagagaga

SEQ ID NO: 235672 - DNA, 25 bp, Probe Sequence
gagggtactttcttatgctggatca

SEQ ID NO: 235673 - DNA, 25 bp, Probe Sequence
gagggggttctcttgatgtaatgaa

SEQ ID NO: 235674 - DNA, 25 bp, Probe Sequence
gagggtattatcttctggtaatata

SEQ ID NO: 235675 - DNA, 25 bp, Probe Sequence
gagggatttatagcatcttgaatag

SEQ ID NO: 235676 - DNA, 25 bp, Probe Sequence
gaggagttacattacttcgttcaga

SEQ ID NO: 235677 - DNA, 25 bp, Probe Sequence
gaggattaaatttcatttatctgga

SEQ ID NO: 235678 - DNA, 25 bp, Probe Sequence
gaggtagcagtaaacttttcagtat

SEQ ID NO: 235679 - DNA, 25 bp, Probe Sequence
gagggagagttactttctttgtatc

SEQ ID NO: 235680 - DNA, 25 bp, Probe Sequence
gaggtgctgagttttgtatcttttt

SEQ ID NO: 235681 - DNA, 25 bp, Probe Sequence
gagggtgcatgctgtggattcttgc

SEQ ID NO: 235682 - DNA, 25 bp, Probe Sequence
gagggcagatgcttgatagattatc

SEQ ID NO: 235683 - DNA, 25 bp, Probe Sequence
gagggcagatgcttgatagattatc

SEQ ID NO: 235684 - DNA, 25 bp, Probe Sequence
gaggatcagatcatgcatgcgccat

SEQ ID NO: 235685 - DNA, 25 bp, Probe Sequence
gaggatcagatcatgcatgcgccat

SEQ ID NO: 235686 - DNA, 25 bp, Probe Sequence
gaggtatgacaaatgcagcttagcc

SEQ ID NO: 235687 - DNA, 25 bp, Probe Sequence
gaggatatgacgttgacttccccag

SEQ ID NO: 235688 - DNA, 25 bp, Probe Sequence
gaggtacagcagccttttaccatca

SEQ ID NO: 235689 - DNA, 25 bp, Probe Sequence
gaggtacagcagccttttaccatca

SEQ ID NO: 235690 - DNA, 25 bp, Probe Sequence
gagggaaagtcttgcactattgcat

SEQ ID NO: 235691 - DNA, 25 bp, Probe Sequence
gagggcaagtgacttcctcaggata

SEQ ID NO: 235692 - DNA, 25 bp, Probe Sequence
gaggagcgcaaactcatcctttata

SEQ ID NO: 235693 - DNA, 25 bp, Probe Sequence
gagggtcaatatcctctttgatttt

SEQ ID NO: 235694 - DNA, 25 bp, Probe Sequence
gagggtcaatatcctctttgatttt

SEQ ID NO: 235695 - DNA, 25 bp, Probe Sequence
gagggtagtcagcatctccaatttt

SEQ ID NO: 235696 - DNA, 25 bp, Probe Sequence
gagggtagaagccatcattgcatct

SEQ ID NO: 235697 - DNA, 25 bp, Probe Sequence
gaggagctcaaaactataatcttta

SEQ ID NO: 235698 - DNA, 25 bp, Probe Sequence
gaggagccagataacttcagcagca

SEQ ID NO: 235699 - DNA, 25 bp, Probe Sequence
gaggtgctagctgtgttagagcagg

SEQ ID NO: 235700 - DNA, 25 bp, Probe Sequence
gaggtgctactggtgcggaatctga

SEQ ID NO: 235701 - DNA, 25 bp, Probe Sequence
gaggtgcttctcatgcaaaaggaat

SEQ ID NO: 235702 - DNA, 25 bp, Probe Sequence
gaggtttccttcaacagatatatat

SEQ ID NO: 235703 - DNA, 25 bp, Probe Sequence
gagggttctttttcacttgacatgc

SEQ ID NO: 235704 - DNA, 25 bp, Probe Sequence
gaggagtttttttgccgctgattgt

SEQ ID NO: 235705 - DNA, 25 bp, Probe Sequence
gagggttgttcaaatgcccactttc

SEQ ID NO: 235706 - DNA, 25 bp, Probe Sequence
gagggatgaacgaaagccccctctt

SEQ ID NO: 235707 - DNA, 25 bp, Probe Sequence
gaggacaaccagtaagctacccttt

SEQ ID NO: 235708 - DNA, 25 bp, Probe Sequence
gagggcaaaacacaaatccctttgc

SEQ ID NO: 235709 - DNA, 25 bp, Probe Sequence
gaggtcaagttcaacaaaccctttg

SEQ ID NO: 235710 - DNA, 25 bp, Probe Sequence
gaggtcagtgataatgaaaactctt

SEQ ID NO: 235711 - DNA, 25 bp, Probe Sequence
gagggcagctacaacaaagtgttcc

SEQ ID NO: 235712 - DNA, 25 bp, Probe Sequence
gagggcacgactgaatatggcttgt

SEQ ID NO: 235713 - DNA, 25 bp, Probe Sequence
gagggactcagatttatatggcttt

SEQ ID NO: 235714 - DNA, 25 bp, Probe Sequence
gagggactcggagatcatgcagcag

SEQ ID NO: 235715 - DNA, 25 bp, Probe Sequence
gaggtgaccggagaactgagttgca

SEQ ID NO: 235716 - DNA, 25 bp, Probe Sequence
gaggtcccagtatgaactgccgtga

SEQ ID NO: 235717 - DNA, 25 bp, Probe Sequence
gaggtctggtaacagaatgccagga

SEQ ID NO: 235718 - DNA, 25 bp, Probe Sequence
gaggtgcgagttacaccaaccagga

SEQ ID NO: 235719 - DNA, 25 bp, Probe Sequence
gaggtggaggttgcattgaccagag

SEQ ID NO: 235720 - DNA, 25 bp, Probe Sequence
gaggtggaggtcatggtgagccgag

SEQ ID NO: 235721 - DNA, 25 bp, Probe Sequence
gaggtgtgagggaggagacgtgagg

SEQ ID NO: 235722 - DNA, 25 bp, Probe Sequence
gaggtgcaccggaggtgaagtcggt

SEQ ID NO: 235723 - DNA, 25 bp, Probe Sequence
gagggactggggcctcgaagggatt

SEQ ID NO: 235724 - DNA, 25 bp, Probe Sequence
gaggcgtttgggcccgaagatgggt

SEQ ID NO: 235725 - DNA, 25 bp, Probe Sequence
gggacttgggggacagtaatcaagt

SEQ ID NO: 235726 - DNA, 25 bp, Probe Sequence
gaggactttgagatggcagtagcca

SEQ ID NO: 235727 - DNA, 25 bp, Probe Sequence
gaggtcttcgacaataaattccaca

SEQ ID NO: 235728 - DNA, 25 bp, Probe Sequence
gaggtggctggtgttaggtcacaca

SEQ ID NO: 235729 - DNA, 25 bp, Probe Sequence
gaggtcgtggtcttgtggaggagac

SEQ ID NO: 235730 - DNA, 25 bp, Probe Sequence
gaggttgtggtgtctgggaaactcc

SEQ ID NO: 235731 - DNA, 25 bp, Probe Sequence
gagggatgggttttgggacagctcc

SEQ ID NO: 235732 - DNA, 25 bp, Probe Sequence
gagggagccggtttgggagagacca

SEQ ID NO: 235733 - DNA, 25 bp, Probe Sequence
gagggagaaggtttgtcatggacag

SEQ ID NO: 235734 - DNA, 25 bp, Probe Sequence
gagggggagtgttctctcaagaaga

SEQ ID NO: 235735 - DNA, 25 bp, Probe Sequence
gaggtgatgagccatttttcaaatg

SEQ ID NO: 235736 - DNA, 25 bp, Probe Sequence
gagggatgcactatttcacaaggtc

SEQ ID NO: 235737 - DNA, 25 bp, Probe Sequence
gagggatgcactatttcacaaggtc

SEQ ID NO: 235738 - DNA, 25 bp, Probe Sequence
gagggggctttggcaactatggtgc

SEQ ID NO: 235739 - DNA, 25 bp, Probe Sequence
gaggtgagggaagccattatggtaa

SEQ ID NO: 235740 - DNA, 25 bp, Probe Sequence
gagggagggaagagagtgacggaga

SEQ ID NO: 235741 - DNA, 25 bp, Probe Sequence
gagggtgaggaagaaggagaggaat

SEQ ID NO: 235742 - DNA, 25 bp, Probe Sequence
gaggggaaaactcaggctggggtag

SEQ ID NO: 235743 - DNA, 25 bp, Probe Sequence
gaggtggaaaccccaggggctggct

SEQ ID NO: 235744 - DNA, 25 bp, Probe Sequence
gagggagacaacggcagagggagtg

SEQ ID NO: 235745 - DNA, 25 bp, Probe Sequence
gaggggaacgtgtcagagggagctg

SEQ ID NO: 235746 - DNA, 25 bp, Probe Sequence
gaggggtattcttcatgcaggagac

SEQ ID NO: 235747 - DNA, 25 bp, Probe Sequence
gagggactgtgttgactgacgagcc

SEQ ID NO: 235748 - DNA, 25 bp, Probe Sequence
gagggagcatagaaggcaggtgagc

SEQ ID NO: 235749 - DNA, 25 bp, Probe Sequence
gagggagcagacggtgcactacatc

SEQ ID NO: 235750 - DNA, 25 bp, Probe Sequence
gagggacagcacaatggagccaaga

SEQ ID NO: 235751 - DNA, 25 bp, Probe Sequence
gagggactgaatagagggagaagcc

SEQ ID NO: 235752 - DNA, 25 bp, Probe Sequence
gagggagctggtacagtagtgttgg

SEQ ID NO: 235753 - DNA, 25 bp, Probe Sequence
gaggtggctggttatgtcctcattg

SEQ ID NO: 235754 - DNA, 25 bp, Probe Sequence
gagggaggagtgtcatttctatgtg

SEQ ID NO: 235755 - DNA, 25 bp, Probe Sequence
gagggagtgagttcacatttgagac

SEQ ID NO: 235756 - DNA, 25 bp, Probe Sequence
gaggagcttctgttgaacggcaaac

SEQ ID NO: 235757 - DNA, 25 bp, Probe Sequence
gaggatcttgttcaatcggaaaccc

SEQ ID NO: 235758 - DNA, 25 bp, Probe Sequence
gaggtcctgtgtccacagctggaca

SEQ ID NO: 235759 - DNA, 25 bp, Probe Sequence
gaggcccaagtaccgtggaaggtgg

SEQ ID NO: 235760 - DNA, 25 bp, Probe Sequence
gaggcccgcgacttagtagaacgct

SEQ ID NO: 235761 - DNA, 25 bp, Probe Sequence
gaggtccggcagttccggagactct

SEQ ID NO: 235762 - DNA, 25 bp, Probe Sequence
gaggtcctgtggtagcttgagggtc

SEQ ID NO: 235763 - DNA, 25 bp, Probe Sequence
gaggtagagggttgcctgagtttaa

SEQ ID NO: 235764 - DNA, 25 bp, Probe Sequence
gaggtcagtaggttgcgtctttgta

SEQ ID NO: 235765 - DNA, 25 bp, Probe Sequence
gagggagtaggaaacacttgttatt

SEQ ID NO: 235766 - DNA, 25 bp, Probe Sequence
gaggagaaagaatacatcggttgtt

SEQ ID NO: 235767 - DNA, 25 bp, Probe Sequence
gaggaaaaaacaactccatgtattt

SEQ ID NO: 235768 - DNA, 25 bp, Probe Sequence
gaggaacagatggctacgtccgtgt

SEQ ID NO: 235769 - DNA, 25 bp, Probe Sequence
gaggaatggacctcgttttgtccct

SEQ ID NO: 235770 - DNA, 25 bp, Probe Sequence
gaggaaaagcacctggtttcggccg

SEQ ID NO: 235771 - DNA, 25 bp, Probe Sequence
gaggaaacaaagcgttctgcgcgtc

SEQ ID NO: 235772 - DNA, 25 bp, Probe Sequence
gaggttataaagcaattccgtcatc

SEQ ID NO: 235773 - DNA, 25 bp, Probe Sequence
gaggctaccaaagaattccagatta

SEQ ID NO: 235774 - DNA, 25 bp, Probe Sequence
gagggatcaaaagtaactccatgtt

SEQ ID NO: 235775 - DNA, 25 bp, Probe Sequence
gagggtgaagagtattaacctgtgt

SEQ ID NO: 235776 - DNA, 25 bp, Probe Sequence
gagggtaaggaagcaactcagcgct

SEQ ID NO: 235777 - DNA, 25 bp, Probe Sequence
gaggaaaaggtataggcttgccttg

SEQ ID NO: 235778 - DNA, 25 bp, Probe Sequence
gaggtggagaggtaccggcttctcc

SEQ ID NO: 235779 - DNA, 25 bp, Probe Sequence
gagggagggagccaaggtcactcca

SEQ ID NO: 235780 - DNA, 25 bp, Probe Sequence
gagggtgggagcctaaggaagcgtg

SEQ ID NO: 235781 - DNA, 25 bp, Probe Sequence
gaggggaggagtccagggagaggcg

SEQ ID NO: 235782 - DNA, 25 bp, Probe Sequence
gagggagaggactgattcagggccc

SEQ ID NO: 235783 - DNA, 25 bp, Probe Sequence
gagggatgaaaggctcttcaggccc

SEQ ID NO: 235784 - DNA, 25 bp, Probe Sequence
gaggtgatgaactcctttgagctgc

SEQ ID NO: 235785 - DNA, 25 bp, Probe Sequence
gaggagctagaccacgaactgggcc

SEQ ID NO: 235786 - DNA, 25 bp, Probe Sequence
gaggtctatgatagagccgagctcg

SEQ ID NO: 235787 - DNA, 25 bp, Probe Sequence
gaggcactcatgcaggagctgagcc

SEQ ID NO: 235788 - DNA, 25 bp, Probe Sequence
gaggtgccagcttggagatgacccc

SEQ ID NO: 235789 - DNA, 25 bp, Probe Sequence
gaggatcatcacggacaagcacttc

SEQ ID NO: 235790 - DNA, 25 bp, Probe Sequence
gaggtctatataagcagagccttcg

SEQ ID NO: 235791 - DNA, 25 bp, Probe Sequence
gaggtctatataatgcagagctcgt

SEQ ID NO: 235792 - DNA, 25 bp, Probe Sequence
gaggtctatataagcagagctcgtt

SEQ ID NO: 235793 - DNA, 25 bp, Probe Sequence
gaggacattcaaaagcccatggtga

SEQ ID NO: 235794 - DNA, 25 bp, Probe Sequence
gaggacattgccaagaggacgtgtg

SEQ ID NO: 235795 - DNA, 25 bp, Probe Sequence
gaggaacccaagtagctttgtggct

SEQ ID NO: 235796 - DNA, 25 bp, Probe Sequence
gaggaactcctatagatttctggca

SEQ ID NO: 235797 - DNA, 25 bp, Probe Sequence
gaggtgacttatatgaggttccaga

SEQ ID NO: 235798 - DNA, 25 bp, Probe Sequence
gaggtggtgtattcgaaggctgcca

SEQ ID NO: 235799 - DNA, 25 bp, Probe Sequence
gaggtggtgtattcgaaggctgcca

SEQ ID NO: 235800 - DNA, 25 bp, Probe Sequence
gaggggtgtgattggagtgtgtccg

SEQ ID NO: 235801 - DNA, 25 bp, Probe Sequence
gagggaggttggatgtggtggcttg

SEQ ID NO: 235802 - DNA, 25 bp, Probe Sequence
gagggagaaatgaagtgtgggtggg

SEQ ID NO: 235803 - DNA, 25 bp, Probe Sequence
gagggaggcaagaggctggcgatca

SEQ ID NO: 235804 - DNA, 25 bp, Probe Sequence
gagggagggaggctgcagaggtcac

SEQ ID NO: 235805 - DNA, 25 bp, Probe Sequence
gagggagagtggggtcagaagattc

SEQ ID NO: 235806 - DNA, 25 bp, Probe Sequence
gagggaggtggatgaacagatgttc

SEQ ID NO: 235807 - DNA, 25 bp, Probe Sequence
gaggggtgatggatcaaaattttga

SEQ ID NO: 235808 - DNA, 25 bp, Probe Sequence
gaggggttggtctaccaatctggga

SEQ ID NO: 235809 - DNA, 25 bp, Probe Sequence
gaggtgtttgagatggccactcggg

SEQ ID NO: 235810 - DNA, 25 bp, Probe Sequence
gaggtggtaggcaggacctctgggc

SEQ ID NO: 235811 - DNA, 25 bp, Probe Sequence
gagggagtgaaggtccccttggagc

SEQ ID NO: 235812 - DNA, 25 bp, Probe Sequence
gaggtttacacctgccaagtggagc

SEQ ID NO: 235813 - DNA, 25 bp, Probe Sequence
gatgactttcactgtaaaagggagc

SEQ ID NO: 235814 - DNA, 25 bp, Probe Sequence
gaggtcttcacaggtcatatgggga

SEQ ID NO: 235815 - DNA, 25 bp, Probe Sequence
gaggacattaaggatatgaccaaag

SEQ ID NO: 235816 - DNA, 25 bp, Probe Sequence
gaggtcttagacgtgatggaataat

SEQ ID NO: 235817 - DNA, 25 bp, Probe Sequence
gaggtgcttcagtagtgcaggccat

SEQ ID NO: 235818 - DNA, 25 bp, Probe Sequence
gaggtgtacaacttcaatgccatta

SEQ ID NO: 235819 - DNA, 25 bp, Probe Sequence
gagggtgacaagttcaagctcaaca

SEQ ID NO: 235820 - DNA, 25 bp, Probe Sequence
gagggtcaaaggagagtcaacatat

SEQ ID NO: 235821 - DNA, 25 bp, Probe Sequence
gagggtcacatactgatgtcgtcag

SEQ ID NO: 235822 - DNA, 25 bp, Probe Sequence
gaggtgatagcattgctttcgtgta

SEQ ID NO: 235823 - DNA, 25 bp, Probe Sequence
gaggggagcatccattattggtaca

SEQ ID NO: 235824 - DNA, 25 bp, Probe Sequence
gaggggacactttaggatgctacaa

SEQ ID NO: 235825 - DNA, 25 bp, Probe Sequence
gagggaggcagtaatatgaagtgac

SEQ ID NO: 235826 - DNA, 25 bp, Probe Sequence
gaggtagggaatgtgtggtgatcga

SEQ ID NO: 235827 - DNA, 25 bp, Probe Sequence
gaggtagggaatgtgtggtgatcga

SEQ ID NO: 235828 - DNA, 25 bp, Probe Sequence
gaggtagggatctggctgagaggga

SEQ ID NO: 235829 - DNA, 25 bp, Probe Sequence
gaggtagggatggggctgtggggat

SEQ ID NO: 235830 - DNA, 25 bp, Probe Sequence
gagggaggttggggattgtgggaca

SEQ ID NO: 235831 - DNA, 25 bp, Probe Sequence
gagggaggggtgagagctgttggag

SEQ ID NO: 235832 - DNA, 25 bp, Probe Sequence
gaggtgggagggagtggcttagagg

SEQ ID NO: 235833 - DNA, 25 bp, Probe Sequence
gagggggaggcgagtgtgtgaataa

SEQ ID NO: 235834 - DNA, 25 bp, Probe Sequence
gagggggcagatggtggttgcatgg

SEQ ID NO: 235835 - DNA, 25 bp, Probe Sequence
gaggtggtcatgtgaggggcgcatt

SEQ ID NO: 235836 - DNA, 25 bp, Probe Sequence
gaggtagtgctgatagtggcccacc

SEQ ID NO: 235837 - DNA, 25 bp, Probe Sequence
gaggtgctggtggtatggctgaccc

SEQ ID NO: 235838 - DNA, 25 bp, Probe Sequence
gaggggagctgagtctccgaagcct

SEQ ID NO: 235839 - DNA, 25 bp, Probe Sequence
gagggtgaagacggccagaacttgg

SEQ ID NO: 235840 - DNA, 25 bp, Probe Sequence
gagggaggagacgtgaggcaactgt

SEQ ID NO: 235841 - DNA, 25 bp, Probe Sequence
gaggaggtggggagtatcactgtgc

SEQ ID NO: 235842 - DNA, 25 bp, Probe Sequence
gaggggtggggaaagacagcctgta

SEQ ID NO: 235843 - DNA, 25 bp, Probe Sequence
gaggggtgagcggagggagacctgt

SEQ ID NO: 235844 - DNA, 25 bp, Probe Sequence
gaggagcttcaggggaagtgcccag

SEQ ID NO: 235845 - DNA, 25 bp, Probe Sequence
gaggacttgaagcagagttcaccag

SEQ ID NO: 235846 - DNA, 25 bp, Probe Sequence
gagggtggcaaggaacttcctggct

SEQ ID NO: 235847 - DNA, 25 bp, Probe Sequence
gatgggtccaaggaacctattgtta

SEQ ID NO: 235848 - DNA, 25 bp, Probe Sequence
gaggggcatcaaggaccaatcactg

SEQ ID NO: 235849 - DNA, 25 bp, Probe Sequence
gaggggacagcagattaatacttaa

SEQ ID NO: 235850 - DNA, 25 bp, Probe Sequence
gaggggagcatgaaaagaatggttc

SEQ ID NO: 235851 - DNA, 25 bp, Probe Sequence
gagggggtgcaaacatgactgggac

SEQ ID NO: 235852 - DNA, 25 bp, Probe Sequence
gagggggatcgatatgactacaaca

SEQ ID NO: 235853 - DNA, 25 bp, Probe Sequence
gaggttggacagtggtttcattcat

SEQ ID NO: 235854 - DNA, 25 bp, Probe Sequence
gagggtggattattggattgtcatt

SEQ ID NO: 235855 - DNA, 25 bp, Probe Sequence
gagggtggattattggattgtcatt

SEQ ID NO: 235856 - DNA, 25 bp, Probe Sequence
gaggggaacatattacttctttgac

SEQ ID NO: 235857 - DNA, 25 bp, Probe Sequence
gaggggatatggttgaccttttact

SEQ ID NO: 235858 - DNA, 25 bp, Probe Sequence
gaggaggtattgtttctgttttcat

SEQ ID NO: 235859 - DNA, 25 bp, Probe Sequence
gagggtggatttcatcgtgtctatc

SEQ ID NO: 235860 - DNA, 25 bp, Probe Sequence
gagggtaatttggtagaatctgtca

SEQ ID NO: 235861 - DNA, 25 bp, Probe Sequence
gaggtctaaccgggaagatgctgcc

SEQ ID NO: 235862 - DNA, 25 bp, Probe Sequence
gagggtaagcgacctgcaagactca

SEQ ID NO: 235863 - DNA, 25 bp, Probe Sequence
gaggtgctgaagcacgccaggcact

SEQ ID NO: 235864 - DNA, 25 bp, Probe Sequence
gaggtctaggtgtctgaagtgcctt

SEQ ID NO: 235865 - DNA, 25 bp, Probe Sequence
gaggatctacgactagataagccat

SEQ ID NO: 235866 - DNA, 25 bp, Probe Sequence
gaggattgtctacaaaaccataact

SEQ ID NO: 235867 - DNA, 25 bp, Probe Sequence
gaggagcgaccacaagaaactacaa

SEQ ID NO: 235868 - DNA, 25 bp, Probe Sequence
gaggagaacggcaaagattactact

SEQ ID NO: 235869 - DNA, 25 bp, Probe Sequence
gatggagaccggtggattcagtgca

SEQ ID NO: 235870 - DNA, 25 bp, Probe Sequence
gagggggctcgaatggttcgtgaac

SEQ ID NO: 235871 - DNA, 25 bp, Probe Sequence
gagggggctagaaggactctgagaa

SEQ ID NO: 235872 - DNA, 25 bp, Probe Sequence
gaggggtgctgaaaccagactggga

SEQ ID NO: 235873 - DNA, 25 bp, Probe Sequence
gagggggattagctagactaggaga

SEQ ID NO: 235874 - DNA, 25 bp, Probe Sequence
gaggtggcagcattcagcagtatat

SEQ ID NO: 235875 - DNA, 25 bp, Probe Sequence
gaggtggcagcttcacagaactgga

SEQ ID NO: 235876 - DNA, 25 bp, Probe Sequence
gagggggctgatcctgatagcattg

SEQ ID NO: 235877 - DNA, 25 bp, Probe Sequence
gaggggcaggagcatgatgagctga

SEQ ID NO: 235878 - DNA, 25 bp, Probe Sequence
gaggggcagaggagcagagatgcat

SEQ ID NO: 235879 - DNA, 25 bp, Probe Sequence
gaggtgccagggcagcaaacatcct

SEQ ID NO: 235880 - DNA, 25 bp, Probe Sequence
gaggttctgcctgacatagacacgt

SEQ ID NO: 235881 - DNA, 25 bp, Probe Sequence
gaggttctgcctgacatagacacgt

SEQ ID NO: 235882 - DNA, 25 bp, Probe Sequence
gaggagttcctgaaccagagctcgc

SEQ ID NO: 235883 - DNA, 25 bp, Probe Sequence
gaggagaagtatgacctcagccggc

SEQ ID NO: 235884 - DNA, 25 bp, Probe Sequence
gaggagaagtatgacctcagccggc

SEQ ID NO: 235885 - DNA, 25 bp, Probe Sequence
gaggtagtaatttcctcagaagact

SEQ ID NO: 235886 - DNA, 25 bp, Probe Sequence
gaggtaggacttttaagagatgatt

SEQ ID NO: 235887 - DNA, 25 bp, Probe Sequence
gaggggccatcttttgataggatga

SEQ ID NO: 235888 - DNA, 25 bp, Probe Sequence
gaggggtgacatttcatgaagtgta

SEQ ID NO: 235889 - DNA, 25 bp, Probe Sequence
gaggtggtgagcatgtaacatgagc

SEQ ID NO: 235890 - DNA, 25 bp, Probe Sequence
gaggtggtggacataatgcgagtta

SEQ ID NO: 235891 - DNA, 25 bp, Probe Sequence
gaggtgttcataggtattgcgttct

SEQ ID NO: 235892 - DNA, 25 bp, Probe Sequence
gaggtggtctgaatgttctgacatt

SEQ ID NO: 235893 - DNA, 25 bp, Probe Sequence
gaggctgttagactgttagatttaa

SEQ ID NO: 235894 - DNA, 25 bp, Probe Sequence
gaggtgaaagagctgtagagtgtta

SEQ ID NO: 235895 - DNA, 25 bp, Probe Sequence
gaggcatacttgtgtgtctgggttg

SEQ ID NO: 235896 - DNA, 25 bp, Probe Sequence
gaggatgactaatggtcggcgtata

SEQ ID NO: 235897 - DNA, 25 bp, Probe Sequence
gaggatatctaatgtgatgcccgga

SEQ ID NO: 235898 - DNA, 25 bp, Probe Sequence
gaggtgtttatactgcattctcaga

SEQ ID NO: 235899 - DNA, 25 bp, Probe Sequence
gagggtgtcatctagcgcaattgaa

SEQ ID NO: 235900 - DNA, 25 bp, Probe Sequence
gaggaggctgcagtagttcagtata

SEQ ID NO: 235901 - DNA, 25 bp, Probe Sequence
gaggggctctgctgtgtagatgcca

SEQ ID NO: 235902 - DNA, 25 bp, Probe Sequence
gaggggcttttgcaatgatagcaga

SEQ ID NO: 235903 - DNA, 25 bp, Probe Sequence
gaggtggtatttgagcttacagttc

SEQ ID NO: 235904 - DNA, 25 bp, Probe Sequence
gaggaggacattttctcttgccagt

SEQ ID NO: 235905 - DNA, 25 bp, Probe Sequence
gaggaggaattagtggatcccctaa

SEQ ID NO: 235906 - DNA, 25 bp, Probe Sequence
gaggggaatggcggagaccacactg

SEQ ID NO: 235907 - DNA, 25 bp, Probe Sequence
gaggttggtgagggagatcgcgcag

SEQ ID NO: 235908 - DNA, 25 bp, Probe Sequence
gaggtggagtgagaagtctccgctg

SEQ ID NO: 235909 - DNA, 25 bp, Probe Sequence
gaggtggaagcttacacatctccct

SEQ ID NO: 235910 - DNA, 25 bp, Probe Sequence
gaggtggacacaacagcagtctcct

SEQ ID NO: 235911 - DNA, 25 bp, Probe Sequence
gaggtggtcaagctgagcaccagcc

SEQ ID NO: 235912 - DNA, 25 bp, Probe Sequence
gaggtggtatatatgaccgagccca

SEQ ID NO: 235913 - DNA, 25 bp, Probe Sequence
gaggtggttcagaagatgactggac

SEQ ID NO: 235914 - DNA, 25 bp, Probe Sequence
gaggtgagaatggtgaatggcaaac

SEQ ID NO: 235915 - DNA, 25 bp, Probe Sequence
gaggatggtgaggcgaaggccaggt

SEQ ID NO: 235916 - DNA, 25 bp, Probe Sequence
gaggtggtgtatggaaagccgatca

SEQ ID NO: 235917 - DNA, 25 bp, Probe Sequence
gaggtggctgaagtaccagcagtga

SEQ ID NO: 235918 - DNA, 25 bp, Probe Sequence
gaggggcaagcagtgaacgctgtaa

SEQ ID NO: 235919 - DNA, 25 bp, Probe Sequence
gaggtggcatgttctaactcctaga

SEQ ID NO: 235920 - DNA, 25 bp, Probe Sequence
gaggggctttcatacaaatagactg

SEQ ID NO: 235921 - DNA, 25 bp, Probe Sequence
gaggggttatcttacatcagagtga

SEQ ID NO: 235922 - DNA, 25 bp, Probe Sequence
gagggtgtttcctagaaactgataa

SEQ ID NO: 235923 - DNA, 25 bp, Probe Sequence
gaggtggttcgagagaagtggtata

SEQ ID NO: 235924 - DNA, 25 bp, Probe Sequence
gaggggctccaataaatgtggatag

SEQ ID NO: 235925 - DNA, 25 bp, Probe Sequence
gaggggagccaacataagctgagct

SEQ ID NO: 235926 - DNA, 25 bp, Probe Sequence
gaggggatggataggaaagcaggct

SEQ ID NO: 235927 - DNA, 25 bp, Probe Sequence
gaggtgaatggcaggtaggaggtgt

SEQ ID NO: 235928 - DNA, 25 bp, Probe Sequence
gaggtgacagggagctaggcagccg

SEQ ID NO: 235929 - DNA, 25 bp, Probe Sequence
gaggtgaaggtggggcaggagcaga

SEQ ID NO: 235930 - DNA, 25 bp, Probe Sequence
gaggtgaaggtggggcaggagcaga

SEQ ID NO: 235931 - DNA, 25 bp, Probe Sequence
gaggtgaaggccgtcctggagaaaa

SEQ ID NO: 235932 - DNA, 25 bp, Probe Sequence
gaggcaaatacttccctggacaaga

SEQ ID NO: 235933 - DNA, 25 bp, Probe Sequence
gaggcaaatacttccctggacaaga

SEQ ID NO: 235934 - DNA, 25 bp, Probe Sequence
gaggagaaatctgtagtgagcaaag

SEQ ID NO: 235935 - DNA, 25 bp, Probe Sequence
gaggaaaagccacattgaccaagag

SEQ ID NO: 235936 - DNA, 25 bp, Probe Sequence
gaggaaaacccaaagccagacatag

SEQ ID NO: 235937 - DNA, 25 bp, Probe Sequence
gaggaagaaccagtacgtcagtaac

SEQ ID NO: 235938 - DNA, 25 bp, Probe Sequence
gaggataaaccagctgtccaggaac

SEQ ID NO: 235939 - DNA, 25 bp, Probe Sequence
gaggtcaaacctatgttcgtaatga

SEQ ID NO: 235940 - DNA, 25 bp, Probe Sequence
gaggcataatactatttttttgaaa

SEQ ID NO: 235941 - DNA, 25 bp, Probe Sequence
gaggcaatggaatggttagttgaaa

SEQ ID NO: 235942 - DNA, 25 bp, Probe Sequence
gaggcccgaaagccgtaggataaca

SEQ ID NO: 235943 - DNA, 25 bp, Probe Sequence
gaggggagaaatcctgatctttaaa

SEQ ID NO: 235944 - DNA, 25 bp, Probe Sequence
gaggaaggaagatttgatgttgtga

SEQ ID NO: 235945 - DNA, 25 bp, Probe Sequence
gaggaggccaagtacaagttgtgca

SEQ ID NO: 235946 - DNA, 25 bp, Probe Sequence
gaggaccaaaataaagtgtgtgtgc

SEQ ID NO: 235947 - DNA, 25 bp, Probe Sequence
gatggcctaaacagaaatgtgcgat

SEQ ID NO: 235948 - DNA, 25 bp, Probe Sequence
gatcgtccacaacggttactgcgat

SEQ ID NO: 235949 - DNA, 25 bp, Probe Sequence
gatcagattgaaggtggttggtttt

SEQ ID NO: 235950 - DNA, 25 bp, Probe Sequence
gatctgatacaaggtcggggtgtct

SEQ ID NO: 235951 - DNA, 25 bp, Probe Sequence
gaggatatagacctctagggtcctg

SEQ ID NO: 235952 - DNA, 25 bp, Probe Sequence
gaggtgtagcattacctggtgctcc

SEQ ID NO: 235953 - DNA, 25 bp, Probe Sequence
gaggtgggcatttcctacattcctc

SEQ ID NO: 235954 - DNA, 25 bp, Probe Sequence
gaggtgggcatttcctacattcctc

SEQ ID NO: 235955 - DNA, 25 bp, Probe Sequence
gaggtaggcacttcatttttctctt

SEQ ID NO: 235956 - DNA, 25 bp, Probe Sequence
gaggatggtagttttttcaccttca

SEQ ID NO: 235957 - DNA, 25 bp, Probe Sequence
gaggatggtactgttttcatacttt

SEQ ID NO: 235958 - DNA, 25 bp, Probe Sequence
gaggtggtcgtaagtcttaacttct

SEQ ID NO: 235959 - DNA, 25 bp, Probe Sequence
gaggttgttcaaagtttaagcaatt

SEQ ID NO: 235960 - DNA, 25 bp, Probe Sequence
gaggttgtacatatgttttcacacg

SEQ ID NO: 235961 - DNA, 25 bp, Probe Sequence
gaggggaagctcttgttttccaagc

SEQ ID NO: 235962 - DNA, 25 bp, Probe Sequence
gaggggaagagactgcattgtggcc

SEQ ID NO: 235963 - DNA, 25 bp, Probe Sequence
gaggggaccagattgtggtgccacc

SEQ ID NO: 235964 - DNA, 25 bp, Probe Sequence
gaggggagatcagtatgggcgctat

SEQ ID NO: 235965 - DNA, 25 bp, Probe Sequence
gaggtgggatgcagatcttcgtgaa

SEQ ID NO: 235966 - DNA, 25 bp, Probe Sequence
gaggggtatcagctgcctcagaaca

SEQ ID NO: 235967 - DNA, 25 bp, Probe Sequence
gaggggctacaggcagctggagaaa

SEQ ID NO: 235968 - DNA, 25 bp, Probe Sequence
gaggtggtacagagctggcaggagg

SEQ ID NO: 235969 - DNA, 25 bp, Probe Sequence
gaggtggaagagactcgtgcaatgg

SEQ ID NO: 235970 - DNA, 25 bp, Probe Sequence
gaggtggataagatgatggaacaga

SEQ ID NO: 235971 - DNA, 25 bp, Probe Sequence
gaggatttgagctcataggaacagg

SEQ ID NO: 235972 - DNA, 25 bp, Probe Sequence
gaggtgttgactaatccagccaagg

SEQ ID NO: 235973 - DNA, 25 bp, Probe Sequence
gaggtgcttgatctatctacaaaga

SEQ ID NO: 235974 - DNA, 25 bp, Probe Sequence
gaggtcccagtagtctaaaacacgt

SEQ ID NO: 235975 - DNA, 25 bp, Probe Sequence
gaggctccaccttgttaaataaatt

SEQ ID NO: 235976 - DNA, 25 bp, Probe Sequence
gaggacacaggcagcttccaaaata

SEQ ID NO: 235977 - DNA, 25 bp, Probe Sequence
gaggacacaggcagcttccaaaata

SEQ ID NO: 235978 - DNA, 25 bp, Probe Sequence
gaggacaaatcaccttaaaacatgt

SEQ ID NO: 235979 - DNA, 25 bp, Probe Sequence
gaggtgcaaaccgtggggaactgtg

SEQ ID NO: 235980 - DNA, 25 bp, Probe Sequence
gaggtgctaacctaggaagaattgg

SEQ ID NO: 235981 - DNA, 25 bp, Probe Sequence
gaggtgctgaaacagtgccgacttg

SEQ ID NO: 235982 - DNA, 25 bp, Probe Sequence
gaggtctgcagagtaagtgccgcct

SEQ ID NO: 235983 - DNA, 25 bp, Probe Sequence
gaggtcagcattgaggtcacctgct

SEQ ID NO: 235984 - DNA, 25 bp, Probe Sequence
gaggtgcacgtgagttccaatgctg

SEQ ID NO: 235985 - DNA, 25 bp, Probe Sequence
gaggatgccgctctgtgacaaatgt

SEQ ID NO: 235986 - DNA, 25 bp, Probe Sequence
gaggtggccatgatgcttacaggtt

SEQ ID NO: 235987 - DNA, 25 bp, Probe Sequence
gaggtactgcagagttacaggatcg

SEQ ID NO: 235988 - DNA, 25 bp, Probe Sequence
gaggtaacatgcagttgggtctcaa

SEQ ID NO: 235989 - DNA, 25 bp, Probe Sequence
gaggtgtgcttcagttgggtggcaa

SEQ ID NO: 235990 - DNA, 25 bp, Probe Sequence
gaggtggccaatatggggatgtgga

SEQ ID NO: 235991 - DNA, 25 bp, Probe Sequence
gaggtggccaaggatgctggagctg

SEQ ID NO: 235992 - DNA, 25 bp, Probe Sequence
gaggtgggcatatgacaggcatgag

SEQ ID NO: 235993 - DNA, 25 bp, Probe Sequence
gaggtgagctgcatgaagatggagg

SEQ ID NO: 235994 - DNA, 25 bp, Probe Sequence
gaggtgcagctgagagtgcagaggg

SEQ ID NO: 235995 - DNA, 25 bp, Probe Sequence
gaggtgatggtaggatgaggaggaa

SEQ ID NO: 235996 - DNA, 25 bp, Probe Sequence
gaggttgggaggtggaggcccagca

SEQ ID NO: 235997 - DNA, 25 bp, Probe Sequence
gaggtacggtggggaaggtgcctat

SEQ ID NO: 235998 - DNA, 25 bp, Probe Sequence
gaggggctagtgttggtaggtccta

SEQ ID NO: 235999 - DNA, 25 bp, Probe Sequence
gaggggctgggattagggtggttca

SEQ ID NO: 236000 - DNA, 25 bp, Probe Sequence
gaggtgggaaggtggcttgagttca

SEQ ID NO: 236001 - DNA, 25 bp, Probe Sequence
gaggtgcggtatagtggactcgact

SEQ ID NO: 236002 - DNA, 25 bp, Probe Sequence
gaggtgtctgcattattgggccgaa

SEQ ID NO: 236003 - DNA, 25 bp, Probe Sequence
gaggagtatgactctggagttgaag

SEQ ID NO: 236004 - DNA, 25 bp, Probe Sequence
gaggaatatatcatcatgggctatg

SEQ ID NO: 236005 - DNA, 25 bp, Probe Sequence
gaggattacatcatcatcctgcctg

SEQ ID NO: 236006 - DNA, 25 bp, Probe Sequence
gaggttgagcaactacactgcgctg

SEQ ID NO: 236007 - DNA, 25 bp, Probe Sequence
gaggttgacaaggtcacaggcaggt

SEQ ID NO: 236008 - DNA, 25 bp, Probe Sequence
gaggtggccttggataagggctgct

SEQ ID NO: 236009 - DNA, 25 bp, Probe Sequence
gaggtgtgcccagaaagcttgtctg

SEQ ID NO: 236010 - DNA, 25 bp, Probe Sequence
gaggtgtctacagtccagatgttct

SEQ ID NO: 236011 - DNA, 25 bp, Probe Sequence
gaggttctaatattcacatgttcta

SEQ ID NO: 236012 - DNA, 25 bp, Probe Sequence
gaggtcttttaatctgatgttctca

SEQ ID NO: 236013 - DNA, 25 bp, Probe Sequence
gaggtcttctctttaatgttacttt

SEQ ID NO: 236014 - DNA, 25 bp, Probe Sequence
gaggttactctatatttttagatta

SEQ ID NO: 236015 - DNA, 25 bp, Probe Sequence
gaggtttctttctttctctgtaatc

SEQ ID NO: 236016 - DNA, 25 bp, Probe Sequence
gaggattttcgtcaaccttactgaa

SEQ ID NO: 236017 - DNA, 25 bp, Probe Sequence
gaggttatgtgttctaactattatc

SEQ ID NO: 236018 - DNA, 25 bp, Probe Sequence
gaggattttgttttatcacatatac

SEQ ID NO: 236019 - DNA, 25 bp, Probe Sequence
gaggaacttgttactcaaaactaga

SEQ ID NO: 236020 - DNA, 25 bp, Probe Sequence
gaggaatgggttagccctaatgtag

SEQ ID NO: 236021 - DNA, 25 bp, Probe Sequence
gaggaggaagttaccacattctgga

SEQ ID NO: 236022 - DNA, 25 bp, Probe Sequence
gaggagaaaggcacagcgtttggga

SEQ ID NO: 236023 - DNA, 25 bp, Probe Sequence
gaggacagcacaggctcaaggttgg

SEQ ID NO: 236024 - DNA, 25 bp, Probe Sequence
gaggacgacactgagggattctcgg

SEQ ID NO: 236025 - DNA, 25 bp, Probe Sequence
gaggactggcttgacaggggctatg

SEQ ID NO: 236026 - DNA, 25 bp, Probe Sequence
gaggacgatgtagcacgggatttat

SEQ ID NO: 236027 - DNA, 25 bp, Probe Sequence
gaggccacttaccaaagttatttct

SEQ ID NO: 236028 - DNA, 25 bp, Probe Sequence
gaggcaaactaacaagtcaaattct

SEQ ID NO: 236029 - DNA, 25 bp, Probe Sequence
gaggaaaccactccaaaatcgtcgc

SEQ ID NO: 236030 - DNA, 25 bp, Probe Sequence
gaggtaaaccagcacaagaagtctc

SEQ ID NO: 236031 - DNA, 25 bp, Probe Sequence
gatggtaacctcagaaagcaagaat

SEQ ID NO: 236032 - DNA, 25 bp, Probe Sequence
gatggaaaccttacaatccgagact

SEQ ID NO: 236033 - DNA, 25 bp, Probe Sequence
gaggaaatgcctttaaccggcgtgg

SEQ ID NO: 236034 - DNA, 25 bp, Probe Sequence
gaggaacagctctttggacactagg

SEQ ID NO: 236035 - DNA, 25 bp, Probe Sequence
gaggtcaagcaataggcgcctggca

SEQ ID NO: 236036 - DNA, 25 bp, Probe Sequence
gaggtaacacggcagcacagctgtc

SEQ ID NO: 236037 - DNA, 25 bp, Probe Sequence
gaggtgagagccaaggtgcagcatt

SEQ ID NO: 236038 - DNA, 25 bp, Probe Sequence
gaggtgaagagcaagactgccaagc

SEQ ID NO: 236039 - DNA, 25 bp, Probe Sequence
gaggatgacagagacagcgccaatg

SEQ ID NO: 236040 - DNA, 25 bp, Probe Sequence
gaggatgactcaggacgctggatac

SEQ ID NO: 236041 - DNA, 25 bp, Probe Sequence
gaggtgttcaggtcatgggagcaaa

SEQ ID NO: 236042 - DNA, 25 bp, Probe Sequence
gaggtctgatatccctgggacagaa

SEQ ID NO: 236043 - DNA, 25 bp, Probe Sequence
gaggttgatctttgctgggaaacag

SEQ ID NO: 236044 - DNA, 25 bp, Probe Sequence
gaggtggtttgtgggaggaatagtg

SEQ ID NO: 236045 - DNA, 25 bp, Probe Sequence
gaggtggctttggtggaggaagacg

SEQ ID NO: 236046 - DNA, 25 bp, Probe Sequence
gaggctgccttggtctaggtgaaaa

SEQ ID NO: 236047 - DNA, 25 bp, Probe Sequence
gaggtacttgaactggcaggaaatg

SEQ ID NO: 236048 - DNA, 25 bp, Probe Sequence
gaggtggtagtagacagtgatattg

SEQ ID NO: 236049 - DNA, 25 bp, Probe Sequence
gaggtggtggtagtcagggtgtgtg

SEQ ID NO: 236050 - DNA, 25 bp, Probe Sequence
gaggtgggcggaacacgatgtcagg

SEQ ID NO: 236051 - DNA, 25 bp, Probe Sequence
gatgggctggggaaccctggagagc

SEQ ID NO: 236052 - DNA, 25 bp, Probe Sequence
gaggagtccagggagaggcgggatc

SEQ ID NO: 236053 - DNA, 25 bp, Probe Sequence
gaggaactccaggacgaggaggaca

SEQ ID NO: 236054 - DNA, 25 bp, Probe Sequence
gaggataaactgcaggtgaagaaca

SEQ ID NO: 236055 - DNA, 25 bp, Probe Sequence
gaggatagaatccgaggcattgata

SEQ ID NO: 236056 - DNA, 25 bp, Probe Sequence
gaggtagctatcctgagagaagact

SEQ ID NO: 236057 - DNA, 25 bp, Probe Sequence
gatcgggtatgactcagaacaagtg

SEQ ID NO: 236058 - DNA, 25 bp, Probe Sequence
gatggggaagagcaaaatacatgga

SEQ ID NO: 236059 - DNA, 25 bp, Probe Sequence
gaggacagagggctaaatccatgaa

SEQ ID NO: 236060 - DNA, 25 bp, Probe Sequence
gaggacgagagggctgtttccaaac

SEQ ID NO: 236061 - DNA, 25 bp, Probe Sequence
gaggacgccaaggtggggacaaact

SEQ ID NO: 236062 - DNA, 25 bp, Probe Sequence
gaggacctggaataggcgccaagac

SEQ ID NO: 236063 - DNA, 25 bp, Probe Sequence
gaggaccgagaagcaatggcccagc

SEQ ID NO: 236064 - DNA, 25 bp, Probe Sequence
gaggaataagtaccgattccacatc

SEQ ID NO: 236065 - DNA, 25 bp, Probe Sequence
gaggaaataggaccaagacccctgg

SEQ ID NO: 236066 - DNA, 25 bp, Probe Sequence
gaggaaatgaggtctctaccacacc

SEQ ID NO: 236067 - DNA, 25 bp, Probe Sequence
gaggtaaaggtccatgaaccctgcc

SEQ ID NO: 236068 - DNA, 25 bp, Probe Sequence
gaggtcaggagatcgagaccatcct

SEQ ID NO: 236069 - DNA, 25 bp, Probe Sequence
gaggtcaggagatcgagaccatcct

SEQ ID NO: 236070 - DNA, 25 bp, Probe Sequence
gaggtcaggagatcgagaccatcct

SEQ ID NO: 236071 - DNA, 25 bp, Probe Sequence
gaggtcaggagatcgagaccatcct

SEQ ID NO: 236072 - DNA, 25 bp, Probe Sequence
gaggtcaagagttcgaggccagcct

SEQ ID NO: 236073 - DNA, 25 bp, Probe Sequence
gaggtcaagagttcgaggccagcct

SEQ ID NO: 236074 - DNA, 25 bp, Probe Sequence
gaggtcatggaggtcgagaccagcc

SEQ ID NO: 236075 - DNA, 25 bp, Probe Sequence
gaggtcattggcatcaacacgctca

SEQ ID NO: 236076 - DNA, 25 bp, Probe Sequence
gaggtgattggagtgaacaccatga

SEQ ID NO: 236077 - DNA, 25 bp, Probe Sequence
gaggtgactggcgataaatacaatg

SEQ ID NO: 236078 - DNA, 25 bp, Probe Sequence
gaggatgactagacagcaaaaagga

SEQ ID NO: 236079 - DNA, 25 bp, Probe Sequence
gaggctgagcgaaagaaggaaggac

SEQ ID NO: 236080 - DNA, 25 bp, Probe Sequence
gaggcgaaggtagcagtaagccaag

SEQ ID NO: 236081 - DNA, 25 bp, Probe Sequence
gaggcaggaggtggaaaccccaggg

SEQ ID NO: 236082 - DNA, 25 bp, Probe Sequence
gaggacgagagtaagaactcccact

SEQ ID NO: 236083 - DNA, 25 bp, Probe Sequence
gaggaggtggagagacagcccaccc

SEQ ID NO: 236084 - DNA, 25 bp, Probe Sequence
gaggagggggctggaaatgccaccc

SEQ ID NO: 236085 - DNA, 25 bp, Probe Sequence
gatgtacggggtgaattctcttgcc

SEQ ID NO: 236086 - DNA, 25 bp, Probe Sequence
gaggccgaggggccaattcgttctc

SEQ ID NO: 236087 - DNA, 25 bp, Probe Sequence
gaggtacgagaggaccttcgtctcc

SEQ ID NO: 236088 - DNA, 25 bp, Probe Sequence
gaggagagcttaaacaccttcttcc

SEQ ID NO: 236089 - DNA, 25 bp, Probe Sequence
gaggaagcatttatgaccttctaca

SEQ ID NO: 236090 - DNA, 25 bp, Probe Sequence
gaggaggttgttttagctctgctaa

SEQ ID NO: 236091 - DNA, 25 bp, Probe Sequence
gaggaggtggctatgtcttcttaag

SEQ ID NO: 236092 - DNA, 25 bp, Probe Sequence
gaggaggtgtggacttttatatata

SEQ ID NO: 236093 - DNA, 25 bp, Probe Sequence
gaggacggatctagctcctgtatat

SEQ ID NO: 236094 - DNA, 25 bp, Probe Sequence
gaggtctaatgctatgttttcatat

SEQ ID NO: 236095 - DNA, 25 bp, Probe Sequence
gaggtcttatgaggctttcctcaag

SEQ ID NO: 236096 - DNA, 25 bp, Probe Sequence
gaggttttgaagattatgccagtgc

SEQ ID NO: 236097 - DNA, 25 bp, Probe Sequence
gaggttttgagtacctatccttgcc

SEQ ID NO: 236098 - DNA, 25 bp, Probe Sequence
gaggttttgatgtaggatttttctc

SEQ ID NO: 236099 - DNA, 25 bp, Probe Sequence
gaggtcatttgttatggtgctattt

SEQ ID NO: 236100 - DNA, 25 bp, Probe Sequence
gaggtatgttgatcatggctttgct

SEQ ID NO: 236101 - DNA, 25 bp, Probe Sequence
gaggttgcttactaagctttgccag

SEQ ID NO: 236102 - DNA, 25 bp, Probe Sequence
gaggagctttgataagcacttctag

SEQ ID NO: 236103 - DNA, 25 bp, Probe Sequence
gaggacctgctaaaatcagctacta

SEQ ID NO: 236104 - DNA, 25 bp, Probe Sequence
gaggtcctagatgagaacaacttgg

SEQ ID NO: 236105 - DNA, 25 bp, Probe Sequence
gaggctacgtgaaggaacagtttgc

SEQ ID NO: 236106 - DNA, 25 bp, Probe Sequence
gaggttcctgaacaatgaattccca

SEQ ID NO: 236107 - DNA, 25 bp, Probe Sequence
gaggttcctgaacaatgaattccca

SEQ ID NO: 236108 - DNA, 25 bp, Probe Sequence
gatggttatttaaagagaattccct

SEQ ID NO: 236109 - DNA, 25 bp, Probe Sequence
gatggcttatttgtcagcgatttac

SEQ ID NO: 236110 - DNA, 25 bp, Probe Sequence
gaggcctatttgactccaaggtagc

SEQ ID NO: 236111 - DNA, 25 bp, Probe Sequence
gaggcagctatctgcactctaaact

SEQ ID NO: 236112 - DNA, 25 bp, Probe Sequence
gaggctgcaacatacctcaatcctg

SEQ ID NO: 236113 - DNA, 25 bp, Probe Sequence
gaggtacaattgatcacaatactgc

SEQ ID NO: 236114 - DNA, 25 bp, Probe Sequence
gaggtgaagtcggtgccacttctgc

SEQ ID NO: 236115 - DNA, 25 bp, Probe Sequence
gaggtattgttggattcagttgagc

SEQ ID NO: 236116 - DNA, 25 bp, Probe Sequence
gaggttggtgtggattctgttgaag

SEQ ID NO: 236117 - DNA, 25 bp, Probe Sequence
gaggttggctgggagttcaagacca

SEQ ID NO: 236118 - DNA, 25 bp, Probe Sequence
gaggagtggaagggctcggagacct

SEQ ID NO: 236119 - DNA, 25 bp, Probe Sequence
gaggagtggcagcggcaaggcagcc

SEQ ID NO: 236120 - DNA, 25 bp, Probe Sequence
gaggtgagaggatgacacgtctgcc

SEQ ID NO: 236121 - DNA, 25 bp, Probe Sequence
gaggtgggaggatcacttgagccca

SEQ ID NO: 236122 - DNA, 25 bp, Probe Sequence
gaggtgggaggatggcttgggccta

SEQ ID NO: 236123 - DNA, 25 bp, Probe Sequence
gaggtgggaggaagaagtgggaaat

SEQ ID NO: 236124 - DNA, 25 bp, Probe Sequence
gaggtgggaggtggaagaagggaga

SEQ ID NO: 236125 - DNA, 25 bp, Probe Sequence
gaggctctgagggtctgaaaagggc

SEQ ID NO: 236126 - DNA, 25 bp, Probe Sequence
gaggctccgggttgacaaatggtgg

SEQ ID NO: 236127 - DNA, 25 bp, Probe Sequence
gaggcccggccagagaatttgtggg

SEQ ID NO: 236128 - DNA, 25 bp, Probe Sequence
gaggcgaaggccaggttgggggcag

SEQ ID NO: 236129 - DNA, 25 bp, Probe Sequence
gaggagaggggcagtattgggggac

SEQ ID NO: 236130 - DNA, 25 bp, Probe Sequence
gaggaggtggagccttttgaggggg

SEQ ID NO: 236131 - DNA, 25 bp, Probe Sequence
gaggaggtggagatcctgaaggagc

SEQ ID NO: 236132 - DNA, 25 bp, Probe Sequence
gaggagtttggatcttgacataagt

SEQ ID NO: 236133 - DNA, 25 bp, Probe Sequence
gaggaccctgggacttaagaagaag

SEQ ID NO: 236134 - DNA, 25 bp, Probe Sequence
gaggagcccccgggtgagaaagttg

SEQ ID NO: 236135 - DNA, 25 bp, Probe Sequence
gaggaccacccggcgaaagaagtag

SEQ ID NO: 236136 - DNA, 25 bp, Probe Sequence
gaggttaaggctccagaaagctagt

SEQ ID NO: 236137 - DNA, 25 bp, Probe Sequence
gaggtatgagaagcctgaactgaag

SEQ ID NO: 236138 - DNA, 25 bp, Probe Sequence
gaggtaggcatagtacagtacgata

SEQ ID NO: 236139 - DNA, 25 bp, Probe Sequence
gaggctgagaccgtgacaagaccat

SEQ ID NO: 236140 - DNA, 25 bp, Probe Sequence
gaggatgagattgccctctacacag

SEQ ID NO: 236141 - DNA, 25 bp, Probe Sequence
gaggataaagcggctgctcgaacag

SEQ ID NO: 236142 - DNA, 25 bp, Probe Sequence
gaggatgacgtgcgctttgagagca

SEQ ID NO: 236143 - DNA, 25 bp, Probe Sequence
gaggagcacgtgcagagtgtcgata

SEQ ID NO: 236144 - DNA, 25 bp, Probe Sequence
gaggatgcagcttaagatattacta

SEQ ID NO: 236145 - DNA, 25 bp, Probe Sequence
gaggacattccaagacagtatacag

SEQ ID NO: 236146 - DNA, 25 bp, Probe Sequence
gaggtatctctaaggcacatagtag

SEQ ID NO: 236147 - DNA, 25 bp, Probe Sequence
gaggattgtgtcgtgccaatgagaa

SEQ ID NO: 236148 - DNA, 25 bp, Probe Sequence
gaggatagatgtatgctcggtggca

SEQ ID NO: 236149 - DNA, 25 bp, Probe Sequence
gaggatagatgcaggcgggtgagct

SEQ ID NO: 236150 - DNA, 25 bp, Probe Sequence
gatggatgagaggggtacggaaggg

SEQ ID NO: 236151 - DNA, 25 bp, Probe Sequence
gatgggacagtcagccctaaaggag

SEQ ID NO: 236152 - DNA, 25 bp, Probe Sequence
gatgggaagacataccacgtaggag

SEQ ID NO: 236153 - DNA, 25 bp, Probe Sequence
gaggaaaagactcctcctgggggct

SEQ ID NO: 236154 - DNA, 25 bp, Probe Sequence
gggaaaggatggatcctcgggacct

SEQ ID NO: 236155 - DNA, 25 bp, Probe Sequence
gaggacaaggatatcatcaccaggg

SEQ ID NO: 236156 - DNA, 25 bp, Probe Sequence
gaggatgagggtgtgtaccagtgcc

SEQ ID NO: 236157 - DNA, 25 bp, Probe Sequence
gaggtgagggttagtgccaccctgc

SEQ ID NO: 236158 - DNA, 25 bp, Probe Sequence
gaggtgagggatcacccatctttcc

SEQ ID NO: 236159 - DNA, 25 bp, Probe Sequence
gaggtagggagtctcactaactcca

SEQ ID NO: 236160 - DNA, 25 bp, Probe Sequence
gaggcgcaggaagcccacgaagatc

SEQ ID NO: 236161 - DNA, 25 bp, Probe Sequence
gaggctgagttagtcccttagaaac

SEQ ID NO: 236162 - DNA, 25 bp, Probe Sequence
gaggaagcctgagtgctcacttaaa

SEQ ID NO: 236163 - DNA, 25 bp, Probe Sequence
gatggaagggccagcacttaagagc

SEQ ID NO: 236164 - DNA, 25 bp, Probe Sequence
gaggatttggctgcgacttattgca

SEQ ID NO: 236165 - DNA, 25 bp, Probe Sequence
gatgccttacgtctgatcttgatgg

SEQ ID NO: 236166 - DNA, 25 bp, Probe Sequence
gatcctaactgggttcttggggtct

SEQ ID NO: 236167 - DNA, 25 bp, Probe Sequence
gatggaaacttggaattgggggttg

SEQ ID NO: 236168 - DNA, 25 bp, Probe Sequence
gaggaacttttaatttgcaggggtg

SEQ ID NO: 236169 - DNA, 25 bp, Probe Sequence
gaggacccagttgttataaggcgct

SEQ ID NO: 236170 - DNA, 25 bp, Probe Sequence
gaggcacctaaaaattgtataccgc

SEQ ID NO: 236171 - DNA, 25 bp, Probe Sequence
gaggcacaacaattacccaaaccca

SEQ ID NO: 236172 - DNA, 25 bp, Probe Sequence
gaggcacaacaattacccaaaccca

SEQ ID NO: 236173 - DNA, 25 bp, Probe Sequence
gaggagacacggaacaccaaggccc

SEQ ID NO: 236174 - DNA, 25 bp, Probe Sequence
gaggatacacgggacccagaatcca

SEQ ID NO: 236175 - DNA, 25 bp, Probe Sequence
gaggtcacagggaagtcacagaaca

SEQ ID NO: 236176 - DNA, 25 bp, Probe Sequence
gaggtacaatagaagtctctaatct

SEQ ID NO: 236177 - DNA, 25 bp, Probe Sequence
gaggagaagcattgttttcaaacta

SEQ ID NO: 236178 - DNA, 25 bp, Probe Sequence
gaggcagtgactttatttccaaaga

SEQ ID NO: 236179 - DNA, 25 bp, Probe Sequence
gaggatgtgggcttatttgtaaaca

SEQ ID NO: 236180 - DNA, 25 bp, Probe Sequence
gaggtgcatttcctgtttgttacac

SEQ ID NO: 236181 - DNA, 25 bp, Probe Sequence
gaggtgcatttcctgttgtacacac

SEQ ID NO: 236182 - DNA, 25 bp, Probe Sequence
gaggtctcttcattattgatgacaa

SEQ ID NO: 236183 - DNA, 25 bp, Probe Sequence
gaggtgcatcaaattaaatgacagc

SEQ ID NO: 236184 - DNA, 25 bp, Probe Sequence
gaggttgcatatttaaagacactta

SEQ ID NO: 236185 - DNA, 25 bp, Probe Sequence
gaggattaatcccagagaactttca

SEQ ID NO: 236186 - DNA, 25 bp, Probe Sequence
gaggaataattccattgaaccttga

SEQ ID NO: 236187 - DNA, 25 bp, Probe Sequence
gaggaaaatgattgacaaagcccaa

SEQ ID NO: 236188 - DNA, 25 bp, Probe Sequence
gatggaacacagacatatcaaatgc

SEQ ID NO: 236189 - DNA, 25 bp, Probe Sequence
gaggaatagcatcgacatcacgaga

SEQ ID NO: 236190 - DNA, 25 bp, Probe Sequence
gaggaatcagtcaagcaaaaatgct

SEQ ID NO: 236191 - DNA, 25 bp, Probe Sequence
gaggatggatctgcagatagtagag

SEQ ID NO: 236192 - DNA, 25 bp, Probe Sequence
gaggaggctctgtatgtcctcaggg

SEQ ID NO: 236193 - DNA, 25 bp, Probe Sequence
gaggaacctggtggtgtctgtggac

SEQ ID NO: 236194 - DNA, 25 bp, Probe Sequence
gaggactccaggagtaccttgtctc

SEQ ID NO: 236195 - DNA, 25 bp, Probe Sequence
gaggaccctggtccaaactttcatc

SEQ ID NO: 236196 - DNA, 25 bp, Probe Sequence
gaggaggacctgtccaaactcttca

SEQ ID NO: 236197 - DNA, 25 bp, Probe Sequence
gaggttgcacgagccagaaatcttc

SEQ ID NO: 236198 - DNA, 25 bp, Probe Sequence
gaggttactgaagagcaatagccac

SEQ ID NO: 236199 - DNA, 25 bp, Probe Sequence
gaggttactggagttcttattcaat

SEQ ID NO: 236200 - DNA, 25 bp, Probe Sequence
gaggattcgctgctggtgttaattt

SEQ ID NO: 236201 - DNA, 25 bp, Probe Sequence
gaggtacctcttggtgtatagtatt

SEQ ID NO: 236202 - DNA, 25 bp, Probe Sequence
gaggacagaccttagttgaaatgat

SEQ ID NO: 236203 - DNA, 25 bp, Probe Sequence
gaggaagagctcaggtggaaaagga

SEQ ID NO: 236204 - DNA, 25 bp, Probe Sequence
gaggtagagctcattgatcaaacgc

SEQ ID NO: 236205 - DNA, 25 bp, Probe Sequence
gaggtagagctgtgcattaaacttg

SEQ ID NO: 236206 - DNA, 25 bp, Probe Sequence
gaggtagagctgtgcattaaacttg

SEQ ID NO: 236207 - DNA, 25 bp, Probe Sequence
gaggtatgaattaatgctacacatt

SEQ ID NO: 236208 - DNA, 25 bp, Probe Sequence
gaggtagaatcactttcagacttaa

SEQ ID NO: 236209 - DNA, 25 bp, Probe Sequence
gaggtccgtagtgctcaactactca

SEQ ID NO: 236210 - DNA, 25 bp, Probe Sequence
gaggtcgggagttcgagactagcct

SEQ ID NO: 236211 - DNA, 25 bp, Probe Sequence
gaggttaggagttcgagaccagcct

SEQ ID NO: 236212 - DNA, 25 bp, Probe Sequence
gaggatcaaggagatcgcaaaacct

SEQ ID NO: 236213 - DNA, 25 bp, Probe Sequence
gaggacaagttcctccagaacaagg

SEQ ID NO: 236214 - DNA, 25 bp, Probe Sequence
gaggacaagtccccagagtatttct

SEQ ID NO: 236215 - DNA, 25 bp, Probe Sequence
gaggactgagcctcggtgttttttt

SEQ ID NO: 236216 - DNA, 25 bp, Probe Sequence
gaggagctggcttaccagttgtcta

SEQ ID NO: 236217 - DNA, 25 bp, Probe Sequence
gaggagagggtagtcagcatctcca

SEQ ID NO: 236218 - DNA, 25 bp, Probe Sequence
gatgagcaaggagaaatgccccaaa

SEQ ID NO: 236219 - DNA, 25 bp, Probe Sequence
gaggacaggatgcacattccttcaa

SEQ ID NO: 236220 - DNA, 25 bp, Probe Sequence
gaggacaggatcactgtggaatcga

SEQ ID NO: 236221 - DNA, 25 bp, Probe Sequence
gaggtcaggatcacgatgaaacccc

SEQ ID NO: 236222 - DNA, 25 bp, Probe Sequence
gaggtctatggccccatgaagaact

SEQ ID NO: 236223 - DNA, 25 bp, Probe Sequence
gaggacttaggagagatctgaactc

SEQ ID NO: 236224 - DNA, 25 bp, Probe Sequence
gaggactcttcgagacattgagacc

SEQ ID NO: 236225 - DNA, 25 bp, Probe Sequence
gaggaggcttggaagtgccggacgt

SEQ ID NO: 236226 - DNA, 25 bp, Probe Sequence
gaggaggattggatgagtgggggat

SEQ ID NO: 236227 - DNA, 25 bp, Probe Sequence
gaggatgttaggacggggtgggtag

SEQ ID NO: 236228 - DNA, 25 bp, Probe Sequence
gaggttctagcccaggagggtgggg

SEQ ID NO: 236229 - DNA, 25 bp, Probe Sequence
gaggcatttaggccaatatgggtgt

SEQ ID NO: 236230 - DNA, 25 bp, Probe Sequence
gaggtttatgcagctttatggttcc

SEQ ID NO: 236231 - DNA, 25 bp, Probe Sequence
gaggttgtcatggcctcagctatgc

SEQ ID NO: 236232 - DNA, 25 bp, Probe Sequence
gaggttgtcatggcctcagctatgc

SEQ ID NO: 236233 - DNA, 25 bp, Probe Sequence
gaggacgcttgagccagaatctcag

SEQ ID NO: 236234 - DNA, 25 bp, Probe Sequence
gaggcagttagagacaaaccaattt

SEQ ID NO: 236235 - DNA, 25 bp, Probe Sequence
gaggcaggtagacacatacccaact

SEQ ID NO: 236236 - DNA, 25 bp, Probe Sequence
gaggaggcaaaattatacggcattc

SEQ ID NO: 236237 - DNA, 25 bp, Probe Sequence
gaggagagaaagtttgcgcggccga

SEQ ID NO: 236238 - DNA, 25 bp, Probe Sequence
gaggcagaaatagttaccgagggga

SEQ ID NO: 236239 - DNA, 25 bp, Probe Sequence
gaggagattttaacacctgggtgag

SEQ ID NO: 236240 - DNA, 25 bp, Probe Sequence
gaggcatttcttatcaaaaggattg

SEQ ID NO: 236241 - DNA, 25 bp, Probe Sequence
gaggatttcttagagagacgcctac

SEQ ID NO: 236242 - DNA, 25 bp, Probe Sequence
gaggatttcttagagagacgcctgc

SEQ ID NO: 236243 - DNA, 25 bp, Probe Sequence
gaggtattcttggaatgtgaagccc

SEQ ID NO: 236244 - DNA, 25 bp, Probe Sequence
gaggatttctttagtgtcattgccg

SEQ ID NO: 236245 - DNA, 25 bp, Probe Sequence
gaggattgtccaatgtgtgccctca

SEQ ID NO: 236246 - DNA, 25 bp, Probe Sequence
gaggatgctaggatgttgctgctcc

SEQ ID NO: 236247 - DNA, 25 bp, Probe Sequence
gatgatgagggactgttggcatgca

SEQ ID NO: 236248 - DNA, 25 bp, Probe Sequence
gaggagtgcgacgtgagtctgagtc

SEQ ID NO: 236249 - DNA, 25 bp, Probe Sequence
gaggagggactgtcacactggtgct

SEQ ID NO: 236250 - DNA, 25 bp, Probe Sequence
gaggaggagaaaaagctgactcgga

SEQ ID NO: 236251 - DNA, 25 bp, Probe Sequence
gaggttgcagaagctgcagtgaacc

SEQ ID NO: 236252 - DNA, 25 bp, Probe Sequence
gaggcagtagacacgggacaggctt

SEQ ID NO: 236253 - DNA, 25 bp, Probe Sequence
gaggaccaggtcaagggacgttctg

SEQ ID NO: 236254 - DNA, 25 bp, Probe Sequence
gaggaactgagtgtgtccacgttgg

SEQ ID NO: 236255 - DNA, 25 bp, Probe Sequence
gaggacactggtggttctactgacc

SEQ ID NO: 236256 - DNA, 25 bp, Probe Sequence
gaggattgtcgtgtttgactgactc

SEQ ID NO: 236257 - DNA, 25 bp, Probe Sequence
gaggatgtgcggaagctttactggt

SEQ ID NO: 236258 - DNA, 25 bp, Probe Sequence
gatggtgctctgcatcagtggttca

SEQ ID NO: 236259 - DNA, 25 bp, Probe Sequence
gatggtgctctgcatcagtggttca

SEQ ID NO: 236260 - DNA, 25 bp, Probe Sequence
gaggtcagcatgtctattcagcttc

SEQ ID NO: 236261 - DNA, 25 bp, Probe Sequence
gaggatctgatggatatggcagtgg

SEQ ID NO: 236262 - DNA, 25 bp, Probe Sequence
gaggttttctatggcagtgctgggc

SEQ ID NO: 236263 - DNA, 25 bp, Probe Sequence
gaggagtactacgaggtgctggacc

SEQ ID NO: 236264 - DNA, 25 bp, Probe Sequence
gaggatgctgagaacggtgtctttc

SEQ ID NO: 236265 - DNA, 25 bp, Probe Sequence
gatggggataactggtcctcatacc

SEQ ID NO: 236266 - DNA, 25 bp, Probe Sequence
gggagtattgactggtcccttacct

SEQ ID NO: 236267 - DNA, 25 bp, Probe Sequence
gaggagtttgactctgacaccctcc

SEQ ID NO: 236268 - DNA, 25 bp, Probe Sequence
gaggagtttgactctgacaccctcc

SEQ ID NO: 236269 - DNA, 25 bp, Probe Sequence
gaggattttgattcctatctcgttc

SEQ ID NO: 236270 - DNA, 25 bp, Probe Sequence
gatggtgcttggtgagtcttggttc

SEQ ID NO: 236271 - DNA, 25 bp, Probe Sequence
gaggttgcgagagatgtttggttta

SEQ ID NO: 236272 - DNA, 25 bp, Probe Sequence
gaggttgcgagagatgtttggttta

SEQ ID NO: 236273 - DNA, 25 bp, Probe Sequence
gaggtagcttatgaatttgatttta

SEQ ID NO: 236274 - DNA, 25 bp, Probe Sequence
gaggtatgttttagatatagtttac

SEQ ID NO: 236275 - DNA, 25 bp, Probe Sequence
gaggtttttctgaagacagtctttt

SEQ ID NO: 236276 - DNA, 25 bp, Probe Sequence
gaggacttttgggaagagattcctt

SEQ ID NO: 236277 - DNA, 25 bp, Probe Sequence
gaggcgtttctataagaattggcat

SEQ ID NO: 236278 - DNA, 25 bp, Probe Sequence
gaggcgtttctttcaaagctatagg

SEQ ID NO: 236279 - DNA, 25 bp, Probe Sequence
gaggcaggttgccccaaagtgtttt

SEQ ID NO: 236280 - DNA, 25 bp, Probe Sequence
gaggaggaacttcccaagtgctttt

SEQ ID NO: 236281 - DNA, 25 bp, Probe Sequence
tgggggacacttcagggtactacca

SEQ ID NO: 236282 - DNA, 25 bp, Probe Sequence
ggtggaatacgtcattggtcgctac

SEQ ID NO: 236283 - DNA, 25 bp, Probe Sequence
gaggaaatccaagtcaaggtcgcga

SEQ ID NO: 236284 - DNA, 25 bp, Probe Sequence
gaggattgcttaggctaaggtggga

SEQ ID NO: 236285 - DNA, 25 bp, Probe Sequence
gaggatcgcttgggctcaagagttt

SEQ ID NO: 236286 - DNA, 25 bp, Probe Sequence
gaggatctcttgagctcaggaggtt

SEQ ID NO: 236287 - DNA, 25 bp, Probe Sequence
gaggatcacttgaacctgggaggtg

SEQ ID NO: 236288 - DNA, 25 bp, Probe Sequence
gaggatcaattgagcccaggagttc

SEQ ID NO: 236289 - DNA, 25 bp, Probe Sequence
gaggatcacttgagcccaggagatc

SEQ ID NO: 236290 - DNA, 25 bp, Probe Sequence
gaggagccggcgaccaagaagatgc

SEQ ID NO: 236291 - DNA, 25 bp, Probe Sequence
gaggacccagtgagacgatggacct

SEQ ID NO: 236292 - DNA, 25 bp, Probe Sequence
gaggttccagtgtctcctggtaact

SEQ ID NO: 236293 - DNA, 25 bp, Probe Sequence
gaggttgaagtgtctttggcccatt

SEQ ID NO: 236294 - DNA, 25 bp, Probe Sequence
gaggttaagctactgattgctgcta

SEQ ID NO: 236295 - DNA, 25 bp, Probe Sequence
gaggattaatcgatatgtcttcagt

SEQ ID NO: 236296 - DNA, 25 bp, Probe Sequence
gaggattcccagatgtgatcatagc

SEQ ID NO: 236297 - DNA, 25 bp, Probe Sequence
gaggacccacaagtatgatcctgct

SEQ ID NO: 236298 - DNA, 25 bp, Probe Sequence
gaggacccatcaatgaagattcttg

SEQ ID NO: 236299 - DNA, 25 bp, Probe Sequence
gaggactctcatgggagactcatgt

SEQ ID NO: 236300 - DNA, 25 bp, Probe Sequence
gaggattgcacggaggagctctttg

SEQ ID NO: 236301 - DNA, 25 bp, Probe Sequence
gaggatctacagcaggacttccaga

SEQ ID NO: 236302 - DNA, 25 bp, Probe Sequence
gaggattgatctctggcacaaccag

SEQ ID NO: 236303 - DNA, 25 bp, Probe Sequence
gaggttgcagtaagccaagatcgtg

SEQ ID NO: 236304 - DNA, 25 bp, Probe Sequence
gaggttgatgataagtcacaccctt

SEQ ID NO: 236305 - DNA, 25 bp, Probe Sequence
gatgaatgaattcagatccccctaa

SEQ ID NO: 236306 - DNA, 25 bp, Probe Sequence
gaggaggattaagtccacctgtccc

SEQ ID NO: 236307 - DNA, 25 bp, Probe Sequence
gaggaggaggtagtaggacgtccct

SEQ ID NO: 236308 - DNA, 25 bp, Probe Sequence
gaggaggaacaagaggaggaccgct

SEQ ID NO: 236309 - DNA, 25 bp, Probe Sequence
gaggttacacagactgagaaggaca

SEQ ID NO: 236310 - DNA, 25 bp, Probe Sequence
gaggttttcagatggaagtgagagg

SEQ ID NO: 236311 - DNA, 25 bp, Probe Sequence
gaggctacgtcacccaaagtagatg

SEQ ID NO: 236312 - DNA, 25 bp, Probe Sequence
gaggctaatctatcacttgttaatg

SEQ ID NO: 236313 - DNA, 25 bp, Probe Sequence
gaggttaccaccattgtgatcaaga

SEQ ID NO: 236314 - DNA, 25 bp, Probe Sequence
gaggatgacccacagttggtaggca

SEQ ID NO: 236315 - DNA, 25 bp, Probe Sequence
gaggttcacaagcaggtggttgaga

SEQ ID NO: 236316 - DNA, 25 bp, Probe Sequence
gaggttgcaggcagggtgcgaatgg

SEQ ID NO: 236317 - DNA, 25 bp, Probe Sequence
gaggttgcagtgagctgagatcatg

SEQ ID NO: 236318 - DNA, 25 bp, Probe Sequence
gaggttgcagtgagctgagatcaca

SEQ ID NO: 236319 - DNA, 25 bp, Probe Sequence
gaggttggatgcagtggctcactcc

SEQ ID NO: 236320 - DNA, 25 bp, Probe Sequence
gaggctagagtgcttttagcctttt

SEQ ID NO: 236321 - DNA, 25 bp, Probe Sequence
gaggtataatgactatattcagcct

SEQ ID NO: 236322 - DNA, 25 bp, Probe Sequence
gaggtatataggcagcaacagcaac

SEQ ID NO: 236323 - DNA, 25 bp, Probe Sequence
gaggcttcagtgtacagcaaccaaa

SEQ ID NO: 236324 - DNA, 25 bp, Probe Sequence
gaggattcagtagtacacatacaac

SEQ ID NO: 236325 - DNA, 25 bp, Probe Sequence
gaggaataagcagacctacagcact

SEQ ID NO: 236326 - DNA, 25 bp, Probe Sequence
gaggacaaatcagttctctgtgacc

SEQ ID NO: 236327 - DNA, 25 bp, Probe Sequence
gaggatacacacgtttgtttcttcg

SEQ ID NO: 236328 - DNA, 25 bp, Probe Sequence
gaggttcaaggtgctgctttgcatg

SEQ ID NO: 236329 - DNA, 25 bp, Probe Sequence
gaggttcagaggatcctgctggagc

SEQ ID NO: 236330 - DNA, 25 bp, Probe Sequence
gaggactgagggaatcctgtacagg

SEQ ID NO: 236331 - DNA, 25 bp, Probe Sequence
gaggagtatggaccagccttacatt

SEQ ID NO: 236332 - DNA, 25 bp, Probe Sequence
gaggactgtgtgaccaccattgtct

SEQ ID NO: 236333 - DNA, 25 bp, Probe Sequence
gaggactatgagacccatcagctgc

SEQ ID NO: 236334 - DNA, 25 bp, Probe Sequence
gaggactatgagacccatcagctgc

SEQ ID NO: 236335 - DNA, 25 bp, Probe Sequence
gaggactatgagacccatcagctgc

SEQ ID NO: 236336 - DNA, 25 bp, Probe Sequence
gaggactatgagacccatcagctgc

SEQ ID NO: 236337 - DNA, 25 bp, Probe Sequence
gaggactatgagacccatcagctgc

SEQ ID NO: 236338 - DNA, 25 bp, Probe Sequence
gaggatctatgagaatgccattgcg

SEQ ID NO: 236339 - DNA, 25 bp, Probe Sequence
gaggcatgctaaaaataattgaggt

SEQ ID NO: 236340 - DNA, 25 bp, Probe Sequence
gaggcatttttactactattctgtt

SEQ ID NO: 236341 - DNA, 25 bp, Probe Sequence
gaggatgtgtttcatactttagcat

SEQ ID NO: 236342 - DNA, 25 bp, Probe Sequence
gaggatttgtatctaattcatgaat

SEQ ID NO: 236343 - DNA, 25 bp, Probe Sequence
gaggatttgctgaaaagttgcactt

SEQ ID NO: 236344 - DNA, 25 bp, Probe Sequence
gaggaggtgctttacactgtacttt

SEQ ID NO: 236345 - DNA, 25 bp, Probe Sequence
gaggacgaggcttaaaaacttctca

SEQ ID NO: 236346 - DNA, 25 bp, Probe Sequence
gaggagcaaggtttaaatttgttat

SEQ ID NO: 236347 - DNA, 25 bp, Probe Sequence
gaggacaattttgacaacttttgac

SEQ ID NO: 236348 - DNA, 25 bp, Probe Sequence
tcaggccgttttagaagagctttta

SEQ ID NO: 236349 - DNA, 25 bp, Probe Sequence
gaggccagtttaaataggctttcaa

SEQ ID NO: 236350 - DNA, 25 bp, Probe Sequence
gaggccaaatttttagctgttttat

SEQ ID NO: 236351 - DNA, 25 bp, Probe Sequence
ggcccacacgttgtatttggttgat

SEQ ID NO: 236352 - DNA, 25 bp, Probe Sequence
gaggccacggggatatttgagtttc

SEQ ID NO: 236353 - DNA, 25 bp, Probe Sequence
gaggccccggagaaactgaggtatg

SEQ ID NO: 236354 - DNA, 25 bp, Probe Sequence
gaggacccctagaaagtagatttgt

SEQ ID NO: 236355 - DNA, 25 bp, Probe Sequence
gaggaccctctggattaatcgaatt

SEQ ID NO: 236356 - DNA, 25 bp, Probe Sequence
gaggagcctgttctgtaatcgataa

SEQ ID NO: 236357 - DNA, 25 bp, Probe Sequence
gatgccggttggtgtcaaagataga

SEQ ID NO: 236358 - DNA, 25 bp, Probe Sequence
gatgttcctttgtggcaaaaacatg

SEQ ID NO: 236359 - DNA, 25 bp, Probe Sequence
gaggatcgcccgtggcaaaatcaca

SEQ ID NO: 236360 - DNA, 25 bp, Probe Sequence
gaggctcccgtgcaggaagagaagc

SEQ ID NO: 236361 - DNA, 25 bp, Probe Sequence
gaggctcccgtgcaggaagagaagc

SEQ ID NO: 236362 - DNA, 25 bp, Probe Sequence
gaggagcttcacggaggcaagaggg

SEQ ID NO: 236363 - DNA, 25 bp, Probe Sequence
gaggactaaccgcgcagagattccc

SEQ ID NO: 236364 - DNA, 25 bp, Probe Sequence
gaggaccaatactgaggtctatgcc

SEQ ID NO: 236365 - DNA, 25 bp, Probe Sequence
gaggcccacagactcaaagttactc

SEQ ID NO: 236366 - DNA, 25 bp, Probe Sequence
gaggccaagagcagaaagggacatc

SEQ ID NO: 236367 - DNA, 25 bp, Probe Sequence
gaggctgaagcagcggaagggttgc

SEQ ID NO: 236368 - DNA, 25 bp, Probe Sequence
gaggaaaatggggagcaggaggctg

SEQ ID NO: 236369 - DNA, 25 bp, Probe Sequence
gaggccacgggggagaaagtgctgc

SEQ ID NO: 236370 - DNA, 25 bp, Probe Sequence
gatgtggccgggagtgacaagtacc

SEQ ID NO: 236371 - DNA, 25 bp, Probe Sequence
gaggagggatggagatgtatactga

SEQ ID NO: 236372 - DNA, 25 bp, Probe Sequence
gaggaggagtctgaccacaactgag

SEQ ID NO: 236373 - DNA, 25 bp, Probe Sequence
gaggttgagttcgagaccagcctgg

SEQ ID NO: 236374 - DNA, 25 bp, Probe Sequence
gaggcttgcagcatggacaccaact

SEQ ID NO: 236375 - DNA, 25 bp, Probe Sequence
gaggcaatgcattcgtaacacagat

SEQ ID NO: 236376 - DNA, 25 bp, Probe Sequence
gaggcagcaatgctgttaactgcat

SEQ ID NO: 236377 - DNA, 25 bp, Probe Sequence
gaggagactggaagtttctgcattc

SEQ ID NO: 236378 - DNA, 25 bp, Probe Sequence
gaggatggctcgatgttttgcagct

SEQ ID NO: 236379 - DNA, 25 bp, Probe Sequence
gaggaggatctgatggatatggcag

SEQ ID NO: 236380 - DNA, 25 bp, Probe Sequence
gatggaaactacttgaagccgccca

SEQ ID NO: 236381 - DNA, 25 bp, Probe Sequence
gaggaagacaaaatgccgccctacg

SEQ ID NO: 236382 - DNA, 25 bp, Probe Sequence
gaggcattgatattcaaccggctta

SEQ ID NO: 236383 - DNA, 25 bp, Probe Sequence
gaggttggactccacgagtgtggca

SEQ ID NO: 236384 - DNA, 25 bp, Probe Sequence
gaggttggagctggcacatggggag

SEQ ID NO: 236385 - DNA, 25 bp, Probe Sequence
gaggttggtggaccatggagtccct

SEQ ID NO: 236386 - DNA, 25 bp, Probe Sequence
gaggatagtgtgggtcagaggtgcc

SEQ ID NO: 236387 - DNA, 25 bp, Probe Sequence
gaggatagagtggcctgagagcagt

SEQ ID NO: 236388 - DNA, 25 bp, Probe Sequence
gaggataagtctctggagcagaatt

SEQ ID NO: 236389 - DNA, 25 bp, Probe Sequence
gaggaacttctcttgggcagaacga

SEQ ID NO: 236390 - DNA, 25 bp, Probe Sequence
gaggaccttatctgtgcgtgaaaca

SEQ ID NO: 236391 - DNA, 25 bp, Probe Sequence
gaggatgcctgctataactgcggta

SEQ ID NO: 236392 - DNA, 25 bp, Probe Sequence
gaggatggctcatgatgcacgtgtt

SEQ ID NO: 236393 - DNA, 25 bp, Probe Sequence
gaggaggcaaggccacattgtcgcc

SEQ ID NO: 236394 - DNA, 25 bp, Probe Sequence
gaggcttcaggtacaactggccaca

SEQ ID NO: 236395 - DNA, 25 bp, Probe Sequence
gaggcttcaggtacaactggccaca

SEQ ID NO: 236396 - DNA, 25 bp, Probe Sequence
gaggcttcaggtacaactggccaca

SEQ ID NO: 236397 - DNA, 25 bp, Probe Sequence
gaggcggaggttgagctgagaagag

SEQ ID NO: 236398 - DNA, 25 bp, Probe Sequence
gaggccgcggatagcggggaaccac

SEQ ID NO: 236399 - DNA, 25 bp, Probe Sequence
gaggaacctgaacctgggaaccatg

SEQ ID NO: 236400 - DNA, 25 bp, Probe Sequence
gaggaacctaaagttgcaacagctt

SEQ ID NO: 236401 - DNA, 25 bp, Probe Sequence
gaggaacctgagtgcctcagtcatc

SEQ ID NO: 236402 - DNA, 25 bp, Probe Sequence
gaggacacctgtgtgcagtatgtgc

SEQ ID NO: 236403 - DNA, 25 bp, Probe Sequence
gaggaaggcttgtatgcctcatagc

SEQ ID NO: 236404 - DNA, 25 bp, Probe Sequence
gaggaaggcaaactggtcaacaagt

SEQ ID NO: 236405 - DNA, 25 bp, Probe Sequence
gaggaagataaacgcccacaacaat

SEQ ID NO: 236406 - DNA, 25 bp, Probe Sequence
gaggaggcagatgaggcttacgaac

SEQ ID NO: 236407 - DNA, 25 bp, Probe Sequence
gaggaggagatcgggcagttggtga

SEQ ID NO: 236408 - DNA, 25 bp, Probe Sequence
gaggaagtaactgcagattgtggtg

SEQ ID NO: 236409 - DNA, 25 bp, Probe Sequence
gaggaagtgcactggcactgctggg

SEQ ID NO: 236410 - DNA, 25 bp, Probe Sequence
gaggacaatgactattgcatcttca

SEQ ID NO: 236411 - DNA, 25 bp, Probe Sequence
gaggccagcgaggactgcatctcgc

SEQ ID NO: 236412 - DNA, 25 bp, Probe Sequence
gaggatgacgatgtcgataccaaga

SEQ ID NO: 236413 - DNA, 25 bp, Probe Sequence
gaggatgacgatgtcgataccaaga

SEQ ID NO: 236414 - DNA, 25 bp, Probe Sequence
gaggagatgccacataaaccacaga

SEQ ID NO: 236415 - DNA, 25 bp, Probe Sequence
gaggaagccgaaaacaccctgcaat

SEQ ID NO: 236416 - DNA, 25 bp, Probe Sequence
gaggagaggggaaccctcctccatc

SEQ ID NO: 236417 - DNA, 25 bp, Probe Sequence
gaggaagagttagggcctctccctc

SEQ ID NO: 236418 - DNA, 25 bp, Probe Sequence
gaggaaggtccaggagggacgcctg

SEQ ID NO: 236419 - DNA, 25 bp, Probe Sequence
gaggaagggcgagtaggggcacctg

SEQ ID NO: 236420 - DNA, 25 bp, Probe Sequence
gaggaaagagccttgcgagggccct

SEQ ID NO: 236421 - DNA, 25 bp, Probe Sequence
gaggacaaacctctgtgcaggacct

SEQ ID NO: 236422 - DNA, 25 bp, Probe Sequence
gaggaacatcacatcatttagggca

SEQ ID NO: 236423 - DNA, 25 bp, Probe Sequence
gaggaaaactgggtagagggcaagg

SEQ ID NO: 236424 - DNA, 25 bp, Probe Sequence
gaggacaaagctggcgctcaaggtc

SEQ ID NO: 236425 - DNA, 25 bp, Probe Sequence
gaggctcagcaagtgccatgctaca

SEQ ID NO: 236426 - DNA, 25 bp, Probe Sequence
gaggctgcagcttgagctacaatca

SEQ ID NO: 236427 - DNA, 25 bp, Probe Sequence
gaggatcagcagtagcgacatctca

SEQ ID NO: 236428 - DNA, 25 bp, Probe Sequence
gaggatccagaagagcatctcccag

SEQ ID NO: 236429 - DNA, 25 bp, Probe Sequence
gaggatgacaaagacagtgaccagg

SEQ ID NO: 236430 - DNA, 25 bp, Probe Sequence
gaggatggcaaagagagtcgcatct

SEQ ID NO: 236431 - DNA, 25 bp, Probe Sequence
gaggatgggcgatgacagttgtttc

SEQ ID NO: 236432 - DNA, 25 bp, Probe Sequence
gaggatgggcctagcagatgaagct

SEQ ID NO: 236433 - DNA, 25 bp, Probe Sequence
gaggctgaggccggagaattgcttg

SEQ ID NO: 236434 - DNA, 25 bp, Probe Sequence
gaggaagcccagtagccattttgta

SEQ ID NO: 236435 - DNA, 25 bp, Probe Sequence
gaggagagttcagagtttatttgca

SEQ ID NO: 236436 - DNA, 25 bp, Probe Sequence
gaggagtttatcagtattcatcttc

SEQ ID NO: 236437 - DNA, 25 bp, Probe Sequence
gaggagttagtcatgtgaggcgctt

SEQ ID NO: 236438 - DNA, 25 bp, Probe Sequence
gaggagtgggacattgcaggtccgc

SEQ ID NO: 236439 - DNA, 25 bp, Probe Sequence
gaggaaggagattttggagatccct

SEQ ID NO: 236440 - DNA, 25 bp, Probe Sequence
gaggacctgagtttgggagagtggt

SEQ ID NO: 236441 - DNA, 25 bp, Probe Sequence
gaggacaccagggtgggggtgaagg

SEQ ID NO: 236442 - DNA, 25 bp, Probe Sequence
gaggcaacaggtctagggttaagga

SEQ ID NO: 236443 - DNA, 25 bp, Probe Sequence
gatggctaccgtctgggacagtata

SEQ ID NO: 236444 - DNA, 25 bp, Probe Sequence
gatggcgaccgtgtaaatggtatta

SEQ ID NO: 236445 - DNA, 25 bp, Probe Sequence
gttgtagccggtgaattgagtcgta

SEQ ID NO: 236446 - DNA, 25 bp, Probe Sequence
gattaaccgagataactagtagtaa

SEQ ID NO: 236447 - DNA, 25 bp, Probe Sequence
ttttcccgaaacacacattggtact

SEQ ID NO: 236448 - DNA, 25 bp, Probe Sequence
gttccgggagaattggccattggta

SEQ ID NO: 236449 - DNA, 25 bp, Probe Sequence
gattacggtaacggccacttggcca

SEQ ID NO: 236450 - DNA, 25 bp, Probe Sequence
gttcatcgtaaacaccaacgtgccc

SEQ ID NO: 236451 - DNA, 25 bp, Probe Sequence
gatctttgaaaacactacacagggc

SEQ ID NO: 236452 - DNA, 25 bp, Probe Sequence
gatctttgaacaacgaagggcgtgg

SEQ ID NO: 236453 - DNA, 25 bp, Probe Sequence
gatctgaacaaaagtaagggcaagg

SEQ ID NO: 236454 - DNA, 25 bp, Probe Sequence
gatgctggaaactgtcgacggccat

SEQ ID NO: 236455 - DNA, 25 bp, Probe Sequence
gatgcctaagactgtgaggacccag

SEQ ID NO: 236456 - DNA, 25 bp, Probe Sequence
gatggctggatcgcttgggagaaag

SEQ ID NO: 236457 - DNA, 25 bp, Probe Sequence
gaggcaggatcagtttgggcccagg

SEQ ID NO: 236458 - DNA, 25 bp, Probe Sequence
gaggagtccaaggtgagagctgcca

SEQ ID NO: 236459 - DNA, 25 bp, Probe Sequence
gaggaccacaaccatgatctgatgc

SEQ ID NO: 236460 - DNA, 25 bp, Probe Sequence
gaggatctcacttgcttatctgaag

SEQ ID NO: 236461 - DNA, 25 bp, Probe Sequence
gaggagctagattcatatcctaagt

SEQ ID NO: 236462 - DNA, 25 bp, Probe Sequence
gatgggctactcatacagttagatt

SEQ ID NO: 236463 - DNA, 25 bp, Probe Sequence
gatgggctcacatatacgaatgaat

SEQ ID NO: 236464 - DNA, 25 bp, Probe Sequence
gaggccatccaggtactaaggaccc

SEQ ID NO: 236465 - DNA, 25 bp, Probe Sequence
gaggagcagggaataccacggcccc

SEQ ID NO: 236466 - DNA, 25 bp, Probe Sequence
gaggaggaggagtagggccgcctcg

SEQ ID NO: 236467 - DNA, 25 bp, Probe Sequence
gaggataaggagtggatgcccgtca

SEQ ID NO: 236468 - DNA, 25 bp, Probe Sequence
gaggagaagtgtggggtgccgttca

SEQ ID NO: 236469 - DNA, 25 bp, Probe Sequence
gaggagagatgggtggcctgccatg

SEQ ID NO: 236470 - DNA, 25 bp, Probe Sequence
gaggagagtgaggtgtccagcctgc

SEQ ID NO: 236471 - DNA, 25 bp, Probe Sequence
gaggagggcagaggacgacctgaag

SEQ ID NO: 236472 - DNA, 25 bp, Probe Sequence
gaggaggacgtggaggacctggaaa

SEQ ID NO: 236473 - DNA, 25 bp, Probe Sequence
gaggaggacgtggaggacctggaaa

SEQ ID NO: 236474 - DNA, 25 bp, Probe Sequence
gaggaggtctgtgggctgaactccg

SEQ ID NO: 236475 - DNA, 25 bp, Probe Sequence
gaggctggcattgaggctaacctcc

SEQ ID NO: 236476 - DNA, 25 bp, Probe Sequence
gaggcttatctgaggccaaacccgc

SEQ ID NO: 236477 - DNA, 25 bp, Probe Sequence
gaggccatagattcggccagacccc

SEQ ID NO: 236478 - DNA, 25 bp, Probe Sequence
gaggagcaaaactcacagacaccac

SEQ ID NO: 236479 - DNA, 25 bp, Probe Sequence
gaggaggagaccgaagagacccagc

SEQ ID NO: 236480 - DNA, 25 bp, Probe Sequence
gaggaggaggacaaggaggcggcac

SEQ ID NO: 236481 - DNA, 25 bp, Probe Sequence
gaggaggaggcggaggaggaggtgg

SEQ ID NO: 236482 - DNA, 25 bp, Probe Sequence
gaggcgaaagcggagggggccgcgc

SEQ ID NO: 236483 - DNA, 25 bp, Probe Sequence
gaggccgccagggagaagggccagg

SEQ ID NO: 236484 - DNA, 25 bp, Probe Sequence
gaggcacccaagggtatgctggccc

SEQ ID NO: 236485 - DNA, 25 bp, Probe Sequence
gaggcacccaatgagttctatgatg

SEQ ID NO: 236486 - DNA, 25 bp, Probe Sequence
gaggcacccaatgagttctatgatg

SEQ ID NO: 236487 - DNA, 25 bp, Probe Sequence
gggacgtcaatgcttactattcggt

SEQ ID NO: 236488 - DNA, 25 bp, Probe Sequence
gaggcacctgcatttgttgagtttc

SEQ ID NO: 236489 - DNA, 25 bp, Probe Sequence
gaggacctgcactgtctaaatgaag

SEQ ID NO: 236490 - DNA, 25 bp, Probe Sequence
gaggaggtactagttccaagcaaca

SEQ ID NO: 236491 - DNA, 25 bp, Probe Sequence
gaggaggttaaggttctagagcaca

SEQ ID NO: 236492 - DNA, 25 bp, Probe Sequence
gaggcacagatgtaaggtttataac

SEQ ID NO: 236493 - DNA, 25 bp, Probe Sequence
gaggcactagattaggagtcttcaa

SEQ ID NO: 236494 - DNA, 25 bp, Probe Sequence
gaggactaagctaagatgtttgcaa

SEQ ID NO: 236495 - DNA, 25 bp, Probe Sequence
gaggatgccatagaagtttgcaaga

SEQ ID NO: 236496 - DNA, 25 bp, Probe Sequence
gaggatgtcattcaaattgtgaaga

SEQ ID NO: 236497 - DNA, 25 bp, Probe Sequence
gaggatgatgactcaaatctggaac

SEQ ID NO: 236498 - DNA, 25 bp, Probe Sequence
gaggatgtactgggacttggcattt

SEQ ID NO: 236499 - DNA, 25 bp, Probe Sequence
gaggatgaattgggggatagatcta

SEQ ID NO: 236500 - DNA, 25 bp, Probe Sequence
gaggacaagtgaggccgtcagtctt

SEQ ID NO: 236501 - DNA, 25 bp, Probe Sequence
gatggacaagcgggacgtggacttc

SEQ ID NO: 236502 - DNA, 25 bp, Probe Sequence
gatgtagccttgtaggctgggttta

SEQ ID NO: 236503 - DNA, 25 bp, Probe Sequence
gaggagcagctttaggtatggattg

SEQ ID NO: 236504 - DNA, 25 bp, Probe Sequence
gaggacagttcagaggaggattcag

SEQ ID NO: 236505 - DNA, 25 bp, Probe Sequence
gaggcacaagaagaggacgttcctg

SEQ ID NO: 236506 - DNA, 25 bp, Probe Sequence
gaggaaaagaccttgacatattcct

SEQ ID NO: 236507 - DNA, 25 bp, Probe Sequence
gatggagaaacacctaaatcttcac

SEQ ID NO: 236508 - DNA, 25 bp, Probe Sequence
gaggaggagaaattaaccttcatca

SEQ ID NO: 236509 - DNA, 25 bp, Probe Sequence
gaggaggtgaatttatagcactgaa

SEQ ID NO: 236510 - DNA, 25 bp, Probe Sequence
gaggaggggtcagaagacgatagca

SEQ ID NO: 236511 - DNA, 25 bp, Probe Sequence
gaggaggaggaagaggaagaggagg

SEQ ID NO: 236512 - DNA, 25 bp, Probe Sequence
gaggaggaggaagagggcgaggagg

SEQ ID NO: 236513 - DNA, 25 bp, Probe Sequence
gaggaggaggaagagggcgaggagg

SEQ ID NO: 236514 - DNA, 25 bp, Probe Sequence
gaggaggaggatcctgcggaggagg

SEQ ID NO: 236515 - DNA, 25 bp, Probe Sequence
gaggaggaggtcttcgacagcatcg

SEQ ID NO: 236516 - DNA, 25 bp, Probe Sequence
gaggaaggatgtctgcagaactttg

SEQ ID NO: 236517 - DNA, 25 bp, Probe Sequence
gaggaggaggatgtgaaactcttaa

SEQ ID NO: 236518 - DNA, 25 bp, Probe Sequence
gaggaggactctcatacaactctgc

SEQ ID NO: 236519 - DNA, 25 bp, Probe Sequence
gaggatgaactcattcacaaatcca

SEQ ID NO: 236520 - DNA, 25 bp, Probe Sequence
gaggaactcttgatcaagatgccca

SEQ ID NO: 236521 - DNA, 25 bp, Probe Sequence
gaggaactgggtggaaagctgccag

SEQ ID NO: 236522 - DNA, 25 bp, Probe Sequence
gaggagatcatgaagctcaagaagc

SEQ ID NO: 236523 - DNA, 25 bp, Probe Sequence
gaggcacatgagagcttagactggc

SEQ ID NO: 236524 - DNA, 25 bp, Probe Sequence
gaggagagagacattcagacagagg

SEQ ID NO: 236525 - DNA, 25 bp, Probe Sequence
gaggaagaatgccttcgccagtgtc

SEQ ID NO: 236526 - DNA, 25 bp, Probe Sequence
gaggaagaatgccttcgccagtgtc

SEQ ID NO: 236527 - DNA, 25 bp, Probe Sequence
gatggaggagggtctgcagccagtt

SEQ ID NO: 236528 - DNA, 25 bp, Probe Sequence
gaggagggctggtctacaagttcta

SEQ ID NO: 236529 - DNA, 25 bp, Probe Sequence
gaggcatggggagatactggttcaa

SEQ ID NO: 236530 - DNA, 25 bp, Probe Sequence
gatggaggggaaatcactggagatc

SEQ ID NO: 236531 - DNA, 25 bp, Probe Sequence
gaggacaaaaattactgagtggccc

SEQ ID NO: 236532 - DNA, 25 bp, Probe Sequence
gaggaagaaagatgactgatgtggt

SEQ ID NO: 236533 - DNA, 25 bp, Probe Sequence
gaggcaggaaactaactggtgtgag

SEQ ID NO: 236534 - DNA, 25 bp, Probe Sequence
gaggaggaagaagtggctgaggtgg

SEQ ID NO: 236535 - DNA, 25 bp, Probe Sequence
gaggagtgtggcaagttcggggccg

SEQ ID NO: 236536 - DNA, 25 bp, Probe Sequence
gaggaggtgctcaagatgtccacgg

SEQ ID NO: 236537 - DNA, 25 bp, Probe Sequence
gaggacgtgctcaaggatgacaaga

SEQ ID NO: 236538 - DNA, 25 bp, Probe Sequence
gaggcaactgtggcagggaaaaaaa

SEQ ID NO: 236539 - DNA, 25 bp, Probe Sequence
gaggcagagggaggccgaggcacaa

SEQ ID NO: 236540 - DNA, 25 bp, Probe Sequence
gaggcagagggaggccgaggcacaa

SEQ ID NO: 236541 - DNA, 25 bp, Probe Sequence
gaggaggatgaagccgcattgcaca

SEQ ID NO: 236542 - DNA, 25 bp, Probe Sequence
gaggagcagagatacacctgccaat

SEQ ID NO: 236543 - DNA, 25 bp, Probe Sequence
gaggagcagagatacacgtgccatg

SEQ ID NO: 236544 - DNA, 25 bp, Probe Sequence
gaggagcagagatacacgtgccatg

SEQ ID NO: 236545 - DNA, 25 bp, Probe Sequence
gaggagggcaagaaggatgcctgca

SEQ ID NO: 236546 - DNA, 25 bp, Probe Sequence
gaggagggcaagaaggatgcctgca

SEQ ID NO: 236547 - DNA, 25 bp, Probe Sequence
gaggatgggcacaacaggctgccga

SEQ ID NO: 236548 - DNA, 25 bp, Probe Sequence
gaggaggagcacacgttgcacattc

SEQ ID NO: 236549 - DNA, 25 bp, Probe Sequence
gaggcaggagaatctcttgaaaccg

SEQ ID NO: 236550 - DNA, 25 bp, Probe Sequence
gaggcaggagaatcactcaaaccca

SEQ ID NO: 236551 - DNA, 25 bp, Probe Sequence
gaggcaggcattccaaacctggacc

SEQ ID NO: 236552 - DNA, 25 bp, Probe Sequence
gaggcggggcagaaagccatggacc

SEQ ID NO: 236553 - DNA, 25 bp, Probe Sequence
gaggcatgggagtctaagacagaag

SEQ ID NO: 236554 - DNA, 25 bp, Probe Sequence
gaggaagctgagtctttcaccaata

SEQ ID NO: 236555 - DNA, 25 bp, Probe Sequence
gaggaatgcacaattttcagccata

SEQ ID NO: 236556 - DNA, 25 bp, Probe Sequence
gaggcaccagcactttatctgttga

SEQ ID NO: 236557 - DNA, 25 bp, Probe Sequence
gaggagctcagattttaaggctgta

SEQ ID NO: 236558 - DNA, 25 bp, Probe Sequence
gaggcagctctactataaaagctta

SEQ ID NO: 236559 - DNA, 25 bp, Probe Sequence
gaggcagtctattgcaaggaccttc

SEQ ID NO: 236560 - DNA, 25 bp, Probe Sequence
ggggttttgcacagaccaagtatag

SEQ ID NO: 236561 - DNA, 25 bp, Probe Sequence
gaggctttttccatgactcaaggga

SEQ ID NO: 236562 - DNA, 25 bp, Probe Sequence
gaggctcgttttagtgataccgtca

SEQ ID NO: 236563 - DNA, 25 bp, Probe Sequence
gggaagttcttgactctaccaagct

SEQ ID NO: 236564 - DNA, 25 bp, Probe Sequence
gaggagagatttttttgcacgtcct

SEQ ID NO: 236565 - DNA, 25 bp, Probe Sequence
gaggaggttggatttctgccagtgg

SEQ ID NO: 236566 - DNA, 25 bp, Probe Sequence
gaggagttggaggatctggacgctg

SEQ ID NO: 236567 - DNA, 25 bp, Probe Sequence
gaggacgttgaggagatggacaggc

SEQ ID NO: 236568 - DNA, 25 bp, Probe Sequence
gaggacgacgaggatgaggatggag

SEQ ID NO: 236569 - DNA, 25 bp, Probe Sequence
gaggaagaggatgatgaggatgaag

SEQ ID NO: 236570 - DNA, 25 bp, Probe Sequence
gaggagaggattgatagagtgttgc

SEQ ID NO: 236571 - DNA, 25 bp, Probe Sequence
gaggcaggtatcactagaggtcaag

SEQ ID NO: 236572 - DNA, 25 bp, Probe Sequence
gaggcagctgttgcaatcaaggcca

SEQ ID NO: 236573 - DNA, 25 bp, Probe Sequence
gaggactgagtaagaaatgctgccc

SEQ ID NO: 236574 - DNA, 25 bp, Probe Sequence
gaggactgatactgcagtgactgcc

SEQ ID NO: 236575 - DNA, 25 bp, Probe Sequence
gaggactatggaaatgtaggccaaa

SEQ ID NO: 236576 - DNA, 25 bp, Probe Sequence
gaggacttttaattatgacccaatc

SEQ ID NO: 236577 - DNA, 25 bp, Probe Sequence
gatgtcccctttttgagacactaat

SEQ ID NO: 236578 - DNA, 25 bp, Probe Sequence
gaggctctactttatgtagacttaa

SEQ ID NO: 236579 - DNA, 25 bp, Probe Sequence
gaggccaaggaatttggcctgtaaa

SEQ ID NO: 236580 - DNA, 25 bp, Probe Sequence
gaggccagaggcaaaggaaagtaaa

SEQ ID NO: 236581 - DNA, 25 bp, Probe Sequence
gaggcttggatggaaacacggtaaa

SEQ ID NO: 236582 - DNA, 25 bp, Probe Sequence
gaggcattggattggaacgagttac

SEQ ID NO: 236583 - DNA, 25 bp, Probe Sequence
gaggactggtcagaaccgttactgt

SEQ ID NO: 236584 - DNA, 25 bp, Probe Sequence
gatggactaccagaaacggtatgga

SEQ ID NO: 236585 - DNA, 25 bp, Probe Sequence
gatggactcaaagaccttgccgatg

SEQ ID NO: 236586 - DNA, 25 bp, Probe Sequence
gatggactcaaagaccttgccgatg

SEQ ID NO: 236587 - DNA, 25 bp, Probe Sequence
gaggaacaagcatgtctctctgcca

SEQ ID NO: 236588 - DNA, 25 bp, Probe Sequence
gaggaacaagaccgtggctgccctc

SEQ ID NO: 236589 - DNA, 25 bp, Probe Sequence
gaggagaaaccttgggcagctccgg

SEQ ID NO: 236590 - DNA, 25 bp, Probe Sequence
gaggaaaacctctatagcagctccc

SEQ ID NO: 236591 - DNA, 25 bp, Probe Sequence
gaggagatgaaagccatagatggcc

SEQ ID NO: 236592 - DNA, 25 bp, Probe Sequence
gaggagagcgaaggtcataatacac

SEQ ID NO: 236593 - DNA, 25 bp, Probe Sequence
gaggaagtcaggtatatgatttcaa

SEQ ID NO: 236594 - DNA, 25 bp, Probe Sequence
gaggaagtggcttaagatgttcaaa

SEQ ID NO: 236595 - DNA, 25 bp, Probe Sequence
gaggaagtggtctgtctgttaccat

SEQ ID NO: 236596 - DNA, 25 bp, Probe Sequence
gaggaagtcgtgtgtcacgtggcta

SEQ ID NO: 236597 - DNA, 25 bp, Probe Sequence
gaggagtgtcggtagttcttgcagt

SEQ ID NO: 236598 - DNA, 25 bp, Probe Sequence
gaggagttgggtagctccttgtgcc

SEQ ID NO: 236599 - DNA, 25 bp, Probe Sequence
gaggagtggacgctgtccattgcca

SEQ ID NO: 236600 - DNA, 25 bp, Probe Sequence
gaggagaggcacccgatatatgttc

SEQ ID NO: 236601 - DNA, 25 bp, Probe Sequence
gaggcaaagcagccctgtaggcttc

SEQ ID NO: 236602 - DNA, 25 bp, Probe Sequence
gaggacagagtgccctggggcatcc

SEQ ID NO: 236603 - DNA, 25 bp, Probe Sequence
gaggaatctggctgctgtgtagcac

SEQ ID NO: 236604 - DNA, 25 bp, Probe Sequence
gaggagtgaggagtgctgctgtaga

SEQ ID NO: 236605 - DNA, 25 bp, Probe Sequence
gaggagcgatgcgacaggcatgatg

SEQ ID NO: 236606 - DNA, 25 bp, Probe Sequence
gaggacgatgaggatggtgatgagg

SEQ ID NO: 236607 - DNA, 25 bp, Probe Sequence
gaggacgagcgattgaggtgtatgg

SEQ ID NO: 236608 - DNA, 25 bp, Probe Sequence
gaggacgcagcctgtgcagtaaaga

SEQ ID NO: 236609 - DNA, 25 bp, Probe Sequence
gaggacccacatatcattaaaaaaa

SEQ ID NO: 236610 - DNA, 25 bp, Probe Sequence
gaggactcagaagttcaagctaaat

SEQ ID NO: 236611 - DNA, 25 bp, Probe Sequence
gatcgactggagatttactgaagca

SEQ ID NO: 236612 - DNA, 25 bp, Probe Sequence
gatggaggtatgagttagtaacgag

SEQ ID NO: 236613 - DNA, 25 bp, Probe Sequence
gaggcagcgttcagggagattacta

SEQ ID NO: 236614 - DNA, 25 bp, Probe Sequence
gatggagtccctagaaggcttacta

SEQ ID NO: 236615 - DNA, 25 bp, Probe Sequence
gaggagtcaccttgaattattttct

SEQ ID NO: 236616 - DNA, 25 bp, Probe Sequence
gaggagacacaatgagcttagtacc

SEQ ID NO: 236617 - DNA, 25 bp, Probe Sequence
gaggagctcaagcaacttcgaagcc

SEQ ID NO: 236618 - DNA, 25 bp, Probe Sequence
gaggctgcccagaaagcagttaaca

SEQ ID NO: 236619 - DNA, 25 bp, Probe Sequence
gaggcgctgctcgaaagggtttgcc

SEQ ID NO: 236620 - DNA, 25 bp, Probe Sequence
gaggacatgacagaagaggccttcc

SEQ ID NO: 236621 - DNA, 25 bp, Probe Sequence
gaggacgaagcagagagccacaccc

SEQ ID NO: 236622 - DNA, 25 bp, Probe Sequence
gaggaagaggcagtatggcaccatc

SEQ ID NO: 236623 - DNA, 25 bp, Probe Sequence
gaggagcaggtggtcaggcagcaag

SEQ ID NO: 236624 - DNA, 25 bp, Probe Sequence
gaggagatgctgctgaagcgcgagg

SEQ ID NO: 236625 - DNA, 25 bp, Probe Sequence
gaggaagctcttcattggagggttg

SEQ ID NO: 236626 - DNA, 25 bp, Probe Sequence
gaggaagccctggattcagtgagtg

SEQ ID NO: 236627 - DNA, 25 bp, Probe Sequence
gaggagagaccttttgcactgggaa

SEQ ID NO: 236628 - DNA, 25 bp, Probe Sequence
gaggacaggccttgggcagtgggtt

SEQ ID NO: 236629 - DNA, 25 bp, Probe Sequence
gaggacagcagcctcttggaggtgg

SEQ ID NO: 236630 - DNA, 25 bp, Probe Sequence
gaggagacatgcttctggagaagat

SEQ ID NO: 236631 - DNA, 25 bp, Probe Sequence
gaggagacaccagagcaggagatgg

SEQ ID NO: 236632 - DNA, 25 bp, Probe Sequence
gaggagtcaagggagcagggcagct

SEQ ID NO: 236633 - DNA, 25 bp, Probe Sequence
gaggagctggaggcggaggagtgcg

SEQ ID NO: 236634 - DNA, 25 bp, Probe Sequence
gaggagctggaggcggaggagtgcg

SEQ ID NO: 236635 - DNA, 25 bp, Probe Sequence
gaggcagtgggggaggagttgtgtc

SEQ ID NO: 236636 - DNA, 25 bp, Probe Sequence
gaggaatggcagtgaggtttcttca

SEQ ID NO: 236637 - DNA, 25 bp, Probe Sequence
gatggcaggtgataaggttgttgta

SEQ ID NO: 236638 - DNA, 25 bp, Probe Sequence
gaggctgggaagaaggggttgccca

SEQ ID NO: 236639 - DNA, 25 bp, Probe Sequence
gaggctgggaatggaggggcagagc

SEQ ID NO: 236640 - DNA, 25 bp, Probe Sequence
gaggcttacctatgggccaagtatt

SEQ ID NO: 236641 - DNA, 25 bp, Probe Sequence
gaggccttcctatggctgtacaatt

SEQ ID NO: 236642 - DNA, 25 bp, Probe Sequence
gataccataacgtggcagataaaaa

SEQ ID NO: 236643 - DNA, 25 bp, Probe Sequence
gatcttaaaagctccaggcagaaaa

SEQ ID NO: 236644 - DNA, 25 bp, Probe Sequence
gatgttagaaagttcaagccagaag

SEQ ID NO: 236645 - DNA, 25 bp, Probe Sequence
gatgtgttccaacagcagacgggag

SEQ ID NO: 236646 - DNA, 25 bp, Probe Sequence
gaggcgatccagtgatgagtcgggg

SEQ ID NO: 236647 - DNA, 25 bp, Probe Sequence
gaggcaatgccaccatgatacaggg

SEQ ID NO: 236648 - DNA, 25 bp, Probe Sequence
gaggaagctcaggatctgacatgtt

SEQ ID NO: 236649 - DNA, 25 bp, Probe Sequence
gaggagattggagtctgaatggatc

SEQ ID NO: 236650 - DNA, 25 bp, Probe Sequence
gaggagacgtgaggcaactgtggca

SEQ ID NO: 236651 - DNA, 25 bp, Probe Sequence
gaggacctgtcaggctacatggagt

SEQ ID NO: 236652 - DNA, 25 bp, Probe Sequence
gaggacctatcccaaatgtggaatt

SEQ ID NO: 236653 - DNA, 25 bp, Probe Sequence
gatggatttttccaaggctaaattc

SEQ ID NO: 236654 - DNA, 25 bp, Probe Sequence
gaggcagttgttgaaaccaaaatgg

SEQ ID NO: 236655 - DNA, 25 bp, Probe Sequence
gaggcaggtttacaacactacaagt

SEQ ID NO: 236656 - DNA, 25 bp, Probe Sequence
gaggcatcttatgttaacctaccta

SEQ ID NO: 236657 - DNA, 25 bp, Probe Sequence
gaggacttctgcatcttacagtcag

SEQ ID NO: 236658 - DNA, 25 bp, Probe Sequence
gaggacttggtacttactggatacc

SEQ ID NO: 236659 - DNA, 25 bp, Probe Sequence
gaggactttgtgctctactgtttca

SEQ ID NO: 236660 - DNA, 25 bp, Probe Sequence
gaggaacgtggctctagtgtctgga

SEQ ID NO: 236661 - DNA, 25 bp, Probe Sequence
gatggaacaacgcttattttggaag

SEQ ID NO: 236662 - DNA, 25 bp, Probe Sequence
gaggaatgacctgtttctttctgaa

SEQ ID NO: 236663 - DNA, 25 bp, Probe Sequence
gaggcaaacgccaggtgcttattag

SEQ ID NO: 236664 - DNA, 25 bp, Probe Sequence
gaggaagacttcaagggttttacag

SEQ ID NO: 236665 - DNA, 25 bp, Probe Sequence
gatggacgacttgcaggattttcta

SEQ ID NO: 236666 - DNA, 25 bp, Probe Sequence
gaggcagtgaccgaggaatttaaac

SEQ ID NO: 236667 - DNA, 25 bp, Probe Sequence
gaggcaatactgggaaaaacaaatc

SEQ ID NO: 236668 - DNA, 25 bp, Probe Sequence
gaggaagaccgccaaagaacacctg

SEQ ID NO: 236669 - DNA, 25 bp, Probe Sequence
gaggaagacctgcaaagccagctcc

SEQ ID NO: 236670 - DNA, 25 bp, Probe Sequence
gaggcagagaccctgcaatggccac

SEQ ID NO: 236671 - DNA, 25 bp, Probe Sequence
gatggaatatgccccattagccagg

SEQ ID NO: 236672 - DNA, 25 bp, Probe Sequence
gaggaaagccagactgctacactgc

SEQ ID NO: 236673 - DNA, 25 bp, Probe Sequence
gaggcagaagcgcacggagcctgcc

SEQ ID NO: 236674 - DNA, 25 bp, Probe Sequence
gatgagaaacggagtggcctgctcc

SEQ ID NO: 236675 - DNA, 25 bp, Probe Sequence
gaggaaggtggcaagtggccttatg

SEQ ID NO: 236676 - DNA, 25 bp, Probe Sequence
gaggaatgcggggaaacctgtcata

SEQ ID NO: 236677 - DNA, 25 bp, Probe Sequence
gaggcaaacagggaattccgccgat

SEQ ID NO: 236678 - DNA, 25 bp, Probe Sequence
gaggcaaacgggtcatcgagcagct

SEQ ID NO: 236679 - DNA, 25 bp, Probe Sequence
gaggcatacctggggccagaggatg

SEQ ID NO: 236680 - DNA, 25 bp, Probe Sequence
gaggcaagtctggtgcccagaagag

SEQ ID NO: 236681 - DNA, 25 bp, Probe Sequence
gaggaagtgctgagcagcagggaat

SEQ ID NO: 236682 - DNA, 25 bp, Probe Sequence
gaggaagttttcaatcagtgtgatc

SEQ ID NO: 236683 - DNA, 25 bp, Probe Sequence
gaggcaagaaatccctaggacacac

SEQ ID NO: 236684 - DNA, 25 bp, Probe Sequence
gatggccaaagaccggaggaacaac

SEQ ID NO: 236685 - DNA, 25 bp, Probe Sequence
gatggccaaagaccggaggaacaac

SEQ ID NO: 236686 - DNA, 25 bp, Probe Sequence
gatggccaaagaccggaggaacagc

SEQ ID NO: 236687 - DNA, 25 bp, Probe Sequence
gaggccaatgggaccgaggacgaga

SEQ ID NO: 236688 - DNA, 25 bp, Probe Sequence
gaggccattgggttccagaaggtgt

SEQ ID NO: 236689 - DNA, 25 bp, Probe Sequence
gatgacctggggctgccgaagaagt

SEQ ID NO: 236690 - DNA, 25 bp, Probe Sequence
gaggctctggggctgaggggaacat

SEQ ID NO: 236691 - DNA, 25 bp, Probe Sequence
gaggcctccgagatagctgagggaa

SEQ ID NO: 236692 - DNA, 25 bp, Probe Sequence
gaggccttaaaatctgagcagggaa

SEQ ID NO: 236693 - DNA, 25 bp, Probe Sequence
gaggctattcaagatctctggcagt

SEQ ID NO: 236694 - DNA, 25 bp, Probe Sequence
gaggctattcaagatctctggcagt

SEQ ID NO: 236695 - DNA, 25 bp, Probe Sequence
gaggctactatcatacttcctgtgc

SEQ ID NO: 236696 - DNA, 25 bp, Probe Sequence
gaggcttcaatcatagaattctgca

SEQ ID NO: 236697 - DNA, 25 bp, Probe Sequence
gaggactcatctgatagaatcccct

SEQ ID NO: 236698 - DNA, 25 bp, Probe Sequence
gaggactccatggctgagaggctcc

SEQ ID NO: 236699 - DNA, 25 bp, Probe Sequence
gaggactgcaagaggagagctagca

SEQ ID NO: 236700 - DNA, 25 bp, Probe Sequence
gaggactgcaagaggagagctagca

SEQ ID NO: 236701 - DNA, 25 bp, Probe Sequence
gaggcacctctgagctagacagacc

SEQ ID NO: 236702 - DNA, 25 bp, Probe Sequence
gaggcaccacgaagctgtgaactca

SEQ ID NO: 236703 - DNA, 25 bp, Probe Sequence
gaggcacccaaactggaacttcatt

SEQ ID NO: 236704 - DNA, 25 bp, Probe Sequence
gaggccggagaacggccactggtgt

SEQ ID NO: 236705 - DNA, 25 bp, Probe Sequence
gaggctaaggaaggagaatcgctgg

SEQ ID NO: 236706 - DNA, 25 bp, Probe Sequence
gaggctaaggcatgaaaatctcttg

SEQ ID NO: 236707 - DNA, 25 bp, Probe Sequence
gaggctcaggcggagaagtactctc

SEQ ID NO: 236708 - DNA, 25 bp, Probe Sequence
gaggctcagtcgtgagaggagctgg

SEQ ID NO: 236709 - DNA, 25 bp, Probe Sequence
gatggccagtagtggtggacttgcc

SEQ ID NO: 236710 - DNA, 25 bp, Probe Sequence
gaggccaggagttcgggaccggcct

SEQ ID NO: 236711 - DNA, 25 bp, Probe Sequence
gaggcataaggttcgggaagaggtt

SEQ ID NO: 236712 - DNA, 25 bp, Probe Sequence
gaggcatgatgggtccaaggaacct

SEQ ID NO: 236713 - DNA, 25 bp, Probe Sequence
gatggctgaacggaaagtgtacact

SEQ ID NO: 236714 - DNA, 25 bp, Probe Sequence
gaggctagcactgaattcattctac

SEQ ID NO: 236715 - DNA, 25 bp, Probe Sequence
gaggctagaggttcttattctggct

SEQ ID NO: 236716 - DNA, 25 bp, Probe Sequence
gatggccgcccttttaatcatggcc

SEQ ID NO: 236717 - DNA, 25 bp, Probe Sequence
gaggaagccccagattacatgtatc

SEQ ID NO: 236718 - DNA, 25 bp, Probe Sequence
gaggaagggcagacggtacatgtcc

SEQ ID NO: 236719 - DNA, 25 bp, Probe Sequence
gaggaagaggaagaattgcagtcac

SEQ ID NO: 236720 - DNA, 25 bp, Probe Sequence
gaggcaagaggatcgagttaccagt

SEQ ID NO: 236721 - DNA, 25 bp, Probe Sequence
gatgggaaagttgcgttacctgtca

SEQ ID NO: 236722 - DNA, 25 bp, Probe Sequence
gttgataacgtattcggtaccccag

SEQ ID NO: 236723 - DNA, 25 bp, Probe Sequence
gttgttacgggtattcagccttcag

SEQ ID NO: 236724 - DNA, 25 bp, Probe Sequence
gatcgtttgacgggacttcaggttc

SEQ ID NO: 236725 - DNA, 25 bp, Probe Sequence
gatgcttaggcagggtacttcgttc

SEQ ID NO: 236726 - DNA, 25 bp, Probe Sequence
gatgttgagtgcgccgcactgtgcc

SEQ ID NO: 236727 - DNA, 25 bp, Probe Sequence
gaggaagatctggcgtcacatggct

SEQ ID NO: 236728 - DNA, 25 bp, Probe Sequence
gaggactgtgtggtgatgatctggc

SEQ ID NO: 236729 - DNA, 25 bp, Probe Sequence
gaggaatgtgttagtgtctggagcc

SEQ ID NO: 236730 - DNA, 25 bp, Probe Sequence
gaggaagtttgtcgctgatggcatc

SEQ ID NO: 236731 - DNA, 25 bp, Probe Sequence
gaggcaagccatggttgctgggctg

SEQ ID NO: 236732 - DNA, 25 bp, Probe Sequence
gaggaatgcacagtgtttccctgtt

SEQ ID NO: 236733 - DNA, 25 bp, Probe Sequence
gaggactgaattactctccaagttg

SEQ ID NO: 236734 - DNA, 25 bp, Probe Sequence
gaggactgtgtctcattaaagtgat

SEQ ID NO: 236735 - DNA, 25 bp, Probe Sequence
gaggcatctttacatctaagaattt

SEQ ID NO: 236736 - DNA, 25 bp, Probe Sequence
gaggcattttagccccagttattct

SEQ ID NO: 236737 - DNA, 25 bp, Probe Sequence
gaggctcttggacacacagtgtctt

SEQ ID NO: 236738 - DNA, 25 bp, Probe Sequence
gaggctctttcagtgcagcaaatgc

SEQ ID NO: 236739 - DNA, 25 bp, Probe Sequence
gaggctctttaaagcttcagctccc

SEQ ID NO: 236740 - DNA, 25 bp, Probe Sequence
gaggactttaatatctatggccatg

SEQ ID NO: 236741 - DNA, 25 bp, Probe Sequence
gaggcactcattatattcctcctca

SEQ ID NO: 236742 - DNA, 25 bp, Probe Sequence
gaggcagccagaattctgactccct

SEQ ID NO: 236743 - DNA, 25 bp, Probe Sequence
gaggcagccagaattctgactccct

SEQ ID NO: 236744 - DNA, 25 bp, Probe Sequence
gaggcaacagagagcttctgccagt

SEQ ID NO: 236745 - DNA, 25 bp, Probe Sequence
gaggctgacagcagttttcagatgt

SEQ ID NO: 236746 - DNA, 25 bp, Probe Sequence
gaggctgcaggtcattatggcaaga

SEQ ID NO: 236747 - DNA, 25 bp, Probe Sequence
gaggctacggaaacaggccgagaag

SEQ ID NO: 236748 - DNA, 25 bp, Probe Sequence
gaggcctttgaaacaggtagtgagg

SEQ ID NO: 236749 - DNA, 25 bp, Probe Sequence
gaggcgccggaatatgacacagggg

SEQ ID NO: 236750 - DNA, 25 bp, Probe Sequence
gaggcctggggatgtgaacaacctg

SEQ ID NO: 236751 - DNA, 25 bp, Probe Sequence
gaggcctctgggtttgaattcacca

SEQ ID NO: 236752 - DNA, 25 bp, Probe Sequence
gaggcacataggccttctgaatttc

SEQ ID NO: 236753 - DNA, 25 bp, Probe Sequence
gaggaatggctttgcttgaatgtgt

SEQ ID NO: 236754 - DNA, 25 bp, Probe Sequence
gaggaatgggctggcttggtctgcc

SEQ ID NO: 236755 - DNA, 25 bp, Probe Sequence
gaggaatgggaccagttctgctgcc

SEQ ID NO: 236756 - DNA, 25 bp, Probe Sequence
gaggaagagagacctgccctgtagc

SEQ ID NO: 236757 - DNA, 25 bp, Probe Sequence
gaggcagaaaacggcaacggcagca

SEQ ID NO: 236758 - DNA, 25 bp, Probe Sequence
gaggcaagaatgagagaccagggca

SEQ ID NO: 236759 - DNA, 25 bp, Probe Sequence
gaggcaagaagcagacagcccgaga

SEQ ID NO: 236760 - DNA, 25 bp, Probe Sequence
gaggcaagaagcaataggcccactg

SEQ ID NO: 236761 - DNA, 25 bp, Probe Sequence
gatgtggaggtggacgacccactga

SEQ ID NO: 236762 - DNA, 25 bp, Probe Sequence
gatggggaggaccagacccaggacg

SEQ ID NO: 236763 - DNA, 25 bp, Probe Sequence
gatggggaggaccagacccaggacg

SEQ ID NO: 236764 - DNA, 25 bp, Probe Sequence
gaggcccagagacatgggccagggc

SEQ ID NO: 236765 - DNA, 25 bp, Probe Sequence
gaggcccgaggaaggagtggctggg

SEQ ID NO: 236766 - DNA, 25 bp, Probe Sequence
gaggcccaaggatgtcggagggaga

SEQ ID NO: 236767 - DNA, 25 bp, Probe Sequence
gaggacacaatggacgtagcgcggc

SEQ ID NO: 236768 - DNA, 25 bp, Probe Sequence
gaggacttataatgtactcatggga

SEQ ID NO: 236769 - DNA, 25 bp, Probe Sequence
gaggacttgtaatagttaggagtat

SEQ ID NO: 236770 - DNA, 25 bp, Probe Sequence
gaggactttgactacaatacaggca

SEQ ID NO: 236771 - DNA, 25 bp, Probe Sequence
gaggactcgggccacgaaaggaaag

SEQ ID NO: 236772 - DNA, 25 bp, Probe Sequence
gaggactcgggccacgaaaggaaag

SEQ ID NO: 236773 - DNA, 25 bp, Probe Sequence
gaggactcgggccacgaaaggaaag

SEQ ID NO: 236774 - DNA, 25 bp, Probe Sequence
gaggactccaggagcaaaagaaaca

SEQ ID NO: 236775 - DNA, 25 bp, Probe Sequence
gaggaatcgcagatcccaatcaaag

SEQ ID NO: 236776 - DNA, 25 bp, Probe Sequence
gaggaagcacagttacaagaaatag

SEQ ID NO: 236777 - DNA, 25 bp, Probe Sequence
gaggaacccattagcaagatcaata

SEQ ID NO: 236778 - DNA, 25 bp, Probe Sequence
gaggaacttcctacaatgatgcagc

SEQ ID NO: 236779 - DNA, 25 bp, Probe Sequence
gaggacatctcaactcaacaaactg

SEQ ID NO: 236780 - DNA, 25 bp, Probe Sequence
gaggaatcctcggcagataaactgg

SEQ ID NO: 236781 - DNA, 25 bp, Probe Sequence
gaggcgctgccgcgcagcttgaacg

SEQ ID NO: 236782 - DNA, 25 bp, Probe Sequence
gaggcggcatccaagatggtgacat

SEQ ID NO: 236783 - DNA, 25 bp, Probe Sequence
gaggctgttgccagtgctggacagt

SEQ ID NO: 236784 - DNA, 25 bp, Probe Sequence
gaggcgatctacaaggtggagctgg

SEQ ID NO: 236785 - DNA, 25 bp, Probe Sequence
gaggaagctcaaaggcgtcgaatgg

SEQ ID NO: 236786 - DNA, 25 bp, Probe Sequence
gaggaagctcaaaggcgtcgaatgg

SEQ ID NO: 236787 - DNA, 25 bp, Probe Sequence
gatggaagctgatggggttgaagtc

SEQ ID NO: 236788 - DNA, 25 bp, Probe Sequence
gatggatgaatgtgagcaggcgctg

SEQ ID NO: 236789 - DNA, 25 bp, Probe Sequence
gatggagaagtaatgcccgtggttg

SEQ ID NO: 236790 - DNA, 25 bp, Probe Sequence
gatggccaggtcatcaccattggca

SEQ ID NO: 236791 - DNA, 25 bp, Probe Sequence
gaggaagagtctgcctatgtggcag

SEQ ID NO: 236792 - DNA, 25 bp, Probe Sequence
gaggaagaggtggcctcatggatcg

SEQ ID NO: 236793 - DNA, 25 bp, Probe Sequence
gaggacaagtggggcgatgcgtgcg

SEQ ID NO: 236794 - DNA, 25 bp, Probe Sequence
gaggcaagaggctggcgatcaggga

SEQ ID NO: 236795 - DNA, 25 bp, Probe Sequence
gatggcacagggtgggcatcaaaac

SEQ ID NO: 236796 - DNA, 25 bp, Probe Sequence
gaggctgagcagaaggagtcatcat

SEQ ID NO: 236797 - DNA, 25 bp, Probe Sequence
gaggctgagcagaaggagtcatcat

SEQ ID NO: 236798 - DNA, 25 bp, Probe Sequence
gaggaagaaagggctcatcgcttag

SEQ ID NO: 236799 - DNA, 25 bp, Probe Sequence
gaggaagacaccccttcagataatg

SEQ ID NO: 236800 - DNA, 25 bp, Probe Sequence
gaggaagatccgcagcctcatgaag

SEQ ID NO: 236801 - DNA, 25 bp, Probe Sequence
gaggaagtagtccagccttccaggt

SEQ ID NO: 236802 - DNA, 25 bp, Probe Sequence
gaggaagtggatctgcttctccagt

SEQ ID NO: 236803 - DNA, 25 bp, Probe Sequence
gaggacagtggtctttcctgttgat

SEQ ID NO: 236804 - DNA, 25 bp, Probe Sequence
gaggaatgtgggatatcttttggcc

SEQ ID NO: 236805 - DNA, 25 bp, Probe Sequence
gaggaacaggtgactaagtatctgg

SEQ ID NO: 236806 - DNA, 25 bp, Probe Sequence
gaggaaatgttggtgttgtactgtt

SEQ ID NO: 236807 - DNA, 25 bp, Probe Sequence
gaggaaactgtatatgttactgcct

SEQ ID NO: 236808 - DNA, 25 bp, Probe Sequence
gaggcactacttctgatttattgca

SEQ ID NO: 236809 - DNA, 25 bp, Probe Sequence
gaggcacccgatatatgttctctag

SEQ ID NO: 236810 - DNA, 25 bp, Probe Sequence
gaggcaccgagataagttcatcatt

SEQ ID NO: 236811 - DNA, 25 bp, Probe Sequence
gatggcagccggtcaagaccgtcac

SEQ ID NO: 236812 - DNA, 25 bp, Probe Sequence
gaggcagccagggcttacctgtaca

SEQ ID NO: 236813 - DNA, 25 bp, Probe Sequence
gaggcagccacggaggacggaaagt

SEQ ID NO: 236814 - DNA, 25 bp, Probe Sequence
gaggcaccactgagagttgtgaagg

SEQ ID NO: 236815 - DNA, 25 bp, Probe Sequence
gaggcatccctcatggatataacag

SEQ ID NO: 236816 - DNA, 25 bp, Probe Sequence
gaggcatggttagtgtgtgatacaa

SEQ ID NO: 236817 - DNA, 25 bp, Probe Sequence
gaggcatgatgaagactctgctgct

SEQ ID NO: 236818 - DNA, 25 bp, Probe Sequence
gaggctataggacgcagctgttgcc

SEQ ID NO: 236819 - DNA, 25 bp, Probe Sequence
gaggctcagagcagcaggtgttacc

SEQ ID NO: 236820 - DNA, 25 bp, Probe Sequence
gaggctcagatctgcatgttggccc

SEQ ID NO: 236821 - DNA, 25 bp, Probe Sequence
gaggcatcagcctgctgttgatcac

SEQ ID NO: 236822 - DNA, 25 bp, Probe Sequence
gaggacagcaatggttgtatcaact

SEQ ID NO: 236823 - DNA, 25 bp, Probe Sequence
gaggacagcaatggttgtatcaact

SEQ ID NO: 236824 - DNA, 25 bp, Probe Sequence
gatggaccaatcaggctgccaattg

SEQ ID NO: 236825 - DNA, 25 bp, Probe Sequence
gatgggcacaacaggctgccgattt

SEQ ID NO: 236826 - DNA, 25 bp, Probe Sequence
gatggacacatagaacacactattt

SEQ ID NO: 236827 - DNA, 25 bp, Probe Sequence
gatggacagacagacaccacagcct

SEQ ID NO: 236828 - DNA, 25 bp, Probe Sequence
gaggaagcagcactaaaagcactct

SEQ ID NO: 236829 - DNA, 25 bp, Probe Sequence
gaggaaggctaaaacagcagtgcca

SEQ ID NO: 236830 - DNA, 25 bp, Probe Sequence
gaggaagcctgcaagtccagggcac

SEQ ID NO: 236831 - DNA, 25 bp, Probe Sequence
gaggaagcctgcaagtccagggcac

SEQ ID NO: 236832 - DNA, 25 bp, Probe Sequence
gaggaacctgcatttacaggtcatt

SEQ ID NO: 236833 - DNA, 25 bp, Probe Sequence
gaggcaaagctgtttcaatggtgta

SEQ ID NO: 236834 - DNA, 25 bp, Probe Sequence
gaggcaaacgagagcaatgactatt

SEQ ID NO: 236835 - DNA, 25 bp, Probe Sequence
gaggcaaactgaattgagtcaactt

SEQ ID NO: 236836 - DNA, 25 bp, Probe Sequence
gaggcaaactgaattgagtcaactt

SEQ ID NO: 236837 - DNA, 25 bp, Probe Sequence
gaggaatactaattatccattcctt

SEQ ID NO: 236838 - DNA, 25 bp, Probe Sequence
gaggcaacctcagttgatgccttcc

SEQ ID NO: 236839 - DNA, 25 bp, Probe Sequence
gaggaaccatctatacctgagcctc

SEQ ID NO: 236840 - DNA, 25 bp, Probe Sequence
gaggaaggaactgaccgacttcctg

SEQ ID NO: 236841 - DNA, 25 bp, Probe Sequence
gaggaaggctccgaatccgaatctc

SEQ ID NO: 236842 - DNA, 25 bp, Probe Sequence
gaggaaggctccgaatccgaatctc

SEQ ID NO: 236843 - DNA, 25 bp, Probe Sequence
gaggaaggcgcaggatatccaggtt

SEQ ID NO: 236844 - DNA, 25 bp, Probe Sequence
gaggcataggtaggttccacagtta

SEQ ID NO: 236845 - DNA, 25 bp, Probe Sequence
gaggaagagtaaatgtgagacagtc

SEQ ID NO: 236846 - DNA, 25 bp, Probe Sequence
gaggaagtgacaagtgagcagaatt

SEQ ID NO: 236847 - DNA, 25 bp, Probe Sequence
gaggaacagaagaagcagagcagat

SEQ ID NO: 236848 - DNA, 25 bp, Probe Sequence
gaggcttccaagaatgaggcaaact

SEQ ID NO: 236849 - DNA, 25 bp, Probe Sequence
gaggcttccaagaatgaggcaaact

SEQ ID NO: 236850 - DNA, 25 bp, Probe Sequence
gaggctcaaccaatataggatatag

SEQ ID NO: 236851 - DNA, 25 bp, Probe Sequence
gaggcaaatgcctgctatgtgaaaa

SEQ ID NO: 236852 - DNA, 25 bp, Probe Sequence
gaggcaatcaatgacctggtgaaga

SEQ ID NO: 236853 - DNA, 25 bp, Probe Sequence
gaggcaataacaagttgctgtgaaa

SEQ ID NO: 236854 - DNA, 25 bp, Probe Sequence
gaggcagtttatgtattgctgaata

SEQ ID NO: 236855 - DNA, 25 bp, Probe Sequence
gaggcagcattcgatgttcctctta

SEQ ID NO: 236856 - DNA, 25 bp, Probe Sequence
gaggcatcatgtgcatggaccacct

SEQ ID NO: 236857 - DNA, 25 bp, Probe Sequence
gatggccatgctgctgaaacttcaa

SEQ ID NO: 236858 - DNA, 25 bp, Probe Sequence
gatgggctgtttaaagtgtcacccc

SEQ ID NO: 236859 - DNA, 25 bp, Probe Sequence
gatggggacacttaaatctaccctc

SEQ ID NO: 236860 - DNA, 25 bp, Probe Sequence
gatggtggtcactgaaataaccttt

SEQ ID NO: 236861 - DNA, 25 bp, Probe Sequence
gaggaagtaaagaaacagacccgct

SEQ ID NO: 236862 - DNA, 25 bp, Probe Sequence
gatggtcgttaacaaatgaaccctt

SEQ ID NO: 236863 - DNA, 25 bp, Probe Sequence
gatggccagtctaaagagggaagcg

SEQ ID NO: 236864 - DNA, 25 bp, Probe Sequence
gaggcatcatgtctgttagggaaag

SEQ ID NO: 236865 - DNA, 25 bp, Probe Sequence
gaggccatgctgagttaggtaggtg

SEQ ID NO: 236866 - DNA, 25 bp, Probe Sequence
gaggccatctgagctcatagctgat

SEQ ID NO: 236867 - DNA, 25 bp, Probe Sequence
gaggcatctctgacaccaatcagat

SEQ ID NO: 236868 - DNA, 25 bp, Probe Sequence
gaggcatgcttgacacacatcataa

SEQ ID NO: 236869 - DNA, 25 bp, Probe Sequence
gaggcatgcttgacacacatcataa

SEQ ID NO: 236870 - DNA, 25 bp, Probe Sequence
gaggcatcattcaacctcaatgcca

SEQ ID NO: 236871 - DNA, 25 bp, Probe Sequence
gaggcatcctcaaacatctggagcc

SEQ ID NO: 236872 - DNA, 25 bp, Probe Sequence
gaggcatcactgaggccaggagctc

SEQ ID NO: 236873 - DNA, 25 bp, Probe Sequence
gaggcatgattggtggccactacac

SEQ ID NO: 236874 - DNA, 25 bp, Probe Sequence
gaggctgagtcgcaggacacatgcc

SEQ ID NO: 236875 - DNA, 25 bp, Probe Sequence
gatggctgagtgcacaggtgccgcc

SEQ ID NO: 236876 - DNA, 25 bp, Probe Sequence
gaggcagagcttgcagtgagccgag

SEQ ID NO: 236877 - DNA, 25 bp, Probe Sequence
gaggcagacattgcagtgagccgag

SEQ ID NO: 236878 - DNA, 25 bp, Probe Sequence
gaggcagcacacgaagtcaaaagag

SEQ ID NO: 236879 - DNA, 25 bp, Probe Sequence
gaggcagcacacgaagtcaaaagag

SEQ ID NO: 236880 - DNA, 25 bp, Probe Sequence
gaggcatgacaagtaaagaaagaca

SEQ ID NO: 236881 - DNA, 25 bp, Probe Sequence
gaggctgtaactgagagaaagattc

SEQ ID NO: 236882 - DNA, 25 bp, Probe Sequence
gaggcttcacacattggactagctt

SEQ ID NO: 236883 - DNA, 25 bp, Probe Sequence
gaggcagctaacctgggcacatagc

SEQ ID NO: 236884 - DNA, 25 bp, Probe Sequence
gaggcagtcagatctgaggatctga

SEQ ID NO: 236885 - DNA, 25 bp, Probe Sequence
gaggcagagagattatgggagtgag

SEQ ID NO: 236886 - DNA, 25 bp, Probe Sequence
gaggcagaggaaggcggcagaagat

SEQ ID NO: 236887 - DNA, 25 bp, Probe Sequence
gaggcgggagagggagctgccatct

SEQ ID NO: 236888 - DNA, 25 bp, Probe Sequence
gaggcgggaagatcgcatgagtccg

SEQ ID NO: 236889 - DNA, 25 bp, Probe Sequence
gaggcggcgagaccgcagaattccc

SEQ ID NO: 236890 - DNA, 25 bp, Probe Sequence
gaggcgctggcaagcccgaatcggt

SEQ ID NO: 236891 - DNA, 25 bp, Probe Sequence
gaggccggcaacaaacgacagtatc

SEQ ID NO: 236892 - DNA, 25 bp, Probe Sequence
gaggccggcaacaaacgacagtatc

SEQ ID NO: 236893 - DNA, 25 bp, Probe Sequence
gaggccgggagttcaagacagcctg

SEQ ID NO: 236894 - DNA, 25 bp, Probe Sequence
gaggctttgctgggacataacatcc

SEQ ID NO: 236895 - DNA, 25 bp, Probe Sequence
gatgtgtatttgggctccacactgg

SEQ ID NO: 236896 - DNA, 25 bp, Probe Sequence
gatggtcttggattgtctgacctca

SEQ ID NO: 236897 - DNA, 25 bp, Probe Sequence
gatgtgagcttggacttgcattccc

SEQ ID NO: 236898 - DNA, 25 bp, Probe Sequence
gatgtagcttattcttcagttccct

SEQ ID NO: 236899 - DNA, 25 bp, Probe Sequence
gaggcttaattctgagctggccctt

SEQ ID NO: 236900 - DNA, 25 bp, Probe Sequence
gatggttatttattgagctggctcc

SEQ ID NO: 236901 - DNA, 25 bp, Probe Sequence
gaggcttatctcactgagtgagcag

SEQ ID NO: 236902 - DNA, 25 bp, Probe Sequence
gaggcatcaacttcctgatgttggt

SEQ ID NO: 236903 - DNA, 25 bp, Probe Sequence
gaggcataatttcctgctagctact

SEQ ID NO: 236904 - DNA, 25 bp, Probe Sequence
gaggcagaatattgtcctgccctct

SEQ ID NO: 236905 - DNA, 25 bp, Probe Sequence
gaggcagtgattctgcctccatcct

SEQ ID NO: 236906 - DNA, 25 bp, Probe Sequence
gaggcagtatggcaccatcagccac

SEQ ID NO: 236907 - DNA, 25 bp, Probe Sequence
gaggcagttggcaaacttctcagga

SEQ ID NO: 236908 - DNA, 25 bp, Probe Sequence
gaggctttggcatgacttaagagga

SEQ ID NO: 236909 - DNA, 25 bp, Probe Sequence
gaggcatttggcaaccctgaagagt

SEQ ID NO: 236910 - DNA, 25 bp, Probe Sequence
gaggctttggttttgtggaatttga

SEQ ID NO: 236911 - DNA, 25 bp, Probe Sequence
gaggcttctcctgttttatatatta

SEQ ID NO: 236912 - DNA, 25 bp, Probe Sequence
gaggcctcctctctcagtttttata

SEQ ID NO: 236913 - DNA, 25 bp, Probe Sequence
gaggccttctaggtgagacactttt

SEQ ID NO: 236914 - DNA, 25 bp, Probe Sequence
gaggcacttaggacataacactttt

SEQ ID NO: 236915 - DNA, 25 bp, Probe Sequence
gaggccttgagggaaatgcacactg

SEQ ID NO: 236916 - DNA, 25 bp, Probe Sequence
gatggcattttgctaagtccctgag

SEQ ID NO: 236917 - DNA, 25 bp, Probe Sequence
gatggcaagtctctgaggtgacctc

SEQ ID NO: 236918 - DNA, 25 bp, Probe Sequence
gatgtggagaagctggccaagcccc

SEQ ID NO: 236919 - DNA, 25 bp, Probe Sequence
gatgtggagaagctggccaagcccc

SEQ ID NO: 236920 - DNA, 25 bp, Probe Sequence
gatgggaaacctggttggccaccca

SEQ ID NO: 236921 - DNA, 25 bp, Probe Sequence
gatggggagacaggtcagggccccc

SEQ ID NO: 236922 - DNA, 25 bp, Probe Sequence
gatggaaaacggaggtgccgcccca

SEQ ID NO: 236923 - DNA, 25 bp, Probe Sequence
gatgaaaccccaaggggccctatct

SEQ ID NO: 236924 - DNA, 25 bp, Probe Sequence
gatgaagccccttctggggaggatt

SEQ ID NO: 236925 - DNA, 25 bp, Probe Sequence
gatgggttcagttccggaaggtgtc

SEQ ID NO: 236926 - DNA, 25 bp, Probe Sequence
gaggcaggtggttcactggaggttg

SEQ ID NO: 236927 - DNA, 25 bp, Probe Sequence
gaggcaggtggatcactggaggtca

SEQ ID NO: 236928 - DNA, 25 bp, Probe Sequence
gaggcggtgagcctccagaaggtca

SEQ ID NO: 236929 - DNA, 25 bp, Probe Sequence
gaggcacggatccggcagaaggacg

SEQ ID NO: 236930 - DNA, 25 bp, Probe Sequence
gaggcctggatggcatgtggtaggt

SEQ ID NO: 236931 - DNA, 25 bp, Probe Sequence
gaggcctgggcggatgatgtggagc

SEQ ID NO: 236932 - DNA, 25 bp, Probe Sequence
gaggctctgagcgtacatagggaag

SEQ ID NO: 236933 - DNA, 25 bp, Probe Sequence
gaggcttgagccattattgctaagg

SEQ ID NO: 236934 - DNA, 25 bp, Probe Sequence
gatctttgagcccattcttctgggt

SEQ ID NO: 236935 - DNA, 25 bp, Probe Sequence
gattatgtccacgaattttgccgat

SEQ ID NO: 236936 - DNA, 25 bp, Probe Sequence
gatggattgcccgtaatttctatga

SEQ ID NO: 236937 - DNA, 25 bp, Probe Sequence
gatggtttccgtgtctgtgtagaaa

SEQ ID NO: 236938 - DNA, 25 bp, Probe Sequence
gttgtttgggctgtgtttcgaaatg

SEQ ID NO: 236939 - DNA, 25 bp, Probe Sequence
gttgtttggtaatgaaccagaggag

SEQ ID NO: 236940 - DNA, 25 bp, Probe Sequence
gatctgtagttaagggaaccaaggg

SEQ ID NO: 236941 - DNA, 25 bp, Probe Sequence
gatcgttggctatgtaaaaacaggc

SEQ ID NO: 236942 - DNA, 25 bp, Probe Sequence
gatggtcgagtatctcagaaaagaa

SEQ ID NO: 236943 - DNA, 25 bp, Probe Sequence
gatgacaaatactctcgacaccgaa

SEQ ID NO: 236944 - DNA, 25 bp, Probe Sequence
gatccaagataatgtctccaacgtc

SEQ ID NO: 236945 - DNA, 25 bp, Probe Sequence
gatccaagaaaggtccgagattgca

SEQ ID NO: 236946 - DNA, 25 bp, Probe Sequence
gatcgggacaaagttcgagaagggc

SEQ ID NO: 236947 - DNA, 25 bp, Probe Sequence
gatggggccaagattgggaactgcc

SEQ ID NO: 236948 - DNA, 25 bp, Probe Sequence
gatggggcccagaatgttggggtga

SEQ ID NO: 236949 - DNA, 25 bp, Probe Sequence
gatgggcccaaactcatatgggaat

SEQ ID NO: 236950 - DNA, 25 bp, Probe Sequence
gatggcctggaaacctctggctaat

SEQ ID NO: 236951 - DNA, 25 bp, Probe Sequence
gatggcctggaaacctctggctaat

SEQ ID NO: 236952 - DNA, 25 bp, Probe Sequence
gatggccgctaaatagctcacgtta

SEQ ID NO: 236953 - DNA, 25 bp, Probe Sequence
gaggctcatgctgaagattcggtta

SEQ ID NO: 236954 - DNA, 25 bp, Probe Sequence
gaggctgtgcttcaggtatggtaca

SEQ ID NO: 236955 - DNA, 25 bp, Probe Sequence
gaggctgtgcttcaggtatggtaca

SEQ ID NO: 236956 - DNA, 25 bp, Probe Sequence
gaggcttgtgtgcacgtgagcgtgc

SEQ ID NO: 236957 - DNA, 25 bp, Probe Sequence
gatggctttgatccaatggagcctg

SEQ ID NO: 236958 - DNA, 25 bp, Probe Sequence
gaggctgcattgagctatggtcgtg

SEQ ID NO: 236959 - DNA, 25 bp, Probe Sequence
gatggctgaatgaacttgagacgct

SEQ ID NO: 236960 - DNA, 25 bp, Probe Sequence
gatggtacattcaggcaccagcata

SEQ ID NO: 236961 - DNA, 25 bp, Probe Sequence
gatggtaatcaatgccacccaaggg

SEQ ID NO: 236962 - DNA, 25 bp, Probe Sequence
gatggaaaccactcatgtccacagg

SEQ ID NO: 236963 - DNA, 25 bp, Probe Sequence
gatgtaaacccttcagaaacacagt

SEQ ID NO: 236964 - DNA, 25 bp, Probe Sequence
gttaaaacctacttcaggccagatg

SEQ ID NO: 236965 - DNA, 25 bp, Probe Sequence
gatggaaaaccttattctcctagtg

SEQ ID NO: 236966 - DNA, 25 bp, Probe Sequence
gatggctaaacgattcttactcagt

SEQ ID NO: 236967 - DNA, 25 bp, Probe Sequence
gatggtaaagtgaactttcgtttga

SEQ ID NO: 236968 - DNA, 25 bp, Probe Sequence
gatggaataggagtactggtttttc

SEQ ID NO: 236969 - DNA, 25 bp, Probe Sequence
gaggcatagggagagctggtcaagc

SEQ ID NO: 236970 - DNA, 25 bp, Probe Sequence
gaggcatagtaaaagtattcacagg

SEQ ID NO: 236971 - DNA, 25 bp, Probe Sequence
gatggatgaggaaaggtatccacct

SEQ ID NO: 236972 - DNA, 25 bp, Probe Sequence
gatggagaggattacttgaccccag

SEQ ID NO: 236973 - DNA, 25 bp, Probe Sequence
gaggcacgagaattgcttgaaccca

SEQ ID NO: 236974 - DNA, 25 bp, Probe Sequence
gaggcaggagaattgcttgagccca

SEQ ID NO: 236975 - DNA, 25 bp, Probe Sequence
gaggcaggcagatcacctgaggtca

SEQ ID NO: 236976 - DNA, 25 bp, Probe Sequence
gatcgctgccaatgcactcgatctt

SEQ ID NO: 236977 - DNA, 25 bp, Probe Sequence
gaggctgccatatgagtaactctgg

SEQ ID NO: 236978 - DNA, 25 bp, Probe Sequence
gaggctcataatggagttcctgggg

SEQ ID NO: 236979 - DNA, 25 bp, Probe Sequence
gaggcaattaggattgcccaggagt

SEQ ID NO: 236980 - DNA, 25 bp, Probe Sequence
gaggcatttttaaatcccagacagt

SEQ ID NO: 236981 - DNA, 25 bp, Probe Sequence
gaggcaattcattaaactctcaaat

SEQ ID NO: 236982 - DNA, 25 bp, Probe Sequence
gaggcagttcattgaggcagctcta

SEQ ID NO: 236983 - DNA, 25 bp, Probe Sequence
gaggcagtttggtggcatgctactt

SEQ ID NO: 236984 - DNA, 25 bp, Probe Sequence
gaggcagatgttgaatttgctactc

SEQ ID NO: 236985 - DNA, 25 bp, Probe Sequence
gaggcaatttacaatcctaaactca

SEQ ID NO: 236986 - DNA, 25 bp, Probe Sequence
gaggcagatttaccatcatgtgact

SEQ ID NO: 236987 - DNA, 25 bp, Probe Sequence
gatggaagttgacatctggcctctg

SEQ ID NO: 236988 - DNA, 25 bp, Probe Sequence
gatggcaaattcacttgggttacct

SEQ ID NO: 236989 - DNA, 25 bp, Probe Sequence
gaggcaagtcaatcttttttatttc

SEQ ID NO: 236990 - DNA, 25 bp, Probe Sequence
gaggcaaggatctactgtcatttgt

SEQ ID NO: 236991 - DNA, 25 bp, Probe Sequence
gaggcacggatccaagtacctggcc

SEQ ID NO: 236992 - DNA, 25 bp, Probe Sequence
gaggcagggtcaagtgctacgggcc

SEQ ID NO: 236993 - DNA, 25 bp, Probe Sequence
gaggcagaggttgagtaagctgaga

SEQ ID NO: 236994 - DNA, 25 bp, Probe Sequence
gaggcagaggttgagtaagctgaga

SEQ ID NO: 236995 - DNA, 25 bp, Probe Sequence
gaggcggagattgcagtgagccgag

SEQ ID NO: 236996 - DNA, 25 bp, Probe Sequence
gaggcggagattgcagtgagccgag

SEQ ID NO: 236997 - DNA, 25 bp, Probe Sequence
gaggcggagcttgcagtgagccaat

SEQ ID NO: 236998 - DNA, 25 bp, Probe Sequence
gaggcagggcttgcagtgagccaag

SEQ ID NO: 236999 - DNA, 25 bp, Probe Sequence
gaggcaggtggtgaggtgagaagac

SEQ ID NO: 237000 - DNA, 25 bp, Probe Sequence
gatgggccgggcaaggaggaagctc

SEQ ID NO: 237001 - DNA, 25 bp, Probe Sequence
gatgggtcaggcggggcagaccctc

SEQ ID NO: 237002 - DNA, 25 bp, Probe Sequence
gatggatgtagggcaggggcccggg

SEQ ID NO: 237003 - DNA, 25 bp, Probe Sequence
gaggctgctcaacaggatggccatc

SEQ ID NO: 237004 - DNA, 25 bp, Probe Sequence
gaggcagcagaacggtggggcgctg

SEQ ID NO: 237005 - DNA, 25 bp, Probe Sequence
gatggtacaccaagaaggggctgtt

SEQ ID NO: 237006 - DNA, 25 bp, Probe Sequence
gaggctaagtctgggcagtgggctg

SEQ ID NO: 237007 - DNA, 25 bp, Probe Sequence
gaggcaagcggcgtggagatgcggc

SEQ ID NO: 237008 - DNA, 25 bp, Probe Sequence
gaggccgcagcgtttgatgacgagt

SEQ ID NO: 237009 - DNA, 25 bp, Probe Sequence
gatggcccagaggtggtggtagtca

SEQ ID NO: 237010 - DNA, 25 bp, Probe Sequence
gaggccgaggcgggtggatcatcta

SEQ ID NO: 237011 - DNA, 25 bp, Probe Sequence
gaggccgaggtgggtagatcacaag

SEQ ID NO: 237012 - DNA, 25 bp, Probe Sequence
gaggcctagcctgagccaaagagag

SEQ ID NO: 237013 - DNA, 25 bp, Probe Sequence
gaggccaacctggacacatggagaa

SEQ ID NO: 237014 - DNA, 25 bp, Probe Sequence
gatggacaacctggcaactgtgagt

SEQ ID NO: 237015 - DNA, 25 bp, Probe Sequence
gatggacaacctggcaactgtgagt

SEQ ID NO: 237016 - DNA, 25 bp, Probe Sequence
gatggacaacctggcaactgtgagt

SEQ ID NO: 237017 - DNA, 25 bp, Probe Sequence
gaggcagaactgcaggacatctgca

SEQ ID NO: 237018 - DNA, 25 bp, Probe Sequence
gaggcagaactgcaggacatctgca

SEQ ID NO: 237019 - DNA, 25 bp, Probe Sequence
gaggcacaccagcaggagtgctgcc

SEQ ID NO: 237020 - DNA, 25 bp, Probe Sequence
gaggcactaagcaatccaggcgccc

SEQ ID NO: 237021 - DNA, 25 bp, Probe Sequence
gaggcatatatacttccgaggcacc

SEQ ID NO: 237022 - DNA, 25 bp, Probe Sequence
gatggctgaaggctcctgggccatc

SEQ ID NO: 237023 - DNA, 25 bp, Probe Sequence
gaggcttaaggcgcatgtggcacac

SEQ ID NO: 237024 - DNA, 25 bp, Probe Sequence
gaggcttcaggggatgctgggcccc

SEQ ID NO: 237025 - DNA, 25 bp, Probe Sequence
gaggcttcaggtgcactagacctcc

SEQ ID NO: 237026 - DNA, 25 bp, Probe Sequence
gaggccacaagattcctaacctctc

SEQ ID NO: 237027 - DNA, 25 bp, Probe Sequence
gaggccacagacaaccaggaggccc

SEQ ID NO: 237028 - DNA, 25 bp, Probe Sequence
gaggcccagtaagaggtatctccat

SEQ ID NO: 237029 - DNA, 25 bp, Probe Sequence
gaggctctcagtaaagatgtgtttc

SEQ ID NO: 237030 - DNA, 25 bp, Probe Sequence
gaggcccagataatgagctgagatt

SEQ ID NO: 237031 - DNA, 25 bp, Probe Sequence
gaggccgcagagaagactatgttgg

SEQ ID NO: 237032 - DNA, 25 bp, Probe Sequence
gaggcaggaggatcgcttaagcaca

SEQ ID NO: 237033 - DNA, 25 bp, Probe Sequence
gaggcaggagaatggcatgaaccca

SEQ ID NO: 237034 - DNA, 25 bp, Probe Sequence
gaggcaggaggatcacttgagccca

SEQ ID NO: 237035 - DNA, 25 bp, Probe Sequence
gaggcaggagaatcacttgagccca

SEQ ID NO: 237036 - DNA, 25 bp, Probe Sequence
gaggcaggagaatcacttgagccca

SEQ ID NO: 237037 - DNA, 25 bp, Probe Sequence
gaggcaggagaatggcgtgaaccca

SEQ ID NO: 237038 - DNA, 25 bp, Probe Sequence
gatggagagatgtgggcttgaagcc

SEQ ID NO: 237039 - DNA, 25 bp, Probe Sequence
gatgagaaggcggcggttgcaggca

SEQ ID NO: 237040 - DNA, 25 bp, Probe Sequence
gatggcaaggttcgagtggatgtca

SEQ ID NO: 237041 - DNA, 25 bp, Probe Sequence
gatggcacgtgcgtggagtggctcc

SEQ ID NO: 237042 - DNA, 25 bp, Probe Sequence
gaggcatcacatgctggtgctgtgt

SEQ ID NO: 237043 - DNA, 25 bp, Probe Sequence
gaggcatcaaacagtgcctcctaca

SEQ ID NO: 237044 - DNA, 25 bp, Probe Sequence
gaggcatccaaaagtttccacaagg

SEQ ID NO: 237045 - DNA, 25 bp, Probe Sequence
gaggcagagcagtggggtttcaagg

SEQ ID NO: 237046 - DNA, 25 bp, Probe Sequence
gaggcgatggaagcggatttgaagg

SEQ ID NO: 237047 - DNA, 25 bp, Probe Sequence
gatggaaggaagactgggttgcagg

SEQ ID NO: 237048 - DNA, 25 bp, Probe Sequence
gatggaaggaccgtttgagctcagg

SEQ ID NO: 237049 - DNA, 25 bp, Probe Sequence
gatggccacggctgcttccagctcc

SEQ ID NO: 237050 - DNA, 25 bp, Probe Sequence
gaggccaggtatggtggctcatgcc

SEQ ID NO: 237051 - DNA, 25 bp, Probe Sequence
gaggccaaggtccgagtgctggacc

SEQ ID NO: 237052 - DNA, 25 bp, Probe Sequence
gaggccagaaggcagaacttatgct

SEQ ID NO: 237053 - DNA, 25 bp, Probe Sequence
gatggtattaggcaaatcttactat

SEQ ID NO: 237054 - DNA, 25 bp, Probe Sequence
gatggtttggaacattatctacaat

SEQ ID NO: 237055 - DNA, 25 bp, Probe Sequence
gatggtatctggttttattcccctg

SEQ ID NO: 237056 - DNA, 25 bp, Probe Sequence
gatgttaagtgtctttatcaccccc

SEQ ID NO: 237057 - DNA, 25 bp, Probe Sequence
gatgtttggagtcgttttaccctct

SEQ ID NO: 237058 - DNA, 25 bp, Probe Sequence
gatgtttggagtcgttttaccctct

SEQ ID NO: 237059 - DNA, 25 bp, Probe Sequence
gatgtttggagtcgttttaccctct

SEQ ID NO: 237060 - DNA, 25 bp, Probe Sequence
gatgtcgatgcctttgattttattc

SEQ ID NO: 237061 - DNA, 25 bp, Probe Sequence
gatgtagagaccgcttcattactcc

SEQ ID NO: 237062 - DNA, 25 bp, Probe Sequence
gatgtagaaatggccaacaaagtcc

SEQ ID NO: 237063 - DNA, 25 bp, Probe Sequence
gttggaaaacgcttcaaagaggcaa

SEQ ID NO: 237064 - DNA, 25 bp, Probe Sequence
gtagataaaaccacaaagatgggga

SEQ ID NO: 237065 - DNA, 25 bp, Probe Sequence
gttctaaataagggcacaaatggga

SEQ ID NO: 237066 - DNA, 25 bp, Probe Sequence
gaggctccaaaaggacaagatatgg

SEQ ID NO: 237067 - DNA, 25 bp, Probe Sequence
gaggcttcaagaggagggcactagg

SEQ ID NO: 237068 - DNA, 25 bp, Probe Sequence
gaggctaaagaccatgttcacattc

SEQ ID NO: 237069 - DNA, 25 bp, Probe Sequence
gaggctagtgggaagcttcacctgc

SEQ ID NO: 237070 - DNA, 25 bp, Probe Sequence
gaggctgaggtgggaggatcacttg

SEQ ID NO: 237071 - DNA, 25 bp, Probe Sequence
gaggctggagtgggtacatcacttg

SEQ ID NO: 237072 - DNA, 25 bp, Probe Sequence
gaggccaagtgcactgaattttggt

SEQ ID NO: 237073 - DNA, 25 bp, Probe Sequence
gaggctcatgggaattgtagtttgt

SEQ ID NO: 237074 - DNA, 25 bp, Probe Sequence
gaggcttgtggatttctatgttatg

SEQ ID NO: 237075 - DNA, 25 bp, Probe Sequence
gaggcttggagctattagttaatct

SEQ ID NO: 237076 - DNA, 25 bp, Probe Sequence
gaggcatgttaattctggttctatc

SEQ ID NO: 237077 - DNA, 25 bp, Probe Sequence
gaggcaggagaatttgcttgatcct

SEQ ID NO: 237078 - DNA, 25 bp, Probe Sequence
gaggccggagtaactgtgtccttga

SEQ ID NO: 237079 - DNA, 25 bp, Probe Sequence
gatggccggggaaatggcggcttca

SEQ ID NO: 237080 - DNA, 25 bp, Probe Sequence
gaggccacaggtctaggctggcttt

SEQ ID NO: 237081 - DNA, 25 bp, Probe Sequence
gatggccgaggtgatagtgtggttt

SEQ ID NO: 237082 - DNA, 25 bp, Probe Sequence
gaggccaacctggaatttggctctt

SEQ ID NO: 237083 - DNA, 25 bp, Probe Sequence
gatgttaacagtcagacttggcttt

SEQ ID NO: 237084 - DNA, 25 bp, Probe Sequence
gatgttaattgagagccctgggtcc

SEQ ID NO: 237085 - DNA, 25 bp, Probe Sequence
gatttaaaatgtgtacgtgggccag

SEQ ID NO: 237086 - DNA, 25 bp, Probe Sequence
gatttctaaagtcttggcttgggca

SEQ ID NO: 237087 - DNA, 25 bp, Probe Sequence
tactacgaaattcttaattcccctg

SEQ ID NO: 237088 - DNA, 25 bp, Probe Sequence
tactacgaaattcttaattcccctg

SEQ ID NO: 237089 - DNA, 25 bp, Probe Sequence
tacttggaaaggcattttcccagga

SEQ ID NO: 237090 - DNA, 25 bp, Probe Sequence
tacttagattaccaaattagcccag

SEQ ID NO: 237091 - DNA, 25 bp, Probe Sequence
gatttagagatacaaagtactacta

SEQ ID NO: 237092 - DNA, 25 bp, Probe Sequence
gatcttagagaacaaggacagccat

SEQ ID NO: 237093 - DNA, 25 bp, Probe Sequence
gatcttgaaaattatggatacccac

SEQ ID NO: 237094 - DNA, 25 bp, Probe Sequence
gatcctggaaatgaggtacaccaag

SEQ ID NO: 237095 - DNA, 25 bp, Probe Sequence
gatccggaaatatggcctcaatatg

SEQ ID NO: 237096 - DNA, 25 bp, Probe Sequence
gatccgaacacagcggtcgacattt

SEQ ID NO: 237097 - DNA, 25 bp, Probe Sequence
gatgtatgcccaaagcggtagaatt

SEQ ID NO: 237098 - DNA, 25 bp, Probe Sequence
gatgtagtccacaagggatactgta

SEQ ID NO: 237099 - DNA, 25 bp, Probe Sequence
gatggagctccgaatgtgcttaagt

SEQ ID NO: 237100 - DNA, 25 bp, Probe Sequence
gatggtgtcctttgatgcctaaaaa

SEQ ID NO: 237101 - DNA, 25 bp, Probe Sequence
gatggtgtctcctttactaaataag

SEQ ID NO: 237102 - DNA, 25 bp, Probe Sequence
gatggtgactctttttatagcgaca

SEQ ID NO: 237103 - DNA, 25 bp, Probe Sequence
gatggacaccgttttctaggagccc

SEQ ID NO: 237104 - DNA, 25 bp, Probe Sequence
gatggtcccattattctagggtctt

SEQ ID NO: 237105 - DNA, 25 bp, Probe Sequence
gatggtccctgtggtatatactttc

SEQ ID NO: 237106 - DNA, 25 bp, Probe Sequence
gatggtagttgagggtgacttttcc

SEQ ID NO: 237107 - DNA, 25 bp, Probe Sequence
gatgtgtgggtggaggatgccttgt

SEQ ID NO: 237108 - DNA, 25 bp, Probe Sequence
gaggctggcgatcagggatcttgtt

SEQ ID NO: 237109 - DNA, 25 bp, Probe Sequence
gaggctggcgatcagggatcttgtt

SEQ ID NO: 237110 - DNA, 25 bp, Probe Sequence
gatggcggcgttagggtttgagaga

SEQ ID NO: 237111 - DNA, 25 bp, Probe Sequence
gatggtactgtgtgtggcccaggaa

SEQ ID NO: 237112 - DNA, 25 bp, Probe Sequence
gatgagtacgtgtcggcgcaaaaga

SEQ ID NO: 237113 - DNA, 25 bp, Probe Sequence
gatcgtacctaattccaaatcagtc

SEQ ID NO: 237114 - DNA, 25 bp, Probe Sequence
gatgcttaccgaatccggagatcct

SEQ ID NO: 237115 - DNA, 25 bp, Probe Sequence
gatgaaaaaatcactggaaccccca

SEQ ID NO: 237116 - DNA, 25 bp, Probe Sequence
gatgggaaaatcatccagaaaaccc

SEQ ID NO: 237117 - DNA, 25 bp, Probe Sequence
gatgggatgaatgccccaaaaggcc

SEQ ID NO: 237118 - DNA, 25 bp, Probe Sequence
gatggcgagaaccaaggagtaggag

SEQ ID NO: 237119 - DNA, 25 bp, Probe Sequence
gatgggggactgagcaagtagctat

SEQ ID NO: 237120 - DNA, 25 bp, Probe Sequence
gatgagggaactgacaagtgacttg

SEQ ID NO: 237121 - DNA, 25 bp, Probe Sequence
gatggggaaaaatactgattctgtg

SEQ ID NO: 237122 - DNA, 25 bp, Probe Sequence
gaggctggatactagttacatgatt

SEQ ID NO: 237123 - DNA, 25 bp, Probe Sequence
gaggcatggaagtgatctatcctgc

SEQ ID NO: 237124 - DNA, 25 bp, Probe Sequence
gaggcctcagagtgatctgtcctgc

SEQ ID NO: 237125 - DNA, 25 bp, Probe Sequence
gaggcccatgaagatcttcttcttg

SEQ ID NO: 237126 - DNA, 25 bp, Probe Sequence
gatggcacccaagtgtttggcttct

SEQ ID NO: 237127 - DNA, 25 bp, Probe Sequence
gatggccctaaattcttgaagtctg

SEQ ID NO: 237128 - DNA, 25 bp, Probe Sequence
gatgggcgatacaattttaactcac

SEQ ID NO: 237129 - DNA, 25 bp, Probe Sequence
gaggctgcatgatctttttataaaa

SEQ ID NO: 237130 - DNA, 25 bp, Probe Sequence
gaggctgctgttagttttacagata

SEQ ID NO: 237131 - DNA, 25 bp, Probe Sequence
gaggcgctgctttgtcaaaaggaag

SEQ ID NO: 237132 - DNA, 25 bp, Probe Sequence
gaggccacattactagagttggcat

SEQ ID NO: 237133 - DNA, 25 bp, Probe Sequence
gaggccaagacattaagattcctta

SEQ ID NO: 237134 - DNA, 25 bp, Probe Sequence
gaggccagaaaaaaggtcagctctt

SEQ ID NO: 237135 - DNA, 25 bp, Probe Sequence
gaggcgcaaaaaaatcgaatcactg

SEQ ID NO: 237136 - DNA, 25 bp, Probe Sequence
gatggaaaatcagaatctagtcctg

SEQ ID NO: 237137 - DNA, 25 bp, Probe Sequence
gatggaaaatcagctctcataacta

SEQ ID NO: 237138 - DNA, 25 bp, Probe Sequence
gatggaaaagcaccacttgctactg

SEQ ID NO: 237139 - DNA, 25 bp, Probe Sequence
gatggaaaagcaccacttgctactg

SEQ ID NO: 237140 - DNA, 25 bp, Probe Sequence
gatggaaatcagaccactcattgtt

SEQ ID NO: 237141 - DNA, 25 bp, Probe Sequence
gatggcaactaaatggtgtttgtag

SEQ ID NO: 237142 - DNA, 25 bp, Probe Sequence
gatggcaactaaatggtgtttgtag

SEQ ID NO: 237143 - DNA, 25 bp, Probe Sequence
gatggcaactaaatggtgtttgtag

SEQ ID NO: 237144 - DNA, 25 bp, Probe Sequence
gatggcaactaaatggtgtttgtag

SEQ ID NO: 237145 - DNA, 25 bp, Probe Sequence
gatacaactgccaggttaatttcca

SEQ ID NO: 237146 - DNA, 25 bp, Probe Sequence
gtaaggcttaacagatccaattcca

SEQ ID NO: 237147 - DNA, 25 bp, Probe Sequence
gttacctggaggcgatcctaatcat

SEQ ID NO: 237148 - DNA, 25 bp, Probe Sequence
gttacgggatccagataggaatctt

SEQ ID NO: 237149 - DNA, 25 bp, Probe Sequence
gttaccaggccgagtgggatgacta

SEQ ID NO: 237150 - DNA, 25 bp, Probe Sequence
gttacggcctagaaggcgggctgta

SEQ ID NO: 237151 - DNA, 25 bp, Probe Sequence
tttgattggttaaaaggggccatag

SEQ ID NO: 237152 - DNA, 25 bp, Probe Sequence
gatggttggtttcatgtgggggtat

SEQ ID NO: 237153 - DNA, 25 bp, Probe Sequence
gatgtggttggtctagggtcagcct

SEQ ID NO: 237154 - DNA, 25 bp, Probe Sequence
gatgtgggtgggaggtagtgccttc

SEQ ID NO: 237155 - DNA, 25 bp, Probe Sequence
gattgggaggcagttggtacctttc

SEQ ID NO: 237156 - DNA, 25 bp, Probe Sequence
gatgagtggggagctggaaaccccg

SEQ ID NO: 237157 - DNA, 25 bp, Probe Sequence
gatggtgtcaatggcccgaaacaca

SEQ ID NO: 237158 - DNA, 25 bp, Probe Sequence
gatgtgtgacttcaccgaagaccag

SEQ ID NO: 237159 - DNA, 25 bp, Probe Sequence
gatgtgtgacttcaccgaagaccag

SEQ ID NO: 237160 - DNA, 25 bp, Probe Sequence
gatggaggcttttcctaaggccaag

SEQ ID NO: 237161 - DNA, 25 bp, Probe Sequence
gatggacggtatttcaacggccagg

SEQ ID NO: 237162 - DNA, 25 bp, Probe Sequence
gaggcgggtgtatcacctgaggtcg

SEQ ID NO: 237163 - DNA, 25 bp, Probe Sequence
gaggcgggtggatcatctaaggtca

SEQ ID NO: 237164 - DNA, 25 bp, Probe Sequence
gaggcgggtggatcacttgaggtca

SEQ ID NO: 237165 - DNA, 25 bp, Probe Sequence
gaggcgggtggatcacttgaggtca

SEQ ID NO: 237166 - DNA, 25 bp, Probe Sequence
gaggcgggaggatcacttgagccca

SEQ ID NO: 237167 - DNA, 25 bp, Probe Sequence
gatggcaggagggaaccttcagcct

SEQ ID NO: 237168 - DNA, 25 bp, Probe Sequence
gatggaggggcagagcctggagcct

SEQ ID NO: 237169 - DNA, 25 bp, Probe Sequence
gatcctgggtggacacctggatgcc

SEQ ID NO: 237170 - DNA, 25 bp, Probe Sequence
gatcctggaaggagagctggagcgc

SEQ ID NO: 237171 - DNA, 25 bp, Probe Sequence
gatcctggaaggagagctggagcgc

SEQ ID NO: 237172 - DNA, 25 bp, Probe Sequence
gatggggaagggggctgagcagctc

SEQ ID NO: 237173 - DNA, 25 bp, Probe Sequence
gatggggtcaggttgtgggccatgc

SEQ ID NO: 237174 - DNA, 25 bp, Probe Sequence
gatgggccttatgcagcaggcccag

SEQ ID NO: 237175 - DNA, 25 bp, Probe Sequence
gatgggcctctagtgacagatccag

SEQ ID NO: 237176 - DNA, 25 bp, Probe Sequence
gatggctcctttagcagagacacat

SEQ ID NO: 237177 - DNA, 25 bp, Probe Sequence
gatggccgatctagagaagtcccgc

SEQ ID NO: 237178 - DNA, 25 bp, Probe Sequence
gaggctggagctagatagagaggac

SEQ ID NO: 237179 - DNA, 25 bp, Probe Sequence
gaggctgtgagcaatgtgaggattc

SEQ ID NO: 237180 - DNA, 25 bp, Probe Sequence
gaggctgtgcacaaggctgagctga

SEQ ID NO: 237181 - DNA, 25 bp, Probe Sequence
gaggcttgacaaactagctgttggc

SEQ ID NO: 237182 - DNA, 25 bp, Probe Sequence
gaggcgagaaagacaagtgaatggc

SEQ ID NO: 237183 - DNA, 25 bp, Probe Sequence
gaggctggctacacaatcgaatggt

SEQ ID NO: 237184 - DNA, 25 bp, Probe Sequence
gaggctggtacaaatagatggagac

SEQ ID NO: 237185 - DNA, 25 bp, Probe Sequence
gaggctgagccagtcaaggaggtga

SEQ ID NO: 237186 - DNA, 25 bp, Probe Sequence
gaggctacaagttagtcagcagatg

SEQ ID NO: 237187 - DNA, 25 bp, Probe Sequence
gaggctggagagaaagccacaaaca

SEQ ID NO: 237188 - DNA, 25 bp, Probe Sequence
gatggctggagacacaccaaaagta

SEQ ID NO: 237189 - DNA, 25 bp, Probe Sequence
gaggctgagatgtctccatctctat

SEQ ID NO: 237190 - DNA, 25 bp, Probe Sequence
gaggctgggatggccatagcaatgg

SEQ ID NO: 237191 - DNA, 25 bp, Probe Sequence
gaggctggagtggctatcctaggca

SEQ ID NO: 237192 - DNA, 25 bp, Probe Sequence
gaggcggcaggagtactgcacggca

SEQ ID NO: 237193 - DNA, 25 bp, Probe Sequence
gaggcgatcctaatcatgtcacgga

SEQ ID NO: 237194 - DNA, 25 bp, Probe Sequence
gaggcgaactgtagagtgcagggac

SEQ ID NO: 237195 - DNA, 25 bp, Probe Sequence
gaggccagcactgagtctgggacac

SEQ ID NO: 237196 - DNA, 25 bp, Probe Sequence
gaggccacatctgtaaggcagacca

SEQ ID NO: 237197 - DNA, 25 bp, Probe Sequence
gaggctccatacctaagtcagacca

SEQ ID NO: 237198 - DNA, 25 bp, Probe Sequence
gaggcccaattccaagacagactct

SEQ ID NO: 237199 - DNA, 25 bp, Probe Sequence
gaggcccaaatccatggactgaagg

SEQ ID NO: 237200 - DNA, 25 bp, Probe Sequence
gaggctcttactggtgagtgcaaag

SEQ ID NO: 237201 - DNA, 25 bp, Probe Sequence
gaggctatttctggtagctacctca

SEQ ID NO: 237202 - DNA, 25 bp, Probe Sequence
gaggctatttctacatagtaactct

SEQ ID NO: 237203 - DNA, 25 bp, Probe Sequence
gaggctattttaatctttagtgcat

SEQ ID NO: 237204 - DNA, 25 bp, Probe Sequence
gaggctattgtgtaatcatcttaag

SEQ ID NO: 237205 - DNA, 25 bp, Probe Sequence
gaggctgtttgattatgtcgtgaag

SEQ ID NO: 237206 - DNA, 25 bp, Probe Sequence
gatgtgattttggccattggggagc

SEQ ID NO: 237207 - DNA, 25 bp, Probe Sequence
gatgtgcaggtatcaatgtaggaac

SEQ ID NO: 237208 - DNA, 25 bp, Probe Sequence
gatggcggacattcagactgagcgt

SEQ ID NO: 237209 - DNA, 25 bp, Probe Sequence
gatggcggacattcagactgagcgt

SEQ ID NO: 237210 - DNA, 25 bp, Probe Sequence
gatggcggacattcagactgagcgt

SEQ ID NO: 237211 - DNA, 25 bp, Probe Sequence
gatggctgtgacatcgcagaccttc

SEQ ID NO: 237212 - DNA, 25 bp, Probe Sequence
gaggcgcgagacacagagagcttct

SEQ ID NO: 237213 - DNA, 25 bp, Probe Sequence
gaggccgagagcaacatgaacgacc

SEQ ID NO: 237214 - DNA, 25 bp, Probe Sequence
gaggccgagagcaacatgaatgacc

SEQ ID NO: 237215 - DNA, 25 bp, Probe Sequence
gatggcccagcagacatttggcctc

SEQ ID NO: 237216 - DNA, 25 bp, Probe Sequence
gatggcccagcagacatttggcctc

SEQ ID NO: 237217 - DNA, 25 bp, Probe Sequence
gatggccgaatcttcattggcacct

SEQ ID NO: 237218 - DNA, 25 bp, Probe Sequence
gatgggggatgcttcatgtgaacgt

SEQ ID NO: 237219 - DNA, 25 bp, Probe Sequence
gatggggagctctacaatgaagtga

SEQ ID NO: 237220 - DNA, 25 bp, Probe Sequence
gatggactgagcacaaaccactggc

SEQ ID NO: 237221 - DNA, 25 bp, Probe Sequence
gatgtcctgtcaacaaaacctgtcc

SEQ ID NO: 237222 - DNA, 25 bp, Probe Sequence
gatgtatttcccaatcaacctggtg

SEQ ID NO: 237223 - DNA, 25 bp, Probe Sequence
gatgtagtaaccaacacctggattt

SEQ ID NO: 237224 - DNA, 25 bp, Probe Sequence
tgtgtagtcacatcaacgtcgggtc

SEQ ID NO: 237225 - DNA, 25 bp, Probe Sequence
gatggagtccatgaaggctctggag

SEQ ID NO: 237226 - DNA, 25 bp, Probe Sequence
gatggaacgatttgaggtgctgggc

SEQ ID NO: 237227 - DNA, 25 bp, Probe Sequence
gatggaccgttgaactgatcgtggc

SEQ ID NO: 237228 - DNA, 25 bp, Probe Sequence
gaggccaagtggcactaggtgcagc

SEQ ID NO: 237229 - DNA, 25 bp, Probe Sequence
gaggcgacagtcctatctagacatc

SEQ ID NO: 237230 - DNA, 25 bp, Probe Sequence
gatggagaccatcctggctaacaca

SEQ ID NO: 237231 - DNA, 25 bp, Probe Sequence
gatgaacagcccctggagaactacc

SEQ ID NO: 237232 - DNA, 25 bp, Probe Sequence
gatgacaagatcgttgggggctaca

SEQ ID NO: 237233 - DNA, 25 bp, Probe Sequence
gatgacaagatcgttgggggctaca

SEQ ID NO: 237234 - DNA, 25 bp, Probe Sequence
gatgacaagatcgttgggggctaca

SEQ ID NO: 237235 - DNA, 25 bp, Probe Sequence
gatgcaaggtctattatcccaacag

SEQ ID NO: 237236 - DNA, 25 bp, Probe Sequence
gatgtcggtcatagtttcctgaagc

SEQ ID NO: 237237 - DNA, 25 bp, Probe Sequence
gatgacgggatttttccacagcctc

SEQ ID NO: 237238 - DNA, 25 bp, Probe Sequence
gatggcgcaggagattttccgcctg

SEQ ID NO: 237239 - DNA, 25 bp, Probe Sequence
gatggcgcaggagattttccgcctg

SEQ ID NO: 237240 - DNA, 25 bp, Probe Sequence
gaggccaggagttcaagtccagcct

SEQ ID NO: 237241 - DNA, 25 bp, Probe Sequence
gaggccaggagttctgagaccagcc

SEQ ID NO: 237242 - DNA, 25 bp, Probe Sequence
gaggcctgaagttctgtgatagacc

SEQ ID NO: 237243 - DNA, 25 bp, Probe Sequence
gaggcctgcgagaagctggaagcca

SEQ ID NO: 237244 - DNA, 25 bp, Probe Sequence
gaggccgagatgagcggatagcttg

SEQ ID NO: 237245 - DNA, 25 bp, Probe Sequence
gaggccgaaggagagatatgcttcc

SEQ ID NO: 237246 - DNA, 25 bp, Probe Sequence
gaggcccacggagcaatacagtgac

SEQ ID NO: 237247 - DNA, 25 bp, Probe Sequence
gaggcccctctagcattatagtaga

SEQ ID NO: 237248 - DNA, 25 bp, Probe Sequence
gaggctcccctgttataatgggaga

SEQ ID NO: 237249 - DNA, 25 bp, Probe Sequence
gaggccacccagttgatactgggat

SEQ ID NO: 237250 - DNA, 25 bp, Probe Sequence
gaggcggaaggcttgtactggagca

SEQ ID NO: 237251 - DNA, 25 bp, Probe Sequence
gaggctggaacgctttttagctgca

SEQ ID NO: 237252 - DNA, 25 bp, Probe Sequence
gaggctggcacctgattttgtatcc

SEQ ID NO: 237253 - DNA, 25 bp, Probe Sequence
gatggtgtcaccagattttggtcac

SEQ ID NO: 237254 - DNA, 25 bp, Probe Sequence
gatgggtcctctagacttgaggggc

SEQ ID NO: 237255 - DNA, 25 bp, Probe Sequence
gatggtgttcgtaactaccaggctc

SEQ ID NO: 237256 - DNA, 25 bp, Probe Sequence
gaggctgttagctaacttgcacagg

SEQ ID NO: 237257 - DNA, 25 bp, Probe Sequence
gaggctgtaaaacctggcactctgc

SEQ ID NO: 237258 - DNA, 25 bp, Probe Sequence
gaggctgtaaatatctggcattttc

SEQ ID NO: 237259 - DNA, 25 bp, Probe Sequence
gatgcgcttaaaattgtccgttcca

SEQ ID NO: 237260 - DNA, 25 bp, Probe Sequence
gatccttgagaagcgagcctatatc

SEQ ID NO: 237261 - DNA, 25 bp, Probe Sequence
gatcctgaggagctcgaggtttcga

SEQ ID NO: 237262 - DNA, 25 bp, Probe Sequence
gatggtggtggcattgcaggttggc

SEQ ID NO: 237263 - DNA, 25 bp, Probe Sequence
gatggggctgtggggatagtgaggc

SEQ ID NO: 237264 - DNA, 25 bp, Probe Sequence
gatctgggaggaccgtatgtatggg

SEQ ID NO: 237265 - DNA, 25 bp, Probe Sequence
gatggggacgaggcttgaggtgggc

SEQ ID NO: 237266 - DNA, 25 bp, Probe Sequence
gaggcggagggtggatgaggtggaa

SEQ ID NO: 237267 - DNA, 25 bp, Probe Sequence
gaggcgcatgaatttgtgaaggtgg

SEQ ID NO: 237268 - DNA, 25 bp, Probe Sequence
gaggctgctcgatgctgtgaggaga

SEQ ID NO: 237269 - DNA, 25 bp, Probe Sequence
gatggcagatcacgaggtcaggaga

SEQ ID NO: 237270 - DNA, 25 bp, Probe Sequence
gaggctgtaagacgcattgtggaga

SEQ ID NO: 237271 - DNA, 25 bp, Probe Sequence
gaggctgtcctgtacattgtgggat

SEQ ID NO: 237272 - DNA, 25 bp, Probe Sequence
gaggctggcctgtgtggatatggca

SEQ ID NO: 237273 - DNA, 25 bp, Probe Sequence
gaggctgaggctgcagtgagttgtg

SEQ ID NO: 237274 - DNA, 25 bp, Probe Sequence
gaggcgggcaaggatgactatgtga

SEQ ID NO: 237275 - DNA, 25 bp, Probe Sequence
gaggctgaggacaaatacctgctgt

SEQ ID NO: 237276 - DNA, 25 bp, Probe Sequence
gaggctgaggacaaatacctgctgt

SEQ ID NO: 237277 - DNA, 25 bp, Probe Sequence
gatggcgggaatcatcatcgcaggc

SEQ ID NO: 237278 - DNA, 25 bp, Probe Sequence
gatgtgcgcggagagcaatcgccgg

SEQ ID NO: 237279 - DNA, 25 bp, Probe Sequence
gaggcgctgtaggagcctggtcatc

SEQ ID NO: 237280 - DNA, 25 bp, Probe Sequence
gaggcgcatgggttcatgtggctta

SEQ ID NO: 237281 - DNA, 25 bp, Probe Sequence
gaggccagacctactgtagcctcag

SEQ ID NO: 237282 - DNA, 25 bp, Probe Sequence
gaggccagtacgacgtggccatcaa

SEQ ID NO: 237283 - DNA, 25 bp, Probe Sequence
gatggcacattagggtgggcgtgct

SEQ ID NO: 237284 - DNA, 25 bp, Probe Sequence
gatggagcatcaacagcagggtggg

SEQ ID NO: 237285 - DNA, 25 bp, Probe Sequence
gatggcagatgcacatgttggagga

SEQ ID NO: 237286 - DNA, 25 bp, Probe Sequence
gatggcagagtgccttctgaagtga

SEQ ID NO: 237287 - DNA, 25 bp, Probe Sequence
gatggcatggttgctctattggact

SEQ ID NO: 237288 - DNA, 25 bp, Probe Sequence
gatggatggcttgccttcatgggtg

SEQ ID NO: 237289 - DNA, 25 bp, Probe Sequence
gatggactgaatgcgctactcggga

SEQ ID NO: 237290 - DNA, 25 bp, Probe Sequence
gatggaagaatcctggacttggcta

SEQ ID NO: 237291 - DNA, 25 bp, Probe Sequence
gatggatatggcagtggacgtggat

SEQ ID NO: 237292 - DNA, 25 bp, Probe Sequence
gatgttgtgtgcaatgctggcctgt

SEQ ID NO: 237293 - DNA, 25 bp, Probe Sequence
gatgttggtcctagacccatccaaa

SEQ ID NO: 237294 - DNA, 25 bp, Probe Sequence
gatggtgtgtacaaactcacctgaa

SEQ ID NO: 237295 - DNA, 25 bp, Probe Sequence
gatgggcttcacacagtacatggca

SEQ ID NO: 237296 - DNA, 25 bp, Probe Sequence
gatggctttatttgagatatatggc

SEQ ID NO: 237297 - DNA, 25 bp, Probe Sequence
gatggttctgaatgacaaaggtgtt

SEQ ID NO: 237298 - DNA, 25 bp, Probe Sequence
gatggttgctcagggacaaggtgcc

SEQ ID NO: 237299 - DNA, 25 bp, Probe Sequence
gatggcaagccaaggcttagcctcc

SEQ ID NO: 237300 - DNA, 25 bp, Probe Sequence
gatgggaatgcttggtttcctccta

SEQ ID NO: 237301 - DNA, 25 bp, Probe Sequence
gatggtgctattttgtttgttttgt

SEQ ID NO: 237302 - DNA, 25 bp, Probe Sequence
gatgtttttcgttccttgtatttat

SEQ ID NO: 237303 - DNA, 25 bp, Probe Sequence
gatgtgacttttcacctagtttaca

SEQ ID NO: 237304 - DNA, 25 bp, Probe Sequence
gatggcgtgtttctttattttgaag

SEQ ID NO: 237305 - DNA, 25 bp, Probe Sequence
gatggcgtttctgtgttcagagtag

SEQ ID NO: 237306 - DNA, 25 bp, Probe Sequence
gaggcctttgctgtgaactgcagtg

SEQ ID NO: 237307 - DNA, 25 bp, Probe Sequence
gatggcacagttctaacctggggaa

SEQ ID NO: 237308 - DNA, 25 bp, Probe Sequence
gatggcaagatctgtaccgtgacgg

SEQ ID NO: 237309 - DNA, 25 bp, Probe Sequence
gatggaaatcatgacccgagaggtg

SEQ ID NO: 237310 - DNA, 25 bp, Probe Sequence
gatggaacatgctaaccagcagact

SEQ ID NO: 237311 - DNA, 25 bp, Probe Sequence
gatggaattctagtcagctgcaggc

SEQ ID NO: 237312 - DNA, 25 bp, Probe Sequence
gatgggaactgagttgttggccttt

SEQ ID NO: 237313 - DNA, 25 bp, Probe Sequence
gataggcaacgctgcagttccttta

SEQ ID NO: 237314 - DNA, 25 bp, Probe Sequence
gatagagacacgtaaacccttctaa

SEQ ID NO: 237315 - DNA, 25 bp, Probe Sequence
gtaaatcattgcttaaccctcttat

SEQ ID NO: 237316 - DNA, 25 bp, Probe Sequence
gatggacattagttgaaccccttca

SEQ ID NO: 237317 - DNA, 25 bp, Probe Sequence
gatggaattgatgctgggccaaatt

SEQ ID NO: 237318 - DNA, 25 bp, Probe Sequence
gattgcaactggcctggccgcaaca

SEQ ID NO: 237319 - DNA, 25 bp, Probe Sequence
gatggaaatgtgttagcctcagaca

SEQ ID NO: 237320 - DNA, 25 bp, Probe Sequence
gatggaagtttttgctacatgttat

SEQ ID NO: 237321 - DNA, 25 bp, Probe Sequence
gatgtgcaaggagatttaatgattt

SEQ ID NO: 237322 - DNA, 25 bp, Probe Sequence
gatggtaggaattttccttctatgc

SEQ ID NO: 237323 - DNA, 25 bp, Probe Sequence
gatggtaggcaggattctttccaag

SEQ ID NO: 237324 - DNA, 25 bp, Probe Sequence
gatggctaatcgagacttgttaagc

SEQ ID NO: 237325 - DNA, 25 bp, Probe Sequence
gatgtgtaacgaattctttgaaggc

SEQ ID NO: 237326 - DNA, 25 bp, Probe Sequence
gatgatgtagaatttcctttaattt

SEQ ID NO: 237327 - DNA, 25 bp, Probe Sequence
gatgtaagcaaagccctggaatcct

SEQ ID NO: 237328 - DNA, 25 bp, Probe Sequence
gatggagaggtagcacgggagtaca

SEQ ID NO: 237329 - DNA, 25 bp, Probe Sequence
gatgggatcggagccatggtgagga

SEQ ID NO: 237330 - DNA, 25 bp, Probe Sequence
gatgtaccttacgtcatggtgaggg

SEQ ID NO: 237331 - DNA, 25 bp, Probe Sequence
gatggagcttttgatacttgcaggg

SEQ ID NO: 237332 - DNA, 25 bp, Probe Sequence
gatggcttttatggtactggagaga

SEQ ID NO: 237333 - DNA, 25 bp, Probe Sequence
gatgccttttcctctctaagagttc

SEQ ID NO: 237334 - DNA, 25 bp, Probe Sequence
gatgactctactcttccacaagagt

SEQ ID NO: 237335 - DNA, 25 bp, Probe Sequence
gatggtctcattccgtggacgaggt

SEQ ID NO: 237336 - DNA, 25 bp, Probe Sequence
gatgtttagctctggtacagcctgt

SEQ ID NO: 237337 - DNA, 25 bp, Probe Sequence
gatggaacagcctagtggcagccct

SEQ ID NO: 237338 - DNA, 25 bp, Probe Sequence
gatggatctgcagatagtagagggc

SEQ ID NO: 237339 - DNA, 25 bp, Probe Sequence
gatggtccggattggagggagcaca

SEQ ID NO: 237340 - DNA, 25 bp, Probe Sequence
gatggtctcaagtcagagggaagca

SEQ ID NO: 237341 - DNA, 25 bp, Probe Sequence
gatgtgttcacgaagaggaaaggac

SEQ ID NO: 237342 - DNA, 25 bp, Probe Sequence
gatggcttcgagaagggcccagaag

SEQ ID NO: 237343 - DNA, 25 bp, Probe Sequence
gaggcgattgagaaggagctcccag

SEQ ID NO: 237344 - DNA, 25 bp, Probe Sequence
gaggccaatggaagtgagatcctcg

SEQ ID NO: 237345 - DNA, 25 bp, Probe Sequence
gaggccagaggagtgagatgtccta

SEQ ID NO: 237346 - DNA, 25 bp, Probe Sequence
gatggcacagaggactcaattccag

SEQ ID NO: 237347 - DNA, 25 bp, Probe Sequence
gaggccaggctgataggagctcagg

SEQ ID NO: 237348 - DNA, 25 bp, Probe Sequence
gaggcctgaggatgagctggaagga

SEQ ID NO: 237349 - DNA, 25 bp, Probe Sequence
gaggccattgcgttggtggagaagg

SEQ ID NO: 237350 - DNA, 25 bp, Probe Sequence
gatggctatgtgctagagggcaaag

SEQ ID NO: 237351 - DNA, 25 bp, Probe Sequence
gatggctatgtgctagagggcaaag

SEQ ID NO: 237352 - DNA, 25 bp, Probe Sequence
gatggctcatgtcaaacgtaaaggt

SEQ ID NO: 237353 - DNA, 25 bp, Probe Sequence
gaggccatggtaacctggatcacag

SEQ ID NO: 237354 - DNA, 25 bp, Probe Sequence
gaggcctgcttcacttgcagataag

SEQ ID NO: 237355 - DNA, 25 bp, Probe Sequence
gatggcctttgtcttatgaatattt

SEQ ID NO: 237356 - DNA, 25 bp, Probe Sequence
gaggcctcttggttgttgtatgatt

SEQ ID NO: 237357 - DNA, 25 bp, Probe Sequence
gaggcctgctgtggtgattttgagg

SEQ ID NO: 237358 - DNA, 25 bp, Probe Sequence
gatggctctgttaacttcttcagga

SEQ ID NO: 237359 - DNA, 25 bp, Probe Sequence
gatggttgcatgtttctagtttgta

SEQ ID NO: 237360 - DNA, 25 bp, Probe Sequence
gatggttctccaactaggattgcgt

SEQ ID NO: 237361 - DNA, 25 bp, Probe Sequence
gatggatatcccatttggtcccgac

SEQ ID NO: 237362 - DNA, 25 bp, Probe Sequence
gatggtatcccctggagtagagggc

SEQ ID NO: 237363 - DNA, 25 bp, Probe Sequence
gattcttccacggggttagggagat

SEQ ID NO: 237364 - DNA, 25 bp, Probe Sequence
gatgttgaatcctgggttgggaaat

SEQ ID NO: 237365 - DNA, 25 bp, Probe Sequence
gatggtgaacctcctgttaggcaaa

SEQ ID NO: 237366 - DNA, 25 bp, Probe Sequence
gatggaggcatcatgtctgttaggg

SEQ ID NO: 237367 - DNA, 25 bp, Probe Sequence
gatggcaagcatgtggtgtttggca

SEQ ID NO: 237368 - DNA, 25 bp, Probe Sequence
gatggcaagcatgtggtgtttggca

SEQ ID NO: 237369 - DNA, 25 bp, Probe Sequence
gatggcaagaaagggattgtgggtc

SEQ ID NO: 237370 - DNA, 25 bp, Probe Sequence
gatggaagaacagtggggtggttca

SEQ ID NO: 237371 - DNA, 25 bp, Probe Sequence
gatggaaacaaattgtggggttcag

SEQ ID NO: 237372 - DNA, 25 bp, Probe Sequence
gatggacaaccaaagtcagtgggac

SEQ ID NO: 237373 - DNA, 25 bp, Probe Sequence
gatggcagcaaggaacccaggtcga

SEQ ID NO: 237374 - DNA, 25 bp, Probe Sequence
gatggcatttgaaagcctgaggttg

SEQ ID NO: 237375 - DNA, 25 bp, Probe Sequence
gaggcctatgattgacagacaggtt

SEQ ID NO: 237376 - DNA, 25 bp, Probe Sequence
gaggccttcatcatagactggtata

SEQ ID NO: 237377 - DNA, 25 bp, Probe Sequence
gatggccttatcaatgaagctacta

SEQ ID NO: 237378 - DNA, 25 bp, Probe Sequence
gatggccttatcaatgaagctacta

SEQ ID NO: 237379 - DNA, 25 bp, Probe Sequence
gatggcctgaatatatgtctgcact

SEQ ID NO: 237380 - DNA, 25 bp, Probe Sequence
gaggccagatgaggttcctgacgat

SEQ ID NO: 237381 - DNA, 25 bp, Probe Sequence
gatggacagatcgttgtcagctact

SEQ ID NO: 237382 - DNA, 25 bp, Probe Sequence
gatggaacacatgctctgatgcgaa

SEQ ID NO: 237383 - DNA, 25 bp, Probe Sequence
gaggccacactgatgttctaaaaaa

SEQ ID NO: 237384 - DNA, 25 bp, Probe Sequence
gaggccacagtgaattatgattaca

SEQ ID NO: 237385 - DNA, 25 bp, Probe Sequence
gaggccagcattatcctgatatcta

SEQ ID NO: 237386 - DNA, 25 bp, Probe Sequence
gatggcctgataactccaggaatgt

SEQ ID NO: 237387 - DNA, 25 bp, Probe Sequence
gatggcggatgaagccacgcgacgt

SEQ ID NO: 237388 - DNA, 25 bp, Probe Sequence
gatggcgtgatatgcacctgcaacg

SEQ ID NO: 237389 - DNA, 25 bp, Probe Sequence
gatggcgcttgagcaccgcatcggc

SEQ ID NO: 237390 - DNA, 25 bp, Probe Sequence
gatggccaagaggcacctttggccc

SEQ ID NO: 237391 - DNA, 25 bp, Probe Sequence
gatggccatagatttgccttgtggt

SEQ ID NO: 237392 - DNA, 25 bp, Probe Sequence
gatggcgctatattctgtgtttcag

SEQ ID NO: 237393 - DNA, 25 bp, Probe Sequence
gatggcattaaactggaatctcaaa

SEQ ID NO: 237394 - DNA, 25 bp, Probe Sequence
gatggcaataaaactgactctcaac

SEQ ID NO: 237395 - DNA, 25 bp, Probe Sequence
gatggcaaagagagtcgcatctcag

SEQ ID NO: 237396 - DNA, 25 bp, Probe Sequence
gatggcatacagatagtagaccgtt

SEQ ID NO: 237397 - DNA, 25 bp, Probe Sequence
gatggctaatcagtattgaggccgg

SEQ ID NO: 237398 - DNA, 25 bp, Probe Sequence
gatgacttcacagaggagcgcctgg

SEQ ID NO: 237399 - DNA, 25 bp, Probe Sequence
gatcccccgcaatgaggctgatggg

SEQ ID NO: 237400 - DNA, 25 bp, Probe Sequence
gatgtcccggagcaaggtggctggg

SEQ ID NO: 237401 - DNA, 25 bp, Probe Sequence
gatgtcgaagcgaggacgtggtggg

SEQ ID NO: 237402 - DNA, 25 bp, Probe Sequence
gatgaggaagaaaatggccaggggg

SEQ ID NO: 237403 - DNA, 25 bp, Probe Sequence
gatgaggaagaaaatggccaggggg

SEQ ID NO: 237404 - DNA, 25 bp, Probe Sequence
gatgtgctgaaatacgtccgggaga

SEQ ID NO: 237405 - DNA, 25 bp, Probe Sequence
gatggtgagcagtaactgtccctgc

SEQ ID NO: 237406 - DNA, 25 bp, Probe Sequence
gatggtatagttatgttgcctggac

SEQ ID NO: 237407 - DNA, 25 bp, Probe Sequence
gatggttagctctttgttttggggt

SEQ ID NO: 237408 - DNA, 25 bp, Probe Sequence
gatggagtgttttagttcttggggg

SEQ ID NO: 237409 - DNA, 25 bp, Probe Sequence
gatggtgcaactttgagtccttggc

SEQ ID NO: 237410 - DNA, 25 bp, Probe Sequence
gatggtgctcatcttgaaacttgaa

SEQ ID NO: 237411 - DNA, 25 bp, Probe Sequence
gatggtttccatggatacaagtgta

SEQ ID NO: 237412 - DNA, 25 bp, Probe Sequence
gatggattacaagggccagaagcta

SEQ ID NO: 237413 - DNA, 25 bp, Probe Sequence
gatggaatcaaacggctctataatg

SEQ ID NO: 237414 - DNA, 25 bp, Probe Sequence
gatggatattccattctccacgatg

SEQ ID NO: 237415 - DNA, 25 bp, Probe Sequence
gatggtatatccttgcgatgtacag

SEQ ID NO: 237416 - DNA, 25 bp, Probe Sequence
gatggttttctcttcatgtaagtcc

SEQ ID NO: 237417 - DNA, 25 bp, Probe Sequence
gatgttttttctacaaaagtccata

SEQ ID NO: 237418 - DNA, 25 bp, Probe Sequence
gatgtttttctgcactagaaggcac

SEQ ID NO: 237419 - DNA, 25 bp, Probe Sequence
gatgttatagccccactcataacgc

SEQ ID NO: 237420 - DNA, 25 bp, Probe Sequence
gatggctgatagggattgtacaacc

SEQ ID NO: 237421 - DNA, 25 bp, Probe Sequence
gatgtgctgattgaattttatgccc

SEQ ID NO: 237422 - DNA, 25 bp, Probe Sequence
gatggctgatccctatttgtgactt

SEQ ID NO: 237423 - DNA, 25 bp, Probe Sequence
gatgggatccctaatatgataccac

SEQ ID NO: 237424 - DNA, 25 bp, Probe Sequence
gatgtggtcatcattaacgacagcc

SEQ ID NO: 237425 - DNA, 25 bp, Probe Sequence
gatggcagtctgatgtacaaataca

SEQ ID NO: 237426 - DNA, 25 bp, Probe Sequence
gatggaatcatggatgctgccaatt

SEQ ID NO: 237427 - DNA, 25 bp, Probe Sequence
gatggatgacatggctgtggatagt

SEQ ID NO: 237428 - DNA, 25 bp, Probe Sequence
gatggatgacatggctgtggatagt

SEQ ID NO: 237429 - DNA, 25 bp, Probe Sequence
gatggatgcatgcagttcgtcagaa

SEQ ID NO: 237430 - DNA, 25 bp, Probe Sequence
gatggatcatgcggagccggctgaa

SEQ ID NO: 237431 - DNA, 25 bp, Probe Sequence
gatggagactggtcctgtgtgcagt

SEQ ID NO: 237432 - DNA, 25 bp, Probe Sequence
gatggaagctggacacatgagaagt

SEQ ID NO: 237433 - DNA, 25 bp, Probe Sequence
gatggaaggcagaaggacacagtga

SEQ ID NO: 237434 - DNA, 25 bp, Probe Sequence
gatgtgtaggaggaagagctcaggt

SEQ ID NO: 237435 - DNA, 25 bp, Probe Sequence
gatggctggcggaaagatatatgag

SEQ ID NO: 237436 - DNA, 25 bp, Probe Sequence
gatggggggagcaagcataattttt

SEQ ID NO: 237437 - DNA, 25 bp, Probe Sequence
gatggggatcggggattgcaattat

SEQ ID NO: 237438 - DNA, 25 bp, Probe Sequence
gatggaggatacggagattcacaat

SEQ ID NO: 237439 - DNA, 25 bp, Probe Sequence
gatggaccatttggattgtgcaaca

SEQ ID NO: 237440 - DNA, 25 bp, Probe Sequence
gatggacttggcggatcttacagag

SEQ ID NO: 237441 - DNA, 25 bp, Probe Sequence
gatgtacttgactagtttacttatg

SEQ ID NO: 237442 - DNA, 25 bp, Probe Sequence
gatggaaagttatttctatcttggc

SEQ ID NO: 237443 - DNA, 25 bp, Probe Sequence
gatgtgctaaatgacttttttggcc

SEQ ID NO: 237444 - DNA, 25 bp, Probe Sequence
gatgtgctataatctgtttttacgt

SEQ ID NO: 237445 - DNA, 25 bp, Probe Sequence
gatgggagtatacttactttccctt

SEQ ID NO: 237446 - DNA, 25 bp, Probe Sequence
gatgggttataaatgacttgacggc

SEQ ID NO: 237447 - DNA, 25 bp, Probe Sequence
gatgcaggtcgtacataacttccgg

SEQ ID NO: 237448 - DNA, 25 bp, Probe Sequence
gatgcaggatccactaattttttgt

SEQ ID NO: 237449 - DNA, 25 bp, Probe Sequence
gatgtggtagggtaatcttgtttga

SEQ ID NO: 237450 - DNA, 25 bp, Probe Sequence
gatgtgttatgggaagacttgttac

SEQ ID NO: 237451 - DNA, 25 bp, Probe Sequence
gatgttctagggcataatgaggaaa

SEQ ID NO: 237452 - DNA, 25 bp, Probe Sequence
gatggttatctgcctcaatttgaaa

SEQ ID NO: 237453 - DNA, 25 bp, Probe Sequence
gatggcattactctgcactatagcc

SEQ ID NO: 237454 - DNA, 25 bp, Probe Sequence
gatgtgcatgtgtacttcctaaggt

SEQ ID NO: 237455 - DNA, 25 bp, Probe Sequence
gatggagctgtattgtgtatggatg

SEQ ID NO: 237456 - DNA, 25 bp, Probe Sequence
gatggaatgacagggtctggtgggg

SEQ ID NO: 237457 - DNA, 25 bp, Probe Sequence
gatggaagttctagtgtggaggcgg

SEQ ID NO: 237458 - DNA, 25 bp, Probe Sequence
gatggccaggtgtcttgtggacacg

SEQ ID NO: 237459 - DNA, 25 bp, Probe Sequence
gatggagagtgttgttgtaacagga

SEQ ID NO: 237460 - DNA, 25 bp, Probe Sequence
gatggagagggtatctatgcaggga

SEQ ID NO: 237461 - DNA, 25 bp, Probe Sequence
gatggcaacagtagttctaggagga

SEQ ID NO: 237462 - DNA, 25 bp, Probe Sequence
gatcgcacaaggacatttgggactg

SEQ ID NO: 237463 - DNA, 25 bp, Probe Sequence
gatggcccggattttatggcatctg

SEQ ID NO: 237464 - DNA, 25 bp, Probe Sequence
gatgtagccggtaatcctggcacgt

SEQ ID NO: 237465 - DNA, 25 bp, Probe Sequence
gatgtggttcgaactcgcatgatga

SEQ ID NO: 237466 - DNA, 25 bp, Probe Sequence
gatgtggtaagatctacaatgctcc

SEQ ID NO: 237467 - DNA, 25 bp, Probe Sequence
gatggtcagaattactaccaccacc

SEQ ID NO: 237468 - DNA, 25 bp, Probe Sequence
gtcgccaggttaaacaaccatcgag

SEQ ID NO: 237469 - DNA, 25 bp, Probe Sequence
gatcccagcgttatctaactcctgg

SEQ ID NO: 237470 - DNA, 25 bp, Probe Sequence
gatcccagcgttatctaactcctgg

SEQ ID NO: 237471 - DNA, 25 bp, Probe Sequence
tccacctggcatagttaaaaccttg

SEQ ID NO: 237472 - DNA, 25 bp, Probe Sequence
tacaagcatgtaacaaaaaaggtgt

SEQ ID NO: 237473 - DNA, 25 bp, Probe Sequence
gattcactctaagaagaaaggcgat

SEQ ID NO: 237474 - DNA, 25 bp, Probe Sequence
gatgtccttttctgagaagaatctg

SEQ ID NO: 237475 - DNA, 25 bp, Probe Sequence
gatggcactgttaaaaccgtatatg

SEQ ID NO: 237476 - DNA, 25 bp, Probe Sequence
gatggcatttcttaggacacctttg

SEQ ID NO: 237477 - DNA, 25 bp, Probe Sequence
gatggcagttcttatctgcatcact

SEQ ID NO: 237478 - DNA, 25 bp, Probe Sequence
gatggcagtatgacaattcttgcta

SEQ ID NO: 237479 - DNA, 25 bp, Probe Sequence
gatggagaacaaatttctgccagaa

SEQ ID NO: 237480 - DNA, 25 bp, Probe Sequence
gatgtagaatatgctttcctgccaa

SEQ ID NO: 237481 - DNA, 25 bp, Probe Sequence
gatggcaaattgatagatcccaaaa

SEQ ID NO: 237482 - DNA, 25 bp, Probe Sequence
gatggacagcttctttgcccaaaat

SEQ ID NO: 237483 - DNA, 25 bp, Probe Sequence
gatggatagcttctttgtcagcaat

SEQ ID NO: 237484 - DNA, 25 bp, Probe Sequence
gatggacatttgtttagtaaatccc

SEQ ID NO: 237485 - DNA, 25 bp, Probe Sequence
gatggatcacttgtaaggacagtgc

SEQ ID NO: 237486 - DNA, 25 bp, Probe Sequence
gatggaagctaagcaatggaaatgc

SEQ ID NO: 237487 - DNA, 25 bp, Probe Sequence
gatggcctctaagtaaggagaatgt

SEQ ID NO: 237488 - DNA, 25 bp, Probe Sequence
gatggctgctctaaaaagacaaatg

SEQ ID NO: 237489 - DNA, 25 bp, Probe Sequence
gatggccctgacaagtatgatcata

SEQ ID NO: 237490 - DNA, 25 bp, Probe Sequence
gatggccagtgattgaatatgtctg

SEQ ID NO: 237491 - DNA, 25 bp, Probe Sequence
gatggcaatggctatattagtgctg

SEQ ID NO: 237492 - DNA, 25 bp, Probe Sequence
gatggcaatcttaatttttgggtac

SEQ ID NO: 237493 - DNA, 25 bp, Probe Sequence
gatggctactataatgtcctctggg

SEQ ID NO: 237494 - DNA, 25 bp, Probe Sequence
gatggcatgcacctataatcccagc

SEQ ID NO: 237495 - DNA, 25 bp, Probe Sequence
gatggctcatgctgtaatcccagca

SEQ ID NO: 237496 - DNA, 25 bp, Probe Sequence
gatggcttctcagatatggcttgca

SEQ ID NO: 237497 - DNA, 25 bp, Probe Sequence
gatggctgtgtagcagatgcactgg

SEQ ID NO: 237498 - DNA, 25 bp, Probe Sequence
gatggatggccagtgcaagcgtgac

SEQ ID NO: 237499 - DNA, 25 bp, Probe Sequence
gatggagtgctaatggaaatgccca

SEQ ID NO: 237500 - DNA, 25 bp, Probe Sequence
gatggctttacaagaaaaccaccta

SEQ ID NO: 237501 - DNA, 25 bp, Probe Sequence
gatgtggatttcacaaaacactcct

SEQ ID NO: 237502 - DNA, 25 bp, Probe Sequence
gatgtcaatttcatgaaaagcctga

SEQ ID NO: 237503 - DNA, 25 bp, Probe Sequence
gatgtttttttgtctaggcaccata

SEQ ID NO: 237504 - DNA, 25 bp, Probe Sequence
gatgtgggttcatatcttggcacca

SEQ ID NO: 237505 - DNA, 25 bp, Probe Sequence
gatggtggggcacagtagcgcacac

SEQ ID NO: 237506 - DNA, 25 bp, Probe Sequence
gatggagggtgcctactggagaaat

SEQ ID NO: 237507 - DNA, 25 bp, Probe Sequence
gatggagagtgtttcacaggcaaaa

SEQ ID NO: 237508 - DNA, 25 bp, Probe Sequence
gatgagggtgtgtaccagtgccatg

SEQ ID NO: 237509 - DNA, 25 bp, Probe Sequence
gatggggctgaggaacatgctccct

SEQ ID NO: 237510 - DNA, 25 bp, Probe Sequence
gatggagacgtgagagatctcctcg

SEQ ID NO: 237511 - DNA, 25 bp, Probe Sequence
gatggcaatatgctgggcatctact

SEQ ID NO: 237512 - DNA, 25 bp, Probe Sequence
gatggcaaatgcaaggagatcgccg

SEQ ID NO: 237513 - DNA, 25 bp, Probe Sequence
gatggaggagctaggggctccagaa

SEQ ID NO: 237514 - DNA, 25 bp, Probe Sequence
gatggagaatctagtgtagcagcct

SEQ ID NO: 237515 - DNA, 25 bp, Probe Sequence
gatggacaaccaattgaccagcagc

SEQ ID NO: 237516 - DNA, 25 bp, Probe Sequence
gatggctcagaacatgtacacagac

SEQ ID NO: 237517 - DNA, 25 bp, Probe Sequence
gatggctgctgaaccagtagaagac

SEQ ID NO: 237518 - DNA, 25 bp, Probe Sequence
gatggcttgtgacgcggagagaacc

SEQ ID NO: 237519 - DNA, 25 bp, Probe Sequence
gatggctgtgcatgactggaaaact

SEQ ID NO: 237520 - DNA, 25 bp, Probe Sequence
gatgatctgaattactggtccgact

SEQ ID NO: 237521 - DNA, 25 bp, Probe Sequence
gatggcatctcattactgtgctctc

SEQ ID NO: 237522 - DNA, 25 bp, Probe Sequence
gatggatcagtgtactgtcctggca

SEQ ID NO: 237523 - DNA, 25 bp, Probe Sequence
gatggctgtgaatgtgatccgctca

SEQ ID NO: 237524 - DNA, 25 bp, Probe Sequence
gatggctgctgagcaaggggatcag

SEQ ID NO: 237525 - DNA, 25 bp, Probe Sequence
gatggcttgagtcagctgcagggca

SEQ ID NO: 237526 - DNA, 25 bp, Probe Sequence
gatggcttggaggactcaggacttc

SEQ ID NO: 237527 - DNA, 25 bp, Probe Sequence
gatggtgatggatgcccgtagtccc

SEQ ID NO: 237528 - DNA, 25 bp, Probe Sequence
gatggagtagcatgcccaaggctac

SEQ ID NO: 237529 - DNA, 25 bp, Probe Sequence
gatggcacagactgcaaataggcat

SEQ ID NO: 237530 - DNA, 25 bp, Probe Sequence
gatgtcacgagctcgttagctgcgt

SEQ ID NO: 237531 - DNA, 25 bp, Probe Sequence
gatgtcagcggatgtcacgagctcg

SEQ ID NO: 237532 - DNA, 25 bp, Probe Sequence
gatgtctggaagccatgactgttcc

SEQ ID NO: 237533 - DNA, 25 bp, Probe Sequence
gatgttatgaagggctctaatccaa

SEQ ID NO: 237534 - DNA, 25 bp, Probe Sequence
gatgttatgtggtcacctacccacc

SEQ ID NO: 237535 - DNA, 25 bp, Probe Sequence
gatgatcatttacagactccctacc

SEQ ID NO: 237536 - DNA, 25 bp, Probe Sequence
gatgtagatgttctgtgctgtcctg

SEQ ID NO: 237537 - DNA, 25 bp, Probe Sequence
gatggagcttgtgttgcgagctctg

SEQ ID NO: 237538 - DNA, 25 bp, Probe Sequence
gatggactttaaaagatgctgtgta

SEQ ID NO: 237539 - DNA, 25 bp, Probe Sequence
gatggatgtttatcacagtgctgtt

SEQ ID NO: 237540 - DNA, 25 bp, Probe Sequence
gatggcattattagacatgctggtc

SEQ ID NO: 237541 - DNA, 25 bp, Probe Sequence
gatggcatctgtttgaatgtgctgt

SEQ ID NO: 237542 - DNA, 25 bp, Probe Sequence
gatggctctgaagaatctgtgtgac

SEQ ID NO: 237543 - DNA, 25 bp, Probe Sequence
gatgtctctgacaaagtgtgtctca

SEQ ID NO: 237544 - DNA, 25 bp, Probe Sequence
gatgtccatcttgacgttgctgacc

SEQ ID NO: 237545 - DNA, 25 bp, Probe Sequence
gatgatgatatcacgcacgttgaag

SEQ ID NO: 237546 - DNA, 25 bp, Probe Sequence
gatgatgatatcacgcacgttgaag

SEQ ID NO: 237547 - DNA, 25 bp, Probe Sequence
gatgaattaacctctcaaagcacag

SEQ ID NO: 237548 - DNA, 25 bp, Probe Sequence
gatgtattaacctacctgtgaatca

SEQ ID NO: 237549 - DNA, 25 bp, Probe Sequence
gatgatatcaagattacttttcaca

SEQ ID NO: 237550 - DNA, 25 bp, Probe Sequence
gatgttaaggtgtaccttgttgaat

SEQ ID NO: 237551 - DNA, 25 bp, Probe Sequence
gatgtttgatggacaccgttttcta

SEQ ID NO: 237552 - DNA, 25 bp, Probe Sequence
gatgtttgacatactaattatttta

SEQ ID NO: 237553 - DNA, 25 bp, Probe Sequence
gatggttatgcaattaaggaaagaa

SEQ ID NO: 237554 - DNA, 25 bp, Probe Sequence
gatggtgtggattattgggccaaaa

SEQ ID NO: 237555 - DNA, 25 bp, Probe Sequence
gatgggtggcagtgaggtggcccag

SEQ ID NO: 237556 - DNA, 25 bp, Probe Sequence
gatggagaacgttgcgttgttcaca

SEQ ID NO: 237557 - DNA, 25 bp, Probe Sequence
gatggagaacactggactgtatacc

SEQ ID NO: 237558 - DNA, 25 bp, Probe Sequence
gatggagagtactgggtcgacccca

SEQ ID NO: 237559 - DNA, 25 bp, Probe Sequence
gatgtaagtaaagggcccacaccca

SEQ ID NO: 237560 - DNA, 25 bp, Probe Sequence
gatgtaagtacgaggagtaaatcca

SEQ ID NO: 237561 - DNA, 25 bp, Probe Sequence
gatgttaccacctggaggatttctc

SEQ ID NO: 237562 - DNA, 25 bp, Probe Sequence
gatgtggaccaccaaggggttgttg

SEQ ID NO: 237563 - DNA, 25 bp, Probe Sequence
gatgtggaccaccaaggggttgttg

SEQ ID NO: 237564 - DNA, 25 bp, Probe Sequence
gatgtgggctcagtaatgtgcgaga

SEQ ID NO: 237565 - DNA, 25 bp, Probe Sequence
gatgtggcccagaggtgcaaggagc

SEQ ID NO: 237566 - DNA, 25 bp, Probe Sequence
gatggagtcgaagcgctgaaggaat

SEQ ID NO: 237567 - DNA, 25 bp, Probe Sequence
gatggatactgatgggtgacattga

SEQ ID NO: 237568 - DNA, 25 bp, Probe Sequence
gatgttcagcgatgcaggtagcggg

SEQ ID NO: 237569 - DNA, 25 bp, Probe Sequence
gatgggctgcgagtgcaagatcacg

SEQ ID NO: 237570 - DNA, 25 bp, Probe Sequence
gatggtgctgtgctgaggaaagggg

SEQ ID NO: 237571 - DNA, 25 bp, Probe Sequence
gatggtctgtggggttagagcccag

SEQ ID NO: 237572 - DNA, 25 bp, Probe Sequence
gatgctttggtagatttctccctga

SEQ ID NO: 237573 - DNA, 25 bp, Probe Sequence
gatctttagtacgtggagtcacctt

SEQ ID NO: 237574 - DNA, 25 bp, Probe Sequence
gatgtacatactcaagggtcacatt

SEQ ID NO: 237575 - DNA, 25 bp, Probe Sequence
gatgtatatagtcaagtaggagcag

SEQ ID NO: 237576 - DNA, 25 bp, Probe Sequence
gatgttttcaggtgtcatggactgt

SEQ ID NO: 237577 - DNA, 25 bp, Probe Sequence
gatggttgtcaatcgtctgaccgaa

SEQ ID NO: 237578 - DNA, 25 bp, Probe Sequence
gatggtttctattggctcgacattt

SEQ ID NO: 237579 - DNA, 25 bp, Probe Sequence
gatggattttatttcactcacactc

SEQ ID NO: 237580 - DNA, 25 bp, Probe Sequence
gatgtgatctttatcatcactaaga

SEQ ID NO: 237581 - DNA, 25 bp, Probe Sequence
gatgtgaatattacccattgcgtgc

SEQ ID NO: 237582 - DNA, 25 bp, Probe Sequence
gatgtgaaatataagcctgcggcct

SEQ ID NO: 237583 - DNA, 25 bp, Probe Sequence
gatgtatataatatctccggtttat

SEQ ID NO: 237584 - DNA, 25 bp, Probe Sequence
gatgtaaccaggtctcctagtttac

SEQ ID NO: 237585 - DNA, 25 bp, Probe Sequence
gatgtaacctggaaactatgcttta

SEQ ID NO: 237586 - DNA, 25 bp, Probe Sequence
gatggcaagcttcaaatctgatttg

SEQ ID NO: 237587 - DNA, 25 bp, Probe Sequence
gatggagcgtgtcagtattgtgtga

SEQ ID NO: 237588 - DNA, 25 bp, Probe Sequence
gatggaagtttttgcattggtaaga

SEQ ID NO: 237589 - DNA, 25 bp, Probe Sequence
gatcacgatttcacactgggtacag

SEQ ID NO: 237590 - DNA, 25 bp, Probe Sequence
gatcctgcttccaaagatcaggtaa

SEQ ID NO: 237591 - DNA, 25 bp, Probe Sequence
gatgcttgcccctagttaagtcaat

SEQ ID NO: 237592 - DNA, 25 bp, Probe Sequence
gatgttgactgcacaggtaatacaa

SEQ ID NO: 237593 - DNA, 25 bp, Probe Sequence
gatgtgtcattaagtgcagaaataa

SEQ ID NO: 237594 - DNA, 25 bp, Probe Sequence
gatgtgtcattaagtgcagaaataa

SEQ ID NO: 237595 - DNA, 25 bp, Probe Sequence
gatggttgatgtctcaggaataagc

SEQ ID NO: 237596 - DNA, 25 bp, Probe Sequence
gatggtgtagctcccaggctataag

SEQ ID NO: 237597 - DNA, 25 bp, Probe Sequence
gatgggactgcaactcatgactatc

SEQ ID NO: 237598 - DNA, 25 bp, Probe Sequence
gatggtatcatcaagctcaacgttc

SEQ ID NO: 237599 - DNA, 25 bp, Probe Sequence
gatggtgacatcatcgtcaaggtca

SEQ ID NO: 237600 - DNA, 25 bp, Probe Sequence
gatggatatacagtaatacagtcaa

SEQ ID NO: 237601 - DNA, 25 bp, Probe Sequence
gatggttacactagaagcccagact

SEQ ID NO: 237602 - DNA, 25 bp, Probe Sequence
gatggattaatcctaatacaagtta

SEQ ID NO: 237603 - DNA, 25 bp, Probe Sequence
gatggttgaatcataacataaggaa

SEQ ID NO: 237604 - DNA, 25 bp, Probe Sequence
gatggtatactgtttttagaggaat

SEQ ID NO: 237605 - DNA, 25 bp, Probe Sequence
gatgggaaccttatctgaatgtttt

SEQ ID NO: 237606 - DNA, 25 bp, Probe Sequence
gatggagagttctttcctatttttt

SEQ ID NO: 237607 - DNA, 25 bp, Probe Sequence
gatgggagtagctcttcttgctttt

SEQ ID NO: 237608 - DNA, 25 bp, Probe Sequence
gatggtgcaatactttccttctttg

SEQ ID NO: 237609 - DNA, 25 bp, Probe Sequence
gatcagtatggacctttttccttgg

SEQ ID NO: 237610 - DNA, 25 bp, Probe Sequence
gatggactggagctttttctttgtg

SEQ ID NO: 237611 - DNA, 25 bp, Probe Sequence
gatggacggaaacctcgacttggag

SEQ ID NO: 237612 - DNA, 25 bp, Probe Sequence
gatggacgaaaacggatgatcttga

SEQ ID NO: 237613 - DNA, 25 bp, Probe Sequence
gatgtccggaacaggatgtcctcaa

SEQ ID NO: 237614 - DNA, 25 bp, Probe Sequence
gatgacctggaagagcgtctctaca

SEQ ID NO: 237615 - DNA, 25 bp, Probe Sequence
gatgaacctgaccaaggtggctgac

SEQ ID NO: 237616 - DNA, 25 bp, Probe Sequence
gatgacgagctgacgggcttttagc

SEQ ID NO: 237617 - DNA, 25 bp, Probe Sequence
gatgggcttgagggcctgtttgagg

SEQ ID NO: 237618 - DNA, 25 bp, Probe Sequence
gatggtttggaagtctattgctggg

SEQ ID NO: 237619 - DNA, 25 bp, Probe Sequence
gatggtgtctgtgacatttcctgtt

SEQ ID NO: 237620 - DNA, 25 bp, Probe Sequence
gatggattctcagatatttatattt

SEQ ID NO: 237621 - DNA, 25 bp, Probe Sequence
gatggatgcttagattgttttcata

SEQ ID NO: 237622 - DNA, 25 bp, Probe Sequence
gatgggttgacttgtttgttccaaa

SEQ ID NO: 237623 - DNA, 25 bp, Probe Sequence
gtgggactattatggttaacagaac

SEQ ID NO: 237624 - DNA, 25 bp, Probe Sequence
gatgggacttactgagttgaataac

SEQ ID NO: 237625 - DNA, 25 bp, Probe Sequence
gatgtaacttaggtgttggtataac

SEQ ID NO: 237626 - DNA, 25 bp, Probe Sequence
gatgtaacaatctcgttggaaacat

SEQ ID NO: 237627 - DNA, 25 bp, Probe Sequence
gatgatagaaactccttgtaaactt

SEQ ID NO: 237628 - DNA, 25 bp, Probe Sequence
gatatagaaactcttttttcctaag

SEQ ID NO: 237629 - DNA, 25 bp, Probe Sequence
gatgtaggagttctcttttgtaaaa

SEQ ID NO: 237630 - DNA, 25 bp, Probe Sequence
gatgtgggttctttttcttgtcatt

SEQ ID NO: 237631 - DNA, 25 bp, Probe Sequence
gatggtggtttcactatattgtgtc

SEQ ID NO: 237632 - DNA, 25 bp, Probe Sequence
gatgtgtggcgtacactctcatatt

SEQ ID NO: 237633 - DNA, 25 bp, Probe Sequence
gatgtgatcctggctgacttactgc

SEQ ID NO: 237634 - DNA, 25 bp, Probe Sequence
gatgagtccgtcaagcacaactgtt

SEQ ID NO: 237635 - DNA, 25 bp, Probe Sequence
gatggtcggatctcacaggctgaga

SEQ ID NO: 237636 - DNA, 25 bp, Probe Sequence
gatggtcgtgtggacagctggcgaa

SEQ ID NO: 237637 - DNA, 25 bp, Probe Sequence
gatgttagctgtggccactgtggat

SEQ ID NO: 237638 - DNA, 25 bp, Probe Sequence
gatgatacacgaggctcagcaggcc

SEQ ID NO: 237639 - DNA, 25 bp, Probe Sequence
gatgtaccagacgcagaggcacgag

SEQ ID NO: 237640 - DNA, 25 bp, Probe Sequence
gatggagcaaagtgagggccgagtg

SEQ ID NO: 237641 - DNA, 25 bp, Probe Sequence
gatgggcaaagaaggtgtccacggt

SEQ ID NO: 237642 - DNA, 25 bp, Probe Sequence
gatggatggaagtgtggtcaccaga

SEQ ID NO: 237643 - DNA, 25 bp, Probe Sequence
gatggtgggcacttgtagtcccagc

SEQ ID NO: 237644 - DNA, 25 bp, Probe Sequence
gatgatgtatggcctatggaccccc

SEQ ID NO: 237645 - DNA, 25 bp, Probe Sequence
gatgttcagtccaaggatcaccgca

SEQ ID NO: 237646 - DNA, 25 bp, Probe Sequence
gatggggctcacaagatcacccaga

SEQ ID NO: 237647 - DNA, 25 bp, Probe Sequence
gatggtgaggcatagacaaccagga

SEQ ID NO: 237648 - DNA, 25 bp, Probe Sequence
gatggagggtgctgacaaccagggt

SEQ ID NO: 237649 - DNA, 25 bp, Probe Sequence
gatggagggcagcgacaagccacag

SEQ ID NO: 237650 - DNA, 25 bp, Probe Sequence
gatggagcccagcagcattgagaaa

SEQ ID NO: 237651 - DNA, 25 bp, Probe Sequence
gatggttccagcatcttggacagag

SEQ ID NO: 237652 - DNA, 25 bp, Probe Sequence
gatggtctcaccaatgccatggaag

SEQ ID NO: 237653 - DNA, 25 bp, Probe Sequence
gatggtgccatgacaatggtgtgaa

SEQ ID NO: 237654 - DNA, 25 bp, Probe Sequence
gatgagaccaacttccttgatgagg

SEQ ID NO: 237655 - DNA, 25 bp, Probe Sequence
gatgtaccccattgactttgagaag

SEQ ID NO: 237656 - DNA, 25 bp, Probe Sequence
gatggagcccttgggctctctggga

SEQ ID NO: 237657 - DNA, 25 bp, Probe Sequence
gatgtacggcttatgttctccaact

SEQ ID NO: 237658 - DNA, 25 bp, Probe Sequence
gatgaatctgtgactcatgtttccc

SEQ ID NO: 237659 - DNA, 25 bp, Probe Sequence
gatgagattgtcaacattgctcgac

SEQ ID NO: 237660 - DNA, 25 bp, Probe Sequence
gatggtgagtgcagcattcatgaag

SEQ ID NO: 237661 - DNA, 25 bp, Probe Sequence
gatggtggccaggatgctcagctgg

SEQ ID NO: 237662 - DNA, 25 bp, Probe Sequence
gatggtagccattggccacatgcga

SEQ ID NO: 237663 - DNA, 25 bp, Probe Sequence
gatggtagccagtgactcagatcac

SEQ ID NO: 237664 - DNA, 25 bp, Probe Sequence
gatggtacaggaaagctcagctact

SEQ ID NO: 237665 - DNA, 25 bp, Probe Sequence
gatggtatagatggatcctagtcct

SEQ ID NO: 237666 - DNA, 25 bp, Probe Sequence
gatggtcatggtcagcaaagacctt

SEQ ID NO: 237667 - DNA, 25 bp, Probe Sequence
gatggtcattgaaactcacttcttt

SEQ ID NO: 237668 - DNA, 25 bp, Probe Sequence
gatggtcaatgacagccgttttctc

SEQ ID NO: 237669 - DNA, 25 bp, Probe Sequence
gatggtcacacaccagcactttata

SEQ ID NO: 237670 - DNA, 25 bp, Probe Sequence
gatggagaagacaccttgtgctcat

SEQ ID NO: 237671 - DNA, 25 bp, Probe Sequence
gatgggatataaaggaactccacaa

SEQ ID NO: 237672 - DNA, 25 bp, Probe Sequence
gatgggattgaaaggatcttctgca

SEQ ID NO: 237673 - DNA, 25 bp, Probe Sequence
gatgggagggatgggcttatccaac

SEQ ID NO: 237674 - DNA, 25 bp, Probe Sequence
gatgttagccaaggacttgtcccac

SEQ ID NO: 237675 - DNA, 25 bp, Probe Sequence
gatgtgaggaaaggcacctccacca

SEQ ID NO: 237676 - DNA, 25 bp, Probe Sequence
gatggagggacacgaccaagcagct

SEQ ID NO: 237677 - DNA, 25 bp, Probe Sequence
gatgggggagcaaaaagcaacttat

SEQ ID NO: 237678 - DNA, 25 bp, Probe Sequence
gatgggagtggctgaagcctacttc

SEQ ID NO: 237679 - DNA, 25 bp, Probe Sequence
gatgaacgtgcctgactttgacttc

SEQ ID NO: 237680 - DNA, 25 bp, Probe Sequence
gatgaacgtgcctgactttgacttc

SEQ ID NO: 237681 - DNA, 25 bp, Probe Sequence
gatgacacttaaagatccttagcat

SEQ ID NO: 237682 - DNA, 25 bp, Probe Sequence
gatgatccccaatatatctaccatt

SEQ ID NO: 237683 - DNA, 25 bp, Probe Sequence
gatgtgcctaaaaaattcctgcaat

SEQ ID NO: 237684 - DNA, 25 bp, Probe Sequence
gatgtccaaaattcaggtctctgag

SEQ ID NO: 237685 - DNA, 25 bp, Probe Sequence
gatgtaaagccatcaccttctgcag

SEQ ID NO: 237686 - DNA, 25 bp, Probe Sequence
gatgtaaagccatcaccttctgcag

SEQ ID NO: 237687 - DNA, 25 bp, Probe Sequence
gatgtgaacaaggtcgcctactgcc

SEQ ID NO: 237688 - DNA, 25 bp, Probe Sequence
gatgggacattgtgcggctcatccc

SEQ ID NO: 237689 - DNA, 25 bp, Probe Sequence
gatgggcaagtgtcgtggacttcgt

SEQ ID NO: 237690 - DNA, 25 bp, Probe Sequence
gatgagaaatgtgctggggtcgcgt

SEQ ID NO: 237691 - DNA, 25 bp, Probe Sequence
gatgagaacttaatagcgtgtcgac

SEQ ID NO: 237692 - DNA, 25 bp, Probe Sequence
gatgggattggaatacattgtaact

SEQ ID NO: 237693 - DNA, 25 bp, Probe Sequence
gatggtgattaaagacagtgatgga

SEQ ID NO: 237694 - DNA, 25 bp, Probe Sequence
gatgggattaacagcagtgtggaga

SEQ ID NO: 237695 - DNA, 25 bp, Probe Sequence
gatgacttaaacatgcacctggaaa

SEQ ID NO: 237696 - DNA, 25 bp, Probe Sequence
gatccttaacagatgaactatccac

SEQ ID NO: 237697 - DNA, 25 bp, Probe Sequence
gatgtttacaagctacctgactact

SEQ ID NO: 237698 - DNA, 25 bp, Probe Sequence
gatgattgttcgtgtaactgacaga

SEQ ID NO: 237699 - DNA, 25 bp, Probe Sequence
gatgtggttgcatcctaactccatg

SEQ ID NO: 237700 - DNA, 25 bp, Probe Sequence
gatgggctacattcctagaaagtta

SEQ ID NO: 237701 - DNA, 25 bp, Probe Sequence
gatgtggaactcctctaaaaattac

SEQ ID NO: 237702 - DNA, 25 bp, Probe Sequence
gatgatattactttgctataaaatt

SEQ ID NO: 237703 - DNA, 25 bp, Probe Sequence
gatgtattacttaggccaaaatctg

SEQ ID NO: 237704 - DNA, 25 bp, Probe Sequence
gatgtactaaaagccacagtatgtg

SEQ ID NO: 237705 - DNA, 25 bp, Probe Sequence
gatgttctaaaaacccaaagataca

SEQ ID NO: 237706 - DNA, 25 bp, Probe Sequence
gatgataccaagattcccaaatgta

SEQ ID NO: 237707 - DNA, 25 bp, Probe Sequence
gatgagcaacttgttcccaaagctg

SEQ ID NO: 237708 - DNA, 25 bp, Probe Sequence
gatgataatggtgttcccttcgtcc

SEQ ID NO: 237709 - DNA, 25 bp, Probe Sequence
tgataaaagtgcatccccgttgttc

SEQ ID NO: 237710 - DNA, 25 bp, Probe Sequence
gataacacggcgatgaacgtcttac

SEQ ID NO: 237711 - DNA, 25 bp, Probe Sequence
gatggagaccctcatcaacgtgttc

SEQ ID NO: 237712 - DNA, 25 bp, Probe Sequence
gatgtgtatcaagtttaatttgtgt

SEQ ID NO: 237713 - DNA, 25 bp, Probe Sequence
gatgtgcttaatttatggtgtaact

SEQ ID NO: 237714 - DNA, 25 bp, Probe Sequence
gatgtgtttatatctggttctatat

SEQ ID NO: 237715 - DNA, 25 bp, Probe Sequence
gatggagtttatatggctctctgtt

SEQ ID NO: 237716 - DNA, 25 bp, Probe Sequence
gatgcaggttggaaggggccttgct

SEQ ID NO: 237717 - DNA, 25 bp, Probe Sequence
gtaggtatggttgcaggcacctgta

SEQ ID NO: 237718 - DNA, 25 bp, Probe Sequence
gtagacctagggaggaccttatctg

SEQ ID NO: 237719 - DNA, 25 bp, Probe Sequence
gttccccaggagtggatttaccagt

SEQ ID NO: 237720 - DNA, 25 bp, Probe Sequence
gatgacccacagcaaagtttgtaca

SEQ ID NO: 237721 - DNA, 25 bp, Probe Sequence
gatgagcccaggtaagacctctctg

SEQ ID NO: 237722 - DNA, 25 bp, Probe Sequence
gatgacgtcggacagatactctcgt

SEQ ID NO: 237723 - DNA, 25 bp, Probe Sequence
gatggttaggagcatgatgactttg

SEQ ID NO: 237724 - DNA, 25 bp, Probe Sequence
gatgtttaaagtttgatctttgttt

SEQ ID NO: 237725 - DNA, 25 bp, Probe Sequence
gatgtaataagggccttctttttct

SEQ ID NO: 237726 - DNA, 25 bp, Probe Sequence
tgatgataaatacacctttttttcc

SEQ ID NO: 237727 - DNA, 25 bp, Probe Sequence
gatgtaaataaccccattctttgct

SEQ ID NO: 237728 - DNA, 25 bp, Probe Sequence
gatctaaaaactcatctttggggta

SEQ ID NO: 237729 - DNA, 25 bp, Probe Sequence
gattcaaaagagcaacttaggctgg

SEQ ID NO: 237730 - DNA, 25 bp, Probe Sequence
gttcgactcaatttacggggcttgt

SEQ ID NO: 237731 - DNA, 25 bp, Probe Sequence
gatgtaagtaatttacgtgcatggt

SEQ ID NO: 237732 - DNA, 25 bp, Probe Sequence
gatgtaatggtttgtcagctgtcac

SEQ ID NO: 237733 - DNA, 25 bp, Probe Sequence
gatgtcgtgcaaactgtactgtgaa

SEQ ID NO: 237734 - DNA, 25 bp, Probe Sequence
gatgactgtgaccctggttggaaat

SEQ ID NO: 237735 - DNA, 25 bp, Probe Sequence
gatgacttatctgggtttaggattc

SEQ ID NO: 237736 - DNA, 25 bp, Probe Sequence
gatgaagtactggggcgtagcctcc

SEQ ID NO: 237737 - DNA, 25 bp, Probe Sequence
gatgagaggtctgaagccttcctgg

SEQ ID NO: 237738 - DNA, 25 bp, Probe Sequence
gatggggttatgaacccttcctgag

SEQ ID NO: 237739 - DNA, 25 bp, Probe Sequence
gatgaggtattaatcccctccattg

SEQ ID NO: 237740 - DNA, 25 bp, Probe Sequence
gatggtgtttttgttctacatattt

SEQ ID NO: 237741 - DNA, 25 bp, Probe Sequence
gatgggatttccctgattctaattg

SEQ ID NO: 237742 - DNA, 25 bp, Probe Sequence
gatgggattttcatgttaacttttt

SEQ ID NO: 237743 - DNA, 25 bp, Probe Sequence
gatggtgtaattgttaacctcattt

SEQ ID NO: 237744 - DNA, 25 bp, Probe Sequence
gatagatttctttttagcccttttg

SEQ ID NO: 237745 - DNA, 25 bp, Probe Sequence
gatgtttatttatattgtccttttt

SEQ ID NO: 237746 - DNA, 25 bp, Probe Sequence
gatgtttatttatattgtccttttt

SEQ ID NO: 237747 - DNA, 25 bp, Probe Sequence
gatgtttttgttcaatgtggatttt

SEQ ID NO: 237748 - DNA, 25 bp, Probe Sequence
gataccttctttgaagttgaagttg

SEQ ID NO: 237749 - DNA, 25 bp, Probe Sequence
gatgaccttcatttaaagtccaact

SEQ ID NO: 237750 - DNA, 25 bp, Probe Sequence
gatgatcctgtggactacgaggcca

SEQ ID NO: 237751 - DNA, 25 bp, Probe Sequence
gatgcattctcagattatgccaact

SEQ ID NO: 237752 - DNA, 25 bp, Probe Sequence
gatgatctgagcgagattaccaagt

SEQ ID NO: 237753 - DNA, 25 bp, Probe Sequence
gatgctaagtagtgaccagagagag

SEQ ID NO: 237754 - DNA, 25 bp, Probe Sequence
gatgggtgcaacctgaccagagaga

SEQ ID NO: 237755 - DNA, 25 bp, Probe Sequence
gatgggtgcaacctgaccagagaga

SEQ ID NO: 237756 - DNA, 25 bp, Probe Sequence
gatgggtagcactaagccagctggc

SEQ ID NO: 237757 - DNA, 25 bp, Probe Sequence
gatgggtagcactaagccagctggc

SEQ ID NO: 237758 - DNA, 25 bp, Probe Sequence
gatgtggctagaccaaccagtggga

SEQ ID NO: 237759 - DNA, 25 bp, Probe Sequence
gatgttgctgagccctacaaggtgt

SEQ ID NO: 237760 - DNA, 25 bp, Probe Sequence
gatggattgcatcatttaagtgttg

SEQ ID NO: 237761 - DNA, 25 bp, Probe Sequence
gatggattgcatcatttaagtgttg

SEQ ID NO: 237762 - DNA, 25 bp, Probe Sequence
gatggtatgctgcagttcagccgtt

SEQ ID NO: 237763 - DNA, 25 bp, Probe Sequence
gatggattgtggataactctgtttg

SEQ ID NO: 237764 - DNA, 25 bp, Probe Sequence
gatgtattggttttacttgcaattg

SEQ ID NO: 237765 - DNA, 25 bp, Probe Sequence
gatgtcttggctaaattttgatttg

SEQ ID NO: 237766 - DNA, 25 bp, Probe Sequence
gatgtctcggcattaatccgtttat

SEQ ID NO: 237767 - DNA, 25 bp, Probe Sequence
gatgtctcggcattaatccgtttat

SEQ ID NO: 237768 - DNA, 25 bp, Probe Sequence
gatgtggctggagaattggtattga

SEQ ID NO: 237769 - DNA, 25 bp, Probe Sequence
gatgggtgtgggtttgaatttgaga

SEQ ID NO: 237770 - DNA, 25 bp, Probe Sequence
gatggggttatgttgtgtttgtgaa

SEQ ID NO: 237771 - DNA, 25 bp, Probe Sequence
gtgaggagaattctggttgtaatag

SEQ ID NO: 237772 - DNA, 25 bp, Probe Sequence
gatgggatgaacctggagctttatt

SEQ ID NO: 237773 - DNA, 25 bp, Probe Sequence
gatgcggtaacaattcaggttttaa

SEQ ID NO: 237774 - DNA, 25 bp, Probe Sequence
gatggtgaaatattctgcagctatt

SEQ ID NO: 237775 - DNA, 25 bp, Probe Sequence
gatggggaatattgcagcatcctca

SEQ ID NO: 237776 - DNA, 25 bp, Probe Sequence
gatgagtggcaaatactcccatagt

SEQ ID NO: 237777 - DNA, 25 bp, Probe Sequence
gatagtggacagagacctttgtaac

SEQ ID NO: 237778 - DNA, 25 bp, Probe Sequence
gatgggaaatggcacctggtgtaca

SEQ ID NO: 237779 - DNA, 25 bp, Probe Sequence
gatgtgaaaatatacttgactctaa

SEQ ID NO: 237780 - DNA, 25 bp, Probe Sequence
gatgtgaaaatatacttgactctaa

SEQ ID NO: 237781 - DNA, 25 bp, Probe Sequence
gatgggaaaacataatgtctctaaa

SEQ ID NO: 237782 - DNA, 25 bp, Probe Sequence
gatgacaaaaacttatattcccata

SEQ ID NO: 237783 - DNA, 25 bp, Probe Sequence
gatgacaacctccattctattttag

SEQ ID NO: 237784 - DNA, 25 bp, Probe Sequence
gataatacctagtcttgttacataa

SEQ ID NO: 237785 - DNA, 25 bp, Probe Sequence
gataatacctagtcttgttacataa

SEQ ID NO: 237786 - DNA, 25 bp, Probe Sequence
gattcatacgcctctactgatacat

SEQ ID NO: 237787 - DNA, 25 bp, Probe Sequence
gatgtattccagattactgaactaa

SEQ ID NO: 237788 - DNA, 25 bp, Probe Sequence
gatgtcactggattttaccaagtaa

SEQ ID NO: 237789 - DNA, 25 bp, Probe Sequence
gatttcggtttcacaaatggcagac

SEQ ID NO: 237790 - DNA, 25 bp, Probe Sequence
gatgtaaggtttataactggaaata

SEQ ID NO: 237791 - DNA, 25 bp, Probe Sequence
gatgataagggtattcttcggcaga

SEQ ID NO: 237792 - DNA, 25 bp, Probe Sequence
gatgttgagtggtttccttcagaca

SEQ ID NO: 237793 - DNA, 25 bp, Probe Sequence
gatctgggtggacatgttcaagctc

SEQ ID NO: 237794 - DNA, 25 bp, Probe Sequence
gatctgggtggacatgttcaagctc

SEQ ID NO: 237795 - DNA, 25 bp, Probe Sequence
gatgagggtggccgatgatgtaacc

SEQ ID NO: 237796 - DNA, 25 bp, Probe Sequence
gatgtgaagtgtccagattctcaga

SEQ ID NO: 237797 - DNA, 25 bp, Probe Sequence
gatgctaccttgccaggacaagaac

SEQ ID NO: 237798 - DNA, 25 bp, Probe Sequence
gatgtgacacctcataaaagtgagc

SEQ ID NO: 237799 - DNA, 25 bp, Probe Sequence
gatgatataagcttaccaaagtcag

SEQ ID NO: 237800 - DNA, 25 bp, Probe Sequence
gatgatacaactttcaacattgtca

SEQ ID NO: 237801 - DNA, 25 bp, Probe Sequence
gatggtcaagctgtcagacatccaa

SEQ ID NO: 237802 - DNA, 25 bp, Probe Sequence
gatgggagagcgatacatcacgcat

SEQ ID NO: 237803 - DNA, 25 bp, Probe Sequence
gatgggggcaagaagatcacgctcc

SEQ ID NO: 237804 - DNA, 25 bp, Probe Sequence
gatggggtctgaaagacaatgtcag

SEQ ID NO: 237805 - DNA, 25 bp, Probe Sequence
gatgggctgggctaaacattgttgc

SEQ ID NO: 237806 - DNA, 25 bp, Probe Sequence
gatgggctggatgtaacttgtgtct

SEQ ID NO: 237807 - DNA, 25 bp, Probe Sequence
gatggggtttctccatgttggtcag

SEQ ID NO: 237808 - DNA, 25 bp, Probe Sequence
gatgggcttattcccttggagatcc

SEQ ID NO: 237809 - DNA, 25 bp, Probe Sequence
gatgggttcatgtctctgattgggt

SEQ ID NO: 237810 - DNA, 25 bp, Probe Sequence
gatgatggttccattgctcttggct

SEQ ID NO: 237811 - DNA, 25 bp, Probe Sequence
gatggtgtctcaggtggtcttggac

SEQ ID NO: 237812 - DNA, 25 bp, Probe Sequence
gatgaggcccatgaagatcttcttc

SEQ ID NO: 237813 - DNA, 25 bp, Probe Sequence
gatgttgctctctaaagacctttaa

SEQ ID NO: 237814 - DNA, 25 bp, Probe Sequence
gatgtcccattttcagactgcttta

SEQ ID NO: 237815 - DNA, 25 bp, Probe Sequence
gatgtcccatctaaacagtcgtcat

SEQ ID NO: 237816 - DNA, 25 bp, Probe Sequence
gatgtcttactccaacagattatga

SEQ ID NO: 237817 - DNA, 25 bp, Probe Sequence
gatgtgctgtacctgacaacttcaa

SEQ ID NO: 237818 - DNA, 25 bp, Probe Sequence
gatgtgatgaacctactcaatgtga

SEQ ID NO: 237819 - DNA, 25 bp, Probe Sequence
gatgtaatcagcttgttgtagtgat

SEQ ID NO: 237820 - DNA, 25 bp, Probe Sequence
gatgtgactcaaattctgatagtga

SEQ ID NO: 237821 - DNA, 25 bp, Probe Sequence
gatggtctcaagctatgatcagaag

SEQ ID NO: 237822 - DNA, 25 bp, Probe Sequence
gatgggcctagcagatgaagcttgc

SEQ ID NO: 237823 - DNA, 25 bp, Probe Sequence
gatggtgactactggagactgctgc

SEQ ID NO: 237824 - DNA, 25 bp, Probe Sequence
gatggtcataaccacgatgacgctg

SEQ ID NO: 237825 - DNA, 25 bp, Probe Sequence
gatggtgtataactctagagcttga

SEQ ID NO: 237826 - DNA, 25 bp, Probe Sequence
gatggtgtatggatccagacaggag

SEQ ID NO: 237827 - DNA, 25 bp, Probe Sequence
gatgtgaaatggactctcctcgggt

SEQ ID NO: 237828 - DNA, 25 bp, Probe Sequence
gatgatggaggacattctccgggtt

SEQ ID NO: 237829 - DNA, 25 bp, Probe Sequence
gatgtccaaggatcatctccggaat

SEQ ID NO: 237830 - DNA, 25 bp, Probe Sequence
gatgtggtaggatagctctggaaga

SEQ ID NO: 237831 - DNA, 25 bp, Probe Sequence
gatgggcaagaagagctgcagtaaa

SEQ ID NO: 237832 - DNA, 25 bp, Probe Sequence
gatgtcgaagaagagctcatggcca

SEQ ID NO: 237833 - DNA, 25 bp, Probe Sequence
gatgtgtgcaagtacgacttcgtgg

SEQ ID NO: 237834 - DNA, 25 bp, Probe Sequence
gatggtgtagcttctgacatctggc

SEQ ID NO: 237835 - DNA, 25 bp, Probe Sequence
gatgagtgatcagtatggacctttt

SEQ ID NO: 237836 - DNA, 25 bp, Probe Sequence
gatgcagaacctagagccagttttc

SEQ ID NO: 237837 - DNA, 25 bp, Probe Sequence
gatgatgagcccatggacgttgaca

SEQ ID NO: 237838 - DNA, 25 bp, Probe Sequence
ggtattctaaggtgttgacaccctc

SEQ ID NO: 237839 - DNA, 25 bp, Probe Sequence
gatgtttatgaagctgttcgaaccc

SEQ ID NO: 237840 - DNA, 25 bp, Probe Sequence
gatgttatatggactttaatgacac

SEQ ID NO: 237841 - DNA, 25 bp, Probe Sequence
gatgttgtttcaccttatctgagtt

SEQ ID NO: 237842 - DNA, 25 bp, Probe Sequence
gatgtggtttgactatttctgtatg

SEQ ID NO: 237843 - DNA, 25 bp, Probe Sequence
gatgtggtttgactatttctgtatg

SEQ ID NO: 237844 - DNA, 25 bp, Probe Sequence
gatgtggattctatctttatgtagc

SEQ ID NO: 237845 - DNA, 25 bp, Probe Sequence
gatgtggagtcaatctctttggtac

SEQ ID NO: 237846 - DNA, 25 bp, Probe Sequence
gatgggagccattctttgtgttatc

SEQ ID NO: 237847 - DNA, 25 bp, Probe Sequence
gatgagctgacctatttctgatcct

SEQ ID NO: 237848 - DNA, 25 bp, Probe Sequence
gatgtgcagatcaatgacatttccc

SEQ ID NO: 237849 - DNA, 25 bp, Probe Sequence
gatgagcagtcacactgttactcca

SEQ ID NO: 237850 - DNA, 25 bp, Probe Sequence
gatgggtcagaatttctaccacgtt

SEQ ID NO: 237851 - DNA, 25 bp, Probe Sequence
gatgggtcagaatttctaccacgtt

SEQ ID NO: 237852 - DNA, 25 bp, Probe Sequence
gatgggccagaatctcaaccgtatt

SEQ ID NO: 237853 - DNA, 25 bp, Probe Sequence
gatgggcaagaacgccatgacgcgc

SEQ ID NO: 237854 - DNA, 25 bp, Probe Sequence
gatgtggaagacagctacgggcagc

SEQ ID NO: 237855 - DNA, 25 bp, Probe Sequence
gatgtggaagaaatctatcacccag

SEQ ID NO: 237856 - DNA, 25 bp, Probe Sequence
gatgggagaatagcttgaacctggg

SEQ ID NO: 237857 - DNA, 25 bp, Probe Sequence
gatgggggttcacctgaacacagag

SEQ ID NO: 237858 - DNA, 25 bp, Probe Sequence
gatgggtgatttacaatgaccacaa

SEQ ID NO: 237859 - DNA, 25 bp, Probe Sequence
gattcttatttacaaccccagaaga

SEQ ID NO: 237860 - DNA, 25 bp, Probe Sequence
gatgtttatttcctaagcactaaat

SEQ ID NO: 237861 - DNA, 25 bp, Probe Sequence
gatgttttcctcaaaggcctatatt

SEQ ID NO: 237862 - DNA, 25 bp, Probe Sequence
gatgtctgtacataaaggcagttct

SEQ ID NO: 237863 - DNA, 25 bp, Probe Sequence
gatgtctgattctaaatgggagttg

SEQ ID NO: 237864 - DNA, 25 bp, Probe Sequence
gatgtgttctctgagacccatgatc

SEQ ID NO: 237865 - DNA, 25 bp, Probe Sequence
gatgggcatcagggatactccagtc

SEQ ID NO: 237866 - DNA, 25 bp, Probe Sequence
gatgatgttcagggccctgacttgc

SEQ ID NO: 237867 - DNA, 25 bp, Probe Sequence
gatgagtttgctgtactgacgctgc

SEQ ID NO: 237868 - DNA, 25 bp, Probe Sequence
gatggtggtgctgagtctgattgct

SEQ ID NO: 237869 - DNA, 25 bp, Probe Sequence
gatgagggcatgtgcggctgaactg

SEQ ID NO: 237870 - DNA, 25 bp, Probe Sequence
gatgtggtgcatgtgaaggatgcca

SEQ ID NO: 237871 - DNA, 25 bp, Probe Sequence
gatgtcgctgccttgcataaggcca

SEQ ID NO: 237872 - DNA, 25 bp, Probe Sequence
gatgtctatctacctaggggaacac

SEQ ID NO: 237873 - DNA, 25 bp, Probe Sequence
gatgtccttcagataacggataagc

SEQ ID NO: 237874 - DNA, 25 bp, Probe Sequence
gatgtcacttcaggtgaccatggtg

SEQ ID NO: 237875 - DNA, 25 bp, Probe Sequence
gatgaagttcaggttgtacgtggac

SEQ ID NO: 237876 - DNA, 25 bp, Probe Sequence
gatgggttcagtggtatgagcagag

SEQ ID NO: 237877 - DNA, 25 bp, Probe Sequence
gatggggggttggatagcatcctct

SEQ ID NO: 237878 - DNA, 25 bp, Probe Sequence
gatgggctaggtagttcaatcctct

SEQ ID NO: 237879 - DNA, 25 bp, Probe Sequence
gatgggcctggtagttttccatctt

SEQ ID NO: 237880 - DNA, 25 bp, Probe Sequence
gatgggactggtcgtgtttgtgctt

SEQ ID NO: 237881 - DNA, 25 bp, Probe Sequence
gatgagatcacgctggatttagggt

SEQ ID NO: 237882 - DNA, 25 bp, Probe Sequence
gataacacaggggttggactggact

SEQ ID NO: 237883 - DNA, 25 bp, Probe Sequence
gatgaacaactggcctgtgaactgt

SEQ ID NO: 237884 - DNA, 25 bp, Probe Sequence
gatgattgctaattccttgaaggac

SEQ ID NO: 237885 - DNA, 25 bp, Probe Sequence
gatgatggttatgcaattaaggaaa

SEQ ID NO: 237886 - DNA, 25 bp, Probe Sequence
gatgtggtgcctgtcttcaaggaac

SEQ ID NO: 237887 - DNA, 25 bp, Probe Sequence
gatgtgggccgaatttgaatgggaa

SEQ ID NO: 237888 - DNA, 25 bp, Probe Sequence
gatgtgtgtgggttgttgaggggaa

SEQ ID NO: 237889 - DNA, 25 bp, Probe Sequence
gatgagttggtcctttcagcttaaa

SEQ ID NO: 237890 - DNA, 25 bp, Probe Sequence
gatgtgtgtcagagttccagtctta

SEQ ID NO: 237891 - DNA, 25 bp, Probe Sequence
gatgggtgacatcggttatgctcgt

SEQ ID NO: 237892 - DNA, 25 bp, Probe Sequence
gatgggatacacgtgctcatctgtc

SEQ ID NO: 237893 - DNA, 25 bp, Probe Sequence
gatgggaaacatttcattctcaaaa

SEQ ID NO: 237894 - DNA, 25 bp, Probe Sequence
gatgggaaacatttcattctcaaaa

SEQ ID NO: 237895 - DNA, 25 bp, Probe Sequence
gatgtgtgaaatgttctctgcaaaa

SEQ ID NO: 237896 - DNA, 25 bp, Probe Sequence
gatgggacaacattctgctctgaac

SEQ ID NO: 237897 - DNA, 25 bp, Probe Sequence
gatgggacaacattctgctctgaac

SEQ ID NO: 237898 - DNA, 25 bp, Probe Sequence
gataggaatgacctatggcttactg

SEQ ID NO: 237899 - DNA, 25 bp, Probe Sequence
gatccaagcatgaccctgttttgct

SEQ ID NO: 237900 - DNA, 25 bp, Probe Sequence
gatgacaagatgggcctcaagttct

SEQ ID NO: 237901 - DNA, 25 bp, Probe Sequence
gatgataacatggtggtcaagctta

SEQ ID NO: 237902 - DNA, 25 bp, Probe Sequence
gatgtaccatttctctgttgtatgt

SEQ ID NO: 237903 - DNA, 25 bp, Probe Sequence
gatgtatctaattctcctgactgtt

SEQ ID NO: 237904 - DNA, 25 bp, Probe Sequence
gatgtgtatgtatttctgctgagtg

SEQ ID NO: 237905 - DNA, 25 bp, Probe Sequence
gatgggcagatcatgtttgatgtgg

SEQ ID NO: 237906 - DNA, 25 bp, Probe Sequence
gatgggacagagaccttgatgatat

SEQ ID NO: 237907 - DNA, 25 bp, Probe Sequence
gatgtggatcagcaagcaggagtat

SEQ ID NO: 237908 - DNA, 25 bp, Probe Sequence
gatgatggcattaaactggaatctc

SEQ ID NO: 237909 - DNA, 25 bp, Probe Sequence
gatgattgtcatagaactgggcacc

SEQ ID NO: 237910 - DNA, 25 bp, Probe Sequence
gatgtgctgctcaaagagctggagc

SEQ ID NO: 237911 - DNA, 25 bp, Probe Sequence
gatgttgcatcagcagcctagggtt

SEQ ID NO: 237912 - DNA, 25 bp, Probe Sequence
gatgtgtatctgcagcctgatcggt

SEQ ID NO: 237913 - DNA, 25 bp, Probe Sequence
gatgtatgcattcatcctacagagt

SEQ ID NO: 237914 - DNA, 25 bp, Probe Sequence
gatgtctgcaagcaaccacaggtgt

SEQ ID NO: 237915 - DNA, 25 bp, Probe Sequence
gatgtctgcaaaaaccagaagcggc

SEQ ID NO: 237916 - DNA, 25 bp, Probe Sequence
gatgtggcaagatcaccattagcaa

SEQ ID NO: 237917 - DNA, 25 bp, Probe Sequence
gatgatggtggatacgctcttgatc

SEQ ID NO: 237918 - DNA, 25 bp, Probe Sequence
gatgggaggcagtgagtcttgatga

SEQ ID NO: 237919 - DNA, 25 bp, Probe Sequence
gatgggagatcacttgagcccagaa

SEQ ID NO: 237920 - DNA, 25 bp, Probe Sequence
gatgttgatgtacttacagacacaa

SEQ ID NO: 237921 - DNA, 25 bp, Probe Sequence
gatgtacatatacgacagctgacaa

SEQ ID NO: 237922 - DNA, 25 bp, Probe Sequence
gatgtggtgatactgagattgtctg

SEQ ID NO: 237923 - DNA, 25 bp, Probe Sequence
gatgggttttgttgtgtcttgtgaa

SEQ ID NO: 237924 - DNA, 25 bp, Probe Sequence
gatgtgtgggtttttgccattggac

SEQ ID NO: 237925 - DNA, 25 bp, Probe Sequence
gatgttggattctgttgcctgggta

SEQ ID NO: 237926 - DNA, 25 bp, Probe Sequence
gatgttggattctgttgcctgggta

SEQ ID NO: 237927 - DNA, 25 bp, Probe Sequence
gatgtggtgttccacatgtgcctgt

SEQ ID NO: 237928 - DNA, 25 bp, Probe Sequence
gatgcggtggtccttgtgacatgtc

SEQ ID NO: 237929 - DNA, 25 bp, Probe Sequence
gatgggatgtgtgggtggaggatgc

SEQ ID NO: 237930 - DNA, 25 bp, Probe Sequence
gatgtggttcatgggggagcagtcc

SEQ ID NO: 237931 - DNA, 25 bp, Probe Sequence
gatgtggtgtctcggtcgatgactc

SEQ ID NO: 237932 - DNA, 25 bp, Probe Sequence
gatgatgctgtgtatctggacaatg

SEQ ID NO: 237933 - DNA, 25 bp, Probe Sequence
gatgtgctgctatgtgtacataatg

SEQ ID NO: 237934 - DNA, 25 bp, Probe Sequence
gatgtgcttatggtgaagctcaagg

SEQ ID NO: 237935 - DNA, 25 bp, Probe Sequence
gatgtgttcagtaaggtcgagagct

SEQ ID NO: 237936 - DNA, 25 bp, Probe Sequence
gatgtcttcatgtaaaccagaggct

SEQ ID NO: 237937 - DNA, 25 bp, Probe Sequence
gatgtgctactgtaaatatacctct

SEQ ID NO: 237938 - DNA, 25 bp, Probe Sequence
gatgattgactgtaatgctttccat

SEQ ID NO: 237939 - DNA, 25 bp, Probe Sequence
gatgttatgttatgttttattggta

SEQ ID NO: 237940 - DNA, 25 bp, Probe Sequence
gatgtatagttttttttgtttatga

SEQ ID NO: 237941 - DNA, 25 bp, Probe Sequence
gatgtcatagttctttctatggtta

SEQ ID NO: 237942 - DNA, 25 bp, Probe Sequence
gatgaccctggtcttcaatggttag

SEQ ID NO: 237943 - DNA, 25 bp, Probe Sequence
gatgaccctggtcttcaatggttag

SEQ ID NO: 237944 - DNA, 25 bp, Probe Sequence
gatgacctttatccgaacggttctg

SEQ ID NO: 237945 - DNA, 25 bp, Probe Sequence
gatgacaatttacttcccaggtctc

SEQ ID NO: 237946 - DNA, 25 bp, Probe Sequence
gatgaaactgatctaccagggccgc

SEQ ID NO: 237947 - DNA, 25 bp, Probe Sequence
gatgaaactgatctaccagggccgc

SEQ ID NO: 237948 - DNA, 25 bp, Probe Sequence
gatgaaactgatctaccagggccgc

SEQ ID NO: 237949 - DNA, 25 bp, Probe Sequence
gatgaggcaggtatcactagaggtc

SEQ ID NO: 237950 - DNA, 25 bp, Probe Sequence
gatgaggaaggcattctgggagcat

SEQ ID NO: 237951 - DNA, 25 bp, Probe Sequence
gatgagggtgagcttaggtgacttt

SEQ ID NO: 237952 - DNA, 25 bp, Probe Sequence
gatgagcaagttcttaaggcacttc

SEQ ID NO: 237953 - DNA, 25 bp, Probe Sequence
gatgatttgtatcttagacgacctg

SEQ ID NO: 237954 - DNA, 25 bp, Probe Sequence
gatgtgtgttatctgtaaccattac

SEQ ID NO: 237955 - DNA, 25 bp, Probe Sequence
gatgatggattgtggataactctgt

SEQ ID NO: 237956 - DNA, 25 bp, Probe Sequence
gatgtaatgatgtggaactcctcta

SEQ ID NO: 237957 - DNA, 25 bp, Probe Sequence
gatgtaaattggcaaccacaaatgt

SEQ ID NO: 237958 - DNA, 25 bp, Probe Sequence
gatgtgaaccgcagagaccaacaga

SEQ ID NO: 237959 - DNA, 25 bp, Probe Sequence
gatgtatacccagtgtgaaatatct

SEQ ID NO: 237960 - DNA, 25 bp, Probe Sequence
gatgtctacctagtgttgaatcttt

SEQ ID NO: 237961 - DNA, 25 bp, Probe Sequence
gatgtctcaggcactttgttttagt

SEQ ID NO: 237962 - DNA, 25 bp, Probe Sequence
gatgtctcagtgaatcagtctgttt

SEQ ID NO: 237963 - DNA, 25 bp, Probe Sequence
gatgtgtcatggaaacttggttgca

SEQ ID NO: 237964 - DNA, 25 bp, Probe Sequence
gatgactgcaggaactaatggtaga

SEQ ID NO: 237965 - DNA, 25 bp, Probe Sequence
gatgtcaagagatccatagttatga

SEQ ID NO: 237966 - DNA, 25 bp, Probe Sequence
gatgattagaaacgaagctgtgaga

SEQ ID NO: 237967 - DNA, 25 bp, Probe Sequence
gatgtcatcatcaagaacaacctga

SEQ ID NO: 237968 - DNA, 25 bp, Probe Sequence
gatgctttctggaccaattcgaaga

SEQ ID NO: 237969 - DNA, 25 bp, Probe Sequence
gatgtatgtcttaaaatgtgggtga

SEQ ID NO: 237970 - DNA, 25 bp, Probe Sequence
gatgtccctctgaaaactgaggaat

SEQ ID NO: 237971 - DNA, 25 bp, Probe Sequence
gatgtcccactggagaactgcatgg

SEQ ID NO: 237972 - DNA, 25 bp, Probe Sequence
gatgtcccactggagaactgcatgg

SEQ ID NO: 237973 - DNA, 25 bp, Probe Sequence
gatgtcttccagcgtaatcagcagg

SEQ ID NO: 237974 - DNA, 25 bp, Probe Sequence
gatgttgtccgatttaatcctatgt

SEQ ID NO: 237975 - DNA, 25 bp, Probe Sequence
gatgctttcgccaactgaaactact

SEQ ID NO: 237976 - DNA, 25 bp, Probe Sequence
gatgtgtatgcccaagagaaaccca

SEQ ID NO: 237977 - DNA, 25 bp, Probe Sequence
gatgctcttgcagaaggaactacca

SEQ ID NO: 237978 - DNA, 25 bp, Probe Sequence
gatgtcccagtaagagatctcaaac

SEQ ID NO: 237979 - DNA, 25 bp, Probe Sequence
gatgtggcacagctggagtataaac

SEQ ID NO: 237980 - DNA, 25 bp, Probe Sequence
gatgtgtacatgttgggtatcctac

SEQ ID NO: 237981 - DNA, 25 bp, Probe Sequence
gatgacatcaagcgggtctactcac

SEQ ID NO: 237982 - DNA, 25 bp, Probe Sequence
gatgtcatcaaatgggtgcgctaca

SEQ ID NO: 237983 - DNA, 25 bp, Probe Sequence
gatgtctcaacatggctttgtgcac

SEQ ID NO: 237984 - DNA, 25 bp, Probe Sequence
gatgttcaactatttttggcaccat

SEQ ID NO: 237985 - DNA, 25 bp, Probe Sequence
gatgtccaatctttttgcatccctg

SEQ ID NO: 237986 - DNA, 25 bp, Probe Sequence
gattcctactttatgtaatggggtc

SEQ ID NO: 237987 - DNA, 25 bp, Probe Sequence
gatgttccagtactttgtgaaggtg

SEQ ID NO: 237988 - DNA, 25 bp, Probe Sequence
gatgttcgatgttgtctgtcaggag

SEQ ID NO: 237989 - DNA, 25 bp, Probe Sequence
gatgtccgtgtgttcatgcacgcag

SEQ ID NO: 237990 - DNA, 25 bp, Probe Sequence
gatgtcctgtgtgacagcagatgca

SEQ ID NO: 237991 - DNA, 25 bp, Probe Sequence
gatgtctccattgatctgccaaatc

SEQ ID NO: 237992 - DNA, 25 bp, Probe Sequence
gatgtgcctctagactggcggatga

SEQ ID NO: 237993 - DNA, 25 bp, Probe Sequence
gatgtgccttgagaatagtatatgt

SEQ ID NO: 237994 - DNA, 25 bp, Probe Sequence
gatgtgacttgctgaatttcataga

SEQ ID NO: 237995 - DNA, 25 bp, Probe Sequence
gatgtactgtgatgtgagtttgaaa

SEQ ID NO: 237996 - DNA, 25 bp, Probe Sequence
gatgttctcagatatggtcttaaaa

SEQ ID NO: 237997 - DNA, 25 bp, Probe Sequence
gatgttcgcgattatcttctatatc

SEQ ID NO: 237998 - DNA, 25 bp, Probe Sequence
gatgtttctgatctatcactttgca

SEQ ID NO: 237999 - DNA, 25 bp, Probe Sequence
gatgttatcagtcagattctttcct

SEQ ID NO: 238000 - DNA, 25 bp, Probe Sequence
gatgtttcactgacagtttttaaca

SEQ ID NO: 238001 - DNA, 25 bp, Probe Sequence
gatgtgttatagacaagttttaaga

SEQ ID NO: 238002 - DNA, 25 bp, Probe Sequence
gatgtctttcacagagcttattaaa

SEQ ID NO: 238003 - DNA, 25 bp, Probe Sequence
gatgtttatcacagtgctgtttgta

SEQ ID NO: 238004 - DNA, 25 bp, Probe Sequence
gatgtatttacagctgtccttgaac

SEQ ID NO: 238005 - DNA, 25 bp, Probe Sequence
gatgttttgatagattccttaccca

SEQ ID NO: 238006 - DNA, 25 bp, Probe Sequence
gatgtttttatgatatccctgatcc

SEQ ID NO: 238007 - DNA, 25 bp, Probe Sequence
gatgtcttttcgaaaaatggatccc

SEQ ID NO: 238008 - DNA, 25 bp, Probe Sequence
gatgtttcttagagagaagatcact

SEQ ID NO: 238009 - DNA, 25 bp, Probe Sequence
gatgtctgtattattgaggggcaac

SEQ ID NO: 238010 - DNA, 25 bp, Probe Sequence
gatgtgcatgtactatttgatgcgt

SEQ ID NO: 238011 - DNA, 25 bp, Probe Sequence
gatgtcagcagaatggttgatcagt

SEQ ID NO: 238012 - DNA, 25 bp, Probe Sequence
gatgtatctgtactgatgtctcagt

SEQ ID NO: 238013 - DNA, 25 bp, Probe Sequence
gatgtcatcttgagctcttcattta

SEQ ID NO: 238014 - DNA, 25 bp, Probe Sequence
gatgatcactggtgttgagcttttt

SEQ ID NO: 238015 - DNA, 25 bp, Probe Sequence
gatgacatgggatttggcctttttg

SEQ ID NO: 238016 - DNA, 25 bp, Probe Sequence
gatgacatgggatttggcctttttg

SEQ ID NO: 238017 - DNA, 25 bp, Probe Sequence
gatgagaatgaatcttggtacttag

SEQ ID NO: 238018 - DNA, 25 bp, Probe Sequence
gatgctctcgacagttgcagtactt

SEQ ID NO: 238019 - DNA, 25 bp, Probe Sequence
gatgctctcgacagttgcagtactt

SEQ ID NO: 238020 - DNA, 25 bp, Probe Sequence
gatgtcacacacatttgtggtgctt

SEQ ID NO: 238021 - DNA, 25 bp, Probe Sequence
gatgctcaccagttttctgtgtaca

SEQ ID NO: 238022 - DNA, 25 bp, Probe Sequence
gatgctcaccagttttctgtgtaca

SEQ ID NO: 238023 - DNA, 25 bp, Probe Sequence
gatgctcaccagttttctgtgtaca

SEQ ID NO: 238024 - DNA, 25 bp, Probe Sequence
gatgaaccagattcagtctgtggag

SEQ ID NO: 238025 - DNA, 25 bp, Probe Sequence
gatgacccagatcatgtttgagacc

SEQ ID NO: 238026 - DNA, 25 bp, Probe Sequence
gatgtgcctcgaaagctgttgagcc

SEQ ID NO: 238027 - DNA, 25 bp, Probe Sequence
gatgtccttgagaggctggatccta

SEQ ID NO: 238028 - DNA, 25 bp, Probe Sequence
gatgtccttcagacagaagtatctt

SEQ ID NO: 238029 - DNA, 25 bp, Probe Sequence
gatgtgccaataaccaagtttattc

SEQ ID NO: 238030 - DNA, 25 bp, Probe Sequence
gatgcatgccaaaccaaactaaacc

SEQ ID NO: 238031 - DNA, 25 bp, Probe Sequence
gatgcacacaagcagcatgacactg

SEQ ID NO: 238032 - DNA, 25 bp, Probe Sequence
gatgacaaagcggatgctcccgatg

SEQ ID NO: 238033 - DNA, 25 bp, Probe Sequence
gatgaatcgagtggtgttcgacatg

SEQ ID NO: 238034 - DNA, 25 bp, Probe Sequence
gatgagcataagtcctctccaacag

SEQ ID NO: 238035 - DNA, 25 bp, Probe Sequence
gatgaagacaggcctcccaaagtac

SEQ ID NO: 238036 - DNA, 25 bp, Probe Sequence
gatgaatgcacaaggtggccctatt

SEQ ID NO: 238037 - DNA, 25 bp, Probe Sequence
gatgataccatcggggaccttaaga

SEQ ID NO: 238038 - DNA, 25 bp, Probe Sequence
gatgatacaaccctggacgatttga

SEQ ID NO: 238039 - DNA, 25 bp, Probe Sequence
gatgatacaaccctggacgatttga

SEQ ID NO: 238040 - DNA, 25 bp, Probe Sequence
gatgatgtaaccctgcatgacttga

SEQ ID NO: 238041 - DNA, 25 bp, Probe Sequence
gatgatgatgaagttccagatcttg

SEQ ID NO: 238042 - DNA, 25 bp, Probe Sequence
gatgtatatccaaccatgcttcatt

SEQ ID NO: 238043 - DNA, 25 bp, Probe Sequence
gatgaatgaccaactgatgctcctg

SEQ ID NO: 238044 - DNA, 25 bp, Probe Sequence
gatgactacctactgagcaatcagg

SEQ ID NO: 238045 - DNA, 25 bp, Probe Sequence
gatgatttcctagtagaactcacag

SEQ ID NO: 238046 - DNA, 25 bp, Probe Sequence
gatgaactcttaaaggacttgcaac

SEQ ID NO: 238047 - DNA, 25 bp, Probe Sequence
gatgaacagtttgcagccatcattg

SEQ ID NO: 238048 - DNA, 25 bp, Probe Sequence
gatgtagcattgttccacacattta

SEQ ID NO: 238049 - DNA, 25 bp, Probe Sequence
gatgagtgttcaatccaacattgtt

SEQ ID NO: 238050 - DNA, 25 bp, Probe Sequence
gatgagtttccaccgaaatgtcgga

SEQ ID NO: 238051 - DNA, 25 bp, Probe Sequence
gatgaagatctgacacaggattatg

SEQ ID NO: 238052 - DNA, 25 bp, Probe Sequence
gatgaagattcaccaaataagctat

SEQ ID NO: 238053 - DNA, 25 bp, Probe Sequence
gatgaagatagcaacaacatcacag

SEQ ID NO: 238054 - DNA, 25 bp, Probe Sequence
gatgcatgaaaggaaacgacaaagg

SEQ ID NO: 238055 - DNA, 25 bp, Probe Sequence
gatgtaacatgtgatacatacaaaa

SEQ ID NO: 238056 - DNA, 25 bp, Probe Sequence
gatgtacatcagttaagaagcaaaa

SEQ ID NO: 238057 - DNA, 25 bp, Probe Sequence
gatgtatatcagtggagaaaatgga

SEQ ID NO: 238058 - DNA, 25 bp, Probe Sequence
gatgtgacacagactgacaatcaag

SEQ ID NO: 238059 - DNA, 25 bp, Probe Sequence
gatgtcagcatccttgaaccatatc

SEQ ID NO: 238060 - DNA, 25 bp, Probe Sequence
gatgaaatccttcacgcatatcagc

SEQ ID NO: 238061 - DNA, 25 bp, Probe Sequence
gatgagcactccttgttagctaaca

SEQ ID NO: 238062 - DNA, 25 bp, Probe Sequence
gatgacatctaaattgaactcaaca

SEQ ID NO: 238063 - DNA, 25 bp, Probe Sequence
gatgacattacatgaaataggacac

SEQ ID NO: 238064 - DNA, 25 bp, Probe Sequence
gatgatattcacacacattcaggaa

SEQ ID NO: 238065 - DNA, 25 bp, Probe Sequence
gatgttgatcacacagcttcaatca

SEQ ID NO: 238066 - DNA, 25 bp, Probe Sequence
gatgtcatgacaactgtgttcaaag

SEQ ID NO: 238067 - DNA, 25 bp, Probe Sequence
gatgatcgagatggatggaacagaa

SEQ ID NO: 238068 - DNA, 25 bp, Probe Sequence
gatgtcgtccgagtatatgcagaag

SEQ ID NO: 238069 - DNA, 25 bp, Probe Sequence
gatgtgcaggcttcagtatcagaca

SEQ ID NO: 238070 - DNA, 25 bp, Probe Sequence
gatgtgcaggcttcagtatcagaca

SEQ ID NO: 238071 - DNA, 25 bp, Probe Sequence
gatgtgcacagctaatgattcaatg

SEQ ID NO: 238072 - DNA, 25 bp, Probe Sequence
gatgatgctgcagaagtccctcaga

SEQ ID NO: 238073 - DNA, 25 bp, Probe Sequence
gatgatgctgcagaagtccctcaga

SEQ ID NO: 238074 - DNA, 25 bp, Probe Sequence
gatgtctagctgtagtctccttgat

SEQ ID NO: 238075 - DNA, 25 bp, Probe Sequence
gatgttaattgccttcctaatctag

SEQ ID NO: 238076 - DNA, 25 bp, Probe Sequence
gatgatttttagttgttacactaga

SEQ ID NO: 238077 - DNA, 25 bp, Probe Sequence
gatgattctattccattttgaaaag

SEQ ID NO: 238078 - DNA, 25 bp, Probe Sequence
gatgttctggagctgttggacaaat

SEQ ID NO: 238079 - DNA, 25 bp, Probe Sequence
gatgttctggagctgttggacaaat

SEQ ID NO: 238080 - DNA, 25 bp, Probe Sequence
gatgtttgtgatccagattggtcaa

SEQ ID NO: 238081 - DNA, 25 bp, Probe Sequence
gatgtctttatgcagttcttctcat

SEQ ID NO: 238082 - DNA, 25 bp, Probe Sequence
gatgttttcatatgctgttgttcac

SEQ ID NO: 238083 - DNA, 25 bp, Probe Sequence
gatgtaatgtagttctttgttcctg

SEQ ID NO: 238084 - DNA, 25 bp, Probe Sequence
gatccaaccaagaattctgtatcct

SEQ ID NO: 238085 - DNA, 25 bp, Probe Sequence
gatccatgtccaggtgcaactgtgt

SEQ ID NO: 238086 - DNA, 25 bp, Probe Sequence
gatccttgccacaagaagctttcct

SEQ ID NO: 238087 - DNA, 25 bp, Probe Sequence
gatgtttggaatcgatcatgctttc

SEQ ID NO: 238088 - DNA, 25 bp, Probe Sequence
gatgttctcggtcgagtctatgctg

SEQ ID NO: 238089 - DNA, 25 bp, Probe Sequence
gatgttctggtggaggtagactgaa

SEQ ID NO: 238090 - DNA, 25 bp, Probe Sequence
gatgtttgacatggggctgcggaaa

SEQ ID NO: 238091 - DNA, 25 bp, Probe Sequence
gatgatattaatgtcactgggacaa

SEQ ID NO: 238092 - DNA, 25 bp, Probe Sequence
gatgaattgtacggcacttggcgta

SEQ ID NO: 238093 - DNA, 25 bp, Probe Sequence
gatgaattcaaagtgttctgggaca

SEQ ID NO: 238094 - DNA, 25 bp, Probe Sequence
gatgaaatgcatcaggtcctttggg

SEQ ID NO: 238095 - DNA, 25 bp, Probe Sequence
gatgaaagcctgtgtctttgaggga

SEQ ID NO: 238096 - DNA, 25 bp, Probe Sequence
gatgaccagtttcttttagatggac

SEQ ID NO: 238097 - DNA, 25 bp, Probe Sequence
gatgacttgtttcccttcaaggaaa

SEQ ID NO: 238098 - DNA, 25 bp, Probe Sequence
gatgacaatgtcgtggtttcaaaac

SEQ ID NO: 238099 - DNA, 25 bp, Probe Sequence
gatgcaaaaacgattccgaaacata

SEQ ID NO: 238100 - DNA, 25 bp, Probe Sequence
gatgagtcaacaggtttcactaata

SEQ ID NO: 238101 - DNA, 25 bp, Probe Sequence
gatgatgtccatgttttgtgtgaat

SEQ ID NO: 238102 - DNA, 25 bp, Probe Sequence
gatgacatccatgtttcctgatgct

SEQ ID NO: 238103 - DNA, 25 bp, Probe Sequence
gatgtatgctatgtgtctcaggatt

SEQ ID NO: 238104 - DNA, 25 bp, Probe Sequence
gatgctcatctctggtatcacgaat

SEQ ID NO: 238105 - DNA, 25 bp, Probe Sequence
gatgcatgctcgagatttcactgta

SEQ ID NO: 238106 - DNA, 25 bp, Probe Sequence
gatgatgccgaggacttcctattgg

SEQ ID NO: 238107 - DNA, 25 bp, Probe Sequence
gatgtcctgcggattttatttgcaa

SEQ ID NO: 238108 - DNA, 25 bp, Probe Sequence
gatgattccgagttttgtatccgca

SEQ ID NO: 238109 - DNA, 25 bp, Probe Sequence
gatgacatcttatatttgtgaccct

SEQ ID NO: 238110 - DNA, 25 bp, Probe Sequence
gatacctttaaaagaaccactgtca

SEQ ID NO: 238111 - DNA, 25 bp, Probe Sequence
gatacaccttaacaagaagcttgtg

SEQ ID NO: 238112 - DNA, 25 bp, Probe Sequence
gatctaccttggacggaaacaggtg

SEQ ID NO: 238113 - DNA, 25 bp, Probe Sequence
gatgccacgttgctctgggaaaggg

SEQ ID NO: 238114 - DNA, 25 bp, Probe Sequence
gatcccgttcgagtggatatcactt

SEQ ID NO: 238115 - DNA, 25 bp, Probe Sequence
gatgtcacagttgaagtatctcctt

SEQ ID NO: 238116 - DNA, 25 bp, Probe Sequence
gatgtccattggatactttcctttt

SEQ ID NO: 238117 - DNA, 25 bp, Probe Sequence
gatgtcagcataaaggatttccctc

SEQ ID NO: 238118 - DNA, 25 bp, Probe Sequence
gatgatcagaatgctgcgatcttct

SEQ ID NO: 238119 - DNA, 25 bp, Probe Sequence
gatgtctgcaatggcgctgacttct

SEQ ID NO: 238120 - DNA, 25 bp, Probe Sequence
gatgtcgctcgggctgagattgcat

SEQ ID NO: 238121 - DNA, 25 bp, Probe Sequence
gatgtcaccgagtctgtgattgtca

SEQ ID NO: 238122 - DNA, 25 bp, Probe Sequence
gatgtcatctgtcactataggtcat

SEQ ID NO: 238123 - DNA, 25 bp, Probe Sequence
gatgtcatatgtctctgatggggct

SEQ ID NO: 238124 - DNA, 25 bp, Probe Sequence
gatgccattacatttattggccccc

SEQ ID NO: 238125 - DNA, 25 bp, Probe Sequence
gatgtcataacagtatttggagaac

SEQ ID NO: 238126 - DNA, 25 bp, Probe Sequence
gatgactaacacaactgaggccaat

SEQ ID NO: 238127 - DNA, 25 bp, Probe Sequence
gatgaacaagagaactgggcaaccc

SEQ ID NO: 238128 - DNA, 25 bp, Probe Sequence
gatgaggacgaattctggactacac

SEQ ID NO: 238129 - DNA, 25 bp, Probe Sequence
gatgagaaggaagtctgggctgggc

SEQ ID NO: 238130 - DNA, 25 bp, Probe Sequence
gatgaggagtttgatgctcgctggg

SEQ ID NO: 238131 - DNA, 25 bp, Probe Sequence
gatgaggagtttgatgctcgctggg

SEQ ID NO: 238132 - DNA, 25 bp, Probe Sequence
gatgatccagactataatcctgctg

SEQ ID NO: 238133 - DNA, 25 bp, Probe Sequence
gatgatccagtgcctgagatccgtc

SEQ ID NO: 238134 - DNA, 25 bp, Probe Sequence
gatgagaatgtgcctactgctcctg

SEQ ID NO: 238135 - DNA, 25 bp, Probe Sequence
gatgagaatgtgcctactgctcctg

SEQ ID NO: 238136 - DNA, 25 bp, Probe Sequence
gatgaaatgctgccgcaatggctgt

SEQ ID NO: 238137 - DNA, 25 bp, Probe Sequence
gatgagaagctgaatgtaggattta

SEQ ID NO: 238138 - DNA, 25 bp, Probe Sequence
gatgaaacttctcaggaccctggaa

SEQ ID NO: 238139 - DNA, 25 bp, Probe Sequence
gatcaaaattttgtgactccttcag

SEQ ID NO: 238140 - DNA, 25 bp, Probe Sequence
gatgatgaattttataagacacctt

SEQ ID NO: 238141 - DNA, 25 bp, Probe Sequence
gatgagctattttggataacaagca

SEQ ID NO: 238142 - DNA, 25 bp, Probe Sequence
gatgatttttcagatacagacaata

SEQ ID NO: 238143 - DNA, 25 bp, Probe Sequence
gatgagtttctagatgaagaggact

SEQ ID NO: 238144 - DNA, 25 bp, Probe Sequence
gatgaggtttcaagagaggaggatt

SEQ ID NO: 238145 - DNA, 25 bp, Probe Sequence
gatgaggtttctcgacagcaggaac

SEQ ID NO: 238146 - DNA, 25 bp, Probe Sequence
gatgagatgtttatgactgctggaa

SEQ ID NO: 238147 - DNA, 25 bp, Probe Sequence
gatgatggcttgagtcagctgcagg

SEQ ID NO: 238148 - DNA, 25 bp, Probe Sequence
gatgtagcttgtgcagatgtagcag

SEQ ID NO: 238149 - DNA, 25 bp, Probe Sequence
gatgtcagatctggtaggttgcagc

SEQ ID NO: 238150 - DNA, 25 bp, Probe Sequence
gatgacaatctgggagtgtgctggc

SEQ ID NO: 238151 - DNA, 25 bp, Probe Sequence
gatgatcagtccggggcgctgcata

SEQ ID NO: 238152 - DNA, 25 bp, Probe Sequence
gatgtatgtcattctgtgggcagct

SEQ ID NO: 238153 - DNA, 25 bp, Probe Sequence
gatgctagcactgcatgtgctgtgc

SEQ ID NO: 238154 - DNA, 25 bp, Probe Sequence
gatgctggacatgaaggtgaacccc

SEQ ID NO: 238155 - DNA, 25 bp, Probe Sequence
gatgatcatagctgggagagaaccc

SEQ ID NO: 238156 - DNA, 25 bp, Probe Sequence
gatgtatcatgatagtcacaaacgc

SEQ ID NO: 238157 - DNA, 25 bp, Probe Sequence
gatgagttgatagatgcagcaaacc

SEQ ID NO: 238158 - DNA, 25 bp, Probe Sequence
gatgagggcatagccaatcccactg

SEQ ID NO: 238159 - DNA, 25 bp, Probe Sequence
gatgatgtgtgcggaggacacccac

SEQ ID NO: 238160 - DNA, 25 bp, Probe Sequence
gatgatgagcggcagagcatcccca

SEQ ID NO: 238161 - DNA, 25 bp, Probe Sequence
gatgatccggaaagatctcccacca

SEQ ID NO: 238162 - DNA, 25 bp, Probe Sequence
gatgtactggacaaacacctcattc

SEQ ID NO: 238163 - DNA, 25 bp, Probe Sequence
gatgtactggagcaatcagatcaca

SEQ ID NO: 238164 - DNA, 25 bp, Probe Sequence
gatgttcatgggtaaaataatactg

SEQ ID NO: 238165 - DNA, 25 bp, Probe Sequence
gatgactgggaggacgactacgact

SEQ ID NO: 238166 - DNA, 25 bp, Probe Sequence
gatgaggaggcactggctacaatta

SEQ ID NO: 238167 - DNA, 25 bp, Probe Sequence
gatgaagcagagtggcaagaattac

SEQ ID NO: 238168 - DNA, 25 bp, Probe Sequence
gatgaagtgatgagagcctatttac

SEQ ID NO: 238169 - DNA, 25 bp, Probe Sequence
gatgatcatgggaggcctatttgac

SEQ ID NO: 238170 - DNA, 25 bp, Probe Sequence
gatgtcatggtgatgcccaatctct

SEQ ID NO: 238171 - DNA, 25 bp, Probe Sequence
gatgtatatatggtgcccttctgat

SEQ ID NO: 238172 - DNA, 25 bp, Probe Sequence
gatgtaatagagtcacgctttgatt

SEQ ID NO: 238173 - DNA, 25 bp, Probe Sequence
gatgatagtatagaacatttatttc

SEQ ID NO: 238174 - DNA, 25 bp, Probe Sequence
gatgtagtctagaatcctgtgaatt

SEQ ID NO: 238175 - DNA, 25 bp, Probe Sequence
gatgtcatcttgcttccttaatgtc

SEQ ID NO: 238176 - DNA, 25 bp, Probe Sequence
gatgtcatctgtattctctttttct

SEQ ID NO: 238177 - DNA, 25 bp, Probe Sequence
gatgatcatttggttccatttttat

SEQ ID NO: 238178 - DNA, 25 bp, Probe Sequence
gatgattgcgggtgccaatttctac

SEQ ID NO: 238179 - DNA, 25 bp, Probe Sequence
gatgtttgagtattctatatttcta

SEQ ID NO: 238180 - DNA, 25 bp, Probe Sequence
gatgtattactcttattatttctat

SEQ ID NO: 238181 - DNA, 25 bp, Probe Sequence
gatgtactagatttgtgtatgtctt

SEQ ID NO: 238182 - DNA, 25 bp, Probe Sequence
gatgtacttgttagtgtattcattc

SEQ ID NO: 238183 - DNA, 25 bp, Probe Sequence
gatgtaaatataaggatcttctcta

SEQ ID NO: 238184 - DNA, 25 bp, Probe Sequence
gatgatcacatttatggagattatt

SEQ ID NO: 238185 - DNA, 25 bp, Probe Sequence
gatatctcaaaatggttcaagtggg

SEQ ID NO: 238186 - DNA, 25 bp, Probe Sequence
gatgtcatgaaacagaatccaatgg

SEQ ID NO: 238187 - DNA, 25 bp, Probe Sequence
gatgtcatgcaagtttgtatgccag

SEQ ID NO: 238188 - DNA, 25 bp, Probe Sequence
gatgttgaacttgttgctgagggca

SEQ ID NO: 238189 - DNA, 25 bp, Probe Sequence
gatgttaatttctctgtaggttgta

SEQ ID NO: 238190 - DNA, 25 bp, Probe Sequence
gatgtttattctccaggtttttggt

SEQ ID NO: 238191 - DNA, 25 bp, Probe Sequence
gatgtttatttccatagtttgatag

SEQ ID NO: 238192 - DNA, 25 bp, Probe Sequence
gatgctgtttgtaaaggtattaatg

SEQ ID NO: 238193 - DNA, 25 bp, Probe Sequence
gatcgagttggagaggaagttcagc

SEQ ID NO: 238194 - DNA, 25 bp, Probe Sequence
gatgcccctcggggaacgtatcact

SEQ ID NO: 238195 - DNA, 25 bp, Probe Sequence
gatgcccatgtctcgtaatttatcc

SEQ ID NO: 238196 - DNA, 25 bp, Probe Sequence
gatcccagtacctgaatcctgaatc

SEQ ID NO: 238197 - DNA, 25 bp, Probe Sequence
gatcccagtacctgaatcctgaatc

SEQ ID NO: 238198 - DNA, 25 bp, Probe Sequence
gatgcccagtacaggacttatggac

SEQ ID NO: 238199 - DNA, 25 bp, Probe Sequence
gatgagagacaaaaggggttcgcac

SEQ ID NO: 238200 - DNA, 25 bp, Probe Sequence
gatgaggcacttggaggggttctgg

SEQ ID NO: 238201 - DNA, 25 bp, Probe Sequence
gatgactcactgtgggggggtggct

SEQ ID NO: 238202 - DNA, 25 bp, Probe Sequence
gatgagcaccaacatgtgaggggtg

SEQ ID NO: 238203 - DNA, 25 bp, Probe Sequence
gatgatacctcacatgttgaccggc

SEQ ID NO: 238204 - DNA, 25 bp, Probe Sequence
gatgtacctgatactgaggaagcgc

SEQ ID NO: 238205 - DNA, 25 bp, Probe Sequence
gatgattttgatgatgaggaagctg

SEQ ID NO: 238206 - DNA, 25 bp, Probe Sequence
gatcatttctgggatgggaagggat

SEQ ID NO: 238207 - DNA, 25 bp, Probe Sequence
gatgcattcatcatggaagacaagg

SEQ ID NO: 238208 - DNA, 25 bp, Probe Sequence
gatgatgccatgggtgatgaggaag

SEQ ID NO: 238209 - DNA, 25 bp, Probe Sequence
gatgcagccatgggtaggtcagaga

SEQ ID NO: 238210 - DNA, 25 bp, Probe Sequence
gatgcagctattttcgaggccaaca

SEQ ID NO: 238211 - DNA, 25 bp, Probe Sequence
gatgagtttttcctggagcagacca

SEQ ID NO: 238212 - DNA, 25 bp, Probe Sequence
gatgcatttttaaaggagccagctc

SEQ ID NO: 238213 - DNA, 25 bp, Probe Sequence
gatgtattgattccaggggccatgc

SEQ ID NO: 238214 - DNA, 25 bp, Probe Sequence
gatgctttagtgcaggcctgttctg

SEQ ID NO: 238215 - DNA, 25 bp, Probe Sequence
gatgtatttgtgacaccctatcttg

SEQ ID NO: 238216 - DNA, 25 bp, Probe Sequence
gatgtatttgtgacaccctatcttg

SEQ ID NO: 238217 - DNA, 25 bp, Probe Sequence
gatgttttgctggaatttaatgatg

SEQ ID NO: 238218 - DNA, 25 bp, Probe Sequence
gatgatttatgggtattccaaagaa

SEQ ID NO: 238219 - DNA, 25 bp, Probe Sequence
gatgctgagctttttataccaccaa

SEQ ID NO: 238220 - DNA, 25 bp, Probe Sequence
gatgattgtaaaatttgctcctcaa

SEQ ID NO: 238221 - DNA, 25 bp, Probe Sequence
gatgatctggcagacctcagctgcc

SEQ ID NO: 238222 - DNA, 25 bp, Probe Sequence
gatgactgccagcacagggcatctc

SEQ ID NO: 238223 - DNA, 25 bp, Probe Sequence
gatgttgacaagacaggagcttcct

SEQ ID NO: 238224 - DNA, 25 bp, Probe Sequence
gatgactaagtcaagctacttcctg

SEQ ID NO: 238225 - DNA, 25 bp, Probe Sequence
gatgaaaggtgccagcaacttgctg

SEQ ID NO: 238226 - DNA, 25 bp, Probe Sequence
gatgatgaagttccaggatcttgtg

SEQ ID NO: 238227 - DNA, 25 bp, Probe Sequence
gatgcagcctttccaagtgcggctg

SEQ ID NO: 238228 - DNA, 25 bp, Probe Sequence
gatccagtttgaaattgcacatgct

SEQ ID NO: 238229 - DNA, 25 bp, Probe Sequence
gatgcaagttgtcaatggatgagtg

SEQ ID NO: 238230 - DNA, 25 bp, Probe Sequence
gatgttgtctgtcaggagatgcagt

SEQ ID NO: 238231 - DNA, 25 bp, Probe Sequence
gatgattgttcgggcaagacagttg

SEQ ID NO: 238232 - DNA, 25 bp, Probe Sequence
gatgtaggtgctgggcgagactgct

SEQ ID NO: 238233 - DNA, 25 bp, Probe Sequence
gatgtagaagctgactgagacctgc

SEQ ID NO: 238234 - DNA, 25 bp, Probe Sequence
gatgtattatctgcacagacccacg

SEQ ID NO: 238235 - DNA, 25 bp, Probe Sequence
gatgttgtcattgcagcagacgtgc

SEQ ID NO: 238236 - DNA, 25 bp, Probe Sequence
gatgtttgcaaaccaacatgtgctc

SEQ ID NO: 238237 - DNA, 25 bp, Probe Sequence
gatgttgcagctttcaacaaggtct

SEQ ID NO: 238238 - DNA, 25 bp, Probe Sequence
gatgttgcatgctctcagaattatg

SEQ ID NO: 238239 - DNA, 25 bp, Probe Sequence
gatgagtgatcaactaatagctctg

SEQ ID NO: 238240 - DNA, 25 bp, Probe Sequence
gatgatgcagatatcgactacatta

SEQ ID NO: 238241 - DNA, 25 bp, Probe Sequence
gatgctggatggacctatcacaata

SEQ ID NO: 238242 - DNA, 25 bp, Probe Sequence
gatgctggtgaggtttgtaagaaaa

SEQ ID NO: 238243 - DNA, 25 bp, Probe Sequence
gatgaagtgcacctttcaaaaacat

SEQ ID NO: 238244 - DNA, 25 bp, Probe Sequence
gatgaggtcaacactgcaaaaggca

SEQ ID NO: 238245 - DNA, 25 bp, Probe Sequence
gatgaggtcttcaccaaagtgtaca

SEQ ID NO: 238246 - DNA, 25 bp, Probe Sequence
gatgacgccattttccaaagcttgg

SEQ ID NO: 238247 - DNA, 25 bp, Probe Sequence
gatgacttatatggtaataggcttg

SEQ ID NO: 238248 - DNA, 25 bp, Probe Sequence
gatgagtctgagagaaagaggtttt

SEQ ID NO: 238249 - DNA, 25 bp, Probe Sequence
gatctgtctgccacgaagggttttc

SEQ ID NO: 238250 - DNA, 25 bp, Probe Sequence
gatgattctgccaaaaaggtacttc

SEQ ID NO: 238251 - DNA, 25 bp, Probe Sequence
gatgattcgtctaaaagcgtccctt

SEQ ID NO: 238252 - DNA, 25 bp, Probe Sequence
gatgatcctgtggaacacacgttcc

SEQ ID NO: 238253 - DNA, 25 bp, Probe Sequence
gatgaacggccgacacaggttctgc

SEQ ID NO: 238254 - DNA, 25 bp, Probe Sequence
gatgatcaaaccacagactttggcc

SEQ ID NO: 238255 - DNA, 25 bp, Probe Sequence
gatgatcaataactccaattctagg

SEQ ID NO: 238256 - DNA, 25 bp, Probe Sequence
gatgagcatttagcacaatttgaga

SEQ ID NO: 238257 - DNA, 25 bp, Probe Sequence
gatgacttctatgcacatttatgac

SEQ ID NO: 238258 - DNA, 25 bp, Probe Sequence
gatgacattcccatgtttgatgact

SEQ ID NO: 238259 - DNA, 25 bp, Probe Sequence
gatgttaccatcatgcttttaccct

SEQ ID NO: 238260 - DNA, 25 bp, Probe Sequence
gatgttatcttcttgctattttgct

SEQ ID NO: 238261 - DNA, 25 bp, Probe Sequence
gatgagtcttcctctatgtttgacg

SEQ ID NO: 238262 - DNA, 25 bp, Probe Sequence
gatgatgttctgccaatctatgctt

SEQ ID NO: 238263 - DNA, 25 bp, Probe Sequence
gatgatatgtgctgcctttgcttct

SEQ ID NO: 238264 - DNA, 25 bp, Probe Sequence
gatgcttcttaggtttctgtcttaa

SEQ ID NO: 238265 - DNA, 25 bp, Probe Sequence
gatgttaatatactattctgttaca

SEQ ID NO: 238266 - DNA, 25 bp, Probe Sequence
gatgattgtcataaggtttttagca

SEQ ID NO: 238267 - DNA, 25 bp, Probe Sequence
gatgatttctttgttctttgcaact

SEQ ID NO: 238268 - DNA, 25 bp, Probe Sequence
gatgatttctttgttctttgcaact

SEQ ID NO: 238269 - DNA, 25 bp, Probe Sequence
gatgatttctttgttctttgcaact

SEQ ID NO: 238270 - DNA, 25 bp, Probe Sequence
gatgtttgtttcttattcattccac

SEQ ID NO: 238271 - DNA, 25 bp, Probe Sequence
gatgttttcattgtttcagttatct

SEQ ID NO: 238272 - DNA, 25 bp, Probe Sequence
gatgtttccattaatctttttctgg

SEQ ID NO: 238273 - DNA, 25 bp, Probe Sequence
gatgttttattttatttttctctga

SEQ ID NO: 238274 - DNA, 25 bp, Probe Sequence
gatgttttgattcagtattctttta

SEQ ID NO: 238275 - DNA, 25 bp, Probe Sequence
gatctaactcttctgttcgttgtta

SEQ ID NO: 238276 - DNA, 25 bp, Probe Sequence
gatccagattctacttaatggggtt

SEQ ID NO: 238277 - DNA, 25 bp, Probe Sequence
gatccagtcatctgtctaactacgt

SEQ ID NO: 238278 - DNA, 25 bp, Probe Sequence
gatccagtagggtcttaccagagag

SEQ ID NO: 238279 - DNA, 25 bp, Probe Sequence
gatgacctcagcagcttaatccaag

SEQ ID NO: 238280 - DNA, 25 bp, Probe Sequence
gatgaatcacacaagactattaaac

SEQ ID NO: 238281 - DNA, 25 bp, Probe Sequence
gatgaaaggcaggcctatttcatca

SEQ ID NO: 238282 - DNA, 25 bp, Probe Sequence
gatgaggaggaggtcttcgacagca

SEQ ID NO: 238283 - DNA, 25 bp, Probe Sequence
gatgttcaggtggactacatgaaga

SEQ ID NO: 238284 - DNA, 25 bp, Probe Sequence
gatgattccctgcatcaactaagaa

SEQ ID NO: 238285 - DNA, 25 bp, Probe Sequence
gatcaccccgagaaagtaaacaaag

SEQ ID NO: 238286 - DNA, 25 bp, Probe Sequence
gatccgccggcggaagatgaaccac

SEQ ID NO: 238287 - DNA, 25 bp, Probe Sequence
gatcctgagcgcttggccaagtaac

SEQ ID NO: 238288 - DNA, 25 bp, Probe Sequence
gttcgaccagtacaggtatacccga

SEQ ID NO: 238289 - DNA, 25 bp, Probe Sequence
gttcgaccccaacgagatcaaagtc

SEQ ID NO: 238290 - DNA, 25 bp, Probe Sequence
gatgttcccctatgggtacaaatgt

SEQ ID NO: 238291 - DNA, 25 bp, Probe Sequence
gatgttccgtctgtgggaaacgctt

SEQ ID NO: 238292 - DNA, 25 bp, Probe Sequence
gatttccaccagggctggaaaggtt

SEQ ID NO: 238293 - DNA, 25 bp, Probe Sequence
gatgttccccctgctgtaaatgcag

SEQ ID NO: 238294 - DNA, 25 bp, Probe Sequence
gatgaacccttcagctgctaagatc

SEQ ID NO: 238295 - DNA, 25 bp, Probe Sequence
gatgaattcgcttccggatcaagaa

SEQ ID NO: 238296 - DNA, 25 bp, Probe Sequence
gatgcaattggttctcctgcattga

SEQ ID NO: 238297 - DNA, 25 bp, Probe Sequence
gatgcatgtcgttacatcactgacg

SEQ ID NO: 238298 - DNA, 25 bp, Probe Sequence
gatgcatgtggattaaatcagaatc

SEQ ID NO: 238299 - DNA, 25 bp, Probe Sequence
gatgctcaggcttgaaatcgcatta

SEQ ID NO: 238300 - DNA, 25 bp, Probe Sequence
gatgcagctagcctgaaaggactga

SEQ ID NO: 238301 - DNA, 25 bp, Probe Sequence
gatgcagctagcctgaaaggactga

SEQ ID NO: 238302 - DNA, 25 bp, Probe Sequence
gatgcagctagcctgaaaggactga

SEQ ID NO: 238303 - DNA, 25 bp, Probe Sequence
gatgagctatgataacactatgaat

SEQ ID NO: 238304 - DNA, 25 bp, Probe Sequence
gatgagtcaggataacagagagata

SEQ ID NO: 238305 - DNA, 25 bp, Probe Sequence
gatcattagcaagacattaagcttt

SEQ ID NO: 238306 - DNA, 25 bp, Probe Sequence
gattctagctaggcgtcggacggat

SEQ ID NO: 238307 - DNA, 25 bp, Probe Sequence
gatgttcaaagggcctgagaaggat

SEQ ID NO: 238308 - DNA, 25 bp, Probe Sequence
gatgttcatatgtttcactgtgtgg

SEQ ID NO: 238309 - DNA, 25 bp, Probe Sequence
gatgttgtatttgcagtggctgagg

SEQ ID NO: 238310 - DNA, 25 bp, Probe Sequence
gatgttggtatctaaggcttaggcc

SEQ ID NO: 238311 - DNA, 25 bp, Probe Sequence
gatgttggcttgctgggtatagaac

SEQ ID NO: 238312 - DNA, 25 bp, Probe Sequence
gatgttactgagctgatctgtatag

SEQ ID NO: 238313 - DNA, 25 bp, Probe Sequence
gatgattaatacagatcttagcaga

SEQ ID NO: 238314 - DNA, 25 bp, Probe Sequence
gatgatagaaccggacctagcatga

SEQ ID NO: 238315 - DNA, 25 bp, Probe Sequence
gatgaaaaccctgagtcacagattt

SEQ ID NO: 238316 - DNA, 25 bp, Probe Sequence
gatgaaaactgcacaaggccagaac

SEQ ID NO: 238317 - DNA, 25 bp, Probe Sequence
gatgaaacaacaacacttccataca

SEQ ID NO: 238318 - DNA, 25 bp, Probe Sequence
gatgatcaagataacgcacgtccat

SEQ ID NO: 238319 - DNA, 25 bp, Probe Sequence
gatgataatctcaagacacctcctg

SEQ ID NO: 238320 - DNA, 25 bp, Probe Sequence
gatgataatctcaagacacctgcgg

SEQ ID NO: 238321 - DNA, 25 bp, Probe Sequence
cttactccttcacagatcggtgtaa

SEQ ID NO: 238322 - DNA, 25 bp, Probe Sequence
gatgataatctcaagacaccttccg

SEQ ID NO: 238323 - DNA, 25 bp, Probe Sequence
gatgataatctcaagacacctcccg

SEQ ID NO: 238324 - DNA, 25 bp, Probe Sequence
gatgataatctcaagacacctcccg

SEQ ID NO: 238325 - DNA, 25 bp, Probe Sequence
gatgataatctcaagacacctcccg

SEQ ID NO: 238326 - DNA, 25 bp, Probe Sequence
gatgataatctcaagacacctccct

SEQ ID NO: 238327 - DNA, 25 bp, Probe Sequence
gatgatcaacataatggaccactcc

SEQ ID NO: 238328 - DNA, 25 bp, Probe Sequence
gatgatgataatagtacccactcac

SEQ ID NO: 238329 - DNA, 25 bp, Probe Sequence
gatgatgacaatttacttcccaggt

SEQ ID NO: 238330 - DNA, 25 bp, Probe Sequence
gatgactttgtgaacattcccaggt

SEQ ID NO: 238331 - DNA, 25 bp, Probe Sequence
gatgactttgagaccatgctccaca

SEQ ID NO: 238332 - DNA, 25 bp, Probe Sequence
gatgagttgtagacactgatctgct

SEQ ID NO: 238333 - DNA, 25 bp, Probe Sequence
gatgatgtgtttagatatcattata

SEQ ID NO: 238334 - DNA, 25 bp, Probe Sequence
gatgatgtttggaagtatactactc

SEQ ID NO: 238335 - DNA, 25 bp, Probe Sequence
gatgatgttttgcagcattccccat

SEQ ID NO: 238336 - DNA, 25 bp, Probe Sequence
gatgatatttggcagctgtcctcca

SEQ ID NO: 238337 - DNA, 25 bp, Probe Sequence
gatgaatggtgaccgcatcgactcc

SEQ ID NO: 238338 - DNA, 25 bp, Probe Sequence
gatgaagcgctgatcctgtagtcac

SEQ ID NO: 238339 - DNA, 25 bp, Probe Sequence
gatgaagagcaaggccctcaggacc

SEQ ID NO: 238340 - DNA, 25 bp, Probe Sequence
gatgaagagcaaggccctcaggacc

SEQ ID NO: 238341 - DNA, 25 bp, Probe Sequence
gatgactacagtgccctaagacagc

SEQ ID NO: 238342 - DNA, 25 bp, Probe Sequence
gatgactacaagcagcctctaactg

SEQ ID NO: 238343 - DNA, 25 bp, Probe Sequence
gatctcttcaaccaggtcaaagctg

SEQ ID NO: 238344 - DNA, 25 bp, Probe Sequence
gatgatcccaacaaagatacaagtg

SEQ ID NO: 238345 - DNA, 25 bp, Probe Sequence
gatccccagacacatgctaacagga

SEQ ID NO: 238346 - DNA, 25 bp, Probe Sequence
gtcccgagagctttcaaaaggggat

SEQ ID NO: 238347 - DNA, 25 bp, Probe Sequence
gatccggaagctcatcaaagatggg

SEQ ID NO: 238348 - DNA, 25 bp, Probe Sequence
gtcaaggccgctgctaatcagatgc

SEQ ID NO: 238349 - DNA, 25 bp, Probe Sequence
gatgctacccctgtcagacagaggc

SEQ ID NO: 238350 - DNA, 25 bp, Probe Sequence
gatgctcatcctgtttgagagggtg

SEQ ID NO: 238351 - DNA, 25 bp, Probe Sequence
gatgccatttacttaatagggttgt

SEQ ID NO: 238352 - DNA, 25 bp, Probe Sequence
gatgcattgtttttagctcaggttt

SEQ ID NO: 238353 - DNA, 25 bp, Probe Sequence
gatgatggtatctgtgagtatgttt

SEQ ID NO: 238354 - DNA, 25 bp, Probe Sequence
ggatgcacttaggtggtgaatgtga

SEQ ID NO: 238355 - DNA, 25 bp, Probe Sequence
gatgagttttttgcagatgtctgga

SEQ ID NO: 238356 - DNA, 25 bp, Probe Sequence
gtagtcacgttcgtcaagtccgtta

SEQ ID NO: 238357 - DNA, 25 bp, Probe Sequence
gataaccgtggcgaaagtcttgtta

SEQ ID NO: 238358 - DNA, 25 bp, Probe Sequence
gatgaccccaggcttgagtttttaa

SEQ ID NO: 238359 - DNA, 25 bp, Probe Sequence
gatgacattccatgagttggtattt

SEQ ID NO: 238360 - DNA, 25 bp, Probe Sequence
gatgaactgccatgagggtgtagtg

SEQ ID NO: 238361 - DNA, 25 bp, Probe Sequence
gatgaaagcctgtgatggtatcaat

SEQ ID NO: 238362 - DNA, 25 bp, Probe Sequence
gatgacatactttgagagttacagt

SEQ ID NO: 238363 - DNA, 25 bp, Probe Sequence
gatccacattgttaggtgctgacct

SEQ ID NO: 238364 - DNA, 25 bp, Probe Sequence
gatgaacaccttggctttgcatcct

SEQ ID NO: 238365 - DNA, 25 bp, Probe Sequence
gatgaaacactgacctcttgtctca

SEQ ID NO: 238366 - DNA, 25 bp, Probe Sequence
gatgcaaaacacggctacgtctcac

SEQ ID NO: 238367 - DNA, 25 bp, Probe Sequence
gataagaaatcgagacccatactgc

SEQ ID NO: 238368 - DNA, 25 bp, Probe Sequence
gatgataaatatgttgaccgagggg

SEQ ID NO: 238369 - DNA, 25 bp, Probe Sequence
gatgataatgtttttgagggagtag

SEQ ID NO: 238370 - DNA, 25 bp, Probe Sequence
gatgaataggtgttctcaggaggta

SEQ ID NO: 238371 - DNA, 25 bp, Probe Sequence
gatgatcaggtttttctggatggaa

SEQ ID NO: 238372 - DNA, 25 bp, Probe Sequence
gatgaagctgttgcttatggtgcag

SEQ ID NO: 238373 - DNA, 25 bp, Probe Sequence
gatgacagtgtcggctttgtggagt

SEQ ID NO: 238374 - DNA, 25 bp, Probe Sequence
gatgaagggcggggctgatctgttt

SEQ ID NO: 238375 - DNA, 25 bp, Probe Sequence
gatgaagggctgattgtgctttatg

SEQ ID NO: 238376 - DNA, 25 bp, Probe Sequence
gatgaaatgttattttgccattaaa

SEQ ID NO: 238377 - DNA, 25 bp, Probe Sequence
gatgaaatgttattttgccattaaa

SEQ ID NO: 238378 - DNA, 25 bp, Probe Sequence
gatgaaatgttattttgccattaaa

SEQ ID NO: 238379 - DNA, 25 bp, Probe Sequence
gatgacaaggtgaatttccatttta

SEQ ID NO: 238380 - DNA, 25 bp, Probe Sequence
gatgaacaaggtccatgttatttta

SEQ ID NO: 238381 - DNA, 25 bp, Probe Sequence
gatgaggaaggcctcagtccactgc

SEQ ID NO: 238382 - DNA, 25 bp, Probe Sequence
gatgatgaaccgcttcatgccactg

SEQ ID NO: 238383 - DNA, 25 bp, Probe Sequence
gatgatgcaaatctctataccagct

SEQ ID NO: 238384 - DNA, 25 bp, Probe Sequence
gatgcacaacagattatacggcatg

SEQ ID NO: 238385 - DNA, 25 bp, Probe Sequence
gatgcaaagaggttggatcaagttt

SEQ ID NO: 238386 - DNA, 25 bp, Probe Sequence
gatgaaactggagtaatgaagctgc

SEQ ID NO: 238387 - DNA, 25 bp, Probe Sequence
gatgcaaatgctgactaataaagac

SEQ ID NO: 238388 - DNA, 25 bp, Probe Sequence
gatgaaatgtgctaagaagaggggg

SEQ ID NO: 238389 - DNA, 25 bp, Probe Sequence
gatgaagctgcagaaccaacgaggt

SEQ ID NO: 238390 - DNA, 25 bp, Probe Sequence
gatgaagtctatgcccagaagatga

SEQ ID NO: 238391 - DNA, 25 bp, Probe Sequence
gatgcacagggagcaccaaaggacc

SEQ ID NO: 238392 - DNA, 25 bp, Probe Sequence
gatgatggggggtccagcaaatatg

SEQ ID NO: 238393 - DNA, 25 bp, Probe Sequence
gatgttggagatgtaacagaattga

SEQ ID NO: 238394 - DNA, 25 bp, Probe Sequence
gatgttggcaatctgatccagcctg

SEQ ID NO: 238395 - DNA, 25 bp, Probe Sequence
gatgctttgaaagctatagccagat

SEQ ID NO: 238396 - DNA, 25 bp, Probe Sequence
gatgctgaagatcaaataaccaata

SEQ ID NO: 238397 - DNA, 25 bp, Probe Sequence
gatgctgacagagcacaaaaggctt

SEQ ID NO: 238398 - DNA, 25 bp, Probe Sequence
gatctgccggaagcaaatgtcctca

SEQ ID NO: 238399 - DNA, 25 bp, Probe Sequence
gatgcccaagaagactcggcgctcg

SEQ ID NO: 238400 - DNA, 25 bp, Probe Sequence
gatccacagcggagaccctgttaac

SEQ ID NO: 238401 - DNA, 25 bp, Probe Sequence
gatccacagcggagaccctgttaac

SEQ ID NO: 238402 - DNA, 25 bp, Probe Sequence
gatccaataggagacaccagttctg

SEQ ID NO: 238403 - DNA, 25 bp, Probe Sequence
gatccaataggagacaccagttctg

SEQ ID NO: 238404 - DNA, 25 bp, Probe Sequence
gatcgccaaggatgtgaagcagttc

SEQ ID NO: 238405 - DNA, 25 bp, Probe Sequence
gatctgcttgggatgatggaggtac

SEQ ID NO: 238406 - DNA, 25 bp, Probe Sequence
gatgccttgggcataactgccttga

SEQ ID NO: 238407 - DNA, 25 bp, Probe Sequence
gatgccgtgggcaaatgtcgaagtg

SEQ ID NO: 238408 - DNA, 25 bp, Probe Sequence
gatgaccttggatgctgtaaagtga

SEQ ID NO: 238409 - DNA, 25 bp, Probe Sequence
gatgacctagagtatctggaagaaa

SEQ ID NO: 238410 - DNA, 25 bp, Probe Sequence
gatgacttggacttcgagacaggag

SEQ ID NO: 238411 - DNA, 25 bp, Probe Sequence
gatgccattaaatttcagactgtag

SEQ ID NO: 238412 - DNA, 25 bp, Probe Sequence
gatgccattaaatttcagactgtag

SEQ ID NO: 238413 - DNA, 25 bp, Probe Sequence
gatgacccaatgtgaatgtctgtag

SEQ ID NO: 238414 - DNA, 25 bp, Probe Sequence
gatgaccctatgagctggactgaag

SEQ ID NO: 238415 - DNA, 25 bp, Probe Sequence
gatgacatccggtgtggtcttgtac

SEQ ID NO: 238416 - DNA, 25 bp, Probe Sequence
gatgaccaagaggcgtttctttcaa

SEQ ID NO: 238417 - DNA, 25 bp, Probe Sequence
gatgaacctggagctttattatcaa

SEQ ID NO: 238418 - DNA, 25 bp, Probe Sequence
gatgaggatttgggttttctataag

SEQ ID NO: 238419 - DNA, 25 bp, Probe Sequence
gatgatggttcttcctttattgata

SEQ ID NO: 238420 - DNA, 25 bp, Probe Sequence
gatgagattatttcctgtgttaaaa

SEQ ID NO: 238421 - DNA, 25 bp, Probe Sequence
gatgaattcaatgctagttcttaaa

SEQ ID NO: 238422 - DNA, 25 bp, Probe Sequence
gatgatttcgtctgagtttttatac

SEQ ID NO: 238423 - DNA, 25 bp, Probe Sequence
gatcttcctgtcagcgtttttgagt

SEQ ID NO: 238424 - DNA, 25 bp, Probe Sequence
gatcctgtagtcacctattttcgta

SEQ ID NO: 238425 - DNA, 25 bp, Probe Sequence
gatgccattagatacccagacatta

SEQ ID NO: 238426 - DNA, 25 bp, Probe Sequence
gatgcagactacagtccctgcaatt

SEQ ID NO: 238427 - DNA, 25 bp, Probe Sequence
gatgagactcacagatctacacaaa

SEQ ID NO: 238428 - DNA, 25 bp, Probe Sequence
gatgagatcatcaatttctacatga

SEQ ID NO: 238429 - DNA, 25 bp, Probe Sequence
gatgcaatttgaatcttcatcatac

SEQ ID NO: 238430 - DNA, 25 bp, Probe Sequence
gatgatctgttaatttcctatctaa

SEQ ID NO: 238431 - DNA, 25 bp, Probe Sequence
gatctgcgttttgtcacttttcgtt

SEQ ID NO: 238432 - DNA, 25 bp, Probe Sequence
gatccaggtattaacactttccagt

SEQ ID NO: 238433 - DNA, 25 bp, Probe Sequence
gatgcatcctttgagaactatataa

SEQ ID NO: 238434 - DNA, 25 bp, Probe Sequence
gatgatacaattgcagaactggata

SEQ ID NO: 238435 - DNA, 25 bp, Probe Sequence
gatgaaaatgctccagtcactgaaa

SEQ ID NO: 238436 - DNA, 25 bp, Probe Sequence
gatgaaacttgctgtagatgaagaa

SEQ ID NO: 238437 - DNA, 25 bp, Probe Sequence
gatgatgaatacgaggtggactgga

SEQ ID NO: 238438 - DNA, 25 bp, Probe Sequence
gatgagaaagcctgatagcaaggat

SEQ ID NO: 238439 - DNA, 25 bp, Probe Sequence
gatgcgcaaacgctacagcgtggac

SEQ ID NO: 238440 - DNA, 25 bp, Probe Sequence
gatcgacgacgtgatcagcgcagac

SEQ ID NO: 238441 - DNA, 25 bp, Probe Sequence
gatgccacgggtgaatgcagaatgc

SEQ ID NO: 238442 - DNA, 25 bp, Probe Sequence
gatcgacgtgtgtccggagaacgct

SEQ ID NO: 238443 - DNA, 25 bp, Probe Sequence
gatcgatggtgttctcaacaacccg

SEQ ID NO: 238444 - DNA, 25 bp, Probe Sequence
gatcgtggtgcatccatactggaac

SEQ ID NO: 238445 - DNA, 25 bp, Probe Sequence
gatccggtcccaggttatgacacac

SEQ ID NO: 238446 - DNA, 25 bp, Probe Sequence
gatcgagtctatggaggtcttacaa

SEQ ID NO: 238447 - DNA, 25 bp, Probe Sequence
gatgagattaatggcaggtctggta

SEQ ID NO: 238448 - DNA, 25 bp, Probe Sequence
gatgctgttacaaaggctcatgtgg

SEQ ID NO: 238449 - DNA, 25 bp, Probe Sequence
gatgcttgtcacagtggcgcatttc

SEQ ID NO: 238450 - DNA, 25 bp, Probe Sequence
gatgcttacgcattctggtgtttca

SEQ ID NO: 238451 - DNA, 25 bp, Probe Sequence
gatgctgaaccagcgtgctttccta

SEQ ID NO: 238452 - DNA, 25 bp, Probe Sequence
gatgcttaccaaaggatggccctca

SEQ ID NO: 238453 - DNA, 25 bp, Probe Sequence
gatgcttacaagaaacagttctctc

SEQ ID NO: 238454 - DNA, 25 bp, Probe Sequence
gatgatggcaccagaaaggcactgc

SEQ ID NO: 238455 - DNA, 25 bp, Probe Sequence
gatgaggcgccggaatatgacacag

SEQ ID NO: 238456 - DNA, 25 bp, Probe Sequence
gatgagacccagcatcaagatgaag

SEQ ID NO: 238457 - DNA, 25 bp, Probe Sequence
gatgatggtccataagaataatgaa

SEQ ID NO: 238458 - DNA, 25 bp, Probe Sequence
gatgatggtaattacatgagacaga

SEQ ID NO: 238459 - DNA, 25 bp, Probe Sequence
gatgagctggaatatgatgacgaga

SEQ ID NO: 238460 - DNA, 25 bp, Probe Sequence
gatgagctgcactatacagccaagg

SEQ ID NO: 238461 - DNA, 25 bp, Probe Sequence
gatgagtatctaggatgccatgatg

SEQ ID NO: 238462 - DNA, 25 bp, Probe Sequence
gatgcgatcattaagatgcgaagcc

SEQ ID NO: 238463 - DNA, 25 bp, Probe Sequence
gatgcagctatgaaaggcttggcac

SEQ ID NO: 238464 - DNA, 25 bp, Probe Sequence
gatgaggatagagtggcctgagagc

SEQ ID NO: 238465 - DNA, 25 bp, Probe Sequence
gatgagggacgctatgcctcatgcc

SEQ ID NO: 238466 - DNA, 25 bp, Probe Sequence
gatgacagtacatatgatctgcagg

SEQ ID NO: 238467 - DNA, 25 bp, Probe Sequence
gatgccagcaatcaatgtgctcagc

SEQ ID NO: 238468 - DNA, 25 bp, Probe Sequence
gatatcgcagatgacggctgcccga

SEQ ID NO: 238469 - DNA, 25 bp, Probe Sequence
gatgatcagagatgaggggtcctca

SEQ ID NO: 238470 - DNA, 25 bp, Probe Sequence
gatgaggaaaaggagcagtcgcaca

SEQ ID NO: 238471 - DNA, 25 bp, Probe Sequence
gatgaggaaaaggagcagtcgcaca

SEQ ID NO: 238472 - DNA, 25 bp, Probe Sequence
gatgagtagaaaccagcaccagcac

SEQ ID NO: 238473 - DNA, 25 bp, Probe Sequence
gatgagtagaaaccagcaccagcac

SEQ ID NO: 238474 - DNA, 25 bp, Probe Sequence
gatgcagatgagagagcacgagcta

SEQ ID NO: 238475 - DNA, 25 bp, Probe Sequence
gatgaatgcagaacctcaagctacc

SEQ ID NO: 238476 - DNA, 25 bp, Probe Sequence
gatgaatgactgccttcaagtctca

SEQ ID NO: 238477 - DNA, 25 bp, Probe Sequence
gatgacagaatgacaccttgtctca

SEQ ID NO: 238478 - DNA, 25 bp, Probe Sequence
gatgacaaagatgccttagatgagc

SEQ ID NO: 238479 - DNA, 25 bp, Probe Sequence
gatgaagacagcatccttgaatatg

SEQ ID NO: 238480 - DNA, 25 bp, Probe Sequence
gatgaaatgccactccattaacaga

SEQ ID NO: 238481 - DNA, 25 bp, Probe Sequence
gatgaagtcaagatgatgtcagcaa

SEQ ID NO: 238482 - DNA, 25 bp, Probe Sequence
gatgagagatcatgcttggtcgact

SEQ ID NO: 238483 - DNA, 25 bp, Probe Sequence
gatgatgagctgtacactgcttaga

SEQ ID NO: 238484 - DNA, 25 bp, Probe Sequence
gatgcatggctggcacattgttggc

SEQ ID NO: 238485 - DNA, 25 bp, Probe Sequence
gatgagagagcccatagtcatgtcc

SEQ ID NO: 238486 - DNA, 25 bp, Probe Sequence
gatgatggcagcggaaatgactcct

SEQ ID NO: 238487 - DNA, 25 bp, Probe Sequence
gatgatgacatgggatttggccttt

SEQ ID NO: 238488 - DNA, 25 bp, Probe Sequence
gatgatgacatggctgttcttctta

SEQ ID NO: 238489 - DNA, 25 bp, Probe Sequence
gatgagtatgccattttcctgacca

SEQ ID NO: 238490 - DNA, 25 bp, Probe Sequence
gatgagcttccagtttttctagata

SEQ ID NO: 238491 - DNA, 25 bp, Probe Sequence
gatgaggacagagtggtttccaatg

SEQ ID NO: 238492 - DNA, 25 bp, Probe Sequence
gataagtagtgctgtttgccagctg

SEQ ID NO: 238493 - DNA, 25 bp, Probe Sequence
gatgccaaagcttcgctttgccagt

SEQ ID NO: 238494 - DNA, 25 bp, Probe Sequence
gatgcaataaaaggttatatcagct

SEQ ID NO: 238495 - DNA, 25 bp, Probe Sequence
gatgaaaagcgaggttgctacacta

SEQ ID NO: 238496 - DNA, 25 bp, Probe Sequence
gatgacggcgccttgaggtaagcta

SEQ ID NO: 238497 - DNA, 25 bp, Probe Sequence
gatgactgatgtggtagggtaatct

SEQ ID NO: 238498 - DNA, 25 bp, Probe Sequence
gatgacattttgagggtagttttaa

SEQ ID NO: 238499 - DNA, 25 bp, Probe Sequence
gatgaaatgttgagccgtggtttta

SEQ ID NO: 238500 - DNA, 25 bp, Probe Sequence
gatgaatttcagacctggggttctc

SEQ ID NO: 238501 - DNA, 25 bp, Probe Sequence
gatgaatattaacatggagggcatt

SEQ ID NO: 238502 - DNA, 25 bp, Probe Sequence
gatgacatattccaggatggatcca

SEQ ID NO: 238503 - DNA, 25 bp, Probe Sequence
gatgaacatatgagtgcatgtgtca

SEQ ID NO: 238504 - DNA, 25 bp, Probe Sequence
gatgagatctgatttgtgagggcct

SEQ ID NO: 238505 - DNA, 25 bp, Probe Sequence
gatgagatcaaatatgagggcacat

SEQ ID NO: 238506 - DNA, 25 bp, Probe Sequence
gatgagatcatttcaagagagtatc

SEQ ID NO: 238507 - DNA, 25 bp, Probe Sequence
gatgagtgccttgggagctgtcatt

SEQ ID NO: 238508 - DNA, 25 bp, Probe Sequence
gatgctgggttggtgcacagtgatt

SEQ ID NO: 238509 - DNA, 25 bp, Probe Sequence
gatgctcattgcctgggcaaggcct

SEQ ID NO: 238510 - DNA, 25 bp, Probe Sequence
gatgctcagatccgagacagctggc

SEQ ID NO: 238511 - DNA, 25 bp, Probe Sequence
gatgcacttgcaaatgtcagcattg

SEQ ID NO: 238512 - DNA, 25 bp, Probe Sequence
gatgccactgagatggcacctgtca

SEQ ID NO: 238513 - DNA, 25 bp, Probe Sequence
gatgcacagctgccttgtgtgcgac

SEQ ID NO: 238514 - DNA, 25 bp, Probe Sequence
gatgaagatctcatgcggcagactg

SEQ ID NO: 238515 - DNA, 25 bp, Probe Sequence
gatgaagattctcctgtgctagatg

SEQ ID NO: 238516 - DNA, 25 bp, Probe Sequence
gatgagagccctcctgattttgaaa

SEQ ID NO: 238517 - DNA, 25 bp, Probe Sequence
gatgagacagtctgtgacttcatga

SEQ ID NO: 238518 - DNA, 25 bp, Probe Sequence
gatgaagagtgacttgtttctggat

SEQ ID NO: 238519 - DNA, 25 bp, Probe Sequence
gatgctcatgcaatacttttaagga

SEQ ID NO: 238520 - DNA, 25 bp, Probe Sequence
gatgacatcagttgtttaaacgggg

SEQ ID NO: 238521 - DNA, 25 bp, Probe Sequence
gatgccacagtgtcctatgaagacc

SEQ ID NO: 238522 - DNA, 25 bp, Probe Sequence
gatgccaccgcatttatagatcaga

SEQ ID NO: 238523 - DNA, 25 bp, Probe Sequence
gatgctgccaaagtgccaaatctgg

SEQ ID NO: 238524 - DNA, 25 bp, Probe Sequence
gatctctaagtgaccaccaggggct

SEQ ID NO: 238525 - DNA, 25 bp, Probe Sequence
gatcctcagatgaacccgaatggcc

SEQ ID NO: 238526 - DNA, 25 bp, Probe Sequence
gatcctcaaagacctcgaggaagag

SEQ ID NO: 238527 - DNA, 25 bp, Probe Sequence
gatcctttggcatccggagaaatga

SEQ ID NO: 238528 - DNA, 25 bp, Probe Sequence
gatcctgtagtatttccagtagaca

SEQ ID NO: 238529 - DNA, 25 bp, Probe Sequence
gatccgtgttgatggcgatggagga

SEQ ID NO: 238530 - DNA, 25 bp, Probe Sequence
gatgccagtgggcagtgcatgtgga

SEQ ID NO: 238531 - DNA, 25 bp, Probe Sequence
gatgcagcgtaggagatctctgtgg

SEQ ID NO: 238532 - DNA, 25 bp, Probe Sequence
gatgactgtcaggatgttgcttcag

SEQ ID NO: 238533 - DNA, 25 bp, Probe Sequence
gatgactgactgtatttgttcgact

SEQ ID NO: 238534 - DNA, 25 bp, Probe Sequence
gatgacttcatgtatatttacaacc

SEQ ID NO: 238535 - DNA, 25 bp, Probe Sequence
gatgacattcagcaacttctcaaga

SEQ ID NO: 238536 - DNA, 25 bp, Probe Sequence
gatgcactgaagacagaattcaaag

SEQ ID NO: 238537 - DNA, 25 bp, Probe Sequence
gatgcactattggatgcgtatcaaa

SEQ ID NO: 238538 - DNA, 25 bp, Probe Sequence
gatgactatgctcagctgtgtaaca

SEQ ID NO: 238539 - DNA, 25 bp, Probe Sequence
gatgcattaatcactggcatacatt

SEQ ID NO: 238540 - DNA, 25 bp, Probe Sequence
gatgctaaattccgtctgattctaa

SEQ ID NO: 238541 - DNA, 25 bp, Probe Sequence
gatgctaaattccgtctgattctaa

SEQ ID NO: 238542 - DNA, 25 bp, Probe Sequence
gatgcataacatactgctattggtc

SEQ ID NO: 238543 - DNA, 25 bp, Probe Sequence
gatgaagcagcatgtgttggtggca

SEQ ID NO: 238544 - DNA, 25 bp, Probe Sequence
gatgagctgcacatgtcttgggaac

SEQ ID NO: 238545 - DNA, 25 bp, Probe Sequence
gatgagctgcacatgtcttgggaac

SEQ ID NO: 238546 - DNA, 25 bp, Probe Sequence
gatgagctgcacatgtcttgggaac

SEQ ID NO: 238547 - DNA, 25 bp, Probe Sequence
gatgagccgccactggcgggaacgt

SEQ ID NO: 238548 - DNA, 25 bp, Probe Sequence
gatgaccctcaaaggggcacagcag

SEQ ID NO: 238549 - DNA, 25 bp, Probe Sequence
gatgacacttggggaggagcaatag

SEQ ID NO: 238550 - DNA, 25 bp, Probe Sequence
gatgaagcttgccagcaaggccaaa

SEQ ID NO: 238551 - DNA, 25 bp, Probe Sequence
gatgacacagtctacatgggcaaag

SEQ ID NO: 238552 - DNA, 25 bp, Probe Sequence
gatgacacatgaaagcagctccaag

SEQ ID NO: 238553 - DNA, 25 bp, Probe Sequence
gatgacgagagttactcctactacc

SEQ ID NO: 238554 - DNA, 25 bp, Probe Sequence
gatgacggagataatccctaaaagc

SEQ ID NO: 238555 - DNA, 25 bp, Probe Sequence
gatgagtgggaaaccatctcaataa

SEQ ID NO: 238556 - DNA, 25 bp, Probe Sequence
gatgagtgggaaaccatctcaataa

SEQ ID NO: 238557 - DNA, 25 bp, Probe Sequence
gatgagtgggaaaccatctcaataa

SEQ ID NO: 238558 - DNA, 25 bp, Probe Sequence
gatgacctggaaaccatgccagatg

SEQ ID NO: 238559 - DNA, 25 bp, Probe Sequence
gatgacacttacgacaatgacattg

SEQ ID NO: 238560 - DNA, 25 bp, Probe Sequence
gatgcaacttactagagtgatgatg

SEQ ID NO: 238561 - DNA, 25 bp, Probe Sequence
gatgcaacttcttgtaatgggagat

SEQ ID NO: 238562 - DNA, 25 bp, Probe Sequence
gatcaacctttgtgtgcgagggtct

SEQ ID NO: 238563 - DNA, 25 bp, Probe Sequence
gatcaacctttgtgtgcgagggtct

SEQ ID NO: 238564 - DNA, 25 bp, Probe Sequence
gatatacgttaattatccgggcatg

SEQ ID NO: 238565 - DNA, 25 bp, Probe Sequence
gatgaacgtcttacaactcagttgt

SEQ ID NO: 238566 - DNA, 25 bp, Probe Sequence
gatgagaggtttatcaacatttttt

SEQ ID NO: 238567 - DNA, 25 bp, Probe Sequence
gatgagcgagatactttcaagcatt

SEQ ID NO: 238568 - DNA, 25 bp, Probe Sequence
gatgacgatgatgatgaagaggatg

SEQ ID NO: 238569 - DNA, 25 bp, Probe Sequence
gatgacctgctccagaaacagcacc

SEQ ID NO: 238570 - DNA, 25 bp, Probe Sequence
gatgacctgctccagaaacagcacc

SEQ ID NO: 238571 - DNA, 25 bp, Probe Sequence
gatgacctgctccagaaacagcacc

SEQ ID NO: 238572 - DNA, 25 bp, Probe Sequence
gatgacctgctccagaaacagcacc

SEQ ID NO: 238573 - DNA, 25 bp, Probe Sequence
gatgaagctgccagaaacgaacctc

SEQ ID NO: 238574 - DNA, 25 bp, Probe Sequence
gatgacagtgtcatgagataagaaa

SEQ ID NO: 238575 - DNA, 25 bp, Probe Sequence
gatgacatttctaagctacagcgta

SEQ ID NO: 238576 - DNA, 25 bp, Probe Sequence
gatgaatattctatctttcctcaga

SEQ ID NO: 238577 - DNA, 25 bp, Probe Sequence
gatgacaagcttatgcttctcctgg

SEQ ID NO: 238578 - DNA, 25 bp, Probe Sequence
gatgacaagcttatgcttctcctgg

SEQ ID NO: 238579 - DNA, 25 bp, Probe Sequence
gatgacatggctgttcttcttaggg

SEQ ID NO: 238580 - DNA, 25 bp, Probe Sequence
gatgcatgggtcatttgtcttgggt

SEQ ID NO: 238581 - DNA, 25 bp, Probe Sequence
gatgaccgtttgttacttgtggtgt

SEQ ID NO: 238582 - DNA, 25 bp, Probe Sequence
gatgacgggttgggccaggggatta

SEQ ID NO: 238583 - DNA, 25 bp, Probe Sequence
gatgagaggagtcgagtcccaaggc

SEQ ID NO: 238584 - DNA, 25 bp, Probe Sequence
gatgaaggagagcgcccgcatagcc

SEQ ID NO: 238585 - DNA, 25 bp, Probe Sequence
gatgacaagcaagaccacctcagct

SEQ ID NO: 238586 - DNA, 25 bp, Probe Sequence
gatgacaagatataccctgggctgc

SEQ ID NO: 238587 - DNA, 25 bp, Probe Sequence
gatgagccaatttatccatctgggt

SEQ ID NO: 238588 - DNA, 25 bp, Probe Sequence
gatgaccaaaagtcctgagggtgta

SEQ ID NO: 238589 - DNA, 25 bp, Probe Sequence
gatgaccataggacaccgggagcag

SEQ ID NO: 238590 - DNA, 25 bp, Probe Sequence
gatgaccattagaaattagggcagg

SEQ ID NO: 238591 - DNA, 25 bp, Probe Sequence
gatcccttagcccttggggcagaga

SEQ ID NO: 238592 - DNA, 25 bp, Probe Sequence
gatcaccttagggtcaggggctgga

SEQ ID NO: 238593 - DNA, 25 bp, Probe Sequence
gatgcccttagatgtccggggctgc

SEQ ID NO: 238594 - DNA, 25 bp, Probe Sequence
gatgcccttggaggtactaagtaga

SEQ ID NO: 238595 - DNA, 25 bp, Probe Sequence
gatgcccaatggaggaaacaggagg

SEQ ID NO: 238596 - DNA, 25 bp, Probe Sequence
gatgcccaatgtgagaacacaccag

SEQ ID NO: 238597 - DNA, 25 bp, Probe Sequence
tgactccaatttaaaccaggaaagg

SEQ ID NO: 238598 - DNA, 25 bp, Probe Sequence
gatcctgaagctgttaaagtaaaga

SEQ ID NO: 238599 - DNA, 25 bp, Probe Sequence
gatgcgtagggggtcataaggatag

SEQ ID NO: 238600 - DNA, 25 bp, Probe Sequence
gatcgtagggtcacattcatccaac

SEQ ID NO: 238601 - DNA, 25 bp, Probe Sequence
gatcccagggtgagagtaacaggcc

SEQ ID NO: 238602 - DNA, 25 bp, Probe Sequence
gatgctccgggtcaatgagtaccgc

SEQ ID NO: 238603 - DNA, 25 bp, Probe Sequence
gatgacaaggggcctagggcacccc

SEQ ID NO: 238604 - DNA, 25 bp, Probe Sequence
gatgaaggggagccaagggaccacc

SEQ ID NO: 238605 - DNA, 25 bp, Probe Sequence
gatgacaggcgtgagcaaccgcacc

SEQ ID NO: 238606 - DNA, 25 bp, Probe Sequence
gatgaagactctgacaacagtgcaa

SEQ ID NO: 238607 - DNA, 25 bp, Probe Sequence
gatgcaatgtgcatgcctaaatgga

SEQ ID NO: 238608 - DNA, 25 bp, Probe Sequence
gatgcaatcctgaccaaaattacaa

SEQ ID NO: 238609 - DNA, 25 bp, Probe Sequence
gatgcaaaagagtacaatcctgaaa

SEQ ID NO: 238610 - DNA, 25 bp, Probe Sequence
gatgctaacgtgtcagaatccttta

SEQ ID NO: 238611 - DNA, 25 bp, Probe Sequence
gatgctgatccacttgggaacatca

SEQ ID NO: 238612 - DNA, 25 bp, Probe Sequence
gatgctgtgtctagtgattaaacaa

SEQ ID NO: 238613 - DNA, 25 bp, Probe Sequence
gatgcttgtttgtaaaaactcacct

SEQ ID NO: 238614 - DNA, 25 bp, Probe Sequence
gatgcctgaacttgaattaatccac

SEQ ID NO: 238615 - DNA, 25 bp, Probe Sequence
gatcgtgaactctatttattcccac

SEQ ID NO: 238616 - DNA, 25 bp, Probe Sequence
gatctcgcaaagttattcttccacc

SEQ ID NO: 238617 - DNA, 25 bp, Probe Sequence
gatccacaaagctcttttataaacc

SEQ ID NO: 238618 - DNA, 25 bp, Probe Sequence
gatccagaaactgctttctgtactc

SEQ ID NO: 238619 - DNA, 25 bp, Probe Sequence
gatccaaaatatgtgaccttaatga

SEQ ID NO: 238620 - DNA, 25 bp, Probe Sequence
gatccaaaggacctgaccttcttga

SEQ ID NO: 238621 - DNA, 25 bp, Probe Sequence
gatccagaaggagctcaccattggc

SEQ ID NO: 238622 - DNA, 25 bp, Probe Sequence
gatgctaaagccatctttactggcc

SEQ ID NO: 238623 - DNA, 25 bp, Probe Sequence
gatgacaaatgccttttgtagccac

SEQ ID NO: 238624 - DNA, 25 bp, Probe Sequence
gatgaccatcagcattttgtagtaa

SEQ ID NO: 238625 - DNA, 25 bp, Probe Sequence
gatgacctcagggctatgtggattg

SEQ ID NO: 238626 - DNA, 25 bp, Probe Sequence
gatgacctaagtgtgactgcagcag

SEQ ID NO: 238627 - DNA, 25 bp, Probe Sequence
gatgaccgagtgggagacagcagca

SEQ ID NO: 238628 - DNA, 25 bp, Probe Sequence
gatgacctagatggaacacatgctc

SEQ ID NO: 238629 - DNA, 25 bp, Probe Sequence
gatgaccctgatgatctgcaatgta

SEQ ID NO: 238630 - DNA, 25 bp, Probe Sequence
gatgactccatggctactgatatta

SEQ ID NO: 238631 - DNA, 25 bp, Probe Sequence
gatgaaccagccttcatgtattata

SEQ ID NO: 238632 - DNA, 25 bp, Probe Sequence
gatgacctccactgcattgatataa

SEQ ID NO: 238633 - DNA, 25 bp, Probe Sequence
gatgactctgagtttgagctattaa

SEQ ID NO: 238634 - DNA, 25 bp, Probe Sequence
gatgacctcaatatgagtttcgatt

SEQ ID NO: 238635 - DNA, 25 bp, Probe Sequence
gatgactcatcaattttgtctatta

SEQ ID NO: 238636 - DNA, 25 bp, Probe Sequence
gatgctatgactgtttgtcttgtat

SEQ ID NO: 238637 - DNA, 25 bp, Probe Sequence
gatcttgacttgctcacctatgaac

SEQ ID NO: 238638 - DNA, 25 bp, Probe Sequence
gatccgcactaactcatctttgcaa

SEQ ID NO: 238639 - DNA, 25 bp, Probe Sequence
gatccgcactaactcatctttgcaa

SEQ ID NO: 238640 - DNA, 25 bp, Probe Sequence
gatccaattcgaattctggtgaaaa

SEQ ID NO: 238641 - DNA, 25 bp, Probe Sequence
gatccttaagattttggggtattat

SEQ ID NO: 238642 - DNA, 25 bp, Probe Sequence
gtccattaaaatatccggttgcgta

SEQ ID NO: 238643 - DNA, 25 bp, Probe Sequence
gatgccataagacaaccctggttcc

SEQ ID NO: 238644 - DNA, 25 bp, Probe Sequence
gatgcctaagaagaaccggattgcc

SEQ ID NO: 238645 - DNA, 25 bp, Probe Sequence
gatgcctaagaagaaccggattgcc

SEQ ID NO: 238646 - DNA, 25 bp, Probe Sequence
gatcctagggagggaaatgtttgcc

SEQ ID NO: 238647 - DNA, 25 bp, Probe Sequence
gatctccggttctgaaatgtactgc

SEQ ID NO: 238648 - DNA, 25 bp, Probe Sequence
gatctgccagttgttgaagttaatg

SEQ ID NO: 238649 - DNA, 25 bp, Probe Sequence
gatctctggactctttggccatgaa

SEQ ID NO: 238650 - DNA, 25 bp, Probe Sequence
gatcttggtcagtgtctactcatac

SEQ ID NO: 238651 - DNA, 25 bp, Probe Sequence
gatctttggtggcattgactcttct

SEQ ID NO: 238652 - DNA, 25 bp, Probe Sequence
gatttttaaggaccacgtgtctctg

SEQ ID NO: 238653 - DNA, 25 bp, Probe Sequence
gatcaggtaaagggccccttctgct

SEQ ID NO: 238654 - DNA, 25 bp, Probe Sequence
gatgaagacaaaggtcctccctgtg

SEQ ID NO: 238655 - DNA, 25 bp, Probe Sequence
gatgaacgcaaacttcgtactttct

SEQ ID NO: 238656 - DNA, 25 bp, Probe Sequence
gatgaactgaggtccttgttttgtt

SEQ ID NO: 238657 - DNA, 25 bp, Probe Sequence
gatgaatctgatgaactggtcactg

SEQ ID NO: 238658 - DNA, 25 bp, Probe Sequence
gatgaatctgattccgagggctctg

SEQ ID NO: 238659 - DNA, 25 bp, Probe Sequence
gatgaagctggagccagggctgccg

SEQ ID NO: 238660 - DNA, 25 bp, Probe Sequence
gatgaactggagtctaggcctctct

SEQ ID NO: 238661 - DNA, 25 bp, Probe Sequence
gatgacctggaagatgagctctatg

SEQ ID NO: 238662 - DNA, 25 bp, Probe Sequence
gatgaatccaaagcagatctctctg

SEQ ID NO: 238663 - DNA, 25 bp, Probe Sequence
gatgcaatcacacgggaacttctat

SEQ ID NO: 238664 - DNA, 25 bp, Probe Sequence
gatgaatacgaggtggactggagca

SEQ ID NO: 238665 - DNA, 25 bp, Probe Sequence
gatgcagtagaagctggtggaggca

SEQ ID NO: 238666 - DNA, 25 bp, Probe Sequence
gatgcagaaacaggaggtgtgagcc

SEQ ID NO: 238667 - DNA, 25 bp, Probe Sequence
gatgccaatgattagagggtgctcc

SEQ ID NO: 238668 - DNA, 25 bp, Probe Sequence
gatgacatctgattagcagaagtca

SEQ ID NO: 238669 - DNA, 25 bp, Probe Sequence
gatgcatccgagacagaacatgctc

SEQ ID NO: 238670 - DNA, 25 bp, Probe Sequence
gatgacaagaactaacgctcctgag

SEQ ID NO: 238671 - DNA, 25 bp, Probe Sequence
gatgaagagagcattttccactgag

SEQ ID NO: 238672 - DNA, 25 bp, Probe Sequence
gatgaagagagcattttccactgag

SEQ ID NO: 238673 - DNA, 25 bp, Probe Sequence
gatgaagaggctggtactcaatctc

SEQ ID NO: 238674 - DNA, 25 bp, Probe Sequence
gatgaaggcatggcgatgcccgtcc

SEQ ID NO: 238675 - DNA, 25 bp, Probe Sequence
gataaggtgggaggttggccgggca

SEQ ID NO: 238676 - DNA, 25 bp, Probe Sequence
gattaggtgacgagttgacattgag

SEQ ID NO: 238677 - DNA, 25 bp, Probe Sequence
gatgaaaggacgagtggcttgtgag

SEQ ID NO: 238678 - DNA, 25 bp, Probe Sequence
gatgaaaacctgcgtgctgttgggc

SEQ ID NO: 238679 - DNA, 25 bp, Probe Sequence
gatgacagaacagtgccgttgggtg

SEQ ID NO: 238680 - DNA, 25 bp, Probe Sequence
gatgcacaaactgtcacttggttaa

SEQ ID NO: 238681 - DNA, 25 bp, Probe Sequence
gatgcaaagactggtatcactctgt

SEQ ID NO: 238682 - DNA, 25 bp, Probe Sequence
gatgccaagactcgctacaagctga

SEQ ID NO: 238683 - DNA, 25 bp, Probe Sequence
gatgcagctgaagtactacaactcc

SEQ ID NO: 238684 - DNA, 25 bp, Probe Sequence
gatgacaacatcaaaacatactctg

SEQ ID NO: 238685 - DNA, 25 bp, Probe Sequence
gatgcaacctcaaacaccaatgctg

SEQ ID NO: 238686 - DNA, 25 bp, Probe Sequence
gatgctgagatctaaacccaattga

SEQ ID NO: 238687 - DNA, 25 bp, Probe Sequence
gatcttgtgcaaaccctgagttgtt

SEQ ID NO: 238688 - DNA, 25 bp, Probe Sequence
gatcgcttaagcacaggagttggaa

SEQ ID NO: 238689 - DNA, 25 bp, Probe Sequence
gatccttagatgaatcgttggtaga

SEQ ID NO: 238690 - DNA, 25 bp, Probe Sequence
gatccactgttgcccagttggtgaa

SEQ ID NO: 238691 - DNA, 25 bp, Probe Sequence
gatgcactgctgagtcaagtggctg

SEQ ID NO: 238692 - DNA, 25 bp, Probe Sequence
gatgcattttggccaaatggcattt

SEQ ID NO: 238693 - DNA, 25 bp, Probe Sequence
gatgcatatttcctcaacatactgt

SEQ ID NO: 238694 - DNA, 25 bp, Probe Sequence
gatgcacttatcattgaatacagag

SEQ ID NO: 238695 - DNA, 25 bp, Probe Sequence
gatgcacttagatatggaaaatgga

SEQ ID NO: 238696 - DNA, 25 bp, Probe Sequence
gatcagctcaagtgaccaaattggt

SEQ ID NO: 238697 - DNA, 25 bp, Probe Sequence
gatcctcaagaggctgccataatct

SEQ ID NO: 238698 - DNA, 25 bp, Probe Sequence
gatgcaaatagactgatacataatt

SEQ ID NO: 238699 - DNA, 25 bp, Probe Sequence
gatgcacaacacttatcaaagatat

SEQ ID NO: 238700 - DNA, 25 bp, Probe Sequence
gatgaaccaatggatgcagaatcaa

SEQ ID NO: 238701 - DNA, 25 bp, Probe Sequence
gatgcacacacacgcagacagacac

SEQ ID NO: 238702 - DNA, 25 bp, Probe Sequence
gatgcagatgccatgaagtacacca

SEQ ID NO: 238703 - DNA, 25 bp, Probe Sequence
gatgcactgctccttcagtaataca

SEQ ID NO: 238704 - DNA, 25 bp, Probe Sequence
gatgcacagtatctgctgttcttca

SEQ ID NO: 238705 - DNA, 25 bp, Probe Sequence
gatcagcgtcatcgtggttatgacc

SEQ ID NO: 238706 - DNA, 25 bp, Probe Sequence
gatccaggccggcattgtgagctgg

SEQ ID NO: 238707 - DNA, 25 bp, Probe Sequence
gatgctcagtccctggtatgatgag

SEQ ID NO: 238708 - DNA, 25 bp, Probe Sequence
gatgctgcagcacattgactataga

SEQ ID NO: 238709 - DNA, 25 bp, Probe Sequence
gatgctgagcgaaatgcttgctata

SEQ ID NO: 238710 - DNA, 25 bp, Probe Sequence
gatgctgaatgcagtgatgttatca

SEQ ID NO: 238711 - DNA, 25 bp, Probe Sequence
gatgctgaaagaggtgtgcttcagt

SEQ ID NO: 238712 - DNA, 25 bp, Probe Sequence
gatgctgaagaagtgtcatctttgt

SEQ ID NO: 238713 - DNA, 25 bp, Probe Sequence
gatgcactgagatgtgtactttcta

SEQ ID NO: 238714 - DNA, 25 bp, Probe Sequence
gatgcagctatggagtgaaatattt

SEQ ID NO: 238715 - DNA, 25 bp, Probe Sequence
gatgcagcttaagatattactattc

SEQ ID NO: 238716 - DNA, 25 bp, Probe Sequence
gatgacttacctatatgactaatgc

SEQ ID NO: 238717 - DNA, 25 bp, Probe Sequence
gatgccttaccttcttaggaaggct

SEQ ID NO: 238718 - DNA, 25 bp, Probe Sequence
gatgcctacccatatgtgggacagg

SEQ ID NO: 238719 - DNA, 25 bp, Probe Sequence
gatgcctacggatcatctattccta

SEQ ID NO: 238720 - DNA, 25 bp, Probe Sequence
gatgcctaagctgtatttctccaaa

SEQ ID NO: 238721 - DNA, 25 bp, Probe Sequence
gatgccttttagtttttccaatgat

SEQ ID NO: 238722 - DNA, 25 bp, Probe Sequence
gatgccttttagtttttccaatgat

SEQ ID NO: 238723 - DNA, 25 bp, Probe Sequence
gatcctttcccatttattctgggaa

SEQ ID NO: 238724 - DNA, 25 bp, Probe Sequence
gatccaattccagaaattatctgtg

SEQ ID NO: 238725 - DNA, 25 bp, Probe Sequence
gatccatatttcggaggtcttctaa

SEQ ID NO: 238726 - DNA, 25 bp, Probe Sequence
gatctctttttgaggtttttagcag

SEQ ID NO: 238727 - DNA, 25 bp, Probe Sequence
gatccttttgtgaggaccttcctga

SEQ ID NO: 238728 - DNA, 25 bp, Probe Sequence
gatcctttctgtaggctaattcctc

SEQ ID NO: 238729 - DNA, 25 bp, Probe Sequence
gatctatttattagcttggtgaccc

SEQ ID NO: 238730 - DNA, 25 bp, Probe Sequence
gatcgattgggctgctttaacctca

SEQ ID NO: 238731 - DNA, 25 bp, Probe Sequence
gatgcgatttccgttttaacagaca

SEQ ID NO: 238732 - DNA, 25 bp, Probe Sequence
gatgcagatgtgtcctggtttcggc

SEQ ID NO: 238733 - DNA, 25 bp, Probe Sequence
gatgcagatgtgtcctggtttcggc

SEQ ID NO: 238734 - DNA, 25 bp, Probe Sequence
gatgcagatgtgtcctggtttcggc

SEQ ID NO: 238735 - DNA, 25 bp, Probe Sequence
gatgcagatgggctgccacttttcg

SEQ ID NO: 238736 - DNA, 25 bp, Probe Sequence
gatgcagatggacggcaatgtatca

SEQ ID NO: 238737 - DNA, 25 bp, Probe Sequence
gatgcagcaggagacagttccagtt

SEQ ID NO: 238738 - DNA, 25 bp, Probe Sequence
gatgcagtaattatgttccagattg

SEQ ID NO: 238739 - DNA, 25 bp, Probe Sequence
gatgcttacaggttttgtgagattg

SEQ ID NO: 238740 - DNA, 25 bp, Probe Sequence
gatcttaatgggttcgatggtaggg

SEQ ID NO: 238741 - DNA, 25 bp, Probe Sequence
gatctttaggggacagaggatttgt

SEQ ID NO: 238742 - DNA, 25 bp, Probe Sequence
gatgctttagatcagactaggtttt

SEQ ID NO: 238743 - DNA, 25 bp, Probe Sequence
gatgccgctagtgaggctgaggggt

SEQ ID NO: 238744 - DNA, 25 bp, Probe Sequence
gatgcagccgttgcaggcgaagttg

SEQ ID NO: 238745 - DNA, 25 bp, Probe Sequence
gatgcagccgttgcaggcgaagttg

SEQ ID NO: 238746 - DNA, 25 bp, Probe Sequence
gatgccccttgatgggaacatcaga

SEQ ID NO: 238747 - DNA, 25 bp, Probe Sequence
gatgcccagtaaagcctgaaccatg

SEQ ID NO: 238748 - DNA, 25 bp, Probe Sequence
gatcccaggataagaccaaacttca

SEQ ID NO: 238749 - DNA, 25 bp, Probe Sequence
gatcccaagttgaatcacgtagctg

SEQ ID NO: 238750 - DNA, 25 bp, Probe Sequence
gatcccaagtatgtcagcagcaaag

SEQ ID NO: 238751 - DNA, 25 bp, Probe Sequence
gatccctttccttcactgaaatgga

SEQ ID NO: 238752 - DNA, 25 bp, Probe Sequence
gtctccaataccggagcttttggaa

SEQ ID NO: 238753 - DNA, 25 bp, Probe Sequence
gtctcccttcccagaatttgtaact

SEQ ID NO: 238754 - DNA, 25 bp, Probe Sequence
gatcccctttctacttaatttacat

SEQ ID NO: 238755 - DNA, 25 bp, Probe Sequence
gatccccaaagcctttaaggtacat

SEQ ID NO: 238756 - DNA, 25 bp, Probe Sequence
gattccctaagggttacgccatgcc

SEQ ID NO: 238757 - DNA, 25 bp, Probe Sequence
gatccaccattgggtttacgaacct

SEQ ID NO: 238758 - DNA, 25 bp, Probe Sequence
gatgcctcctggggtttataaagcc

SEQ ID NO: 238759 - DNA, 25 bp, Probe Sequence
gatgcctatctgaagcgctgtttgc

SEQ ID NO: 238760 - DNA, 25 bp, Probe Sequence
gatgcagtagccagtgctgacttct

SEQ ID NO: 238761 - DNA, 25 bp, Probe Sequence
gatgcgtagcatttgctgcatgggt

SEQ ID NO: 238762 - DNA, 25 bp, Probe Sequence
gatgccattgatgatgccatgggtg

SEQ ID NO: 238763 - DNA, 25 bp, Probe Sequence
gatgccaagatcctcaatgatgtgc

SEQ ID NO: 238764 - DNA, 25 bp, Probe Sequence
gatgccagcatgtgccaatgactgt

SEQ ID NO: 238765 - DNA, 25 bp, Probe Sequence
gatgccacaactggccagacttttg

SEQ ID NO: 238766 - DNA, 25 bp, Probe Sequence
gatgcagaacctttcagagttagct

SEQ ID NO: 238767 - DNA, 25 bp, Probe Sequence
gatgaagacgtacgggtgcgagctc

SEQ ID NO: 238768 - DNA, 25 bp, Probe Sequence
gatgaatgactttgaggctcacgag

SEQ ID NO: 238769 - DNA, 25 bp, Probe Sequence
gatccagagctataggtacagtgtg

SEQ ID NO: 238770 - DNA, 25 bp, Probe Sequence
gatccaagctatccagaaatcagat

SEQ ID NO: 238771 - DNA, 25 bp, Probe Sequence
gatcctcgtcaggtgcaggtcagca

SEQ ID NO: 238772 - DNA, 25 bp, Probe Sequence
gatttggtaggtgtgtcagaaggga

SEQ ID NO: 238773 - DNA, 25 bp, Probe Sequence
gatcttggtagactctttgcgaaag

SEQ ID NO: 238774 - DNA, 25 bp, Probe Sequence
gatgctatggctggagattttgtga

SEQ ID NO: 238775 - DNA, 25 bp, Probe Sequence
gatgcaaagctgaagttgtgtgtac

SEQ ID NO: 238776 - DNA, 25 bp, Probe Sequence
gatgcaaagtcattgcttgtgcact

SEQ ID NO: 238777 - DNA, 25 bp, Probe Sequence
gatgaagcaccattctttgatctcc

SEQ ID NO: 238778 - DNA, 25 bp, Probe Sequence
gatgcagactctcagtaatatccct

SEQ ID NO: 238779 - DNA, 25 bp, Probe Sequence
gatgcataagctgagcaataacccc

SEQ ID NO: 238780 - DNA, 25 bp, Probe Sequence
gatgctcactctgaaataaatcttc

SEQ ID NO: 238781 - DNA, 25 bp, Probe Sequence
gatgcagactcctgaaacagactac

SEQ ID NO: 238782 - DNA, 25 bp, Probe Sequence
gatgcatgacccaagctaatcagag

SEQ ID NO: 238783 - DNA, 25 bp, Probe Sequence
gatcggccctactagatgcagagac

SEQ ID NO: 238784 - DNA, 25 bp, Probe Sequence
gatcggccctactagatgcagagac

SEQ ID NO: 238785 - DNA, 25 bp, Probe Sequence
gatcggccctactagatgcagagac

SEQ ID NO: 238786 - DNA, 25 bp, Probe Sequence
gatcggccatcaagggaagaactat

SEQ ID NO: 238787 - DNA, 25 bp, Probe Sequence
gatgcggttgcttgcgtgaggaaat

SEQ ID NO: 238788 - DNA, 25 bp, Probe Sequence
gatgctgctttgcgggcatgcagac

SEQ ID NO: 238789 - DNA, 25 bp, Probe Sequence
gatgctgctttgcgggcatgcagac

SEQ ID NO: 238790 - DNA, 25 bp, Probe Sequence
gatgctgcccgcattggtgcagatg

SEQ ID NO: 238791 - DNA, 25 bp, Probe Sequence
gatgctggccaggagtgagtgctag

SEQ ID NO: 238792 - DNA, 25 bp, Probe Sequence
gatgctgctgaagagaggtgccggg

SEQ ID NO: 238793 - DNA, 25 bp, Probe Sequence
gatgctgctgaagcgcgaggagcgg

SEQ ID NO: 238794 - DNA, 25 bp, Probe Sequence
gatgctgccgagaaggcagagacag

SEQ ID NO: 238795 - DNA, 25 bp, Probe Sequence
gatgcaggacagccggcagaaagca

SEQ ID NO: 238796 - DNA, 25 bp, Probe Sequence
gatgcaggaccacaccatcagagag

SEQ ID NO: 238797 - DNA, 25 bp, Probe Sequence
gatgcagagagaagccccactggga

SEQ ID NO: 238798 - DNA, 25 bp, Probe Sequence
gatgctaagatactgcctgcactgg

SEQ ID NO: 238799 - DNA, 25 bp, Probe Sequence
gatgctcaagtgaggctgcaggcgc

SEQ ID NO: 238800 - DNA, 25 bp, Probe Sequence
gatccaagatgacactgcaggttaa

SEQ ID NO: 238801 - DNA, 25 bp, Probe Sequence
gatgcacatatgtaacatctcagaa

SEQ ID NO: 238802 - DNA, 25 bp, Probe Sequence
gatgcctatgggaaccaaaagaatc

SEQ ID NO: 238803 - DNA, 25 bp, Probe Sequence
gatgcctgggtgcaaagaacggctt

SEQ ID NO: 238804 - DNA, 25 bp, Probe Sequence
gatcctgaagggccaagcaacatgt

SEQ ID NO: 238805 - DNA, 25 bp, Probe Sequence
gatcctgaaggcccgagagcatgtc

SEQ ID NO: 238806 - DNA, 25 bp, Probe Sequence
gatgccatgaagtacaccattgtgg

SEQ ID NO: 238807 - DNA, 25 bp, Probe Sequence
gatgccatgaagggcgaccgtgcag

SEQ ID NO: 238808 - DNA, 25 bp, Probe Sequence
gatgccatggggagacacaatgaga

SEQ ID NO: 238809 - DNA, 25 bp, Probe Sequence
gatgcacttaggtggtgaatgtgac

SEQ ID NO: 238810 - DNA, 25 bp, Probe Sequence
gatcggttggtgccactgaatggct

SEQ ID NO: 238811 - DNA, 25 bp, Probe Sequence
gatcggttttgcagtacatcaatgg

SEQ ID NO: 238812 - DNA, 25 bp, Probe Sequence
gatgcgttttgaccagtacatcaat

SEQ ID NO: 238813 - DNA, 25 bp, Probe Sequence
gatcgcttttggccagtacatcaat

SEQ ID NO: 238814 - DNA, 25 bp, Probe Sequence
gatcgctttttgcagtacatcaatg

SEQ ID NO: 238815 - DNA, 25 bp, Probe Sequence
gatcctatttcttagtaacccactg

SEQ ID NO: 238816 - DNA, 25 bp, Probe Sequence
gatctttttcattgcaaaattgcca

SEQ ID NO: 238817 - DNA, 25 bp, Probe Sequence
gatgctttcttcattaagattttga

SEQ ID NO: 238818 - DNA, 25 bp, Probe Sequence
gatttctcaccttaataggtcctaa

SEQ ID NO: 238819 - DNA, 25 bp, Probe Sequence
gatcttcccttacattagtaccaca

SEQ ID NO: 238820 - DNA, 25 bp, Probe Sequence
gatgcccttctttaattggttctca

SEQ ID NO: 238821 - DNA, 25 bp, Probe Sequence
gatccctcaatttggtctgttttca

SEQ ID NO: 238822 - DNA, 25 bp, Probe Sequence
gatgctgcaccgataggttttttgc

SEQ ID NO: 238823 - DNA, 25 bp, Probe Sequence
gatgctcccgatgaagttgcgtggg

SEQ ID NO: 238824 - DNA, 25 bp, Probe Sequence
gatgctggggcagagaggcctggga

SEQ ID NO: 238825 - DNA, 25 bp, Probe Sequence
gatgctggagaatatgagtgccatg

SEQ ID NO: 238826 - DNA, 25 bp, Probe Sequence
gatgcggaagaaagagatgctcgga

SEQ ID NO: 238827 - DNA, 25 bp, Probe Sequence
gatcggagaattaatctgctagtga

SEQ ID NO: 238828 - DNA, 25 bp, Probe Sequence
gatccagcagactgaaatcacttgt

SEQ ID NO: 238829 - DNA, 25 bp, Probe Sequence
gatcgcactgcctcaataacttggt

SEQ ID NO: 238830 - DNA, 25 bp, Probe Sequence
gatctgactgccttaagggatacca

SEQ ID NO: 238831 - DNA, 25 bp, Probe Sequence
gatctggtgtcgaataggaggaccc

SEQ ID NO: 238832 - DNA, 25 bp, Probe Sequence
gatctgtttcgtgcattggaagacc

SEQ ID NO: 238833 - DNA, 25 bp, Probe Sequence
gatcgtcttcctcaggaatagactc

SEQ ID NO: 238834 - DNA, 25 bp, Probe Sequence
gatccctacctgttggctataacat

SEQ ID NO: 238835 - DNA, 25 bp, Probe Sequence
gatcccaatccaagtgaataaacca

SEQ ID NO: 238836 - DNA, 25 bp, Probe Sequence
gatcccagtcacagtaacgagagga

SEQ ID NO: 238837 - DNA, 25 bp, Probe Sequence
gatcccggcagaagctatgaaaggg

SEQ ID NO: 238838 - DNA, 25 bp, Probe Sequence
gatgccacggccgagggagaaggag

SEQ ID NO: 238839 - DNA, 25 bp, Probe Sequence
gatcccaggctctgggtggtgggaa

SEQ ID NO: 238840 - DNA, 25 bp, Probe Sequence
gatcctcaacgttggggacattgga

SEQ ID NO: 238841 - DNA, 25 bp, Probe Sequence
gatccatctacgtaggtggtcgagc

SEQ ID NO: 238842 - DNA, 25 bp, Probe Sequence
gatgcctcaagcaatacgtggtccc

SEQ ID NO: 238843 - DNA, 25 bp, Probe Sequence
gatgcctcacaccattaggtgatgc

SEQ ID NO: 238844 - DNA, 25 bp, Probe Sequence
gatcgtcatcaccttggtgatgctg

SEQ ID NO: 238845 - DNA, 25 bp, Probe Sequence
gatgcaacctcactatggtatgctg

SEQ ID NO: 238846 - DNA, 25 bp, Probe Sequence
gatgcccccatgttcgtcatgggtg

SEQ ID NO: 238847 - DNA, 25 bp, Probe Sequence
gatgcccccatgttcgtcatgggtg

SEQ ID NO: 238848 - DNA, 25 bp, Probe Sequence
gatccccacagtaactcatgaagca

SEQ ID NO: 238849 - DNA, 25 bp, Probe Sequence
gatcccagactggttcttgaacaga

SEQ ID NO: 238850 - DNA, 25 bp, Probe Sequence
gatgccctatctatctgctaaagca

SEQ ID NO: 238851 - DNA, 25 bp, Probe Sequence
gatccgcgatatacctgtcagcgag

SEQ ID NO: 238852 - DNA, 25 bp, Probe Sequence
gatgccctgagtacagtgttgcaat

SEQ ID NO: 238853 - DNA, 25 bp, Probe Sequence
gatctcactgaccatcagttacaca

SEQ ID NO: 238854 - DNA, 25 bp, Probe Sequence
gatgctattggccatcactaccaac

SEQ ID NO: 238855 - DNA, 25 bp, Probe Sequence
gatgctttgaggagcattcctctag

SEQ ID NO: 238856 - DNA, 25 bp, Probe Sequence
gatgctttgaggagcattcctctag

SEQ ID NO: 238857 - DNA, 25 bp, Probe Sequence
gatgctgttggacttcatgtcccca

SEQ ID NO: 238858 - DNA, 25 bp, Probe Sequence
gatgcttggaaggtgtgtctacgac

SEQ ID NO: 238859 - DNA, 25 bp, Probe Sequence
gatgctggtaatggccatggtaccc

SEQ ID NO: 238860 - DNA, 25 bp, Probe Sequence
gatgctgcgtcagttcacagggaac

SEQ ID NO: 238861 - DNA, 25 bp, Probe Sequence
gatgctgctgctcttcgcaagctga

SEQ ID NO: 238862 - DNA, 25 bp, Probe Sequence
gatgctgtgtaactaaactgaaata

SEQ ID NO: 238863 - DNA, 25 bp, Probe Sequence
gatgcatgcagttcgtcagaactta

SEQ ID NO: 238864 - DNA, 25 bp, Probe Sequence
gatgcatcagtaaagcagcatattc

SEQ ID NO: 238865 - DNA, 25 bp, Probe Sequence
gatgcgcttttgtcagctacatcct

SEQ ID NO: 238866 - DNA, 25 bp, Probe Sequence
gatcttttaaactctctattgacca

SEQ ID NO: 238867 - DNA, 25 bp, Probe Sequence
gatcttgtgtatcaaacctatcccc

SEQ ID NO: 238868 - DNA, 25 bp, Probe Sequence
gatgcttgcatttaaaacagccatg

SEQ ID NO: 238869 - DNA, 25 bp, Probe Sequence
gatgcagtgctcccaaagagacctt

SEQ ID NO: 238870 - DNA, 25 bp, Probe Sequence
gatcgagctacctaagaacagctaa

SEQ ID NO: 238871 - DNA, 25 bp, Probe Sequence
gatccagtaatgtacataaagcctg

SEQ ID NO: 238872 - DNA, 25 bp, Probe Sequence
gatccatgtaatcaccagaatgcat

SEQ ID NO: 238873 - DNA, 25 bp, Probe Sequence
gatgcgtgaatacaccaggctcatt

SEQ ID NO: 238874 - DNA, 25 bp, Probe Sequence
gatgctgtaagaagacaagctgttt

SEQ ID NO: 238875 - DNA, 25 bp, Probe Sequence
gatgctgtggagatgataatggtct

SEQ ID NO: 238876 - DNA, 25 bp, Probe Sequence
gatgctgggccaaattatgtgtcta

SEQ ID NO: 238877 - DNA, 25 bp, Probe Sequence
gatctggatcgttatctactgacta

SEQ ID NO: 238878 - DNA, 25 bp, Probe Sequence
gatctgctgatcattattaagttga

SEQ ID NO: 238879 - DNA, 25 bp, Probe Sequence
gatcagagcattgtgcaatacagtt

SEQ ID NO: 238880 - DNA, 25 bp, Probe Sequence
gatcggtgtaatcctgagagattca

SEQ ID NO: 238881 - DNA, 25 bp, Probe Sequence
gatgcagcggttttcatggagactg

SEQ ID NO: 238882 - DNA, 25 bp, Probe Sequence
gatgccggtgattttgacaccatta

SEQ ID NO: 238883 - DNA, 25 bp, Probe Sequence
gatgccctggctttaaggtttagct

SEQ ID NO: 238884 - DNA, 25 bp, Probe Sequence
gatgcccggtggtcaaaagttgcag

SEQ ID NO: 238885 - DNA, 25 bp, Probe Sequence
gatgcactttgaagtctaaagattt

SEQ ID NO: 238886 - DNA, 25 bp, Probe Sequence
gatactttcatcacaggtagattct

SEQ ID NO: 238887 - DNA, 25 bp, Probe Sequence
gatgccttcctctcagaggtgttct

SEQ ID NO: 238888 - DNA, 25 bp, Probe Sequence
gatccattcgccccaaggggacaac

SEQ ID NO: 238889 - DNA, 25 bp, Probe Sequence
gatccatcctccttaagggatgccc

SEQ ID NO: 238890 - DNA, 25 bp, Probe Sequence
gatctccttcctataggctgatgtc

SEQ ID NO: 238891 - DNA, 25 bp, Probe Sequence
gatttcggcctgtccaggtatgtcc

SEQ ID NO: 238892 - DNA, 25 bp, Probe Sequence
gatgcagtgggccaaggggtatgtt

SEQ ID NO: 238893 - DNA, 25 bp, Probe Sequence
gatctctgggaaagggttcagtggc

SEQ ID NO: 238894 - DNA, 25 bp, Probe Sequence
gatgccgggaagactgaggctagag

SEQ ID NO: 238895 - DNA, 25 bp, Probe Sequence
gatgcactttgaggggtgttggaga

SEQ ID NO: 238896 - DNA, 25 bp, Probe Sequence
gatcacattcacaggcgttaggggt

SEQ ID NO: 238897 - DNA, 25 bp, Probe Sequence
gatcctctgccacgggttaaatttt

SEQ ID NO: 238898 - DNA, 25 bp, Probe Sequence
gatgcctctgtgggtgtgtgtaagt

SEQ ID NO: 238899 - DNA, 25 bp, Probe Sequence
gatgcagttgttgtgtagagaatgt

SEQ ID NO: 238900 - DNA, 25 bp, Probe Sequence
gatgcaatttaggattcacgcaagt

SEQ ID NO: 238901 - DNA, 25 bp, Probe Sequence
gatgcacagtttgatgcttcccatt

SEQ ID NO: 238902 - DNA, 25 bp, Probe Sequence
gatccagattattttccttgcattg

SEQ ID NO: 238903 - DNA, 25 bp, Probe Sequence
gatctaggccaatatctttgattgc

SEQ ID NO: 238904 - DNA, 25 bp, Probe Sequence
gatctggaggtctgattttgtggca

SEQ ID NO: 238905 - DNA, 25 bp, Probe Sequence
gatgcatgtaagggagattctggtg

SEQ ID NO: 238906 - DNA, 25 bp, Probe Sequence
gatgcatgtacttgtgtgttttgtg

SEQ ID NO: 238907 - DNA, 25 bp, Probe Sequence
gatgcagttctgtatttattgtgct

SEQ ID NO: 238908 - DNA, 25 bp, Probe Sequence
gatgcctttgattttattcgcacca

SEQ ID NO: 238909 - DNA, 25 bp, Probe Sequence
gatgctttgttttttcctgcagtca

SEQ ID NO: 238910 - DNA, 25 bp, Probe Sequence
gatgctgtgggttttcatcctactc

SEQ ID NO: 238911 - DNA, 25 bp, Probe Sequence
gatgctttgtgttgtatacttacta

SEQ ID NO: 238912 - DNA, 25 bp, Probe Sequence
gatgcttttgcttctgagatttttg

SEQ ID NO: 238913 - DNA, 25 bp, Probe Sequence
gatgcctttcttggggttactgtta

SEQ ID NO: 238914 - DNA, 25 bp, Probe Sequence
gatcctttttgaaactctacagtta

SEQ ID NO: 238915 - DNA, 25 bp, Probe Sequence
gatcctgtactcttaatcattacct

SEQ ID NO: 238916 - DNA, 25 bp, Probe Sequence
gatgccgtatggtaaaactataaag

SEQ ID NO: 238917 - DNA, 25 bp, Probe Sequence
gatccctagatgatacacactcata

SEQ ID NO: 238918 - DNA, 25 bp, Probe Sequence
gatccgccagatagaattcatcatc

SEQ ID NO: 238919 - DNA, 25 bp, Probe Sequence
gatctagccatgcagcaatccttgc

SEQ ID NO: 238920 - DNA, 25 bp, Probe Sequence
gatcgagggagatctgcagcctgcc

SEQ ID NO: 238921 - DNA, 25 bp, Probe Sequence
gatgcctcgtgaaacacagctgggc

SEQ ID NO: 238922 - DNA, 25 bp, Probe Sequence
gatgccgctctgtgacaaatgtggg

SEQ ID NO: 238923 - DNA, 25 bp, Probe Sequence
gatccgcatctcaaagaagtggggc

SEQ ID NO: 238924 - DNA, 25 bp, Probe Sequence
gatcccctaacaacagtgagagagc

SEQ ID NO: 238925 - DNA, 25 bp, Probe Sequence
gatcccccaaagtcagacacagagc

SEQ ID NO: 238926 - DNA, 25 bp, Probe Sequence
gatccgagacaaaaaagccgatgcc

SEQ ID NO: 238927 - DNA, 25 bp, Probe Sequence
gatccagagacacacaagagcacca

SEQ ID NO: 238928 - DNA, 25 bp, Probe Sequence
gatccctgacacaaaaggcgtctat

SEQ ID NO: 238929 - DNA, 25 bp, Probe Sequence
gatcctctgaacctgcagaggcccc

SEQ ID NO: 238930 - DNA, 25 bp, Probe Sequence
gatcctgtggactacgaggccacca

SEQ ID NO: 238931 - DNA, 25 bp, Probe Sequence
gatgccagttacaaccttaacagca

SEQ ID NO: 238932 - DNA, 25 bp, Probe Sequence
gatccaatgctcaccccagaagagc

SEQ ID NO: 238933 - DNA, 25 bp, Probe Sequence
gatctcaagtcaaccctgagcagta

SEQ ID NO: 238934 - DNA, 25 bp, Probe Sequence
gatgcttcatgtagaccctcatcag

SEQ ID NO: 238935 - DNA, 25 bp, Probe Sequence
gatgctggtgctaaacctccaagtg

SEQ ID NO: 238936 - DNA, 25 bp, Probe Sequence
gatgctgggcgattaccgagggaac

SEQ ID NO: 238937 - DNA, 25 bp, Probe Sequence
gatctcaggccattaccaggtgagt

SEQ ID NO: 238938 - DNA, 25 bp, Probe Sequence
gattagcccagtgcggtggcactca

SEQ ID NO: 238939 - DNA, 25 bp, Probe Sequence
gatctggaccaggaagacggattgc

SEQ ID NO: 238940 - DNA, 25 bp, Probe Sequence
gatctggcacgagaagggcgagtgg

SEQ ID NO: 238941 - DNA, 25 bp, Probe Sequence
gatccagccgcagaagccaggatga

SEQ ID NO: 238942 - DNA, 25 bp, Probe Sequence
gatgcaccggcagaaagcagatgaa

SEQ ID NO: 238943 - DNA, 25 bp, Probe Sequence
gatgcaccagcaaaaaaatcattta

SEQ ID NO: 238944 - DNA, 25 bp, Probe Sequence
gatgcccaatgggaacttctttgca

SEQ ID NO: 238945 - DNA, 25 bp, Probe Sequence
gatccacaagaggcccttcgaggca

SEQ ID NO: 238946 - DNA, 25 bp, Probe Sequence
gatgcagctaaggtacatttgtaaa

SEQ ID NO: 238947 - DNA, 25 bp, Probe Sequence
gatgcttagtgtgaagttgatacgc

SEQ ID NO: 238948 - DNA, 25 bp, Probe Sequence
gatgctttggcaaaagtgattcagc

SEQ ID NO: 238949 - DNA, 25 bp, Probe Sequence
gatgccttgcttcagagtgatctca

SEQ ID NO: 238950 - DNA, 25 bp, Probe Sequence
gatgcgtgtttaatgatgatgactc

SEQ ID NO: 238951 - DNA, 25 bp, Probe Sequence
gatgcctgttgagtcagatgctttc

SEQ ID NO: 238952 - DNA, 25 bp, Probe Sequence
gatgcccttggtaatgctattgatg

SEQ ID NO: 238953 - DNA, 25 bp, Probe Sequence
gatgccaatgggatagtacatgttt

SEQ ID NO: 238954 - DNA, 25 bp, Probe Sequence
gatgccaaggtgaaagtacccaact

SEQ ID NO: 238955 - DNA, 25 bp, Probe Sequence
gatgccaaggggtaatgggcccagc

SEQ ID NO: 238956 - DNA, 25 bp, Probe Sequence
gatccaagaaggccttcatggcccc

SEQ ID NO: 238957 - DNA, 25 bp, Probe Sequence
gatcgccagacatacttaggacctc

SEQ ID NO: 238958 - DNA, 25 bp, Probe Sequence
gatcccagaaaacctgatggaccag

SEQ ID NO: 238959 - DNA, 25 bp, Probe Sequence
gatctccgagcaaagctccaggagt

SEQ ID NO: 238960 - DNA, 25 bp, Probe Sequence
gatctacgagataaccccaagttta

SEQ ID NO: 238961 - DNA, 25 bp, Probe Sequence
gatgctataaaatcaccacggtctt

SEQ ID NO: 238962 - DNA, 25 bp, Probe Sequence
gatgctataaaatcaccacggtctt

SEQ ID NO: 238963 - DNA, 25 bp, Probe Sequence
gatgcattatgagaagaccccgttt

SEQ ID NO: 238964 - DNA, 25 bp, Probe Sequence
gatgcttctgtggaggactctacct

SEQ ID NO: 238965 - DNA, 25 bp, Probe Sequence
gatgcttctgctcaggaatggccca

SEQ ID NO: 238966 - DNA, 25 bp, Probe Sequence
gatcttcatgctgagcgacagccct

SEQ ID NO: 238967 - DNA, 25 bp, Probe Sequence
gatgctgccatgtaagctggactcc

SEQ ID NO: 238968 - DNA, 25 bp, Probe Sequence
gatgctccagcatatgcacgttcac

SEQ ID NO: 238969 - DNA, 25 bp, Probe Sequence
gatgcatgccacagtagatgtccac

SEQ ID NO: 238970 - DNA, 25 bp, Probe Sequence
gatgcagttctggtcagagacgctc

SEQ ID NO: 238971 - DNA, 25 bp, Probe Sequence
gatgctctgtctgtagacactgctt

SEQ ID NO: 238972 - DNA, 25 bp, Probe Sequence
gatgctcgctgggtaacatacttca

SEQ ID NO: 238973 - DNA, 25 bp, Probe Sequence
gatgctcgctgggtaacatacttca

SEQ ID NO: 238974 - DNA, 25 bp, Probe Sequence
gatgctcgctgggtaacatacttca

SEQ ID NO: 238975 - DNA, 25 bp, Probe Sequence
gatgctcaagctgttgacatactca

SEQ ID NO: 238976 - DNA, 25 bp, Probe Sequence
gatgctgaagctgttagtactcggt

SEQ ID NO: 238977 - DNA, 25 bp, Probe Sequence
gatgcgaaggggcagaactcaggca

SEQ ID NO: 238978 - DNA, 25 bp, Probe Sequence
gatctggagggcctgaaaccccaga

SEQ ID NO: 238979 - DNA, 25 bp, Probe Sequence
gatcgtgatcgtgctgaagaaccgc

SEQ ID NO: 238980 - DNA, 25 bp, Probe Sequence
gatcgctgtcatgttactggaaggc

SEQ ID NO: 238981 - DNA, 25 bp, Probe Sequence
gatcgctgccaggatatacgtaatc

SEQ ID NO: 238982 - DNA, 25 bp, Probe Sequence
gatgcgcaccagtcttgaggaaacg

SEQ ID NO: 238983 - DNA, 25 bp, Probe Sequence
gatccacagaggactgggacacacc

SEQ ID NO: 238984 - DNA, 25 bp, Probe Sequence
gatgccaatgggtggaatgatgcca

SEQ ID NO: 238985 - DNA, 25 bp, Probe Sequence
gatgccttggatggagacgatgacc

SEQ ID NO: 238986 - DNA, 25 bp, Probe Sequence
gatgccttggcacaagcgtcagatc

SEQ ID NO: 238987 - DNA, 25 bp, Probe Sequence
gatgccctgtactgatgcaaaattt

SEQ ID NO: 238988 - DNA, 25 bp, Probe Sequence
gatgcttcccatttgtgtaatattt

SEQ ID NO: 238989 - DNA, 25 bp, Probe Sequence
gatgccatccaagttgtatattttt

SEQ ID NO: 238990 - DNA, 25 bp, Probe Sequence
gatgcttgacaattttgactgtttt

SEQ ID NO: 238991 - DNA, 25 bp, Probe Sequence
gatgctgccaattttgagcagtttt

SEQ ID NO: 238992 - DNA, 25 bp, Probe Sequence
gatgctgctcaccatcagtgaattt

SEQ ID NO: 238993 - DNA, 25 bp, Probe Sequence
gatgcttcccattgtgacagtgaca

SEQ ID NO: 238994 - DNA, 25 bp, Probe Sequence
gatcctcaccaactacatggacacc

SEQ ID NO: 238995 - DNA, 25 bp, Probe Sequence
gatcggcctgaacgacaggaccatc

SEQ ID NO: 238996 - DNA, 25 bp, Probe Sequence
gatcgcccatgacaaagaggtctat

SEQ ID NO: 238997 - DNA, 25 bp, Probe Sequence
gatcaacacagtcaaagcggctcta

SEQ ID NO: 238998 - DNA, 25 bp, Probe Sequence
gatccaccatatcaaagctttcatg

SEQ ID NO: 238999 - DNA, 25 bp, Probe Sequence
gatccatttctgcagaacttactgt

SEQ ID NO: 239000 - DNA, 25 bp, Probe Sequence
gatgccatttctaagacctacagct

SEQ ID NO: 239001 - DNA, 25 bp, Probe Sequence
gatctcctagctgagacttacacgt

SEQ ID NO: 239002 - DNA, 25 bp, Probe Sequence
gatcttccagttggagttactcact

SEQ ID NO: 239003 - DNA, 25 bp, Probe Sequence
gatctaaagttggtgctttctccac

SEQ ID NO: 239004 - DNA, 25 bp, Probe Sequence
gttaaacctcctcaggttcaacctg

SEQ ID NO: 239005 - DNA, 25 bp, Probe Sequence
gattacaaccggctaggctacacac

SEQ ID NO: 239006 - DNA, 25 bp, Probe Sequence
gattaccaacaaggctggggaatac

SEQ ID NO: 239007 - DNA, 25 bp, Probe Sequence
gatatcccccaagctgagggaaggt

SEQ ID NO: 239008 - DNA, 25 bp, Probe Sequence
gatatatgaccctgtctgtgggact

SEQ ID NO: 239009 - DNA, 25 bp, Probe Sequence
gatcaaaccacagactttggcctca

SEQ ID NO: 239010 - DNA, 25 bp, Probe Sequence
gatcaagacaacccgttggagcccc

SEQ ID NO: 239011 - DNA, 25 bp, Probe Sequence
gatcctgataaccctttggtgctgg

SEQ ID NO: 239012 - DNA, 25 bp, Probe Sequence
gatccgaggtccttttagtctcaga

SEQ ID NO: 239013 - DNA, 25 bp, Probe Sequence
gatccaggtgtctgtttttttgaga

SEQ ID NO: 239014 - DNA, 25 bp, Probe Sequence
gatcgagtggtctgtgttcctattg

SEQ ID NO: 239015 - DNA, 25 bp, Probe Sequence
gatctggttatccaggctgtctttt

SEQ ID NO: 239016 - DNA, 25 bp, Probe Sequence
gatctgttgattgatgacccttttc

SEQ ID NO: 239017 - DNA, 25 bp, Probe Sequence
gatgctaagactccagaccttttgt

SEQ ID NO: 239018 - DNA, 25 bp, Probe Sequence
gatgctatcagactctaatgttttt

SEQ ID NO: 239019 - DNA, 25 bp, Probe Sequence
gatgctttaggaacatgttttgctt

SEQ ID NO: 239020 - DNA, 25 bp, Probe Sequence
gatgctgttagtgttttcatttgtt

SEQ ID NO: 239021 - DNA, 25 bp, Probe Sequence
gatgctggataggttgtcttttgtt

SEQ ID NO: 239022 - DNA, 25 bp, Probe Sequence
gatcatagaaggtcttccttgagag

SEQ ID NO: 239023 - DNA, 25 bp, Probe Sequence
gatctaataggattgctgaggtgga

SEQ ID NO: 239024 - DNA, 25 bp, Probe Sequence
gatctacaatgtctggaaggctgag

SEQ ID NO: 239025 - DNA, 25 bp, Probe Sequence
gatctacagctcaacaggaacttga

SEQ ID NO: 239026 - DNA, 25 bp, Probe Sequence
gatctaagctcagtaaagccttggt

SEQ ID NO: 239027 - DNA, 25 bp, Probe Sequence
gatcaaagtcgtatacctgaggtgc

SEQ ID NO: 239028 - DNA, 25 bp, Probe Sequence
gatcaaggctcgagatcttcgcggg

SEQ ID NO: 239029 - DNA, 25 bp, Probe Sequence
gatcaaggctgcccaataccaggtc

SEQ ID NO: 239030 - DNA, 25 bp, Probe Sequence
gatgcgggcgcagatgaaccagatt

SEQ ID NO: 239031 - DNA, 25 bp, Probe Sequence
gatcggggggatgaccagctggagt

SEQ ID NO: 239032 - DNA, 25 bp, Probe Sequence
gatgcgggaggattgcataagcctg

SEQ ID NO: 239033 - DNA, 25 bp, Probe Sequence
gatgctgggcgatctcatcaaggtg

SEQ ID NO: 239034 - DNA, 25 bp, Probe Sequence
gatgctgaggagcagtctggagggc

SEQ ID NO: 239035 - DNA, 25 bp, Probe Sequence
gatctcatgcggcagactgaaggac

SEQ ID NO: 239036 - DNA, 25 bp, Probe Sequence
gatctacgctgaggcccaaggcagc

SEQ ID NO: 239037 - DNA, 25 bp, Probe Sequence
gatctactgcgacaacatcgtgcgc

SEQ ID NO: 239038 - DNA, 25 bp, Probe Sequence
gatgctgtcatgatgaatacacctg

SEQ ID NO: 239039 - DNA, 25 bp, Probe Sequence
gatctgtaccattataccctagaag

SEQ ID NO: 239040 - DNA, 25 bp, Probe Sequence
gatctctaccatttaattaagaaag

SEQ ID NO: 239041 - DNA, 25 bp, Probe Sequence
gatcctacagaatgaatttatgcac

SEQ ID NO: 239042 - DNA, 25 bp, Probe Sequence
gatcctaggtgctggatgctttgtc

SEQ ID NO: 239043 - DNA, 25 bp, Probe Sequence
gatcccgtgtgcttgtctgggtatc

SEQ ID NO: 239044 - DNA, 25 bp, Probe Sequence
gatgcgcaggggttttctgcacttc

SEQ ID NO: 239045 - DNA, 25 bp, Probe Sequence
gatgccaggggtctgctctagcatc

SEQ ID NO: 239046 - DNA, 25 bp, Probe Sequence
gtctcagggccaaggcctaaggatc

SEQ ID NO: 239047 - DNA, 25 bp, Probe Sequence
gatcatcgggggccgggaggtgatc

SEQ ID NO: 239048 - DNA, 25 bp, Probe Sequence
gatgctccggtgctgagggaggctg

SEQ ID NO: 239049 - DNA, 25 bp, Probe Sequence
gatgctcctggtggctgggaggcat

SEQ ID NO: 239050 - DNA, 25 bp, Probe Sequence
gatgctcctagctctggagactgac

SEQ ID NO: 239051 - DNA, 25 bp, Probe Sequence
gatccccacatctgtggactggaga

SEQ ID NO: 239052 - DNA, 25 bp, Probe Sequence
gatccccacatctgtggactggaga

SEQ ID NO: 239053 - DNA, 25 bp, Probe Sequence
gataccccctttggaatgtgagagt

SEQ ID NO: 239054 - DNA, 25 bp, Probe Sequence
gataactccctctggagcttggaga

SEQ ID NO: 239055 - DNA, 25 bp, Probe Sequence
gtagactcggctgcggagtactacc

SEQ ID NO: 239056 - DNA, 25 bp, Probe Sequence
gtcggctaagtgggacattagtaac

SEQ ID NO: 239057 - DNA, 25 bp, Probe Sequence
gatcgactacagagtacttttttct

SEQ ID NO: 239058 - DNA, 25 bp, Probe Sequence
gatattgctacaaaaggtttctttc

SEQ ID NO: 239059 - DNA, 25 bp, Probe Sequence
gattcctcaaaatattttctgttaa

SEQ ID NO: 239060 - DNA, 25 bp, Probe Sequence
gatccctctgaattgttttactttc

SEQ ID NO: 239061 - DNA, 25 bp, Probe Sequence
gatccatttgtctattttatttatt

SEQ ID NO: 239062 - DNA, 25 bp, Probe Sequence
gatgccgtttctttcaatatttatt

SEQ ID NO: 239063 - DNA, 25 bp, Probe Sequence
gatgcctttttttctctgcatttaa

SEQ ID NO: 239064 - DNA, 25 bp, Probe Sequence
gatcttttttttgcattttccttca

SEQ ID NO: 239065 - DNA, 25 bp, Probe Sequence
gatctaactttggctacaacattcc

SEQ ID NO: 239066 - DNA, 25 bp, Probe Sequence
gatctcaaaagtctacagatcccaa

SEQ ID NO: 239067 - DNA, 25 bp, Probe Sequence
gatccccatgtgagtacatgaccca

SEQ ID NO: 239068 - DNA, 25 bp, Probe Sequence
gatccacctgtttgtggtacacaca

SEQ ID NO: 239069 - DNA, 25 bp, Probe Sequence
gatccccctctataataatcacaat

SEQ ID NO: 239070 - DNA, 25 bp, Probe Sequence
gatccggttttgcaagtacatcaat

SEQ ID NO: 239071 - DNA, 25 bp, Probe Sequence
gatccggttttgccagtacatcaat

SEQ ID NO: 239072 - DNA, 25 bp, Probe Sequence
gatccccatttctggtcatcaagat

SEQ ID NO: 239073 - DNA, 25 bp, Probe Sequence
gatacccattgtctatgtaaagtag

SEQ ID NO: 239074 - DNA, 25 bp, Probe Sequence
gataccacttcacatagattaaggt

SEQ ID NO: 239075 - DNA, 25 bp, Probe Sequence
gtgagcaacccgcaaacggtggggg

SEQ ID NO: 239076 - DNA, 25 bp, Probe Sequence
gtgagcaacccgcaaacggtggggg

SEQ ID NO: 239077 - DNA, 25 bp, Probe Sequence
gtgagaaggctggggaccgggaggt

SEQ ID NO: 239078 - DNA, 25 bp, Probe Sequence
gataccagcctgggcaacctggtga

SEQ ID NO: 239079 - DNA, 25 bp, Probe Sequence
gataccagccgctgcaaaatcatgc

SEQ ID NO: 239080 - DNA, 25 bp, Probe Sequence
gatcatccagcccgacaagaataac

SEQ ID NO: 239081 - DNA, 25 bp, Probe Sequence
gatcgcgagcggccaaacagttaca

SEQ ID NO: 239082 - DNA, 25 bp, Probe Sequence
gatcgagatggatggaacagaaaat

SEQ ID NO: 239083 - DNA, 25 bp, Probe Sequence
gatcgaggtgcaggaaggccagaac

SEQ ID NO: 239084 - DNA, 25 bp, Probe Sequence
gatcggtgctaccaaggaagagagc

SEQ ID NO: 239085 - DNA, 25 bp, Probe Sequence
gatcaaagcggccaaggacggagca

SEQ ID NO: 239086 - DNA, 25 bp, Probe Sequence
gatcaaagaagccaaggcaggtcca

SEQ ID NO: 239087 - DNA, 25 bp, Probe Sequence
gataatacattccgaggggctcagt

SEQ ID NO: 239088 - DNA, 25 bp, Probe Sequence
gatctaaccatgtgagccggacaga

SEQ ID NO: 239089 - DNA, 25 bp, Probe Sequence
gatgcgacatccagatgacccagtc

SEQ ID NO: 239090 - DNA, 25 bp, Probe Sequence
gatgctccacaaggatatgctcccc

SEQ ID NO: 239091 - DNA, 25 bp, Probe Sequence
gatgcgccagcaagtaatgctttac

SEQ ID NO: 239092 - DNA, 25 bp, Probe Sequence
gatgctgaacctgatattattgaac

SEQ ID NO: 239093 - DNA, 25 bp, Probe Sequence
gatctgtaccctctgcaagagcaac

SEQ ID NO: 239094 - DNA, 25 bp, Probe Sequence
gatcgaaacctgccagacatgatgc

SEQ ID NO: 239095 - DNA, 25 bp, Probe Sequence
gatcaggacacttagcaaatgtaaa

SEQ ID NO: 239096 - DNA, 25 bp, Probe Sequence
gatcataggcaattagaactggaag

SEQ ID NO: 239097 - DNA, 25 bp, Probe Sequence
gatgctgatggcaaatcgtacaaca

SEQ ID NO: 239098 - DNA, 25 bp, Probe Sequence
gatgcgtgcatttatcagatcaaaa

SEQ ID NO: 239099 - DNA, 25 bp, Probe Sequence
gatgctgaatattatgctgcacaca

SEQ ID NO: 239100 - DNA, 25 bp, Probe Sequence
gatctgggatcattggcagccacat

SEQ ID NO: 239101 - DNA, 25 bp, Probe Sequence
gatgctggaacatgacagcttcatc

SEQ ID NO: 239102 - DNA, 25 bp, Probe Sequence
gatctgcgagaagtgcagcctgccc

SEQ ID NO: 239103 - DNA, 25 bp, Probe Sequence
gatctgcgagaagtgcagcctgccc

SEQ ID NO: 239104 - DNA, 25 bp, Probe Sequence
gatcacggcaatgcggctgcactgg

SEQ ID NO: 239105 - DNA, 25 bp, Probe Sequence
gatccattctatggtagctcacttg

SEQ ID NO: 239106 - DNA, 25 bp, Probe Sequence
gatccatcttgctaatagctatctg

SEQ ID NO: 239107 - DNA, 25 bp, Probe Sequence
gatccattgtcgggagcttgtggca

SEQ ID NO: 239108 - DNA, 25 bp, Probe Sequence
gatcgcatgagtccgggatgttgga

SEQ ID NO: 239109 - DNA, 25 bp, Probe Sequence
gatccagagtccagcaggtcagagc

SEQ ID NO: 239110 - DNA, 25 bp, Probe Sequence
gatgccaaatctgtcaagatcaaga

SEQ ID NO: 239111 - DNA, 25 bp, Probe Sequence
gatcctaatcatgtcacggatgact

SEQ ID NO: 239112 - DNA, 25 bp, Probe Sequence
gatccagaatatgctgtgggtacca

SEQ ID NO: 239113 - DNA, 25 bp, Probe Sequence
gatcatagaattgtgctggtcatac

SEQ ID NO: 239114 - DNA, 25 bp, Probe Sequence
gatctatcaagtgcagggtctacaa

SEQ ID NO: 239115 - DNA, 25 bp, Probe Sequence
gatctaaagtaaatggtctccaaag

SEQ ID NO: 239116 - DNA, 25 bp, Probe Sequence
gatctcaaaggactatggtgtatac

SEQ ID NO: 239117 - DNA, 25 bp, Probe Sequence
gatccaaaggagttgtatgcacatg

SEQ ID NO: 239118 - DNA, 25 bp, Probe Sequence
gatcgaacacgtcatgtaccatgac

SEQ ID NO: 239119 - DNA, 25 bp, Probe Sequence
gatcgagaccatcctggctaacatg

SEQ ID NO: 239120 - DNA, 25 bp, Probe Sequence
gatcgagaccatcctggctaacatg

SEQ ID NO: 239121 - DNA, 25 bp, Probe Sequence
gatcaaggctgcagtgagctatgat

SEQ ID NO: 239122 - DNA, 25 bp, Probe Sequence
gatgccagcgccatgctgaggcgct

SEQ ID NO: 239123 - DNA, 25 bp, Probe Sequence
gatgcgagggcaacgatggagctct

SEQ ID NO: 239124 - DNA, 25 bp, Probe Sequence
gatccccgcaaggatgagtgctgcc

SEQ ID NO: 239125 - DNA, 25 bp, Probe Sequence
gatctgcatccgtaagaagtgtgcc

SEQ ID NO: 239126 - DNA, 25 bp, Probe Sequence
gatctgcactattaactttgtgaag

SEQ ID NO: 239127 - DNA, 25 bp, Probe Sequence
gatcatgcgaactacagtttggaac

SEQ ID NO: 239128 - DNA, 25 bp, Probe Sequence
gatctgccaatcttcaatattctgg

SEQ ID NO: 239129 - DNA, 25 bp, Probe Sequence
gatccataatcagagaattgcccgg

SEQ ID NO: 239130 - DNA, 25 bp, Probe Sequence
gatgccttacatgaaataccagtga

SEQ ID NO: 239131 - DNA, 25 bp, Probe Sequence
gatgccgtcattgaatttctcttgg

SEQ ID NO: 239132 - DNA, 25 bp, Probe Sequence
gatcttacttccaaatctccttgga

SEQ ID NO: 239133 - DNA, 25 bp, Probe Sequence
gatttaaccacaaactacctctact

SEQ ID NO: 239134 - DNA, 25 bp, Probe Sequence
tgaataaaacaacagtacttacctc

SEQ ID NO: 239135 - DNA, 25 bp, Probe Sequence
tgaaaaatccttcagtacccaagtc

SEQ ID NO: 239136 - DNA, 25 bp, Probe Sequence
tgaaacctcaaacagtaccaaacct

SEQ ID NO: 239137 - DNA, 25 bp, Probe Sequence
gataacttaagacagctcttataaa

SEQ ID NO: 239138 - DNA, 25 bp, Probe Sequence
gatcaacttacctgttttcaacaaa

SEQ ID NO: 239139 - DNA, 25 bp, Probe Sequence
gataactagaacttaggttcacgtt

SEQ ID NO: 239140 - DNA, 25 bp, Probe Sequence
gtaataataatggtaggtaacaatt

SEQ ID NO: 239141 - DNA, 25 bp, Probe Sequence
gataaattttggggtaggagcagca

SEQ ID NO: 239142 - DNA, 25 bp, Probe Sequence
gataatttttagcttagggcctggt

SEQ ID NO: 239143 - DNA, 25 bp, Probe Sequence
gatagtcttttagagaagtggggag

SEQ ID NO: 239144 - DNA, 25 bp, Probe Sequence
gataacttcgaagccatagggtgga

SEQ ID NO: 239145 - DNA, 25 bp, Probe Sequence
gatcaaccccctgcgaaaggaggat

SEQ ID NO: 239146 - DNA, 25 bp, Probe Sequence
gatcagtccttctccaaaaggacct

SEQ ID NO: 239147 - DNA, 25 bp, Probe Sequence
gatctgtgcctttggctgcaacaag

SEQ ID NO: 239148 - DNA, 25 bp, Probe Sequence
gatcttgccttgtcagagatgcaca

SEQ ID NO: 239149 - DNA, 25 bp, Probe Sequence
gatctggatctgttaagatatgcac

SEQ ID NO: 239150 - DNA, 25 bp, Probe Sequence
gatccagctgcctatgaaaatgaca

SEQ ID NO: 239151 - DNA, 25 bp, Probe Sequence
gatccagcggcagtgacagaatcca

SEQ ID NO: 239152 - DNA, 25 bp, Probe Sequence
gatcaagcagattccacgaatcctc

SEQ ID NO: 239153 - DNA, 25 bp, Probe Sequence
gatcaaatattgcccacatgtacca

SEQ ID NO: 239154 - DNA, 25 bp, Probe Sequence
gatccaatattactgccttctgaaa

SEQ ID NO: 239155 - DNA, 25 bp, Probe Sequence
gatccagagtaagtgcctctccaag

SEQ ID NO: 239156 - DNA, 25 bp, Probe Sequence
gatccagagtaagtgcctctccaag

SEQ ID NO: 239157 - DNA, 25 bp, Probe Sequence
gatccaaatgccgtgtgtcaccaac

SEQ ID NO: 239158 - DNA, 25 bp, Probe Sequence
gatgcctagtgagtatgtgtccaca

SEQ ID NO: 239159 - DNA, 25 bp, Probe Sequence
gatgccaagtcagatatgtacagct

SEQ ID NO: 239160 - DNA, 25 bp, Probe Sequence
gatctgacagtcattattacagact

SEQ ID NO: 239161 - DNA, 25 bp, Probe Sequence
gatctgccataaattcttcctaaat

SEQ ID NO: 239162 - DNA, 25 bp, Probe Sequence
gatcttcattaagtacccaaatgta

SEQ ID NO: 239163 - DNA, 25 bp, Probe Sequence
gatgcctcattatgtcaaccaggtc

SEQ ID NO: 239164 - DNA, 25 bp, Probe Sequence
gatgcctactacatcttccaggaga

SEQ ID NO: 239165 - DNA, 25 bp, Probe Sequence
gatgccttctacagttgggagagta

SEQ ID NO: 239166 - DNA, 25 bp, Probe Sequence
gatgccttttactttagaagagctg

SEQ ID NO: 239167 - DNA, 25 bp, Probe Sequence
gatcctcttgtactgggagaggtgc

SEQ ID NO: 239168 - DNA, 25 bp, Probe Sequence
gatcctttgaatggagcgtggttcc

SEQ ID NO: 239169 - DNA, 25 bp, Probe Sequence
gatcctttgaatggagcgtggttcc

SEQ ID NO: 239170 - DNA, 25 bp, Probe Sequence
gatgccttctgaaagagcttggcct

SEQ ID NO: 239171 - DNA, 25 bp, Probe Sequence
gatgcctgatcagaaaccaaccatg

SEQ ID NO: 239172 - DNA, 25 bp, Probe Sequence
gatcgctgcataaatatcaccaaac

SEQ ID NO: 239173 - DNA, 25 bp, Probe Sequence
gatccatgtattaatcagtaaatca

SEQ ID NO: 239174 - DNA, 25 bp, Probe Sequence
gatgcctggagttactgtaaaagac

SEQ ID NO: 239175 - DNA, 25 bp, Probe Sequence
gatccttaaagactgctatataaat

SEQ ID NO: 239176 - DNA, 25 bp, Probe Sequence
gatgccttgcagggcattcttcaaa

SEQ ID NO: 239177 - DNA, 25 bp, Probe Sequence
gatgccttcatctgttcagtcatct

SEQ ID NO: 239178 - DNA, 25 bp, Probe Sequence
gatgccttcatctgttcagtcatct

SEQ ID NO: 239179 - DNA, 25 bp, Probe Sequence
gatccttatggctgtagtgactgtt

SEQ ID NO: 239180 - DNA, 25 bp, Probe Sequence
gatcgcaaattgcttgagctgttgt

SEQ ID NO: 239181 - DNA, 25 bp, Probe Sequence
gatgccgaggatgtctggtgtgtgt

SEQ ID NO: 239182 - DNA, 25 bp, Probe Sequence
gatgccacagtgattcatgtgggtt

SEQ ID NO: 239183 - DNA, 25 bp, Probe Sequence
gatcccatcatgaattcattggaat

SEQ ID NO: 239184 - DNA, 25 bp, Probe Sequence
gatcttactgcttgtcacttgaatc

SEQ ID NO: 239185 - DNA, 25 bp, Probe Sequence
gatctagacatgccttaggtaactg

SEQ ID NO: 239186 - DNA, 25 bp, Probe Sequence
gatcaaacgaataatggccaaagcc

SEQ ID NO: 239187 - DNA, 25 bp, Probe Sequence
gatcaacaggatcccaaggcagaag

SEQ ID NO: 239188 - DNA, 25 bp, Probe Sequence
gatcaagcttggccggaaggagaag

SEQ ID NO: 239189 - DNA, 25 bp, Probe Sequence
gatcaagcttggccggaaggagaag

SEQ ID NO: 239190 - DNA, 25 bp, Probe Sequence
gatcaacttggaggtgatgccggga

SEQ ID NO: 239191 - DNA, 25 bp, Probe Sequence
gatcatagattggacctggttttgt

SEQ ID NO: 239192 - DNA, 25 bp, Probe Sequence
gatctagtaacttgcgagtatttgt

SEQ ID NO: 239193 - DNA, 25 bp, Probe Sequence
gatctcagctaaattctatttttgg

SEQ ID NO: 239194 - DNA, 25 bp, Probe Sequence
gatcccttcactgttcatatggcag

SEQ ID NO: 239195 - DNA, 25 bp, Probe Sequence
gatcaacttatagcttcatatggtc

SEQ ID NO: 239196 - DNA, 25 bp, Probe Sequence
gatcgactgctacgttgaccatgtc

SEQ ID NO: 239197 - DNA, 25 bp, Probe Sequence
gatctcactctcaggagaccattgc

SEQ ID NO: 239198 - DNA, 25 bp, Probe Sequence
gatctactgtaaggcagatgctaat

SEQ ID NO: 239199 - DNA, 25 bp, Probe Sequence
gatctcagtgtaacgacatggccag

SEQ ID NO: 239200 - DNA, 25 bp, Probe Sequence
gatccaggtacactcctgggagttt

SEQ ID NO: 239201 - DNA, 25 bp, Probe Sequence
gatccaggtttgatgctcatgggtt

SEQ ID NO: 239202 - DNA, 25 bp, Probe Sequence
gatagcggtttgactcacggggatt

SEQ ID NO: 239203 - DNA, 25 bp, Probe Sequence
gatagcggtttgactcacggggatt

SEQ ID NO: 239204 - DNA, 25 bp, Probe Sequence
gatagcggtttgactcacggggatt

SEQ ID NO: 239205 - DNA, 25 bp, Probe Sequence
gatagcggtttgactcacggggatt

SEQ ID NO: 239206 - DNA, 25 bp, Probe Sequence
gatagcggtttgactcacggggatt

SEQ ID NO: 239207 - DNA, 25 bp, Probe Sequence
gatagcggtttgactcacggggatt

SEQ ID NO: 239208 - DNA, 25 bp, Probe Sequence
gatagcggtttgactcacggggatt

SEQ ID NO: 239209 - DNA, 25 bp, Probe Sequence
gatagcggtttgactcacggggatt

SEQ ID NO: 239210 - DNA, 25 bp, Probe Sequence
gatagcggtttgactcacggggatt

SEQ ID NO: 239211 - DNA, 25 bp, Probe Sequence
gatagcggtttgactcacggggatt

SEQ ID NO: 239212 - DNA, 25 bp, Probe Sequence
gatagcggtttgactcacggggatt

SEQ ID NO: 239213 - DNA, 25 bp, Probe Sequence
gatagcggtttgactcacggggatt

SEQ ID NO: 239214 - DNA, 25 bp, Probe Sequence
gatagcggtttgactcacggggatt

SEQ ID NO: 239215 - DNA, 25 bp, Probe Sequence
gatagcggtttgactcacggggatt

SEQ ID NO: 239216 - DNA, 25 bp, Probe Sequence
gatagcggtttgactcacggggatt

SEQ ID NO: 239217 - DNA, 25 bp, Probe Sequence
gatagcggtttgactcacggggatt

SEQ ID NO: 239218 - DNA, 25 bp, Probe Sequence
gatagcggtttgactcacggggatt

SEQ ID NO: 239219 - DNA, 25 bp, Probe Sequence
gatagcggtttgactcacggggatt

SEQ ID NO: 239220 - DNA, 25 bp, Probe Sequence
gatagcggtttgactcacggggatt

SEQ ID NO: 239221 - DNA, 25 bp, Probe Sequence
gatagcggtttgactcacggggatt

SEQ ID NO: 239222 - DNA, 25 bp, Probe Sequence
gatagcggtttgactcacggggatt

SEQ ID NO: 239223 - DNA, 25 bp, Probe Sequence
gatagcggtttgactcacggggatt

SEQ ID NO: 239224 - DNA, 25 bp, Probe Sequence
gatagcggtttgactcacggggatt

SEQ ID NO: 239225 - DNA, 25 bp, Probe Sequence
gatagcggtttgactcacggggatt

SEQ ID NO: 239226 - DNA, 25 bp, Probe Sequence
gatagcggtttgactcacggggatt

SEQ ID NO: 239227 - DNA, 25 bp, Probe Sequence
gatagcggtttgactcacggggatt

SEQ ID NO: 239228 - DNA, 25 bp, Probe Sequence
gatagcggtttgactcacggggatt

SEQ ID NO: 239229 - DNA, 25 bp, Probe Sequence
gatagcggtttgactcacggggatt

SEQ ID NO: 239230 - DNA, 25 bp, Probe Sequence
gatagcggtttgactcacggggatt

SEQ ID NO: 239231 - DNA, 25 bp, Probe Sequence
gatcctgctcttaaacgcaaggccc

SEQ ID NO: 239232 - DNA, 25 bp, Probe Sequence
gatccaagtctaaacgcaagagcta

SEQ ID NO: 239233 - DNA, 25 bp, Probe Sequence
gatcccatttagaaccaaccaggtg

SEQ ID NO: 239234 - DNA, 25 bp, Probe Sequence
gatcctcgattattgaactaccagt

SEQ ID NO: 239235 - DNA, 25 bp, Probe Sequence
taaccgaatttaactatccaacaca

SEQ ID NO: 239236 - DNA, 25 bp, Probe Sequence
taagtaactttaacaactcaacaag

SEQ ID NO: 239237 - DNA, 25 bp, Probe Sequence
taagttcgtctttcaaagtaatcct

SEQ ID NO: 239238 - DNA, 25 bp, Probe Sequence
taaatccggtgttcaatcccaacta

SEQ ID NO: 239239 - DNA, 25 bp, Probe Sequence
gatttcctgggatgcacccaaacca

SEQ ID NO: 239240 - DNA, 25 bp, Probe Sequence
gatctctccagggaagacccatccc

SEQ ID NO: 239241 - DNA, 25 bp, Probe Sequence
gatcccagcagggggaggcaatccc

SEQ ID NO: 239242 - DNA, 25 bp, Probe Sequence
gatccgcgcagggaggagggtcggg

SEQ ID NO: 239243 - DNA, 25 bp, Probe Sequence
gatccacctccaatggaagtccggg

SEQ ID NO: 239244 - DNA, 25 bp, Probe Sequence
gatcgagcctcgagagagagccaag

SEQ ID NO: 239245 - DNA, 25 bp, Probe Sequence
gatcgagcctcgagagagagccaag

SEQ ID NO: 239246 - DNA, 25 bp, Probe Sequence
gatcgtccgctactggaactacagt

SEQ ID NO: 239247 - DNA, 25 bp, Probe Sequence
gatcgacacgtcatggaccatgact

SEQ ID NO: 239248 - DNA, 25 bp, Probe Sequence
gatcgagacgtgcggtcacattcta

SEQ ID NO: 239249 - DNA, 25 bp, Probe Sequence
gatcgtgacggaagaagccattgcc

SEQ ID NO: 239250 - DNA, 25 bp, Probe Sequence
gatcgtgactagagatgacctctct

SEQ ID NO: 239251 - DNA, 25 bp, Probe Sequence
gatccattctagaagatccaccttc

SEQ ID NO: 239252 - DNA, 25 bp, Probe Sequence
gatcctgtatctagaaaacccatcg

SEQ ID NO: 239253 - DNA, 25 bp, Probe Sequence
gatccgtagtaataaattctcagag

SEQ ID NO: 239254 - DNA, 25 bp, Probe Sequence
gatccagtttgagaaagtttagcga

SEQ ID NO: 239255 - DNA, 25 bp, Probe Sequence
gatccagtgatccttacaagttaga

SEQ ID NO: 239256 - DNA, 25 bp, Probe Sequence
gatccatgatggctctcttagtcca

SEQ ID NO: 239257 - DNA, 25 bp, Probe Sequence
gatccatgatggctctcttagtcca

SEQ ID NO: 239258 - DNA, 25 bp, Probe Sequence
gatcaatgaggactggctgtgcaat

SEQ ID NO: 239259 - DNA, 25 bp, Probe Sequence
gatcatatgagggaagatgtctttt

SEQ ID NO: 239260 - DNA, 25 bp, Probe Sequence
gatctgtgaacctactgtcatttct

SEQ ID NO: 239261 - DNA, 25 bp, Probe Sequence
gatcctgagactatttgcatgcttc

SEQ ID NO: 239262 - DNA, 25 bp, Probe Sequence
gatcttgagcactatttcatggatg

SEQ ID NO: 239263 - DNA, 25 bp, Probe Sequence
gatctgtgcaagcccatattggatg

SEQ ID NO: 239264 - DNA, 25 bp, Probe Sequence
gatcttgctagtgccataggtgatg

SEQ ID NO: 239265 - DNA, 25 bp, Probe Sequence
gatcatacacctgctcacaggcgag

SEQ ID NO: 239266 - DNA, 25 bp, Probe Sequence
gatcgccatccggatcacggcaatg

SEQ ID NO: 239267 - DNA, 25 bp, Probe Sequence
gatcctccctgagactggcaaggga

SEQ ID NO: 239268 - DNA, 25 bp, Probe Sequence
gatcctccctgagactggcaaggga

SEQ ID NO: 239269 - DNA, 25 bp, Probe Sequence
gatactccccacgaatgtgaagagg

SEQ ID NO: 239270 - DNA, 25 bp, Probe Sequence
gatacctcaacatcaatttagggta

SEQ ID NO: 239271 - DNA, 25 bp, Probe Sequence
gatccctaaagaattttcagtgaat

SEQ ID NO: 239272 - DNA, 25 bp, Probe Sequence
gatctccagaagcaacttcacagtt

SEQ ID NO: 239273 - DNA, 25 bp, Probe Sequence
gatcctcagaatcaactcttcttat

SEQ ID NO: 239274 - DNA, 25 bp, Probe Sequence
gatctttacttatgcatcttcctga

SEQ ID NO: 239275 - DNA, 25 bp, Probe Sequence
gatctttccgttgcattcatgatgc

SEQ ID NO: 239276 - DNA, 25 bp, Probe Sequence
gatccagtcctgttgatcatgtctc

SEQ ID NO: 239277 - DNA, 25 bp, Probe Sequence
gatccagctccatatattgtttacc

SEQ ID NO: 239278 - DNA, 25 bp, Probe Sequence
gatcctgcatctgggtttgtttaca

SEQ ID NO: 239279 - DNA, 25 bp, Probe Sequence
gatcctatttgtattttctgatgct

SEQ ID NO: 239280 - DNA, 25 bp, Probe Sequence
gatcccatttgaattttttagtgac

SEQ ID NO: 239281 - DNA, 25 bp, Probe Sequence
gatccttactaagtttttcatggga

SEQ ID NO: 239282 - DNA, 25 bp, Probe Sequence
gatccttgggatcttgtgtttggga

SEQ ID NO: 239283 - DNA, 25 bp, Probe Sequence
gatcgtcaacaacaagtttctggca

SEQ ID NO: 239284 - DNA, 25 bp, Probe Sequence
gatcctccaccgaaaactcttgtga

SEQ ID NO: 239285 - DNA, 25 bp, Probe Sequence
gatcctcaaccaataaaatctcagt

SEQ ID NO: 239286 - DNA, 25 bp, Probe Sequence
gatccacaactctcgaagtctatct

SEQ ID NO: 239287 - DNA, 25 bp, Probe Sequence
gatcccagatctgataaatgaattc

SEQ ID NO: 239288 - DNA, 25 bp, Probe Sequence
gatcgtcagatcaaataaagttata

SEQ ID NO: 239289 - DNA, 25 bp, Probe Sequence
gatcgtcatgttcagtagtttatac

SEQ ID NO: 239290 - DNA, 25 bp, Probe Sequence
gatcgttcttaacacgcatgttcac

SEQ ID NO: 239291 - DNA, 25 bp, Probe Sequence
gatctttgtaaagacagctcttcac

SEQ ID NO: 239292 - DNA, 25 bp, Probe Sequence
gatctaggaaaagacattgttcatg

SEQ ID NO: 239293 - DNA, 25 bp, Probe Sequence
gatctaggataagtaactcctgttt

SEQ ID NO: 239294 - DNA, 25 bp, Probe Sequence
gattataaaaccagcccttgttgta

SEQ ID NO: 239295 - DNA, 25 bp, Probe Sequence
gataaaaaatccactgacttgtatt

SEQ ID NO: 239296 - DNA, 25 bp, Probe Sequence
gtaacttcacttgacgcacgttagc

SEQ ID NO: 239297 - DNA, 25 bp, Probe Sequence
gataactccagcaggaaactgtaac

SEQ ID NO: 239298 - DNA, 25 bp, Probe Sequence
gatcaactccagataagaactgctc

SEQ ID NO: 239299 - DNA, 25 bp, Probe Sequence
gatcccagcaagataatgtcctgtc

SEQ ID NO: 239300 - DNA, 25 bp, Probe Sequence
gatcctgccaggatatttttgtaaa

SEQ ID NO: 239301 - DNA, 25 bp, Probe Sequence
gatcctccagatctaactattataa

SEQ ID NO: 239302 - DNA, 25 bp, Probe Sequence
gatcccaagagctatgaggcatatg

SEQ ID NO: 239303 - DNA, 25 bp, Probe Sequence
gatcccagcgatgtgactgctcaat

SEQ ID NO: 239304 - DNA, 25 bp, Probe Sequence
gatcaaaccacaatgcacatcctta

SEQ ID NO: 239305 - DNA, 25 bp, Probe Sequence
gatcatatccacaagtgctcgtgct

SEQ ID NO: 239306 - DNA, 25 bp, Probe Sequence
gatcatgcattgttgaggtggtctg

SEQ ID NO: 239307 - DNA, 25 bp, Probe Sequence
gatctgcatggagtgctgtgggctc

SEQ ID NO: 239308 - DNA, 25 bp, Probe Sequence
gatctgcagatagtagagggccctg

SEQ ID NO: 239309 - DNA, 25 bp, Probe Sequence
gatccagaactatgtgctgtgacgt

SEQ ID NO: 239310 - DNA, 25 bp, Probe Sequence
gatccagagcacagatctgtttcgt

SEQ ID NO: 239311 - DNA, 25 bp, Probe Sequence
gatctaagcactgtctgttgtcttt

SEQ ID NO: 239312 - DNA, 25 bp, Probe Sequence
gatctaggagaactctcacgttctt

SEQ ID NO: 239313 - DNA, 25 bp, Probe Sequence
gataaggaaggcatccctcctgatc

SEQ ID NO: 239314 - DNA, 25 bp, Probe Sequence
gataaggaaggcatccctcctgatc

SEQ ID NO: 239315 - DNA, 25 bp, Probe Sequence
gataataaaggctccctcgttctgc

SEQ ID NO: 239316 - DNA, 25 bp, Probe Sequence
gataatgaaagctaagcctcgggct

SEQ ID NO: 239317 - DNA, 25 bp, Probe Sequence
gatttgaacccagcttcagtgtgca

SEQ ID NO: 239318 - DNA, 25 bp, Probe Sequence
gatcctgataccaaactcatcggaa

SEQ ID NO: 239319 - DNA, 25 bp, Probe Sequence
gatccgatagctatgttctgctgga

SEQ ID NO: 239320 - DNA, 25 bp, Probe Sequence
gatcctggagctttgctttctattg

SEQ ID NO: 239321 - DNA, 25 bp, Probe Sequence
gatcctgggtgatgtcttcatccgc

SEQ ID NO: 239322 - DNA, 25 bp, Probe Sequence
gatacggaagacctcttatgctcag

SEQ ID NO: 239323 - DNA, 25 bp, Probe Sequence
gatacagtaaaccacttgattcaat

SEQ ID NO: 239324 - DNA, 25 bp, Probe Sequence
gatctaaaacaactcttattgaatt

SEQ ID NO: 239325 - DNA, 25 bp, Probe Sequence
gatctttaatccattgtcagtattt

SEQ ID NO: 239326 - DNA, 25 bp, Probe Sequence
gatctgatgtaaacccttcatgcta

SEQ ID NO: 239327 - DNA, 25 bp, Probe Sequence
gatctctgaatagctcacttcttac

SEQ ID NO: 239328 - DNA, 25 bp, Probe Sequence
gatccatggttggccaattcctagc

SEQ ID NO: 239329 - DNA, 25 bp, Probe Sequence
gatccattttgttgacttgagctat

SEQ ID NO: 239330 - DNA, 25 bp, Probe Sequence
gatcgttttgcagacatcatggcgt

SEQ ID NO: 239331 - DNA, 25 bp, Probe Sequence
gatctgctgtctcccaaataagctt

SEQ ID NO: 239332 - DNA, 25 bp, Probe Sequence
gatctgctatctcagaaagaatggt

SEQ ID NO: 239333 - DNA, 25 bp, Probe Sequence
gatccttccaatgaagcgagagtct

SEQ ID NO: 239334 - DNA, 25 bp, Probe Sequence
gatcctcgcggtgcaaatagcgtat

SEQ ID NO: 239335 - DNA, 25 bp, Probe Sequence
gatcctgcaggactacaaatccctc

SEQ ID NO: 239336 - DNA, 25 bp, Probe Sequence
gatcccaggagaatcagaaactcca

SEQ ID NO: 239337 - DNA, 25 bp, Probe Sequence
gatcccctggcttgcagaaaatcca

SEQ ID NO: 239338 - DNA, 25 bp, Probe Sequence
gatctagcctccatcatgaagaagc

SEQ ID NO: 239339 - DNA, 25 bp, Probe Sequence
gatacagcacccatctacaaagacc

SEQ ID NO: 239340 - DNA, 25 bp, Probe Sequence
gataagccagctgttactaagccat

SEQ ID NO: 239341 - DNA, 25 bp, Probe Sequence
gataggagcagtgagtgacaaagcc

SEQ ID NO: 239342 - DNA, 25 bp, Probe Sequence
gatccgagagctggtggagaagaac

SEQ ID NO: 239343 - DNA, 25 bp, Probe Sequence
gatcgctgtctcgggagagaaatca

SEQ ID NO: 239344 - DNA, 25 bp, Probe Sequence
gatcctgaccagggggaatccatga

SEQ ID NO: 239345 - DNA, 25 bp, Probe Sequence
gatcctgaccagggggaatccatga

SEQ ID NO: 239346 - DNA, 25 bp, Probe Sequence
gatcctgatgccaatgggaaatcct

SEQ ID NO: 239347 - DNA, 25 bp, Probe Sequence
gatccatctgtcctgtgtggaatcc

SEQ ID NO: 239348 - DNA, 25 bp, Probe Sequence
gatccatctgtcctgtgtggaatcc

SEQ ID NO: 239349 - DNA, 25 bp, Probe Sequence
gatctgccagtggttgtggagacat

SEQ ID NO: 239350 - DNA, 25 bp, Probe Sequence
gatcgccaggcgttttctgagcata

SEQ ID NO: 239351 - DNA, 25 bp, Probe Sequence
gatcgccaggcgttttctgagcata

SEQ ID NO: 239352 - DNA, 25 bp, Probe Sequence
gatccatatccaccattatgtgaca

SEQ ID NO: 239353 - DNA, 25 bp, Probe Sequence
gatccgatccactagtgataaacac

SEQ ID NO: 239354 - DNA, 25 bp, Probe Sequence
gatccttccatcttcttgaagtcgc

SEQ ID NO: 239355 - DNA, 25 bp, Probe Sequence
gatctcttcacttccatggaagcca

SEQ ID NO: 239356 - DNA, 25 bp, Probe Sequence
gatcctcagtcttacatggggtgcg

SEQ ID NO: 239357 - DNA, 25 bp, Probe Sequence
gatcctgcaggttactattgtgggt

SEQ ID NO: 239358 - DNA, 25 bp, Probe Sequence
gatcgctgagcgatactttcggcag

SEQ ID NO: 239359 - DNA, 25 bp, Probe Sequence
gatcgtcatgtatacttacggcaac

SEQ ID NO: 239360 - DNA, 25 bp, Probe Sequence
gatcgatattagtaattccccaaga

SEQ ID NO: 239361 - DNA, 25 bp, Probe Sequence
gatcctttgagaaatctcgtctcga

SEQ ID NO: 239362 - DNA, 25 bp, Probe Sequence
gatcctcttcaactaccgatattgc

SEQ ID NO: 239363 - DNA, 25 bp, Probe Sequence
gatcgttgtcagctacttgatgtcc

SEQ ID NO: 239364 - DNA, 25 bp, Probe Sequence
gatcgatatcccatttctgatgtgt

SEQ ID NO: 239365 - DNA, 25 bp, Probe Sequence
gatcgctcattcttcttttatgatt

SEQ ID NO: 239366 - DNA, 25 bp, Probe Sequence
gatcctttattctttctatttgtca

SEQ ID NO: 239367 - DNA, 25 bp, Probe Sequence
gatctcagttttgttgaatatcttc

SEQ ID NO: 239368 - DNA, 25 bp, Probe Sequence
gatctatcctttacttgaaagcttt

SEQ ID NO: 239369 - DNA, 25 bp, Probe Sequence
gatctgatcctcacttgcgaagaga

SEQ ID NO: 239370 - DNA, 25 bp, Probe Sequence
gatcttctgtctcattcgatacagc

SEQ ID NO: 239371 - DNA, 25 bp, Probe Sequence
gatcttcttggccatgaaaaccatg

SEQ ID NO: 239372 - DNA, 25 bp, Probe Sequence
gatctgatgttttgttaaacctgat

SEQ ID NO: 239373 - DNA, 25 bp, Probe Sequence
gatcctgcttgttgtaagactccgt

SEQ ID NO: 239374 - DNA, 25 bp, Probe Sequence
gatcaggttgttgacagttcctggt

SEQ ID NO: 239375 - DNA, 25 bp, Probe Sequence
gatcaaggttatgaagcccctggtg

SEQ ID NO: 239376 - DNA, 25 bp, Probe Sequence
gatataatgagtttaacccaatagg

SEQ ID NO: 239377 - DNA, 25 bp, Probe Sequence
gatcagttcagtatattgcactaat

SEQ ID NO: 239378 - DNA, 25 bp, Probe Sequence
gatctttcagatctttccataaagt

SEQ ID NO: 239379 - DNA, 25 bp, Probe Sequence
gatcttctagtggctacttaattag

SEQ ID NO: 239380 - DNA, 25 bp, Probe Sequence
gatctcttggtgttatttcgttacc

SEQ ID NO: 239381 - DNA, 25 bp, Probe Sequence
gatcctgggtttttgtggtttgact

SEQ ID NO: 239382 - DNA, 25 bp, Probe Sequence
gatcttgggttatctaatgattgta

SEQ ID NO: 239383 - DNA, 25 bp, Probe Sequence
gatcctggtacatttcataagcttg

SEQ ID NO: 239384 - DNA, 25 bp, Probe Sequence
gatcccctagcatctaaacttaaca

SEQ ID NO: 239385 - DNA, 25 bp, Probe Sequence
gatacccagtatgcttaacgtgaaa

SEQ ID NO: 239386 - DNA, 25 bp, Probe Sequence
gattgcccgtaggttaagaggtcag

SEQ ID NO: 239387 - DNA, 25 bp, Probe Sequence
gatctgccaaatcgttatagagagc

SEQ ID NO: 239388 - DNA, 25 bp, Probe Sequence
gatcccaacatgactcatccagagt

SEQ ID NO: 239389 - DNA, 25 bp, Probe Sequence
gatcccaacatgactcatccagagt

SEQ ID NO: 239390 - DNA, 25 bp, Probe Sequence
gatcctcaagcacatcaacgagctg

SEQ ID NO: 239391 - DNA, 25 bp, Probe Sequence
gatcctcaaatccacggtggctgcc

SEQ ID NO: 239392 - DNA, 25 bp, Probe Sequence
gatcctcagtatagccggtgaaccc

SEQ ID NO: 239393 - DNA, 25 bp, Probe Sequence
gatcccaaaagcttggtaagcccaa

SEQ ID NO: 239394 - DNA, 25 bp, Probe Sequence
gatagccccaaggtttaatccaagg

SEQ ID NO: 239395 - DNA, 25 bp, Probe Sequence
gatcagcccctaaaggtaatgccag

SEQ ID NO: 239396 - DNA, 25 bp, Probe Sequence
gatcttcccgtggggtaagccaggc

SEQ ID NO: 239397 - DNA, 25 bp, Probe Sequence
gatcctcgccaagcggtatgggggc

SEQ ID NO: 239398 - DNA, 25 bp, Probe Sequence
gatcagggccaaagcggtcagtgag

SEQ ID NO: 239399 - DNA, 25 bp, Probe Sequence
gatcgtcagcgctaagggaactgag

SEQ ID NO: 239400 - DNA, 25 bp, Probe Sequence
gatctgtttgcttagctgtcaacaa

SEQ ID NO: 239401 - DNA, 25 bp, Probe Sequence
gatctgcttttatctaaatgcaaat

SEQ ID NO: 239402 - DNA, 25 bp, Probe Sequence
gatcttctgattgccataaaaaaaa

SEQ ID NO: 239403 - DNA, 25 bp, Probe Sequence
gatctacaatgctccataatttata

SEQ ID NO: 239404 - DNA, 25 bp, Probe Sequence
gatcaccacgcatctcaggattggt

SEQ ID NO: 239405 - DNA, 25 bp, Probe Sequence
gatacaaccaagtcggatgggcagt

SEQ ID NO: 239406 - DNA, 25 bp, Probe Sequence
gataaatccacgaagatagggagaa

SEQ ID NO: 239407 - DNA, 25 bp, Probe Sequence
gatcgatcccagcacagtagtggaa

SEQ ID NO: 239408 - DNA, 25 bp, Probe Sequence
gatcagaacctccaaatactgccat

SEQ ID NO: 239409 - DNA, 25 bp, Probe Sequence
gatcaccaatctggactgtactcgg

SEQ ID NO: 239410 - DNA, 25 bp, Probe Sequence
gatcaccacattgtcgttcttgggc

SEQ ID NO: 239411 - DNA, 25 bp, Probe Sequence
gatctcacagttggtcagttctact

SEQ ID NO: 239412 - DNA, 25 bp, Probe Sequence
gatctaaggaaacttctcacctatg

SEQ ID NO: 239413 - DNA, 25 bp, Probe Sequence
gatctacgggatctttccattatgt

SEQ ID NO: 239414 - DNA, 25 bp, Probe Sequence
gatagtggggattttttgttatgtt

SEQ ID NO: 239415 - DNA, 25 bp, Probe Sequence
gataagggactcttgtgctttcata

SEQ ID NO: 239416 - DNA, 25 bp, Probe Sequence
gataacgctgaagcaggcctctcat

SEQ ID NO: 239417 - DNA, 25 bp, Probe Sequence
gataaatctgaagaggcttctcctg

SEQ ID NO: 239418 - DNA, 25 bp, Probe Sequence
gatcgtcttcgagagtttctgcatc

SEQ ID NO: 239419 - DNA, 25 bp, Probe Sequence
gatcgctttctacactgtattacat

SEQ ID NO: 239420 - DNA, 25 bp, Probe Sequence
gatcgccttaactactgtaaacata

SEQ ID NO: 239421 - DNA, 25 bp, Probe Sequence
gatcccttgcaatgactctaaaatc

SEQ ID NO: 239422 - DNA, 25 bp, Probe Sequence
gatcttttaagaactgcaaatactc

SEQ ID NO: 239423 - DNA, 25 bp, Probe Sequence
gatcattgtagatgaactgaagcaa

SEQ ID NO: 239424 - DNA, 25 bp, Probe Sequence
gatcattgtccatggctcaggagcc

SEQ ID NO: 239425 - DNA, 25 bp, Probe Sequence
gatcttggcgtccgccagtgaagct

SEQ ID NO: 239426 - DNA, 25 bp, Probe Sequence
gatcctggtggcgaccatggagagg

SEQ ID NO: 239427 - DNA, 25 bp, Probe Sequence
gatctctgagctgcccagcatagtc

SEQ ID NO: 239428 - DNA, 25 bp, Probe Sequence
gatctcgagctggctgctagtggag

SEQ ID NO: 239429 - DNA, 25 bp, Probe Sequence
gatcatgcagagaaggcatctgtgg

SEQ ID NO: 239430 - DNA, 25 bp, Probe Sequence
gatctgatggatatggcagtggacg

SEQ ID NO: 239431 - DNA, 25 bp, Probe Sequence
gatctcatggtccggaatgacaccc

SEQ ID NO: 239432 - DNA, 25 bp, Probe Sequence
gatcctggtatccgctaacaggtca

SEQ ID NO: 239433 - DNA, 25 bp, Probe Sequence
gatctctgattgtccccaaagcagt

SEQ ID NO: 239434 - DNA, 25 bp, Probe Sequence
gatctctactaccaccaaggagaat

SEQ ID NO: 239435 - DNA, 25 bp, Probe Sequence
gatccctttctctgaatggagagat

SEQ ID NO: 239436 - DNA, 25 bp, Probe Sequence
gatcccaaatgttcgatatggcaag

SEQ ID NO: 239437 - DNA, 25 bp, Probe Sequence
gatcccagactttgccagaggcaaa

SEQ ID NO: 239438 - DNA, 25 bp, Probe Sequence
gatctgcatcagttgtaaaggggaa

SEQ ID NO: 239439 - DNA, 25 bp, Probe Sequence
gatctctcagatttgaatgcagtac

SEQ ID NO: 239440 - DNA, 25 bp, Probe Sequence
gatctgcttgtagcaccagctattg

SEQ ID NO: 239441 - DNA, 25 bp, Probe Sequence
gatctgcctggtgaaggctatctgg

SEQ ID NO: 239442 - DNA, 25 bp, Probe Sequence
gatcagccgggtggaggcgatgcgc

SEQ ID NO: 239443 - DNA, 25 bp, Probe Sequence
gatcgttgggctgaagatcagcact

SEQ ID NO: 239444 - DNA, 25 bp, Probe Sequence
gatcgcttgagactcctaataggca

SEQ ID NO: 239445 - DNA, 25 bp, Probe Sequence
gatcgcttgagcctaggagccagag

SEQ ID NO: 239446 - DNA, 25 bp, Probe Sequence
gatcattggacactggacacactag

SEQ ID NO: 239447 - DNA, 25 bp, Probe Sequence
gatcatttcaagagagtatctagaa

SEQ ID NO: 239448 - DNA, 25 bp, Probe Sequence
gatcttctatcagtagcagtattgt

SEQ ID NO: 239449 - DNA, 25 bp, Probe Sequence
gatcttctatcagtgtctttatgga

SEQ ID NO: 239450 - DNA, 25 bp, Probe Sequence
gatcttttcactagttctgtgcaga

SEQ ID NO: 239451 - DNA, 25 bp, Probe Sequence
gatcattttccaggctgttgcatga

SEQ ID NO: 239452 - DNA, 25 bp, Probe Sequence
gatcgttacccgaactgcatcaggc

SEQ ID NO: 239453 - DNA, 25 bp, Probe Sequence
gatcgttactctgtatttaggcctg

SEQ ID NO: 239454 - DNA, 25 bp, Probe Sequence
gatcgttactctgtatttaggcctg

SEQ ID NO: 239455 - DNA, 25 bp, Probe Sequence
gatctttattctgtcattggggtat

SEQ ID NO: 239456 - DNA, 25 bp, Probe Sequence
gatcttgtattcagtcaggttaaaa

SEQ ID NO: 239457 - DNA, 25 bp, Probe Sequence
gatctgtttatctgtaccttaaata

SEQ ID NO: 239458 - DNA, 25 bp, Probe Sequence
gatctcttatactagtatccttaat

SEQ ID NO: 239459 - DNA, 25 bp, Probe Sequence
gatctactataaggtattctatatt

SEQ ID NO: 239460 - DNA, 25 bp, Probe Sequence
gatcaacctgaacggaattgctatt

SEQ ID NO: 239461 - DNA, 25 bp, Probe Sequence
gatctactctgttaccaatggcttt

SEQ ID NO: 239462 - DNA, 25 bp, Probe Sequence
gatctggtttcaaccctggatgctt

SEQ ID NO: 239463 - DNA, 25 bp, Probe Sequence
gatctggtggtcagccctaggataa

SEQ ID NO: 239464 - DNA, 25 bp, Probe Sequence
gatctggtggtcagccctaggataa

SEQ ID NO: 239465 - DNA, 25 bp, Probe Sequence
gatctgagcgagattaccaagtata

SEQ ID NO: 239466 - DNA, 25 bp, Probe Sequence
gatctcatgtagatgtaccactttc

SEQ ID NO: 239467 - DNA, 25 bp, Probe Sequence
gatctcagctttgcaaacacatttt

SEQ ID NO: 239468 - DNA, 25 bp, Probe Sequence
gatcccattcatgaagcagagcatc

SEQ ID NO: 239469 - DNA, 25 bp, Probe Sequence
gatcgagttcatgtacaagcctggg

SEQ ID NO: 239470 - DNA, 25 bp, Probe Sequence
gatcagtgtactgtcctggcaggag

SEQ ID NO: 239471 - DNA, 25 bp, Probe Sequence
gatcaggaactttagttgaagcgta

SEQ ID NO: 239472 - DNA, 25 bp, Probe Sequence
gatctgtgcaacatttttgtactgt

SEQ ID NO: 239473 - DNA, 25 bp, Probe Sequence
gatcatgcatgcgccattttttact

SEQ ID NO: 239474 - DNA, 25 bp, Probe Sequence
gataacccactttatttgaatgtgt

SEQ ID NO: 239475 - DNA, 25 bp, Probe Sequence
gatctacaccacttaattatgaatt

SEQ ID NO: 239476 - DNA, 25 bp, Probe Sequence
gatctacatggcattaattgattta

SEQ ID NO: 239477 - DNA, 25 bp, Probe Sequence
gattacaggcttgaaagtctaactt

SEQ ID NO: 239478 - DNA, 25 bp, Probe Sequence
gataacgtttgtagacagtcacgtc

SEQ ID NO: 239479 - DNA, 25 bp, Probe Sequence
gataagcagttatgtgacctcacgt

SEQ ID NO: 239480 - DNA, 25 bp, Probe Sequence
gatcaaattcaattgtggcccatgc

SEQ ID NO: 239481 - DNA, 25 bp, Probe Sequence
gatcatcacattttgatacctgcca

SEQ ID NO: 239482 - DNA, 25 bp, Probe Sequence
gatcgctcactgttgtgaatcacca

SEQ ID NO: 239483 - DNA, 25 bp, Probe Sequence
gatcccctctgtagagatcatgcga

SEQ ID NO: 239484 - DNA, 25 bp, Probe Sequence
gatcccacctatgagatcagaatat

SEQ ID NO: 239485 - DNA, 25 bp, Probe Sequence
gatcccctcatcaaggtgaatgata

SEQ ID NO: 239486 - DNA, 25 bp, Probe Sequence
gatcgcctcccttgatgtcaagatc

SEQ ID NO: 239487 - DNA, 25 bp, Probe Sequence
gatctgcctacctttgtgaattcat

SEQ ID NO: 239488 - DNA, 25 bp, Probe Sequence
gatctcactacagctcatctggtta

SEQ ID NO: 239489 - DNA, 25 bp, Probe Sequence
gatctcgctgaaagccacatggatt

SEQ ID NO: 239490 - DNA, 25 bp, Probe Sequence
gatcggctgagcagatctcagacag

SEQ ID NO: 239491 - DNA, 25 bp, Probe Sequence
gatctgaagacagcatgtacacagc

SEQ ID NO: 239492 - DNA, 25 bp, Probe Sequence
gatctaaggcagaaggcactcagca

SEQ ID NO: 239493 - DNA, 25 bp, Probe Sequence
gatcttaggcaaaataccagctgat

SEQ ID NO: 239494 - DNA, 25 bp, Probe Sequence
gatcttaggcaaaataccagctgat

SEQ ID NO: 239495 - DNA, 25 bp, Probe Sequence
gatcttgggcagaacataccgggtg

SEQ ID NO: 239496 - DNA, 25 bp, Probe Sequence
gatcactgagggatttccgcgagct

SEQ ID NO: 239497 - DNA, 25 bp, Probe Sequence
gatcatctggggtttgtcatcacca

SEQ ID NO: 239498 - DNA, 25 bp, Probe Sequence
gatcttagctcacttattccaaaac

SEQ ID NO: 239499 - DNA, 25 bp, Probe Sequence
gatcttgactcactgcaacatctgc

SEQ ID NO: 239500 - DNA, 25 bp, Probe Sequence
gatcttttcagttaatatgcaacat

SEQ ID NO: 239501 - DNA, 25 bp, Probe Sequence
gatcagttgacagtggcaattaaac

SEQ ID NO: 239502 - DNA, 25 bp, Probe Sequence
gatcacgatgatcctgacaatgctc

SEQ ID NO: 239503 - DNA, 25 bp, Probe Sequence
gatctgcaatgtagtacaatcacct

SEQ ID NO: 239504 - DNA, 25 bp, Probe Sequence
gatcatgcacagagtgacaggcaca

SEQ ID NO: 239505 - DNA, 25 bp, Probe Sequence
gatcgcgagttcaacatgaccaact

SEQ ID NO: 239506 - DNA, 25 bp, Probe Sequence
gatcgtgcaggatacagcaccaccc

SEQ ID NO: 239507 - DNA, 25 bp, Probe Sequence
gatcgagctggataagagcgcaggc

SEQ ID NO: 239508 - DNA, 25 bp, Probe Sequence
gatcgacgtgatcaagcaggctgac

SEQ ID NO: 239509 - DNA, 25 bp, Probe Sequence
gatcgacgtgatcaagcaggctgac

SEQ ID NO: 239510 - DNA, 25 bp, Probe Sequence
gatcgactgtgtaaacaactagaga

SEQ ID NO: 239511 - DNA, 25 bp, Probe Sequence
gatcgacgtgatgaaatcatatcag

SEQ ID NO: 239512 - DNA, 25 bp, Probe Sequence
gataatgcgtgctaataacagtagt

SEQ ID NO: 239513 - DNA, 25 bp, Probe Sequence
gatagatcgccatcatgaacgacac

SEQ ID NO: 239514 - DNA, 25 bp, Probe Sequence
gatcgccacatcacagaatcgtatc

SEQ ID NO: 239515 - DNA, 25 bp, Probe Sequence
gatctgcacacacaaatatagatgt

SEQ ID NO: 239516 - DNA, 25 bp, Probe Sequence
gatctgccaactttcaacagtgtct

SEQ ID NO: 239517 - DNA, 25 bp, Probe Sequence
gatctagacctaccacacatggtca

SEQ ID NO: 239518 - DNA, 25 bp, Probe Sequence
gatctagagtcttgtctccaatgtc

SEQ ID NO: 239519 - DNA, 25 bp, Probe Sequence
gatcaggagtccttcaataatgtta

SEQ ID NO: 239520 - DNA, 25 bp, Probe Sequence
gatcggagtcagatgagtacatgtt

SEQ ID NO: 239521 - DNA, 25 bp, Probe Sequence
gatcgagatcactgtgagtggttgt

SEQ ID NO: 239522 - DNA, 25 bp, Probe Sequence
gatctctggcagtggaggaagtctc

SEQ ID NO: 239523 - DNA, 25 bp, Probe Sequence
gatctctggcagtggaggaagtctc

SEQ ID NO: 239524 - DNA, 25 bp, Probe Sequence
gatcttctgccatggatgaaaactc

SEQ ID NO: 239525 - DNA, 25 bp, Probe Sequence
gatcttgctgcctttgacaaatccc

SEQ ID NO: 239526 - DNA, 25 bp, Probe Sequence
gatcttcataacggacaaactgaac

SEQ ID NO: 239527 - DNA, 25 bp, Probe Sequence
gatctttgagacgggcatgaactgc

SEQ ID NO: 239528 - DNA, 25 bp, Probe Sequence
gatcttcgggctgtcagagttggtc

SEQ ID NO: 239529 - DNA, 25 bp, Probe Sequence
gatcttcgggctgtcagagttggtc

SEQ ID NO: 239530 - DNA, 25 bp, Probe Sequence
gatcattgggttcaggagttgagac

SEQ ID NO: 239531 - DNA, 25 bp, Probe Sequence
gatcacgctggatttagggtaggtc

SEQ ID NO: 239532 - DNA, 25 bp, Probe Sequence
tactggggaaactggccatggcctg

SEQ ID NO: 239533 - DNA, 25 bp, Probe Sequence
tcctgggtaaggggcggaggactgc

SEQ ID NO: 239534 - DNA, 25 bp, Probe Sequence
tcacaggcgttaggggttaggactt

SEQ ID NO: 239535 - DNA, 25 bp, Probe Sequence
tcccacgttgggatgttagtcttta

SEQ ID NO: 239536 - DNA, 25 bp, Probe Sequence
tggccacagttgaggggaactttgc

SEQ ID NO: 239537 - DNA, 25 bp, Probe Sequence
tgaccggcttacagggatattttta

SEQ ID NO: 239538 - DNA, 25 bp, Probe Sequence
gatcaaggtctgcaagggaattctt

SEQ ID NO: 239539 - DNA, 25 bp, Probe Sequence
gataatgttttatgggaaccttgta

SEQ ID NO: 239540 - DNA, 25 bp, Probe Sequence
gatactttataattttaaccggcat

SEQ ID NO: 239541 - DNA, 25 bp, Probe Sequence
gataatttgaatcaagggggcggtt

SEQ ID NO: 239542 - DNA, 25 bp, Probe Sequence
gatctttctgacacacttagggcag

SEQ ID NO: 239543 - DNA, 25 bp, Probe Sequence
gatcttcttcaatatcttggtgccg

SEQ ID NO: 239544 - DNA, 25 bp, Probe Sequence
gatcttcttcaatatcttggtgccg

SEQ ID NO: 239545 - DNA, 25 bp, Probe Sequence
gatcttcttcaatatcttggtgccg

SEQ ID NO: 239546 - DNA, 25 bp, Probe Sequence
gatctgtttcattttgttttgccgt

SEQ ID NO: 239547 - DNA, 25 bp, Probe Sequence
gatcatttgtcatatggtttttgcc

SEQ ID NO: 239548 - DNA, 25 bp, Probe Sequence
gatcttcacaaagttgtcttttcac

SEQ ID NO: 239549 - DNA, 25 bp, Probe Sequence
gatctgtctcaaatatttcttatta

SEQ ID NO: 239550 - DNA, 25 bp, Probe Sequence
gatcatttcattaagatctctaatc

SEQ ID NO: 239551 - DNA, 25 bp, Probe Sequence
gatcattttttagtctctatccttc

SEQ ID NO: 239552 - DNA, 25 bp, Probe Sequence
gatctatctttttttgttaccttca

SEQ ID NO: 239553 - DNA, 25 bp, Probe Sequence
gatctactagtgataattctacctt

SEQ ID NO: 239554 - DNA, 25 bp, Probe Sequence
gatctgtttggaaacaaccccttga

SEQ ID NO: 239555 - DNA, 25 bp, Probe Sequence
gattcccggatagcaacctcgggac

SEQ ID NO: 239556 - DNA, 25 bp, Probe Sequence
gatcatgcggaggtcagtcaccttc

SEQ ID NO: 239557 - DNA, 25 bp, Probe Sequence
gatagatggatgcatgcagttcgtc

SEQ ID NO: 239558 - DNA, 25 bp, Probe Sequence
gatagacgacagagcttcgcatcct

SEQ ID NO: 239559 - DNA, 25 bp, Probe Sequence
gataccgatacatcttctgcatacg

SEQ ID NO: 239560 - DNA, 25 bp, Probe Sequence
gataaccaaatgtctggctgtttgc

SEQ ID NO: 239561 - DNA, 25 bp, Probe Sequence
gatcaataaccatcgtggatattcc

SEQ ID NO: 239562 - DNA, 25 bp, Probe Sequence
gatcatgaaaaacggggagatgccc

SEQ ID NO: 239563 - DNA, 25 bp, Probe Sequence
gtgcgacgagggtggagaagaccaa

SEQ ID NO: 239564 - DNA, 25 bp, Probe Sequence
gatcacacggcggcttggagaaacc

SEQ ID NO: 239565 - DNA, 25 bp, Probe Sequence
gataaggcctgaactgggaaaccca

SEQ ID NO: 239566 - DNA, 25 bp, Probe Sequence
gatacgctgaagtgtgaggaaatgc

SEQ ID NO: 239567 - DNA, 25 bp, Probe Sequence
gataagctggaattgagacggaaac

SEQ ID NO: 239568 - DNA, 25 bp, Probe Sequence
gatagtgtggaatagaggctgacag

SEQ ID NO: 239569 - DNA, 25 bp, Probe Sequence
gataatgttgtctcgatgccttcga

SEQ ID NO: 239570 - DNA, 25 bp, Probe Sequence
gatcttttgtcttttcacaattgac

SEQ ID NO: 239571 - DNA, 25 bp, Probe Sequence
gatcttatattggtttgcacaagtt

SEQ ID NO: 239572 - DNA, 25 bp, Probe Sequence
gatttcatattgcacttggagggta

SEQ ID NO: 239573 - DNA, 25 bp, Probe Sequence
gatcattgcttttgtcctggaagga

SEQ ID NO: 239574 - DNA, 25 bp, Probe Sequence
gatcttgagtgtactccagagaaag

SEQ ID NO: 239575 - DNA, 25 bp, Probe Sequence
gatcttgcgtgaactcatcgatgag

SEQ ID NO: 239576 - DNA, 25 bp, Probe Sequence
gatcggcgcagagtccgtgtgagac

SEQ ID NO: 239577 - DNA, 25 bp, Probe Sequence
gatcggcgcagagtccgtgtgagac

SEQ ID NO: 239578 - DNA, 25 bp, Probe Sequence
gatcagccgaactctagggacttgg

SEQ ID NO: 239579 - DNA, 25 bp, Probe Sequence
gatcacaccttctctagggaggagg

SEQ ID NO: 239580 - DNA, 25 bp, Probe Sequence
gatcaaccccgacaggatgaagaca

SEQ ID NO: 239581 - DNA, 25 bp, Probe Sequence
gatcatcaccaggggcttacagaaa

SEQ ID NO: 239582 - DNA, 25 bp, Probe Sequence
gatcacaccatggagactttctact

SEQ ID NO: 239583 - DNA, 25 bp, Probe Sequence
gataatcgagtctacctcttcagta

SEQ ID NO: 239584 - DNA, 25 bp, Probe Sequence
gatctgtcctgccaggaggtgtgag

SEQ ID NO: 239585 - DNA, 25 bp, Probe Sequence
gatcttcacagttggagtttgaccc

SEQ ID NO: 239586 - DNA, 25 bp, Probe Sequence
gatctgtagatgtctgatggtttga

SEQ ID NO: 239587 - DNA, 25 bp, Probe Sequence
gatctgctagtgctgtaatattgta

SEQ ID NO: 239588 - DNA, 25 bp, Probe Sequence
gatctgatgttccttttatttataa

SEQ ID NO: 239589 - DNA, 25 bp, Probe Sequence
gatcttttatgcattgtttctttca

SEQ ID NO: 239590 - DNA, 25 bp, Probe Sequence
gatctgtttggactatgttttcttt

SEQ ID NO: 239591 - DNA, 25 bp, Probe Sequence
gatctgttatctagctgagttcatt

SEQ ID NO: 239592 - DNA, 25 bp, Probe Sequence
gatcataaacctcagattcatctgt

SEQ ID NO: 239593 - DNA, 25 bp, Probe Sequence
gataaagacctgcaactgttccgca

SEQ ID NO: 239594 - DNA, 25 bp, Probe Sequence
gataaaaagtcctctgtcaaagaaa

SEQ ID NO: 239595 - DNA, 25 bp, Probe Sequence
gataaaacagagaccctaagttgaa

SEQ ID NO: 239596 - DNA, 25 bp, Probe Sequence
gataataaaacagctttgacttgaa

SEQ ID NO: 239597 - DNA, 25 bp, Probe Sequence
gatagaaagccctctttactctgat

SEQ ID NO: 239598 - DNA, 25 bp, Probe Sequence
gataaaacacccgattaacagatgt

SEQ ID NO: 239599 - DNA, 25 bp, Probe Sequence
gataaattcatagcccaacaaggta

SEQ ID NO: 239600 - DNA, 25 bp, Probe Sequence
gataaacacaaaatccattccaggt

SEQ ID NO: 239601 - DNA, 25 bp, Probe Sequence
gataatagtacatgtcaccttaggt

SEQ ID NO: 239602 - DNA, 25 bp, Probe Sequence
gatttcgaacaatcacctccagtta

SEQ ID NO: 239603 - DNA, 25 bp, Probe Sequence
gatcttggcaagaaaccctaatctc

SEQ ID NO: 239604 - DNA, 25 bp, Probe Sequence
gatcttgacaagaccaacaaaacaa

SEQ ID NO: 239605 - DNA, 25 bp, Probe Sequence
gatcatccacaagccaaagaacacg

SEQ ID NO: 239606 - DNA, 25 bp, Probe Sequence
gatctgtcaagagtaagaggcaaca

SEQ ID NO: 239607 - DNA, 25 bp, Probe Sequence
gatcaccaacagagagaggcaccct

SEQ ID NO: 239608 - DNA, 25 bp, Probe Sequence
gatcaccaagagtatgaggctcctg

SEQ ID NO: 239609 - DNA, 25 bp, Probe Sequence
gatcaccttgcacatgaagtgagct

SEQ ID NO: 239610 - DNA, 25 bp, Probe Sequence
gatcatcctctgagtagggctgcca

SEQ ID NO: 239611 - DNA, 25 bp, Probe Sequence
gatctcctttatcatgtagctctag

SEQ ID NO: 239612 - DNA, 25 bp, Probe Sequence
gatcatcctgcgcaaattcagatta

SEQ ID NO: 239613 - DNA, 25 bp, Probe Sequence
gattacgcagcacatacttactaac

SEQ ID NO: 239614 - DNA, 25 bp, Probe Sequence
gattacgtcatccagactactcgaa

SEQ ID NO: 239615 - DNA, 25 bp, Probe Sequence
gataacgtaccaagaagtcggatcg

SEQ ID NO: 239616 - DNA, 25 bp, Probe Sequence
tgaacagggccctgaagcgcgtaca

SEQ ID NO: 239617 - DNA, 25 bp, Probe Sequence
gataaaggcaccgaacagcgttgaa

SEQ ID NO: 239618 - DNA, 25 bp, Probe Sequence
gatagagtggcctgagagcagtgct

SEQ ID NO: 239619 - DNA, 25 bp, Probe Sequence
gatagtgcccctggaagtgtcaaac

SEQ ID NO: 239620 - DNA, 25 bp, Probe Sequence
gatagaccggcagtggcagtacgac

SEQ ID NO: 239621 - DNA, 25 bp, Probe Sequence
gatacacgggacccagaatccacgg

SEQ ID NO: 239622 - DNA, 25 bp, Probe Sequence
gatacctagggcggaagtgctctcg

SEQ ID NO: 239623 - DNA, 25 bp, Probe Sequence
gatagcttacggggcacagagatcc

SEQ ID NO: 239624 - DNA, 25 bp, Probe Sequence
gatcagatatacgagaacgccatga

SEQ ID NO: 239625 - DNA, 25 bp, Probe Sequence
gatctgatcatgtacagttcccttt

SEQ ID NO: 239626 - DNA, 25 bp, Probe Sequence
gatctgttgatgaaattgctatgtt

SEQ ID NO: 239627 - DNA, 25 bp, Probe Sequence
gatctttacaactttatgtttgttt

SEQ ID NO: 239628 - DNA, 25 bp, Probe Sequence
gattaatacagatccaagttttaaa

SEQ ID NO: 239629 - DNA, 25 bp, Probe Sequence
gatcaccaaatatccacgtattcta

SEQ ID NO: 239630 - DNA, 25 bp, Probe Sequence
gatcaggcaaacttccactgtttct

SEQ ID NO: 239631 - DNA, 25 bp, Probe Sequence
gatcatgtgcatatcatcccattgt

SEQ ID NO: 239632 - DNA, 25 bp, Probe Sequence
gatctgccttataagcacagtcatc

SEQ ID NO: 239633 - DNA, 25 bp, Probe Sequence
gatcatgaatttgaaagctttcctc

SEQ ID NO: 239634 - DNA, 25 bp, Probe Sequence
gatctaactgatgaaaatttctctc

SEQ ID NO: 239635 - DNA, 25 bp, Probe Sequence
gatctaagctgctttccatcttttc

SEQ ID NO: 239636 - DNA, 25 bp, Probe Sequence
gatctagatattttcctctttttct

SEQ ID NO: 239637 - DNA, 25 bp, Probe Sequence
gtaaaaccatatcttaattggctac

SEQ ID NO: 239638 - DNA, 25 bp, Probe Sequence
gataaaactctatggtacacctgct

SEQ ID NO: 239639 - DNA, 25 bp, Probe Sequence
gatcagaaacttgctattccaccca

SEQ ID NO: 239640 - DNA, 25 bp, Probe Sequence
gataaacactatgcttaggactcca

SEQ ID NO: 239641 - DNA, 25 bp, Probe Sequence
gataacccttggagatgtgactaca

SEQ ID NO: 239642 - DNA, 25 bp, Probe Sequence
gataaaccatttaccagccactaaa

SEQ ID NO: 239643 - DNA, 25 bp, Probe Sequence
gatacacacctttcacaagggcaaa

SEQ ID NO: 239644 - DNA, 25 bp, Probe Sequence
gatatatccctcccaaaaggaaaca

SEQ ID NO: 239645 - DNA, 25 bp, Probe Sequence
gatcaaccagtaccaggtggtgaaa

SEQ ID NO: 239646 - DNA, 25 bp, Probe Sequence
gatcaacatcgcctccatgttgggc

SEQ ID NO: 239647 - DNA, 25 bp, Probe Sequence
gatcatcagatcagtctcaaatggg

SEQ ID NO: 239648 - DNA, 25 bp, Probe Sequence
gatcatcgactacctttatgagacg

SEQ ID NO: 239649 - DNA, 25 bp, Probe Sequence
gatctgccttacgatgttcatatgt

SEQ ID NO: 239650 - DNA, 25 bp, Probe Sequence
gatctgccttttattcatcagtctt

SEQ ID NO: 239651 - DNA, 25 bp, Probe Sequence
gatctgctattgttatttctcctct

SEQ ID NO: 239652 - DNA, 25 bp, Probe Sequence
gatctgtaatgttatttccacttat

SEQ ID NO: 239653 - DNA, 25 bp, Probe Sequence
gatctgtaatgttatttccacttat

SEQ ID NO: 239654 - DNA, 25 bp, Probe Sequence
gatcttaagtgtattgctctttcat

SEQ ID NO: 239655 - DNA, 25 bp, Probe Sequence
gatcttaagctttcttttgctctct

SEQ ID NO: 239656 - DNA, 25 bp, Probe Sequence
gatctctaatctgttttgagtcttt

SEQ ID NO: 239657 - DNA, 25 bp, Probe Sequence
gatctatgatacgcttttttctttc

SEQ ID NO: 239658 - DNA, 25 bp, Probe Sequence
gatcaagtgacgtattattttttcc

SEQ ID NO: 239659 - DNA, 25 bp, Probe Sequence
gatcacaggacgttgctttttcact

SEQ ID NO: 239660 - DNA, 25 bp, Probe Sequence
gatcatgcaggaggcctttctggtc

SEQ ID NO: 239661 - DNA, 25 bp, Probe Sequence
gatctgggattccatgttttgtgct

SEQ ID NO: 239662 - DNA, 25 bp, Probe Sequence
gatctgtggttgaatttgctgtgtt

SEQ ID NO: 239663 - DNA, 25 bp, Probe Sequence
gatcttgtgttttgctatccttttt

SEQ ID NO: 239664 - DNA, 25 bp, Probe Sequence
gatctatgctttgagtttgctttct

SEQ ID NO: 239665 - DNA, 25 bp, Probe Sequence
gatctatgctgcatccagtttgcaa

SEQ ID NO: 239666 - DNA, 25 bp, Probe Sequence
gatacatggtatccagtttgcatag

SEQ ID NO: 239667 - DNA, 25 bp, Probe Sequence
gatagctggttgtttttcaggggcc

SEQ ID NO: 239668 - DNA, 25 bp, Probe Sequence
gatacgtttttcttatacggattct

SEQ ID NO: 239669 - DNA, 25 bp, Probe Sequence
gatcattgttgtattctaaggagtg

SEQ ID NO: 239670 - DNA, 25 bp, Probe Sequence
gatctctattgtaatctctattgga

SEQ ID NO: 239671 - DNA, 25 bp, Probe Sequence
gatcaatggatttactgcgttggca

SEQ ID NO: 239672 - DNA, 25 bp, Probe Sequence
gatcagatgtatggcaacgtggtgg

SEQ ID NO: 239673 - DNA, 25 bp, Probe Sequence
gatcaagttgagtaccatgaagggc

SEQ ID NO: 239674 - DNA, 25 bp, Probe Sequence
gataacttgagcaccgtcatggctt

SEQ ID NO: 239675 - DNA, 25 bp, Probe Sequence
gataacctgatctaccaagtggcta

SEQ ID NO: 239676 - DNA, 25 bp, Probe Sequence
gatcatatcctcagaccaggtggaa

SEQ ID NO: 239677 - DNA, 25 bp, Probe Sequence
gatcaattcacaaggccatcttaga

SEQ ID NO: 239678 - DNA, 25 bp, Probe Sequence
gataccatcggggaccttaagaagc

SEQ ID NO: 239679 - DNA, 25 bp, Probe Sequence
gataccgtgggtgccctgaagagca

SEQ ID NO: 239680 - DNA, 25 bp, Probe Sequence
gataaaggtggtgcccagcgcaagc

SEQ ID NO: 239681 - DNA, 25 bp, Probe Sequence
gataaggagtggatgcccgtcacca

SEQ ID NO: 239682 - DNA, 25 bp, Probe Sequence
gtatagggtgataaccttccccaga

SEQ ID NO: 239683 - DNA, 25 bp, Probe Sequence
gatcaagggtgttacactgggcttc

SEQ ID NO: 239684 - DNA, 25 bp, Probe Sequence
gataagcggctggtgacgctgcgac

SEQ ID NO: 239685 - DNA, 25 bp, Probe Sequence
gatcacgctggaactgagttgcgac

SEQ ID NO: 239686 - DNA, 25 bp, Probe Sequence
gatctcctggtgctgcagaccagac

SEQ ID NO: 239687 - DNA, 25 bp, Probe Sequence
gattccccactgagcaacagaaaca

SEQ ID NO: 239688 - DNA, 25 bp, Probe Sequence
gattggcccaggaggaaaacacgac

SEQ ID NO: 239689 - DNA, 25 bp, Probe Sequence
gttggcccagtagaaattgacagta

SEQ ID NO: 239690 - DNA, 25 bp, Probe Sequence
gataccccctagaaaattatactat

SEQ ID NO: 239691 - DNA, 25 bp, Probe Sequence
gataccgacctactaagaactacct

SEQ ID NO: 239692 - DNA, 25 bp, Probe Sequence
gatacctgccttgtacttagtacct

SEQ ID NO: 239693 - DNA, 25 bp, Probe Sequence
gtaaaacttcgttctttatcagcct

SEQ ID NO: 239694 - DNA, 25 bp, Probe Sequence
gataaactttcatcgttcttagcct

SEQ ID NO: 239695 - DNA, 25 bp, Probe Sequence
gataagttttaaagtactaatctgt

SEQ ID NO: 239696 - DNA, 25 bp, Probe Sequence
gataaatgtaatcactgtaaacatc

SEQ ID NO: 239697 - DNA, 25 bp, Probe Sequence
gataatagaaatccaaccaatgaat

SEQ ID NO: 239698 - DNA, 25 bp, Probe Sequence
gatagctaaattgtaccatagtact

SEQ ID NO: 239699 - DNA, 25 bp, Probe Sequence
gatcaataaattggacccacagaaa

SEQ ID NO: 239700 - DNA, 25 bp, Probe Sequence
gatcttattttatcctatatataca

SEQ ID NO: 239701 - DNA, 25 bp, Probe Sequence
gatcatgtattttctactcaataaa

SEQ ID NO: 239702 - DNA, 25 bp, Probe Sequence
gatcttcatgattgtcattccactc

SEQ ID NO: 239703 - DNA, 25 bp, Probe Sequence
gatcaatctgaactatcttagccca

SEQ ID NO: 239704 - DNA, 25 bp, Probe Sequence
gatcacaagcacaaatctttcccac

SEQ ID NO: 239705 - DNA, 25 bp, Probe Sequence
gatcatcaccttatcttatccaagc

SEQ ID NO: 239706 - DNA, 25 bp, Probe Sequence
gatctcagtgatgtttgaaccttct

SEQ ID NO: 239707 - DNA, 25 bp, Probe Sequence
gatctcagtgttattacaggtgctt

SEQ ID NO: 239708 - DNA, 25 bp, Probe Sequence
gatcacgatgttgtggcaatggcac

SEQ ID NO: 239709 - DNA, 25 bp, Probe Sequence
gatcatgcgatactttgtcagggaa

SEQ ID NO: 239710 - DNA, 25 bp, Probe Sequence
gatcatgctgatcttttcagttaat

SEQ ID NO: 239711 - DNA, 25 bp, Probe Sequence
gatcaggatcagtttgacagttttc

SEQ ID NO: 239712 - DNA, 25 bp, Probe Sequence
gtaggcaccgttgaggtgtcctttg

SEQ ID NO: 239713 - DNA, 25 bp, Probe Sequence
gttgagagggtttgagtttccgttg

SEQ ID NO: 239714 - DNA, 25 bp, Probe Sequence
gttggcagcagtgccagagttccgc

SEQ ID NO: 239715 - DNA, 25 bp, Probe Sequence
gttggcaagcgagcaatttccacct

SEQ ID NO: 239716 - DNA, 25 bp, Probe Sequence
gatctccaagctgaaacttccacgt

SEQ ID NO: 239717 - DNA, 25 bp, Probe Sequence
gatctctcggcagaaactctacaag

SEQ ID NO: 239718 - DNA, 25 bp, Probe Sequence
gatacctggcaggaaaataccaatg

SEQ ID NO: 239719 - DNA, 25 bp, Probe Sequence
gataccttgcagtaagtaagtcgaa

SEQ ID NO: 239720 - DNA, 25 bp, Probe Sequence
gatcacgcccggagtagaagcgcat

SEQ ID NO: 239721 - DNA, 25 bp, Probe Sequence
gatctgctcaccctcggtgagcaac

SEQ ID NO: 239722 - DNA, 25 bp, Probe Sequence
gatctcacacaacgggtgatctcac

SEQ ID NO: 239723 - DNA, 25 bp, Probe Sequence
gatacaaatggcggaggattgctgc

SEQ ID NO: 239724 - DNA, 25 bp, Probe Sequence
gatacaaatcgcagagctgaggcac

SEQ ID NO: 239725 - DNA, 25 bp, Probe Sequence
gatagacatacggaagcgaggcctg

SEQ ID NO: 239726 - DNA, 25 bp, Probe Sequence
gatcagcactaagagcgtgggccga

SEQ ID NO: 239727 - DNA, 25 bp, Probe Sequence
gatcagcctgaagacgctgctggag

SEQ ID NO: 239728 - DNA, 25 bp, Probe Sequence
gatctaagtctccagcatctgtgga

SEQ ID NO: 239729 - DNA, 25 bp, Probe Sequence
gatctcatcagtgcgtttggaacag

SEQ ID NO: 239730 - DNA, 25 bp, Probe Sequence
gatcaaagttctacgtgcgagagcc

SEQ ID NO: 239731 - DNA, 25 bp, Probe Sequence
gatcaaatttagtcatggagagaac

SEQ ID NO: 239732 - DNA, 25 bp, Probe Sequence
gatcaagggctatcattggagagac

SEQ ID NO: 239733 - DNA, 25 bp, Probe Sequence
gatcaatcgtgcatccttagtgaac

SEQ ID NO: 239734 - DNA, 25 bp, Probe Sequence
gatcatacagtgaggctacagtgac

SEQ ID NO: 239735 - DNA, 25 bp, Probe Sequence
gatcatacagtgaggctacagtgac

SEQ ID NO: 239736 - DNA, 25 bp, Probe Sequence
gatcatacagtgaggctacagtgac

SEQ ID NO: 239737 - DNA, 25 bp, Probe Sequence
gatcatgatcagcttgagcaatttc

SEQ ID NO: 239738 - DNA, 25 bp, Probe Sequence
gataatcgagtctacctcttcagta

SEQ ID NO: 239739 - DNA, 25 bp, Probe Sequence
gataacttcatagctgcctgtacag

SEQ ID NO: 239740 - DNA, 25 bp, Probe Sequence
gatcaatttcaaaccctgcttatga

SEQ ID NO: 239741 - DNA, 25 bp, Probe Sequence
gatcagatattccttacatttttca

SEQ ID NO: 239742 - DNA, 25 bp, Probe Sequence
gatcagatattccttacatttttca

SEQ ID NO: 239743 - DNA, 25 bp, Probe Sequence
gatcaagtacctattgttgatgtca

SEQ ID NO: 239744 - DNA, 25 bp, Probe Sequence
gatcaataactccaattctaggaat

SEQ ID NO: 239745 - DNA, 25 bp, Probe Sequence
gatcataatcactcaactttgaagt

SEQ ID NO: 239746 - DNA, 25 bp, Probe Sequence
gatctagacatcttactattatgaa

SEQ ID NO: 239747 - DNA, 25 bp, Probe Sequence
gatcagcaacattgtcattaaggac

SEQ ID NO: 239748 - DNA, 25 bp, Probe Sequence
gatcagcaagtgtccttaagtcaaa

SEQ ID NO: 239749 - DNA, 25 bp, Probe Sequence
gattaaggtgggtatattcaaaaga

SEQ ID NO: 239750 - DNA, 25 bp, Probe Sequence
gataaaggaagtatattcatccaaa

SEQ ID NO: 239751 - DNA, 25 bp, Probe Sequence
gataacaaatgccttttgtagccaa

SEQ ID NO: 239752 - DNA, 25 bp, Probe Sequence
gataaaccagaaagtgtattgccaa

SEQ ID NO: 239753 - DNA, 25 bp, Probe Sequence
gatcaaacacggtggtcatcatgaa

SEQ ID NO: 239754 - DNA, 25 bp, Probe Sequence
gatcataatactggtgtcggacaaa

SEQ ID NO: 239755 - DNA, 25 bp, Probe Sequence
gatcagggacatgttgctggccaat

SEQ ID NO: 239756 - DNA, 25 bp, Probe Sequence
gatcatgggtctagatggggccacc

SEQ ID NO: 239757 - DNA, 25 bp, Probe Sequence
gatcatgaggtcaggaggtcgcgac

SEQ ID NO: 239758 - DNA, 25 bp, Probe Sequence
gatcagatggccagtagtggtggac

SEQ ID NO: 239759 - DNA, 25 bp, Probe Sequence
gatagatgcaggcgggtgagctgcc

SEQ ID NO: 239760 - DNA, 25 bp, Probe Sequence
gatcagacagagtggttcatcgaca

SEQ ID NO: 239761 - DNA, 25 bp, Probe Sequence
gatcaggcaattcggtcaattgtca

SEQ ID NO: 239762 - DNA, 25 bp, Probe Sequence
gatcatacgaattggatcaatcttg

SEQ ID NO: 239763 - DNA, 25 bp, Probe Sequence
gatcatatcaacactgtaactgctg

SEQ ID NO: 239764 - DNA, 25 bp, Probe Sequence
gatactgctattttgaaacctggag

SEQ ID NO: 239765 - DNA, 25 bp, Probe Sequence
gatactgctattttgaaacctggag

SEQ ID NO: 239766 - DNA, 25 bp, Probe Sequence
gatactgctattttgaaacctggag

SEQ ID NO: 239767 - DNA, 25 bp, Probe Sequence
gatacatggaccaatgaattcccta

SEQ ID NO: 239768 - DNA, 25 bp, Probe Sequence
gataagaatgtcatcttctccccac

SEQ ID NO: 239769 - DNA, 25 bp, Probe Sequence
gataagattccagtctatcttctcc

SEQ ID NO: 239770 - DNA, 25 bp, Probe Sequence
gataaactcacagagatctactcag

SEQ ID NO: 239771 - DNA, 25 bp, Probe Sequence
gataaactcacagagatctactcag

SEQ ID NO: 239772 - DNA, 25 bp, Probe Sequence
gataaactgacatggctaactgcaa

SEQ ID NO: 239773 - DNA, 25 bp, Probe Sequence
gataaactgacatggctaactgcaa

SEQ ID NO: 239774 - DNA, 25 bp, Probe Sequence
gtaaactgatacataacctaaatta

SEQ ID NO: 239775 - DNA, 25 bp, Probe Sequence
gataaactcaccataagcaataaca

SEQ ID NO: 239776 - DNA, 25 bp, Probe Sequence
gataatactatcaattcttgcaaaa

SEQ ID NO: 239777 - DNA, 25 bp, Probe Sequence
gataattacctactctggctagaag

SEQ ID NO: 239778 - DNA, 25 bp, Probe Sequence
gatcaggtaacaactccgtgggtgc

SEQ ID NO: 239779 - DNA, 25 bp, Probe Sequence
gataggtacaatgtcgtgagggcgc

SEQ ID NO: 239780 - DNA, 25 bp, Probe Sequence
gatagggctaatcccaagggtgcct

SEQ ID NO: 239781 - DNA, 25 bp, Probe Sequence
ggattggcacaaccaaaattggcct

SEQ ID NO: 239782 - DNA, 25 bp, Probe Sequence
ggattggccagggagaagaccctac

SEQ ID NO: 239783 - DNA, 25 bp, Probe Sequence
gttgtaccaatgccaaaaccctaag

SEQ ID NO: 239784 - DNA, 25 bp, Probe Sequence
gataccaagttgtaaaacacctaag

SEQ ID NO: 239785 - DNA, 25 bp, Probe Sequence
gattcccagcttgagaaacacctct

SEQ ID NO: 239786 - DNA, 25 bp, Probe Sequence
gatcttaacatcaggaattctccct

SEQ ID NO: 239787 - DNA, 25 bp, Probe Sequence
gatctataattgcgcaatattcacc

SEQ ID NO: 239788 - DNA, 25 bp, Probe Sequence
gatctattttgcctgaatttccacc

SEQ ID NO: 239789 - DNA, 25 bp, Probe Sequence
gatcttcagtatatgaattaccctt

SEQ ID NO: 239790 - DNA, 25 bp, Probe Sequence
gatcttcagtatatgaattaccctt

SEQ ID NO: 239791 - DNA, 25 bp, Probe Sequence
gatctatagtttcaatgcaatccca

SEQ ID NO: 239792 - DNA, 25 bp, Probe Sequence
gatctaaatggtaatctgaacccaa

SEQ ID NO: 239793 - DNA, 25 bp, Probe Sequence
gatctcaaatcattaatctaactct

SEQ ID NO: 239794 - DNA, 25 bp, Probe Sequence
gatcatcaagactttatccaaggag

SEQ ID NO: 239795 - DNA, 25 bp, Probe Sequence
gatcatgaattcttttcccttagcc

SEQ ID NO: 239796 - DNA, 25 bp, Probe Sequence
gttgctgattctgttccggaagccg

SEQ ID NO: 239797 - DNA, 25 bp, Probe Sequence
gatacgtactatgaccgaaatgccg

SEQ ID NO: 239798 - DNA, 25 bp, Probe Sequence
gatcacagatacatccattccaaag

SEQ ID NO: 239799 - DNA, 25 bp, Probe Sequence
gatcaaatgaagtccattatgggag

SEQ ID NO: 239800 - DNA, 25 bp, Probe Sequence
gatagaattaggcctctctggaagc

SEQ ID NO: 239801 - DNA, 25 bp, Probe Sequence
gatcagtttaggttccagtgggaat

SEQ ID NO: 239802 - DNA, 25 bp, Probe Sequence
gataaccaaggtgccagctgagcgg

SEQ ID NO: 239803 - DNA, 25 bp, Probe Sequence
gatcacgccagagtgatggggcgag

SEQ ID NO: 239804 - DNA, 25 bp, Probe Sequence
gatcagcttgcattggaggtggcca

SEQ ID NO: 239805 - DNA, 25 bp, Probe Sequence
gtagctgatgcattggaaccagtgc

SEQ ID NO: 239806 - DNA, 25 bp, Probe Sequence
gatcaggatataaacccagacattc

SEQ ID NO: 239807 - DNA, 25 bp, Probe Sequence
gatcatatatattacaactaacttc

SEQ ID NO: 239808 - DNA, 25 bp, Probe Sequence
gatcatagacattaaggaaagcggt

SEQ ID NO: 239809 - DNA, 25 bp, Probe Sequence
gatcatgatgtctacacaggaaact

SEQ ID NO: 239810 - DNA, 25 bp, Probe Sequence
gatcattggcagccacatgtagaat

SEQ ID NO: 239811 - DNA, 25 bp, Probe Sequence
gatcaatggtgccacggagcacatc

SEQ ID NO: 239812 - DNA, 25 bp, Probe Sequence
gataatgagctgagattcagcatcc

SEQ ID NO: 239813 - DNA, 25 bp, Probe Sequence
gatcattttactttgcagcacactc

SEQ ID NO: 239814 - DNA, 25 bp, Probe Sequence
gatcattccttctgtagctcaggag

SEQ ID NO: 239815 - DNA, 25 bp, Probe Sequence
gatcagtgcctttggctaccttgag

SEQ ID NO: 239816 - DNA, 25 bp, Probe Sequence
gatcagtgcctttggctaccttgag

SEQ ID NO: 239817 - DNA, 25 bp, Probe Sequence
gatcagtcctgattgaatttcatta

SEQ ID NO: 239818 - DNA, 25 bp, Probe Sequence
gatcactcactgttgtagcttctgt

SEQ ID NO: 239819 - DNA, 25 bp, Probe Sequence
gatcactacatccttacttcatcat

SEQ ID NO: 239820 - DNA, 25 bp, Probe Sequence
gataatagctgcattactgccaact

SEQ ID NO: 239821 - DNA, 25 bp, Probe Sequence
gataatttgctcctgacagtcatac

SEQ ID NO: 239822 - DNA, 25 bp, Probe Sequence
gataatgttcccaaccatcatcaaa

SEQ ID NO: 239823 - DNA, 25 bp, Probe Sequence
gataagtgaaggcaactcataagga

SEQ ID NO: 239824 - DNA, 25 bp, Probe Sequence
gataactgatagataactcattgga

SEQ ID NO: 239825 - DNA, 25 bp, Probe Sequence
gataaggctaatatcactgactgat

SEQ ID NO: 239826 - DNA, 25 bp, Probe Sequence
gatcaagtgaacattacattgccat

SEQ ID NO: 239827 - DNA, 25 bp, Probe Sequence
gatcacagctattatactactttct

SEQ ID NO: 239828 - DNA, 25 bp, Probe Sequence
gatcacagctattatactactttct

SEQ ID NO: 239829 - DNA, 25 bp, Probe Sequence
gatcaatctcaattccttttcatgc

SEQ ID NO: 239830 - DNA, 25 bp, Probe Sequence
gatcatttctaggactaattctcca

SEQ ID NO: 239831 - DNA, 25 bp, Probe Sequence
gatcattctcctgatttatattcac

SEQ ID NO: 239832 - DNA, 25 bp, Probe Sequence
gatcttctcgcctacatggatagtc

SEQ ID NO: 239833 - DNA, 25 bp, Probe Sequence
gatcttcttgcatcaagttcagctc

SEQ ID NO: 239834 - DNA, 25 bp, Probe Sequence
gatctttctacagcagcttcagttt

SEQ ID NO: 239835 - DNA, 25 bp, Probe Sequence
gataatcctacaaccacatgcagtt

SEQ ID NO: 239836 - DNA, 25 bp, Probe Sequence
gatcatatgcctaaatccaagagct

SEQ ID NO: 239837 - DNA, 25 bp, Probe Sequence
gatcaatgccctcattaaagcagcc

SEQ ID NO: 239838 - DNA, 25 bp, Probe Sequence
gatctttccttcttaaagaccatcc

SEQ ID NO: 239839 - DNA, 25 bp, Probe Sequence
gatcatttgctctctttaagagtcc

SEQ ID NO: 239840 - DNA, 25 bp, Probe Sequence
gatcacctcacatccattaagatgg

SEQ ID NO: 239841 - DNA, 25 bp, Probe Sequence
gatcacacatcaagactatctacaa

SEQ ID NO: 239842 - DNA, 25 bp, Probe Sequence
gatcatcagcaatgcctcctgcacc

SEQ ID NO: 239843 - DNA, 25 bp, Probe Sequence
gatcagagacaactcgcatctaccc

SEQ ID NO: 239844 - DNA, 25 bp, Probe Sequence
gatagcggtttgactcacggggatt

SEQ ID NO: 239845 - DNA, 25 bp, Probe Sequence
gatagcggtttgactcacggggatt

SEQ ID NO: 239846 - DNA, 25 bp, Probe Sequence
gatagcggtttgactcacggggatt

SEQ ID NO: 239847 - DNA, 25 bp, Probe Sequence
gatagcggtttgactcacggggatt

SEQ ID NO: 239848 - DNA, 25 bp, Probe Sequence
gatagcggtttgactcacggggatt

SEQ ID NO: 239849 - DNA, 25 bp, Probe Sequence
gatagcggtttgactcacggggatt

SEQ ID NO: 239850 - DNA, 25 bp, Probe Sequence
gatagcggtttgactcacggggatt

SEQ ID NO: 239851 - DNA, 25 bp, Probe Sequence
gatagcggtttgactcacggggatt

SEQ ID NO: 239852 - DNA, 25 bp, Probe Sequence
gatagcggtttgactcacggggatt

SEQ ID NO: 239853 - DNA, 25 bp, Probe Sequence
gatagcggtttgactcacggggatt

SEQ ID NO: 239854 - DNA, 25 bp, Probe Sequence
gatagcggtttgactcacggggatt

SEQ ID NO: 239855 - DNA, 25 bp, Probe Sequence
gatagcggtttgactcacggggatt

SEQ ID NO: 239856 - DNA, 25 bp, Probe Sequence
gatagcggtttgactcacggggatt

SEQ ID NO: 239857 - DNA, 25 bp, Probe Sequence
gatagcggtttgactcacggggatt

SEQ ID NO: 239858 - DNA, 25 bp, Probe Sequence
gatagcggtttgactcacggggatt

SEQ ID NO: 239859 - DNA, 25 bp, Probe Sequence
gatagcggtttgactcacggggatt

SEQ ID NO: 239860 - DNA, 25 bp, Probe Sequence
gatagcggtttgactcacggggatt

SEQ ID NO: 239861 - DNA, 25 bp, Probe Sequence
gatagcggtttgactcacggggatt

SEQ ID NO: 239862 - DNA, 25 bp, Probe Sequence
gatagcggtttgactcacggggatg

SEQ ID NO: 239863 - DNA, 25 bp, Probe Sequence
gataaggcttctcaccaagatggat

SEQ ID NO: 239864 - DNA, 25 bp, Probe Sequence
gatcaaaattgcgaacccagtggaa

SEQ ID NO: 239865 - DNA, 25 bp, Probe Sequence
gataaaatctaaagccaaggaaaca

SEQ ID NO: 239866 - DNA, 25 bp, Probe Sequence
gataaagtccaatgcccaacactag

SEQ ID NO: 239867 - DNA, 25 bp, Probe Sequence
gataaagtcaaatgccaaacactag

SEQ ID NO: 239868 - DNA, 25 bp, Probe Sequence
gatcaaagtcccttctcaaaaataa

SEQ ID NO: 239869 - DNA, 25 bp, Probe Sequence
gataatttcctattctaaaatatca

SEQ ID NO: 239870 - DNA, 25 bp, Probe Sequence
gatactttcctttttatcatcttaa

SEQ ID NO: 239871 - DNA, 25 bp, Probe Sequence
tgaactgtctggcaagtttcttaaa

SEQ ID NO: 239872 - DNA, 25 bp, Probe Sequence
gatcacatccggcattgttagctct

SEQ ID NO: 239873 - DNA, 25 bp, Probe Sequence
gatcacatccggcattgttagctct

SEQ ID NO: 239874 - DNA, 25 bp, Probe Sequence
gatcacagtcttcagtggtgagtca

SEQ ID NO: 239875 - DNA, 25 bp, Probe Sequence
gatagcagtcctaggggtgatccag

SEQ ID NO: 239876 - DNA, 25 bp, Probe Sequence
gatatctgatccaagcttggttcca

SEQ ID NO: 239877 - DNA, 25 bp, Probe Sequence
gatcatccacctgtgtgagtccatc

SEQ ID NO: 239878 - DNA, 25 bp, Probe Sequence
gatcaggtcctggaggagatctatc

SEQ ID NO: 239879 - DNA, 25 bp, Probe Sequence
gatagagaggctggaggaggtgaca

SEQ ID NO: 239880 - DNA, 25 bp, Probe Sequence
gatagcaagcgcggagctgcgcagc

SEQ ID NO: 239881 - DNA, 25 bp, Probe Sequence
gatcagccacttgactcagcagtgc

SEQ ID NO: 239882 - DNA, 25 bp, Probe Sequence
gatcaccagctagtttcagagttac

SEQ ID NO: 239883 - DNA, 25 bp, Probe Sequence
gatcaccctggatgatcagttttct

SEQ ID NO: 239884 - DNA, 25 bp, Probe Sequence
gatcacctttgtggatttccttgcc

SEQ ID NO: 239885 - DNA, 25 bp, Probe Sequence
gatacccactgggatcttttatcct

SEQ ID NO: 239886 - DNA, 25 bp, Probe Sequence
gataccaaaggcactattttagcta

SEQ ID NO: 239887 - DNA, 25 bp, Probe Sequence
gatcacctgaggtcgggagtttgag

SEQ ID NO: 239888 - DNA, 25 bp, Probe Sequence
gatcacctgaggctgggagttcgag

SEQ ID NO: 239889 - DNA, 25 bp, Probe Sequence
gatcacttgaggctcaggagttcaa

SEQ ID NO: 239890 - DNA, 25 bp, Probe Sequence
gatcacttgagggtgtggttccaac

SEQ ID NO: 239891 - DNA, 25 bp, Probe Sequence
gatcacttcagcccaggagtttaag

SEQ ID NO: 239892 - DNA, 25 bp, Probe Sequence
gatcattatcaccacaagttcttca

SEQ ID NO: 239893 - DNA, 25 bp, Probe Sequence
gatcattgtaattcaaatccattca

SEQ ID NO: 239894 - DNA, 25 bp, Probe Sequence
gatcatttcacaaaccaccattttt

SEQ ID NO: 239895 - DNA, 25 bp, Probe Sequence
gatcatggctacaaacagaccagat

SEQ ID NO: 239896 - DNA, 25 bp, Probe Sequence
gatcatggccaccaaccgtggcatc

SEQ ID NO: 239897 - DNA, 25 bp, Probe Sequence
gatcatactgacctggcagcgggat

SEQ ID NO: 239898 - DNA, 25 bp, Probe Sequence
gatcatactgacctggcagcgggat

SEQ ID NO: 239899 - DNA, 25 bp, Probe Sequence
gatcacgctgacctggcagcgggat

SEQ ID NO: 239900 - DNA, 25 bp, Probe Sequence
gatcatcctacccgagatggtgggc

SEQ ID NO: 239901 - DNA, 25 bp, Probe Sequence
gatagccatacatggagggtaggca

SEQ ID NO: 239902 - DNA, 25 bp, Probe Sequence
gatagcctaaatgatggtgcttggt

SEQ ID NO: 239903 - DNA, 25 bp, Probe Sequence
gatacctaaatatagtgtcagatct

SEQ ID NO: 239904 - DNA, 25 bp, Probe Sequence
gatcacttagagaaacaggccgtta

SEQ ID NO: 239905 - DNA, 25 bp, Probe Sequence
gatcactcgagctcaacagttcgat

SEQ ID NO: 239906 - DNA, 25 bp, Probe Sequence
gatcattctgaataagcatttgcct

SEQ ID NO: 239907 - DNA, 25 bp, Probe Sequence
gatcatctctgacaacgcagttgac

SEQ ID NO: 239908 - DNA, 25 bp, Probe Sequence
gatcatcctgtgtataattgtagac

SEQ ID NO: 239909 - DNA, 25 bp, Probe Sequence
gatcagcttgtgtatggtttagaaa

SEQ ID NO: 239910 - DNA, 25 bp, Probe Sequence
gataggattggcggctcattcaaaa

SEQ ID NO: 239911 - DNA, 25 bp, Probe Sequence
gataaatatgagacccttcagtaaa

SEQ ID NO: 239912 - DNA, 25 bp, Probe Sequence
gataaactggactgtcctctacaga

SEQ ID NO: 239913 - DNA, 25 bp, Probe Sequence
gataacaccgatttgtgtctattat

SEQ ID NO: 239914 - DNA, 25 bp, Probe Sequence
gatactacgcgtgttgttttttaca

SEQ ID NO: 239915 - DNA, 25 bp, Probe Sequence
gatactaaggacgttgttttggttg

SEQ ID NO: 239916 - DNA, 25 bp, Probe Sequence
gatactaaggacgttgttttggttg

SEQ ID NO: 239917 - DNA, 25 bp, Probe Sequence
gatcaataaacattttgtcttatgg

SEQ ID NO: 239918 - DNA, 25 bp, Probe Sequence
gatacatacaatcttggactttctc

SEQ ID NO: 239919 - DNA, 25 bp, Probe Sequence
gatcacaaccagttatggatttctg

SEQ ID NO: 239920 - DNA, 25 bp, Probe Sequence
gatcaacttcaaatctgtgattgct

SEQ ID NO: 239921 - DNA, 25 bp, Probe Sequence
gataatattcatgacctgatgtggg

SEQ ID NO: 239922 - DNA, 25 bp, Probe Sequence
gatagcaatattgttctaatggcca

SEQ ID NO: 239923 - DNA, 25 bp, Probe Sequence
gataagtattggcattagtgttcag

SEQ ID NO: 239924 - DNA, 25 bp, Probe Sequence
gataagtatgttcattattttattg

SEQ ID NO: 239925 - DNA, 25 bp, Probe Sequence
gataggtatggtttaatctttccat

SEQ ID NO: 239926 - DNA, 25 bp, Probe Sequence
gatcaccttagtttgattctatttt

SEQ ID NO: 239927 - DNA, 25 bp, Probe Sequence
gatacctaaatccttcttatgtttc

SEQ ID NO: 239928 - DNA, 25 bp, Probe Sequence
gatacctaaatccttcttatgtttc

SEQ ID NO: 239929 - DNA, 25 bp, Probe Sequence
gataccattttacttcctttattct

SEQ ID NO: 239930 - DNA, 25 bp, Probe Sequence
gataagcatatgttacttaccttgt

SEQ ID NO: 239931 - DNA, 25 bp, Probe Sequence
gataacatcttatactactcttgta

SEQ ID NO: 239932 - DNA, 25 bp, Probe Sequence
gataataaaatcgctactttaaggg

SEQ ID NO: 239933 - DNA, 25 bp, Probe Sequence
gatcatgtacagttccctttttaaa

SEQ ID NO: 239934 - DNA, 25 bp, Probe Sequence
gatcatctaagatccatgctgattt

SEQ ID NO: 239935 - DNA, 25 bp, Probe Sequence
gatcatccatcgtattgattgtatt

SEQ ID NO: 239936 - DNA, 25 bp, Probe Sequence
gatcagacatggcactgtctcctct

SEQ ID NO: 239937 - DNA, 25 bp, Probe Sequence
gatcatagcatactttgtcgctcca

SEQ ID NO: 239938 - DNA, 25 bp, Probe Sequence
gatcatacacagagatggcgcccag

SEQ ID NO: 239939 - DNA, 25 bp, Probe Sequence
gatcaacaactgggtgcaggcgcag

SEQ ID NO: 239940 - DNA, 25 bp, Probe Sequence
gatcaaagactggaagaagcgcttc

SEQ ID NO: 239941 - DNA, 25 bp, Probe Sequence
gataagaagctgctctgtatggcta

SEQ ID NO: 239942 - DNA, 25 bp, Probe Sequence
gataagaactgctctgggactgtaa

SEQ ID NO: 239943 - DNA, 25 bp, Probe Sequence
gatcaaagtctgttctggcggcatt

SEQ ID NO: 239944 - DNA, 25 bp, Probe Sequence
gatcagagacatgcttcgacgaatt

SEQ ID NO: 239945 - DNA, 25 bp, Probe Sequence
gatagaacatggatcagggagattt

SEQ ID NO: 239946 - DNA, 25 bp, Probe Sequence
gatagcaacagggacagctgccaat

SEQ ID NO: 239947 - DNA, 25 bp, Probe Sequence
gataatatcatgaccaccatgccca

SEQ ID NO: 239948 - DNA, 25 bp, Probe Sequence
gataatatcaagacacctgccgagc

SEQ ID NO: 239949 - DNA, 25 bp, Probe Sequence
gataatctcaagacaccttccgagc

SEQ ID NO: 239950 - DNA, 25 bp, Probe Sequence
gatcaaagcctgagtgaccatagag

SEQ ID NO: 239951 - DNA, 25 bp, Probe Sequence
gatcacaaggccaggagttcgagac

SEQ ID NO: 239952 - DNA, 25 bp, Probe Sequence
gatacaaggtcggggtgtctatgca

SEQ ID NO: 239953 - DNA, 25 bp, Probe Sequence
gatacaaccctggacgatttgatta

SEQ ID NO: 239954 - DNA, 25 bp, Probe Sequence
gatacaaccctggacgatttgatta

SEQ ID NO: 239955 - DNA, 25 bp, Probe Sequence
gataaacttgtttgcttttgtgtat

SEQ ID NO: 239956 - DNA, 25 bp, Probe Sequence
gataagattttggctgtttggtttt

SEQ ID NO: 239957 - DNA, 25 bp, Probe Sequence
gatacagacattccctttgaggtgc

SEQ ID NO: 239958 - DNA, 25 bp, Probe Sequence
gatacatgtcttccaaaataccagc

SEQ ID NO: 239959 - DNA, 25 bp, Probe Sequence
gataagtttacattagagcactaga

SEQ ID NO: 239960 - DNA, 25 bp, Probe Sequence
gataatttctcacctatagacttaa

SEQ ID NO: 239961 - DNA, 25 bp, Probe Sequence
gatatggttccagaacagacgctat

SEQ ID NO: 239962 - DNA, 25 bp, Probe Sequence
gattcggtcggtaaagacgtcttct

SEQ ID NO: 239963 - DNA, 25 bp, Probe Sequence
gtacgaaccctaatggaggcagttt

SEQ ID NO: 239964 - DNA, 25 bp, Probe Sequence
ggatccaacctccaaaaggggtgct

SEQ ID NO: 239965 - DNA, 25 bp, Probe Sequence
gtaccaacacgtcaccggagagatg

SEQ ID NO: 239966 - DNA, 25 bp, Probe Sequence
gatatcccaaggtcaaactgtaaat

SEQ ID NO: 239967 - DNA, 25 bp, Probe Sequence
gataccaagattcccaaatgtaaaa

SEQ ID NO: 239968 - DNA, 25 bp, Probe Sequence
gatataaacacttccaaataaaaat

SEQ ID NO: 239969 - DNA, 25 bp, Probe Sequence
gatcactgtagccttcaataaaaaa

SEQ ID NO: 239970 - DNA, 25 bp, Probe Sequence
gatcagtgtggcctgccggataagc

SEQ ID NO: 239971 - DNA, 25 bp, Probe Sequence
gatcaggaggcatcactgaggccag

SEQ ID NO: 239972 - DNA, 25 bp, Probe Sequence
gatcatcgacgccatcaggcaggag

SEQ ID NO: 239973 - DNA, 25 bp, Probe Sequence
gatcagcggctgaaaggtgcagaga

SEQ ID NO: 239974 - DNA, 25 bp, Probe Sequence
gatatgcgggtccagtgtcaacagt

SEQ ID NO: 239975 - DNA, 25 bp, Probe Sequence
gatcaggaggttctgcatgaatgca

SEQ ID NO: 239976 - DNA, 25 bp, Probe Sequence
gatcagcagatggtacttcaacagc

SEQ ID NO: 239977 - DNA, 25 bp, Probe Sequence
gatacaacagtggcaccagaagcag

SEQ ID NO: 239978 - DNA, 25 bp, Probe Sequence
gataaagcggctgctcgaacagatt

SEQ ID NO: 239979 - DNA, 25 bp, Probe Sequence
gataaattggccctctaggcagtag

SEQ ID NO: 239980 - DNA, 25 bp, Probe Sequence
gataattggaggatccgatgcagat

SEQ ID NO: 239981 - DNA, 25 bp, Probe Sequence
gatcatactgtggttcttcgagaga

SEQ ID NO: 239982 - DNA, 25 bp, Probe Sequence
gatcaatgctcaagttttggaggac

SEQ ID NO: 239983 - DNA, 25 bp, Probe Sequence
gataatgtaagggatgtggcagcaa

SEQ ID NO: 239984 - DNA, 25 bp, Probe Sequence
gataattgtattgctgtccaacagg

SEQ ID NO: 239985 - DNA, 25 bp, Probe Sequence
gatactattttcctgtgcatcacac

SEQ ID NO: 239986 - DNA, 25 bp, Probe Sequence
gatcagttttctgctgaaggcacct

SEQ ID NO: 239987 - DNA, 25 bp, Probe Sequence
gatcagtctgttgcctgaaacagcc

SEQ ID NO: 239988 - DNA, 25 bp, Probe Sequence
gatcaccgtgctttgtgaaactgtg

SEQ ID NO: 239989 - DNA, 25 bp, Probe Sequence
gataacgtgcacattgaacacattg

SEQ ID NO: 239990 - DNA, 25 bp, Probe Sequence
gataatttgcaaagtacccttgaga

SEQ ID NO: 239991 - DNA, 25 bp, Probe Sequence
gatcaattagaaaatgtccctgtag

SEQ ID NO: 239992 - DNA, 25 bp, Probe Sequence
gataattgtgaaaacctcctttggc

SEQ ID NO: 239993 - DNA, 25 bp, Probe Sequence
gatcacttgtcaagaagcgccctct

SEQ ID NO: 239994 - DNA, 25 bp, Probe Sequence
gatagtttctgacatgtgcctatgc

SEQ ID NO: 239995 - DNA, 25 bp, Probe Sequence
gatcagtttctgccaatttcagtgg

SEQ ID NO: 239996 - DNA, 25 bp, Probe Sequence
gatcagtttctgccaatttcagtgg

SEQ ID NO: 239997 - DNA, 25 bp, Probe Sequence
gatcatgtttctccagtattacctc

SEQ ID NO: 239998 - DNA, 25 bp, Probe Sequence
gatcatgtcttttccatgtgtacct

SEQ ID NO: 239999 - DNA, 25 bp, Probe Sequence
gatcatgttcactgcaatgctggac

SEQ ID NO: 240000 - DNA, 25 bp, Probe Sequence
gatcatgctttcttcaaggtgacag

SEQ ID NO: 240001 - DNA, 25 bp, Probe Sequence
gataatcatctagaagggatatgca

SEQ ID NO: 240002 - DNA, 25 bp, Probe Sequence
gataatctctcctatctgagaaatc

SEQ ID NO: 240003 - DNA, 25 bp, Probe Sequence
gatcaacttagtactgaaaacagtc

SEQ ID NO: 240004 - DNA, 25 bp, Probe Sequence
gatagagccagggtctgaaatccag

SEQ ID NO: 240005 - DNA, 25 bp, Probe Sequence
gatcagagccagttcctaaatccag

SEQ ID NO: 240006 - DNA, 25 bp, Probe Sequence
gatacaagcatgtaacaaaaaaggt

SEQ ID NO: 240007 - DNA, 25 bp, Probe Sequence
gataccacgaattgtgaacaaaggg

SEQ ID NO: 240008 - DNA, 25 bp, Probe Sequence
gataaccagtgaattacacagggga

SEQ ID NO: 240009 - DNA, 25 bp, Probe Sequence
gatacccagtggaattccaacttga

SEQ ID NO: 240010 - DNA, 25 bp, Probe Sequence
gatttatcagttcagtccaatttat

SEQ ID NO: 240011 - DNA, 25 bp, Probe Sequence
gatagttcagttctttagtttttct

SEQ ID NO: 240012 - DNA, 25 bp, Probe Sequence
gataattagtttagtttgtggcttc

SEQ ID NO: 240013 - DNA, 25 bp, Probe Sequence
gatactaaattaagcataggtggta

SEQ ID NO: 240014 - DNA, 25 bp, Probe Sequence
gatacatacaaaagaatatagttta

SEQ ID NO: 240015 - DNA, 25 bp, Probe Sequence
gatacagacaataaacttagggcca

SEQ ID NO: 240016 - DNA, 25 bp, Probe Sequence
gatagcaaagtagagtttgggccaa

SEQ ID NO: 240017 - DNA, 25 bp, Probe Sequence
gatcagaagcagcagttatttgagt

SEQ ID NO: 240018 - DNA, 25 bp, Probe Sequence
gatcagatcaagcattctttctatt

SEQ ID NO: 240019 - DNA, 25 bp, Probe Sequence
gatcatgcaaagaacgctctccttt

SEQ ID NO: 240020 - DNA, 25 bp, Probe Sequence
gatcagaacagaaagctagctcgga

SEQ ID NO: 240021 - DNA, 25 bp, Probe Sequence
gatcaaactgcaaggcggcagcgag

SEQ ID NO: 240022 - DNA, 25 bp, Probe Sequence
gatactatatgaaggatggcaggag

SEQ ID NO: 240023 - DNA, 25 bp, Probe Sequence
gataccaataaagtgggagacctcc

SEQ ID NO: 240024 - DNA, 25 bp, Probe Sequence
gatacccataacctatgttgagcct

SEQ ID NO: 240025 - DNA, 25 bp, Probe Sequence
gataccgtcgacctcgatgatgatg

SEQ ID NO: 240026 - DNA, 25 bp, Probe Sequence
gatattcgtcggttcgaaggtacca

SEQ ID NO: 240027 - DNA, 25 bp, Probe Sequence
gattctcttcccttgttaggtacaa

SEQ ID NO: 240028 - DNA, 25 bp, Probe Sequence
gatactagtccctgtgtcaggatgg

SEQ ID NO: 240029 - DNA, 25 bp, Probe Sequence
gatagcataggacagaggaaggagg

SEQ ID NO: 240030 - DNA, 25 bp, Probe Sequence
gataccatgtggctgagaaaagaac

SEQ ID NO: 240031 - DNA, 25 bp, Probe Sequence
gataacttcgctacataacaaggaa

SEQ ID NO: 240032 - DNA, 25 bp, Probe Sequence
gataatctgtacctcatcaatcaga

SEQ ID NO: 240033 - DNA, 25 bp, Probe Sequence
gataaatgtgcagctataaaagttt

SEQ ID NO: 240034 - DNA, 25 bp, Probe Sequence
gataattatcactttaaattgtgtg

SEQ ID NO: 240035 - DNA, 25 bp, Probe Sequence
gataccccacaggtaaatcctgtgt

SEQ ID NO: 240036 - DNA, 25 bp, Probe Sequence
gattgcccccagataagtggtctgt

SEQ ID NO: 240037 - DNA, 25 bp, Probe Sequence
gattgaccccaactgggtggtgctc

SEQ ID NO: 240038 - DNA, 25 bp, Probe Sequence
gatagaactcccagcaggtggcttc

SEQ ID NO: 240039 - DNA, 25 bp, Probe Sequence
gataaacccagcaagtggtggactt

SEQ ID NO: 240040 - DNA, 25 bp, Probe Sequence
gatcacatactctgaagtgcgtggt

SEQ ID NO: 240041 - DNA, 25 bp, Probe Sequence
gatcacaccttttcagttgtacttc

SEQ ID NO: 240042 - DNA, 25 bp, Probe Sequence
gattaccagatcatcagtttagctt

SEQ ID NO: 240043 - DNA, 25 bp, Probe Sequence
gattcaccgtttggctcgatattat

SEQ ID NO: 240044 - DNA, 25 bp, Probe Sequence
gatatgagccggtggccgtgttagt

SEQ ID NO: 240045 - DNA, 25 bp, Probe Sequence
gatatgcggaggtgggccgagttct

SEQ ID NO: 240046 - DNA, 25 bp, Probe Sequence
gataaaggaaagggcaccatcttca

SEQ ID NO: 240047 - DNA, 25 bp, Probe Sequence
gataaatggtaccagcgtcctctta

SEQ ID NO: 240048 - DNA, 25 bp, Probe Sequence
gatagaagtgtaggtttcctctgga

SEQ ID NO: 240049 - DNA, 25 bp, Probe Sequence
gatatagttgtaggtactccgggaa

SEQ ID NO: 240050 - DNA, 25 bp, Probe Sequence
gattagttgggaccatctgcccagc

SEQ ID NO: 240051 - DNA, 25 bp, Probe Sequence
gatcaatcttggtaggtatccacag

SEQ ID NO: 240052 - DNA, 25 bp, Probe Sequence
gatcacgtggtggagttcagtacag

SEQ ID NO: 240053 - DNA, 25 bp, Probe Sequence
gatcagcgtgaaggagttgcggaca

SEQ ID NO: 240054 - DNA, 25 bp, Probe Sequence
gatagagctggagggctcccagacc

SEQ ID NO: 240055 - DNA, 25 bp, Probe Sequence
gatcagtgaagagtggctcctgaca

SEQ ID NO: 240056 - DNA, 25 bp, Probe Sequence
gatatccaggttacagaatgagagt

SEQ ID NO: 240057 - DNA, 25 bp, Probe Sequence
tattctggtttgaggggttcccctg

SEQ ID NO: 240058 - DNA, 25 bp, Probe Sequence
gatactggttgcttcaggggtaccc

SEQ ID NO: 240059 - DNA, 25 bp, Probe Sequence
gatactggtagttggtgtgaaactc

SEQ ID NO: 240060 - DNA, 25 bp, Probe Sequence
gatactggccagaatgctaagcaac

SEQ ID NO: 240061 - DNA, 25 bp, Probe Sequence
gataggtctacaagccaagaacttc

SEQ ID NO: 240062 - DNA, 25 bp, Probe Sequence
gatacgatcatatacccagaaaacc

SEQ ID NO: 240063 - DNA, 25 bp, Probe Sequence
gatactgtgtgactactgacggaga

SEQ ID NO: 240064 - DNA, 25 bp, Probe Sequence
gatcagctggatctcagcggggagc

SEQ ID NO: 240065 - DNA, 25 bp, Probe Sequence
gatcacttgatcccaggaggcggag

SEQ ID NO: 240066 - DNA, 25 bp, Probe Sequence
gatcacctgaggtcatggaggtcga

SEQ ID NO: 240067 - DNA, 25 bp, Probe Sequence
gatcacctgaggtcaagagttcgag

SEQ ID NO: 240068 - DNA, 25 bp, Probe Sequence
gatcacctgaggtcaagagttcgag

SEQ ID NO: 240069 - DNA, 25 bp, Probe Sequence
gatcacgtgaggtcaagagttcaag

SEQ ID NO: 240070 - DNA, 25 bp, Probe Sequence
gatcacctgaggtcaggagttcaag

SEQ ID NO: 240071 - DNA, 25 bp, Probe Sequence
gatcacttcaggtcaggagttcgag

SEQ ID NO: 240072 - DNA, 25 bp, Probe Sequence
gatcacttgaggtcaggagttcgag

SEQ ID NO: 240073 - DNA, 25 bp, Probe Sequence
gatcacttgagcccaggagttggag

SEQ ID NO: 240074 - DNA, 25 bp, Probe Sequence
gatcacttgagcccagaagatcaag

SEQ ID NO: 240075 - DNA, 25 bp, Probe Sequence
gatactgactgcccaggaatcaaga

SEQ ID NO: 240076 - DNA, 25 bp, Probe Sequence
gataatcttgccccagattctagat

SEQ ID NO: 240077 - DNA, 25 bp, Probe Sequence
gataatctgtacctgtgattgtaga

SEQ ID NO: 240078 - DNA, 25 bp, Probe Sequence
gataactgtggcttggactagaact

SEQ ID NO: 240079 - DNA, 25 bp, Probe Sequence
gataacatgctgacataggcttaac

SEQ ID NO: 240080 - DNA, 25 bp, Probe Sequence
gatacactgcacatattgcttttgc

SEQ ID NO: 240081 - DNA, 25 bp, Probe Sequence
gatactagccttatcctctatgagg

SEQ ID NO: 240082 - DNA, 25 bp, Probe Sequence
gatagattccttacccagtgaagaa

SEQ ID NO: 240083 - DNA, 25 bp, Probe Sequence
gatatagtttttgcacggaagacag

SEQ ID NO: 240084 - DNA, 25 bp, Probe Sequence
gatattattctcaccgggaaactgt

SEQ ID NO: 240085 - DNA, 25 bp, Probe Sequence
gatttttctatatcgttactgtcga

SEQ ID NO: 240086 - DNA, 25 bp, Probe Sequence
gatttttttattgctccgcatactg

SEQ ID NO: 240087 - DNA, 25 bp, Probe Sequence
gattgcttttacttccggaatactc

SEQ ID NO: 240088 - DNA, 25 bp, Probe Sequence
gatactttaagaacctgtaaaatca

SEQ ID NO: 240089 - DNA, 25 bp, Probe Sequence
gatactttgaagacaccttaactct

SEQ ID NO: 240090 - DNA, 25 bp, Probe Sequence
gattttattcgcaccattgcggtcg

SEQ ID NO: 240091 - DNA, 25 bp, Probe Sequence
gatttagtcctcagaaatggactag

SEQ ID NO: 240092 - DNA, 25 bp, Probe Sequence
gatttgggccttgaagagtaattga

SEQ ID NO: 240093 - DNA, 25 bp, Probe Sequence
gttcaggtccttaaaattctagtca

SEQ ID NO: 240094 - DNA, 25 bp, Probe Sequence
gatactggacttgatcaaatttagt

SEQ ID NO: 240095 - DNA, 25 bp, Probe Sequence
gatacgtgccttggactcatgtttg

SEQ ID NO: 240096 - DNA, 25 bp, Probe Sequence
gatcacgtgttaagtgcacacttgt

SEQ ID NO: 240097 - DNA, 25 bp, Probe Sequence
gatagcaggttatgtcacgcatctg

SEQ ID NO: 240098 - DNA, 25 bp, Probe Sequence
gatacagtgactttgaatggctgcg

SEQ ID NO: 240099 - DNA, 25 bp, Probe Sequence
gatatggtcgctgctcaatggagag

SEQ ID NO: 240100 - DNA, 25 bp, Probe Sequence
gttggtgctcatgtcttgacaacgt

SEQ ID NO: 240101 - DNA, 25 bp, Probe Sequence
gatagagtctagactcgggccactt

SEQ ID NO: 240102 - DNA, 25 bp, Probe Sequence
gatacagatatatccaaacccttac

SEQ ID NO: 240103 - DNA, 25 bp, Probe Sequence
gatagcaaaaacctagactgcctta

SEQ ID NO: 240104 - DNA, 25 bp, Probe Sequence
gataagaattacatatgcatgcata

SEQ ID NO: 240105 - DNA, 25 bp, Probe Sequence
gatactgagagctacctattggcat

SEQ ID NO: 240106 - DNA, 25 bp, Probe Sequence
gatcacgagagagtcctggaagcag

SEQ ID NO: 240107 - DNA, 25 bp, Probe Sequence
gataatgcaggagtcatagtgaaca

SEQ ID NO: 240108 - DNA, 25 bp, Probe Sequence
gatactgcatgggtcatttcccagc

SEQ ID NO: 240109 - DNA, 25 bp, Probe Sequence
gataacatggcattcatcttcctca

SEQ ID NO: 240110 - DNA, 25 bp, Probe Sequence
gataacagcgcaatcctattctaga

SEQ ID NO: 240111 - DNA, 25 bp, Probe Sequence
gataatagccttgcatgttgtagtt

SEQ ID NO: 240112 - DNA, 25 bp, Probe Sequence
gataatacactaacattttcagatt

SEQ ID NO: 240113 - DNA, 25 bp, Probe Sequence
gataatccactatatgttctgaaga

SEQ ID NO: 240114 - DNA, 25 bp, Probe Sequence
gatacatctcctgacagtactgaag

SEQ ID NO: 240115 - DNA, 25 bp, Probe Sequence
gatagcgctcacgcaagcatggtta

SEQ ID NO: 240116 - DNA, 25 bp, Probe Sequence
gattgcgctcatggatacagatggc

SEQ ID NO: 240117 - DNA, 25 bp, Probe Sequence
gatcacagctcaatgctatgaagcg

SEQ ID NO: 240118 - DNA, 25 bp, Probe Sequence
gatcaactgatgccttcaagcagga

SEQ ID NO: 240119 - DNA, 25 bp, Probe Sequence
gatcaaagcagcatatctccaggaa

SEQ ID NO: 240120 - DNA, 25 bp, Probe Sequence
gataaagcactattcagccatgaag

SEQ ID NO: 240121 - DNA, 25 bp, Probe Sequence
gatcacaaactacagcctgcaggcc

SEQ ID NO: 240122 - DNA, 25 bp, Probe Sequence
gatcacagaagcttgtcacctgcac

SEQ ID NO: 240123 - DNA, 25 bp, Probe Sequence
gatcacggagatctcagacacactc

SEQ ID NO: 240124 - DNA, 25 bp, Probe Sequence
gatacgtgaagccacagatcaagca

SEQ ID NO: 240125 - DNA, 25 bp, Probe Sequence
gatcactggagagaagtacagcctg

SEQ ID NO: 240126 - DNA, 25 bp, Probe Sequence
gatactgggatttttaacactgcct

SEQ ID NO: 240127 - DNA, 25 bp, Probe Sequence
gatcactggtgttgagctttttttc

SEQ ID NO: 240128 - DNA, 25 bp, Probe Sequence
gatcacatttatggagattattatt

SEQ ID NO: 240129 - DNA, 25 bp, Probe Sequence
gataatgtgccatgatgttttatat

SEQ ID NO: 240130 - DNA, 25 bp, Probe Sequence
gataatgtctgcaagtgggcttatt

SEQ ID NO: 240131 - DNA, 25 bp, Probe Sequence
gataagttgatattgccagcctttc

SEQ ID NO: 240132 - DNA, 25 bp, Probe Sequence
gatacctgtatgtcagcatcgccat

SEQ ID NO: 240133 - DNA, 25 bp, Probe Sequence
gatagctcattaggcacatgaccga

SEQ ID NO: 240134 - DNA, 25 bp, Probe Sequence
gatcactatgtggaccagatccaga

SEQ ID NO: 240135 - DNA, 25 bp, Probe Sequence
gatcactatgggaaaatcatccaga

SEQ ID NO: 240136 - DNA, 25 bp, Probe Sequence
gatcactatgggaaaatcatccaga

SEQ ID NO: 240137 - DNA, 25 bp, Probe Sequence
gatagcctgggatgagcaatcctgt

SEQ ID NO: 240138 - DNA, 25 bp, Probe Sequence
gataaatgggcatgcacaaagatgt

SEQ ID NO: 240139 - DNA, 25 bp, Probe Sequence
gataagtgtcagatcaataacagat

SEQ ID NO: 240140 - DNA, 25 bp, Probe Sequence
gataatcattagcccacataccagt

SEQ ID NO: 240141 - DNA, 25 bp, Probe Sequence
gataactctagccacaaagccagac

SEQ ID NO: 240142 - DNA, 25 bp, Probe Sequence
gataactcattggaaacgtgcatac

SEQ ID NO: 240143 - DNA, 25 bp, Probe Sequence
gataagctagtggacaatcagtgta

SEQ ID NO: 240144 - DNA, 25 bp, Probe Sequence
gataactaatgatcacagctattat

SEQ ID NO: 240145 - DNA, 25 bp, Probe Sequence
gataactaatgacatccagtgtctc

SEQ ID NO: 240146 - DNA, 25 bp, Probe Sequence
gattactaatatcttttgccctgta

SEQ ID NO: 240147 - DNA, 25 bp, Probe Sequence
gataactgcaaaatattttcctttt

SEQ ID NO: 240148 - DNA, 25 bp, Probe Sequence
gataaccacaataagtccatatttt

SEQ ID NO: 240149 - DNA, 25 bp, Probe Sequence
gatagagcacaaagcatgagttctt

SEQ ID NO: 240150 - DNA, 25 bp, Probe Sequence
gatactgaaaggtgctatgcttctg

SEQ ID NO: 240151 - DNA, 25 bp, Probe Sequence
gatactgaggggtgacatttcatga

SEQ ID NO: 240152 - DNA, 25 bp, Probe Sequence
gatactgggtgataggcttgtccgg

SEQ ID NO: 240153 - DNA, 25 bp, Probe Sequence
gatacgggcacatacggattcttgc

SEQ ID NO: 240154 - DNA, 25 bp, Probe Sequence
gatatcgggccatagcgagcactag

SEQ ID NO: 240155 - DNA, 25 bp, Probe Sequence
gatatggctgagatcgagaaattcg

SEQ ID NO: 240156 - DNA, 25 bp, Probe Sequence
gatatgcctgtttttgagaattcca

SEQ ID NO: 240157 - DNA, 25 bp, Probe Sequence
gatacttcttacctgcagagtttct

SEQ ID NO: 240158 - DNA, 25 bp, Probe Sequence
gatactattaatcatgcagtgtaca

SEQ ID NO: 240159 - DNA, 25 bp, Probe Sequence
gataccatctaacactggaatgacc

SEQ ID NO: 240160 - DNA, 25 bp, Probe Sequence
gataccaggggtcctggcaagccat

SEQ ID NO: 240161 - DNA, 25 bp, Probe Sequence
gatagaaggggcactgatgaaggag

SEQ ID NO: 240162 - DNA, 25 bp, Probe Sequence
gatagacgcaatgcattgtgtagct

SEQ ID NO: 240163 - DNA, 25 bp, Probe Sequence
gatagtgctgcattagggtgagtct

SEQ ID NO: 240164 - DNA, 25 bp, Probe Sequence
gatagtagcatatcccggacatccc

SEQ ID NO: 240165 - DNA, 25 bp, Probe Sequence
gatagtaatattggacatggcacac

SEQ ID NO: 240166 - DNA, 25 bp, Probe Sequence
gatactgattatgaaatgtcccctg

SEQ ID NO: 240167 - DNA, 25 bp, Probe Sequence
gatatctttgatgaaacgagggctg

SEQ ID NO: 240168 - DNA, 25 bp, Probe Sequence
gatacgaatctcttaagggggtgga

SEQ ID NO: 240169 - DNA, 25 bp, Probe Sequence
gataatagtcattctaacgggtatg

SEQ ID NO: 240170 - DNA, 25 bp, Probe Sequence
gataaatttactaatggggttcaat

SEQ ID NO: 240171 - DNA, 25 bp, Probe Sequence
gtgacttttttctggggtcaaagag

SEQ ID NO: 240172 - DNA, 25 bp, Probe Sequence
gatagtttttactgtggggcaaata

SEQ ID NO: 240173 - DNA, 25 bp, Probe Sequence
gtaggtatagtaagttggggacaat

SEQ ID NO: 240174 - DNA, 25 bp, Probe Sequence
gataggcctagtacaatcttgggaa

SEQ ID NO: 240175 - DNA, 25 bp, Probe Sequence
gataatcctttaagccttgtggcaa

SEQ ID NO: 240176 - DNA, 25 bp, Probe Sequence
gatcaagacatgttaaccttttata

SEQ ID NO: 240177 - DNA, 25 bp, Probe Sequence
gatattgagcgtccaacctatacta

SEQ ID NO: 240178 - DNA, 25 bp, Probe Sequence
gataattcagtgtaaccaaaccact

SEQ ID NO: 240179 - DNA, 25 bp, Probe Sequence
gatacttattgtccatttataccct

SEQ ID NO: 240180 - DNA, 25 bp, Probe Sequence
gatactttctgaataaatcaacctc

SEQ ID NO: 240181 - DNA, 25 bp, Probe Sequence
gatatcgccttgataaaactccagg

SEQ ID NO: 240182 - DNA, 25 bp, Probe Sequence
gatatgctggttgtagaccccaaaa

SEQ ID NO: 240183 - DNA, 25 bp, Probe Sequence
gatatgggcactgtggtcctgggaa

SEQ ID NO: 240184 - DNA, 25 bp, Probe Sequence
gataggagctcaggagggcgcggga

SEQ ID NO: 240185 - DNA, 25 bp, Probe Sequence
gataggaagaaacctggcttgtgag

SEQ ID NO: 240186 - DNA, 25 bp, Probe Sequence
gatagagaaaatctgcttggttcta

SEQ ID NO: 240187 - DNA, 25 bp, Probe Sequence
gataataaccatcggcctgttcttc

SEQ ID NO: 240188 - DNA, 25 bp, Probe Sequence
gatacaaatccactgagccggtgta

SEQ ID NO: 240189 - DNA, 25 bp, Probe Sequence
gataaatatggctgggcgtgtgtgg

SEQ ID NO: 240190 - DNA, 25 bp, Probe Sequence
gataacatgttctgtgccagctggg

SEQ ID NO: 240191 - DNA, 25 bp, Probe Sequence
gattaatgttctagggccgggcacc

SEQ ID NO: 240192 - DNA, 25 bp, Probe Sequence
gattagtgattgcctgggccaagtg

SEQ ID NO: 240193 - DNA, 25 bp, Probe Sequence
gatacaatttgagggaggcagaagt

SEQ ID NO: 240194 - DNA, 25 bp, Probe Sequence
gatagctctttcttgagaggagaga

SEQ ID NO: 240195 - DNA, 25 bp, Probe Sequence
gatactgttgacgtggcaatgccgc

SEQ ID NO: 240196 - DNA, 25 bp, Probe Sequence
gatacagttggggaaatgctgacta

SEQ ID NO: 240197 - DNA, 25 bp, Probe Sequence
gatacatttagggtatgcagctcct

SEQ ID NO: 240198 - DNA, 25 bp, Probe Sequence
gataatatttggttagtatgtccta

SEQ ID NO: 240199 - DNA, 25 bp, Probe Sequence
gataattttgtgaatctgtagattt

SEQ ID NO: 240200 - DNA, 25 bp, Probe Sequence
gataacttgctgtttctcacgtttc

SEQ ID NO: 240201 - DNA, 25 bp, Probe Sequence
gataatattgtgtctgatctcattc

SEQ ID NO: 240202 - DNA, 25 bp, Probe Sequence
gataatcacatttcagtgcatcttt

SEQ ID NO: 240203 - DNA, 25 bp, Probe Sequence
gatcaagcctgcctcaatcagtatt

SEQ ID NO: 240204 - DNA, 25 bp, Probe Sequence
gataagcctgagcatgtaggtgtaa

SEQ ID NO: 240205 - DNA, 25 bp, Probe Sequence
gataacaccatcaagtagaagaaat

SEQ ID NO: 240206 - DNA, 25 bp, Probe Sequence
gatacccccaagtgtagcaagatct

SEQ ID NO: 240207 - DNA, 25 bp, Probe Sequence
gatcaacccggggagtactcagtgt

SEQ ID NO: 240208 - DNA, 25 bp, Probe Sequence
gataaccagggacattcacctgtgt

SEQ ID NO: 240209 - DNA, 25 bp, Probe Sequence
gataacaaggagcccattccagatg

SEQ ID NO: 240210 - DNA, 25 bp, Probe Sequence
gataactccagtgccagtatagtgg

SEQ ID NO: 240211 - DNA, 25 bp, Probe Sequence
gattatcgacagagggttggggaag

SEQ ID NO: 240212 - DNA, 25 bp, Probe Sequence
gtatacgttggaggagttcgggaga

SEQ ID NO: 240213 - DNA, 25 bp, Probe Sequence
gattcaaattggaagttctcggata

SEQ ID NO: 240214 - DNA, 25 bp, Probe Sequence
gataataattgacatttctcgtaga

SEQ ID NO: 240215 - DNA, 25 bp, Probe Sequence
gataatttaaatattgctgctgctt

SEQ ID NO: 240216 - DNA, 25 bp, Probe Sequence
gatagtcttacattacttgaattgt

SEQ ID NO: 240217 - DNA, 25 bp, Probe Sequence
gatatgtttcgtgggttgaattgtg

SEQ ID NO: 240218 - DNA, 25 bp, Probe Sequence
gataggcaacttcatttggcttgtg

SEQ ID NO: 240219 - DNA, 25 bp, Probe Sequence
gatatggaactagaaggctgtttga

SEQ ID NO: 240220 - DNA, 25 bp, Probe Sequence
gatatggtatctcctaaagtgtaaa

SEQ ID NO: 240221 - DNA, 25 bp, Probe Sequence
gatatggtatagatgaagttagacc

SEQ ID NO: 240222 - DNA, 25 bp, Probe Sequence
gatagtgtctggaaaccttcgcatc

SEQ ID NO: 240223 - DNA, 25 bp, Probe Sequence
gatactactagatcacttgtcctct

SEQ ID NO: 240224 - DNA, 25 bp, Probe Sequence
gatacaaaagctacagaagaccctg

SEQ ID NO: 240225 - DNA, 25 bp, Probe Sequence
gatacaaagactacatccaaatcct

SEQ ID NO: 240226 - DNA, 25 bp, Probe Sequence
gataaatagttttccaatcatccca

SEQ ID NO: 240227 - DNA, 25 bp, Probe Sequence
gataaaggtttagtctcactgccgt

SEQ ID NO: 240228 - DNA, 25 bp, Probe Sequence
gatagtcggaatagagccgccccaa

SEQ ID NO: 240229 - DNA, 25 bp, Probe Sequence
gatactcagaaaatacaccacccac

SEQ ID NO: 240230 - DNA, 25 bp, Probe Sequence
gataccaagaagcagaagaccgacg

SEQ ID NO: 240231 - DNA, 25 bp, Probe Sequence
gataccaagaagcagaagaccgacg

SEQ ID NO: 240232 - DNA, 25 bp, Probe Sequence
gataccaaagagacagggcccgggc

SEQ ID NO: 240233 - DNA, 25 bp, Probe Sequence
gatacccagaggaggatgagcccag

SEQ ID NO: 240234 - DNA, 25 bp, Probe Sequence
gatacccaggaagaatacagcgagt

SEQ ID NO: 240235 - DNA, 25 bp, Probe Sequence
gatacccaggaagaatacagcgagt

SEQ ID NO: 240236 - DNA, 25 bp, Probe Sequence
gataccctggagtttacacagaagc

SEQ ID NO: 240237 - DNA, 25 bp, Probe Sequence
gataccacttagtgtagctccagca

SEQ ID NO: 240238 - DNA, 25 bp, Probe Sequence
gatacccacggatatgcagtcaatg

SEQ ID NO: 240239 - DNA, 25 bp, Probe Sequence
gatagcatccaatgacctatgtaac

SEQ ID NO: 240240 - DNA, 25 bp, Probe Sequence
gataaccagataaactatatagagc

SEQ ID NO: 240241 - DNA, 25 bp, Probe Sequence
gataacctacatgcactcagaaggc

SEQ ID NO: 240242 - DNA, 25 bp, Probe Sequence
gatacagctttaaccatagcagcag

SEQ ID NO: 240243 - DNA, 25 bp, Probe Sequence
gatagccatcccaccataggatgtg

SEQ ID NO: 240244 - DNA, 25 bp, Probe Sequence
gatacctctggcatgagacagtggt

SEQ ID NO: 240245 - DNA, 25 bp, Probe Sequence
gatactgcacacggagaggagggaa

SEQ ID NO: 240246 - DNA, 25 bp, Probe Sequence
gatactccagccaaaaatgcacaaa

SEQ ID NO: 240247 - DNA, 25 bp, Probe Sequence
gatacttcaggagaagctgacacaa

SEQ ID NO: 240248 - DNA, 25 bp, Probe Sequence
gatactctgagctgtggactgaact

SEQ ID NO: 240249 - DNA, 25 bp, Probe Sequence
gatactatgacatgttgccaacacc

SEQ ID NO: 240250 - DNA, 25 bp, Probe Sequence
gataatgatgactagttcacacata

SEQ ID NO: 240251 - DNA, 25 bp, Probe Sequence
gataagcataatagcttctctctca

SEQ ID NO: 240252 - DNA, 25 bp, Probe Sequence
gataatgctttactttctgtgttga

SEQ ID NO: 240253 - DNA, 25 bp, Probe Sequence
gataatgctttactttctgtgttga

SEQ ID NO: 240254 - DNA, 25 bp, Probe Sequence
gataattgtctagttcttgctttga

SEQ ID NO: 240255 - DNA, 25 bp, Probe Sequence
gataatggactcagctctgtctgct

SEQ ID NO: 240256 - DNA, 25 bp, Probe Sequence
gatagtgataccttctcatttgcca

SEQ ID NO: 240257 - DNA, 25 bp, Probe Sequence
gatacgttctgctccatttaatttg

SEQ ID NO: 240258 - DNA, 25 bp, Probe Sequence
gatacgattatgcccaatattaagt

SEQ ID NO: 240259 - DNA, 25 bp, Probe Sequence
gatacgattatgcccaatattaagt

SEQ ID NO: 240260 - DNA, 25 bp, Probe Sequence
gatacgttgatgggaaaatagattt

SEQ ID NO: 240261 - DNA, 25 bp, Probe Sequence
gataccttgagaaaaactgcaatga

SEQ ID NO: 240262 - DNA, 25 bp, Probe Sequence
gataactctgagaaacacatctagt

SEQ ID NO: 240263 - DNA, 25 bp, Probe Sequence
gatagccatgctaaaatgcaattat

SEQ ID NO: 240264 - DNA, 25 bp, Probe Sequence
gattagagttacacaatttattgct

SEQ ID NO: 240265 - DNA, 25 bp, Probe Sequence
gataagcatttattggttttttcta

SEQ ID NO: 240266 - DNA, 25 bp, Probe Sequence
gatactcatttatagttacgttcat

SEQ ID NO: 240267 - DNA, 25 bp, Probe Sequence
gatacttgatttgaagtccttttca

SEQ ID NO: 240268 - DNA, 25 bp, Probe Sequence
gataaaaccttatgattcttttctc

SEQ ID NO: 240269 - DNA, 25 bp, Probe Sequence
gataaaactctgagagactacttat

SEQ ID NO: 240270 - DNA, 25 bp, Probe Sequence
gatagtaactctgttgacattcctt

SEQ ID NO: 240271 - DNA, 25 bp, Probe Sequence
gatattaagcctgcctacttctaca

SEQ ID NO: 240272 - DNA, 25 bp, Probe Sequence
gatattcaaccggcttactcttagc

SEQ ID NO: 240273 - DNA, 25 bp, Probe Sequence
gataacatattaccttatttgaaca

SEQ ID NO: 240274 - DNA, 25 bp, Probe Sequence
gataactttgactttcttctgaata

SEQ ID NO: 240275 - DNA, 25 bp, Probe Sequence
gataactttgactttcttctgaata

SEQ ID NO: 240276 - DNA, 25 bp, Probe Sequence
gatacaacttgattttcgtgaagat

SEQ ID NO: 240277 - DNA, 25 bp, Probe Sequence
gataactcaggatttacttgaaatg

SEQ ID NO: 240278 - DNA, 25 bp, Probe Sequence
gataactaggtatttagtaagcagg

SEQ ID NO: 240279 - DNA, 25 bp, Probe Sequence
gataacctcttttgtagtgacacag

SEQ ID NO: 240280 - DNA, 25 bp, Probe Sequence
gataacctttctttctgaaatagtc

SEQ ID NO: 240281 - DNA, 25 bp, Probe Sequence
gataaccattttgtatataatcatt

SEQ ID NO: 240282 - DNA, 25 bp, Probe Sequence
gatttttattttttaaatgctgtca

SEQ ID NO: 240283 - DNA, 25 bp, Probe Sequence
gatttgtactttaaatacgtgatta

SEQ ID NO: 240284 - DNA, 25 bp, Probe Sequence
gattctgataccacaaatagtttta

SEQ ID NO: 240285 - DNA, 25 bp, Probe Sequence
gatacttgactccacataagagttc

SEQ ID NO: 240286 - DNA, 25 bp, Probe Sequence
gatagatagactcacatctataatc

SEQ ID NO: 240287 - DNA, 25 bp, Probe Sequence
gataggaacgcaacattaaatttaa

SEQ ID NO: 240288 - DNA, 25 bp, Probe Sequence
gataagagaagcacttcggtgttta

SEQ ID NO: 240289 - DNA, 25 bp, Probe Sequence
gataaattacatatttggggtacat

SEQ ID NO: 240290 - DNA, 25 bp, Probe Sequence
gataaatggatcttttgtgtgtggt

SEQ ID NO: 240291 - DNA, 25 bp, Probe Sequence
gataactggcattttgtagatgtgg

SEQ ID NO: 240292 - DNA, 25 bp, Probe Sequence
gatatcatggtcatttgtaggcatc

SEQ ID NO: 240293 - DNA, 25 bp, Probe Sequence
gatacttgaagaatgttgatggtgc

SEQ ID NO: 240294 - DNA, 25 bp, Probe Sequence
gatacacttataattcactggtcct

SEQ ID NO: 240295 - DNA, 25 bp, Probe Sequence
gtacgattgtagatactagtccctg

SEQ ID NO: 240296 - DNA, 25 bp, Probe Sequence
gataggttatttctctaaccttgtc

SEQ ID NO: 240297 - DNA, 25 bp, Probe Sequence
gattgctgatcgtgttttaactttt

SEQ ID NO: 240298 - DNA, 25 bp, Probe Sequence
gatatgtatcgatgccttttagttt

SEQ ID NO: 240299 - DNA, 25 bp, Probe Sequence
gatatgagactgaaacccctgggtt

SEQ ID NO: 240300 - DNA, 25 bp, Probe Sequence
gatatgagactgaaacccctgggtt

SEQ ID NO: 240301 - DNA, 25 bp, Probe Sequence
gatatgagactgaaacccctgggtt

SEQ ID NO: 240302 - DNA, 25 bp, Probe Sequence
gatatggtctgaagtactcctggta

SEQ ID NO: 240303 - DNA, 25 bp, Probe Sequence
gataagttatatgatcatcctgtgt

SEQ ID NO: 240304 - DNA, 25 bp, Probe Sequence
gatagatttgtagctcacttgatga

SEQ ID NO: 240305 - DNA, 25 bp, Probe Sequence
gatagatttgtagctcacttgatga

SEQ ID NO: 240306 - DNA, 25 bp, Probe Sequence
gatagtgcttttggtcctagatgat

SEQ ID NO: 240307 - DNA, 25 bp, Probe Sequence
gatagtgcttttggtcctagatgat

SEQ ID NO: 240308 - DNA, 25 bp, Probe Sequence
gatagatgtttatttcctaagcact

SEQ ID NO: 240309 - DNA, 25 bp, Probe Sequence
gataaatttgacttccaagacagct

SEQ ID NO: 240310 - DNA, 25 bp, Probe Sequence
gataaatgttgtttcaaattactaa

SEQ ID NO: 240311 - DNA, 25 bp, Probe Sequence
gatacaatttgtcccaaagctccca

SEQ ID NO: 240312 - DNA, 25 bp, Probe Sequence
gattcaggtggtcccttagtttgca

SEQ ID NO: 240313 - DNA, 25 bp, Probe Sequence
gatttggggtgggatagcaggtcag

SEQ ID NO: 240314 - DNA, 25 bp, Probe Sequence
gatttggaggcactgcagtccaggc

SEQ ID NO: 240315 - DNA, 25 bp, Probe Sequence
gatttggaactgggcaccaatccgc

SEQ ID NO: 240316 - DNA, 25 bp, Probe Sequence
gttctgtaaagacaacaaatccctt

SEQ ID NO: 240317 - DNA, 25 bp, Probe Sequence
gttggtaaaaagagcctgacacctc

SEQ ID NO: 240318 - DNA, 25 bp, Probe Sequence
gattggagcaattacgggttgacct

SEQ ID NO: 240319 - DNA, 25 bp, Probe Sequence
gattcgggttaggatgaggtgacct

SEQ ID NO: 240320 - DNA, 25 bp, Probe Sequence
gtaccggttacagtacttggcctct

SEQ ID NO: 240321 - DNA, 25 bp, Probe Sequence
gatagccaggtttttagcttgggtg

SEQ ID NO: 240322 - DNA, 25 bp, Probe Sequence
gatacaaatgtttataactctaggg

SEQ ID NO: 240323 - DNA, 25 bp, Probe Sequence
gatacaaatgtttataactctaggg

SEQ ID NO: 240324 - DNA, 25 bp, Probe Sequence
gataaaattcaaacttcctagtgtg

SEQ ID NO: 240325 - DNA, 25 bp, Probe Sequence
gataaaacatcaaactacccagcaa

SEQ ID NO: 240326 - DNA, 25 bp, Probe Sequence
gataaataatgtcatcgcctccaac

SEQ ID NO: 240327 - DNA, 25 bp, Probe Sequence
gatatataaactcagacccaaacat

SEQ ID NO: 240328 - DNA, 25 bp, Probe Sequence
gatattgggctcatcaaactcaaac

SEQ ID NO: 240329 - DNA, 25 bp, Probe Sequence
gatattgggatcatcaaactcaaac

SEQ ID NO: 240330 - DNA, 25 bp, Probe Sequence
gatactatatgtgtccaagctaaac

SEQ ID NO: 240331 - DNA, 25 bp, Probe Sequence
gataaagctatggtccaaccaggac

SEQ ID NO: 240332 - DNA, 25 bp, Probe Sequence
gataaagtttttcatgcacaggcaa

SEQ ID NO: 240333 - DNA, 25 bp, Probe Sequence
gataaagtttttcatgcacaggcaa

SEQ ID NO: 240334 - DNA, 25 bp, Probe Sequence
gataaatggttttcatcagccggat

SEQ ID NO: 240335 - DNA, 25 bp, Probe Sequence
gatactaggttttatcacctgctgc

SEQ ID NO: 240336 - DNA, 25 bp, Probe Sequence
gatagccggtttgactcacggggat

SEQ ID NO: 240337 - DNA, 25 bp, Probe Sequence
gatagcggttttgactcacggggat

SEQ ID NO: 240338 - DNA, 25 bp, Probe Sequence
gataggggtgtatgagctccagagg

SEQ ID NO: 240339 - DNA, 25 bp, Probe Sequence
gataggcaggtttactgtaaatgaa

SEQ ID NO: 240340 - DNA, 25 bp, Probe Sequence
gatagagcggctttagtatagtatt

SEQ ID NO: 240341 - DNA, 25 bp, Probe Sequence
gatatggttgatttcgtaggatttg

SEQ ID NO: 240342 - DNA, 25 bp, Probe Sequence
gatagtacatgtttctgctaaagat

SEQ ID NO: 240343 - DNA, 25 bp, Probe Sequence
gatagtacatgtgttgttcaaacct

SEQ ID NO: 240344 - DNA, 25 bp, Probe Sequence
gatagacttgccattttaatacacg

SEQ ID NO: 240345 - DNA, 25 bp, Probe Sequence
gatacagtatccaatttatccaaac

SEQ ID NO: 240346 - DNA, 25 bp, Probe Sequence
gatactttcctctttttcaagactc

SEQ ID NO: 240347 - DNA, 25 bp, Probe Sequence
gatactttgacagtgtttttagacc

SEQ ID NO: 240348 - DNA, 25 bp, Probe Sequence
gataccttcagagggttttgcgacc

SEQ ID NO: 240349 - DNA, 25 bp, Probe Sequence
gataccccagaggttgatttatacc

SEQ ID NO: 240350 - DNA, 25 bp, Probe Sequence
gataccccagaggttgatttatacc

SEQ ID NO: 240351 - DNA, 25 bp, Probe Sequence
gataccaccaagaatatctttgatg

SEQ ID NO: 240352 - DNA, 25 bp, Probe Sequence
gatactaaagagatattgtggtgat

SEQ ID NO: 240353 - DNA, 25 bp, Probe Sequence
gataccgaggagctggctgtggcta

SEQ ID NO: 240354 - DNA, 25 bp, Probe Sequence
gataccgaagttagtctgggcatga

SEQ ID NO: 240355 - DNA, 25 bp, Probe Sequence
gataccagaaaactgcctggagcag

SEQ ID NO: 240356 - DNA, 25 bp, Probe Sequence
gataaaggcacaagacgtgagcagc

SEQ ID NO: 240357 - DNA, 25 bp, Probe Sequence
gatacctggcctggtctggacacag

SEQ ID NO: 240358 - DNA, 25 bp, Probe Sequence
gatagcacatgactttcctggaatt

SEQ ID NO: 240359 - DNA, 25 bp, Probe Sequence
gatacatctgatctatcatgggaat

SEQ ID NO: 240360 - DNA, 25 bp, Probe Sequence
gataccatatggacaatgcacgatt

SEQ ID NO: 240361 - DNA, 25 bp, Probe Sequence
gatacatacatgcctatgatgaagt

SEQ ID NO: 240362 - DNA, 25 bp, Probe Sequence
gatacacctgccaatgtgcagcatg

SEQ ID NO: 240363 - DNA, 25 bp, Probe Sequence
gatatcactgtggctcagttcatgt

SEQ ID NO: 240364 - DNA, 25 bp, Probe Sequence
gatacactggcagagctcacagatg

SEQ ID NO: 240365 - DNA, 25 bp, Probe Sequence
gataacatgttccgctcataataac

SEQ ID NO: 240366 - DNA, 25 bp, Probe Sequence
gatatatcagaagccacatcaaaac

SEQ ID NO: 240367 - DNA, 25 bp, Probe Sequence
gatagttcactgcctaacaaacaag

SEQ ID NO: 240368 - DNA, 25 bp, Probe Sequence
gataactggctaattacaaacatga

SEQ ID NO: 240369 - DNA, 25 bp, Probe Sequence
gatacaattgatgtgttccaacagc

SEQ ID NO: 240370 - DNA, 25 bp, Probe Sequence
gatacctatatctgtgctcgcaaat

SEQ ID NO: 240371 - DNA, 25 bp, Probe Sequence
gataactaacatttcatccgatgac

SEQ ID NO: 240372 - DNA, 25 bp, Probe Sequence
gataaaatcacttctgtttgttcaa

SEQ ID NO: 240373 - DNA, 25 bp, Probe Sequence
gataaaatcacttctgtttgttcag

SEQ ID NO: 240374 - DNA, 25 bp, Probe Sequence
gatacaaatcactacagttctcaga

SEQ ID NO: 240375 - DNA, 25 bp, Probe Sequence
gataaagatcatcatcgattcgaac

SEQ ID NO: 240376 - DNA, 25 bp, Probe Sequence
gataacacacaagctgactcagaac

SEQ ID NO: 240377 - DNA, 25 bp, Probe Sequence
gatagagcaagaacctgtctcaaaa

SEQ ID NO: 240378 - DNA, 25 bp, Probe Sequence
gatacatgccatgcctttgatcaaa

SEQ ID NO: 240379 - DNA, 25 bp, Probe Sequence
gatactctagatgctttatggacaa

SEQ ID NO: 240380 - DNA, 25 bp, Probe Sequence
gatacatataattcttttggctttg

SEQ ID NO: 240381 - DNA, 25 bp, Probe Sequence
gattcagcacctgcttttgtttctg

SEQ ID NO: 240382 - DNA, 25 bp, Probe Sequence
gatatgaagcctgactgattttttt

SEQ ID NO: 240383 - DNA, 25 bp, Probe Sequence
gataaagctgctaactcctgatcta

SEQ ID NO: 240384 - DNA, 25 bp, Probe Sequence
gataaagcactttctctctgaaaaa

SEQ ID NO: 240385 - DNA, 25 bp, Probe Sequence
gatattaatgtcactgggacaaaaa

SEQ ID NO: 240386 - DNA, 25 bp, Probe Sequence
gatattatgcatactgagctagacc

SEQ ID NO: 240387 - DNA, 25 bp, Probe Sequence
gatattgtatatcatctggccgcct

SEQ ID NO: 240388 - DNA, 25 bp, Probe Sequence
gatagtggcatctgtatgagcccag

SEQ ID NO: 240389 - DNA, 25 bp, Probe Sequence
gatagtgtctcttgtgagatcagcg

SEQ ID NO: 240390 - DNA, 25 bp, Probe Sequence
gatagactcggcttgaatctcagct

SEQ ID NO: 240391 - DNA, 25 bp, Probe Sequence
gatagagccttctgtgttgcagatg

SEQ ID NO: 240392 - DNA, 25 bp, Probe Sequence
gatacactccgagaggtgcagctga

SEQ ID NO: 240393 - DNA, 25 bp, Probe Sequence
gatttcactctactgaggatcctga

SEQ ID NO: 240394 - DNA, 25 bp, Probe Sequence
gatatctctgccaacatgaggacag

SEQ ID NO: 240395 - DNA, 25 bp, Probe Sequence
gatactgctgctggaatgggcgaga

SEQ ID NO: 240396 - DNA, 25 bp, Probe Sequence
gatactctgctgtttgggacacagg

SEQ ID NO: 240397 - DNA, 25 bp, Probe Sequence
gatacagctctcttcagagtaactg

SEQ ID NO: 240398 - DNA, 25 bp, Probe Sequence
gatactgtatcatgacaaagactga

SEQ ID NO: 240399 - DNA, 25 bp, Probe Sequence
gatactttgccgtcaattaagcata

SEQ ID NO: 240400 - DNA, 25 bp, Probe Sequence
gatacctatctcccaaatacatcaa

SEQ ID NO: 240401 - DNA, 25 bp, Probe Sequence
gataccaagccacacaaagactaca

SEQ ID NO: 240402 - DNA, 25 bp, Probe Sequence
gataccatcagagaacaaacactaa

SEQ ID NO: 240403 - DNA, 25 bp, Probe Sequence
gataccatcagagaacaaacactaa

SEQ ID NO: 240404 - DNA, 25 bp, Probe Sequence
gataccatcagagaacaaacactaa

SEQ ID NO: 240405 - DNA, 25 bp, Probe Sequence
gatacccatgactgcaagaatactg

SEQ ID NO: 240406 - DNA, 25 bp, Probe Sequence
gatacccatagcttccatgagaaca

SEQ ID NO: 240407 - DNA, 25 bp, Probe Sequence
gatacaatctcctttcatgagaata

SEQ ID NO: 240408 - DNA, 25 bp, Probe Sequence
gatacgttcctgtgctgcaaaagtc

SEQ ID NO: 240409 - DNA, 25 bp, Probe Sequence
gatatccttcctcagctaaaactgc

SEQ ID NO: 240410 - DNA, 25 bp, Probe Sequence
gattcctgtcttgaaaaaagcacct

SEQ ID NO: 240411 - DNA, 25 bp, Probe Sequence
gatttcttgtagacaaaaaggccta

SEQ ID NO: 240412 - DNA, 25 bp, Probe Sequence
gatttgtcgggtagaaacagagtac

SEQ ID NO: 240413 - DNA, 25 bp, Probe Sequence
gttgaccgaggggaaaagatttcag

SEQ ID NO: 240414 - DNA, 25 bp, Probe Sequence
gtggtgccaaacaaaaaggttctca

SEQ ID NO: 240415 - DNA, 25 bp, Probe Sequence
gttgtccaaacaagaaatacctatc

SEQ ID NO: 240416 - DNA, 25 bp, Probe Sequence
gatttcctaataaaagtccactctg

SEQ ID NO: 240417 - DNA, 25 bp, Probe Sequence
gtagcaccttcaaagaaatccccgt

SEQ ID NO: 240418 - DNA, 25 bp, Probe Sequence
gatatgaggttcacaaagtccccgc

SEQ ID NO: 240419 - DNA, 25 bp, Probe Sequence
gatatggtgttttatacgcttcctc

SEQ ID NO: 240420 - DNA, 25 bp, Probe Sequence
gattgtagtttagttttcctccttg

SEQ ID NO: 240421 - DNA, 25 bp, Probe Sequence
gatagtctgctgaggttgttggccc

SEQ ID NO: 240422 - DNA, 25 bp, Probe Sequence
gatacttgcatgatatactgtagtc

SEQ ID NO: 240423 - DNA, 25 bp, Probe Sequence
gatactttgctttagatgtcagtct

SEQ ID NO: 240424 - DNA, 25 bp, Probe Sequence
gatacttgacttatatgctcaggta

SEQ ID NO: 240425 - DNA, 25 bp, Probe Sequence
gatacattatttttctccaggacgt

SEQ ID NO: 240426 - DNA, 25 bp, Probe Sequence
gatacatttactaatcccaaatcac

SEQ ID NO: 240427 - DNA, 25 bp, Probe Sequence
gatacgtggacatttcctcataaaa

SEQ ID NO: 240428 - DNA, 25 bp, Probe Sequence
gatacggaacattcttccagaagaa

SEQ ID NO: 240429 - DNA, 25 bp, Probe Sequence
gatataggaccaagattacagaatg

SEQ ID NO: 240430 - DNA, 25 bp, Probe Sequence
gatagaaccggacctagcatgattg

SEQ ID NO: 240431 - DNA, 25 bp, Probe Sequence
gatagtcctcggataagcatgggga

SEQ ID NO: 240432 - DNA, 25 bp, Probe Sequence
gatagatcctgaagttacagatgaa

SEQ ID NO: 240433 - DNA, 25 bp, Probe Sequence
gatagctctctgactgctttggata

SEQ ID NO: 240434 - DNA, 25 bp, Probe Sequence
gatagtgactatggcagttcgaaaa

SEQ ID NO: 240435 - DNA, 25 bp, Probe Sequence
gatagtgacatagcacttcagccta

SEQ ID NO: 240436 - DNA, 25 bp, Probe Sequence
gatagatgaaattcacacccctgca

SEQ ID NO: 240437 - DNA, 25 bp, Probe Sequence
gatagatataatacaactcagtgct

SEQ ID NO: 240438 - DNA, 25 bp, Probe Sequence
gatagaaaattactgtcatgtgctc

SEQ ID NO: 240439 - DNA, 25 bp, Probe Sequence
gatagctacaattcagtggatggca

SEQ ID NO: 240440 - DNA, 25 bp, Probe Sequence
gatacaggcaattcagtggactata

SEQ ID NO: 240441 - DNA, 25 bp, Probe Sequence
gatactggcagattgcagtgcaacc

SEQ ID NO: 240442 - DNA, 25 bp, Probe Sequence
gatacgtgctgcttgttcatcacaa

SEQ ID NO: 240443 - DNA, 25 bp, Probe Sequence
gatactttcattttgcacatcatgc

SEQ ID NO: 240444 - DNA, 25 bp, Probe Sequence
gatagtttattcttgacatattgag

SEQ ID NO: 240445 - DNA, 25 bp, Probe Sequence
gatagacattttcggaagtgctgag

SEQ ID NO: 240446 - DNA, 25 bp, Probe Sequence
gatagaatttgttggccagttggat

SEQ ID NO: 240447 - DNA, 25 bp, Probe Sequence
gatactttttttcatgtctctgtct

SEQ ID NO: 240448 - DNA, 25 bp, Probe Sequence
gatacttgaattattgtgcgcctgt

SEQ ID NO: 240449 - DNA, 25 bp, Probe Sequence
gatacttgagacatccatttgtttt

SEQ ID NO: 240450 - DNA, 25 bp, Probe Sequence
gatacttgttattgtctgctttttt

SEQ ID NO: 240451 - DNA, 25 bp, Probe Sequence
gatactggtgttttctgacttttac

SEQ ID NO: 240452 - DNA, 25 bp, Probe Sequence
gatactgtgattctagtgattttca

SEQ ID NO: 240453 - DNA, 25 bp, Probe Sequence
gatactggtattaagctgaatcctc

SEQ ID NO: 240454 - DNA, 25 bp, Probe Sequence
gatactcgtattaagcctatttata

SEQ ID NO: 240455 - DNA, 25 bp, Probe Sequence
gataccagaatttacctatcttgct

SEQ ID NO: 240456 - DNA, 25 bp, Probe Sequence
gatacagcaggacaaccttctagcg

SEQ ID NO: 240457 - DNA, 25 bp, Probe Sequence
gatactgaagaacatcacttaagag

SEQ ID NO: 240458 - DNA, 25 bp, Probe Sequence
gatactgtcaaattttgccttgagg

SEQ ID NO: 240459 - DNA, 25 bp, Probe Sequence
gatacagtagatttcttcttagcag

SEQ ID NO: 240460 - DNA, 25 bp, Probe Sequence
gatacttcgacactgttcttagctc

SEQ ID NO: 240461 - DNA, 25 bp, Probe Sequence
gatactcatcagtcaaggttctact

SEQ ID NO: 240462 - DNA, 25 bp, Probe Sequence
gatacataagtcaactcttctcctt

SEQ ID NO: 240463 - DNA, 25 bp, Probe Sequence
gatagatcaataaacattttgtctt

SEQ ID NO: 240464 - DNA, 25 bp, Probe Sequence
gatagtcttggcacagtctcatgtt

SEQ ID NO: 240465 - DNA, 25 bp, Probe Sequence
gatagtcatttgcccgtcaagttat

SEQ ID NO: 240466 - DNA, 25 bp, Probe Sequence
gatagtcaattgattgtaagatttt

SEQ ID NO: 240467 - DNA, 25 bp, Probe Sequence
gatagtcatgttttttagactctct

SEQ ID NO: 240468 - DNA, 25 bp, Probe Sequence
gatagtgacctactttctacctcac

SEQ ID NO: 240469 - DNA, 25 bp, Probe Sequence
gatagtgtccagccttgtatatttc

SEQ ID NO: 240470 - DNA, 25 bp, Probe Sequence
gatagcttaatgactgtttattctc

SEQ ID NO: 240471 - DNA, 25 bp, Probe Sequence
gataaataagcctttcctgtcatct

SEQ ID NO: 240472 - DNA, 25 bp, Probe Sequence
gatagagattaccattctgcccttc

SEQ ID NO: 240473 - DNA, 25 bp, Probe Sequence
gatagagagctattacctacctttc

SEQ ID NO: 240474 - DNA, 25 bp, Probe Sequence
gatagaagcctttgtctgtgcctac

SEQ ID NO: 240475 - DNA, 25 bp, Probe Sequence
gatacagacgcttagctcttaaaag

SEQ ID NO: 240476 - DNA, 25 bp, Probe Sequence
gatatagaccattagttctcaacta

SEQ ID NO: 240477 - DNA, 25 bp, Probe Sequence
gatataacctattgactgtattctg

SEQ ID NO: 240478 - DNA, 25 bp, Probe Sequence
gatatgcacgctgaatcctgctatg

SEQ ID NO: 240479 - DNA, 25 bp, Probe Sequence
gatatgcacctgcaacggagactcc

SEQ ID NO: 240480 - DNA, 25 bp, Probe Sequence
gatactcacgaagcggacacagttc

SEQ ID NO: 240481 - DNA, 25 bp, Probe Sequence
gatattagggcctggacatctttgg

SEQ ID NO: 240482 - DNA, 25 bp, Probe Sequence
gatacttaggcctttgaattttaga

SEQ ID NO: 240483 - DNA, 25 bp, Probe Sequence
gatacggaggatttatgagatttta

SEQ ID NO: 240484 - DNA, 25 bp, Probe Sequence
gataccgtgtatcttacaaatgttt

SEQ ID NO: 240485 - DNA, 25 bp, Probe Sequence
gataccgtgaatctaagaagatcga

SEQ ID NO: 240486 - DNA, 25 bp, Probe Sequence
gataccaggagaccttcaacgtcat

SEQ ID NO: 240487 - DNA, 25 bp, Probe Sequence
gataccagatagctcaatactctct

SEQ ID NO: 240488 - DNA, 25 bp, Probe Sequence
gatatccagataccacacataccaa

SEQ ID NO: 240489 - DNA, 25 bp, Probe Sequence
gatagcagctgtacaaaatgactaa

SEQ ID NO: 240490 - DNA, 25 bp, Probe Sequence
gatacctatatccatatagcatgta

SEQ ID NO: 240491 - DNA, 25 bp, Probe Sequence
gatagagctacaaactcagctgtac

SEQ ID NO: 240492 - DNA, 25 bp, Probe Sequence
gatagagctctcgtgacttaatcac

SEQ ID NO: 240493 - DNA, 25 bp, Probe Sequence
gatagtggtgcagtgctttaacata

SEQ ID NO: 240494 - DNA, 25 bp, Probe Sequence
gatagggtatacattgatcaataag

SEQ ID NO: 240495 - DNA, 25 bp, Probe Sequence
gatagggtctaagttatgatattca

SEQ ID NO: 240496 - DNA, 25 bp, Probe Sequence
gatagtgagttattgtaggaattac

SEQ ID NO: 240497 - DNA, 25 bp, Probe Sequence
gatagtatttactggagagatcata

SEQ ID NO: 240498 - DNA, 25 bp, Probe Sequence
gatatggattggaaactgaaattca

SEQ ID NO: 240499 - DNA, 25 bp, Probe Sequence
gatatcaccaggagactaaagtcca

SEQ ID NO: 240500 - DNA, 25 bp, Probe Sequence
gatacattcgtcagacacaagatcc

SEQ ID NO: 240501 - DNA, 25 bp, Probe Sequence
gatacttcttcataaaacataaaca

SEQ ID NO: 240502 - DNA, 25 bp, Probe Sequence
gatacatttttgtactaactagcat

SEQ ID NO: 240503 - DNA, 25 bp, Probe Sequence
gatacttttggatctcattgttgat

SEQ ID NO: 240504 - DNA, 25 bp, Probe Sequence
gatacttttggatctcattgttgat

SEQ ID NO: 240505 - DNA, 25 bp, Probe Sequence
gatactttttgctgctagctttatg

SEQ ID NO: 240506 - DNA, 25 bp, Probe Sequence
gatagttaacattagtggatttaga

SEQ ID NO: 240507 - DNA, 25 bp, Probe Sequence
gatacgtcatccagaatggtttaaa

SEQ ID NO: 240508 - DNA, 25 bp, Probe Sequence
gatacttccactcaagattttggag

SEQ ID NO: 240509 - DNA, 25 bp, Probe Sequence
gatacagttactcagaattctctag

SEQ ID NO: 240510 - DNA, 25 bp, Probe Sequence
gatacaggatcagtcctaatctatt

SEQ ID NO: 240511 - DNA, 25 bp, Probe Sequence
gatacggactcagctggtctatttt

SEQ ID NO: 240512 - DNA, 25 bp, Probe Sequence
gatacagataccagcttgccttgat

SEQ ID NO: 240513 - DNA, 25 bp, Probe Sequence
gatatgaggacctctgtgccttcta

SEQ ID NO: 240514 - DNA, 25 bp, Probe Sequence
gatatcttgacctacgtggcttgga

SEQ ID NO: 240515 - DNA, 25 bp, Probe Sequence
gatacttgcctaacatgcatgtgct

SEQ ID NO: 240516 - DNA, 25 bp, Probe Sequence
gatacttcagtgacacagcctctgc

SEQ ID NO: 240517 - DNA, 25 bp, Probe Sequence
gatactacagtaacaggctttaatt

SEQ ID NO: 240518 - DNA, 25 bp, Probe Sequence
gatagtcaaatacacgtttagatta

SEQ ID NO: 240519 - DNA, 25 bp, Probe Sequence
gatagacagtaacggtgtttagttt

SEQ ID NO: 240520 - DNA, 25 bp, Probe Sequence
gatagagttgaggagtgtgaggctg

SEQ ID NO: 240521 - DNA, 25 bp, Probe Sequence
gatagacttgactgtgtttgtgaaa

SEQ ID NO: 240522 - DNA, 25 bp, Probe Sequence
gataggttcaaaatgttaggaacag

SEQ ID NO: 240523 - DNA, 25 bp, Probe Sequence
gatacgttagagatttaagagactg

SEQ ID NO: 240524 - DNA, 25 bp, Probe Sequence
gattagttggacagtttaaagcttt

SEQ ID NO: 240525 - DNA, 25 bp, Probe Sequence
gatatagaattgtggctttagtagc

SEQ ID NO: 240526 - DNA, 25 bp, Probe Sequence
gatactgaagtatttgctttaattc

SEQ ID NO: 240527 - DNA, 25 bp, Probe Sequence
gatatcttgacgctctctttaaggg

SEQ ID NO: 240528 - DNA, 25 bp, Probe Sequence
gatatcttagagcatccttttacgc

SEQ ID NO: 240529 - DNA, 25 bp, Probe Sequence
gatactacaagttgagcatctctaa

SEQ ID NO: 240530 - DNA, 25 bp, Probe Sequence
gatactacaagttgagcatctctaa

SEQ ID NO: 240531 - DNA, 25 bp, Probe Sequence
gatatgtactcaaatagtcattaag

SEQ ID NO: 240532 - DNA, 25 bp, Probe Sequence
gatactcattcaattattcatatga

SEQ ID NO: 240533 - DNA, 25 bp, Probe Sequence
gatacttatgaaatctcacagatgt

SEQ ID NO: 240534 - DNA, 25 bp, Probe Sequence
gatacttcattaatctccatcatgt

SEQ ID NO: 240535 - DNA, 25 bp, Probe Sequence
gatacttcattaatctccatcatgt

SEQ ID NO: 240536 - DNA, 25 bp, Probe Sequence
gatagcatgacattctttcttcctg

SEQ ID NO: 240537 - DNA, 25 bp, Probe Sequence
gatagcagatcagctcagccatcac

SEQ ID NO: 240538 - DNA, 25 bp, Probe Sequence
gatacccagccttgtatcactgttg

SEQ ID NO: 240539 - DNA, 25 bp, Probe Sequence
gatacctcaccatggatgacttgac

SEQ ID NO: 240540 - DNA, 25 bp, Probe Sequence
gattactaccaacgtcactatgatg

SEQ ID NO: 240541 - DNA, 25 bp, Probe Sequence
gatagatatcacttaggtcacttgg

SEQ ID NO: 240542 - DNA, 25 bp, Probe Sequence
gatagtgcatcttctgaggtcaatt

SEQ ID NO: 240543 - DNA, 25 bp, Probe Sequence
gatagtgcagctttgggtgatcttg

SEQ ID NO: 240544 - DNA, 25 bp, Probe Sequence
gatagcatagatttacgctgtcatt

SEQ ID NO: 240545 - DNA, 25 bp, Probe Sequence
gatagcatatattcatacctgttgt

SEQ ID NO: 240546 - DNA, 25 bp, Probe Sequence
gatatgctaatctaaggcagttgct

SEQ ID NO: 240547 - DNA, 25 bp, Probe Sequence
gatatccaaacaagactgctcatgc

SEQ ID NO: 240548 - DNA, 25 bp, Probe Sequence
gatatacgagaacgccatgattgct

SEQ ID NO: 240549 - DNA, 25 bp, Probe Sequence
gatatcaaggaactccatgctccac

SEQ ID NO: 240550 - DNA, 25 bp, Probe Sequence
gatagcagtggaaatgcaatcctca

SEQ ID NO: 240551 - DNA, 25 bp, Probe Sequence
gatatgcttgaattggatcacctca

SEQ ID NO: 240552 - DNA, 25 bp, Probe Sequence
gataccagagcattacaacagccat

SEQ ID NO: 240553 - DNA, 25 bp, Probe Sequence
gatacctggagaactatgatgccat

SEQ ID NO: 240554 - DNA, 25 bp, Probe Sequence
gatacgctagtaactgtgataccat

SEQ ID NO: 240555 - DNA, 25 bp, Probe Sequence
gatacctagtatgatggagctgcaa

SEQ ID NO: 240556 - DNA, 25 bp, Probe Sequence
gatatcccgttttgtgaggtagagc

SEQ ID NO: 240557 - DNA, 25 bp, Probe Sequence
gatatcccgttttgtgaggtagagc

SEQ ID NO: 240558 - DNA, 25 bp, Probe Sequence
gatacctcggattgaggatggtaac

SEQ ID NO: 240559 - DNA, 25 bp, Probe Sequence
gatacgacagagaatcagagtggtg

SEQ ID NO: 240560 - DNA, 25 bp, Probe Sequence
gataggacatagtagtagcggtggt

SEQ ID NO: 240561 - DNA, 25 bp, Probe Sequence
gataggacagcagtattatgggcga

SEQ ID NO: 240562 - DNA, 25 bp, Probe Sequence
gatacgacagatgatgcttttcgaa

SEQ ID NO: 240563 - DNA, 25 bp, Probe Sequence
gataccacaaatagttttatgatca

SEQ ID NO: 240564 - DNA, 25 bp, Probe Sequence
gatacctttatcattcctgagacag

SEQ ID NO: 240565 - DNA, 25 bp, Probe Sequence
gatactagtttgctttgctgaccaa

SEQ ID NO: 240566 - DNA, 25 bp, Probe Sequence
gatactggtgttagtgttgtaatca

SEQ ID NO: 240567 - DNA, 25 bp, Probe Sequence
gatactggtctgtgattggtggaat

SEQ ID NO: 240568 - DNA, 25 bp, Probe Sequence
gatactggcattttgtagatgtggt

SEQ ID NO: 240569 - DNA, 25 bp, Probe Sequence
gatacgactttattttctggtagat

SEQ ID NO: 240570 - DNA, 25 bp, Probe Sequence
gatacgatcttaagcttttgtgtca

SEQ ID NO: 240571 - DNA, 25 bp, Probe Sequence
gatacgatcttaagcttttgtgtca

SEQ ID NO: 240572 - DNA, 25 bp, Probe Sequence
gatactgttccaaattgttgattgc

SEQ ID NO: 240573 - DNA, 25 bp, Probe Sequence
gatagtctctctggaataagtttgc

SEQ ID NO: 240574 - DNA, 25 bp, Probe Sequence
gatttccttcatcagaattttgtag

SEQ ID NO: 240575 - DNA, 25 bp, Probe Sequence
gatttttggtccagttcttgtggtt

SEQ ID NO: 240576 - DNA, 25 bp, Probe Sequence
gatttttagtatcaatcctgttgag

SEQ ID NO: 240577 - DNA, 25 bp, Probe Sequence
gatactaaagttcaagcactggctg

SEQ ID NO: 240578 - DNA, 25 bp, Probe Sequence
gatatctaatagtgtacagttgggg

SEQ ID NO: 240579 - DNA, 25 bp, Probe Sequence
gatatttaatatctaagcaggggag

SEQ ID NO: 240580 - DNA, 25 bp, Probe Sequence
gatataaacatcattgacacggagg

SEQ ID NO: 240581 - DNA, 25 bp, Probe Sequence
gatttagacacctgaaactgggcgt

SEQ ID NO: 240582 - DNA, 25 bp, Probe Sequence
gatttagacacctgaaactgggcgt

SEQ ID NO: 240583 - DNA, 25 bp, Probe Sequence
gatactataccctagaaactctgaa

SEQ ID NO: 240584 - DNA, 25 bp, Probe Sequence
gattttgccctcggagcaaactgaa

SEQ ID NO: 240585 - DNA, 25 bp, Probe Sequence
gatttcaggacccttgaaactaatt

SEQ ID NO: 240586 - DNA, 25 bp, Probe Sequence
gatttgaggcgctgttgaggactga

SEQ ID NO: 240587 - DNA, 25 bp, Probe Sequence
gattcggaggaacctgagtgcctca

SEQ ID NO: 240588 - DNA, 25 bp, Probe Sequence
gattcagggaagctctacaccttgg

SEQ ID NO: 240589 - DNA, 25 bp, Probe Sequence
gatatcggatgtcgtttaacctggg

SEQ ID NO: 240590 - DNA, 25 bp, Probe Sequence
gatatcagtttagtttaaccctaca

SEQ ID NO: 240591 - DNA, 25 bp, Probe Sequence
gatatcgattttgtccaagttttac

SEQ ID NO: 240592 - DNA, 25 bp, Probe Sequence
gatttattacttcccaatatttcta

SEQ ID NO: 240593 - DNA, 25 bp, Probe Sequence
gattttttttgacaacagtacatat

SEQ ID NO: 240594 - DNA, 25 bp, Probe Sequence
gatttttgttgttacgggtattcag

SEQ ID NO: 240595 - DNA, 25 bp, Probe Sequence
gattttgttgggcaccgaaatcacg

SEQ ID NO: 240596 - DNA, 25 bp, Probe Sequence
gattttgctagtctagttcgaatcc

SEQ ID NO: 240597 - DNA, 25 bp, Probe Sequence
gatttgtcaaggggatggtggcaaa

SEQ ID NO: 240598 - DNA, 25 bp, Probe Sequence
gattttaaggctgtagcttgccgat

SEQ ID NO: 240599 - DNA, 25 bp, Probe Sequence
gattttggacttgttcatgtcccct

SEQ ID NO: 240600 - DNA, 25 bp, Probe Sequence
gattttggcctcattactttaccac

SEQ ID NO: 240601 - DNA, 25 bp, Probe Sequence
gattttgtactgctaaaattaccaa

SEQ ID NO: 240602 - DNA, 25 bp, Probe Sequence
gatactggtacttgatagcctctta

SEQ ID NO: 240603 - DNA, 25 bp, Probe Sequence
gatactggtacttgatagcctctta

SEQ ID NO: 240604 - DNA, 25 bp, Probe Sequence
gatactgaggattctgaccctgtgt

SEQ ID NO: 240605 - DNA, 25 bp, Probe Sequence
gatttatggatgttgacgccaatgt

SEQ ID NO: 240606 - DNA, 25 bp, Probe Sequence
gattaatgggggttgctactgttta

SEQ ID NO: 240607 - DNA, 25 bp, Probe Sequence
gattcctggaggtggtcgtttttga

SEQ ID NO: 240608 - DNA, 25 bp, Probe Sequence
gatttcttatggtggtttcagtttc

SEQ ID NO: 240609 - DNA, 25 bp, Probe Sequence
gatttcttatggtggtttcagtttc

SEQ ID NO: 240610 - DNA, 25 bp, Probe Sequence
gatatacttgggagccgttctgttt

SEQ ID NO: 240611 - DNA, 25 bp, Probe Sequence
gattacgtggattgctgccgggatg

SEQ ID NO: 240612 - DNA, 25 bp, Probe Sequence
gattccagtggttctgcttcaaggc

SEQ ID NO: 240613 - DNA, 25 bp, Probe Sequence
gatatctcgacagcactttcaagcc

SEQ ID NO: 240614 - DNA, 25 bp, Probe Sequence
gatagctcttcagcctgcactgaag

SEQ ID NO: 240615 - DNA, 25 bp, Probe Sequence
gatatgttcagcaagatctgcgtga

SEQ ID NO: 240616 - DNA, 25 bp, Probe Sequence
gatattcacacacattcaggaacct

SEQ ID NO: 240617 - DNA, 25 bp, Probe Sequence
gatattcaaactctaaaccatctga

SEQ ID NO: 240618 - DNA, 25 bp, Probe Sequence
gatattccagaacctgaaatccaaa

SEQ ID NO: 240619 - DNA, 25 bp, Probe Sequence
gatattccagaacctgaaatccaaa

SEQ ID NO: 240620 - DNA, 25 bp, Probe Sequence
gattacagtgaaactgaccattcag

SEQ ID NO: 240621 - DNA, 25 bp, Probe Sequence
gatatccaggagtatctaactatca

SEQ ID NO: 240622 - DNA, 25 bp, Probe Sequence
gatatctcatggcatattaaaagaa

SEQ ID NO: 240623 - DNA, 25 bp, Probe Sequence
gatatgagcataagttgtacaagga

SEQ ID NO: 240624 - DNA, 25 bp, Probe Sequence
gatagtaatttgtatacacactgca

SEQ ID NO: 240625 - DNA, 25 bp, Probe Sequence
gatagtagactgtttgaatgcaata

SEQ ID NO: 240626 - DNA, 25 bp, Probe Sequence
gatatgtatacttttgcttcactaa

SEQ ID NO: 240627 - DNA, 25 bp, Probe Sequence
gatttcaacttttgttcatcctagc

SEQ ID NO: 240628 - DNA, 25 bp, Probe Sequence
gattcataccttattccctataaag

SEQ ID NO: 240629 - DNA, 25 bp, Probe Sequence
gattaacatctagtttctcgtcaga

SEQ ID NO: 240630 - DNA, 25 bp, Probe Sequence
gattaaagccaaacttcgtggtgaa

SEQ ID NO: 240631 - DNA, 25 bp, Probe Sequence
gatataaactttctctgggttgata

SEQ ID NO: 240632 - DNA, 25 bp, Probe Sequence
gttgaacactttagccttaattgaa

SEQ ID NO: 240633 - DNA, 25 bp, Probe Sequence
gatagataatcccattgcctttatt

SEQ ID NO: 240634 - DNA, 25 bp, Probe Sequence
gatagaacatgagatactctttgtt

SEQ ID NO: 240635 - DNA, 25 bp, Probe Sequence
gatataaatgcagcaacttgtttta

SEQ ID NO: 240636 - DNA, 25 bp, Probe Sequence
gattctgactgctgcacattgtctc

SEQ ID NO: 240637 - DNA, 25 bp, Probe Sequence
gatattggctgtggcactgggctga

SEQ ID NO: 240638 - DNA, 25 bp, Probe Sequence
gatatactcatctgccatggtgtgg

SEQ ID NO: 240639 - DNA, 25 bp, Probe Sequence
gatatactcatctgccatggtgtgg

SEQ ID NO: 240640 - DNA, 25 bp, Probe Sequence
gatagccttccactgattggctggt

SEQ ID NO: 240641 - DNA, 25 bp, Probe Sequence
gttgtcttccagcaattcttgtagc

SEQ ID NO: 240642 - DNA, 25 bp, Probe Sequence
gatatgtcgtccacaatgtcacagg

SEQ ID NO: 240643 - DNA, 25 bp, Probe Sequence
gatatgtcagaggcgtttgaaccag

SEQ ID NO: 240644 - DNA, 25 bp, Probe Sequence
gatatgctcatgtggtattgaggaa

SEQ ID NO: 240645 - DNA, 25 bp, Probe Sequence
gatatcctgaggctgattcgggagc

SEQ ID NO: 240646 - DNA, 25 bp, Probe Sequence
gatacctggaggcttatctgaggcc

SEQ ID NO: 240647 - DNA, 25 bp, Probe Sequence
gatagcacggagcctggcttgtggt

SEQ ID NO: 240648 - DNA, 25 bp, Probe Sequence
gatagtttgggatgcagtgcttgtt

SEQ ID NO: 240649 - DNA, 25 bp, Probe Sequence
gatagcactattcaaagatatcttt

SEQ ID NO: 240650 - DNA, 25 bp, Probe Sequence
gatatgtatactccagaagaatttc

SEQ ID NO: 240651 - DNA, 25 bp, Probe Sequence
gatatctaattctaaagtctgttcc

SEQ ID NO: 240652 - DNA, 25 bp, Probe Sequence
gattatttgcccaaagttgtcctct

SEQ ID NO: 240653 - DNA, 25 bp, Probe Sequence
gatttgatcctagaagtggtccttg

SEQ ID NO: 240654 - DNA, 25 bp, Probe Sequence
gatatctgagtataaggggttttga

SEQ ID NO: 240655 - DNA, 25 bp, Probe Sequence
gatttgtgtattgtagggtgtttgt

SEQ ID NO: 240656 - DNA, 25 bp, Probe Sequence
gatttcattatctgcctgggttttt

SEQ ID NO: 240657 - DNA, 25 bp, Probe Sequence
gattgtctactgtgggcaggtgttt

SEQ ID NO: 240658 - DNA, 25 bp, Probe Sequence
gatatttactcaaggcaaggtgcgg

SEQ ID NO: 240659 - DNA, 25 bp, Probe Sequence
gatatttcagtcaagtccgggattc

SEQ ID NO: 240660 - DNA, 25 bp, Probe Sequence
gatatctaatgtgatgcccggaata

SEQ ID NO: 240661 - DNA, 25 bp, Probe Sequence
gatattaatgtggtccctgtaagaa

SEQ ID NO: 240662 - DNA, 25 bp, Probe Sequence
gatttgaagttggtcctgtttgttt

SEQ ID NO: 240663 - DNA, 25 bp, Probe Sequence
gatttctatgttatgccggtggtta

SEQ ID NO: 240664 - DNA, 25 bp, Probe Sequence
gattattattggagcctaattgtta

SEQ ID NO: 240665 - DNA, 25 bp, Probe Sequence
gatttctttggcatgtccaacagtt

SEQ ID NO: 240666 - DNA, 25 bp, Probe Sequence
gatttctttggcatgtccaacagtt

SEQ ID NO: 240667 - DNA, 25 bp, Probe Sequence
gataggtaaccaggtccaatcagta

SEQ ID NO: 240668 - DNA, 25 bp, Probe Sequence
gtagggacaggggtcccactatgtt

SEQ ID NO: 240669 - DNA, 25 bp, Probe Sequence
gtagggaggggtgacacagtgttcc

SEQ ID NO: 240670 - DNA, 25 bp, Probe Sequence
gatagctgggggctccccagatgag

SEQ ID NO: 240671 - DNA, 25 bp, Probe Sequence
gatagaggaggcttccctccaagag

SEQ ID NO: 240672 - DNA, 25 bp, Probe Sequence
gatatacagaggaaagtcacctata

SEQ ID NO: 240673 - DNA, 25 bp, Probe Sequence
gatttagtgtaaagtaccatgtcca

SEQ ID NO: 240674 - DNA, 25 bp, Probe Sequence
gattccgttcagtgtggcctgaaaa

SEQ ID NO: 240675 - DNA, 25 bp, Probe Sequence
gattcttgtaggtgtatgcttactg

SEQ ID NO: 240676 - DNA, 25 bp, Probe Sequence
gatttcgtaggatttgacatcttct

SEQ ID NO: 240677 - DNA, 25 bp, Probe Sequence
gatttcaaacagtgatagacttgcc

SEQ ID NO: 240678 - DNA, 25 bp, Probe Sequence
gattataaacaacctagacagtacc

SEQ ID NO: 240679 - DNA, 25 bp, Probe Sequence
gatttgattaaacctagacgcatta

SEQ ID NO: 240680 - DNA, 25 bp, Probe Sequence
gattaaatatccagccagtacagta

SEQ ID NO: 240681 - DNA, 25 bp, Probe Sequence
gattaatgactggctacagagtaac

SEQ ID NO: 240682 - DNA, 25 bp, Probe Sequence
gatatatctgttgctacatatttaa

SEQ ID NO: 240683 - DNA, 25 bp, Probe Sequence
gatattcgttcgtacatgtttgaca

SEQ ID NO: 240684 - DNA, 25 bp, Probe Sequence
gatatagaggatggtactgttttca

SEQ ID NO: 240685 - DNA, 25 bp, Probe Sequence
gatatggagtatgttttgctatgta

SEQ ID NO: 240686 - DNA, 25 bp, Probe Sequence
gataggaggatgttctcttctgacc

SEQ ID NO: 240687 - DNA, 25 bp, Probe Sequence
gatatggtggatccttttcatacct

SEQ ID NO: 240688 - DNA, 25 bp, Probe Sequence
gatagggagatgcctgaatttcagg

SEQ ID NO: 240689 - DNA, 25 bp, Probe Sequence
gatagagggatcagaaatgactgtg

SEQ ID NO: 240690 - DNA, 25 bp, Probe Sequence
gataggtgtgaaagatgaagggctg

SEQ ID NO: 240691 - DNA, 25 bp, Probe Sequence
gatagtgaggcgagaaagggagaag

SEQ ID NO: 240692 - DNA, 25 bp, Probe Sequence
gatagctcatggctagcatatgggc

SEQ ID NO: 240693 - DNA, 25 bp, Probe Sequence
gatatgtctggcagagctattgaca

SEQ ID NO: 240694 - DNA, 25 bp, Probe Sequence
gatatggctggagagtaatgagaca

SEQ ID NO: 240695 - DNA, 25 bp, Probe Sequence
gatatggtgccgctgtagtacacaa

SEQ ID NO: 240696 - DNA, 25 bp, Probe Sequence
gatatccatgcctgttttacagaaa

SEQ ID NO: 240697 - DNA, 25 bp, Probe Sequence
gatatccatgcctgttttacagaaa

SEQ ID NO: 240698 - DNA, 25 bp, Probe Sequence
gatatttctcgggtccttgcagaaa

SEQ ID NO: 240699 - DNA, 25 bp, Probe Sequence
gatatcaatctcgcttaggtaaaat

SEQ ID NO: 240700 - DNA, 25 bp, Probe Sequence
gattgatttcaacacaggtagaact

SEQ ID NO: 240701 - DNA, 25 bp, Probe Sequence
gatatttctcaacacttaaattcat

SEQ ID NO: 240702 - DNA, 25 bp, Probe Sequence
gattttccagggtttaagcattgct

SEQ ID NO: 240703 - DNA, 25 bp, Probe Sequence
gatttcgtctcagatttaatttctt

SEQ ID NO: 240704 - DNA, 25 bp, Probe Sequence
gatatttgtgtctgttactactttt

SEQ ID NO: 240705 - DNA, 25 bp, Probe Sequence
gatagctttgtcggcattttacttt

SEQ ID NO: 240706 - DNA, 25 bp, Probe Sequence
gatagtgttttgtacttgttctttt

SEQ ID NO: 240707 - DNA, 25 bp, Probe Sequence
gatagttgtcttttcatgcctgatt

SEQ ID NO: 240708 - DNA, 25 bp, Probe Sequence
gatattttcctggtactcgtactga

SEQ ID NO: 240709 - DNA, 25 bp, Probe Sequence
gatttcccgtcttgactgagttcag

SEQ ID NO: 240710 - DNA, 25 bp, Probe Sequence
gatatccttcgtcatgacacttctc

SEQ ID NO: 240711 - DNA, 25 bp, Probe Sequence
gatatcgtctttcatcacgttctca

SEQ ID NO: 240712 - DNA, 25 bp, Probe Sequence
gatattgaatgttggtaccttccat

SEQ ID NO: 240713 - DNA, 25 bp, Probe Sequence
gatatgggatttggtctctttgact

SEQ ID NO: 240714 - DNA, 25 bp, Probe Sequence
gattggctacttgggctattgtaaa

SEQ ID NO: 240715 - DNA, 25 bp, Probe Sequence
gatttgctacttcttctgatgtaat

SEQ ID NO: 240716 - DNA, 25 bp, Probe Sequence
gattatgctaatcatttagttgagc

SEQ ID NO: 240717 - DNA, 25 bp, Probe Sequence
gattggtgaaattggtggtaatgca

SEQ ID NO: 240718 - DNA, 25 bp, Probe Sequence
gatatctatgaaatatggtggtttt

SEQ ID NO: 240719 - DNA, 25 bp, Probe Sequence
gatatcaacaaacgtggagcgtctt

SEQ ID NO: 240720 - DNA, 25 bp, Probe Sequence
gatatacaaaacatggctgcaagct

SEQ ID NO: 240721 - DNA, 25 bp, Probe Sequence
gatatcactgacaccagtctgaatc

SEQ ID NO: 240722 - DNA, 25 bp, Probe Sequence
gatttgcagacaggccaggagatat

SEQ ID NO: 240723 - DNA, 25 bp, Probe Sequence
gatttgcataaggctcaacagtcac

SEQ ID NO: 240724 - DNA, 25 bp, Probe Sequence
gatttgcaagatgctcagtccctgg

SEQ ID NO: 240725 - DNA, 25 bp, Probe Sequence
gatattgagaagcctagcttcactt

SEQ ID NO: 240726 - DNA, 25 bp, Probe Sequence
gatattgacagagttggcttcagaa

SEQ ID NO: 240727 - DNA, 25 bp, Probe Sequence
gataggtcaagcaagactgatcaag

SEQ ID NO: 240728 - DNA, 25 bp, Probe Sequence
gataggcatcattctaacttcagga

SEQ ID NO: 240729 - DNA, 25 bp, Probe Sequence
gatatgagcatatttcagtgctgtc

SEQ ID NO: 240730 - DNA, 25 bp, Probe Sequence
gatatcatgctggttaagcttcaaa

SEQ ID NO: 240731 - DNA, 25 bp, Probe Sequence
gatatgctgtggtttcctactagag

SEQ ID NO: 240732 - DNA, 25 bp, Probe Sequence
gatatgctgattttcattgtgcaca

SEQ ID NO: 240733 - DNA, 25 bp, Probe Sequence
gatatgtgcacttatatcacacaca

SEQ ID NO: 240734 - DNA, 25 bp, Probe Sequence
gatatggcagcttctacatacgaat

SEQ ID NO: 240735 - DNA, 25 bp, Probe Sequence
gatattgcctagaactcactgaagc

SEQ ID NO: 240736 - DNA, 25 bp, Probe Sequence
gatatcacccagaacatagtaaata

SEQ ID NO: 240737 - DNA, 25 bp, Probe Sequence
gattcctctgtcaaaagtagcccat

SEQ ID NO: 240738 - DNA, 25 bp, Probe Sequence
gatttactgatttaagctagccaaa

SEQ ID NO: 240739 - DNA, 25 bp, Probe Sequence
gatttccgttaaaataccagccagt

SEQ ID NO: 240740 - DNA, 25 bp, Probe Sequence
gatttgtgcttggaacgaaccaggc

SEQ ID NO: 240741 - DNA, 25 bp, Probe Sequence
gattagtgcgggtatagacaccccc

SEQ ID NO: 240742 - DNA, 25 bp, Probe Sequence
gattcaggattacacaacaccgcct

SEQ ID NO: 240743 - DNA, 25 bp, Probe Sequence
gtatcggtttaagaagcggacggag

SEQ ID NO: 240744 - DNA, 25 bp, Probe Sequence
gtacgttcctcatgaaagggacgac

SEQ ID NO: 240745 - DNA, 25 bp, Probe Sequence
gtgggttcctaggactagggcccat

SEQ ID NO: 240746 - DNA, 25 bp, Probe Sequence
gttggttcaccaggacgtgatggct

SEQ ID NO: 240747 - DNA, 25 bp, Probe Sequence
gatatggctggctcaaggccgattc

SEQ ID NO: 240748 - DNA, 25 bp, Probe Sequence
gatatggctgcttcaaaggccagag

SEQ ID NO: 240749 - DNA, 25 bp, Probe Sequence
gatagcgactaagccgccagaattg

SEQ ID NO: 240750 - DNA, 25 bp, Probe Sequence
gatagcaatgcttaaccccaggaag

SEQ ID NO: 240751 - DNA, 25 bp, Probe Sequence
gatagactgcttgaacccaggagtt

SEQ ID NO: 240752 - DNA, 25 bp, Probe Sequence
gatagtcagttcgaatgcccggact

SEQ ID NO: 240753 - DNA, 25 bp, Probe Sequence
gatagtcaacagggtcttcgtggct

SEQ ID NO: 240754 - DNA, 25 bp, Probe Sequence
gatagtcaactcagccttcagattg

SEQ ID NO: 240755 - DNA, 25 bp, Probe Sequence
gatagtgaaaatagcctatacacag

SEQ ID NO: 240756 - DNA, 25 bp, Probe Sequence
gatatatataattaggtgaccacag

SEQ ID NO: 240757 - DNA, 25 bp, Probe Sequence
gatagcaaagacttggaaccaaccc

SEQ ID NO: 240758 - DNA, 25 bp, Probe Sequence
gttggaggcatctctgacaccaatc

SEQ ID NO: 240759 - DNA, 25 bp, Probe Sequence
gataggcaggttaccatcactggat

SEQ ID NO: 240760 - DNA, 25 bp, Probe Sequence
gatatgagggaaatcctcagcagta

SEQ ID NO: 240761 - DNA, 25 bp, Probe Sequence
gattagctggatacttcccaggata

SEQ ID NO: 240762 - DNA, 25 bp, Probe Sequence
gattttgaaacttcctagtcaagtc

SEQ ID NO: 240763 - DNA, 25 bp, Probe Sequence
gatttctaaaatgtcacccaaggcc

SEQ ID NO: 240764 - DNA, 25 bp, Probe Sequence
gattacaaaaagatacttcaagtat

SEQ ID NO: 240765 - DNA, 25 bp, Probe Sequence
gatttgcaaaagaaattcttcccaa

SEQ ID NO: 240766 - DNA, 25 bp, Probe Sequence
gattctagaagacaaccttccaaga

SEQ ID NO: 240767 - DNA, 25 bp, Probe Sequence
gatatatatgaggtgcaaatacttc

SEQ ID NO: 240768 - DNA, 25 bp, Probe Sequence
gatatctagagtagagttgctagtc

SEQ ID NO: 240769 - DNA, 25 bp, Probe Sequence
gatattactgttgccatgaagtgtc

SEQ ID NO: 240770 - DNA, 25 bp, Probe Sequence
gatttagcagtaaactgagagtaga

SEQ ID NO: 240771 - DNA, 25 bp, Probe Sequence
gatttcaggtgacaagtagggcatg

SEQ ID NO: 240772 - DNA, 25 bp, Probe Sequence
gattctgcgggtcaaggaccgcgac

SEQ ID NO: 240773 - DNA, 25 bp, Probe Sequence
gattctgggattctcagagtctggc

SEQ ID NO: 240774 - DNA, 25 bp, Probe Sequence
gatatctcggatacaatagaggcaa

SEQ ID NO: 240775 - DNA, 25 bp, Probe Sequence
gatatcatcatttgaaaaggccttt

SEQ ID NO: 240776 - DNA, 25 bp, Probe Sequence
gatatctgcatgttgaattggggtg

SEQ ID NO: 240777 - DNA, 25 bp, Probe Sequence
gatatgggtgtggatatggatggat

SEQ ID NO: 240778 - DNA, 25 bp, Probe Sequence
gatataagttgtactgcgtatgcag

SEQ ID NO: 240779 - DNA, 25 bp, Probe Sequence
gataggaacttcagagcttattgga

SEQ ID NO: 240780 - DNA, 25 bp, Probe Sequence
gatagttaatctcatgcagttttgg

SEQ ID NO: 240781 - DNA, 25 bp, Probe Sequence
gatattggagacacagcggttcgag

SEQ ID NO: 240782 - DNA, 25 bp, Probe Sequence
gatattggagacacagcggttcgag

SEQ ID NO: 240783 - DNA, 25 bp, Probe Sequence
gatattgagaccatcctggctaaca

SEQ ID NO: 240784 - DNA, 25 bp, Probe Sequence
gatattgtgtaaatactgagccaag

SEQ ID NO: 240785 - DNA, 25 bp, Probe Sequence
gatattgccatataaagagaaatgc

SEQ ID NO: 240786 - DNA, 25 bp, Probe Sequence
gattttattgaagagggccgcaagc

SEQ ID NO: 240787 - DNA, 25 bp, Probe Sequence
gatttgtttatagaagtgcaggcat

SEQ ID NO: 240788 - DNA, 25 bp, Probe Sequence
gattttttactttgaggagtcataa

SEQ ID NO: 240789 - DNA, 25 bp, Probe Sequence
gatttgggaacaactggtcgtcttc

SEQ ID NO: 240790 - DNA, 25 bp, Probe Sequence
gatttgaaaatccacttgtttcctt

SEQ ID NO: 240791 - DNA, 25 bp, Probe Sequence
gattctaatagagagccggattcac

SEQ ID NO: 240792 - DNA, 25 bp, Probe Sequence
gatttttgaagcaactcatcgattg

SEQ ID NO: 240793 - DNA, 25 bp, Probe Sequence
gatttactaaatctctccatctgca

SEQ ID NO: 240794 - DNA, 25 bp, Probe Sequence
gatttcacaaaatccacctataatt

SEQ ID NO: 240795 - DNA, 25 bp, Probe Sequence
gatttagagatgatttcccaacgat

SEQ ID NO: 240796 - DNA, 25 bp, Probe Sequence
gattttcgcgttctgcgataccaga

SEQ ID NO: 240797 - DNA, 25 bp, Probe Sequence
gattttcgcgttctgcgataccaga

SEQ ID NO: 240798 - DNA, 25 bp, Probe Sequence
gattttcaccttctcaaaactgagt

SEQ ID NO: 240799 - DNA, 25 bp, Probe Sequence
gatattgctcttttggttaacacta

SEQ ID NO: 240800 - DNA, 25 bp, Probe Sequence
gattgtcctgaattggttcccattg

SEQ ID NO: 240801 - DNA, 25 bp, Probe Sequence
gattggcaggatcctggtatccgct

SEQ ID NO: 240802 - DNA, 25 bp, Probe Sequence
gattggagagaagtgggaccgtcag

SEQ ID NO: 240803 - DNA, 25 bp, Probe Sequence
gattggagagaagtgggaccgtcag

SEQ ID NO: 240804 - DNA, 25 bp, Probe Sequence
gattggagagaagtgggaccgtcag

SEQ ID NO: 240805 - DNA, 25 bp, Probe Sequence
gatttgacagaagcggaactctctt

SEQ ID NO: 240806 - DNA, 25 bp, Probe Sequence
gattctgaagtagtgggttttgatt

SEQ ID NO: 240807 - DNA, 25 bp, Probe Sequence
gattttaatgagtgctttagtgagt

SEQ ID NO: 240808 - DNA, 25 bp, Probe Sequence
gattatagaaggctgtcttagtgca

SEQ ID NO: 240809 - DNA, 25 bp, Probe Sequence
gattatagaaggctgtcttagtgca

SEQ ID NO: 240810 - DNA, 25 bp, Probe Sequence
gattatagaaggctgtcttagtgca

SEQ ID NO: 240811 - DNA, 25 bp, Probe Sequence
gatttagaataactgttccaatgat

SEQ ID NO: 240812 - DNA, 25 bp, Probe Sequence
gatttctattcaaggtggccaaatt

SEQ ID NO: 240813 - DNA, 25 bp, Probe Sequence
gattttttcacgtaagtccacatat

SEQ ID NO: 240814 - DNA, 25 bp, Probe Sequence
gatttttacactatattcctgccac

SEQ ID NO: 240815 - DNA, 25 bp, Probe Sequence
gatattttactgcttgtgtccttat

SEQ ID NO: 240816 - DNA, 25 bp, Probe Sequence
gattgtttgacttctagtgtccgag

SEQ ID NO: 240817 - DNA, 25 bp, Probe Sequence
gattttatgttttcagtgtcctgtg

SEQ ID NO: 240818 - DNA, 25 bp, Probe Sequence
gatagattatcttttccttgctttc

SEQ ID NO: 240819 - DNA, 25 bp, Probe Sequence
gattattattactccagtgcttcat

SEQ ID NO: 240820 - DNA, 25 bp, Probe Sequence
gatttccttaatagcccatttctgt

SEQ ID NO: 240821 - DNA, 25 bp, Probe Sequence
gatttgcccatttacacttttgaga

SEQ ID NO: 240822 - DNA, 25 bp, Probe Sequence
gatttgtcgtgttacagttatacaa

SEQ ID NO: 240823 - DNA, 25 bp, Probe Sequence
gatttctcatttgccaataataata

SEQ ID NO: 240824 - DNA, 25 bp, Probe Sequence
gatttcctttacagatatacatttt

SEQ ID NO: 240825 - DNA, 25 bp, Probe Sequence
gatttccctgattctaattgcattt

SEQ ID NO: 240826 - DNA, 25 bp, Probe Sequence
gatattgacgcgtgctttttctttg

SEQ ID NO: 240827 - DNA, 25 bp, Probe Sequence
gatttaatgcgattgctctttctgc

SEQ ID NO: 240828 - DNA, 25 bp, Probe Sequence
gacattgtcgcaagtcacagaatta

SEQ ID NO: 240829 - DNA, 25 bp, Probe Sequence
attgtcgcaagtcacagaattattt

SEQ ID NO: 240830 - DNA, 25 bp, Probe Sequence
gttgctggatctgctgtttgaagcg

SEQ ID NO: 240831 - DNA, 25 bp, Probe Sequence
ggatctgctgtttgaagcgcagcag

SEQ ID NO: 240832 - DNA, 25 bp, Probe Sequence
gcgcagcaggtgcatcgccagcatt

SEQ ID NO: 240833 - DNA, 25 bp, Probe Sequence
gcaggtgcatcgccagcatttcgat

SEQ ID NO: 240834 - DNA, 25 bp, Probe Sequence
gcatcgccagcatttcgatcctcgt

SEQ ID NO: 240835 - DNA, 25 bp, Probe Sequence
gcatttcgatcctcgtcaggtgcag

SEQ ID NO: 240836 - DNA, 25 bp, Probe Sequence
cgatcctcgtcaggtgcaggtcagc

SEQ ID NO: 240837 - DNA, 25 bp, Probe Sequence
tcgtcaggtgcaggtcagcacgttg

SEQ ID NO: 240838 - DNA, 25 bp, Probe Sequence
gcaggtcagcacgttgctgtcgatt

SEQ ID NO: 240839 - DNA, 25 bp, Probe Sequence
cagcacgttgctgtcgattaagacc

SEQ ID NO: 240840 - DNA, 25 bp, Probe Sequence
gctgtcgattaagaccggagcttgt

SEQ ID NO: 240841 - DNA, 25 bp, Probe Sequence
agcttgtccggaagattgcaaatac

SEQ ID NO: 240842 - DNA, 25 bp, Probe Sequence
agattgcaaatactgcccgcaaacg

SEQ ID NO: 240843 - DNA, 25 bp, Probe Sequence
caaatactgcccgcaaacgtcgcgc

SEQ ID NO: 240844 - DNA, 25 bp, Probe Sequence
tgaacaggtgctggagtcggcgcgc

SEQ ID NO: 240845 - DNA, 25 bp, Probe Sequence
ggagtcggcgcgcaaagcgaaagcg

SEQ ID NO: 240846 - DNA, 25 bp, Probe Sequence
gatataagttgtactgcgtatgcag

SEQ ID NO: 240847 - DNA, 25 bp, Probe Sequence
gattttttgcaggagcgattgagga

SEQ ID NO: 240848 - DNA, 25 bp, Probe Sequence
gatttcgcttaggccagagtgatgg

SEQ ID NO: 240849 - DNA, 25 bp, Probe Sequence
gatttccttatggggctgcaggtca

SEQ ID NO: 240850 - DNA, 25 bp, Probe Sequence
gatttcaatggtggggaccgctgga

SEQ ID NO: 240851 - DNA, 25 bp, Probe Sequence
gatttaatggtggggagccagcttg

SEQ ID NO: 240852 - DNA, 25 bp, Probe Sequence
gattttctgggtggggccattcatc

SEQ ID NO: 240853 - DNA, 25 bp, Probe Sequence
gatttttggccaggtggaatatgac

SEQ ID NO: 240854 - DNA, 25 bp, Probe Sequence
gatatatgtaagtagttgtagtaga

SEQ ID NO: 240855 - DNA, 25 bp, Probe Sequence
gattatgtgcacttcgttgtcaata

SEQ ID NO: 240856 - DNA, 25 bp, Probe Sequence
gattattacgtcttttgtattgaga

SEQ ID NO: 240857 - DNA, 25 bp, Probe Sequence
gatttttagattttgtattgtggac

SEQ ID NO: 240858 - DNA, 25 bp, Probe Sequence
gatttttattaactgcttttgccca

SEQ ID NO: 240859 - DNA, 25 bp, Probe Sequence
gatttcttaatttcatggttcttta

SEQ ID NO: 240860 - DNA, 25 bp, Probe Sequence
gatttcttaatgtttttgtttgtat

SEQ ID NO: 240861 - DNA, 25 bp, Probe Sequence
gatttctggaatgccttttctctgt

SEQ ID NO: 240862 - DNA, 25 bp, Probe Sequence
gatttccagttgcactatttccagt

SEQ ID NO: 240863 - DNA, 25 bp, Probe Sequence
gattgttagtgttgacttttcctgt

SEQ ID NO: 240864 - DNA, 25 bp, Probe Sequence
gattttcaggatacagacattccct

SEQ ID NO: 240865 - DNA, 25 bp, Probe Sequence
gatatttcattttcagcacagtgca

SEQ ID NO: 240866 - DNA, 25 bp, Probe Sequence
gatatgtgcacgttgctagacagcc

SEQ ID NO: 240867 - DNA, 25 bp, Probe Sequence
gatattcaatgacctcagcagcagc

SEQ ID NO: 240868 - DNA, 25 bp, Probe Sequence
gatagcaaccaagtcatgcatgagg

SEQ ID NO: 240869 - DNA, 25 bp, Probe Sequence
gatatgcacccaatgtccagggagc

SEQ ID NO: 240870 - DNA, 25 bp, Probe Sequence
gatagcaatagcctggctaaggcac

SEQ ID NO: 240871 - DNA, 25 bp, Probe Sequence
gatagaagaggtccgcaaggcaagg

SEQ ID NO: 240872 - DNA, 25 bp, Probe Sequence
gatatcaaggggcctgaagacaaga

SEQ ID NO: 240873 - DNA, 25 bp, Probe Sequence
gattcaacgggccagggcacaagcc

SEQ ID NO: 240874 - DNA, 25 bp, Probe Sequence
gatttacgcgcaggaacagccacac

SEQ ID NO: 240875 - DNA, 25 bp, Probe Sequence
gatattgcaagccagagacaatgga

SEQ ID NO: 240876 - DNA, 25 bp, Probe Sequence
gatagacgcgcacaatccaggagta

SEQ ID NO: 240877 - DNA, 25 bp, Probe Sequence
gatagaacgcaactttcagagagat

SEQ ID NO: 240878 - DNA, 25 bp, Probe Sequence
gatatgagcatagaagttcagaagt

SEQ ID NO: 240879 - DNA, 25 bp, Probe Sequence
gatatgttcggcttttcatgtatgt

SEQ ID NO: 240880 - DNA, 25 bp, Probe Sequence
gattttcggatttgtcatttctgtg

SEQ ID NO: 240881 - DNA, 25 bp, Probe Sequence
gatttgtccaatatgtgcagcgtta

SEQ ID NO: 240882 - DNA, 25 bp, Probe Sequence
gatatggttcaaataggactactag

SEQ ID NO: 240883 - DNA, 25 bp, Probe Sequence
gatattttaaaacgtctgtatgagt

SEQ ID NO: 240884 - DNA, 25 bp, Probe Sequence
gatatagtataagcagtgtctgtgt

SEQ ID NO: 240885 - DNA, 25 bp, Probe Sequence
gattatggcatcaagtactcatttg

SEQ ID NO: 240886 - DNA, 25 bp, Probe Sequence
gatttgatgcattcagattctcgtg

SEQ ID NO: 240887 - DNA, 25 bp, Probe Sequence
gatagatcataaatgtacttgctga

SEQ ID NO: 240888 - DNA, 25 bp, Probe Sequence
gatagatctataatgttcactgttc

SEQ ID NO: 240889 - DNA, 25 bp, Probe Sequence
gatagactgctgtttttctggtctg

SEQ ID NO: 240890 - DNA, 25 bp, Probe Sequence
gatagtgctgtctttttgtgggtac

SEQ ID NO: 240891 - DNA, 25 bp, Probe Sequence
gattatagccatttttgtaggtaca

SEQ ID NO: 240892 - DNA, 25 bp, Probe Sequence
gatttacctattatatgtgaaaacc

SEQ ID NO: 240893 - DNA, 25 bp, Probe Sequence
gatattcacctgggactgttaattt

SEQ ID NO: 240894 - DNA, 25 bp, Probe Sequence
gatattcagtcaaggcacttatggt

SEQ ID NO: 240895 - DNA, 25 bp, Probe Sequence
gatatacaacatctgcacataaagt

SEQ ID NO: 240896 - DNA, 25 bp, Probe Sequence
gatattgctactataatcaaatgat

SEQ ID NO: 240897 - DNA, 25 bp, Probe Sequence
gatagttatcggaaatatatatata

SEQ ID NO: 240898 - DNA, 25 bp, Probe Sequence
gatagtttgcaggcaaaacaaatgt

SEQ ID NO: 240899 - DNA, 25 bp, Probe Sequence
gatagtatctagcaatcacaacact

SEQ ID NO: 240900 - DNA, 25 bp, Probe Sequence
gattttctagacttcagaacatgct

SEQ ID NO: 240901 - DNA, 25 bp, Probe Sequence
gatttgcttaactgatgtacttgat

SEQ ID NO: 240902 - DNA, 25 bp, Probe Sequence
gatttccaaacaaatgtactgtact

SEQ ID NO: 240903 - DNA, 25 bp, Probe Sequence
gattttaaagcaacaggcctttctc

SEQ ID NO: 240904 - DNA, 25 bp, Probe Sequence
gatttaatcatgtgaaacttttcct

SEQ ID NO: 240905 - DNA, 25 bp, Probe Sequence
gatttatactactgataattttgtt

SEQ ID NO: 240906 - DNA, 25 bp, Probe Sequence
gatatttacttcatcaacagttctt

SEQ ID NO: 240907 - DNA, 25 bp, Probe Sequence
gatttctacctcgcaagagtgacta

SEQ ID NO: 240908 - DNA, 25 bp, Probe Sequence
gatttctacctccaaagtgtgaaga

SEQ ID NO: 240909 - DNA, 25 bp, Probe Sequence
gattttactatccaagagctgtttg

SEQ ID NO: 240910 - DNA, 25 bp, Probe Sequence
gatatttcatctttgatacagttat

SEQ ID NO: 240911 - DNA, 25 bp, Probe Sequence
gatatttgcatgcataaatttctga

SEQ ID NO: 240912 - DNA, 25 bp, Probe Sequence
gatagatgtcataacagtatttgga

SEQ ID NO: 240913 - DNA, 25 bp, Probe Sequence
gatatatgtcatctcctattcattg

SEQ ID NO: 240914 - DNA, 25 bp, Probe Sequence
gatttggctggatctattattggca

SEQ ID NO: 240915 - DNA, 25 bp, Probe Sequence
gatataggcctgttctttttagcaa

SEQ ID NO: 240916 - DNA, 25 bp, Probe Sequence
gattaactgtgttgcctatttatgc

SEQ ID NO: 240917 - DNA, 25 bp, Probe Sequence
gatttcctgtattcctattttaaag

SEQ ID NO: 240918 - DNA, 25 bp, Probe Sequence
gatttactgtttctttgttactcgt

SEQ ID NO: 240919 - DNA, 25 bp, Probe Sequence
gatttaacttgtattttgtcacttt

SEQ ID NO: 240920 - DNA, 25 bp, Probe Sequence
gattttaattttatcttctctttga

SEQ ID NO: 240921 - DNA, 25 bp, Probe Sequence
gttcttttcctaaatcgattcggtg

SEQ ID NO: 240922 - DNA, 25 bp, Probe Sequence
gatatgctttatgctcataactgat

SEQ ID NO: 240923 - DNA, 25 bp, Probe Sequence
gattcaatgctattgccattaccat

SEQ ID NO: 240924 - DNA, 25 bp, Probe Sequence
gatatcaagcaagtggcttcctttt

SEQ ID NO: 240925 - DNA, 25 bp, Probe Sequence
gatatatataactctctacatttct

SEQ ID NO: 240926 - DNA, 25 bp, Probe Sequence
gatatttgaggccatgcttaatata

SEQ ID NO: 240927 - DNA, 25 bp, Probe Sequence
gatatttagagacattcagattcag

SEQ ID NO: 240928 - DNA, 25 bp, Probe Sequence
gatatcttcagcttgtagtcagacc

SEQ ID NO: 240929 - DNA, 25 bp, Probe Sequence
gattcctcaggccaggtgatgactc

SEQ ID NO: 240930 - DNA, 25 bp, Probe Sequence
gatatgccatcatgaaaagcaagct

SEQ ID NO: 240931 - DNA, 25 bp, Probe Sequence
gatatgccattctagattacaattc

SEQ ID NO: 240932 - DNA, 25 bp, Probe Sequence
gatatggattgcttatgttatataa

SEQ ID NO: 240933 - DNA, 25 bp, Probe Sequence
gatttttgcatcaatgtttacaagg

SEQ ID NO: 240934 - DNA, 25 bp, Probe Sequence
gatattgtgtcagcacttctaaatg

SEQ ID NO: 240935 - DNA, 25 bp, Probe Sequence
gatatatttcccctcttgaagaggc

SEQ ID NO: 240936 - DNA, 25 bp, Probe Sequence
gatattttcctactcttaagatgat

SEQ ID NO: 240937 - DNA, 25 bp, Probe Sequence
gatatatcttttttcctaaattgct

SEQ ID NO: 240938 - DNA, 25 bp, Probe Sequence
gatatcctttattaagtaagttcac

SEQ ID NO: 240939 - DNA, 25 bp, Probe Sequence
gatatttttatttgtttcagttcag

SEQ ID NO: 240940 - DNA, 25 bp, Probe Sequence
gatattctcttatatgttatagtaa

SEQ ID NO: 240941 - DNA, 25 bp, Probe Sequence
gatatttgttataatgccttgtaaa

SEQ ID NO: 240942 - DNA, 25 bp, Probe Sequence
gatatttttaatcccgttatggact

SEQ ID NO: 240943 - DNA, 25 bp, Probe Sequence
gatatttttccaaacgtattgagca

SEQ ID NO: 240944 - DNA, 25 bp, Probe Sequence
gattaccttacagaccattatggca

SEQ ID NO: 240945 - DNA, 25 bp, Probe Sequence
gattaccagtaaccaccagaacaac

SEQ ID NO: 240946 - DNA, 25 bp, Probe Sequence
gattacgggtcatagtcacaaatac

SEQ ID NO: 240947 - DNA, 25 bp, Probe Sequence
gattacaggcgttcgagtaccctat

SEQ ID NO: 240948 - DNA, 25 bp, Probe Sequence
gatatcggggctttgatgtacccta

SEQ ID NO: 240949 - DNA, 25 bp, Probe Sequence
gattatggggctagttgtcctccaa

SEQ ID NO: 240950 - DNA, 25 bp, Probe Sequence
gatattcggagcattttctgcagga

SEQ ID NO: 240951 - DNA, 25 bp, Probe Sequence
gatttcgttctctgattccagcaga

SEQ ID NO: 240952 - DNA, 25 bp, Probe Sequence
gattttgactgcaaggaataccaga

SEQ ID NO: 240953 - DNA, 25 bp, Probe Sequence
gattttactacagggagacagaaac

SEQ ID NO: 240954 - DNA, 25 bp, Probe Sequence
gattttactacagggagacagaaac

SEQ ID NO: 240955 - DNA, 25 bp, Probe Sequence
gattgtcacttttgggagaagaaca

SEQ ID NO: 240956 - DNA, 25 bp, Probe Sequence
gatttcctttgctttgattagacac

SEQ ID NO: 240957 - DNA, 25 bp, Probe Sequence
gatttcctttgctttgattagacac

SEQ ID NO: 240958 - DNA, 25 bp, Probe Sequence
gattaatccctctttttgtgacaca

SEQ ID NO: 240959 - DNA, 25 bp, Probe Sequence
gattacaattccattgtggatacaa

SEQ ID NO: 240960 - DNA, 25 bp, Probe Sequence
gattaaaagccactgttacatttca

SEQ ID NO: 240961 - DNA, 25 bp, Probe Sequence
gatatgaaactctacatttaaaaca

SEQ ID NO: 240962 - DNA, 25 bp, Probe Sequence
gatatcaaagactcattgcttaatt

SEQ ID NO: 240963 - DNA, 25 bp, Probe Sequence
gatatgataaactctagctctaaat

SEQ ID NO: 240964 - DNA, 25 bp, Probe Sequence
gatttagcacactctcagttattta

SEQ ID NO: 240965 - DNA, 25 bp, Probe Sequence
gatttagtacatttcagaacttttg

SEQ ID NO: 240966 - DNA, 25 bp, Probe Sequence
gatttaaccatgtttgacatatttt

SEQ ID NO: 240967 - DNA, 25 bp, Probe Sequence
gatttaacactgacttagcatatag

SEQ ID NO: 240968 - DNA, 25 bp, Probe Sequence
gatttcttactgatatataatgact

SEQ ID NO: 240969 - DNA, 25 bp, Probe Sequence
gatattttttgatcaattaacttaa

SEQ ID NO: 240970 - DNA, 25 bp, Probe Sequence
gatattctttagtgaacttgtttaa

SEQ ID NO: 240971 - DNA, 25 bp, Probe Sequence
gatttctgattataatactctgctt

SEQ ID NO: 240972 - DNA, 25 bp, Probe Sequence
gatttcgttttctataggagctctt

SEQ ID NO: 240973 - DNA, 25 bp, Probe Sequence
gatattcagttttcctgagcaacct

SEQ ID NO: 240974 - DNA, 25 bp, Probe Sequence
gataggcgttgcactgggtacatct

SEQ ID NO: 240975 - DNA, 25 bp, Probe Sequence
gatagggtgtttaagcagtaattta

SEQ ID NO: 240976 - DNA, 25 bp, Probe Sequence
gataggctgatggttattgccttat

SEQ ID NO: 240977 - DNA, 25 bp, Probe Sequence
gataggctctggattttgctgttag

SEQ ID NO: 240978 - DNA, 25 bp, Probe Sequence
gatatgatgctcggctgatttttgt

SEQ ID NO: 240979 - DNA, 25 bp, Probe Sequence
gatatatatctggtacatgtttgat

SEQ ID NO: 240980 - DNA, 25 bp, Probe Sequence
gatatatatcggagagagttacaac

SEQ ID NO: 240981 - DNA, 25 bp, Probe Sequence
gatatgaatccagaagggaacaagc

SEQ ID NO: 240982 - DNA, 25 bp, Probe Sequence
gatataatacaactcagtgctacca

SEQ ID NO: 240983 - DNA, 25 bp, Probe Sequence
gatattatgacactgatactgctat

SEQ ID NO: 240984 - DNA, 25 bp, Probe Sequence
gatatcgctgtagtgaagctcttca

SEQ ID NO: 240985 - DNA, 25 bp, Probe Sequence
gatttgttagaccactctgtcaaac

SEQ ID NO: 240986 - DNA, 25 bp, Probe Sequence
gatttgtccagcgacactcattcat

SEQ ID NO: 240987 - DNA, 25 bp, Probe Sequence
gatttgtgctgggaacatctgagtg

SEQ ID NO: 240988 - DNA, 25 bp, Probe Sequence
gattatgttagcaccatgtgatggg

SEQ ID NO: 240989 - DNA, 25 bp, Probe Sequence
gatatcacttaggtcacttgggttt

SEQ ID NO: 240990 - DNA, 25 bp, Probe Sequence
gattactggaaaacttgggcacttt

SEQ ID NO: 240991 - DNA, 25 bp, Probe Sequence
gatttatggaacaccgagagcagcc

SEQ ID NO: 240992 - DNA, 25 bp, Probe Sequence
gatttgcagttacggcctggatgcc

SEQ ID NO: 240993 - DNA, 25 bp, Probe Sequence
gattttgttatcggtgggcatgcac

SEQ ID NO: 240994 - DNA, 25 bp, Probe Sequence
gatatgatctgttatgctagtggtt

SEQ ID NO: 240995 - DNA, 25 bp, Probe Sequence
gatatattctgatgtatgggtgcta

SEQ ID NO: 240996 - DNA, 25 bp, Probe Sequence
gatattactgaaacgcgtgatctaa

SEQ ID NO: 240997 - DNA, 25 bp, Probe Sequence
gatattcctggagtccgctttaagg

SEQ ID NO: 240998 - DNA, 25 bp, Probe Sequence
gatatacctgaatttactttgtaag

SEQ ID NO: 240999 - DNA, 25 bp, Probe Sequence
gatatacctgaatttactttgtaag

SEQ ID NO: 241000 - DNA, 25 bp, Probe Sequence
gatatcctctgacgtatcatctttt

SEQ ID NO: 241001 - DNA, 25 bp, Probe Sequence
gatatgttgctaggtgaatatatat

SEQ ID NO: 241002 - DNA, 25 bp, Probe Sequence
gatatgtatgcaacgtttcatcaaa

SEQ ID NO: 241003 - DNA, 25 bp, Probe Sequence
gatatgcttgttgctttacaacata

SEQ ID NO: 241004 - DNA, 25 bp, Probe Sequence
gatatctcttgctcttatccaaata

SEQ ID NO: 241005 - DNA, 25 bp, Probe Sequence
gattcatattcatttgtatccaagg

SEQ ID NO: 241006 - DNA, 25 bp, Probe Sequence
gatattcattcaattattccatagg

SEQ ID NO: 241007 - DNA, 25 bp, Probe Sequence
gatattcttactaaactctgaggcc

SEQ ID NO: 241008 - DNA, 25 bp, Probe Sequence
gatttgcttcctgaagtcatgcacc

SEQ ID NO: 241009 - DNA, 25 bp, Probe Sequence
gatttcctcactgacatgttgatct

SEQ ID NO: 241010 - DNA, 25 bp, Probe Sequence
gatattgcccacatgatcagtggct

SEQ ID NO: 241011 - DNA, 25 bp, Probe Sequence
gatttcccagttatgatgagtattt

SEQ ID NO: 241012 - DNA, 25 bp, Probe Sequence
gattatcccagcctcttagtaaatg

SEQ ID NO: 241013 - DNA, 25 bp, Probe Sequence
gattaaccaggtcgtccaagcaaaa

SEQ ID NO: 241014 - DNA, 25 bp, Probe Sequence
gttagaccactctgtcaaactgtca

SEQ ID NO: 241015 - DNA, 25 bp, Probe Sequence
gattactcaacctctcagtgattcc

SEQ ID NO: 241016 - DNA, 25 bp, Probe Sequence
gattagtaagcaattccttggatct

SEQ ID NO: 241017 - DNA, 25 bp, Probe Sequence
gattacataggcactcctttttatt

SEQ ID NO: 241018 - DNA, 25 bp, Probe Sequence
gattagggatgctgtactttttgaa

SEQ ID NO: 241019 - DNA, 25 bp, Probe Sequence
gattagggtggcattgcttttatag

SEQ ID NO: 241020 - DNA, 25 bp, Probe Sequence
gattaggtcgtcattgtcttacata

SEQ ID NO: 241021 - DNA, 25 bp, Probe Sequence
gattagttactgacttgacacaaaa

SEQ ID NO: 241022 - DNA, 25 bp, Probe Sequence
gattggttccgactggagtccaaca

SEQ ID NO: 241023 - DNA, 25 bp, Probe Sequence
gatttgtttagactgaaggaagacg

SEQ ID NO: 241024 - DNA, 25 bp, Probe Sequence
gttggcttcttgtctgcaagccagc

SEQ ID NO: 241025 - DNA, 25 bp, Probe Sequence
gatatacttctggtcagtagccagc

SEQ ID NO: 241026 - DNA, 25 bp, Probe Sequence
gattacactggctgcagtacatcag

SEQ ID NO: 241027 - DNA, 25 bp, Probe Sequence
gatatacttgtctgcagtgatagag

SEQ ID NO: 241028 - DNA, 25 bp, Probe Sequence
gatatccttgtgaaccagatggaga

SEQ ID NO: 241029 - DNA, 25 bp, Probe Sequence
gatattccttgaagtagatgtggat

SEQ ID NO: 241030 - DNA, 25 bp, Probe Sequence
gatttgcctctggattcacgggaac

SEQ ID NO: 241031 - DNA, 25 bp, Probe Sequence
gattatgcctatggtgccactgggc

SEQ ID NO: 241032 - DNA, 25 bp, Probe Sequence
gatttgctgcagagtcctatggagt

SEQ ID NO: 241033 - DNA, 25 bp, Probe Sequence
gatatacacagcagacctagccatg

SEQ ID NO: 241034 - DNA, 25 bp, Probe Sequence
gattatcatagtcgacgctacattg

SEQ ID NO: 241035 - DNA, 25 bp, Probe Sequence
gatttcatcattccacactgtatat

SEQ ID NO: 241036 - DNA, 25 bp, Probe Sequence
gatttgtcatgatacacattgaatt

SEQ ID NO: 241037 - DNA, 25 bp, Probe Sequence
gatatttcagagtcagtcattggtt

SEQ ID NO: 241038 - DNA, 25 bp, Probe Sequence
gatatttcagagtcagtcattggtt

SEQ ID NO: 241039 - DNA, 25 bp, Probe Sequence
gatatttcagagtcagtcattggtt

SEQ ID NO: 241040 - DNA, 25 bp, Probe Sequence
gatatttcagagtcagtcattggtt

SEQ ID NO: 241041 - DNA, 25 bp, Probe Sequence
gatatttcaagcttgctgtctcgtc

SEQ ID NO: 241042 - DNA, 25 bp, Probe Sequence
gatatttactcatgcatttactcta

SEQ ID NO: 241043 - DNA, 25 bp, Probe Sequence
gatatcatacccagcattatacttg

SEQ ID NO: 241044 - DNA, 25 bp, Probe Sequence
gatatcatattgtggcttctgagct

SEQ ID NO: 241045 - DNA, 25 bp, Probe Sequence
gatttcattgttgtctctcatgctt

SEQ ID NO: 241046 - DNA, 25 bp, Probe Sequence
gatttcatttgtgtcagagcagcca

SEQ ID NO: 241047 - DNA, 25 bp, Probe Sequence
gatttctttagtacagaacctgcta

SEQ ID NO: 241048 - DNA, 25 bp, Probe Sequence
gattattttggtgaaattgcactac

SEQ ID NO: 241049 - DNA, 25 bp, Probe Sequence
gattttcgggtccaaaatctcatga

SEQ ID NO: 241050 - DNA, 25 bp, Probe Sequence
gattttatggttttataactatata

SEQ ID NO: 241051 - DNA, 25 bp, Probe Sequence
gatttgtatagaactttagaccact

SEQ ID NO: 241052 - DNA, 25 bp, Probe Sequence
gatttgtaactaacactggaccatt

SEQ ID NO: 241053 - DNA, 25 bp, Probe Sequence
gattctgtaactgtacgttcctctt

SEQ ID NO: 241054 - DNA, 25 bp, Probe Sequence
gattgcttacctacatacgtgttcc

SEQ ID NO: 241055 - DNA, 25 bp, Probe Sequence
gattcgtactgtataagatttccca

SEQ ID NO: 241056 - DNA, 25 bp, Probe Sequence
gattttggctgtttggttttccact

SEQ ID NO: 241057 - DNA, 25 bp, Probe Sequence
gatttttggcgagtggttggtctga

SEQ ID NO: 241058 - DNA, 25 bp, Probe Sequence
gattctacggcgactggagagggtg

SEQ ID NO: 241059 - DNA, 25 bp, Probe Sequence
gatttaaggctgacaggaagactga

SEQ ID NO: 241060 - DNA, 25 bp, Probe Sequence
gatttgaagtgtccttgtagataga

SEQ ID NO: 241061 - DNA, 25 bp, Probe Sequence
gattataatttctgcttgagtatgg

SEQ ID NO: 241062 - DNA, 25 bp, Probe Sequence
gattcaaattctgccttgaaatatt

SEQ ID NO: 241063 - DNA, 25 bp, Probe Sequence
gattatgaaatgtcccctgaaactc

SEQ ID NO: 241064 - DNA, 25 bp, Probe Sequence
gattatgggagtgagcctgaaatat

SEQ ID NO: 241065 - DNA, 25 bp, Probe Sequence
gattatggaatttagacagcaagac

SEQ ID NO: 241066 - DNA, 25 bp, Probe Sequence
gatttgaaagtataccagatatgct

SEQ ID NO: 241067 - DNA, 25 bp, Probe Sequence
gattatacggcatgaatgaagaagg

SEQ ID NO: 241068 - DNA, 25 bp, Probe Sequence
gatttacggcgctaaggatgactct

SEQ ID NO: 241069 - DNA, 25 bp, Probe Sequence
gatatctctgtgtgcgaatggtacc

SEQ ID NO: 241070 - DNA, 25 bp, Probe Sequence
gattccagcagagggaacgctatcc

SEQ ID NO: 241071 - DNA, 25 bp, Probe Sequence
gattcaagaatcgggcaagcctcag

SEQ ID NO: 241072 - DNA, 25 bp, Probe Sequence
gattcacaaattgggcagctcctag

SEQ ID NO: 241073 - DNA, 25 bp, Probe Sequence
gatatcatcaaagtgagcccatctt

SEQ ID NO: 241074 - DNA, 25 bp, Probe Sequence
gatatacacatggatgcacgcacat

SEQ ID NO: 241075 - DNA, 25 bp, Probe Sequence
gatatgcacacacatggatgagcac

SEQ ID NO: 241076 - DNA, 25 bp, Probe Sequence
gattcaccatgattggagagcactc

SEQ ID NO: 241077 - DNA, 25 bp, Probe Sequence
gattcaccatgattggagagcactc

SEQ ID NO: 241078 - DNA, 25 bp, Probe Sequence
gatatcaccatgacttcacagacat

SEQ ID NO: 241079 - DNA, 25 bp, Probe Sequence
gatatcagcgagatcatccaagaat

SEQ ID NO: 241080 - DNA, 25 bp, Probe Sequence
gatatactatgaatactctagaatg

SEQ ID NO: 241081 - DNA, 25 bp, Probe Sequence
gatatgaatattatctccatgttgg

SEQ ID NO: 241082 - DNA, 25 bp, Probe Sequence
gattcacagtttacccatttggcct

SEQ ID NO: 241083 - DNA, 25 bp, Probe Sequence
gttcacgtttgaaccatgtcctggt

SEQ ID NO: 241084 - DNA, 25 bp, Probe Sequence
gttccttttgtttcaggcacggata

SEQ ID NO: 241085 - DNA, 25 bp, Probe Sequence
gttgaggtacttgctgggacggatt

SEQ ID NO: 241086 - DNA, 25 bp, Probe Sequence
gttggagtttctgtttagggcatta

SEQ ID NO: 241087 - DNA, 25 bp, Probe Sequence
gttgatgggtttcttcgggaatatt

SEQ ID NO: 241088 - DNA, 25 bp, Probe Sequence
gttctggcctcccgatacgggatta

SEQ ID NO: 241089 - DNA, 25 bp, Probe Sequence
gttgtgacccattttactctggata

SEQ ID NO: 241090 - DNA, 25 bp, Probe Sequence
gatttgatgggctatcttacctagt

SEQ ID NO: 241091 - DNA, 25 bp, Probe Sequence
gattctgaaggccatctccagttac

SEQ ID NO: 241092 - DNA, 25 bp, Probe Sequence
gattatgaaagccatccctgatcgg

SEQ ID NO: 241093 - DNA, 25 bp, Probe Sequence
gttcatgagggaccccattcggatt

SEQ ID NO: 241094 - DNA, 25 bp, Probe Sequence
gttctggggattgcccttattgcta

SEQ ID NO: 241095 - DNA, 25 bp, Probe Sequence
gatttggagtattggcctctactag

SEQ ID NO: 241096 - DNA, 25 bp, Probe Sequence
gatttggtatactgcactctaaaaa

SEQ ID NO: 241097 - DNA, 25 bp, Probe Sequence
gatatctggctgtcctttttataat

SEQ ID NO: 241098 - DNA, 25 bp, Probe Sequence
gatattagttctgatttctttttaa

SEQ ID NO: 241099 - DNA, 25 bp, Probe Sequence
gatttgaatctatatttttctttaa

SEQ ID NO: 241100 - DNA, 25 bp, Probe Sequence
gatttaatgaatcttgctttctaat

SEQ ID NO: 241101 - DNA, 25 bp, Probe Sequence
gatttggattatattcacattctaa

SEQ ID NO: 241102 - DNA, 25 bp, Probe Sequence
gatttgataatcttattcacagttg

SEQ ID NO: 241103 - DNA, 25 bp, Probe Sequence
gatattggcttcattgtctcagttg

SEQ ID NO: 241104 - DNA, 25 bp, Probe Sequence
gatttggatctcattgacaacctgg

SEQ ID NO: 241105 - DNA, 25 bp, Probe Sequence
gatttggtctctttgactaatcacc

SEQ ID NO: 241106 - DNA, 25 bp, Probe Sequence
gattttgattgcttacctacatacg

SEQ ID NO: 241107 - DNA, 25 bp, Probe Sequence
gatatttgaagctgaccgtctttga

SEQ ID NO: 241108 - DNA, 25 bp, Probe Sequence
gatttgtgaacatactgccttattt

SEQ ID NO: 241109 - DNA, 25 bp, Probe Sequence
gatttggagtagacctgaccttgtt

SEQ ID NO: 241110 - DNA, 25 bp, Probe Sequence
gatttagaggttcctgagccttcaa

SEQ ID NO: 241111 - DNA, 25 bp, Probe Sequence
gatttgaaggctgcagctgaggctg

SEQ ID NO: 241112 - DNA, 25 bp, Probe Sequence
gatttcaaagagggcatggctgcag

SEQ ID NO: 241113 - DNA, 25 bp, Probe Sequence
gatttgaaccaggatctgtcagcgc

SEQ ID NO: 241114 - DNA, 25 bp, Probe Sequence
gattcaaaccaaagctgcctgtgcc

SEQ ID NO: 241115 - DNA, 25 bp, Probe Sequence
gattacaagcggaggcgctgccgcg

SEQ ID NO: 241116 - DNA, 25 bp, Probe Sequence
gattcaagagggacagccccagctt

SEQ ID NO: 241117 - DNA, 25 bp, Probe Sequence
gatttccagggaaccttcatgactg

SEQ ID NO: 241118 - DNA, 25 bp, Probe Sequence
gatttccaggtaaagtggtgatgat

SEQ ID NO: 241119 - DNA, 25 bp, Probe Sequence
gatttcgaggcaagaatttgttaaa

SEQ ID NO: 241120 - DNA, 25 bp, Probe Sequence
gatttgctgggcagtttttctgtat

SEQ ID NO: 241121 - DNA, 25 bp, Probe Sequence
gatatttggaaacttgattttcgag

SEQ ID NO: 241122 - DNA, 25 bp, Probe Sequence
gatatcttggaatcttaatgcttat

SEQ ID NO: 241123 - DNA, 25 bp, Probe Sequence
gatatttctggatcattccagtcat

SEQ ID NO: 241124 - DNA, 25 bp, Probe Sequence
gatattttggatacattaactcact

SEQ ID NO: 241125 - DNA, 25 bp, Probe Sequence
gatattgttgccatcaatgacccct

SEQ ID NO: 241126 - DNA, 25 bp, Probe Sequence
gatatagtggcaagtgagcagtctc

SEQ ID NO: 241127 - DNA, 25 bp, Probe Sequence
gatatattcccaatgagcagtgtat

SEQ ID NO: 241128 - DNA, 25 bp, Probe Sequence
gatattgtcacctagcagatatgta

SEQ ID NO: 241129 - DNA, 25 bp, Probe Sequence
gatattgctatcaatcgcagtagtc

SEQ ID NO: 241130 - DNA, 25 bp, Probe Sequence
gatttctgacagactatctttgggg

SEQ ID NO: 241131 - DNA, 25 bp, Probe Sequence
gattttgatacaatttgagggaggc

SEQ ID NO: 241132 - DNA, 25 bp, Probe Sequence
gattttaatatccttgagcctgggc

SEQ ID NO: 241133 - DNA, 25 bp, Probe Sequence
gatattttgtatttggcaactgtgg

SEQ ID NO: 241134 - DNA, 25 bp, Probe Sequence
gatattttttagactgaactgctcc

SEQ ID NO: 241135 - DNA, 25 bp, Probe Sequence
gatttgtatcttagacgacctgtcc

SEQ ID NO: 241136 - DNA, 25 bp, Probe Sequence
gattttccatgtagacaaggttcac

SEQ ID NO: 241137 - DNA, 25 bp, Probe Sequence
gattttcctgagagaactgatttca

SEQ ID NO: 241138 - DNA, 25 bp, Probe Sequence
gattaatcccagagaactttcaact

SEQ ID NO: 241139 - DNA, 25 bp, Probe Sequence
gattaatcaccatggaactttggaa

SEQ ID NO: 241140 - DNA, 25 bp, Probe Sequence
gattacccgtaacacatttgtgatt

SEQ ID NO: 241141 - DNA, 25 bp, Probe Sequence
gattcacccagtcattacttctaga

SEQ ID NO: 241142 - DNA, 25 bp, Probe Sequence
gatatacttagtccattgatgttgt

SEQ ID NO: 241143 - DNA, 25 bp, Probe Sequence
gattacttcatgcgcaatgctgact

SEQ ID NO: 241144 - DNA, 25 bp, Probe Sequence
gatttcttaccctacagatctttta

SEQ ID NO: 241145 - DNA, 25 bp, Probe Sequence
gatattttatccttagcattgcttc

SEQ ID NO: 241146 - DNA, 25 bp, Probe Sequence
gatattttgaactaagcatctttat

SEQ ID NO: 241147 - DNA, 25 bp, Probe Sequence
gattttgagaatcaggatactttga

SEQ ID NO: 241148 - DNA, 25 bp, Probe Sequence
gattttgaggtggggcaactgttcc

SEQ ID NO: 241149 - DNA, 25 bp, Probe Sequence
gattaatgagggcatggggtggtcc

SEQ ID NO: 241150 - DNA, 25 bp, Probe Sequence
gattgctctggtggagagggggggc

SEQ ID NO: 241151 - DNA, 25 bp, Probe Sequence
gatattggtatcggagggcggtcct

SEQ ID NO: 241152 - DNA, 25 bp, Probe Sequence
gatttgttgacttgaggtctggttt

SEQ ID NO: 241153 - DNA, 25 bp, Probe Sequence
gatttctctttagtcgttggtgtta

SEQ ID NO: 241154 - DNA, 25 bp, Probe Sequence
gattcccttaagctgtcttgtttca

SEQ ID NO: 241155 - DNA, 25 bp, Probe Sequence
gattacgttattgggtttggatatt

SEQ ID NO: 241156 - DNA, 25 bp, Probe Sequence
gttgaatgatacagtaaaccacttg

SEQ ID NO: 241157 - DNA, 25 bp, Probe Sequence
gattactatgagctgtatataccat

SEQ ID NO: 241158 - DNA, 25 bp, Probe Sequence
gatatatctattgatgctcttcctt

SEQ ID NO: 241159 - DNA, 25 bp, Probe Sequence
gatatatgctcaagcagatgttttc

SEQ ID NO: 241160 - DNA, 25 bp, Probe Sequence
gatttgcctacagtgatgtttggaa

SEQ ID NO: 241161 - DNA, 25 bp, Probe Sequence
gatttcgctgatgtggtttgttata

SEQ ID NO: 241162 - DNA, 25 bp, Probe Sequence
gatattactgtacttttatgttctc

SEQ ID NO: 241163 - DNA, 25 bp, Probe Sequence
gatattatgtggcttttatttcagt

SEQ ID NO: 241164 - DNA, 25 bp, Probe Sequence
gatttagggttctatatttactgtt

SEQ ID NO: 241165 - DNA, 25 bp, Probe Sequence
gattaagccttttgacgttactcct

SEQ ID NO: 241166 - DNA, 25 bp, Probe Sequence
gattaacatccctgatcctatcaat

SEQ ID NO: 241167 - DNA, 25 bp, Probe Sequence
gattgaatcactccacagtactacc

SEQ ID NO: 241168 - DNA, 25 bp, Probe Sequence
gatattatgatctccattttacaat

SEQ ID NO: 241169 - DNA, 25 bp, Probe Sequence
gatattatatgctgtaaccatgaaa

SEQ ID NO: 241170 - DNA, 25 bp, Probe Sequence
gatatattcatttgctacaccaact

SEQ ID NO: 241171 - DNA, 25 bp, Probe Sequence
gatatttcaatgttagcctcaattt

SEQ ID NO: 241172 - DNA, 25 bp, Probe Sequence
gatattgtcaattcttgctcatcgg

SEQ ID NO: 241173 - DNA, 25 bp, Probe Sequence
gatattgtcaattcttgctcatcgg

SEQ ID NO: 241174 - DNA, 25 bp, Probe Sequence
gatttgtcacttagttcacggtctc

SEQ ID NO: 241175 - DNA, 25 bp, Probe Sequence
gatttgtagtaacagcaccacctgc

SEQ ID NO: 241176 - DNA, 25 bp, Probe Sequence
gattcagctagttaggagcccattt

SEQ ID NO: 241177 - DNA, 25 bp, Probe Sequence
gattcagacagcttatggggtattt

SEQ ID NO: 241178 - DNA, 25 bp, Probe Sequence
gattcagacagcttatggggtattt

SEQ ID NO: 241179 - DNA, 25 bp, Probe Sequence
gatatagagcatttatgcggtattc

SEQ ID NO: 241180 - DNA, 25 bp, Probe Sequence
gattcaagctgaacatctgggatgt

SEQ ID NO: 241181 - DNA, 25 bp, Probe Sequence
gattcaatgtacctgtgagcttgga

SEQ ID NO: 241182 - DNA, 25 bp, Probe Sequence
gattcatcaggccaatgggcttgcg

SEQ ID NO: 241183 - DNA, 25 bp, Probe Sequence
gattctcagggatgggttcgattct

SEQ ID NO: 241184 - DNA, 25 bp, Probe Sequence
gattgagagggatgtcgggcagttc

SEQ ID NO: 241185 - DNA, 25 bp, Probe Sequence
gttgtcagaggtttcctacctgtct

SEQ ID NO: 241186 - DNA, 25 bp, Probe Sequence
gattgtggggtatatcccctatctt

SEQ ID NO: 241187 - DNA, 25 bp, Probe Sequence
gattgctttgtatgagaccccaact

SEQ ID NO: 241188 - DNA, 25 bp, Probe Sequence
gattcgtcagaattattccaccgac

SEQ ID NO: 241189 - DNA, 25 bp, Probe Sequence
gatttgtagcactttgttgacttcc

SEQ ID NO: 241190 - DNA, 25 bp, Probe Sequence
gatttctgagattttggtgcaccca

SEQ ID NO: 241191 - DNA, 25 bp, Probe Sequence
gattttcagattatgctgctgccca

SEQ ID NO: 241192 - DNA, 25 bp, Probe Sequence
gatttcacagtcagctgctcaacgg

SEQ ID NO: 241193 - DNA, 25 bp, Probe Sequence
gattcgcacgatgagtgtaaagaac

SEQ ID NO: 241194 - DNA, 25 bp, Probe Sequence
gatttgcctgcagagtttggataaa

SEQ ID NO: 241195 - DNA, 25 bp, Probe Sequence
gatttgccaatggtgctttggatac

SEQ ID NO: 241196 - DNA, 25 bp, Probe Sequence
gattatgccaagggctttggtggcc

SEQ ID NO: 241197 - DNA, 25 bp, Probe Sequence
gatttgccaactgtggtgagctggt

SEQ ID NO: 241198 - DNA, 25 bp, Probe Sequence
gatttgtcaccgttggagcttggat

SEQ ID NO: 241199 - DNA, 25 bp, Probe Sequence
gatttctgtccttggtacattggat

SEQ ID NO: 241200 - DNA, 25 bp, Probe Sequence
gatttttccttgttactcaggctgg

SEQ ID NO: 241201 - DNA, 25 bp, Probe Sequence
gatttgtgcaacttgtaactaggtg

SEQ ID NO: 241202 - DNA, 25 bp, Probe Sequence
gatttcgcagtctgaaagctgaatc

SEQ ID NO: 241203 - DNA, 25 bp, Probe Sequence
gatataggcttctgcacagtctgaa

SEQ ID NO: 241204 - DNA, 25 bp, Probe Sequence
gatttgtgtctatgaagtgctggat

SEQ ID NO: 241205 - DNA, 25 bp, Probe Sequence
gatttgatgtgtgagtagctttgat

SEQ ID NO: 241206 - DNA, 25 bp, Probe Sequence
gattttgactgctgtgactttgtac

SEQ ID NO: 241207 - DNA, 25 bp, Probe Sequence
gatttgtgtctgtgacttttgtgaa

SEQ ID NO: 241208 - DNA, 25 bp, Probe Sequence
gatttttctgcttgttcttaatgct

SEQ ID NO: 241209 - DNA, 25 bp, Probe Sequence
gatattctatacagttctgttgtct

SEQ ID NO: 241210 - DNA, 25 bp, Probe Sequence
gatttcttaatgctgtatttgttca

SEQ ID NO: 241211 - DNA, 25 bp, Probe Sequence
gatttcttattgctgtacattgcgt

SEQ ID NO: 241212 - DNA, 25 bp, Probe Sequence
gatttttgactcttgtgtctactgt

SEQ ID NO: 241213 - DNA, 25 bp, Probe Sequence
gattttctacattgttactctcaac

SEQ ID NO: 241214 - DNA, 25 bp, Probe Sequence
gattttctacattgttactctcaac

SEQ ID NO: 241215 - DNA, 25 bp, Probe Sequence
gattttaagttgtctactgagcaga

SEQ ID NO: 241216 - DNA, 25 bp, Probe Sequence
gatttgtacagattgaccacgggaa

SEQ ID NO: 241217 - DNA, 25 bp, Probe Sequence
gatattctaatatataacactggaa

SEQ ID NO: 241218 - DNA, 25 bp, Probe Sequence
gatttaacataactgagacttgaaa

SEQ ID NO: 241219 - DNA, 25 bp, Probe Sequence
gatttgaacatgtagtgtacgtgct

SEQ ID NO: 241220 - DNA, 25 bp, Probe Sequence
gattaaagtgatagcgattcagatt

SEQ ID NO: 241221 - DNA, 25 bp, Probe Sequence
gatttaatgctgctctgatctgaga

SEQ ID NO: 241222 - DNA, 25 bp, Probe Sequence
gattctcctgtgctagatgtgcaaa

SEQ ID NO: 241223 - DNA, 25 bp, Probe Sequence
gatttctgtgggactgtggatctca

SEQ ID NO: 241224 - DNA, 25 bp, Probe Sequence
gatttctgcatgggtagaccatcca

SEQ ID NO: 241225 - DNA, 25 bp, Probe Sequence
gattttgatcgtgagatcctcccct

SEQ ID NO: 241226 - DNA, 25 bp, Probe Sequence
gatttggttgacagaactcccagcc

SEQ ID NO: 241227 - DNA, 25 bp, Probe Sequence
gatttgttttctgataacgccccac

SEQ ID NO: 241228 - DNA, 25 bp, Probe Sequence
gatttttagcttgaacaggcaaccc

SEQ ID NO: 241229 - DNA, 25 bp, Probe Sequence
gattttctaatagacaagtgtaatc

SEQ ID NO: 241230 - DNA, 25 bp, Probe Sequence
gattttgctttagaatggttacctt

SEQ ID NO: 241231 - DNA, 25 bp, Probe Sequence
taatttctgtttgacaggaaacctt

SEQ ID NO: 241232 - DNA, 25 bp, Probe Sequence
gttttctgttttcagtaaagtctcg

SEQ ID NO: 241233 - DNA, 25 bp, Probe Sequence
gttttctgttttcagtaaagtctcg

SEQ ID NO: 241234 - DNA, 25 bp, Probe Sequence
gttgttccttctgtactaaagtatt

SEQ ID NO: 241235 - DNA, 25 bp, Probe Sequence
gatttgtttttcatacttaagtcat

SEQ ID NO: 241236 - DNA, 25 bp, Probe Sequence
gattttttggttaagctttgacact

SEQ ID NO: 241237 - DNA, 25 bp, Probe Sequence
gattttttttctgacaatgtgacca

SEQ ID NO: 241238 - DNA, 25 bp, Probe Sequence
gatttgttttctaaagttgatactg

SEQ ID NO: 241239 - DNA, 25 bp, Probe Sequence
gatattgtgtatcccataaagtata

SEQ ID NO: 241240 - DNA, 25 bp, Probe Sequence
gattttgctacccatgaaatacagt

SEQ ID NO: 241241 - DNA, 25 bp, Probe Sequence
gattttgatgaccgcagaagaccct

SEQ ID NO: 241242 - DNA, 25 bp, Probe Sequence
gatttcagaggtggcagacgactca

SEQ ID NO: 241243 - DNA, 25 bp, Probe Sequence
gatttcagaggagtaaggcatgcca

SEQ ID NO: 241244 - DNA, 25 bp, Probe Sequence
gattatcgtgggaaatacttggttt

SEQ ID NO: 241245 - DNA, 25 bp, Probe Sequence
gattcatctgggaaaattgattttt

SEQ ID NO: 241246 - DNA, 25 bp, Probe Sequence
gattacgagggagtcaaattttctt

SEQ ID NO: 241247 - DNA, 25 bp, Probe Sequence
gattcctgcaggcttaacagttggc

SEQ ID NO: 241248 - DNA, 25 bp, Probe Sequence
gatttctgcaggctgtgtaagcatg

SEQ ID NO: 241249 - DNA, 25 bp, Probe Sequence
gatttgcagaccctgtctaaaggct

SEQ ID NO: 241250 - DNA, 25 bp, Probe Sequence
gatttcatgacccactaataagttt

SEQ ID NO: 241251 - DNA, 25 bp, Probe Sequence
gatattcatgagtttctacttgagt

SEQ ID NO: 241252 - DNA, 25 bp, Probe Sequence
gatattcagttcattcacctgatta

SEQ ID NO: 241253 - DNA, 25 bp, Probe Sequence
gatttccttcatatagcacatgttc

SEQ ID NO: 241254 - DNA, 25 bp, Probe Sequence
gatttccacatcatgagcgaagttc

SEQ ID NO: 241255 - DNA, 25 bp, Probe Sequence
gattcccacaaggactaagtatcag

SEQ ID NO: 241256 - DNA, 25 bp, Probe Sequence
gattcagcaccatggcggaagacat

SEQ ID NO: 241257 - DNA, 25 bp, Probe Sequence
gattatcccaatgtggaagatgccc

SEQ ID NO: 241258 - DNA, 25 bp, Probe Sequence
gatttcctgaagacggacagtgact

SEQ ID NO: 241259 - DNA, 25 bp, Probe Sequence
gattatccatgtggttaactggact

SEQ ID NO: 241260 - DNA, 25 bp, Probe Sequence
gattaaagtttaaagctatggcatc

SEQ ID NO: 241261 - DNA, 25 bp, Probe Sequence
gattagacacttctagaccaggctt

SEQ ID NO: 241262 - DNA, 25 bp, Probe Sequence
gatttgacacttaattcccattttc

SEQ ID NO: 241263 - DNA, 25 bp, Probe Sequence
gattgtacacttaattcaagccttc

SEQ ID NO: 241264 - DNA, 25 bp, Probe Sequence
gatttaacttgtttgccatcagttc

SEQ ID NO: 241265 - DNA, 25 bp, Probe Sequence
gttcaacaccgtttctgcataaagg

SEQ ID NO: 241266 - DNA, 25 bp, Probe Sequence
gattacaccacggattccttaagtg

SEQ ID NO: 241267 - DNA, 25 bp, Probe Sequence
gattcaaacacagagacttccaagt

SEQ ID NO: 241268 - DNA, 25 bp, Probe Sequence
gattaccacgaaaggctgtcaaagg

SEQ ID NO: 241269 - DNA, 25 bp, Probe Sequence
gattcagtagcagatgccgttcaaa

SEQ ID NO: 241270 - DNA, 25 bp, Probe Sequence
gattcagaagcgtcaacagttagtc

SEQ ID NO: 241271 - DNA, 25 bp, Probe Sequence
gattcacagactcaacttgttacaa

SEQ ID NO: 241272 - DNA, 25 bp, Probe Sequence
gattcagagactgggacgttttatc

SEQ ID NO: 241273 - DNA, 25 bp, Probe Sequence
gattaggatgcttggtaggtttttt

SEQ ID NO: 241274 - DNA, 25 bp, Probe Sequence
gattaggaattgctagatagtgttt

SEQ ID NO: 241275 - DNA, 25 bp, Probe Sequence
gattaaactgtgatggatgggctat

SEQ ID NO: 241276 - DNA, 25 bp, Probe Sequence
gattacaatcgtcatgcagtggtca

SEQ ID NO: 241277 - DNA, 25 bp, Probe Sequence
gatttcattcaagacagtgggcaga

SEQ ID NO: 241278 - DNA, 25 bp, Probe Sequence
gatttcagtatctagaagtgggatg

SEQ ID NO: 241279 - DNA, 25 bp, Probe Sequence
gattctcaccactgaagggcgtaat

SEQ ID NO: 241280 - DNA, 25 bp, Probe Sequence
gattcacagcccttagtggtgatgg

SEQ ID NO: 241281 - DNA, 25 bp, Probe Sequence
gattacagtagctttgtagtgggtt

SEQ ID NO: 241282 - DNA, 25 bp, Probe Sequence
gatttgggagtgatgtatctgggtg

SEQ ID NO: 241283 - DNA, 25 bp, Probe Sequence
gattctggtatggaggttgtggtgg

SEQ ID NO: 241284 - DNA, 25 bp, Probe Sequence
gatttgtgctatgatgggtggtgtt

SEQ ID NO: 241285 - DNA, 25 bp, Probe Sequence
gatttgtttgtggcgttgagtattt

SEQ ID NO: 241286 - DNA, 25 bp, Probe Sequence
gattcttcactgaaatttagtttgt

SEQ ID NO: 241287 - DNA, 25 bp, Probe Sequence
gatttggtttaatttccattatgct

SEQ ID NO: 241288 - DNA, 25 bp, Probe Sequence
gattttgatgtttattctccaggtt

SEQ ID NO: 241289 - DNA, 25 bp, Probe Sequence
gattttgattgttttggccttgctt

SEQ ID NO: 241290 - DNA, 25 bp, Probe Sequence
gatttaacattgttgggccatttaa

SEQ ID NO: 241291 - DNA, 25 bp, Probe Sequence
gatttgaacttgtttggaacttgtc

SEQ ID NO: 241292 - DNA, 25 bp, Probe Sequence
gattcgaactaatgtgtgtcctttt

SEQ ID NO: 241293 - DNA, 25 bp, Probe Sequence
gattttatctaatgtttctctaatt

SEQ ID NO: 241294 - DNA, 25 bp, Probe Sequence
gattattactaattctatttctcta

SEQ ID NO: 241295 - DNA, 25 bp, Probe Sequence
gattattactaattctatttctcta

SEQ ID NO: 241296 - DNA, 25 bp, Probe Sequence
gatttaaaggagttcatttcgcata

SEQ ID NO: 241297 - DNA, 25 bp, Probe Sequence
gatttaaagcacttcctgattctat

SEQ ID NO: 241298 - DNA, 25 bp, Probe Sequence
gatttgaaatgtttactgacactta

SEQ ID NO: 241299 - DNA, 25 bp, Probe Sequence
gatttagactcttctccatgtcagc

SEQ ID NO: 241300 - DNA, 25 bp, Probe Sequence
gatttccacaattcttctgtcaagc

SEQ ID NO: 241301 - DNA, 25 bp, Probe Sequence
gattttcactcatccctgagaagcc

SEQ ID NO: 241302 - DNA, 25 bp, Probe Sequence
gatttctaacatttcttaacagtca

SEQ ID NO: 241303 - DNA, 25 bp, Probe Sequence
gatttctaacatttcttaacagtca

SEQ ID NO: 241304 - DNA, 25 bp, Probe Sequence
gttgttagcaatttcattcaaaatg

SEQ ID NO: 241305 - DNA, 25 bp, Probe Sequence
gattttagcagctctctccaaagct

SEQ ID NO: 241306 - DNA, 25 bp, Probe Sequence
gatttgtgggactcaaaaatgctga

SEQ ID NO: 241307 - DNA, 25 bp, Probe Sequence
gatattggggaggctccaaaaggac

SEQ ID NO: 241308 - DNA, 25 bp, Probe Sequence
gattagagggtgctcctccaaggcc

SEQ ID NO: 241309 - DNA, 25 bp, Probe Sequence
gattaagggtgttgatctccttagc

SEQ ID NO: 241310 - DNA, 25 bp, Probe Sequence
gattaaggtgagagctgcgcctaaa

SEQ ID NO: 241311 - DNA, 25 bp, Probe Sequence
gttactgtggagattaagttcaaat

SEQ ID NO: 241312 - DNA, 25 bp, Probe Sequence
gtagctcggaggattgaatttcgaa

SEQ ID NO: 241313 - DNA, 25 bp, Probe Sequence
gattttaggagaagctgatttttaa

SEQ ID NO: 241314 - DNA, 25 bp, Probe Sequence
gattttaaatagcgtattgtatata

SEQ ID NO: 241315 - DNA, 25 bp, Probe Sequence
gatttgttaaagtgtattgtgtgtt

SEQ ID NO: 241316 - DNA, 25 bp, Probe Sequence
gattgtatttcctcctttgtggatt

SEQ ID NO: 241317 - DNA, 25 bp, Probe Sequence
gattgtacaccacagcccttgtgga

SEQ ID NO: 241318 - DNA, 25 bp, Probe Sequence
gtagtctacccttaccttgaggaat

SEQ ID NO: 241319 - DNA, 25 bp, Probe Sequence
gtagtctacccttaccttgaggaat

SEQ ID NO: 241320 - DNA, 25 bp, Probe Sequence
gtagattggcctgtaccttttagta

SEQ ID NO: 241321 - DNA, 25 bp, Probe Sequence
gattttggtcatgtacagtttgttg

SEQ ID NO: 241322 - DNA, 25 bp, Probe Sequence
gattattagctcattcacttatttt

SEQ ID NO: 241323 - DNA, 25 bp, Probe Sequence
gattattagctcattcacttatttt

SEQ ID NO: 241324 - DNA, 25 bp, Probe Sequence
gatttgtccattgtagcttattgtt

SEQ ID NO: 241325 - DNA, 25 bp, Probe Sequence
gatttgtaattagttttgatgtgta

SEQ ID NO: 241326 - DNA, 25 bp, Probe Sequence
gatttgtcaaattttatgctgtgtg

SEQ ID NO: 241327 - DNA, 25 bp, Probe Sequence
gatttgaccagataaatgctgtgga

SEQ ID NO: 241328 - DNA, 25 bp, Probe Sequence
gatttctcagcctacaaattgtgtc

SEQ ID NO: 241329 - DNA, 25 bp, Probe Sequence
gatttctagcattaaatatggaaca

SEQ ID NO: 241330 - DNA, 25 bp, Probe Sequence
gatttctacgaaaagatgtgcaact

SEQ ID NO: 241331 - DNA, 25 bp, Probe Sequence
gatttccacggagagcattcagaca

SEQ ID NO: 241332 - DNA, 25 bp, Probe Sequence
gatttccaggaagtactcatagcaa

SEQ ID NO: 241333 - DNA, 25 bp, Probe Sequence
gatttctgcatgaagattcacaaaa

SEQ ID NO: 241334 - DNA, 25 bp, Probe Sequence
gatttctctgggtcttcaattagaa

SEQ ID NO: 241335 - DNA, 25 bp, Probe Sequence
gattgattcctttgtgtagattaga

SEQ ID NO: 241336 - DNA, 25 bp, Probe Sequence
gattatctcctaagtgacagtgaag

SEQ ID NO: 241337 - DNA, 25 bp, Probe Sequence
gattattcctgaatgtacagacaga

SEQ ID NO: 241338 - DNA, 25 bp, Probe Sequence
gattgctcccgaagtattacgtggc

SEQ ID NO: 241339 - DNA, 25 bp, Probe Sequence
gattctcctcccattatagttggtg

SEQ ID NO: 241340 - DNA, 25 bp, Probe Sequence
gatttccattccattttcatttatt

SEQ ID NO: 241341 - DNA, 25 bp, Probe Sequence
gatttacttccggtttcttcatatt

SEQ ID NO: 241342 - DNA, 25 bp, Probe Sequence
gattattttcctgttgtgtttattt

SEQ ID NO: 241343 - DNA, 25 bp, Probe Sequence
gattttgttccttatcctgattttc

SEQ ID NO: 241344 - DNA, 25 bp, Probe Sequence
gatttttcatgcgttcccgtatatt

SEQ ID NO: 241345 - DNA, 25 bp, Probe Sequence
gatttcttcgttctctgggataatg

SEQ ID NO: 241346 - DNA, 25 bp, Probe Sequence
gattacttcattgttcagtggccgg

SEQ ID NO: 241347 - DNA, 25 bp, Probe Sequence
gattccctaattgtgctgtgttcgt

SEQ ID NO: 241348 - DNA, 25 bp, Probe Sequence
gattccaataagcttgctcgctctc

SEQ ID NO: 241349 - DNA, 25 bp, Probe Sequence
gatttcaaaacagtcagatttcttc

SEQ ID NO: 241350 - DNA, 25 bp, Probe Sequence
gattctcaaggattgtcagacttca

SEQ ID NO: 241351 - DNA, 25 bp, Probe Sequence
gatttagcagctttgtcgtcatgta

SEQ ID NO: 241352 - DNA, 25 bp, Probe Sequence
gattttgagcatttttacgtacttg

SEQ ID NO: 241353 - DNA, 25 bp, Probe Sequence
gattttgatcttagtttatccactt

SEQ ID NO: 241354 - DNA, 25 bp, Probe Sequence
gattttcttttgaggatcaatctat

SEQ ID NO: 241355 - DNA, 25 bp, Probe Sequence
gattatttctagatgggtagtgctt

SEQ ID NO: 241356 - DNA, 25 bp, Probe Sequence
gattattttgaaggggccacttctc

SEQ ID NO: 241357 - DNA, 25 bp, Probe Sequence
gattagtattacctgtggcaccttt

SEQ ID NO: 241358 - DNA, 25 bp, Probe Sequence
gattcatgtttaagtggtagatctt

SEQ ID NO: 241359 - DNA, 25 bp, Probe Sequence
gattcattaagtttgccacatgact

SEQ ID NO: 241360 - DNA, 25 bp, Probe Sequence
gattcatgatattgtcctggttggt

SEQ ID NO: 241361 - DNA, 25 bp, Probe Sequence
gattcatgatattgtcctggttggt

SEQ ID NO: 241362 - DNA, 25 bp, Probe Sequence
gattatgaagagtcactgagtggca

SEQ ID NO: 241363 - DNA, 25 bp, Probe Sequence
gattctagacactaagatatgagca

SEQ ID NO: 241364 - DNA, 25 bp, Probe Sequence
gattacagaagctgcatcctgagac

SEQ ID NO: 241365 - DNA, 25 bp, Probe Sequence
gattacaggcatgagccactgcgcc

SEQ ID NO: 241366 - DNA, 25 bp, Probe Sequence
gatttgcgactggagcacactcatt

SEQ ID NO: 241367 - DNA, 25 bp, Probe Sequence
gattcttgatactgcactctctaag

SEQ ID NO: 241368 - DNA, 25 bp, Probe Sequence
gattgcaaatactgcccgcaaagct

SEQ ID NO: 241369 - DNA, 25 bp, Probe Sequence
gattaaaagcagtctcggaaacaca

SEQ ID NO: 241370 - DNA, 25 bp, Probe Sequence
gattagcagaacgctcttgaaacaa

SEQ ID NO: 241371 - DNA, 25 bp, Probe Sequence
gattagtgtactgtttgaaacaaaa

SEQ ID NO: 241372 - DNA, 25 bp, Probe Sequence
gattcagtgcccacaatgtaaacag

SEQ ID NO: 241373 - DNA, 25 bp, Probe Sequence
gattaatccagaagcagtcataaac

SEQ ID NO: 241374 - DNA, 25 bp, Probe Sequence
gattaagtcaatacatttacataaa

SEQ ID NO: 241375 - DNA, 25 bp, Probe Sequence
gatttacttaattgctacatctaaa

SEQ ID NO: 241376 - DNA, 25 bp, Probe Sequence
gatttactgctaaacatcactctga

SEQ ID NO: 241377 - DNA, 25 bp, Probe Sequence
gattacacggaatcatgtcctgata

SEQ ID NO: 241378 - DNA, 25 bp, Probe Sequence
gattaagaggcatacaccacttagt

SEQ ID NO: 241379 - DNA, 25 bp, Probe Sequence
gattactgataatatcacaacccag

SEQ ID NO: 241380 - DNA, 25 bp, Probe Sequence
gattaattttcattcatcaacctct

SEQ ID NO: 241381 - DNA, 25 bp, Probe Sequence
gattaattcctgggtcaagactcaa

SEQ ID NO: 241382 - DNA, 25 bp, Probe Sequence
gttgaagtccagagacacgaggaga

SEQ ID NO: 241383 - DNA, 25 bp, Probe Sequence
gatttgagctcataggaacaggtag

SEQ ID NO: 241384 - DNA, 25 bp, Probe Sequence
gattttggacagggacaaggtagga

SEQ ID NO: 241385 - DNA, 25 bp, Probe Sequence
gattgttcgaatgtcaccagttaaa

SEQ ID NO: 241386 - DNA, 25 bp, Probe Sequence
gatttttatatttgccactgttaga

SEQ ID NO: 241387 - DNA, 25 bp, Probe Sequence
gatttgctctatttcagcagatctt

SEQ ID NO: 241388 - DNA, 25 bp, Probe Sequence
gatttcagctatgctagaggctttt

SEQ ID NO: 241389 - DNA, 25 bp, Probe Sequence
gatttcacctgcatatacatttttc

SEQ ID NO: 241390 - DNA, 25 bp, Probe Sequence
gattatcacctcttacaatatttgg

SEQ ID NO: 241391 - DNA, 25 bp, Probe Sequence
gattaatgcccatttaaatctcatg

SEQ ID NO: 241392 - DNA, 25 bp, Probe Sequence
gattaacccatacatgagctctccc

SEQ ID NO: 241393 - DNA, 25 bp, Probe Sequence
gttaaaataacatacctctcctacg

SEQ ID NO: 241394 - DNA, 25 bp, Probe Sequence
gattaagaataactaaccctccctg

SEQ ID NO: 241395 - DNA, 25 bp, Probe Sequence
gattacgagtgtaccaactccacca

SEQ ID NO: 241396 - DNA, 25 bp, Probe Sequence
gattgatgcggtatacgaggcccca

SEQ ID NO: 241397 - DNA, 25 bp, Probe Sequence
gattattggcatatactgactgact

SEQ ID NO: 241398 - DNA, 25 bp, Probe Sequence
gattatctgctaagtaagtctgaaa

SEQ ID NO: 241399 - DNA, 25 bp, Probe Sequence
gattgcttgcagagaaactcaaaga

SEQ ID NO: 241400 - DNA, 25 bp, Probe Sequence
gatttcatggctaagacctcaaaag

SEQ ID NO: 241401 - DNA, 25 bp, Probe Sequence
gattttgagttaacatctcttgaag

SEQ ID NO: 241402 - DNA, 25 bp, Probe Sequence
gattctgtaagttacccagtaaata

SEQ ID NO: 241403 - DNA, 25 bp, Probe Sequence
gattcatgtacattgaacccaacag

SEQ ID NO: 241404 - DNA, 25 bp, Probe Sequence
gattcagaacattcagatcgccgac

SEQ ID NO: 241405 - DNA, 25 bp, Probe Sequence
gattcagaagtagctcaggcaggga

SEQ ID NO: 241406 - DNA, 25 bp, Probe Sequence
gattcagaagtagctcaggcaggga

SEQ ID NO: 241407 - DNA, 25 bp, Probe Sequence
gattcaggaccagcttgggctgcgt

SEQ ID NO: 241408 - DNA, 25 bp, Probe Sequence
gattcaggccctgagaggtctcagc

SEQ ID NO: 241409 - DNA, 25 bp, Probe Sequence
gattattgaactaccagtgctccac

SEQ ID NO: 241410 - DNA, 25 bp, Probe Sequence
gattcttggacgactatgtggcaac

SEQ ID NO: 241411 - DNA, 25 bp, Probe Sequence
gattcttggcgaagtatgggcctta

SEQ ID NO: 241412 - DNA, 25 bp, Probe Sequence
gatttattcgatgtgattggcttgt

SEQ ID NO: 241413 - DNA, 25 bp, Probe Sequence
gatttatttggagtggaggcattgt

SEQ ID NO: 241414 - DNA, 25 bp, Probe Sequence
gatttcaggctgtactggatgagct

SEQ ID NO: 241415 - DNA, 25 bp, Probe Sequence
gatttctactgccagtgagctcagc

SEQ ID NO: 241416 - DNA, 25 bp, Probe Sequence
gattttttgctgcagactcatcctt

SEQ ID NO: 241417 - DNA, 25 bp, Probe Sequence
gattctgtttctcagtagtcctttt

SEQ ID NO: 241418 - DNA, 25 bp, Probe Sequence
gattatatttctagagctgagtctc

SEQ ID NO: 241419 - DNA, 25 bp, Probe Sequence
gattataatatcctcactggccaca

SEQ ID NO: 241420 - DNA, 25 bp, Probe Sequence
gattctgcagtagatcctgtccaga

SEQ ID NO: 241421 - DNA, 25 bp, Probe Sequence
gatttcacaaaaacatgatcaagtc

SEQ ID NO: 241422 - DNA, 25 bp, Probe Sequence
gatttccaaaatgagggagctcctg

SEQ ID NO: 241423 - DNA, 25 bp, Probe Sequence
gatttcgctaacagatgggagatgg

SEQ ID NO: 241424 - DNA, 25 bp, Probe Sequence
gatttctgtttctgatgggagtata

SEQ ID NO: 241425 - DNA, 25 bp, Probe Sequence
gattttgtattctctagacggacac

SEQ ID NO: 241426 - DNA, 25 bp, Probe Sequence
gatttattctgttactagatcaggt

SEQ ID NO: 241427 - DNA, 25 bp, Probe Sequence
gatttatttgtctaggagtatgtca

SEQ ID NO: 241428 - DNA, 25 bp, Probe Sequence
gatttagtggccttcatgttattca

SEQ ID NO: 241429 - DNA, 25 bp, Probe Sequence
gatttttggcactttgttttcaaga

SEQ ID NO: 241430 - DNA, 25 bp, Probe Sequence
gatttctttgacatccttgtaaaat

SEQ ID NO: 241431 - DNA, 25 bp, Probe Sequence
gattttttgttttttgctacaatct

SEQ ID NO: 241432 - DNA, 25 bp, Probe Sequence
gatttttttttaatgttatcttgct

SEQ ID NO: 241433 - DNA, 25 bp, Probe Sequence
gattttctgattttattttctttgt

SEQ ID NO: 241434 - DNA, 25 bp, Probe Sequence
gattttcctttaatttctctggagt

SEQ ID NO: 241435 - DNA, 25 bp, Probe Sequence
gattttgcctattgtgattatcgct

SEQ ID NO: 241436 - DNA, 25 bp, Probe Sequence
gattacgatgctttggatgttgcca

SEQ ID NO: 241437 - DNA, 25 bp, Probe Sequence
gattatctagcttatggattctggt

SEQ ID NO: 241438 - DNA, 25 bp, Probe Sequence
gattcactgtcttttgattcttgat

SEQ ID NO: 241439 - DNA, 25 bp, Probe Sequence
gattcaggcctagattacttgcacg

SEQ ID NO: 241440 - DNA, 25 bp, Probe Sequence
gattcggcttcgtgtatttccagaa

SEQ ID NO: 241441 - DNA, 25 bp, Probe Sequence
gattctggggactggatcttcacaa

SEQ ID NO: 241442 - DNA, 25 bp, Probe Sequence
gattctggggactggatcttcacaa

SEQ ID NO: 241443 - DNA, 25 bp, Probe Sequence
gattctatggagtaggtattatccc

SEQ ID NO: 241444 - DNA, 25 bp, Probe Sequence
gattccaggagtcgtggtttcttgc

SEQ ID NO: 241445 - DNA, 25 bp, Probe Sequence
gattgtgggactgctggttttggcc

SEQ ID NO: 241446 - DNA, 25 bp, Probe Sequence
gattgaggggcgtgcagttgttcca

SEQ ID NO: 241447 - DNA, 25 bp, Probe Sequence
gattgaggagcggagagacttctgc

SEQ ID NO: 241448 - DNA, 25 bp, Probe Sequence
gatttcatgtgcggggatcatctgc

SEQ ID NO: 241449 - DNA, 25 bp, Probe Sequence
gattttgctgctgggcaacttcttc

SEQ ID NO: 241450 - DNA, 25 bp, Probe Sequence
gatttttctcagtcaatttgccagc

SEQ ID NO: 241451 - DNA, 25 bp, Probe Sequence
gatttattctcattcatttgttcat

SEQ ID NO: 241452 - DNA, 25 bp, Probe Sequence
gattttcttcatattttccatgcca

SEQ ID NO: 241453 - DNA, 25 bp, Probe Sequence
gattttttcaatatggctcctggca

SEQ ID NO: 241454 - DNA, 25 bp, Probe Sequence
gattttttaattaccatgcttcaca

SEQ ID NO: 241455 - DNA, 25 bp, Probe Sequence
gatttttaccagtctcacatgattc

SEQ ID NO: 241456 - DNA, 25 bp, Probe Sequence
gattttgtaaatgccacaaatgcat

SEQ ID NO: 241457 - DNA, 25 bp, Probe Sequence
gattcttccaaaggccttcaaatca

SEQ ID NO: 241458 - DNA, 25 bp, Probe Sequence
gattcttcagaaaacctccaaagta

SEQ ID NO: 241459 - DNA, 25 bp, Probe Sequence
gattcctcaggttacctctgatgga

SEQ ID NO: 241460 - DNA, 25 bp, Probe Sequence
gattaccaggatatgcttcacatca

SEQ ID NO: 241461 - DNA, 25 bp, Probe Sequence
gattaccaggatatgcttcacatca

SEQ ID NO: 241462 - DNA, 25 bp, Probe Sequence
gatttctcaggaatgtcttcagcaa

SEQ ID NO: 241463 - DNA, 25 bp, Probe Sequence
gattcataaggcaagtcctgagcga

SEQ ID NO: 241464 - DNA, 25 bp, Probe Sequence
caaagcgaaagcggcaggatcgacg

SEQ ID NO: 241465 - DNA, 25 bp, Probe Sequence
ggcaggatcgacgcgcttctgtatg

SEQ ID NO: 241466 - DNA, 25 bp, Probe Sequence
gccggagttttacggcaatatcatc

SEQ ID NO: 241467 - DNA, 25 bp, Probe Sequence
gttttacggcaatatcatcaccaca

SEQ ID NO: 241468 - DNA, 25 bp, Probe Sequence
gcaatatcatcaccacacgcactta

SEQ ID NO: 241469 - DNA, 25 bp, Probe Sequence
atcaccacacgcacttatcaggaac

SEQ ID NO: 241470 - DNA, 25 bp, Probe Sequence
acgcacttatcaggaacgcctcgat

SEQ ID NO: 241471 - DNA, 25 bp, Probe Sequence
atacgctggaaaaagtgcgcgatgc

SEQ ID NO: 241472 - DNA, 25 bp, Probe Sequence
ggaaaaagtgcgcgatgccgggatc

SEQ ID NO: 241473 - DNA, 25 bp, Probe Sequence
agtgcgcgatgccgggatcaaagtc

SEQ ID NO: 241474 - DNA, 25 bp, Probe Sequence
gccgggatcaaagtctgttctggcg

SEQ ID NO: 241475 - DNA, 25 bp, Probe Sequence
aagtctgttctggcggcattgtggg

SEQ ID NO: 241476 - DNA, 25 bp, Probe Sequence
aagatcgcgccggattattgctgca

SEQ ID NO: 241477 - DNA, 25 bp, Probe Sequence
gccggattattgctgcaactggcaa

SEQ ID NO: 241478 - DNA, 25 bp, Probe Sequence
attgctgcaactggcaaacctgccg

SEQ ID NO: 241479 - DNA, 25 bp, Probe Sequence
cgccggaaagcgtgccaatcaacat

SEQ ID NO: 241480 - DNA, 25 bp, Probe Sequence
aagcgtgccaatcaacatgctggtg

SEQ ID NO: 241481 - DNA, 25 bp, Probe Sequence
caatcaacatgctggtgaaggtgaa

SEQ ID NO: 241482 - DNA, 25 bp, Probe Sequence
gattgacaggtatgcccagcaagac

SEQ ID NO: 241483 - DNA, 25 bp, Probe Sequence
gattgcaagcattagctatcacagc

SEQ ID NO: 241484 - DNA, 25 bp, Probe Sequence
gattcatcagtgtatgcaacatcct

SEQ ID NO: 241485 - DNA, 25 bp, Probe Sequence
gatttcagatattgcaacctagtac

SEQ ID NO: 241486 - DNA, 25 bp, Probe Sequence
gattcggttatggaccatcatttcc

SEQ ID NO: 241487 - DNA, 25 bp, Probe Sequence
gattctgtgtttaagcacagggctg

SEQ ID NO: 241488 - DNA, 25 bp, Probe Sequence
gattctggtccgagccagtgactcc

SEQ ID NO: 241489 - DNA, 25 bp, Probe Sequence
gattcttgcgggaagcgcggactcc

SEQ ID NO: 241490 - DNA, 25 bp, Probe Sequence
gattctatccagcaagatcctgtcc

SEQ ID NO: 241491 - DNA, 25 bp, Probe Sequence
gattatgtccactctgatggctctc

SEQ ID NO: 241492 - DNA, 25 bp, Probe Sequence
gattatgtctactacgttcgttcaa

SEQ ID NO: 241493 - DNA, 25 bp, Probe Sequence
gattttgctagtacagttcgtatcc

SEQ ID NO: 241494 - DNA, 25 bp, Probe Sequence
gatttatctagaaaggtcgttccca

SEQ ID NO: 241495 - DNA, 25 bp, Probe Sequence
gatttatctggatctctgtggttcc

SEQ ID NO: 241496 - DNA, 25 bp, Probe Sequence
gattttctgtgtccttaagtacttc

SEQ ID NO: 241497 - DNA, 25 bp, Probe Sequence
gatttttgattccgctatagtcaga

SEQ ID NO: 241498 - DNA, 25 bp, Probe Sequence
gattttcttttgccttttgcaacca

SEQ ID NO: 241499 - DNA, 25 bp, Probe Sequence
gattttctcctaggtgtttgatatt

SEQ ID NO: 241500 - DNA, 25 bp, Probe Sequence
gattttctgtcttcttgtatcaata

SEQ ID NO: 241501 - DNA, 25 bp, Probe Sequence
gattttgtgcctgtgcagattgcaa

SEQ ID NO: 241502 - DNA, 25 bp, Probe Sequence
gattttgtgaatatgaacatgctgt

SEQ ID NO: 241503 - DNA, 25 bp, Probe Sequence
gatttcatcaagttcgacactggta

SEQ ID NO: 241504 - DNA, 25 bp, Probe Sequence
gattaggcagattacaccacggatt

SEQ ID NO: 241505 - DNA, 25 bp, Probe Sequence
gatttacagatctatcctcaggaga

SEQ ID NO: 241506 - DNA, 25 bp, Probe Sequence
gatttcatcaactatcatgcttcgg

SEQ ID NO: 241507 - DNA, 25 bp, Probe Sequence
gattcatctgaagtgtatgtttccc

SEQ ID NO: 241508 - DNA, 25 bp, Probe Sequence
gattatctaaagttggatgcccaca

SEQ ID NO: 241509 - DNA, 25 bp, Probe Sequence
gattctcaaagaccaggtgcccact

SEQ ID NO: 241510 - DNA, 25 bp, Probe Sequence
gattctcaaagaccaggtgcccact

SEQ ID NO: 241511 - DNA, 25 bp, Probe Sequence
gattcccaaagaacagtggtggctc

SEQ ID NO: 241512 - DNA, 25 bp, Probe Sequence
gattcaccgcaagactgtgggcgtg

SEQ ID NO: 241513 - DNA, 25 bp, Probe Sequence
gattacatccaagactggactctga

SEQ ID NO: 241514 - DNA, 25 bp, Probe Sequence
gattactactaggtccagagctctg

SEQ ID NO: 241515 - DNA, 25 bp, Probe Sequence
gattttaggggttcagatgcactga

SEQ ID NO: 241516 - DNA, 25 bp, Probe Sequence
gattttcagtgtgcattactggcta

SEQ ID NO: 241517 - DNA, 25 bp, Probe Sequence
gattttagtctcgtgtgacatgatg

SEQ ID NO: 241518 - DNA, 25 bp, Probe Sequence
gttgagttttcctgacttggaaaag

SEQ ID NO: 241519 - DNA, 25 bp, Probe Sequence
gttggtaaaatacatcttggcacaa

SEQ ID NO: 241520 - DNA, 25 bp, Probe Sequence
gattagttaaccactcattgccaca

SEQ ID NO: 241521 - DNA, 25 bp, Probe Sequence
gattattgtaacctttcaacctgaa

SEQ ID NO: 241522 - DNA, 25 bp, Probe Sequence
gatttcatgtaagtctgtcgcatac

SEQ ID NO: 241523 - DNA, 25 bp, Probe Sequence
gattctcaagagatcctagatatcc

SEQ ID NO: 241524 - DNA, 25 bp, Probe Sequence
gattcaaagaaggtacagtgctcca

SEQ ID NO: 241525 - DNA, 25 bp, Probe Sequence
gattcaagaactgtacaagctgccc

SEQ ID NO: 241526 - DNA, 25 bp, Probe Sequence
gattcaggagtcattagcagtgatg

SEQ ID NO: 241527 - DNA, 25 bp, Probe Sequence
gattctggagctctattaggagaaa

SEQ ID NO: 241528 - DNA, 25 bp, Probe Sequence
gatttagacttttctgatgcgcaaa

SEQ ID NO: 241529 - DNA, 25 bp, Probe Sequence
gatttcagttttctctggaatatat

SEQ ID NO: 241530 - DNA, 25 bp, Probe Sequence
gattccgtttgtatctgtaaatatt

SEQ ID NO: 241531 - DNA, 25 bp, Probe Sequence
gattcctcttttgatctgtaggaca

SEQ ID NO: 241532 - DNA, 25 bp, Probe Sequence
gattcctcctttgtgttgagtaaca

SEQ ID NO: 241533 - DNA, 25 bp, Probe Sequence
gattcttactaatatgttgaactaa

SEQ ID NO: 241534 - DNA, 25 bp, Probe Sequence
gattccttccaatagttagatctac

SEQ ID NO: 241535 - DNA, 25 bp, Probe Sequence
gattccgaaacataatatcaatttt

SEQ ID NO: 241536 - DNA, 25 bp, Probe Sequence
gttccgtgaccttagatgcagcatc

SEQ ID NO: 241537 - DNA, 25 bp, Probe Sequence
gattcactgatgtccttcagacaga

SEQ ID NO: 241538 - DNA, 25 bp, Probe Sequence
gattactgaactaaagaagcattga

SEQ ID NO: 241539 - DNA, 25 bp, Probe Sequence
ggtgattgaaattaaggccgtattt

SEQ ID NO: 241540 - DNA, 25 bp, Probe Sequence
gattcaaggcaattaaggctcgttt

SEQ ID NO: 241541 - DNA, 25 bp, Probe Sequence
gattagatgtgccaataaccaagtt

SEQ ID NO: 241542 - DNA, 25 bp, Probe Sequence
gattaatgagcttattagtcatagt

SEQ ID NO: 241543 - DNA, 25 bp, Probe Sequence
gattaactcgacaatatggccagct

SEQ ID NO: 241544 - DNA, 25 bp, Probe Sequence
gattcttctctcagattgggcagct

SEQ ID NO: 241545 - DNA, 25 bp, Probe Sequence
gattctgccccacattggcagtgcc

SEQ ID NO: 241546 - DNA, 25 bp, Probe Sequence
gattctccctcaggatatcctgaac

SEQ ID NO: 241547 - DNA, 25 bp, Probe Sequence
gattcttcctcattagatcattgga

SEQ ID NO: 241548 - DNA, 25 bp, Probe Sequence
gattttcctacaatgcatattaagt

SEQ ID NO: 241549 - DNA, 25 bp, Probe Sequence
gattttcccccttattgatgggact

SEQ ID NO: 241550 - DNA, 25 bp, Probe Sequence
gattttgaccccttattgattcatt

SEQ ID NO: 241551 - DNA, 25 bp, Probe Sequence
gattatatgtccacctatcttaagt

SEQ ID NO: 241552 - DNA, 25 bp, Probe Sequence
gattatatgtccacctatcttaagt

SEQ ID NO: 241553 - DNA, 25 bp, Probe Sequence
gattattccaagccttattttgagt

SEQ ID NO: 241554 - DNA, 25 bp, Probe Sequence
gattattccttgtctgtactttagt

SEQ ID NO: 241555 - DNA, 25 bp, Probe Sequence
gattattccttgtctgtactttagt

SEQ ID NO: 241556 - DNA, 25 bp, Probe Sequence
gattattcttggctgaacttcattt

SEQ ID NO: 241557 - DNA, 25 bp, Probe Sequence
gattccctgaggctactttattttg

SEQ ID NO: 241558 - DNA, 25 bp, Probe Sequence
gattaattatctctaccagtttttg

SEQ ID NO: 241559 - DNA, 25 bp, Probe Sequence
gattaatagactccattccagtaat

SEQ ID NO: 241560 - DNA, 25 bp, Probe Sequence
gatttacagagaacttacacttcat

SEQ ID NO: 241561 - DNA, 25 bp, Probe Sequence
gattttcagaatcttaactgtctac

SEQ ID NO: 241562 - DNA, 25 bp, Probe Sequence
gattcttgacagatttagtcgttcc

SEQ ID NO: 241563 - DNA, 25 bp, Probe Sequence
gattatctgacagggattagatgca

SEQ ID NO: 241564 - DNA, 25 bp, Probe Sequence
gattcatctagatggtgccatgaca

SEQ ID NO: 241565 - DNA, 25 bp, Probe Sequence
gattcatctagatggtgccatgaca

SEQ ID NO: 241566 - DNA, 25 bp, Probe Sequence
gattctgccatattggtccgacagt

SEQ ID NO: 241567 - DNA, 25 bp, Probe Sequence
gattccttcaggatacaatcagtga

SEQ ID NO: 241568 - DNA, 25 bp, Probe Sequence
gattccttgcaacaatcaatgagaa

SEQ ID NO: 241569 - DNA, 25 bp, Probe Sequence
gattccattacctcatatctcaaag

SEQ ID NO: 241570 - DNA, 25 bp, Probe Sequence
gattgtgattcagcctctactaaag

SEQ ID NO: 241571 - DNA, 25 bp, Probe Sequence
gattgtgattcagcctctactaaag

SEQ ID NO: 241572 - DNA, 25 bp, Probe Sequence
gattatgattcaccctctttggaga

SEQ ID NO: 241573 - DNA, 25 bp, Probe Sequence
gattcagtttcagtcttttggatat

SEQ ID NO: 241574 - DNA, 25 bp, Probe Sequence
gattacattatcagccctattgtca

SEQ ID NO: 241575 - DNA, 25 bp, Probe Sequence
gattacttatctggtaccatggtgc

SEQ ID NO: 241576 - DNA, 25 bp, Probe Sequence
gattatcttctatatcttcaggcgc

SEQ ID NO: 241577 - DNA, 25 bp, Probe Sequence
gatttttctacttcttcagtggatc

SEQ ID NO: 241578 - DNA, 25 bp, Probe Sequence
gattttgcctactctgtggtgaata

SEQ ID NO: 241579 - DNA, 25 bp, Probe Sequence
gattttttatcactattgtgtaaat

SEQ ID NO: 241580 - DNA, 25 bp, Probe Sequence
gatttagttagactttgagtacaca

SEQ ID NO: 241581 - DNA, 25 bp, Probe Sequence
gattttctaacagtttaaacacaat

SEQ ID NO: 241582 - DNA, 25 bp, Probe Sequence
gatttttcatgagccttacagacac

SEQ ID NO: 241583 - DNA, 25 bp, Probe Sequence
gattttctcagtggtctagaaaatc

SEQ ID NO: 241584 - DNA, 25 bp, Probe Sequence
gattgttgtcctgacatataaaaca

SEQ ID NO: 241585 - DNA, 25 bp, Probe Sequence
gattctggggctgtcttatgaaaat

SEQ ID NO: 241586 - DNA, 25 bp, Probe Sequence
gattctggggctgtcttatgaaaat

SEQ ID NO: 241587 - DNA, 25 bp, Probe Sequence
gattctgggggacctttagtcacaa

SEQ ID NO: 241588 - DNA, 25 bp, Probe Sequence
gattttggggtggtattcatgtgaa

SEQ ID NO: 241589 - DNA, 25 bp, Probe Sequence
gattttggaattttatgtcatgcta

SEQ ID NO: 241590 - DNA, 25 bp, Probe Sequence
gattctatggttccctcagtattac

SEQ ID NO: 241591 - DNA, 25 bp, Probe Sequence
gattctatagttatctggatttacc

SEQ ID NO: 241592 - DNA, 25 bp, Probe Sequence
gattttatcttcatgtggtctagac

SEQ ID NO: 241593 - DNA, 25 bp, Probe Sequence
gattcttccttcagtgacacagaac

SEQ ID NO: 241594 - DNA, 25 bp, Probe Sequence
gattgcggcctccatttatacagac

SEQ ID NO: 241595 - DNA, 25 bp, Probe Sequence
gttggacctccatagaagacaccgg

SEQ ID NO: 241596 - DNA, 25 bp, Probe Sequence
gttggaacccagattagaatccagg

SEQ ID NO: 241597 - DNA, 25 bp, Probe Sequence
gttgagaaactcactttagacaatg

SEQ ID NO: 241598 - DNA, 25 bp, Probe Sequence
gattctaaactctcctgaaaaggcc

SEQ ID NO: 241599 - DNA, 25 bp, Probe Sequence
gattctaaactctcctgaaaaggcc

SEQ ID NO: 241600 - DNA, 25 bp, Probe Sequence
gattctaaagtcctctctggtaaac

SEQ ID NO: 241601 - DNA, 25 bp, Probe Sequence
gattcagacgagtgtcgctgcgtga

SEQ ID NO: 241602 - DNA, 25 bp, Probe Sequence
gattcagcactaatttcctgctgtg

SEQ ID NO: 241603 - DNA, 25 bp, Probe Sequence
gattctactacaattcagtcattgg

SEQ ID NO: 241604 - DNA, 25 bp, Probe Sequence
gattccttgagcatgtggactgttg

SEQ ID NO: 241605 - DNA, 25 bp, Probe Sequence
gattccggcagcgatgaagatttcc

SEQ ID NO: 241606 - DNA, 25 bp, Probe Sequence
gattgccgcttggcttcaagtatcc

SEQ ID NO: 241607 - DNA, 25 bp, Probe Sequence
gattgcccattgaaatgccaggtcc

SEQ ID NO: 241608 - DNA, 25 bp, Probe Sequence
gattgccgtttcaattgtggaccgg

SEQ ID NO: 241609 - DNA, 25 bp, Probe Sequence
gattccgatttgacgggcaaccaat

SEQ ID NO: 241610 - DNA, 25 bp, Probe Sequence
gattccaatttcctggtaccgagat

SEQ ID NO: 241611 - DNA, 25 bp, Probe Sequence
gattcacattttgttgaaacagtaa

SEQ ID NO: 241612 - DNA, 25 bp, Probe Sequence
gattcctcttatgcggtgtgtagta

SEQ ID NO: 241613 - DNA, 25 bp, Probe Sequence
gattatccttgtactttgaggagaa

SEQ ID NO: 241614 - DNA, 25 bp, Probe Sequence
gattgctacctggactttcgttgac

SEQ ID NO: 241615 - DNA, 25 bp, Probe Sequence
gattgcacaagggacagtgccttta

SEQ ID NO: 241616 - DNA, 25 bp, Probe Sequence
gattccatcagctgaaaggctttaa

SEQ ID NO: 241617 - DNA, 25 bp, Probe Sequence
gattgtctctggcaaagactataat

SEQ ID NO: 241618 - DNA, 25 bp, Probe Sequence
gattgtctgtgaatgacaggccctg

SEQ ID NO: 241619 - DNA, 25 bp, Probe Sequence
gattgcctgctaggattgtgccatc

SEQ ID NO: 241620 - DNA, 25 bp, Probe Sequence
gttggcatgtcaaatgcatcctcta

SEQ ID NO: 241621 - DNA, 25 bp, Probe Sequence
gttggcatgtcaaatgcatcctcta

SEQ ID NO: 241622 - DNA, 25 bp, Probe Sequence
gattgagcgcgaacacctcattcag

SEQ ID NO: 241623 - DNA, 25 bp, Probe Sequence
gattgcagcggacatcccagaagtg

SEQ ID NO: 241624 - DNA, 25 bp, Probe Sequence
gattcaggatagttagccagctagg

SEQ ID NO: 241625 - DNA, 25 bp, Probe Sequence
gattaagagcagttgcagggctgag

SEQ ID NO: 241626 - DNA, 25 bp, Probe Sequence
gattatgaggaggttggtgtggatt

SEQ ID NO: 241627 - DNA, 25 bp, Probe Sequence
gattcagagcgaagttggcgggact

SEQ ID NO: 241628 - DNA, 25 bp, Probe Sequence
gattcagtgtgtggtggaggacgac

SEQ ID NO: 241629 - DNA, 25 bp, Probe Sequence
gattctggttggtgactgaggcagc

SEQ ID NO: 241630 - DNA, 25 bp, Probe Sequence
gattctgttagattagggaggcctt

SEQ ID NO: 241631 - DNA, 25 bp, Probe Sequence
gattctgtcataggcatagagagtt

SEQ ID NO: 241632 - DNA, 25 bp, Probe Sequence
gattcgctctagacttttgttggtc

SEQ ID NO: 241633 - DNA, 25 bp, Probe Sequence
gattccttcaactggctactgagtc

SEQ ID NO: 241634 - DNA, 25 bp, Probe Sequence
gattcctcatatccaaggctacttt

SEQ ID NO: 241635 - DNA, 25 bp, Probe Sequence
gattatcactcatcaatggctttat

SEQ ID NO: 241636 - DNA, 25 bp, Probe Sequence
gattaatcaaaggcatatcttctat

SEQ ID NO: 241637 - DNA, 25 bp, Probe Sequence
gattttctgtaggatatcatcattg

SEQ ID NO: 241638 - DNA, 25 bp, Probe Sequence
gattctagcaatagtgattccactc

SEQ ID NO: 241639 - DNA, 25 bp, Probe Sequence
gtttcacccgtgttaaccaggatgg

SEQ ID NO: 241640 - DNA, 25 bp, Probe Sequence
gttaacagcaggcttaaacccaggc

SEQ ID NO: 241641 - DNA, 25 bp, Probe Sequence
gattaacgggcagttataacaccat

SEQ ID NO: 241642 - DNA, 25 bp, Probe Sequence
gattgaaggcggtgtctaaacaagc

SEQ ID NO: 241643 - DNA, 25 bp, Probe Sequence
gattacagacggtgacataacacag

SEQ ID NO: 241644 - DNA, 25 bp, Probe Sequence
gttccatggcgttttgtaatcagag

SEQ ID NO: 241645 - DNA, 25 bp, Probe Sequence
gattcctgcgagttgctttcagtca

SEQ ID NO: 241646 - DNA, 25 bp, Probe Sequence
gattcaccagcacttgctcgtccat

SEQ ID NO: 241647 - DNA, 25 bp, Probe Sequence
gattcacgcaagtttcagtgtcaaa

SEQ ID NO: 241648 - DNA, 25 bp, Probe Sequence
gttctccaggagtttggtagaatcg

SEQ ID NO: 241649 - DNA, 25 bp, Probe Sequence
tggcctcccgttgctgggagaatct

SEQ ID NO: 241650 - DNA, 25 bp, Probe Sequence
tgcgtttcccctgtgaaagcttgat

SEQ ID NO: 241651 - DNA, 25 bp, Probe Sequence
gattattccccagctaagtcttatt

SEQ ID NO: 241652 - DNA, 25 bp, Probe Sequence
gattattatcctggcccacgatatt

SEQ ID NO: 241653 - DNA, 25 bp, Probe Sequence
gattgatctgatgttccttttattt

SEQ ID NO: 241654 - DNA, 25 bp, Probe Sequence
gttggcttgttttgacttaattcta

SEQ ID NO: 241655 - DNA, 25 bp, Probe Sequence
gttgggttttagatctcttttcatt

SEQ ID NO: 241656 - DNA, 25 bp, Probe Sequence
gttgggtttacgttttgtatatgat

SEQ ID NO: 241657 - DNA, 25 bp, Probe Sequence
gttggtgtgttaggtaaatcgggca

SEQ ID NO: 241658 - DNA, 25 bp, Probe Sequence
gttggttttcaggaggttcagggag

SEQ ID NO: 241659 - DNA, 25 bp, Probe Sequence
gattagtgtttatgagaggtagagg

SEQ ID NO: 241660 - DNA, 25 bp, Probe Sequence
gattatcttccaatagaggactaag

SEQ ID NO: 241661 - DNA, 25 bp, Probe Sequence
gattatcttcaggccaaagacataa

SEQ ID NO: 241662 - DNA, 25 bp, Probe Sequence
gattacatcctgggcctgaagatag

SEQ ID NO: 241663 - DNA, 25 bp, Probe Sequence
gattacatcctgggcctgaagatag

SEQ ID NO: 241664 - DNA, 25 bp, Probe Sequence
gattatgtttgctcttggaatgaac

SEQ ID NO: 241665 - DNA, 25 bp, Probe Sequence
gattatattctcttttgatgtatgt

SEQ ID NO: 241666 - DNA, 25 bp, Probe Sequence
gattatcttctccacatctgaaatt

SEQ ID NO: 241667 - DNA, 25 bp, Probe Sequence
gattcattatcccatctagagaaga

SEQ ID NO: 241668 - DNA, 25 bp, Probe Sequence
gattgctgtgcaacttccaacaagc

SEQ ID NO: 241669 - DNA, 25 bp, Probe Sequence
gattctggcttctactgaagaacca

SEQ ID NO: 241670 - DNA, 25 bp, Probe Sequence
gattcaggattctgtgctaatacaa

SEQ ID NO: 241671 - DNA, 25 bp, Probe Sequence
gattcagtattcttttatcataaat

SEQ ID NO: 241672 - DNA, 25 bp, Probe Sequence
gattacatcattattgttccaaatt

SEQ ID NO: 241673 - DNA, 25 bp, Probe Sequence
gattatccattcagttgatcctaat

SEQ ID NO: 241674 - DNA, 25 bp, Probe Sequence
gattctccactcagttgcaacttgg

SEQ ID NO: 241675 - DNA, 25 bp, Probe Sequence
gattccccatgcatgggaaagtgca

SEQ ID NO: 241676 - DNA, 25 bp, Probe Sequence
gattcacccagcagcactaggaaga

SEQ ID NO: 241677 - DNA, 25 bp, Probe Sequence
gattcattcaacataccagggagca

SEQ ID NO: 241678 - DNA, 25 bp, Probe Sequence
gattgctgttacataacaccccaaa

SEQ ID NO: 241679 - DNA, 25 bp, Probe Sequence
gattgcatctgggcttaaacccata

SEQ ID NO: 241680 - DNA, 25 bp, Probe Sequence
gattcttgcgccctagacaagctaa

SEQ ID NO: 241681 - DNA, 25 bp, Probe Sequence
gattctatgggaaatacacagctga

SEQ ID NO: 241682 - DNA, 25 bp, Probe Sequence
gattgctagattgctaaggagctga

SEQ ID NO: 241683 - DNA, 25 bp, Probe Sequence
gattcttgtgtcatcaagtagtagt

SEQ ID NO: 241684 - DNA, 25 bp, Probe Sequence
gattccgctatagtcagaaaatatg

SEQ ID NO: 241685 - DNA, 25 bp, Probe Sequence
gattccgtaagctgagaactctgga

SEQ ID NO: 241686 - DNA, 25 bp, Probe Sequence
gattccttagaataaacatcatctg

SEQ ID NO: 241687 - DNA, 25 bp, Probe Sequence
gattgcctgtggtaggaaaactgaa

SEQ ID NO: 241688 - DNA, 25 bp, Probe Sequence
gattacttgcacgggactggacatg

SEQ ID NO: 241689 - DNA, 25 bp, Probe Sequence
gattctgctacagtcaggacttact

SEQ ID NO: 241690 - DNA, 25 bp, Probe Sequence
gattctcagacattcttatccttct

SEQ ID NO: 241691 - DNA, 25 bp, Probe Sequence
gattcttacatctttataccattta

SEQ ID NO: 241692 - DNA, 25 bp, Probe Sequence
gattctggactctttgggatttata

SEQ ID NO: 241693 - DNA, 25 bp, Probe Sequence
gattctgggcaagcatgggttcttt

SEQ ID NO: 241694 - DNA, 25 bp, Probe Sequence
gattgccggagagtcagaagatttc

SEQ ID NO: 241695 - DNA, 25 bp, Probe Sequence
gattgccaggaagtaaaatagccac

SEQ ID NO: 241696 - DNA, 25 bp, Probe Sequence
gattcggagacagtatttaagcaca

SEQ ID NO: 241697 - DNA, 25 bp, Probe Sequence
gattctggacaacttcttgagtcta

SEQ ID NO: 241698 - DNA, 25 bp, Probe Sequence
gattagagaaatatgctatgagatt

SEQ ID NO: 241699 - DNA, 25 bp, Probe Sequence
gattctgagacatttcgcctgagat

SEQ ID NO: 241700 - DNA, 25 bp, Probe Sequence
gattctgagacatttcgcctgagat

SEQ ID NO: 241701 - DNA, 25 bp, Probe Sequence
gattcatgatgcaaattaactagat

SEQ ID NO: 241702 - DNA, 25 bp, Probe Sequence
gattctataaataaagctatattct

SEQ ID NO: 241703 - DNA, 25 bp, Probe Sequence
gattaccgagtaaacatatgacatt

SEQ ID NO: 241704 - DNA, 25 bp, Probe Sequence
gttgaccgagctggagaaagccttg

SEQ ID NO: 241705 - DNA, 25 bp, Probe Sequence
gattcctctacttagagaccactta

SEQ ID NO: 241706 - DNA, 25 bp, Probe Sequence
gattacgcaacagtaaatccttaca

SEQ ID NO: 241707 - DNA, 25 bp, Probe Sequence
gattactacaaccacaacctggaca

SEQ ID NO: 241708 - DNA, 25 bp, Probe Sequence
gattatcgccaataaacctgaggcc

SEQ ID NO: 241709 - DNA, 25 bp, Probe Sequence
gttatcatccaagactactctaccc

SEQ ID NO: 241710 - DNA, 25 bp, Probe Sequence
gattatcaccaagccaaacatcatc

SEQ ID NO: 241711 - DNA, 25 bp, Probe Sequence
gattaacacatgctcacaaccatcc

SEQ ID NO: 241712 - DNA, 25 bp, Probe Sequence
gattatgaaatgcacgacaccctgg

SEQ ID NO: 241713 - DNA, 25 bp, Probe Sequence
gattcagagaagttcttcaggcctg

SEQ ID NO: 241714 - DNA, 25 bp, Probe Sequence
gattcaaagagattcctgcaggcca

SEQ ID NO: 241715 - DNA, 25 bp, Probe Sequence
gattcgcatagattctccagagtcc

SEQ ID NO: 241716 - DNA, 25 bp, Probe Sequence
gattccatatgattcactcattgta

SEQ ID NO: 241717 - DNA, 25 bp, Probe Sequence
gattcacattaaactctgtgccatg

SEQ ID NO: 241718 - DNA, 25 bp, Probe Sequence
gattccatgttttgtgctggtgctg

SEQ ID NO: 241719 - DNA, 25 bp, Probe Sequence
gattcctggcttagagcatgcgagc

SEQ ID NO: 241720 - DNA, 25 bp, Probe Sequence
gattcctttctgaagcatcaggcca

SEQ ID NO: 241721 - DNA, 25 bp, Probe Sequence
gttgcagtgttcatagtcaggcgtt

SEQ ID NO: 241722 - DNA, 25 bp, Probe Sequence
gttggtttattacttgggtgtcaca

SEQ ID NO: 241723 - DNA, 25 bp, Probe Sequence
gttaggcgtgtacgttgggagttca

SEQ ID NO: 241724 - DNA, 25 bp, Probe Sequence
gttgcgggtgttatggggacttgct

SEQ ID NO: 241725 - DNA, 25 bp, Probe Sequence
gttgaggggaacaggggacatagct

SEQ ID NO: 241726 - DNA, 25 bp, Probe Sequence
gtgggagggaacttgggtcccagca

SEQ ID NO: 241727 - DNA, 25 bp, Probe Sequence
gtcggcagaaaactcgaagtaccaa

SEQ ID NO: 241728 - DNA, 25 bp, Probe Sequence
gtgcgtgggggacccagagattaaa

SEQ ID NO: 241729 - DNA, 25 bp, Probe Sequence
gtaggaggaagagctcaggtggaaa

SEQ ID NO: 241730 - DNA, 25 bp, Probe Sequence
gtaggggaaccctcgtgggagatat

SEQ ID NO: 241731 - DNA, 25 bp, Probe Sequence
tgtgccgggaacacccggagggact

SEQ ID NO: 241732 - DNA, 25 bp, Probe Sequence
tgtgccgggaacacccggagggact

SEQ ID NO: 241733 - DNA, 25 bp, Probe Sequence
tcatactggtgaacaacccgtaatg

SEQ ID NO: 241734 - DNA, 25 bp, Probe Sequence
gattctggagaagatcccgctacat

SEQ ID NO: 241735 - DNA, 25 bp, Probe Sequence
gattctgtcagtaaatttgagcata

SEQ ID NO: 241736 - DNA, 25 bp, Probe Sequence
gattctattgttcagttgtgatcaa

SEQ ID NO: 241737 - DNA, 25 bp, Probe Sequence
gattatgtgtgtccgatgttttcaa

SEQ ID NO: 241738 - DNA, 25 bp, Probe Sequence
gattatctttcccagtgtcaacagg

SEQ ID NO: 241739 - DNA, 25 bp, Probe Sequence
gattatacttctgagctgctaccac

SEQ ID NO: 241740 - DNA, 25 bp, Probe Sequence
gattataaccttaatgtgacacctg

SEQ ID NO: 241741 - DNA, 25 bp, Probe Sequence
gattattcacaccgatagcaacacc

SEQ ID NO: 241742 - DNA, 25 bp, Probe Sequence
gattactcaagcagacagcacacga

SEQ ID NO: 241743 - DNA, 25 bp, Probe Sequence
gattctgtaatgagcacagcaccta

SEQ ID NO: 241744 - DNA, 25 bp, Probe Sequence
gattattaatgcatgcccactgaat

SEQ ID NO: 241745 - DNA, 25 bp, Probe Sequence
gattatgaagtggctcctcctgagt

SEQ ID NO: 241746 - DNA, 25 bp, Probe Sequence
gattctatgagggccctgagctggt

SEQ ID NO: 241747 - DNA, 25 bp, Probe Sequence
gattctatgagggccctgagctggt

SEQ ID NO: 241748 - DNA, 25 bp, Probe Sequence
gattctatgagggccctgagctggt

SEQ ID NO: 241749 - DNA, 25 bp, Probe Sequence
gattgcggagggcaagctgctggtc

SEQ ID NO: 241750 - DNA, 25 bp, Probe Sequence
gattggcagacccaggtgcagtggc

SEQ ID NO: 241751 - DNA, 25 bp, Probe Sequence
gattggcaagcaggagggccgaaat

SEQ ID NO: 241752 - DNA, 25 bp, Probe Sequence
gttcatgaagccggggaccctgtac

SEQ ID NO: 241753 - DNA, 25 bp, Probe Sequence
gttggaagggcatcatgacctcttg

SEQ ID NO: 241754 - DNA, 25 bp, Probe Sequence
gttgtgccagtgcttaggctttgga

SEQ ID NO: 241755 - DNA, 25 bp, Probe Sequence
gttgtgccagtgcttaggctttgga

SEQ ID NO: 241756 - DNA, 25 bp, Probe Sequence
gttgtgccagtgcttaggctttgga

SEQ ID NO: 241757 - DNA, 25 bp, Probe Sequence
gttgctctggggatgggtttattta

SEQ ID NO: 241758 - DNA, 25 bp, Probe Sequence
gattctgtggggactgtggacttca

SEQ ID NO: 241759 - DNA, 25 bp, Probe Sequence
gattctgggctggactgtgggatct

SEQ ID NO: 241760 - DNA, 25 bp, Probe Sequence
gattcgtctgtgtcctattgagttt

SEQ ID NO: 241761 - DNA, 25 bp, Probe Sequence
gattctcttggctcatatttctttt

SEQ ID NO: 241762 - DNA, 25 bp, Probe Sequence
gattacagtgggggcatttctttat

SEQ ID NO: 241763 - DNA, 25 bp, Probe Sequence
gattaaatagatcacatttgcttct

SEQ ID NO: 241764 - DNA, 25 bp, Probe Sequence
gattcaattatactgcacatgtttt

SEQ ID NO: 241765 - DNA, 25 bp, Probe Sequence
gattgctgctattgacagaaatgtc

SEQ ID NO: 241766 - DNA, 25 bp, Probe Sequence
gattctctgactgtgaagatcatcc

SEQ ID NO: 241767 - DNA, 25 bp, Probe Sequence
gattctctggtcattgagcatatcc

SEQ ID NO: 241768 - DNA, 25 bp, Probe Sequence
gattgctgctggacttgttgacgac

SEQ ID NO: 241769 - DNA, 25 bp, Probe Sequence
gattgctgtcatctgtgtggtggtc

SEQ ID NO: 241770 - DNA, 25 bp, Probe Sequence
gttggccatgtcttcatcagtggct

SEQ ID NO: 241771 - DNA, 25 bp, Probe Sequence
gattggcccatggtgccaggttagt

SEQ ID NO: 241772 - DNA, 25 bp, Probe Sequence
gttggccttgggaatagttggctgc

SEQ ID NO: 241773 - DNA, 25 bp, Probe Sequence
gttgggattgggggctggtgccagc

SEQ ID NO: 241774 - DNA, 25 bp, Probe Sequence
gttggagttgtggagacggccttga

SEQ ID NO: 241775 - DNA, 25 bp, Probe Sequence
gattgaaagtgtggagacaggcctg

SEQ ID NO: 241776 - DNA, 25 bp, Probe Sequence
gattacaggcgtgagccagcatgcc

SEQ ID NO: 241777 - DNA, 25 bp, Probe Sequence
gattacaggcgtgagccactgcacc

SEQ ID NO: 241778 - DNA, 25 bp, Probe Sequence
gattacaggcgtgagccactgcgcc

SEQ ID NO: 241779 - DNA, 25 bp, Probe Sequence
gattacaggcgtgaaccactgcacc

SEQ ID NO: 241780 - DNA, 25 bp, Probe Sequence
gattggattgcctcaaagactgccc

SEQ ID NO: 241781 - DNA, 25 bp, Probe Sequence
gttggtcccattaagcaactaccag

SEQ ID NO: 241782 - DNA, 25 bp, Probe Sequence
gttggttaataaacagtacctgctc

SEQ ID NO: 241783 - DNA, 25 bp, Probe Sequence
gttgttataaaactatacccactgc

SEQ ID NO: 241784 - DNA, 25 bp, Probe Sequence
gttgttaagcactgtgttccagacc

SEQ ID NO: 241785 - DNA, 25 bp, Probe Sequence
gtatggggagttctttccagtgccc

SEQ ID NO: 241786 - DNA, 25 bp, Probe Sequence
gttgggaggtggaggcccagcatcc

SEQ ID NO: 241787 - DNA, 25 bp, Probe Sequence
gttgtggtgagtcgggatcccgtca

SEQ ID NO: 241788 - DNA, 25 bp, Probe Sequence
gttggacgaatccgtgtccgagtct

SEQ ID NO: 241789 - DNA, 25 bp, Probe Sequence
gtcggcaggaatgtttctgggtcat

SEQ ID NO: 241790 - DNA, 25 bp, Probe Sequence
gttggcggaaaggtgtctgtgagga

SEQ ID NO: 241791 - DNA, 25 bp, Probe Sequence
gttggcgtagatttggcttctggta

SEQ ID NO: 241792 - DNA, 25 bp, Probe Sequence
gattgacagatggttgtagtaacaa

SEQ ID NO: 241793 - DNA, 25 bp, Probe Sequence
gattacaatggctattagtgctaca

SEQ ID NO: 241794 - DNA, 25 bp, Probe Sequence
gattacatgacctgtgactgtatca

SEQ ID NO: 241795 - DNA, 25 bp, Probe Sequence
gattcctgtccattggactgtaagg

SEQ ID NO: 241796 - DNA, 25 bp, Probe Sequence
gattctttccattgtgagtgcttga

SEQ ID NO: 241797 - DNA, 25 bp, Probe Sequence
gattctttactactggatttgctat

SEQ ID NO: 241798 - DNA, 25 bp, Probe Sequence
gattcttattgcacttgtatttttt

SEQ ID NO: 241799 - DNA, 25 bp, Probe Sequence
gattctatagttgtattattgttgt

SEQ ID NO: 241800 - DNA, 25 bp, Probe Sequence
gattctgaaggtgctaccattattt

SEQ ID NO: 241801 - DNA, 25 bp, Probe Sequence
gtgggaggtgctgaaccttttctgg

SEQ ID NO: 241802 - DNA, 25 bp, Probe Sequence
gttggggctaaagcaggtcttcatg

SEQ ID NO: 241803 - DNA, 25 bp, Probe Sequence
gtcggtggggaagacttgcctcatt

SEQ ID NO: 241804 - DNA, 25 bp, Probe Sequence
gtagagggggaatatcgagcaattt

SEQ ID NO: 241805 - DNA, 25 bp, Probe Sequence
gtataggtcggaaacaactaataat

SEQ ID NO: 241806 - DNA, 25 bp, Probe Sequence
gtaacccgagaatacaccatcaaca

SEQ ID NO: 241807 - DNA, 25 bp, Probe Sequence
gtagaacactaaatccccacaaaat

SEQ ID NO: 241808 - DNA, 25 bp, Probe Sequence
gtctgaccaaacacaccaagttcgt

SEQ ID NO: 241809 - DNA, 25 bp, Probe Sequence
gattaccaaattagcccaggcgtgg

SEQ ID NO: 241810 - DNA, 25 bp, Probe Sequence
gattcgaaattctgtgccatggcgt

SEQ ID NO: 241811 - DNA, 25 bp, Probe Sequence
gattaatagaaaggggcatggctgt

SEQ ID NO: 241812 - DNA, 25 bp, Probe Sequence
gattcaatgcgagacaagattggcg

SEQ ID NO: 241813 - DNA, 25 bp, Probe Sequence
gattcaatggactcatccatttgtg

SEQ ID NO: 241814 - DNA, 25 bp, Probe Sequence
gattcacatgtactcttttctttgg

SEQ ID NO: 241815 - DNA, 25 bp, Probe Sequence
gattcgctgtcagtttttcacttat

SEQ ID NO: 241816 - DNA, 25 bp, Probe Sequence
gattcctgctacaactatagtgctt

SEQ ID NO: 241817 - DNA, 25 bp, Probe Sequence
gattcacgctcgttcaatgagtgtt

SEQ ID NO: 241818 - DNA, 25 bp, Probe Sequence
gattcagcagcttggtcacttgatt

SEQ ID NO: 241819 - DNA, 25 bp, Probe Sequence
gattcagaggatgacagttgcaagt

SEQ ID NO: 241820 - DNA, 25 bp, Probe Sequence
gattagatggtgcacatgccccaga

SEQ ID NO: 241821 - DNA, 25 bp, Probe Sequence
gattgaagaggttctgactccagag

SEQ ID NO: 241822 - DNA, 25 bp, Probe Sequence
gattgcagaaggtacagagcctccg

SEQ ID NO: 241823 - DNA, 25 bp, Probe Sequence
gattgcagaaggtacagagcctccg

SEQ ID NO: 241824 - DNA, 25 bp, Probe Sequence
gattcagtgagtgaaaccatcccgg

SEQ ID NO: 241825 - DNA, 25 bp, Probe Sequence
gttggtaattaatccattcctggca

SEQ ID NO: 241826 - DNA, 25 bp, Probe Sequence
gttggtcgattaggacacattctcg

SEQ ID NO: 241827 - DNA, 25 bp, Probe Sequence
gttggtcgaagcggccgaccactga

SEQ ID NO: 241828 - DNA, 25 bp, Probe Sequence
gattcagtggcatcggccaaccaga

SEQ ID NO: 241829 - DNA, 25 bp, Probe Sequence
gattccagtgcagtagtgccaaaag

SEQ ID NO: 241830 - DNA, 25 bp, Probe Sequence
gattcagattgaggagcatgccata

SEQ ID NO: 241831 - DNA, 25 bp, Probe Sequence
gattgagtgccaggtgcatccaaga

SEQ ID NO: 241832 - DNA, 25 bp, Probe Sequence
gttggctcacagggctgaaaggggc

SEQ ID NO: 241833 - DNA, 25 bp, Probe Sequence
gattgggacagccgtgggaaggaca

SEQ ID NO: 241834 - DNA, 25 bp, Probe Sequence
gattgttgccaacatgacagaatgg

SEQ ID NO: 241835 - DNA, 25 bp, Probe Sequence
gttggtgcatattagtataactgtg

SEQ ID NO: 241836 - DNA, 25 bp, Probe Sequence
gttggtgggcaagtcatagaagtcg

SEQ ID NO: 241837 - DNA, 25 bp, Probe Sequence
gttggggagcaatttggtagttgta

SEQ ID NO: 241838 - DNA, 25 bp, Probe Sequence
gttgggaaaatatggctcctcctta

SEQ ID NO: 241839 - DNA, 25 bp, Probe Sequence
gttgggtaagactttgaacaagctt

SEQ ID NO: 241840 - DNA, 25 bp, Probe Sequence
gttctggtcaaatgcctgaaatttt

SEQ ID NO: 241841 - DNA, 25 bp, Probe Sequence
gttgatgttaaggccctccattttg

SEQ ID NO: 241842 - DNA, 25 bp, Probe Sequence
ggtgattctgggggacctttagtca

SEQ ID NO: 241843 - DNA, 25 bp, Probe Sequence
gttgagtcttggggcactttctaac

SEQ ID NO: 241844 - DNA, 25 bp, Probe Sequence
gattactttggcaagcttgaatcta

SEQ ID NO: 241845 - DNA, 25 bp, Probe Sequence
gattactctttggcagtggtcttcc

SEQ ID NO: 241846 - DNA, 25 bp, Probe Sequence
gattgatcttttgcgggtgattcat

SEQ ID NO: 241847 - DNA, 25 bp, Probe Sequence
gattgacttggtgtgtgagcttgca

SEQ ID NO: 241848 - DNA, 25 bp, Probe Sequence
gattgatttggtggtcgtgcatatt

SEQ ID NO: 241849 - DNA, 25 bp, Probe Sequence
gattgatttacctttggaattgtgc

SEQ ID NO: 241850 - DNA, 25 bp, Probe Sequence
gattgttgtaggattaaatgattgg

SEQ ID NO: 241851 - DNA, 25 bp, Probe Sequence
gattcttgtgatgaattcaatgcta

SEQ ID NO: 241852 - DNA, 25 bp, Probe Sequence
gattctggctgagagacgcaagccg

SEQ ID NO: 241853 - DNA, 25 bp, Probe Sequence
gattctggcattgagactgacagtg

SEQ ID NO: 241854 - DNA, 25 bp, Probe Sequence
gattgtagatactagtccctgtgtc

SEQ ID NO: 241855 - DNA, 25 bp, Probe Sequence
gattctaatctctgttccagtttcc

SEQ ID NO: 241856 - DNA, 25 bp, Probe Sequence
gattctcaattgttatgtccactta

SEQ ID NO: 241857 - DNA, 25 bp, Probe Sequence
gattccagctttgatgttcacaaga

SEQ ID NO: 241858 - DNA, 25 bp, Probe Sequence
gattccagctttgatgttcacaaga

SEQ ID NO: 241859 - DNA, 25 bp, Probe Sequence
gattccagtggtgacttcactgata

SEQ ID NO: 241860 - DNA, 25 bp, Probe Sequence
gattccagtggtgacttcactgata

SEQ ID NO: 241861 - DNA, 25 bp, Probe Sequence
gattccgtttctactcctctgacga

SEQ ID NO: 241862 - DNA, 25 bp, Probe Sequence
gttgtcgttttaacatctccacgtc

SEQ ID NO: 241863 - DNA, 25 bp, Probe Sequence
gttgttttctctaacagtccacata

SEQ ID NO: 241864 - DNA, 25 bp, Probe Sequence
gattgtgtctcctttacaaccaatg

SEQ ID NO: 241865 - DNA, 25 bp, Probe Sequence
gattcttgctaatttccaaccatat

SEQ ID NO: 241866 - DNA, 25 bp, Probe Sequence
gattcttctaaatcagccagcaaga

SEQ ID NO: 241867 - DNA, 25 bp, Probe Sequence
gattccattggcttacatcgagtag

SEQ ID NO: 241868 - DNA, 25 bp, Probe Sequence
gattctttgttaacatccgtagatt

SEQ ID NO: 241869 - DNA, 25 bp, Probe Sequence
gattcttttatcaattaggttattt

SEQ ID NO: 241870 - DNA, 25 bp, Probe Sequence
gattctttcttaaaagtttctaatg

SEQ ID NO: 241871 - DNA, 25 bp, Probe Sequence
gattctttcttttcgactttatact

SEQ ID NO: 241872 - DNA, 25 bp, Probe Sequence
gattcttgtctaacttcaatttcaa

SEQ ID NO: 241873 - DNA, 25 bp, Probe Sequence
gattctcttgtttctaatagttgca

SEQ ID NO: 241874 - DNA, 25 bp, Probe Sequence
gattctatcttttataattctggag

SEQ ID NO: 241875 - DNA, 25 bp, Probe Sequence
gattctgagcttcacataatatctt

SEQ ID NO: 241876 - DNA, 25 bp, Probe Sequence
gattcagcaattcaatcacatcact

SEQ ID NO: 241877 - DNA, 25 bp, Probe Sequence
gattcacatatcatggcagcaaagc

SEQ ID NO: 241878 - DNA, 25 bp, Probe Sequence
gattcagctagtggccaagagatgc

SEQ ID NO: 241879 - DNA, 25 bp, Probe Sequence
gattccaagatccatcaaggagcaa

SEQ ID NO: 241880 - DNA, 25 bp, Probe Sequence
gattacagagatctcagaggttatg

SEQ ID NO: 241881 - DNA, 25 bp, Probe Sequence
gattacagaggtaagaagtcctgga

SEQ ID NO: 241882 - DNA, 25 bp, Probe Sequence
gattacaagggccagaagctagctg

SEQ ID NO: 241883 - DNA, 25 bp, Probe Sequence
gattccacagaaccacaagagactt

SEQ ID NO: 241884 - DNA, 25 bp, Probe Sequence
gttcccgtagtcgcaaatcttacag

SEQ ID NO: 241885 - DNA, 25 bp, Probe Sequence
gattcgggttttggccaagttacag

SEQ ID NO: 241886 - DNA, 25 bp, Probe Sequence
gattcagcaggtgttgcaaaattct

SEQ ID NO: 241887 - DNA, 25 bp, Probe Sequence
gattccattccattctagaaatttg

SEQ ID NO: 241888 - DNA, 25 bp, Probe Sequence
gattccattccattctagaaatttg

SEQ ID NO: 241889 - DNA, 25 bp, Probe Sequence
gattcctatctcgttcaaatttttg

SEQ ID NO: 241890 - DNA, 25 bp, Probe Sequence
gattcccattaggctcatcatactg

SEQ ID NO: 241891 - DNA, 25 bp, Probe Sequence
gattctctcatcaaggctacaattg

SEQ ID NO: 241892 - DNA, 25 bp, Probe Sequence
gattcacagatcaaggcttcagagt

SEQ ID NO: 241893 - DNA, 25 bp, Probe Sequence
gattgacgacaagtgctgaacagtg

SEQ ID NO: 241894 - DNA, 25 bp, Probe Sequence
gattgcacaggatgctctgtaatgg

SEQ ID NO: 241895 - DNA, 25 bp, Probe Sequence
gattgcacttgcactttaatgagtc

SEQ ID NO: 241896 - DNA, 25 bp, Probe Sequence
gattgccttgttattactaggtttt

SEQ ID NO: 241897 - DNA, 25 bp, Probe Sequence
gattcaagtttcctaagctcagagt

SEQ ID NO: 241898 - DNA, 25 bp, Probe Sequence
gattaacttctataaacagtgttgg

SEQ ID NO: 241899 - DNA, 25 bp, Probe Sequence
gttgggctttcacaaaaggcatctg

SEQ ID NO: 241900 - DNA, 25 bp, Probe Sequence
gttggatgcctttccgaaggttcct

SEQ ID NO: 241901 - DNA, 25 bp, Probe Sequence
gtttcagtcatattgcggcatagtg

SEQ ID NO: 241902 - DNA, 25 bp, Probe Sequence
gattgtcacaatctgatctgcataa

SEQ ID NO: 241903 - DNA, 25 bp, Probe Sequence
gattgctcaacatgcataacttgaa

SEQ ID NO: 241904 - DNA, 25 bp, Probe Sequence
gttgtcaacgacatcacatctgaag

SEQ ID NO: 241905 - DNA, 25 bp, Probe Sequence
gttggaagctccacatgtccatgga

SEQ ID NO: 241906 - DNA, 25 bp, Probe Sequence
gttggagacccaatcagttcactca

SEQ ID NO: 241907 - DNA, 25 bp, Probe Sequence
gttggagacacggatttcttcctga

SEQ ID NO: 241908 - DNA, 25 bp, Probe Sequence
gttggcagaaaggatgttttgtccc

SEQ ID NO: 241909 - DNA, 25 bp, Probe Sequence
gattgggaaccagctgtatttgttc

SEQ ID NO: 241910 - DNA, 25 bp, Probe Sequence
tcatcgggactatttcgtacttggt

SEQ ID NO: 241911 - DNA, 25 bp, Probe Sequence
tgactgggacttgtgggacgtggga

SEQ ID NO: 241912 - DNA, 25 bp, Probe Sequence
gtcgtatacctgaggtgcaccggag

SEQ ID NO: 241913 - DNA, 25 bp, Probe Sequence
tgtcttaatcgatctggtaggggag

SEQ ID NO: 241914 - DNA, 25 bp, Probe Sequence
gtttgcaacgaccgtctggggaaga

SEQ ID NO: 241915 - DNA, 25 bp, Probe Sequence
gtttccacaatgtgagggggaacca

SEQ ID NO: 241916 - DNA, 25 bp, Probe Sequence
gtactccacaaacatgggtggtaac

SEQ ID NO: 241917 - DNA, 25 bp, Probe Sequence
gttgcccttaagtacagtggtgtaa

SEQ ID NO: 241918 - DNA, 25 bp, Probe Sequence
gattccttttattgatgaatggtgt

SEQ ID NO: 241919 - DNA, 25 bp, Probe Sequence
gattcacactagcaggatgagggtg

SEQ ID NO: 241920 - DNA, 25 bp, Probe Sequence
gattcatgctctgggcgggatggag

SEQ ID NO: 241921 - DNA, 25 bp, Probe Sequence
gattcagtcttgacggtgaatggaa

SEQ ID NO: 241922 - DNA, 25 bp, Probe Sequence
gattcactctgtgaccgcatatgtg

SEQ ID NO: 241923 - DNA, 25 bp, Probe Sequence
gattcagtgtggtacccatccattc

SEQ ID NO: 241924 - DNA, 25 bp, Probe Sequence
gattctggtgtggacacagtccttg

SEQ ID NO: 241925 - DNA, 25 bp, Probe Sequence
gattctatattgtaatgatgtccta

SEQ ID NO: 241926 - DNA, 25 bp, Probe Sequence
gattgcttatgtcattagtgcctca

SEQ ID NO: 241927 - DNA, 25 bp, Probe Sequence
gattgcttacatcgctgttggatcc

SEQ ID NO: 241928 - DNA, 25 bp, Probe Sequence
gattgcttaattctgcaggacacat

SEQ ID NO: 241929 - DNA, 25 bp, Probe Sequence
gttggctaaccattggggccttaca

SEQ ID NO: 241930 - DNA, 25 bp, Probe Sequence
gttggtttgaagtgatagcctttca

SEQ ID NO: 241931 - DNA, 25 bp, Probe Sequence
gttgggttgaattccaacctggaag

SEQ ID NO: 241932 - DNA, 25 bp, Probe Sequence
gttggggacaagaccacatttgtaa

SEQ ID NO: 241933 - DNA, 25 bp, Probe Sequence
gattgtaaatcatacctattttaaa

SEQ ID NO: 241934 - DNA, 25 bp, Probe Sequence
gattctggaatataactttgtgtaa

SEQ ID NO: 241935 - DNA, 25 bp, Probe Sequence
gattcatggaattgagccaatgttg

SEQ ID NO: 241936 - DNA, 25 bp, Probe Sequence
gattctgtataattcactattcatg

SEQ ID NO: 241937 - DNA, 25 bp, Probe Sequence
gattcttgcacatgaactgtcacat

SEQ ID NO: 241938 - DNA, 25 bp, Probe Sequence
gattgtccccaaagcagtacatcat

SEQ ID NO: 241939 - DNA, 25 bp, Probe Sequence
gattgcagctaccagaggcagtaca

SEQ ID NO: 241940 - DNA, 25 bp, Probe Sequence
gattgagctacgaggaccaaggcaa

SEQ ID NO: 241941 - DNA, 25 bp, Probe Sequence
gattgtatactgagtgtccaaacac

SEQ ID NO: 241942 - DNA, 25 bp, Probe Sequence
gattgttgactaggaggttaccacc

SEQ ID NO: 241943 - DNA, 25 bp, Probe Sequence
gattgtcagggaggtgccagttaca

SEQ ID NO: 241944 - DNA, 25 bp, Probe Sequence
gattgggggctggtgccagccttcc

SEQ ID NO: 241945 - DNA, 25 bp, Probe Sequence
gattgggggacaatgtgcccttgca

SEQ ID NO: 241946 - DNA, 25 bp, Probe Sequence
gattgaacgtgagattgcccattga

SEQ ID NO: 241947 - DNA, 25 bp, Probe Sequence
gttgaatccggggtgcctttaggat

SEQ ID NO: 241948 - DNA, 25 bp, Probe Sequence
gtagggccgaggttacatttggaga

SEQ ID NO: 241949 - DNA, 25 bp, Probe Sequence
gtaggcgatcgagccttcttagaca

SEQ ID NO: 241950 - DNA, 25 bp, Probe Sequence
gttggaatcgaagcctcttaaaatg

SEQ ID NO: 241951 - DNA, 25 bp, Probe Sequence
gtctggaataaagccccctagttgc

SEQ ID NO: 241952 - DNA, 25 bp, Probe Sequence
gttgtgaaataaaccgctccttgcc

SEQ ID NO: 241953 - DNA, 25 bp, Probe Sequence
gattgaaaattaacctctgagggcc

SEQ ID NO: 241954 - DNA, 25 bp, Probe Sequence
gttgaagactttgccgcagtaggtc

SEQ ID NO: 241955 - DNA, 25 bp, Probe Sequence
gttttagcctctggcccaggagtta

SEQ ID NO: 241956 - DNA, 25 bp, Probe Sequence
gttcttggctccagacctggaatcc

SEQ ID NO: 241957 - DNA, 25 bp, Probe Sequence
gttcttggctccagacctggaatcc

SEQ ID NO: 241958 - DNA, 25 bp, Probe Sequence
gattgagtacccagcacgaggaatc

SEQ ID NO: 241959 - DNA, 25 bp, Probe Sequence
gattgatgaacctattgaagaagag

SEQ ID NO: 241960 - DNA, 25 bp, Probe Sequence
gattgctgtagctctcacagggaag

SEQ ID NO: 241961 - DNA, 25 bp, Probe Sequence
gattctgtagcaaaacctgggtggg

SEQ ID NO: 241962 - DNA, 25 bp, Probe Sequence
gattggccagcaaaaactgtgggaa

SEQ ID NO: 241963 - DNA, 25 bp, Probe Sequence
gattggccagcaaaaactgtgggaa

SEQ ID NO: 241964 - DNA, 25 bp, Probe Sequence
gattggccagcaaaaactgtgggaa

SEQ ID NO: 241965 - DNA, 25 bp, Probe Sequence
gttcgacacagtggagaccatggga

SEQ ID NO: 241966 - DNA, 25 bp, Probe Sequence
gattcaaccagctgcaaacagggaa

SEQ ID NO: 241967 - DNA, 25 bp, Probe Sequence
gattcctccagctacaagcacaatg

SEQ ID NO: 241968 - DNA, 25 bp, Probe Sequence
gattcccctggattatgcaaagaaa

SEQ ID NO: 241969 - DNA, 25 bp, Probe Sequence
gattctccatcaggaattcacagac

SEQ ID NO: 241970 - DNA, 25 bp, Probe Sequence
gattgtccagggtgtccatgagctc

SEQ ID NO: 241971 - DNA, 25 bp, Probe Sequence
gattgtccagggtgtccatgagctc

SEQ ID NO: 241972 - DNA, 25 bp, Probe Sequence
gttggcggcttgtgcagcaatggcc

SEQ ID NO: 241973 - DNA, 25 bp, Probe Sequence
gattcgagcctttgtgaaatgcacc

SEQ ID NO: 241974 - DNA, 25 bp, Probe Sequence
gattcggcctgatggagagaagaag

SEQ ID NO: 241975 - DNA, 25 bp, Probe Sequence
gattcagctcgctgaggaagaggga

SEQ ID NO: 241976 - DNA, 25 bp, Probe Sequence
gattcagctacttgaggtcggtaac

SEQ ID NO: 241977 - DNA, 25 bp, Probe Sequence
gattcgctgacttccttggttaagc

SEQ ID NO: 241978 - DNA, 25 bp, Probe Sequence
gattgctgtccttgccattggacta

SEQ ID NO: 241979 - DNA, 25 bp, Probe Sequence
gattcttgcagtttgcattgcagtc

SEQ ID NO: 241980 - DNA, 25 bp, Probe Sequence
gattcttgcatgagcttccagtgta

SEQ ID NO: 241981 - DNA, 25 bp, Probe Sequence
gattctctgtacgcccagggaaagc

SEQ ID NO: 241982 - DNA, 25 bp, Probe Sequence
gattctgtgatctcactctcaggag

SEQ ID NO: 241983 - DNA, 25 bp, Probe Sequence
gattctcttaattctgtgcaggcag

SEQ ID NO: 241984 - DNA, 25 bp, Probe Sequence
gattctcagttttgctggaggccgc

SEQ ID NO: 241985 - DNA, 25 bp, Probe Sequence
gattcacgtatccatctggagacct

SEQ ID NO: 241986 - DNA, 25 bp, Probe Sequence
gattcatcacagaccctgtggtcct

SEQ ID NO: 241987 - DNA, 25 bp, Probe Sequence
gattcatccagcacttggacctgat

SEQ ID NO: 241988 - DNA, 25 bp, Probe Sequence
gattcatgccaaattattacctatt

SEQ ID NO: 241989 - DNA, 25 bp, Probe Sequence
gattctcccaatgttatgactactt

SEQ ID NO: 241990 - DNA, 25 bp, Probe Sequence
gattccctaatatgtatactatctt

SEQ ID NO: 241991 - DNA, 25 bp, Probe Sequence
gattcagaataaacttataacatct

SEQ ID NO: 241992 - DNA, 25 bp, Probe Sequence
gttgcacttaaccttgtaactttgt

SEQ ID NO: 241993 - DNA, 25 bp, Probe Sequence
gattgatgtagccccggtaggtttg

SEQ ID NO: 241994 - DNA, 25 bp, Probe Sequence
gattgatgatcactccgtggataga

SEQ ID NO: 241995 - DNA, 25 bp, Probe Sequence
gattcagatcaggtcggctatcaag

SEQ ID NO: 241996 - DNA, 25 bp, Probe Sequence
gattcagtgcaggtttggatacatc

SEQ ID NO: 241997 - DNA, 25 bp, Probe Sequence
gattcaggcatggattccgtgaagg

SEQ ID NO: 241998 - DNA, 25 bp, Probe Sequence
gattctctagagatccagtgacagg

SEQ ID NO: 241999 - DNA, 25 bp, Probe Sequence
gattcgatgcaacttcggagacagg

SEQ ID NO: 242000 - DNA, 25 bp, Probe Sequence
gattgcaagcacctttgtggatcag

SEQ ID NO: 242001 - DNA, 25 bp, Probe Sequence
gattgcgagcacattacttgctgca

SEQ ID NO: 242002 - DNA, 25 bp, Probe Sequence
gattcgagccttacactctatctcg

SEQ ID NO: 242003 - DNA, 25 bp, Probe Sequence
gattgtggtgccaccatctacttga

SEQ ID NO: 242004 - DNA, 25 bp, Probe Sequence
gattggaatgcctggctctactctc

SEQ ID NO: 242005 - DNA, 25 bp, Probe Sequence
gattgtaaccacgtctctgcaattc

SEQ ID NO: 242006 - DNA, 25 bp, Probe Sequence
gattgctggagcccgtttcaaatca

SEQ ID NO: 242007 - DNA, 25 bp, Probe Sequence
gattgctgtgggtgattctgaagga

SEQ ID NO: 242008 - DNA, 25 bp, Probe Sequence
gttggtgtggattctgttgaaggag

SEQ ID NO: 242009 - DNA, 25 bp, Probe Sequence
gattgagttctgatgcgttaaacgg

SEQ ID NO: 242010 - DNA, 25 bp, Probe Sequence
gattggtgtatagctttaaactgta

SEQ ID NO: 242011 - DNA, 25 bp, Probe Sequence
gattgttgtatagctttcgattttg

SEQ ID NO: 242012 - DNA, 25 bp, Probe Sequence
gattgtattcatatctatttgcatt

SEQ ID NO: 242013 - DNA, 25 bp, Probe Sequence
gattgcactattatttgttgctatt

SEQ ID NO: 242014 - DNA, 25 bp, Probe Sequence
gattgccaatgtattatcctttttg

SEQ ID NO: 242015 - DNA, 25 bp, Probe Sequence
gattgactgtaaattaccttaatct

SEQ ID NO: 242016 - DNA, 25 bp, Probe Sequence
gattgactttagttgactgcactat

SEQ ID NO: 242017 - DNA, 25 bp, Probe Sequence
gattgatttttctggtacgtaagta

SEQ ID NO: 242018 - DNA, 25 bp, Probe Sequence
gttgttttgcacagactccggaaaa

SEQ ID NO: 242019 - DNA, 25 bp, Probe Sequence
gtagattgttacaggcttcctagga

SEQ ID NO: 242020 - DNA, 25 bp, Probe Sequence
gttgtggagttaagacccctatgga

SEQ ID NO: 242021 - DNA, 25 bp, Probe Sequence
gttggggtcactgaaccccgagcat

SEQ ID NO: 242022 - DNA, 25 bp, Probe Sequence
gttggggtcactgaaccccgagcat

SEQ ID NO: 242023 - DNA, 25 bp, Probe Sequence
gttggggtatttagagcctgtaatc

SEQ ID NO: 242024 - DNA, 25 bp, Probe Sequence
gattgggtacttagttgcctgttac

SEQ ID NO: 242025 - DNA, 25 bp, Probe Sequence
gttggctgtgacatctattccatct

SEQ ID NO: 242026 - DNA, 25 bp, Probe Sequence
gattggcagtgacatttagagttac

SEQ ID NO: 242027 - DNA, 25 bp, Probe Sequence
gattgaattcagcatcccagactct

SEQ ID NO: 242028 - DNA, 25 bp, Probe Sequence
gattgatatgtgcttcttctgattc

SEQ ID NO: 242029 - DNA, 25 bp, Probe Sequence
gattgagagtggacttacatttcct

SEQ ID NO: 242030 - DNA, 25 bp, Probe Sequence
gattgaagagagacagtacatgccc

SEQ ID NO: 242031 - DNA, 25 bp, Probe Sequence
gattgagaaatgtgtagctgcaaaa

SEQ ID NO: 242032 - DNA, 25 bp, Probe Sequence
gttggaaattccagtgcagcactga

SEQ ID NO: 242033 - DNA, 25 bp, Probe Sequence
gttggaggtattttctctgcaccaa

SEQ ID NO: 242034 - DNA, 25 bp, Probe Sequence
gttggacctcgttttgctcaaatat

SEQ ID NO: 242035 - DNA, 25 bp, Probe Sequence
gattgaagcccccattcgtataata

SEQ ID NO: 242036 - DNA, 25 bp, Probe Sequence
gattgatcagttcttttgtatgaat

SEQ ID NO: 242037 - DNA, 25 bp, Probe Sequence
gattctcagatgtttgttgtgtgga

SEQ ID NO: 242038 - DNA, 25 bp, Probe Sequence
gattccagaaacatatgggctgata

SEQ ID NO: 242039 - DNA, 25 bp, Probe Sequence
gattcattgaaactctaggggtaga

SEQ ID NO: 242040 - DNA, 25 bp, Probe Sequence
gattcattaaactatagtcacccgt

SEQ ID NO: 242041 - DNA, 25 bp, Probe Sequence
gattcagtaaatcaagtcagcttgg

SEQ ID NO: 242042 - DNA, 25 bp, Probe Sequence
gattcagtagacctaatgacatttg

SEQ ID NO: 242043 - DNA, 25 bp, Probe Sequence
gattgcagtgcaaccttatgccaat

SEQ ID NO: 242044 - DNA, 25 bp, Probe Sequence
gattcgagctccagctaggatgatc

SEQ ID NO: 242045 - DNA, 25 bp, Probe Sequence
gattcgagatggcagcaaggaaccc

SEQ ID NO: 242046 - DNA, 25 bp, Probe Sequence
gattcgaatgcaggctcaaggaagc

SEQ ID NO: 242047 - DNA, 25 bp, Probe Sequence
gattcctaagcagcaaggacctggt

SEQ ID NO: 242048 - DNA, 25 bp, Probe Sequence
gattccagaactgcaaagacctgtt

SEQ ID NO: 242049 - DNA, 25 bp, Probe Sequence
gattccagtattgtatatgagtttt

SEQ ID NO: 242050 - DNA, 25 bp, Probe Sequence
gattccggtttttgtcagtacatct

SEQ ID NO: 242051 - DNA, 25 bp, Probe Sequence
gttcctgtccgtttatcaggacacg

SEQ ID NO: 242052 - DNA, 25 bp, Probe Sequence
gattctctgttggggtgaaggacat

SEQ ID NO: 242053 - DNA, 25 bp, Probe Sequence
gattgttcttctgggtaagagctct

SEQ ID NO: 242054 - DNA, 25 bp, Probe Sequence
gattgatttacggcgctaaggatga

SEQ ID NO: 242055 - DNA, 25 bp, Probe Sequence
gattgatattaggctggtgcaaaag

SEQ ID NO: 242056 - DNA, 25 bp, Probe Sequence
gattgatgcagttgccattgctgac

SEQ ID NO: 242057 - DNA, 25 bp, Probe Sequence
gattgatgggtggcagtctggaggc

SEQ ID NO: 242058 - DNA, 25 bp, Probe Sequence
gattgaggcgcagaccatggaggcc

SEQ ID NO: 242059 - DNA, 25 bp, Probe Sequence
gattgagcctgaactctcttagtca

SEQ ID NO: 242060 - DNA, 25 bp, Probe Sequence
gattggcttagtcagcttagcatca

SEQ ID NO: 242061 - DNA, 25 bp, Probe Sequence
gattggttacgatcgaagtaggtga

SEQ ID NO: 242062 - DNA, 25 bp, Probe Sequence
gggtgaaactaacaagaacaggaca

SEQ ID NO: 242063 - DNA, 25 bp, Probe Sequence
ggggtaagctaacaagtacaactca

SEQ ID NO: 242064 - DNA, 25 bp, Probe Sequence
gtgggtaatccagccaataccaact

SEQ ID NO: 242065 - DNA, 25 bp, Probe Sequence
gttggtatgactaccgttacctact

SEQ ID NO: 242066 - DNA, 25 bp, Probe Sequence
gttggatgattctcacctttactcc

SEQ ID NO: 242067 - DNA, 25 bp, Probe Sequence
gttgggattacctgtttaaatctgt

SEQ ID NO: 242068 - DNA, 25 bp, Probe Sequence
gttggtatttttagttctaactgct

SEQ ID NO: 242069 - DNA, 25 bp, Probe Sequence
gttgctgtttattttttttggcctg

SEQ ID NO: 242070 - DNA, 25 bp, Probe Sequence
gttgctgtttattttttttggcctg

SEQ ID NO: 242071 - DNA, 25 bp, Probe Sequence
gattctgccctatttatgtttctac

SEQ ID NO: 242072 - DNA, 25 bp, Probe Sequence
gattctgccctatttatgtttctac

SEQ ID NO: 242073 - DNA, 25 bp, Probe Sequence
gattctgccctatttatgtttctac

SEQ ID NO: 242074 - DNA, 25 bp, Probe Sequence
gattctctcctgattatttatcaca

SEQ ID NO: 242075 - DNA, 25 bp, Probe Sequence
gattcttccttctatctattatctc

SEQ ID NO: 242076 - DNA, 25 bp, Probe Sequence
gattctgtcttgaataatgattatc

SEQ ID NO: 242077 - DNA, 25 bp, Probe Sequence
gattcttgttgttgattctctctct

SEQ ID NO: 242078 - DNA, 25 bp, Probe Sequence
gattgcgggtgccaatttctacatt

SEQ ID NO: 242079 - DNA, 25 bp, Probe Sequence
gttggggtgggcatttgatgcggga

SEQ ID NO: 242080 - DNA, 25 bp, Probe Sequence
gttggggaggagatctgtggggctg

SEQ ID NO: 242081 - DNA, 25 bp, Probe Sequence
gttgggggctacatctgtgaggaga

SEQ ID NO: 242082 - DNA, 25 bp, Probe Sequence
gttgggggctacatctgtgaggaga

SEQ ID NO: 242083 - DNA, 25 bp, Probe Sequence
gttgggggctacacctgtgaggaga

SEQ ID NO: 242084 - DNA, 25 bp, Probe Sequence
gttggaggcctcgaggaagagcggg

SEQ ID NO: 242085 - DNA, 25 bp, Probe Sequence
gttggacgcagggcggcacatgagt

SEQ ID NO: 242086 - DNA, 25 bp, Probe Sequence
gttggacaggggagccagattgttg

SEQ ID NO: 242087 - DNA, 25 bp, Probe Sequence
gattggacaggcagcacagcggatt

SEQ ID NO: 242088 - DNA, 25 bp, Probe Sequence
gattggcaattgaaatgcaggtgca

SEQ ID NO: 242089 - DNA, 25 bp, Probe Sequence
gattgtgatcttcaggaggatgcct

SEQ ID NO: 242090 - DNA, 25 bp, Probe Sequence
gattgtgtctttatgattatagcca

SEQ ID NO: 242091 - DNA, 25 bp, Probe Sequence
gattgttctagtactgtattgggct

SEQ ID NO: 242092 - DNA, 25 bp, Probe Sequence
gattgtagtaatttctatttgcact

SEQ ID NO: 242093 - DNA, 25 bp, Probe Sequence
gattctactacaacactttgacatt

SEQ ID NO: 242094 - DNA, 25 bp, Probe Sequence
gattcttctacatcacgcttggaat

SEQ ID NO: 242095 - DNA, 25 bp, Probe Sequence
gattctcacaagcaaccctgagaga

SEQ ID NO: 242096 - DNA, 25 bp, Probe Sequence
gattccgactgggagccggaggaac

SEQ ID NO: 242097 - DNA, 25 bp, Probe Sequence
gattccgactggatgcctggaagag

SEQ ID NO: 242098 - DNA, 25 bp, Probe Sequence
gattctctgacattggtgcctaaga

SEQ ID NO: 242099 - DNA, 25 bp, Probe Sequence
gattgaagagcatggtccttcagaa

SEQ ID NO: 242100 - DNA, 25 bp, Probe Sequence
tggtgaaggtgaaaggcacgccgct

SEQ ID NO: 242101 - DNA, 25 bp, Probe Sequence
acgccgcttgccgataacgatgatg

SEQ ID NO: 242102 - DNA, 25 bp, Probe Sequence
ttgccgataacgatgatgtcgatgc

SEQ ID NO: 242103 - DNA, 25 bp, Probe Sequence
acgatgatgtcgatgcctttgattt

SEQ ID NO: 242104 - DNA, 25 bp, Probe Sequence
ggtcgcgcggatcatgatgccaacc

SEQ ID NO: 242105 - DNA, 25 bp, Probe Sequence
ggatcatgatgccaacctcttacgt

SEQ ID NO: 242106 - DNA, 25 bp, Probe Sequence
tgccaacctcttacgtgcgcctttc

SEQ ID NO: 242107 - DNA, 25 bp, Probe Sequence
gcgcctttctgccggacgcgagcag

SEQ ID NO: 242108 - DNA, 25 bp, Probe Sequence
gccggacgcgagcagatgaacgaac

SEQ ID NO: 242109 - DNA, 25 bp, Probe Sequence
cgagcagatgaacgaacagactcag

SEQ ID NO: 242110 - DNA, 25 bp, Probe Sequence
gatgaacgaacagactcaggcgatg

SEQ ID NO: 242111 - DNA, 25 bp, Probe Sequence
aacagactcaggcgatgtgctttat

SEQ ID NO: 242112 - DNA, 25 bp, Probe Sequence
tcaggcgatgtgctttatggcaggc

SEQ ID NO: 242113 - DNA, 25 bp, Probe Sequence
gtgctttatggcaggcgcaaactcg

SEQ ID NO: 242114 - DNA, 25 bp, Probe Sequence
atggcaggcgcaaactcgattttct

SEQ ID NO: 242115 - DNA, 25 bp, Probe Sequence
tacggttgcaaactgctgaccacgc

SEQ ID NO: 242116 - DNA, 25 bp, Probe Sequence
caaactgctgaccacgccgaatccg

SEQ ID NO: 242117 - DNA, 25 bp, Probe Sequence
gacctgcaactgttccgcaaactgg

SEQ ID NO: 242118 - DNA, 25 bp, Probe Sequence
gttgagggtggaacctccaggcagg

SEQ ID NO: 242119 - DNA, 25 bp, Probe Sequence
gattgcagattgagtacccagcacg

SEQ ID NO: 242120 - DNA, 25 bp, Probe Sequence
gattcgagcgaaatatcccgacagg

SEQ ID NO: 242121 - DNA, 25 bp, Probe Sequence
gattgtgcctagtatatcccagaca

SEQ ID NO: 242122 - DNA, 25 bp, Probe Sequence
gattgcccttgtcaactcagtcaac

SEQ ID NO: 242123 - DNA, 25 bp, Probe Sequence
gattctgcctggtccaacacagatt

SEQ ID NO: 242124 - DNA, 25 bp, Probe Sequence
gattcctctcgatcacatacagaag

SEQ ID NO: 242125 - DNA, 25 bp, Probe Sequence
gattcctctgggtcaatcggaaggc

SEQ ID NO: 242126 - DNA, 25 bp, Probe Sequence
gattcctatgtgggcgacgaggccc

SEQ ID NO: 242127 - DNA, 25 bp, Probe Sequence
gattcctcttgggctgaagcagacc

SEQ ID NO: 242128 - DNA, 25 bp, Probe Sequence
gttaccgctgtggcgagtcagggca

SEQ ID NO: 242129 - DNA, 25 bp, Probe Sequence
gttgtccaggttggagtgcagcggc

SEQ ID NO: 242130 - DNA, 25 bp, Probe Sequence
gttgtcaatggtgaggatgcggtcc

SEQ ID NO: 242131 - DNA, 25 bp, Probe Sequence
gattgtcctgaagaagtggtacacg

SEQ ID NO: 242132 - DNA, 25 bp, Probe Sequence
gattgtccaggctcatattgggaat

SEQ ID NO: 242133 - DNA, 25 bp, Probe Sequence
gattctccaaattgccttggtccat

SEQ ID NO: 242134 - DNA, 25 bp, Probe Sequence
gattctacatattttgcttggtgcc

SEQ ID NO: 242135 - DNA, 25 bp, Probe Sequence
gattcgactcattacgcatgggctt

SEQ ID NO: 242136 - DNA, 25 bp, Probe Sequence
gattggacctattcagcagctacat

SEQ ID NO: 242137 - DNA, 25 bp, Probe Sequence
gattgtaagctcttgcagcagtcac

SEQ ID NO: 242138 - DNA, 25 bp, Probe Sequence
gattgtatcagaatgcgagcaacac

SEQ ID NO: 242139 - DNA, 25 bp, Probe Sequence
gttgtcatcgaagggaagggtgggg

SEQ ID NO: 242140 - DNA, 25 bp, Probe Sequence
gattctgttgaaggagagggtgagg

SEQ ID NO: 242141 - DNA, 25 bp, Probe Sequence
gattctgctgatgcggaggaggatg

SEQ ID NO: 242142 - DNA, 25 bp, Probe Sequence
gattgtctcaacggcagcgacgaag

SEQ ID NO: 242143 - DNA, 25 bp, Probe Sequence
gattgacatcaagaagtgtgtgaag

SEQ ID NO: 242144 - DNA, 25 bp, Probe Sequence
gattgaaaaggctgtggtgtctcag

SEQ ID NO: 242145 - DNA, 25 bp, Probe Sequence
gattgaacaaggctgtgaggctcat

SEQ ID NO: 242146 - DNA, 25 bp, Probe Sequence
gttggcaaaggcggtggcacatcac

SEQ ID NO: 242147 - DNA, 25 bp, Probe Sequence
gttggccaggctggtcttgaactcc

SEQ ID NO: 242148 - DNA, 25 bp, Probe Sequence
gttggccaggctggtcttgaactcc

SEQ ID NO: 242149 - DNA, 25 bp, Probe Sequence
gattcccagtgtggtctgagagacc

SEQ ID NO: 242150 - DNA, 25 bp, Probe Sequence
gattctccgcgaggtgtgcagagtg

SEQ ID NO: 242151 - DNA, 25 bp, Probe Sequence
gattctccgcgaggtgtgcagagtg

SEQ ID NO: 242152 - DNA, 25 bp, Probe Sequence
gattgtcctggcagtgtgcattgga

SEQ ID NO: 242153 - DNA, 25 bp, Probe Sequence
gattgtaggtgcaagctgtccagag

SEQ ID NO: 242154 - DNA, 25 bp, Probe Sequence
gttgatatggttcctggcaagccca

SEQ ID NO: 242155 - DNA, 25 bp, Probe Sequence
gttggtggctcgactcgaattccaa

SEQ ID NO: 242156 - DNA, 25 bp, Probe Sequence
gttggggtatgtgctgcacttccca

SEQ ID NO: 242157 - DNA, 25 bp, Probe Sequence
gttcgttcaagtctgactacccatc

SEQ ID NO: 242158 - DNA, 25 bp, Probe Sequence
gttggatttattctgccaaacctgt

SEQ ID NO: 242159 - DNA, 25 bp, Probe Sequence
gttgtctttcttcctaacaacctgc

SEQ ID NO: 242160 - DNA, 25 bp, Probe Sequence
gttcatagttttttcaagacccagg

SEQ ID NO: 242161 - DNA, 25 bp, Probe Sequence
gttgaagttcaatataagactctcc

SEQ ID NO: 242162 - DNA, 25 bp, Probe Sequence
gttgaagttcccctaattgcttcct

SEQ ID NO: 242163 - DNA, 25 bp, Probe Sequence
gttgatggttgacaaagcttgcttc

SEQ ID NO: 242164 - DNA, 25 bp, Probe Sequence
gttggccctatgaaattctgcactt

SEQ ID NO: 242165 - DNA, 25 bp, Probe Sequence
gttggcacgtttacaatgactcttg

SEQ ID NO: 242166 - DNA, 25 bp, Probe Sequence
gattggactgtcaactttggaattg

SEQ ID NO: 242167 - DNA, 25 bp, Probe Sequence
gattggcctgtaccttttagtatga

SEQ ID NO: 242168 - DNA, 25 bp, Probe Sequence
gattccctctttttctattgattgg

SEQ ID NO: 242169 - DNA, 25 bp, Probe Sequence
gattgttgccttcagtgtttgattg

SEQ ID NO: 242170 - DNA, 25 bp, Probe Sequence
gttgtggcctatcacagttagcagt

SEQ ID NO: 242171 - DNA, 25 bp, Probe Sequence
gattgggaacatacacgttagagtc

SEQ ID NO: 242172 - DNA, 25 bp, Probe Sequence
gattgtcagaagcttcagttctggt

SEQ ID NO: 242173 - DNA, 25 bp, Probe Sequence
gattctctgaagtttgcagtgttga

SEQ ID NO: 242174 - DNA, 25 bp, Probe Sequence
gattcctaactaaagtgtcatgaga

SEQ ID NO: 242175 - DNA, 25 bp, Probe Sequence
gattgattaacttaaggtcaactga

SEQ ID NO: 242176 - DNA, 25 bp, Probe Sequence
gttgtataactcaggcgtctttgca

SEQ ID NO: 242177 - DNA, 25 bp, Probe Sequence
gttggtgattccagtggactgtatc

SEQ ID NO: 242178 - DNA, 25 bp, Probe Sequence
gattcctactccatttgcaagtcat

SEQ ID NO: 242179 - DNA, 25 bp, Probe Sequence
gattcccacattcatctggcagagt

SEQ ID NO: 242180 - DNA, 25 bp, Probe Sequence
gattctcccctgattgtggagtgga

SEQ ID NO: 242181 - DNA, 25 bp, Probe Sequence
gattctctcctagtttggctgggga

SEQ ID NO: 242182 - DNA, 25 bp, Probe Sequence
ggctttccaaggtgccatgagggtt

SEQ ID NO: 242183 - DNA, 25 bp, Probe Sequence
gggtttccaatgtgtataggtcgga

SEQ ID NO: 242184 - DNA, 25 bp, Probe Sequence
gggttttcaattcaatacgcgggat

SEQ ID NO: 242185 - DNA, 25 bp, Probe Sequence
gttgttttgcacctaaatcgacggg

SEQ ID NO: 242186 - DNA, 25 bp, Probe Sequence
gttttattacctgttgcagaagcgg

SEQ ID NO: 242187 - DNA, 25 bp, Probe Sequence
gttttttacagtgcattataggcgg

SEQ ID NO: 242188 - DNA, 25 bp, Probe Sequence
gtctacttttttgatcctagggtgc

SEQ ID NO: 242189 - DNA, 25 bp, Probe Sequence
gtctgacttagtgtaacctaggaga

SEQ ID NO: 242190 - DNA, 25 bp, Probe Sequence
gttggcctactgttacacattaaaa

SEQ ID NO: 242191 - DNA, 25 bp, Probe Sequence
gttgcacccacatataaaaggagaa

SEQ ID NO: 242192 - DNA, 25 bp, Probe Sequence
gttcacctctggataaactgggaaa

SEQ ID NO: 242193 - DNA, 25 bp, Probe Sequence
gattgccctaggtattaacttggga

SEQ ID NO: 242194 - DNA, 25 bp, Probe Sequence
gattgccatctacggcaccaatttc

SEQ ID NO: 242195 - DNA, 25 bp, Probe Sequence
gattgaatatatctctacattttga

SEQ ID NO: 242196 - DNA, 25 bp, Probe Sequence
gattgttaatgccctattttctaat

SEQ ID NO: 242197 - DNA, 25 bp, Probe Sequence
gattggtaatggctttcctgtcttt

SEQ ID NO: 242198 - DNA, 25 bp, Probe Sequence
gttggtacaatgcttcgttgtattt

SEQ ID NO: 242199 - DNA, 25 bp, Probe Sequence
gttggtcaaagtattggtacttata

SEQ ID NO: 242200 - DNA, 25 bp, Probe Sequence
gtagccctaggttgtagtaacattt

SEQ ID NO: 242201 - DNA, 25 bp, Probe Sequence
gtagggccagagagtagtacaacgt

SEQ ID NO: 242202 - DNA, 25 bp, Probe Sequence
gttgggccagagtcccgtagaaggg

SEQ ID NO: 242203 - DNA, 25 bp, Probe Sequence
gtgtggggcggagacgctaaccgcc

SEQ ID NO: 242204 - DNA, 25 bp, Probe Sequence
gttggtgtgctgaacccagtaactc

SEQ ID NO: 242205 - DNA, 25 bp, Probe Sequence
gttggcttcgtgattaaaatgctcc

SEQ ID NO: 242206 - DNA, 25 bp, Probe Sequence
gattgagtttgtattaaggtctctt

SEQ ID NO: 242207 - DNA, 25 bp, Probe Sequence
gttggttctctgattaaagttttga

SEQ ID NO: 242208 - DNA, 25 bp, Probe Sequence
gttggttcttgactctgaagggact

SEQ ID NO: 242209 - DNA, 25 bp, Probe Sequence
gttgagtttgcctcttatggtgact

SEQ ID NO: 242210 - DNA, 25 bp, Probe Sequence
gttgagttacctctgtgctggatcc

SEQ ID NO: 242211 - DNA, 25 bp, Probe Sequence
gttgagttacctctgtgctggatcc

SEQ ID NO: 242212 - DNA, 25 bp, Probe Sequence
gttggctagatctcctagctgagac

SEQ ID NO: 242213 - DNA, 25 bp, Probe Sequence
gttggtctgaagtccttgcaagacg

SEQ ID NO: 242214 - DNA, 25 bp, Probe Sequence
gattggagctgaagacctaaagtgc

SEQ ID NO: 242215 - DNA, 25 bp, Probe Sequence
gttgatatctgtaacactaaactaa

SEQ ID NO: 242216 - DNA, 25 bp, Probe Sequence
gttgtacttcaatcctgaattaatc

SEQ ID NO: 242217 - DNA, 25 bp, Probe Sequence
gttggtttaatgcctttatttctct

SEQ ID NO: 242218 - DNA, 25 bp, Probe Sequence
gttgttgttcctccttaggaattct

SEQ ID NO: 242219 - DNA, 25 bp, Probe Sequence
gttgttttccgttgtgacgaatgtg

SEQ ID NO: 242220 - DNA, 25 bp, Probe Sequence
gattgttattctggcatcttgggaa

SEQ ID NO: 242221 - DNA, 25 bp, Probe Sequence
gattgagaattcttgcctaggaaaa

SEQ ID NO: 242222 - DNA, 25 bp, Probe Sequence
gttggagttctatcttaggaaaatc

SEQ ID NO: 242223 - DNA, 25 bp, Probe Sequence
gttggagttctatcttaggaaaatc

SEQ ID NO: 242224 - DNA, 25 bp, Probe Sequence
gttgtggccctagctatgggcctaa

SEQ ID NO: 242225 - DNA, 25 bp, Probe Sequence
gttggaccacttacattgtaccaaa

SEQ ID NO: 242226 - DNA, 25 bp, Probe Sequence
gttggatcaagtgacttctgcccac

SEQ ID NO: 242227 - DNA, 25 bp, Probe Sequence
gttggatcaagtgacttctgcccac

SEQ ID NO: 242228 - DNA, 25 bp, Probe Sequence
gttggatcaagtgacttctgcccac

SEQ ID NO: 242229 - DNA, 25 bp, Probe Sequence
gttggatcaagtgacttctgcccac

SEQ ID NO: 242230 - DNA, 25 bp, Probe Sequence
gattggtgggtgtattttgcacaac

SEQ ID NO: 242231 - DNA, 25 bp, Probe Sequence
gttgcgtgggctagacttatactaa

SEQ ID NO: 242232 - DNA, 25 bp, Probe Sequence
gttgtggacctatttgttttaacat

SEQ ID NO: 242233 - DNA, 25 bp, Probe Sequence
gttggaggcttctcttttgataact

SEQ ID NO: 242234 - DNA, 25 bp, Probe Sequence
gattgtagacccagttttgaaacca

SEQ ID NO: 242235 - DNA, 25 bp, Probe Sequence
gttgctagaccgagcctgtgggata

SEQ ID NO: 242236 - DNA, 25 bp, Probe Sequence
gttgtaacctgctgcacggatacat

SEQ ID NO: 242237 - DNA, 25 bp, Probe Sequence
gattggtcccattctccagaataca

SEQ ID NO: 242238 - DNA, 25 bp, Probe Sequence
gattgccccaatgtacagaattata

SEQ ID NO: 242239 - DNA, 25 bp, Probe Sequence
gattccctcactgttgtatcttgaa

SEQ ID NO: 242240 - DNA, 25 bp, Probe Sequence
gattccctcactgttgtatcttgaa

SEQ ID NO: 242241 - DNA, 25 bp, Probe Sequence
gattgccctttcatatgatcttcta

SEQ ID NO: 242242 - DNA, 25 bp, Probe Sequence
gattccttctaaacacagctatcta

SEQ ID NO: 242243 - DNA, 25 bp, Probe Sequence
gattccttctatttgcacaagtcac

SEQ ID NO: 242244 - DNA, 25 bp, Probe Sequence
gattcctaattctatgacagtgtac

SEQ ID NO: 242245 - DNA, 25 bp, Probe Sequence
gattcccatatgacctggagtggac

SEQ ID NO: 242246 - DNA, 25 bp, Probe Sequence
gattcccatcataactggtggggca

SEQ ID NO: 242247 - DNA, 25 bp, Probe Sequence
gattccaagtccatgtgaggggcat

SEQ ID NO: 242248 - DNA, 25 bp, Probe Sequence
gattccttgtgcccaggaggttgag

SEQ ID NO: 242249 - DNA, 25 bp, Probe Sequence
gttcagcctggctcggcaagtagat

SEQ ID NO: 242250 - DNA, 25 bp, Probe Sequence
gttgagacgccttgctagaggtaga

SEQ ID NO: 242251 - DNA, 25 bp, Probe Sequence
gttgctgagccctacaaggtgtatc

SEQ ID NO: 242252 - DNA, 25 bp, Probe Sequence
gattgctcagaataaagtgtctgtt

SEQ ID NO: 242253 - DNA, 25 bp, Probe Sequence
gattgtgctcaacaagagtccatga

SEQ ID NO: 242254 - DNA, 25 bp, Probe Sequence
gattgtatgaaccgcatggtgcttg

SEQ ID NO: 242255 - DNA, 25 bp, Probe Sequence
gattgtctgcacagcatatgttcat

SEQ ID NO: 242256 - DNA, 25 bp, Probe Sequence
gttgactgcacaggtaatacaacac

SEQ ID NO: 242257 - DNA, 25 bp, Probe Sequence
gttggctgacaattatgctgcagca

SEQ ID NO: 242258 - DNA, 25 bp, Probe Sequence
gttggctacgaaatgcttgctcagg

SEQ ID NO: 242259 - DNA, 25 bp, Probe Sequence
gttggctacgaaatgcttgctcagg

SEQ ID NO: 242260 - DNA, 25 bp, Probe Sequence
gttggctaaataagctagagaggga

SEQ ID NO: 242261 - DNA, 25 bp, Probe Sequence
gttggctacagctatgaaggagcag

SEQ ID NO: 242262 - DNA, 25 bp, Probe Sequence
gattgagagaactatgacctgcagc

SEQ ID NO: 242263 - DNA, 25 bp, Probe Sequence
gattgatgaggacatgactgcccga

SEQ ID NO: 242264 - DNA, 25 bp, Probe Sequence
gttgatggggccagatgagccagca

SEQ ID NO: 242265 - DNA, 25 bp, Probe Sequence
gttgggaggctgagatgggagaata

SEQ ID NO: 242266 - DNA, 25 bp, Probe Sequence
gttgggtgactttgtgggagccact

SEQ ID NO: 242267 - DNA, 25 bp, Probe Sequence
gttgtggcatgacatctgggtcatc

SEQ ID NO: 242268 - DNA, 25 bp, Probe Sequence
gttggtcaagccatggtatgatgaa

SEQ ID NO: 242269 - DNA, 25 bp, Probe Sequence
gttggctcatgaaataggttgtgga

SEQ ID NO: 242270 - DNA, 25 bp, Probe Sequence
gttggtgcatctagaaagctttgaa

SEQ ID NO: 242271 - DNA, 25 bp, Probe Sequence
gttggcaccttcaatacttcatgat

SEQ ID NO: 242272 - DNA, 25 bp, Probe Sequence
gttggcaccttcaatacttcatgat

SEQ ID NO: 242273 - DNA, 25 bp, Probe Sequence
gttggcatgtctacaatgactctcg

SEQ ID NO: 242274 - DNA, 25 bp, Probe Sequence
gattgcagagatataatgattacat

SEQ ID NO: 242275 - DNA, 25 bp, Probe Sequence
gttctactttagtttcactgggaag

SEQ ID NO: 242276 - DNA, 25 bp, Probe Sequence
gtggcgacgtgcagtttacttggta

SEQ ID NO: 242277 - DNA, 25 bp, Probe Sequence
gttgtgacctgtacttgtactatgg

SEQ ID NO: 242278 - DNA, 25 bp, Probe Sequence
gttgtgacattgtaccattaggagg

SEQ ID NO: 242279 - DNA, 25 bp, Probe Sequence
gttgaatcatatgcccaaagtacgc

SEQ ID NO: 242280 - DNA, 25 bp, Probe Sequence
gttgaatctagaaccgtagccagac

SEQ ID NO: 242281 - DNA, 25 bp, Probe Sequence
gttgtcttcagacgtcttggggacg

SEQ ID NO: 242282 - DNA, 25 bp, Probe Sequence
gttgccccagttccatggggttcgt

SEQ ID NO: 242283 - DNA, 25 bp, Probe Sequence
gttccagccgtttgcaggggaggcg

SEQ ID NO: 242284 - DNA, 25 bp, Probe Sequence
gttccagccgtttgcaggggaggcg

SEQ ID NO: 242285 - DNA, 25 bp, Probe Sequence
gtaccccgtggaggggtggcactgc

SEQ ID NO: 242286 - DNA, 25 bp, Probe Sequence
gttcctccacgccaaagggcgacat

SEQ ID NO: 242287 - DNA, 25 bp, Probe Sequence
gattcctcgacccctgaaaaggatg

SEQ ID NO: 242288 - DNA, 25 bp, Probe Sequence
gattcctataccactcaaatgtgtg

SEQ ID NO: 242289 - DNA, 25 bp, Probe Sequence
gattccttactctattatatttgtt

SEQ ID NO: 242290 - DNA, 25 bp, Probe Sequence
gattgttaagtctaaatatttcctt

SEQ ID NO: 242291 - DNA, 25 bp, Probe Sequence
gattgttattttagagtatattcct

SEQ ID NO: 242292 - DNA, 25 bp, Probe Sequence
gattgtatgtttcaagccttgtcct

SEQ ID NO: 242293 - DNA, 25 bp, Probe Sequence
gttgtattttcgacaggttgctgcc

SEQ ID NO: 242294 - DNA, 25 bp, Probe Sequence
gttgcttgtcattcatgacgtggtc

SEQ ID NO: 242295 - DNA, 25 bp, Probe Sequence
gttggtgctagtggaagggctcagt

SEQ ID NO: 242296 - DNA, 25 bp, Probe Sequence
gttggtgccacataaaggctcaaca

SEQ ID NO: 242297 - DNA, 25 bp, Probe Sequence
gttgtggtcactgaaagagtaatac

SEQ ID NO: 242298 - DNA, 25 bp, Probe Sequence
gttgtggcctcggaaggagaatgtt

SEQ ID NO: 242299 - DNA, 25 bp, Probe Sequence
gattgaggccgggagctagagattg

SEQ ID NO: 242300 - DNA, 25 bp, Probe Sequence
gttggtctcgcaccagatagtattt

SEQ ID NO: 242301 - DNA, 25 bp, Probe Sequence
gttgtgtttgatcagaattttgggg

SEQ ID NO: 242302 - DNA, 25 bp, Probe Sequence
gttgtttttgcattggatttgggga

SEQ ID NO: 242303 - DNA, 25 bp, Probe Sequence
gttgcttcttctgtaaaatggggat

SEQ ID NO: 242304 - DNA, 25 bp, Probe Sequence
gttgttctttcctcacatttggatg

SEQ ID NO: 242305 - DNA, 25 bp, Probe Sequence
gttgtggcttctggcttaaattaag

SEQ ID NO: 242306 - DNA, 25 bp, Probe Sequence
gattgtcctagccagtaataaaaat

SEQ ID NO: 242307 - DNA, 25 bp, Probe Sequence
gttgtcactactagattataaaaac

SEQ ID NO: 242308 - DNA, 25 bp, Probe Sequence
gattgcctaactacactgctaaaaa

SEQ ID NO: 242309 - DNA, 25 bp, Probe Sequence
gattgcctaactacactgctaaaaa

SEQ ID NO: 242310 - DNA, 25 bp, Probe Sequence
gattgcaaaattacctccagttatg

SEQ ID NO: 242311 - DNA, 25 bp, Probe Sequence
gattccaagattatgtccactctga

SEQ ID NO: 242312 - DNA, 25 bp, Probe Sequence
gattccacagagatgtttatggtga

SEQ ID NO: 242313 - DNA, 25 bp, Probe Sequence
gattgaccaaatctccattgaggaa

SEQ ID NO: 242314 - DNA, 25 bp, Probe Sequence
gttgaggccagtctcagttgggaaa

SEQ ID NO: 242315 - DNA, 25 bp, Probe Sequence
gttgatagccctctagtcagttata

SEQ ID NO: 242316 - DNA, 25 bp, Probe Sequence
gttgtagcctctgtaattgtgaata

SEQ ID NO: 242317 - DNA, 25 bp, Probe Sequence
gttgtagactttcacctggattatt

SEQ ID NO: 242318 - DNA, 25 bp, Probe Sequence
gttgtagactttcacctggattatt

SEQ ID NO: 242319 - DNA, 25 bp, Probe Sequence
gttaatctgtttcacctggtttgtc

SEQ ID NO: 242320 - DNA, 25 bp, Probe Sequence
gttgttctgttttgagggttattgg

SEQ ID NO: 242321 - DNA, 25 bp, Probe Sequence
gattgtattgttaaaatgagttgta

SEQ ID NO: 242322 - DNA, 25 bp, Probe Sequence
gattgctcctgtgtaaagatgcctt

SEQ ID NO: 242323 - DNA, 25 bp, Probe Sequence
gattgctcctgttaaaggaactgac

SEQ ID NO: 242324 - DNA, 25 bp, Probe Sequence
gttgatgctcttgcagaaggaacta

SEQ ID NO: 242325 - DNA, 25 bp, Probe Sequence
gttggtcactcctcaggaccatgag

SEQ ID NO: 242326 - DNA, 25 bp, Probe Sequence
gattgtctaccctgaagtccatcag

SEQ ID NO: 242327 - DNA, 25 bp, Probe Sequence
gttgcttaccgtcagatgtctctgt

SEQ ID NO: 242328 - DNA, 25 bp, Probe Sequence
gttgggactcgactggtgtttgatc

SEQ ID NO: 242329 - DNA, 25 bp, Probe Sequence
gttgggactcgactggtgtttgatc

SEQ ID NO: 242330 - DNA, 25 bp, Probe Sequence
gttgctagactccctggagtattcg

SEQ ID NO: 242331 - DNA, 25 bp, Probe Sequence
gttgcaagacccatgatactagacc

SEQ ID NO: 242332 - DNA, 25 bp, Probe Sequence
gttggaagcctggagtgcctaagcc

SEQ ID NO: 242333 - DNA, 25 bp, Probe Sequence
gttggaacaagattgtcctgaagaa

SEQ ID NO: 242334 - DNA, 25 bp, Probe Sequence
gttgaagacaaattatccagtgagt

SEQ ID NO: 242335 - DNA, 25 bp, Probe Sequence
gttgaagacaaattatccagtgagt

SEQ ID NO: 242336 - DNA, 25 bp, Probe Sequence
gattgaaacacaaatttacatgcat

SEQ ID NO: 242337 - DNA, 25 bp, Probe Sequence
gattgcaaacaaattggtgatactt

SEQ ID NO: 242338 - DNA, 25 bp, Probe Sequence
gattccaactagattgttattctgg

SEQ ID NO: 242339 - DNA, 25 bp, Probe Sequence
gattgtcaccggaggtatagctgtg

SEQ ID NO: 242340 - DNA, 25 bp, Probe Sequence
gttgtcctgggcgagtatgaccgat

SEQ ID NO: 242341 - DNA, 25 bp, Probe Sequence
gattgccttgggaagttgaacttga

SEQ ID NO: 242342 - DNA, 25 bp, Probe Sequence
gattccttgttatctcaggactcta

SEQ ID NO: 242343 - DNA, 25 bp, Probe Sequence
tcttccttcaaattttggaccaaag

SEQ ID NO: 242344 - DNA, 25 bp, Probe Sequence
tccttttaataattgggaaatactg

SEQ ID NO: 242345 - DNA, 25 bp, Probe Sequence
tccccctaaaaatggtaaatctgat

SEQ ID NO: 242346 - DNA, 25 bp, Probe Sequence
gtccgtcataacccaaggtaccatc

SEQ ID NO: 242347 - DNA, 25 bp, Probe Sequence
gattgcaccaaagaaagcgtcccat

SEQ ID NO: 242348 - DNA, 25 bp, Probe Sequence
gattgcactcaatgaaaaacttgta

SEQ ID NO: 242349 - DNA, 25 bp, Probe Sequence
gattgcttaaaatagcaacactcta

SEQ ID NO: 242350 - DNA, 25 bp, Probe Sequence
gttgcccaaatatgaggtccataaa

SEQ ID NO: 242351 - DNA, 25 bp, Probe Sequence
gattgacaaaatcatgaggctcact

SEQ ID NO: 242352 - DNA, 25 bp, Probe Sequence
gttgatcaaatacaatagaccatgt

SEQ ID NO: 242353 - DNA, 25 bp, Probe Sequence
gttgctcacaattgaccaggacctc

SEQ ID NO: 242354 - DNA, 25 bp, Probe Sequence
gttcgaaatcgtgcaggggctactg

SEQ ID NO: 242355 - DNA, 25 bp, Probe Sequence
gttcagaaccagacctgtgggcacc

SEQ ID NO: 242356 - DNA, 25 bp, Probe Sequence
gttggccccatgaagtgggtgcccc

SEQ ID NO: 242357 - DNA, 25 bp, Probe Sequence
gttggccccatgaagtgggtgcccc

SEQ ID NO: 242358 - DNA, 25 bp, Probe Sequence
gattggctccaggctagatgcggac

SEQ ID NO: 242359 - DNA, 25 bp, Probe Sequence
gttgactccaggaataggtggcatg

SEQ ID NO: 242360 - DNA, 25 bp, Probe Sequence
gattgattcaccatctagagtgagc

SEQ ID NO: 242361 - DNA, 25 bp, Probe Sequence
gattgaacagtgaattatcagtgac

SEQ ID NO: 242362 - DNA, 25 bp, Probe Sequence
gattgatccaggacatccatagccc

SEQ ID NO: 242363 - DNA, 25 bp, Probe Sequence
gattgacgagaacttcaaggccctc

SEQ ID NO: 242364 - DNA, 25 bp, Probe Sequence
gttggcatagatattactgaacctc

SEQ ID NO: 242365 - DNA, 25 bp, Probe Sequence
gttggcaaggagtctgcctccatgc

SEQ ID NO: 242366 - DNA, 25 bp, Probe Sequence
gttggcaggggagtccctctgagga

SEQ ID NO: 242367 - DNA, 25 bp, Probe Sequence
gttggggagcactacccctaggagg

SEQ ID NO: 242368 - DNA, 25 bp, Probe Sequence
gttggggagcactacccctaggagg

SEQ ID NO: 242369 - DNA, 25 bp, Probe Sequence
gttggcaagaacaagcgccttacga

SEQ ID NO: 242370 - DNA, 25 bp, Probe Sequence
gattgggagaaaatcccttccatgt

SEQ ID NO: 242371 - DNA, 25 bp, Probe Sequence
gattggtaaatatcacctgctcaac

SEQ ID NO: 242372 - DNA, 25 bp, Probe Sequence
gttggtaggcatcactgctcgtaac

SEQ ID NO: 242373 - DNA, 25 bp, Probe Sequence
gattggtatggccttagctcttagc

SEQ ID NO: 242374 - DNA, 25 bp, Probe Sequence
gattgttatgttcactgctcttcag

SEQ ID NO: 242375 - DNA, 25 bp, Probe Sequence
gattgttatgttcactgctcttcag

SEQ ID NO: 242376 - DNA, 25 bp, Probe Sequence
gattgtactgttctcatgctataaa

SEQ ID NO: 242377 - DNA, 25 bp, Probe Sequence
gattgtactgttctcatgctataaa

SEQ ID NO: 242378 - DNA, 25 bp, Probe Sequence
gattgtacagaatcattgcttatga

SEQ ID NO: 242379 - DNA, 25 bp, Probe Sequence
gattgaagcaatttatagctgctta

SEQ ID NO: 242380 - DNA, 25 bp, Probe Sequence
gattgaacttatctgatcgcttgag

SEQ ID NO: 242381 - DNA, 25 bp, Probe Sequence
gattgagaatttctgagcagtgtgt

SEQ ID NO: 242382 - DNA, 25 bp, Probe Sequence
gattgtcagtttcttgagggctccc

SEQ ID NO: 242383 - DNA, 25 bp, Probe Sequence
gttggcagttgttatctacagaatc

SEQ ID NO: 242384 - DNA, 25 bp, Probe Sequence
gattggagtctggccattggctgga

SEQ ID NO: 242385 - DNA, 25 bp, Probe Sequence
gattgtgagctggggcattggctgc

SEQ ID NO: 242386 - DNA, 25 bp, Probe Sequence
gattgcgcacgtgggaatggcagac

SEQ ID NO: 242387 - DNA, 25 bp, Probe Sequence
gattggctcatcagtgaagcgcagt

SEQ ID NO: 242388 - DNA, 25 bp, Probe Sequence
gttgaccatcttcagagccgggtac

SEQ ID NO: 242389 - DNA, 25 bp, Probe Sequence
gttggtgattggcaggatcctggta

SEQ ID NO: 242390 - DNA, 25 bp, Probe Sequence
gttgggcttgtgcctagattaggag

SEQ ID NO: 242391 - DNA, 25 bp, Probe Sequence
gttggtgtggatcctaaccggaact

SEQ ID NO: 242392 - DNA, 25 bp, Probe Sequence
gttgtggaggagctaactcggatcc

SEQ ID NO: 242393 - DNA, 25 bp, Probe Sequence
gttgtgggggtttgtcttgtgcact

SEQ ID NO: 242394 - DNA, 25 bp, Probe Sequence
gttgctgggcggatgatgtttacta

SEQ ID NO: 242395 - DNA, 25 bp, Probe Sequence
gttggaggctaaagaagttctcaaa

SEQ ID NO: 242396 - DNA, 25 bp, Probe Sequence
gattggatttacagtggtttcagca

SEQ ID NO: 242397 - DNA, 25 bp, Probe Sequence
gattgtcctacaatttggattttga

SEQ ID NO: 242398 - DNA, 25 bp, Probe Sequence
gattgtttgaacacatgtatttata

SEQ ID NO: 242399 - DNA, 25 bp, Probe Sequence
gattgaatctgattggacattttct

SEQ ID NO: 242400 - DNA, 25 bp, Probe Sequence
gattgaatttattcagcatttttac

SEQ ID NO: 242401 - DNA, 25 bp, Probe Sequence
gattgagtttcaacagcatctctgc

SEQ ID NO: 242402 - DNA, 25 bp, Probe Sequence
gattgagtttcaacagcatctctgc

SEQ ID NO: 242403 - DNA, 25 bp, Probe Sequence
cacatggtgcactgcagtcttctgg

SEQ ID NO: 242404 - DNA, 25 bp, Probe Sequence
gattgtttttcattgtcactggact

SEQ ID NO: 242405 - DNA, 25 bp, Probe Sequence
gttgttataatttgtactgaacttc

SEQ ID NO: 242406 - DNA, 25 bp, Probe Sequence
gttgttattgatttttggcaatttt

SEQ ID NO: 242407 - DNA, 25 bp, Probe Sequence
gttgtgtactacgtttggtattttg

SEQ ID NO: 242408 - DNA, 25 bp, Probe Sequence
gttgtgtccatagctttagtcttcc

SEQ ID NO: 242409 - DNA, 25 bp, Probe Sequence
gttgttgttgttgttgcagttcccc

SEQ ID NO: 242410 - DNA, 25 bp, Probe Sequence
gttggtcttgtacatgcgcagtgtc

SEQ ID NO: 242411 - DNA, 25 bp, Probe Sequence
gttgttttgaagatggcattttgct

SEQ ID NO: 242412 - DNA, 25 bp, Probe Sequence
gttgttttcaggcagcgtctgtgaa

SEQ ID NO: 242413 - DNA, 25 bp, Probe Sequence
gttgttgttggacgcagggcggcac

SEQ ID NO: 242414 - DNA, 25 bp, Probe Sequence
gttggccattggtactgggcaggat

SEQ ID NO: 242415 - DNA, 25 bp, Probe Sequence
gattgacggtggtgctgaggcatga

SEQ ID NO: 242416 - DNA, 25 bp, Probe Sequence
gattgacgtgggggaagctgaacca

SEQ ID NO: 242417 - DNA, 25 bp, Probe Sequence
gttgaggtgcgagttacaccaacca

SEQ ID NO: 242418 - DNA, 25 bp, Probe Sequence
gtgttgtgtcgtgtatccgaacctg

SEQ ID NO: 242419 - DNA, 25 bp, Probe Sequence
gttgtgtacgtgttattccaagcct

SEQ ID NO: 242420 - DNA, 25 bp, Probe Sequence
gttggcattactgttgttaagcact

SEQ ID NO: 242421 - DNA, 25 bp, Probe Sequence
gttgattgtactcatgctgttccac

SEQ ID NO: 242422 - DNA, 25 bp, Probe Sequence
gttgtggtcagtatgtctcctgcac

SEQ ID NO: 242423 - DNA, 25 bp, Probe Sequence
gttggagtgagatgtcttccatatc

SEQ ID NO: 242424 - DNA, 25 bp, Probe Sequence
gttgagggcatttggcttcctctgc

SEQ ID NO: 242425 - DNA, 25 bp, Probe Sequence
gttgggtgaactggtattgctgctg

SEQ ID NO: 242426 - DNA, 25 bp, Probe Sequence
gttctggtaaactgattgctggcaa

SEQ ID NO: 242427 - DNA, 25 bp, Probe Sequence
gttctggtaaactgattgctggcaa

SEQ ID NO: 242428 - DNA, 25 bp, Probe Sequence
gattgataatagccttgcatgttgt

SEQ ID NO: 242429 - DNA, 25 bp, Probe Sequence
gattggagatgtcctttgcattgct

SEQ ID NO: 242430 - DNA, 25 bp, Probe Sequence
gttggaggctgcattgagctatggt

SEQ ID NO: 242431 - DNA, 25 bp, Probe Sequence
gattgtaggatcatatggcgtatat

SEQ ID NO: 242432 - DNA, 25 bp, Probe Sequence
gttcaaagtcgtagggcttataaag

SEQ ID NO: 242433 - DNA, 25 bp, Probe Sequence
gttcaaaacgaagactagctattaa

SEQ ID NO: 242434 - DNA, 25 bp, Probe Sequence
gattggaaaggccagtactgtttta

SEQ ID NO: 242435 - DNA, 25 bp, Probe Sequence
gttggacacagacggcaactccttt

SEQ ID NO: 242436 - DNA, 25 bp, Probe Sequence
gttggaaggatggggactctctcaa

SEQ ID NO: 242437 - DNA, 25 bp, Probe Sequence
gttgtgaaggtgtctaccattctac

SEQ ID NO: 242438 - DNA, 25 bp, Probe Sequence
gttgtgaaagtacttcctgtaaggc

SEQ ID NO: 242439 - DNA, 25 bp, Probe Sequence
gttgttcaggttcattcgtcaaagt

SEQ ID NO: 242440 - DNA, 25 bp, Probe Sequence
gttgttaggggcgcagcgtcaggtg

SEQ ID NO: 242441 - DNA, 25 bp, Probe Sequence
tgttgttccggatccaggttaccta

SEQ ID NO: 242442 - DNA, 25 bp, Probe Sequence
gggcttgggtgagcccagcttgacc

SEQ ID NO: 242443 - DNA, 25 bp, Probe Sequence
gtagaaggttgcacccacatataaa

SEQ ID NO: 242444 - DNA, 25 bp, Probe Sequence
gttgatacgttctgctccatttaat

SEQ ID NO: 242445 - DNA, 25 bp, Probe Sequence
gttgtacgttttgaagtgctgatta

SEQ ID NO: 242446 - DNA, 25 bp, Probe Sequence
gattgtaagattttgataagactga

SEQ ID NO: 242447 - DNA, 25 bp, Probe Sequence
gttgtgtatgaagtatctcaaactg

SEQ ID NO: 242448 - DNA, 25 bp, Probe Sequence
gattggaagatagcactctagagtg

SEQ ID NO: 242449 - DNA, 25 bp, Probe Sequence
gttggagtgagagcctcttggaggt

SEQ ID NO: 242450 - DNA, 25 bp, Probe Sequence
gttggcttatacacctctggatgag

SEQ ID NO: 242451 - DNA, 25 bp, Probe Sequence
gttgtgttcaatttactctggtatt

SEQ ID NO: 242452 - DNA, 25 bp, Probe Sequence
gttggttgccactttaggtctattc

SEQ ID NO: 242453 - DNA, 25 bp, Probe Sequence
gttggcttcccaatgtagagttaaa

SEQ ID NO: 242454 - DNA, 25 bp, Probe Sequence
gttgcagctgtcaccactacagtaa

SEQ ID NO: 242455 - DNA, 25 bp, Probe Sequence
gttgcagctgtcaccactacagtaa

SEQ ID NO: 242456 - DNA, 25 bp, Probe Sequence
gttgatatgtatgcccatagcctag

SEQ ID NO: 242457 - DNA, 25 bp, Probe Sequence
gattgtagcatagcctgacagctct

SEQ ID NO: 242458 - DNA, 25 bp, Probe Sequence
gattgtgtgaaactgcccagctcag

SEQ ID NO: 242459 - DNA, 25 bp, Probe Sequence
gattgtgatgtacctcagccacata

SEQ ID NO: 242460 - DNA, 25 bp, Probe Sequence
gattgtagtcatcctgaaaatgggt

SEQ ID NO: 242461 - DNA, 25 bp, Probe Sequence
gattgtaaatacaccgatgggcact

SEQ ID NO: 242462 - DNA, 25 bp, Probe Sequence
gattggcaaatcacccagggtcaca

SEQ ID NO: 242463 - DNA, 25 bp, Probe Sequence
gtttgcggatgcacaccgacctaaa

SEQ ID NO: 242464 - DNA, 25 bp, Probe Sequence
gtttgcggatgcacaccgacctaaa

SEQ ID NO: 242465 - DNA, 25 bp, Probe Sequence
gtttcaggagctcttctaggtaaag

SEQ ID NO: 242466 - DNA, 25 bp, Probe Sequence
gattgtaaatctcattctagctgta

SEQ ID NO: 242467 - DNA, 25 bp, Probe Sequence
gattgacaaactgatgatcgagatg

SEQ ID NO: 242468 - DNA, 25 bp, Probe Sequence
gttggcaagactgtactgatcatgg

SEQ ID NO: 242469 - DNA, 25 bp, Probe Sequence
gttgtgaagcactttttgagtggga

SEQ ID NO: 242470 - DNA, 25 bp, Probe Sequence
gattgtaatccagtcttctggtgga

SEQ ID NO: 242471 - DNA, 25 bp, Probe Sequence
gattgaggaacagttgactttggaa

SEQ ID NO: 242472 - DNA, 25 bp, Probe Sequence
gattgatgtgcaacaagtgtctttg

SEQ ID NO: 242473 - DNA, 25 bp, Probe Sequence
gttgaggctcacaagttgctctttc

SEQ ID NO: 242474 - DNA, 25 bp, Probe Sequence
gttggggacaatcatgtgcacttcc

SEQ ID NO: 242475 - DNA, 25 bp, Probe Sequence
gttggcccacaactaataggacctc

SEQ ID NO: 242476 - DNA, 25 bp, Probe Sequence
gttaggcccaaatatactatcttat

SEQ ID NO: 242477 - DNA, 25 bp, Probe Sequence
gttaggcctacatcgtggaattttt

SEQ ID NO: 242478 - DNA, 25 bp, Probe Sequence
gttgaaccaattgggtggatttgat

SEQ ID NO: 242479 - DNA, 25 bp, Probe Sequence
gttgagtctcctgtgcagaagtttg

SEQ ID NO: 242480 - DNA, 25 bp, Probe Sequence
gttgcagttcattttggagaacttg

SEQ ID NO: 242481 - DNA, 25 bp, Probe Sequence
gttgcccttatgttggaatacttct

SEQ ID NO: 242482 - DNA, 25 bp, Probe Sequence
gttggtttatgtgctgaaatgtctt

SEQ ID NO: 242483 - DNA, 25 bp, Probe Sequence
gttggttgtttggttagtgactgat

SEQ ID NO: 242484 - DNA, 25 bp, Probe Sequence
gttgggttttgatttatataagtag

SEQ ID NO: 242485 - DNA, 25 bp, Probe Sequence
gttggtgttttgtatggatcacaag

SEQ ID NO: 242486 - DNA, 25 bp, Probe Sequence
gttgttgttcctttgaatacagacg

SEQ ID NO: 242487 - DNA, 25 bp, Probe Sequence
gttgttgtatacccaaatacgcacc

SEQ ID NO: 242488 - DNA, 25 bp, Probe Sequence
gttgttggtggtacatattcaggcc

SEQ ID NO: 242489 - DNA, 25 bp, Probe Sequence
gattgtcgtgtttgactgactcgga

SEQ ID NO: 242490 - DNA, 25 bp, Probe Sequence
gattgtgatttaagactactgcagg

SEQ ID NO: 242491 - DNA, 25 bp, Probe Sequence
gattggatttgagacccatcagact

SEQ ID NO: 242492 - DNA, 25 bp, Probe Sequence
gattggaattattcatcccctttga

SEQ ID NO: 242493 - DNA, 25 bp, Probe Sequence
gattgtaacatgtgcagaccctata

SEQ ID NO: 242494 - DNA, 25 bp, Probe Sequence
gttgttctcattacaacccttctgg

SEQ ID NO: 242495 - DNA, 25 bp, Probe Sequence
gttccccatagtgacgccaatagga

SEQ ID NO: 242496 - DNA, 25 bp, Probe Sequence
gttccaagtgaagtacccaatgagg

SEQ ID NO: 242497 - DNA, 25 bp, Probe Sequence
gttgctctattggactaccgtgagg

SEQ ID NO: 242498 - DNA, 25 bp, Probe Sequence
gttgtagttagagacactgtagctg

SEQ ID NO: 242499 - DNA, 25 bp, Probe Sequence
gttgtcagtatatgctccagcttca

SEQ ID NO: 242500 - DNA, 25 bp, Probe Sequence
gttgtcagtatatgctccagcttca

SEQ ID NO: 242501 - DNA, 25 bp, Probe Sequence
gttgtagtgaagctctcacccataa

SEQ ID NO: 242502 - DNA, 25 bp, Probe Sequence
gttgtcagctaaacctcctgcaaaa

SEQ ID NO: 242503 - DNA, 25 bp, Probe Sequence
gttgtctggaattcgctgctgtgaa

SEQ ID NO: 242504 - DNA, 25 bp, Probe Sequence
gattgtgtggtaatcctgtggagag

SEQ ID NO: 242505 - DNA, 25 bp, Probe Sequence
gattgtgttttcttcttggatagaa

SEQ ID NO: 242506 - DNA, 25 bp, Probe Sequence
gattggcttgtttttatgtggcgcc

SEQ ID NO: 242507 - DNA, 25 bp, Probe Sequence
gttggcttctgtttctagttgagga

SEQ ID NO: 242508 - DNA, 25 bp, Probe Sequence
gttggcttctgtttctagttgagga

SEQ ID NO: 242509 - DNA, 25 bp, Probe Sequence
gttggctttggatgtctttgctgca

SEQ ID NO: 242510 - DNA, 25 bp, Probe Sequence
gttggctttggatgtctttgctgca

SEQ ID NO: 242511 - DNA, 25 bp, Probe Sequence
gttggctttggatgtctttgctgca

SEQ ID NO: 242512 - DNA, 25 bp, Probe Sequence
gattggaattggagaccttcacaga

SEQ ID NO: 242513 - DNA, 25 bp, Probe Sequence
gttggatatttgaggccatgcttaa

SEQ ID NO: 242514 - DNA, 25 bp, Probe Sequence
gttgaaatggtgagtgtatcctgaa

SEQ ID NO: 242515 - DNA, 25 bp, Probe Sequence
gttgaaagactgaaagcttcctccc

SEQ ID NO: 242516 - DNA, 25 bp, Probe Sequence
gttgatagacactttggttgattcc

SEQ ID NO: 242517 - DNA, 25 bp, Probe Sequence
gttgatgggcacttgagaactttcc

SEQ ID NO: 242518 - DNA, 25 bp, Probe Sequence
gttgagtggcactgataactggtga

SEQ ID NO: 242519 - DNA, 25 bp, Probe Sequence
gttagtgccacagcacctgggtatg

SEQ ID NO: 242520 - DNA, 25 bp, Probe Sequence
gttgagacgtgattaccgggttggg

SEQ ID NO: 242521 - DNA, 25 bp, Probe Sequence
gttggaggtgtttgtactggtttgg

SEQ ID NO: 242522 - DNA, 25 bp, Probe Sequence
gttggggtttttaatgtgattgtgt

SEQ ID NO: 242523 - DNA, 25 bp, Probe Sequence
gttgtgggaatactaaagcagtttt

SEQ ID NO: 242524 - DNA, 25 bp, Probe Sequence
gttgtggctgtacttaaagcaatac

SEQ ID NO: 242525 - DNA, 25 bp, Probe Sequence
gattggcggctcattcaaaaatcct

SEQ ID NO: 242526 - DNA, 25 bp, Probe Sequence
gattgtgggactttaccaaatcggt

SEQ ID NO: 242527 - DNA, 25 bp, Probe Sequence
gattgtgttccttttccacagattg

SEQ ID NO: 242528 - DNA, 25 bp, Probe Sequence
gttccattcctacctctaaggtgat

SEQ ID NO: 242529 - DNA, 25 bp, Probe Sequence
gttgcctgggtaccaccagagggaa

SEQ ID NO: 242530 - DNA, 25 bp, Probe Sequence
gttgcctgggtaccaccagagggaa

SEQ ID NO: 242531 - DNA, 25 bp, Probe Sequence
gttggcttggtttcaataaggaacg

SEQ ID NO: 242532 - DNA, 25 bp, Probe Sequence
gttgcgttagtttctgtcatcagga

SEQ ID NO: 242533 - DNA, 25 bp, Probe Sequence
gattggtcgtttttgatgctcgatg

SEQ ID NO: 242534 - DNA, 25 bp, Probe Sequence
gattgttcgtgtaactgacagagat

SEQ ID NO: 242535 - DNA, 25 bp, Probe Sequence
gattggccttgtccttaaggatatt

SEQ ID NO: 242536 - DNA, 25 bp, Probe Sequence
gttggcctttggacttaggatttct

SEQ ID NO: 242537 - DNA, 25 bp, Probe Sequence
gttgtgtctcatacagtgcttagga

SEQ ID NO: 242538 - DNA, 25 bp, Probe Sequence
gttgtccatcagtctgatttaggca

SEQ ID NO: 242539 - DNA, 25 bp, Probe Sequence
gattgttcatagttgcttctcagca

SEQ ID NO: 242540 - DNA, 25 bp, Probe Sequence
gattgtgcccagttctatgacatca

SEQ ID NO: 242541 - DNA, 25 bp, Probe Sequence
gttggctggcagctgtatgatgtcc

SEQ ID NO: 242542 - DNA, 25 bp, Probe Sequence
gttgtgcacgcagattagcaggcca

SEQ ID NO: 242543 - DNA, 25 bp, Probe Sequence
gttgtgacatcatatctgataacca

SEQ ID NO: 242544 - DNA, 25 bp, Probe Sequence
gttggccacaacattatgattattc

SEQ ID NO: 242545 - DNA, 25 bp, Probe Sequence
gttggccacaacattatgattattc

SEQ ID NO: 242546 - DNA, 25 bp, Probe Sequence
gttgggcaaacttctgatcgttggt

SEQ ID NO: 242547 - DNA, 25 bp, Probe Sequence
gttggtattgacatctttactggga

SEQ ID NO: 242548 - DNA, 25 bp, Probe Sequence
gttgtgtttgcggtggttgacgtag

SEQ ID NO: 242549 - DNA, 25 bp, Probe Sequence
gattgtgttcgagggagtgataggg

SEQ ID NO: 242550 - DNA, 25 bp, Probe Sequence
gattgtgttcgagggagtgataggg

SEQ ID NO: 242551 - DNA, 25 bp, Probe Sequence
gttgtttcagataggggtcaaggaa

SEQ ID NO: 242552 - DNA, 25 bp, Probe Sequence
gttgttgaagaatgggtgaaggaaa

SEQ ID NO: 242553 - DNA, 25 bp, Probe Sequence
gttgacgttcaattgggtggagtat

SEQ ID NO: 242554 - DNA, 25 bp, Probe Sequence
gttggcctttgcatgggaggcaggt

SEQ ID NO: 242555 - DNA, 25 bp, Probe Sequence
gttgaggctagagttaggaggcaga

SEQ ID NO: 242556 - DNA, 25 bp, Probe Sequence
gttgagcgtggcctacgtgagccaa

SEQ ID NO: 242557 - DNA, 25 bp, Probe Sequence
gttggttgtggcgagcgaggctgaa

SEQ ID NO: 242558 - DNA, 25 bp, Probe Sequence
gattgtcttgtgccaatggttggaa

SEQ ID NO: 242559 - DNA, 25 bp, Probe Sequence
gttgtttagcagagtatctggcaca

SEQ ID NO: 242560 - DNA, 25 bp, Probe Sequence
gttgttgtgcatcaaattcgacagc

SEQ ID NO: 242561 - DNA, 25 bp, Probe Sequence
gattggtgagcagaagttctccagc

SEQ ID NO: 242562 - DNA, 25 bp, Probe Sequence
gttgcagtgagccgaaattgtgcca

SEQ ID NO: 242563 - DNA, 25 bp, Probe Sequence
gttggtgacttgctattctgccaaa

SEQ ID NO: 242564 - DNA, 25 bp, Probe Sequence
gttgtctacatgtgtgacctgcaca

SEQ ID NO: 242565 - DNA, 25 bp, Probe Sequence
gttgtcattgctccagataccagcc

SEQ ID NO: 242566 - DNA, 25 bp, Probe Sequence
gttgtcatttgaagatcacaccttt

SEQ ID NO: 242567 - DNA, 25 bp, Probe Sequence
gttggttctgaaacagcctcttagc

SEQ ID NO: 242568 - DNA, 25 bp, Probe Sequence
gttggtatggaaatctggactgaca

SEQ ID NO: 242569 - DNA, 25 bp, Probe Sequence
gttggctgtggaatatccgatgctt

SEQ ID NO: 242570 - DNA, 25 bp, Probe Sequence
gttggtgcagtaatgattgcgattt

SEQ ID NO: 242571 - DNA, 25 bp, Probe Sequence
gttgactggataatgaagactatgc

SEQ ID NO: 242572 - DNA, 25 bp, Probe Sequence
gttggctccatgaccaagatctatg

SEQ ID NO: 242573 - DNA, 25 bp, Probe Sequence
gttggtgcacagagattgacttgat

SEQ ID NO: 242574 - DNA, 25 bp, Probe Sequence
gattggtagagaattggatattgta

SEQ ID NO: 242575 - DNA, 25 bp, Probe Sequence
gattggtggataatatggtagttct

SEQ ID NO: 242576 - DNA, 25 bp, Probe Sequence
gattggatggaaccagagcctgtct

SEQ ID NO: 242577 - DNA, 25 bp, Probe Sequence
gttggatgcctacatggcgcagaca

SEQ ID NO: 242578 - DNA, 25 bp, Probe Sequence
gttgtttctgcaccatggtataccc

SEQ ID NO: 242579 - DNA, 25 bp, Probe Sequence
gttggcttctgaactggaattctgc

SEQ ID NO: 242580 - DNA, 25 bp, Probe Sequence
gttggcacctggatggagtgctctg

SEQ ID NO: 242581 - DNA, 25 bp, Probe Sequence
gattggcacctagtggctgggagct

SEQ ID NO: 242582 - DNA, 25 bp, Probe Sequence
gttgatcacctgagttgggattttg

SEQ ID NO: 242583 - DNA, 25 bp, Probe Sequence
gttgatactgtgggttatttttgtg

SEQ ID NO: 242584 - DNA, 25 bp, Probe Sequence
gttttcatcccgctaatcttgggaa

SEQ ID NO: 242585 - DNA, 25 bp, Probe Sequence
gttctgtgacccgggaagctttggt

SEQ ID NO: 242586 - DNA, 25 bp, Probe Sequence
gttggagacccctgaatcttgggct

SEQ ID NO: 242587 - DNA, 25 bp, Probe Sequence
gattggaaacctgccgacttagtgc

SEQ ID NO: 242588 - DNA, 25 bp, Probe Sequence
gattgtgaaatccagtcctgataaa

SEQ ID NO: 242589 - DNA, 25 bp, Probe Sequence
gattgtgagactgcttccttgaaac

SEQ ID NO: 242590 - DNA, 25 bp, Probe Sequence
gattggagacgcttctccttgtgca

SEQ ID NO: 242591 - DNA, 25 bp, Probe Sequence
gattggcaaatgttgtctctcattg

SEQ ID NO: 242592 - DNA, 25 bp, Probe Sequence
gattgtgataatttgcaacatagta

SEQ ID NO: 242593 - DNA, 25 bp, Probe Sequence
gattgtgacctagtagacttggacg

SEQ ID NO: 242594 - DNA, 25 bp, Probe Sequence
gttggacctcattagcaaaggagag

SEQ ID NO: 242595 - DNA, 25 bp, Probe Sequence
gttgtacgcccaggcaacaagggct

SEQ ID NO: 242596 - DNA, 25 bp, Probe Sequence
gttgtactcgccgacggcaaagtcc

SEQ ID NO: 242597 - DNA, 25 bp, Probe Sequence
gttctagggccgtcaggacacggga

SEQ ID NO: 242598 - DNA, 25 bp, Probe Sequence
gttccggaccattcaggagaaggaa

SEQ ID NO: 242599 - DNA, 25 bp, Probe Sequence
gttccaggattgctccaggtttgag

SEQ ID NO: 242600 - DNA, 25 bp, Probe Sequence
gtaccaggtggtgactgtttaactc

SEQ ID NO: 242601 - DNA, 25 bp, Probe Sequence
gtacgcgaaggatatcggtttcatt

SEQ ID NO: 242602 - DNA, 25 bp, Probe Sequence
gttcagccaaggggacggtctgggc

SEQ ID NO: 242603 - DNA, 25 bp, Probe Sequence
gttccccctgcaggagcaggttctt

SEQ ID NO: 242604 - DNA, 25 bp, Probe Sequence
gttcacccgtaatgagaaacttcga

SEQ ID NO: 242605 - DNA, 25 bp, Probe Sequence
gttcacccgcagcggaaaaggccca

SEQ ID NO: 242606 - DNA, 25 bp, Probe Sequence
gttcccaggagcagcaaaggggcct

SEQ ID NO: 242607 - DNA, 25 bp, Probe Sequence
gttgccctggaatgtacgggaccca

SEQ ID NO: 242608 - DNA, 25 bp, Probe Sequence
gttgtagcggaaggaattgcgggcc

SEQ ID NO: 242609 - DNA, 25 bp, Probe Sequence
gttggggtgaaggacatggcagcag

SEQ ID NO: 242610 - DNA, 25 bp, Probe Sequence
gttgaggggaaggagccaggcacag

SEQ ID NO: 242611 - DNA, 25 bp, Probe Sequence
gttcgggaagcaggagccagggagt

SEQ ID NO: 242612 - DNA, 25 bp, Probe Sequence
gttcgcgtcccagtacgggaatgag

SEQ ID NO: 242613 - DNA, 25 bp, Probe Sequence
gttctgtgtttcctacggaaataag

SEQ ID NO: 242614 - DNA, 25 bp, Probe Sequence
gttcgtggtgagctacgccaaggac

SEQ ID NO: 242615 - DNA, 25 bp, Probe Sequence
gtttggttgatggttaccagggtca

SEQ ID NO: 242616 - DNA, 25 bp, Probe Sequence
gttgggattgatattaggctggtgc

SEQ ID NO: 242617 - DNA, 25 bp, Probe Sequence
gttgactgacgagccgaggggtggc

SEQ ID NO: 242618 - DNA, 25 bp, Probe Sequence
gttgcacgaaacacactggggaatg

SEQ ID NO: 242619 - DNA, 25 bp, Probe Sequence
gttgtgctacattctctagagggga

SEQ ID NO: 242620 - DNA, 25 bp, Probe Sequence
gttgtctattatctgtaggtggaag

SEQ ID NO: 242621 - DNA, 25 bp, Probe Sequence
gttgtgcgcttaacgtgagggtggg

SEQ ID NO: 242622 - DNA, 25 bp, Probe Sequence
gttggcccaaaggttgccctgaagc

SEQ ID NO: 242623 - DNA, 25 bp, Probe Sequence
gtgtacccactgggtatccgttaga

SEQ ID NO: 242624 - DNA, 25 bp, Probe Sequence
gttacccaattggtgatacgatctt

SEQ ID NO: 242625 - DNA, 25 bp, Probe Sequence
gttacccaattggtgatacgatctt

SEQ ID NO: 242626 - DNA, 25 bp, Probe Sequence
gttcccgataagatgaactcccttg

SEQ ID NO: 242627 - DNA, 25 bp, Probe Sequence
gttccagcaattattaatcctttag

SEQ ID NO: 242628 - DNA, 25 bp, Probe Sequence
gttcctggagcaagttaaatctttg

SEQ ID NO: 242629 - DNA, 25 bp, Probe Sequence
gttcctggacttcggatcagtgaat

SEQ ID NO: 242630 - DNA, 25 bp, Probe Sequence
gttggtggatcacctgagatcagga

SEQ ID NO: 242631 - DNA, 25 bp, Probe Sequence
gttggtctcatacctcatatgcagg

SEQ ID NO: 242632 - DNA, 25 bp, Probe Sequence
gttgatgtgcgtttgtgcatatgcg

SEQ ID NO: 242633 - DNA, 25 bp, Probe Sequence
gttgatggcgatggaggatggagga

SEQ ID NO: 242634 - DNA, 25 bp, Probe Sequence
gttgcagctcgacatggattacaga

SEQ ID NO: 242635 - DNA, 25 bp, Probe Sequence
gttgaccttgttgattgagcatgac

SEQ ID NO: 242636 - DNA, 25 bp, Probe Sequence
gttgaccttgttgattgagcatgac

SEQ ID NO: 242637 - DNA, 25 bp, Probe Sequence
gttgaacattgattgtttggtaccg

SEQ ID NO: 242638 - DNA, 25 bp, Probe Sequence
gttgtgactctatgtttgctccaga

SEQ ID NO: 242639 - DNA, 25 bp, Probe Sequence
gttggttgtatgggttgctctaagg

SEQ ID NO: 242640 - DNA, 25 bp, Probe Sequence
gttgtgttgtagggttgcaggtttt

SEQ ID NO: 242641 - DNA, 25 bp, Probe Sequence
gttggttaatagttgtgcagttttt

SEQ ID NO: 242642 - DNA, 25 bp, Probe Sequence
gttgtgttcactacattgtgcaatt

SEQ ID NO: 242643 - DNA, 25 bp, Probe Sequence
gttgtgtctgaaaatatctcttgtg

SEQ ID NO: 242644 - DNA, 25 bp, Probe Sequence
gttgatgctgagatccatatttagt

SEQ ID NO: 242645 - DNA, 25 bp, Probe Sequence
gttggtcagttctacttcttgatcc

SEQ ID NO: 242646 - DNA, 25 bp, Probe Sequence
gattggccagtttggtgtcggtttc

SEQ ID NO: 242647 - DNA, 25 bp, Probe Sequence
gttggttgtgtgtgtgtgtgttttc

SEQ ID NO: 242648 - DNA, 25 bp, Probe Sequence
gttgttgtgtggttgttgctgtgat

SEQ ID NO: 242649 - DNA, 25 bp, Probe Sequence
gttgggatgtgttatgttgtatgta

SEQ ID NO: 242650 - DNA, 25 bp, Probe Sequence
gttgctggtgttttgccatttaaag

SEQ ID NO: 242651 - DNA, 25 bp, Probe Sequence
gttgtgtctaatctccttctgagaa

SEQ ID NO: 242652 - DNA, 25 bp, Probe Sequence
gttgatgttaactgagctactagag

SEQ ID NO: 242653 - DNA, 25 bp, Probe Sequence
gttgatgttaactgagctactagag

SEQ ID NO: 242654 - DNA, 25 bp, Probe Sequence
gttgatgttaactgagctactagag

SEQ ID NO: 242655 - DNA, 25 bp, Probe Sequence
gttgatgttaactgagctactagag

SEQ ID NO: 242656 - DNA, 25 bp, Probe Sequence
gttgtcgtgtataagagctacttcc

SEQ ID NO: 242657 - DNA, 25 bp, Probe Sequence
gttgtctctgtgtacagaatacata

SEQ ID NO: 242658 - DNA, 25 bp, Probe Sequence
gttgtctcttttcaaaccaaattgg

SEQ ID NO: 242659 - DNA, 25 bp, Probe Sequence
gttgtgcacttttacaagccgcaaa

SEQ ID NO: 242660 - DNA, 25 bp, Probe Sequence
gttgttgatttttgattccgctata

SEQ ID NO: 242661 - DNA, 25 bp, Probe Sequence
gttggctgcatattttgtggcccca

SEQ ID NO: 242662 - DNA, 25 bp, Probe Sequence
gttggctgcatattttgtggcccca

SEQ ID NO: 242663 - DNA, 25 bp, Probe Sequence
gttggtgtgaaattggagcctctcg

SEQ ID NO: 242664 - DNA, 25 bp, Probe Sequence
gttggtgtgaaactcggctgtatta

SEQ ID NO: 242665 - DNA, 25 bp, Probe Sequence
gttggggaaatgctgactacagtag

SEQ ID NO: 242666 - DNA, 25 bp, Probe Sequence
gttgttaaacagcaggccactgtca

SEQ ID NO: 242667 - DNA, 25 bp, Probe Sequence
gttgaaagacacccagtgcacaccc

SEQ ID NO: 242668 - DNA, 25 bp, Probe Sequence
gttgaaagacacccagtgcacaccc

SEQ ID NO: 242669 - DNA, 25 bp, Probe Sequence
gttgagggagcagacggtgcactac

SEQ ID NO: 242670 - DNA, 25 bp, Probe Sequence
gttggtggagctgtcggctgagaac

SEQ ID NO: 242671 - DNA, 25 bp, Probe Sequence
gttgagagcgctgggttgactaacc

SEQ ID NO: 242672 - DNA, 25 bp, Probe Sequence
gttgaccccggaatatctggagctc

SEQ ID NO: 242673 - DNA, 25 bp, Probe Sequence
gttgtcaccactttattctggaggc

SEQ ID NO: 242674 - DNA, 25 bp, Probe Sequence
gttgccaaactataccatggagggg

SEQ ID NO: 242675 - DNA, 25 bp, Probe Sequence
gtctcttgaaaacacgggaggttgc

SEQ ID NO: 242676 - DNA, 25 bp, Probe Sequence
gttctttataaagcctgtaggttct

SEQ ID NO: 242677 - DNA, 25 bp, Probe Sequence
gttgctgtcgattaagaccggagct

SEQ ID NO: 242678 - DNA, 25 bp, Probe Sequence
gttggtcaacagacagatccagttt

SEQ ID NO: 242679 - DNA, 25 bp, Probe Sequence
gttgagtctatctcagtgccagata

SEQ ID NO: 242680 - DNA, 25 bp, Probe Sequence
gttggcacttctgccatgagcagag

SEQ ID NO: 242681 - DNA, 25 bp, Probe Sequence
gttggactgttgccacagtgcagtg

SEQ ID NO: 242682 - DNA, 25 bp, Probe Sequence
gttggagttctggcagcagggtgtc

SEQ ID NO: 242683 - DNA, 25 bp, Probe Sequence
gttgtcgctacagcaagaggtgccc

SEQ ID NO: 242684 - DNA, 25 bp, Probe Sequence
gttgtcctacatgcaagtacatgtt

SEQ ID NO: 242685 - DNA, 25 bp, Probe Sequence
gttgtcaaatgttaagtcctctatt

SEQ ID NO: 242686 - DNA, 25 bp, Probe Sequence
gttgtacacttttagtagtcatagt

SEQ ID NO: 242687 - DNA, 25 bp, Probe Sequence
gttgtcatctctctgtaatagataa

SEQ ID NO: 242688 - DNA, 25 bp, Probe Sequence
gttgtgcattgttgtggtccagaaa

SEQ ID NO: 242689 - DNA, 25 bp, Probe Sequence
gttgcggttagggatcacaatgcta

SEQ ID NO: 242690 - DNA, 25 bp, Probe Sequence
gttggcactaggagtcatcagatct

SEQ ID NO: 242691 - DNA, 25 bp, Probe Sequence
gttgtcacatcaaaggatacagcat

SEQ ID NO: 242692 - DNA, 25 bp, Probe Sequence
gttgaatgataatagctcacagcac

SEQ ID NO: 242693 - DNA, 25 bp, Probe Sequence
gttgcaaactgctgaccacgccgaa

SEQ ID NO: 242694 - DNA, 25 bp, Probe Sequence
gttgaaacactcgatcagaaggcag

SEQ ID NO: 242695 - DNA, 25 bp, Probe Sequence
gttgaaatcactttctgtagtcaaa

SEQ ID NO: 242696 - DNA, 25 bp, Probe Sequence
gttggatatcaacactgatggtgca

SEQ ID NO: 242697 - DNA, 25 bp, Probe Sequence
gttgagtacatatactgacagctca

SEQ ID NO: 242698 - DNA, 25 bp, Probe Sequence
gttggtatgatattccaggcagctc

SEQ ID NO: 242699 - DNA, 25 bp, Probe Sequence
gttgtgctagtttctaggaatacaa

SEQ ID NO: 242700 - DNA, 25 bp, Probe Sequence
gttgttcaagtttatgcagacacac

SEQ ID NO: 242701 - DNA, 25 bp, Probe Sequence
gttgttcaagtttatgcagacacac

SEQ ID NO: 242702 - DNA, 25 bp, Probe Sequence
gtatgtgtaatttgatagccgaccc

SEQ ID NO: 242703 - DNA, 25 bp, Probe Sequence
gttggttattctgagtctgacacag

SEQ ID NO: 242704 - DNA, 25 bp, Probe Sequence
gttggttttatccatgtctctagca

SEQ ID NO: 242705 - DNA, 25 bp, Probe Sequence
gttgagattcttaatctgacttaca

SEQ ID NO: 242706 - DNA, 25 bp, Probe Sequence
gttggtctttctttgacatgttgca

SEQ ID NO: 242707 - DNA, 25 bp, Probe Sequence
gttgtgtttacttttcattcagatt

SEQ ID NO: 242708 - DNA, 25 bp, Probe Sequence
gttgtctgttactcttcacacaagc

SEQ ID NO: 242709 - DNA, 25 bp, Probe Sequence
gttggttttcaatttgctcactggc

SEQ ID NO: 242710 - DNA, 25 bp, Probe Sequence
gttgggctttcatgtgtgtacttga

SEQ ID NO: 242711 - DNA, 25 bp, Probe Sequence
gttgaccatgttgactggatgactt

SEQ ID NO: 242712 - DNA, 25 bp, Probe Sequence
gttgaactgtctggcaagtttctta

SEQ ID NO: 242713 - DNA, 25 bp, Probe Sequence
gttgtcatttccaatatttatatta

SEQ ID NO: 242714 - DNA, 25 bp, Probe Sequence
gttgatctttcagatctttccataa

SEQ ID NO: 242715 - DNA, 25 bp, Probe Sequence
gttgattttggcactatctttatat

SEQ ID NO: 242716 - DNA, 25 bp, Probe Sequence
gttgagggggatactctgtttatga

SEQ ID NO: 242717 - DNA, 25 bp, Probe Sequence
gttgggtggcaaatttgcttctatg

SEQ ID NO: 242718 - DNA, 25 bp, Probe Sequence
gttgaggctaagatatgggtttggt

SEQ ID NO: 242719 - DNA, 25 bp, Probe Sequence
gttgagaggagctctggtcgtttgg

SEQ ID NO: 242720 - DNA, 25 bp, Probe Sequence
gttggagtggtgccaggtactgttt

SEQ ID NO: 242721 - DNA, 25 bp, Probe Sequence
gttggaatggtcaagttatactttt

SEQ ID NO: 242722 - DNA, 25 bp, Probe Sequence
gttgagaagttctgcttaattttaa

SEQ ID NO: 242723 - DNA, 25 bp, Probe Sequence
gttggaagatcctgccttgatttag

SEQ ID NO: 242724 - DNA, 25 bp, Probe Sequence
gttggaaagctatgcctattctcta

SEQ ID NO: 242725 - DNA, 25 bp, Probe Sequence
gttgtatgcataggaccgacatttc

SEQ ID NO: 242726 - DNA, 25 bp, Probe Sequence
gttgttgctgagcaggcgatcacag

SEQ ID NO: 242727 - DNA, 25 bp, Probe Sequence
gttgtctctgatgcagcttatacga

SEQ ID NO: 242728 - DNA, 25 bp, Probe Sequence
gttgcaggtgtccacttaactgact

SEQ ID NO: 242729 - DNA, 25 bp, Probe Sequence
gttgaattgcaccatcgtgaaagat

SEQ ID NO: 242730 - DNA, 25 bp, Probe Sequence
gttgcatactaccctggtgggatgg

SEQ ID NO: 242731 - DNA, 25 bp, Probe Sequence
gttgtatccacagcttctggagcgc

SEQ ID NO: 242732 - DNA, 25 bp, Probe Sequence
gttgtatctctagtcagttcagtag

SEQ ID NO: 242733 - DNA, 25 bp, Probe Sequence
gttgtatgttcagtctcttggaagg

SEQ ID NO: 242734 - DNA, 25 bp, Probe Sequence
gttgatagactagctcttgatcaga

SEQ ID NO: 242735 - DNA, 25 bp, Probe Sequence
gttgatcccatgggccgttcagaac

SEQ ID NO: 242736 - DNA, 25 bp, Probe Sequence
gggctaaatccgcagcaaactgccg

SEQ ID NO: 242737 - DNA, 25 bp, Probe Sequence
cgcagcaaactgccgtgctggcagg

SEQ ID NO: 242738 - DNA, 25 bp, Probe Sequence
acagcaacgtcttgaacaggcgctg

SEQ ID NO: 242739 - DNA, 25 bp, Probe Sequence
cgtcttgaacaggcgctgatgaccc

SEQ ID NO: 242740 - DNA, 25 bp, Probe Sequence
acaggcgctgatgaccccggacacc

SEQ ID NO: 242741 - DNA, 25 bp, Probe Sequence
atattacaacgcggcagcattatga

SEQ ID NO: 242742 - DNA, 25 bp, Probe Sequence
cagcggcatttggtcgggcagccgc

SEQ ID NO: 242743 - DNA, 25 bp, Probe Sequence
gtcgggcagccgcacactatgagca

SEQ ID NO: 242744 - DNA, 25 bp, Probe Sequence
cgcacactatgagcaacatgcagat

SEQ ID NO: 242745 - DNA, 25 bp, Probe Sequence
aacatgcagatctacagcgccagag

SEQ ID NO: 242746 - DNA, 25 bp, Probe Sequence
tacagcgccagagtgctgacgcctt

SEQ ID NO: 242747 - DNA, 25 bp, Probe Sequence
gagtgctgacgccttactggcaatg

SEQ ID NO: 242748 - DNA, 25 bp, Probe Sequence
tactggcaatgcttccacagcgtaa

SEQ ID NO: 242749 - DNA, 25 bp, Probe Sequence
gggttgtggacctggctggatgagc

SEQ ID NO: 242750 - DNA, 25 bp, Probe Sequence
tgagccgccactggcgggaacgtca

SEQ ID NO: 242751 - DNA, 25 bp, Probe Sequence
gcgcaggtgacggccttagatctct

SEQ ID NO: 242752 - DNA, 25 bp, Probe Sequence
gccttagatctctcgccgccaatgc

SEQ ID NO: 242753 - DNA, 25 bp, Probe Sequence
gccgccaatgcttgttcaggcacgc

SEQ ID NO: 242754 - DNA, 25 bp, Probe Sequence
gttggagactgaaccgttgcaagga

SEQ ID NO: 242755 - DNA, 25 bp, Probe Sequence
gttgagacaaattacgaccactgga

SEQ ID NO: 242756 - DNA, 25 bp, Probe Sequence
gttgagacaaattacgaccactgga

SEQ ID NO: 242757 - DNA, 25 bp, Probe Sequence
gttgggcattgtttaaccactgaga

SEQ ID NO: 242758 - DNA, 25 bp, Probe Sequence
gttggcagttgttaagtccttggct

SEQ ID NO: 242759 - DNA, 25 bp, Probe Sequence
gttgggtgagtacaaccttgctgtg

SEQ ID NO: 242760 - DNA, 25 bp, Probe Sequence
gtacctctggtagaattcggctgtg

SEQ ID NO: 242761 - DNA, 25 bp, Probe Sequence
gtaccttaggacacatggggttggg

SEQ ID NO: 242762 - DNA, 25 bp, Probe Sequence
gtacctttggggcatgggggcatta

SEQ ID NO: 242763 - DNA, 25 bp, Probe Sequence
gttcactttgggcctatggattgga

SEQ ID NO: 242764 - DNA, 25 bp, Probe Sequence
gttcctatcaggctgatttttggag

SEQ ID NO: 242765 - DNA, 25 bp, Probe Sequence
gttcctaaagggttactggctcatg

SEQ ID NO: 242766 - DNA, 25 bp, Probe Sequence
gtacctaggggagaaagagccatgt

SEQ ID NO: 242767 - DNA, 25 bp, Probe Sequence
gttactatgagtgaaagggagccag

SEQ ID NO: 242768 - DNA, 25 bp, Probe Sequence
gttgaataggtcttaagtggagatc

SEQ ID NO: 242769 - DNA, 25 bp, Probe Sequence
gttgaaagttcttcctggagcagat

SEQ ID NO: 242770 - DNA, 25 bp, Probe Sequence
gttgtaccatttgcactgtgagcaa

SEQ ID NO: 242771 - DNA, 25 bp, Probe Sequence
gttggcaatcaaagcatgcacttgt

SEQ ID NO: 242772 - DNA, 25 bp, Probe Sequence
gttgtgcctcatggagatgactttc

SEQ ID NO: 242773 - DNA, 25 bp, Probe Sequence
gttgcagcatctggcagtgagactg

SEQ ID NO: 242774 - DNA, 25 bp, Probe Sequence
gttgctatccaggctgtgctatccc

SEQ ID NO: 242775 - DNA, 25 bp, Probe Sequence
gttgaatcaatcatgcactatactg

SEQ ID NO: 242776 - DNA, 25 bp, Probe Sequence
gttgatattgccagcctttcatgag

SEQ ID NO: 242777 - DNA, 25 bp, Probe Sequence
gttgcactacctcggccatgtcatg

SEQ ID NO: 242778 - DNA, 25 bp, Probe Sequence
gtagcaactacttgactgcggctgt

SEQ ID NO: 242779 - DNA, 25 bp, Probe Sequence
gttgacctcctgtactggagagaca

SEQ ID NO: 242780 - DNA, 25 bp, Probe Sequence
gttgacactccctgttcatagagca

SEQ ID NO: 242781 - DNA, 25 bp, Probe Sequence
gttgaacacaagtgctgtcattgca

SEQ ID NO: 242782 - DNA, 25 bp, Probe Sequence
gttggacactggtgccagcatacac

SEQ ID NO: 242783 - DNA, 25 bp, Probe Sequence
gttgtacactggttcaatgaaagga

SEQ ID NO: 242784 - DNA, 25 bp, Probe Sequence
gttggacagtggtttcattcatagg

SEQ ID NO: 242785 - DNA, 25 bp, Probe Sequence
gttggtagtagattcatgttcaagg

SEQ ID NO: 242786 - DNA, 25 bp, Probe Sequence
gttggtaggcacatcgtgtcaagtg

SEQ ID NO: 242787 - DNA, 25 bp, Probe Sequence
gttggtgggagttgcgatgatattg

SEQ ID NO: 242788 - DNA, 25 bp, Probe Sequence
gttgtgactggctttggtgcaaatg

SEQ ID NO: 242789 - DNA, 25 bp, Probe Sequence
gttggattggatgctgctggcaaga

SEQ ID NO: 242790 - DNA, 25 bp, Probe Sequence
gttggatggtgtgctctaaaatact

SEQ ID NO: 242791 - DNA, 25 bp, Probe Sequence
gttgacatgggggctcatcaaacta

SEQ ID NO: 242792 - DNA, 25 bp, Probe Sequence
gttgaagtatgggtctcatcattcc

SEQ ID NO: 242793 - DNA, 25 bp, Probe Sequence
gttgcaagcatcagctgaccagcat

SEQ ID NO: 242794 - DNA, 25 bp, Probe Sequence
gttgttcaggcactgagtcagcatg

SEQ ID NO: 242795 - DNA, 25 bp, Probe Sequence
gttgttggagcactgaccagaacac

SEQ ID NO: 242796 - DNA, 25 bp, Probe Sequence
gttgtgatgtaacagccataagagc

SEQ ID NO: 242797 - DNA, 25 bp, Probe Sequence
gttgatggcaaacatgaaactgatc

SEQ ID NO: 242798 - DNA, 25 bp, Probe Sequence
gttggagcactgaccagaacacttc

SEQ ID NO: 242799 - DNA, 25 bp, Probe Sequence
gtttggactgatgggaatcttcttg

SEQ ID NO: 242800 - DNA, 25 bp, Probe Sequence
gttggagacttgggcaatgtgactg

SEQ ID NO: 242801 - DNA, 25 bp, Probe Sequence
gttggagctttcttgccagaactga

SEQ ID NO: 242802 - DNA, 25 bp, Probe Sequence
gttgagccttgcttaccagcaaaga

SEQ ID NO: 242803 - DNA, 25 bp, Probe Sequence
gttgagtctctgaacatcctaaata

SEQ ID NO: 242804 - DNA, 25 bp, Probe Sequence
gttggatccatgtaatcaccagaat

SEQ ID NO: 242805 - DNA, 25 bp, Probe Sequence
gttggatgcacttagatatggaaaa

SEQ ID NO: 242806 - DNA, 25 bp, Probe Sequence
gttgggatggcattagaggaatcaa

SEQ ID NO: 242807 - DNA, 25 bp, Probe Sequence
gttggagaagcagtgagagtagaca

SEQ ID NO: 242808 - DNA, 25 bp, Probe Sequence
gttcgaccagcggcaggtgtacagg

SEQ ID NO: 242809 - DNA, 25 bp, Probe Sequence
gttccaacagggtgcttacatattt

SEQ ID NO: 242810 - DNA, 25 bp, Probe Sequence
gttccaagacacccacttaagttct

SEQ ID NO: 242811 - DNA, 25 bp, Probe Sequence
gttcctagtccagctttaagtttcg

SEQ ID NO: 242812 - DNA, 25 bp, Probe Sequence
gttgtctaacctggggtcaagtttg

SEQ ID NO: 242813 - DNA, 25 bp, Probe Sequence
gttgcgtgaacactgcagtggggag

SEQ ID NO: 242814 - DNA, 25 bp, Probe Sequence
gtatcctaactgccggtggggagaa

SEQ ID NO: 242815 - DNA, 25 bp, Probe Sequence
gttcctaccagaccggagaggggag

SEQ ID NO: 242816 - DNA, 25 bp, Probe Sequence
gttccaacagcagacgggaggtgtc

SEQ ID NO: 242817 - DNA, 25 bp, Probe Sequence
gttccatcagccgtaccgggcgatg

SEQ ID NO: 242818 - DNA, 25 bp, Probe Sequence
gtttccgtcagtacgcgaaggatat

SEQ ID NO: 242819 - DNA, 25 bp, Probe Sequence
gttgtcctggcaaaaactaggatga

SEQ ID NO: 242820 - DNA, 25 bp, Probe Sequence
gttgtgttaaatagtactagctaga

SEQ ID NO: 242821 - DNA, 25 bp, Probe Sequence
gttgtttatcaacttcgctagaaaa

SEQ ID NO: 242822 - DNA, 25 bp, Probe Sequence
gttgtttatcaacttcgctagaaaa

SEQ ID NO: 242823 - DNA, 25 bp, Probe Sequence
gttgtgtcctggattccgataaaat

SEQ ID NO: 242824 - DNA, 25 bp, Probe Sequence
gttggatcagctcctttacaaaaaa

SEQ ID NO: 242825 - DNA, 25 bp, Probe Sequence
gttgaaccctcggatacgatagaaa

SEQ ID NO: 242826 - DNA, 25 bp, Probe Sequence
gttgagcccccgtatgagaataaat

SEQ ID NO: 242827 - DNA, 25 bp, Probe Sequence
gttaccaccgctctggatcatggta

SEQ ID NO: 242828 - DNA, 25 bp, Probe Sequence
gttgaacagggccctgaagcgcgta

SEQ ID NO: 242829 - DNA, 25 bp, Probe Sequence
gttgtcctggggctgaatgggcaaa

SEQ ID NO: 242830 - DNA, 25 bp, Probe Sequence
gttcccgctggaggtaattggctaa

SEQ ID NO: 242831 - DNA, 25 bp, Probe Sequence
gttgcccctgtacgtggattgggct

SEQ ID NO: 242832 - DNA, 25 bp, Probe Sequence
gttgtgcttctctaggaggttgggt

SEQ ID NO: 242833 - DNA, 25 bp, Probe Sequence
gttgtatgtctttgggtgtttgttt

SEQ ID NO: 242834 - DNA, 25 bp, Probe Sequence
gttgttgttgttgttgttttatata

SEQ ID NO: 242835 - DNA, 25 bp, Probe Sequence
gttgatgtcaatctttttttcctaa

SEQ ID NO: 242836 - DNA, 25 bp, Probe Sequence
gttgaccgatgtatcttttccttaa

SEQ ID NO: 242837 - DNA, 25 bp, Probe Sequence
gttgaaggagttgcatttatctttc

SEQ ID NO: 242838 - DNA, 25 bp, Probe Sequence
gttgtagcaggaatcttcttactca

SEQ ID NO: 242839 - DNA, 25 bp, Probe Sequence
gttgggggtcttgctgatgactcag

SEQ ID NO: 242840 - DNA, 25 bp, Probe Sequence
gttgggtgcttcatttgtgttcagt

SEQ ID NO: 242841 - DNA, 25 bp, Probe Sequence
gttggtgtgtttttgggatgtctta

SEQ ID NO: 242842 - DNA, 25 bp, Probe Sequence
gttggtgtgtttttgggatgtctta

SEQ ID NO: 242843 - DNA, 25 bp, Probe Sequence
gttggttttgactggatattcatat

SEQ ID NO: 242844 - DNA, 25 bp, Probe Sequence
gttgggttgggctggatatctttgt

SEQ ID NO: 242845 - DNA, 25 bp, Probe Sequence
gttgggttgggctggatatctttgt

SEQ ID NO: 242846 - DNA, 25 bp, Probe Sequence
gttgggttgggctggatatctttgt

SEQ ID NO: 242847 - DNA, 25 bp, Probe Sequence
gttgagatttagaggtttcatttgt

SEQ ID NO: 242848 - DNA, 25 bp, Probe Sequence
gttgatgctttagtgcaggcctgtt

SEQ ID NO: 242849 - DNA, 25 bp, Probe Sequence
gttgtgcatataatccaagccaggg

SEQ ID NO: 242850 - DNA, 25 bp, Probe Sequence
gttgagcagcataataatcccggga

SEQ ID NO: 242851 - DNA, 25 bp, Probe Sequence
gttgcaatctacaaagcctcaggga

SEQ ID NO: 242852 - DNA, 25 bp, Probe Sequence
gttgtgacaacaatgacctatttat

SEQ ID NO: 242853 - DNA, 25 bp, Probe Sequence
gttgtccaaaatgcctgtttagttt

SEQ ID NO: 242854 - DNA, 25 bp, Probe Sequence
gtttcccattatgccgttggagatg

SEQ ID NO: 242855 - DNA, 25 bp, Probe Sequence
gtttggcctattgaggtttagcgtt

SEQ ID NO: 242856 - DNA, 25 bp, Probe Sequence
gttgggattatcacaggttaagcct

SEQ ID NO: 242857 - DNA, 25 bp, Probe Sequence
gttgagattctatccagggcaataa

SEQ ID NO: 242858 - DNA, 25 bp, Probe Sequence
gttgaagttcccctggaagacaaga

SEQ ID NO: 242859 - DNA, 25 bp, Probe Sequence
gttaaactcccgcgtcatagaaata

SEQ ID NO: 242860 - DNA, 25 bp, Probe Sequence
gttccacccccgtgaagagtaatca

SEQ ID NO: 242861 - DNA, 25 bp, Probe Sequence
gttcccccttcctgatgaaaagact

SEQ ID NO: 242862 - DNA, 25 bp, Probe Sequence
gttccctcaattccctgaaacaaga

SEQ ID NO: 242863 - DNA, 25 bp, Probe Sequence
gttcccatagttacgtccaatagtg

SEQ ID NO: 242864 - DNA, 25 bp, Probe Sequence
gttgggatggtggccgatcctgata

SEQ ID NO: 242865 - DNA, 25 bp, Probe Sequence
gttgggcatagtggcacttgcctgt

SEQ ID NO: 242866 - DNA, 25 bp, Probe Sequence
gtatgtgaaggtgacttccatccag

SEQ ID NO: 242867 - DNA, 25 bp, Probe Sequence
gttgtccaggtgtgtctacatctag

SEQ ID NO: 242868 - DNA, 25 bp, Probe Sequence
gttggtaggtgcctgttcattcaag

SEQ ID NO: 242869 - DNA, 25 bp, Probe Sequence
gttgggagatagggtgtttaagcag

SEQ ID NO: 242870 - DNA, 25 bp, Probe Sequence
gttgtggagtacgctttggactgag

SEQ ID NO: 242871 - DNA, 25 bp, Probe Sequence
gttgtgaggtgatcactatgtggac

SEQ ID NO: 242872 - DNA, 25 bp, Probe Sequence
gttgtgagaggacccagtggaaagt

SEQ ID NO: 242873 - DNA, 25 bp, Probe Sequence
gttgtgacagactcctggaacagca

SEQ ID NO: 242874 - DNA, 25 bp, Probe Sequence
gttgtgcacatgtaccctagaactt

SEQ ID NO: 242875 - DNA, 25 bp, Probe Sequence
gttgtgcctgacactgtaacactgt

SEQ ID NO: 242876 - DNA, 25 bp, Probe Sequence
gttgtccgcatcaacagtgatgaca

SEQ ID NO: 242877 - DNA, 25 bp, Probe Sequence
gttgtccaactaccatatgaagcta

SEQ ID NO: 242878 - DNA, 25 bp, Probe Sequence
gtaggccacaaaccacagtagtatt

SEQ ID NO: 242879 - DNA, 25 bp, Probe Sequence
gtatctaacagatggaagtttttgc

SEQ ID NO: 242880 - DNA, 25 bp, Probe Sequence
gttctcaactagggatgggtttcct

SEQ ID NO: 242881 - DNA, 25 bp, Probe Sequence
gtatcccaggaggcgttggttcacc

SEQ ID NO: 242882 - DNA, 25 bp, Probe Sequence
gttgccaatgggctgttgggcgacc

SEQ ID NO: 242883 - DNA, 25 bp, Probe Sequence
gttgccaatgggctgttgggcgacc

SEQ ID NO: 242884 - DNA, 25 bp, Probe Sequence
gttgcaaatgagtcactgtcagggt

SEQ ID NO: 242885 - DNA, 25 bp, Probe Sequence
gttacttgcagaccttcacggaaca

SEQ ID NO: 242886 - DNA, 25 bp, Probe Sequence
gttgactggaggcatctagtggaaa

SEQ ID NO: 242887 - DNA, 25 bp, Probe Sequence
gttgcagtcgagcaccatcagttac

SEQ ID NO: 242888 - DNA, 25 bp, Probe Sequence
gttgcggcagagaagccatgcgttc

SEQ ID NO: 242889 - DNA, 25 bp, Probe Sequence
gttggtcgcagctgtgctgttcatc

SEQ ID NO: 242890 - DNA, 25 bp, Probe Sequence
gttgtgtgaccacgtgcatgtctat

SEQ ID NO: 242891 - DNA, 25 bp, Probe Sequence
gttgatgtgcacagctaatgattca

SEQ ID NO: 242892 - DNA, 25 bp, Probe Sequence
gttgatatacatctacatatataac

SEQ ID NO: 242893 - DNA, 25 bp, Probe Sequence
gttgactcacacagacttaaagcct

SEQ ID NO: 242894 - DNA, 25 bp, Probe Sequence
gttgactcacacagacttaaagcct

SEQ ID NO: 242895 - DNA, 25 bp, Probe Sequence
gttgactcacacagacttaaagcct

SEQ ID NO: 242896 - DNA, 25 bp, Probe Sequence
gttgatctgaacaaaagtaagggca

SEQ ID NO: 242897 - DNA, 25 bp, Probe Sequence
gttgatggatacgtgaagccacaga

SEQ ID NO: 242898 - DNA, 25 bp, Probe Sequence
gttgatgagaaaggaccccagctgt

SEQ ID NO: 242899 - DNA, 25 bp, Probe Sequence
gttgatcatggatcatactcccctt

SEQ ID NO: 242900 - DNA, 25 bp, Probe Sequence
gttgctatggcacagtgtcttcctt

SEQ ID NO: 242901 - DNA, 25 bp, Probe Sequence
tgtttatggctgcttaggggcttaa

SEQ ID NO: 242902 - DNA, 25 bp, Probe Sequence
gttgttggcagctttggggctgttt

SEQ ID NO: 242903 - DNA, 25 bp, Probe Sequence
gttgttggcagctttggggctgttt

SEQ ID NO: 242904 - DNA, 25 bp, Probe Sequence
gttgttgtctcattttggtctgttt

SEQ ID NO: 242905 - DNA, 25 bp, Probe Sequence
gttgttcaggttttctgttgacttg

SEQ ID NO: 242906 - DNA, 25 bp, Probe Sequence
gttgatgtcagcgtatgtgtatttg

SEQ ID NO: 242907 - DNA, 25 bp, Probe Sequence
gttgatgcggcaaatgctgttattt

SEQ ID NO: 242908 - DNA, 25 bp, Probe Sequence
gttgtgaatatatttgtacattgtt

SEQ ID NO: 242909 - DNA, 25 bp, Probe Sequence
gttgatgatttagttgattctctga

SEQ ID NO: 242910 - DNA, 25 bp, Probe Sequence
gttgatttactgatgatatgtcata

SEQ ID NO: 242911 - DNA, 25 bp, Probe Sequence
gttgatttttgattccgctatagtc

SEQ ID NO: 242912 - DNA, 25 bp, Probe Sequence
gttgcagttgtttgtaatgtctagt

SEQ ID NO: 242913 - DNA, 25 bp, Probe Sequence
gttgcagttgtgtagtagttaagga

SEQ ID NO: 242914 - DNA, 25 bp, Probe Sequence
gttgaactatgactggagtaaacca

SEQ ID NO: 242915 - DNA, 25 bp, Probe Sequence
gttgaactatgactggagtaaacca

SEQ ID NO: 242916 - DNA, 25 bp, Probe Sequence
gttgtactatgatgatggtcaaaac

SEQ ID NO: 242917 - DNA, 25 bp, Probe Sequence
gttgtactatgatgatggtcaaaac

SEQ ID NO: 242918 - DNA, 25 bp, Probe Sequence
gttgctactggatcaggagcaaaag

SEQ ID NO: 242919 - DNA, 25 bp, Probe Sequence
gttgtaccgcgaggggcatgtgaag

SEQ ID NO: 242920 - DNA, 25 bp, Probe Sequence
gttgtacctggaagcctcatagacc

SEQ ID NO: 242921 - DNA, 25 bp, Probe Sequence
gttccacgtgtaagctttgagccct

SEQ ID NO: 242922 - DNA, 25 bp, Probe Sequence
gttccaagccttaggggatgccgct

SEQ ID NO: 242923 - DNA, 25 bp, Probe Sequence
gttctccgacatctacaagatccgg

SEQ ID NO: 242924 - DNA, 25 bp, Probe Sequence
gttcgtcagaacttaaatactgagg

SEQ ID NO: 242925 - DNA, 25 bp, Probe Sequence
gttcggaacaatgtacttctggagc

SEQ ID NO: 242926 - DNA, 25 bp, Probe Sequence
gttctggaatccacaaccaggggct

SEQ ID NO: 242927 - DNA, 25 bp, Probe Sequence
gttctggtactaaaaattgtggttg

SEQ ID NO: 242928 - DNA, 25 bp, Probe Sequence
gttgggtatcctactactttgtgtt

SEQ ID NO: 242929 - DNA, 25 bp, Probe Sequence
gttgtgctgtatgttcttgatttga

SEQ ID NO: 242930 - DNA, 25 bp, Probe Sequence
gttgctgtatatgtatcggatttct

SEQ ID NO: 242931 - DNA, 25 bp, Probe Sequence
gttctggatttgctgcagagtccta

SEQ ID NO: 242932 - DNA, 25 bp, Probe Sequence
gttctgccattacaggaccagtagc

SEQ ID NO: 242933 - DNA, 25 bp, Probe Sequence
gttctgcgactacaacaaggaggcc

SEQ ID NO: 242934 - DNA, 25 bp, Probe Sequence
gttctgcagcactaggggagggggc

SEQ ID NO: 242935 - DNA, 25 bp, Probe Sequence
gtttgagcagctggcgtgtgaggct

SEQ ID NO: 242936 - DNA, 25 bp, Probe Sequence
gttcatgtctgcgggctggagatgc

SEQ ID NO: 242937 - DNA, 25 bp, Probe Sequence
gttgcagcgccgaagcattggatgc

SEQ ID NO: 242938 - DNA, 25 bp, Probe Sequence
gttgcatagctggtacatgctaacg

SEQ ID NO: 242939 - DNA, 25 bp, Probe Sequence
gttgctatatttgcttaacgtggtg

SEQ ID NO: 242940 - DNA, 25 bp, Probe Sequence
gttgtgtgatttgtgttatactggt

SEQ ID NO: 242941 - DNA, 25 bp, Probe Sequence
gttgtggtctgatcagttaatttgt

SEQ ID NO: 242942 - DNA, 25 bp, Probe Sequence
gtatcgttatgtccgttaatagctt

SEQ ID NO: 242943 - DNA, 25 bp, Probe Sequence
gttcctctttggtgtacagacttct

SEQ ID NO: 242944 - DNA, 25 bp, Probe Sequence
gttccattttggcagaaaaagactt

SEQ ID NO: 242945 - DNA, 25 bp, Probe Sequence
gttcccccttcatgatgaaaagact

SEQ ID NO: 242946 - DNA, 25 bp, Probe Sequence
gttcccagcctttttgaatttcacg

SEQ ID NO: 242947 - DNA, 25 bp, Probe Sequence
gttcccgctcctattagatctaatg

SEQ ID NO: 242948 - DNA, 25 bp, Probe Sequence
gttccagcctatggctttaggctag

SEQ ID NO: 242949 - DNA, 25 bp, Probe Sequence
gttgccgaagtgtctgcttcatggt

SEQ ID NO: 242950 - DNA, 25 bp, Probe Sequence
gttgcggacaatcctcaataggatc

SEQ ID NO: 242951 - DNA, 25 bp, Probe Sequence
gttgctgctgaacttatactaaatc

SEQ ID NO: 242952 - DNA, 25 bp, Probe Sequence
gttgtctgagacacacataatattc

SEQ ID NO: 242953 - DNA, 25 bp, Probe Sequence
gttgtctaagatgtaatgagtgctc

SEQ ID NO: 242954 - DNA, 25 bp, Probe Sequence
gttgtctgcgagattgtaggtgcct

SEQ ID NO: 242955 - DNA, 25 bp, Probe Sequence
gttgttggttagatttggcactgtg

SEQ ID NO: 242956 - DNA, 25 bp, Probe Sequence
gttgttggtttgaagtgatagcctt

SEQ ID NO: 242957 - DNA, 25 bp, Probe Sequence
gttgttcctttgaatacagacgttg

SEQ ID NO: 242958 - DNA, 25 bp, Probe Sequence
gtaggaccaccgaatataatcgatt

SEQ ID NO: 242959 - DNA, 25 bp, Probe Sequence
gttgtaccactgctaataaatgacc

SEQ ID NO: 242960 - DNA, 25 bp, Probe Sequence
gttgtcacccatcgataaaaatcac

SEQ ID NO: 242961 - DNA, 25 bp, Probe Sequence
gttgatgcccgaagaaaatttcact

SEQ ID NO: 242962 - DNA, 25 bp, Probe Sequence
gttgaccctgaattaaatagtcaca

SEQ ID NO: 242963 - DNA, 25 bp, Probe Sequence
gttgactgggattggaaataatgag

SEQ ID NO: 242964 - DNA, 25 bp, Probe Sequence
gttgaggggtgctgaaaccagactg

SEQ ID NO: 242965 - DNA, 25 bp, Probe Sequence
gttgacggttcataaatggctgatt

SEQ ID NO: 242966 - DNA, 25 bp, Probe Sequence
gttgcactggtttgaagattttaat

SEQ ID NO: 242967 - DNA, 25 bp, Probe Sequence
gttgcactgaggtggatttttactt

SEQ ID NO: 242968 - DNA, 25 bp, Probe Sequence
gttcagtaggtgtagactttccact

SEQ ID NO: 242969 - DNA, 25 bp, Probe Sequence
gttctgtagagatggcctttcactt

SEQ ID NO: 242970 - DNA, 25 bp, Probe Sequence
gttcttacaggaaccacctactctt

SEQ ID NO: 242971 - DNA, 25 bp, Probe Sequence
gttgaaactggaacatagctttcct

SEQ ID NO: 242972 - DNA, 25 bp, Probe Sequence
gttgaaactgggaacctgttggcta

SEQ ID NO: 242973 - DNA, 25 bp, Probe Sequence
gttgaaaatggcttgttctattggc

SEQ ID NO: 242974 - DNA, 25 bp, Probe Sequence
gttccaccatggttagttatttgcc

SEQ ID NO: 242975 - DNA, 25 bp, Probe Sequence
gttctaccgcgacagctatatccgc

SEQ ID NO: 242976 - DNA, 25 bp, Probe Sequence
gttcttccggcacgataaaccagtc

SEQ ID NO: 242977 - DNA, 25 bp, Probe Sequence
gttcttcacgactgtctatactgag

SEQ ID NO: 242978 - DNA, 25 bp, Probe Sequence
gttcctcactacactggtactgaaa

SEQ ID NO: 242979 - DNA, 25 bp, Probe Sequence
gttccttagactccgttatggataa

SEQ ID NO: 242980 - DNA, 25 bp, Probe Sequence
gttgtcttaacatcgtagtcctagt

SEQ ID NO: 242981 - DNA, 25 bp, Probe Sequence
gtgcctttaaaagaggtcctatgga

SEQ ID NO: 242982 - DNA, 25 bp, Probe Sequence
gtgcctttaaaagaggtcctatgga

SEQ ID NO: 242983 - DNA, 25 bp, Probe Sequence
gtgccctggaagttcaggggcccag

SEQ ID NO: 242984 - DNA, 25 bp, Probe Sequence
gttgcctggacagttacagtttcca

SEQ ID NO: 242985 - DNA, 25 bp, Probe Sequence
gttcgaagacaaaatcagtagccca

SEQ ID NO: 242986 - DNA, 25 bp, Probe Sequence
gttccaaccaaagtgactggcatca

SEQ ID NO: 242987 - DNA, 25 bp, Probe Sequence
gttgccaacaaaattgggatcatct

SEQ ID NO: 242988 - DNA, 25 bp, Probe Sequence
gttgcacagtcctcattcaggcaat

SEQ ID NO: 242989 - DNA, 25 bp, Probe Sequence
gttgcaagtcataagcctgaggcaa

SEQ ID NO: 242990 - DNA, 25 bp, Probe Sequence
gttctaaaggtggtgaggcaataaa

SEQ ID NO: 242991 - DNA, 25 bp, Probe Sequence
gttctaccggtctatggtggtccaa

SEQ ID NO: 242992 - DNA, 25 bp, Probe Sequence
gttgctcccagttcaggaggtgctc

SEQ ID NO: 242993 - DNA, 25 bp, Probe Sequence
gttgctcccagttcaggaggtgctc

SEQ ID NO: 242994 - DNA, 25 bp, Probe Sequence
gttgcctgctcagaccttgcaggct

SEQ ID NO: 242995 - DNA, 25 bp, Probe Sequence
gttgcctctgctgttcagtgaagga

SEQ ID NO: 242996 - DNA, 25 bp, Probe Sequence
gttgcctctgctgttcagtgaagga

SEQ ID NO: 242997 - DNA, 25 bp, Probe Sequence
gttgtctcgatgccttcgagatgca

SEQ ID NO: 242998 - DNA, 25 bp, Probe Sequence
gttgtcctgacacttgtggcatcaa

SEQ ID NO: 242999 - DNA, 25 bp, Probe Sequence
gttacagcaaatctggagcccacag

SEQ ID NO: 243000 - DNA, 25 bp, Probe Sequence
gttccagaatctctactgacaccac

SEQ ID NO: 243001 - DNA, 25 bp, Probe Sequence
gttccgatttgacaggacatctagc

SEQ ID NO: 243002 - DNA, 25 bp, Probe Sequence
gtaccagtaaggctggatcttacag

SEQ ID NO: 243003 - DNA, 25 bp, Probe Sequence
ggacctgaaaggatccagaaatggg

SEQ ID NO: 243004 - DNA, 25 bp, Probe Sequence
gggcccaaagtcaccgtcaaggtgt

SEQ ID NO: 243005 - DNA, 25 bp, Probe Sequence
gggccccaagaagcacttaaagcgt

SEQ ID NO: 243006 - DNA, 25 bp, Probe Sequence
gttgcgtaccagttccacttaaatg

SEQ ID NO: 243007 - DNA, 25 bp, Probe Sequence
gttgattccaagtttcctatagaag

SEQ ID NO: 243008 - DNA, 25 bp, Probe Sequence
gttgttggagagttcccatgtcaaa

SEQ ID NO: 243009 - DNA, 25 bp, Probe Sequence
gttgactggatgacttcacctgaac

SEQ ID NO: 243010 - DNA, 25 bp, Probe Sequence
gttgaacattgtgaacctgcagatc

SEQ ID NO: 243011 - DNA, 25 bp, Probe Sequence
gttgaacattgtgaacctgcagatc

SEQ ID NO: 243012 - DNA, 25 bp, Probe Sequence
gttgtcagtctttaatcctgagtca

SEQ ID NO: 243013 - DNA, 25 bp, Probe Sequence
gttgtctttttaatgttagtgatcc

SEQ ID NO: 243014 - DNA, 25 bp, Probe Sequence
gttgacccacttatgttcagtgctg

SEQ ID NO: 243015 - DNA, 25 bp, Probe Sequence
gttgaggctcactatttttagaggg

SEQ ID NO: 243016 - DNA, 25 bp, Probe Sequence
gttgaggcatacttgtgtgtctggg

SEQ ID NO: 243017 - DNA, 25 bp, Probe Sequence
gttgcatggaatcttgtcctgggca

SEQ ID NO: 243018 - DNA, 25 bp, Probe Sequence
gttgcagagaattgtttctgggctc

SEQ ID NO: 243019 - DNA, 25 bp, Probe Sequence
gttgagatgtgtttatatctggttc

SEQ ID NO: 243020 - DNA, 25 bp, Probe Sequence
gttgatgcattttgtacttagctgt

SEQ ID NO: 243021 - DNA, 25 bp, Probe Sequence
gttgtcactttgggcatggcagctt

SEQ ID NO: 243022 - DNA, 25 bp, Probe Sequence
gttgtcacatttatgtggcacaaag

SEQ ID NO: 243023 - DNA, 25 bp, Probe Sequence
gttgagcctttatgtggcaccaact

SEQ ID NO: 243024 - DNA, 25 bp, Probe Sequence
gttgagcctttctagatggcttagg

SEQ ID NO: 243025 - DNA, 25 bp, Probe Sequence
gttgcagcgattgcaactggcctgg

SEQ ID NO: 243026 - DNA, 25 bp, Probe Sequence
gttgcatcgatacaggcaggtgctg

SEQ ID NO: 243027 - DNA, 25 bp, Probe Sequence
gttgcactgtagcagagaatttggc

SEQ ID NO: 243028 - DNA, 25 bp, Probe Sequence
gttgatggtgctagaagaatttgag

SEQ ID NO: 243029 - DNA, 25 bp, Probe Sequence
gttaggctggagggcatgttcagag

SEQ ID NO: 243030 - DNA, 25 bp, Probe Sequence
gttctgcctggtttgcagtctgagt

SEQ ID NO: 243031 - DNA, 25 bp, Probe Sequence
gtctccaggtactcactctggttta

SEQ ID NO: 243032 - DNA, 25 bp, Probe Sequence
gttgcctgttactgagttagctcta

SEQ ID NO: 243033 - DNA, 25 bp, Probe Sequence
gttgctcgaggacaagttcctccag

SEQ ID NO: 243034 - DNA, 25 bp, Probe Sequence
gttgttgatcacaaaagttcttcca

SEQ ID NO: 243035 - DNA, 25 bp, Probe Sequence
gttgttatccacgaaatccttgtca

SEQ ID NO: 243036 - DNA, 25 bp, Probe Sequence
gttgtttgcttcaaggacctttcat

SEQ ID NO: 243037 - DNA, 25 bp, Probe Sequence
gttgtcttattcctaattcctgtat

SEQ ID NO: 243038 - DNA, 25 bp, Probe Sequence
gttgttttatcactgtaagcctgtc

SEQ ID NO: 243039 - DNA, 25 bp, Probe Sequence
gttgtagtgtacttttcctctgtag

SEQ ID NO: 243040 - DNA, 25 bp, Probe Sequence
gttgttgaaacactttgcttcttaa

SEQ ID NO: 243041 - DNA, 25 bp, Probe Sequence
gtagttaacggcataattgtataaa

SEQ ID NO: 243042 - DNA, 25 bp, Probe Sequence
gttgatctacaccacttaattatga

SEQ ID NO: 243043 - DNA, 25 bp, Probe Sequence
gttgatgtacccttaaattgaagaa

SEQ ID NO: 243044 - DNA, 25 bp, Probe Sequence
gttgtttcaccttatctgagttaga

SEQ ID NO: 243045 - DNA, 25 bp, Probe Sequence
gttgattctctgaagtttgcagtgt

SEQ ID NO: 243046 - DNA, 25 bp, Probe Sequence
gttgattctctgaagtttgcagtgt

SEQ ID NO: 243047 - DNA, 25 bp, Probe Sequence
gttgattctctgaagtttgcagtgt

SEQ ID NO: 243048 - DNA, 25 bp, Probe Sequence
gttgttttgcaggtctagcagagtt

SEQ ID NO: 243049 - DNA, 25 bp, Probe Sequence
gttgttttagcttctgcagaagtga

SEQ ID NO: 243050 - DNA, 25 bp, Probe Sequence
gttgcttaatgacattgcgacagtc

SEQ ID NO: 243051 - DNA, 25 bp, Probe Sequence
gttcgcaagaacctgatggacatgt

SEQ ID NO: 243052 - DNA, 25 bp, Probe Sequence
gttctgcagagggctcagttcacta

SEQ ID NO: 243053 - DNA, 25 bp, Probe Sequence
gttgtctactgagcagatttctgca

SEQ ID NO: 243054 - DNA, 25 bp, Probe Sequence
gttgttgcacgagaatatgtataga

SEQ ID NO: 243055 - DNA, 25 bp, Probe Sequence
gttgttaccaaaatcagtcagactt

SEQ ID NO: 243056 - DNA, 25 bp, Probe Sequence
gttgttactcattttgaatatacct

SEQ ID NO: 243057 - DNA, 25 bp, Probe Sequence
gttgttaccattataaccctacaga

SEQ ID NO: 243058 - DNA, 25 bp, Probe Sequence
gttgttcacagatttttacctgcta

SEQ ID NO: 243059 - DNA, 25 bp, Probe Sequence
gttgtctggatgatgtattacttct

SEQ ID NO: 243060 - DNA, 25 bp, Probe Sequence
gttgtctactctggagcttgacttg

SEQ ID NO: 243061 - DNA, 25 bp, Probe Sequence
gttgttacatatgagctatgtgttg

SEQ ID NO: 243062 - DNA, 25 bp, Probe Sequence
gttcctgaatacaagcctatgcgtg

SEQ ID NO: 243063 - DNA, 25 bp, Probe Sequence
gttctttagaccaatgcattgcgtt

SEQ ID NO: 243064 - DNA, 25 bp, Probe Sequence
gttgattgtttgtgctttcttggca

SEQ ID NO: 243065 - DNA, 25 bp, Probe Sequence
gttgttagagtcttttatctggtca

SEQ ID NO: 243066 - DNA, 25 bp, Probe Sequence
gttgttagctccttgactattttca

SEQ ID NO: 243067 - DNA, 25 bp, Probe Sequence
gttgtcttttcatgcctgatttact

SEQ ID NO: 243068 - DNA, 25 bp, Probe Sequence
gttccttttcttgtgttaatgtaca

SEQ ID NO: 243069 - DNA, 25 bp, Probe Sequence
gttttccactttgacttgaagtcaa

SEQ ID NO: 243070 - DNA, 25 bp, Probe Sequence
gttacctactttgactttttgcatt

SEQ ID NO: 243071 - DNA, 25 bp, Probe Sequence
gttgaccataaccgtacatcttttc

SEQ ID NO: 243072 - DNA, 25 bp, Probe Sequence
gttgacaataacagtacatcttttc

SEQ ID NO: 243073 - DNA, 25 bp, Probe Sequence
gttgtcaaagtagccaatgtttctc

SEQ ID NO: 243074 - DNA, 25 bp, Probe Sequence
gttgtaaggtagtctcctgctttcc

SEQ ID NO: 243075 - DNA, 25 bp, Probe Sequence
gttttagtgataccgtcagtttcgc

SEQ ID NO: 243076 - DNA, 25 bp, Probe Sequence
gttttagtgaaccgtcagatcgcct

SEQ ID NO: 243077 - DNA, 25 bp, Probe Sequence
gttttagtaaccggatgtccaccat

SEQ ID NO: 243078 - DNA, 25 bp, Probe Sequence
gttcttgggagacccgttatgacct

SEQ ID NO: 243079 - DNA, 25 bp, Probe Sequence
gttgagggcaagccacccaattacc

SEQ ID NO: 243080 - DNA, 25 bp, Probe Sequence
gttagaggaagccctacctgtcagc

SEQ ID NO: 243081 - DNA, 25 bp, Probe Sequence
gttgatgagggactttccctgctcc

SEQ ID NO: 243082 - DNA, 25 bp, Probe Sequence
gttgaagaggtccttccacactggt

SEQ ID NO: 243083 - DNA, 25 bp, Probe Sequence
gttaccagagatttacccatcgggt

SEQ ID NO: 243084 - DNA, 25 bp, Probe Sequence
gttccaatatgattccacccatggc

SEQ ID NO: 243085 - DNA, 25 bp, Probe Sequence
gttccaatatgattccacccatggc

SEQ ID NO: 243086 - DNA, 25 bp, Probe Sequence
gttgcacaaaactcaccatcagtag

SEQ ID NO: 243087 - DNA, 25 bp, Probe Sequence
gttgatctataattacacctatggg

SEQ ID NO: 243088 - DNA, 25 bp, Probe Sequence
gttgatcttgatctacaattgttgg

SEQ ID NO: 243089 - DNA, 25 bp, Probe Sequence
gttgacagtgtccttgaagtggtga

SEQ ID NO: 243090 - DNA, 25 bp, Probe Sequence
gttgacagcgccctgataaggtctg

SEQ ID NO: 243091 - DNA, 25 bp, Probe Sequence
gttccagcgccgcatggatggacag

SEQ ID NO: 243092 - DNA, 25 bp, Probe Sequence
gttctacgcacgcgtctgcagaagt

SEQ ID NO: 243093 - DNA, 25 bp, Probe Sequence
gttctaccagccctacagtgaagat

SEQ ID NO: 243094 - DNA, 25 bp, Probe Sequence
gttgctagaggggcttagagaacta

SEQ ID NO: 243095 - DNA, 25 bp, Probe Sequence
gttgcacagggcttctatagatcag

SEQ ID NO: 243096 - DNA, 25 bp, Probe Sequence
gttctcagccccttataacaggtgc

SEQ ID NO: 243097 - DNA, 25 bp, Probe Sequence
gttctcagctccaggcaacttggac

SEQ ID NO: 243098 - DNA, 25 bp, Probe Sequence
gtttccacaaggccaccttggacgt

SEQ ID NO: 243099 - DNA, 25 bp, Probe Sequence
gttccaccagaaacaccttaagtgt

SEQ ID NO: 243100 - DNA, 25 bp, Probe Sequence
gtatccagatttaaacctaccagtt

SEQ ID NO: 243101 - DNA, 25 bp, Probe Sequence
ggtccagagttgaagttcccctaat

SEQ ID NO: 243102 - DNA, 25 bp, Probe Sequence
gttccaatcttcgtgttcactttaa

SEQ ID NO: 243103 - DNA, 25 bp, Probe Sequence
gttccaaatactagttgcactgctc

SEQ ID NO: 243104 - DNA, 25 bp, Probe Sequence
gttctgcaagatgttaccacctgga

SEQ ID NO: 243105 - DNA, 25 bp, Probe Sequence
gttctcaaaagcttaccagtgtgga

SEQ ID NO: 243106 - DNA, 25 bp, Probe Sequence
gttctgctaaacttcctggtgggaa

SEQ ID NO: 243107 - DNA, 25 bp, Probe Sequence
gtttctcaaagctccttgattaaga

SEQ ID NO: 243108 - DNA, 25 bp, Probe Sequence
gttgttgcccagtgctttattgaag

SEQ ID NO: 243109 - DNA, 25 bp, Probe Sequence
gttgtacccaacagtctcattgaga

SEQ ID NO: 243110 - DNA, 25 bp, Probe Sequence
gttgtagccaaaggttcactctcaa

SEQ ID NO: 243111 - DNA, 25 bp, Probe Sequence
gttaacacaacagggtcctggccac

SEQ ID NO: 243112 - DNA, 25 bp, Probe Sequence
gttaacaccagatggtgcccctcat

SEQ ID NO: 243113 - DNA, 25 bp, Probe Sequence
gttccaccgagaaggggacctcatc

SEQ ID NO: 243114 - DNA, 25 bp, Probe Sequence
gttccaccgagaaggggacctcatc

SEQ ID NO: 243115 - DNA, 25 bp, Probe Sequence
gttgcacaccggagagaaaccctac

SEQ ID NO: 243116 - DNA, 25 bp, Probe Sequence
gttccacccagttgaaagacaccca

SEQ ID NO: 243117 - DNA, 25 bp, Probe Sequence
gttccacccagttgaaagacaccca

SEQ ID NO: 243118 - DNA, 25 bp, Probe Sequence
gttccaggcaagactagaaatcacc

SEQ ID NO: 243119 - DNA, 25 bp, Probe Sequence
gttccaggattttcaaaatggctgc

SEQ ID NO: 243120 - DNA, 25 bp, Probe Sequence
gttccagtttgtgaacgtgctgctc

SEQ ID NO: 243121 - DNA, 25 bp, Probe Sequence
gttctagtttctggaaggtaagcct

SEQ ID NO: 243122 - DNA, 25 bp, Probe Sequence
gttgtattttctcccagtaaagctt

SEQ ID NO: 243123 - DNA, 25 bp, Probe Sequence
gttgtattttctcccagtaaagctt

SEQ ID NO: 243124 - DNA, 25 bp, Probe Sequence
gttaattctatctccagtaggccta

SEQ ID NO: 243125 - DNA, 25 bp, Probe Sequence
gttgttgtatacacctggaggcatc

SEQ ID NO: 243126 - DNA, 25 bp, Probe Sequence
gttgttttactatcctcaggcatcc

SEQ ID NO: 243127 - DNA, 25 bp, Probe Sequence
gttgttttactatcctcaggcatcc

SEQ ID NO: 243128 - DNA, 25 bp, Probe Sequence
gttgattttaaagcctcttcatcca

SEQ ID NO: 243129 - DNA, 25 bp, Probe Sequence
gttgatgttctgaaggaccctgact

SEQ ID NO: 243130 - DNA, 25 bp, Probe Sequence
gttgcacttatcagcaaccctacca

SEQ ID NO: 243131 - DNA, 25 bp, Probe Sequence
gttgcacttatcagcaaccctacca

SEQ ID NO: 243132 - DNA, 25 bp, Probe Sequence
gttccttacggaaaccattcatatc

SEQ ID NO: 243133 - DNA, 25 bp, Probe Sequence
gttgcagcttgatggttcaactcca

SEQ ID NO: 243134 - DNA, 25 bp, Probe Sequence
gttgcacttttgttacaatgcttat

SEQ ID NO: 243135 - DNA, 25 bp, Probe Sequence
gttgccattttggaccagatcgttc

SEQ ID NO: 243136 - DNA, 25 bp, Probe Sequence
gttccttttccacagattgtctaaa

SEQ ID NO: 243137 - DNA, 25 bp, Probe Sequence
gttcctttggccacatatatgcgaa

SEQ ID NO: 243138 - DNA, 25 bp, Probe Sequence
gttcctttggccacatatatgcgaa

SEQ ID NO: 243139 - DNA, 25 bp, Probe Sequence
gttcctttgatagccattcagtgaa

SEQ ID NO: 243140 - DNA, 25 bp, Probe Sequence
gttgcaggttaagcttgtctggtca

SEQ ID NO: 243141 - DNA, 25 bp, Probe Sequence
gttgcttactaagctttgccagctg

SEQ ID NO: 243142 - DNA, 25 bp, Probe Sequence
gttgttcagtgatcctattttcgta

SEQ ID NO: 243143 - DNA, 25 bp, Probe Sequence
gttgatcctatgtacctatgttatc

SEQ ID NO: 243144 - DNA, 25 bp, Probe Sequence
gttgtttcgatatttatgtttcaga

SEQ ID NO: 243145 - DNA, 25 bp, Probe Sequence
gttgtttctatatcatcatcgtcta

SEQ ID NO: 243146 - DNA, 25 bp, Probe Sequence
gttgtttttcatttcatctatctca

SEQ ID NO: 243147 - DNA, 25 bp, Probe Sequence
gttgtttttcatttcatctatctca

SEQ ID NO: 243148 - DNA, 25 bp, Probe Sequence
gttgttgtttgtttttagatccaca

SEQ ID NO: 243149 - DNA, 25 bp, Probe Sequence
gttgttaattggtttggagcctcct

SEQ ID NO: 243150 - DNA, 25 bp, Probe Sequence
gttgaattatgtcagtgtgggcagc

SEQ ID NO: 243151 - DNA, 25 bp, Probe Sequence
gttgaaggcattcaaggtggccctc

SEQ ID NO: 243152 - DNA, 25 bp, Probe Sequence
gttgctaggattcagagtaaaactc

SEQ ID NO: 243153 - DNA, 25 bp, Probe Sequence
gttgttggcaacaggtgaatgaacc

SEQ ID NO: 243154 - DNA, 25 bp, Probe Sequence
gtttgggaatttgtttgctaccctg

SEQ ID NO: 243155 - DNA, 25 bp, Probe Sequence
gtttgggaaggtgatgggtattagt

SEQ ID NO: 243156 - DNA, 25 bp, Probe Sequence
gttatagggaagatatgggtgtttt

SEQ ID NO: 243157 - DNA, 25 bp, Probe Sequence
gtggaaactaaatataatcttttgt

SEQ ID NO: 243158 - DNA, 25 bp, Probe Sequence
gttaaacttaagcactattcttgtt

SEQ ID NO: 243159 - DNA, 25 bp, Probe Sequence
gttgccacagtaaagaacagttttt

SEQ ID NO: 243160 - DNA, 25 bp, Probe Sequence
gttgctccctgtgacaaaattttat

SEQ ID NO: 243161 - DNA, 25 bp, Probe Sequence
gttgcccctgtaatacataagttta

SEQ ID NO: 243162 - DNA, 25 bp, Probe Sequence
gttgctccttttgaccagaatttgt

SEQ ID NO: 243163 - DNA, 25 bp, Probe Sequence
gttgctccttttgaccagaatttgt

SEQ ID NO: 243164 - DNA, 25 bp, Probe Sequence
gttgcccctttggggcgggatggct

SEQ ID NO: 243165 - DNA, 25 bp, Probe Sequence
gttccaccctctggggcaggagggg

SEQ ID NO: 243166 - DNA, 25 bp, Probe Sequence
gttcacacccttcaagcaggcggtg

SEQ ID NO: 243167 - DNA, 25 bp, Probe Sequence
gttcttcccttggaaagccgagctc

SEQ ID NO: 243168 - DNA, 25 bp, Probe Sequence
gttctttccattcaccagaccattc

SEQ ID NO: 243169 - DNA, 25 bp, Probe Sequence
gttcattcctttcagccatcgtcct

SEQ ID NO: 243170 - DNA, 25 bp, Probe Sequence
gttgttcctttggccacatatatgc

SEQ ID NO: 243171 - DNA, 25 bp, Probe Sequence
gttgttcctttggccacatatatgc

SEQ ID NO: 243172 - DNA, 25 bp, Probe Sequence
gttgacccttgtggaagatatgatt

SEQ ID NO: 243173 - DNA, 25 bp, Probe Sequence
gttgcactgctctgtttataattgt

SEQ ID NO: 243174 - DNA, 25 bp, Probe Sequence
gttccgtaagctctttattggtggc

SEQ ID NO: 243175 - DNA, 25 bp, Probe Sequence
gttctagaaaatattacttgagtgc

SEQ ID NO: 243176 - DNA, 25 bp, Probe Sequence
gttctggcgaaaaatccaaagggca

SEQ ID NO: 243177 - DNA, 25 bp, Probe Sequence
gtttggcgacgtttccatcaacgta

SEQ ID NO: 243178 - DNA, 25 bp, Probe Sequence
gttgagactgatgatgtcccatcta

SEQ ID NO: 243179 - DNA, 25 bp, Probe Sequence
gttgcatgaccaagattgtggcact

SEQ ID NO: 243180 - DNA, 25 bp, Probe Sequence
gttgcagtgcagagtgcttggctgt

SEQ ID NO: 243181 - DNA, 25 bp, Probe Sequence
gttgagctcaatttcatttctgttt

SEQ ID NO: 243182 - DNA, 25 bp, Probe Sequence
gttgaacaatttatgtctgctttac

SEQ ID NO: 243183 - DNA, 25 bp, Probe Sequence
gttgatctgcatatttctgtatatt

SEQ ID NO: 243184 - DNA, 25 bp, Probe Sequence
gttgatgtaatcagtcgatatcctg

SEQ ID NO: 243185 - DNA, 25 bp, Probe Sequence
gttgcttcagttggtcgaagacaga

SEQ ID NO: 243186 - DNA, 25 bp, Probe Sequence
gttgctgtggttggttgcattacat

SEQ ID NO: 243187 - DNA, 25 bp, Probe Sequence
gttgttggtgtggtgagccacaata

SEQ ID NO: 243188 - DNA, 25 bp, Probe Sequence
gttgttgggttcctgcgatcagaag

SEQ ID NO: 243189 - DNA, 25 bp, Probe Sequence
gttgatgtgcttctttgggcaaaga

SEQ ID NO: 243190 - DNA, 25 bp, Probe Sequence
gttgatcgcgtttttggcagtacat

SEQ ID NO: 243191 - DNA, 25 bp, Probe Sequence
gttgatgcgggttttggcagtagca

SEQ ID NO: 243192 - DNA, 25 bp, Probe Sequence
gttgcagcaggctttccggcagaac

SEQ ID NO: 243193 - DNA, 25 bp, Probe Sequence
gttgcgccactgagacggcagagac

SEQ ID NO: 243194 - DNA, 25 bp, Probe Sequence
gttctctcgtgggagacgcaggcac

SEQ ID NO: 243195 - DNA, 25 bp, Probe Sequence
gttctccttcaggctaacagagacc

SEQ ID NO: 243196 - DNA, 25 bp, Probe Sequence
gttctactctaggcagtgacagtgc

SEQ ID NO: 243197 - DNA, 25 bp, Probe Sequence
gttgctgcagccaggagtctaggac

SEQ ID NO: 243198 - DNA, 25 bp, Probe Sequence
gttcagcggcagtggatctgggaca

SEQ ID NO: 243199 - DNA, 25 bp, Probe Sequence
gttcctgcactgtgtatcttgtgtc

SEQ ID NO: 243200 - DNA, 25 bp, Probe Sequence
gttcccaactgagtcatcttgctga

SEQ ID NO: 243201 - DNA, 25 bp, Probe Sequence
gttgctccaaatagataccgtgtat

SEQ ID NO: 243202 - DNA, 25 bp, Probe Sequence
gttgcctcaaatgagcaccatttgt

SEQ ID NO: 243203 - DNA, 25 bp, Probe Sequence
gttgccatcaatgaccccttcattg

SEQ ID NO: 243204 - DNA, 25 bp, Probe Sequence
gttctgtgcatagagacctttaagc

SEQ ID NO: 243205 - DNA, 25 bp, Probe Sequence
gttgaggcatgagaatcgcttgaac

SEQ ID NO: 243206 - DNA, 25 bp, Probe Sequence
gttgctggagcataactgcttcaat

SEQ ID NO: 243207 - DNA, 25 bp, Probe Sequence
gttgagggcatgtaatccagctact

SEQ ID NO: 243208 - DNA, 25 bp, Probe Sequence
gttgcaggtgagtccatcagaaaca

SEQ ID NO: 243209 - DNA, 25 bp, Probe Sequence
gttgcagtatggtgcataccaccat

SEQ ID NO: 243210 - DNA, 25 bp, Probe Sequence
gttgctttggatatgactacactaa

SEQ ID NO: 243211 - DNA, 25 bp, Probe Sequence
gttcttggtttcgactcagaaaaca

SEQ ID NO: 243212 - DNA, 25 bp, Probe Sequence
gttgctaggaattcatactgcgaaa

SEQ ID NO: 243213 - DNA, 25 bp, Probe Sequence
gttcgagactagtctggccgacata

SEQ ID NO: 243214 - DNA, 25 bp, Probe Sequence
gttcaagaccagcctggccaacatg

SEQ ID NO: 243215 - DNA, 25 bp, Probe Sequence
gttcgtgaccagcctgacaaacatg

SEQ ID NO: 243216 - DNA, 25 bp, Probe Sequence
gttctgaaccgcctgcaatatgcaa

SEQ ID NO: 243217 - DNA, 25 bp, Probe Sequence
gttccatgaccatgactgtcgcaga

SEQ ID NO: 243218 - DNA, 25 bp, Probe Sequence
gttctgctgagcatagagtatggga

SEQ ID NO: 243219 - DNA, 25 bp, Probe Sequence
gttctgcggtgctggtatttagagc

SEQ ID NO: 243220 - DNA, 25 bp, Probe Sequence
gttcagagctgaacggttttgaagg

SEQ ID NO: 243221 - DNA, 25 bp, Probe Sequence
gttccagtaccccattatctatgac

SEQ ID NO: 243222 - DNA, 25 bp, Probe Sequence
gttcgaggcctcattgatagcttac

SEQ ID NO: 243223 - DNA, 25 bp, Probe Sequence
gttcgaaggcttctggatttcatct

SEQ ID NO: 243224 - DNA, 25 bp, Probe Sequence
gttctgaatcactggcctgaattca

SEQ ID NO: 243225 - DNA, 25 bp, Probe Sequence
gttctactatcatgcccatttggca

SEQ ID NO: 243226 - DNA, 25 bp, Probe Sequence
gttgcagaatactcactatttccaa

SEQ ID NO: 243227 - DNA, 25 bp, Probe Sequence
gttgcagattacatgcgctacttaa

SEQ ID NO: 243228 - DNA, 25 bp, Probe Sequence
gttgcagattacatgcgctacttaa

SEQ ID NO: 243229 - DNA, 25 bp, Probe Sequence
gttgaatagatcttagctcacttat

SEQ ID NO: 243230 - DNA, 25 bp, Probe Sequence
gttgaaatgctcaagacttcattat

SEQ ID NO: 243231 - DNA, 25 bp, Probe Sequence
gttgaaatctcagcctccttcaaca

SEQ ID NO: 243232 - DNA, 25 bp, Probe Sequence
gttgaattcatagctctccaacctc

SEQ ID NO: 243233 - DNA, 25 bp, Probe Sequence
gttgagatggaagagctgccaaagc

SEQ ID NO: 243234 - DNA, 25 bp, Probe Sequence
gttgactggcaacgagtggagaagg

SEQ ID NO: 243235 - DNA, 25 bp, Probe Sequence
gttcatcggctgagagggcgtagga

SEQ ID NO: 243236 - DNA, 25 bp, Probe Sequence
gttgccaggctgatgatggtgctta

SEQ ID NO: 243237 - DNA, 25 bp, Probe Sequence
gttccaggggagcaggcttcttatg

SEQ ID NO: 243238 - DNA, 25 bp, Probe Sequence
gttccgaaaggaaggcgtctgttga

SEQ ID NO: 243239 - DNA, 25 bp, Probe Sequence
gttccaggaatgcaaaggtggctta

SEQ ID NO: 243240 - DNA, 25 bp, Probe Sequence
gttcctctgtgacaaggttggcctt

SEQ ID NO: 243241 - DNA, 25 bp, Probe Sequence
gttccctggaacatagttcgatgtt

SEQ ID NO: 243242 - DNA, 25 bp, Probe Sequence
gttccacatggagaaactccgtctt

SEQ ID NO: 243243 - DNA, 25 bp, Probe Sequence
gttccagctggatcagatccccttc

SEQ ID NO: 243244 - DNA, 25 bp, Probe Sequence
gttccagggcaagattggactcccc

SEQ ID NO: 243245 - DNA, 25 bp, Probe Sequence
gttcctcgtagagattggactggct

SEQ ID NO: 243246 - DNA, 25 bp, Probe Sequence
gttcgtcctacggtgggagcgacta

SEQ ID NO: 243247 - DNA, 25 bp, Probe Sequence
gtttgtgataaccgtggcgaaagtc

SEQ ID NO: 243248 - DNA, 25 bp, Probe Sequence
gttctgtgccgtccttgggaaaggc

SEQ ID NO: 243249 - DNA, 25 bp, Probe Sequence
gttctgtgccgtccttgggaaaggc

SEQ ID NO: 243250 - DNA, 25 bp, Probe Sequence
gttctgtgccggatatatggaagga

SEQ ID NO: 243251 - DNA, 25 bp, Probe Sequence
gttctggttcctctgatggagggac

SEQ ID NO: 243252 - DNA, 25 bp, Probe Sequence
gttgccgtatccatttatgtgggcc

SEQ ID NO: 243253 - DNA, 25 bp, Probe Sequence
gttgccgttgaccttgaatgggagt

SEQ ID NO: 243254 - DNA, 25 bp, Probe Sequence
gttgccgttattacatcagatggga

SEQ ID NO: 243255 - DNA, 25 bp, Probe Sequence
gttgcccatgtaacatacaggtgga

SEQ ID NO: 243256 - DNA, 25 bp, Probe Sequence
gttgcatctgcatatcctaagagga

SEQ ID NO: 243257 - DNA, 25 bp, Probe Sequence
gttgcatcagcatttctgctgtgca

SEQ ID NO: 243258 - DNA, 25 bp, Probe Sequence
gttgcatccacatggcattcatgct

SEQ ID NO: 243259 - DNA, 25 bp, Probe Sequence
gttgcacacactaggagatctcctc

SEQ ID NO: 243260 - DNA, 25 bp, Probe Sequence
gttgcaagtctaggagagtgttcca

SEQ ID NO: 243261 - DNA, 25 bp, Probe Sequence
gttgaattcttctagcagtccttca

SEQ ID NO: 243262 - DNA, 25 bp, Probe Sequence
gttccaggtccatgattgctttcaa

SEQ ID NO: 243263 - DNA, 25 bp, Probe Sequence
gtaccaggtgcttttattttcttgc

SEQ ID NO: 243264 - DNA, 25 bp, Probe Sequence
gttccataggttttaacttctgatc

SEQ ID NO: 243265 - DNA, 25 bp, Probe Sequence
gttgaccggctatgtgaactgccta

SEQ ID NO: 243266 - DNA, 25 bp, Probe Sequence
gttgcaagggcaaagataactctta

SEQ ID NO: 243267 - DNA, 25 bp, Probe Sequence
gtgctgcaaatgtcacaagattgac

SEQ ID NO: 243268 - DNA, 25 bp, Probe Sequence
gttgctcagctgtacaagattgtgc

SEQ ID NO: 243269 - DNA, 25 bp, Probe Sequence
gttgcacagtcacactgatatgctg

SEQ ID NO: 243270 - DNA, 25 bp, Probe Sequence
gttgcaatgtgaccagcgaaagctg

SEQ ID NO: 243271 - DNA, 25 bp, Probe Sequence
gttgaaagaccagtagacgctcctc

SEQ ID NO: 243272 - DNA, 25 bp, Probe Sequence
gttgccaaggtagagagctgcccgc

SEQ ID NO: 243273 - DNA, 25 bp, Probe Sequence
gttcccttggaggaactgcttcctg

SEQ ID NO: 243274 - DNA, 25 bp, Probe Sequence
gttccacctgaatgagcatctctat

SEQ ID NO: 243275 - DNA, 25 bp, Probe Sequence
gttccaatgggttgagctgtctttg

SEQ ID NO: 243276 - DNA, 25 bp, Probe Sequence
gttcgcttccgttggtagcttgagt

SEQ ID NO: 243277 - DNA, 25 bp, Probe Sequence
gttctgttccttgtgtaactgtgtt

SEQ ID NO: 243278 - DNA, 25 bp, Probe Sequence
gttgctgttcttacatctgtaaaga

SEQ ID NO: 243279 - DNA, 25 bp, Probe Sequence
gttgctgaaattaatgcagtcaagc

SEQ ID NO: 243280 - DNA, 25 bp, Probe Sequence
gttgctgccatgttaatgacccagc

SEQ ID NO: 243281 - DNA, 25 bp, Probe Sequence
gttcatgccagaaaagagccttccc

SEQ ID NO: 243282 - DNA, 25 bp, Probe Sequence
gttgctgcgcaaagttgatgcctac

SEQ ID NO: 243283 - DNA, 25 bp, Probe Sequence
gttgcgattaggatagccatacatg

SEQ ID NO: 243284 - DNA, 25 bp, Probe Sequence
gttccatgtagggatatgccatcat

SEQ ID NO: 243285 - DNA, 25 bp, Probe Sequence
gttacatggaggggattgatcaaat

SEQ ID NO: 243286 - DNA, 25 bp, Probe Sequence
gttgcaaagtagtgaatggcaaata

SEQ ID NO: 243287 - DNA, 25 bp, Probe Sequence
gttgcaaatttgtgactgtccttat

SEQ ID NO: 243288 - DNA, 25 bp, Probe Sequence
gttgaactttgtggaaacattcttt

SEQ ID NO: 243289 - DNA, 25 bp, Probe Sequence
gttgacagtttccgcagaaatccta

SEQ ID NO: 243290 - DNA, 25 bp, Probe Sequence
gttgacatgttttccaaagtcctgg

SEQ ID NO: 243291 - DNA, 25 bp, Probe Sequence
gttgagttttcaaatatagtccaga

SEQ ID NO: 243292 - DNA, 25 bp, Probe Sequence
gttgaatgtccagaaattgctaaga

SEQ ID NO: 243293 - DNA, 25 bp, Probe Sequence
gttgcatgagtggactaaacctgag

SEQ ID NO: 243294 - DNA, 25 bp, Probe Sequence
gttgctggcttagtagagccctcaa

SEQ ID NO: 243295 - DNA, 25 bp, Probe Sequence
gttgctctcttgtaaagatccccat

SEQ ID NO: 243296 - DNA, 25 bp, Probe Sequence
gttgcatcttatttaatgactctga

SEQ ID NO: 243297 - DNA, 25 bp, Probe Sequence
gttgcagctgttttgttgacattct

SEQ ID NO: 243298 - DNA, 25 bp, Probe Sequence
gttgcagctgttttgttgacattct

SEQ ID NO: 243299 - DNA, 25 bp, Probe Sequence
gttgcagctgttttgttgacattct

SEQ ID NO: 243300 - DNA, 25 bp, Probe Sequence
gttgagctttaactctatgctgact

SEQ ID NO: 243301 - DNA, 25 bp, Probe Sequence
gttccttgctaatctgagctactta

SEQ ID NO: 243302 - DNA, 25 bp, Probe Sequence
gttcttccgaaacaattctgtcaac

SEQ ID NO: 243303 - DNA, 25 bp, Probe Sequence
gttctctcaggacggtaaggcgtac

SEQ ID NO: 243304 - DNA, 25 bp, Probe Sequence
gttcctcatgaaagggacgacggga

SEQ ID NO: 243305 - DNA, 25 bp, Probe Sequence
gttgccttgagaagtcagaccgctg

SEQ ID NO: 243306 - DNA, 25 bp, Probe Sequence
gttcgtcgagaactcagtctgcgcg

SEQ ID NO: 243307 - DNA, 25 bp, Probe Sequence
gttcgcctggagccattgactgaag

SEQ ID NO: 243308 - DNA, 25 bp, Probe Sequence
gttctgctctaactgatacctcaac

SEQ ID NO: 243309 - DNA, 25 bp, Probe Sequence
gttccccacaggatttcaacgtggc

SEQ ID NO: 243310 - DNA, 25 bp, Probe Sequence
gttcctcccaagaggccagggtggc

SEQ ID NO: 243311 - DNA, 25 bp, Probe Sequence
gtccccttcaagagtggacaaaggc

SEQ ID NO: 243312 - DNA, 25 bp, Probe Sequence
gttctccttaagggcctgaagcaca

SEQ ID NO: 243313 - DNA, 25 bp, Probe Sequence
gttgccagttacacgcactaagatt

SEQ ID NO: 243314 - DNA, 25 bp, Probe Sequence
gttgctaatttaacccataagtcaa

SEQ ID NO: 243315 - DNA, 25 bp, Probe Sequence
gtctcaatttcatgttccagtagtc

SEQ ID NO: 243316 - DNA, 25 bp, Probe Sequence
gttcgtttgcaatctacagctagta

SEQ ID NO: 243317 - DNA, 25 bp, Probe Sequence
gttctgctttcacacggcagtgtgc

SEQ ID NO: 243318 - DNA, 25 bp, Probe Sequence
gttgagattgtgccaacggcaatga

SEQ ID NO: 243319 - DNA, 25 bp, Probe Sequence
gttgagatgctaccaactgccattc

SEQ ID NO: 243320 - DNA, 25 bp, Probe Sequence
gttgacattgatccacaggtttctg

SEQ ID NO: 243321 - DNA, 25 bp, Probe Sequence
gttgcaaagtctacattttatgctg

SEQ ID NO: 243322 - DNA, 25 bp, Probe Sequence
gttgcaacaatgagactgttagctt

SEQ ID NO: 243323 - DNA, 25 bp, Probe Sequence
gttgcaatttaggacatttgagcta

SEQ ID NO: 243324 - DNA, 25 bp, Probe Sequence
gttgcctatgtaggttctctgacaa

SEQ ID NO: 243325 - DNA, 25 bp, Probe Sequence
gttgctttgtgagtgtaattgagta

SEQ ID NO: 243326 - DNA, 25 bp, Probe Sequence
gttgcttctggtgggatcattggct

SEQ ID NO: 243327 - DNA, 25 bp, Probe Sequence
gttgaactgctgtggtttggctggg

SEQ ID NO: 243328 - DNA, 25 bp, Probe Sequence
gttgaactggaaaattccctgaggc

SEQ ID NO: 243329 - DNA, 25 bp, Probe Sequence
gttgaatttgaagatccccgagatg

SEQ ID NO: 243330 - DNA, 25 bp, Probe Sequence
gttgaataccaagaactgcccaagt

SEQ ID NO: 243331 - DNA, 25 bp, Probe Sequence
gttgaaagcccatcataggtttagt

SEQ ID NO: 243332 - DNA, 25 bp, Probe Sequence
gttgcacaacccaaagaggtatata

SEQ ID NO: 243333 - DNA, 25 bp, Probe Sequence
gttgcagaacctccacaaggctaaa

SEQ ID NO: 243334 - DNA, 25 bp, Probe Sequence
gttcgaatgcctaccaagactttga

SEQ ID NO: 243335 - DNA, 25 bp, Probe Sequence
gttcccatgtctaacaggacttgaa

SEQ ID NO: 243336 - DNA, 25 bp, Probe Sequence
gttgccgcttcattaagtggttcaa

SEQ ID NO: 243337 - DNA, 25 bp, Probe Sequence
gttccagatacattaaaggcttaaa

SEQ ID NO: 243338 - DNA, 25 bp, Probe Sequence
gttgctccaccaataaacgtttcga

SEQ ID NO: 243339 - DNA, 25 bp, Probe Sequence
gttctcccccatgacatttttagaa

SEQ ID NO: 243340 - DNA, 25 bp, Probe Sequence
gttctgtcccacggaatctatttac

SEQ ID NO: 243341 - DNA, 25 bp, Probe Sequence
ggtcgtgctaactgtggctatttcg

SEQ ID NO: 243342 - DNA, 25 bp, Probe Sequence
gttcgtttatccattgcgatctggg

SEQ ID NO: 243343 - DNA, 25 bp, Probe Sequence
gttcgtctttcaaagtaatccttga

SEQ ID NO: 243344 - DNA, 25 bp, Probe Sequence
gttcctgttaaaggtcaagacactg

SEQ ID NO: 243345 - DNA, 25 bp, Probe Sequence
gttccttgtacgattgtagatacta

SEQ ID NO: 243346 - DNA, 25 bp, Probe Sequence
gttcggtgttcagatggtaatatat

SEQ ID NO: 243347 - DNA, 25 bp, Probe Sequence
gttgcataggtttccattgtattta

SEQ ID NO: 243348 - DNA, 25 bp, Probe Sequence
gttgaagacatctaccagtttctcc

SEQ ID NO: 243349 - DNA, 25 bp, Probe Sequence
gttgacaactaactcgttttcctag

SEQ ID NO: 243350 - DNA, 25 bp, Probe Sequence
gttgaaacatatctcttatcttacg

SEQ ID NO: 243351 - DNA, 25 bp, Probe Sequence
gttgaaacgactttgtcctgctaca

SEQ ID NO: 243352 - DNA, 25 bp, Probe Sequence
gttgaaaggactattctttatctat

SEQ ID NO: 243353 - DNA, 25 bp, Probe Sequence
gttgaaggaacttgtctcttcatct

SEQ ID NO: 243354 - DNA, 25 bp, Probe Sequence
gttgcaggcgaagttgattttgctt

SEQ ID NO: 243355 - DNA, 25 bp, Probe Sequence
gttgcaggggagccgagttgctctg

SEQ ID NO: 243356 - DNA, 25 bp, Probe Sequence
gttcggggtgagaacttctcttggt

SEQ ID NO: 243357 - DNA, 25 bp, Probe Sequence
gttgctggatgactgttactctttt

SEQ ID NO: 243358 - DNA, 25 bp, Probe Sequence
gttgctagaagtcatgagtcttttc

SEQ ID NO: 243359 - DNA, 25 bp, Probe Sequence
gttgcaaacagaatatcgtcttcct

SEQ ID NO: 243360 - DNA, 25 bp, Probe Sequence
gtaggcagacagagacctttgcttc

SEQ ID NO: 243361 - DNA, 25 bp, Probe Sequence
gtagccatcagcaggaccgttggcc

SEQ ID NO: 243362 - DNA, 25 bp, Probe Sequence
gttgctatcggggactacaatggcc

SEQ ID NO: 243363 - DNA, 25 bp, Probe Sequence
gttgctattgcccgttaaaggcact

SEQ ID NO: 243364 - DNA, 25 bp, Probe Sequence
gttctttgcctgctgtcagaggagc

SEQ ID NO: 243365 - DNA, 25 bp, Probe Sequence
gttcacttacgcctctcaaggaggg

SEQ ID NO: 243366 - DNA, 25 bp, Probe Sequence
gttctttgaccctcggagcagggac

SEQ ID NO: 243367 - DNA, 25 bp, Probe Sequence
gttctactgacccaactgggggcaa

SEQ ID NO: 243368 - DNA, 25 bp, Probe Sequence
gttcgagctataccaagtagggaga

SEQ ID NO: 243369 - DNA, 25 bp, Probe Sequence
gttcgagctaagttcttgggagacc

SEQ ID NO: 243370 - DNA, 25 bp, Probe Sequence
gttccagtgcctgacttgggatagg

SEQ ID NO: 243371 - DNA, 25 bp, Probe Sequence
gttccagctggcaacacgtttgcaa

SEQ ID NO: 243372 - DNA, 25 bp, Probe Sequence
tgttcaggcacgccagaaggatgcc

SEQ ID NO: 243373 - DNA, 25 bp, Probe Sequence
agaaggatgccgcagaccattatct

SEQ ID NO: 243374 - DNA, 25 bp, Probe Sequence
gccgcagaccattatctggcgggag

SEQ ID NO: 243375 - DNA, 25 bp, Probe Sequence
cgttagcgactgcgacgttcgatct

SEQ ID NO: 243376 - DNA, 25 bp, Probe Sequence
cgacgttcgatcttgcatggagcaa

SEQ ID NO: 243377 - DNA, 25 bp, Probe Sequence
gatcttgcatggagcaatctcgcag

SEQ ID NO: 243378 - DNA, 25 bp, Probe Sequence
caatctcgcagtgcagtggtgcggt

SEQ ID NO: 243379 - DNA, 25 bp, Probe Sequence
atttatccacggcactccgcgagct

SEQ ID NO: 243380 - DNA, 25 bp, Probe Sequence
tacccgaacgtcatcaggcgtggca

SEQ ID NO: 243381 - DNA, 25 bp, Probe Sequence
ggtggacgagcgtccgcatgctaat

SEQ ID NO: 243382 - DNA, 25 bp, Probe Sequence
cgtccgcatgctaatcgctttttac

SEQ ID NO: 243383 - DNA, 25 bp, Probe Sequence
tttaccgccagatgaaatcgaacag

SEQ ID NO: 243384 - DNA, 25 bp, Probe Sequence
gatgaaatcgaacagtcgctgaacg

SEQ ID NO: 243385 - DNA, 25 bp, Probe Sequence
aacagtcgctgaacggcgtgcatta

SEQ ID NO: 243386 - DNA, 25 bp, Probe Sequence
acatcatattcagcccatcacgctg

SEQ ID NO: 243387 - DNA, 25 bp, Probe Sequence
ttcagcccatcacgctgtggtttga

SEQ ID NO: 243388 - DNA, 25 bp, Probe Sequence
atcacgctgtggtttgatgatgcgc

SEQ ID NO: 243389 - DNA, 25 bp, Probe Sequence
ggtttgatgatgcgctcagtgccat

SEQ ID NO: 243390 - DNA, 25 bp, Probe Sequence
gttgctgaactgtaccccaaaatca

SEQ ID NO: 243391 - DNA, 25 bp, Probe Sequence
gttgctgaactatcttccaggaata

SEQ ID NO: 243392 - DNA, 25 bp, Probe Sequence
gttgctgactcttaattcctatttc

SEQ ID NO: 243393 - DNA, 25 bp, Probe Sequence
gttcgacttggaattacttctggca

SEQ ID NO: 243394 - DNA, 25 bp, Probe Sequence
gttcgacttggaattacttctggca

SEQ ID NO: 243395 - DNA, 25 bp, Probe Sequence
gttcgttacgagattgtcttcgcag

SEQ ID NO: 243396 - DNA, 25 bp, Probe Sequence
gttccttttattagtgctttgccag

SEQ ID NO: 243397 - DNA, 25 bp, Probe Sequence
gttcctctactacttttactacagt

SEQ ID NO: 243398 - DNA, 25 bp, Probe Sequence
gttccttatctgagttgtaatagcc

SEQ ID NO: 243399 - DNA, 25 bp, Probe Sequence
gttcccttgcatggatgtttttaac

SEQ ID NO: 243400 - DNA, 25 bp, Probe Sequence
gttgccctggatctttataaatgac

SEQ ID NO: 243401 - DNA, 25 bp, Probe Sequence
gttcccagaggattgtctaccctga

SEQ ID NO: 243402 - DNA, 25 bp, Probe Sequence
gttcctgggtggagctacccatgaa

SEQ ID NO: 243403 - DNA, 25 bp, Probe Sequence
gttccggaggccagagtccaaaatc

SEQ ID NO: 243404 - DNA, 25 bp, Probe Sequence
gttcctggggaattggatccaactg

SEQ ID NO: 243405 - DNA, 25 bp, Probe Sequence
gttcctcgtggtatgggacacgctg

SEQ ID NO: 243406 - DNA, 25 bp, Probe Sequence
gtatcccgttgatcctggacaactg

SEQ ID NO: 243407 - DNA, 25 bp, Probe Sequence
gttacagcccgaacactggaaactc

SEQ ID NO: 243408 - DNA, 25 bp, Probe Sequence
gttccagcccagagcctgtgaaagc

SEQ ID NO: 243409 - DNA, 25 bp, Probe Sequence
gttccagcccagagcctgtgaaagc

SEQ ID NO: 243410 - DNA, 25 bp, Probe Sequence
gttgctagccaggtgacctggacaa

SEQ ID NO: 243411 - DNA, 25 bp, Probe Sequence
gttgctatccacatgcaagctaaag

SEQ ID NO: 243412 - DNA, 25 bp, Probe Sequence
gttgctatggcacccagattaactg

SEQ ID NO: 243413 - DNA, 25 bp, Probe Sequence
gttgctcatgactgggatgttatgg

SEQ ID NO: 243414 - DNA, 25 bp, Probe Sequence
gttgctcacaggcagagtgtctctg

SEQ ID NO: 243415 - DNA, 25 bp, Probe Sequence
gttccaagggaaggtcacatgcagt

SEQ ID NO: 243416 - DNA, 25 bp, Probe Sequence
gttcccagtgacacttcagagagct

SEQ ID NO: 243417 - DNA, 25 bp, Probe Sequence
gttcccaatcacagtgttagcactg

SEQ ID NO: 243418 - DNA, 25 bp, Probe Sequence
gttgccctaacatgttctaatccta

SEQ ID NO: 243419 - DNA, 25 bp, Probe Sequence
gttccgagcaacttttctaattata

SEQ ID NO: 243420 - DNA, 25 bp, Probe Sequence
gttcaggggcctttttatcattgat

SEQ ID NO: 243421 - DNA, 25 bp, Probe Sequence
gttgcagatgggcttttctccaagt

SEQ ID NO: 243422 - DNA, 25 bp, Probe Sequence
gttgcagatttgccatttctccata

SEQ ID NO: 243423 - DNA, 25 bp, Probe Sequence
gttgaattggcactttctatatctg

SEQ ID NO: 243424 - DNA, 25 bp, Probe Sequence
gttgcaaatggcagtgtgctgtcac

SEQ ID NO: 243425 - DNA, 25 bp, Probe Sequence
gttgcacttgtcattgtgtttctcc

SEQ ID NO: 243426 - DNA, 25 bp, Probe Sequence
gttgcacactgggcattttcttggc

SEQ ID NO: 243427 - DNA, 25 bp, Probe Sequence
gttcaatcatgggtgtattcaggag

SEQ ID NO: 243428 - DNA, 25 bp, Probe Sequence
gttccagcttggactcatgaaggat

SEQ ID NO: 243429 - DNA, 25 bp, Probe Sequence
gttccagtgctggtcactagaggag

SEQ ID NO: 243430 - DNA, 25 bp, Probe Sequence
gttccatgtgctttacttgctgaag

SEQ ID NO: 243431 - DNA, 25 bp, Probe Sequence
gttctgcatcttataatggtaacca

SEQ ID NO: 243432 - DNA, 25 bp, Probe Sequence
gttctcacttccaacttaggaccaa

SEQ ID NO: 243433 - DNA, 25 bp, Probe Sequence
gttcgcaagtctgccattagtgacc

SEQ ID NO: 243434 - DNA, 25 bp, Probe Sequence
gtacgcatactccatcgatgttgta

SEQ ID NO: 243435 - DNA, 25 bp, Probe Sequence
gtacgcatactccatcgatgttgta

SEQ ID NO: 243436 - DNA, 25 bp, Probe Sequence
gttcgcaactcacggatgattgata

SEQ ID NO: 243437 - DNA, 25 bp, Probe Sequence
gttgcagaacttcgtgaatgtatta

SEQ ID NO: 243438 - DNA, 25 bp, Probe Sequence
gttgcagaagcagcttgacagcctc

SEQ ID NO: 243439 - DNA, 25 bp, Probe Sequence
gttgcgcaatgatattgccctcatc

SEQ ID NO: 243440 - DNA, 25 bp, Probe Sequence
gttgcagcaagctgatatcatccca

SEQ ID NO: 243441 - DNA, 25 bp, Probe Sequence
gttgcagtgagctgagatcacgcca

SEQ ID NO: 243442 - DNA, 25 bp, Probe Sequence
gttgcagtgagcggagatcacacca

SEQ ID NO: 243443 - DNA, 25 bp, Probe Sequence
gttgcagaaggccgagatgacctct

SEQ ID NO: 243444 - DNA, 25 bp, Probe Sequence
gttcaacgactgccgtgacatcatt

SEQ ID NO: 243445 - DNA, 25 bp, Probe Sequence
gttcaaaaccacagccacttagtga

SEQ ID NO: 243446 - DNA, 25 bp, Probe Sequence
gttcaataacccaaacatcaaagga

SEQ ID NO: 243447 - DNA, 25 bp, Probe Sequence
gttagctgcaatccagcttcccaag

SEQ ID NO: 243448 - DNA, 25 bp, Probe Sequence
gttcctgaagctggcttgagtcaag

SEQ ID NO: 243449 - DNA, 25 bp, Probe Sequence
gttgcctcaagtgttgaatggagtg

SEQ ID NO: 243450 - DNA, 25 bp, Probe Sequence
gttctgtgaaatattttgggatcta

SEQ ID NO: 243451 - DNA, 25 bp, Probe Sequence
gttttgcaactctttttggggctag

SEQ ID NO: 243452 - DNA, 25 bp, Probe Sequence
gttcttaggtccctttggaggatat

SEQ ID NO: 243453 - DNA, 25 bp, Probe Sequence
gttcctcagttagaattgtgggact

SEQ ID NO: 243454 - DNA, 25 bp, Probe Sequence
gttcttcgtcacttaatgttggttc

SEQ ID NO: 243455 - DNA, 25 bp, Probe Sequence
gttgctctcagttttaatgataggg

SEQ ID NO: 243456 - DNA, 25 bp, Probe Sequence
tgcttcgtaattttggagtaggagg

SEQ ID NO: 243457 - DNA, 25 bp, Probe Sequence
gttcgtgaactctttgaaatggcca

SEQ ID NO: 243458 - DNA, 25 bp, Probe Sequence
gttctggctaactttggaatccatt

SEQ ID NO: 243459 - DNA, 25 bp, Probe Sequence
gttcatcccacagctttgttaaatt

SEQ ID NO: 243460 - DNA, 25 bp, Probe Sequence
gttccctctcactttcagtaaaaat

SEQ ID NO: 243461 - DNA, 25 bp, Probe Sequence
gttccctctcactttcagtaaaaat

SEQ ID NO: 243462 - DNA, 25 bp, Probe Sequence
gttccctctcactttcagtaaaaat

SEQ ID NO: 243463 - DNA, 25 bp, Probe Sequence
gttccacttcctaatactatacctt

SEQ ID NO: 243464 - DNA, 25 bp, Probe Sequence
gttctaatgtctgttagctacccat

SEQ ID NO: 243465 - DNA, 25 bp, Probe Sequence
gttctgattgcaacacttacttccc

SEQ ID NO: 243466 - DNA, 25 bp, Probe Sequence
gttctatatcagcccagtagtcttc

SEQ ID NO: 243467 - DNA, 25 bp, Probe Sequence
gttcctatcccaggatggctgttgg

SEQ ID NO: 243468 - DNA, 25 bp, Probe Sequence
gttgctttccaaagatgtatgttgc

SEQ ID NO: 243469 - DNA, 25 bp, Probe Sequence
gttgctgtaccttagctgtgtttgc

SEQ ID NO: 243470 - DNA, 25 bp, Probe Sequence
gttgctcagttatactgttcttctt

SEQ ID NO: 243471 - DNA, 25 bp, Probe Sequence
gttgcatagtatagttttgccattt

SEQ ID NO: 243472 - DNA, 25 bp, Probe Sequence
gttgcaagcaatattcttctcaatt

SEQ ID NO: 243473 - DNA, 25 bp, Probe Sequence
gttgcaccatactttcttgtacatt

SEQ ID NO: 243474 - DNA, 25 bp, Probe Sequence
gttcccacctgattttgtgacacta

SEQ ID NO: 243475 - DNA, 25 bp, Probe Sequence
gttcccacactgctaattactatga

SEQ ID NO: 243476 - DNA, 25 bp, Probe Sequence
gttcacgctgggcaacattaagagt

SEQ ID NO: 243477 - DNA, 25 bp, Probe Sequence
gttatcggtgggcatgcactgcaag

SEQ ID NO: 243478 - DNA, 25 bp, Probe Sequence
gttcatcggggtcctggggacgaag

SEQ ID NO: 243479 - DNA, 25 bp, Probe Sequence
gttcacggagttcacagaggacgag

SEQ ID NO: 243480 - DNA, 25 bp, Probe Sequence
gttgcccatagtacgccatagggga

SEQ ID NO: 243481 - DNA, 25 bp, Probe Sequence
gttgcttgtaggggccaaactggat

SEQ ID NO: 243482 - DNA, 25 bp, Probe Sequence
gttgcttgcgtgaggaaatacttga

SEQ ID NO: 243483 - DNA, 25 bp, Probe Sequence
gttgcgtctctaagggtttctgtga

SEQ ID NO: 243484 - DNA, 25 bp, Probe Sequence
gttgctaatgtaatcggtttttgta

SEQ ID NO: 243485 - DNA, 25 bp, Probe Sequence
gttgctacatgtatcgagccttgat

SEQ ID NO: 243486 - DNA, 25 bp, Probe Sequence
gttgctacactaacagcagctggga

SEQ ID NO: 243487 - DNA, 25 bp, Probe Sequence
gttcaaccctaccagcttgtggtaa

SEQ ID NO: 243488 - DNA, 25 bp, Probe Sequence
gttccgcacgtgtcgactttggaaa

SEQ ID NO: 243489 - DNA, 25 bp, Probe Sequence
gttcccacaggacacgctaagaagc

SEQ ID NO: 243490 - DNA, 25 bp, Probe Sequence
gttaacacaaacgtcactagcaaag

SEQ ID NO: 243491 - DNA, 25 bp, Probe Sequence
gttaaccaatagtcaggcttcagca

SEQ ID NO: 243492 - DNA, 25 bp, Probe Sequence
gttacgttcatttcaggttaaacat

SEQ ID NO: 243493 - DNA, 25 bp, Probe Sequence
gttgcagctttcaacaaggtctgaa

SEQ ID NO: 243494 - DNA, 25 bp, Probe Sequence
gttgctgttctcacgatggtgagtg

SEQ ID NO: 243495 - DNA, 25 bp, Probe Sequence
gttgctatatctgaggagttggttc

SEQ ID NO: 243496 - DNA, 25 bp, Probe Sequence
gttgctgaggctggagtgcagtgat

SEQ ID NO: 243497 - DNA, 25 bp, Probe Sequence
gttgccagccgccatggctgatgaa

SEQ ID NO: 243498 - DNA, 25 bp, Probe Sequence
gttgccagcctggtttctgaaaaac

SEQ ID NO: 243499 - DNA, 25 bp, Probe Sequence
gttccatccatgcttttgcaaataa

SEQ ID NO: 243500 - DNA, 25 bp, Probe Sequence
gttgcattactgtgttgtgaagata

SEQ ID NO: 243501 - DNA, 25 bp, Probe Sequence
gttgctggatctgctgtttgaagcg

SEQ ID NO: 243502 - DNA, 25 bp, Probe Sequence
gttctggtgtggttgttggagccgg

SEQ ID NO: 243503 - DNA, 25 bp, Probe Sequence
gttctggagaaaggtctggactgga

SEQ ID NO: 243504 - DNA, 25 bp, Probe Sequence
gttcctggagacggtggagttgcag

SEQ ID NO: 243505 - DNA, 25 bp, Probe Sequence
gttctgtgggccagatggcgtctgt

SEQ ID NO: 243506 - DNA, 25 bp, Probe Sequence
gttctgattgatccacagtgggtgc

SEQ ID NO: 243507 - DNA, 25 bp, Probe Sequence
gttcagaggtggccgtggtggagac

SEQ ID NO: 243508 - DNA, 25 bp, Probe Sequence
gttcagaggtggccgtggtggagac

SEQ ID NO: 243509 - DNA, 25 bp, Probe Sequence
gttcggctccgaggtggagctgaga

SEQ ID NO: 243510 - DNA, 25 bp, Probe Sequence
gttccagctactcagtgagatggga

SEQ ID NO: 243511 - DNA, 25 bp, Probe Sequence
gttgccctcactagagtgcagtagg

SEQ ID NO: 243512 - DNA, 25 bp, Probe Sequence
gttgccaatcactaatgctgttact

SEQ ID NO: 243513 - DNA, 25 bp, Probe Sequence
gttccacatcacaatgatttgtccc

SEQ ID NO: 243514 - DNA, 25 bp, Probe Sequence
gttgctccatacaatgactagtcac

SEQ ID NO: 243515 - DNA, 25 bp, Probe Sequence
gttgcccatggctgagaagttctgg

SEQ ID NO: 243516 - DNA, 25 bp, Probe Sequence
gttccaatatacgaaattatccggc

SEQ ID NO: 243517 - DNA, 25 bp, Probe Sequence
gttgccaaaagcaggttgtccgtcc

SEQ ID NO: 243518 - DNA, 25 bp, Probe Sequence
gttgccacaaaggtgtgttgagccc

SEQ ID NO: 243519 - DNA, 25 bp, Probe Sequence
gttgccaaaaggttgtgctatccag

SEQ ID NO: 243520 - DNA, 25 bp, Probe Sequence
gttccagaaacgccgctggactgcg

SEQ ID NO: 243521 - DNA, 25 bp, Probe Sequence
gttgccaagagcaggctcgggtgct

SEQ ID NO: 243522 - DNA, 25 bp, Probe Sequence
gttccacatgacggcctggtgggac

SEQ ID NO: 243523 - DNA, 25 bp, Probe Sequence
gttccacatgacggcctggtgggac

SEQ ID NO: 243524 - DNA, 25 bp, Probe Sequence
gttccacatgacggcctggtgggac

SEQ ID NO: 243525 - DNA, 25 bp, Probe Sequence
gttccacatgacggcctggtgggac

SEQ ID NO: 243526 - DNA, 25 bp, Probe Sequence
gttctgcaccactggcatggatggc

SEQ ID NO: 243527 - DNA, 25 bp, Probe Sequence
gttctgcagcaagcggaggtagagc

SEQ ID NO: 243528 - DNA, 25 bp, Probe Sequence
gttctgagaagcccgaggtcatcac

SEQ ID NO: 243529 - DNA, 25 bp, Probe Sequence
gttctaggagctcctgggtagctga

SEQ ID NO: 243530 - DNA, 25 bp, Probe Sequence
gttcttgagacttatgggtgcagga

SEQ ID NO: 243531 - DNA, 25 bp, Probe Sequence
gttgcctagagctggggatcatggg

SEQ ID NO: 243532 - DNA, 25 bp, Probe Sequence
gttgctcttgactgtttgaaggtag

SEQ ID NO: 243533 - DNA, 25 bp, Probe Sequence
gttctctgtcactgttcccggaagc

SEQ ID NO: 243534 - DNA, 25 bp, Probe Sequence
gttcttgtctcatggtgttcgggaa

SEQ ID NO: 243535 - DNA, 25 bp, Probe Sequence
gttcattgagaaagggtcccagtgc

SEQ ID NO: 243536 - DNA, 25 bp, Probe Sequence
gttcatatggagcggaatcccaggt

SEQ ID NO: 243537 - DNA, 25 bp, Probe Sequence
gttattagggtagactccaggaggt

SEQ ID NO: 243538 - DNA, 25 bp, Probe Sequence
gttcttcagagaacaccctctaggg

SEQ ID NO: 243539 - DNA, 25 bp, Probe Sequence
gttgccattgaaaaccctgctgatg

SEQ ID NO: 243540 - DNA, 25 bp, Probe Sequence
gttctcattacaacccttctggtta

SEQ ID NO: 243541 - DNA, 25 bp, Probe Sequence
gttcttaactaagcttctcgctcta

SEQ ID NO: 243542 - DNA, 25 bp, Probe Sequence
gttcttagaagattattttcctcat

SEQ ID NO: 243543 - DNA, 25 bp, Probe Sequence
gttctagcgcagtttttttttcttg

SEQ ID NO: 243544 - DNA, 25 bp, Probe Sequence
gttctagggaatttatttttctatg

SEQ ID NO: 243545 - DNA, 25 bp, Probe Sequence
gttgctgggtgattttagtctctac

SEQ ID NO: 243546 - DNA, 25 bp, Probe Sequence
gtttttagagttgagttcccgagag

SEQ ID NO: 243547 - DNA, 25 bp, Probe Sequence
gtaccttatgagggcggttacctag

SEQ ID NO: 243548 - DNA, 25 bp, Probe Sequence
gttcctttgagtgtcttctaacttt

SEQ ID NO: 243549 - DNA, 25 bp, Probe Sequence
gttccatttgtagatctttaagatt

SEQ ID NO: 243550 - DNA, 25 bp, Probe Sequence
gttgccatggcttccttatttaagt

SEQ ID NO: 243551 - DNA, 25 bp, Probe Sequence
gttcctggtgaagtgtttccacaga

SEQ ID NO: 243552 - DNA, 25 bp, Probe Sequence
gttcctggcgagatctgtctgccac

SEQ ID NO: 243553 - DNA, 25 bp, Probe Sequence
gttcctcagatgtatttgtctgccc

SEQ ID NO: 243554 - DNA, 25 bp, Probe Sequence
gttgcttcatggtttatgctcgcca

SEQ ID NO: 243555 - DNA, 25 bp, Probe Sequence
gtttaactggtttggctgccaagtc

SEQ ID NO: 243556 - DNA, 25 bp, Probe Sequence
gttctaacttttagcatgctgcaca

SEQ ID NO: 243557 - DNA, 25 bp, Probe Sequence
gttctaacttttagcatgctgcaca

SEQ ID NO: 243558 - DNA, 25 bp, Probe Sequence
gttcccacttatgtgagtgacccca

SEQ ID NO: 243559 - DNA, 25 bp, Probe Sequence
gttcccattagatttagtggccttc

SEQ ID NO: 243560 - DNA, 25 bp, Probe Sequence
gttcccaaagcatttggacagtttc

SEQ ID NO: 243561 - DNA, 25 bp, Probe Sequence
gttctaaagacagctgaatttttcc

SEQ ID NO: 243562 - DNA, 25 bp, Probe Sequence
gttctatctacctcaacaagtttct

SEQ ID NO: 243563 - DNA, 25 bp, Probe Sequence
gtttactgaccagccagaggaacct

SEQ ID NO: 243564 - DNA, 25 bp, Probe Sequence
gtttcagcaaccgctaggtttctat

SEQ ID NO: 243565 - DNA, 25 bp, Probe Sequence
gttctcaagacacgaccaggttctc

SEQ ID NO: 243566 - DNA, 25 bp, Probe Sequence
gttccatgcagtatgactgggttct

SEQ ID NO: 243567 - DNA, 25 bp, Probe Sequence
gttccatgatttgcccgctaatcaa

SEQ ID NO: 243568 - DNA, 25 bp, Probe Sequence
gttcctctttggtcccaagagcagc

SEQ ID NO: 243569 - DNA, 25 bp, Probe Sequence
gttcttccttgctccgcagaagaga

SEQ ID NO: 243570 - DNA, 25 bp, Probe Sequence
gttcttcctggcgctaaaaagagct

SEQ ID NO: 243571 - DNA, 25 bp, Probe Sequence
gttcattccagggacaaataaatgg

SEQ ID NO: 243572 - DNA, 25 bp, Probe Sequence
gttctgtccccttcacaatgagaag

SEQ ID NO: 243573 - DNA, 25 bp, Probe Sequence
gttctggagcagatgatctcaatga

SEQ ID NO: 243574 - DNA, 25 bp, Probe Sequence
gttctgggcatttcatgtcaatgga

SEQ ID NO: 243575 - DNA, 25 bp, Probe Sequence
gttgctgcagagttatcattaaagt

SEQ ID NO: 243576 - DNA, 25 bp, Probe Sequence
gttgctgggatctcagacacaagtg

SEQ ID NO: 243577 - DNA, 25 bp, Probe Sequence
gttcaggttcattcgtcaaagttaa

SEQ ID NO: 243578 - DNA, 25 bp, Probe Sequence
gttcagttgtgatcaataaaggtga

SEQ ID NO: 243579 - DNA, 25 bp, Probe Sequence
gttcttctgtgtggaaaacatactt

SEQ ID NO: 243580 - DNA, 25 bp, Probe Sequence
gttcttcatttggaggaatcacccc

SEQ ID NO: 243581 - DNA, 25 bp, Probe Sequence
gttcctcactgtggggattactaca

SEQ ID NO: 243582 - DNA, 25 bp, Probe Sequence
gttccgactggctgccaggatgtac

SEQ ID NO: 243583 - DNA, 25 bp, Probe Sequence
gttcccatctgggaccaggacatac

SEQ ID NO: 243584 - DNA, 25 bp, Probe Sequence
gttccgcctgtctcaagatgatata

SEQ ID NO: 243585 - DNA, 25 bp, Probe Sequence
gttccaactgttaagcatatttctc

SEQ ID NO: 243586 - DNA, 25 bp, Probe Sequence
gttccaatcgtattacagagttgtc

SEQ ID NO: 243587 - DNA, 25 bp, Probe Sequence
gttccatctggaatatgacaaatta

SEQ ID NO: 243588 - DNA, 25 bp, Probe Sequence
gttgcctatgtttagcaaatttata

SEQ ID NO: 243589 - DNA, 25 bp, Probe Sequence
gttgctgtgctatttgacaaactta

SEQ ID NO: 243590 - DNA, 25 bp, Probe Sequence
gttgctcgctactttgatgaactct

SEQ ID NO: 243591 - DNA, 25 bp, Probe Sequence
gttcctgctagatttcgtattctag

SEQ ID NO: 243592 - DNA, 25 bp, Probe Sequence
gttgccttgcatttgtggtaatcta

SEQ ID NO: 243593 - DNA, 25 bp, Probe Sequence
gttgcctattcagtgttacagattt

SEQ ID NO: 243594 - DNA, 25 bp, Probe Sequence
gttgcgaagtccttttgagttgatt

SEQ ID NO: 243595 - DNA, 25 bp, Probe Sequence
gttaaggctccagaaagctagtatc

SEQ ID NO: 243596 - DNA, 25 bp, Probe Sequence
gttaaactgtcagtcgaacaagtca

SEQ ID NO: 243597 - DNA, 25 bp, Probe Sequence
gttaaaggaactgacagcagtgctt

SEQ ID NO: 243598 - DNA, 25 bp, Probe Sequence
gttcaaaagaacatcaacgtgcaat

SEQ ID NO: 243599 - DNA, 25 bp, Probe Sequence
gttcttaggaacagactcgatgcaa

SEQ ID NO: 243600 - DNA, 25 bp, Probe Sequence
gttctttgggccagacatgccacaa

SEQ ID NO: 243601 - DNA, 25 bp, Probe Sequence
gttctattagctccacaaagccaat

SEQ ID NO: 243602 - DNA, 25 bp, Probe Sequence
gttgcgcgtagttgctaacagcaaa

SEQ ID NO: 243603 - DNA, 25 bp, Probe Sequence
gttccttcaggaggaagcagcacta

SEQ ID NO: 243604 - DNA, 25 bp, Probe Sequence
gttccttcaggaggaagcagcacta

SEQ ID NO: 243605 - DNA, 25 bp, Probe Sequence
gttcctggaggaggacactcccatc

SEQ ID NO: 243606 - DNA, 25 bp, Probe Sequence
gttcctggaggaggacactcccatc

SEQ ID NO: 243607 - DNA, 25 bp, Probe Sequence
gttcctggaggaggacactcccatc

SEQ ID NO: 243608 - DNA, 25 bp, Probe Sequence
gttcctggtgaagcacacggccagc

SEQ ID NO: 243609 - DNA, 25 bp, Probe Sequence
gttcttgggtgaaatcaccgcctgc

SEQ ID NO: 243610 - DNA, 25 bp, Probe Sequence
gttctaagagtgtacaattcccagc

SEQ ID NO: 243611 - DNA, 25 bp, Probe Sequence
gttctaagtggacaaggctctcaca

SEQ ID NO: 243612 - DNA, 25 bp, Probe Sequence
gttctgggtggacaacagcacctca

SEQ ID NO: 243613 - DNA, 25 bp, Probe Sequence
gttctgtggttctgagaagcccgag

SEQ ID NO: 243614 - DNA, 25 bp, Probe Sequence
gttcaggttcctggaaaacgcagat

SEQ ID NO: 243615 - DNA, 25 bp, Probe Sequence
gttcctgttcctgaaatataagaga

SEQ ID NO: 243616 - DNA, 25 bp, Probe Sequence
gttgccgttttttaattgccatgag

SEQ ID NO: 243617 - DNA, 25 bp, Probe Sequence
gttgccactgttattagattgacaa

SEQ ID NO: 243618 - DNA, 25 bp, Probe Sequence
gttctccattatatcaaggctacaa

SEQ ID NO: 243619 - DNA, 25 bp, Probe Sequence
gttcccagatagatcaagggtctca

SEQ ID NO: 243620 - DNA, 25 bp, Probe Sequence
gttctcaagaaataagttgttgcct

SEQ ID NO: 243621 - DNA, 25 bp, Probe Sequence
gttctcaaataaatacagtagtccc

SEQ ID NO: 243622 - DNA, 25 bp, Probe Sequence
gttctcaggctttgataagtagtgc

SEQ ID NO: 243623 - DNA, 25 bp, Probe Sequence
gttccagtttattagcagcaactgc

SEQ ID NO: 243624 - DNA, 25 bp, Probe Sequence
gttccagcatattttgcgagtactc

SEQ ID NO: 243625 - DNA, 25 bp, Probe Sequence
gttgccagtagtcatcagagtacca

SEQ ID NO: 243626 - DNA, 25 bp, Probe Sequence
gttccacatggcctgaaggtaacat

SEQ ID NO: 243627 - DNA, 25 bp, Probe Sequence
gttctactgaggtaaggatgggctt

SEQ ID NO: 243628 - DNA, 25 bp, Probe Sequence
gttcagcacggagttgaggaggcgc

SEQ ID NO: 243629 - DNA, 25 bp, Probe Sequence
gttccactagaaatagagagcccac

SEQ ID NO: 243630 - DNA, 25 bp, Probe Sequence
gttccatctaaaatatcatgcccag

SEQ ID NO: 243631 - DNA, 25 bp, Probe Sequence
gttcctcttagaagtcagatcatct

SEQ ID NO: 243632 - DNA, 25 bp, Probe Sequence
gttcctctctgagcgagcggacttc

SEQ ID NO: 243633 - DNA, 25 bp, Probe Sequence
gttcctctctacttggggaaatcag

SEQ ID NO: 243634 - DNA, 25 bp, Probe Sequence
gttgcctcggcagctggtgcgaaaa

SEQ ID NO: 243635 - DNA, 25 bp, Probe Sequence
gttgccatggaagcggtgggccaga

SEQ ID NO: 243636 - DNA, 25 bp, Probe Sequence
gttccatgtcacacaggtaggccat

SEQ ID NO: 243637 - DNA, 25 bp, Probe Sequence
gttgcctgtcaaaggctggagggca

SEQ ID NO: 243638 - DNA, 25 bp, Probe Sequence
gttcactgtcaaggactgtgatccc

SEQ ID NO: 243639 - DNA, 25 bp, Probe Sequence
gttcatcgacaagaagattgcataa

SEQ ID NO: 243640 - DNA, 25 bp, Probe Sequence
gttccaagcaacaaactccttaatt

SEQ ID NO: 243641 - DNA, 25 bp, Probe Sequence
gttccaaaacaaagccacaaaagct

SEQ ID NO: 243642 - DNA, 25 bp, Probe Sequence
ggaccaaagaacactcgaaaagagc

SEQ ID NO: 243643 - DNA, 25 bp, Probe Sequence
gggcaaaaatacaccgataaacctg

SEQ ID NO: 243644 - DNA, 25 bp, Probe Sequence
gttcaatcagaatccccgaaacctc

SEQ ID NO: 243645 - DNA, 25 bp, Probe Sequence
gttagttaaaccgctaagctcctct

SEQ ID NO: 243646 - DNA, 25 bp, Probe Sequence
gtataactacaatcacctaatgccc

SEQ ID NO: 243647 - DNA, 25 bp, Probe Sequence
gttccatccaaatacactttctgga

SEQ ID NO: 243648 - DNA, 25 bp, Probe Sequence
gttcgacactggtaacctgtgtatg

SEQ ID NO: 243649 - DNA, 25 bp, Probe Sequence
gttccatatatgttataccttgtat

SEQ ID NO: 243650 - DNA, 25 bp, Probe Sequence
gttccttcatggtaatggcttgagt

SEQ ID NO: 243651 - DNA, 25 bp, Probe Sequence
gttcctttagaaaacattgactgtt

SEQ ID NO: 243652 - DNA, 25 bp, Probe Sequence
gttcctcttctttgaacactgaccc

SEQ ID NO: 243653 - DNA, 25 bp, Probe Sequence
gttcctctgttctgtgaatggactc

SEQ ID NO: 243654 - DNA, 25 bp, Probe Sequence
gttccaattggctggagaaatctca

SEQ ID NO: 243655 - DNA, 25 bp, Probe Sequence
gttcctgcagtgctgtgaggaagtt

SEQ ID NO: 243656 - DNA, 25 bp, Probe Sequence
gttcctagtttttatacatgtgtaa

SEQ ID NO: 243657 - DNA, 25 bp, Probe Sequence
gttcctccttaactatacttgctag

SEQ ID NO: 243658 - DNA, 25 bp, Probe Sequence
gttcggatttaacttcatcttctgg

SEQ ID NO: 243659 - DNA, 25 bp, Probe Sequence
gttcagacttatcaccattcttatg

SEQ ID NO: 243660 - DNA, 25 bp, Probe Sequence
gttcagagtgttcagctgtccagaa

SEQ ID NO: 243661 - DNA, 25 bp, Probe Sequence
gttcagcatggtgtactcatccata

SEQ ID NO: 243662 - DNA, 25 bp, Probe Sequence
gttcacatgggaagagtcaccgaag

SEQ ID NO: 243663 - DNA, 25 bp, Probe Sequence
gttcattggaggtgtcactggatgg

SEQ ID NO: 243664 - DNA, 25 bp, Probe Sequence
gttctgtgggcagtagccctgtgtg

SEQ ID NO: 243665 - DNA, 25 bp, Probe Sequence
gttctggtggatgaatttggatgcc

SEQ ID NO: 243666 - DNA, 25 bp, Probe Sequence
gttctgcctggaaatttaggcttca

SEQ ID NO: 243667 - DNA, 25 bp, Probe Sequence
gttccactggaaacttagagtcatg

SEQ ID NO: 243668 - DNA, 25 bp, Probe Sequence
gttccacttgtattatttgaccatg

SEQ ID NO: 243669 - DNA, 25 bp, Probe Sequence
gttcccatttgaaattgctggcgct

SEQ ID NO: 243670 - DNA, 25 bp, Probe Sequence
gttcctgttagaaatggtgtggctt

SEQ ID NO: 243671 - DNA, 25 bp, Probe Sequence
gttcctttgaatacagacgttgcta

SEQ ID NO: 243672 - DNA, 25 bp, Probe Sequence
gttcctgaaatcttggactgtttat

SEQ ID NO: 243673 - DNA, 25 bp, Probe Sequence
gttcctaatgacgtggactttagca

SEQ ID NO: 243674 - DNA, 25 bp, Probe Sequence
gttccttggaccttaatcatttgca

SEQ ID NO: 243675 - DNA, 25 bp, Probe Sequence
ggttccttgacctcattatttgtcc

SEQ ID NO: 243676 - DNA, 25 bp, Probe Sequence
gtttttatgacctccttttggtctg

SEQ ID NO: 243677 - DNA, 25 bp, Probe Sequence
gtttattagccctgttttataggtg

SEQ ID NO: 243678 - DNA, 25 bp, Probe Sequence
gtcttgttttggtgttttaagagct

SEQ ID NO: 243679 - DNA, 25 bp, Probe Sequence
gttctgtaatgtcaagaatttaaga

SEQ ID NO: 243680 - DNA, 25 bp, Probe Sequence
gttcttcaagcctagacaacctaag

SEQ ID NO: 243681 - DNA, 25 bp, Probe Sequence
gttctctaactctgaatggctctaa

SEQ ID NO: 243682 - DNA, 25 bp, Probe Sequence
gttccagccccagaatgtggtaact

SEQ ID NO: 243683 - DNA, 25 bp, Probe Sequence
gttcaacctggagagatggaaaatc

SEQ ID NO: 243684 - DNA, 25 bp, Probe Sequence
gttctccacgggtagtgggaacact

SEQ ID NO: 243685 - DNA, 25 bp, Probe Sequence
gttccagccggcatggctgggaact

SEQ ID NO: 243686 - DNA, 25 bp, Probe Sequence
gttcctaagacccagtgacagtact

SEQ ID NO: 243687 - DNA, 25 bp, Probe Sequence
gttcctgtagacctagggaggacct

SEQ ID NO: 243688 - DNA, 25 bp, Probe Sequence
gttccagaggacctgatgccaaggg

SEQ ID NO: 243689 - DNA, 25 bp, Probe Sequence
gttctcaaagacctgtggccaggta

SEQ ID NO: 243690 - DNA, 25 bp, Probe Sequence
gttccagaagaacgtatccaagtgg

SEQ ID NO: 243691 - DNA, 25 bp, Probe Sequence
gttccagaacagacgctataagact

SEQ ID NO: 243692 - DNA, 25 bp, Probe Sequence
gttccaaatctgacctataataagt

SEQ ID NO: 243693 - DNA, 25 bp, Probe Sequence
gttcacatgaactcctaaatctaaa

SEQ ID NO: 243694 - DNA, 25 bp, Probe Sequence
gttccataggcagttcttaccaaga

SEQ ID NO: 243695 - DNA, 25 bp, Probe Sequence
gttcctggagcatttgttgaccgcc

SEQ ID NO: 243696 - DNA, 25 bp, Probe Sequence
gttcctggacatttggtattctgcc

SEQ ID NO: 243697 - DNA, 25 bp, Probe Sequence
gttcctaacattttgattcctgtct

SEQ ID NO: 243698 - DNA, 25 bp, Probe Sequence
gttcctaaaatggtgatatcctctc

SEQ ID NO: 243699 - DNA, 25 bp, Probe Sequence
gttctctcaaaacatgttctgtgct

SEQ ID NO: 243700 - DNA, 25 bp, Probe Sequence
gttccagatttatgatgttttatgt

SEQ ID NO: 243701 - DNA, 25 bp, Probe Sequence
gttctgatacttcacgtttatgctt

SEQ ID NO: 243702 - DNA, 25 bp, Probe Sequence
gttgccaactccaaagttcgtgctt

SEQ ID NO: 243703 - DNA, 25 bp, Probe Sequence
gttaataaccaatatatcgtgtatc

SEQ ID NO: 243704 - DNA, 25 bp, Probe Sequence
gtaaataaccccattctttgcttga

SEQ ID NO: 243705 - DNA, 25 bp, Probe Sequence
gtaaataaccccattctttgcttga

SEQ ID NO: 243706 - DNA, 25 bp, Probe Sequence
gtaaataaccccattctttgcttga

SEQ ID NO: 243707 - DNA, 25 bp, Probe Sequence
gtgaaaaaacactggtctttgagta

SEQ ID NO: 243708 - DNA, 25 bp, Probe Sequence
gtagaacaaaaatggcactggggct

SEQ ID NO: 243709 - DNA, 25 bp, Probe Sequence
gttaattaaacgagacgggtgcatc

SEQ ID NO: 243710 - DNA, 25 bp, Probe Sequence
gttagagggaacagggcggagatat

SEQ ID NO: 243711 - DNA, 25 bp, Probe Sequence
gttagatcgcgacctcgaagtggga

SEQ ID NO: 243712 - DNA, 25 bp, Probe Sequence
gttagaaggagccaacaatgtaagc

SEQ ID NO: 243713 - DNA, 25 bp, Probe Sequence
gttaaaggagcccaccttgaaccat

SEQ ID NO: 243714 - DNA, 25 bp, Probe Sequence
gttcagagagggcccctttaactct

SEQ ID NO: 243715 - DNA, 25 bp, Probe Sequence
gttcagtagttgcttccctaactgc

SEQ ID NO: 243716 - DNA, 25 bp, Probe Sequence
gttcagtagttgcttccctaactgc

SEQ ID NO: 243717 - DNA, 25 bp, Probe Sequence
gtatcaggagttcgattcctatacc

SEQ ID NO: 243718 - DNA, 25 bp, Probe Sequence
gttagggattccttccaatagttag

SEQ ID NO: 243719 - DNA, 25 bp, Probe Sequence
gttaaggacttctgcagctatgcgc

SEQ ID NO: 243720 - DNA, 25 bp, Probe Sequence
gttcttggtgctacacacagtctgg

SEQ ID NO: 243721 - DNA, 25 bp, Probe Sequence
gttcttgtgtgtgacactgctcttc

SEQ ID NO: 243722 - DNA, 25 bp, Probe Sequence
gttcttgggtgctcagagtttcagc

SEQ ID NO: 243723 - DNA, 25 bp, Probe Sequence
gttcttctgggtaagagctcttggg

SEQ ID NO: 243724 - DNA, 25 bp, Probe Sequence
gttccatggggttcgtgtctttggc

SEQ ID NO: 243725 - DNA, 25 bp, Probe Sequence
gttctagcaggtcatcggtgctttg

SEQ ID NO: 243726 - DNA, 25 bp, Probe Sequence
gttctcaatgagctgtcgggcatac

SEQ ID NO: 243727 - DNA, 25 bp, Probe Sequence
gttcctagaggcatctggcagcaag

SEQ ID NO: 243728 - DNA, 25 bp, Probe Sequence
gttctccaaggcctgagggcaagac

SEQ ID NO: 243729 - DNA, 25 bp, Probe Sequence
gttcatccggcctgagggagagatc

SEQ ID NO: 243730 - DNA, 25 bp, Probe Sequence
gttctctaggccttttagaaaacat

SEQ ID NO: 243731 - DNA, 25 bp, Probe Sequence
gttctctaggccttttagaaaacat

SEQ ID NO: 243732 - DNA, 25 bp, Probe Sequence
gttcctaacagctttatacataata

SEQ ID NO: 243733 - DNA, 25 bp, Probe Sequence
gttcctaaatgattctcacaagcaa

SEQ ID NO: 243734 - DNA, 25 bp, Probe Sequence
gttcctgacgctgtgcaacatcgtc

SEQ ID NO: 243735 - DNA, 25 bp, Probe Sequence
gttcctgacagcatagcatactgcc

SEQ ID NO: 243736 - DNA, 25 bp, Probe Sequence
gttccagactctgaagactgcctgg

SEQ ID NO: 243737 - DNA, 25 bp, Probe Sequence
gttcacagacctgctggatgcagcc

SEQ ID NO: 243738 - DNA, 25 bp, Probe Sequence
gttcatcaattcccattgcatcacc

SEQ ID NO: 243739 - DNA, 25 bp, Probe Sequence
gttctcatctttcttgatcaacatc

SEQ ID NO: 243740 - DNA, 25 bp, Probe Sequence
gttctctcttcttcattattagtgc

SEQ ID NO: 243741 - DNA, 25 bp, Probe Sequence
gttctctttgccattttagatggaa

SEQ ID NO: 243742 - DNA, 25 bp, Probe Sequence
gttcatgctacaccattttaagata

SEQ ID NO: 243743 - DNA, 25 bp, Probe Sequence
gttactaacactcttattattttga

SEQ ID NO: 243744 - DNA, 25 bp, Probe Sequence
gttcctaagtatccattttattatg

SEQ ID NO: 243745 - DNA, 25 bp, Probe Sequence
gttccatccctaaacttatacttgc

SEQ ID NO: 243746 - DNA, 25 bp, Probe Sequence
gttctctggccttcagacttgatca

SEQ ID NO: 243747 - DNA, 25 bp, Probe Sequence
gttcgggtcatggcagactctatgc

SEQ ID NO: 243748 - DNA, 25 bp, Probe Sequence
gttctggtgtcatagatatcccgtt

SEQ ID NO: 243749 - DNA, 25 bp, Probe Sequence
gttctggtgtcatagatatcccgtt

SEQ ID NO: 243750 - DNA, 25 bp, Probe Sequence
gttcttgttcaaggagtcccgcatc

SEQ ID NO: 243751 - DNA, 25 bp, Probe Sequence
gtatcggtacgagatctagcctgcc

SEQ ID NO: 243752 - DNA, 25 bp, Probe Sequence
gttccctcacgagaatgaattgccc

SEQ ID NO: 243753 - DNA, 25 bp, Probe Sequence
gttccctccatgactagtaatcttt

SEQ ID NO: 243754 - DNA, 25 bp, Probe Sequence
gttccagagccccaagtatatcttc

SEQ ID NO: 243755 - DNA, 25 bp, Probe Sequence
gttctcagagttgtacatatgtttc

SEQ ID NO: 243756 - DNA, 25 bp, Probe Sequence
gttcgcagagcttttcagattgtgg

SEQ ID NO: 243757 - DNA, 25 bp, Probe Sequence
gttctaatcttgggcacatctgtgg

SEQ ID NO: 243758 - DNA, 25 bp, Probe Sequence
gttctaatcttgtcaaccagtgcaa

SEQ ID NO: 243759 - DNA, 25 bp, Probe Sequence
gttctgtgtctttaagcatgaggaa

SEQ ID NO: 243760 - DNA, 25 bp, Probe Sequence
gttaatgtcttaatccagcttgcaa

SEQ ID NO: 243761 - DNA, 25 bp, Probe Sequence
tgattaatttactcacgttaaacca

SEQ ID NO: 243762 - DNA, 25 bp, Probe Sequence
gttcagtttatctccagttgaaacg

SEQ ID NO: 243763 - DNA, 25 bp, Probe Sequence
gttagttttcaagcagttaagtcat

SEQ ID NO: 243764 - DNA, 25 bp, Probe Sequence
gttcctttctaagctttgtcagtca

SEQ ID NO: 243765 - DNA, 25 bp, Probe Sequence
gtggccttttcaaggcctagtccca

SEQ ID NO: 243766 - DNA, 25 bp, Probe Sequence
gtttttattcactgttgttcccact

SEQ ID NO: 243767 - DNA, 25 bp, Probe Sequence
gttctgtttacctagtgtcttactc

SEQ ID NO: 243768 - DNA, 25 bp, Probe Sequence
gtatccatttatgtgggcctttctc

SEQ ID NO: 243769 - DNA, 25 bp, Probe Sequence
gttcagccaacaggagcgtcctttt

SEQ ID NO: 243770 - DNA, 25 bp, Probe Sequence
gttcatacaatgtggcaacctcttt

SEQ ID NO: 243771 - DNA, 25 bp, Probe Sequence
gttctaacagataggaatgacctat

SEQ ID NO: 243772 - DNA, 25 bp, Probe Sequence
gtcccaaattagcaaacccttcatt

SEQ ID NO: 243773 - DNA, 25 bp, Probe Sequence
gtcagttgtttacaaactccctctc

SEQ ID NO: 243774 - DNA, 25 bp, Probe Sequence
gttctggtattaccaaaccacacat

SEQ ID NO: 243775 - DNA, 25 bp, Probe Sequence
gttctgttattgacccaaaggccat

SEQ ID NO: 243776 - DNA, 25 bp, Probe Sequence
gttctgcctttgactcactgacaga

SEQ ID NO: 243777 - DNA, 25 bp, Probe Sequence
gttctcctattaccttgacaaggat

SEQ ID NO: 243778 - DNA, 25 bp, Probe Sequence
gttctccttggagctgtgatcactg

SEQ ID NO: 243779 - DNA, 25 bp, Probe Sequence
gttcccttgtgagcttgaatcaacc

SEQ ID NO: 243780 - DNA, 25 bp, Probe Sequence
gttcgtttatgatcttagcaaatga

SEQ ID NO: 243781 - DNA, 25 bp, Probe Sequence
gttcagtttatcactggacattcag

SEQ ID NO: 243782 - DNA, 25 bp, Probe Sequence
gttcgtgtcttgcactggaattcaa

SEQ ID NO: 243783 - DNA, 25 bp, Probe Sequence
gttctgttcttgtacattatactga

SEQ ID NO: 243784 - DNA, 25 bp, Probe Sequence
gttctttcaagaatctttagagata

SEQ ID NO: 243785 - DNA, 25 bp, Probe Sequence
gttcttacacgtatcagtgagtttt

SEQ ID NO: 243786 - DNA, 25 bp, Probe Sequence
gtacagttagttatagaggttcttg

SEQ ID NO: 243787 - DNA, 25 bp, Probe Sequence
gttcgatttattgaagatgagcttc

SEQ ID NO: 243788 - DNA, 25 bp, Probe Sequence
gttctctggctatttgcaaaacctc

SEQ ID NO: 243789 - DNA, 25 bp, Probe Sequence
gttctctagctgattcctataccac

SEQ ID NO: 243790 - DNA, 25 bp, Probe Sequence
gttcctgatggaattcaccatagcc

SEQ ID NO: 243791 - DNA, 25 bp, Probe Sequence
gttcctatgaagaagccacttgtgt

SEQ ID NO: 243792 - DNA, 25 bp, Probe Sequence
gttctcaataaagttcacggtttca

SEQ ID NO: 243793 - DNA, 25 bp, Probe Sequence
gttacactagaagcccagactttac

SEQ ID NO: 243794 - DNA, 25 bp, Probe Sequence
gttacagtttacgcaggacattctt

SEQ ID NO: 243795 - DNA, 25 bp, Probe Sequence
gttccattctctctcctgtactttt

SEQ ID NO: 243796 - DNA, 25 bp, Probe Sequence
gttccttcattttcctgtatattct

SEQ ID NO: 243797 - DNA, 25 bp, Probe Sequence
gttccttatgatattctcattattt

SEQ ID NO: 243798 - DNA, 25 bp, Probe Sequence
gttccttgcagtaaatccgtataat

SEQ ID NO: 243799 - DNA, 25 bp, Probe Sequence
gttcctctgtttatcacctgattta

SEQ ID NO: 243800 - DNA, 25 bp, Probe Sequence
gttcccgatttgagcaacttctatg

SEQ ID NO: 243801 - DNA, 25 bp, Probe Sequence
gttcctggatctacggagtcttcta

SEQ ID NO: 243802 - DNA, 25 bp, Probe Sequence
gtatcctgaggcacataggccttct

SEQ ID NO: 243803 - DNA, 25 bp, Probe Sequence
gttcctgagcagttcaagaccctat

SEQ ID NO: 243804 - DNA, 25 bp, Probe Sequence
gttccgtcaaacaaagccagcaatc

SEQ ID NO: 243805 - DNA, 25 bp, Probe Sequence
gttcaagttaatcaacatcaaacac

SEQ ID NO: 243806 - DNA, 25 bp, Probe Sequence
gttcaaattagttgcccatgtaaca

SEQ ID NO: 243807 - DNA, 25 bp, Probe Sequence
gttcagaagacctccctgtgagaga

SEQ ID NO: 243808 - DNA, 25 bp, Probe Sequence
gttcccaccctctaagtgtgatgga

SEQ ID NO: 243809 - DNA, 25 bp, Probe Sequence
gttccccacctacaaatatgtcgac

SEQ ID NO: 243810 - DNA, 25 bp, Probe Sequence
gttccccttctagaataagagtgac

SEQ ID NO: 243811 - DNA, 25 bp, Probe Sequence
gttcacctcttttgtatattacagt

SEQ ID NO: 243812 - DNA, 25 bp, Probe Sequence
gttccctgtcctaccaataacgtag

SEQ ID NO: 243813 - DNA, 25 bp, Probe Sequence
gttcccttctatatcctcaaggtag

SEQ ID NO: 243814 - DNA, 25 bp, Probe Sequence
gttccctttatttcacataagccca

SEQ ID NO: 243815 - DNA, 25 bp, Probe Sequence
gttctcacagttattaaccagactc

SEQ ID NO: 243816 - DNA, 25 bp, Probe Sequence
gttcttcattattttagaggggtca

SEQ ID NO: 243817 - DNA, 25 bp, Probe Sequence
gtcgtaactttctttatgtgtttca

SEQ ID NO: 243818 - DNA, 25 bp, Probe Sequence
gttaacaggttcttcttgtgtagtc

SEQ ID NO: 243819 - DNA, 25 bp, Probe Sequence
gttctgccagatgtttctatgtgga

SEQ ID NO: 243820 - DNA, 25 bp, Probe Sequence
gttctgtagatgtctgttagatttg

SEQ ID NO: 243821 - DNA, 25 bp, Probe Sequence
gttctgtgcagtttggtatgaaaca

SEQ ID NO: 243822 - DNA, 25 bp, Probe Sequence
gttcattggttcctttgatagccat

SEQ ID NO: 243823 - DNA, 25 bp, Probe Sequence
gttcttggaggcctctgtaacgtta

SEQ ID NO: 243824 - DNA, 25 bp, Probe Sequence
gttcttcgagtcctggccaaagatg

SEQ ID NO: 243825 - DNA, 25 bp, Probe Sequence
gttcttgtagcaaatggaacaatgt

SEQ ID NO: 243826 - DNA, 25 bp, Probe Sequence
gttcgtgtacaaagaagagcatccg

SEQ ID NO: 243827 - DNA, 25 bp, Probe Sequence
gttctggttctcaagaaaatcatca

SEQ ID NO: 243828 - DNA, 25 bp, Probe Sequence
gttcggttactgacaatgcaataaa

SEQ ID NO: 243829 - DNA, 25 bp, Probe Sequence
gttcgatgttgatgctcttgcagaa

SEQ ID NO: 243830 - DNA, 25 bp, Probe Sequence
gttctagcaggtggcacgatcagca

SEQ ID NO: 243831 - DNA, 25 bp, Probe Sequence
gttcggcagccaagacatacagcag

SEQ ID NO: 243832 - DNA, 25 bp, Probe Sequence
gttcctcatccatgcagataacagc

SEQ ID NO: 243833 - DNA, 25 bp, Probe Sequence
gttctctgattccagcagagggaac

SEQ ID NO: 243834 - DNA, 25 bp, Probe Sequence
gttcttgatctgccaactttcaaca

SEQ ID NO: 243835 - DNA, 25 bp, Probe Sequence
gttcctgatcctgtcatttcaatag

SEQ ID NO: 243836 - DNA, 25 bp, Probe Sequence
gttcctctttgcatgatctgtcaaa

SEQ ID NO: 243837 - DNA, 25 bp, Probe Sequence
gttcctcatttcaaacagtatacat

SEQ ID NO: 243838 - DNA, 25 bp, Probe Sequence
gttcctgctttcacagaattattcc

SEQ ID NO: 243839 - DNA, 25 bp, Probe Sequence
gttcctgccttcaatcaatattttg

SEQ ID NO: 243840 - DNA, 25 bp, Probe Sequence
gttctctcacctgaggtattttttt

SEQ ID NO: 243841 - DNA, 25 bp, Probe Sequence
gttccccagctgtagttatgtatct

SEQ ID NO: 243842 - DNA, 25 bp, Probe Sequence
gttccctgaatacgtttgctttctc

SEQ ID NO: 243843 - DNA, 25 bp, Probe Sequence
gttcccgcagataaggattgctttc

SEQ ID NO: 243844 - DNA, 25 bp, Probe Sequence
gttcccaggatgaggatgttaccca

SEQ ID NO: 243845 - DNA, 25 bp, Probe Sequence
gttcccatggcacctgtgattgtac

SEQ ID NO: 243846 - DNA, 25 bp, Probe Sequence
gttcttcaggcatttctatttcaca

SEQ ID NO: 243847 - DNA, 25 bp, Probe Sequence
gttcttcaggcatttctatttcaca

SEQ ID NO: 243848 - DNA, 25 bp, Probe Sequence
gttctttggcatcactatgcactaa

SEQ ID NO: 243849 - DNA, 25 bp, Probe Sequence
gttcttgggcaagcaatcacaaagc

SEQ ID NO: 243850 - DNA, 25 bp, Probe Sequence
gttctgacctcaaaaacagcaaagc

SEQ ID NO: 243851 - DNA, 25 bp, Probe Sequence
gttctgacactcacagatttcaaga

SEQ ID NO: 243852 - DNA, 25 bp, Probe Sequence
gttcataatatcatgtgcacttcaa

SEQ ID NO: 243853 - DNA, 25 bp, Probe Sequence
gttcttgttgcaatgccatcttcaa

SEQ ID NO: 243854 - DNA, 25 bp, Probe Sequence
gttcttgatgtgaatctcatgggca

SEQ ID NO: 243855 - DNA, 25 bp, Probe Sequence
gttctggtgtatttgattgtgctca

SEQ ID NO: 243856 - DNA, 25 bp, Probe Sequence
gttcggcttttcatgtatgtagatt

SEQ ID NO: 243857 - DNA, 25 bp, Probe Sequence
gttcggcccttacttattgatgact

SEQ ID NO: 243858 - DNA, 25 bp, Probe Sequence
gttcagtactttttggatcgattct

SEQ ID NO: 243859 - DNA, 25 bp, Probe Sequence
gttcgtagtttgtataatcagtcat

SEQ ID NO: 243860 - DNA, 25 bp, Probe Sequence
gttcgtagtattggattattgtatt

SEQ ID NO: 243861 - DNA, 25 bp, Probe Sequence
gttctgtaatgtaggcacttttatt

SEQ ID NO: 243862 - DNA, 25 bp, Probe Sequence
gttcgtacactaaactcttcttgct

SEQ ID NO: 243863 - DNA, 25 bp, Probe Sequence
gttctttgccctaatgtttcatttg

SEQ ID NO: 243864 - DNA, 25 bp, Probe Sequence
gttcattgtgagccaaggttaattt

SEQ ID NO: 243865 - DNA, 25 bp, Probe Sequence
gttcatattaaaaagcttaactgtt

SEQ ID NO: 243866 - DNA, 25 bp, Probe Sequence
gttctctgatcataaacctcagatt

SEQ ID NO: 243867 - DNA, 25 bp, Probe Sequence
gttcactttcaggcaccgtaattct

SEQ ID NO: 243868 - DNA, 25 bp, Probe Sequence
gttagcttgtgggctgcccaatcca

SEQ ID NO: 243869 - DNA, 25 bp, Probe Sequence
gttagcttcagggctcctgaacagg

SEQ ID NO: 243870 - DNA, 25 bp, Probe Sequence
gttcacttaccacatctgtgacagt

SEQ ID NO: 243871 - DNA, 25 bp, Probe Sequence
gttcacagtgcaccatgtcactgtg

SEQ ID NO: 243872 - DNA, 25 bp, Probe Sequence
gttacaggatgctatgattccatga

SEQ ID NO: 243873 - DNA, 25 bp, Probe Sequence
gttaaggctgcagtgaaccatgatc

SEQ ID NO: 243874 - DNA, 25 bp, Probe Sequence
gttcaaggaaggcaccacaccagaa

SEQ ID NO: 243875 - DNA, 25 bp, Probe Sequence
gtatccgtaagaccaaattcaagaa

SEQ ID NO: 243876 - DNA, 25 bp, Probe Sequence
gttcctgtaagtttgctattaaaat

SEQ ID NO: 243877 - DNA, 25 bp, Probe Sequence
gttcctgtaagtttgctattaaaat

SEQ ID NO: 243878 - DNA, 25 bp, Probe Sequence
gttcctgtaagtttgctattaaaat

SEQ ID NO: 243879 - DNA, 25 bp, Probe Sequence
gttcctgttttatcttctattcagt

SEQ ID NO: 243880 - DNA, 25 bp, Probe Sequence
gttcccgatttctctgttggtcgga

SEQ ID NO: 243881 - DNA, 25 bp, Probe Sequence
tgttcccgatttctctgttggtcgg

SEQ ID NO: 243882 - DNA, 25 bp, Probe Sequence
gttccctgcttccttggagggatgg

SEQ ID NO: 243883 - DNA, 25 bp, Probe Sequence
gttagctgcgttcggggaaggttgg

SEQ ID NO: 243884 - DNA, 25 bp, Probe Sequence
gttacttgttcgaagcttacagctt

SEQ ID NO: 243885 - DNA, 25 bp, Probe Sequence
gttcctgtattcatgtatgtaagtt

SEQ ID NO: 243886 - DNA, 25 bp, Probe Sequence
gttcctgttagcataatgtgaggag

SEQ ID NO: 243887 - DNA, 25 bp, Probe Sequence
gttactggaccaaatatggggggca

SEQ ID NO: 243888 - DNA, 25 bp, Probe Sequence
gttctctgagacccatgatcagggg

SEQ ID NO: 243889 - DNA, 25 bp, Probe Sequence
gttctagaggcagctgtcacgggag

SEQ ID NO: 243890 - DNA, 25 bp, Probe Sequence
gttcgagagagagtcttcgggagag

SEQ ID NO: 243891 - DNA, 25 bp, Probe Sequence
gttcctggatagtttgcggctgaga

SEQ ID NO: 243892 - DNA, 25 bp, Probe Sequence
gttctgctgatagttttggggatac

SEQ ID NO: 243893 - DNA, 25 bp, Probe Sequence
gttctgcatgattgtgctgttcggc

SEQ ID NO: 243894 - DNA, 25 bp, Probe Sequence
gttctgatgagtagtatgtcagcac

SEQ ID NO: 243895 - DNA, 25 bp, Probe Sequence
gttcagacagcttgtgattcgctct

SEQ ID NO: 243896 - DNA, 25 bp, Probe Sequence
gttcaacagctattcataggtacaa

SEQ ID NO: 243897 - DNA, 25 bp, Probe Sequence
gttaatccttcctagatccagacaa

SEQ ID NO: 243898 - DNA, 25 bp, Probe Sequence
gttcaagccttggatgacaccgaaa

SEQ ID NO: 243899 - DNA, 25 bp, Probe Sequence
gttcaacacattattacctactacc

SEQ ID NO: 243900 - DNA, 25 bp, Probe Sequence
gttctatgaatttcgtacttattac

SEQ ID NO: 243901 - DNA, 25 bp, Probe Sequence
gttcatctgttgagggacattttga

SEQ ID NO: 243902 - DNA, 25 bp, Probe Sequence
gttctgctattgtggtattctggtg

SEQ ID NO: 243903 - DNA, 25 bp, Probe Sequence
gttcgatatggtgagattccagctg

SEQ ID NO: 243904 - DNA, 25 bp, Probe Sequence
gttagagcattagcagatgtccact

SEQ ID NO: 243905 - DNA, 25 bp, Probe Sequence
gttcgcagttgcagcgattgcaact

SEQ ID NO: 243906 - DNA, 25 bp, Probe Sequence
gttcgatcttgcatggagcaatctc

SEQ ID NO: 243907 - DNA, 25 bp, Probe Sequence
gttcgagagctcaaggagcaagccc

SEQ ID NO: 243908 - DNA, 25 bp, Probe Sequence
gttccggtctactatgaagcccgtc

SEQ ID NO: 243909 - DNA, 25 bp, Probe Sequence
gttccctgtgtttaaggccgtgtca

SEQ ID NO: 243910 - DNA, 25 bp, Probe Sequence
gttctttagattagacatggccgtg

SEQ ID NO: 243911 - DNA, 25 bp, Probe Sequence
gttctttagaagatctggccatttg

SEQ ID NO: 243912 - DNA, 25 bp, Probe Sequence
gttctgtctggttttgttgccattt

SEQ ID NO: 243913 - DNA, 25 bp, Probe Sequence
gttcaggttttctgttgacttgtag

SEQ ID NO: 243914 - DNA, 25 bp, Probe Sequence
gttctggtgatttcttgatggtttg

SEQ ID NO: 243915 - DNA, 25 bp, Probe Sequence
gttctaatgtattttgacaatgttg

SEQ ID NO: 243916 - DNA, 25 bp, Probe Sequence
gttctcctacatttcaagcatatct

SEQ ID NO: 243917 - DNA, 25 bp, Probe Sequence
gttctgccattcaccatggcatgat

SEQ ID NO: 243918 - DNA, 25 bp, Probe Sequence
gttctcgcttgcattgtctgcagta

SEQ ID NO: 243919 - DNA, 25 bp, Probe Sequence
gtcctacttcgtgtctgactacgac

SEQ ID NO: 243920 - DNA, 25 bp, Probe Sequence
gttcttcttcagcgtctacattaac

SEQ ID NO: 243921 - DNA, 25 bp, Probe Sequence
gttcccatgaagcggctaccaaagc

SEQ ID NO: 243922 - DNA, 25 bp, Probe Sequence
gttaaaaccttgctagccaaagcgg

SEQ ID NO: 243923 - DNA, 25 bp, Probe Sequence
gttcaaaacgttctcaccaaatcca

SEQ ID NO: 243924 - DNA, 25 bp, Probe Sequence
gttcacaaccgtgaagaggacttcc

SEQ ID NO: 243925 - DNA, 25 bp, Probe Sequence
gttacccctgcctaaaggatattct

SEQ ID NO: 243926 - DNA, 25 bp, Probe Sequence
gttaccctcctgtaaatggtgtaca

SEQ ID NO: 243927 - DNA, 25 bp, Probe Sequence
gtatggtttccgtaaagtagtacat

SEQ ID NO: 243928 - DNA, 25 bp, Probe Sequence
gttcgttaccgaaaatgtatcaagt

SEQ ID NO: 243929 - DNA, 25 bp, Probe Sequence
gttcatgctatcactcaactttaaa

SEQ ID NO: 243930 - DNA, 25 bp, Probe Sequence
gttcatgcttctactgtgacactta

SEQ ID NO: 243931 - DNA, 25 bp, Probe Sequence
gtttcatttagcagactttactaag

SEQ ID NO: 243932 - DNA, 25 bp, Probe Sequence
gttctcttctaaaacaagctactaa

SEQ ID NO: 243933 - DNA, 25 bp, Probe Sequence
gttctctgtttaaacctgtattaat

SEQ ID NO: 243934 - DNA, 25 bp, Probe Sequence
gttctctaatagaagcctttctttt

SEQ ID NO: 243935 - DNA, 25 bp, Probe Sequence
gttcttgaaaatacctgcatttttt

SEQ ID NO: 243936 - DNA, 25 bp, Probe Sequence
gttctataataagccatgagcttcg

SEQ ID NO: 243937 - DNA, 25 bp, Probe Sequence
gttctgttatactccagccatttgc

SEQ ID NO: 243938 - DNA, 25 bp, Probe Sequence
gttcttcaaatatctactcatcttc

SEQ ID NO: 243939 - DNA, 25 bp, Probe Sequence
gttcccaagataaattcatccttca

SEQ ID NO: 243940 - DNA, 25 bp, Probe Sequence
gttcccagaaggcatatcagtctct

SEQ ID NO: 243941 - DNA, 25 bp, Probe Sequence
gttctggaaaggcacttgcctctgc

SEQ ID NO: 243942 - DNA, 25 bp, Probe Sequence
gttcttggcaaggacacttggacta

SEQ ID NO: 243943 - DNA, 25 bp, Probe Sequence
gttctgtggaaggctagcttgccag

SEQ ID NO: 243944 - DNA, 25 bp, Probe Sequence
gttcgttcaagcctagcaatccatc

SEQ ID NO: 243945 - DNA, 25 bp, Probe Sequence
gttcccatataccaataaccatgcc

SEQ ID NO: 243946 - DNA, 25 bp, Probe Sequence
gttctccatatcaagatgtggccca

SEQ ID NO: 243947 - DNA, 25 bp, Probe Sequence
gttctcactcataagtgggaactga

SEQ ID NO: 243948 - DNA, 25 bp, Probe Sequence
gttctcactcataagcgggaactaa

SEQ ID NO: 243949 - DNA, 25 bp, Probe Sequence
gttcttcttttgggagacgcatata

SEQ ID NO: 243950 - DNA, 25 bp, Probe Sequence
gttcttgcttttggcgcccacagtg

SEQ ID NO: 243951 - DNA, 25 bp, Probe Sequence
gttcttcttgtaaccctgaggtgcc

SEQ ID NO: 243952 - DNA, 25 bp, Probe Sequence
gttcttttctaagccatggagtgag

SEQ ID NO: 243953 - DNA, 25 bp, Probe Sequence
gtactttgtcaaataaacgaggatg

SEQ ID NO: 243954 - DNA, 25 bp, Probe Sequence
gttcatttgtcatataggcactggg

SEQ ID NO: 243955 - DNA, 25 bp, Probe Sequence
gtatttgtgtaatctcccaagggag

SEQ ID NO: 243956 - DNA, 25 bp, Probe Sequence
gttagctttaagcaccctagaggac

SEQ ID NO: 243957 - DNA, 25 bp, Probe Sequence
gtctagccttaacaacttggtccat

SEQ ID NO: 243958 - DNA, 25 bp, Probe Sequence
gttacctacaagagttctgggctat

SEQ ID NO: 243959 - DNA, 25 bp, Probe Sequence
gttaagaaatgacagtctcgggggg

SEQ ID NO: 243960 - DNA, 25 bp, Probe Sequence
gtcaaggaaatttacctgttcgagg

SEQ ID NO: 243961 - DNA, 25 bp, Probe Sequence
gtttaaagataatcctttccatgtg

SEQ ID NO: 243962 - DNA, 25 bp, Probe Sequence
gtttaagacaaacccttgtgcacct

SEQ ID NO: 243963 - DNA, 25 bp, Probe Sequence
gttcaaaggaaaccctggctggctc

SEQ ID NO: 243964 - DNA, 25 bp, Probe Sequence
gttcaaatgttctgtactttggtgt

SEQ ID NO: 243965 - DNA, 25 bp, Probe Sequence
gttcaaaataaccaacttgtgagtt

SEQ ID NO: 243966 - DNA, 25 bp, Probe Sequence
gttagaacacaatcaacctgtaagt

SEQ ID NO: 243967 - DNA, 25 bp, Probe Sequence
gttagtaaagaacatctgcttgaaa

SEQ ID NO: 243968 - DNA, 25 bp, Probe Sequence
gttctgttaggcctacatcgtggaa

SEQ ID NO: 243969 - DNA, 25 bp, Probe Sequence
gttcgaacaggccatggatctggtg

SEQ ID NO: 243970 - DNA, 25 bp, Probe Sequence
gttctacacagactgcagcaacggt

SEQ ID NO: 243971 - DNA, 25 bp, Probe Sequence
gttctacaactgccgcagcatcgac

SEQ ID NO: 243972 - DNA, 25 bp, Probe Sequence
gttctacaactccaaacgcattgac

SEQ ID NO: 243973 - DNA, 25 bp, Probe Sequence
gttctaacaccaaaacgcttggcaa

SEQ ID NO: 243974 - DNA, 25 bp, Probe Sequence
gttctcaaaccaatcacacagaatg

SEQ ID NO: 243975 - DNA, 25 bp, Probe Sequence
gttctaatccctaaatcataatctt

SEQ ID NO: 243976 - DNA, 25 bp, Probe Sequence
gttcaccagcccagagatcaatctt

SEQ ID NO: 243977 - DNA, 25 bp, Probe Sequence
gttcaggaccacagcgataatcttc

SEQ ID NO: 243978 - DNA, 25 bp, Probe Sequence
gttcgcgattatcttctatatcttc

SEQ ID NO: 243979 - DNA, 25 bp, Probe Sequence
gttcgagattatctcagtaaccctc

SEQ ID NO: 243980 - DNA, 25 bp, Probe Sequence
gtttgaactataatactaaggcctg

SEQ ID NO: 243981 - DNA, 25 bp, Probe Sequence
gttctgttttcaatgtataaggact

SEQ ID NO: 243982 - DNA, 25 bp, Probe Sequence
gttcgttgtcaacattatagtaatt

SEQ ID NO: 243983 - DNA, 25 bp, Probe Sequence
gttttttctaccataagtgacacca

SEQ ID NO: 243984 - DNA, 25 bp, Probe Sequence
gttcattaatcttccgttaggccaa

SEQ ID NO: 243985 - DNA, 25 bp, Probe Sequence
gttactagaaagtcttttggccatc

SEQ ID NO: 243986 - DNA, 25 bp, Probe Sequence
gttatcaaaaagattgtttctctaa

SEQ ID NO: 243987 - DNA, 25 bp, Probe Sequence
gtaaaaaattgcattccctttgtat

SEQ ID NO: 243988 - DNA, 25 bp, Probe Sequence
gtaggaaaagctgttcccatgtcta

SEQ ID NO: 243989 - DNA, 25 bp, Probe Sequence
gtaggaaaggccatttgcaactatc

SEQ ID NO: 243990 - DNA, 25 bp, Probe Sequence
gttcggaagaccatgttagtgctac

SEQ ID NO: 243991 - DNA, 25 bp, Probe Sequence
gttcgagaagacctagttgctgtgg

SEQ ID NO: 243992 - DNA, 25 bp, Probe Sequence
gttaagtagccactggtgtcctggg

SEQ ID NO: 243993 - DNA, 25 bp, Probe Sequence
gttaagtacctctgttctggatctg

SEQ ID NO: 243994 - DNA, 25 bp, Probe Sequence
gttaagtacctctgttctggatctg

SEQ ID NO: 243995 - DNA, 25 bp, Probe Sequence
gttaagttagtctgttgttatagta

SEQ ID NO: 243996 - DNA, 25 bp, Probe Sequence
gttagaccttttggctgcagtttca

SEQ ID NO: 243997 - DNA, 25 bp, Probe Sequence
gtaaatcccttcagtatttatccct

SEQ ID NO: 243998 - DNA, 25 bp, Probe Sequence
gtaaaaccgtggatcctgtactctt

SEQ ID NO: 243999 - DNA, 25 bp, Probe Sequence
gtactaaggcgtcttttgtaggctt

SEQ ID NO: 244000 - DNA, 25 bp, Probe Sequence
gtacggggaatggtttggctacctg

SEQ ID NO: 244001 - DNA, 25 bp, Probe Sequence
gtagggggcaagctttggtgcgccc

SEQ ID NO: 244002 - DNA, 25 bp, Probe Sequence
gtaggcggtgcttgaacttagggct

SEQ ID NO: 244003 - DNA, 25 bp, Probe Sequence
gtcgatgaccattagaaattagggc

SEQ ID NO: 244004 - DNA, 25 bp, Probe Sequence
gttaaggataaatctgtagcagagc

SEQ ID NO: 244005 - DNA, 25 bp, Probe Sequence
gttaatttgagattcatctgggaaa

SEQ ID NO: 244006 - DNA, 25 bp, Probe Sequence
gtccaacagtcgtatcctggtgaat

SEQ ID NO: 244007 - DNA, 25 bp, Probe Sequence
gttcaacatgaccaacttggtgaga

SEQ ID NO: 244008 - DNA, 25 bp, Probe Sequence
atgatgcgctcagtgccatgcgttc

SEQ ID NO: 244009 - DNA, 25 bp, Probe Sequence
ctcagtgccatgcgttcgctgaaag

SEQ ID NO: 244010 - DNA, 25 bp, Probe Sequence
catgcgttcgctgaaaggcatcggt

SEQ ID NO: 244011 - DNA, 25 bp, Probe Sequence
ctgaaaggcatcggtgccacgcatc

SEQ ID NO: 244012 - DNA, 25 bp, Probe Sequence
ggcatcggtgccacgcatcttcatg

SEQ ID NO: 244013 - DNA, 25 bp, Probe Sequence
tgccacgcatcttcatgaagggcgc

SEQ ID NO: 244014 - DNA, 25 bp, Probe Sequence
atcttcatgaagggcgcgacccgcg

SEQ ID NO: 244015 - DNA, 25 bp, Probe Sequence
attaacgcgttcgcagttgcagcga

SEQ ID NO: 244016 - DNA, 25 bp, Probe Sequence
gcgttcgcagttgcagcgattgcaa

SEQ ID NO: 244017 - DNA, 25 bp, Probe Sequence
agttgcagcgattgcaactggcctg

SEQ ID NO: 244018 - DNA, 25 bp, Probe Sequence
gggaaaactgtcgccagttgtgcac

SEQ ID NO: 244019 - DNA, 25 bp, Probe Sequence
cgccagttgtgcacttttacaagcc

SEQ ID NO: 244020 - DNA, 25 bp, Probe Sequence
cacttttacaagccgcaaaggcagc

SEQ ID NO: 244021 - DNA, 25 bp, Probe Sequence
caagccgcaaaggcagcaggctacc

SEQ ID NO: 244022 - DNA, 25 bp, Probe Sequence
gcaaaggcagcaggctaccggacgg

SEQ ID NO: 244023 - DNA, 25 bp, Probe Sequence
aggtttacgcaatagcgacgcgctg

SEQ ID NO: 244024 - DNA, 25 bp, Probe Sequence
cgcaatagcgacgcgctggcgttac

SEQ ID NO: 244025 - DNA, 25 bp, Probe Sequence
gcgacgcgctggcgttacagcgcaa

SEQ ID NO: 244026 - DNA, 25 bp, Probe Sequence
gttcaagtctgactacccatcaggc

SEQ ID NO: 244027 - DNA, 25 bp, Probe Sequence
gttcaagcctagcaatccatcagac

SEQ ID NO: 244028 - DNA, 25 bp, Probe Sequence
gttaagccaagcaataggctaacca

SEQ ID NO: 244029 - DNA, 25 bp, Probe Sequence
gtcttaccacggggcgaaatcctat

SEQ ID NO: 244030 - DNA, 25 bp, Probe Sequence
gtcttacaaggcaggcctttcctac

SEQ ID NO: 244031 - DNA, 25 bp, Probe Sequence
gttctccaagtgggctgacttatcc

SEQ ID NO: 244032 - DNA, 25 bp, Probe Sequence
gttcttgcaggttgcctgacttacc

SEQ ID NO: 244033 - DNA, 25 bp, Probe Sequence
gttctaagggatctcatctaatctc

SEQ ID NO: 244034 - DNA, 25 bp, Probe Sequence
gttctaatgccagtttcctaattcc

SEQ ID NO: 244035 - DNA, 25 bp, Probe Sequence
gttctaatccatcttgcaccaaaaa

SEQ ID NO: 244036 - DNA, 25 bp, Probe Sequence
gttctaattgatctctcctaaagtg

SEQ ID NO: 244037 - DNA, 25 bp, Probe Sequence
gtttcaagtggatctcagtaaagga

SEQ ID NO: 244038 - DNA, 25 bp, Probe Sequence
gttagaaggggaccgacaacaggag

SEQ ID NO: 244039 - DNA, 25 bp, Probe Sequence
gtttaaaggactgcagaccaaggag

SEQ ID NO: 244040 - DNA, 25 bp, Probe Sequence
gttaatggggacacagacccctggc

SEQ ID NO: 244041 - DNA, 25 bp, Probe Sequence
gttacttagggacaatctcactctg

SEQ ID NO: 244042 - DNA, 25 bp, Probe Sequence
gttacttagggacaatctcactctg

SEQ ID NO: 244043 - DNA, 25 bp, Probe Sequence
ggtactttgggaaatgactccattt

SEQ ID NO: 244044 - DNA, 25 bp, Probe Sequence
gttcttttgaaatagtaccacatgt

SEQ ID NO: 244045 - DNA, 25 bp, Probe Sequence
ggttgacttcaaaggcctaaactgt

SEQ ID NO: 244046 - DNA, 25 bp, Probe Sequence
gtctttccaagaaggccttaacctg

SEQ ID NO: 244047 - DNA, 25 bp, Probe Sequence
gttagtcagaattcaggtttagtcc

SEQ ID NO: 244048 - DNA, 25 bp, Probe Sequence
gttattgcagataccacattcatta

SEQ ID NO: 244049 - DNA, 25 bp, Probe Sequence
gttcttgcagtaggcactttatcag

SEQ ID NO: 244050 - DNA, 25 bp, Probe Sequence
gttctagagtatgttcttatgcggg

SEQ ID NO: 244051 - DNA, 25 bp, Probe Sequence
gttctaaggtcttttcagagcgtgg

SEQ ID NO: 244052 - DNA, 25 bp, Probe Sequence
gttctaaactcttttcatgtcatgt

SEQ ID NO: 244053 - DNA, 25 bp, Probe Sequence
gttctacacagagtttgatcggcgt

SEQ ID NO: 244054 - DNA, 25 bp, Probe Sequence
gttctacacagacttgtatatgaat

SEQ ID NO: 244055 - DNA, 25 bp, Probe Sequence
gttcaacagctgctctgtcacataa

SEQ ID NO: 244056 - DNA, 25 bp, Probe Sequence
gttcataaatggctgatttataagc

SEQ ID NO: 244057 - DNA, 25 bp, Probe Sequence
gttaatgtcatgctgttgtttaggt

SEQ ID NO: 244058 - DNA, 25 bp, Probe Sequence
gttaattggtatttttcaaggatgt

SEQ ID NO: 244059 - DNA, 25 bp, Probe Sequence
gttaattgtggaagcctccaagctt

SEQ ID NO: 244060 - DNA, 25 bp, Probe Sequence
gttcaatggggaggacatcgacacc

SEQ ID NO: 244061 - DNA, 25 bp, Probe Sequence
gttcactgtggacagtttgacatcg

SEQ ID NO: 244062 - DNA, 25 bp, Probe Sequence
gttactgggtaggttctgaacagca

SEQ ID NO: 244063 - DNA, 25 bp, Probe Sequence
gttcaaatggtacgttataacatca

SEQ ID NO: 244064 - DNA, 25 bp, Probe Sequence
gttcagacatgatcacttaaaaaga

SEQ ID NO: 244065 - DNA, 25 bp, Probe Sequence
gttcatagctgctttatctataaca

SEQ ID NO: 244066 - DNA, 25 bp, Probe Sequence
gttctcaggctttcagcttgaacta

SEQ ID NO: 244067 - DNA, 25 bp, Probe Sequence
gttctcaggatttatcaggagttaa

SEQ ID NO: 244068 - DNA, 25 bp, Probe Sequence
gttctggcatcatttacgtagttta

SEQ ID NO: 244069 - DNA, 25 bp, Probe Sequence
gttctggcatatttatctgtaggta

SEQ ID NO: 244070 - DNA, 25 bp, Probe Sequence
gttctcatacttttctgtcactgta

SEQ ID NO: 244071 - DNA, 25 bp, Probe Sequence
gttctgataccttgtttacatgttt

SEQ ID NO: 244072 - DNA, 25 bp, Probe Sequence
gttctgaaccaattttctcctatct

SEQ ID NO: 244073 - DNA, 25 bp, Probe Sequence
gttcatgatactttcctctttttca

SEQ ID NO: 244074 - DNA, 25 bp, Probe Sequence
gttagaataggctgcatctttttaa

SEQ ID NO: 244075 - DNA, 25 bp, Probe Sequence
gttcagatcagttgcaggcctctgt

SEQ ID NO: 244076 - DNA, 25 bp, Probe Sequence
gttaacagcatgtagatggcatttg

SEQ ID NO: 244077 - DNA, 25 bp, Probe Sequence
gttcaaggcatttgttgctatcggg

SEQ ID NO: 244078 - DNA, 25 bp, Probe Sequence
gttcagtataatgatccatatgcag

SEQ ID NO: 244079 - DNA, 25 bp, Probe Sequence
gttcagctacagtctgactctggac

SEQ ID NO: 244080 - DNA, 25 bp, Probe Sequence
gttcagcatccgggagacaacatgc

SEQ ID NO: 244081 - DNA, 25 bp, Probe Sequence
gtatcagatcaatgggaaaacaaca

SEQ ID NO: 244082 - DNA, 25 bp, Probe Sequence
gttcataatcaacagaaaccaagat

SEQ ID NO: 244083 - DNA, 25 bp, Probe Sequence
gttaaagctaccaatggaccaagat

SEQ ID NO: 244084 - DNA, 25 bp, Probe Sequence
gttcacaacgacttatgggaaagct

SEQ ID NO: 244085 - DNA, 25 bp, Probe Sequence
gttacacacatttctatagtgaagg

SEQ ID NO: 244086 - DNA, 25 bp, Probe Sequence
gttaaccaagcctatgcttgtagtc

SEQ ID NO: 244087 - DNA, 25 bp, Probe Sequence
gttcacccaatccaacttcagagaa

SEQ ID NO: 244088 - DNA, 25 bp, Probe Sequence
gttcttccaggccagcctatgagga

SEQ ID NO: 244089 - DNA, 25 bp, Probe Sequence
gttctctattggaagatcatatgag

SEQ ID NO: 244090 - DNA, 25 bp, Probe Sequence
gttcatctcttgccaaataagggtc

SEQ ID NO: 244091 - DNA, 25 bp, Probe Sequence
gttcttgattgacttgtaattggtt

SEQ ID NO: 244092 - DNA, 25 bp, Probe Sequence
gttctctctataattggacagggat

SEQ ID NO: 244093 - DNA, 25 bp, Probe Sequence
gttctctgtagatttctgaagtgca

SEQ ID NO: 244094 - DNA, 25 bp, Probe Sequence
gttctcctaaattatgaagatccca

SEQ ID NO: 244095 - DNA, 25 bp, Probe Sequence
gttcacaccaacttgcgcaaaaaca

SEQ ID NO: 244096 - DNA, 25 bp, Probe Sequence
gttaccttgctagctgcaaaataaa

SEQ ID NO: 244097 - DNA, 25 bp, Probe Sequence
gttacctatgtacctgttaccactt

SEQ ID NO: 244098 - DNA, 25 bp, Probe Sequence
gttatcgatattcttactaaactct

SEQ ID NO: 244099 - DNA, 25 bp, Probe Sequence
gttaccaatggctttactagtgaca

SEQ ID NO: 244100 - DNA, 25 bp, Probe Sequence
gttacaataagcgtttctgcagtcc

SEQ ID NO: 244101 - DNA, 25 bp, Probe Sequence
gttaaatgcataccttcccagtact

SEQ ID NO: 244102 - DNA, 25 bp, Probe Sequence
gttcaaatgcattgctttaaccttt

SEQ ID NO: 244103 - DNA, 25 bp, Probe Sequence
gttaagatctcgctgaaagccacat

SEQ ID NO: 244104 - DNA, 25 bp, Probe Sequence
gttctagatctctggaatactatgc

SEQ ID NO: 244105 - DNA, 25 bp, Probe Sequence
gttctgagtcctgagacttttccgc

SEQ ID NO: 244106 - DNA, 25 bp, Probe Sequence
gttctagatctcagacatgctttct

SEQ ID NO: 244107 - DNA, 25 bp, Probe Sequence
gttctcagttcatgaagcattcttt

SEQ ID NO: 244108 - DNA, 25 bp, Probe Sequence
gttctcactggatgctagagttttc

SEQ ID NO: 244109 - DNA, 25 bp, Probe Sequence
gttctactgtgaagaaagttctgtc

SEQ ID NO: 244110 - DNA, 25 bp, Probe Sequence
gttctaatcctaaaaattctgctaa

SEQ ID NO: 244111 - DNA, 25 bp, Probe Sequence
gttaacacctaatagtgattatgaa

SEQ ID NO: 244112 - DNA, 25 bp, Probe Sequence
gttaacctgcagaaacagtacttag

SEQ ID NO: 244113 - DNA, 25 bp, Probe Sequence
gttaaggtgagatcacactgaatta

SEQ ID NO: 244114 - DNA, 25 bp, Probe Sequence
gttagcaggtggtcaccagggatcg

SEQ ID NO: 244115 - DNA, 25 bp, Probe Sequence
gttcagcacgtttacctaggacagc

SEQ ID NO: 244116 - DNA, 25 bp, Probe Sequence
gttcaacaatggtacctacaacatc

SEQ ID NO: 244117 - DNA, 25 bp, Probe Sequence
gttaagaatccaagtcgagaacact

SEQ ID NO: 244118 - DNA, 25 bp, Probe Sequence
gttaataattcatgccaaaaataga

SEQ ID NO: 244119 - DNA, 25 bp, Probe Sequence
gttcatctacttcaggaatcagaaa

SEQ ID NO: 244120 - DNA, 25 bp, Probe Sequence
gttcatctacttcaggaatcagaaa

SEQ ID NO: 244121 - DNA, 25 bp, Probe Sequence
gttactgtccttggcgaatcgataa

SEQ ID NO: 244122 - DNA, 25 bp, Probe Sequence
gttaatccatattggcagaacgaaa

SEQ ID NO: 244123 - DNA, 25 bp, Probe Sequence
gttaatccatattggcagaacgaaa

SEQ ID NO: 244124 - DNA, 25 bp, Probe Sequence
gttactgccttgtgagataaaaact

SEQ ID NO: 244125 - DNA, 25 bp, Probe Sequence
gttactgccttgtgagataaaaact

SEQ ID NO: 244126 - DNA, 25 bp, Probe Sequence
gttactcctagcctgcttaaaaaga

SEQ ID NO: 244127 - DNA, 25 bp, Probe Sequence
gttactactacgacaggtacacgca

SEQ ID NO: 244128 - DNA, 25 bp, Probe Sequence
gttagccgcccgaaggtacaagttg

SEQ ID NO: 244129 - DNA, 25 bp, Probe Sequence
gttatggtcctagaggtggcaagaa

SEQ ID NO: 244130 - DNA, 25 bp, Probe Sequence
gttcatgttttagcaagaggcgtag

SEQ ID NO: 244131 - DNA, 25 bp, Probe Sequence
gttcatatagtaactgcacagggct

SEQ ID NO: 244132 - DNA, 25 bp, Probe Sequence
gttctctatggaactgcaattatta

SEQ ID NO: 244133 - DNA, 25 bp, Probe Sequence
gttctcttcggtgatatatattgca

SEQ ID NO: 244134 - DNA, 25 bp, Probe Sequence
gttctcttgggcagaaacatatggg

SEQ ID NO: 244135 - DNA, 25 bp, Probe Sequence
gttctctggcagccatctgaaaata

SEQ ID NO: 244136 - DNA, 25 bp, Probe Sequence
gttcagggcatcatctgggacatca

SEQ ID NO: 244137 - DNA, 25 bp, Probe Sequence
gttcatgtagtcacggtgctctcag

SEQ ID NO: 244138 - DNA, 25 bp, Probe Sequence
gttcatgaggttcatcgtgccatcg

SEQ ID NO: 244139 - DNA, 25 bp, Probe Sequence
gttcatggggtttttgccctggagc

SEQ ID NO: 244140 - DNA, 25 bp, Probe Sequence
gttcatgactagattttgattcgga

SEQ ID NO: 244141 - DNA, 25 bp, Probe Sequence
gttcatcacaagcctctgtggcttc

SEQ ID NO: 244142 - DNA, 25 bp, Probe Sequence
gttcatgaatatactctgtgagcca

SEQ ID NO: 244143 - DNA, 25 bp, Probe Sequence
gttagctaattgctgtgactgcagg

SEQ ID NO: 244144 - DNA, 25 bp, Probe Sequence
gttagcataatgtgaggaggtggag

SEQ ID NO: 244145 - DNA, 25 bp, Probe Sequence
gttcagagctcttggcgagggtgga

SEQ ID NO: 244146 - DNA, 25 bp, Probe Sequence
gttcagagttctaggagtggaagag

SEQ ID NO: 244147 - DNA, 25 bp, Probe Sequence
gttcatgttgtttggatggtatcga

SEQ ID NO: 244148 - DNA, 25 bp, Probe Sequence
gtttttttggcactgactactgggc

SEQ ID NO: 244149 - DNA, 25 bp, Probe Sequence
gttatttattgggaacccctgcagg

SEQ ID NO: 244150 - DNA, 25 bp, Probe Sequence
gttttctagttataaccaccagccg

SEQ ID NO: 244151 - DNA, 25 bp, Probe Sequence
gttactcgagttaaagtctcaaccg

SEQ ID NO: 244152 - DNA, 25 bp, Probe Sequence
gttaatctgacaaaaatgtcctcaa

SEQ ID NO: 244153 - DNA, 25 bp, Probe Sequence
gttaattaactgtgtgcttccaaca

SEQ ID NO: 244154 - DNA, 25 bp, Probe Sequence
gttcaataatacgtaggttcccata

SEQ ID NO: 244155 - DNA, 25 bp, Probe Sequence
gttaaatgtaccatccttccagata

SEQ ID NO: 244156 - DNA, 25 bp, Probe Sequence
gttaaagaagtactcctccagcaga

SEQ ID NO: 244157 - DNA, 25 bp, Probe Sequence
gttcacaagaagtgtcccctctgtg

SEQ ID NO: 244158 - DNA, 25 bp, Probe Sequence
gttcacaagaagtgtcccctctgtg

SEQ ID NO: 244159 - DNA, 25 bp, Probe Sequence
gttcacaagaaatgctaccttgctt

SEQ ID NO: 244160 - DNA, 25 bp, Probe Sequence
gttagaataacttgctactcatggc

SEQ ID NO: 244161 - DNA, 25 bp, Probe Sequence
gttaaaagcaagtcatagttctgcc

SEQ ID NO: 244162 - DNA, 25 bp, Probe Sequence
gttagacaccaatatagtgacctca

SEQ ID NO: 244163 - DNA, 25 bp, Probe Sequence
gttctacaccaatttcagttcaata

SEQ ID NO: 244164 - DNA, 25 bp, Probe Sequence
gttctagcttagtcattcatttact

SEQ ID NO: 244165 - DNA, 25 bp, Probe Sequence
gttctatgcatttattggctcttga

SEQ ID NO: 244166 - DNA, 25 bp, Probe Sequence
gttactgcatttagcatggctctga

SEQ ID NO: 244167 - DNA, 25 bp, Probe Sequence
gttacatatgagctatgtgttgatg

SEQ ID NO: 244168 - DNA, 25 bp, Probe Sequence
gttcacttcacggatgttcagtgga

SEQ ID NO: 244169 - DNA, 25 bp, Probe Sequence
gttctttccgcagatatcctgaagg

SEQ ID NO: 244170 - DNA, 25 bp, Probe Sequence
gttcttgttccgatactctgagaag

SEQ ID NO: 244171 - DNA, 25 bp, Probe Sequence
gttctttctcaactcagagtccaac

SEQ ID NO: 244172 - DNA, 25 bp, Probe Sequence
gttcatttgtaaagaagctccttcc

SEQ ID NO: 244173 - DNA, 25 bp, Probe Sequence
gtttttggctaaacacacctgtcta

SEQ ID NO: 244174 - DNA, 25 bp, Probe Sequence
gttcttcaggctgatttccctgacc

SEQ ID NO: 244175 - DNA, 25 bp, Probe Sequence
gttcttagtgctcgaatgtcccaac

SEQ ID NO: 244176 - DNA, 25 bp, Probe Sequence
gttcttcatattccagagtcaccca

SEQ ID NO: 244177 - DNA, 25 bp, Probe Sequence
gttctctctaattcaattagctctc

SEQ ID NO: 244178 - DNA, 25 bp, Probe Sequence
gttcatactattaaattttgcccta

SEQ ID NO: 244179 - DNA, 25 bp, Probe Sequence
gttctagtttgtatttttctctcag

SEQ ID NO: 244180 - DNA, 25 bp, Probe Sequence
gttctactgttgtcgtatattcttc

SEQ ID NO: 244181 - DNA, 25 bp, Probe Sequence
gttctttgtgtattttttctacaga

SEQ ID NO: 244182 - DNA, 25 bp, Probe Sequence
gttctttggagcattgttctaaaaa

SEQ ID NO: 244183 - DNA, 25 bp, Probe Sequence
gttcattttggatgctggtgctaaa

SEQ ID NO: 244184 - DNA, 25 bp, Probe Sequence
gttctttattagtgcctctcacaaa

SEQ ID NO: 244185 - DNA, 25 bp, Probe Sequence
gttctttttgagtacattccacaaa

SEQ ID NO: 244186 - DNA, 25 bp, Probe Sequence
gttcttcacctgctatcatttacat

SEQ ID NO: 244187 - DNA, 25 bp, Probe Sequence
gttcttctacatcacattgttactc

SEQ ID NO: 244188 - DNA, 25 bp, Probe Sequence
gttctatttatttattgtcttcctg

SEQ ID NO: 244189 - DNA, 25 bp, Probe Sequence
gttctttgatttgtaccattccttc

SEQ ID NO: 244190 - DNA, 25 bp, Probe Sequence
gttcatttgtttttgacctgttttg

SEQ ID NO: 244191 - DNA, 25 bp, Probe Sequence
gttttgtattaatggtcagtctttg

SEQ ID NO: 244192 - DNA, 25 bp, Probe Sequence
gttctttttgcatttactagtattt

SEQ ID NO: 244193 - DNA, 25 bp, Probe Sequence
gttcttttgtgctttcaaataacta

SEQ ID NO: 244194 - DNA, 25 bp, Probe Sequence
gttctcttttatctaaaaaatatgg

SEQ ID NO: 244195 - DNA, 25 bp, Probe Sequence
gttcttttcaacttataacactgta

SEQ ID NO: 244196 - DNA, 25 bp, Probe Sequence
gttcatctttctgcttgaaaccttc

SEQ ID NO: 244197 - DNA, 25 bp, Probe Sequence
gttaccaacaacttgaaatccctgg

SEQ ID NO: 244198 - DNA, 25 bp, Probe Sequence
gttaacccagaacaaatgtccactg

SEQ ID NO: 244199 - DNA, 25 bp, Probe Sequence
gttaaccagaactccagtttcactg

SEQ ID NO: 244200 - DNA, 25 bp, Probe Sequence
gtcttccccaactttcagttatacg

SEQ ID NO: 244201 - DNA, 25 bp, Probe Sequence
gtttcacatcaaaactgtgggtata

SEQ ID NO: 244202 - DNA, 25 bp, Probe Sequence
gttctagcaacaatactggaggcct

SEQ ID NO: 244203 - DNA, 25 bp, Probe Sequence
gttctatgaaccaactaatggtcta

SEQ ID NO: 244204 - DNA, 25 bp, Probe Sequence
gttctatcacagcaactcaggggca

SEQ ID NO: 244205 - DNA, 25 bp, Probe Sequence
gttaatcacccaccatagggcatga

SEQ ID NO: 244206 - DNA, 25 bp, Probe Sequence
gttcattaccaccctggggcagaag

SEQ ID NO: 244207 - DNA, 25 bp, Probe Sequence
gttcattctccccagtgagggaaag

SEQ ID NO: 244208 - DNA, 25 bp, Probe Sequence
gtttgacctccgatgagtagtgaca

SEQ ID NO: 244209 - DNA, 25 bp, Probe Sequence
gtttacctgcctgtagacaagtctc

SEQ ID NO: 244210 - DNA, 25 bp, Probe Sequence
gtattaaaccactgaacaattgtct

SEQ ID NO: 244211 - DNA, 25 bp, Probe Sequence
gtttaggagcaccttggaagattga

SEQ ID NO: 244212 - DNA, 25 bp, Probe Sequence
gttcaggggcccaggaagagcaaaa

SEQ ID NO: 244213 - DNA, 25 bp, Probe Sequence
gttcagtggccggctctgaaagaaa

SEQ ID NO: 244214 - DNA, 25 bp, Probe Sequence
gttcagtatctcaagcccagaaaga

SEQ ID NO: 244215 - DNA, 25 bp, Probe Sequence
gttatgtgcatcgttgccacaatag

SEQ ID NO: 244216 - DNA, 25 bp, Probe Sequence
gttcattcatgcattcacaaaatat

SEQ ID NO: 244217 - DNA, 25 bp, Probe Sequence
gttcatccatgcatttaacaaacat

SEQ ID NO: 244218 - DNA, 25 bp, Probe Sequence
gttcacaatctagtaatagcaaaaa

SEQ ID NO: 244219 - DNA, 25 bp, Probe Sequence
gttcaacatttgcaaagagagacaa

SEQ ID NO: 244220 - DNA, 25 bp, Probe Sequence
gttcaggcttctcccaagtgaactc

SEQ ID NO: 244221 - DNA, 25 bp, Probe Sequence
gttcttgactctaccaagctgaacc

SEQ ID NO: 244222 - DNA, 25 bp, Probe Sequence
gttcttatctctatagtgatgaaac

SEQ ID NO: 244223 - DNA, 25 bp, Probe Sequence
gttcacttgtgcatgggctaaaacc

SEQ ID NO: 244224 - DNA, 25 bp, Probe Sequence
gtctagttgctaagggtacagtagt

SEQ ID NO: 244225 - DNA, 25 bp, Probe Sequence
gttcagttctgcaagcaagtatgct

SEQ ID NO: 244226 - DNA, 25 bp, Probe Sequence
gttcttctagggaatgtatgcatct

SEQ ID NO: 244227 - DNA, 25 bp, Probe Sequence
gttcatcctagaatcctgtcacact

SEQ ID NO: 244228 - DNA, 25 bp, Probe Sequence
gttcatcctagaatcctgtcacact

SEQ ID NO: 244229 - DNA, 25 bp, Probe Sequence
gttacacttagtgtgatccatttgt

SEQ ID NO: 244230 - DNA, 25 bp, Probe Sequence
gttcaaagatagactcttcttttgt

SEQ ID NO: 244231 - DNA, 25 bp, Probe Sequence
gttaatcgatgaattctcatttttg

SEQ ID NO: 244232 - DNA, 25 bp, Probe Sequence
gttaatcttatttgccatcatcttg

SEQ ID NO: 244233 - DNA, 25 bp, Probe Sequence
gttaatcttatttgccatcatcttg

SEQ ID NO: 244234 - DNA, 25 bp, Probe Sequence
gttaatcttatttgccatcatcttg

SEQ ID NO: 244235 - DNA, 25 bp, Probe Sequence
gttcatattgaagcagtcacatttg

SEQ ID NO: 244236 - DNA, 25 bp, Probe Sequence
gttcatcattaagctaaactctgac

SEQ ID NO: 244237 - DNA, 25 bp, Probe Sequence
gttcatcaccagtttcaaaagcttc

SEQ ID NO: 244238 - DNA, 25 bp, Probe Sequence
gttcatcaccagtttcaaaagcttc

SEQ ID NO: 244239 - DNA, 25 bp, Probe Sequence
gttctactcgatcaccaagatgctt

SEQ ID NO: 244240 - DNA, 25 bp, Probe Sequence
gttctattctgatactacgcgtgtt

SEQ ID NO: 244241 - DNA, 25 bp, Probe Sequence
gttctttccaaagtacactgtttca

SEQ ID NO: 244242 - DNA, 25 bp, Probe Sequence
gttctttctcaacattgccattttt

SEQ ID NO: 244243 - DNA, 25 bp, Probe Sequence
gttctttgcaaacaaccgtgaaatg

SEQ ID NO: 244244 - DNA, 25 bp, Probe Sequence
gttcttgatgtaggaaagggtgaaa

SEQ ID NO: 244245 - DNA, 25 bp, Probe Sequence
gttcttgctggagaatagcgtgctc

SEQ ID NO: 244246 - DNA, 25 bp, Probe Sequence
gttcattatggatatttctgctgcc

SEQ ID NO: 244247 - DNA, 25 bp, Probe Sequence
gttcatgtcagtgagagcttcccac

SEQ ID NO: 244248 - DNA, 25 bp, Probe Sequence
gttcagtgccatgaagtatgagcaa

SEQ ID NO: 244249 - DNA, 25 bp, Probe Sequence
gttcatagctatgcaagatggatct

SEQ ID NO: 244250 - DNA, 25 bp, Probe Sequence
gttcatccttccggcatgattatgt

SEQ ID NO: 244251 - DNA, 25 bp, Probe Sequence
gttcagcctgaaatgccatattcat

SEQ ID NO: 244252 - DNA, 25 bp, Probe Sequence
gttcaccgaagtgactctatgaccc

SEQ ID NO: 244253 - DNA, 25 bp, Probe Sequence
gttcagacgaagctactctggcatc

SEQ ID NO: 244254 - DNA, 25 bp, Probe Sequence
gttcatcatccatcttaattggcat

SEQ ID NO: 244255 - DNA, 25 bp, Probe Sequence
gttactcagcaacttaagctcctgt

SEQ ID NO: 244256 - DNA, 25 bp, Probe Sequence
gttagcccaagtataggctctgccc

SEQ ID NO: 244257 - DNA, 25 bp, Probe Sequence
gttagcccaagtataggctctgccc

SEQ ID NO: 244258 - DNA, 25 bp, Probe Sequence
gttcagcccagacacaggtgctgtc

SEQ ID NO: 244259 - DNA, 25 bp, Probe Sequence
gttagcctagtctaaggatgccctc

SEQ ID NO: 244260 - DNA, 25 bp, Probe Sequence
gttagtctcagtcagcaaatggcca

SEQ ID NO: 244261 - DNA, 25 bp, Probe Sequence
gttcatggtagtctctgatagttat

SEQ ID NO: 244262 - DNA, 25 bp, Probe Sequence
gttaagctgggcgttgtggttcatg

SEQ ID NO: 244263 - DNA, 25 bp, Probe Sequence
gttcaaggagccggtggaggtgctg

SEQ ID NO: 244264 - DNA, 25 bp, Probe Sequence
gttcaatggaagcctgatggggtgc

SEQ ID NO: 244265 - DNA, 25 bp, Probe Sequence
gttcatcagtaacagttggtgtgac

SEQ ID NO: 244266 - DNA, 25 bp, Probe Sequence
gttctttgacaattttggtgctcat

SEQ ID NO: 244267 - DNA, 25 bp, Probe Sequence
gttcttcataaattactcactctct

SEQ ID NO: 244268 - DNA, 25 bp, Probe Sequence
gttaataaacagtacctgctctcaa

SEQ ID NO: 244269 - DNA, 25 bp, Probe Sequence
gttcagatctcatagatgaccccca

SEQ ID NO: 244270 - DNA, 25 bp, Probe Sequence
gttacatcatgctggaacctgcaaa

SEQ ID NO: 244271 - DNA, 25 bp, Probe Sequence
gttacagcgcaacagcagcctgcag

SEQ ID NO: 244272 - DNA, 25 bp, Probe Sequence
gttcatagcccagtagaccttgtta

SEQ ID NO: 244273 - DNA, 25 bp, Probe Sequence
gttcttgccaaattgatctatagtt

SEQ ID NO: 244274 - DNA, 25 bp, Probe Sequence
gttcttgtctaatccatgtagcttt

SEQ ID NO: 244275 - DNA, 25 bp, Probe Sequence
gttcatctgtcacaagcctgtcagc

SEQ ID NO: 244276 - DNA, 25 bp, Probe Sequence
gttcaagaagcatggcactggcacc

SEQ ID NO: 244277 - DNA, 25 bp, Probe Sequence
gttatagaggattgaggtggaccaa

SEQ ID NO: 244278 - DNA, 25 bp, Probe Sequence
gttaaagtcaaaggggcatatatag

SEQ ID NO: 244279 - DNA, 25 bp, Probe Sequence
gttcaaaaacaagcggattctcatg

SEQ ID NO: 244280 - DNA, 25 bp, Probe Sequence
gttaaggacaaagcaggacctcata

SEQ ID NO: 244281 - DNA, 25 bp, Probe Sequence
gttaaggacaaagcaggacctcata

SEQ ID NO: 244282 - DNA, 25 bp, Probe Sequence
gttagttaccaacaggacatctcac

SEQ ID NO: 244283 - DNA, 25 bp, Probe Sequence
gttagtgtaaactgcaaatactaca

SEQ ID NO: 244284 - DNA, 25 bp, Probe Sequence
gttacgtcaaactacctgtactggt

SEQ ID NO: 244285 - DNA, 25 bp, Probe Sequence
gttacttcgagatatccattcactt

SEQ ID NO: 244286 - DNA, 25 bp, Probe Sequence
gttacttcgagatatccattcactt

SEQ ID NO: 244287 - DNA, 25 bp, Probe Sequence
gttacttcgagatatccattcactt

SEQ ID NO: 244288 - DNA, 25 bp, Probe Sequence
gttacttcgagatatccattcactt

SEQ ID NO: 244289 - DNA, 25 bp, Probe Sequence
gttcagtttgattaatagactccat

SEQ ID NO: 244290 - DNA, 25 bp, Probe Sequence
gttcaggttgtacgtggacactata

SEQ ID NO: 244291 - DNA, 25 bp, Probe Sequence
gttatggttgtgataggacagcagt

SEQ ID NO: 244292 - DNA, 25 bp, Probe Sequence
gttcattgtttcgtaacacagcatt

SEQ ID NO: 244293 - DNA, 25 bp, Probe Sequence
gttcagttgttataaaccattgtga

SEQ ID NO: 244294 - DNA, 25 bp, Probe Sequence
gttaaatttacatacctcatatagt

SEQ ID NO: 244295 - DNA, 25 bp, Probe Sequence
gttcaaattttatcatgccagtagg

SEQ ID NO: 244296 - DNA, 25 bp, Probe Sequence
gttcttttgatattgccagccatta

SEQ ID NO: 244297 - DNA, 25 bp, Probe Sequence
gttcttatggactaccatgccatgt

SEQ ID NO: 244298 - DNA, 25 bp, Probe Sequence
gttcttgatgagaatacttctagat

SEQ ID NO: 244299 - DNA, 25 bp, Probe Sequence
gttatcagatggacagagcttctga

SEQ ID NO: 244300 - DNA, 25 bp, Probe Sequence
gttaccatgtgaaagtcctgttgaa

SEQ ID NO: 244301 - DNA, 25 bp, Probe Sequence
gttcagccattattacttttggtat

SEQ ID NO: 244302 - DNA, 25 bp, Probe Sequence
gttacctttctctattacagcttaa

SEQ ID NO: 244303 - DNA, 25 bp, Probe Sequence
gttacgcttaccgatgtagcagtcc

SEQ ID NO: 244304 - DNA, 25 bp, Probe Sequence
gttaagcttgtactgcagaagcagt

SEQ ID NO: 244305 - DNA, 25 bp, Probe Sequence
gttagacgtgcttctgaatgactgt

SEQ ID NO: 244306 - DNA, 25 bp, Probe Sequence
gttacacttgaattaagatctgcgc

SEQ ID NO: 244307 - DNA, 25 bp, Probe Sequence
gttacattcgagttgaggtacgcgc

SEQ ID NO: 244308 - DNA, 25 bp, Probe Sequence
gttcacagtggagtatggtgttcgg

SEQ ID NO: 244309 - DNA, 25 bp, Probe Sequence
gttcagcagtgaactctggtgtctc

SEQ ID NO: 244310 - DNA, 25 bp, Probe Sequence
gttcagctgttaatgctgggatcca

SEQ ID NO: 244311 - DNA, 25 bp, Probe Sequence
gttcagctcttccttggaacatcac

SEQ ID NO: 244312 - DNA, 25 bp, Probe Sequence
gttcagctcttctgtgagaatatga

SEQ ID NO: 244313 - DNA, 25 bp, Probe Sequence
gtctagccctgctctagtaatgtct

SEQ ID NO: 244314 - DNA, 25 bp, Probe Sequence
gttagcatcctgggccagtttgttc

SEQ ID NO: 244315 - DNA, 25 bp, Probe Sequence
gttaagcctaagcagaagtgtccct

SEQ ID NO: 244316 - DNA, 25 bp, Probe Sequence
gttaacacactaccgaatgtgtctt

SEQ ID NO: 244317 - DNA, 25 bp, Probe Sequence
gttcttaactaccatgattgctttt

SEQ ID NO: 244318 - DNA, 25 bp, Probe Sequence
gttcttgtactagctatgtttctat

SEQ ID NO: 244319 - DNA, 25 bp, Probe Sequence
gttcttgtgtgttcgtatctttatt

SEQ ID NO: 244320 - DNA, 25 bp, Probe Sequence
gttcttgagtgtggattttgtaaat

SEQ ID NO: 244321 - DNA, 25 bp, Probe Sequence
tcttttccggttgttgaagacattg

SEQ ID NO: 244322 - DNA, 25 bp, Probe Sequence
tttttgccagtttagggcagtagct

SEQ ID NO: 244323 - DNA, 25 bp, Probe Sequence
gttttgctatgtaataatgggaagc

SEQ ID NO: 244324 - DNA, 25 bp, Probe Sequence
gttttgcattgtctgcatgcaagga

SEQ ID NO: 244325 - DNA, 25 bp, Probe Sequence
gttcttgcgcgtctatcgcaggagt

SEQ ID NO: 244326 - DNA, 25 bp, Probe Sequence
gttcagtgtctgtagtacgcgtatt

SEQ ID NO: 244327 - DNA, 25 bp, Probe Sequence
gttcaggatctagcacaaggtttca

SEQ ID NO: 244328 - DNA, 25 bp, Probe Sequence
gttcaggcagtcttagcaaagtatg

SEQ ID NO: 244329 - DNA, 25 bp, Probe Sequence
gttcagtgaatcctcctaatctgtt

SEQ ID NO: 244330 - DNA, 25 bp, Probe Sequence
gttaatagtgcctcatagtctactt

SEQ ID NO: 244331 - DNA, 25 bp, Probe Sequence
gttcagaaggactctcaatcactca

SEQ ID NO: 244332 - DNA, 25 bp, Probe Sequence
gttcaccaaacagctagcactctag

SEQ ID NO: 244333 - DNA, 25 bp, Probe Sequence
gttcactgaaacggaatgccttcct

SEQ ID NO: 244334 - DNA, 25 bp, Probe Sequence
gttcatctgaagtctggaatgacgt

SEQ ID NO: 244335 - DNA, 25 bp, Probe Sequence
gttcactgcagaccagaaggccgtc

SEQ ID NO: 244336 - DNA, 25 bp, Probe Sequence
gttacagattaaaaattcagcaatt

SEQ ID NO: 244337 - DNA, 25 bp, Probe Sequence
gttaaggctaatacaatgacagact

SEQ ID NO: 244338 - DNA, 25 bp, Probe Sequence
gttcaagacataagaagtgactggt

SEQ ID NO: 244339 - DNA, 25 bp, Probe Sequence
gttcaggacttcaaacgagcttctg

SEQ ID NO: 244340 - DNA, 25 bp, Probe Sequence
gttcagccacccgagattgagcaat

SEQ ID NO: 244341 - DNA, 25 bp, Probe Sequence
gttcagccacccgagattgagcaat

SEQ ID NO: 244342 - DNA, 25 bp, Probe Sequence
gttagccaggcgtggtggcacatgc

SEQ ID NO: 244343 - DNA, 25 bp, Probe Sequence
gttcagaggccgaggaggcactgga

SEQ ID NO: 244344 - DNA, 25 bp, Probe Sequence
gttaggggccttagggcactgggct

SEQ ID NO: 244345 - DNA, 25 bp, Probe Sequence
gttattcggaaaggggcacgggcat

SEQ ID NO: 244346 - DNA, 25 bp, Probe Sequence
gttttagaaacatgagtccggactg

SEQ ID NO: 244347 - DNA, 25 bp, Probe Sequence
gttttagaaacatgagtccggactg

SEQ ID NO: 244348 - DNA, 25 bp, Probe Sequence
gttcaacaaaactgcagtgccggtc

SEQ ID NO: 244349 - DNA, 25 bp, Probe Sequence
gttcaaccatatattgggctcacgt

SEQ ID NO: 244350 - DNA, 25 bp, Probe Sequence
gttatgttatgtgcatcgttgccac

SEQ ID NO: 244351 - DNA, 25 bp, Probe Sequence
gttcatttatgtatctgatgtaagt

SEQ ID NO: 244352 - DNA, 25 bp, Probe Sequence
gttcatcatttggtgcttagtcttt

SEQ ID NO: 244353 - DNA, 25 bp, Probe Sequence
gttcatgatttcttttattctttgc

SEQ ID NO: 244354 - DNA, 25 bp, Probe Sequence
gttaattgtccttttagtagccaag

SEQ ID NO: 244355 - DNA, 25 bp, Probe Sequence
gttaactgttctattctgatactac

SEQ ID NO: 244356 - DNA, 25 bp, Probe Sequence
gttaatccttctatcttgaatcttc

SEQ ID NO: 244357 - DNA, 25 bp, Probe Sequence
gttcagtcctttcttgtgtgattgg

SEQ ID NO: 244358 - DNA, 25 bp, Probe Sequence
gttcatttgtatattgttgttcggg

SEQ ID NO: 244359 - DNA, 25 bp, Probe Sequence
gttcattttgttattttgtgacgtg

SEQ ID NO: 244360 - DNA, 25 bp, Probe Sequence
gttcatttggtgatgcttttgcttc

SEQ ID NO: 244361 - DNA, 25 bp, Probe Sequence
gttcattaggctttctgttgttttt

SEQ ID NO: 244362 - DNA, 25 bp, Probe Sequence
gttcatctgaggactgcatcggtgg

SEQ ID NO: 244363 - DNA, 25 bp, Probe Sequence
gttcatctgatgattgagcagtagc

SEQ ID NO: 244364 - DNA, 25 bp, Probe Sequence
gttcatctcaggtggcatttgcagg

SEQ ID NO: 244365 - DNA, 25 bp, Probe Sequence
gttcaccctgaaggctgggcaggtg

SEQ ID NO: 244366 - DNA, 25 bp, Probe Sequence
gttcaccctgaaggctgggcaggtg

SEQ ID NO: 244367 - DNA, 25 bp, Probe Sequence
gttcactcacagaactttagagttg

SEQ ID NO: 244368 - DNA, 25 bp, Probe Sequence
gttagccacgcaactgtacagagaa

SEQ ID NO: 244369 - DNA, 25 bp, Probe Sequence
gttaatacgcatattcacatagcaa

SEQ ID NO: 244370 - DNA, 25 bp, Probe Sequence
gttcattgaggcagctctactataa

SEQ ID NO: 244371 - DNA, 25 bp, Probe Sequence
gttcatctaggttctcatgccatat

SEQ ID NO: 244372 - DNA, 25 bp, Probe Sequence
gttcatcacaggcatcatcatcctc

SEQ ID NO: 244373 - DNA, 25 bp, Probe Sequence
gttcacacaatgccaagacttcgaa

SEQ ID NO: 244374 - DNA, 25 bp, Probe Sequence
gttcaccaatgagaggttcccatta

SEQ ID NO: 244375 - DNA, 25 bp, Probe Sequence
gttacctatgatatggttccagagc

SEQ ID NO: 244376 - DNA, 25 bp, Probe Sequence
gttcaaatttttggttcatcgtcac

SEQ ID NO: 244377 - DNA, 25 bp, Probe Sequence
gttcaaatgtccttaattgtctcca

SEQ ID NO: 244378 - DNA, 25 bp, Probe Sequence
gtgtcagaacttctttaggcaacag

SEQ ID NO: 244379 - DNA, 25 bp, Probe Sequence
gttcagaaatcacctttagtcaaaa

SEQ ID NO: 244380 - DNA, 25 bp, Probe Sequence
gttcagtgaaatccttttgttaaga

SEQ ID NO: 244381 - DNA, 25 bp, Probe Sequence
gttaagtcctctatttgtctgagga

SEQ ID NO: 244382 - DNA, 25 bp, Probe Sequence
gttaacatccgtagattttcatgaa

SEQ ID NO: 244383 - DNA, 25 bp, Probe Sequence
gttacagcccagatagctcttcagc

SEQ ID NO: 244384 - DNA, 25 bp, Probe Sequence
gttcatacccaaactgtctggcagt

SEQ ID NO: 244385 - DNA, 25 bp, Probe Sequence
gttcacccattaagctgtcatgggt

SEQ ID NO: 244386 - DNA, 25 bp, Probe Sequence
gttcagctttatgggattcaggcct

SEQ ID NO: 244387 - DNA, 25 bp, Probe Sequence
gttcagcagctttcagtgatgtccg

SEQ ID NO: 244388 - DNA, 25 bp, Probe Sequence
gttcacagctactacttgtgcagta

SEQ ID NO: 244389 - DNA, 25 bp, Probe Sequence
gttcacctgcagtactgtggagttt

SEQ ID NO: 244390 - DNA, 25 bp, Probe Sequence
gttcacaatgtggccgaggactttg

SEQ ID NO: 244391 - DNA, 25 bp, Probe Sequence
gttagcaagttcagtggcattgtgg

SEQ ID NO: 244392 - DNA, 25 bp, Probe Sequence
gttcaggatgcttcttaggtttctg

SEQ ID NO: 244393 - DNA, 25 bp, Probe Sequence
gttaacatttctagcaagtttccag

SEQ ID NO: 244394 - DNA, 25 bp, Probe Sequence
gttaacattttgcataataaacgat

SEQ ID NO: 244395 - DNA, 25 bp, Probe Sequence
gtttgagctctgtaggtaaaaagga

SEQ ID NO: 244396 - DNA, 25 bp, Probe Sequence
gtttgagctctgtaggtaaaaagga

SEQ ID NO: 244397 - DNA, 25 bp, Probe Sequence
gttaacttgacatttctaaattgga

SEQ ID NO: 244398 - DNA, 25 bp, Probe Sequence
gttcagcacttgtctcattttaatg

SEQ ID NO: 244399 - DNA, 25 bp, Probe Sequence
gtagtggttattatttagagtttat

SEQ ID NO: 244400 - DNA, 25 bp, Probe Sequence
gtaggtcttcctagtccaagtagtt

SEQ ID NO: 244401 - DNA, 25 bp, Probe Sequence
gtcggctttcctttccaagaggaat

SEQ ID NO: 244402 - DNA, 25 bp, Probe Sequence
gttagtttctcctctaatcagtaat

SEQ ID NO: 244403 - DNA, 25 bp, Probe Sequence
gttaattttcccctgtgttgtgata

SEQ ID NO: 244404 - DNA, 25 bp, Probe Sequence
gttcatattttcacaaggattcttc

SEQ ID NO: 244405 - DNA, 25 bp, Probe Sequence
gttagtatgttcaacagaccccatt

SEQ ID NO: 244406 - DNA, 25 bp, Probe Sequence
gttagttttgcctagaatcctgttt

SEQ ID NO: 244407 - DNA, 25 bp, Probe Sequence
gttaatctttctccaatgatcctat

SEQ ID NO: 244408 - DNA, 25 bp, Probe Sequence
gttaatctatcttccaatacactgt

SEQ ID NO: 244409 - DNA, 25 bp, Probe Sequence
gtaaatctactactaaaacgtccag

SEQ ID NO: 244410 - DNA, 25 bp, Probe Sequence
gtaatctacctacagaaaagtgccc

SEQ ID NO: 244411 - DNA, 25 bp, Probe Sequence
gttactgactttccatcaaatagtg

SEQ ID NO: 244412 - DNA, 25 bp, Probe Sequence
gttaccgtgtgtaccaaatagatgg

SEQ ID NO: 244413 - DNA, 25 bp, Probe Sequence
gttaaccttgatatacacagagatg

SEQ ID NO: 244414 - DNA, 25 bp, Probe Sequence
gttaccgcgtgtactacaatgccgg

SEQ ID NO: 244415 - DNA, 25 bp, Probe Sequence
gttactcgggatttctacagctacc

SEQ ID NO: 244416 - DNA, 25 bp, Probe Sequence
gttactggtgattttctagcagact

SEQ ID NO: 244417 - DNA, 25 bp, Probe Sequence
gttcatgggatgtattgtttccact

SEQ ID NO: 244418 - DNA, 25 bp, Probe Sequence
gttcatgggcatatcagtttcttca

SEQ ID NO: 244419 - DNA, 25 bp, Probe Sequence
gttcagaaataatgcttttctcaag

SEQ ID NO: 244420 - DNA, 25 bp, Probe Sequence
gttaatgactaatatgtttacaagt

SEQ ID NO: 244421 - DNA, 25 bp, Probe Sequence
gttagctaaacgttgttgaacattg

SEQ ID NO: 244422 - DNA, 25 bp, Probe Sequence
gttacataacctttaataaatggct

SEQ ID NO: 244423 - DNA, 25 bp, Probe Sequence
gttagttacctcctagatacaatgg

SEQ ID NO: 244424 - DNA, 25 bp, Probe Sequence
gttaatgaggccatcaaaatctatg

SEQ ID NO: 244425 - DNA, 25 bp, Probe Sequence
gttaatgctgggatccatatttagt

SEQ ID NO: 244426 - DNA, 25 bp, Probe Sequence
gttactgtggtttcactaaaagcta

SEQ ID NO: 244427 - DNA, 25 bp, Probe Sequence
gttacttggttagacatcaaatctg

SEQ ID NO: 244428 - DNA, 25 bp, Probe Sequence
gtttttttactgaaataactcatgt

SEQ ID NO: 244429 - DNA, 25 bp, Probe Sequence
gttatttcaaagcaaacatactagt

SEQ ID NO: 244430 - DNA, 25 bp, Probe Sequence
gtctaccttaatcaaaggatctaga

SEQ ID NO: 244431 - DNA, 25 bp, Probe Sequence
gttacgttttacaacaaggctagag

SEQ ID NO: 244432 - DNA, 25 bp, Probe Sequence
gttacagtttaacaaagttcatctg

SEQ ID NO: 244433 - DNA, 25 bp, Probe Sequence
gttacaactttaaaacagttctctg

SEQ ID NO: 244434 - DNA, 25 bp, Probe Sequence
gtctaaacacctataagtgtactcg

SEQ ID NO: 244435 - DNA, 25 bp, Probe Sequence
gttaaactgcctaaaatgtgatttg

SEQ ID NO: 244436 - DNA, 25 bp, Probe Sequence
gttcaacaccctaagcaatttctca

SEQ ID NO: 244437 - DNA, 25 bp, Probe Sequence
gttaccggcctatgatcatttcaca

SEQ ID NO: 244438 - DNA, 25 bp, Probe Sequence
gttacaagggcctgcatcatctttg

SEQ ID NO: 244439 - DNA, 25 bp, Probe Sequence
gttcacagaggtctttcagctcatt

SEQ ID NO: 244440 - DNA, 25 bp, Probe Sequence
gttcacacaggaactcatctcctca

SEQ ID NO: 244441 - DNA, 25 bp, Probe Sequence
gttaggatggcaattctgacactct

SEQ ID NO: 244442 - DNA, 25 bp, Probe Sequence
gttaatgatggtttccaactggcct

SEQ ID NO: 244443 - DNA, 25 bp, Probe Sequence
gttacagaggctcacctggtggtgc

SEQ ID NO: 244444 - DNA, 25 bp, Probe Sequence
gttaagacctataccaggctgggca

SEQ ID NO: 244445 - DNA, 25 bp, Probe Sequence
gttcacagacctcagacacagctga

SEQ ID NO: 244446 - DNA, 25 bp, Probe Sequence
gttaagatctctcagcaatattcag

SEQ ID NO: 244447 - DNA, 25 bp, Probe Sequence
gttcacgtgcttttgagatgattaa

SEQ ID NO: 244448 - DNA, 25 bp, Probe Sequence
gttcaccgagtcttgaagattcatg

SEQ ID NO: 244449 - DNA, 25 bp, Probe Sequence
gttcaccttgactgagaaattggaa

SEQ ID NO: 244450 - DNA, 25 bp, Probe Sequence
gttcagccagtttcggaagagggaa

SEQ ID NO: 244451 - DNA, 25 bp, Probe Sequence
gttcaacagttttgctgacagatgg

SEQ ID NO: 244452 - DNA, 25 bp, Probe Sequence
gttcacacatgtctttaggtggaaa

SEQ ID NO: 244453 - DNA, 25 bp, Probe Sequence
gttaaattatctctaggatggtgat

SEQ ID NO: 244454 - DNA, 25 bp, Probe Sequence
gttaaacttttgttatgactgtgtt

SEQ ID NO: 244455 - DNA, 25 bp, Probe Sequence
tctctaaccttgtcttctaacgttt

SEQ ID NO: 244456 - DNA, 25 bp, Probe Sequence
gtttacctagtgtcttactctgttt

SEQ ID NO: 244457 - DNA, 25 bp, Probe Sequence
gtttgactccgggatttccagtctc

SEQ ID NO: 244458 - DNA, 25 bp, Probe Sequence
gttaaccctgactattttactctat

SEQ ID NO: 244459 - DNA, 25 bp, Probe Sequence
gttacttactgagattaaacttcac

SEQ ID NO: 244460 - DNA, 25 bp, Probe Sequence
gttcactctttgtgctacaaagttc

SEQ ID NO: 244461 - DNA, 25 bp, Probe Sequence
gttcagtctgaattatgggaaagtt

SEQ ID NO: 244462 - DNA, 25 bp, Probe Sequence
gttcagtggaatagagacagcaaca

SEQ ID NO: 244463 - DNA, 25 bp, Probe Sequence
gttcagtggtgtgcagacagaaatt

SEQ ID NO: 244464 - DNA, 25 bp, Probe Sequence
gttcagttgttggcttcagcaaata

SEQ ID NO: 244465 - DNA, 25 bp, Probe Sequence
gttcatgatttagtcctcagaaatg

SEQ ID NO: 244466 - DNA, 25 bp, Probe Sequence
gttatattataaccatagcaagctt

SEQ ID NO: 244467 - DNA, 25 bp, Probe Sequence
gttacagtatgaacacacagcagag

SEQ ID NO: 244468 - DNA, 25 bp, Probe Sequence
gttacacacataaagacaccactca

SEQ ID NO: 244469 - DNA, 25 bp, Probe Sequence
gttacaaccagaagacccacatggt

SEQ ID NO: 244470 - DNA, 25 bp, Probe Sequence
gttcaaaccagaaattccctagtgt

SEQ ID NO: 244471 - DNA, 25 bp, Probe Sequence
gttaataacaatgacatctaccagg

SEQ ID NO: 244472 - DNA, 25 bp, Probe Sequence
gttagaaacctccacattcttaggc

SEQ ID NO: 244473 - DNA, 25 bp, Probe Sequence
gttcaaaaccttattcttaggctat

SEQ ID NO: 244474 - DNA, 25 bp, Probe Sequence
gtatccaagtccattgttactaggt

SEQ ID NO: 244475 - DNA, 25 bp, Probe Sequence
gttactgagtccactttattctggg

SEQ ID NO: 244476 - DNA, 25 bp, Probe Sequence
gttacggcatcacacttatatttta

SEQ ID NO: 244477 - DNA, 25 bp, Probe Sequence
gttacggcatcacacttatatttta

SEQ ID NO: 244478 - DNA, 25 bp, Probe Sequence
gtataaagattgtacttagccagtt

SEQ ID NO: 244479 - DNA, 25 bp, Probe Sequence
gttagtggtatgtaatttccagttt

SEQ ID NO: 244480 - DNA, 25 bp, Probe Sequence
gtttggcgtagcagagttaaatctc

SEQ ID NO: 244481 - DNA, 25 bp, Probe Sequence
gtttacccaccagattacaatcctg

SEQ ID NO: 244482 - DNA, 25 bp, Probe Sequence
gtttttccacctgataacttggaat

SEQ ID NO: 244483 - DNA, 25 bp, Probe Sequence
gttttggcaccgtcgatctacggga

SEQ ID NO: 244484 - DNA, 25 bp, Probe Sequence
gtatcgtgtggcagcacgtgtacga

SEQ ID NO: 244485 - DNA, 25 bp, Probe Sequence
gttcagtgctgatgaccgtgtgaaa

SEQ ID NO: 244486 - DNA, 25 bp, Probe Sequence
gttcagatgcagttaccttagagac

SEQ ID NO: 244487 - DNA, 25 bp, Probe Sequence
gttcagatgcagttaccttagagac

SEQ ID NO: 244488 - DNA, 25 bp, Probe Sequence
gttcagtgagtttcgatgactagcc

SEQ ID NO: 244489 - DNA, 25 bp, Probe Sequence
gttcagtggatatcggtcacatgcc

SEQ ID NO: 244490 - DNA, 25 bp, Probe Sequence
gttcaagatgaattctgttcacagt

SEQ ID NO: 244491 - DNA, 25 bp, Probe Sequence
gttaagatgcttacgcattctggtg

SEQ ID NO: 244492 - DNA, 25 bp, Probe Sequence
gttaggatctgaatcatgttctggg

SEQ ID NO: 244493 - DNA, 25 bp, Probe Sequence
gttaggatctgaatcatgttctggg

SEQ ID NO: 244494 - DNA, 25 bp, Probe Sequence
gttaggtgtctgtactccatgagga

SEQ ID NO: 244495 - DNA, 25 bp, Probe Sequence
gttaagtgtgttttctctggagata

SEQ ID NO: 244496 - DNA, 25 bp, Probe Sequence
gttaagtgtctgctttatgggcata

SEQ ID NO: 244497 - DNA, 25 bp, Probe Sequence
gttagttgattctttgaagttgcat

SEQ ID NO: 244498 - DNA, 25 bp, Probe Sequence
gttcagtgccattttatactttctc

SEQ ID NO: 244499 - DNA, 25 bp, Probe Sequence
gttttcctatgtgtacttcttctgc

SEQ ID NO: 244500 - DNA, 25 bp, Probe Sequence
gttatttccagaggtgcgcttttta

SEQ ID NO: 244501 - DNA, 25 bp, Probe Sequence
gttatttactcatgtgccttcaatt

SEQ ID NO: 244502 - DNA, 25 bp, Probe Sequence
gttcaatatacctataccaaatcta

SEQ ID NO: 244503 - DNA, 25 bp, Probe Sequence
gttcacattatcaaaactagaattc

SEQ ID NO: 244504 - DNA, 25 bp, Probe Sequence
gttcaatttgcttaattattgctta

SEQ ID NO: 244505 - DNA, 25 bp, Probe Sequence
gttatcaaaggctacattttcagtg

SEQ ID NO: 244506 - DNA, 25 bp, Probe Sequence
gttaccacaggttcattgctgtcat

SEQ ID NO: 244507 - DNA, 25 bp, Probe Sequence
gttaacaggaatgcagtgtgctcat

SEQ ID NO: 244508 - DNA, 25 bp, Probe Sequence
gttcaccagtgagctcaggtgtctc

SEQ ID NO: 244509 - DNA, 25 bp, Probe Sequence
gttcacacaggaaacagctatgacc

SEQ ID NO: 244510 - DNA, 25 bp, Probe Sequence
gttacatagaactaactatacacac

SEQ ID NO: 244511 - DNA, 25 bp, Probe Sequence
gttcaaaacacacagtacagacagc

SEQ ID NO: 244512 - DNA, 25 bp, Probe Sequence
gttactaaactgcacgaatgacact

SEQ ID NO: 244513 - DNA, 25 bp, Probe Sequence
gttttcctagctacatctggtacct

SEQ ID NO: 244514 - DNA, 25 bp, Probe Sequence
gttaacctgagtcacattgtaccat

SEQ ID NO: 244515 - DNA, 25 bp, Probe Sequence
gttaccagtggatacatttactaat

SEQ ID NO: 244516 - DNA, 25 bp, Probe Sequence
gttactcgtaagcaacttttagata

SEQ ID NO: 244517 - DNA, 25 bp, Probe Sequence
gttactggtttgtgtctttgctatg

SEQ ID NO: 244518 - DNA, 25 bp, Probe Sequence
gttacttttgagagttttctggtca

SEQ ID NO: 244519 - DNA, 25 bp, Probe Sequence
gttaccacctggaggatttctctgt

SEQ ID NO: 244520 - DNA, 25 bp, Probe Sequence
gttacccgtagtagagctatttctt

SEQ ID NO: 244521 - DNA, 25 bp, Probe Sequence
gttaccttctaaaagccattattat

SEQ ID NO: 244522 - DNA, 25 bp, Probe Sequence
gttacttaagactacaccattacta

SEQ ID NO: 244523 - DNA, 25 bp, Probe Sequence
gttacttccagattaaccaggacga

SEQ ID NO: 244524 - DNA, 25 bp, Probe Sequence
gttacttccagattaaccaggacga

SEQ ID NO: 244525 - DNA, 25 bp, Probe Sequence
gttttcaggcaatagaggaggacgg

SEQ ID NO: 244526 - DNA, 25 bp, Probe Sequence
gttacgggagagtcggctgtgaagg

SEQ ID NO: 244527 - DNA, 25 bp, Probe Sequence
gttatctgctgatgggccaggtaga

SEQ ID NO: 244528 - DNA, 25 bp, Probe Sequence
gttacagtcaatgggccgtggaaaa

SEQ ID NO: 244529 - DNA, 25 bp, Probe Sequence
gttcacagtcaaatggggaggggta

SEQ ID NO: 244530 - DNA, 25 bp, Probe Sequence
gttcacaactgaatggatggagcct

SEQ ID NO: 244531 - DNA, 25 bp, Probe Sequence
gttacaagcagaggcgtgcagcacc

SEQ ID NO: 244532 - DNA, 25 bp, Probe Sequence
gttttgcacagaggcatactgctcc

SEQ ID NO: 244533 - DNA, 25 bp, Probe Sequence
gttactgatagggatacatgtctta

SEQ ID NO: 244534 - DNA, 25 bp, Probe Sequence
gttactgttgtgaaaatctgtcatg

SEQ ID NO: 244535 - DNA, 25 bp, Probe Sequence
gttaatgttgtcaaatgccttattt

SEQ ID NO: 244536 - DNA, 25 bp, Probe Sequence
gttaatatttgaattgccttgcttt

SEQ ID NO: 244537 - DNA, 25 bp, Probe Sequence
gttacaatcttgtcttgcgttttct

SEQ ID NO: 244538 - DNA, 25 bp, Probe Sequence
gttacagatctgactcttcattttt

SEQ ID NO: 244539 - DNA, 25 bp, Probe Sequence
gttcacagactgctttttcatttta

SEQ ID NO: 244540 - DNA, 25 bp, Probe Sequence
gttacagacctcggttctcattaaa

SEQ ID NO: 244541 - DNA, 25 bp, Probe Sequence
gttacagttctttcattcaattata

SEQ ID NO: 244542 - DNA, 25 bp, Probe Sequence
gttaagctttagtcatctcatttat

SEQ ID NO: 244543 - DNA, 25 bp, Probe Sequence
gttcaagcttaatttgctagtcaag

SEQ ID NO: 244544 - DNA, 25 bp, Probe Sequence
gttcacagcttttcttgataggcct

SEQ ID NO: 244545 - DNA, 25 bp, Probe Sequence
gttatcacttttctgtaacgcctgc

SEQ ID NO: 244546 - DNA, 25 bp, Probe Sequence
gttaacttattcaattgagaccttt

SEQ ID NO: 244547 - DNA, 25 bp, Probe Sequence
gttaatattgtattgggaaccattt

SEQ ID NO: 244548 - DNA, 25 bp, Probe Sequence
gttaattggtttgggagcctcctat

SEQ ID NO: 244549 - DNA, 25 bp, Probe Sequence
gtctaaagagttcactacctgccta

SEQ ID NO: 244550 - DNA, 25 bp, Probe Sequence
gttacaagactactacttcccatat

SEQ ID NO: 244551 - DNA, 25 bp, Probe Sequence
gttaaatgagtacttgattcttcag

SEQ ID NO: 244552 - DNA, 25 bp, Probe Sequence
gttataatgccttgtaaatgcttta

SEQ ID NO: 244553 - DNA, 25 bp, Probe Sequence
gttaaacctttaccagcataccact

SEQ ID NO: 244554 - DNA, 25 bp, Probe Sequence
gttaacatttcaagggcaataccgt

SEQ ID NO: 244555 - DNA, 25 bp, Probe Sequence
gttaactgttataggccaggcacgg

SEQ ID NO: 244556 - DNA, 25 bp, Probe Sequence
gttagacattagggtgccagccagg

SEQ ID NO: 244557 - DNA, 25 bp, Probe Sequence
gttagagttatgtggcccatcaacc

SEQ ID NO: 244558 - DNA, 25 bp, Probe Sequence
gttagagggagaagtgcccccacct

SEQ ID NO: 244559 - DNA, 25 bp, Probe Sequence
gtgttggagaggggactcccccact

SEQ ID NO: 244560 - DNA, 25 bp, Probe Sequence
gtatttacggtaaaactgcgccact

SEQ ID NO: 244561 - DNA, 25 bp, Probe Sequence
gtatttacggtaaactgcccacttg

SEQ ID NO: 244562 - DNA, 25 bp, Probe Sequence
gtatttacggtaaactgcccacttg

SEQ ID NO: 244563 - DNA, 25 bp, Probe Sequence
gtattttccgtgagaatgccaaaat

SEQ ID NO: 244564 - DNA, 25 bp, Probe Sequence
gtttttacgtatgtaggcccagtcg

SEQ ID NO: 244565 - DNA, 25 bp, Probe Sequence
gttaatttcttataaggtcctgtgc

SEQ ID NO: 244566 - DNA, 25 bp, Probe Sequence
gttcactttttatagtgtgtccttt

SEQ ID NO: 244567 - DNA, 25 bp, Probe Sequence
gttcacttttgtatagttgctctgc

SEQ ID NO: 244568 - DNA, 25 bp, Probe Sequence
gttcacttttgtatagttgctctgc

SEQ ID NO: 244569 - DNA, 25 bp, Probe Sequence
gttacattttgtctacttattgaat

SEQ ID NO: 244570 - DNA, 25 bp, Probe Sequence
gttagcatgtttagcaaaccttgtg

SEQ ID NO: 244571 - DNA, 25 bp, Probe Sequence
gttagtgccataacagaccactgta

SEQ ID NO: 244572 - DNA, 25 bp, Probe Sequence
gttatggaaaacaccagtatagaat

SEQ ID NO: 244573 - DNA, 25 bp, Probe Sequence
gttaatccaaaactccagtatatga

SEQ ID NO: 244574 - DNA, 25 bp, Probe Sequence
gttatatcagcagacactccagttt

SEQ ID NO: 244575 - DNA, 25 bp, Probe Sequence
gttagcacacagaacacttcattgt

SEQ ID NO: 244576 - DNA, 25 bp, Probe Sequence
gttaccaatgaggacctgcactgtc

SEQ ID NO: 244577 - DNA, 25 bp, Probe Sequence
gttacacaaaggacctcagctgctt

SEQ ID NO: 244578 - DNA, 25 bp, Probe Sequence
gttacagaaacttcctccagtattc

SEQ ID NO: 244579 - DNA, 25 bp, Probe Sequence
gttacaggaatcacagctctcaata

SEQ ID NO: 244580 - DNA, 25 bp, Probe Sequence
gttacggccaagccagttccattaa

SEQ ID NO: 244581 - DNA, 25 bp, Probe Sequence
gttactccaaagaagttcctgaaat

SEQ ID NO: 244582 - DNA, 25 bp, Probe Sequence
gttacttagtagctactcccaaatt

SEQ ID NO: 244583 - DNA, 25 bp, Probe Sequence
gttactttgtagccttggcccagag

SEQ ID NO: 244584 - DNA, 25 bp, Probe Sequence
gttacaatgcttatgcttggtacaa

SEQ ID NO: 244585 - DNA, 25 bp, Probe Sequence
gttaaatctctcctgcttggtgatt

SEQ ID NO: 244586 - DNA, 25 bp, Probe Sequence
gttaagtccattctctggtactagc

SEQ ID NO: 244587 - DNA, 25 bp, Probe Sequence
gttaattctcttcctggttacattc

SEQ ID NO: 244588 - DNA, 25 bp, Probe Sequence
gttaattgccttcctaatctagtat

SEQ ID NO: 244589 - DNA, 25 bp, Probe Sequence
gttaattctttcaaatatctacata

SEQ ID NO: 244590 - DNA, 25 bp, Probe Sequence
gttacattcctaatagtgcatttta

SEQ ID NO: 244591 - DNA, 25 bp, Probe Sequence
gttaattccataaatctctacttag

SEQ ID NO: 244592 - DNA, 25 bp, Probe Sequence
gttactttaattaccgcgcattgag

SEQ ID NO: 244593 - DNA, 25 bp, Probe Sequence
gttagctgtgaatttaccctgtaca

SEQ ID NO: 244594 - DNA, 25 bp, Probe Sequence
gttactggacagttcccttggagct

SEQ ID NO: 244595 - DNA, 25 bp, Probe Sequence
gttacaggagaagaccagggtggag

SEQ ID NO: 244596 - DNA, 25 bp, Probe Sequence
gttaatatcaacaaagctaagggga

SEQ ID NO: 244597 - DNA, 25 bp, Probe Sequence
gttaataaacaagccattgcagcgg

SEQ ID NO: 244598 - DNA, 25 bp, Probe Sequence
gttcaaaaagcattatcctgtggcg

SEQ ID NO: 244599 - DNA, 25 bp, Probe Sequence
gttcaaaagctgttaccggctgtgt

SEQ ID NO: 244600 - DNA, 25 bp, Probe Sequence
gttatatagttaatgacaccggtgt

SEQ ID NO: 244601 - DNA, 25 bp, Probe Sequence
gttacataggtatacccgtgctatg

SEQ ID NO: 244602 - DNA, 25 bp, Probe Sequence
gttaatggagcggggcgccagtgaa

SEQ ID NO: 244603 - DNA, 25 bp, Probe Sequence
gttagattagcagaacgctcttgaa

SEQ ID NO: 244604 - DNA, 25 bp, Probe Sequence
gttaattatggctttggcactagaa

SEQ ID NO: 244605 - DNA, 25 bp, Probe Sequence
gttacaacagggggtgagctcagac

SEQ ID NO: 244606 - DNA, 25 bp, Probe Sequence
gttacaacgtgtgaaactgagcaaa

SEQ ID NO: 244607 - DNA, 25 bp, Probe Sequence
gttagaaactagcaatcagtagcaa

SEQ ID NO: 244608 - DNA, 25 bp, Probe Sequence
gttagaaattcacactgttgatgta

SEQ ID NO: 244609 - DNA, 25 bp, Probe Sequence
gttagcaacttctagatgtttatct

SEQ ID NO: 244610 - DNA, 25 bp, Probe Sequence
gttcacaactaacatgcttgaatca

SEQ ID NO: 244611 - DNA, 25 bp, Probe Sequence
gttaaactcaactatgcataattct

SEQ ID NO: 244612 - DNA, 25 bp, Probe Sequence
gttattacatccttgtggcacattt

SEQ ID NO: 244613 - DNA, 25 bp, Probe Sequence
gttaaatgccctatgagatgcacat

SEQ ID NO: 244614 - DNA, 25 bp, Probe Sequence
gttaaatgcaacacggatgatacca

SEQ ID NO: 244615 - DNA, 25 bp, Probe Sequence
gttaaatgcaatgtcttgtaccttg

SEQ ID NO: 244616 - DNA, 25 bp, Probe Sequence
gtctctacccatgtttaacccaaag

SEQ ID NO: 244617 - DNA, 25 bp, Probe Sequence
gtttccccttgtgaaaccacatatt

SEQ ID NO: 244618 - DNA, 25 bp, Probe Sequence
gtttacgcccgagatgaaacagaat

SEQ ID NO: 244619 - DNA, 25 bp, Probe Sequence
gttttggccccgctgataaaaatgt

SEQ ID NO: 244620 - DNA, 25 bp, Probe Sequence
gttattagcactaccgatgctgaaa

SEQ ID NO: 244621 - DNA, 25 bp, Probe Sequence
gttactatcagtagcacactggtag

SEQ ID NO: 244622 - DNA, 25 bp, Probe Sequence
gttatcaacgcaaggactggtgatg

SEQ ID NO: 244623 - DNA, 25 bp, Probe Sequence
gttacccagcatgctgttggcattg

SEQ ID NO: 244624 - DNA, 25 bp, Probe Sequence
gtatgaaccgcatggtgcttgcagt

SEQ ID NO: 244625 - DNA, 25 bp, Probe Sequence
gtagagaccggggtttcaccatgtt

SEQ ID NO: 244626 - DNA, 25 bp, Probe Sequence
gttagagatggggttttcaccatgt

SEQ ID NO: 244627 - DNA, 25 bp, Probe Sequence
gttactgaagagcttcactccctta

SEQ ID NO: 244628 - DNA, 25 bp, Probe Sequence
gttactgaagagcaatagccacttg

SEQ ID NO: 244629 - DNA, 25 bp, Probe Sequence
gttaggatatagctatgcctttatg

SEQ ID NO: 244630 - DNA, 25 bp, Probe Sequence
gttaaatcacagccatatacttttt

SEQ ID NO: 244631 - DNA, 25 bp, Probe Sequence
gttaagttcagccattattactttt

SEQ ID NO: 244632 - DNA, 25 bp, Probe Sequence
gttaattttccactgatcttttatt

SEQ ID NO: 244633 - DNA, 25 bp, Probe Sequence
gttaattgcctcaggatatttcttt

SEQ ID NO: 244634 - DNA, 25 bp, Probe Sequence
gttcaattcttttgtttcttctcct

SEQ ID NO: 244635 - DNA, 25 bp, Probe Sequence
gttaaggcttgtgttatttcgcgta

SEQ ID NO: 244636 - DNA, 25 bp, Probe Sequence
gttactggcttggtcttatttgcac

SEQ ID NO: 244637 - DNA, 25 bp, Probe Sequence
gttagggatgggttctgattggcag

SEQ ID NO: 244638 - DNA, 25 bp, Probe Sequence
gttagtggaggccttcagcgaggag

SEQ ID NO: 244639 - DNA, 25 bp, Probe Sequence
gttatgtacaagattaggagggggg

SEQ ID NO: 244640 - DNA, 25 bp, Probe Sequence
gttattagcataaagcaaggaggtt

SEQ ID NO: 244641 - DNA, 25 bp, Probe Sequence
gttatggagaaaccttgaggagtta

SEQ ID NO: 244642 - DNA, 25 bp, Probe Sequence
gttagttgtcaaccttggctgatgg

SEQ ID NO: 244643 - DNA, 25 bp, Probe Sequence
gttagaatgtgcaagcacttgggga

SEQ ID NO: 244644 - DNA, 25 bp, Probe Sequence
gcgctggcgttacagcgcaacagca

SEQ ID NO: 244645 - DNA, 25 bp, Probe Sequence
cgttacagcgcaacagcagcctgca

SEQ ID NO: 244646 - DNA, 25 bp, Probe Sequence
agcgcaacagcagcctgcagctgga

SEQ ID NO: 244647 - DNA, 25 bp, Probe Sequence
cagcagcctgcagctggattacgca

SEQ ID NO: 244648 - DNA, 25 bp, Probe Sequence
ctgcagctggattacgcaacagtaa

SEQ ID NO: 244649 - DNA, 25 bp, Probe Sequence
catcagcgcgcaagagggcagaccg

SEQ ID NO: 244650 - DNA, 25 bp, Probe Sequence
cgcaagagggcagaccgatagaatc

SEQ ID NO: 244651 - DNA, 25 bp, Probe Sequence
gggcagaccgatagaatcattggta

SEQ ID NO: 244652 - DNA, 25 bp, Probe Sequence
gaccgatagaatcattggtaatgag

SEQ ID NO: 244653 - DNA, 25 bp, Probe Sequence
agaatcattggtaatgagcgccgga

SEQ ID NO: 244654 - DNA, 25 bp, Probe Sequence
ttggtaatgagcgccggattacgcg

SEQ ID NO: 244655 - DNA, 25 bp, Probe Sequence
atgagcgccggattacgcgcgcttg

SEQ ID NO: 244656 - DNA, 25 bp, Probe Sequence
ggtgctggcggctggtttacgccgc

SEQ ID NO: 244657 - DNA, 25 bp, Probe Sequence
ctttctgacactttcacttttgcag

SEQ ID NO: 244658 - DNA, 25 bp, Probe Sequence
tgacactttcacttttgcagattgg

SEQ ID NO: 244659 - DNA, 25 bp, Probe Sequence
tttgcagattgggtaacacaggaac

SEQ ID NO: 244660 - DNA, 25 bp, Probe Sequence
gaaaacgtcacgctgaatatatgac

SEQ ID NO: 244661 - DNA, 25 bp, Probe Sequence
aaacgtcacgctgaatatatgacca

SEQ ID NO: 244662 - DNA, 25 bp, Probe Sequence
gttacacagcagtacctctttgacc

SEQ ID NO: 244663 - DNA, 25 bp, Probe Sequence
gttattcaacaggagtcttacacat

SEQ ID NO: 244664 - DNA, 25 bp, Probe Sequence
gttactgtagcactttttacactga

SEQ ID NO: 244665 - DNA, 25 bp, Probe Sequence
gttacattggcgaatttgaaatcat

SEQ ID NO: 244666 - DNA, 25 bp, Probe Sequence
gttacagtggcttatgtttttcata

SEQ ID NO: 244667 - DNA, 25 bp, Probe Sequence
gttacattgtcttactctcttttac

SEQ ID NO: 244668 - DNA, 25 bp, Probe Sequence
gttaacatttatacttgccttggac

SEQ ID NO: 244669 - DNA, 25 bp, Probe Sequence
gttcaacttgacattttctaggact

SEQ ID NO: 244670 - DNA, 25 bp, Probe Sequence
gttaatcttcacgtttttgcaaact

SEQ ID NO: 244671 - DNA, 25 bp, Probe Sequence
gttaatgcttatgctttattgcagt

SEQ ID NO: 244672 - DNA, 25 bp, Probe Sequence
gttaatgcaactgcttaatggcact

SEQ ID NO: 244673 - DNA, 25 bp, Probe Sequence
gttaagagattgttctcactcccgc

SEQ ID NO: 244674 - DNA, 25 bp, Probe Sequence
gttaagcactgtgttccagaccgtg

SEQ ID NO: 244675 - DNA, 25 bp, Probe Sequence
gttaaaggatgcactcagagcccgg

SEQ ID NO: 244676 - DNA, 25 bp, Probe Sequence
gttttagtagtcgcagacctcgaaa

SEQ ID NO: 244677 - DNA, 25 bp, Probe Sequence
gtttttctggtctgaccgtcgcaac

SEQ ID NO: 244678 - DNA, 25 bp, Probe Sequence
gttttgggtgtctttacttcacatc

SEQ ID NO: 244679 - DNA, 25 bp, Probe Sequence
gttaatgttggaatttacctactct

SEQ ID NO: 244680 - DNA, 25 bp, Probe Sequence
gttattttgacaccaaaacaaatct

SEQ ID NO: 244681 - DNA, 25 bp, Probe Sequence
gttatatttcaaccacacctaaatt

SEQ ID NO: 244682 - DNA, 25 bp, Probe Sequence
gtttctcccagacatacctaaattt

SEQ ID NO: 244683 - DNA, 25 bp, Probe Sequence
gttagtgccacaaggaatttaactt

SEQ ID NO: 244684 - DNA, 25 bp, Probe Sequence
gttaggcagctctgtagttgctaat

SEQ ID NO: 244685 - DNA, 25 bp, Probe Sequence
gttatggatctctctgcgtttgaat

SEQ ID NO: 244686 - DNA, 25 bp, Probe Sequence
gttaggcctgcaactgagcatttca

SEQ ID NO: 244687 - DNA, 25 bp, Probe Sequence
gttatgaccggaatgacagctgaca

SEQ ID NO: 244688 - DNA, 25 bp, Probe Sequence
gttatgactactttcaggcatgaca

SEQ ID NO: 244689 - DNA, 25 bp, Probe Sequence
gttaactatctgtatagatgctgta

SEQ ID NO: 244690 - DNA, 25 bp, Probe Sequence
gttaacctcagctgtgatcttatgt

SEQ ID NO: 244691 - DNA, 25 bp, Probe Sequence
gttaactctgagtctgtccaaatga

SEQ ID NO: 244692 - DNA, 25 bp, Probe Sequence
gttagactcatggtgtgttacacaa

SEQ ID NO: 244693 - DNA, 25 bp, Probe Sequence
gttaattcagcactgatttcacaac

SEQ ID NO: 244694 - DNA, 25 bp, Probe Sequence
gttaatctaggaacttcaacactat

SEQ ID NO: 244695 - DNA, 25 bp, Probe Sequence
gttaattctggttctatctacctca

SEQ ID NO: 244696 - DNA, 25 bp, Probe Sequence
gttaatacttgttatatggacccta

SEQ ID NO: 244697 - DNA, 25 bp, Probe Sequence
gtgctttttgtatcattaaccgtaa

SEQ ID NO: 244698 - DNA, 25 bp, Probe Sequence
gttttgatagattccttacccagtg

SEQ ID NO: 244699 - DNA, 25 bp, Probe Sequence
gtttacatttggcttacccagacaa

SEQ ID NO: 244700 - DNA, 25 bp, Probe Sequence
gtttaatgacgaccttaccaagcca

SEQ ID NO: 244701 - DNA, 25 bp, Probe Sequence
gtatataaagggctctcaaaactca

SEQ ID NO: 244702 - DNA, 25 bp, Probe Sequence
gtttcccatgggattcaagagggac

SEQ ID NO: 244703 - DNA, 25 bp, Probe Sequence
gtttcccgggaagatctgaactggc

SEQ ID NO: 244704 - DNA, 25 bp, Probe Sequence
gttttccgggcatcatagtagttgg

SEQ ID NO: 244705 - DNA, 25 bp, Probe Sequence
gttttcttaggcactgagggatctg

SEQ ID NO: 244706 - DNA, 25 bp, Probe Sequence
gttttcttaggcactgagggatctg

SEQ ID NO: 244707 - DNA, 25 bp, Probe Sequence
gttattttcagggttgccgctgagt

SEQ ID NO: 244708 - DNA, 25 bp, Probe Sequence
gttttgtccaggatggccctgacaa

SEQ ID NO: 244709 - DNA, 25 bp, Probe Sequence
gttatgggggatcttgtactgacaa

SEQ ID NO: 244710 - DNA, 25 bp, Probe Sequence
gttaaagggcatccattgatttcaa

SEQ ID NO: 244711 - DNA, 25 bp, Probe Sequence
gttaagaggtcagcattgaggtcac

SEQ ID NO: 244712 - DNA, 25 bp, Probe Sequence
gttaagcgttcagtgatgtggggtg

SEQ ID NO: 244713 - DNA, 25 bp, Probe Sequence
gttaactgcatttgttgtgatggtg

SEQ ID NO: 244714 - DNA, 25 bp, Probe Sequence
gttaactcaatcctctgatcagggt

SEQ ID NO: 244715 - DNA, 25 bp, Probe Sequence
gttagcctcagacactactgaggtg

SEQ ID NO: 244716 - DNA, 25 bp, Probe Sequence
gttatgactgcctgaaagtgggtga

SEQ ID NO: 244717 - DNA, 25 bp, Probe Sequence
gttttgcgaacttaaagggctgact

SEQ ID NO: 244718 - DNA, 25 bp, Probe Sequence
gttatggtaatcaaagggaggagac

SEQ ID NO: 244719 - DNA, 25 bp, Probe Sequence
gttacgacacatatctgggacagaa

SEQ ID NO: 244720 - DNA, 25 bp, Probe Sequence
gttacgacacatatctgggacagaa

SEQ ID NO: 244721 - DNA, 25 bp, Probe Sequence
gttacgacatcgatgtggaggtgga

SEQ ID NO: 244722 - DNA, 25 bp, Probe Sequence
gttacacctgcgattgcttggatgg

SEQ ID NO: 244723 - DNA, 25 bp, Probe Sequence
gttactctctgctctgacttggaga

SEQ ID NO: 244724 - DNA, 25 bp, Probe Sequence
gttacccagtcctacaatgggaaat

SEQ ID NO: 244725 - DNA, 25 bp, Probe Sequence
gtttcctcatctgcaaaatgggaac

SEQ ID NO: 244726 - DNA, 25 bp, Probe Sequence
gttaccacatcccacaaaatggccc

SEQ ID NO: 244727 - DNA, 25 bp, Probe Sequence
gttaatcacatagtccaaaatcagc

SEQ ID NO: 244728 - DNA, 25 bp, Probe Sequence
gttacatcattagtctctgaaaaaa

SEQ ID NO: 244729 - DNA, 25 bp, Probe Sequence
gttacatcactattttaaacatatc

SEQ ID NO: 244730 - DNA, 25 bp, Probe Sequence
gttacgctgattttatgaagaccac

SEQ ID NO: 244731 - DNA, 25 bp, Probe Sequence
gttagcctcaatttctgaacaccat

SEQ ID NO: 244732 - DNA, 25 bp, Probe Sequence
gttacctcatttttggtcaacacta

SEQ ID NO: 244733 - DNA, 25 bp, Probe Sequence
gttacaccgttgttgttttacatct

SEQ ID NO: 244734 - DNA, 25 bp, Probe Sequence
gttaatcccttattttagtgacaat

SEQ ID NO: 244735 - DNA, 25 bp, Probe Sequence
gttaacaagctgaatatttagtaga

SEQ ID NO: 244736 - DNA, 25 bp, Probe Sequence
gttaagaatctgatattgtgtgtgt

SEQ ID NO: 244737 - DNA, 25 bp, Probe Sequence
gttagagagaggattgtgggtttag

SEQ ID NO: 244738 - DNA, 25 bp, Probe Sequence
gttaacagagtttgatatgggcttt

SEQ ID NO: 244739 - DNA, 25 bp, Probe Sequence
gttaagtgcaggagacattggtatt

SEQ ID NO: 244740 - DNA, 25 bp, Probe Sequence
gttacaggatcgtgaactctattta

SEQ ID NO: 244741 - DNA, 25 bp, Probe Sequence
gtttcatggactatggactctttca

SEQ ID NO: 244742 - DNA, 25 bp, Probe Sequence
gttaactgactttgagatcatcatt

SEQ ID NO: 244743 - DNA, 25 bp, Probe Sequence
gttacctgatcaatgacagagcctt

SEQ ID NO: 244744 - DNA, 25 bp, Probe Sequence
gttactcttttgtcaaggtatttgg

SEQ ID NO: 244745 - DNA, 25 bp, Probe Sequence
gttactcgttggtacagctgtttgt

SEQ ID NO: 244746 - DNA, 25 bp, Probe Sequence
gttacagttatacaatgatttttta

SEQ ID NO: 244747 - DNA, 25 bp, Probe Sequence
gttaacatttagggagttatctgtt

SEQ ID NO: 244748 - DNA, 25 bp, Probe Sequence
gttaaagcttatgatagtcttttct

SEQ ID NO: 244749 - DNA, 25 bp, Probe Sequence
gttaaaattgaggtcacatattttc

SEQ ID NO: 244750 - DNA, 25 bp, Probe Sequence
gttaaatattccttcacatatcttt

SEQ ID NO: 244751 - DNA, 25 bp, Probe Sequence
gttaaaattaactgcattcttgtaa

SEQ ID NO: 244752 - DNA, 25 bp, Probe Sequence
gttagaaattaaacagattccatct

SEQ ID NO: 244753 - DNA, 25 bp, Probe Sequence
gttagataaaatagacaatttccta

SEQ ID NO: 244754 - DNA, 25 bp, Probe Sequence
gttaaaacatgaatccatttttgta

SEQ ID NO: 244755 - DNA, 25 bp, Probe Sequence
gttacaaccatatgcctttatagct

SEQ ID NO: 244756 - DNA, 25 bp, Probe Sequence
gtttagaccttctcttcataatctt

SEQ ID NO: 244757 - DNA, 25 bp, Probe Sequence
ttttggtccttctctggtaggcgaa

SEQ ID NO: 244758 - DNA, 25 bp, Probe Sequence
tttgcaaaccttgacgggactggga

SEQ ID NO: 244759 - DNA, 25 bp, Probe Sequence
gtttgcaaaccttgacgggactggg

SEQ ID NO: 244760 - DNA, 25 bp, Probe Sequence
gtttatgtcctctgtcgggacatgg

SEQ ID NO: 244761 - DNA, 25 bp, Probe Sequence
gttttgtgccattcaggagaggaaa

SEQ ID NO: 244762 - DNA, 25 bp, Probe Sequence
gtttttccagcttgtcaaggagaag

SEQ ID NO: 244763 - DNA, 25 bp, Probe Sequence
gttttcatccacagaagcgttaagg

SEQ ID NO: 244764 - DNA, 25 bp, Probe Sequence
gttagtcccacaaaggcagtctagt

SEQ ID NO: 244765 - DNA, 25 bp, Probe Sequence
gttatgtcccaaagagaggctcacc

SEQ ID NO: 244766 - DNA, 25 bp, Probe Sequence
gttttcccatatggaagaccagcca

SEQ ID NO: 244767 - DNA, 25 bp, Probe Sequence
gttactttatacaagatacctgcca

SEQ ID NO: 244768 - DNA, 25 bp, Probe Sequence
gttactgggcattctcaatacttga

SEQ ID NO: 244769 - DNA, 25 bp, Probe Sequence
gttactgtggtatctatgagttatc

SEQ ID NO: 244770 - DNA, 25 bp, Probe Sequence
gttacgggtattcagccttcagtca

SEQ ID NO: 244771 - DNA, 25 bp, Probe Sequence
gttactggcgttggacaggcttcag

SEQ ID NO: 244772 - DNA, 25 bp, Probe Sequence
gtttgaagctttgcatcaggtggca

SEQ ID NO: 244773 - DNA, 25 bp, Probe Sequence
gtttgccagcattcagtactgtgtt

SEQ ID NO: 244774 - DNA, 25 bp, Probe Sequence
gttatcctttcacagtgttcccaag

SEQ ID NO: 244775 - DNA, 25 bp, Probe Sequence
gttacctttcatgaggcttctagcc

SEQ ID NO: 244776 - DNA, 25 bp, Probe Sequence
gttaacttctcagaggctctggaga

SEQ ID NO: 244777 - DNA, 25 bp, Probe Sequence
gttatggcatttgtaggcttggagg

SEQ ID NO: 244778 - DNA, 25 bp, Probe Sequence
gtttagtatttttgcctgttagtga

SEQ ID NO: 244779 - DNA, 25 bp, Probe Sequence
gttacatgtattacttggtgtatcg

SEQ ID NO: 244780 - DNA, 25 bp, Probe Sequence
gttacttatcattactgtgtttctg

SEQ ID NO: 244781 - DNA, 25 bp, Probe Sequence
gttatgcttgtattgaatgctgtct

SEQ ID NO: 244782 - DNA, 25 bp, Probe Sequence
gttatgtactattgtggctggcaaa

SEQ ID NO: 244783 - DNA, 25 bp, Probe Sequence
gttttgtgttagcagcggaaaaaat

SEQ ID NO: 244784 - DNA, 25 bp, Probe Sequence
gtcttttttcggtgaactattgaag

SEQ ID NO: 244785 - DNA, 25 bp, Probe Sequence
gtcatttttttgcgcgacccgctga

SEQ ID NO: 244786 - DNA, 25 bp, Probe Sequence
gttttgttttgctacgagtccacat

SEQ ID NO: 244787 - DNA, 25 bp, Probe Sequence
gttttgttttgctacgagtccacat

SEQ ID NO: 244788 - DNA, 25 bp, Probe Sequence
gttacttgtgcttggtcaggggact

SEQ ID NO: 244789 - DNA, 25 bp, Probe Sequence
gttagattgtgttctgacatggttg

SEQ ID NO: 244790 - DNA, 25 bp, Probe Sequence
gttagcattttatggcattgtctcc

SEQ ID NO: 244791 - DNA, 25 bp, Probe Sequence
gttagcactgatagttggcattact

SEQ ID NO: 244792 - DNA, 25 bp, Probe Sequence
gttacacatcaaagtgacttcactg

SEQ ID NO: 244793 - DNA, 25 bp, Probe Sequence
gttacactgaatggctactatatag

SEQ ID NO: 244794 - DNA, 25 bp, Probe Sequence
gttacactgaacaggagatagcaga

SEQ ID NO: 244795 - DNA, 25 bp, Probe Sequence
gttaacataacaagccatattgtga

SEQ ID NO: 244796 - DNA, 25 bp, Probe Sequence
gttaactacactagcttaatctggt

SEQ ID NO: 244797 - DNA, 25 bp, Probe Sequence
gttaccaaatctactgacaatgcat

SEQ ID NO: 244798 - DNA, 25 bp, Probe Sequence
gttacgccactcacatgaattacac

SEQ ID NO: 244799 - DNA, 25 bp, Probe Sequence
gttaggcctcctataatgtccaaaa

SEQ ID NO: 244800 - DNA, 25 bp, Probe Sequence
gttatgagcctgcattctatttaca

SEQ ID NO: 244801 - DNA, 25 bp, Probe Sequence
gttatgtcatccctcttattaatca

SEQ ID NO: 244802 - DNA, 25 bp, Probe Sequence
gttactgctgctctattattaacaa

SEQ ID NO: 244803 - DNA, 25 bp, Probe Sequence
gttacagcttgttttttgagagaat

SEQ ID NO: 244804 - DNA, 25 bp, Probe Sequence
gttacttttattatttggatgtata

SEQ ID NO: 244805 - DNA, 25 bp, Probe Sequence
gttttacctctaaattctggcattt

SEQ ID NO: 244806 - DNA, 25 bp, Probe Sequence
gttttccaccaatattctggaaggg

SEQ ID NO: 244807 - DNA, 25 bp, Probe Sequence
gttattcccacacttgactttatca

SEQ ID NO: 244808 - DNA, 25 bp, Probe Sequence
gtttctacaaattagagtttgtcac

SEQ ID NO: 244809 - DNA, 25 bp, Probe Sequence
gttttccattttcatgccttgtaaa

SEQ ID NO: 244810 - DNA, 25 bp, Probe Sequence
gttttccagtttcttaatgcgaaat

SEQ ID NO: 244811 - DNA, 25 bp, Probe Sequence
gtttttagtgtatccctatgaaaat

SEQ ID NO: 244812 - DNA, 25 bp, Probe Sequence
gtttattactgatttgaccttacct

SEQ ID NO: 244813 - DNA, 25 bp, Probe Sequence
gtttttaatattatgactctggtcc

SEQ ID NO: 244814 - DNA, 25 bp, Probe Sequence
gttacttattatttagatatttctc

SEQ ID NO: 244815 - DNA, 25 bp, Probe Sequence
gttaactttgactttgatggggctc

SEQ ID NO: 244816 - DNA, 25 bp, Probe Sequence
gttaacttacacttatgagattact

SEQ ID NO: 244817 - DNA, 25 bp, Probe Sequence
gtttccgtacattcttgaactacat

SEQ ID NO: 244818 - DNA, 25 bp, Probe Sequence
gttatccaggactttgtgaaaatgt

SEQ ID NO: 244819 - DNA, 25 bp, Probe Sequence
gttacctgctggtttgtgcacaaca

SEQ ID NO: 244820 - DNA, 25 bp, Probe Sequence
gttacctgctggcaggtcgattcgc

SEQ ID NO: 244821 - DNA, 25 bp, Probe Sequence
gtttcgtggggaggtctaatctaga

SEQ ID NO: 244822 - DNA, 25 bp, Probe Sequence
gtttagccaggatggtctcaatctc

SEQ ID NO: 244823 - DNA, 25 bp, Probe Sequence
gtttatccactggagcttaagtccc

SEQ ID NO: 244824 - DNA, 25 bp, Probe Sequence
gttagatcccattagcacttgagac

SEQ ID NO: 244825 - DNA, 25 bp, Probe Sequence
gttagtgctacattgtgcacagtga

SEQ ID NO: 244826 - DNA, 25 bp, Probe Sequence
gttatggttcattgtccggagagta

SEQ ID NO: 244827 - DNA, 25 bp, Probe Sequence
gtttggttattccactgaacttagg

SEQ ID NO: 244828 - DNA, 25 bp, Probe Sequence
gtttggttaacgtgatacattctgt

SEQ ID NO: 244829 - DNA, 25 bp, Probe Sequence
gtttcgttagaggtgtctacagtcc

SEQ ID NO: 244830 - DNA, 25 bp, Probe Sequence
gttttgtcaaaggtttaattagcag

SEQ ID NO: 244831 - DNA, 25 bp, Probe Sequence
gttttgccacatacttctaaagaac

SEQ ID NO: 244832 - DNA, 25 bp, Probe Sequence
gttttgacctccatagaagacaccg

SEQ ID NO: 244833 - DNA, 25 bp, Probe Sequence
gttttgacctccatagaagacaccg

SEQ ID NO: 244834 - DNA, 25 bp, Probe Sequence
gttttgacctccatagaagacaccg

SEQ ID NO: 244835 - DNA, 25 bp, Probe Sequence
gttttgacctccatagaagacaccg

SEQ ID NO: 244836 - DNA, 25 bp, Probe Sequence
gttttgacctccatagaagacaccg

SEQ ID NO: 244837 - DNA, 25 bp, Probe Sequence
gttttgacctccatagaagacaccg

SEQ ID NO: 244838 - DNA, 25 bp, Probe Sequence
gttttgacctccatagaagacaccg

SEQ ID NO: 244839 - DNA, 25 bp, Probe Sequence
gttttgacctccatagaagacaccg

SEQ ID NO: 244840 - DNA, 25 bp, Probe Sequence
gttttgacctccatagaagacaccg

SEQ ID NO: 244841 - DNA, 25 bp, Probe Sequence
gttttgacctccatagaagacaccg

SEQ ID NO: 244842 - DNA, 25 bp, Probe Sequence
gttttgacctccatagaagacaccg

SEQ ID NO: 244843 - DNA, 25 bp, Probe Sequence
gttttgacctccatagaagacaccg

SEQ ID NO: 244844 - DNA, 25 bp, Probe Sequence
gttttgacctccatagaagacaccg

SEQ ID NO: 244845 - DNA, 25 bp, Probe Sequence
gttttgacctccatagaagacaccg

SEQ ID NO: 244846 - DNA, 25 bp, Probe Sequence
gttttgacctccatagaagacaccg

SEQ ID NO: 244847 - DNA, 25 bp, Probe Sequence
gttttgacctccatagaagacaccg

SEQ ID NO: 244848 - DNA, 25 bp, Probe Sequence
gttttgacctccatagaagacaccg

SEQ ID NO: 244849 - DNA, 25 bp, Probe Sequence
gttttgacctccatagaagacaccg

SEQ ID NO: 244850 - DNA, 25 bp, Probe Sequence
gttttgacctccatagaagacaccg

SEQ ID NO: 244851 - DNA, 25 bp, Probe Sequence
gttttgacctccatagaagacaccg

SEQ ID NO: 244852 - DNA, 25 bp, Probe Sequence
gttttgacctccatagaagacaccg

SEQ ID NO: 244853 - DNA, 25 bp, Probe Sequence
gttttgacctccatagaagacaccg

SEQ ID NO: 244854 - DNA, 25 bp, Probe Sequence
gttttgacctccatagaagacaccg

SEQ ID NO: 244855 - DNA, 25 bp, Probe Sequence
gttttgacctccatagaagacaccg

SEQ ID NO: 244856 - DNA, 25 bp, Probe Sequence
gttttgacctcccatagaagacacc

SEQ ID NO: 244857 - DNA, 25 bp, Probe Sequence
gttattactcctctgagtaccacta

SEQ ID NO: 244858 - DNA, 25 bp, Probe Sequence
gttttgattccctgaggctacttta

SEQ ID NO: 244859 - DNA, 25 bp, Probe Sequence
gttatatatggggatggtagttttt

SEQ ID NO: 244860 - DNA, 25 bp, Probe Sequence
gttatattttggagtaggctttcag

SEQ ID NO: 244861 - DNA, 25 bp, Probe Sequence
gttatagtcttaagatttgttttct

SEQ ID NO: 244862 - DNA, 25 bp, Probe Sequence
gttttgacggatgattggattattc

SEQ ID NO: 244863 - DNA, 25 bp, Probe Sequence
gttttggggcacctcttaattcatt

SEQ ID NO: 244864 - DNA, 25 bp, Probe Sequence
gttatcagtagtgcctttacttcag

SEQ ID NO: 244865 - DNA, 25 bp, Probe Sequence
gttacagtaatttctgttagctgat

SEQ ID NO: 244866 - DNA, 25 bp, Probe Sequence
gttaggaagcttttgttatgtattt

SEQ ID NO: 244867 - DNA, 25 bp, Probe Sequence
gttagtaaccttggcatctttattt

SEQ ID NO: 244868 - DNA, 25 bp, Probe Sequence
gttactacagccttaatattttcct

SEQ ID NO: 244869 - DNA, 25 bp, Probe Sequence
gttacagacaacttgcctgattttt

SEQ ID NO: 244870 - DNA, 25 bp, Probe Sequence
gttatcaaattcttccaagttctat

SEQ ID NO: 244871 - DNA, 25 bp, Probe Sequence
gttagaaatgacttacaggtcaaag

SEQ ID NO: 244872 - DNA, 25 bp, Probe Sequence
gttactgtatactgaaggtctgaca

SEQ ID NO: 244873 - DNA, 25 bp, Probe Sequence
gttatcattatataggaggccccaa

SEQ ID NO: 244874 - DNA, 25 bp, Probe Sequence
gttagagctagagagaaggccccaa

SEQ ID NO: 244875 - DNA, 25 bp, Probe Sequence
gttagagctagagagaaggccccaa

SEQ ID NO: 244876 - DNA, 25 bp, Probe Sequence
gttagatgctattaagaaggcactt

SEQ ID NO: 244877 - DNA, 25 bp, Probe Sequence
gttaggctatataacattgccactt

SEQ ID NO: 244878 - DNA, 25 bp, Probe Sequence
gttatatgcaaatactgtgccattt

SEQ ID NO: 244879 - DNA, 25 bp, Probe Sequence
gttttaaactcacatccatattaca

SEQ ID NO: 244880 - DNA, 25 bp, Probe Sequence
gttattataccagaacctcttcaca

SEQ ID NO: 244881 - DNA, 25 bp, Probe Sequence
gttatttagaactcacctctcacac

SEQ ID NO: 244882 - DNA, 25 bp, Probe Sequence
gttatctgtaaccattacagcctaa

SEQ ID NO: 244883 - DNA, 25 bp, Probe Sequence
gtttttcatccgacataatcctaca

SEQ ID NO: 244884 - DNA, 25 bp, Probe Sequence
gttttggcaccgagagatcgtacgg

SEQ ID NO: 244885 - DNA, 25 bp, Probe Sequence
gttttggcacgcgaaagtcaacggg

SEQ ID NO: 244886 - DNA, 25 bp, Probe Sequence
gttactggtaccaagactactaggg

SEQ ID NO: 244887 - DNA, 25 bp, Probe Sequence
gttactggttcagcaactctgcaga

SEQ ID NO: 244888 - DNA, 25 bp, Probe Sequence
gttactgggatcacattcattgcac

SEQ ID NO: 244889 - DNA, 25 bp, Probe Sequence
gttactgggatcacattcattgcac

SEQ ID NO: 244890 - DNA, 25 bp, Probe Sequence
gttactgggacgccatgccaggact

SEQ ID NO: 244891 - DNA, 25 bp, Probe Sequence
gttactgattgagctacgaggacca

SEQ ID NO: 244892 - DNA, 25 bp, Probe Sequence
gttagtttgagagttcacagggcta

SEQ ID NO: 244893 - DNA, 25 bp, Probe Sequence
gttaccattcaagttaaggtcaagt

SEQ ID NO: 244894 - DNA, 25 bp, Probe Sequence
gttaccactaagataatggccagta

SEQ ID NO: 244895 - DNA, 25 bp, Probe Sequence
gttacatcactgacggtaatgcccg

SEQ ID NO: 244896 - DNA, 25 bp, Probe Sequence
gttactctctaagaagcatgctgcc

SEQ ID NO: 244897 - DNA, 25 bp, Probe Sequence
gttacctcatgatgtcataatttgc

SEQ ID NO: 244898 - DNA, 25 bp, Probe Sequence
gttacctatctcggcataattctca

SEQ ID NO: 244899 - DNA, 25 bp, Probe Sequence
gttactgctgattcttgtaaatctt

SEQ ID NO: 244900 - DNA, 25 bp, Probe Sequence
gttactgatgtttgtgtcagttcat

SEQ ID NO: 244901 - DNA, 25 bp, Probe Sequence
gttatcaggttgtttcagttgtatt

SEQ ID NO: 244902 - DNA, 25 bp, Probe Sequence
gttatcctgaaatttcggagtattt

SEQ ID NO: 244903 - DNA, 25 bp, Probe Sequence
gttattgtaaaagtctggcctcttt

SEQ ID NO: 244904 - DNA, 25 bp, Probe Sequence
gttatactagactccattgtgcctt

SEQ ID NO: 244905 - DNA, 25 bp, Probe Sequence
gttagagtaacacatatcctgcctt

SEQ ID NO: 244906 - DNA, 25 bp, Probe Sequence
gttagctgtgacaggaacctgccat

SEQ ID NO: 244907 - DNA, 25 bp, Probe Sequence
gttactgtaattgggcctggctcac

SEQ ID NO: 244908 - DNA, 25 bp, Probe Sequence
gttacgtccaatagtgacttgtcgc

SEQ ID NO: 244909 - DNA, 25 bp, Probe Sequence
gttagcctacagagatgacaatgtc

SEQ ID NO: 244910 - DNA, 25 bp, Probe Sequence
gttagcttacagaagtcactatgaa

SEQ ID NO: 244911 - DNA, 25 bp, Probe Sequence
gttagctgtagaagcagttctcaga

SEQ ID NO: 244912 - DNA, 25 bp, Probe Sequence
gttactcatgagaccagtgcccatg

SEQ ID NO: 244913 - DNA, 25 bp, Probe Sequence
gttaccaggcatggcagtgggcgcc

SEQ ID NO: 244914 - DNA, 25 bp, Probe Sequence
gttacaggctgaggaatgcggcatc

SEQ ID NO: 244915 - DNA, 25 bp, Probe Sequence
gttagtggcaacggtgcgagctctg

SEQ ID NO: 244916 - DNA, 25 bp, Probe Sequence
gttacaggcctgagtgtgagtccct

SEQ ID NO: 244917 - DNA, 25 bp, Probe Sequence
gttagaggctcgtgtgcatggcccc

SEQ ID NO: 244918 - DNA, 25 bp, Probe Sequence
gttagagatgtggttgggcggccta

SEQ ID NO: 244919 - DNA, 25 bp, Probe Sequence
gttagagatgttgagtgcgccgcac

SEQ ID NO: 244920 - DNA, 25 bp, Probe Sequence
gttatgggtaacaatgcagtctcac

SEQ ID NO: 244921 - DNA, 25 bp, Probe Sequence
gtttggtgataacaactacccagga

SEQ ID NO: 244922 - DNA, 25 bp, Probe Sequence
gtttgggaccaagaacacccatgaa

SEQ ID NO: 244923 - DNA, 25 bp, Probe Sequence
gtttgggacgaacagagctctccct

SEQ ID NO: 244924 - DNA, 25 bp, Probe Sequence
gttatcaggggatgtacatctctcc

SEQ ID NO: 244925 - DNA, 25 bp, Probe Sequence
gttattcgggaattaggcatctgcc

SEQ ID NO: 244926 - DNA, 25 bp, Probe Sequence
gtttgtactggatgaagctgacgaa

SEQ ID NO: 244927 - DNA, 25 bp, Probe Sequence
gttagtactccaatgaaggcagaaa

SEQ ID NO: 244928 - DNA, 25 bp, Probe Sequence
gttatctcctctgctaagacaaaaa

SEQ ID NO: 244929 - DNA, 25 bp, Probe Sequence
gttagcttttaaacagaaatgataa

SEQ ID NO: 244930 - DNA, 25 bp, Probe Sequence
gttacattcttaaacaatgacattg

SEQ ID NO: 244931 - DNA, 25 bp, Probe Sequence
gttatcatatccacaagccgaatag

SEQ ID NO: 244932 - DNA, 25 bp, Probe Sequence
gttatctgtcagatgaagggcacta

SEQ ID NO: 244933 - DNA, 25 bp, Probe Sequence
gttatttcgttaccactgcatgcaa

SEQ ID NO: 244934 - DNA, 25 bp, Probe Sequence
gttatgtatctgccttcaagtctct

SEQ ID NO: 244935 - DNA, 25 bp, Probe Sequence
gttatggtgctggctatattttgct

SEQ ID NO: 244936 - DNA, 25 bp, Probe Sequence
gttatcgctgtggtgagtctggtca

SEQ ID NO: 244937 - DNA, 25 bp, Probe Sequence
gtataccatgtgatcgttttgcagt

SEQ ID NO: 244938 - DNA, 25 bp, Probe Sequence
gttaccattcttacctgctatatgt

SEQ ID NO: 244939 - DNA, 25 bp, Probe Sequence
gttactcttacactcttgtcattat

SEQ ID NO: 244940 - DNA, 25 bp, Probe Sequence
gttaccatgtagagcttgactttag

SEQ ID NO: 244941 - DNA, 25 bp, Probe Sequence
gttacctgtcaatgtattctttaga

SEQ ID NO: 244942 - DNA, 25 bp, Probe Sequence
gttacctaaatattgtattctctag

SEQ ID NO: 244943 - DNA, 25 bp, Probe Sequence
gttatctacaaatgttcattccaga

SEQ ID NO: 244944 - DNA, 25 bp, Probe Sequence
gttatctacattaaggctctgtcaa

SEQ ID NO: 244945 - DNA, 25 bp, Probe Sequence
gttatctaataactgcagcacgtta

SEQ ID NO: 244946 - DNA, 25 bp, Probe Sequence
gttatgtgtataactggcaggctta

SEQ ID NO: 244947 - DNA, 25 bp, Probe Sequence
gttagttgaatgactggagagctga

SEQ ID NO: 244948 - DNA, 25 bp, Probe Sequence
gttagtctacatagatggatgattg

SEQ ID NO: 244949 - DNA, 25 bp, Probe Sequence
gttactccactggtagtcatctggt

SEQ ID NO: 244950 - DNA, 25 bp, Probe Sequence
gtttctgccagggctagtattgctt

SEQ ID NO: 244951 - DNA, 25 bp, Probe Sequence
gtttgggcgaggggtgagtgttcag

SEQ ID NO: 244952 - DNA, 25 bp, Probe Sequence
tgtttacgggaggcgcttggttacg

SEQ ID NO: 244953 - DNA, 25 bp, Probe Sequence
gtttacttgacatggcctgggtact

SEQ ID NO: 244954 - DNA, 25 bp, Probe Sequence
gttattcttcactgctcttggtgaa

SEQ ID NO: 244955 - DNA, 25 bp, Probe Sequence
gttattctgctgcccagttttgtaa

SEQ ID NO: 244956 - DNA, 25 bp, Probe Sequence
gtttttgtggctgtatttgattgat

SEQ ID NO: 244957 - DNA, 25 bp, Probe Sequence
gttttctcaagtgtgtctaagtgac

SEQ ID NO: 244958 - DNA, 25 bp, Probe Sequence
gtttccagccgtgactgttgaggtc

SEQ ID NO: 244959 - DNA, 25 bp, Probe Sequence
gttatccagtcggttcgtggagagg

SEQ ID NO: 244960 - DNA, 25 bp, Probe Sequence
gttatgccggtggttaatgtggacg

SEQ ID NO: 244961 - DNA, 25 bp, Probe Sequence
gttatggaggtggttatggtggtca

SEQ ID NO: 244962 - DNA, 25 bp, Probe Sequence
gttatgtgggtggagatggttttca

SEQ ID NO: 244963 - DNA, 25 bp, Probe Sequence
gttatggaatatgagctgcctttta

SEQ ID NO: 244964 - DNA, 25 bp, Probe Sequence
gttagtgcatttgagcacacatttt

SEQ ID NO: 244965 - DNA, 25 bp, Probe Sequence
gttatgatttcccatcgacattttc

SEQ ID NO: 244966 - DNA, 25 bp, Probe Sequence
gttatgacttccaaatagattgata

SEQ ID NO: 244967 - DNA, 25 bp, Probe Sequence
gttagatattgctactataatcaaa

SEQ ID NO: 244968 - DNA, 25 bp, Probe Sequence
gttagtactcagatgctcaatcagc

SEQ ID NO: 244969 - DNA, 25 bp, Probe Sequence
gttatcactcttaggtcagacagcc

SEQ ID NO: 244970 - DNA, 25 bp, Probe Sequence
gttatcagtaagcagctagaggctc

SEQ ID NO: 244971 - DNA, 25 bp, Probe Sequence
gttactgcgagaacacagagggctc

SEQ ID NO: 244972 - DNA, 25 bp, Probe Sequence
gttttaatttagctcggttctcttg

SEQ ID NO: 244973 - DNA, 25 bp, Probe Sequence
gttttagtttacacagtagttctgt

SEQ ID NO: 244974 - DNA, 25 bp, Probe Sequence
gtttctaatgttattttccttctga

SEQ ID NO: 244975 - DNA, 25 bp, Probe Sequence
gttttactttaaggttcgctgtatg

SEQ ID NO: 244976 - DNA, 25 bp, Probe Sequence
gttttcttttaaggtgacccatctg

SEQ ID NO: 244977 - DNA, 25 bp, Probe Sequence
gttttcactttgctggtaaccactt

SEQ ID NO: 244978 - DNA, 25 bp, Probe Sequence
gtttaagtctattatgggcaaccaa

SEQ ID NO: 244979 - DNA, 25 bp, Probe Sequence
gtttaagtctattatgggcaaccaa

SEQ ID NO: 244980 - DNA, 25 bp, Probe Sequence
gttttagtacattataggcccagca

SEQ ID NO: 244981 - DNA, 25 bp, Probe Sequence
gttatgagaaacatttggtgcccag

SEQ ID NO: 244982 - DNA, 25 bp, Probe Sequence
gttaggaaaactatcggctccctgt

SEQ ID NO: 244983 - DNA, 25 bp, Probe Sequence
gtttttaataatatcggccgctgtt

SEQ ID NO: 244984 - DNA, 25 bp, Probe Sequence
gttttccaaaatgcacactgcgggt

SEQ ID NO: 244985 - DNA, 25 bp, Probe Sequence
gtttacagcaattcctggactcggg

SEQ ID NO: 244986 - DNA, 25 bp, Probe Sequence
gttagtcagcattctttgaactgcc

SEQ ID NO: 244987 - DNA, 25 bp, Probe Sequence
gttagatgtgtgttatctgtaacca

SEQ ID NO: 244988 - DNA, 25 bp, Probe Sequence
gttagatgttggtatgtatatttat

SEQ ID NO: 244989 - DNA, 25 bp, Probe Sequence
gttatgctgttactagtgattttag

SEQ ID NO: 244990 - DNA, 25 bp, Probe Sequence
gttatccttcttatatattgatgga

SEQ ID NO: 244991 - DNA, 25 bp, Probe Sequence
gttacctttttgtctattggtctct

SEQ ID NO: 244992 - DNA, 25 bp, Probe Sequence
gttatactttttggtttgacactgt

SEQ ID NO: 244993 - DNA, 25 bp, Probe Sequence
gttttccctgttggtatgtagcctg

SEQ ID NO: 244994 - DNA, 25 bp, Probe Sequence
gttttccaatttgatatttccttca

SEQ ID NO: 244995 - DNA, 25 bp, Probe Sequence
gttttgggaattgtctttgcctgct

SEQ ID NO: 244996 - DNA, 25 bp, Probe Sequence
gttattgtggaatcattttcctgcc

SEQ ID NO: 244997 - DNA, 25 bp, Probe Sequence
gttatttaatcatatttgtgctttc

SEQ ID NO: 244998 - DNA, 25 bp, Probe Sequence
gttttaaatcgcctttgtatctcct

SEQ ID NO: 244999 - DNA, 25 bp, Probe Sequence
gttttgacctgggacttgtgacgcc

SEQ ID NO: 245000 - DNA, 25 bp, Probe Sequence
gttttggccggacctttgagcatac

SEQ ID NO: 245001 - DNA, 25 bp, Probe Sequence
gttttgagcttggaggctttagtca

SEQ ID NO: 245002 - DNA, 25 bp, Probe Sequence
gttttggtgtgggggtgacaggagg

SEQ ID NO: 245003 - DNA, 25 bp, Probe Sequence
gtttttttgaggttggatgcagtgg

SEQ ID NO: 245004 - DNA, 25 bp, Probe Sequence
gttttctacttaattagtcagcggc

SEQ ID NO: 245005 - DNA, 25 bp, Probe Sequence
gtttgtccgcatgttgtaatcgtgc

SEQ ID NO: 245006 - DNA, 25 bp, Probe Sequence
gttatatcacgtggtttgtattgga

SEQ ID NO: 245007 - DNA, 25 bp, Probe Sequence
gttatagaggtctttggactctaaa

SEQ ID NO: 245008 - DNA, 25 bp, Probe Sequence
gtatcatagggaactttcaccttaa

SEQ ID NO: 245009 - DNA, 25 bp, Probe Sequence
gttatatggaatatttctgcactga

SEQ ID NO: 245010 - DNA, 25 bp, Probe Sequence
gttttagcacatctgttatccgtaa

SEQ ID NO: 245011 - DNA, 25 bp, Probe Sequence
gttatttgacgttggtaactgacaa

SEQ ID NO: 245012 - DNA, 25 bp, Probe Sequence
gtttagttggagtgtagcactgaag

SEQ ID NO: 245013 - DNA, 25 bp, Probe Sequence
gttttcttgccttggttgtctggca

SEQ ID NO: 245014 - DNA, 25 bp, Probe Sequence
gtattttatccatggttacttcaaa

SEQ ID NO: 245015 - DNA, 25 bp, Probe Sequence
gttatttttcctcagtgatcttaaa

SEQ ID NO: 245016 - DNA, 25 bp, Probe Sequence
gttattatttcctcatatgtgtaag

SEQ ID NO: 245017 - DNA, 25 bp, Probe Sequence
gttaccatgtgtctttagttatact

SEQ ID NO: 245018 - DNA, 25 bp, Probe Sequence
gttaccagttgtaatttgtctgtat

SEQ ID NO: 245019 - DNA, 25 bp, Probe Sequence
gttatccaactgtatattgtttact

SEQ ID NO: 245020 - DNA, 25 bp, Probe Sequence
gtttgccaagtttgtggtggacctt

SEQ ID NO: 245021 - DNA, 25 bp, Probe Sequence
gttattcaaatttgtacaggactgt

SEQ ID NO: 245022 - DNA, 25 bp, Probe Sequence
gttatgctaacttaatcacagaggt

SEQ ID NO: 245023 - DNA, 25 bp, Probe Sequence
gttatgccttattcatatcacagtt

SEQ ID NO: 245024 - DNA, 25 bp, Probe Sequence
gttagccatagatcattcctttcaa

SEQ ID NO: 245025 - DNA, 25 bp, Probe Sequence
gttaccaagacaatacctgctacag

SEQ ID NO: 245026 - DNA, 25 bp, Probe Sequence
gttaccttgactcatctcagatacg

SEQ ID NO: 245027 - DNA, 25 bp, Probe Sequence
gttacctgtaattatgtcatatggg

SEQ ID NO: 245028 - DNA, 25 bp, Probe Sequence
gttagtcttactttggttgggatgg

SEQ ID NO: 245029 - DNA, 25 bp, Probe Sequence
gttagtcttactttggttgggatgg

SEQ ID NO: 245030 - DNA, 25 bp, Probe Sequence
gttagtattatttatgtgtatcggg

SEQ ID NO: 245031 - DNA, 25 bp, Probe Sequence
gttttgatactttgatggattccag

SEQ ID NO: 245032 - DNA, 25 bp, Probe Sequence
gtttgtgatcacaatagtgtatatg

SEQ ID NO: 245033 - DNA, 25 bp, Probe Sequence
gttattgtgagactgctgtgtaagc

SEQ ID NO: 245034 - DNA, 25 bp, Probe Sequence
gttatcagtgtaatgctttatgaag

SEQ ID NO: 245035 - DNA, 25 bp, Probe Sequence
gttatctgttttcatcttgaggtgg

SEQ ID NO: 245036 - DNA, 25 bp, Probe Sequence
gtttttgtcttccctacaggatgga

SEQ ID NO: 245037 - DNA, 25 bp, Probe Sequence
gttttttcctagctgccaagactgt

SEQ ID NO: 245038 - DNA, 25 bp, Probe Sequence
gttttttttctgctggaaacagact

SEQ ID NO: 245039 - DNA, 25 bp, Probe Sequence
gtttttatttctcgggtgcatttga

SEQ ID NO: 245040 - DNA, 25 bp, Probe Sequence
gttttgtttgctttgggatcttgtt

SEQ ID NO: 245041 - DNA, 25 bp, Probe Sequence
gttagcatatttcttaggatgtttt

SEQ ID NO: 245042 - DNA, 25 bp, Probe Sequence
gttatgtatattgtctcgtgttttt

SEQ ID NO: 245043 - DNA, 25 bp, Probe Sequence
gttattcacactgtcacgtttcaac

SEQ ID NO: 245044 - DNA, 25 bp, Probe Sequence
gtatttaattctgcaggtgttcaag

SEQ ID NO: 245045 - DNA, 25 bp, Probe Sequence
gttttatgtaaggggtttcctgcag

SEQ ID NO: 245046 - DNA, 25 bp, Probe Sequence
gtttaaagaatggggagactcctca

SEQ ID NO: 245047 - DNA, 25 bp, Probe Sequence
gtttcataaaatctgtaactcgcat

SEQ ID NO: 245048 - DNA, 25 bp, Probe Sequence
gtttctaagaaggtgtcaagtgggg

SEQ ID NO: 245049 - DNA, 25 bp, Probe Sequence
gttttccacagcagatatcacctgg

SEQ ID NO: 245050 - DNA, 25 bp, Probe Sequence
gttattcagcctaactatcctgcgg

SEQ ID NO: 245051 - DNA, 25 bp, Probe Sequence
gttttgcacctaaatcgacgggact

SEQ ID NO: 245052 - DNA, 25 bp, Probe Sequence
gttttgcggaacgcgactggcagcc

SEQ ID NO: 245053 - DNA, 25 bp, Probe Sequence
gtttcggttactgcggtggcagctc

SEQ ID NO: 245054 - DNA, 25 bp, Probe Sequence
gtttcttgtaaaggcgtctgacagt

SEQ ID NO: 245055 - DNA, 25 bp, Probe Sequence
gtttatttaaaccccatgtcatgag

SEQ ID NO: 245056 - DNA, 25 bp, Probe Sequence
gttagtcctaaagtgtacttcatga

SEQ ID NO: 245057 - DNA, 25 bp, Probe Sequence
gttattgcctactaagtaatgactg

SEQ ID NO: 245058 - DNA, 25 bp, Probe Sequence
gttattccaacttttgacatggctg

SEQ ID NO: 245059 - DNA, 25 bp, Probe Sequence
gttttctaactttgctgacaccagg

SEQ ID NO: 245060 - DNA, 25 bp, Probe Sequence
gttattaaaatcaggcaattcaggt

SEQ ID NO: 245061 - DNA, 25 bp, Probe Sequence
gttattagaagagtcccatgaaagg

SEQ ID NO: 245062 - DNA, 25 bp, Probe Sequence
gttttgggagttcctgctaaatgac

SEQ ID NO: 245063 - DNA, 25 bp, Probe Sequence
gttttgggttatccattggtataat

SEQ ID NO: 245064 - DNA, 25 bp, Probe Sequence
gttttggactgtttagtagtctttg

SEQ ID NO: 245065 - DNA, 25 bp, Probe Sequence
gtttgggacttatagacttcttgtt

SEQ ID NO: 245066 - DNA, 25 bp, Probe Sequence
gtttccaaattatggcaaattcatg

SEQ ID NO: 245067 - DNA, 25 bp, Probe Sequence
gtttccaaattatggcaaattcatg

SEQ ID NO: 245068 - DNA, 25 bp, Probe Sequence
gttttctaaacgctgcaaatttgca

SEQ ID NO: 245069 - DNA, 25 bp, Probe Sequence
gtttttattcccttgaacataacag

SEQ ID NO: 245070 - DNA, 25 bp, Probe Sequence
gttttcttcctcatggaattgaacc

SEQ ID NO: 245071 - DNA, 25 bp, Probe Sequence
gttttccagaccaggactgaaatcc

SEQ ID NO: 245072 - DNA, 25 bp, Probe Sequence
gttttgccagacacatgggctgata

SEQ ID NO: 245073 - DNA, 25 bp, Probe Sequence
gttattcaagcactccagacttgat

SEQ ID NO: 245074 - DNA, 25 bp, Probe Sequence
gttagctcaattcccaacatctata

SEQ ID NO: 245075 - DNA, 25 bp, Probe Sequence
gttagccagtgtgactatgcaccta

SEQ ID NO: 245076 - DNA, 25 bp, Probe Sequence
gttagccaggatggtctcgatctcc

SEQ ID NO: 245077 - DNA, 25 bp, Probe Sequence
gttagccaggatggtctcgatctcc

SEQ ID NO: 245078 - DNA, 25 bp, Probe Sequence
gttagtcaggatggtctcgatctcc

SEQ ID NO: 245079 - DNA, 25 bp, Probe Sequence
gttataaagcaattccgtcatccaa

SEQ ID NO: 245080 - DNA, 25 bp, Probe Sequence
gttataaaatattccaagatgagcc

SEQ ID NO: 245081 - DNA, 25 bp, Probe Sequence
gttatcagtactcccacaattggcc

SEQ ID NO: 245082 - DNA, 25 bp, Probe Sequence
gttatcagtaccagcagcaaggcag

SEQ ID NO: 245083 - DNA, 25 bp, Probe Sequence
gttatcagtgcttcccgagtgagca

SEQ ID NO: 245084 - DNA, 25 bp, Probe Sequence
gtttcacgctatatcaggatgagat

SEQ ID NO: 245085 - DNA, 25 bp, Probe Sequence
gtttatccgtttgggagaatgaaca

SEQ ID NO: 245086 - DNA, 25 bp, Probe Sequence
gtttagctttttgaggaacagacaa

SEQ ID NO: 245087 - DNA, 25 bp, Probe Sequence
gttatagtatatctggacaagccaa

SEQ ID NO: 245088 - DNA, 25 bp, Probe Sequence
gttatagcctatctatggcagtgga

SEQ ID NO: 245089 - DNA, 25 bp, Probe Sequence
gtatttttagcagagacagggagga

SEQ ID NO: 245090 - DNA, 25 bp, Probe Sequence
gttatttttgtcttacagggtcgat

SEQ ID NO: 245091 - DNA, 25 bp, Probe Sequence
gtttttcattggctccaggtctaat

SEQ ID NO: 245092 - DNA, 25 bp, Probe Sequence
gtttttcattgtcactggacttaat

SEQ ID NO: 245093 - DNA, 25 bp, Probe Sequence
gtttttcttgttgtgtcctggattc

SEQ ID NO: 245094 - DNA, 25 bp, Probe Sequence
gttttatcttttgtttttccatctg

SEQ ID NO: 245095 - DNA, 25 bp, Probe Sequence
gtttgtttttagagacactttcact

SEQ ID NO: 245096 - DNA, 25 bp, Probe Sequence
gtttttttgtaatgcctttgtacag

SEQ ID NO: 245097 - DNA, 25 bp, Probe Sequence
gtttccaaactacagtcctatgtac

SEQ ID NO: 245098 - DNA, 25 bp, Probe Sequence
gtttctaaactacagatgtcaactc

SEQ ID NO: 245099 - DNA, 25 bp, Probe Sequence
gttttggtactaaggtgctcagtcc

SEQ ID NO: 245100 - DNA, 25 bp, Probe Sequence
gttttgtgtactaaaattgctatct

SEQ ID NO: 245101 - DNA, 25 bp, Probe Sequence
gttattttactcacaagagggcttt

SEQ ID NO: 245102 - DNA, 25 bp, Probe Sequence
gttatttttctcaatacgaggcgca

SEQ ID NO: 245103 - DNA, 25 bp, Probe Sequence
gttattcttccacaagagagggctt

SEQ ID NO: 245104 - DNA, 25 bp, Probe Sequence
gtattattttcggaagaggggtgtg

SEQ ID NO: 245105 - DNA, 25 bp, Probe Sequence
gtattgactcttctaccaagttggt

SEQ ID NO: 245106 - DNA, 25 bp, Probe Sequence
gtttcctctgaagtagtcggttggt

SEQ ID NO: 245107 - DNA, 25 bp, Probe Sequence
gttttctctaacagtccacataggt

SEQ ID NO: 245108 - DNA, 25 bp, Probe Sequence
gtctttcccaactgactgtagggtt

SEQ ID NO: 245109 - DNA, 25 bp, Probe Sequence
gttttccctccctctggagaggata

SEQ ID NO: 245110 - DNA, 25 bp, Probe Sequence
gtttctacctaatgctataggggta

SEQ ID NO: 245111 - DNA, 25 bp, Probe Sequence
gtttcccttgtatctatttgtggtg

SEQ ID NO: 245112 - DNA, 25 bp, Probe Sequence
gtttccctggaatctttttgatcga

SEQ ID NO: 245113 - DNA, 25 bp, Probe Sequence
gtctagggtctgtacacttgtttat

SEQ ID NO: 245114 - DNA, 25 bp, Probe Sequence
gtctagggtctgtacacttgtttat

SEQ ID NO: 245115 - DNA, 25 bp, Probe Sequence
gtctagggtctgtacacttgtttat

SEQ ID NO: 245116 - DNA, 25 bp, Probe Sequence
gttatgcagggagtacagttctttt

SEQ ID NO: 245117 - DNA, 25 bp, Probe Sequence
gtttgcaggcaaaacaaatgtaatg

SEQ ID NO: 245118 - DNA, 25 bp, Probe Sequence
gttttggccaagttacagtcaatgg

SEQ ID NO: 245119 - DNA, 25 bp, Probe Sequence
gttttgcgaccacaagcttcatgat

SEQ ID NO: 245120 - DNA, 25 bp, Probe Sequence
gttttgtgccaagtaagtatcatcc

SEQ ID NO: 245121 - DNA, 25 bp, Probe Sequence
gttagggccaagcctagtgatcagg

SEQ ID NO: 245122 - DNA, 25 bp, Probe Sequence
gttaggaaactgctagtaagaaaca

SEQ ID NO: 245123 - DNA, 25 bp, Probe Sequence
gttattaaccagactcagaaagaaa

SEQ ID NO: 245124 - DNA, 25 bp, Probe Sequence
gttattattctagccagtaatggac

SEQ ID NO: 245125 - DNA, 25 bp, Probe Sequence
gttattgatatctcggatacaatag

SEQ ID NO: 245126 - DNA, 25 bp, Probe Sequence
gttattgatatggttgatttcgtag

SEQ ID NO: 245127 - DNA, 25 bp, Probe Sequence
gttattatattgtcgaattcctact

SEQ ID NO: 245128 - DNA, 25 bp, Probe Sequence
gttattgtgcattgtccacaacctg

SEQ ID NO: 245129 - DNA, 25 bp, Probe Sequence
gttagtgtcatcatctgtaagtcag

SEQ ID NO: 245130 - DNA, 25 bp, Probe Sequence
gttatgtgtgtattattccagccag

SEQ ID NO: 245131 - DNA, 25 bp, Probe Sequence
gttatgtgtgtattattccagccag

SEQ ID NO: 245132 - DNA, 25 bp, Probe Sequence
gttttgtgtccgtatccagaaggat

SEQ ID NO: 245133 - DNA, 25 bp, Probe Sequence
gttttggttctctgaagaagcttat

SEQ ID NO: 245134 - DNA, 25 bp, Probe Sequence
gttttggcttcttaaacttcatatt

SEQ ID NO: 245135 - DNA, 25 bp, Probe Sequence
gttatttttcttttatgcatttatt

SEQ ID NO: 245136 - DNA, 25 bp, Probe Sequence
gttagtagttttgtctctataggta

SEQ ID NO: 245137 - DNA, 25 bp, Probe Sequence
gttatttgtttcaccttcaagcctt

SEQ ID NO: 245138 - DNA, 25 bp, Probe Sequence
gttttcgttatatacttatccctat

SEQ ID NO: 245139 - DNA, 25 bp, Probe Sequence
gttttttgctaacaagtattctcta

SEQ ID NO: 245140 - DNA, 25 bp, Probe Sequence
gttttgtctgctaataaattgttac

SEQ ID NO: 245141 - DNA, 25 bp, Probe Sequence
gttttggctgtcatcaacttattat

SEQ ID NO: 245142 - DNA, 25 bp, Probe Sequence
gttttggcatggacaagatctatga

SEQ ID NO: 245143 - DNA, 25 bp, Probe Sequence
gtttcgactggtccagctctgacat

SEQ ID NO: 245144 - DNA, 25 bp, Probe Sequence
gttattaatgtattgcagcctactg

SEQ ID NO: 245145 - DNA, 25 bp, Probe Sequence
gttattagtgtatgctttgaatgta

SEQ ID NO: 245146 - DNA, 25 bp, Probe Sequence
gttattgggctcagtgctgtaggtc

SEQ ID NO: 245147 - DNA, 25 bp, Probe Sequence
gtttttatctctgtgtgcacggctc

SEQ ID NO: 245148 - DNA, 25 bp, Probe Sequence
gttttactgcctgtagcaatggcca

SEQ ID NO: 245149 - DNA, 25 bp, Probe Sequence
gttattatctgggcttatatctggc

SEQ ID NO: 245150 - DNA, 25 bp, Probe Sequence
gttattaatagtcatgcttcatctc

SEQ ID NO: 245151 - DNA, 25 bp, Probe Sequence
gttattagtagtcacttgttttcat

SEQ ID NO: 245152 - DNA, 25 bp, Probe Sequence
gtatattcctaacactttgttcact

SEQ ID NO: 245153 - DNA, 25 bp, Probe Sequence
gttattttaatgctcttttctcact

SEQ ID NO: 245154 - DNA, 25 bp, Probe Sequence
gtttttgtaactcctgattcttcct

SEQ ID NO: 245155 - DNA, 25 bp, Probe Sequence
gttatttctatcttggctgaatcct

SEQ ID NO: 245156 - DNA, 25 bp, Probe Sequence
gttattacctaatggagatccatct

SEQ ID NO: 245157 - DNA, 25 bp, Probe Sequence
gttattacctaatggagatccatct

SEQ ID NO: 245158 - DNA, 25 bp, Probe Sequence
gttttcccaacgtgacattttatat

SEQ ID NO: 245159 - DNA, 25 bp, Probe Sequence
gtttgtcccagtctaacgtgttgat

SEQ ID NO: 245160 - DNA, 25 bp, Probe Sequence
gtttccaccatgattaagggtcttt

SEQ ID NO: 245161 - DNA, 25 bp, Probe Sequence
gtatttcggtacagaagaggtttct

SEQ ID NO: 245162 - DNA, 25 bp, Probe Sequence
gttattcggtgagcggtggtggttt

SEQ ID NO: 245163 - DNA, 25 bp, Probe Sequence
gtttttgagggggctgtggggcttg

SEQ ID NO: 245164 - DNA, 25 bp, Probe Sequence
gtttcattgccggggttggggcaca

SEQ ID NO: 245165 - DNA, 25 bp, Probe Sequence
gtttctttcaaagctatagggcaca

SEQ ID NO: 245166 - DNA, 25 bp, Probe Sequence
gttttatgtcaaacccagggccaag

SEQ ID NO: 245167 - DNA, 25 bp, Probe Sequence
gtttaatgaaactccacggccataa

SEQ ID NO: 245168 - DNA, 25 bp, Probe Sequence
gtttataaagtctcctccgtgataa

SEQ ID NO: 245169 - DNA, 25 bp, Probe Sequence
gtttctagatagacattttcggaag

SEQ ID NO: 245170 - DNA, 25 bp, Probe Sequence
gtttccaatgaggcagtttctggta

SEQ ID NO: 245171 - DNA, 25 bp, Probe Sequence
gtttccaagtttattgccctcaaat

SEQ ID NO: 245172 - DNA, 25 bp, Probe Sequence
gttttccgatttgcttcagcttgta

SEQ ID NO: 245173 - DNA, 25 bp, Probe Sequence
gttttccactagtcatttcacttct

SEQ ID NO: 245174 - DNA, 25 bp, Probe Sequence
gttatgcatcatttcaggagttact

SEQ ID NO: 245175 - DNA, 25 bp, Probe Sequence
gttatctgcatctcattgtttattg

SEQ ID NO: 245176 - DNA, 25 bp, Probe Sequence
gttatctatcttattgttcttgaaa

SEQ ID NO: 245177 - DNA, 25 bp, Probe Sequence
gttatctgtgtatattgttgcttat

SEQ ID NO: 245178 - DNA, 25 bp, Probe Sequence
gttatgatgcttgaaagttctcaat

SEQ ID NO: 245179 - DNA, 25 bp, Probe Sequence
gttttgctcttagggtactcaattt

SEQ ID NO: 245180 - DNA, 25 bp, Probe Sequence
gttttctcttcatgtaagtccttgg

SEQ ID NO: 245181 - DNA, 25 bp, Probe Sequence
gttttcgttatgagaaacatttggt

SEQ ID NO: 245182 - DNA, 25 bp, Probe Sequence
gttttggtttgaaatgaacagattg

SEQ ID NO: 245183 - DNA, 25 bp, Probe Sequence
gttttgggttgatgctgaattaggg

SEQ ID NO: 245184 - DNA, 25 bp, Probe Sequence
gttttgggttgatgctgaattaggg

SEQ ID NO: 245185 - DNA, 25 bp, Probe Sequence
gttttgggttcaggctatgctgctt

SEQ ID NO: 245186 - DNA, 25 bp, Probe Sequence
gttttgggattgtagcgtctgcacc

SEQ ID NO: 245187 - DNA, 25 bp, Probe Sequence
gttttagaatattatgtgtcatact

SEQ ID NO: 245188 - DNA, 25 bp, Probe Sequence
gtttttacatatagctttgcaacct

SEQ ID NO: 245189 - DNA, 25 bp, Probe Sequence
gttttacctatccgtaaactcatca

SEQ ID NO: 245190 - DNA, 25 bp, Probe Sequence
gtttttccttggctcataacatagt

SEQ ID NO: 245191 - DNA, 25 bp, Probe Sequence
gtttttgccctctggcagtacatca

SEQ ID NO: 245192 - DNA, 25 bp, Probe Sequence
gttttctaactcaggagtcagccaa

SEQ ID NO: 245193 - DNA, 25 bp, Probe Sequence
gtttactgaaacgagtggtcagcac

SEQ ID NO: 245194 - DNA, 25 bp, Probe Sequence
gtttacgacctcgatgttggatcag

SEQ ID NO: 245195 - DNA, 25 bp, Probe Sequence
gtttgaagggcaagagactggtaaa

SEQ ID NO: 245196 - DNA, 25 bp, Probe Sequence
gtttgccggcagggaacttcagaaa

SEQ ID NO: 245197 - DNA, 25 bp, Probe Sequence
gtttcacgcctcaggcaattagaca

SEQ ID NO: 245198 - DNA, 25 bp, Probe Sequence
gtttaactccatttaatataacaag

SEQ ID NO: 245199 - DNA, 25 bp, Probe Sequence
gttttactccaggttattgcaataa

SEQ ID NO: 245200 - DNA, 25 bp, Probe Sequence
gttttcactcaaatattttgcctca

SEQ ID NO: 245201 - DNA, 25 bp, Probe Sequence
gttttcactcaaatattttgcctca

SEQ ID NO: 245202 - DNA, 25 bp, Probe Sequence
gttttcactctcttagcaaggtctc

SEQ ID NO: 245203 - DNA, 25 bp, Probe Sequence
gttttccttatgacactggtttcga

SEQ ID NO: 245204 - DNA, 25 bp, Probe Sequence
gttttttttgctacgcaattctcga

SEQ ID NO: 245205 - DNA, 25 bp, Probe Sequence
gttatcttttctgaccattttagta

SEQ ID NO: 245206 - DNA, 25 bp, Probe Sequence
gttatattttctgtgtgcttttttt

SEQ ID NO: 245207 - DNA, 25 bp, Probe Sequence
gtttctactattgtggagtttttct

SEQ ID NO: 245208 - DNA, 25 bp, Probe Sequence
gttttagtattgtgaagttgtgtta

SEQ ID NO: 245209 - DNA, 25 bp, Probe Sequence
gttttctgtattgtgcaactttaca

SEQ ID NO: 245210 - DNA, 25 bp, Probe Sequence
gttttgcgtaactgagactccttga

SEQ ID NO: 245211 - DNA, 25 bp, Probe Sequence
gttttgtggaactgataatggtaat

SEQ ID NO: 245212 - DNA, 25 bp, Probe Sequence
gttattctggcatcttgggaagtaa

SEQ ID NO: 245213 - DNA, 25 bp, Probe Sequence
gttattctgtgacttgctggaggtt

SEQ ID NO: 245214 - DNA, 25 bp, Probe Sequence
gttatgctcgtgccttgtatttgtt

SEQ ID NO: 245215 - DNA, 25 bp, Probe Sequence
gttatgcatggaagcctgacctttt

SEQ ID NO: 245216 - DNA, 25 bp, Probe Sequence
gttttgtggagcctgatctcttttc

SEQ ID NO: 245217 - DNA, 25 bp, Probe Sequence
gtttttccactgtatttcatttgca

SEQ ID NO: 245218 - DNA, 25 bp, Probe Sequence
gtttttccattgcagagtcttaaga

SEQ ID NO: 245219 - DNA, 25 bp, Probe Sequence
gttttcttgtggggaggttacagag

SEQ ID NO: 245220 - DNA, 25 bp, Probe Sequence
gttttcttgtggggaggttacagag

SEQ ID NO: 245221 - DNA, 25 bp, Probe Sequence
gttttccctggaataggataatagg

SEQ ID NO: 245222 - DNA, 25 bp, Probe Sequence
gttttccctggaataggataatagg

SEQ ID NO: 245223 - DNA, 25 bp, Probe Sequence
gttttccctggaataggataatagg

SEQ ID NO: 245224 - DNA, 25 bp, Probe Sequence
gtttacctctgtgtatggtcactag

SEQ ID NO: 245225 - DNA, 25 bp, Probe Sequence
gttatactgttttctatagctactt

SEQ ID NO: 245226 - DNA, 25 bp, Probe Sequence
gttatgattttattctttgtgagtt

SEQ ID NO: 245227 - DNA, 25 bp, Probe Sequence
gtttttccattttcatttgtgtgtg

SEQ ID NO: 245228 - DNA, 25 bp, Probe Sequence
gtttttccattttcatttgtgtgtg

SEQ ID NO: 245229 - DNA, 25 bp, Probe Sequence
gtttttccattttcatttgtgtgtg

SEQ ID NO: 245230 - DNA, 25 bp, Probe Sequence
gtttttatcgtactctttggagatg

SEQ ID NO: 245231 - DNA, 25 bp, Probe Sequence
gtttattcagaatctcctgtgggaa

SEQ ID NO: 245232 - DNA, 25 bp, Probe Sequence
gtttattcagaatctcctgtgggaa

SEQ ID NO: 245233 - DNA, 25 bp, Probe Sequence
gtttatatcagttcacccgtaatga

SEQ ID NO: 245234 - DNA, 25 bp, Probe Sequence
gtttcccagtacacctgtagatatt

SEQ ID NO: 245235 - DNA, 25 bp, Probe Sequence
gtgtttccgtcagtacgcgaaggat

SEQ ID NO: 245236 - DNA, 25 bp, Probe Sequence
gttttcaattcaatacgcgggatag

SEQ ID NO: 245237 - DNA, 25 bp, Probe Sequence
gtttccaagctaaaccagggcaagc

SEQ ID NO: 245238 - DNA, 25 bp, Probe Sequence
gtttccgggacaaccgcatggacag

SEQ ID NO: 245239 - DNA, 25 bp, Probe Sequence
gtttccgggacaaccgcatggacag

SEQ ID NO: 245240 - DNA, 25 bp, Probe Sequence
gtttttagcagaataccacgatgac

SEQ ID NO: 245241 - DNA, 25 bp, Probe Sequence
gttatgctatagattacatgacctg

SEQ ID NO: 245242 - DNA, 25 bp, Probe Sequence
gttatcacataattttaacactgat

SEQ ID NO: 245243 - DNA, 25 bp, Probe Sequence
gttatacacagctttatgatatcaa

SEQ ID NO: 245244 - DNA, 25 bp, Probe Sequence
gttatcagcaattatctagtttgag

SEQ ID NO: 245245 - DNA, 25 bp, Probe Sequence
gttatcagagattgtgtactatttt

SEQ ID NO: 245246 - DNA, 25 bp, Probe Sequence
gttatctcagtccagaaccaatatt

SEQ ID NO: 245247 - DNA, 25 bp, Probe Sequence
gttatctactcccagaaataatcaa

SEQ ID NO: 245248 - DNA, 25 bp, Probe Sequence
gttttgactctgttgagtacatata

SEQ ID NO: 245249 - DNA, 25 bp, Probe Sequence
gttttcagtgtcctgtgtacatata

SEQ ID NO: 245250 - DNA, 25 bp, Probe Sequence
gtttccagcagccaggagtgaacat

SEQ ID NO: 245251 - DNA, 25 bp, Probe Sequence
gtttaagcagactggctgaagcttt

SEQ ID NO: 245252 - DNA, 25 bp, Probe Sequence
gtttcaagagcctgtaaacctctga

SEQ ID NO: 245253 - DNA, 25 bp, Probe Sequence
gtattacaggcttaccaaaaatcaa

SEQ ID NO: 245254 - DNA, 25 bp, Probe Sequence
gtttagaataagcccaagtaagaca

SEQ ID NO: 245255 - DNA, 25 bp, Probe Sequence
gtttctgagagcaaccgcaagtaaa

SEQ ID NO: 245256 - DNA, 25 bp, Probe Sequence
gttttggacctcccatagaagacac

SEQ ID NO: 245257 - DNA, 25 bp, Probe Sequence
gttttggaactgtatctgagtaaca

SEQ ID NO: 245258 - DNA, 25 bp, Probe Sequence
gtttttggacagttgatgggcaaga

SEQ ID NO: 245259 - DNA, 25 bp, Probe Sequence
gttatcctggtcattttgccagaga

SEQ ID NO: 245260 - DNA, 25 bp, Probe Sequence
gtttcctggcacatgtttaggcaaa

SEQ ID NO: 245261 - DNA, 25 bp, Probe Sequence
gtttaccatgcagttgtttaccaaa

SEQ ID NO: 245262 - DNA, 25 bp, Probe Sequence
gttatattcactggttttacacaga

SEQ ID NO: 245263 - DNA, 25 bp, Probe Sequence
gtattagtcgtcgctatgtacctgg

SEQ ID NO: 245264 - DNA, 25 bp, Probe Sequence
gtttctgtcggtgttcacacttggc

SEQ ID NO: 245265 - DNA, 25 bp, Probe Sequence
gttttgctaggtgttcatcctataa

SEQ ID NO: 245266 - DNA, 25 bp, Probe Sequence
gtttttatgaggttttgccaagcaa

SEQ ID NO: 245267 - DNA, 25 bp, Probe Sequence
gtttttagcagagtttgtgaccaaa

SEQ ID NO: 245268 - DNA, 25 bp, Probe Sequence
gttatttatcaatttttcccagtat

SEQ ID NO: 245269 - DNA, 25 bp, Probe Sequence
gttatttatccatttttcccagtat

SEQ ID NO: 245270 - DNA, 25 bp, Probe Sequence
gttattatttgctatctttcccact

SEQ ID NO: 245271 - DNA, 25 bp, Probe Sequence
gttatcttcttgctattttgctctg

SEQ ID NO: 245272 - DNA, 25 bp, Probe Sequence
gttattgtgttccattttaactggg

SEQ ID NO: 245273 - DNA, 25 bp, Probe Sequence
gttttgtgactcatcttttactggt

SEQ ID NO: 245274 - DNA, 25 bp, Probe Sequence
gtttttcagcacttgggattggggt

SEQ ID NO: 245275 - DNA, 25 bp, Probe Sequence
gttttgaaatgcttgtggattgagg

SEQ ID NO: 245276 - DNA, 25 bp, Probe Sequence
gtttagcacaatgagtagcaagggg

SEQ ID NO: 245277 - DNA, 25 bp, Probe Sequence
gtcattggtcaataggggagggtag

SEQ ID NO: 245278 - DNA, 25 bp, Probe Sequence
gttttgctggcataggtgacagggt

SEQ ID NO: 245279 - DNA, 25 bp, Probe Sequence
gttttgtgagcttcttatggcagga

SEQ ID NO: 245280 - DNA, 25 bp, Probe Sequence
cgtcacgctgaatatatgaccacgc

SEQ ID NO: 245281 - DNA, 25 bp, Probe Sequence
acgctgaatatatgaccacgctcac

SEQ ID NO: 245282 - DNA, 25 bp, Probe Sequence
ctgaatatatgaccacgctcacccg

SEQ ID NO: 245283 - DNA, 25 bp, Probe Sequence
gaatatatgaccacgctcacccgca

SEQ ID NO: 245284 - DNA, 25 bp, Probe Sequence
cccgcatgattcccgcgccgctgct

SEQ ID NO: 245285 - DNA, 25 bp, Probe Sequence
catgattcccgcgccgctgctggga

SEQ ID NO: 245286 - DNA, 25 bp, Probe Sequence
gattcccgcgccgctgctgggagag

SEQ ID NO: 245287 - DNA, 25 bp, Probe Sequence
cgcgccgctgctgggagagatcccc

SEQ ID NO: 245288 - DNA, 25 bp, Probe Sequence
ccgctgctgggagagatcccctggc

SEQ ID NO: 245289 - DNA, 25 bp, Probe Sequence
ctgctgggagagatcccctggcttg

SEQ ID NO: 245290 - DNA, 25 bp, Probe Sequence
gctgggagagatcccctggcttgca

SEQ ID NO: 245291 - DNA, 25 bp, Probe Sequence
ggagagatcccctggcttgcagaaa

SEQ ID NO: 245292 - DNA, 25 bp, Probe Sequence
gagatcccctggcttgcagaaaatc

SEQ ID NO: 245293 - DNA, 25 bp, Probe Sequence
atcccctggcttgcagaaaatccag

SEQ ID NO: 245294 - DNA, 25 bp, Probe Sequence
atttgcctgcattaccggtcgatgc

SEQ ID NO: 245295 - DNA, 25 bp, Probe Sequence
taccggtcgatgcaacgagtgatga

SEQ ID NO: 245296 - DNA, 25 bp, Probe Sequence
gagtgatgaggttcgcaagaacctg

SEQ ID NO: 245297 - DNA, 25 bp, Probe Sequence
gcaagaacctgatggacatgttcag

SEQ ID NO: 245298 - DNA, 25 bp, Probe Sequence
gttttcatctcaagcggtttgagca

SEQ ID NO: 245299 - DNA, 25 bp, Probe Sequence
gttttcactaatctgttgagagcta

SEQ ID NO: 245300 - DNA, 25 bp, Probe Sequence
gttttcaacagtcttgctgaattaa

SEQ ID NO: 245301 - DNA, 25 bp, Probe Sequence
gttttcataagtattatgtctcttc

SEQ ID NO: 245302 - DNA, 25 bp, Probe Sequence
gttattgtactgtcactttgttctt

SEQ ID NO: 245303 - DNA, 25 bp, Probe Sequence
gttatcttacgctatttctgttggt

SEQ ID NO: 245304 - DNA, 25 bp, Probe Sequence
gttttgtactattggtgtgttggtg

SEQ ID NO: 245305 - DNA, 25 bp, Probe Sequence
gttattttctgattgtggtgttgag

SEQ ID NO: 245306 - DNA, 25 bp, Probe Sequence
gttattttctgactgctggattctg

SEQ ID NO: 245307 - DNA, 25 bp, Probe Sequence
gttttctatctacgcttgattcaca

SEQ ID NO: 245308 - DNA, 25 bp, Probe Sequence
gttttcaactacaataagtgcactg

SEQ ID NO: 245309 - DNA, 25 bp, Probe Sequence
gtttacaaacacatcacctgacgtc

SEQ ID NO: 245310 - DNA, 25 bp, Probe Sequence
gttataaagtcatatccacttcttc

SEQ ID NO: 245311 - DNA, 25 bp, Probe Sequence
gttataatattgtaatctcagttca

SEQ ID NO: 245312 - DNA, 25 bp, Probe Sequence
gttattgttgttacatatgagctat

SEQ ID NO: 245313 - DNA, 25 bp, Probe Sequence
gttttgttttcctgcagctgttgac

SEQ ID NO: 245314 - DNA, 25 bp, Probe Sequence
gttttggtttatttgcatcttagaa

SEQ ID NO: 245315 - DNA, 25 bp, Probe Sequence
gtttaggttggttttttgatgtcat

SEQ ID NO: 245316 - DNA, 25 bp, Probe Sequence
gttttgttttgtttttgagacatcg

SEQ ID NO: 245317 - DNA, 25 bp, Probe Sequence
gttttggtgcacctttttgaaatgc

SEQ ID NO: 245318 - DNA, 25 bp, Probe Sequence
gttttgggccatcaatcggaaactc

SEQ ID NO: 245319 - DNA, 25 bp, Probe Sequence
gttttaagcacagactcaggaaaat

SEQ ID NO: 245320 - DNA, 25 bp, Probe Sequence
gtttctcacccagcacctggggaga

SEQ ID NO: 245321 - DNA, 25 bp, Probe Sequence
gttttattgccattcaactagggaa

SEQ ID NO: 245322 - DNA, 25 bp, Probe Sequence
gttattgttgacatgaatctatgcg

SEQ ID NO: 245323 - DNA, 25 bp, Probe Sequence
gttttgtggatagtactgctgtagg

SEQ ID NO: 245324 - DNA, 25 bp, Probe Sequence
gttattgtgaaagaatctctgacag

SEQ ID NO: 245325 - DNA, 25 bp, Probe Sequence
gttattctacacacagatcttgaca

SEQ ID NO: 245326 - DNA, 25 bp, Probe Sequence
gttatactgtccctggagcttcatc

SEQ ID NO: 245327 - DNA, 25 bp, Probe Sequence
gttatactccagccatttgctgtct

SEQ ID NO: 245328 - DNA, 25 bp, Probe Sequence
gttatactctagccaagattgactg

SEQ ID NO: 245329 - DNA, 25 bp, Probe Sequence
gttatactctgcttgctacatcata

SEQ ID NO: 245330 - DNA, 25 bp, Probe Sequence
gtttgaagtgccctcgctcaaactc

SEQ ID NO: 245331 - DNA, 25 bp, Probe Sequence
gtttaaagttggcctctatcctaat

SEQ ID NO: 245332 - DNA, 25 bp, Probe Sequence
gtttacaagggatattgacctgtag

SEQ ID NO: 245333 - DNA, 25 bp, Probe Sequence
gtttacatagggaataacccaggat

SEQ ID NO: 245334 - DNA, 25 bp, Probe Sequence
gtttcagacaagcaattacccagtt

SEQ ID NO: 245335 - DNA, 25 bp, Probe Sequence
gtttcagagaatctttaccctccat

SEQ ID NO: 245336 - DNA, 25 bp, Probe Sequence
gttttaaaggctgtaccaatcctct

SEQ ID NO: 245337 - DNA, 25 bp, Probe Sequence
gttatttaaggttatcaccaatcta

SEQ ID NO: 245338 - DNA, 25 bp, Probe Sequence
gtttttcatagttttcaccactgtg

SEQ ID NO: 245339 - DNA, 25 bp, Probe Sequence
gtttttcttaattccatggccatgg

SEQ ID NO: 245340 - DNA, 25 bp, Probe Sequence
gtttttcttaattccatggccatgg

SEQ ID NO: 245341 - DNA, 25 bp, Probe Sequence
gttttgtgaggatttttgtggcatg

SEQ ID NO: 245342 - DNA, 25 bp, Probe Sequence
gttttgagagacttcctcttggctc

SEQ ID NO: 245343 - DNA, 25 bp, Probe Sequence
gttttgaagatgtttccattcctga

SEQ ID NO: 245344 - DNA, 25 bp, Probe Sequence
gttttgaagaatttagctactgcat

SEQ ID NO: 245345 - DNA, 25 bp, Probe Sequence
gttttgtaggattcaacaaccacca

SEQ ID NO: 245346 - DNA, 25 bp, Probe Sequence
gttttacggcaatatcatcaccaca

SEQ ID NO: 245347 - DNA, 25 bp, Probe Sequence
gtttacctgtgcaacaaatctgccc

SEQ ID NO: 245348 - DNA, 25 bp, Probe Sequence
gtttacctagaccaaaagcctgcat

SEQ ID NO: 245349 - DNA, 25 bp, Probe Sequence
gtttgacgacgaaaacacagcccag

SEQ ID NO: 245350 - DNA, 25 bp, Probe Sequence
ggtaactacgttttgcacagaggca

SEQ ID NO: 245351 - DNA, 25 bp, Probe Sequence
gtttactaagttttctagtggacat

SEQ ID NO: 245352 - DNA, 25 bp, Probe Sequence
gtttactgacacttacatacttgga

SEQ ID NO: 245353 - DNA, 25 bp, Probe Sequence
gttttgctaccaatatcatacggga

SEQ ID NO: 245354 - DNA, 25 bp, Probe Sequence
gtttgccgacctaactcaggtggaa

SEQ ID NO: 245355 - DNA, 25 bp, Probe Sequence
gtttaggcacctagaaggctggtta

SEQ ID NO: 245356 - DNA, 25 bp, Probe Sequence
gtttcggcagcgtagccagctgctg

SEQ ID NO: 245357 - DNA, 25 bp, Probe Sequence
gtttcggcagcgtagccagctgctg

SEQ ID NO: 245358 - DNA, 25 bp, Probe Sequence
gtttcggcagcgtagccagctgctg

SEQ ID NO: 245359 - DNA, 25 bp, Probe Sequence
gtttcagagagcacagggttggggg

SEQ ID NO: 245360 - DNA, 25 bp, Probe Sequence
gtttcagatgcagccatgggtaggt

SEQ ID NO: 245361 - DNA, 25 bp, Probe Sequence
gtattcagagcatctgtctttgcag

SEQ ID NO: 245362 - DNA, 25 bp, Probe Sequence
gtttcactcacagtgtcactgtcag

SEQ ID NO: 245363 - DNA, 25 bp, Probe Sequence
gtttatctcaactcatcttagctcc

SEQ ID NO: 245364 - DNA, 25 bp, Probe Sequence
gtttcaccatacttcattcagacca

SEQ ID NO: 245365 - DNA, 25 bp, Probe Sequence
gtttacactcactttatagagcaag

SEQ ID NO: 245366 - DNA, 25 bp, Probe Sequence
gtttccccacatgtgaagacaggta

SEQ ID NO: 245367 - DNA, 25 bp, Probe Sequence
gtttctgcccagcaaaagcacgtat

SEQ ID NO: 245368 - DNA, 25 bp, Probe Sequence
gtttcagcacatagtcaaagaacca

SEQ ID NO: 245369 - DNA, 25 bp, Probe Sequence
gttttgctgatgatcaataactcca

SEQ ID NO: 245370 - DNA, 25 bp, Probe Sequence
gtttttgagcctaaatatcccagtt

SEQ ID NO: 245371 - DNA, 25 bp, Probe Sequence
gtttttagactaatatacaacttca

SEQ ID NO: 245372 - DNA, 25 bp, Probe Sequence
gttattcattggtatacaacaattt

SEQ ID NO: 245373 - DNA, 25 bp, Probe Sequence
gttattattggttctacacatgttt

SEQ ID NO: 245374 - DNA, 25 bp, Probe Sequence
gtttgaatgcggtgtagaaatgttt

SEQ ID NO: 245375 - DNA, 25 bp, Probe Sequence
gtttaggagtgtctaagttttgtca

SEQ ID NO: 245376 - DNA, 25 bp, Probe Sequence
gtttcagcggttcaactttataata

SEQ ID NO: 245377 - DNA, 25 bp, Probe Sequence
gtttcagcggttcaactttataata

SEQ ID NO: 245378 - DNA, 25 bp, Probe Sequence
gtttcagcggttcaactttataata

SEQ ID NO: 245379 - DNA, 25 bp, Probe Sequence
gtttcaaggctctgcaactgtggat

SEQ ID NO: 245380 - DNA, 25 bp, Probe Sequence
gttttgcaggtctagcagagttgtg

SEQ ID NO: 245381 - DNA, 25 bp, Probe Sequence
gttttagttgctcggcactgttggt

SEQ ID NO: 245382 - DNA, 25 bp, Probe Sequence
gttttgttttggactctctgtggtc

SEQ ID NO: 245383 - DNA, 25 bp, Probe Sequence
gttttggtggggactttgatggtgt

SEQ ID NO: 245384 - DNA, 25 bp, Probe Sequence
gttttgggtgtgcatgtttggagtt

SEQ ID NO: 245385 - DNA, 25 bp, Probe Sequence
gttttggcagtaaaatactctgttt

SEQ ID NO: 245386 - DNA, 25 bp, Probe Sequence
gttttgtgcttccaaatcacttttt

SEQ ID NO: 245387 - DNA, 25 bp, Probe Sequence
gttttgattagttagtatgcttttt

SEQ ID NO: 245388 - DNA, 25 bp, Probe Sequence
gtttaattcaactgcttccctatat

SEQ ID NO: 245389 - DNA, 25 bp, Probe Sequence
gtttatttatatgccaacacgttat

SEQ ID NO: 245390 - DNA, 25 bp, Probe Sequence
gtttatttctaggcctactcaggta

SEQ ID NO: 245391 - DNA, 25 bp, Probe Sequence
gtttatatgctttgacctactaact

SEQ ID NO: 245392 - DNA, 25 bp, Probe Sequence
gttttgtttcaagtcatcataaact

SEQ ID NO: 245393 - DNA, 25 bp, Probe Sequence
gttttgtcatcttactagcaacaac

SEQ ID NO: 245394 - DNA, 25 bp, Probe Sequence
gttattatcacttaaaaacctgcga

SEQ ID NO: 245395 - DNA, 25 bp, Probe Sequence
gttttatgacgagacagaagcccgg

SEQ ID NO: 245396 - DNA, 25 bp, Probe Sequence
gtttatattcacgtacagcaagcca

SEQ ID NO: 245397 - DNA, 25 bp, Probe Sequence
gttttcatccactatccagtactga

SEQ ID NO: 245398 - DNA, 25 bp, Probe Sequence
gttttcttcatgtttcactagctca

SEQ ID NO: 245399 - DNA, 25 bp, Probe Sequence
gtattctctaaacacctgactctag

SEQ ID NO: 245400 - DNA, 25 bp, Probe Sequence
gtatgacctggatgccgacgacatc

SEQ ID NO: 245401 - DNA, 25 bp, Probe Sequence
gtttcctggccaccagaagatccgc

SEQ ID NO: 245402 - DNA, 25 bp, Probe Sequence
gtttgctacgaacaaaacgcagcgc

SEQ ID NO: 245403 - DNA, 25 bp, Probe Sequence
gtttctgttgaataacacacgtgga

SEQ ID NO: 245404 - DNA, 25 bp, Probe Sequence
gtttgttctgcattcaaaaggacgg

SEQ ID NO: 245405 - DNA, 25 bp, Probe Sequence
gtttatgtcagttacatacaggatc

SEQ ID NO: 245406 - DNA, 25 bp, Probe Sequence
gttttgggcagtacatacatgggcg

SEQ ID NO: 245407 - DNA, 25 bp, Probe Sequence
gttttggcagtacatcaatgggcgt

SEQ ID NO: 245408 - DNA, 25 bp, Probe Sequence
gtttaaagtgatctcagaggggccc

SEQ ID NO: 245409 - DNA, 25 bp, Probe Sequence
gttttcaggaggttcagggaggcca

SEQ ID NO: 245410 - DNA, 25 bp, Probe Sequence
gttttcctggtgtctatattgggcc

SEQ ID NO: 245411 - DNA, 25 bp, Probe Sequence
gttttgtttgtgtcgatatgttcgg

SEQ ID NO: 245412 - DNA, 25 bp, Probe Sequence
gttttgttttgtctatatgtgcggc

SEQ ID NO: 245413 - DNA, 25 bp, Probe Sequence
gttttgcgttttatacatgaggtca

SEQ ID NO: 245414 - DNA, 25 bp, Probe Sequence
gttttgtttttgagacatcgagtct

SEQ ID NO: 245415 - DNA, 25 bp, Probe Sequence
gtttattttttagactgagcacttt

SEQ ID NO: 245416 - DNA, 25 bp, Probe Sequence
gtttcattttacaagaactatcctg

SEQ ID NO: 245417 - DNA, 25 bp, Probe Sequence
gtttcatgagttacaagtgttaggt

SEQ ID NO: 245418 - DNA, 25 bp, Probe Sequence
gtttagactttggggtctacgtgca

SEQ ID NO: 245419 - DNA, 25 bp, Probe Sequence
gtttggagttatgaggggaagtgaa

SEQ ID NO: 245420 - DNA, 25 bp, Probe Sequence
gttttgatgtattataggcaggaag

SEQ ID NO: 245421 - DNA, 25 bp, Probe Sequence
gttttatgccttccaggggacagtt

SEQ ID NO: 245422 - DNA, 25 bp, Probe Sequence
gttttatccttgtgggtcagatttc

SEQ ID NO: 245423 - DNA, 25 bp, Probe Sequence
gtttttatcttgtacggtcactgtt

SEQ ID NO: 245424 - DNA, 25 bp, Probe Sequence
gtttcttatttggccaggtagctct

SEQ ID NO: 245425 - DNA, 25 bp, Probe Sequence
gttttattggtggtagctgcttgct

SEQ ID NO: 245426 - DNA, 25 bp, Probe Sequence
gttttgtacgtggtaggtgttcaat

SEQ ID NO: 245427 - DNA, 25 bp, Probe Sequence
gtttgtgtacctgtatttgtttgaa

SEQ ID NO: 245428 - DNA, 25 bp, Probe Sequence
gtttgatggacaccgttttctagga

SEQ ID NO: 245429 - DNA, 25 bp, Probe Sequence
gtttatcgaccagtttgaatctatt

SEQ ID NO: 245430 - DNA, 25 bp, Probe Sequence
gttttctactccaattcataaatct

SEQ ID NO: 245431 - DNA, 25 bp, Probe Sequence
gttttcaacctcatgtaatttgtgc

SEQ ID NO: 245432 - DNA, 25 bp, Probe Sequence
gttttaaatattggacatactggtt

SEQ ID NO: 245433 - DNA, 25 bp, Probe Sequence
gttttccatttatagcaagattgtt

SEQ ID NO: 245434 - DNA, 25 bp, Probe Sequence
gttttgccattttaacatttctgta

SEQ ID NO: 245435 - DNA, 25 bp, Probe Sequence
gtttttatctgttaacaccactgta

SEQ ID NO: 245436 - DNA, 25 bp, Probe Sequence
gtttttctgcattatacaaccctaa

SEQ ID NO: 245437 - DNA, 25 bp, Probe Sequence
gttttcctcctatcaaggcagctat

SEQ ID NO: 245438 - DNA, 25 bp, Probe Sequence
gttttcctcctatcaaggcagctat

SEQ ID NO: 245439 - DNA, 25 bp, Probe Sequence
gttttgcctcctgatttggagtatt

SEQ ID NO: 245440 - DNA, 25 bp, Probe Sequence
gttttgtttcatgatttcgttaatt

SEQ ID NO: 245441 - DNA, 25 bp, Probe Sequence
gtttcttgttcattgactttggtac

SEQ ID NO: 245442 - DNA, 25 bp, Probe Sequence
gttttctgaccacgactttgcagga

SEQ ID NO: 245443 - DNA, 25 bp, Probe Sequence
gttttctgttaggactcagttgcaa

SEQ ID NO: 245444 - DNA, 25 bp, Probe Sequence
gtttgtatggaatgagtagttgcaa

SEQ ID NO: 245445 - DNA, 25 bp, Probe Sequence
gtttcttcacgatggaagttgctaa

SEQ ID NO: 245446 - DNA, 25 bp, Probe Sequence
gtttgcttccgatgattaaatctaa

SEQ ID NO: 245447 - DNA, 25 bp, Probe Sequence
gtttttatggaaattatcagttaca

SEQ ID NO: 245448 - DNA, 25 bp, Probe Sequence
gtttttgattgtatactgagtgtcc

SEQ ID NO: 245449 - DNA, 25 bp, Probe Sequence
gttttgtattcttttgtgtgtgttc

SEQ ID NO: 245450 - DNA, 25 bp, Probe Sequence
gttttagatctcttttcatttgtca

SEQ ID NO: 245451 - DNA, 25 bp, Probe Sequence
gttttgcttcattgcttatcattag

SEQ ID NO: 245452 - DNA, 25 bp, Probe Sequence
gttttgtcatcttccatatttgcag

SEQ ID NO: 245453 - DNA, 25 bp, Probe Sequence
gttttgatccagtcctgttgatcat

SEQ ID NO: 245454 - DNA, 25 bp, Probe Sequence
gttttcttcaatgctgctgctgtgt

SEQ ID NO: 245455 - DNA, 25 bp, Probe Sequence
gttttattcagatctgggtggctca

SEQ ID NO: 245456 - DNA, 25 bp, Probe Sequence
gttttgtgctggtgctgaggatggc

SEQ ID NO: 245457 - DNA, 25 bp, Probe Sequence
gtttatggtgggactagcacattca

SEQ ID NO: 245458 - DNA, 25 bp, Probe Sequence
gtttactggggtgaacatctttcca

SEQ ID NO: 245459 - DNA, 25 bp, Probe Sequence
gtttcccgggatatatattctctcc

SEQ ID NO: 245460 - DNA, 25 bp, Probe Sequence
gtttccgcagaaatcctatttcagt

SEQ ID NO: 245461 - DNA, 25 bp, Probe Sequence
gtttatcgtaatagcctctgcattg

SEQ ID NO: 245462 - DNA, 25 bp, Probe Sequence
gttttcagaagtggccatcgagagg

SEQ ID NO: 245463 - DNA, 25 bp, Probe Sequence
gttttgtgaaggcaatgcgggcaca

SEQ ID NO: 245464 - DNA, 25 bp, Probe Sequence
gttttgagtagacacaccagctcct

SEQ ID NO: 245465 - DNA, 25 bp, Probe Sequence
gtttaagtagtgtatcctgcaccta

SEQ ID NO: 245466 - DNA, 25 bp, Probe Sequence
gttttactagtgaattccacaaaca

SEQ ID NO: 245467 - DNA, 25 bp, Probe Sequence
gtttctactattcagttcctcaaac

SEQ ID NO: 245468 - DNA, 25 bp, Probe Sequence
gtttctttacttattcaatgaagcg

SEQ ID NO: 245469 - DNA, 25 bp, Probe Sequence
gtttttggactaagccttcaggagg

SEQ ID NO: 245470 - DNA, 25 bp, Probe Sequence
gttttaatgaccagcacgcaaggca

SEQ ID NO: 245471 - DNA, 25 bp, Probe Sequence
gttttgattgacatccaagtggaga

SEQ ID NO: 245472 - DNA, 25 bp, Probe Sequence
gttttgcagtacatccatgggcgtg

SEQ ID NO: 245473 - DNA, 25 bp, Probe Sequence
gttttgcagtacatcaatgggcgtg

SEQ ID NO: 245474 - DNA, 25 bp, Probe Sequence
gttttgcagtacatcaatgggcgtg

SEQ ID NO: 245475 - DNA, 25 bp, Probe Sequence
gttttgcagtacatcatgggcgtgg

SEQ ID NO: 245476 - DNA, 25 bp, Probe Sequence
gttttgcagtacatcatggcgtgga

SEQ ID NO: 245477 - DNA, 25 bp, Probe Sequence
gtttctggtatggtcaagcttgtaa

SEQ ID NO: 245478 - DNA, 25 bp, Probe Sequence
gttttgctgcttggtagcactttaa

SEQ ID NO: 245479 - DNA, 25 bp, Probe Sequence
gttttctgtgtggccatcatgttta

SEQ ID NO: 245480 - DNA, 25 bp, Probe Sequence
gtttttgagatggagtctctactaa

SEQ ID NO: 245481 - DNA, 25 bp, Probe Sequence
gtttttgaggagctcttattttcct

SEQ ID NO: 245482 - DNA, 25 bp, Probe Sequence
gttttcttgagagcctgtagatttc

SEQ ID NO: 245483 - DNA, 25 bp, Probe Sequence
gtttagctaaacgctgttgaacatt

SEQ ID NO: 245484 - DNA, 25 bp, Probe Sequence
gttttgtaacctccagtttgcactt

SEQ ID NO: 245485 - DNA, 25 bp, Probe Sequence
gtttggacaaacagatgatattact

SEQ ID NO: 245486 - DNA, 25 bp, Probe Sequence
gtttctcaaaacagggagtacttca

SEQ ID NO: 245487 - DNA, 25 bp, Probe Sequence
gttttcatagcttttggaaatactt

SEQ ID NO: 245488 - DNA, 25 bp, Probe Sequence
gtttcagcaagcagtatggcaaaat

SEQ ID NO: 245489 - DNA, 25 bp, Probe Sequence
gtttatgcagacacacaagagatta

SEQ ID NO: 245490 - DNA, 25 bp, Probe Sequence
gtttatgcagacacacaagagatta

SEQ ID NO: 245491 - DNA, 25 bp, Probe Sequence
gttttcatgtagcagcaatgcagat

SEQ ID NO: 245492 - DNA, 25 bp, Probe Sequence
gttttttgcagcagcatgaatgcag

SEQ ID NO: 245493 - DNA, 25 bp, Probe Sequence
gtttttcgcactgcaggacagcaac

SEQ ID NO: 245494 - DNA, 25 bp, Probe Sequence
gtttatgttcctgaggcagcacttt

SEQ ID NO: 245495 - DNA, 25 bp, Probe Sequence
gtttttgtcctgtgtagatatttac

SEQ ID NO: 245496 - DNA, 25 bp, Probe Sequence
gttttttggtgctgtagtatatgat

SEQ ID NO: 245497 - DNA, 25 bp, Probe Sequence
gtttttctgaacctgatagttttca

SEQ ID NO: 245498 - DNA, 25 bp, Probe Sequence
gtttttctgagatcttcaattaatc

SEQ ID NO: 245499 - DNA, 25 bp, Probe Sequence
gtttttgtgaccgttctttggagca

SEQ ID NO: 245500 - DNA, 25 bp, Probe Sequence
gtttttggaatctacatgtcttggg

SEQ ID NO: 245501 - DNA, 25 bp, Probe Sequence
gttttgctgaaatcctgttttgtat

SEQ ID NO: 245502 - DNA, 25 bp, Probe Sequence
gttttgcctagaatcctgttttctt

SEQ ID NO: 245503 - DNA, 25 bp, Probe Sequence
gtttgtcctaggactgccatctttt

SEQ ID NO: 245504 - DNA, 25 bp, Probe Sequence
gttttacaccggtcacattttctat

SEQ ID NO: 245505 - DNA, 25 bp, Probe Sequence
gtttctattacacgacactttttga

SEQ ID NO: 245506 - DNA, 25 bp, Probe Sequence
gtttctgtataataccttctttgga

SEQ ID NO: 245507 - DNA, 25 bp, Probe Sequence
gtttagtaacagtgcagattccacg

SEQ ID NO: 245508 - DNA, 25 bp, Probe Sequence
gtttagtgaaccgtcagatcgcctg

SEQ ID NO: 245509 - DNA, 25 bp, Probe Sequence
gtttagtgaaccgtcagatcgcctg

SEQ ID NO: 245510 - DNA, 25 bp, Probe Sequence
gtttagtgaaccgtcagatcgcctg

SEQ ID NO: 245511 - DNA, 25 bp, Probe Sequence
gtttagtgaaccgtcagatcgcctg

SEQ ID NO: 245512 - DNA, 25 bp, Probe Sequence
gtttagtgaaccgtcagatcgcctg

SEQ ID NO: 245513 - DNA, 25 bp, Probe Sequence
gtttagtgaaccgtcagatcgcctg

SEQ ID NO: 245514 - DNA, 25 bp, Probe Sequence
gtttagtgaaccgtcagatcgcctg

SEQ ID NO: 245515 - DNA, 25 bp, Probe Sequence
gtttagtgaaccgtcagatcgcctg

SEQ ID NO: 245516 - DNA, 25 bp, Probe Sequence
gtttagtgaaccgtcagatcgcctg

SEQ ID NO: 245517 - DNA, 25 bp, Probe Sequence
gtttagtgaaccgtcagatcgcctg

SEQ ID NO: 245518 - DNA, 25 bp, Probe Sequence
gtttagtgaaccgtcagatcgcctg

SEQ ID NO: 245519 - DNA, 25 bp, Probe Sequence
gtttagtgaaccgtcagatcgcctg

SEQ ID NO: 245520 - DNA, 25 bp, Probe Sequence
gtttagtgaaccgtcagatcgcctg

SEQ ID NO: 245521 - DNA, 25 bp, Probe Sequence
gtttagtgaaccgtcagatcgcctg

SEQ ID NO: 245522 - DNA, 25 bp, Probe Sequence
gtttagtgaaccgtcagatcgcctg

SEQ ID NO: 245523 - DNA, 25 bp, Probe Sequence
gtttagtgaaccgtcagatcgcctg

SEQ ID NO: 245524 - DNA, 25 bp, Probe Sequence
gtttagtgaaccgtcagatcgcctg

SEQ ID NO: 245525 - DNA, 25 bp, Probe Sequence
gtttagtgaaccgtcagatcgcctg

SEQ ID NO: 245526 - DNA, 25 bp, Probe Sequence
gtttagtgaaccgtcagatcgcctg

SEQ ID NO: 245527 - DNA, 25 bp, Probe Sequence
gtttagtgaaccgtcagatcgcctg

SEQ ID NO: 245528 - DNA, 25 bp, Probe Sequence
gtttagtgaaccgtcagatcgcctg

SEQ ID NO: 245529 - DNA, 25 bp, Probe Sequence
gtttagtgaaccgtcagatcgcctg

SEQ ID NO: 245530 - DNA, 25 bp, Probe Sequence
gtttagtgaaccgtcagatcgcctg

SEQ ID NO: 245531 - DNA, 25 bp, Probe Sequence
gtttagtgaaccgtcagatcgcctg

SEQ ID NO: 245532 - DNA, 25 bp, Probe Sequence
gtttagtgaaccgtcagatcgcctg

SEQ ID NO: 245533 - DNA, 25 bp, Probe Sequence
gtttagtgaaccgtcagatcgcctg

SEQ ID NO: 245534 - DNA, 25 bp, Probe Sequence
gtttagtgaaccgtcagatcgcctg

SEQ ID NO: 245535 - DNA, 25 bp, Probe Sequence
gtttagtgaaccgtcagatcgcctg

SEQ ID NO: 245536 - DNA, 25 bp, Probe Sequence
gtttagtgaaccgtcagatcgcctg

SEQ ID NO: 245537 - DNA, 25 bp, Probe Sequence
gtttagtgaaccgtcagatcgcctg

SEQ ID NO: 245538 - DNA, 25 bp, Probe Sequence
gtttagtgaaccgtcagatcgcctg

SEQ ID NO: 245539 - DNA, 25 bp, Probe Sequence
gtttagtgaaccgtcagatcgcctg

SEQ ID NO: 245540 - DNA, 25 bp, Probe Sequence
gtttagtgaaccgtcagatcgcctg

SEQ ID NO: 245541 - DNA, 25 bp, Probe Sequence
gtttagtgaaccgtcagatcgcctg

SEQ ID NO: 245542 - DNA, 25 bp, Probe Sequence
gtttagtgaaccgtcagatcgcctg

SEQ ID NO: 245543 - DNA, 25 bp, Probe Sequence
gtttagtgaaccgtcagatcgcctg

SEQ ID NO: 245544 - DNA, 25 bp, Probe Sequence
gtttagtgaaccgtcagatcgcctg

SEQ ID NO: 245545 - DNA, 25 bp, Probe Sequence
gtttagtgaaccgtcagatcgcctg

SEQ ID NO: 245546 - DNA, 25 bp, Probe Sequence
gtttagtgaaccgtcagatcgcctg

SEQ ID NO: 245547 - DNA, 25 bp, Probe Sequence
gtttagtgaaccgtcagatcgcctg

SEQ ID NO: 245548 - DNA, 25 bp, Probe Sequence
gtttagtgaaccgtcagatcgcctg

SEQ ID NO: 245549 - DNA, 25 bp, Probe Sequence
gtttagtgaaccgtcagatcgcctg

SEQ ID NO: 245550 - DNA, 25 bp, Probe Sequence
gtttagtgaaccgtcagatcgcctg

SEQ ID NO: 245551 - DNA, 25 bp, Probe Sequence
gtttagtgaaccgtcagatcgcctg

SEQ ID NO: 245552 - DNA, 25 bp, Probe Sequence
gtttagtgaaccgtcagatcgcctg

SEQ ID NO: 245553 - DNA, 25 bp, Probe Sequence
gtttagtgaaccgtcagatcgcctg

SEQ ID NO: 245554 - DNA, 25 bp, Probe Sequence
gtttagtgaaccgtcagatcgcctg

SEQ ID NO: 245555 - DNA, 25 bp, Probe Sequence
gtttagtgaaccgtcagatcgcctg

SEQ ID NO: 245556 - DNA, 25 bp, Probe Sequence
gtttagtgaaccgtcagatcgcctg

SEQ ID NO: 245557 - DNA, 25 bp, Probe Sequence
gtttagtgaaccgtcagatcgcctg

SEQ ID NO: 245558 - DNA, 25 bp, Probe Sequence
gtttagtgaaccgtcagatcgcctg

SEQ ID NO: 245559 - DNA, 25 bp, Probe Sequence
gtttagtgaaccgtcagatcgcctg

SEQ ID NO: 245560 - DNA, 25 bp, Probe Sequence
gtatcagactggtccagtagacccg

SEQ ID NO: 245561 - DNA, 25 bp, Probe Sequence
gttttctgtgacaagaagacctcct

SEQ ID NO: 245562 - DNA, 25 bp, Probe Sequence
gtttctcagatcaaatagagccctg

SEQ ID NO: 245563 - DNA, 25 bp, Probe Sequence
gtttgtagtgcactatgatcatgcc

SEQ ID NO: 245564 - DNA, 25 bp, Probe Sequence
gttttcactgacgtgatcagacact

SEQ ID NO: 245565 - DNA, 25 bp, Probe Sequence
gtttttgcattggtaagagcattta

SEQ ID NO: 245566 - DNA, 25 bp, Probe Sequence
gtttcttgatctctaaggtattatg

SEQ ID NO: 245567 - DNA, 25 bp, Probe Sequence
gttttctgcctcctgaagcgaataa

SEQ ID NO: 245568 - DNA, 25 bp, Probe Sequence
gttttctgccatcatagagctgact

SEQ ID NO: 245569 - DNA, 25 bp, Probe Sequence
gtatattcggatatgtatcgatgcc

SEQ ID NO: 245570 - DNA, 25 bp, Probe Sequence
gtttatccaggttgatatctgtgca

SEQ ID NO: 245571 - DNA, 25 bp, Probe Sequence
gttttctctggaatatatgtggcct

SEQ ID NO: 245572 - DNA, 25 bp, Probe Sequence
gttttctgtatgttctattgtgcct

SEQ ID NO: 245573 - DNA, 25 bp, Probe Sequence
gttttctcattgtctttttgcatca

SEQ ID NO: 245574 - DNA, 25 bp, Probe Sequence
gttttccatgtttccttatgcatat

SEQ ID NO: 245575 - DNA, 25 bp, Probe Sequence
gttttcattgtttcagttatctatc

SEQ ID NO: 245576 - DNA, 25 bp, Probe Sequence
gttttcttgttatcattatatagga

SEQ ID NO: 245577 - DNA, 25 bp, Probe Sequence
gttttctgttttgcagctagatggg

SEQ ID NO: 245578 - DNA, 25 bp, Probe Sequence
gttttcgttactggatgtttggagt

SEQ ID NO: 245579 - DNA, 25 bp, Probe Sequence
gtttagttaatatgtgttgggagtt

SEQ ID NO: 245580 - DNA, 25 bp, Probe Sequence
gttttcttaatatgcttcttgaagg

SEQ ID NO: 245581 - DNA, 25 bp, Probe Sequence
gtttgtttcaattggccatttaagt

SEQ ID NO: 245582 - DNA, 25 bp, Probe Sequence
gtttttaagatctccattaatgtca

SEQ ID NO: 245583 - DNA, 25 bp, Probe Sequence
gtttgttttggcacgcgaaagtcaa

SEQ ID NO: 245584 - DNA, 25 bp, Probe Sequence
gtttttcatttcagatggaaaggca

SEQ ID NO: 245585 - DNA, 25 bp, Probe Sequence
gtttttatctgtcagtatgggagga

SEQ ID NO: 245586 - DNA, 25 bp, Probe Sequence
gtttcaaagcgtcagctgtgggagc

SEQ ID NO: 245587 - DNA, 25 bp, Probe Sequence
gtttagggcagtagctgcttttgtc

SEQ ID NO: 245588 - DNA, 25 bp, Probe Sequence
gtttatggaggttgctgtgtcttga

SEQ ID NO: 245589 - DNA, 25 bp, Probe Sequence
gtttcagctgattggcagcaggctc

SEQ ID NO: 245590 - DNA, 25 bp, Probe Sequence
gtttcattttgggccttgctaaatt

SEQ ID NO: 245591 - DNA, 25 bp, Probe Sequence
gttttattctgggtcatctatagaa

SEQ ID NO: 245592 - DNA, 25 bp, Probe Sequence
gttttctgtttgggcatcctgagga

SEQ ID NO: 245593 - DNA, 25 bp, Probe Sequence
gtttttattcctggcatccagagtg

SEQ ID NO: 245594 - DNA, 25 bp, Probe Sequence
gtatgttgggccagagcatccggag

SEQ ID NO: 245595 - DNA, 25 bp, Probe Sequence
gttttcatggtggggaacaggatgg

SEQ ID NO: 245596 - DNA, 25 bp, Probe Sequence
gtttcccttgcatgggacgaaagct

SEQ ID NO: 245597 - DNA, 25 bp, Probe Sequence
gtttccttgtactgatataaacact

SEQ ID NO: 245598 - DNA, 25 bp, Probe Sequence
gtttctttttagacaaattacactg

SEQ ID NO: 245599 - DNA, 25 bp, Probe Sequence
gtttttctttgagtgcaaatgtaca

SEQ ID NO: 245600 - DNA, 25 bp, Probe Sequence
gttttctgatctaacatgcataaat

SEQ ID NO: 245601 - DNA, 25 bp, Probe Sequence
gttttcatgtctcatcaaagacaat

SEQ ID NO: 245602 - DNA, 25 bp, Probe Sequence
gtttcaatgtccaataaatgcaatg

SEQ ID NO: 245603 - DNA, 25 bp, Probe Sequence
gtttcatgatttcgttaattatgga

SEQ ID NO: 245604 - DNA, 25 bp, Probe Sequence
gtttatactctgcttagtctcaagg

SEQ ID NO: 245605 - DNA, 25 bp, Probe Sequence
gtatttacgtggttagtcatcgcgt

SEQ ID NO: 245606 - DNA, 25 bp, Probe Sequence
gtatgtacacgaggcactacttctg

SEQ ID NO: 245607 - DNA, 25 bp, Probe Sequence
gtatgactgccgagcactgaggggt

SEQ ID NO: 245608 - DNA, 25 bp, Probe Sequence
gtttttcttttcatagtcaccttca

SEQ ID NO: 245609 - DNA, 25 bp, Probe Sequence
gtttcatctgcttttttaaattctt

SEQ ID NO: 245610 - DNA, 25 bp, Probe Sequence
gtttctctttctctaaagcttgttt

SEQ ID NO: 245611 - DNA, 25 bp, Probe Sequence
gttttcttctctttaatactattag

SEQ ID NO: 245612 - DNA, 25 bp, Probe Sequence
gtttttgtcattttcgtaacagtcg

SEQ ID NO: 245613 - DNA, 25 bp, Probe Sequence
gtttttgtcattttcgtaacagtcg

SEQ ID NO: 245614 - DNA, 25 bp, Probe Sequence
gtttatttcatttgacccacttgtc

SEQ ID NO: 245615 - DNA, 25 bp, Probe Sequence
gtttatgtacctaggaccatctagt

SEQ ID NO: 245616 - DNA, 25 bp, Probe Sequence
gtttattcttccagacgaccagtgg

SEQ ID NO: 245617 - DNA, 25 bp, Probe Sequence
gtttaattatccattcgtccgttga

SEQ ID NO: 245618 - DNA, 25 bp, Probe Sequence
gtttacttacttttcagtgtcaacg

SEQ ID NO: 245619 - DNA, 25 bp, Probe Sequence
gtttactaactctttaggccactgt

SEQ ID NO: 245620 - DNA, 25 bp, Probe Sequence
gtttctccaaactgaagcagcctct

SEQ ID NO: 245621 - DNA, 25 bp, Probe Sequence
gtttacgcaatagcgacgcgctggc

SEQ ID NO: 245622 - DNA, 25 bp, Probe Sequence
gtatgtacgcatatatggaccggag

SEQ ID NO: 245623 - DNA, 25 bp, Probe Sequence
gtatgaaggcttttggtctccctgg

SEQ ID NO: 245624 - DNA, 25 bp, Probe Sequence
gtttatgcagctttatggttccaca

SEQ ID NO: 245625 - DNA, 25 bp, Probe Sequence
gtttctgaacagtcagcgattccag

SEQ ID NO: 245626 - DNA, 25 bp, Probe Sequence
gttttacccacacatattagactga

SEQ ID NO: 245627 - DNA, 25 bp, Probe Sequence
gtttctgtgccctgaaagtacctga

SEQ ID NO: 245628 - DNA, 25 bp, Probe Sequence
gtttcagtgaccttgagggctaaag

SEQ ID NO: 245629 - DNA, 25 bp, Probe Sequence
gtttagtctcactgccgttaagatt

SEQ ID NO: 245630 - DNA, 25 bp, Probe Sequence
gtgttattccaagcctttaaatata

SEQ ID NO: 245631 - DNA, 25 bp, Probe Sequence
gtttttccaatgatttttacactat

SEQ ID NO: 245632 - DNA, 25 bp, Probe Sequence
gtttttccaatgatttttacactat

SEQ ID NO: 245633 - DNA, 25 bp, Probe Sequence
gtttattctcaggagttgcttgtac

SEQ ID NO: 245634 - DNA, 25 bp, Probe Sequence
gtttatttttggggctggcaatcca

SEQ ID NO: 245635 - DNA, 25 bp, Probe Sequence
gtttatttctgcagggctgaaagca

SEQ ID NO: 245636 - DNA, 25 bp, Probe Sequence
gttttcatcttgaggtggccaatat

SEQ ID NO: 245637 - DNA, 25 bp, Probe Sequence
gtttttgttgaaagctgtgctcaga

SEQ ID NO: 245638 - DNA, 25 bp, Probe Sequence
gtttagtgtctagggctgggagcca

SEQ ID NO: 245639 - DNA, 25 bp, Probe Sequence
gtttctgtgttgagcctgggatgga

SEQ ID NO: 245640 - DNA, 25 bp, Probe Sequence
gtttttgttctactctaggcagtga

SEQ ID NO: 245641 - DNA, 25 bp, Probe Sequence
gttttatcttctattcagtagtatt

SEQ ID NO: 245642 - DNA, 25 bp, Probe Sequence
gttttactgtctacttttcaggatt

SEQ ID NO: 245643 - DNA, 25 bp, Probe Sequence
gttttacttatactttcctagacat

SEQ ID NO: 245644 - DNA, 25 bp, Probe Sequence
gttttagctgttttcattggctcaa

SEQ ID NO: 245645 - DNA, 25 bp, Probe Sequence
gttttagctgttttcattgctcaat

SEQ ID NO: 245646 - DNA, 25 bp, Probe Sequence
gttttagctgttttcattgctcaat

SEQ ID NO: 245647 - DNA, 25 bp, Probe Sequence
gttttagtctttacatacacatata

SEQ ID NO: 245648 - DNA, 25 bp, Probe Sequence
gtttatttgtagcaaggcacatata

SEQ ID NO: 245649 - DNA, 25 bp, Probe Sequence
gttttatctgcttcaaaatgccatt

SEQ ID NO: 245650 - DNA, 25 bp, Probe Sequence
gttttatgctgtaagggctcgtctc

SEQ ID NO: 245651 - DNA, 25 bp, Probe Sequence
gttttatgcttttgagactcttttt

SEQ ID NO: 245652 - DNA, 25 bp, Probe Sequence
gttttactttcaggctcttgttttg

SEQ ID NO: 245653 - DNA, 25 bp, Probe Sequence
gttttagttacagtcctgtttctct

SEQ ID NO: 245654 - DNA, 25 bp, Probe Sequence
gttttagatgtatctcttgttatct

SEQ ID NO: 245655 - DNA, 25 bp, Probe Sequence
gttttcaacttgttcttgtttctgt

SEQ ID NO: 245656 - DNA, 25 bp, Probe Sequence
gtttcaaactttactatggccctgg

SEQ ID NO: 245657 - DNA, 25 bp, Probe Sequence
gtttcaaaatttggagcatttccga

SEQ ID NO: 245658 - DNA, 25 bp, Probe Sequence
gtttgaagacttcctagcttgtcct

SEQ ID NO: 245659 - DNA, 25 bp, Probe Sequence
gtttgaaaaatccatgagtgttcca

SEQ ID NO: 245660 - DNA, 25 bp, Probe Sequence
gtttgacaaatcctgcagtgtttcc

SEQ ID NO: 245661 - DNA, 25 bp, Probe Sequence
gtttgtcaaaaagtctgctgtaccg

SEQ ID NO: 245662 - DNA, 25 bp, Probe Sequence
gtttctgcaaaggcacctgcatgtg

SEQ ID NO: 245663 - DNA, 25 bp, Probe Sequence
gtttctgcaaaggcacctgcatgtg

SEQ ID NO: 245664 - DNA, 25 bp, Probe Sequence
gtttatctcaaggcagcagcctgag

SEQ ID NO: 245665 - DNA, 25 bp, Probe Sequence
gtttctgtaaggctgcctgaggggc

SEQ ID NO: 245666 - DNA, 25 bp, Probe Sequence
gtttctcttgagactcgttactggg

SEQ ID NO: 245667 - DNA, 25 bp, Probe Sequence
gttttacccattcgttatctgtgga

SEQ ID NO: 245668 - DNA, 25 bp, Probe Sequence
gttttactcttgttgtctaggctgg

SEQ ID NO: 245669 - DNA, 25 bp, Probe Sequence
gttttatgtttgttggacagtgggt

SEQ ID NO: 245670 - DNA, 25 bp, Probe Sequence
gtttttctttgcttggatactgtga

SEQ ID NO: 245671 - DNA, 25 bp, Probe Sequence
gttttatcacctgctgctgtatttg

SEQ ID NO: 245672 - DNA, 25 bp, Probe Sequence
gttttattgcctgctcgattatata

SEQ ID NO: 245673 - DNA, 25 bp, Probe Sequence
gtttgtaaactggatcgactctatc

SEQ ID NO: 245674 - DNA, 25 bp, Probe Sequence
gttttatacttcatctgacatccag

SEQ ID NO: 245675 - DNA, 25 bp, Probe Sequence
gttttatccatgtctctagcaatct

SEQ ID NO: 245676 - DNA, 25 bp, Probe Sequence
gtttttcactgcatcacagcagagc

SEQ ID NO: 245677 - DNA, 25 bp, Probe Sequence
gtttttcttgcatttccatgagctg

SEQ ID NO: 245678 - DNA, 25 bp, Probe Sequence
gtttttttgcattcacctagactat

SEQ ID NO: 245679 - DNA, 25 bp, Probe Sequence
gtttttcttctgccaatttactatg

SEQ ID NO: 245680 - DNA, 25 bp, Probe Sequence
gtttttcttctgccaatttactatg

SEQ ID NO: 245681 - DNA, 25 bp, Probe Sequence
gtttttctttgttttgatatattca

SEQ ID NO: 245682 - DNA, 25 bp, Probe Sequence
gtttaatattgtgtttgtgatactg

SEQ ID NO: 245683 - DNA, 25 bp, Probe Sequence
gtttaaatatgtaacgcattcatga

SEQ ID NO: 245684 - DNA, 25 bp, Probe Sequence
gtttctaatgggcaggcatataggg

SEQ ID NO: 245685 - DNA, 25 bp, Probe Sequence
gtttctacagggaactgcctagtgt

SEQ ID NO: 245686 - DNA, 25 bp, Probe Sequence
gttttaggctgtcacatgcagctga

SEQ ID NO: 245687 - DNA, 25 bp, Probe Sequence
gtttatcggttgaatgccacagatt

SEQ ID NO: 245688 - DNA, 25 bp, Probe Sequence
gtttcactggttatgcggcggatcc

SEQ ID NO: 245689 - DNA, 25 bp, Probe Sequence
gtttctcatggtcatgccaggcatg

SEQ ID NO: 245690 - DNA, 25 bp, Probe Sequence
gtttatcttgatatccagtgctgct

SEQ ID NO: 245691 - DNA, 25 bp, Probe Sequence
gttttttcataactgcagtccttca

SEQ ID NO: 245692 - DNA, 25 bp, Probe Sequence
gtttttggcctcagagtctctgatc

SEQ ID NO: 245693 - DNA, 25 bp, Probe Sequence
gtttttgaagctcaggtgtctcacg

SEQ ID NO: 245694 - DNA, 25 bp, Probe Sequence
gtttgtttagcttcaaggtctttgg

SEQ ID NO: 245695 - DNA, 25 bp, Probe Sequence
gttttttcatcttcagttgtctctg

SEQ ID NO: 245696 - DNA, 25 bp, Probe Sequence
gtttttactaattgtatgcttctga

SEQ ID NO: 245697 - DNA, 25 bp, Probe Sequence
gtttcttacggtcggagcatctaga

SEQ ID NO: 245698 - DNA, 25 bp, Probe Sequence
gtttttactgttacctgatcaatga

SEQ ID NO: 245699 - DNA, 25 bp, Probe Sequence
gtttttgagcttctcattgtgtaga

SEQ ID NO: 245700 - DNA, 25 bp, Probe Sequence
gtatcccggtttactgtgttgagtt

SEQ ID NO: 245701 - DNA, 25 bp, Probe Sequence
gtttcagggtttatggatttgtatt

SEQ ID NO: 245702 - DNA, 25 bp, Probe Sequence
gtttcagggtttatggatttgtatt

SEQ ID NO: 245703 - DNA, 25 bp, Probe Sequence
gtttcggagttgaacctattgtgta

SEQ ID NO: 245704 - DNA, 25 bp, Probe Sequence
gtttatgtaattgggtcttttgttg

SEQ ID NO: 245705 - DNA, 25 bp, Probe Sequence
gtttttattgttggtgcatattagt

SEQ ID NO: 245706 - DNA, 25 bp, Probe Sequence
gtttttgtcgttgtcatttttgcat

SEQ ID NO: 245707 - DNA, 25 bp, Probe Sequence
gtttggctggggagcacttaattct

SEQ ID NO: 245708 - DNA, 25 bp, Probe Sequence
gtttcagtgagagacgccctatttc

SEQ ID NO: 245709 - DNA, 25 bp, Probe Sequence
gtttcagtgagagacgccctatttc

SEQ ID NO: 245710 - DNA, 25 bp, Probe Sequence
gtttgagctgaagccccgtatattt

SEQ ID NO: 245711 - DNA, 25 bp, Probe Sequence
gtttgtaggaccaccgaatataatc

SEQ ID NO: 245712 - DNA, 25 bp, Probe Sequence
gtttgtactgaagaccagaagatca

SEQ ID NO: 245713 - DNA, 25 bp, Probe Sequence
gtttgctatctctcttccagataac

SEQ ID NO: 245714 - DNA, 25 bp, Probe Sequence
gtgtcgtagtctgtgtcgacgatcc

SEQ ID NO: 245715 - DNA, 25 bp, Probe Sequence
gtacgtggctgtgatgccgccacac

SEQ ID NO: 245716 - DNA, 25 bp, Probe Sequence
gtatcagttgctgccaccaggaatc

SEQ ID NO: 245717 - DNA, 25 bp, Probe Sequence
gtatcatcggttgaccaagcagatc

SEQ ID NO: 245718 - DNA, 25 bp, Probe Sequence
gtattaggattcaagcaaggcccat

SEQ ID NO: 245719 - DNA, 25 bp, Probe Sequence
gtttgaggaactactacgaacaatg

SEQ ID NO: 245720 - DNA, 25 bp, Probe Sequence
gtttccattccaacaacgagaacag

SEQ ID NO: 245721 - DNA, 25 bp, Probe Sequence
gtattccgtcttccaagttaccaat

SEQ ID NO: 245722 - DNA, 25 bp, Probe Sequence
gtttacagtttacagttccagaagt

SEQ ID NO: 245723 - DNA, 25 bp, Probe Sequence
gtttatctgttaactattatccaaa

SEQ ID NO: 245724 - DNA, 25 bp, Probe Sequence
gtttagcttcacacatgaaattgag

SEQ ID NO: 245725 - DNA, 25 bp, Probe Sequence
gtttttcccacctagatgttgagtc

SEQ ID NO: 245726 - DNA, 25 bp, Probe Sequence
gttttatctctgtcctagttggtta

SEQ ID NO: 245727 - DNA, 25 bp, Probe Sequence
gttttatatctgtgtggtgttttgt

SEQ ID NO: 245728 - DNA, 25 bp, Probe Sequence
gtttaacacgttgcttgtttatttg

SEQ ID NO: 245729 - DNA, 25 bp, Probe Sequence
gtttcaacggttcttatctttaatg

SEQ ID NO: 245730 - DNA, 25 bp, Probe Sequence
gtttttcgtttgcattgtctttaat

SEQ ID NO: 245731 - DNA, 25 bp, Probe Sequence
gtttttggtctagatggtctattgc

SEQ ID NO: 245732 - DNA, 25 bp, Probe Sequence
gtttttggctattactggtgtatta

SEQ ID NO: 245733 - DNA, 25 bp, Probe Sequence
gtttttccttaatgatgtatttgat

SEQ ID NO: 245734 - DNA, 25 bp, Probe Sequence
gtttttcgttactagatttcatgga

SEQ ID NO: 245735 - DNA, 25 bp, Probe Sequence
gttttttcttaccagtattctgcct

SEQ ID NO: 245736 - DNA, 25 bp, Probe Sequence
gttttattgcttttagtcatgtcca

SEQ ID NO: 245737 - DNA, 25 bp, Probe Sequence
gttttattgctaccagagtctgcct

SEQ ID NO: 245738 - DNA, 25 bp, Probe Sequence
gtttttggctgtgagactagcacta

SEQ ID NO: 245739 - DNA, 25 bp, Probe Sequence
gtttttgtgcctgtttgaagctact

SEQ ID NO: 245740 - DNA, 25 bp, Probe Sequence
gtttattatcctgacttaagtgatt

SEQ ID NO: 245741 - DNA, 25 bp, Probe Sequence
gtttattctccttacttgaactcac

SEQ ID NO: 245742 - DNA, 25 bp, Probe Sequence
gttttttgctacaatcttgacccct

SEQ ID NO: 245743 - DNA, 25 bp, Probe Sequence
gttttttcaactttataccagctct

SEQ ID NO: 245744 - DNA, 25 bp, Probe Sequence
gtttatttaaccattcccatgttgt

SEQ ID NO: 245745 - DNA, 25 bp, Probe Sequence
gttttttacctcagtggtgcagggt

SEQ ID NO: 245746 - DNA, 25 bp, Probe Sequence
gtttctttacaacaggtgtaggtat

SEQ ID NO: 245747 - DNA, 25 bp, Probe Sequence
gtttccctcaaatagtgatggttta

SEQ ID NO: 245748 - DNA, 25 bp, Probe Sequence
gtttccccagaaacggagtcttctg

SEQ ID NO: 245749 - DNA, 25 bp, Probe Sequence
gtttccccatgaagcagggtgtctt

SEQ ID NO: 245750 - DNA, 25 bp, Probe Sequence
gtattcccacagaggggtagctggg

SEQ ID NO: 245751 - DNA, 25 bp, Probe Sequence
gtttggagactgctcgggaagctgt

SEQ ID NO: 245752 - DNA, 25 bp, Probe Sequence
gtttggaggcaaacttgtgcacagt

SEQ ID NO: 245753 - DNA, 25 bp, Probe Sequence
gtttgaggccaaccttgacaacatg

SEQ ID NO: 245754 - DNA, 25 bp, Probe Sequence
gtttgagaccgacatgggcaacatg

SEQ ID NO: 245755 - DNA, 25 bp, Probe Sequence
gtttgagacccagttggagcctgag

SEQ ID NO: 245756 - DNA, 25 bp, Probe Sequence
gtttgagaccagcctgggcaacatg

SEQ ID NO: 245757 - DNA, 25 bp, Probe Sequence
gtttagagccaagatctctgacatg

SEQ ID NO: 245758 - DNA, 25 bp, Probe Sequence
gtttgaagaactgctcactgactga

SEQ ID NO: 245759 - DNA, 25 bp, Probe Sequence
gtttataactagactaccatgtgaa

SEQ ID NO: 245760 - DNA, 25 bp, Probe Sequence
gtttatcactttaccaacagtggac

SEQ ID NO: 245761 - DNA, 25 bp, Probe Sequence
gtttacagtccaaccaacaggtgta

SEQ ID NO: 245762 - DNA, 25 bp, Probe Sequence
gtttatagtcttttcacactgcagc

SEQ ID NO: 245763 - DNA, 25 bp, Probe Sequence
gtttataatctgacatcaccccagc

SEQ ID NO: 245764 - DNA, 25 bp, Probe Sequence
gtttataatctgacatcaccccagc

SEQ ID NO: 245765 - DNA, 25 bp, Probe Sequence
gtcgtagacgtgtctgtacccagac

SEQ ID NO: 245766 - DNA, 25 bp, Probe Sequence
gtttagaaggatatcacccagaaca

SEQ ID NO: 245767 - DNA, 25 bp, Probe Sequence
gtttctggatttctccacaatgcaa

SEQ ID NO: 245768 - DNA, 25 bp, Probe Sequence
gtttttgttttatcagaatggcaac

SEQ ID NO: 245769 - DNA, 25 bp, Probe Sequence
gtttttgttcttagataacccacat

SEQ ID NO: 245770 - DNA, 25 bp, Probe Sequence
gtttaatgttttatagtctcatagt

SEQ ID NO: 245771 - DNA, 25 bp, Probe Sequence
gtttacagttcttttacattacatt

SEQ ID NO: 245772 - DNA, 25 bp, Probe Sequence
gtttacaggcttactgtgatttaag

SEQ ID NO: 245773 - DNA, 25 bp, Probe Sequence
gtttccaatcttcttgttaatgata

SEQ ID NO: 245774 - DNA, 25 bp, Probe Sequence
gtttttgttatgttctgttattgac

SEQ ID NO: 245775 - DNA, 25 bp, Probe Sequence
gtttttgtgtttatgttaggatctg

SEQ ID NO: 245776 - DNA, 25 bp, Probe Sequence
gtttttgtgtttatgttaggatctg

SEQ ID NO: 245777 - DNA, 25 bp, Probe Sequence
gtttttctgtattttataagtatct

SEQ ID NO: 245778 - DNA, 25 bp, Probe Sequence
gtttttcagcaaatttatattgttt

SEQ ID NO: 245779 - DNA, 25 bp, Probe Sequence
gtttcttcatgcattacttactgtt

SEQ ID NO: 245780 - DNA, 25 bp, Probe Sequence
gtttcttatgcaagtagtaccagtc

SEQ ID NO: 245781 - DNA, 25 bp, Probe Sequence
gtttctatagtcactttgccagctc

SEQ ID NO: 245782 - DNA, 25 bp, Probe Sequence
gtttctaggtgaagcatactccagt

SEQ ID NO: 245783 - DNA, 25 bp, Probe Sequence
gtttaaagtgaactacagctgtgct

SEQ ID NO: 245784 - DNA, 25 bp, Probe Sequence
gtttatcactggacattcaggaggc

SEQ ID NO: 245785 - DNA, 25 bp, Probe Sequence
gtttatctctgtccagtcaggtgtg

SEQ ID NO: 245786 - DNA, 25 bp, Probe Sequence
gtttcagtcagttcttgcaggttgc

SEQ ID NO: 245787 - DNA, 25 bp, Probe Sequence
gtttagtaggttccataaatgcccg

SEQ ID NO: 245788 - DNA, 25 bp, Probe Sequence
gtttgaggggttcccctgattcctg

SEQ ID NO: 245789 - DNA, 25 bp, Probe Sequence
gtttgagaacaggtcccattttcac

SEQ ID NO: 245790 - DNA, 25 bp, Probe Sequence
gtttaaggggtctgtttctcatctc

SEQ ID NO: 245791 - DNA, 25 bp, Probe Sequence
gtttcaagtgaaatgaggttcctat

SEQ ID NO: 245792 - DNA, 25 bp, Probe Sequence
gtttcaagccaactgtggataccct

SEQ ID NO: 245793 - DNA, 25 bp, Probe Sequence
gtttctgacctcagggatgacccta

SEQ ID NO: 245794 - DNA, 25 bp, Probe Sequence
gtttcggctcacaggtgtgcatcac

SEQ ID NO: 245795 - DNA, 25 bp, Probe Sequence
gtttcacaccacaattctgtgccac

SEQ ID NO: 245796 - DNA, 25 bp, Probe Sequence
gtttcaagccagacattttcacaat

SEQ ID NO: 245797 - DNA, 25 bp, Probe Sequence
gtttataggcgaatttcagcagaag

SEQ ID NO: 245798 - DNA, 25 bp, Probe Sequence
gtttaggggcaggttatgcgagatg

SEQ ID NO: 245799 - DNA, 25 bp, Probe Sequence
gtttatgggatttgagttgcaggtg

SEQ ID NO: 245800 - DNA, 25 bp, Probe Sequence
gtttgagggtattatcttctggtaa

SEQ ID NO: 245801 - DNA, 25 bp, Probe Sequence
gtttgggaaagatcattttgctcag

SEQ ID NO: 245802 - DNA, 25 bp, Probe Sequence
gtttggcatgggtacccttttcagg

SEQ ID NO: 245803 - DNA, 25 bp, Probe Sequence
gtttatgagagtgaccctttcaaca

SEQ ID NO: 245804 - DNA, 25 bp, Probe Sequence
gtttatgatattgccctctttgtat

SEQ ID NO: 245805 - DNA, 25 bp, Probe Sequence
gtttagcaatatgacattcttggtg

SEQ ID NO: 245806 - DNA, 25 bp, Probe Sequence
gtttcacactagtcacattcttgtt

SEQ ID NO: 245807 - DNA, 25 bp, Probe Sequence
gtttccacgataacttcggctttga

SEQ ID NO: 245808 - DNA, 25 bp, Probe Sequence
gtttacaagctacctgactacttta

SEQ ID NO: 245809 - DNA, 25 bp, Probe Sequence
gtttgaggactaccagttattattt

SEQ ID NO: 245810 - DNA, 25 bp, Probe Sequence
gtttatttgctagtgagtttctttg

SEQ ID NO: 245811 - DNA, 25 bp, Probe Sequence
gtttatccattattcattgattctt

SEQ ID NO: 245812 - DNA, 25 bp, Probe Sequence
gtttatatctggttctatattttaa

SEQ ID NO: 245813 - DNA, 25 bp, Probe Sequence
gtttgatatgggctttctctttggt

SEQ ID NO: 245814 - DNA, 25 bp, Probe Sequence
gtttgtctggcgatacttctttagt

SEQ ID NO: 245815 - DNA, 25 bp, Probe Sequence
gtttgtctgggatgtcaactgccta

SEQ ID NO: 245816 - DNA, 25 bp, Probe Sequence
gtttatgtcgtatgatatcctttat

SEQ ID NO: 245817 - DNA, 25 bp, Probe Sequence
gtttctacctatatgcagtctcttt

SEQ ID NO: 245818 - DNA, 25 bp, Probe Sequence
gtattaacctgtgtgctgtactttt

SEQ ID NO: 245819 - DNA, 25 bp, Probe Sequence
gtttaaagcttctctgctgattgtg

SEQ ID NO: 245820 - DNA, 25 bp, Probe Sequence
gtttataagcagacacactgcaatt

SEQ ID NO: 245821 - DNA, 25 bp, Probe Sequence
gtttttgagacatcgcatcatcaaa

SEQ ID NO: 245822 - DNA, 25 bp, Probe Sequence
gtttttgacatactagctctataaa

SEQ ID NO: 245823 - DNA, 25 bp, Probe Sequence
gtttttgacatactagctctataaa

SEQ ID NO: 245824 - DNA, 25 bp, Probe Sequence
gtttttgaatatacattctataaaa

SEQ ID NO: 245825 - DNA, 25 bp, Probe Sequence
gtttcttcatttcctctataaacaa

SEQ ID NO: 245826 - DNA, 25 bp, Probe Sequence
gtttccacgtctactgtaaacatca

SEQ ID NO: 245827 - DNA, 25 bp, Probe Sequence
gtattaattggtaagtgaaaactct

SEQ ID NO: 245828 - DNA, 25 bp, Probe Sequence
gtttgttgtgttaagctgccaacct

SEQ ID NO: 245829 - DNA, 25 bp, Probe Sequence
gtttggtgaattgcaaccaacaata

SEQ ID NO: 245830 - DNA, 25 bp, Probe Sequence
gtttggaacttgtcataaaatcgat

SEQ ID NO: 245831 - DNA, 25 bp, Probe Sequence
gtttaaagctatggcatcatataat

SEQ ID NO: 245832 - DNA, 25 bp, Probe Sequence
gtttacagagccagcaaatgatacc

SEQ ID NO: 245833 - DNA, 25 bp, Probe Sequence
gtttgaggacctggaataggcgcca

SEQ ID NO: 245834 - DNA, 25 bp, Probe Sequence
gtttgcagaacacccaagagcgagc

SEQ ID NO: 245835 - DNA, 25 bp, Probe Sequence
gtttgcagcaacaatctaagaagaa

SEQ ID NO: 245836 - DNA, 25 bp, Probe Sequence
gtttatctccagttgaaacgatata

SEQ ID NO: 245837 - DNA, 25 bp, Probe Sequence
gtttatgcacactttataaccttaa

SEQ ID NO: 245838 - DNA, 25 bp, Probe Sequence
gtattaaccacacttaaacttagag

SEQ ID NO: 245839 - DNA, 25 bp, Probe Sequence
gtttgaacctcactcatggaactta

SEQ ID NO: 245840 - DNA, 25 bp, Probe Sequence
gtttcactttcacatggaatttccc

SEQ ID NO: 245841 - DNA, 25 bp, Probe Sequence
gtttcacgttgacaggtttgcttgg

SEQ ID NO: 245842 - DNA, 25 bp, Probe Sequence
gtataaacttgaagtggttgtgttg

SEQ ID NO: 245843 - DNA, 25 bp, Probe Sequence
gtttaactcatgaagtggactctta

SEQ ID NO: 245844 - DNA, 25 bp, Probe Sequence
gtttctagctagagggactggtgtc

SEQ ID NO: 245845 - DNA, 25 bp, Probe Sequence
gtttcttgcttggggaacttgtgtc

SEQ ID NO: 245846 - DNA, 25 bp, Probe Sequence
gtttaatctaccatgtccgtgtgtc

SEQ ID NO: 245847 - DNA, 25 bp, Probe Sequence
gtttaattcctcagtgggtgtgaca

SEQ ID NO: 245848 - DNA, 25 bp, Probe Sequence
gtttacctgcccttgtagtagtgta

SEQ ID NO: 245849 - DNA, 25 bp, Probe Sequence
gtttacagtgctgggtgtaggggct

SEQ ID NO: 245850 - DNA, 25 bp, Probe Sequence
gtttatcgtcatgctgttagtgtgc

SEQ ID NO: 245851 - DNA, 25 bp, Probe Sequence
gtttagggctgcgtgctcaagagtc

SEQ ID NO: 245852 - DNA, 25 bp, Probe Sequence
gtttagggatctttctgatggtctt

SEQ ID NO: 245853 - DNA, 25 bp, Probe Sequence
gtttggcggcatgaatgtatctgtc

SEQ ID NO: 245854 - DNA, 25 bp, Probe Sequence
gtttctgcggcaagagttgcctgtc

SEQ ID NO: 245855 - DNA, 25 bp, Probe Sequence
gtttgctcactaagcagggtcgtcc

SEQ ID NO: 245856 - DNA, 25 bp, Probe Sequence
gtttgtcctaagtgtgctgttgcta

SEQ ID NO: 245857 - DNA, 25 bp, Probe Sequence
gtttctccttagccgtagtatgcat

SEQ ID NO: 245858 - DNA, 25 bp, Probe Sequence
gtttcccttacacatagcagagctc

SEQ ID NO: 245859 - DNA, 25 bp, Probe Sequence
gtttccagttagcaatatcatacct

SEQ ID NO: 245860 - DNA, 25 bp, Probe Sequence
gtttatcatgctttccattatatac

SEQ ID NO: 245861 - DNA, 25 bp, Probe Sequence
gtttacagtcattcgatatatctca

SEQ ID NO: 245862 - DNA, 25 bp, Probe Sequence
gtttatattctagtgatgtgtgtag

SEQ ID NO: 245863 - DNA, 25 bp, Probe Sequence
gtttagcatcttagtgtagtatagc

SEQ ID NO: 245864 - DNA, 25 bp, Probe Sequence
gtttatgtttgaggtatgtactgca

SEQ ID NO: 245865 - DNA, 25 bp, Probe Sequence
gtttgtgatttgttcctcatactgc

SEQ ID NO: 245866 - DNA, 25 bp, Probe Sequence
gtttggcattggctgtttacaagtg

SEQ ID NO: 245867 - DNA, 25 bp, Probe Sequence
gtttgatgctcgctgggtaacatac

SEQ ID NO: 245868 - DNA, 25 bp, Probe Sequence
gtttagtaagtggcaattccataca

SEQ ID NO: 245869 - DNA, 25 bp, Probe Sequence
gtttaaaaggtcaatcagcctcatg

SEQ ID NO: 245870 - DNA, 25 bp, Probe Sequence
gtatctagaaaacccatcgactcag

SEQ ID NO: 245871 - DNA, 25 bp, Probe Sequence
gtttagctgaaactcacagagacta

SEQ ID NO: 245872 - DNA, 25 bp, Probe Sequence
gtttagctttacaatccagactcag

SEQ ID NO: 245873 - DNA, 25 bp, Probe Sequence
gtttatgctgtatctactcaactaa

SEQ ID NO: 245874 - DNA, 25 bp, Probe Sequence
gtttcatttgagcctccaaactaca

SEQ ID NO: 245875 - DNA, 25 bp, Probe Sequence
gtttcaccttacacagaataatcag

SEQ ID NO: 245876 - DNA, 25 bp, Probe Sequence
gtttcatcccatgtacaaaaccatt

SEQ ID NO: 245877 - DNA, 25 bp, Probe Sequence
gtttccaaattccacaataagcaat

SEQ ID NO: 245878 - DNA, 25 bp, Probe Sequence
gtttcaacgaatcacagcaaggctt

SEQ ID NO: 245879 - DNA, 25 bp, Probe Sequence
gtttccacaaatcaagacaagctta

SEQ ID NO: 245880 - DNA, 25 bp, Probe Sequence
gtttccaatagactaaatactgttt

SEQ ID NO: 245881 - DNA, 25 bp, Probe Sequence
gtttccaatagactaaatactgttt

SEQ ID NO: 245882 - DNA, 25 bp, Probe Sequence
gtttcccatggatacacaacgttgc

SEQ ID NO: 245883 - DNA, 25 bp, Probe Sequence
gtttccccgcataaacaacataagc

SEQ ID NO: 245884 - DNA, 25 bp, Probe Sequence
gtttcactcggcataacatcatcta

SEQ ID NO: 245885 - DNA, 25 bp, Probe Sequence
gtttcactgcgtgcttatgaccaac

SEQ ID NO: 245886 - DNA, 25 bp, Probe Sequence
gtttcactgtgttctatatggttac

SEQ ID NO: 245887 - DNA, 25 bp, Probe Sequence
gtttcaatgtgattctaatgtcttc

SEQ ID NO: 245888 - DNA, 25 bp, Probe Sequence
gtattaaggtgttgaattacgccag

SEQ ID NO: 245889 - DNA, 25 bp, Probe Sequence
gtttacagtgctgcaaattacacca

SEQ ID NO: 245890 - DNA, 25 bp, Probe Sequence
gtttaagtgcaggctgagacccagc

SEQ ID NO: 245891 - DNA, 25 bp, Probe Sequence
gtttgaatcgcggtgcgacgaagga

SEQ ID NO: 245892 - DNA, 25 bp, Probe Sequence
gtttgcaatattttgtactacagga

SEQ ID NO: 245893 - DNA, 25 bp, Probe Sequence
gtttcagaagtcttggcaatatcaa

SEQ ID NO: 245894 - DNA, 25 bp, Probe Sequence
gtttcagatcagtagggagaccata

SEQ ID NO: 245895 - DNA, 25 bp, Probe Sequence
gtttagacaactggtaagccagctc

SEQ ID NO: 245896 - DNA, 25 bp, Probe Sequence
gtttatgagatagtgggtagtacca

SEQ ID NO: 245897 - DNA, 25 bp, Probe Sequence
gtagtaggacgcgtggtttccgatt

SEQ ID NO: 245898 - DNA, 25 bp, Probe Sequence
gtttgagtccttgttttccagattt

SEQ ID NO: 245899 - DNA, 25 bp, Probe Sequence
gtatacagtcctagagaattcctct

SEQ ID NO: 245900 - DNA, 25 bp, Probe Sequence
gtttccatcctattgaattattctt

SEQ ID NO: 245901 - DNA, 25 bp, Probe Sequence
gtttagcttctattgaacttttgtg

SEQ ID NO: 245902 - DNA, 25 bp, Probe Sequence
gtttactttgtgtagatccatttgt

SEQ ID NO: 245903 - DNA, 25 bp, Probe Sequence
gtttactgctttcagtcgacctgat

SEQ ID NO: 245904 - DNA, 25 bp, Probe Sequence
gtttcactttctaagttaccagtgg

SEQ ID NO: 245905 - DNA, 25 bp, Probe Sequence
gtttctgcttccatatatttcccag

SEQ ID NO: 245906 - DNA, 25 bp, Probe Sequence
gtttacttatgcatctctttgcaag

SEQ ID NO: 245907 - DNA, 25 bp, Probe Sequence
gtataagtctaattgcccattgcca

SEQ ID NO: 245908 - DNA, 25 bp, Probe Sequence
gtatttgttcgactcgcacttgact

SEQ ID NO: 245909 - DNA, 25 bp, Probe Sequence
gtttagtatcactatcttctctcct

SEQ ID NO: 245910 - DNA, 25 bp, Probe Sequence
gtttagtaacatattgccaccgtct

SEQ ID NO: 245911 - DNA, 25 bp, Probe Sequence
gtttcagtgaacaagtttcagcggt

SEQ ID NO: 245912 - DNA, 25 bp, Probe Sequence
gtttcagtgaacaagtttcagcggt

SEQ ID NO: 245913 - DNA, 25 bp, Probe Sequence
gtttcagtgaacaagtttcagcggt

SEQ ID NO: 245914 - DNA, 25 bp, Probe Sequence
gtttcagagtaagatttcaggtgac

SEQ ID NO: 245915 - DNA, 25 bp, Probe Sequence
gtttgcaatggaaccttggcaggcg

SEQ ID NO: 245916 - DNA, 25 bp, Probe Sequence
gacatgttcagggatcgccaggcgt

SEQ ID NO: 245917 - DNA, 25 bp, Probe Sequence
gccaggcgttttctgagcatacctg

SEQ ID NO: 245918 - DNA, 25 bp, Probe Sequence
gcggcatggtgcaagttgaataacc

SEQ ID NO: 245919 - DNA, 25 bp, Probe Sequence
gaagatgttcgcgattatcttctat

SEQ ID NO: 245920 - DNA, 25 bp, Probe Sequence
tctatatcttcaggcgcgcggtctg

SEQ ID NO: 245921 - DNA, 25 bp, Probe Sequence
gcaacatttgggccagctaaacatg

SEQ ID NO: 245922 - DNA, 25 bp, Probe Sequence
ccagctaaacatgcttcatcgtcgg

SEQ ID NO: 245923 - DNA, 25 bp, Probe Sequence
ccgggctgccacgaccaagtgacag

SEQ ID NO: 245924 - DNA, 25 bp, Probe Sequence
gaccaagtgacagcaatgctgtttc

SEQ ID NO: 245925 - DNA, 25 bp, Probe Sequence
aatgctgtttcactggttatgcggc

SEQ ID NO: 245926 - DNA, 25 bp, Probe Sequence
atgccggtgaacgtgcaaaacaggc

SEQ ID NO: 245927 - DNA, 25 bp, Probe Sequence
acgtgcaaaacaggctctagcgttc

SEQ ID NO: 245928 - DNA, 25 bp, Probe Sequence
ctctagcgttcgaacgcactgattt

SEQ ID NO: 245929 - DNA, 25 bp, Probe Sequence
tcgttcactcatggaaaatagcgat

SEQ ID NO: 245930 - DNA, 25 bp, Probe Sequence
atggaaaatagcgatcgctgccagg

SEQ ID NO: 245931 - DNA, 25 bp, Probe Sequence
tcagggttaaagatatctcacgtac

SEQ ID NO: 245932 - DNA, 25 bp, Probe Sequence
cgctggttagcaccgcaggtgtaga

SEQ ID NO: 245933 - DNA, 25 bp, Probe Sequence
caccgcaggtgtagagaaggcactt

SEQ ID NO: 245934 - DNA, 25 bp, Probe Sequence
gtttcatcaatcatgcctatttaat

SEQ ID NO: 245935 - DNA, 25 bp, Probe Sequence
gtttctgtaattggcttttgaatca

SEQ ID NO: 245936 - DNA, 25 bp, Probe Sequence
gtttgctggatcatcgcttggtaaa

SEQ ID NO: 245937 - DNA, 25 bp, Probe Sequence
gtttcttgaactttgtggtattacg

SEQ ID NO: 245938 - DNA, 25 bp, Probe Sequence
gtttcctaagctctgagttttcagc

SEQ ID NO: 245939 - DNA, 25 bp, Probe Sequence
gtttccaaccatatgtgttttctgc

SEQ ID NO: 245940 - DNA, 25 bp, Probe Sequence
gtttctcaaccaggggaccctgctc

SEQ ID NO: 245941 - DNA, 25 bp, Probe Sequence
gtttccacaaagggctgacacctga

SEQ ID NO: 245942 - DNA, 25 bp, Probe Sequence
gtttaacaggaggccttgacctagt

SEQ ID NO: 245943 - DNA, 25 bp, Probe Sequence
gtttaacatccagcactgtaagaag

SEQ ID NO: 245944 - DNA, 25 bp, Probe Sequence
gtttaagagctcccattgtacagca

SEQ ID NO: 245945 - DNA, 25 bp, Probe Sequence
gtttgtacagccctcttgtatagca

SEQ ID NO: 245946 - DNA, 25 bp, Probe Sequence
gtttcaacaggcccttcctgatgat

SEQ ID NO: 245947 - DNA, 25 bp, Probe Sequence
gtttaatatgtccaactcctcatga

SEQ ID NO: 245948 - DNA, 25 bp, Probe Sequence
gtattaaatgtctaaagcacatgat

SEQ ID NO: 245949 - DNA, 25 bp, Probe Sequence
gtttaaagttcgatgcagcagatac

SEQ ID NO: 245950 - DNA, 25 bp, Probe Sequence
gtttctaagtatagtagcagctaat

SEQ ID NO: 245951 - DNA, 25 bp, Probe Sequence
gtttgcctgcaatggtactgtaatt

SEQ ID NO: 245952 - DNA, 25 bp, Probe Sequence
gtttgtctcaaattataggataact

SEQ ID NO: 245953 - DNA, 25 bp, Probe Sequence
gtttgagttgacgtatgtgggacct

SEQ ID NO: 245954 - DNA, 25 bp, Probe Sequence
gtttggtctatctcattgggaacct

SEQ ID NO: 245955 - DNA, 25 bp, Probe Sequence
gtttggttcaagcattccagtacac

SEQ ID NO: 245956 - DNA, 25 bp, Probe Sequence
gtttgttgaccataaccgtacatct

SEQ ID NO: 245957 - DNA, 25 bp, Probe Sequence
gtcgatttacacttacctcggttca

SEQ ID NO: 245958 - DNA, 25 bp, Probe Sequence
gtcgatttacacttacctcggttca

SEQ ID NO: 245959 - DNA, 25 bp, Probe Sequence
tgtcagttttcctccctttgaggaa

SEQ ID NO: 245960 - DNA, 25 bp, Probe Sequence
gtactttgtatctccggtaagtaga

SEQ ID NO: 245961 - DNA, 25 bp, Probe Sequence
gtatctatttactcccacaaagaaa

SEQ ID NO: 245962 - DNA, 25 bp, Probe Sequence
gtattattttcttgacccaaatgaa

SEQ ID NO: 245963 - DNA, 25 bp, Probe Sequence
gtagacaatttgcctggcaccaaag

SEQ ID NO: 245964 - DNA, 25 bp, Probe Sequence
gtatggaatcttgcggcatccacga

SEQ ID NO: 245965 - DNA, 25 bp, Probe Sequence
gtaggactctttgagcatgctactt

SEQ ID NO: 245966 - DNA, 25 bp, Probe Sequence
gtatgagaagttcaagctctacctc

SEQ ID NO: 245967 - DNA, 25 bp, Probe Sequence
gtttaatctccaaagccatatcctc

SEQ ID NO: 245968 - DNA, 25 bp, Probe Sequence
gtttgactccagaaagacttccctc

SEQ ID NO: 245969 - DNA, 25 bp, Probe Sequence
gtttgacatcgagtttgacattcct

SEQ ID NO: 245970 - DNA, 25 bp, Probe Sequence
gtttgtgtaatcttctaaatccttt

SEQ ID NO: 245971 - DNA, 25 bp, Probe Sequence
gtttgtaaaactacacatccctaat

SEQ ID NO: 245972 - DNA, 25 bp, Probe Sequence
gtttctacacactttatcatccact

SEQ ID NO: 245973 - DNA, 25 bp, Probe Sequence
gtttctacacactttatcatccact

SEQ ID NO: 245974 - DNA, 25 bp, Probe Sequence
gtttcttgatagttactcagacact

SEQ ID NO: 245975 - DNA, 25 bp, Probe Sequence
gtttgtactattaagtcatgtcctg

SEQ ID NO: 245976 - DNA, 25 bp, Probe Sequence
gtttgtttgttatctcagtccagaa

SEQ ID NO: 245977 - DNA, 25 bp, Probe Sequence
gtaggttcagtcagatccaaccatg

SEQ ID NO: 245978 - DNA, 25 bp, Probe Sequence
gtatggttggtctgcatctaagact

SEQ ID NO: 245979 - DNA, 25 bp, Probe Sequence
gtattgtggggctcataaaacatga

SEQ ID NO: 245980 - DNA, 25 bp, Probe Sequence
gtttctgcggtatcccaatcacaga

SEQ ID NO: 245981 - DNA, 25 bp, Probe Sequence
gtttctgcccataaccaggacacac

SEQ ID NO: 245982 - DNA, 25 bp, Probe Sequence
gtttagctttataccttggccacag

SEQ ID NO: 245983 - DNA, 25 bp, Probe Sequence
gtttacacgtttgcatagactacac

SEQ ID NO: 245984 - DNA, 25 bp, Probe Sequence
gtttacacttgtctcaagcctatct

SEQ ID NO: 245985 - DNA, 25 bp, Probe Sequence
gtttacaattgtttatacactgttc

SEQ ID NO: 245986 - DNA, 25 bp, Probe Sequence
gtttgcctatctcataatacagttt

SEQ ID NO: 245987 - DNA, 25 bp, Probe Sequence
gtttgactatctgactccaaggaat

SEQ ID NO: 245988 - DNA, 25 bp, Probe Sequence
gtttactcacgtcatccagcagaga

SEQ ID NO: 245989 - DNA, 25 bp, Probe Sequence
gtttcctcctgtagtgctcacaggt

SEQ ID NO: 245990 - DNA, 25 bp, Probe Sequence
gtttcctaattccatctcactggag

SEQ ID NO: 245991 - DNA, 25 bp, Probe Sequence
gtttcttgccttgatgtactggagc

SEQ ID NO: 245992 - DNA, 25 bp, Probe Sequence
gtttgtatccttgcagttatgtgac

SEQ ID NO: 245993 - DNA, 25 bp, Probe Sequence
gtttcttcctgtgactgtagagaca

SEQ ID NO: 245994 - DNA, 25 bp, Probe Sequence
gtttagttgctagaagtcatgagtc

SEQ ID NO: 245995 - DNA, 25 bp, Probe Sequence
gtttaatatcatgtcaattctggtt

SEQ ID NO: 245996 - DNA, 25 bp, Probe Sequence
gtttaatctgatcacggctcttttt

SEQ ID NO: 245997 - DNA, 25 bp, Probe Sequence
gtttaatcagagtgccatttttttt

SEQ ID NO: 245998 - DNA, 25 bp, Probe Sequence
gtttaccacacatgccagcatgttt

SEQ ID NO: 245999 - DNA, 25 bp, Probe Sequence
gtttcccatacaaacactggactgc

SEQ ID NO: 246000 - DNA, 25 bp, Probe Sequence
gtttccatccaccaaaagaattgct

SEQ ID NO: 246001 - DNA, 25 bp, Probe Sequence
gtttctctgaagcaaaatgataggc

SEQ ID NO: 246002 - DNA, 25 bp, Probe Sequence
gtttccttattgaaaaatcagtgta

SEQ ID NO: 246003 - DNA, 25 bp, Probe Sequence
gtttcactgtgtgggataagcaagt

SEQ ID NO: 246004 - DNA, 25 bp, Probe Sequence
gtttctgggctgcgaagacatggct

SEQ ID NO: 246005 - DNA, 25 bp, Probe Sequence
gtttcgggcattcagaagctcatta

SEQ ID NO: 246006 - DNA, 25 bp, Probe Sequence
gtttcttgactttcaatatctttga

SEQ ID NO: 246007 - DNA, 25 bp, Probe Sequence
gtttcttggaattttatatttgaca

SEQ ID NO: 246008 - DNA, 25 bp, Probe Sequence
gtatttgcttgccttttaagttact

SEQ ID NO: 246009 - DNA, 25 bp, Probe Sequence
gtttgtgttgggattactgactcat

SEQ ID NO: 246010 - DNA, 25 bp, Probe Sequence
gtttcagttggcatttcactgactt

SEQ ID NO: 246011 - DNA, 25 bp, Probe Sequence
gtttcaattgccatttaagtttagt

SEQ ID NO: 246012 - DNA, 25 bp, Probe Sequence
gtattccttgccactttattttgtt

SEQ ID NO: 246013 - DNA, 25 bp, Probe Sequence
gtaaccttggcatctttatttacca

SEQ ID NO: 246014 - DNA, 25 bp, Probe Sequence
ggaacctaatggtgcttattttcct

SEQ ID NO: 246015 - DNA, 25 bp, Probe Sequence
gtataacggtggtgcctatctactt

SEQ ID NO: 246016 - DNA, 25 bp, Probe Sequence
gtatacgatgggggacgctcctgac

SEQ ID NO: 246017 - DNA, 25 bp, Probe Sequence
gtatacgatgggggacgctcctgac

SEQ ID NO: 246018 - DNA, 25 bp, Probe Sequence
gtttgcggtggttgacgtagtgctc

SEQ ID NO: 246019 - DNA, 25 bp, Probe Sequence
gtttcttgtttaatagtagtcatcc

SEQ ID NO: 246020 - DNA, 25 bp, Probe Sequence
gtttcatgtgggggtattatgtacc

SEQ ID NO: 246021 - DNA, 25 bp, Probe Sequence
gtttcatgatgcatgggtcatttgt

SEQ ID NO: 246022 - DNA, 25 bp, Probe Sequence
gtttcaggccatcatatcattctta

SEQ ID NO: 246023 - DNA, 25 bp, Probe Sequence
gtttcagctgtcagaaagctgctgt

SEQ ID NO: 246024 - DNA, 25 bp, Probe Sequence
gtttcagtgtcaaatggcggtctta

SEQ ID NO: 246025 - DNA, 25 bp, Probe Sequence
gtttcaggttggaaccagccttcac

SEQ ID NO: 246026 - DNA, 25 bp, Probe Sequence
gtttaagttggttgctcagctgtac

SEQ ID NO: 246027 - DNA, 25 bp, Probe Sequence
gtttacagctaagggcacagattga

SEQ ID NO: 246028 - DNA, 25 bp, Probe Sequence
gtttaactcatattctgcacgatct

SEQ ID NO: 246029 - DNA, 25 bp, Probe Sequence
gtttgtcactcttactgcacagact

SEQ ID NO: 246030 - DNA, 25 bp, Probe Sequence
gtttcttcatgtgatctcaagtccc

SEQ ID NO: 246031 - DNA, 25 bp, Probe Sequence
gtttgctttgctgaccaaatgcctg

SEQ ID NO: 246032 - DNA, 25 bp, Probe Sequence
gtttcaataccatccactatgcaat

SEQ ID NO: 246033 - DNA, 25 bp, Probe Sequence
gtttctcatctccatggacatcttc

SEQ ID NO: 246034 - DNA, 25 bp, Probe Sequence
gtttctctgttgtagacatcttgtg

SEQ ID NO: 246035 - DNA, 25 bp, Probe Sequence
gtatttctgtggggtcactggtaat

SEQ ID NO: 246036 - DNA, 25 bp, Probe Sequence
gtataactggagtgccaaggctaaa

SEQ ID NO: 246037 - DNA, 25 bp, Probe Sequence
gtaggaatgaagtggaagtccaggc

SEQ ID NO: 246038 - DNA, 25 bp, Probe Sequence
gtaggaatgaagtggaagtccaggc

SEQ ID NO: 246039 - DNA, 25 bp, Probe Sequence
gtaggagttaaagaccagcctggcc

SEQ ID NO: 246040 - DNA, 25 bp, Probe Sequence
gtagaaggggaagaccaggcgcagt

SEQ ID NO: 246041 - DNA, 25 bp, Probe Sequence
gtataagtttgtggccaccgggcat

SEQ ID NO: 246042 - DNA, 25 bp, Probe Sequence
gtatacggtttgactcacggggatt

SEQ ID NO: 246043 - DNA, 25 bp, Probe Sequence
gtactgggcttaattcctcggtgat

SEQ ID NO: 246044 - DNA, 25 bp, Probe Sequence
gtttgggcaccaaatcaacgggact

SEQ ID NO: 246045 - DNA, 25 bp, Probe Sequence
gtttggcaccaaaatcaacgggact

SEQ ID NO: 246046 - DNA, 25 bp, Probe Sequence
gtttgtcaccctcgataaaggaagt

SEQ ID NO: 246047 - DNA, 25 bp, Probe Sequence
gtttaacccttctgataggtagttg

SEQ ID NO: 246048 - DNA, 25 bp, Probe Sequence
gtattaacctctgtagaaggctgtt

SEQ ID NO: 246049 - DNA, 25 bp, Probe Sequence
gtttcgccctctttgagaatggccc

SEQ ID NO: 246050 - DNA, 25 bp, Probe Sequence
gtttcaccattttcaggcactgtgt

SEQ ID NO: 246051 - DNA, 25 bp, Probe Sequence
gtttcctcttattcaagccatgcac

SEQ ID NO: 246052 - DNA, 25 bp, Probe Sequence
gtttcacttcttttagatccatcca

SEQ ID NO: 246053 - DNA, 25 bp, Probe Sequence
gtttacttttcattcagattttgtg

SEQ ID NO: 246054 - DNA, 25 bp, Probe Sequence
gtttacattttctggtactctgtga

SEQ ID NO: 246055 - DNA, 25 bp, Probe Sequence
gtttgactttgtttggtgaaatgta

SEQ ID NO: 246056 - DNA, 25 bp, Probe Sequence
gtttgctcttccttgggtatgaatg

SEQ ID NO: 246057 - DNA, 25 bp, Probe Sequence
gtttctcgttcgggactgagttgtg

SEQ ID NO: 246058 - DNA, 25 bp, Probe Sequence
gtttcttactcgggagctggctgaa

SEQ ID NO: 246059 - DNA, 25 bp, Probe Sequence
gtttcatctgaatccagaggtgcat

SEQ ID NO: 246060 - DNA, 25 bp, Probe Sequence
gtttctgctaatttctggtgtcact

SEQ ID NO: 246061 - DNA, 25 bp, Probe Sequence
gtttgtctccattcttatggccagc

SEQ ID NO: 246062 - DNA, 25 bp, Probe Sequence
gtttgtcaccagttaagcaggctcc

SEQ ID NO: 246063 - DNA, 25 bp, Probe Sequence
gtactgtcccggaggaggttgggag

SEQ ID NO: 246064 - DNA, 25 bp, Probe Sequence
gtttgtgcttcaggtggggtttgga

SEQ ID NO: 246065 - DNA, 25 bp, Probe Sequence
gtttcatctactgttgctgtgtttg

SEQ ID NO: 246066 - DNA, 25 bp, Probe Sequence
gtttcctaccgcatttgaattcaat

SEQ ID NO: 246067 - DNA, 25 bp, Probe Sequence
gtatttctacccttttagatttgat

SEQ ID NO: 246068 - DNA, 25 bp, Probe Sequence
gtttcttaaacgtatatcctttcat

SEQ ID NO: 246069 - DNA, 25 bp, Probe Sequence
gtttcttacaatgaaatgttctcta

SEQ ID NO: 246070 - DNA, 25 bp, Probe Sequence
gtttgtaagcaaaacactttgagta

SEQ ID NO: 246071 - DNA, 25 bp, Probe Sequence
gtttgtattgagagacacacttcag

SEQ ID NO: 246072 - DNA, 25 bp, Probe Sequence
gtttcctatggaagagacacctctg

SEQ ID NO: 246073 - DNA, 25 bp, Probe Sequence
gtttcaatattgactcagaacctgg

SEQ ID NO: 246074 - DNA, 25 bp, Probe Sequence
gtatacatacgtaacaaacctgcat

SEQ ID NO: 246075 - DNA, 25 bp, Probe Sequence
gtatcctggcttataacaggccatc

SEQ ID NO: 246076 - DNA, 25 bp, Probe Sequence
gtttcatgttctacttgaggcagcc

SEQ ID NO: 246077 - DNA, 25 bp, Probe Sequence
gtttctttctgacctagtcagatgt

SEQ ID NO: 246078 - DNA, 25 bp, Probe Sequence
gtttcctgcccagaatgatcagatt

SEQ ID NO: 246079 - DNA, 25 bp, Probe Sequence
gtttccggggctagtgatcgtgatc

SEQ ID NO: 246080 - DNA, 25 bp, Probe Sequence
gtttcgggtggtagtggtggacagc

SEQ ID NO: 246081 - DNA, 25 bp, Probe Sequence
gtttctaggatggttttgtgtggag

SEQ ID NO: 246082 - DNA, 25 bp, Probe Sequence
gtttctatggctgggttagatgtaa

SEQ ID NO: 246083 - DNA, 25 bp, Probe Sequence
gtttctattgctctttactggattt

SEQ ID NO: 246084 - DNA, 25 bp, Probe Sequence
gtcttcattttcattaccaggtttc

SEQ ID NO: 246085 - DNA, 25 bp, Probe Sequence
gtgttttttcctatgggtgttatca

SEQ ID NO: 246086 - DNA, 25 bp, Probe Sequence
gtttcttttcacattaggctgttgg

SEQ ID NO: 246087 - DNA, 25 bp, Probe Sequence
gtttcttttcacattaggctgttgg

SEQ ID NO: 246088 - DNA, 25 bp, Probe Sequence
gtttgtgtttaattagggctatgag

SEQ ID NO: 246089 - DNA, 25 bp, Probe Sequence
gtttctgctctgaaagttttccaga

SEQ ID NO: 246090 - DNA, 25 bp, Probe Sequence
gtttcagtcttcaatctgttttgag

SEQ ID NO: 246091 - DNA, 25 bp, Probe Sequence
gtttctttcatgtagcatgttttca

SEQ ID NO: 246092 - DNA, 25 bp, Probe Sequence
gtttgattgtgatggctggcctcca

SEQ ID NO: 246093 - DNA, 25 bp, Probe Sequence
gtttaatgatgatgactccgcaagc

SEQ ID NO: 246094 - DNA, 25 bp, Probe Sequence
gtttcactatgatgactacaagctg

SEQ ID NO: 246095 - DNA, 25 bp, Probe Sequence
gtttcaccagctcatgtaaactgca

SEQ ID NO: 246096 - DNA, 25 bp, Probe Sequence
gtttgcaccaggctgaatattctga

SEQ ID NO: 246097 - DNA, 25 bp, Probe Sequence
gtttcccaagctagactgtgtctga

SEQ ID NO: 246098 - DNA, 25 bp, Probe Sequence
gtttcacaaatggcagacttgaaga

SEQ ID NO: 246099 - DNA, 25 bp, Probe Sequence
gtttcgcaacatggagacggcgaga

SEQ ID NO: 246100 - DNA, 25 bp, Probe Sequence
gtttggcatataggaagcacgctgg

SEQ ID NO: 246101 - DNA, 25 bp, Probe Sequence
gtttctctgatagtgaccctgcagc

SEQ ID NO: 246102 - DNA, 25 bp, Probe Sequence
gtttctcacagactgaactgctccc

SEQ ID NO: 246103 - DNA, 25 bp, Probe Sequence
gtttctcacagactgaactgctccc

SEQ ID NO: 246104 - DNA, 25 bp, Probe Sequence
gtttcttcagagctttcccaagaga

SEQ ID NO: 246105 - DNA, 25 bp, Probe Sequence
gtttcttaaggattacgtatgcagg

SEQ ID NO: 246106 - DNA, 25 bp, Probe Sequence
gtttcaaaagacttgcagctaatct

SEQ ID NO: 246107 - DNA, 25 bp, Probe Sequence
gtttcagcagagccaaccaggaagt

SEQ ID NO: 246108 - DNA, 25 bp, Probe Sequence
gtttccaagacttctcatggaggtg

SEQ ID NO: 246109 - DNA, 25 bp, Probe Sequence
gtttgccagaacaccatggggcttg

SEQ ID NO: 246110 - DNA, 25 bp, Probe Sequence
gtttggagataatacggcaggctgt

SEQ ID NO: 246111 - DNA, 25 bp, Probe Sequence
gtttgtacaaaaaaagcaggctggt

SEQ ID NO: 246112 - DNA, 25 bp, Probe Sequence
gtttgtacaaaaaagcaggctggta

SEQ ID NO: 246113 - DNA, 25 bp, Probe Sequence
gtttgaagccatgaaatcggatgag

SEQ ID NO: 246114 - DNA, 25 bp, Probe Sequence
gtttgaatgcctctaaagcccatgc

SEQ ID NO: 246115 - DNA, 25 bp, Probe Sequence
gtttgttggctcctacaaactggct

SEQ ID NO: 246116 - DNA, 25 bp, Probe Sequence
gtttggtggcatgctacttgcctac

SEQ ID NO: 246117 - DNA, 25 bp, Probe Sequence
gtttgtgtggcctccttaaactagc

SEQ ID NO: 246118 - DNA, 25 bp, Probe Sequence
gtttgtttgaatgcctctaaagccc

SEQ ID NO: 246119 - DNA, 25 bp, Probe Sequence
gtttcatttaacgcttgctcaagct

SEQ ID NO: 246120 - DNA, 25 bp, Probe Sequence
gtttcgtaacacagcattgtatatg

SEQ ID NO: 246121 - DNA, 25 bp, Probe Sequence
gtttcgtaacacagcattgtatatg

SEQ ID NO: 246122 - DNA, 25 bp, Probe Sequence
gtttccaaaagtcgcatcgctaatg

SEQ ID NO: 246123 - DNA, 25 bp, Probe Sequence
gtttctcacacttgttgcaccaaag

SEQ ID NO: 246124 - DNA, 25 bp, Probe Sequence
gtttgatcaatccgttgatccagaa

SEQ ID NO: 246125 - DNA, 25 bp, Probe Sequence
gtttcatccaaagaatatcaaaagg

SEQ ID NO: 246126 - DNA, 25 bp, Probe Sequence
gtttgcattccaagccagtatcaat

SEQ ID NO: 246127 - DNA, 25 bp, Probe Sequence
gtttcatatctaaagcttgtcacta

SEQ ID NO: 246128 - DNA, 25 bp, Probe Sequence
gtttgcaaccacagtattcctttgt

SEQ ID NO: 246129 - DNA, 25 bp, Probe Sequence
gtttgcttcaacagtatatcctact

SEQ ID NO: 246130 - DNA, 25 bp, Probe Sequence
gtttcttaactgacgtaccatggta

SEQ ID NO: 246131 - DNA, 25 bp, Probe Sequence
gtttcttaactgacttatcaggatt

SEQ ID NO: 246132 - DNA, 25 bp, Probe Sequence
gtttctgttttgatgtacattattt

SEQ ID NO: 246133 - DNA, 25 bp, Probe Sequence
gtttcattttgctattggaattttt

SEQ ID NO: 246134 - DNA, 25 bp, Probe Sequence
gtttggcacttgtatttaattcttc

SEQ ID NO: 246135 - DNA, 25 bp, Probe Sequence
gtattggttttacttgcaattgtag

SEQ ID NO: 246136 - DNA, 25 bp, Probe Sequence
gtattgttggtctaagtcaatttga

SEQ ID NO: 246137 - DNA, 25 bp, Probe Sequence
gtttgcatgtagctatagtcactat

SEQ ID NO: 246138 - DNA, 25 bp, Probe Sequence
gtattcattgggttactcctattat

SEQ ID NO: 246139 - DNA, 25 bp, Probe Sequence
gtttctgtggagtttccattatttc

SEQ ID NO: 246140 - DNA, 25 bp, Probe Sequence
gtttctattggctcgacatttttct

SEQ ID NO: 246141 - DNA, 25 bp, Probe Sequence
gtttcttattcattccacttttgtc

SEQ ID NO: 246142 - DNA, 25 bp, Probe Sequence
gtttcattgtctaacacacttcttt

SEQ ID NO: 246143 - DNA, 25 bp, Probe Sequence
gtttctctactaagaactctttctt

SEQ ID NO: 246144 - DNA, 25 bp, Probe Sequence
gtatgtgtctgcgttcggagttttc

SEQ ID NO: 246145 - DNA, 25 bp, Probe Sequence
gtttgtccagattctgccagtcatc

SEQ ID NO: 246146 - DNA, 25 bp, Probe Sequence
gtttgatccagtagcttcttctaaa

SEQ ID NO: 246147 - DNA, 25 bp, Probe Sequence
gtattcatccagagttcttaaagtt

SEQ ID NO: 246148 - DNA, 25 bp, Probe Sequence
gtgtaacgaattctttgaaggcttc

SEQ ID NO: 246149 - DNA, 25 bp, Probe Sequence
gtttcacgaagtttgttcatcagac

SEQ ID NO: 246150 - DNA, 25 bp, Probe Sequence
gtttgcatcagaacgtgtttataga

SEQ ID NO: 246151 - DNA, 25 bp, Probe Sequence
gtttgaggatgacgtgcgctttgag

SEQ ID NO: 246152 - DNA, 25 bp, Probe Sequence
gtttcgtagatggggtttgcagctg

SEQ ID NO: 246153 - DNA, 25 bp, Probe Sequence
gtttcttcgtgcctgttttatgtgc

SEQ ID NO: 246154 - DNA, 25 bp, Probe Sequence
gtttgttcggtttgtttctgatgca

SEQ ID NO: 246155 - DNA, 25 bp, Probe Sequence
gtttctagcagatattttttgatca

SEQ ID NO: 246156 - DNA, 25 bp, Probe Sequence
gtttctagctgaacatctgtatttt

SEQ ID NO: 246157 - DNA, 25 bp, Probe Sequence
gtttcacctaagtctcataatttta

SEQ ID NO: 246158 - DNA, 25 bp, Probe Sequence
gtttcacctagtttatcatattgtt

SEQ ID NO: 246159 - DNA, 25 bp, Probe Sequence
gtatcagccccactttactaagtag

SEQ ID NO: 246160 - DNA, 25 bp, Probe Sequence
gtttgctcctgttgttactgggtag

SEQ ID NO: 246161 - DNA, 25 bp, Probe Sequence
gtttctccatgttggtcaggctggt

SEQ ID NO: 246162 - DNA, 25 bp, Probe Sequence
gtttcaccatgttgcccaggatggt

SEQ ID NO: 246163 - DNA, 25 bp, Probe Sequence
gtttcaccatgttgcccaggatggt

SEQ ID NO: 246164 - DNA, 25 bp, Probe Sequence
gtattcccagctgcttgggaggctg

SEQ ID NO: 246165 - DNA, 25 bp, Probe Sequence
gtaccaggaggcgttggccaaggga

SEQ ID NO: 246166 - DNA, 25 bp, Probe Sequence
gtaacaggatggggcgctcaagaat

SEQ ID NO: 246167 - DNA, 25 bp, Probe Sequence
gtatacaggaggatgtgcctaggtt

SEQ ID NO: 246168 - DNA, 25 bp, Probe Sequence
gtttcaggtgagactttgccagcag

SEQ ID NO: 246169 - DNA, 25 bp, Probe Sequence
gtttcagctgagtttactggcagca

SEQ ID NO: 246170 - DNA, 25 bp, Probe Sequence
gtttcctgtgaaacatggagcagca

SEQ ID NO: 246171 - DNA, 25 bp, Probe Sequence
gtttccagtcacactgcagtgtgcc

SEQ ID NO: 246172 - DNA, 25 bp, Probe Sequence
gtttctagttgccgaagtgtctgct

SEQ ID NO: 246173 - DNA, 25 bp, Probe Sequence
gtatactactctcaaaggtgtcttt

SEQ ID NO: 246174 - DNA, 25 bp, Probe Sequence
gtattgtaccaatattgggttttgt

SEQ ID NO: 246175 - DNA, 25 bp, Probe Sequence
gtttgctaccctgattggtttctat

SEQ ID NO: 246176 - DNA, 25 bp, Probe Sequence
gtatatcaaccctcttttagtcaaa

SEQ ID NO: 246177 - DNA, 25 bp, Probe Sequence
gtatcatcaagctcaacgttctgga

SEQ ID NO: 246178 - DNA, 25 bp, Probe Sequence
gtatgctcatacttggacagttagg

SEQ ID NO: 246179 - DNA, 25 bp, Probe Sequence
gtatcaacctgctgtatattagagc

SEQ ID NO: 246180 - DNA, 25 bp, Probe Sequence
gtacccctgcaacaactacagaacc

SEQ ID NO: 246181 - DNA, 25 bp, Probe Sequence
gtaccacccaatgaaaaaaggatct

SEQ ID NO: 246182 - DNA, 25 bp, Probe Sequence
gtatcccccttggagcaaggacagg

SEQ ID NO: 246183 - DNA, 25 bp, Probe Sequence
gtttccactttggcagaaggcagac

SEQ ID NO: 246184 - DNA, 25 bp, Probe Sequence
gtttccactcctgcttcagaagaag

SEQ ID NO: 246185 - DNA, 25 bp, Probe Sequence
gtttccagccgcaatttgaaatgaa

SEQ ID NO: 246186 - DNA, 25 bp, Probe Sequence
gtttctcatatcctgttcaagttaa

SEQ ID NO: 246187 - DNA, 25 bp, Probe Sequence
gtttctcactgcatataagagttat

SEQ ID NO: 246188 - DNA, 25 bp, Probe Sequence
gtttctgcactgctgagacagaaaa

SEQ ID NO: 246189 - DNA, 25 bp, Probe Sequence
gtttctccctgccaaggcaaaaaat

SEQ ID NO: 246190 - DNA, 25 bp, Probe Sequence
gtattgcccgatgcaatgagaaaaa

SEQ ID NO: 246191 - DNA, 25 bp, Probe Sequence
gtattccacgaggcattgagaaaac

SEQ ID NO: 246192 - DNA, 25 bp, Probe Sequence
gtattgccaagagcttgaagctcga

SEQ ID NO: 246193 - DNA, 25 bp, Probe Sequence
gtattgccaagagcttgaagctcga

SEQ ID NO: 246194 - DNA, 25 bp, Probe Sequence
gtttgccatcaaggcggaagagcgg

SEQ ID NO: 246195 - DNA, 25 bp, Probe Sequence
gtttctctgaacgtgtagagcaccg

SEQ ID NO: 246196 - DNA, 25 bp, Probe Sequence
gtttgaatgagcagatgtacacccg

SEQ ID NO: 246197 - DNA, 25 bp, Probe Sequence
gtttgaactgattgatggcaaccca

SEQ ID NO: 246198 - DNA, 25 bp, Probe Sequence
gtttgccagctgtatattatcccta

SEQ ID NO: 246199 - DNA, 25 bp, Probe Sequence
gtttgccttgatgctgatcatcacc

SEQ ID NO: 246200 - DNA, 25 bp, Probe Sequence
gtttgactctgaacgcagcatcagc

SEQ ID NO: 246201 - DNA, 25 bp, Probe Sequence
gtttcatttgatatgtgaatgctca

SEQ ID NO: 246202 - DNA, 25 bp, Probe Sequence
gtttcattgtattctgtgagtgata

SEQ ID NO: 246203 - DNA, 25 bp, Probe Sequence
gtttctatatgttgcgttgtgatga

SEQ ID NO: 246204 - DNA, 25 bp, Probe Sequence
gtttctcatgtttgaatgtgtgact

SEQ ID NO: 246205 - DNA, 25 bp, Probe Sequence
gtttgcttgtacttcagtgtgagag

SEQ ID NO: 246206 - DNA, 25 bp, Probe Sequence
gtttgcattgcagtcaacagtcgaa

SEQ ID NO: 246207 - DNA, 25 bp, Probe Sequence
gtttgcattgcagtcaacagtcgaa

SEQ ID NO: 246208 - DNA, 25 bp, Probe Sequence
gtttctctgtgccagatcttcagtg

SEQ ID NO: 246209 - DNA, 25 bp, Probe Sequence
gtttctctgggactgtgtcattttg

SEQ ID NO: 246210 - DNA, 25 bp, Probe Sequence
gtttcctttgacattctttttatat

SEQ ID NO: 246211 - DNA, 25 bp, Probe Sequence
gtttctttctaaattgctgttcctt

SEQ ID NO: 246212 - DNA, 25 bp, Probe Sequence
gtttctttctaaattgctgttcctt

SEQ ID NO: 246213 - DNA, 25 bp, Probe Sequence
gtttccatttagtttgcttccgatg

SEQ ID NO: 246214 - DNA, 25 bp, Probe Sequence
gtttccatttattccatgttggtgt

SEQ ID NO: 246215 - DNA, 25 bp, Probe Sequence
gtgataacttcgaagccatagggtg

SEQ ID NO: 246216 - DNA, 25 bp, Probe Sequence
gtatctacctcaaaggctattggtg

SEQ ID NO: 246217 - DNA, 25 bp, Probe Sequence
gtttgcgagtcaaatggcatttcct

SEQ ID NO: 246218 - DNA, 25 bp, Probe Sequence
gtttctagcacaaaaatttgcctgc

SEQ ID NO: 246219 - DNA, 25 bp, Probe Sequence
gtttgtaaatcttaacctcctgcct

SEQ ID NO: 246220 - DNA, 25 bp, Probe Sequence
gtttgttaatctcaactaacgccta

SEQ ID NO: 246221 - DNA, 25 bp, Probe Sequence
gtttggctacctgagccgagagggc

SEQ ID NO: 246222 - DNA, 25 bp, Probe Sequence
gtttcttattctgagattggagggc

SEQ ID NO: 246223 - DNA, 25 bp, Probe Sequence
gtttctctgcagactgctaaggtga

SEQ ID NO: 246224 - DNA, 25 bp, Probe Sequence
gtttgtggagattggagtggctgac

SEQ ID NO: 246225 - DNA, 25 bp, Probe Sequence
gtttgcggatgagggcatgtgcggc

SEQ ID NO: 246226 - DNA, 25 bp, Probe Sequence
gtttgccctgcaggcctatgagagc

SEQ ID NO: 246227 - DNA, 25 bp, Probe Sequence
gtttgccctgcaggcctatgagagc

SEQ ID NO: 246228 - DNA, 25 bp, Probe Sequence
gtttgcacgctggcctatatatcag

SEQ ID NO: 246229 - DNA, 25 bp, Probe Sequence
gtttgaccagtcacagattcaggag

SEQ ID NO: 246230 - DNA, 25 bp, Probe Sequence
gtttgaggggccggactcaggagca

SEQ ID NO: 246231 - DNA, 25 bp, Probe Sequence
gtttgagtgggcgtggcattcagta

SEQ ID NO: 246232 - DNA, 25 bp, Probe Sequence
gtttccgtggcaggtgagtattcag

SEQ ID NO: 246233 - DNA, 25 bp, Probe Sequence
gtttcccatgaagctgattacgcag

SEQ ID NO: 246234 - DNA, 25 bp, Probe Sequence
gtttctgccagacactgaaagccat

SEQ ID NO: 246235 - DNA, 25 bp, Probe Sequence
gtttctccattttctagaagctgct

SEQ ID NO: 246236 - DNA, 25 bp, Probe Sequence
gtttcccattcatcacagaacacga

SEQ ID NO: 246237 - DNA, 25 bp, Probe Sequence
gtttcctgattctatgacagcaaca

SEQ ID NO: 246238 - DNA, 25 bp, Probe Sequence
gtttcctgatacaatgctacaagca

SEQ ID NO: 246239 - DNA, 25 bp, Probe Sequence
gtttgctctaaaatcgactcacaga

SEQ ID NO: 246240 - DNA, 25 bp, Probe Sequence
gtttgctgctattagcagaaactca

SEQ ID NO: 246241 - DNA, 25 bp, Probe Sequence
gtttgtatcattagcaacaacatgc

SEQ ID NO: 246242 - DNA, 25 bp, Probe Sequence
gtatatgtagctgatgacccactgg

SEQ ID NO: 246243 - DNA, 25 bp, Probe Sequence
gtatagtgcctgctgacttaggtgg

SEQ ID NO: 246244 - DNA, 25 bp, Probe Sequence
gtattgattgactctgctattggca

SEQ ID NO: 246245 - DNA, 25 bp, Probe Sequence
gtttgctcatactacattgagtaga

SEQ ID NO: 246246 - DNA, 25 bp, Probe Sequence
gtttctgcatatcacctgtatagta

SEQ ID NO: 246247 - DNA, 25 bp, Probe Sequence
gtttccaatctgtcctgttacaaaa

SEQ ID NO: 246248 - DNA, 25 bp, Probe Sequence
gtttccaatctgtcctgttacaaaa

SEQ ID NO: 246249 - DNA, 25 bp, Probe Sequence
gtttctctgtcttttctatcaaaat

SEQ ID NO: 246250 - DNA, 25 bp, Probe Sequence
gtttcctattaatcttcagctgaac

SEQ ID NO: 246251 - DNA, 25 bp, Probe Sequence
gtattccaagtttactccattacat

SEQ ID NO: 246252 - DNA, 25 bp, Probe Sequence
gtttccattatttctactgcttaca

SEQ ID NO: 246253 - DNA, 25 bp, Probe Sequence
gtttgaattttcttgtcgcttccta

SEQ ID NO: 246254 - DNA, 25 bp, Probe Sequence
gtttgactatttctgtatgtctcca

SEQ ID NO: 246255 - DNA, 25 bp, Probe Sequence
gtttggtaacttttatgccttcact

SEQ ID NO: 246256 - DNA, 25 bp, Probe Sequence
gtttggaaacgatgtgcagcacttc

SEQ ID NO: 246257 - DNA, 25 bp, Probe Sequence
gtttggataatcttgccccagattc

SEQ ID NO: 246258 - DNA, 25 bp, Probe Sequence
gtatcagaaaaattgccccagactc

SEQ ID NO: 246259 - DNA, 25 bp, Probe Sequence
gtataggatgattgttcgtgtaact

SEQ ID NO: 246260 - DNA, 25 bp, Probe Sequence
gtattagtcatctgctagttaccat

SEQ ID NO: 246261 - DNA, 25 bp, Probe Sequence
gtattgcagtaatcatcacttacag

SEQ ID NO: 246262 - DNA, 25 bp, Probe Sequence
gtatttgctcaacccagttacaggg

SEQ ID NO: 246263 - DNA, 25 bp, Probe Sequence
gtttctggcatcctaaatcaacggg

SEQ ID NO: 246264 - DNA, 25 bp, Probe Sequence
gtttctgagatgccattattccaag

SEQ ID NO: 246265 - DNA, 25 bp, Probe Sequence
gtttctggaccagtttgtctaagtc

SEQ ID NO: 246266 - DNA, 25 bp, Probe Sequence
gtttcctgaccactctattttgagt

SEQ ID NO: 246267 - DNA, 25 bp, Probe Sequence
gtttgtcatacagcttaatttagta

SEQ ID NO: 246268 - DNA, 25 bp, Probe Sequence
gtttgctatggaacttattcttaaa

SEQ ID NO: 246269 - DNA, 25 bp, Probe Sequence
gtttgttggtctattctttagaata

SEQ ID NO: 246270 - DNA, 25 bp, Probe Sequence
gtatctttggttatcctgtttgaag

SEQ ID NO: 246271 - DNA, 25 bp, Probe Sequence
gtatactttttttacataattggag

SEQ ID NO: 246272 - DNA, 25 bp, Probe Sequence
gtatagttattttaagtgccaatta

SEQ ID NO: 246273 - DNA, 25 bp, Probe Sequence
gtttgtttcttattcattccacttt

SEQ ID NO: 246274 - DNA, 25 bp, Probe Sequence
gtttgctttttattcggacaggcca

SEQ ID NO: 246275 - DNA, 25 bp, Probe Sequence
gtttggttgttgttggacgcagggc

SEQ ID NO: 246276 - DNA, 25 bp, Probe Sequence
gtttgattttgttttgagcctggag

SEQ ID NO: 246277 - DNA, 25 bp, Probe Sequence
gtattgtagtttattgcccggagat

SEQ ID NO: 246278 - DNA, 25 bp, Probe Sequence
gtattgtacgttatttaatgtctga

SEQ ID NO: 246279 - DNA, 25 bp, Probe Sequence
gtttgtaaatatattgtctttctct

SEQ ID NO: 246280 - DNA, 25 bp, Probe Sequence
gtttctacagtatgtttttccagct

SEQ ID NO: 246281 - DNA, 25 bp, Probe Sequence
gtttctcctgtaatattttatccct

SEQ ID NO: 246282 - DNA, 25 bp, Probe Sequence
gtatctttgagtgtttttactcctt

SEQ ID NO: 246283 - DNA, 25 bp, Probe Sequence
gtattttgtgctgttttccattttc

SEQ ID NO: 246284 - DNA, 25 bp, Probe Sequence
gtttgattatgtgatgtattacttt

SEQ ID NO: 246285 - DNA, 25 bp, Probe Sequence
gtttgcttattcaagagatcttcat

SEQ ID NO: 246286 - DNA, 25 bp, Probe Sequence
gtttgctatttgatcttcttgcatc

SEQ ID NO: 246287 - DNA, 25 bp, Probe Sequence
gtttgctatattcctttttctatga

SEQ ID NO: 246288 - DNA, 25 bp, Probe Sequence
gtttctgatctgtactttgtgttta

SEQ ID NO: 246289 - DNA, 25 bp, Probe Sequence
gtttctgacatgtgcctatgcgttt

SEQ ID NO: 246290 - DNA, 25 bp, Probe Sequence
gtttgtgactattctcatctctgtt

SEQ ID NO: 246291 - DNA, 25 bp, Probe Sequence
gtatcctgaaatggtctctcgtatt

SEQ ID NO: 246292 - DNA, 25 bp, Probe Sequence
gtatgcaggaagctgtgctctagca

SEQ ID NO: 246293 - DNA, 25 bp, Probe Sequence
gtatcaggcaagcgcatcttacttc

SEQ ID NO: 246294 - DNA, 25 bp, Probe Sequence
gtatcactaagctcgctttcttgct

SEQ ID NO: 246295 - DNA, 25 bp, Probe Sequence
gtatcccaagcagcggtcattcaag

SEQ ID NO: 246296 - DNA, 25 bp, Probe Sequence
gtatcagacacagcacagcagccat

SEQ ID NO: 246297 - DNA, 25 bp, Probe Sequence
gtatcagacacagcacagcagccat

SEQ ID NO: 246298 - DNA, 25 bp, Probe Sequence
gtatctgagcacacataggaaagtc

SEQ ID NO: 246299 - DNA, 25 bp, Probe Sequence
gtatatagtcaagtaggagcagtgg

SEQ ID NO: 246300 - DNA, 25 bp, Probe Sequence
gtattgattccaggggccatgcagg

SEQ ID NO: 246301 - DNA, 25 bp, Probe Sequence
gtattgattccaggggccatgcagg

SEQ ID NO: 246302 - DNA, 25 bp, Probe Sequence
gtatatgcatgctcaggcagggcta

SEQ ID NO: 246303 - DNA, 25 bp, Probe Sequence
gtatccaaacaggagcggctacttc

SEQ ID NO: 246304 - DNA, 25 bp, Probe Sequence
gtatttagagcgcagcggctgacgg

SEQ ID NO: 246305 - DNA, 25 bp, Probe Sequence
gtttctgcaatggcgaggtacaagc

SEQ ID NO: 246306 - DNA, 25 bp, Probe Sequence
gtttctgcatttggactgaaagtgc

SEQ ID NO: 246307 - DNA, 25 bp, Probe Sequence
gtttctgtgagatgagctaaattgc

SEQ ID NO: 246308 - DNA, 25 bp, Probe Sequence
gtttctgggattgcataatgttcgt

SEQ ID NO: 246309 - DNA, 25 bp, Probe Sequence
gtatttgggtgtggacaagcttgcc

SEQ ID NO: 246310 - DNA, 25 bp, Probe Sequence
gtattttggactgggcaactcccct

SEQ ID NO: 246311 - DNA, 25 bp, Probe Sequence
gtatttgtgcgcaagggaacctctg

SEQ ID NO: 246312 - DNA, 25 bp, Probe Sequence
gtattctgtgagcatgtaaaagcgg

SEQ ID NO: 246313 - DNA, 25 bp, Probe Sequence
gtttgatctcagtgtaacgacatgg

SEQ ID NO: 246314 - DNA, 25 bp, Probe Sequence
gtatagactatgtgatacctaaaac

SEQ ID NO: 246315 - DNA, 25 bp, Probe Sequence
gtatgaccttgtctagtctccaaac

SEQ ID NO: 246316 - DNA, 25 bp, Probe Sequence
gtatactttagtagacatttataac

SEQ ID NO: 246317 - DNA, 25 bp, Probe Sequence
gtatacttattttttttagccatca

SEQ ID NO: 246318 - DNA, 25 bp, Probe Sequence
gtatacttattttttttagccatca

SEQ ID NO: 246319 - DNA, 25 bp, Probe Sequence
gtatatttactgttaacccagaaca

SEQ ID NO: 246320 - DNA, 25 bp, Probe Sequence
gtttgttaggatcacctcccagata

SEQ ID NO: 246321 - DNA, 25 bp, Probe Sequence
gtttgtacagggtaactctacagaa

SEQ ID NO: 246322 - DNA, 25 bp, Probe Sequence
gtttgtgcccggaaattggccatgg

SEQ ID NO: 246323 - DNA, 25 bp, Probe Sequence
gtttctgcacctgtagagatcacca

SEQ ID NO: 246324 - DNA, 25 bp, Probe Sequence
gtattcagcctttgttcagtccaat

SEQ ID NO: 246325 - DNA, 25 bp, Probe Sequence
gtttgccagtcttgcaatcaggtca

SEQ ID NO: 246326 - DNA, 25 bp, Probe Sequence
gtttcgctgtcattcatgatgcggc

SEQ ID NO: 246327 - DNA, 25 bp, Probe Sequence
gtattctggtcattgaggagacacc

SEQ ID NO: 246328 - DNA, 25 bp, Probe Sequence
gtatcctgggacttggaagctggca

SEQ ID NO: 246329 - DNA, 25 bp, Probe Sequence
gtttctggcaacgatgagtcacgaa

SEQ ID NO: 246330 - DNA, 25 bp, Probe Sequence
gtattgcggcaagaaggcccagctc

SEQ ID NO: 246331 - DNA, 25 bp, Probe Sequence
gtttcgtgcattggaagaccccacc

SEQ ID NO: 246332 - DNA, 25 bp, Probe Sequence
gtttctggaatatatgactgcccca

SEQ ID NO: 246333 - DNA, 25 bp, Probe Sequence
gtttctgaaattggatggctggcta

SEQ ID NO: 246334 - DNA, 25 bp, Probe Sequence
gtttctgaacttcgtgccatatttt

SEQ ID NO: 246335 - DNA, 25 bp, Probe Sequence
gtttgttactgtagcactttttaca

SEQ ID NO: 246336 - DNA, 25 bp, Probe Sequence
gtttgattaagaagcactatgttaa

SEQ ID NO: 246337 - DNA, 25 bp, Probe Sequence
gtttgctaaagatcttctataaact

SEQ ID NO: 246338 - DNA, 25 bp, Probe Sequence
gtttcctgaggagctttgataagca

SEQ ID NO: 246339 - DNA, 25 bp, Probe Sequence
gtttgtggaggtgttctgattgatc

SEQ ID NO: 246340 - DNA, 25 bp, Probe Sequence
gtttgttgtagtgtacttttcctct

SEQ ID NO: 246341 - DNA, 25 bp, Probe Sequence
gtattttaatatgtgacttttgtct

SEQ ID NO: 246342 - DNA, 25 bp, Probe Sequence
gtatttttctctcagatatttttct

SEQ ID NO: 246343 - DNA, 25 bp, Probe Sequence
gtatttattccagacctttctgcca

SEQ ID NO: 246344 - DNA, 25 bp, Probe Sequence
gtatattgttacacactattttgga

SEQ ID NO: 246345 - DNA, 25 bp, Probe Sequence
gtattagtatggttcaagattgttg

SEQ ID NO: 246346 - DNA, 25 bp, Probe Sequence
gtattcaatagaaatcaaggtgttc

SEQ ID NO: 246347 - DNA, 25 bp, Probe Sequence
gtttgccagtgaagtccacgtgctt

SEQ ID NO: 246348 - DNA, 25 bp, Probe Sequence
gtattgacgtgaatcccactgtggt

SEQ ID NO: 246349 - DNA, 25 bp, Probe Sequence
gtttgactgtaccattgactgttat

SEQ ID NO: 246350 - DNA, 25 bp, Probe Sequence
gtttcgctgttatgtgaattatgat

SEQ ID NO: 246351 - DNA, 25 bp, Probe Sequence
gtttggtttgaagtgaactgtgact

SEQ ID NO: 246352 - DNA, 25 bp, Probe Sequence
ggtcatcgtattgaggaagttcctg

SEQ ID NO: 246353 - DNA, 25 bp, Probe Sequence
gtatcacgtcatgccatgtgagaca

SEQ ID NO: 246354 - DNA, 25 bp, Probe Sequence
gtataggcttgccttgctgagagcc

SEQ ID NO: 246355 - DNA, 25 bp, Probe Sequence
gtagtggctacaggtgctaagcaaa

SEQ ID NO: 246356 - DNA, 25 bp, Probe Sequence
gtagttgcttccctaactgcaaagg

SEQ ID NO: 246357 - DNA, 25 bp, Probe Sequence
gtatctttgttcttcaactggaagc

SEQ ID NO: 246358 - DNA, 25 bp, Probe Sequence
gtatttggtgttacagggaggaaca

SEQ ID NO: 246359 - DNA, 25 bp, Probe Sequence
gtattttgcttttcgtgttagaaca

SEQ ID NO: 246360 - DNA, 25 bp, Probe Sequence
gtattgggcttcttcgttaatagat

SEQ ID NO: 246361 - DNA, 25 bp, Probe Sequence
gtatttcccctcatgtgtgtaagct

SEQ ID NO: 246362 - DNA, 25 bp, Probe Sequence
gtagtgtctcccagatttctaagat

SEQ ID NO: 246363 - DNA, 25 bp, Probe Sequence
gtttgtttctgatgcatctgttcaa

SEQ ID NO: 246364 - DNA, 25 bp, Probe Sequence
gtttgtggtcaaggcctatctgccc

SEQ ID NO: 246365 - DNA, 25 bp, Probe Sequence
gtttgggacacaggacttatctcac

SEQ ID NO: 246366 - DNA, 25 bp, Probe Sequence
gtttgtggcagatgtgtttattact

SEQ ID NO: 246367 - DNA, 25 bp, Probe Sequence
gtttgtcctgatgcttttgtctaat

SEQ ID NO: 246368 - DNA, 25 bp, Probe Sequence
gtttgtgtcgatatgttcggctttt

SEQ ID NO: 246369 - DNA, 25 bp, Probe Sequence
gtttgacatggtgtttgggttttgt

SEQ ID NO: 246370 - DNA, 25 bp, Probe Sequence
gtttggcaggtatctcattggtttg

SEQ ID NO: 246371 - DNA, 25 bp, Probe Sequence
gtttggggctatagcatatgctttt

SEQ ID NO: 246372 - DNA, 25 bp, Probe Sequence
gtttggcagtgttacaacgtagctc

SEQ ID NO: 246373 - DNA, 25 bp, Probe Sequence
gtttggcatcttataactgctcact

SEQ ID NO: 246374 - DNA, 25 bp, Probe Sequence
gtttgacattaaaagcctacactat

SEQ ID NO: 246375 - DNA, 25 bp, Probe Sequence
gtagcaggcttacaagaaatacttg

SEQ ID NO: 246376 - DNA, 25 bp, Probe Sequence
gtatcggctatactagggaaccatt

SEQ ID NO: 246377 - DNA, 25 bp, Probe Sequence
gtatagaatagacagggagaactcg

SEQ ID NO: 246378 - DNA, 25 bp, Probe Sequence
gtattactagatctggaggcaacca

SEQ ID NO: 246379 - DNA, 25 bp, Probe Sequence
gtattcattgtataaatggaatcct

SEQ ID NO: 246380 - DNA, 25 bp, Probe Sequence
gtattttttaacatgtgtgactttc

SEQ ID NO: 246381 - DNA, 25 bp, Probe Sequence
gtatttttgttgtttgggtcactat

SEQ ID NO: 246382 - DNA, 25 bp, Probe Sequence
gtattgctttaccatttttaactgt

SEQ ID NO: 246383 - DNA, 25 bp, Probe Sequence
gtttgccacatgacttattttgata

SEQ ID NO: 246384 - DNA, 25 bp, Probe Sequence
gtttccatcagtccatattgtatac

SEQ ID NO: 246385 - DNA, 25 bp, Probe Sequence
gtttcctgcagcattaggtatgact

SEQ ID NO: 246386 - DNA, 25 bp, Probe Sequence
gtttcctcacaattggcgagatccc

SEQ ID NO: 246387 - DNA, 25 bp, Probe Sequence
gtattggccccatggcaggaacagc

SEQ ID NO: 246388 - DNA, 25 bp, Probe Sequence
gtttggttctactgcattgtggagc

SEQ ID NO: 246389 - DNA, 25 bp, Probe Sequence
gtttggtgttactaggatcagggtc

SEQ ID NO: 246390 - DNA, 25 bp, Probe Sequence
gtttggtgttactaggatcagggtc

SEQ ID NO: 246391 - DNA, 25 bp, Probe Sequence
gtttggctgttcatgtagtcacggt

SEQ ID NO: 246392 - DNA, 25 bp, Probe Sequence
gtttgcagctttgggataccgctgg

SEQ ID NO: 246393 - DNA, 25 bp, Probe Sequence
gtttgatctctaaggaactcctgtt

SEQ ID NO: 246394 - DNA, 25 bp, Probe Sequence
gtttgaatatgaaggcacaccactg

SEQ ID NO: 246395 - DNA, 25 bp, Probe Sequence
gtttgtaatagtgcacactgcaaat

SEQ ID NO: 246396 - DNA, 25 bp, Probe Sequence
gtttgaaaatgctctcacatacagg

SEQ ID NO: 246397 - DNA, 25 bp, Probe Sequence
gtttgaaacagattctccacggtgg

SEQ ID NO: 246398 - DNA, 25 bp, Probe Sequence
gtatcaaacctatccccggatgtgt

SEQ ID NO: 246399 - DNA, 25 bp, Probe Sequence
gtatcaaatcactactagaccgttt

SEQ ID NO: 246400 - DNA, 25 bp, Probe Sequence
gtatcgaatatctatctgagccctc

SEQ ID NO: 246401 - DNA, 25 bp, Probe Sequence
gtatcagcagtaccaggatgccacc

SEQ ID NO: 246402 - DNA, 25 bp, Probe Sequence
gtatcaagtatgacattcccccaac

SEQ ID NO: 246403 - DNA, 25 bp, Probe Sequence
gtatatagctacattaccacattga

SEQ ID NO: 246404 - DNA, 25 bp, Probe Sequence
gtatatgatgtggctttaatacgtg

SEQ ID NO: 246405 - DNA, 25 bp, Probe Sequence
gtttgcattgtctttaatataataa

SEQ ID NO: 246406 - DNA, 25 bp, Probe Sequence
gtttgcagtacgtttctaatataag

SEQ ID NO: 246407 - DNA, 25 bp, Probe Sequence
gtattgagaaccttttgtttagcac

SEQ ID NO: 246408 - DNA, 25 bp, Probe Sequence
gtttggcaacctttgtgttacagat

SEQ ID NO: 246409 - DNA, 25 bp, Probe Sequence
gtttgccatatcccattggttaaaa

SEQ ID NO: 246410 - DNA, 25 bp, Probe Sequence
gtattccaaaatagggtctcaaaca

SEQ ID NO: 246411 - DNA, 25 bp, Probe Sequence
gtattcctgaactggagccccagac

SEQ ID NO: 246412 - DNA, 25 bp, Probe Sequence
gtatttctgaacttcgggtaatggc

SEQ ID NO: 246413 - DNA, 25 bp, Probe Sequence
gtttgtatcaactttgtgagtaata

SEQ ID NO: 246414 - DNA, 25 bp, Probe Sequence
gtttgcctcaacacatgtgagggcc

SEQ ID NO: 246415 - DNA, 25 bp, Probe Sequence
gtcattcgaaacatagtggaggccg

SEQ ID NO: 246416 - DNA, 25 bp, Probe Sequence
gtattctgtaatataggatcctgga

SEQ ID NO: 246417 - DNA, 25 bp, Probe Sequence
gtttgcttgaaataaatcttgtgcc

SEQ ID NO: 246418 - DNA, 25 bp, Probe Sequence
gtatttcgaaatttagatgctcagt

SEQ ID NO: 246419 - DNA, 25 bp, Probe Sequence
gtattacaacgaagtgaggtcatgc

SEQ ID NO: 246420 - DNA, 25 bp, Probe Sequence
gtattacaatcggaacacattcagc

SEQ ID NO: 246421 - DNA, 25 bp, Probe Sequence
gtttgcacatatggcacttcactcc

SEQ ID NO: 246422 - DNA, 25 bp, Probe Sequence
gtattcagcaaccacttagtgagca

SEQ ID NO: 246423 - DNA, 25 bp, Probe Sequence
gtatcagcccatggtttcaggatca

SEQ ID NO: 246424 - DNA, 25 bp, Probe Sequence
gtatagccggtgaaccctgatacca

SEQ ID NO: 246425 - DNA, 25 bp, Probe Sequence
gtatgaacaggtatcctattgtcta

SEQ ID NO: 246426 - DNA, 25 bp, Probe Sequence
gtattaatggtcagtctttgttctc

SEQ ID NO: 246427 - DNA, 25 bp, Probe Sequence
gtattcaaggcgcttctttccatac

SEQ ID NO: 246428 - DNA, 25 bp, Probe Sequence
gtttgcaaccgttcacgattcaata

SEQ ID NO: 246429 - DNA, 25 bp, Probe Sequence
gtttccacaccatcagattccaaag

SEQ ID NO: 246430 - DNA, 25 bp, Probe Sequence
gtttccattccatcaaacacacaag

SEQ ID NO: 246431 - DNA, 25 bp, Probe Sequence
gtttccattggacctgccaatcaca

SEQ ID NO: 246432 - DNA, 25 bp, Probe Sequence
gtttgacagtggcctcaggttcaca

SEQ ID NO: 246433 - DNA, 25 bp, Probe Sequence
gtttgacagtgtgccattcgacaac

SEQ ID NO: 246434 - DNA, 25 bp, Probe Sequence
gtattacttggtgtatcgataatca

SEQ ID NO: 246435 - DNA, 25 bp, Probe Sequence
gtttgactgtttgcctgagaaatgc

SEQ ID NO: 246436 - DNA, 25 bp, Probe Sequence
gtttgacgaatattttcaagaatgc

SEQ ID NO: 246437 - DNA, 25 bp, Probe Sequence
gtttgccgtatagatttacaataat

SEQ ID NO: 246438 - DNA, 25 bp, Probe Sequence
gtattggtgtaagatttttgtcatt

SEQ ID NO: 246439 - DNA, 25 bp, Probe Sequence
gtttgcatttgatacatttttgtac

SEQ ID NO: 246440 - DNA, 25 bp, Probe Sequence
gtttgcatagtatcacttctttgta

SEQ ID NO: 246441 - DNA, 25 bp, Probe Sequence
gtttgctcagtatatctatctttaa

SEQ ID NO: 246442 - DNA, 25 bp, Probe Sequence
gtattgtcagctgacaccttttcca

SEQ ID NO: 246443 - DNA, 25 bp, Probe Sequence
gtttgctcacagtaagctcattgtt

SEQ ID NO: 246444 - DNA, 25 bp, Probe Sequence
gtttgtcacagtaacgttcattggt

SEQ ID NO: 246445 - DNA, 25 bp, Probe Sequence
gtattggaaggaaagttctatgtat

SEQ ID NO: 246446 - DNA, 25 bp, Probe Sequence
gtttggatggtggaaggtctcattt

SEQ ID NO: 246447 - DNA, 25 bp, Probe Sequence
gtttggagcaatgatcgagtgattc

SEQ ID NO: 246448 - DNA, 25 bp, Probe Sequence
gtattgtggaatatttgagttctat

SEQ ID NO: 246449 - DNA, 25 bp, Probe Sequence
gtttgggtacgttggtgtattgcaa

SEQ ID NO: 246450 - DNA, 25 bp, Probe Sequence
gtttgggtgcaagtaggtctgattg

SEQ ID NO: 246451 - DNA, 25 bp, Probe Sequence
gtttgttggagactgaaccgttgca

SEQ ID NO: 246452 - DNA, 25 bp, Probe Sequence
gtttgttgggaatttgcctgttaca

SEQ ID NO: 246453 - DNA, 25 bp, Probe Sequence
gtattgggggactgtgctagcttta

SEQ ID NO: 246454 - DNA, 25 bp, Probe Sequence
gtatattcaccctttgtctagtgat

SEQ ID NO: 246455 - DNA, 25 bp, Probe Sequence
gtatttcctcctttgtggattgtca

SEQ ID NO: 246456 - DNA, 25 bp, Probe Sequence
gtttgtccacgttcaggatattgtt

SEQ ID NO: 246457 - DNA, 25 bp, Probe Sequence
gtttgctctgacgaatggaatttat

SEQ ID NO: 246458 - DNA, 25 bp, Probe Sequence
gtttgttgcatagctggtacatgct

SEQ ID NO: 246459 - DNA, 25 bp, Probe Sequence
gtatttctctgagcgtggtgatgca

SEQ ID NO: 246460 - DNA, 25 bp, Probe Sequence
gtattgtgccagacccttgatggag

SEQ ID NO: 246461 - DNA, 25 bp, Probe Sequence
gtattccactgtactcattcataag

SEQ ID NO: 246462 - DNA, 25 bp, Probe Sequence
gtattgtcacttaatcccaaagcaa

SEQ ID NO: 246463 - DNA, 25 bp, Probe Sequence
gtttgtcacttttctgataaaagat

SEQ ID NO: 246464 - DNA, 25 bp, Probe Sequence
gtttgctatttttctgtgatcacat

SEQ ID NO: 246465 - DNA, 25 bp, Probe Sequence
gtttgtttgcttctatgatacagag

SEQ ID NO: 246466 - DNA, 25 bp, Probe Sequence
gtttggattttaattgtgatgcaga

SEQ ID NO: 246467 - DNA, 25 bp, Probe Sequence
gtttgcagatattctgagtctcttc

SEQ ID NO: 246468 - DNA, 25 bp, Probe Sequence
gtattagcaaccgagttgctgtccc

SEQ ID NO: 246469 - DNA, 25 bp, Probe Sequence
gtattgtggactgattttgcctcac

SEQ ID NO: 246470 - DNA, 25 bp, Probe Sequence
gtttgtgtatctactgtattcgtcc

SEQ ID NO: 246471 - DNA, 25 bp, Probe Sequence
gtttgctgagattatattatgcctg

SEQ ID NO: 246472 - DNA, 25 bp, Probe Sequence
gtatacctgtaatatagcctgggaa

SEQ ID NO: 246473 - DNA, 25 bp, Probe Sequence
gtatacattgtatctaaattgtggg

SEQ ID NO: 246474 - DNA, 25 bp, Probe Sequence
gtataacctacctgaatgtattaaa

SEQ ID NO: 246475 - DNA, 25 bp, Probe Sequence
gtattacttctcatggaaatcttaa

SEQ ID NO: 246476 - DNA, 25 bp, Probe Sequence
gtatattctttggttgtgaatccta

SEQ ID NO: 246477 - DNA, 25 bp, Probe Sequence
gtttgatgtgttcttgtgaatttac

SEQ ID NO: 246478 - DNA, 25 bp, Probe Sequence
gtttgagtgttcttagggatgtgtt

SEQ ID NO: 246479 - DNA, 25 bp, Probe Sequence
gtttgaggctttcagaagctcttct

SEQ ID NO: 246480 - DNA, 25 bp, Probe Sequence
gtttggtgtcctcagatatctttca

SEQ ID NO: 246481 - DNA, 25 bp, Probe Sequence
gtttggtgtcctcagatatctttca

SEQ ID NO: 246482 - DNA, 25 bp, Probe Sequence
gtttggttcacttacagatagtatc

SEQ ID NO: 246483 - DNA, 25 bp, Probe Sequence
gtttggttcaccactgacagtggaa

SEQ ID NO: 246484 - DNA, 25 bp, Probe Sequence
gtttgttctcccaagtagagatgat

SEQ ID NO: 246485 - DNA, 25 bp, Probe Sequence
gtttggattccccaatgcagcagga

SEQ ID NO: 246486 - DNA, 25 bp, Probe Sequence
gtttgacttctttgagacagagggc

SEQ ID NO: 246487 - DNA, 25 bp, Probe Sequence
gtttgcaccctcagatgaagagcta

SEQ ID NO: 246488 - DNA, 25 bp, Probe Sequence
gtttgacaccaatggctggcagctt

SEQ ID NO: 246489 - DNA, 25 bp, Probe Sequence
gtatatcaaccattcgtgtgcacct

SEQ ID NO: 246490 - DNA, 25 bp, Probe Sequence
gtcttcatagcggtcaagtgccagc

SEQ ID NO: 246491 - DNA, 25 bp, Probe Sequence
gtttgaagcgcagcaggtgcatcgc

SEQ ID NO: 246492 - DNA, 25 bp, Probe Sequence
gtttgatgatgcgctcagtgccatg

SEQ ID NO: 246493 - DNA, 25 bp, Probe Sequence
gtttgctatgctgctagcatcctaa

SEQ ID NO: 246494 - DNA, 25 bp, Probe Sequence
gtatccatgacggtgagcacctcga

SEQ ID NO: 246495 - DNA, 25 bp, Probe Sequence
gtatgcccagcagtggaaccagtac

SEQ ID NO: 246496 - DNA, 25 bp, Probe Sequence
gtatccatcactgccaacaagaaca

SEQ ID NO: 246497 - DNA, 25 bp, Probe Sequence
gtattatccccatcaagatcacaca

SEQ ID NO: 246498 - DNA, 25 bp, Probe Sequence
gtattttcttcataaggcacatctc

SEQ ID NO: 246499 - DNA, 25 bp, Probe Sequence
gtattttgctctgcgaaacatcatc

SEQ ID NO: 246500 - DNA, 25 bp, Probe Sequence
gtattgtattatgtgacaaccatgc

SEQ ID NO: 246501 - DNA, 25 bp, Probe Sequence
gtttgtttatgttacagaatgctgc

SEQ ID NO: 246502 - DNA, 25 bp, Probe Sequence
gtttgttttgtgtccgtatccagaa

SEQ ID NO: 246503 - DNA, 25 bp, Probe Sequence
gtttgttttgctaccaatatcatac

SEQ ID NO: 246504 - DNA, 25 bp, Probe Sequence
gtttgatttttgaccttgacatagt

SEQ ID NO: 246505 - DNA, 25 bp, Probe Sequence
gtttgattttatgcactttgtcgct

SEQ ID NO: 246506 - DNA, 25 bp, Probe Sequence
gtttgattaatagactccattccag

SEQ ID NO: 246507 - DNA, 25 bp, Probe Sequence
gtattcttaatagaccacctgcacc

SEQ ID NO: 246508 - DNA, 25 bp, Probe Sequence
gtattttaatagaaccagcctgcca

SEQ ID NO: 246509 - DNA, 25 bp, Probe Sequence
gtatttgttaacactaactgcacat

SEQ ID NO: 246510 - DNA, 25 bp, Probe Sequence
gtattctgtatactctccttactaa

SEQ ID NO: 246511 - DNA, 25 bp, Probe Sequence
gtattcggtaccccagtatctatac

SEQ ID NO: 246512 - DNA, 25 bp, Probe Sequence
gtattcacttaccctagttcattat

SEQ ID NO: 246513 - DNA, 25 bp, Probe Sequence
gtattccaacctttaactctgtatc

SEQ ID NO: 246514 - DNA, 25 bp, Probe Sequence
gtattccaacgtgatattccttgaa

SEQ ID NO: 246515 - DNA, 25 bp, Probe Sequence
gtataccccagaggagattgccatg

SEQ ID NO: 246516 - DNA, 25 bp, Probe Sequence
gtataacccagacatgatttgtaaa

SEQ ID NO: 246517 - DNA, 25 bp, Probe Sequence
gtataccccaaagtgcatttgccta

SEQ ID NO: 246518 - DNA, 25 bp, Probe Sequence
gtattctcaccaaaatcatttctct

SEQ ID NO: 246519 - DNA, 25 bp, Probe Sequence
gtttgtgcttcaaatgatccttcct

SEQ ID NO: 246520 - DNA, 25 bp, Probe Sequence
gtattacatctcattatccttccac

SEQ ID NO: 246521 - DNA, 25 bp, Probe Sequence
gtattatcagctaattttcctccaa

SEQ ID NO: 246522 - DNA, 25 bp, Probe Sequence
gtataatcagtcattcatagcacta

SEQ ID NO: 246523 - DNA, 25 bp, Probe Sequence
gtattctagatcatctaagatccat

SEQ ID NO: 246524 - DNA, 25 bp, Probe Sequence
gtatattagatcccatgggaggctg

SEQ ID NO: 246525 - DNA, 25 bp, Probe Sequence
gtatcttagtgaccctcggagcaaa

SEQ ID NO: 246526 - DNA, 25 bp, Probe Sequence
gtatattccagacccaacaggcaaa

SEQ ID NO: 246527 - DNA, 25 bp, Probe Sequence
gtatattccagacccaacaggcaaa

SEQ ID NO: 246528 - DNA, 25 bp, Probe Sequence
gtataaacaaccttacaagcaaact

SEQ ID NO: 246529 - DNA, 25 bp, Probe Sequence
gtataagcacaggctcttgaaccaa

SEQ ID NO: 246530 - DNA, 25 bp, Probe Sequence
gtataacacagagagtgaactctaa

SEQ ID NO: 246531 - DNA, 25 bp, Probe Sequence
gtataagcaaactacatggactctg

SEQ ID NO: 246532 - DNA, 25 bp, Probe Sequence
gtattatacaactgctgtgaccaga

SEQ ID NO: 246533 - DNA, 25 bp, Probe Sequence
gtatagattaccaggatgtcccaga

SEQ ID NO: 246534 - DNA, 25 bp, Probe Sequence
gtttgactcacggggatttccaagt

SEQ ID NO: 246535 - DNA, 25 bp, Probe Sequence
gtttgactcacggggatttccaagt

SEQ ID NO: 246536 - DNA, 25 bp, Probe Sequence
gtttgactcacgggggatttccaag

SEQ ID NO: 246537 - DNA, 25 bp, Probe Sequence
gtttgaccatgcaatggtggctttc

SEQ ID NO: 246538 - DNA, 25 bp, Probe Sequence
gtttgaccttagccatggtttgcaa

SEQ ID NO: 246539 - DNA, 25 bp, Probe Sequence
gtttgcactttgtatattggttgaa

SEQ ID NO: 246540 - DNA, 25 bp, Probe Sequence
gtatagacatttctattgcttctaa

SEQ ID NO: 246541 - DNA, 25 bp, Probe Sequence
gtataatctgttcttctattcccac

SEQ ID NO: 246542 - DNA, 25 bp, Probe Sequence
gtataatctgttcttctattcccac

SEQ ID NO: 246543 - DNA, 25 bp, Probe Sequence
gtatagtatactcttgccttcctaa

SEQ ID NO: 246544 - DNA, 25 bp, Probe Sequence
gtatatttgtctcgtacctacagat

SEQ ID NO: 246545 - DNA, 25 bp, Probe Sequence
gtttgtttctggcatcctaaatcaa

SEQ ID NO: 246546 - DNA, 25 bp, Probe Sequence
gtttgttatctcagtccagaaccaa

SEQ ID NO: 246547 - DNA, 25 bp, Probe Sequence
gtttgtataatcagtcattcatagc

SEQ ID NO: 246548 - DNA, 25 bp, Probe Sequence
gtttggaaatcacatatctcataag

SEQ ID NO: 246549 - DNA, 25 bp, Probe Sequence
gtgtgggaaccaccttctagaagtg

SEQ ID NO: 246550 - DNA, 25 bp, Probe Sequence
gtcttagaattcccctctggagggc

SEQ ID NO: 246551 - DNA, 25 bp, Probe Sequence
tctataacagtcacccttggagccc

SEQ ID NO: 246552 - DNA, 25 bp, Probe Sequence
tggtcgagcgatggatttccgtctc

SEQ ID NO: 246553 - DNA, 25 bp, Probe Sequence
atggatttccgtctctggtgtagct

SEQ ID NO: 246554 - DNA, 25 bp, Probe Sequence
gtctctggtgtagctgatgatccga

SEQ ID NO: 246555 - DNA, 25 bp, Probe Sequence
tgtagctgatgatccgaataactac

SEQ ID NO: 246556 - DNA, 25 bp, Probe Sequence
accagccagctatcaactcgcgccc

SEQ ID NO: 246557 - DNA, 25 bp, Probe Sequence
gcaactcatcgattgatttacggcg

SEQ ID NO: 246558 - DNA, 25 bp, Probe Sequence
gattgatttacggcgctaaggatga

SEQ ID NO: 246559 - DNA, 25 bp, Probe Sequence
taaggatgactctggtcagagatac

SEQ ID NO: 246560 - DNA, 25 bp, Probe Sequence
tggtcagagatacctggcctggtct

SEQ ID NO: 246561 - DNA, 25 bp, Probe Sequence
ctggtctggacacagtgcccgtgtc

SEQ ID NO: 246562 - DNA, 25 bp, Probe Sequence
gtgcccgtgtcggagccgcgcgaga

SEQ ID NO: 246563 - DNA, 25 bp, Probe Sequence
cgagatatggcccgcgctggagttt

SEQ ID NO: 246564 - DNA, 25 bp, Probe Sequence
ggagtttcaataccggagatcatgc

SEQ ID NO: 246565 - DNA, 25 bp, Probe Sequence
ggagatcatgcaagctggtggctgg

SEQ ID NO: 246566 - DNA, 25 bp, Probe Sequence
ctggtggctggaccaatgtaaatat

SEQ ID NO: 246567 - DNA, 25 bp, Probe Sequence
ccaatgtaaatattgtcatgaacta

SEQ ID NO: 246568 - DNA, 25 bp, Probe Sequence
ttgtcatgaactatatccgtaacct

SEQ ID NO: 246569 - DNA, 25 bp, Probe Sequence
tagtgaaacaggggcaatggtgcgc

SEQ ID NO: 246570 - DNA, 25 bp, Probe Sequence
gtatgtacagtctacttttgaacta

SEQ ID NO: 246571 - DNA, 25 bp, Probe Sequence
gtattcataaacactttccacatag

SEQ ID NO: 246572 - DNA, 25 bp, Probe Sequence
gtatgtttgatacagcgtcgccaaa

SEQ ID NO: 246573 - DNA, 25 bp, Probe Sequence
gtatacctgcaacacctggcaatga

SEQ ID NO: 246574 - DNA, 25 bp, Probe Sequence
gtagtccccagctaactagggaagg

SEQ ID NO: 246575 - DNA, 25 bp, Probe Sequence
gtagtccccacttatctgaggggga

SEQ ID NO: 246576 - DNA, 25 bp, Probe Sequence
gtatatccccaatgttgcgtgggct

SEQ ID NO: 246577 - DNA, 25 bp, Probe Sequence
gtatcccccaacacggatgagtttt

SEQ ID NO: 246578 - DNA, 25 bp, Probe Sequence
gtttggccgaacacttgcagaaatt

SEQ ID NO: 246579 - DNA, 25 bp, Probe Sequence
gtttggccagactgacttcaaaaaa

SEQ ID NO: 246580 - DNA, 25 bp, Probe Sequence
gtttggccagactgacttcaaaaaa

SEQ ID NO: 246581 - DNA, 25 bp, Probe Sequence
gtttgtcgctgatggcatcttcaaa

SEQ ID NO: 246582 - DNA, 25 bp, Probe Sequence
gtttggcctggggatcttagatgtc

SEQ ID NO: 246583 - DNA, 25 bp, Probe Sequence
gtattggcctaccaactgtagatgt

SEQ ID NO: 246584 - DNA, 25 bp, Probe Sequence
gtattgctttgacaactgtaatttg

SEQ ID NO: 246585 - DNA, 25 bp, Probe Sequence
gtatcttttgagaagtgcggaatag

SEQ ID NO: 246586 - DNA, 25 bp, Probe Sequence
gtatcttgattgttagtagtctaaa

SEQ ID NO: 246587 - DNA, 25 bp, Probe Sequence
gtatttactgccatgtaattgaaat

SEQ ID NO: 246588 - DNA, 25 bp, Probe Sequence
gtatttacatacattaggggaattt

SEQ ID NO: 246589 - DNA, 25 bp, Probe Sequence
gtattttctcacatcctgtgggact

SEQ ID NO: 246590 - DNA, 25 bp, Probe Sequence
gtatctgtcttcattcagggtggat

SEQ ID NO: 246591 - DNA, 25 bp, Probe Sequence
gtattgtaagcacacatgtaattga

SEQ ID NO: 246592 - DNA, 25 bp, Probe Sequence
gtttggagagcacacctatcttagt

SEQ ID NO: 246593 - DNA, 25 bp, Probe Sequence
gtattgaagaactcctcacttgctg

SEQ ID NO: 246594 - DNA, 25 bp, Probe Sequence
gtattgattaaaaaagcacttgctt

SEQ ID NO: 246595 - DNA, 25 bp, Probe Sequence
gtagtctttagacaacagttgcttt

SEQ ID NO: 246596 - DNA, 25 bp, Probe Sequence
gtaccttttgcaataccgttgtaat

SEQ ID NO: 246597 - DNA, 25 bp, Probe Sequence
gtatccctttcgatgaggctgttaa

SEQ ID NO: 246598 - DNA, 25 bp, Probe Sequence
gtatacccgtgctatggtggtttgc

SEQ ID NO: 246599 - DNA, 25 bp, Probe Sequence
gtcaccacctggaacgtagttatcg

SEQ ID NO: 246600 - DNA, 25 bp, Probe Sequence
gtatcacatcgaaaagtgtctttac

SEQ ID NO: 246601 - DNA, 25 bp, Probe Sequence
gtatcatactgtttgaggtctactg

SEQ ID NO: 246602 - DNA, 25 bp, Probe Sequence
gtattgagcatgtgatgggctgttt

SEQ ID NO: 246603 - DNA, 25 bp, Probe Sequence
gtttggaatcgatcatgctttcttc

SEQ ID NO: 246604 - DNA, 25 bp, Probe Sequence
gtttgagctgatgaccagcctccac

SEQ ID NO: 246605 - DNA, 25 bp, Probe Sequence
gtattacagagttgtcatgccttga

SEQ ID NO: 246606 - DNA, 25 bp, Probe Sequence
gtattggaagtcctagcaagagcaa

SEQ ID NO: 246607 - DNA, 25 bp, Probe Sequence
gtattgtgaggtcctaccgacaacc

SEQ ID NO: 246608 - DNA, 25 bp, Probe Sequence
gtattggggtcaaatctctacaaat

SEQ ID NO: 246609 - DNA, 25 bp, Probe Sequence
gtttgtaagctattttcaacaagat

SEQ ID NO: 246610 - DNA, 25 bp, Probe Sequence
gtttgttagtgcatttgagcacaca

SEQ ID NO: 246611 - DNA, 25 bp, Probe Sequence
gtttgttcagtctatttgcgcagcc

SEQ ID NO: 246612 - DNA, 25 bp, Probe Sequence
gtttgttcagtctatttgcgcagcc

SEQ ID NO: 246613 - DNA, 25 bp, Probe Sequence
gtttgttcatgtcagtgagagcttc

SEQ ID NO: 246614 - DNA, 25 bp, Probe Sequence
gtttgggaggcttgtgcgaggtctc

SEQ ID NO: 246615 - DNA, 25 bp, Probe Sequence
gtatataggagtcagggaagcctgc

SEQ ID NO: 246616 - DNA, 25 bp, Probe Sequence
gtattaggagattaggccacctctc

SEQ ID NO: 246617 - DNA, 25 bp, Probe Sequence
gtattctggtataagcggcgagtcc

SEQ ID NO: 246618 - DNA, 25 bp, Probe Sequence
gtattagctgttaatgctctgtgag

SEQ ID NO: 246619 - DNA, 25 bp, Probe Sequence
gtattatctataactgccaaggcta

SEQ ID NO: 246620 - DNA, 25 bp, Probe Sequence
gtattcagtttcctgcccagaatga

SEQ ID NO: 246621 - DNA, 25 bp, Probe Sequence
gtattgagatttgacctgaaaaaca

SEQ ID NO: 246622 - DNA, 25 bp, Probe Sequence
gtttgatattgtcacctagcagata

SEQ ID NO: 246623 - DNA, 25 bp, Probe Sequence
gtttgtcttgtgcactgtaggtttt

SEQ ID NO: 246624 - DNA, 25 bp, Probe Sequence
gtatttttgcctgttagtgattgtt

SEQ ID NO: 246625 - DNA, 25 bp, Probe Sequence
gtattctttccagttgttgtaattc

SEQ ID NO: 246626 - DNA, 25 bp, Probe Sequence
gtattattgtcctttgattccaaat

SEQ ID NO: 246627 - DNA, 25 bp, Probe Sequence
gtattattataaccgattgctctaa

SEQ ID NO: 246628 - DNA, 25 bp, Probe Sequence
gtattatgtgacaaccatgcaggct

SEQ ID NO: 246629 - DNA, 25 bp, Probe Sequence
gtatactgtacttccacagttatga

SEQ ID NO: 246630 - DNA, 25 bp, Probe Sequence
gtattatctagtacccagtccatgt

SEQ ID NO: 246631 - DNA, 25 bp, Probe Sequence
gtatttttgtgcactaggcgcagtt

SEQ ID NO: 246632 - DNA, 25 bp, Probe Sequence
gtattttgttgggctgtccttgtgt

SEQ ID NO: 246633 - DNA, 25 bp, Probe Sequence
gtattttgaatgtgcttctcttgtt

SEQ ID NO: 246634 - DNA, 25 bp, Probe Sequence
gtatttatcatagttgcccatttta

SEQ ID NO: 246635 - DNA, 25 bp, Probe Sequence
gtgttttatacccgatcgtgtgtgg

SEQ ID NO: 246636 - DNA, 25 bp, Probe Sequence
gtattttatcaccagaatcaggaat

SEQ ID NO: 246637 - DNA, 25 bp, Probe Sequence
gtattctgctactcgaacagatgag

SEQ ID NO: 246638 - DNA, 25 bp, Probe Sequence
gtatctacttcatgctgaccagagg

SEQ ID NO: 246639 - DNA, 25 bp, Probe Sequence
gtatctcctctaagtaaggaagatg

SEQ ID NO: 246640 - DNA, 25 bp, Probe Sequence
gtatttctgctgagtgataaagcca

SEQ ID NO: 246641 - DNA, 25 bp, Probe Sequence
gtattggcgagcatggatatagaac

SEQ ID NO: 246642 - DNA, 25 bp, Probe Sequence
gtattgccaactttgttaagtggct

SEQ ID NO: 246643 - DNA, 25 bp, Probe Sequence
gtttgtctgtggtgttatagtggta

SEQ ID NO: 246644 - DNA, 25 bp, Probe Sequence
gtttgtctgtggtgttatagtggta

SEQ ID NO: 246645 - DNA, 25 bp, Probe Sequence
gtatatttggtaccttgttggagta

SEQ ID NO: 246646 - DNA, 25 bp, Probe Sequence
gtaggttcgtagcttgattgaatta

SEQ ID NO: 246647 - DNA, 25 bp, Probe Sequence
gtagacttacttctcaagaaatcta

SEQ ID NO: 246648 - DNA, 25 bp, Probe Sequence
gtataattcactattcatggaaaat

SEQ ID NO: 246649 - DNA, 25 bp, Probe Sequence
gtataactcctgaatgctacttaaa

SEQ ID NO: 246650 - DNA, 25 bp, Probe Sequence
gtataactcaatggattaatatttc

SEQ ID NO: 246651 - DNA, 25 bp, Probe Sequence
gtataagctctgggattctttttgg

SEQ ID NO: 246652 - DNA, 25 bp, Probe Sequence
gtatatatgtcctctgttgtatgtt

SEQ ID NO: 246653 - DNA, 25 bp, Probe Sequence
gtattcgtccagagacctattatga

SEQ ID NO: 246654 - DNA, 25 bp, Probe Sequence
gtatgggcccgatagcttatttagc

SEQ ID NO: 246655 - DNA, 25 bp, Probe Sequence
gtatcgatgccttttagtttttcca

SEQ ID NO: 246656 - DNA, 25 bp, Probe Sequence
gtatcgatgccttttagtttttcca

SEQ ID NO: 246657 - DNA, 25 bp, Probe Sequence
gtattgctgccttgtgtattttatt

SEQ ID NO: 246658 - DNA, 25 bp, Probe Sequence
gtattgcatctcttgatttaatcat

SEQ ID NO: 246659 - DNA, 25 bp, Probe Sequence
gtatatgagtcttcagttctcatca

SEQ ID NO: 246660 - DNA, 25 bp, Probe Sequence
gtatatatgtgcctcacacctgaat

SEQ ID NO: 246661 - DNA, 25 bp, Probe Sequence
gtatatatggtgcccttctgatgct

SEQ ID NO: 246662 - DNA, 25 bp, Probe Sequence
gtattagttgccaatatgccagctt

SEQ ID NO: 246663 - DNA, 25 bp, Probe Sequence
gtattacattaccattgccactgat

SEQ ID NO: 246664 - DNA, 25 bp, Probe Sequence
gtattacagtcagtatttcatataa

SEQ ID NO: 246665 - DNA, 25 bp, Probe Sequence
gtatttcataatgatctgcatcagt

SEQ ID NO: 246666 - DNA, 25 bp, Probe Sequence
gtattgttcaataatccatggttca

SEQ ID NO: 246667 - DNA, 25 bp, Probe Sequence
gtattttcatctcagcctagtgacg

SEQ ID NO: 246668 - DNA, 25 bp, Probe Sequence
gtattttctctgcaccaagagcaca

SEQ ID NO: 246669 - DNA, 25 bp, Probe Sequence
gtattctcttcgggcaaagacagtc

SEQ ID NO: 246670 - DNA, 25 bp, Probe Sequence
gtatacttacggcaacaagcagcac

SEQ ID NO: 246671 - DNA, 25 bp, Probe Sequence
gtattcttaagacatcacttaccca

SEQ ID NO: 246672 - DNA, 25 bp, Probe Sequence
gtattctctagacggacactgtcca

SEQ ID NO: 246673 - DNA, 25 bp, Probe Sequence
gtattcagccattgggagatcattc

SEQ ID NO: 246674 - DNA, 25 bp, Probe Sequence
gtatgtcagctgtataggcaatagt

SEQ ID NO: 246675 - DNA, 25 bp, Probe Sequence
gtatgtcagcagcaaagcactgcaa

SEQ ID NO: 246676 - DNA, 25 bp, Probe Sequence
gtatccagatgtcaaccatgccaag

SEQ ID NO: 246677 - DNA, 25 bp, Probe Sequence
gtatccttgttgagtaccaagtgct

SEQ ID NO: 246678 - DNA, 25 bp, Probe Sequence
ggtcctgcaccaaactacaaagatt

SEQ ID NO: 246679 - DNA, 25 bp, Probe Sequence
ggtctgggccttttaaggcagttgg

SEQ ID NO: 246680 - DNA, 25 bp, Probe Sequence
ggttcccccaattatgggagttgag

SEQ ID NO: 246681 - DNA, 25 bp, Probe Sequence
gtgtacccgccactgaaggggagct

SEQ ID NO: 246682 - DNA, 25 bp, Probe Sequence
gtgtaggccgccctaactggggcgg

SEQ ID NO: 246683 - DNA, 25 bp, Probe Sequence
gtatagacacccccaaataggtggg

SEQ ID NO: 246684 - DNA, 25 bp, Probe Sequence
gtaagtgtccctgtaaaggccaggt

SEQ ID NO: 246685 - DNA, 25 bp, Probe Sequence
gtatttgtcccggggagggtagcag

SEQ ID NO: 246686 - DNA, 25 bp, Probe Sequence
gtattatctgcggtggggggaggag

SEQ ID NO: 246687 - DNA, 25 bp, Probe Sequence
gtatatcatctccgtgaaggggatc

SEQ ID NO: 246688 - DNA, 25 bp, Probe Sequence
gtatacattcactgtctggtgatac

SEQ ID NO: 246689 - DNA, 25 bp, Probe Sequence
gtataactacctgtggttgaaaact

SEQ ID NO: 246690 - DNA, 25 bp, Probe Sequence
gtattactacttttgcgttaggaat

SEQ ID NO: 246691 - DNA, 25 bp, Probe Sequence
gtattacttccttgtggtctattgt

SEQ ID NO: 246692 - DNA, 25 bp, Probe Sequence
gtattccattactatgtggcttagg

SEQ ID NO: 246693 - DNA, 25 bp, Probe Sequence
gtatttagtcaccagtgcctatgga

SEQ ID NO: 246694 - DNA, 25 bp, Probe Sequence
gtttggaccactggtggcttgctga

SEQ ID NO: 246695 - DNA, 25 bp, Probe Sequence
gtttggcaccggggtggatgcagca

SEQ ID NO: 246696 - DNA, 25 bp, Probe Sequence
gtatttcaacggccaggactgccag

SEQ ID NO: 246697 - DNA, 25 bp, Probe Sequence
gtattgtatgggctggtggctgcca

SEQ ID NO: 246698 - DNA, 25 bp, Probe Sequence
gtttgtcactggatggggagcactt

SEQ ID NO: 246699 - DNA, 25 bp, Probe Sequence
gtattggcctggaggtggggttggg

SEQ ID NO: 246700 - DNA, 25 bp, Probe Sequence
gtattggtctgaagggggtggtggg

SEQ ID NO: 246701 - DNA, 25 bp, Probe Sequence
gtatgcgagttcagcaggcggtggg

SEQ ID NO: 246702 - DNA, 25 bp, Probe Sequence
gtatctacaggcagaggcggtaaag

SEQ ID NO: 246703 - DNA, 25 bp, Probe Sequence
gtatcttcatacacgtttggaaatg

SEQ ID NO: 246704 - DNA, 25 bp, Probe Sequence
gtatctatcaaaatatgtttgggtt

SEQ ID NO: 246705 - DNA, 25 bp, Probe Sequence
gtataatacactactttctgttttc

SEQ ID NO: 246706 - DNA, 25 bp, Probe Sequence
gtatacttgcacacaattctgtttg

SEQ ID NO: 246707 - DNA, 25 bp, Probe Sequence
gtattgtctgacacatgctctcaat

SEQ ID NO: 246708 - DNA, 25 bp, Probe Sequence
gtattcatcgacacctaaaatctag

SEQ ID NO: 246709 - DNA, 25 bp, Probe Sequence
gtattcaaatatgttaaagatgtag

SEQ ID NO: 246710 - DNA, 25 bp, Probe Sequence
gtatccattggatttctaaaatgta

SEQ ID NO: 246711 - DNA, 25 bp, Probe Sequence
gtatccatggggcttacaaggagca

SEQ ID NO: 246712 - DNA, 25 bp, Probe Sequence
gtatccatggactcctggaaggcac

SEQ ID NO: 246713 - DNA, 25 bp, Probe Sequence
gtattcattgtctacctgctaagtc

SEQ ID NO: 246714 - DNA, 25 bp, Probe Sequence
gtattcattgtctacctgctaagtc

SEQ ID NO: 246715 - DNA, 25 bp, Probe Sequence
gtattcatagttaccgtacattgct

SEQ ID NO: 246716 - DNA, 25 bp, Probe Sequence
gtattctggagttcacaggtgttgt

SEQ ID NO: 246717 - DNA, 25 bp, Probe Sequence
gtattgcttggtaagctacgtagta

SEQ ID NO: 246718 - DNA, 25 bp, Probe Sequence
gtattcttggctaattcgcccagaa

SEQ ID NO: 246719 - DNA, 25 bp, Probe Sequence
gtattcttcgtgttactacagctga

SEQ ID NO: 246720 - DNA, 25 bp, Probe Sequence
gtatacttgccatttgagcctcact

SEQ ID NO: 246721 - DNA, 25 bp, Probe Sequence
gtatacctctcacaaggtccttata

SEQ ID NO: 246722 - DNA, 25 bp, Probe Sequence
gtatctccttcagaagtttgcttct

SEQ ID NO: 246723 - DNA, 25 bp, Probe Sequence
gtatctgccttgtttggttggttct

SEQ ID NO: 246724 - DNA, 25 bp, Probe Sequence
gtattgagttgtatcgtgtggtgta

SEQ ID NO: 246725 - DNA, 25 bp, Probe Sequence
gtattgagtcttaactgtatttcag

SEQ ID NO: 246726 - DNA, 25 bp, Probe Sequence
gtattggtacttatattgttagtaa

SEQ ID NO: 246727 - DNA, 25 bp, Probe Sequence
gtattggtgactgttgatttgttga

SEQ ID NO: 246728 - DNA, 25 bp, Probe Sequence
gtattggtagcagggatgttttcat

SEQ ID NO: 246729 - DNA, 25 bp, Probe Sequence
gtattaatcacgcgatgttgactgc

SEQ ID NO: 246730 - DNA, 25 bp, Probe Sequence
gtattgagtacatgtgtttgtctgg

SEQ ID NO: 246731 - DNA, 25 bp, Probe Sequence
gtatcggcgaaggttgggactcgac

SEQ ID NO: 246732 - DNA, 25 bp, Probe Sequence
gtatcggcgaaggttgggactcgac

SEQ ID NO: 246733 - DNA, 25 bp, Probe Sequence
gtatttgaatagttgctgggatctc

SEQ ID NO: 246734 - DNA, 25 bp, Probe Sequence
gtatttggcaactgtgggcaataat

SEQ ID NO: 246735 - DNA, 25 bp, Probe Sequence
gtattctagagacgggttgcaatga

SEQ ID NO: 246736 - DNA, 25 bp, Probe Sequence
gtagatggggagcaggattgggacc

SEQ ID NO: 246737 - DNA, 25 bp, Probe Sequence
gtatatcagtggagaaaatggagac

SEQ ID NO: 246738 - DNA, 25 bp, Probe Sequence
gtatgtagttgagtggaggctggga

SEQ ID NO: 246739 - DNA, 25 bp, Probe Sequence
gtatgataaatgatggcacctcctg

SEQ ID NO: 246740 - DNA, 25 bp, Probe Sequence
gtagctgaaatgcaagaccccaaga

SEQ ID NO: 246741 - DNA, 25 bp, Probe Sequence
gtatgcccaagagaaacccatgcag

SEQ ID NO: 246742 - DNA, 25 bp, Probe Sequence
gtattgcccaagtcaaactacatca

SEQ ID NO: 246743 - DNA, 25 bp, Probe Sequence
gtattctgaaagtacagtctacaac

SEQ ID NO: 246744 - DNA, 25 bp, Probe Sequence
gtattctccaaagcagtgttcacac

SEQ ID NO: 246745 - DNA, 25 bp, Probe Sequence
gtataaccaacagtccatttacttt

SEQ ID NO: 246746 - DNA, 25 bp, Probe Sequence
gtagacaaaaaccacatactaattt

SEQ ID NO: 246747 - DNA, 25 bp, Probe Sequence
gtaaaaaactcttctattggtggat

SEQ ID NO: 246748 - DNA, 25 bp, Probe Sequence
gtataaccaacattttcggggtatg

SEQ ID NO: 246749 - DNA, 25 bp, Probe Sequence
gtatgaatcccatgatttgggggtt

SEQ ID NO: 246750 - DNA, 25 bp, Probe Sequence
gtataaagcctcctaagggggtcat

SEQ ID NO: 246751 - DNA, 25 bp, Probe Sequence
gtataaagcctcctaagggggtcat

SEQ ID NO: 246752 - DNA, 25 bp, Probe Sequence
gtataagagtctcccagaggacttc

SEQ ID NO: 246753 - DNA, 25 bp, Probe Sequence
gtatcataagtcctccgtcagaaat

SEQ ID NO: 246754 - DNA, 25 bp, Probe Sequence
gtatctggatgtgatccctctatca

SEQ ID NO: 246755 - DNA, 25 bp, Probe Sequence
gtattgatactggtcccacttcaca

SEQ ID NO: 246756 - DNA, 25 bp, Probe Sequence
gtattgatacaggatcagtcctaat

SEQ ID NO: 246757 - DNA, 25 bp, Probe Sequence
gtatggcacaaggacatatgtccga

SEQ ID NO: 246758 - DNA, 25 bp, Probe Sequence
gtattctcaaaaaatgctacgaatg

SEQ ID NO: 246759 - DNA, 25 bp, Probe Sequence
gtattcaaacaattatgccactcga

SEQ ID NO: 246760 - DNA, 25 bp, Probe Sequence
gtattgaaatcaagttgtctctgtg

SEQ ID NO: 246761 - DNA, 25 bp, Probe Sequence
gtatataaccatacttttctaacaa

SEQ ID NO: 246762 - DNA, 25 bp, Probe Sequence
gtatatgatacctctttattggccc

SEQ ID NO: 246763 - DNA, 25 bp, Probe Sequence
gtattgagtcttcctttcaaggacc

SEQ ID NO: 246764 - DNA, 25 bp, Probe Sequence
gtagaactcttcttttaaggcaatt

SEQ ID NO: 246765 - DNA, 25 bp, Probe Sequence
gtaggtatttcatgaatttggcaag

SEQ ID NO: 246766 - DNA, 25 bp, Probe Sequence
gtagttttacagtagtttgtcattg

SEQ ID NO: 246767 - DNA, 25 bp, Probe Sequence
gtatttttactattaatgtgtgcat

SEQ ID NO: 246768 - DNA, 25 bp, Probe Sequence
gtatttttgtgaatgagagttggca

SEQ ID NO: 246769 - DNA, 25 bp, Probe Sequence
gtatctttttgcttatgaatatctg

SEQ ID NO: 246770 - DNA, 25 bp, Probe Sequence
gtattgtcaattcattaacactgcc

SEQ ID NO: 246771 - DNA, 25 bp, Probe Sequence
gtattgtctcttcttaaactatctt

SEQ ID NO: 246772 - DNA, 25 bp, Probe Sequence
gtatttcttcatcattaaaccatag

SEQ ID NO: 246773 - DNA, 25 bp, Probe Sequence
gtatttgaagtgcttatcgaatcta

SEQ ID NO: 246774 - DNA, 25 bp, Probe Sequence
gtattatgaagtagcttttgtgtca

SEQ ID NO: 246775 - DNA, 25 bp, Probe Sequence
gtattctgtagcctatatttttcat

SEQ ID NO: 246776 - DNA, 25 bp, Probe Sequence
gtattcttagcttttgttgattttg

SEQ ID NO: 246777 - DNA, 25 bp, Probe Sequence
gtattgctctttgaatcgagtttgg

SEQ ID NO: 246778 - DNA, 25 bp, Probe Sequence
gtatttcattgtgaacaggtatttc

SEQ ID NO: 246779 - DNA, 25 bp, Probe Sequence
gtatttctttaatcaatgtgttctc

SEQ ID NO: 246780 - DNA, 25 bp, Probe Sequence
gtattacttttctgcaatgttatta

SEQ ID NO: 246781 - DNA, 25 bp, Probe Sequence
gtattatgcctgctctgaacagtgt

SEQ ID NO: 246782 - DNA, 25 bp, Probe Sequence
gtgaagatcaagcttggccggaagg

SEQ ID NO: 246783 - DNA, 25 bp, Probe Sequence
gtgaagatcaagcttggccggaagg

SEQ ID NO: 246784 - DNA, 25 bp, Probe Sequence
gtagaacgaattatcctgacaaggg

SEQ ID NO: 246785 - DNA, 25 bp, Probe Sequence
gtagaacgaattatcctgacaaggg

SEQ ID NO: 246786 - DNA, 25 bp, Probe Sequence
gtataaagaagttctccatccagag

SEQ ID NO: 246787 - DNA, 25 bp, Probe Sequence
gtatagatgaagttagaccattagc

SEQ ID NO: 246788 - DNA, 25 bp, Probe Sequence
gtattcaaagatacagcctttaagg

SEQ ID NO: 246789 - DNA, 25 bp, Probe Sequence
gtattcactaactgcttattacatg

SEQ ID NO: 246790 - DNA, 25 bp, Probe Sequence
gtattccttgtttgcagtgattaat

SEQ ID NO: 246791 - DNA, 25 bp, Probe Sequence
gtatttcttttaactgtgtatattt

SEQ ID NO: 246792 - DNA, 25 bp, Probe Sequence
gtattgtctctgttcattttgtttt

SEQ ID NO: 246793 - DNA, 25 bp, Probe Sequence
gtattgtcagcatttatttatttat

SEQ ID NO: 246794 - DNA, 25 bp, Probe Sequence
gtatagctcgtaatgatggtatttt

SEQ ID NO: 246795 - DNA, 25 bp, Probe Sequence
gtatctgccaacctgaggttcaatt

SEQ ID NO: 246796 - DNA, 25 bp, Probe Sequence
gtatgcctcatagcaggggagactg

SEQ ID NO: 246797 - DNA, 25 bp, Probe Sequence
gtattctcactggactgtggatacg

SEQ ID NO: 246798 - DNA, 25 bp, Probe Sequence
gtatgttcagtctcttggaaggaag

SEQ ID NO: 246799 - DNA, 25 bp, Probe Sequence
gtatgcttctgatacttcaggagaa

SEQ ID NO: 246800 - DNA, 25 bp, Probe Sequence
gtatttctgcactcttagctggatt

SEQ ID NO: 246801 - DNA, 25 bp, Probe Sequence
gtatttccagtacatagctcaatgc

SEQ ID NO: 246802 - DNA, 25 bp, Probe Sequence
gtatattacagccatcaaacacata

SEQ ID NO: 246803 - DNA, 25 bp, Probe Sequence
gtatagctgcgacataagaatatga

SEQ ID NO: 246804 - DNA, 25 bp, Probe Sequence
gtatagtgagctcaagatgcccagg

SEQ ID NO: 246805 - DNA, 25 bp, Probe Sequence
gtatagggtgaattgatggaggggc

SEQ ID NO: 246806 - DNA, 25 bp, Probe Sequence
gtatacctgtaattgctaatggaga

SEQ ID NO: 246807 - DNA, 25 bp, Probe Sequence
gtattcctgctcacttgcaagtaca

SEQ ID NO: 246808 - DNA, 25 bp, Probe Sequence
gtattctcgtatctgccatgagttc

SEQ ID NO: 246809 - DNA, 25 bp, Probe Sequence
gtattctcacttcatggttgctgta

SEQ ID NO: 246810 - DNA, 25 bp, Probe Sequence
gtatggtcactagatgagtacatta

SEQ ID NO: 246811 - DNA, 25 bp, Probe Sequence
gtatggtaccagttagttttgccgt

SEQ ID NO: 246812 - DNA, 25 bp, Probe Sequence
gtatgagtatgacagggaacttgcc

SEQ ID NO: 246813 - DNA, 25 bp, Probe Sequence
gtatgcgttgactggagatgaggta

SEQ ID NO: 246814 - DNA, 25 bp, Probe Sequence
gtatgctcttttctgcagaaggatg

SEQ ID NO: 246815 - DNA, 25 bp, Probe Sequence
gtatccatgtgtgtctgggaagcat

SEQ ID NO: 246816 - DNA, 25 bp, Probe Sequence
gtatccaggtgatgcgggcgcagat

SEQ ID NO: 246817 - DNA, 25 bp, Probe Sequence
gtatctcctaatttgaggctcagat

SEQ ID NO: 246818 - DNA, 25 bp, Probe Sequence
gtatctcaacaatctggatcacaga

SEQ ID NO: 246819 - DNA, 25 bp, Probe Sequence
gtatacgagccttcacgcataagag

SEQ ID NO: 246820 - DNA, 25 bp, Probe Sequence
gtatatcgagcacttcctaacacag

SEQ ID NO: 246821 - DNA, 25 bp, Probe Sequence
gtatatccagcacttaacgagaagg

SEQ ID NO: 246822 - DNA, 25 bp, Probe Sequence
gtatctccatggaatgaactgtgca

SEQ ID NO: 246823 - DNA, 25 bp, Probe Sequence
gtattctgctgctaatgacactggt

SEQ ID NO: 246824 - DNA, 25 bp, Probe Sequence
gtattctgctgctaatgacactggc

SEQ ID NO: 246825 - DNA, 25 bp, Probe Sequence
gtattctgctgctaatgacactggc

SEQ ID NO: 246826 - DNA, 25 bp, Probe Sequence
gtattttgaatgtacacgcatgctg

SEQ ID NO: 246827 - DNA, 25 bp, Probe Sequence
gtattgttgaagtgaccacaaggat

SEQ ID NO: 246828 - DNA, 25 bp, Probe Sequence
gtagtggacaagttaccagccacgc

SEQ ID NO: 246829 - DNA, 25 bp, Probe Sequence
gtagtgggaacacttatgcctacgg

SEQ ID NO: 246830 - DNA, 25 bp, Probe Sequence
gtattcgagaacccatagccaatag

SEQ ID NO: 246831 - DNA, 25 bp, Probe Sequence
gtattcggcaacagcacacaaatcc

SEQ ID NO: 246832 - DNA, 25 bp, Probe Sequence
gtattcggcaacagcacacaaatcc

SEQ ID NO: 246833 - DNA, 25 bp, Probe Sequence
gtattcggcaaacagcacactaatc

SEQ ID NO: 246834 - DNA, 25 bp, Probe Sequence
gtattagtcataaaacaccatcatt

SEQ ID NO: 246835 - DNA, 25 bp, Probe Sequence
gtattactcatttagatctcgcaca

SEQ ID NO: 246836 - DNA, 25 bp, Probe Sequence
gtatctgaatcttgaagactgcaaa

SEQ ID NO: 246837 - DNA, 25 bp, Probe Sequence
gtatcttggctgtcaagagtatcaa

SEQ ID NO: 246838 - DNA, 25 bp, Probe Sequence
gtatctgatgggaatgggcaatgaa

SEQ ID NO: 246839 - DNA, 25 bp, Probe Sequence
gtatttggagaactcactgatgaaa

SEQ ID NO: 246840 - DNA, 25 bp, Probe Sequence
gtatctcatgtacaaagttgacata

SEQ ID NO: 246841 - DNA, 25 bp, Probe Sequence
gtattgctgctctaaaagtgatata

SEQ ID NO: 246842 - DNA, 25 bp, Probe Sequence
gtattgctccctaaaatatgcataa

SEQ ID NO: 246843 - DNA, 25 bp, Probe Sequence
gtattgctccctaaaatatgcataa

SEQ ID NO: 246844 - DNA, 25 bp, Probe Sequence
gtatctatcccaattgagtcagcta

SEQ ID NO: 246845 - DNA, 25 bp, Probe Sequence
gtattctctccatggagtgaccagc

SEQ ID NO: 246846 - DNA, 25 bp, Probe Sequence
gtattccatgtatgtgttctctctc

SEQ ID NO: 246847 - DNA, 25 bp, Probe Sequence
gtattgcaattttggatgattattc

SEQ ID NO: 246848 - DNA, 25 bp, Probe Sequence
gtattgcaatcagctgttttttcct

SEQ ID NO: 246849 - DNA, 25 bp, Probe Sequence
gtaggttacctgatttgtgccttag

SEQ ID NO: 246850 - DNA, 25 bp, Probe Sequence
gtatttaatcctaaaggtggctgta

SEQ ID NO: 246851 - DNA, 25 bp, Probe Sequence
gtattttactgtcactggaggctct

SEQ ID NO: 246852 - DNA, 25 bp, Probe Sequence
gtatttatcactgagactccgagtc

SEQ ID NO: 246853 - DNA, 25 bp, Probe Sequence
gtatttacagctgatggactcaatt

SEQ ID NO: 246854 - DNA, 25 bp, Probe Sequence
gtatttaatgctgatctactataag

SEQ ID NO: 246855 - DNA, 25 bp, Probe Sequence
gtatttatcacaggactttaacacc

SEQ ID NO: 246856 - DNA, 25 bp, Probe Sequence
gtatttccaatctataattatcccc

SEQ ID NO: 246857 - DNA, 25 bp, Probe Sequence
gtccctccaattaaaccaaacgctg

SEQ ID NO: 246858 - DNA, 25 bp, Probe Sequence
gtcccctcagctccaaacgtagggg

SEQ ID NO: 246859 - DNA, 25 bp, Probe Sequence
gtatctcccatgcgccaagtggagc

SEQ ID NO: 246860 - DNA, 25 bp, Probe Sequence
gtatctcccatgcgccaagtggagc

SEQ ID NO: 246861 - DNA, 25 bp, Probe Sequence
gtatcagcagtatgcccagcagtgg

SEQ ID NO: 246862 - DNA, 25 bp, Probe Sequence
gtatcagcagtatgcccagcagtgg

SEQ ID NO: 246863 - DNA, 25 bp, Probe Sequence
gtatcatggttgaactcgcagctgg

SEQ ID NO: 246864 - DNA, 25 bp, Probe Sequence
gtatcacattgtacatcttgcctag

SEQ ID NO: 246865 - DNA, 25 bp, Probe Sequence
gtatatatctgagcactggtataag

SEQ ID NO: 246866 - DNA, 25 bp, Probe Sequence
gtatctagtgcagctgattttaaca

SEQ ID NO: 246867 - DNA, 25 bp, Probe Sequence
gtagatagtggtgcagtgctttaac

SEQ ID NO: 246868 - DNA, 25 bp, Probe Sequence
gtatatacgtatgattgctttttaa

SEQ ID NO: 246869 - DNA, 25 bp, Probe Sequence
gtatttcttgaatttgttagtataa

SEQ ID NO: 246870 - DNA, 25 bp, Probe Sequence
gtatttgctataactttattggtat

SEQ ID NO: 246871 - DNA, 25 bp, Probe Sequence
gtatttgccatttggttacagagaa

SEQ ID NO: 246872 - DNA, 25 bp, Probe Sequence
gtatttgtttaggtcatgaagcaaa

SEQ ID NO: 246873 - DNA, 25 bp, Probe Sequence
gtattttcaatagtgctatgctagc

SEQ ID NO: 246874 - DNA, 25 bp, Probe Sequence
gtattcttgataatttgatctaaca

SEQ ID NO: 246875 - DNA, 25 bp, Probe Sequence
gtatctttgatcttttgactcaagc

SEQ ID NO: 246876 - DNA, 25 bp, Probe Sequence
gtattactgatcatattgtccaagg

SEQ ID NO: 246877 - DNA, 25 bp, Probe Sequence
gtatgtcatattactgaggctacaa

SEQ ID NO: 246878 - DNA, 25 bp, Probe Sequence
gtatgatgtgttgtgatagctaaca

SEQ ID NO: 246879 - DNA, 25 bp, Probe Sequence
gtatagctttgggccatgtagcatt

SEQ ID NO: 246880 - DNA, 25 bp, Probe Sequence
tgctattattacagatactttaggg

SEQ ID NO: 246881 - DNA, 25 bp, Probe Sequence
gtattataacagcatcactttagat

SEQ ID NO: 246882 - DNA, 25 bp, Probe Sequence
gtatcttacagacctcagggatata

SEQ ID NO: 246883 - DNA, 25 bp, Probe Sequence
gtattctacaacttcaatggaaatt

SEQ ID NO: 246884 - DNA, 25 bp, Probe Sequence
gtatttcacaatgtcgtgctaaata

SEQ ID NO: 246885 - DNA, 25 bp, Probe Sequence
gtatttgacttgcacctataaaatt

SEQ ID NO: 246886 - DNA, 25 bp, Probe Sequence
gtatcttgcctagcacctatcaata

SEQ ID NO: 246887 - DNA, 25 bp, Probe Sequence
gtatcttgaataaacgctgctgctt

SEQ ID NO: 246888 - DNA, 25 bp, Probe Sequence
gtatcttcagtataatgggctttca

SEQ ID NO: 246889 - DNA, 25 bp, Probe Sequence
gtacccaaatgtactgggcattgtc

SEQ ID NO: 246890 - DNA, 25 bp, Probe Sequence
gtatatactcagttacgggattgct

SEQ ID NO: 246891 - DNA, 25 bp, Probe Sequence
gtattactcagagtcacccaagcct

SEQ ID NO: 246892 - DNA, 25 bp, Probe Sequence
gtattatacaaatcactatcgctct

SEQ ID NO: 246893 - DNA, 25 bp, Probe Sequence
gtatttagagaatggctcttgccac

SEQ ID NO: 246894 - DNA, 25 bp, Probe Sequence
gtatttaagaaagctcttcactgac

SEQ ID NO: 246895 - DNA, 25 bp, Probe Sequence
gtatttgaatagttatgtttcactg

SEQ ID NO: 246896 - DNA, 25 bp, Probe Sequence
gtattagtatcgcctattaccattg

SEQ ID NO: 246897 - DNA, 25 bp, Probe Sequence
gtattagtcatcgctattaccatgg

SEQ ID NO: 246898 - DNA, 25 bp, Probe Sequence
gtattagtcatcgctattaccatgg

SEQ ID NO: 246899 - DNA, 25 bp, Probe Sequence
gtattagtcatcgctattaccatgg

SEQ ID NO: 246900 - DNA, 25 bp, Probe Sequence
gtattagtcatcgctattaccatgg

SEQ ID NO: 246901 - DNA, 25 bp, Probe Sequence
gtattaatccccatcattactggta

SEQ ID NO: 246902 - DNA, 25 bp, Probe Sequence
ctttatacacttctggctcacagga

SEQ ID NO: 246903 - DNA, 25 bp, Probe Sequence
gtattaatccccatcattactggta

SEQ ID NO: 246904 - DNA, 25 bp, Probe Sequence
gtattaatccccatcattactggta

SEQ ID NO: 246905 - DNA, 25 bp, Probe Sequence
gtattaatacccttcttactgacat

SEQ ID NO: 246906 - DNA, 25 bp, Probe Sequence
gtattaattcttttcatgatttact

SEQ ID NO: 246907 - DNA, 25 bp, Probe Sequence
gtattttttgttgatgctttagtgc

SEQ ID NO: 246908 - DNA, 25 bp, Probe Sequence
gtatatttttttaatctctcgactg

SEQ ID NO: 246909 - DNA, 25 bp, Probe Sequence
gtatcttatgtgttgttttccgttg

SEQ ID NO: 246910 - DNA, 25 bp, Probe Sequence
gtattctctgagttatttccctgtc

SEQ ID NO: 246911 - DNA, 25 bp, Probe Sequence
gtattttgagacttttctggctggg

SEQ ID NO: 246912 - DNA, 25 bp, Probe Sequence
gtattttcgacaggttgctgccaga

SEQ ID NO: 246913 - DNA, 25 bp, Probe Sequence
gtatactatctaaatttgctgctca

SEQ ID NO: 246914 - DNA, 25 bp, Probe Sequence
gtatactatctttttatctgaagta

SEQ ID NO: 246915 - DNA, 25 bp, Probe Sequence
gtatacttcaatactgtctcatgaa

SEQ ID NO: 246916 - DNA, 25 bp, Probe Sequence
gtattcattcttaatttatgtaagg

SEQ ID NO: 246917 - DNA, 25 bp, Probe Sequence
gtattcatatctatttgcatttgat

SEQ ID NO: 246918 - DNA, 25 bp, Probe Sequence
gtatttgtgcatattgtgatgaggt

SEQ ID NO: 246919 - DNA, 25 bp, Probe Sequence
gtatttggtctggttcatatggtca

SEQ ID NO: 246920 - DNA, 25 bp, Probe Sequence
gtattatgtactctactgatatcta

SEQ ID NO: 246921 - DNA, 25 bp, Probe Sequence
gtatctgtgtagactatttgcttat

SEQ ID NO: 246922 - DNA, 25 bp, Probe Sequence
gtatatatgtgcccatttatctttt

SEQ ID NO: 246923 - DNA, 25 bp, Probe Sequence
gtatatggttgaagttattttattt

SEQ ID NO: 246924 - DNA, 25 bp, Probe Sequence
gtatatgtgttcaccttctttctta

SEQ ID NO: 246925 - DNA, 25 bp, Probe Sequence
gtatttgtgacaccctatcttgtca

SEQ ID NO: 246926 - DNA, 25 bp, Probe Sequence
gtatttgtggtcatcatccttgtca

SEQ ID NO: 246927 - DNA, 25 bp, Probe Sequence
gtatttatattcacagcctcttatg

SEQ ID NO: 246928 - DNA, 25 bp, Probe Sequence
gtatatcaaaatctagttcattatt

SEQ ID NO: 246929 - DNA, 25 bp, Probe Sequence
gtataatcaataaagagttcactct

SEQ ID NO: 246930 - DNA, 25 bp, Probe Sequence
gtatcacaaagattaatgttacttc

SEQ ID NO: 246931 - DNA, 25 bp, Probe Sequence
gtatcgcaaagctatatgtgcatat

SEQ ID NO: 246932 - DNA, 25 bp, Probe Sequence
gtatcactccagcatgatcgcagat

SEQ ID NO: 246933 - DNA, 25 bp, Probe Sequence
gtatcactccagcatgatcgcagat

SEQ ID NO: 246934 - DNA, 25 bp, Probe Sequence
gtatcatctccatcatatgcctgac

SEQ ID NO: 246935 - DNA, 25 bp, Probe Sequence
gtatgacatcactctaccatgcatc

SEQ ID NO: 246936 - DNA, 25 bp, Probe Sequence
gtatatgccatgcattaccatgcac

SEQ ID NO: 246937 - DNA, 25 bp, Probe Sequence
gtatcatggcatcttatcagcaaca

SEQ ID NO: 246938 - DNA, 25 bp, Probe Sequence
gtatgcattgctcgcttaaggacag

SEQ ID NO: 246939 - DNA, 25 bp, Probe Sequence
gtatgctcatagccttgcactgagc

SEQ ID NO: 246940 - DNA, 25 bp, Probe Sequence
gtatctatatgactatgcgtggctg

SEQ ID NO: 246941 - DNA, 25 bp, Probe Sequence
gtatctgcatgaactccgtgggaac

SEQ ID NO: 246942 - DNA, 25 bp, Probe Sequence
gtatctcatggcctcttgatgtgga

SEQ ID NO: 246943 - DNA, 25 bp, Probe Sequence
gtattatctgctttgctgatgtaga

SEQ ID NO: 246944 - DNA, 25 bp, Probe Sequence
gtatatttctgactgctcactgttc

SEQ ID NO: 246945 - DNA, 25 bp, Probe Sequence
gtatatttctactgatctgatctca

SEQ ID NO: 246946 - DNA, 25 bp, Probe Sequence
gtatattagatacttattcatccca

SEQ ID NO: 246947 - DNA, 25 bp, Probe Sequence
gtatattgcctgtatttctacctct

SEQ ID NO: 246948 - DNA, 25 bp, Probe Sequence
gtatgttggatgtcttttgacccta

SEQ ID NO: 246949 - DNA, 25 bp, Probe Sequence
gtactgtgacagcctgtatgtgccc

SEQ ID NO: 246950 - DNA, 25 bp, Probe Sequence
gtaggtgcaacccaatggaccactt

SEQ ID NO: 246951 - DNA, 25 bp, Probe Sequence
gtagattgcttctgtagtactcctt

SEQ ID NO: 246952 - DNA, 25 bp, Probe Sequence
gtatgagtcttctgtaattcattga

SEQ ID NO: 246953 - DNA, 25 bp, Probe Sequence
gtatattattcttgtggtttgtgac

SEQ ID NO: 246954 - DNA, 25 bp, Probe Sequence
gtatattatcttcactgttttcacc

SEQ ID NO: 246955 - DNA, 25 bp, Probe Sequence
gtatattatcctgtacacttatccc

SEQ ID NO: 246956 - DNA, 25 bp, Probe Sequence
gtatgaagtgcagctacaccttccc

SEQ ID NO: 246957 - DNA, 25 bp, Probe Sequence
gtatggatgctagccaaacttcaaa

SEQ ID NO: 246958 - DNA, 25 bp, Probe Sequence
gtatttcgaggagatatctgtccaa

SEQ ID NO: 246959 - DNA, 25 bp, Probe Sequence
gtatcttccctgacaagacgaccta

SEQ ID NO: 246960 - DNA, 25 bp, Probe Sequence
gtatgttcccatagtaacgccaata

SEQ ID NO: 246961 - DNA, 25 bp, Probe Sequence
gtatttcaccacctaaatgtaatgt

SEQ ID NO: 246962 - DNA, 25 bp, Probe Sequence
gtatttcattctcgtatggtgctag

SEQ ID NO: 246963 - DNA, 25 bp, Probe Sequence
gtatcatctttcaggcatgaatgat

SEQ ID NO: 246964 - DNA, 25 bp, Probe Sequence
gtatctgcctcgtagtgcatgaagt

SEQ ID NO: 246965 - DNA, 25 bp, Probe Sequence
gtatcagctgctcctagtgcagcaa

SEQ ID NO: 246966 - DNA, 25 bp, Probe Sequence
gtatgcatgtgccacatttcgcttt

SEQ ID NO: 246967 - DNA, 25 bp, Probe Sequence
gtatagtggactcgactgctttcta

SEQ ID NO: 246968 - DNA, 25 bp, Probe Sequence
gtatacaggacaagcagatcattct

SEQ ID NO: 246969 - DNA, 25 bp, Probe Sequence
gtatcacgagactgggagctgcttc

SEQ ID NO: 246970 - DNA, 25 bp, Probe Sequence
gtatcatctgagatagggcaagtct

SEQ ID NO: 246971 - DNA, 25 bp, Probe Sequence
gtatctggatgacctgcgcagcaag

SEQ ID NO: 246972 - DNA, 25 bp, Probe Sequence
gtatctgtgacaagcatgccagaag

SEQ ID NO: 246973 - DNA, 25 bp, Probe Sequence
gtatctctgcaaagcatcaaattaa

SEQ ID NO: 246974 - DNA, 25 bp, Probe Sequence
gtatgccggaaaacatttaaacgca

SEQ ID NO: 246975 - DNA, 25 bp, Probe Sequence
gtatgccggaaaacatttaaacgca

SEQ ID NO: 246976 - DNA, 25 bp, Probe Sequence
gtatgctgggatacccattaaaacc

SEQ ID NO: 246977 - DNA, 25 bp, Probe Sequence
gtatttgctgacaaccattaaagtc

SEQ ID NO: 246978 - DNA, 25 bp, Probe Sequence
gtattttatgcatgctctgtaattt

SEQ ID NO: 246979 - DNA, 25 bp, Probe Sequence
gtattttcagcactccataaattct

SEQ ID NO: 246980 - DNA, 25 bp, Probe Sequence
gtataggtcatgttccatatatgtt

SEQ ID NO: 246981 - DNA, 25 bp, Probe Sequence
gtatacagactgttcctagtttctt

SEQ ID NO: 246982 - DNA, 25 bp, Probe Sequence
gtatacagactgttcctagtttctt

SEQ ID NO: 246983 - DNA, 25 bp, Probe Sequence
gtcggagactgacaccaggtatttt

SEQ ID NO: 246984 - DNA, 25 bp, Probe Sequence
gtaggagcactacaccattggtttc

SEQ ID NO: 246985 - DNA, 25 bp, Probe Sequence
gtaggagcactacaccattggtttc

SEQ ID NO: 246986 - DNA, 25 bp, Probe Sequence
gtgagtcagtcctcaccaagttttc

SEQ ID NO: 246987 - DNA, 25 bp, Probe Sequence
gtgttagtcagtgaccaggttccag

SEQ ID NO: 246988 - DNA, 25 bp, Probe Sequence
gtgtttatattttggagccttcctg

SEQ ID NO: 246989 - DNA, 25 bp, Probe Sequence
gtattttaatttggatggcagtctc

SEQ ID NO: 246990 - DNA, 25 bp, Probe Sequence
gtatttctcctttgcaatagcagtt

SEQ ID NO: 246991 - DNA, 25 bp, Probe Sequence
gtatttctcaccatatctaatgata

SEQ ID NO: 246992 - DNA, 25 bp, Probe Sequence
gtatttgttctcatactatgataaa

SEQ ID NO: 246993 - DNA, 25 bp, Probe Sequence
gtatcttgtatcgactacatatgta

SEQ ID NO: 246994 - DNA, 25 bp, Probe Sequence
gtatcatatgataatcttgcacttg

SEQ ID NO: 246995 - DNA, 25 bp, Probe Sequence
gtatctagatttcatccttttctca

SEQ ID NO: 246996 - DNA, 25 bp, Probe Sequence
gtatttgtttcaatggtaaatcctt

SEQ ID NO: 246997 - DNA, 25 bp, Probe Sequence
gtattatgttccaaggctactacag

SEQ ID NO: 246998 - DNA, 25 bp, Probe Sequence
gtatgtacttccagtatcctgaaac

SEQ ID NO: 246999 - DNA, 25 bp, Probe Sequence
gtatttcattccacttttgcatata

SEQ ID NO: 247000 - DNA, 25 bp, Probe Sequence
gtatatgtttccatctttgtgataa

SEQ ID NO: 247001 - DNA, 25 bp, Probe Sequence
gtatttttccagtgttgaatctcac

SEQ ID NO: 247002 - DNA, 25 bp, Probe Sequence
gtatttctggaattggttacatccc

SEQ ID NO: 247003 - DNA, 25 bp, Probe Sequence
gtatcggcgatatcggtttcatcct

SEQ ID NO: 247004 - DNA, 25 bp, Probe Sequence
gtatcagggtaatgtgcttggtttg

SEQ ID NO: 247005 - DNA, 25 bp, Probe Sequence
gtaggggccacagttgctggatgtt

SEQ ID NO: 247006 - DNA, 25 bp, Probe Sequence
gtaatgggtacaatgaagaagtttc

SEQ ID NO: 247007 - DNA, 25 bp, Probe Sequence
gtatgaggcgcctggaagaattgct

SEQ ID NO: 247008 - DNA, 25 bp, Probe Sequence
gtagagtggcccagaattgcattct

SEQ ID NO: 247009 - DNA, 25 bp, Probe Sequence
gtctggggcttctgaaatgacctgg

SEQ ID NO: 247010 - DNA, 25 bp, Probe Sequence
gtcttcgcagttttaccgacttaga

SEQ ID NO: 247011 - DNA, 25 bp, Probe Sequence
gtatttcagtattttccagccttat

SEQ ID NO: 247012 - DNA, 25 bp, Probe Sequence
gtatttaaatgtatagaccttgata

SEQ ID NO: 247013 - DNA, 25 bp, Probe Sequence
gtatttatacgttaagacctctatg

SEQ ID NO: 247014 - DNA, 25 bp, Probe Sequence
gtattattaagttgatagccctcta

SEQ ID NO: 247015 - DNA, 25 bp, Probe Sequence
gtatttcttagttgctagactccct

SEQ ID NO: 247016 - DNA, 25 bp, Probe Sequence
gtatttattagtgtagcttctcctt

SEQ ID NO: 247017 - DNA, 25 bp, Probe Sequence
gtagcttttaatgttgcgcctcttc

SEQ ID NO: 247018 - DNA, 25 bp, Probe Sequence
gtagtatttcaaatttccttccttg

SEQ ID NO: 247019 - DNA, 25 bp, Probe Sequence
gtatttcattcatatttcctctcac

SEQ ID NO: 247020 - DNA, 25 bp, Probe Sequence
gtatttatgtcttaatctcttccac

SEQ ID NO: 247021 - DNA, 25 bp, Probe Sequence
gtatatttgtcatgacagtgcttgc

SEQ ID NO: 247022 - DNA, 25 bp, Probe Sequence
gtatgtttgccatcagagcacggcg

SEQ ID NO: 247023 - DNA, 25 bp, Probe Sequence
gtatgtgactcccctggatcgagtc

SEQ ID NO: 247024 - DNA, 25 bp, Probe Sequence
ggttgacccctatgaagtgtcctac

SEQ ID NO: 247025 - DNA, 25 bp, Probe Sequence
gtaggtaccctataattgttctata

SEQ ID NO: 247026 - DNA, 25 bp, Probe Sequence
gtattttcccaatagcactttcatt

SEQ ID NO: 247027 - DNA, 25 bp, Probe Sequence
gtatttttggcattgtagagcattt

SEQ ID NO: 247028 - DNA, 25 bp, Probe Sequence
gtatttttagctcgtatgacttgtt

SEQ ID NO: 247029 - DNA, 25 bp, Probe Sequence
gtaggttaagctgccatacgtgttc

SEQ ID NO: 247030 - DNA, 25 bp, Probe Sequence
gtaggcttagtggtcccaacttgtt

SEQ ID NO: 247031 - DNA, 25 bp, Probe Sequence
gtaggtaatgggtcacacaaacttg

SEQ ID NO: 247032 - DNA, 25 bp, Probe Sequence
gtagggaagggccccataggcagag

SEQ ID NO: 247033 - DNA, 25 bp, Probe Sequence
gtagatggaacgctaaaaggagaag

SEQ ID NO: 247034 - DNA, 25 bp, Probe Sequence
gtatagggggagatcaaatgtggaa

SEQ ID NO: 247035 - DNA, 25 bp, Probe Sequence
gtatgaggagggggaaatttgtata

SEQ ID NO: 247036 - DNA, 25 bp, Probe Sequence
gtgatgaagattcgggaaattaagg

SEQ ID NO: 247037 - DNA, 25 bp, Probe Sequence
tcgaaaattgtccaagaagccaaag

SEQ ID NO: 247038 - DNA, 25 bp, Probe Sequence
gtctcaaaattccgaaaccagaatg

SEQ ID NO: 247039 - DNA, 25 bp, Probe Sequence
ggtaaaactatgggcaaactgaaga

SEQ ID NO: 247040 - DNA, 25 bp, Probe Sequence
gtatatataactccaccaaactaaa

SEQ ID NO: 247041 - DNA, 25 bp, Probe Sequence
gtagtgtggactagaacaacccaaa

SEQ ID NO: 247042 - DNA, 25 bp, Probe Sequence
gtagttgtgaccaaaatactgacag

SEQ ID NO: 247043 - DNA, 25 bp, Probe Sequence
gtagggaacaaatgtgatctgacca

SEQ ID NO: 247044 - DNA, 25 bp, Probe Sequence
gtatggcaatatctacagcttctat

SEQ ID NO: 247045 - DNA, 25 bp, Probe Sequence
gtatgccctgcaagttggctgtcta

SEQ ID NO: 247046 - DNA, 25 bp, Probe Sequence
gtatgccctgcaagttggctgtcta

SEQ ID NO: 247047 - DNA, 25 bp, Probe Sequence
gtatctcattggtttggctggctcc

SEQ ID NO: 247048 - DNA, 25 bp, Probe Sequence
gtatctatttgtggtgaatgtgttt

SEQ ID NO: 247049 - DNA, 25 bp, Probe Sequence
gtatctgaataatctgtatggttta

SEQ ID NO: 247050 - DNA, 25 bp, Probe Sequence
gtatcgctattaccatgtgatgcgt

SEQ ID NO: 247051 - DNA, 25 bp, Probe Sequence
gtatactcaatgtctctgctgtgga

SEQ ID NO: 247052 - DNA, 25 bp, Probe Sequence
gtatatgctagatgtcacgtgatca

SEQ ID NO: 247053 - DNA, 25 bp, Probe Sequence
gtatatgtagacttcatcccaattg

SEQ ID NO: 247054 - DNA, 25 bp, Probe Sequence
gtataatagacaagaccacagtgtt

SEQ ID NO: 247055 - DNA, 25 bp, Probe Sequence
gtataatagacaagaccacagtgtt

SEQ ID NO: 247056 - DNA, 25 bp, Probe Sequence
gtatcaacagaataaccatgtgcat

SEQ ID NO: 247057 - DNA, 25 bp, Probe Sequence
gtatcatcacgtgggcaaactgctg

SEQ ID NO: 247058 - DNA, 25 bp, Probe Sequence
gtatctgcacgagcacttagcttgt

SEQ ID NO: 247059 - DNA, 25 bp, Probe Sequence
gtatatgctccagcttcatcagttg

SEQ ID NO: 247060 - DNA, 25 bp, Probe Sequence
gtatatgctccagcttcatcagttg

SEQ ID NO: 247061 - DNA, 25 bp, Probe Sequence
gtatatgctccaggttcatcagttg

SEQ ID NO: 247062 - DNA, 25 bp, Probe Sequence
gtagagcctaggttgtccttgggcc

SEQ ID NO: 247063 - DNA, 25 bp, Probe Sequence
gtagagcctaggttgtccttgggcc

SEQ ID NO: 247064 - DNA, 25 bp, Probe Sequence
gtatacactgggtaacctgatcgtg

SEQ ID NO: 247065 - DNA, 25 bp, Probe Sequence
gtatacagctgtgaaaccatcatca

SEQ ID NO: 247066 - DNA, 25 bp, Probe Sequence
gtatccagcagtgagacaccaccac

SEQ ID NO: 247067 - DNA, 25 bp, Probe Sequence
gtatccagcagtgagacaccaccac

SEQ ID NO: 247068 - DNA, 25 bp, Probe Sequence
gtatcacatcatggggccctgagcc

SEQ ID NO: 247069 - DNA, 25 bp, Probe Sequence
gtatagaattggaccatatcagccc

SEQ ID NO: 247070 - DNA, 25 bp, Probe Sequence
gtataggcattggataaatacagcc

SEQ ID NO: 247071 - DNA, 25 bp, Probe Sequence
gtatgcagcctttattaccaagccc

SEQ ID NO: 247072 - DNA, 25 bp, Probe Sequence
gtatctccgttgattccaagaatcg

SEQ ID NO: 247073 - DNA, 25 bp, Probe Sequence
gtagtcacggtgctctcagaaaata

SEQ ID NO: 247074 - DNA, 25 bp, Probe Sequence
gtagtcaggtagcttgtaaacatca

SEQ ID NO: 247075 - DNA, 25 bp, Probe Sequence
gtagtgagccttgattataccactg

SEQ ID NO: 247076 - DNA, 25 bp, Probe Sequence
gtaggagcctggtcatctctaccag

SEQ ID NO: 247077 - DNA, 25 bp, Probe Sequence
gtaggacatctagctttaaaaccaa

SEQ ID NO: 247078 - DNA, 25 bp, Probe Sequence
gtataacagctatccttactaccca

SEQ ID NO: 247079 - DNA, 25 bp, Probe Sequence
gtataactctagagcttgaatttta

SEQ ID NO: 247080 - DNA, 25 bp, Probe Sequence
gtatgagactcttgaaggaccagtt

SEQ ID NO: 247081 - DNA, 25 bp, Probe Sequence
gtaggcactttgtaaattcatattg

SEQ ID NO: 247082 - DNA, 25 bp, Probe Sequence
gtaggaggtgtgcagggtcactctg

SEQ ID NO: 247083 - DNA, 25 bp, Probe Sequence
gtagggatggtggcatcgatgcccc

SEQ ID NO: 247084 - DNA, 25 bp, Probe Sequence
gtaggatggaagtcttgtcccgcta

SEQ ID NO: 247085 - DNA, 25 bp, Probe Sequence
gtatctgagagtggtctttggtcgt

SEQ ID NO: 247086 - DNA, 25 bp, Probe Sequence
gtcatcgggtggaggtggtgttcta

SEQ ID NO: 247087 - DNA, 25 bp, Probe Sequence
gtcatcgggtggaggtggtgttcta

SEQ ID NO: 247088 - DNA, 25 bp, Probe Sequence
gtcatcgggtggaggtggtgttcta

SEQ ID NO: 247089 - DNA, 25 bp, Probe Sequence
gtcatcgggtggaggtggtgttcta

SEQ ID NO: 247090 - DNA, 25 bp, Probe Sequence
gtataggcttcgaggtcaggctgta

SEQ ID NO: 247091 - DNA, 25 bp, Probe Sequence
gtatattcaccactaggacaggtta

SEQ ID NO: 247092 - DNA, 25 bp, Probe Sequence
gtatattcacagctgggcacaactt

SEQ ID NO: 247093 - DNA, 25 bp, Probe Sequence
gtatatatccagcagtggaattact

SEQ ID NO: 247094 - DNA, 25 bp, Probe Sequence
gtatattccagacatggaagtcagt

SEQ ID NO: 247095 - DNA, 25 bp, Probe Sequence
gtatttctacatacagtgaacaatt

SEQ ID NO: 247096 - DNA, 25 bp, Probe Sequence
gtatttctcagcatcactatgtagc

SEQ ID NO: 247097 - DNA, 25 bp, Probe Sequence
gtatttctcatagtgcagctttatt

SEQ ID NO: 247098 - DNA, 25 bp, Probe Sequence
gtatcaatcctgttgagttacattt

SEQ ID NO: 247099 - DNA, 25 bp, Probe Sequence
gtagctacgctaatggttaacctga

SEQ ID NO: 247100 - DNA, 25 bp, Probe Sequence
gtatgtaatgtatggttgacccagc

SEQ ID NO: 247101 - DNA, 25 bp, Probe Sequence
gtaggaagctactgtgtcttcagca

SEQ ID NO: 247102 - DNA, 25 bp, Probe Sequence
gtctgggagtctttggagtaagaat

SEQ ID NO: 247103 - DNA, 25 bp, Probe Sequence
gtatgagaggtcctggggctcaaac

SEQ ID NO: 247104 - DNA, 25 bp, Probe Sequence
gtatctagaatggcaggtggtgcat

SEQ ID NO: 247105 - DNA, 25 bp, Probe Sequence
gtatctagaagtgggatgttgctat

SEQ ID NO: 247106 - DNA, 25 bp, Probe Sequence
gtatctggaagcctctgtgttggtg

SEQ ID NO: 247107 - DNA, 25 bp, Probe Sequence
gtatcaggggcaccaatgtgcgtgc

SEQ ID NO: 247108 - DNA, 25 bp, Probe Sequence
gtatcaaggttacattggtgcagcc

SEQ ID NO: 247109 - DNA, 25 bp, Probe Sequence
gtatcacggattacaatgaacgcag

SEQ ID NO: 247110 - DNA, 25 bp, Probe Sequence
gtatactgagtgtccaaacactgca

SEQ ID NO: 247111 - DNA, 25 bp, Probe Sequence
gtatacaggtgtcaaactccacttg

SEQ ID NO: 247112 - DNA, 25 bp, Probe Sequence
gtataccagctttggtacttcattt

SEQ ID NO: 247113 - DNA, 25 bp, Probe Sequence
gtatgcccgaatttgtaattctttt

SEQ ID NO: 247114 - DNA, 25 bp, Probe Sequence
gtatgtgaccgagctataaattttt

SEQ ID NO: 247115 - DNA, 25 bp, Probe Sequence
gtgataaccgtggcgaaagtcttgt

SEQ ID NO: 247116 - DNA, 25 bp, Probe Sequence
gtatatagcagtctagaaattctag

SEQ ID NO: 247117 - DNA, 25 bp, Probe Sequence
gtataagcccatcaagaaagtcatg

SEQ ID NO: 247118 - DNA, 25 bp, Probe Sequence
gtataactccatctgcaatatagta

SEQ ID NO: 247119 - DNA, 25 bp, Probe Sequence
gtatagagtttgcctcaacacatgt

SEQ ID NO: 247120 - DNA, 25 bp, Probe Sequence
gtatatgtgtttctctacacacaga

SEQ ID NO: 247121 - DNA, 25 bp, Probe Sequence
gtatttgatctttcaccacagcaga

SEQ ID NO: 247122 - DNA, 25 bp, Probe Sequence
gtagtaactcttcccaagagagctc

SEQ ID NO: 247123 - DNA, 25 bp, Probe Sequence
gggatacaagcttccaaaggtccgg

SEQ ID NO: 247124 - DNA, 25 bp, Probe Sequence
gggctacggaaccgtgagttccgct

SEQ ID NO: 247125 - DNA, 25 bp, Probe Sequence
ggccgaccctacaggcagttaacat

SEQ ID NO: 247126 - DNA, 25 bp, Probe Sequence
ggacgaccagtgtgaggggtccaca

SEQ ID NO: 247127 - DNA, 25 bp, Probe Sequence
gtataaccgcgaaggagacctcctc

SEQ ID NO: 247128 - DNA, 25 bp, Probe Sequence
gtaggaccaagtgatgacacccctc

SEQ ID NO: 247129 - DNA, 25 bp, Probe Sequence
gtaggaccatagcgatactagccct

SEQ ID NO: 247130 - DNA, 25 bp, Probe Sequence
gtatgtgcatggtgtcagataccag

SEQ ID NO: 247131 - DNA, 25 bp, Probe Sequence
gtatcctggattgagaacactgcta

SEQ ID NO: 247132 - DNA, 25 bp, Probe Sequence
gtatattgttgccacagaaactgta

SEQ ID NO: 247133 - DNA, 25 bp, Probe Sequence
gtatatcttcagccacagaaaagcc

SEQ ID NO: 247134 - DNA, 25 bp, Probe Sequence
gtatatcttcatcagtgacgaggta

SEQ ID NO: 247135 - DNA, 25 bp, Probe Sequence
gtatatttctatgggtgggtctaat

SEQ ID NO: 247136 - DNA, 25 bp, Probe Sequence
gtatatctttttgggcatggactaa

SEQ ID NO: 247137 - DNA, 25 bp, Probe Sequence
gtatcaattttgggtctggcagctg

SEQ ID NO: 247138 - DNA, 25 bp, Probe Sequence
gtatcaattttgtcagtcctgttcg

SEQ ID NO: 247139 - DNA, 25 bp, Probe Sequence
gtatcaagattctattgctccagtt

SEQ ID NO: 247140 - DNA, 25 bp, Probe Sequence
gtataagatttatgtctactgtaaa

SEQ ID NO: 247141 - DNA, 25 bp, Probe Sequence
gtatagaactttagaccactgtcag

SEQ ID NO: 247142 - DNA, 25 bp, Probe Sequence
gtatcgaacttttgttctcagtatc

SEQ ID NO: 247143 - DNA, 25 bp, Probe Sequence
gtatctaacattaccattcacgtta

SEQ ID NO: 247144 - DNA, 25 bp, Probe Sequence
gtatcttagacgacctgtccagatg

SEQ ID NO: 247145 - DNA, 25 bp, Probe Sequence
gtatctgtaaccacaatcacacata

SEQ ID NO: 247146 - DNA, 25 bp, Probe Sequence
gtatctggaagcgaacatgacacaa

SEQ ID NO: 247147 - DNA, 25 bp, Probe Sequence
gtatataaatggcagcaatcacaaa

SEQ ID NO: 247148 - DNA, 25 bp, Probe Sequence
gtatacacattatagcatatccaca

SEQ ID NO: 247149 - DNA, 25 bp, Probe Sequence
gtatatcctatacacacatctcctt

SEQ ID NO: 247150 - DNA, 25 bp, Probe Sequence
gtatatccaaagcttctccttttca

SEQ ID NO: 247151 - DNA, 25 bp, Probe Sequence
gtatacctaagacttactgctttaa

SEQ ID NO: 247152 - DNA, 25 bp, Probe Sequence
gtatgacccaaaggttcctctgtga

SEQ ID NO: 247153 - DNA, 25 bp, Probe Sequence
gtatagcctggaaagacacctctgt

SEQ ID NO: 247154 - DNA, 25 bp, Probe Sequence
gtatatggtggatttgacttttgtc

SEQ ID NO: 247155 - DNA, 25 bp, Probe Sequence
gtatagatgtccactacttctattc

SEQ ID NO: 247156 - DNA, 25 bp, Probe Sequence
gtataatgtatgcactactgtttta

SEQ ID NO: 247157 - DNA, 25 bp, Probe Sequence
gtataatgcagttatcttctttctt

SEQ ID NO: 247158 - DNA, 25 bp, Probe Sequence
gtatatgatagttctgctgatgttt

SEQ ID NO: 247159 - DNA, 25 bp, Probe Sequence
gtatatgctagtttcttgtagatat

SEQ ID NO: 247160 - DNA, 25 bp, Probe Sequence
gtagtctagatctcagttaatgctt

SEQ ID NO: 247161 - DNA, 25 bp, Probe Sequence
gtatatctgaactcttgaaacttat

SEQ ID NO: 247162 - DNA, 25 bp, Probe Sequence
gtataggtgcaacctgtgaaacatt

SEQ ID NO: 247163 - DNA, 25 bp, Probe Sequence
gtgtacagtgctcacctaaatccat

SEQ ID NO: 247164 - DNA, 25 bp, Probe Sequence
gtatgaagctcaacacctaaattat

SEQ ID NO: 247165 - DNA, 25 bp, Probe Sequence
gtataactattactggagactcatt

SEQ ID NO: 247166 - DNA, 25 bp, Probe Sequence
gtatatactttttagagactctttt

SEQ ID NO: 247167 - DNA, 25 bp, Probe Sequence
gtatatttgtactcagagagcctta

SEQ ID NO: 247168 - DNA, 25 bp, Probe Sequence
gtataaactgactctgggcagcatt

SEQ ID NO: 247169 - DNA, 25 bp, Probe Sequence
gtatcaaaccacttgtgtggtcttt

SEQ ID NO: 247170 - DNA, 25 bp, Probe Sequence
gtatccaaccaacttggttctgctt

SEQ ID NO: 247171 - DNA, 25 bp, Probe Sequence
gtactactcgcagtgataggtttgc

SEQ ID NO: 247172 - DNA, 25 bp, Probe Sequence
gtatgtactgcctgatagagaatcc

SEQ ID NO: 247173 - DNA, 25 bp, Probe Sequence
gtatgtgcaccatattggagtacct

SEQ ID NO: 247174 - DNA, 25 bp, Probe Sequence
gtatgtcctaagctggagttctgat

SEQ ID NO: 247175 - DNA, 25 bp, Probe Sequence
tttccctagggagagcttcgttatc

SEQ ID NO: 247176 - DNA, 25 bp, Probe Sequence
gtacgcccagggaaagcggcgttat

SEQ ID NO: 247177 - DNA, 25 bp, Probe Sequence
gtacgtcgtggagtccactggcgtc

SEQ ID NO: 247178 - DNA, 25 bp, Probe Sequence
gtatacgtgtatggtccttgggtcc

SEQ ID NO: 247179 - DNA, 25 bp, Probe Sequence
gtatactttgatgtccctgatgctt

SEQ ID NO: 247180 - DNA, 25 bp, Probe Sequence
gtatactttatcacccatgagatca

SEQ ID NO: 247181 - DNA, 25 bp, Probe Sequence
gtatagctttgcattaccttacatg

SEQ ID NO: 247182 - DNA, 25 bp, Probe Sequence
gtatagctgtatgcttacccaaaaa

SEQ ID NO: 247183 - DNA, 25 bp, Probe Sequence
gtatatgtgaagcaaactctaaaat

SEQ ID NO: 247184 - DNA, 25 bp, Probe Sequence
gtatatgtgaagcaaactctaaaat

SEQ ID NO: 247185 - DNA, 25 bp, Probe Sequence
gtatagagcagataacactgtgaaa

SEQ ID NO: 247186 - DNA, 25 bp, Probe Sequence
gtatagaagaatatccttggaagta

SEQ ID NO: 247187 - DNA, 25 bp, Probe Sequence
gtataatagtgatccctatggagaa

SEQ ID NO: 247188 - DNA, 25 bp, Probe Sequence
gtatgtgccaagagccctaaaaatg

SEQ ID NO: 247189 - DNA, 25 bp, Probe Sequence
gtagtggcaagcagccttttactct

SEQ ID NO: 247190 - DNA, 25 bp, Probe Sequence
gtagtcaggagcaggcgattgaagt

SEQ ID NO: 247191 - DNA, 25 bp, Probe Sequence
gtatatgcaacgagtggctggaatg

SEQ ID NO: 247192 - DNA, 25 bp, Probe Sequence
gtatgagccacgctcaggggagcag

SEQ ID NO: 247193 - DNA, 25 bp, Probe Sequence
gtatgccacactctacatggggggc

SEQ ID NO: 247194 - DNA, 25 bp, Probe Sequence
gtatcaccactgtaatctccagggg

SEQ ID NO: 247195 - DNA, 25 bp, Probe Sequence
gtatcaacgctatgacgcagctgtg

SEQ ID NO: 247196 - DNA, 25 bp, Probe Sequence
gtatagcaggtatcagccatgttta

SEQ ID NO: 247197 - DNA, 25 bp, Probe Sequence
gtatagatacattacccctttacat

SEQ ID NO: 247198 - DNA, 25 bp, Probe Sequence
gtatagatacaaaaccttgtgtaag

SEQ ID NO: 247199 - DNA, 25 bp, Probe Sequence
gtgatggaactagacacgttggaag

SEQ ID NO: 247200 - DNA, 25 bp, Probe Sequence
gtatggcgaggacaccgtggtgcat

SEQ ID NO: 247201 - DNA, 25 bp, Probe Sequence
gtatgcgggcgaaaacgtctgactt

SEQ ID NO: 247202 - DNA, 25 bp, Probe Sequence
gtactgcgggagcctacatgtttcc

SEQ ID NO: 247203 - DNA, 25 bp, Probe Sequence
gtacgtgggaaggcacttttcggat

SEQ ID NO: 247204 - DNA, 25 bp, Probe Sequence
gtaggtgtaaacgctggtgtctgaa

SEQ ID NO: 247205 - DNA, 25 bp, Probe Sequence
gtataggtgaaggcggctgtgtgac

SEQ ID NO: 247206 - DNA, 25 bp, Probe Sequence
gtatatggtcaaacatttgtgtgag

SEQ ID NO: 247207 - DNA, 25 bp, Probe Sequence
gtatgctagtcaaacctttggaagc

SEQ ID NO: 247208 - DNA, 25 bp, Probe Sequence
gtatctagctaatctagtggggatg

SEQ ID NO: 247209 - DNA, 25 bp, Probe Sequence
gtatcttgccagtttttaggagaac

SEQ ID NO: 247210 - DNA, 25 bp, Probe Sequence
gtatcctgcacctactttaatgata

SEQ ID NO: 247211 - DNA, 25 bp, Probe Sequence
gtgaccccacagagtctcaaatttt

SEQ ID NO: 247212 - DNA, 25 bp, Probe Sequence
gtcacctccaagagacccaacttgg

SEQ ID NO: 247213 - DNA, 25 bp, Probe Sequence
gtatgtgtccattttacccacactt

SEQ ID NO: 247214 - DNA, 25 bp, Probe Sequence
gtatcttaattatacccagtctggt

SEQ ID NO: 247215 - DNA, 25 bp, Probe Sequence
gtatcacttctttgtaatccagttg

SEQ ID NO: 247216 - DNA, 25 bp, Probe Sequence
gtatcacctttgccaagtaagagtg

SEQ ID NO: 247217 - DNA, 25 bp, Probe Sequence
gtatcaactttgtgagtaataatgt

SEQ ID NO: 247218 - DNA, 25 bp, Probe Sequence
gtatcaattttaggagctttatttg

SEQ ID NO: 247219 - DNA, 25 bp, Probe Sequence
gtatccttactaagagtgctccttt

SEQ ID NO: 247220 - DNA, 25 bp, Probe Sequence
gtatgggctgatgaagaggccttct

SEQ ID NO: 247221 - DNA, 25 bp, Probe Sequence
gtaggagcagtggaaatggttcctt

SEQ ID NO: 247222 - DNA, 25 bp, Probe Sequence
gtagtgatgctggccaaatggtgct

SEQ ID NO: 247223 - DNA, 25 bp, Probe Sequence
gtatgtacatagtagacatgtgtgt

SEQ ID NO: 247224 - DNA, 25 bp, Probe Sequence
gtagtgtccaggcacattgtgtacc

SEQ ID NO: 247225 - DNA, 25 bp, Probe Sequence
gtaggtggagatgaattttcaggtc

SEQ ID NO: 247226 - DNA, 25 bp, Probe Sequence
gtaggggcagtgatggttgccagga

SEQ ID NO: 247227 - DNA, 25 bp, Probe Sequence
gtaggaaggtggagtatagaagaat

SEQ ID NO: 247228 - DNA, 25 bp, Probe Sequence
gtagggactttgtgtaactcagata

SEQ ID NO: 247229 - DNA, 25 bp, Probe Sequence
gtaggttgcacactttggtaccaga

SEQ ID NO: 247230 - DNA, 25 bp, Probe Sequence
gtatggtgatcaggctttggcttgc

SEQ ID NO: 247231 - DNA, 25 bp, Probe Sequence
gtatggttcaagtagtagctgccta

SEQ ID NO: 247232 - DNA, 25 bp, Probe Sequence
gtagagggcaaggatgctccagcct

SEQ ID NO: 247233 - DNA, 25 bp, Probe Sequence
gtagagaggcaagtaggccgccaga

SEQ ID NO: 247234 - DNA, 25 bp, Probe Sequence
gtatgagtggagacgggcctgggtc

SEQ ID NO: 247235 - DNA, 25 bp, Probe Sequence
gtatgagtggcttctgggagatggg

SEQ ID NO: 247236 - DNA, 25 bp, Probe Sequence
gtatgatgcgtttttggcctcagag

SEQ ID NO: 247237 - DNA, 25 bp, Probe Sequence
gtatgaagcttgtcctctgactagg

SEQ ID NO: 247238 - DNA, 25 bp, Probe Sequence
gtatgtagctttagctcagcgcaaa

SEQ ID NO: 247239 - DNA, 25 bp, Probe Sequence
gtatgcaggtagtcagccaggcaaa

SEQ ID NO: 247240 - DNA, 25 bp, Probe Sequence
gtatcggctgagtgccgtagctcac

SEQ ID NO: 247241 - DNA, 25 bp, Probe Sequence
gtatctgttatgtgcacttaagccg

SEQ ID NO: 247242 - DNA, 25 bp, Probe Sequence
gtatcatgctaatatccattgaatc

SEQ ID NO: 247243 - DNA, 25 bp, Probe Sequence
gtatctgtactctctgcagatggtc

SEQ ID NO: 247244 - DNA, 25 bp, Probe Sequence
gtatctgtatggtcactagatgagt

SEQ ID NO: 247245 - DNA, 25 bp, Probe Sequence
gtatgctcttggtaccaggagctct

SEQ ID NO: 247246 - DNA, 25 bp, Probe Sequence
gtatcatttgagaacacaagtggta

SEQ ID NO: 247247 - DNA, 25 bp, Probe Sequence
gtatcactgttgacccttgtggaag

SEQ ID NO: 247248 - DNA, 25 bp, Probe Sequence
gtatcactgtctttcctagatggca

SEQ ID NO: 247249 - DNA, 25 bp, Probe Sequence
gtatactgtgatttctctagctggc

SEQ ID NO: 247250 - DNA, 25 bp, Probe Sequence
gtataatggatctagcttgatgctt

SEQ ID NO: 247251 - DNA, 25 bp, Probe Sequence
gtataatagaaactttgctagttaa

SEQ ID NO: 247252 - DNA, 25 bp, Probe Sequence
gtataaaatacatgtcgcttttaag

SEQ ID NO: 247253 - DNA, 25 bp, Probe Sequence
gtctaaaatgcagtggggtttgttt

SEQ ID NO: 247254 - DNA, 25 bp, Probe Sequence
gtatctttggaggggttttggtgtg

SEQ ID NO: 247255 - DNA, 25 bp, Probe Sequence
gtatgccctgggggtctttgatggg

SEQ ID NO: 247256 - DNA, 25 bp, Probe Sequence
gtatcccatgttggtgtcctgggga

SEQ ID NO: 247257 - DNA, 25 bp, Probe Sequence
gtatctctagtcagttcagtaggag

SEQ ID NO: 247258 - DNA, 25 bp, Probe Sequence
gtatgttttgctatgtaataatggg

SEQ ID NO: 247259 - DNA, 25 bp, Probe Sequence
gtatcttgttctctgatcataaacc

SEQ ID NO: 247260 - DNA, 25 bp, Probe Sequence
gtatcttcaactggtgtccaaagac

SEQ ID NO: 247261 - DNA, 25 bp, Probe Sequence
gtatgtgtctggggtgtgtcaccag

SEQ ID NO: 247262 - DNA, 25 bp, Probe Sequence
gtatgttctgatgagctgggcaagg

SEQ ID NO: 247263 - DNA, 25 bp, Probe Sequence
gtagctttagatggcgtggacgtga

SEQ ID NO: 247264 - DNA, 25 bp, Probe Sequence
gtatgtttcagtggggttcgatgtt

SEQ ID NO: 247265 - DNA, 25 bp, Probe Sequence
gtatgttctaggtgtattgtgactt

SEQ ID NO: 247266 - DNA, 25 bp, Probe Sequence
gtatgttctaggtgtattgtgactt

SEQ ID NO: 247267 - DNA, 25 bp, Probe Sequence
gtatgttctaggtgtattgtgactt

SEQ ID NO: 247268 - DNA, 25 bp, Probe Sequence
gtatcttgccggtcatttttatgtt

SEQ ID NO: 247269 - DNA, 25 bp, Probe Sequence
gtatcattcttgcaaattattcttt

SEQ ID NO: 247270 - DNA, 25 bp, Probe Sequence
gtatcaagtgtctcagtgtatattt

SEQ ID NO: 247271 - DNA, 25 bp, Probe Sequence
gtatccagcgctcattgggaattta

SEQ ID NO: 247272 - DNA, 25 bp, Probe Sequence
gtatccacccaaatggcaagtttat

SEQ ID NO: 247273 - DNA, 25 bp, Probe Sequence
gtactacccaagaagactgtttatt

SEQ ID NO: 247274 - DNA, 25 bp, Probe Sequence
gtatcttccccaatcagactgagga

SEQ ID NO: 247275 - DNA, 25 bp, Probe Sequence
gtatcttgcctcagatatactcatg

SEQ ID NO: 247276 - DNA, 25 bp, Probe Sequence
gtatcatgtctcctttaactagcat

SEQ ID NO: 247277 - DNA, 25 bp, Probe Sequence
gtatcagtagccaaatagatccagc

SEQ ID NO: 247278 - DNA, 25 bp, Probe Sequence
gtatcatgatagtcacaaacgccgc

SEQ ID NO: 247279 - DNA, 25 bp, Probe Sequence
gtatcttcagatccagagtccagca

SEQ ID NO: 247280 - DNA, 25 bp, Probe Sequence
gtatcattatatgctagtcaacctg

SEQ ID NO: 247281 - DNA, 25 bp, Probe Sequence
gtatctacactgttagtgccacagc

SEQ ID NO: 247282 - DNA, 25 bp, Probe Sequence
gtatgtagcagtgtatgctctcata

SEQ ID NO: 247283 - DNA, 25 bp, Probe Sequence
gtatggatgcaggtcttgccagaac

SEQ ID NO: 247284 - DNA, 25 bp, Probe Sequence
gtatggtagttctcactggatgcta

SEQ ID NO: 247285 - DNA, 25 bp, Probe Sequence
gtaggataactagtagctggtacat

SEQ ID NO: 247286 - DNA, 25 bp, Probe Sequence
gtaggtaatctagttccagagtctg

SEQ ID NO: 247287 - DNA, 25 bp, Probe Sequence
gtatcacgaattcttcaggaggctt

SEQ ID NO: 247288 - DNA, 25 bp, Probe Sequence
gtatgacaaatgcagcttagccacg

SEQ ID NO: 247289 - DNA, 25 bp, Probe Sequence
gtatgccaagtggattccagcctca

SEQ ID NO: 247290 - DNA, 25 bp, Probe Sequence
gtaggctctaaattccagccatcaa

SEQ ID NO: 247291 - DNA, 25 bp, Probe Sequence
gtaggcagctgcaaaaccacactga

SEQ ID NO: 247292 - DNA, 25 bp, Probe Sequence
gtataaggtgacaaatccagtgatg

SEQ ID NO: 247293 - DNA, 25 bp, Probe Sequence
gtatgacagggaacttgccctgcat

SEQ ID NO: 247294 - DNA, 25 bp, Probe Sequence
gtatggctgggaaatggacttgaga

SEQ ID NO: 247295 - DNA, 25 bp, Probe Sequence
gtatccttgcagttatgtgacttaa

SEQ ID NO: 247296 - DNA, 25 bp, Probe Sequence
gtatccaacgcaataaatatatgaa

SEQ ID NO: 247297 - DNA, 25 bp, Probe Sequence
gtatctcaagcccagaaagatgaat

SEQ ID NO: 247298 - DNA, 25 bp, Probe Sequence
gtatctcaagactaataaaatcatg

SEQ ID NO: 247299 - DNA, 25 bp, Probe Sequence
gtatgcctcaaatataactgactgt

SEQ ID NO: 247300 - DNA, 25 bp, Probe Sequence
gtagcccaagtgataacttcgaagc

SEQ ID NO: 247301 - DNA, 25 bp, Probe Sequence
gtatccaaggtgctgaatcttggag

SEQ ID NO: 247302 - DNA, 25 bp, Probe Sequence
gtagcactcacgccctaataaggag

SEQ ID NO: 247303 - DNA, 25 bp, Probe Sequence
gtgaactcggttgtaacggggctgg

SEQ ID NO: 247304 - DNA, 25 bp, Probe Sequence
gtaatcccagttataggggaggctg

SEQ ID NO: 247305 - DNA, 25 bp, Probe Sequence
gtaaccggctgtgagggagagggtc

SEQ ID NO: 247306 - DNA, 25 bp, Probe Sequence
gtatgagttgttgttgggaaagggc

SEQ ID NO: 247307 - DNA, 25 bp, Probe Sequence
gtatgagaaggtgcttgtggaaggg

SEQ ID NO: 247308 - DNA, 25 bp, Probe Sequence
ggtgcagaccgtgttggtggcggta

SEQ ID NO: 247309 - DNA, 25 bp, Probe Sequence
gggctgactggtgtaggtttggtag

SEQ ID NO: 247310 - DNA, 25 bp, Probe Sequence
gggacctggcccagtttatggtgca

SEQ ID NO: 247311 - DNA, 25 bp, Probe Sequence
gggccgggcaccagggatggtgctg

SEQ ID NO: 247312 - DNA, 25 bp, Probe Sequence
gtaggcgtgtacggtgggaggtcta

SEQ ID NO: 247313 - DNA, 25 bp, Probe Sequence
gtatgtgctgattaagggggtggac

SEQ ID NO: 247314 - DNA, 25 bp, Probe Sequence
gtatggctgcgacgtggggtcggac

SEQ ID NO: 247315 - DNA, 25 bp, Probe Sequence
gtagcaggcaggggtgggtaggcac

SEQ ID NO: 247316 - DNA, 25 bp, Probe Sequence
gtcaggcaaggggtggggagtccag

SEQ ID NO: 247317 - DNA, 25 bp, Probe Sequence
gtgggcacggtcacaatggggccag

SEQ ID NO: 247318 - DNA, 25 bp, Probe Sequence
gtatggcgggacaaccatggctggc

SEQ ID NO: 247319 - DNA, 25 bp, Probe Sequence
gtatggcgggacaaccatggctggc

SEQ ID NO: 247320 - DNA, 25 bp, Probe Sequence
gtacgcaggctgtctagacggctac

SEQ ID NO: 247321 - DNA, 25 bp, Probe Sequence
gtatgccgaggacctgatcaggcga

SEQ ID NO: 247322 - DNA, 25 bp, Probe Sequence
gtatcctatggaacagattctgggg

SEQ ID NO: 247323 - DNA, 25 bp, Probe Sequence
gtatcctggcaaatactcctgcagg

SEQ ID NO: 247324 - DNA, 25 bp, Probe Sequence
gtatcctggcacaataattttatgg

SEQ ID NO: 247325 - DNA, 25 bp, Probe Sequence
gtatctggtacatcaactgctttgg

SEQ ID NO: 247326 - DNA, 25 bp, Probe Sequence
gtactttggtcctctgatttcagat

SEQ ID NO: 247327 - DNA, 25 bp, Probe Sequence
gtacctttttcataactggaattgc

SEQ ID NO: 247328 - DNA, 25 bp, Probe Sequence
gtatcagctttttttaaaggacatt

SEQ ID NO: 247329 - DNA, 25 bp, Probe Sequence
gtatgcagtttttcctccaaaaatt

SEQ ID NO: 247330 - DNA, 25 bp, Probe Sequence
gtatcgtgatctatcctcaacaaca

SEQ ID NO: 247331 - DNA, 25 bp, Probe Sequence
gtatcgattatggttctgagaaaag

SEQ ID NO: 247332 - DNA, 25 bp, Probe Sequence
gtagtattagttcatggtaactgca

SEQ ID NO: 247333 - DNA, 25 bp, Probe Sequence
gtatgttttgttcctgctgaatttt

SEQ ID NO: 247334 - DNA, 25 bp, Probe Sequence
gtatcctggtttcatgtgttgtttt

SEQ ID NO: 247335 - DNA, 25 bp, Probe Sequence
gtatcctttcctcagtgtgtatatg

SEQ ID NO: 247336 - DNA, 25 bp, Probe Sequence
gtatcctttctctggagtgtaagca

SEQ ID NO: 247337 - DNA, 25 bp, Probe Sequence
gtatctccggtaagtagatgagaag

SEQ ID NO: 247338 - DNA, 25 bp, Probe Sequence
gtatcctgcagacatgtaagaataa

SEQ ID NO: 247339 - DNA, 25 bp, Probe Sequence
gtatctctgcagtgtggattgaaca

SEQ ID NO: 247340 - DNA, 25 bp, Probe Sequence
gtagcatcgatgtgctgtggatatc

SEQ ID NO: 247341 - DNA, 25 bp, Probe Sequence
gtatcaggcatctgtgctgaatgtc

SEQ ID NO: 247342 - DNA, 25 bp, Probe Sequence
gtatgctgagcacgctgtctcaatg

SEQ ID NO: 247343 - DNA, 25 bp, Probe Sequence
gtatgctatgcacgtgttcttgatt

SEQ ID NO: 247344 - DNA, 25 bp, Probe Sequence
gtatcttgggctttctgtattctga

SEQ ID NO: 247345 - DNA, 25 bp, Probe Sequence
gtatcacgtgtgctttgtatcttaa

SEQ ID NO: 247346 - DNA, 25 bp, Probe Sequence
gtatcagcgttgcggttagggatca

SEQ ID NO: 247347 - DNA, 25 bp, Probe Sequence
gtatcgcagtgttgggtaagacttt

SEQ ID NO: 247348 - DNA, 25 bp, Probe Sequence
gtatgtgcagtgtgggatttgactc

SEQ ID NO: 247349 - DNA, 25 bp, Probe Sequence
gtgatgggtgggggcggtgactgcc

SEQ ID NO: 247350 - DNA, 25 bp, Probe Sequence
gtgaacgggtgcgcaaggacatcga

SEQ ID NO: 247351 - DNA, 25 bp, Probe Sequence
gtagggaacgcggaaggatcataac

SEQ ID NO: 247352 - DNA, 25 bp, Probe Sequence
gtatgggacacgctgaagccaaaga

SEQ ID NO: 247353 - DNA, 25 bp, Probe Sequence
gtagccagaagagttaggccaaaaa

SEQ ID NO: 247354 - DNA, 25 bp, Probe Sequence
gtagaaaaatgcagacacttaacaa

SEQ ID NO: 247355 - DNA, 25 bp, Probe Sequence
gtagataagggacatatttgacaaa

SEQ ID NO: 247356 - DNA, 25 bp, Probe Sequence
gtagtaaagccatagacttgtgcaa

SEQ ID NO: 247357 - DNA, 25 bp, Probe Sequence
gtatgtcgagagtaccaacgtggca

SEQ ID NO: 247358 - DNA, 25 bp, Probe Sequence
gtagtagaagtagcagaggaggaag

SEQ ID NO: 247359 - DNA, 25 bp, Probe Sequence
gtagatgagaagtcttcacggggag

SEQ ID NO: 247360 - DNA, 25 bp, Probe Sequence
gtatcatgcagagagttctagggaa

SEQ ID NO: 247361 - DNA, 25 bp, Probe Sequence
gtaggcaagtagctctggggccacc

SEQ ID NO: 247362 - DNA, 25 bp, Probe Sequence
gtagtcacatcaacgtcgggtcaca

SEQ ID NO: 247363 - DNA, 25 bp, Probe Sequence
gtagaacaaacggctgtctgccaac

SEQ ID NO: 247364 - DNA, 25 bp, Probe Sequence
gtatgaagaatagctagcctgtcca

SEQ ID NO: 247365 - DNA, 25 bp, Probe Sequence
gtagcaagatttgatactttggtga

SEQ ID NO: 247366 - DNA, 25 bp, Probe Sequence
gtcaggaactacggattttgggata

SEQ ID NO: 247367 - DNA, 25 bp, Probe Sequence
gtaggaagcaaagcctctagaggta

SEQ ID NO: 247368 - DNA, 25 bp, Probe Sequence
gtatgtgaccaaagtccttaaggga

SEQ ID NO: 247369 - DNA, 25 bp, Probe Sequence
gtatgatgtccctgtcttgtgggag

SEQ ID NO: 247370 - DNA, 25 bp, Probe Sequence
gtatggactatctgtctggtggccc

SEQ ID NO: 247371 - DNA, 25 bp, Probe Sequence
gtatgcaaaatggtggctggggccc

SEQ ID NO: 247372 - DNA, 25 bp, Probe Sequence
gtatgaggacatggtcgtggagtcg

SEQ ID NO: 247373 - DNA, 25 bp, Probe Sequence
gtatgggagtttggtagtgtcagtc

SEQ ID NO: 247374 - DNA, 25 bp, Probe Sequence
gtaggaattcatgggtcctcaagtc

SEQ ID NO: 247375 - DNA, 25 bp, Probe Sequence
gtaggagagacctgtcctagatgtt

SEQ ID NO: 247376 - DNA, 25 bp, Probe Sequence
gtagttgaacactgtcatccgtttc

SEQ ID NO: 247377 - DNA, 25 bp, Probe Sequence
gtagtcgcaaatcttacagccggtc

SEQ ID NO: 247378 - DNA, 25 bp, Probe Sequence
gtatgtggctttctgtagccgtggt

SEQ ID NO: 247379 - DNA, 25 bp, Probe Sequence
gtatgtttcttctactaccagtaat

SEQ ID NO: 247380 - DNA, 25 bp, Probe Sequence
gtagtcattccctcttaactactgc

SEQ ID NO: 247381 - DNA, 25 bp, Probe Sequence
gtatctcctaatgccttacactact

SEQ ID NO: 247382 - DNA, 25 bp, Probe Sequence
gtaagccttacctttagactactct

SEQ ID NO: 247383 - DNA, 25 bp, Probe Sequence
gtagacgttttcttgaagttcagca

SEQ ID NO: 247384 - DNA, 25 bp, Probe Sequence
gtagtcacttcaactcttagttcac

SEQ ID NO: 247385 - DNA, 25 bp, Probe Sequence
gtagtcacttcaactcttagttcac

SEQ ID NO: 247386 - DNA, 25 bp, Probe Sequence
gtagtactgttggctcgatatttga

SEQ ID NO: 247387 - DNA, 25 bp, Probe Sequence
gtagtcggttggtcatgaactttct

SEQ ID NO: 247388 - DNA, 25 bp, Probe Sequence
gtagttattctcccatgaacgttct

SEQ ID NO: 247389 - DNA, 25 bp, Probe Sequence
gtaggtatctccccagatacccaca

SEQ ID NO: 247390 - DNA, 25 bp, Probe Sequence
gtagtatattcaatgtaaaaccaca

SEQ ID NO: 247391 - DNA, 25 bp, Probe Sequence
gtatctgtatacctgtaatatagcc

SEQ ID NO: 247392 - DNA, 25 bp, Probe Sequence
gtatcctgataatgtttaagccaac

SEQ ID NO: 247393 - DNA, 25 bp, Probe Sequence
gtatcctgataaacattaaacactg

SEQ ID NO: 247394 - DNA, 25 bp, Probe Sequence
gtatccttaatattttatgacattc

SEQ ID NO: 247395 - DNA, 25 bp, Probe Sequence
gtatccttctacttatttagatctt

SEQ ID NO: 247396 - DNA, 25 bp, Probe Sequence
gtatctttccaatatatagcaattt

SEQ ID NO: 247397 - DNA, 25 bp, Probe Sequence
gtatcttgtcaatactacctttctc

SEQ ID NO: 247398 - DNA, 25 bp, Probe Sequence
gtatctattctttcaccacttaatt

SEQ ID NO: 247399 - DNA, 25 bp, Probe Sequence
gtatctttgctagtcaacaacttat

SEQ ID NO: 247400 - DNA, 25 bp, Probe Sequence
gtagtgtatcctgcacctactttaa

SEQ ID NO: 247401 - DNA, 25 bp, Probe Sequence
gtagagtgcttcgaacgctcggtta

SEQ ID NO: 247402 - DNA, 25 bp, Probe Sequence
gtcatgacttccaaacccagtttgg

SEQ ID NO: 247403 - DNA, 25 bp, Probe Sequence
gtaggttgccaaccccatgaattgt

SEQ ID NO: 247404 - DNA, 25 bp, Probe Sequence
gtaggtctgaaggcctccatttgta

SEQ ID NO: 247405 - DNA, 25 bp, Probe Sequence
gtatggtccatagtacccattagga

SEQ ID NO: 247406 - DNA, 25 bp, Probe Sequence
gtagaggccagaaacctagataaga

SEQ ID NO: 247407 - DNA, 25 bp, Probe Sequence
gtaggaccaggaaatcatggaacag

SEQ ID NO: 247408 - DNA, 25 bp, Probe Sequence
gtatgtcctcaggggactgacaaca

SEQ ID NO: 247409 - DNA, 25 bp, Probe Sequence
gtatgctgtccgtgagtgctgtaaa

SEQ ID NO: 247410 - DNA, 25 bp, Probe Sequence
gtatgcttactgcagagttgtttaa

SEQ ID NO: 247411 - DNA, 25 bp, Probe Sequence
gtatgttatccactacaggttttat

SEQ ID NO: 247412 - DNA, 25 bp, Probe Sequence
gtagttaatttatggcatctgttga

SEQ ID NO: 247413 - DNA, 25 bp, Probe Sequence
gtatggtaatgcttgtagaatcttt

SEQ ID NO: 247414 - DNA, 25 bp, Probe Sequence
gtatggttcatctgtcacaagcctg

SEQ ID NO: 247415 - DNA, 25 bp, Probe Sequence
gtatggtgtctactgcttcagagca

SEQ ID NO: 247416 - DNA, 25 bp, Probe Sequence
gtatgtcttcatagtcattgagaat

SEQ ID NO: 247417 - DNA, 25 bp, Probe Sequence
gtatgtctccatctattgatgaggg

SEQ ID NO: 247418 - DNA, 25 bp, Probe Sequence
gtatgtctccatctattgatgaggg

SEQ ID NO: 247419 - DNA, 25 bp, Probe Sequence
gtagtcccagaactttggaaggtag

SEQ ID NO: 247420 - DNA, 25 bp, Probe Sequence
gtagtccctcaacttggctaaagaa

SEQ ID NO: 247421 - DNA, 25 bp, Probe Sequence
gtagtgccagcagagtagggaaaac

SEQ ID NO: 247422 - DNA, 25 bp, Probe Sequence
gtagactagtgccgtagggagttac

SEQ ID NO: 247423 - DNA, 25 bp, Probe Sequence
gtagactagtgccgtgggagtacct

SEQ ID NO: 247424 - DNA, 25 bp, Probe Sequence
gtagactatgtggattgcggcagca

SEQ ID NO: 247425 - DNA, 25 bp, Probe Sequence
gtaaccacttgattgctgacagcta

SEQ ID NO: 247426 - DNA, 25 bp, Probe Sequence
gtagggagttgatgctgacaggatg

SEQ ID NO: 247427 - DNA, 25 bp, Probe Sequence
gtaggtggtctactgtgtaggaagt

SEQ ID NO: 247428 - DNA, 25 bp, Probe Sequence
gtaggtgacctgcttggatctagac

SEQ ID NO: 247429 - DNA, 25 bp, Probe Sequence
gtatggtacaggatagagtgctatg

SEQ ID NO: 247430 - DNA, 25 bp, Probe Sequence
gtagggtacagaatagagcgtgtgc

SEQ ID NO: 247431 - DNA, 25 bp, Probe Sequence
gtagggtagagagacgctgggtgac

SEQ ID NO: 247432 - DNA, 25 bp, Probe Sequence
gtaggttaagaggtcagcattgagg

SEQ ID NO: 247433 - DNA, 25 bp, Probe Sequence
gtagagttacgtggctcacactgag

SEQ ID NO: 247434 - DNA, 25 bp, Probe Sequence
gtatggggaactgctgacatcatga

SEQ ID NO: 247435 - DNA, 25 bp, Probe Sequence
gtagtgagcaaaggacagaccatga

SEQ ID NO: 247436 - DNA, 25 bp, Probe Sequence
gtaaccagacagggcagatgacagc

SEQ ID NO: 247437 - DNA, 25 bp, Probe Sequence
gtaagcaagctactggcatggcaag

SEQ ID NO: 247438 - DNA, 25 bp, Probe Sequence
gtgcgaaactttggtggcaagggcc

SEQ ID NO: 247439 - DNA, 25 bp, Probe Sequence
gtaggaacagttgcttgtaggggcc

SEQ ID NO: 247440 - DNA, 25 bp, Probe Sequence
gtcattgaaagtttttgaagggagc

SEQ ID NO: 247441 - DNA, 25 bp, Probe Sequence
gtatctgaaacctcatcttggagaa

SEQ ID NO: 247442 - DNA, 25 bp, Probe Sequence
gtatctgggactggtttgggcagaa

SEQ ID NO: 247443 - DNA, 25 bp, Probe Sequence
gtatctgtgatagggaacgggaatg

SEQ ID NO: 247444 - DNA, 25 bp, Probe Sequence
gtatgctgtgagagaggaggtggag

SEQ ID NO: 247445 - DNA, 25 bp, Probe Sequence
gtatcgtagcggcgacacgagagag

SEQ ID NO: 247446 - DNA, 25 bp, Probe Sequence
gtatgtgtagcaggcttacaagaaa

SEQ ID NO: 247447 - DNA, 25 bp, Probe Sequence
gtaggtagatacagatatagataga

SEQ ID NO: 247448 - DNA, 25 bp, Probe Sequence
gtatggaagtcacaactacacagag

SEQ ID NO: 247449 - DNA, 25 bp, Probe Sequence
gtatgctactgtctccagaacacga

SEQ ID NO: 247450 - DNA, 25 bp, Probe Sequence
gtatctcactgtatatatgaaacta

SEQ ID NO: 247451 - DNA, 25 bp, Probe Sequence
gtacccatgtagactagcaaaatag

SEQ ID NO: 247452 - DNA, 25 bp, Probe Sequence
gtagatcatcattcagtgccacaaa

SEQ ID NO: 247453 - DNA, 25 bp, Probe Sequence
gtatgtactgtattgtcatcaagga

SEQ ID NO: 247454 - DNA, 25 bp, Probe Sequence
gtatgaaagcttaacagcaatgtga

SEQ ID NO: 247455 - DNA, 25 bp, Probe Sequence
gtagtatcagctattactttgacca

SEQ ID NO: 247456 - DNA, 25 bp, Probe Sequence
gtatgctagcactattgtaccttga

SEQ ID NO: 247457 - DNA, 25 bp, Probe Sequence
gtatctataagatgtgactattaaa

SEQ ID NO: 247458 - DNA, 25 bp, Probe Sequence
gtatgtcaaagctttgactctataa

SEQ ID NO: 247459 - DNA, 25 bp, Probe Sequence
gtatgtttacatatcacctcatggc

SEQ ID NO: 247460 - DNA, 25 bp, Probe Sequence
gtatgttcccagttcaactcatgga

SEQ ID NO: 247461 - DNA, 25 bp, Probe Sequence
gtatggagcccagaaatgtgatgaa

SEQ ID NO: 247462 - DNA, 25 bp, Probe Sequence
gtactgagcccatatgacttgaccc

SEQ ID NO: 247463 - DNA, 25 bp, Probe Sequence
gtagccgtccagagactggcaggcc

SEQ ID NO: 247464 - DNA, 25 bp, Probe Sequence
gtagaccttagaatgttacatagcc

SEQ ID NO: 247465 - DNA, 25 bp, Probe Sequence
gtaggtatagagagctgtcacaact

SEQ ID NO: 247466 - DNA, 25 bp, Probe Sequence
gtagtgatataccatggcatgtccg

SEQ ID NO: 247467 - DNA, 25 bp, Probe Sequence
gtagtgatgaggcagtgatcctgtg

SEQ ID NO: 247468 - DNA, 25 bp, Probe Sequence
gtatgtatacctggtgatcgttttg

SEQ ID NO: 247469 - DNA, 25 bp, Probe Sequence
gtatgttcatttggtgatgcttttg

SEQ ID NO: 247470 - DNA, 25 bp, Probe Sequence
gtagtctttgacagatcatcttgga

SEQ ID NO: 247471 - DNA, 25 bp, Probe Sequence
gtatgatcttgtgctgtgctatccg

SEQ ID NO: 247472 - DNA, 25 bp, Probe Sequence
gtatgcaatttcctgttaccttgaa

SEQ ID NO: 247473 - DNA, 25 bp, Probe Sequence
gtatctgatattaggtattcccaaa

SEQ ID NO: 247474 - DNA, 25 bp, Probe Sequence
gtatctgtaaatatttgttctatag

SEQ ID NO: 247475 - DNA, 25 bp, Probe Sequence
gtacttaaaattaccgttatacatg

SEQ ID NO: 247476 - DNA, 25 bp, Probe Sequence
gtcgctttactgttacctgtttagg

SEQ ID NO: 247477 - DNA, 25 bp, Probe Sequence
gtctctgttttatccagtggttaaa

SEQ ID NO: 247478 - DNA, 25 bp, Probe Sequence
gtatctgaatttgcactaatggtgt

SEQ ID NO: 247479 - DNA, 25 bp, Probe Sequence
gtaggatatgttcccttgcatggat

SEQ ID NO: 247480 - DNA, 25 bp, Probe Sequence
gtagaagatgttcagcgtgcagggc

SEQ ID NO: 247481 - DNA, 25 bp, Probe Sequence
gtatgagtgtgtgcacgcgtgtgag

SEQ ID NO: 247482 - DNA, 25 bp, Probe Sequence
gtagagatgatgccacacctgttag

SEQ ID NO: 247483 - DNA, 25 bp, Probe Sequence
gtagaactgaccaactgtgagatca

SEQ ID NO: 247484 - DNA, 25 bp, Probe Sequence
gtagcaagcgatccagacttctata

SEQ ID NO: 247485 - DNA, 25 bp, Probe Sequence
gtagaaatgtgccacacttttcaag

SEQ ID NO: 247486 - DNA, 25 bp, Probe Sequence
gtatgatacttcgacactgttctta

SEQ ID NO: 247487 - DNA, 25 bp, Probe Sequence
gtatgtatcttcaactggtgtccaa

SEQ ID NO: 247488 - DNA, 25 bp, Probe Sequence
gtagcttccttactcgtatacttta

SEQ ID NO: 247489 - DNA, 25 bp, Probe Sequence
gtaggtactaaatagacagcagtta

SEQ ID NO: 247490 - DNA, 25 bp, Probe Sequence
gtatgtttctattacacgacacttt

SEQ ID NO: 247491 - DNA, 25 bp, Probe Sequence
gtatgattatcaccaagccaaacat

SEQ ID NO: 247492 - DNA, 25 bp, Probe Sequence
gtatgcatcttaccaatgatgtaac

SEQ ID NO: 247493 - DNA, 25 bp, Probe Sequence
gtatgcctggacattgatgctaaca

SEQ ID NO: 247494 - DNA, 25 bp, Probe Sequence
gtatgccttgaacttattaacatgg

SEQ ID NO: 247495 - DNA, 25 bp, Probe Sequence
gtatgccttccagtatttcataatg

SEQ ID NO: 247496 - DNA, 25 bp, Probe Sequence
gtatgcctgtacggtttgcagacat

SEQ ID NO: 247497 - DNA, 25 bp, Probe Sequence
gtaggcttatcgcctttgcacattc

SEQ ID NO: 247498 - DNA, 25 bp, Probe Sequence
gtatgccattctgcacttaggctcc

SEQ ID NO: 247499 - DNA, 25 bp, Probe Sequence
gtatgctttgctgaattagtctgat

SEQ ID NO: 247500 - DNA, 25 bp, Probe Sequence
gtatgtctatatgatgaaatgttat

SEQ ID NO: 247501 - DNA, 25 bp, Probe Sequence
gtatccgcacattatgattatgttc

SEQ ID NO: 247502 - DNA, 25 bp, Probe Sequence
gtatcctcattactgtatcatttgt

SEQ ID NO: 247503 - DNA, 25 bp, Probe Sequence
gtatccctatgaaaatcatttttgg

SEQ ID NO: 247504 - DNA, 25 bp, Probe Sequence
gtatgacctagtaaactttgtacca

SEQ ID NO: 247505 - DNA, 25 bp, Probe Sequence
gtaagccgagttcactccattgtac

SEQ ID NO: 247506 - DNA, 25 bp, Probe Sequence
gtaaaccgtgctctctaatttatcg

SEQ ID NO: 247507 - DNA, 25 bp, Probe Sequence
gtaaaccagtgactcctaatctttt

SEQ ID NO: 247508 - DNA, 25 bp, Probe Sequence
gtagaactttgactctaagagtttc

SEQ ID NO: 247509 - DNA, 25 bp, Probe Sequence
gtagaacagggtcccacaggtttgg

SEQ ID NO: 247510 - DNA, 25 bp, Probe Sequence
gtagaaaaggctcccaaagctcgga

SEQ ID NO: 247511 - DNA, 25 bp, Probe Sequence
gtagaaagaggctcactacagccag

SEQ ID NO: 247512 - DNA, 25 bp, Probe Sequence
gtaaaagtgtaaaccagcccatgac

SEQ ID NO: 247513 - DNA, 25 bp, Probe Sequence
gtagtaagaggacttccacgtggac

SEQ ID NO: 247514 - DNA, 25 bp, Probe Sequence
gtaggagaacagccattccacatgt

SEQ ID NO: 247515 - DNA, 25 bp, Probe Sequence
gtaggaactgattctctacctttct

SEQ ID NO: 247516 - DNA, 25 bp, Probe Sequence
gtagggatgcctttctagtcctatt

SEQ ID NO: 247517 - DNA, 25 bp, Probe Sequence
gtagggagtctcactaactccattt

SEQ ID NO: 247518 - DNA, 25 bp, Probe Sequence
gtagaaattttacagtctgccattt

SEQ ID NO: 247519 - DNA, 25 bp, Probe Sequence
gtcagtaatttaaaccttggatctt

SEQ ID NO: 247520 - DNA, 25 bp, Probe Sequence
gtagaaacctaaaggcttggcgtca

SEQ ID NO: 247521 - DNA, 25 bp, Probe Sequence
gtagaaaaccatatggggactatag

SEQ ID NO: 247522 - DNA, 25 bp, Probe Sequence
gtagtaacacactttggtggagtca

SEQ ID NO: 247523 - DNA, 25 bp, Probe Sequence
gtagtacatcccatattttagaaca

SEQ ID NO: 247524 - DNA, 25 bp, Probe Sequence
gtagtcagcatctccaattttcagc

SEQ ID NO: 247525 - DNA, 25 bp, Probe Sequence
gtatgtcagacatccatgtttgtaa

SEQ ID NO: 247526 - DNA, 25 bp, Probe Sequence
gtatgtcaccaagagatgatggtta

SEQ ID NO: 247527 - DNA, 25 bp, Probe Sequence
gtagtcccaagttctcagagatctc

SEQ ID NO: 247528 - DNA, 25 bp, Probe Sequence
gtagtcccaagttctcagagatctc

SEQ ID NO: 247529 - DNA, 25 bp, Probe Sequence
gtagtagtcaagtgtctaggtcttt

SEQ ID NO: 247530 - DNA, 25 bp, Probe Sequence
gtatggaatcaactgtttatagtct

SEQ ID NO: 247531 - DNA, 25 bp, Probe Sequence
gtaggcaaaagctcactcatgttct

SEQ ID NO: 247532 - DNA, 25 bp, Probe Sequence
gtatggaaaagtacactctgtcact

SEQ ID NO: 247533 - DNA, 25 bp, Probe Sequence
gtatggctatgaaattcctgtggac

SEQ ID NO: 247534 - DNA, 25 bp, Probe Sequence
gtatggctctgacatctcttagatg

SEQ ID NO: 247535 - DNA, 25 bp, Probe Sequence
gtatcgcctattaccattgtgatgc

SEQ ID NO: 247536 - DNA, 25 bp, Probe Sequence
gtactgactgataaccttagcatta

SEQ ID NO: 247537 - DNA, 25 bp, Probe Sequence
gtatgtggttcaaccatccagctcc

SEQ ID NO: 247538 - DNA, 25 bp, Probe Sequence
gtatgatgatgttcccgatttctct

SEQ ID NO: 247539 - DNA, 25 bp, Probe Sequence
gtatgtgtgtactctgcacgtatat

SEQ ID NO: 247540 - DNA, 25 bp, Probe Sequence
gtatgggatacggctactgaggata

SEQ ID NO: 247541 - DNA, 25 bp, Probe Sequence
gtatggtatacaacttacaaataat

SEQ ID NO: 247542 - DNA, 25 bp, Probe Sequence
gtagtttagcgacttccgtatacat

SEQ ID NO: 247543 - DNA, 25 bp, Probe Sequence
gtagtttagaccttctcttcataat

SEQ ID NO: 247544 - DNA, 25 bp, Probe Sequence
gtagtatataatcagtcctccccta

SEQ ID NO: 247545 - DNA, 25 bp, Probe Sequence
gtatgtaataaaggacgccctccct

SEQ ID NO: 247546 - DNA, 25 bp, Probe Sequence
gtagtatcaagctacgcaatccccc

SEQ ID NO: 247547 - DNA, 25 bp, Probe Sequence
gtagtgacaggggcgaacgccgccg

SEQ ID NO: 247548 - DNA, 25 bp, Probe Sequence
gtactacgacactgaacgcatcgga

SEQ ID NO: 247549 - DNA, 25 bp, Probe Sequence
gtaccaagacagagaacctgctcgg

SEQ ID NO: 247550 - DNA, 25 bp, Probe Sequence
gtaccagtgaagaacttcccacacc

SEQ ID NO: 247551 - DNA, 25 bp, Probe Sequence
gtaccgaaaatagttcccgatgact

SEQ ID NO: 247552 - DNA, 25 bp, Probe Sequence
gtatccgaaaattgctaagacagta

SEQ ID NO: 247553 - DNA, 25 bp, Probe Sequence
gtagactacacaacagcgaaggaat

SEQ ID NO: 247554 - DNA, 25 bp, Probe Sequence
gtatgtcttcaaacctggcagtatt

SEQ ID NO: 247555 - DNA, 25 bp, Probe Sequence
gtatgtttcatttactggatgttta

SEQ ID NO: 247556 - DNA, 25 bp, Probe Sequence
gtagttggtttgtatgagatggtta

SEQ ID NO: 247557 - DNA, 25 bp, Probe Sequence
gtagttggtttgtatgagatggtta

SEQ ID NO: 247558 - DNA, 25 bp, Probe Sequence
gtagtgtggttgctcacgcaagtaa

SEQ ID NO: 247559 - DNA, 25 bp, Probe Sequence
gtagatggggtttgcagctgccact

SEQ ID NO: 247560 - DNA, 25 bp, Probe Sequence
gtagatggggttcgagctttcctac

SEQ ID NO: 247561 - DNA, 25 bp, Probe Sequence
gtagcatggggtacccttggcatga

SEQ ID NO: 247562 - DNA, 25 bp, Probe Sequence
gtatgttggtctacacttttgccaa

SEQ ID NO: 247563 - DNA, 25 bp, Probe Sequence
gtagtgggcattacactgcttctgt

SEQ ID NO: 247564 - DNA, 25 bp, Probe Sequence
gtagtggagttcatatcacattatg

SEQ ID NO: 247565 - DNA, 25 bp, Probe Sequence
gtaggcttgttttacactatttcta

SEQ ID NO: 247566 - DNA, 25 bp, Probe Sequence
gtatgtgtgattattatctttttta

SEQ ID NO: 247567 - DNA, 25 bp, Probe Sequence
gtatggtgactagtatctgttttgt

SEQ ID NO: 247568 - DNA, 25 bp, Probe Sequence
gtatggtgactagtatctgttttgt

SEQ ID NO: 247569 - DNA, 25 bp, Probe Sequence
gtatggtgtctgtttatgtaactct

SEQ ID NO: 247570 - DNA, 25 bp, Probe Sequence
gtatgggtctgttattcttgcaagt

SEQ ID NO: 247571 - DNA, 25 bp, Probe Sequence
gtatgtggtgatttatatgttaagt

SEQ ID NO: 247572 - DNA, 25 bp, Probe Sequence
gtagatgggcatctctatgaattag

SEQ ID NO: 247573 - DNA, 25 bp, Probe Sequence
gtagatagctctttcttgagaggag

SEQ ID NO: 247574 - DNA, 25 bp, Probe Sequence
gtatgtataaatcctatgaatagag

SEQ ID NO: 247575 - DNA, 25 bp, Probe Sequence
gtatgtatggaatgttatgatagga

SEQ ID NO: 247576 - DNA, 25 bp, Probe Sequence
gtatgtgatggactggggagcacag

SEQ ID NO: 247577 - DNA, 25 bp, Probe Sequence
gtatgctgactggtggcaggagccg

SEQ ID NO: 247578 - DNA, 25 bp, Probe Sequence
gtagcatgaaggttggccagccaga

SEQ ID NO: 247579 - DNA, 25 bp, Probe Sequence
gtactgaatcaggacctcactcaga

SEQ ID NO: 247580 - DNA, 25 bp, Probe Sequence
gtagccatagctgacagcatcccag

SEQ ID NO: 247581 - DNA, 25 bp, Probe Sequence
gtaggcatagctaatctgaaacaga

SEQ ID NO: 247582 - DNA, 25 bp, Probe Sequence
gtagtgttgctttctaagctataac

SEQ ID NO: 247583 - DNA, 25 bp, Probe Sequence
gtagatttctccctgaagctctacc

SEQ ID NO: 247584 - DNA, 25 bp, Probe Sequence
gtagtgttctcagtataactccatc

SEQ ID NO: 247585 - DNA, 25 bp, Probe Sequence
gtaggatctgtagtgatatcccctc

SEQ ID NO: 247586 - DNA, 25 bp, Probe Sequence
gtagagtttgagctgaagccccgta

SEQ ID NO: 247587 - DNA, 25 bp, Probe Sequence
gtagggcgggcttgaaggccctgat

SEQ ID NO: 247588 - DNA, 25 bp, Probe Sequence
gtagggcgggcttgaaggccctgat

SEQ ID NO: 247589 - DNA, 25 bp, Probe Sequence
gtacgactgtggagaagagatcctg

SEQ ID NO: 247590 - DNA, 25 bp, Probe Sequence
gtatgccactaccttgactggatcc

SEQ ID NO: 247591 - DNA, 25 bp, Probe Sequence
gtatgcccatagcctagaatttttg

SEQ ID NO: 247592 - DNA, 25 bp, Probe Sequence
gtatgctgcctctgtaaattcatgt

SEQ ID NO: 247593 - DNA, 25 bp, Probe Sequence
gtatgcttatgcctgggcaactatt

SEQ ID NO: 247594 - DNA, 25 bp, Probe Sequence
gtagataatgttcccaaccatcatc

SEQ ID NO: 247595 - DNA, 25 bp, Probe Sequence
gtatgaacatacccacaaatgccta

SEQ ID NO: 247596 - DNA, 25 bp, Probe Sequence
gtaggaatagtcactcactggctga

SEQ ID NO: 247597 - DNA, 25 bp, Probe Sequence
gtaggagcatcagttattacttctg

SEQ ID NO: 247598 - DNA, 25 bp, Probe Sequence
gtatggaccctaataatcagtgctt

SEQ ID NO: 247599 - DNA, 25 bp, Probe Sequence
gtatggatccctctacaatgtacta

SEQ ID NO: 247600 - DNA, 25 bp, Probe Sequence
gtatggaacctggctaactgcaagc

SEQ ID NO: 247601 - DNA, 25 bp, Probe Sequence
gtatggtaccatagtattctcactg

SEQ ID NO: 247602 - DNA, 25 bp, Probe Sequence
gtaggggtgcagcccatactgaatg

SEQ ID NO: 247603 - DNA, 25 bp, Probe Sequence
gtaccggcacgggatatggaacgaa

SEQ ID NO: 247604 - DNA, 25 bp, Probe Sequence
gtacctggcacagtggttagaaaag

SEQ ID NO: 247605 - DNA, 25 bp, Probe Sequence
gtaccatggacagaccctggaaact

SEQ ID NO: 247606 - DNA, 25 bp, Probe Sequence
gtagccagtgactcagatcactggt

SEQ ID NO: 247607 - DNA, 25 bp, Probe Sequence
gtagatcttgtagtcagtgcctggt

SEQ ID NO: 247608 - DNA, 25 bp, Probe Sequence
gtatgcattctttatagtgaagtgt

SEQ ID NO: 247609 - DNA, 25 bp, Probe Sequence
gtatgtctcttatagatatagtttt

SEQ ID NO: 247610 - DNA, 25 bp, Probe Sequence
gtatgttgcttagataaatgtaatc

SEQ ID NO: 247611 - DNA, 25 bp, Probe Sequence
gtatgcttgcatatttattttcaac

SEQ ID NO: 247612 - DNA, 25 bp, Probe Sequence
gtatgttatgtgaatgtatctttaa

SEQ ID NO: 247613 - DNA, 25 bp, Probe Sequence
gtatgatatggtgttttttagatgg

SEQ ID NO: 247614 - DNA, 25 bp, Probe Sequence
gtatgcaagactgattctgtttgga

SEQ ID NO: 247615 - DNA, 25 bp, Probe Sequence
gtatgcatacacctatccatgttca

SEQ ID NO: 247616 - DNA, 25 bp, Probe Sequence
gtatggaatcagaaccagatgacac

SEQ ID NO: 247617 - DNA, 25 bp, Probe Sequence
gtagtaatcaatcacatgagtacct

SEQ ID NO: 247618 - DNA, 25 bp, Probe Sequence
gtatgtcagatgctgtacaagtatt

SEQ ID NO: 247619 - DNA, 25 bp, Probe Sequence
gtatgaagatgccctgatttgtaca

SEQ ID NO: 247620 - DNA, 25 bp, Probe Sequence
gtatgaatgtctacgtgttgctaac

SEQ ID NO: 247621 - DNA, 25 bp, Probe Sequence
gtagcaaattatggtgtattcacat

SEQ ID NO: 247622 - DNA, 25 bp, Probe Sequence
gtagaaagtgcaggcgatcattatt

SEQ ID NO: 247623 - DNA, 25 bp, Probe Sequence
gtatgaacgaagccgacatgctgtt

SEQ ID NO: 247624 - DNA, 25 bp, Probe Sequence
gtaggagccaatgcaacatgtcttt

SEQ ID NO: 247625 - DNA, 25 bp, Probe Sequence
gtagtagtcaaccaaagcctttcag

SEQ ID NO: 247626 - DNA, 25 bp, Probe Sequence
gtagcctgtgaagaaaccttacatg

SEQ ID NO: 247627 - DNA, 25 bp, Probe Sequence
gtagccttgaacaactaagttttca

SEQ ID NO: 247628 - DNA, 25 bp, Probe Sequence
gtaccctccctatatatgttcattt

SEQ ID NO: 247629 - DNA, 25 bp, Probe Sequence
gtgacccttcccaaatgggattatg

SEQ ID NO: 247630 - DNA, 25 bp, Probe Sequence
gtgaggtctttcctttgggagttgt

SEQ ID NO: 247631 - DNA, 25 bp, Probe Sequence
gtacctttcagcatcctaggaattt

SEQ ID NO: 247632 - DNA, 25 bp, Probe Sequence
gtaccgttatgtcccaaacgttctg

SEQ ID NO: 247633 - DNA, 25 bp, Probe Sequence
gtaccagtttgtaccttttagcctg

SEQ ID NO: 247634 - DNA, 25 bp, Probe Sequence
gtagtagtttgattctggtttccct

SEQ ID NO: 247635 - DNA, 25 bp, Probe Sequence
gtagtcagttcttactggggtgatc

SEQ ID NO: 247636 - DNA, 25 bp, Probe Sequence
gtatgtagattttagtctcgtgtga

SEQ ID NO: 247637 - DNA, 25 bp, Probe Sequence
gtagtaatcttatgcacacggtgat

SEQ ID NO: 247638 - DNA, 25 bp, Probe Sequence
gtagtgtacttttcctctgtagttt

SEQ ID NO: 247639 - DNA, 25 bp, Probe Sequence
gtaggctaatcacactctgtaagtc

SEQ ID NO: 247640 - DNA, 25 bp, Probe Sequence
gtagagtggctcacacctgtaatcc

SEQ ID NO: 247641 - DNA, 25 bp, Probe Sequence
gtatggtggctcatgcctgtaatcc

SEQ ID NO: 247642 - DNA, 25 bp, Probe Sequence
gtagcagggtattgcctttgattca

SEQ ID NO: 247643 - DNA, 25 bp, Probe Sequence
gtaggctttcagttcttggatctaa

SEQ ID NO: 247644 - DNA, 25 bp, Probe Sequence
gtaagagttacatcagggacaaata

SEQ ID NO: 247645 - DNA, 25 bp, Probe Sequence
gtaggagtcccccgagaagaagatg

SEQ ID NO: 247646 - DNA, 25 bp, Probe Sequence
gtagggtcacctagggaagcacttg

SEQ ID NO: 247647 - DNA, 25 bp, Probe Sequence
gtagggggtcataaggatagacttg

SEQ ID NO: 247648 - DNA, 25 bp, Probe Sequence
gtagctttggtcataggcaagtttg

SEQ ID NO: 247649 - DNA, 25 bp, Probe Sequence
gtatgttctcagtttcaaaggtgtt

SEQ ID NO: 247650 - DNA, 25 bp, Probe Sequence
gtaggcttccagttaaagacggtag

SEQ ID NO: 247651 - DNA, 25 bp, Probe Sequence
gtaggcttccgagaggagccctgag

SEQ ID NO: 247652 - DNA, 25 bp, Probe Sequence
gtaggaacaagggagtgagccttat

SEQ ID NO: 247653 - DNA, 25 bp, Probe Sequence
gtcaggcacacaaggggcccttgga

SEQ ID NO: 247654 - DNA, 25 bp, Probe Sequence
gtaggctgcatctggagagcatgct

SEQ ID NO: 247655 - DNA, 25 bp, Probe Sequence
gtacgtgccgcggaaatgctccgct

SEQ ID NO: 247656 - DNA, 25 bp, Probe Sequence
gtagcaggacacctaaaccggtatt

SEQ ID NO: 247657 - DNA, 25 bp, Probe Sequence
gtagccgactcagtgaaacgtttca

SEQ ID NO: 247658 - DNA, 25 bp, Probe Sequence
gtagcacagagttagcatagtcgta

SEQ ID NO: 247659 - DNA, 25 bp, Probe Sequence
gtagaacgctgcatgcgagtgctgt

SEQ ID NO: 247660 - DNA, 25 bp, Probe Sequence
gtagtaatctcaattgcagctgctg

SEQ ID NO: 247661 - DNA, 25 bp, Probe Sequence
gtagtggtgctcagtggcagcatgg

SEQ ID NO: 247662 - DNA, 25 bp, Probe Sequence
gtactggcgctttgaggatggtgtc

SEQ ID NO: 247663 - DNA, 25 bp, Probe Sequence
gtaggttgctctggggatgggttta

SEQ ID NO: 247664 - DNA, 25 bp, Probe Sequence
gtaggtctcccaaggagagtgttac

SEQ ID NO: 247665 - DNA, 25 bp, Probe Sequence
gtagtcttccactggagtgttttta

SEQ ID NO: 247666 - DNA, 25 bp, Probe Sequence
gtagctttgtagtgggttttctgtg

SEQ ID NO: 247667 - DNA, 25 bp, Probe Sequence
gtagttttattcagactggtttctg

SEQ ID NO: 247668 - DNA, 25 bp, Probe Sequence
gtagttttactcatatagagcttgt

SEQ ID NO: 247669 - DNA, 25 bp, Probe Sequence
gtagatttgtatgtgtgaaagcctt

SEQ ID NO: 247670 - DNA, 25 bp, Probe Sequence
gtagtgctacattgggtgaaaccgt

SEQ ID NO: 247671 - DNA, 25 bp, Probe Sequence
gtagtgctacattgggtgaaaccgt

SEQ ID NO: 247672 - DNA, 25 bp, Probe Sequence
gtcaagtaggagcagtggaaatggt

SEQ ID NO: 247673 - DNA, 25 bp, Probe Sequence
gtagagaaggatcaaggacggatga

SEQ ID NO: 247674 - DNA, 25 bp, Probe Sequence
gtaggatagagacaaaagctggagg

SEQ ID NO: 247675 - DNA, 25 bp, Probe Sequence
gtcggcgacgatccaaaagcccaag

SEQ ID NO: 247676 - DNA, 25 bp, Probe Sequence
gtcagggggactgcaaaggccaatg

SEQ ID NO: 247677 - DNA, 25 bp, Probe Sequence
gtaggaaggcctcaaggatgtaatt

SEQ ID NO: 247678 - DNA, 25 bp, Probe Sequence
gtagagaaagcccttcgagatgcca

SEQ ID NO: 247679 - DNA, 25 bp, Probe Sequence
gtagaagtagctgtcatagagtgaa

SEQ ID NO: 247680 - DNA, 25 bp, Probe Sequence
gtagaggggccaataaacatgaaaa

SEQ ID NO: 247681 - DNA, 25 bp, Probe Sequence
gtaggggacgagaaagatcattgaa

SEQ ID NO: 247682 - DNA, 25 bp, Probe Sequence
gtagggtatgccttccagtatttca

SEQ ID NO: 247683 - DNA, 25 bp, Probe Sequence
gtagtgagtgatgtttgctgtgatt

SEQ ID NO: 247684 - DNA, 25 bp, Probe Sequence
gtatggaatgactttttgctgtgat

SEQ ID NO: 247685 - DNA, 25 bp, Probe Sequence
gtatggaatggagtttgcggtgact

SEQ ID NO: 247686 - DNA, 25 bp, Probe Sequence
gtaggaaggtgctgtgggctggtcc

SEQ ID NO: 247687 - DNA, 25 bp, Probe Sequence
gtaggaaggtgctgtgggctggtcc

SEQ ID NO: 247688 - DNA, 25 bp, Probe Sequence
gtaggaatatgtgggagggctgggc

SEQ ID NO: 247689 - DNA, 25 bp, Probe Sequence
gtaggcataaggaggggggtgtgga

SEQ ID NO: 247690 - DNA, 25 bp, Probe Sequence
gtaggcaaacagaggcgaaagatta

SEQ ID NO: 247691 - DNA, 25 bp, Probe Sequence
gtaggaataaatttgcgaacttagg

SEQ ID NO: 247692 - DNA, 25 bp, Probe Sequence
gtaggagaatgattaggcagatttt

SEQ ID NO: 247693 - DNA, 25 bp, Probe Sequence
gtagtgagtagatagctctttcttg

SEQ ID NO: 247694 - DNA, 25 bp, Probe Sequence
gtagtagtaggatcaccttcttata

SEQ ID NO: 247695 - DNA, 25 bp, Probe Sequence
gtagcaactaggtaaactccttata

SEQ ID NO: 247696 - DNA, 25 bp, Probe Sequence
gtaagactagtgcaaaacagttatt

SEQ ID NO: 247697 - DNA, 25 bp, Probe Sequence
gtaaccttgtcgacaaagaggtaga

SEQ ID NO: 247698 - DNA, 25 bp, Probe Sequence
gtaggcacatcgtgtcaagtgaagt

SEQ ID NO: 247699 - DNA, 25 bp, Probe Sequence
gtagccacaattagtaaagtactgt

SEQ ID NO: 247700 - DNA, 25 bp, Probe Sequence
gtagacacgttagttataatcacct

SEQ ID NO: 247701 - DNA, 25 bp, Probe Sequence
gtagtcccattaggtgtatattgaa

SEQ ID NO: 247702 - DNA, 25 bp, Probe Sequence
gtatggcctattctctgtatttatt

SEQ ID NO: 247703 - DNA, 25 bp, Probe Sequence
gtatggcctattctctgtatttatt

SEQ ID NO: 247704 - DNA, 25 bp, Probe Sequence
gtacccatgatctcttggtgttatt

SEQ ID NO: 247705 - DNA, 25 bp, Probe Sequence
gtacccagtctggaaggggccgtga

SEQ ID NO: 247706 - DNA, 25 bp, Probe Sequence
gtagcaccacttgacggctacaagt

SEQ ID NO: 247707 - DNA, 25 bp, Probe Sequence
gtagcaccactaaacatagcacaac

SEQ ID NO: 247708 - DNA, 25 bp, Probe Sequence
gtaggccaggcacagtggctcacac

SEQ ID NO: 247709 - DNA, 25 bp, Probe Sequence
gtagcagcggtacttgtagagcacc

SEQ ID NO: 247710 - DNA, 25 bp, Probe Sequence
gtcaccgttcaggattcacagacct

SEQ ID NO: 247711 - DNA, 25 bp, Probe Sequence
gtagggctgtgggttccagaactct

SEQ ID NO: 247712 - DNA, 25 bp, Probe Sequence
gtcaggggtgagacctgaaggacct

SEQ ID NO: 247713 - DNA, 25 bp, Probe Sequence
gtagttggtagagctgaggaagagt

SEQ ID NO: 247714 - DNA, 25 bp, Probe Sequence
gtagtgttgtaacctgctgcacgga

SEQ ID NO: 247715 - DNA, 25 bp, Probe Sequence
gtagctgcactttaagtctcagcag

SEQ ID NO: 247716 - DNA, 25 bp, Probe Sequence
gtagcatagcctgacagctctagat

SEQ ID NO: 247717 - DNA, 25 bp, Probe Sequence
gtacatacatgatgatggcttgagt

SEQ ID NO: 247718 - DNA, 25 bp, Probe Sequence
gtagtactacaggagccatgagatg

SEQ ID NO: 247719 - DNA, 25 bp, Probe Sequence
gtagtgccataagacactggcgctt

SEQ ID NO: 247720 - DNA, 25 bp, Probe Sequence
gtaggcagaaatgagcagttcgctc

SEQ ID NO: 247721 - DNA, 25 bp, Probe Sequence
gtaggcttgagtgaacttctgatct

SEQ ID NO: 247722 - DNA, 25 bp, Probe Sequence
gtaggctctgaaacatcttgtcaag

SEQ ID NO: 247723 - DNA, 25 bp, Probe Sequence
gtagtgactgttgctcttctatcag

SEQ ID NO: 247724 - DNA, 25 bp, Probe Sequence
gtatgtgttgttgcttgacttctta

SEQ ID NO: 247725 - DNA, 25 bp, Probe Sequence
gtagggttggtgggagttgcgatga

SEQ ID NO: 247726 - DNA, 25 bp, Probe Sequence
gtagagatgtagggcagggctgggt

SEQ ID NO: 247727 - DNA, 25 bp, Probe Sequence
gtagagtggagggagggtggcctaa

SEQ ID NO: 247728 - DNA, 25 bp, Probe Sequence
gtagagtataggggagtgggaggaa

SEQ ID NO: 247729 - DNA, 25 bp, Probe Sequence
gtagatgtcatgaggcgagctggga

SEQ ID NO: 247730 - DNA, 25 bp, Probe Sequence
gtagtgtcatgggtgaggtctgcag

SEQ ID NO: 247731 - DNA, 25 bp, Probe Sequence
gtaggtgcagtgggcaggatcatgc

SEQ ID NO: 247732 - DNA, 25 bp, Probe Sequence
gtagcttgagggtcaggaagccagg

SEQ ID NO: 247733 - DNA, 25 bp, Probe Sequence
gtagtgtgtgcttacagtaactaat

SEQ ID NO: 247734 - DNA, 25 bp, Probe Sequence
gtagtgctctgcatagtttactgaa

SEQ ID NO: 247735 - DNA, 25 bp, Probe Sequence
gtagtgtctcattgcagataatttt

SEQ ID NO: 247736 - DNA, 25 bp, Probe Sequence
gtagtatctcaaagattgtgttatg

SEQ ID NO: 247737 - DNA, 25 bp, Probe Sequence
gtagtactccattgtttttgctatt

SEQ ID NO: 247738 - DNA, 25 bp, Probe Sequence
gtagtaataaagtttttgccactgt

SEQ ID NO: 247739 - DNA, 25 bp, Probe Sequence
gtagtcacaaacatgttttgcaaca

SEQ ID NO: 247740 - DNA, 25 bp, Probe Sequence
gtagggcaacaactgttcctcaaag

SEQ ID NO: 247741 - DNA, 25 bp, Probe Sequence
gtagaggccactgtgtttctagcac

SEQ ID NO: 247742 - DNA, 25 bp, Probe Sequence
gtagggcaactgggctttgcctcac

SEQ ID NO: 247743 - DNA, 25 bp, Probe Sequence
gtagggaagctgagtgtgtcgctcc

SEQ ID NO: 247744 - DNA, 25 bp, Probe Sequence
gtagtgggaggttgtgcatggaggc

SEQ ID NO: 247745 - DNA, 25 bp, Probe Sequence
gtacggagggtctagtctgagtgcg

SEQ ID NO: 247746 - DNA, 25 bp, Probe Sequence
gtacggtggagataattatcgccct

SEQ ID NO: 247747 - DNA, 25 bp, Probe Sequence
gtaccggggattcaccatccccgag

SEQ ID NO: 247748 - DNA, 25 bp, Probe Sequence
gtaccggctggtcaaacagatcctc

SEQ ID NO: 247749 - DNA, 25 bp, Probe Sequence
gtccactgcttgggtaaccgtactt

SEQ ID NO: 247750 - DNA, 25 bp, Probe Sequence
gtaaccgtggagctgactcgtaagt

SEQ ID NO: 247751 - DNA, 25 bp, Probe Sequence
tgttactcggggtgacccttttcat

SEQ ID NO: 247752 - DNA, 25 bp, Probe Sequence
tgttactcggggtgacccttttcat

SEQ ID NO: 247753 - DNA, 25 bp, Probe Sequence
gtaaacggggatatcgtctttcatc

SEQ ID NO: 247754 - DNA, 25 bp, Probe Sequence
gtagaacagggtagagtcatgtcat

SEQ ID NO: 247755 - DNA, 25 bp, Probe Sequence
gtagaagcagttgtcagatcatgaa

SEQ ID NO: 247756 - DNA, 25 bp, Probe Sequence
gtaggagctggtgtcatagatgaag

SEQ ID NO: 247757 - DNA, 25 bp, Probe Sequence
gtaggatccctgctcaagcagcaca

SEQ ID NO: 247758 - DNA, 25 bp, Probe Sequence
gtatgtgtcactagtgtctaatgaa

SEQ ID NO: 247759 - DNA, 25 bp, Probe Sequence
gtagtcgatctaggtcaaatgaaag

SEQ ID NO: 247760 - DNA, 25 bp, Probe Sequence
gtagtcagacccaatcagaatcaca

SEQ ID NO: 247761 - DNA, 25 bp, Probe Sequence
gtagtcccagctactcgagaggctg

SEQ ID NO: 247762 - DNA, 25 bp, Probe Sequence
gtagtcccagctactcgagaggctg

SEQ ID NO: 247763 - DNA, 25 bp, Probe Sequence
gtagtcccagctactcaggagactg

SEQ ID NO: 247764 - DNA, 25 bp, Probe Sequence
gtaggagccactatgaggagggccc

SEQ ID NO: 247765 - DNA, 25 bp, Probe Sequence
gtacaaccgcttcgagaagcgccac

SEQ ID NO: 247766 - DNA, 25 bp, Probe Sequence
gtagcagatgccgttcaaaaggtcg

SEQ ID NO: 247767 - DNA, 25 bp, Probe Sequence
gtagctgaccaggggactaggttgt

SEQ ID NO: 247768 - DNA, 25 bp, Probe Sequence
gtatggcactcaggggtgccaggtg

SEQ ID NO: 247769 - DNA, 25 bp, Probe Sequence
gtactgcatcgagtgggctgcacgc

SEQ ID NO: 247770 - DNA, 25 bp, Probe Sequence
gtacttctggcgagccaggctgcac

SEQ ID NO: 247771 - DNA, 25 bp, Probe Sequence
gtacccggcaaagcagatgtgcctg

SEQ ID NO: 247772 - DNA, 25 bp, Probe Sequence
gtacagcccatccatgaccatgggc

SEQ ID NO: 247773 - DNA, 25 bp, Probe Sequence
gtagcccctctcaaaaggagtcttt

SEQ ID NO: 247774 - DNA, 25 bp, Probe Sequence
gtagtctttctatactgtggactaa

SEQ ID NO: 247775 - DNA, 25 bp, Probe Sequence
gtagcactttttacactgaaactat

SEQ ID NO: 247776 - DNA, 25 bp, Probe Sequence
gtaaatattttcaccacgatcgatt

SEQ ID NO: 247777 - DNA, 25 bp, Probe Sequence
gtaaatattttcaccacgatcgatt

SEQ ID NO: 247778 - DNA, 25 bp, Probe Sequence
gtaaatattttcaccacgatcgatt

SEQ ID NO: 247779 - DNA, 25 bp, Probe Sequence
gtaaagttgttcgccgcgtggaatg

SEQ ID NO: 247780 - DNA, 25 bp, Probe Sequence
gtagaggttgaaggacctgcagtcc

SEQ ID NO: 247781 - DNA, 25 bp, Probe Sequence
gtagggtcttaccagagagactcct

SEQ ID NO: 247782 - DNA, 25 bp, Probe Sequence
gtagttgttccatgcagtatgactg

SEQ ID NO: 247783 - DNA, 25 bp, Probe Sequence
gtagtcatgttactaaactgcacga

SEQ ID NO: 247784 - DNA, 25 bp, Probe Sequence
gtagtcatatgtccaagtacgcccc

SEQ ID NO: 247785 - DNA, 25 bp, Probe Sequence
gtagtacttaatagtacccaacctg

SEQ ID NO: 247786 - DNA, 25 bp, Probe Sequence
gtaattttaattcaccacatactta

SEQ ID NO: 247787 - DNA, 25 bp, Probe Sequence
gtaaagttacaacacaccctcttgc

SEQ ID NO: 247788 - DNA, 25 bp, Probe Sequence
gtacggtaatagttatcaccttcta

SEQ ID NO: 247789 - DNA, 25 bp, Probe Sequence
gtaccttaaagcttctcctgtgaac

SEQ ID NO: 247790 - DNA, 25 bp, Probe Sequence
gtatggcggacatcacgtttgtgga

SEQ ID NO: 247791 - DNA, 25 bp, Probe Sequence
gtaggggaattagggccatgctgga

SEQ ID NO: 247792 - DNA, 25 bp, Probe Sequence
gtaggggaatctaagcacaatgcat

SEQ ID NO: 247793 - DNA, 25 bp, Probe Sequence
gtaggtgtagattcccaaatgcatt

SEQ ID NO: 247794 - DNA, 25 bp, Probe Sequence
gtaggtgctcagaaaatcatgaatg

SEQ ID NO: 247795 - DNA, 25 bp, Probe Sequence
gtagaactcaaagatgctgaacctg

SEQ ID NO: 247796 - DNA, 25 bp, Probe Sequence
gtagaattaaaggaggacacgagcc

SEQ ID NO: 247797 - DNA, 25 bp, Probe Sequence
gtaggtaataaggtgtccagcagag

SEQ ID NO: 247798 - DNA, 25 bp, Probe Sequence
gtaggcgaagcaaggactcaacacg

SEQ ID NO: 247799 - DNA, 25 bp, Probe Sequence
gtaggcagaagagatccatcaacag

SEQ ID NO: 247800 - DNA, 25 bp, Probe Sequence
gtagggaatgatgctggctggacac

SEQ ID NO: 247801 - DNA, 25 bp, Probe Sequence
gtatggatgtattgtcgcctgtacc

SEQ ID NO: 247802 - DNA, 25 bp, Probe Sequence
gtaggatgacattatctgccttatt

SEQ ID NO: 247803 - DNA, 25 bp, Probe Sequence
gtaggatatcatcattggtcataat

SEQ ID NO: 247804 - DNA, 25 bp, Probe Sequence
gtagttgtcatattctggaaaattt

SEQ ID NO: 247805 - DNA, 25 bp, Probe Sequence
gtagttctcttgggcagaaacatat

SEQ ID NO: 247806 - DNA, 25 bp, Probe Sequence
gtagttctgctccagacagggaatt

SEQ ID NO: 247807 - DNA, 25 bp, Probe Sequence
gtagtgtctgccatacatgttaata

SEQ ID NO: 247808 - DNA, 25 bp, Probe Sequence
gtagtttgccaggattttttcagct

SEQ ID NO: 247809 - DNA, 25 bp, Probe Sequence
gtagtttgccaggattttttcagct

SEQ ID NO: 247810 - DNA, 25 bp, Probe Sequence
gtagttctgcaagatgttaccacct

SEQ ID NO: 247811 - DNA, 25 bp, Probe Sequence
gtacttccaacagttgctgactcac

SEQ ID NO: 247812 - DNA, 25 bp, Probe Sequence
gtaccactaacacagatgattgatc

SEQ ID NO: 247813 - DNA, 25 bp, Probe Sequence
gtacccacatgacacgtgatttgga

SEQ ID NO: 247814 - DNA, 25 bp, Probe Sequence
gtaccccgacgcggtgaagatctgc

SEQ ID NO: 247815 - DNA, 25 bp, Probe Sequence
gtaccccggagctcggagacatgaa

SEQ ID NO: 247816 - DNA, 25 bp, Probe Sequence
gtaacctccggtttgtggacaggca

SEQ ID NO: 247817 - DNA, 25 bp, Probe Sequence
gtaacctgtattattctggacggac

SEQ ID NO: 247818 - DNA, 25 bp, Probe Sequence
gtaccctgctttgctttggatggac

SEQ ID NO: 247819 - DNA, 25 bp, Probe Sequence
gtagtccatgtattttccgtgagaa

SEQ ID NO: 247820 - DNA, 25 bp, Probe Sequence
gtaggctcattcatttctctaacag

SEQ ID NO: 247821 - DNA, 25 bp, Probe Sequence
gtaggcttctatattgcatttaact

SEQ ID NO: 247822 - DNA, 25 bp, Probe Sequence
gtaggcattcgtgatgacttttaat

SEQ ID NO: 247823 - DNA, 25 bp, Probe Sequence
gtaggatacactcgagtctgtttat

SEQ ID NO: 247824 - DNA, 25 bp, Probe Sequence
gtagtgatcaactgatgccttcaag

SEQ ID NO: 247825 - DNA, 25 bp, Probe Sequence
gtagtgacggaagcctgatcataga

SEQ ID NO: 247826 - DNA, 25 bp, Probe Sequence
gtagtacagagatccagataagagt

SEQ ID NO: 247827 - DNA, 25 bp, Probe Sequence
gtaaccaagcagttttactattctg

SEQ ID NO: 247828 - DNA, 25 bp, Probe Sequence
gtaggcataagctaatggtttattt

SEQ ID NO: 247829 - DNA, 25 bp, Probe Sequence
gtagtgcacacgcacgggtgtttct

SEQ ID NO: 247830 - DNA, 25 bp, Probe Sequence
gtagtcaacggtcagcttgttggtg

SEQ ID NO: 247831 - DNA, 25 bp, Probe Sequence
gtagtgccactgttgttttgggggg

SEQ ID NO: 247832 - DNA, 25 bp, Probe Sequence
gtagtgccactgttgttttgggggg

SEQ ID NO: 247833 - DNA, 25 bp, Probe Sequence
gtagaacacttagtttggggtgtca

SEQ ID NO: 247834 - DNA, 25 bp, Probe Sequence
gtagacacatttaaggatggggtta

SEQ ID NO: 247835 - DNA, 25 bp, Probe Sequence
gtagatccatatttcggaggtcttc

SEQ ID NO: 247836 - DNA, 25 bp, Probe Sequence
gtagatgatatgtttcgtgggttga

SEQ ID NO: 247837 - DNA, 25 bp, Probe Sequence
gtacagaatgtagggatgggttaag

SEQ ID NO: 247838 - DNA, 25 bp, Probe Sequence
gtacagctagtatggggatggaata

SEQ ID NO: 247839 - DNA, 25 bp, Probe Sequence
gtagcgtggtatcacaggatttcat

SEQ ID NO: 247840 - DNA, 25 bp, Probe Sequence
gtaggggatatctcttgctcttatc

SEQ ID NO: 247841 - DNA, 25 bp, Probe Sequence
gtaggtggataacacctgcttttca

SEQ ID NO: 247842 - DNA, 25 bp, Probe Sequence
gtagggagacaaaacttggagttca

SEQ ID NO: 247843 - DNA, 25 bp, Probe Sequence
gtaggagtgaaacatctatgatgga

SEQ ID NO: 247844 - DNA, 25 bp, Probe Sequence
gtaggagtcaacaaatttgggattt

SEQ ID NO: 247845 - DNA, 25 bp, Probe Sequence
gtaggattcaaaaattcttcaatgt

SEQ ID NO: 247846 - DNA, 25 bp, Probe Sequence
gtaaattcaaagcagtcttagtcag

SEQ ID NO: 247847 - DNA, 25 bp, Probe Sequence
gtagcctaaaagcgtatgtagacaa

SEQ ID NO: 247848 - DNA, 25 bp, Probe Sequence
gtagcaccaacaagcctggattgtg

SEQ ID NO: 247849 - DNA, 25 bp, Probe Sequence
gtagccatcaactgactgagacctt

SEQ ID NO: 247850 - DNA, 25 bp, Probe Sequence
gtagccttcacacagatagaccttt

SEQ ID NO: 247851 - DNA, 25 bp, Probe Sequence
gtagtttcaacaagtgctacctttg

SEQ ID NO: 247852 - DNA, 25 bp, Probe Sequence
gtagtttatgatattgccctctttg

SEQ ID NO: 247853 - DNA, 25 bp, Probe Sequence
gtaggttcattaatcagctcactgg

SEQ ID NO: 247854 - DNA, 25 bp, Probe Sequence
gtaggtgtattttatgctcttaagg

SEQ ID NO: 247855 - DNA, 25 bp, Probe Sequence
gtagttggattgtttgtattaggat

SEQ ID NO: 247856 - DNA, 25 bp, Probe Sequence
gtaggttattcctgttaagcagcat

SEQ ID NO: 247857 - DNA, 25 bp, Probe Sequence
tgctacgttacggtggttctacaat

SEQ ID NO: 247858 - DNA, 25 bp, Probe Sequence
gtgattgttgaccccgggtacagtt

SEQ ID NO: 247859 - DNA, 25 bp, Probe Sequence
gtgaagattacggtaacggccactt

SEQ ID NO: 247860 - DNA, 25 bp, Probe Sequence
gtaagcatttggcaaacgttcagcc

SEQ ID NO: 247861 - DNA, 25 bp, Probe Sequence
gtagctgattctggaagcaacgttc

SEQ ID NO: 247862 - DNA, 25 bp, Probe Sequence
gtagctgattctggaagcaacgttc

SEQ ID NO: 247863 - DNA, 25 bp, Probe Sequence
gtagcgatggccaaagaatcagtga

SEQ ID NO: 247864 - DNA, 25 bp, Probe Sequence
gtaggtgcacttgacagtattgagg

SEQ ID NO: 247865 - DNA, 25 bp, Probe Sequence
gtaggagactgttaaaattggtgat

SEQ ID NO: 247866 - DNA, 25 bp, Probe Sequence
gtaggaactcttaagcaatggtaat

SEQ ID NO: 247867 - DNA, 25 bp, Probe Sequence
gtaggacatcttttgaggaattagt

SEQ ID NO: 247868 - DNA, 25 bp, Probe Sequence
gtaggagcatctgtaagtgcattta

SEQ ID NO: 247869 - DNA, 25 bp, Probe Sequence
gtagagatcattttaagtgcttgtg

SEQ ID NO: 247870 - DNA, 25 bp, Probe Sequence
gtagcagttctacaggctcatcatg

SEQ ID NO: 247871 - DNA, 25 bp, Probe Sequence
gtagcagtgctctcattggcctgct

SEQ ID NO: 247872 - DNA, 25 bp, Probe Sequence
gtagagatcaccaatctggactgta

SEQ ID NO: 247873 - DNA, 25 bp, Probe Sequence
gtagagtcagctaaaggaatgtgag

SEQ ID NO: 247874 - DNA, 25 bp, Probe Sequence
gtagcagtcctaaatggactcatga

SEQ ID NO: 247875 - DNA, 25 bp, Probe Sequence
gtaggtctacatcttactcagaatc

SEQ ID NO: 247876 - DNA, 25 bp, Probe Sequence
gtaggtctatatttatcttcacagt

SEQ ID NO: 247877 - DNA, 25 bp, Probe Sequence
gtagtgttggactgttgccacagtg

SEQ ID NO: 247878 - DNA, 25 bp, Probe Sequence
gtagagtgccgaaggctgtaccagt

SEQ ID NO: 247879 - DNA, 25 bp, Probe Sequence
gtaggtgctcagacaggtaaccact

SEQ ID NO: 247880 - DNA, 25 bp, Probe Sequence
gtagatcttcagacatgcccatacc

SEQ ID NO: 247881 - DNA, 25 bp, Probe Sequence
gtagtgctcacgaatacagctcctc

SEQ ID NO: 247882 - DNA, 25 bp, Probe Sequence
gtagtgtcagaggatactgtggctt

SEQ ID NO: 247883 - DNA, 25 bp, Probe Sequence
gtagttagagacactgtagctgtat

SEQ ID NO: 247884 - DNA, 25 bp, Probe Sequence
gtagtctaggatcaataggctgtac

SEQ ID NO: 247885 - DNA, 25 bp, Probe Sequence
gtagtccaataagatagcagctgta

SEQ ID NO: 247886 - DNA, 25 bp, Probe Sequence
gtagtctggaaagttaccatatgat

SEQ ID NO: 247887 - DNA, 25 bp, Probe Sequence
gtagacttgaaattaaactcagcat

SEQ ID NO: 247888 - DNA, 25 bp, Probe Sequence
gtagagcttgcatagtcggcactca

SEQ ID NO: 247889 - DNA, 25 bp, Probe Sequence
gtaggtacaaagtggcatctcatgg

SEQ ID NO: 247890 - DNA, 25 bp, Probe Sequence
gtaggtaaccagatggctctttttc

SEQ ID NO: 247891 - DNA, 25 bp, Probe Sequence
gtagaaagaccttgctggttttttg

SEQ ID NO: 247892 - DNA, 25 bp, Probe Sequence
gtagatccaggtgtctgtttttttg

SEQ ID NO: 247893 - DNA, 25 bp, Probe Sequence
gtagatccacctgtttgtggtacac

SEQ ID NO: 247894 - DNA, 25 bp, Probe Sequence
gtactacaccttatttggtcgcagc

SEQ ID NO: 247895 - DNA, 25 bp, Probe Sequence
gtactgcaacctcttggtgaggggc

SEQ ID NO: 247896 - DNA, 25 bp, Probe Sequence
gtaccttccatgttttgttggccag

SEQ ID NO: 247897 - DNA, 25 bp, Probe Sequence
gtagagttcctggttgcttttcata

SEQ ID NO: 247898 - DNA, 25 bp, Probe Sequence
gtactgtacctgggttacttgcaaa

SEQ ID NO: 247899 - DNA, 25 bp, Probe Sequence
gtacattacctggtttcctgggatt

SEQ ID NO: 247900 - DNA, 25 bp, Probe Sequence
gtagttcccatatatttcagggtct

SEQ ID NO: 247901 - DNA, 25 bp, Probe Sequence
gtagatttctcttaattccatttgt

SEQ ID NO: 247902 - DNA, 25 bp, Probe Sequence
gtgagtcgtcgttaaatgcctgtct

SEQ ID NO: 247903 - DNA, 25 bp, Probe Sequence
gtagacttttcagaatggcttcttt

SEQ ID NO: 247904 - DNA, 25 bp, Probe Sequence
gtagtccattcttgctaatggttag

SEQ ID NO: 247905 - DNA, 25 bp, Probe Sequence
gtagtgcctttacttcaggcttgat

SEQ ID NO: 247906 - DNA, 25 bp, Probe Sequence
gtaggtctgattgagcttgtgttgt

SEQ ID NO: 247907 - DNA, 25 bp, Probe Sequence
gtagagttggatgactatgtgtttt

SEQ ID NO: 247908 - DNA, 25 bp, Probe Sequence
gtagatgtggtttgactatttctgt

SEQ ID NO: 247909 - DNA, 25 bp, Probe Sequence
gtagtgaccattttgctatctgttt

SEQ ID NO: 247910 - DNA, 25 bp, Probe Sequence
gtagtcccattgatgtactttacct

SEQ ID NO: 247911 - DNA, 25 bp, Probe Sequence
gtagctaccactgttgagttttcct

SEQ ID NO: 247912 - DNA, 25 bp, Probe Sequence
gtactcgcacctggtggactacttc

SEQ ID NO: 247913 - DNA, 25 bp, Probe Sequence
gtacttgcatggggttcactattta

SEQ ID NO: 247914 - DNA, 25 bp, Probe Sequence
gtagagacagggtttcaccatgtta

SEQ ID NO: 247915 - DNA, 25 bp, Probe Sequence
gtagagacagggtttcacccgtgtt

SEQ ID NO: 247916 - DNA, 25 bp, Probe Sequence
gtagagatggggcttcaccagcctg

SEQ ID NO: 247917 - DNA, 25 bp, Probe Sequence
gtaattggagggatcacatactctg

SEQ ID NO: 247918 - DNA, 25 bp, Probe Sequence
gtacatcgtaggtattagtcatcgc

SEQ ID NO: 247919 - DNA, 25 bp, Probe Sequence
gtaataaatgttttcaggccgggca

SEQ ID NO: 247920 - DNA, 25 bp, Probe Sequence
gtagattaattattggctggacgag

SEQ ID NO: 247921 - DNA, 25 bp, Probe Sequence
gtagtctacttattgctagatggga

SEQ ID NO: 247922 - DNA, 25 bp, Probe Sequence
gtaggtactctcaactctggatgag

SEQ ID NO: 247923 - DNA, 25 bp, Probe Sequence
gtacgtacttcatatgtggtgtgtc

SEQ ID NO: 247924 - DNA, 25 bp, Probe Sequence
gtagtgatacaaacaattattgttc

SEQ ID NO: 247925 - DNA, 25 bp, Probe Sequence
gtagtgtaaattctcattgattctt

SEQ ID NO: 247926 - DNA, 25 bp, Probe Sequence
gtaggtaaaggccgaggatgctgct

SEQ ID NO: 247927 - DNA, 25 bp, Probe Sequence
gtacgcatatatggaccggagtctg

SEQ ID NO: 247928 - DNA, 25 bp, Probe Sequence
gtaggtgtatgcttactgcagagtt

SEQ ID NO: 247929 - DNA, 25 bp, Probe Sequence
gtagtggttgcacagtcacactgat

SEQ ID NO: 247930 - DNA, 25 bp, Probe Sequence
gtagagttcagacatgatcacttaa

SEQ ID NO: 247931 - DNA, 25 bp, Probe Sequence
gtagagtgtcgatgttgcagctttc

SEQ ID NO: 247932 - DNA, 25 bp, Probe Sequence
gtacgtctagattgtgtggtttgcc

SEQ ID NO: 247933 - DNA, 25 bp, Probe Sequence
gtacagttgaattcctagtcttcct

SEQ ID NO: 247934 - DNA, 25 bp, Probe Sequence
gtagctctgtaatccttgaatacgg

SEQ ID NO: 247935 - DNA, 25 bp, Probe Sequence
gtagctctggatacatctcctgaca

SEQ ID NO: 247936 - DNA, 25 bp, Probe Sequence
gtactatggcaaactcctgcagccc

SEQ ID NO: 247937 - DNA, 25 bp, Probe Sequence
gtactgccacaaagcttcacagaca

SEQ ID NO: 247938 - DNA, 25 bp, Probe Sequence
gtactgccaagtggtcaaggcagac

SEQ ID NO: 247939 - DNA, 25 bp, Probe Sequence
gtactccagcgtgggcaacagagta

SEQ ID NO: 247940 - DNA, 25 bp, Probe Sequence
gtagtcgccgtgcctaccatggtga

SEQ ID NO: 247941 - DNA, 25 bp, Probe Sequence
gtagtcccagtacttcaaaggctga

SEQ ID NO: 247942 - DNA, 25 bp, Probe Sequence
gtagtcccagctacttgaaaggctg

SEQ ID NO: 247943 - DNA, 25 bp, Probe Sequence
gtagtaccagctgctcgggaggctg

SEQ ID NO: 247944 - DNA, 25 bp, Probe Sequence
gtagtcccagctacttgggaagctg

SEQ ID NO: 247945 - DNA, 25 bp, Probe Sequence
gtagtcccagctacttgggaggctg

SEQ ID NO: 247946 - DNA, 25 bp, Probe Sequence
gtagtcccagctacttgggaggctg

SEQ ID NO: 247947 - DNA, 25 bp, Probe Sequence
gtagtcgcagcctttcgggaggctg

SEQ ID NO: 247948 - DNA, 25 bp, Probe Sequence
gtagtcccagttacgtgggaggcta

SEQ ID NO: 247949 - DNA, 25 bp, Probe Sequence
gtagtcccaggtacttgggaggctg

SEQ ID NO: 247950 - DNA, 25 bp, Probe Sequence
gtgaacccggaagtcggaggttgca

SEQ ID NO: 247951 - DNA, 25 bp, Probe Sequence
gtaactatccgcactagaaagttca

SEQ ID NO: 247952 - DNA, 25 bp, Probe Sequence
gtacccagctactctataaatttga

SEQ ID NO: 247953 - DNA, 25 bp, Probe Sequence
gtacctagctaggctgctattatta

SEQ ID NO: 247954 - DNA, 25 bp, Probe Sequence
gtaccagagcttcgtgcagtttctc

SEQ ID NO: 247955 - DNA, 25 bp, Probe Sequence
gtagccagctgttttcagtggtccc

SEQ ID NO: 247956 - DNA, 25 bp, Probe Sequence
gtagccagtgtgacccagaggctcc

SEQ ID NO: 247957 - DNA, 25 bp, Probe Sequence
gtagccagtgtgacccagaggctcc

SEQ ID NO: 247958 - DNA, 25 bp, Probe Sequence
gtagccagtgtgacccagaggctcc

SEQ ID NO: 247959 - DNA, 25 bp, Probe Sequence
gtagcctgtggaatctgatcagtta

SEQ ID NO: 247960 - DNA, 25 bp, Probe Sequence
gtacctgggttcaactaaagcgcca

SEQ ID NO: 247961 - DNA, 25 bp, Probe Sequence
gtagccatgggcttagcatgctaag

SEQ ID NO: 247962 - DNA, 25 bp, Probe Sequence
gtagccagcatcttgtaactaaatg

SEQ ID NO: 247963 - DNA, 25 bp, Probe Sequence
gtagatggataaatcacaccacctg

SEQ ID NO: 247964 - DNA, 25 bp, Probe Sequence
gtagctgtcaagaccacacgatttg

SEQ ID NO: 247965 - DNA, 25 bp, Probe Sequence
gtagcatatgcttgtctcaaagatt

SEQ ID NO: 247966 - DNA, 25 bp, Probe Sequence
gtagatactagtccctgtgtcagga

SEQ ID NO: 247967 - DNA, 25 bp, Probe Sequence
gtagataaactcctctatccagcag

SEQ ID NO: 247968 - DNA, 25 bp, Probe Sequence
gtagtaatttcattctgaccagaca

SEQ ID NO: 247969 - DNA, 25 bp, Probe Sequence
gtagccagtttctttggccagaagg

SEQ ID NO: 247970 - DNA, 25 bp, Probe Sequence
gtagactttgtcttatgtgtcaaaa

SEQ ID NO: 247971 - DNA, 25 bp, Probe Sequence
gtagactttgcgcttgatgaagaag

SEQ ID NO: 247972 - DNA, 25 bp, Probe Sequence
gtacctggtgggtctgttcgaagat

SEQ ID NO: 247973 - DNA, 25 bp, Probe Sequence
gtacctcctggcaactatgggaact

SEQ ID NO: 247974 - DNA, 25 bp, Probe Sequence
gtagcctttgtcaagtgaggaaatc

SEQ ID NO: 247975 - DNA, 25 bp, Probe Sequence
gtagcggtggtcagacatggaaatg

SEQ ID NO: 247976 - DNA, 25 bp, Probe Sequence
gtagggtgacctggaattcgaattc

SEQ ID NO: 247977 - DNA, 25 bp, Probe Sequence
gtacggagccgagattatcgcaatt

SEQ ID NO: 247978 - DNA, 25 bp, Probe Sequence
gtacggtgggaggtctatataagca

SEQ ID NO: 247979 - DNA, 25 bp, Probe Sequence
gtacggtgggaggtctatataagca

SEQ ID NO: 247980 - DNA, 25 bp, Probe Sequence
gtacggtgggaggtctatataagca

SEQ ID NO: 247981 - DNA, 25 bp, Probe Sequence
gtacggtgggaggtctatataagca

SEQ ID NO: 247982 - DNA, 25 bp, Probe Sequence
gtacggtgggaggtctatataagca

SEQ ID NO: 247983 - DNA, 25 bp, Probe Sequence
gtacggtgggaggtctatataagca

SEQ ID NO: 247984 - DNA, 25 bp, Probe Sequence
gtacggtgggaggtctatataagca

SEQ ID NO: 247985 - DNA, 25 bp, Probe Sequence
gtacggtgggaggtctatataagca

SEQ ID NO: 247986 - DNA, 25 bp, Probe Sequence
gtacggtgggaggtctatataagca

SEQ ID NO: 247987 - DNA, 25 bp, Probe Sequence
gtacgtctgggaggtctatgataga

SEQ ID NO: 247988 - DNA, 25 bp, Probe Sequence
gtaccacggctatccttatagtgat

SEQ ID NO: 247989 - DNA, 25 bp, Probe Sequence
gtacgcccctattgacgtcaatgac

SEQ ID NO: 247990 - DNA, 25 bp, Probe Sequence
gtacgcccctattgacgtcaatgaa

SEQ ID NO: 247991 - DNA, 25 bp, Probe Sequence
gtacctcaccgcagaggtacttgaa

SEQ ID NO: 247992 - DNA, 25 bp, Probe Sequence
gtacagtgacacttatggggacttt

SEQ ID NO: 247993 - DNA, 25 bp, Probe Sequence
gtagactggatcaatgtgggtcagc

SEQ ID NO: 247994 - DNA, 25 bp, Probe Sequence
gtagatcatgtttacttcccagtgg

SEQ ID NO: 247995 - DNA, 25 bp, Probe Sequence
gtagatcatgtttacttcccagtgg

SEQ ID NO: 247996 - DNA, 25 bp, Probe Sequence
gtagatcatgtttacttcccagtgg

SEQ ID NO: 247997 - DNA, 25 bp, Probe Sequence
gtagatcatgtttacttcccagtgg

SEQ ID NO: 247998 - DNA, 25 bp, Probe Sequence
gtagacactaattctgtcagtaggg

SEQ ID NO: 247999 - DNA, 25 bp, Probe Sequence
gtagacactttcgtcactgtaggca

SEQ ID NO: 248000 - DNA, 25 bp, Probe Sequence
gtagacacatacccaactgttggca

SEQ ID NO: 248001 - DNA, 25 bp, Probe Sequence
gtagccagaggccacaagattccta

SEQ ID NO: 248002 - DNA, 25 bp, Probe Sequence
gtagaagaagcacatcagaccccac

SEQ ID NO: 248003 - DNA, 25 bp, Probe Sequence
gtagcaagaaatctacatccaccaa

SEQ ID NO: 248004 - DNA, 25 bp, Probe Sequence
gtagcaggaatcttcttactcatcc

SEQ ID NO: 248005 - DNA, 25 bp, Probe Sequence
gtagcagggaattttcacataacag

SEQ ID NO: 248006 - DNA, 25 bp, Probe Sequence
gtagtgggaatgtgcctctgaatgg

SEQ ID NO: 248007 - DNA, 25 bp, Probe Sequence
gtagaacattatttgcctatgaagg

SEQ ID NO: 248008 - DNA, 25 bp, Probe Sequence
gtagaaatatagacctgtgaaaaga

SEQ ID NO: 248009 - DNA, 25 bp, Probe Sequence
gtagcttagtaaggcattaacataa

SEQ ID NO: 248010 - DNA, 25 bp, Probe Sequence
gtagttagacagatgactgatccta

SEQ ID NO: 248011 - DNA, 25 bp, Probe Sequence
gtagttgcagatttcagtcgtcgtg

SEQ ID NO: 248012 - DNA, 25 bp, Probe Sequence
gtagttggatgcttggcacgtcgtc

SEQ ID NO: 248013 - DNA, 25 bp, Probe Sequence
gtactctgacagctgtgcacgatgc

SEQ ID NO: 248014 - DNA, 25 bp, Probe Sequence
gtagatctaagtctccagcatctgt

SEQ ID NO: 248015 - DNA, 25 bp, Probe Sequence
gtagatctaagtctccagcatctgt

SEQ ID NO: 248016 - DNA, 25 bp, Probe Sequence
gtagatctaagtctccagcatctgt

SEQ ID NO: 248017 - DNA, 25 bp, Probe Sequence
gtagtctaagtattccacacacatt

SEQ ID NO: 248018 - DNA, 25 bp, Probe Sequence
gtagattattaattccactcccttg

SEQ ID NO: 248019 - DNA, 25 bp, Probe Sequence
gtagtcttctaatacagtctctcag

SEQ ID NO: 248020 - DNA, 25 bp, Probe Sequence
gtacgtattagtcatcgctattacc

SEQ ID NO: 248021 - DNA, 25 bp, Probe Sequence
gtacctattttattagacttacagc

SEQ ID NO: 248022 - DNA, 25 bp, Probe Sequence
gtagatatcctttattagtttaaga

SEQ ID NO: 248023 - DNA, 25 bp, Probe Sequence
gtagtcacctattttcgtactgaaa

SEQ ID NO: 248024 - DNA, 25 bp, Probe Sequence
gtagtgcatttaattggagtatcta

SEQ ID NO: 248025 - DNA, 25 bp, Probe Sequence
gtagtctgtataataagggcatctc

SEQ ID NO: 248026 - DNA, 25 bp, Probe Sequence
gtagtgatgcttctccatgggcatt

SEQ ID NO: 248027 - DNA, 25 bp, Probe Sequence
gtagtgctgtttgccagctgtatat

SEQ ID NO: 248028 - DNA, 25 bp, Probe Sequence
gtagttcttttgtcagctgcttaca

SEQ ID NO: 248029 - DNA, 25 bp, Probe Sequence
gtagctttacagtacagatcttaca

SEQ ID NO: 248030 - DNA, 25 bp, Probe Sequence
gtagtttgtataatcagtcattcat

SEQ ID NO: 248031 - DNA, 25 bp, Probe Sequence
gtagtagctgcatttgtcattaata

SEQ ID NO: 248032 - DNA, 25 bp, Probe Sequence
gtactggatgctacagacttataac

SEQ ID NO: 248033 - DNA, 25 bp, Probe Sequence
gtagacagtctgaacagtttaagca

SEQ ID NO: 248034 - DNA, 25 bp, Probe Sequence
gtagcacgtgataaagttacataga

SEQ ID NO: 248035 - DNA, 25 bp, Probe Sequence
gtagtgctgtaaatattctgccata

SEQ ID NO: 248036 - DNA, 25 bp, Probe Sequence
gtagttctattgacattcctcaaga

SEQ ID NO: 248037 - DNA, 25 bp, Probe Sequence
gtagcatccgtactatacttcacaa

SEQ ID NO: 248038 - DNA, 25 bp, Probe Sequence
gtagattccatccattcactatact

SEQ ID NO: 248039 - DNA, 25 bp, Probe Sequence
gtagattccatccattcactatact

SEQ ID NO: 248040 - DNA, 25 bp, Probe Sequence
gtagattccatccattcactatact

SEQ ID NO: 248041 - DNA, 25 bp, Probe Sequence
gtagtatgtcatcattctgctcatg

SEQ ID NO: 248042 - DNA, 25 bp, Probe Sequence
gtagtatgtcatcattctgctcatg

SEQ ID NO: 248043 - DNA, 25 bp, Probe Sequence
gtagaagccatcattgcatctatgc

SEQ ID NO: 248044 - DNA, 25 bp, Probe Sequence
gtagaagcgcatacgcatgactaca

SEQ ID NO: 248045 - DNA, 25 bp, Probe Sequence
gtaccaccatgtgggactccaggca

SEQ ID NO: 248046 - DNA, 25 bp, Probe Sequence
gtaccaccatgtgggactccaggca

SEQ ID NO: 248047 - DNA, 25 bp, Probe Sequence
gtaccaccatgtgggactccaggca

SEQ ID NO: 248048 - DNA, 25 bp, Probe Sequence
gtagcttcctggtgaccagctgaca

SEQ ID NO: 248049 - DNA, 25 bp, Probe Sequence
gtagctgtatctgtatacctgtaat

SEQ ID NO: 248050 - DNA, 25 bp, Probe Sequence
gtactgctaatgaaatacctgggca

SEQ ID NO: 248051 - DNA, 25 bp, Probe Sequence
gtagtcttagtggtacctgtgtctt

SEQ ID NO: 248052 - DNA, 25 bp, Probe Sequence
gtagaattgggcaacaccttgttct

SEQ ID NO: 248053 - DNA, 25 bp, Probe Sequence
gtagacattcaggcaaaatcgagtt

SEQ ID NO: 248054 - DNA, 25 bp, Probe Sequence
gtagcattgtccgagaggaccagac

SEQ ID NO: 248055 - DNA, 25 bp, Probe Sequence
gtagcactgtggcagatggacctgg

SEQ ID NO: 248056 - DNA, 25 bp, Probe Sequence
gtagcactttgttgacttccatggt

SEQ ID NO: 248057 - DNA, 25 bp, Probe Sequence
gtagaccttgttacttctgaggtaa

SEQ ID NO: 248058 - DNA, 25 bp, Probe Sequence
gtagagccagttaacatttagggag

SEQ ID NO: 248059 - DNA, 25 bp, Probe Sequence
gtagacctgtctaggcactaaggga

SEQ ID NO: 248060 - DNA, 25 bp, Probe Sequence
gtacccgttgcagagccagggacat

SEQ ID NO: 248061 - DNA, 25 bp, Probe Sequence
gtacccgttgcagagccagggacat

SEQ ID NO: 248062 - DNA, 25 bp, Probe Sequence
gtacccgttgcagagccagggacat

SEQ ID NO: 248063 - DNA, 25 bp, Probe Sequence
gtaccttgtggatgtgccgggaatg

SEQ ID NO: 248064 - DNA, 25 bp, Probe Sequence
gtacctggttgagtggggaggaggg

SEQ ID NO: 248065 - DNA, 25 bp, Probe Sequence
gtactcatggctcacgggagggaag

SEQ ID NO: 248066 - DNA, 25 bp, Probe Sequence
gtaatccgccttggggagtggagga

SEQ ID NO: 248067 - DNA, 25 bp, Probe Sequence
gtaccaccactgtgtgggtgagaag

SEQ ID NO: 248068 - DNA, 25 bp, Probe Sequence
gtactccggcagggagggtgacaag

SEQ ID NO: 248069 - DNA, 25 bp, Probe Sequence
gtagctctcacagggaagtggtaaa

SEQ ID NO: 248070 - DNA, 25 bp, Probe Sequence
gtactgattagtcaacagtggaaaa

SEQ ID NO: 248071 - DNA, 25 bp, Probe Sequence
gtagctttagctcagcgcaaagaag

SEQ ID NO: 248072 - DNA, 25 bp, Probe Sequence
gtagcggcgacacgagagagacggg

SEQ ID NO: 248073 - DNA, 25 bp, Probe Sequence
gtagctgggcattcaaacggagggc

SEQ ID NO: 248074 - DNA, 25 bp, Probe Sequence
gtagctggaattgtgaaggtcggag

SEQ ID NO: 248075 - DNA, 25 bp, Probe Sequence
gtagcattacagggggcacttcgcc

SEQ ID NO: 248076 - DNA, 25 bp, Probe Sequence
gtactcaccaggtaggacattgggc

SEQ ID NO: 248077 - DNA, 25 bp, Probe Sequence
gtaccacgaggatcggattagagcg

SEQ ID NO: 248078 - DNA, 25 bp, Probe Sequence
gtactacgggaacgtgacgcggcac

SEQ ID NO: 248079 - DNA, 25 bp, Probe Sequence
gtactgacaagtaattggacagacc

SEQ ID NO: 248080 - DNA, 25 bp, Probe Sequence
gtactgggcaggattggcaacaccc

SEQ ID NO: 248081 - DNA, 25 bp, Probe Sequence
gtacggtcactgttggtgcgagact

SEQ ID NO: 248082 - DNA, 25 bp, Probe Sequence
gtacgcggacatcggaggcatggac

SEQ ID NO: 248083 - DNA, 25 bp, Probe Sequence
gtacttaaatggtatgcagaggcac

SEQ ID NO: 248084 - DNA, 25 bp, Probe Sequence
gtacttgacaaccaacatgtaaatt

SEQ ID NO: 248085 - DNA, 25 bp, Probe Sequence
gtaccaacaacacgaattgcacagt

SEQ ID NO: 248086 - DNA, 25 bp, Probe Sequence
gtacccatgagagacactctacgtg

SEQ ID NO: 248087 - DNA, 25 bp, Probe Sequence
gtactccagatgtctacactcaata

SEQ ID NO: 248088 - DNA, 25 bp, Probe Sequence
gtactccagatgtctacactcaata

SEQ ID NO: 248089 - DNA, 25 bp, Probe Sequence
gtacctcatggagtgctcactaagg

SEQ ID NO: 248090 - DNA, 25 bp, Probe Sequence
gtagagtagtgagtctccaataccg

SEQ ID NO: 248091 - DNA, 25 bp, Probe Sequence
gtagagttgctagtcatatggtaac

SEQ ID NO: 248092 - DNA, 25 bp, Probe Sequence
gtagaattgcattgtctatacatgc

SEQ ID NO: 248093 - DNA, 25 bp, Probe Sequence
gtagatattgcaccctatgacattg

SEQ ID NO: 248094 - DNA, 25 bp, Probe Sequence
gtagatatctagagtagagttgcta

SEQ ID NO: 248095 - DNA, 25 bp, Probe Sequence
gtagtatttgcattgtatagttata

SEQ ID NO: 248096 - DNA, 25 bp, Probe Sequence
gtagtcttagctatgcagatttata

SEQ ID NO: 248097 - DNA, 25 bp, Probe Sequence
gtactcttagcaatccattatttaa

SEQ ID NO: 248098 - DNA, 25 bp, Probe Sequence
gtagttttgaatggcatttcattaa

SEQ ID NO: 248099 - DNA, 25 bp, Probe Sequence
gtagttatgctacctgattgtataa

SEQ ID NO: 248100 - DNA, 25 bp, Probe Sequence
gtagctaatctatgtacttataaat

SEQ ID NO: 248101 - DNA, 25 bp, Probe Sequence
gtagttcctcattgaacatgtgata

SEQ ID NO: 248102 - DNA, 25 bp, Probe Sequence
gtagattcttattactcagtcatac

SEQ ID NO: 248103 - DNA, 25 bp, Probe Sequence
gtagattcttacgaactccaacttg

SEQ ID NO: 248104 - DNA, 25 bp, Probe Sequence
gtagaattaacagccctcaacgtga

SEQ ID NO: 248105 - DNA, 25 bp, Probe Sequence
gtagccaaggaagcccgcaatgtta

SEQ ID NO: 248106 - DNA, 25 bp, Probe Sequence
gtagctttgtacgccttaatgttca

SEQ ID NO: 248107 - DNA, 25 bp, Probe Sequence
gtagttatgtatctgccttcaagtc

SEQ ID NO: 248108 - DNA, 25 bp, Probe Sequence
gtagtttgtttttcataagcatgta

SEQ ID NO: 248109 - DNA, 25 bp, Probe Sequence
gtagtttgtttttcataagcatgta

SEQ ID NO: 248110 - DNA, 25 bp, Probe Sequence
gtagtattgtttgtgaccctgagaa

SEQ ID NO: 248111 - DNA, 25 bp, Probe Sequence
gtagtattgtttgtgaccctgagaa

SEQ ID NO: 248112 - DNA, 25 bp, Probe Sequence
gtagtataatattcgtctccctgga

SEQ ID NO: 248113 - DNA, 25 bp, Probe Sequence
gtcagcttagaatcttcccctaaag

SEQ ID NO: 248114 - DNA, 25 bp, Probe Sequence
gtactttgaaattatcacccatata

SEQ ID NO: 248115 - DNA, 25 bp, Probe Sequence
gtacgttataacatcaattatagaa

SEQ ID NO: 248116 - DNA, 25 bp, Probe Sequence
gtactgttttactcatttttattca

SEQ ID NO: 248117 - DNA, 25 bp, Probe Sequence
ggccttattttatgttaatcttgtc

SEQ ID NO: 248118 - DNA, 25 bp, Probe Sequence
gtactcaattttatgtttccttttg

SEQ ID NO: 248119 - DNA, 25 bp, Probe Sequence
gtagaatttattatttgtcattttt

SEQ ID NO: 248120 - DNA, 25 bp, Probe Sequence
gtagacatgggagacttttcatttt

SEQ ID NO: 248121 - DNA, 25 bp, Probe Sequence
gtagagtgggggtatttgacatatt

SEQ ID NO: 248122 - DNA, 25 bp, Probe Sequence
gtacgggaggatggatttgtcactt

SEQ ID NO: 248123 - DNA, 25 bp, Probe Sequence
gtacaaggggaccgtctggcacaaa

SEQ ID NO: 248124 - DNA, 25 bp, Probe Sequence
gtaccatgggctacagtgtctggcc

SEQ ID NO: 248125 - DNA, 25 bp, Probe Sequence
gtaccatttctcaggttgagccgga

SEQ ID NO: 248126 - DNA, 25 bp, Probe Sequence
gtactattagccatggtcaacccca

SEQ ID NO: 248127 - DNA, 25 bp, Probe Sequence
gtactgttcaaaaaggaatgcccca

SEQ ID NO: 248128 - DNA, 25 bp, Probe Sequence
gtactgttcaaaaaggaatgcccca

SEQ ID NO: 248129 - DNA, 25 bp, Probe Sequence
gtacgtccaaatgacgaagtcactg

SEQ ID NO: 248130 - DNA, 25 bp, Probe Sequence
gtacacccagaaggaccgagtcgga

SEQ ID NO: 248131 - DNA, 25 bp, Probe Sequence
tgtcgaccctaacgaccagaagaag

SEQ ID NO: 248132 - DNA, 25 bp, Probe Sequence
gtagccctctaagacaagatatgaa

SEQ ID NO: 248133 - DNA, 25 bp, Probe Sequence
gtagcctcttaatcccatcaagatg

SEQ ID NO: 248134 - DNA, 25 bp, Probe Sequence
gtagcgtttattttactgaatgtgg

SEQ ID NO: 248135 - DNA, 25 bp, Probe Sequence
gtagcgctgtaaatttttttgtggg

SEQ ID NO: 248136 - DNA, 25 bp, Probe Sequence
gtactgcgtatgcagtttttcctcc

SEQ ID NO: 248137 - DNA, 25 bp, Probe Sequence
gtactggatatacgttaattatccg

SEQ ID NO: 248138 - DNA, 25 bp, Probe Sequence
gtagttgatgctttgttttttcctg

SEQ ID NO: 248139 - DNA, 25 bp, Probe Sequence
gtagtagagctatttcttgtacttc

SEQ ID NO: 248140 - DNA, 25 bp, Probe Sequence
gtactgaatgccttttttcctttca

SEQ ID NO: 248141 - DNA, 25 bp, Probe Sequence
gtagatgcttgctttttgttttttc

SEQ ID NO: 248142 - DNA, 25 bp, Probe Sequence
gtagatgcatgtacttgtgtgtttt

SEQ ID NO: 248143 - DNA, 25 bp, Probe Sequence
gtagagcagtgggctttgccttctg

SEQ ID NO: 248144 - DNA, 25 bp, Probe Sequence
gtagagcagtgggctttgccttctg

SEQ ID NO: 248145 - DNA, 25 bp, Probe Sequence
gtagagcaatgtgtttcctctcatt

SEQ ID NO: 248146 - DNA, 25 bp, Probe Sequence
gtagagacgacaacttctccgcttc

SEQ ID NO: 248147 - DNA, 25 bp, Probe Sequence
gtagagatgcaattggttctcctgc

SEQ ID NO: 248148 - DNA, 25 bp, Probe Sequence
gtagagacaaggcattgctgcgcag

SEQ ID NO: 248149 - DNA, 25 bp, Probe Sequence
gtagaaatgatgcttctgctcagga

SEQ ID NO: 248150 - DNA, 25 bp, Probe Sequence
gtacagatctgtggatgacctcagc

SEQ ID NO: 248151 - DNA, 25 bp, Probe Sequence
gtagatgacactgatgattctcacc

SEQ ID NO: 248152 - DNA, 25 bp, Probe Sequence
gtagagcagaccaagtgtgcatcaa

SEQ ID NO: 248153 - DNA, 25 bp, Probe Sequence
gtagcactgaagaactgtcagctca

SEQ ID NO: 248154 - DNA, 25 bp, Probe Sequence
gtagcagagcagctccctcgctgcg

SEQ ID NO: 248155 - DNA, 25 bp, Probe Sequence
gtagagagagttgtctgcactgctg

SEQ ID NO: 248156 - DNA, 25 bp, Probe Sequence
gtagagaattctgcccactttttat

SEQ ID NO: 248157 - DNA, 25 bp, Probe Sequence
gtagagaattctgcccactttttat

SEQ ID NO: 248158 - DNA, 25 bp, Probe Sequence
gtacaagctttctcgagcttttgtc

SEQ ID NO: 248159 - DNA, 25 bp, Probe Sequence
gtagaagattttactggcattttcc

SEQ ID NO: 248160 - DNA, 25 bp, Probe Sequence
gtagaaatctaagctcagtgttgtc

SEQ ID NO: 248161 - DNA, 25 bp, Probe Sequence
gtagaaatgaagtccatattgggcc

SEQ ID NO: 248162 - DNA, 25 bp, Probe Sequence
gtagaacacaagtcacatttcagat

SEQ ID NO: 248163 - DNA, 25 bp, Probe Sequence
gtagacacacgagcatatttcacct

SEQ ID NO: 248164 - DNA, 25 bp, Probe Sequence
gtagctatccgacatgttcagacca

SEQ ID NO: 248165 - DNA, 25 bp, Probe Sequence
gtagctgacctgacacagattgatg

SEQ ID NO: 248166 - DNA, 25 bp, Probe Sequence
gtagccaacatcacaatctatgacg

SEQ ID NO: 248167 - DNA, 25 bp, Probe Sequence
gtagctgcaaaaataatcatgaacc

SEQ ID NO: 248168 - DNA, 25 bp, Probe Sequence
gtacccaaagtgttctgattccttc

SEQ ID NO: 248169 - DNA, 25 bp, Probe Sequence
gtacctcaaactctggaacctgatt

SEQ ID NO: 248170 - DNA, 25 bp, Probe Sequence
gtagcagaaaacagaggccacactt

SEQ ID NO: 248171 - DNA, 25 bp, Probe Sequence
gtacagtagtaactgatgtcccctt

SEQ ID NO: 248172 - DNA, 25 bp, Probe Sequence
gtactgggtgggcatgtcgaccatc

SEQ ID NO: 248173 - DNA, 25 bp, Probe Sequence
gtactgggcatgtgcctgtctgagc

SEQ ID NO: 248174 - DNA, 25 bp, Probe Sequence
gtagctgggattacaggtgtgcacc

SEQ ID NO: 248175 - DNA, 25 bp, Probe Sequence
gtagctgggaatacaggcacgccac

SEQ ID NO: 248176 - DNA, 25 bp, Probe Sequence
gtagctgggactacagcttccgaag

SEQ ID NO: 248177 - DNA, 25 bp, Probe Sequence
gtagttgtactttgtatctctaaat

SEQ ID NO: 248178 - DNA, 25 bp, Probe Sequence
gtagcttgtcctgctacttgctaaa

SEQ ID NO: 248179 - DNA, 25 bp, Probe Sequence
gtagatattcacagctcattttaga

SEQ ID NO: 248180 - DNA, 25 bp, Probe Sequence
gtagactttcaactattgttagatg

SEQ ID NO: 248181 - DNA, 25 bp, Probe Sequence
gtagattttagtctcgtgtgacatg

SEQ ID NO: 248182 - DNA, 25 bp, Probe Sequence
gtagatgttaagtgtctttatcacc

SEQ ID NO: 248183 - DNA, 25 bp, Probe Sequence
gtagttgtacaatatcagtgttgac

SEQ ID NO: 248184 - DNA, 25 bp, Probe Sequence
gtaatattagcacaaagtactagca

SEQ ID NO: 248185 - DNA, 25 bp, Probe Sequence
gtaatgaatggcacgaaatgttgga

SEQ ID NO: 248186 - DNA, 25 bp, Probe Sequence
gtagcgaagagcaggaacttctgtg

SEQ ID NO: 248187 - DNA, 25 bp, Probe Sequence
gtagcgtgaacgtgaactgtgtgaa

SEQ ID NO: 248188 - DNA, 25 bp, Probe Sequence
gtacgatgagaaattcaacgttaat

SEQ ID NO: 248189 - DNA, 25 bp, Probe Sequence
gtaccgagcaaatgccaggtctagc

SEQ ID NO: 248190 - DNA, 25 bp, Probe Sequence
gtacctgaaagctcctggcaatgct

SEQ ID NO: 248191 - DNA, 25 bp, Probe Sequence
gtagcggacaagccacctgaaagca

SEQ ID NO: 248192 - DNA, 25 bp, Probe Sequence
gtagccaaatagatccagcagaaga

SEQ ID NO: 248193 - DNA, 25 bp, Probe Sequence
gtagcagaacttatctcaggaaagg

SEQ ID NO: 248194 - DNA, 25 bp, Probe Sequence
gtaaattattaccacagggagccag

SEQ ID NO: 248195 - DNA, 25 bp, Probe Sequence
gtagagtaatttttgcacgggtcag

SEQ ID NO: 248196 - DNA, 25 bp, Probe Sequence
gtagatgtttttgtccacagttcct

SEQ ID NO: 248197 - DNA, 25 bp, Probe Sequence
gtagatttttgtttggcatcatgtt

SEQ ID NO: 248198 - DNA, 25 bp, Probe Sequence
gtagagttttctttgcttatgttga

SEQ ID NO: 248199 - DNA, 25 bp, Probe Sequence
gtagagttcttttgtctttgtatgg

SEQ ID NO: 248200 - DNA, 25 bp, Probe Sequence
gtagatgtgcgcatgatcgactttg

SEQ ID NO: 248201 - DNA, 25 bp, Probe Sequence
gtagctgctggattattgtctgtct

SEQ ID NO: 248202 - DNA, 25 bp, Probe Sequence
gtagctgatgaagtatgtcgcattt

SEQ ID NO: 248203 - DNA, 25 bp, Probe Sequence
gtcccagaacttagcctttacctgt

SEQ ID NO: 248204 - DNA, 25 bp, Probe Sequence
gtagcacaaagtttctctttactgc

SEQ ID NO: 248205 - DNA, 25 bp, Probe Sequence
gtacggcaagtatttcaagttgctg

SEQ ID NO: 248206 - DNA, 25 bp, Probe Sequence
gtacgatgaatgaatatttagtctg

SEQ ID NO: 248207 - DNA, 25 bp, Probe Sequence
gtacctgacaaattattggattcca

SEQ ID NO: 248208 - DNA, 25 bp, Probe Sequence
gtagcctggcaaaaacggcatttga

SEQ ID NO: 248209 - DNA, 25 bp, Probe Sequence
gtagcctggcaaaaacggcatttga

SEQ ID NO: 248210 - DNA, 25 bp, Probe Sequence
gtagagggagagtacaagcctttga

SEQ ID NO: 248211 - DNA, 25 bp, Probe Sequence
gtagaagctatatttcagacagttt

SEQ ID NO: 248212 - DNA, 25 bp, Probe Sequence
gtagatgtctttagtatactttgta

SEQ ID NO: 248213 - DNA, 25 bp, Probe Sequence
gtagatgtctgttagatttgcttgg

SEQ ID NO: 248214 - DNA, 25 bp, Probe Sequence
gtagctcacttgatgatggtgctgg

SEQ ID NO: 248215 - DNA, 25 bp, Probe Sequence
gtagctcacttgatgatggtgctgg

SEQ ID NO: 248216 - DNA, 25 bp, Probe Sequence
gtagctcacttgatgatggtgctgg

SEQ ID NO: 248217 - DNA, 25 bp, Probe Sequence
gtactactggatatctgactggagc

SEQ ID NO: 248218 - DNA, 25 bp, Probe Sequence
gtaccagatgggctgcgagtgcaag

SEQ ID NO: 248219 - DNA, 25 bp, Probe Sequence
gtagcagcaatgcagatttggtgaa

SEQ ID NO: 248220 - DNA, 25 bp, Probe Sequence
gtagcacacagcgacatcacatagt

SEQ ID NO: 248221 - DNA, 25 bp, Probe Sequence
gtagcatcttgctagacctagatga

SEQ ID NO: 248222 - DNA, 25 bp, Probe Sequence
gtagatgctctctactaccagagct

SEQ ID NO: 248223 - DNA, 25 bp, Probe Sequence
gtagcatgctctgttgattcacagt

SEQ ID NO: 248224 - DNA, 25 bp, Probe Sequence
gtagcatgccttacctacagcacta

SEQ ID NO: 248225 - DNA, 25 bp, Probe Sequence
gtagcagtttgagcattcggcttga

SEQ ID NO: 248226 - DNA, 25 bp, Probe Sequence
gtacagctatgaccacttaggccta

SEQ ID NO: 248227 - DNA, 25 bp, Probe Sequence
gtactgcttatggttgtaggattca

SEQ ID NO: 248228 - DNA, 25 bp, Probe Sequence
gtagctgcagtaggcattgctgggg

SEQ ID NO: 248229 - DNA, 25 bp, Probe Sequence
gtagcctcagcatcttgctaggagg

SEQ ID NO: 248230 - DNA, 25 bp, Probe Sequence
gtagctgtcagaggttaagactgtg

SEQ ID NO: 248231 - DNA, 25 bp, Probe Sequence
gtagcattttgagttcaagccttgg

SEQ ID NO: 248232 - DNA, 25 bp, Probe Sequence
gtagcattcataattacaaccattc

SEQ ID NO: 248233 - DNA, 25 bp, Probe Sequence
gtagagccacatttacaatacctca

SEQ ID NO: 248234 - DNA, 25 bp, Probe Sequence
gtagagccacatttacaatacctca

SEQ ID NO: 248235 - DNA, 25 bp, Probe Sequence
gtagacaactttaataatccatatt

SEQ ID NO: 248236 - DNA, 25 bp, Probe Sequence
gtagctcaagctagtaaaaccttgt

SEQ ID NO: 248237 - DNA, 25 bp, Probe Sequence
gtagccatacctaatagacctcctg

SEQ ID NO: 248238 - DNA, 25 bp, Probe Sequence
gtagcacatacctgtaatcccagct

SEQ ID NO: 248239 - DNA, 25 bp, Probe Sequence
gtagcacattcctatatttccagct

SEQ ID NO: 248240 - DNA, 25 bp, Probe Sequence
gtagagggtcgagtttcatcagatg

SEQ ID NO: 248241 - DNA, 25 bp, Probe Sequence
gtagatgatggtgagcagtttcaac

SEQ ID NO: 248242 - DNA, 25 bp, Probe Sequence
gtagcatctggttcagtgtttccct

SEQ ID NO: 248243 - DNA, 25 bp, Probe Sequence
gtactgggtacaagtggtccaaact

SEQ ID NO: 248244 - DNA, 25 bp, Probe Sequence
gtagctagagtacaggcgttcacta

SEQ ID NO: 248245 - DNA, 25 bp, Probe Sequence
gtagctggctgaagcttgggttcct

SEQ ID NO: 248246 - DNA, 25 bp, Probe Sequence
gtagagcactcaagtgtgggtttct

SEQ ID NO: 248247 - DNA, 25 bp, Probe Sequence
gtaccagtgcacagaggggtttgtc

SEQ ID NO: 248248 - DNA, 25 bp, Probe Sequence
gtaccatgtccaaagggaaccttgt

SEQ ID NO: 248249 - DNA, 25 bp, Probe Sequence
gtacttaccgaagcgaacgcagcct

SEQ ID NO: 248250 - DNA, 25 bp, Probe Sequence
gtacgtacactgaaccagaacaaca

SEQ ID NO: 248251 - DNA, 25 bp, Probe Sequence
gtaccagtactattccaataaacac

SEQ ID NO: 248252 - DNA, 25 bp, Probe Sequence
gtaccagtactattccaataaacac

SEQ ID NO: 248253 - DNA, 25 bp, Probe Sequence
gtaccaacagtatcacataccaaaa

SEQ ID NO: 248254 - DNA, 25 bp, Probe Sequence
gtaccagaattctcagagacaccat

SEQ ID NO: 248255 - DNA, 25 bp, Probe Sequence
gtaccagcatatctaaagtcacact

SEQ ID NO: 248256 - DNA, 25 bp, Probe Sequence
gtgatgctcagtgttcaaaaccaca

SEQ ID NO: 248257 - DNA, 25 bp, Probe Sequence
gtagccatgtgtgtaacaccccaca

SEQ ID NO: 248258 - DNA, 25 bp, Probe Sequence
gtaccattgctgaaaatagcttcgc

SEQ ID NO: 248259 - DNA, 25 bp, Probe Sequence
gtaaattctatggagtacatttcta

SEQ ID NO: 248260 - DNA, 25 bp, Probe Sequence
gtactactgtagaactgcaatttcc

SEQ ID NO: 248261 - DNA, 25 bp, Probe Sequence
gtagcttctgaaaggtgctttctcc

SEQ ID NO: 248262 - DNA, 25 bp, Probe Sequence
gtagccgtgatgtggtcatttgtcc

SEQ ID NO: 248263 - DNA, 25 bp, Probe Sequence
gtagcaggtggtggagcacatcttt

SEQ ID NO: 248264 - DNA, 25 bp, Probe Sequence
gtagacttggtctatgcagctcttc

SEQ ID NO: 248265 - DNA, 25 bp, Probe Sequence
gtagactatggatacactcctaata

SEQ ID NO: 248266 - DNA, 25 bp, Probe Sequence
gtagctctagttctcttcagtaaga

SEQ ID NO: 248267 - DNA, 25 bp, Probe Sequence
gtacgtatttttgcatgcagtgaaa

SEQ ID NO: 248268 - DNA, 25 bp, Probe Sequence
gtgaggaattttattggtggaactg

SEQ ID NO: 248269 - DNA, 25 bp, Probe Sequence
gtaaaaagcttgacctggggcaatt

SEQ ID NO: 248270 - DNA, 25 bp, Probe Sequence
gtacagttcgtatcctagaggttgt

SEQ ID NO: 248271 - DNA, 25 bp, Probe Sequence
gtacctttatactgggatggttgtg

SEQ ID NO: 248272 - DNA, 25 bp, Probe Sequence
gtaccattgtgtgcatgaggatcag

SEQ ID NO: 248273 - DNA, 25 bp, Probe Sequence
gtaccttctgctggaacagatagta

SEQ ID NO: 248274 - DNA, 25 bp, Probe Sequence
gtaccatccttccagatacaagtag

SEQ ID NO: 248275 - DNA, 25 bp, Probe Sequence
gtacctccttgactaagctggttcc

SEQ ID NO: 248276 - DNA, 25 bp, Probe Sequence
gtacctcctctgttcaatcatgggt

SEQ ID NO: 248277 - DNA, 25 bp, Probe Sequence
gtacggcgttgtacggtggatgtct

SEQ ID NO: 248278 - DNA, 25 bp, Probe Sequence
gtacctgctgtttacctacaattgc

SEQ ID NO: 248279 - DNA, 25 bp, Probe Sequence
gtcacctggatcctccagtaaagtg

SEQ ID NO: 248280 - DNA, 25 bp, Probe Sequence
gtacctggacatacacaattactgt

SEQ ID NO: 248281 - DNA, 25 bp, Probe Sequence
gtacctgaatcaacctttcagccta

SEQ ID NO: 248282 - DNA, 25 bp, Probe Sequence
gtaccttaaaccagtagctctcaaa

SEQ ID NO: 248283 - DNA, 25 bp, Probe Sequence
gtaccttaataccaataacctaatg

SEQ ID NO: 248284 - DNA, 25 bp, Probe Sequence
gtacctgtaatgagaaacagtaaag

SEQ ID NO: 248285 - DNA, 25 bp, Probe Sequence
gtaccctaatgaatgacagacttgg

SEQ ID NO: 248286 - DNA, 25 bp, Probe Sequence
gtactcctggtattgcaagtcattt

SEQ ID NO: 248287 - DNA, 25 bp, Probe Sequence
gtactaccagtattcataaatgtat

SEQ ID NO: 248288 - DNA, 25 bp, Probe Sequence
gtagccctaggctatagaagtgttc

SEQ ID NO: 248289 - DNA, 25 bp, Probe Sequence
gtagctctttgtcagggagtgttcc

SEQ ID NO: 248290 - DNA, 25 bp, Probe Sequence
gtacatctaccgcgggagatttccc

SEQ ID NO: 248291 - DNA, 25 bp, Probe Sequence
gtagacggcttgagggacttgcccc

SEQ ID NO: 248292 - DNA, 25 bp, Probe Sequence
gtagacagacttgggtggcaattcc

SEQ ID NO: 248293 - DNA, 25 bp, Probe Sequence
gtagagagacgctgggtgacctgcc

SEQ ID NO: 248294 - DNA, 25 bp, Probe Sequence
gtacaggacgtctggtgaccattga

SEQ ID NO: 248295 - DNA, 25 bp, Probe Sequence
gtagcaagagccataggtagcctta

SEQ ID NO: 248296 - DNA, 25 bp, Probe Sequence
gtagcaaggcacatatagaagaaga

SEQ ID NO: 248297 - DNA, 25 bp, Probe Sequence
gtacaagtacggaagtagtagcaac

SEQ ID NO: 248298 - DNA, 25 bp, Probe Sequence
gtagcaagtatgtgggtcagcttaa

SEQ ID NO: 248299 - DNA, 25 bp, Probe Sequence
gtactggttgtaggcgtagctgcac

SEQ ID NO: 248300 - DNA, 25 bp, Probe Sequence
gtactgcgtgggcagctggagccca

SEQ ID NO: 248301 - DNA, 25 bp, Probe Sequence
gtacgagtgaggcctgtgagagctg

SEQ ID NO: 248302 - DNA, 25 bp, Probe Sequence
gtacgtgccaagggtaagctggcct

SEQ ID NO: 248303 - DNA, 25 bp, Probe Sequence
gtactgagtcttctgtaacttcact

SEQ ID NO: 248304 - DNA, 25 bp, Probe Sequence
gtactagtctgtgtgggactgtaca

SEQ ID NO: 248305 - DNA, 25 bp, Probe Sequence
gtagaagacatttgtgggactctgg

SEQ ID NO: 248306 - DNA, 25 bp, Probe Sequence
gtagaaaatctgctggaatggttgt

SEQ ID NO: 248307 - DNA, 25 bp, Probe Sequence
gtagcaaaacgcatggagtgtgtat

SEQ ID NO: 248308 - DNA, 25 bp, Probe Sequence
gtactataggccaagtcaatttact

SEQ ID NO: 248309 - DNA, 25 bp, Probe Sequence
gtacttacacacaagtcaacattgt

SEQ ID NO: 248310 - DNA, 25 bp, Probe Sequence
gtactctgcatgccacaagtgagaa

SEQ ID NO: 248311 - DNA, 25 bp, Probe Sequence
gtagcactgataaccaggagaagcc

SEQ ID NO: 248312 - DNA, 25 bp, Probe Sequence
gtacgtgatatacagggtcagggct

SEQ ID NO: 248313 - DNA, 25 bp, Probe Sequence
gtaaggaaggacccagtaggaggct

SEQ ID NO: 248314 - DNA, 25 bp, Probe Sequence
gtcactggggcttcccaggaggcag

SEQ ID NO: 248315 - DNA, 25 bp, Probe Sequence
gtacggggacagcggggagcagatt

SEQ ID NO: 248316 - DNA, 25 bp, Probe Sequence
gtacgtggagaagtgggaatgcaaa

SEQ ID NO: 248317 - DNA, 25 bp, Probe Sequence
gtactgatgggctaggtagttcaat

SEQ ID NO: 248318 - DNA, 25 bp, Probe Sequence
gtaaaggcagccgaggaatccaatg

SEQ ID NO: 248319 - DNA, 25 bp, Probe Sequence
gtacaaggaccaggccgacaaggca

SEQ ID NO: 248320 - DNA, 25 bp, Probe Sequence
gtacgaatacacgggcgtcaatgaa

SEQ ID NO: 248321 - DNA, 25 bp, Probe Sequence
gtagctgagtatactggtttaagaa

SEQ ID NO: 248322 - DNA, 25 bp, Probe Sequence
gtagctgcagataagtggccttgac

SEQ ID NO: 248323 - DNA, 25 bp, Probe Sequence
gtagctgagttactgcccagaggct

SEQ ID NO: 248324 - DNA, 25 bp, Probe Sequence
gtacatgtttacgggaggcgcttgg

SEQ ID NO: 248325 - DNA, 25 bp, Probe Sequence
gtacatggccccggagttagtggag

SEQ ID NO: 248326 - DNA, 25 bp, Probe Sequence
gtactcaccttagggattcatttga

SEQ ID NO: 248327 - DNA, 25 bp, Probe Sequence
gtacgcagcctgttggttgtatggg

SEQ ID NO: 248328 - DNA, 25 bp, Probe Sequence
gtagccaccgttagctgtgaatagt

SEQ ID NO: 248329 - DNA, 25 bp, Probe Sequence
gtactatctgcgaaatggagaacgt

SEQ ID NO: 248330 - DNA, 25 bp, Probe Sequence
gtagcatgactggatttgagatgaa

SEQ ID NO: 248331 - DNA, 25 bp, Probe Sequence
gtagcagtagcagtttgagcattcg

SEQ ID NO: 248332 - DNA, 25 bp, Probe Sequence
gtagcagcaaagtgtacagtctgaa

SEQ ID NO: 248333 - DNA, 25 bp, Probe Sequence
gtaccatatagctgtcaacttaaat

SEQ ID NO: 248334 - DNA, 25 bp, Probe Sequence
gtaacacatggctgctcacagcagc

SEQ ID NO: 248335 - DNA, 25 bp, Probe Sequence
gtacaacctgtactcatcagagggc

SEQ ID NO: 248336 - DNA, 25 bp, Probe Sequence
gtaccacacgtccaaagttagattt

SEQ ID NO: 248337 - DNA, 25 bp, Probe Sequence
gtaccaagccatgtaatggtaactt

SEQ ID NO: 248338 - DNA, 25 bp, Probe Sequence
gtaaagaccatttagtcctcacctt

SEQ ID NO: 248339 - DNA, 25 bp, Probe Sequence
gtaacgcccataagggactgtccat

SEQ ID NO: 248340 - DNA, 25 bp, Probe Sequence
gtagacatcgtctacacggactgta

SEQ ID NO: 248341 - DNA, 25 bp, Probe Sequence
gtagcagtatgggacaaggcttgta

SEQ ID NO: 248342 - DNA, 25 bp, Probe Sequence
gtacagacatatccacaaggtcgta

SEQ ID NO: 248343 - DNA, 25 bp, Probe Sequence
gtagccagtatgctcaaggctgtga

SEQ ID NO: 248344 - DNA, 25 bp, Probe Sequence
gtacatcaaacttagaggtgtgacc

SEQ ID NO: 248345 - DNA, 25 bp, Probe Sequence
gtacactcgtcttgaataggctaaa

SEQ ID NO: 248346 - DNA, 25 bp, Probe Sequence
gtaccaagtgcttttgagtcacaaa

SEQ ID NO: 248347 - DNA, 25 bp, Probe Sequence
gtaccagtgctggtttgctgtgaaa

SEQ ID NO: 248348 - DNA, 25 bp, Probe Sequence
gtactcggtggctttgctcatgaac

SEQ ID NO: 248349 - DNA, 25 bp, Probe Sequence
gtacttgctgggtcttgccaagatc

SEQ ID NO: 248350 - DNA, 25 bp, Probe Sequence
gtacctgcggaaccggagcaagctg

SEQ ID NO: 248351 - DNA, 25 bp, Probe Sequence
gtacgtgggaaaggtggaatgtgca

SEQ ID NO: 248352 - DNA, 25 bp, Probe Sequence
gtacggggagaggcgatgctattgg

SEQ ID NO: 248353 - DNA, 25 bp, Probe Sequence
gtactgtgttggtccagatgtaggt

SEQ ID NO: 248354 - DNA, 25 bp, Probe Sequence
gtaccagcctcgacacaatgtcatg

SEQ ID NO: 248355 - DNA, 25 bp, Probe Sequence
gtaacctccgaggctatggcatggc

SEQ ID NO: 248356 - DNA, 25 bp, Probe Sequence
gtagcatcttgccgggttgtggctc

SEQ ID NO: 248357 - DNA, 25 bp, Probe Sequence
gtacttctggagctattgcggtcaa

SEQ ID NO: 248358 - DNA, 25 bp, Probe Sequence
gtacctgtagacaaatttagtcaaa

SEQ ID NO: 248359 - DNA, 25 bp, Probe Sequence
gtagccttcagtgagatttccatct

SEQ ID NO: 248360 - DNA, 25 bp, Probe Sequence
gtagccttgaataatgtgtatctca

SEQ ID NO: 248361 - DNA, 25 bp, Probe Sequence
gtagcctctgtccttgtaagtcagt

SEQ ID NO: 248362 - DNA, 25 bp, Probe Sequence
gtagctctttctctgttggttatat

SEQ ID NO: 248363 - DNA, 25 bp, Probe Sequence
gtagcttttggttgtattgatttta

SEQ ID NO: 248364 - DNA, 25 bp, Probe Sequence
gtactttgggaaatgactccatttc

SEQ ID NO: 248365 - DNA, 25 bp, Probe Sequence
gtactgtggggactatgagctcttc

SEQ ID NO: 248366 - DNA, 25 bp, Probe Sequence
gtacttgctgggacggattcttgcg

SEQ ID NO: 248367 - DNA, 25 bp, Probe Sequence
gtacattcaggcaccagcatattcc

SEQ ID NO: 248368 - DNA, 25 bp, Probe Sequence
gtacatctgagcatcccaaaacctc

SEQ ID NO: 248369 - DNA, 25 bp, Probe Sequence
gtacctggttcctaaactcagcttg

SEQ ID NO: 248370 - DNA, 25 bp, Probe Sequence
gtcactccgaggtcaaaacctgctc

SEQ ID NO: 248371 - DNA, 25 bp, Probe Sequence
gtactccgtggaaggatcctcatcc

SEQ ID NO: 248372 - DNA, 25 bp, Probe Sequence
gtactccagcttgggagatactccc

SEQ ID NO: 248373 - DNA, 25 bp, Probe Sequence
gtagcctcactggagggcattgccc

SEQ ID NO: 248374 - DNA, 25 bp, Probe Sequence
gtaccacatctgggagacatgccac

SEQ ID NO: 248375 - DNA, 25 bp, Probe Sequence
gtacgcactggaagatatcgctcta

SEQ ID NO: 248376 - DNA, 25 bp, Probe Sequence
gtactacgaaaattcctatgcctta

SEQ ID NO: 248377 - DNA, 25 bp, Probe Sequence
gtactaacaagtctccttgcagctt

SEQ ID NO: 248378 - DNA, 25 bp, Probe Sequence
gtactgaaatatactgtcccaggct

SEQ ID NO: 248379 - DNA, 25 bp, Probe Sequence
gtactaaattatgttcctgccaagt

SEQ ID NO: 248380 - DNA, 25 bp, Probe Sequence
gtactgaaaacagtctacctgtcag

SEQ ID NO: 248381 - DNA, 25 bp, Probe Sequence
gtacaaaagcagcctgtaccgtccg

SEQ ID NO: 248382 - DNA, 25 bp, Probe Sequence
gtagcaataatttctgtacctgatc

SEQ ID NO: 248383 - DNA, 25 bp, Probe Sequence
gtagcttacagttccaaccagatca

SEQ ID NO: 248384 - DNA, 25 bp, Probe Sequence
gtactaaggtgctcagtccttgcaa

SEQ ID NO: 248385 - DNA, 25 bp, Probe Sequence
gtacatccaggttgtctaccttcat

SEQ ID NO: 248386 - DNA, 25 bp, Probe Sequence
gtacatccaggttgtctaccttcat

SEQ ID NO: 248387 - DNA, 25 bp, Probe Sequence
gtacatccaggttgtctaccttcat

SEQ ID NO: 248388 - DNA, 25 bp, Probe Sequence
gtacacaggagtgccatagccttga

SEQ ID NO: 248389 - DNA, 25 bp, Probe Sequence
gtacgaagcagagcctgagcctgag

SEQ ID NO: 248390 - DNA, 25 bp, Probe Sequence
gtacgaaggcggagagcctgatgat

SEQ ID NO: 248391 - DNA, 25 bp, Probe Sequence
gtactaaggaagactgatccgcgat

SEQ ID NO: 248392 - DNA, 25 bp, Probe Sequence
gtagctaaggagttccatctggaat

SEQ ID NO: 248393 - DNA, 25 bp, Probe Sequence
gtactcagagggcaccactggataa

SEQ ID NO: 248394 - DNA, 25 bp, Probe Sequence
gtactcagccggcagcataatgaaa

SEQ ID NO: 248395 - DNA, 25 bp, Probe Sequence
gtactcatccctgggcatatgtgta

SEQ ID NO: 248396 - DNA, 25 bp, Probe Sequence
gtacatcttgccgtgcacattttga

SEQ ID NO: 248397 - DNA, 25 bp, Probe Sequence
gtagcatctacatttacttaaagga

SEQ ID NO: 248398 - DNA, 25 bp, Probe Sequence
gtacctacttcttcaatgtacagaa

SEQ ID NO: 248399 - DNA, 25 bp, Probe Sequence
gtagcttatttcatagatataccaa

SEQ ID NO: 248400 - DNA, 25 bp, Probe Sequence
gtagcagtgttgcccgagattgacc

SEQ ID NO: 248401 - DNA, 25 bp, Probe Sequence
gtagcagtgtatgctctcatataca

SEQ ID NO: 248402 - DNA, 25 bp, Probe Sequence
gtagcagggacctataaggccacct

SEQ ID NO: 248403 - DNA, 25 bp, Probe Sequence
gtacttctaccattaaggtgaaatc

SEQ ID NO: 248404 - DNA, 25 bp, Probe Sequence
gtaccctcacatacaaagggatcaa

SEQ ID NO: 248405 - DNA, 25 bp, Probe Sequence
gtagctactccaccacggaagagaa

SEQ ID NO: 248406 - DNA, 25 bp, Probe Sequence
gtacaattcatacctcggaaggcat

SEQ ID NO: 248407 - DNA, 25 bp, Probe Sequence
gtactgcaacatttgatgggacggc

SEQ ID NO: 248408 - DNA, 25 bp, Probe Sequence
gtagccacacaattgtggtaggagc

SEQ ID NO: 248409 - DNA, 25 bp, Probe Sequence
gtaccacccaattatctatggcagc

SEQ ID NO: 248410 - DNA, 25 bp, Probe Sequence
gtacacacccaggtcctggagctgc

SEQ ID NO: 248411 - DNA, 25 bp, Probe Sequence
gtacccattctgtttcaggagctct

SEQ ID NO: 248412 - DNA, 25 bp, Probe Sequence
gtacccattctgtttcaggagctct

SEQ ID NO: 248413 - DNA, 25 bp, Probe Sequence
gtagcctcttgctgtctaaggtctc

SEQ ID NO: 248414 - DNA, 25 bp, Probe Sequence
gtacttgttgatctctgaatagctc

SEQ ID NO: 248415 - DNA, 25 bp, Probe Sequence
gtacttgttgatctctgaatagctc

SEQ ID NO: 248416 - DNA, 25 bp, Probe Sequence
gtacttgttgatctctgaatagctc

SEQ ID NO: 248417 - DNA, 25 bp, Probe Sequence
gtacctgttgttctacgagtcaaga

SEQ ID NO: 248418 - DNA, 25 bp, Probe Sequence
gtactcagttgaattaaccattaaa

SEQ ID NO: 248419 - DNA, 25 bp, Probe Sequence
gtacgcggtgtttgaaacagctacg

SEQ ID NO: 248420 - DNA, 25 bp, Probe Sequence
gtagccggattatgaaatgcacgac

SEQ ID NO: 248421 - DNA, 25 bp, Probe Sequence
gtactttttcaacaagcacgaccat

SEQ ID NO: 248422 - DNA, 25 bp, Probe Sequence
gtgactatatttaccaaagccccta

SEQ ID NO: 248423 - DNA, 25 bp, Probe Sequence
ggaaatacctaagaagcaccttaag

SEQ ID NO: 248424 - DNA, 25 bp, Probe Sequence
ggaaactccaaagaagcattttcta

SEQ ID NO: 248425 - DNA, 25 bp, Probe Sequence
gtctcccccaaagaaccatgtatta

SEQ ID NO: 248426 - DNA, 25 bp, Probe Sequence
gtaaccgacaaagacaccttcgaat

SEQ ID NO: 248427 - DNA, 25 bp, Probe Sequence
gtacctttcaagataccaattaaat

SEQ ID NO: 248428 - DNA, 25 bp, Probe Sequence
gtaccgttcaatcaaccaattagca

SEQ ID NO: 248429 - DNA, 25 bp, Probe Sequence
gtagccagttaaccaagactcattc

SEQ ID NO: 248430 - DNA, 25 bp, Probe Sequence
gtagcctatctatggaagagacttt

SEQ ID NO: 248431 - DNA, 25 bp, Probe Sequence
gtagcctatcatcagattccagagc

SEQ ID NO: 248432 - DNA, 25 bp, Probe Sequence
gtacgtgatatgtaacactgaggcc

SEQ ID NO: 248433 - DNA, 25 bp, Probe Sequence
gtaccatttgaaccacatatcccac

SEQ ID NO: 248434 - DNA, 25 bp, Probe Sequence
gtaccctgtctgactacaacatcca

SEQ ID NO: 248435 - DNA, 25 bp, Probe Sequence
gtacctcgactacaatagcatcgag

SEQ ID NO: 248436 - DNA, 25 bp, Probe Sequence
gtacctcaacaacaatagcatcgag

SEQ ID NO: 248437 - DNA, 25 bp, Probe Sequence
gtacccatagtaataattgcatcaa

SEQ ID NO: 248438 - DNA, 25 bp, Probe Sequence
gtagcctgaatgtcttactgtgatc

SEQ ID NO: 248439 - DNA, 25 bp, Probe Sequence
gtagccatgtattctgacttgccat

SEQ ID NO: 248440 - DNA, 25 bp, Probe Sequence
gtagctcagtatttgagtgctcata

SEQ ID NO: 248441 - DNA, 25 bp, Probe Sequence
gtacatagtacataggtgatcaatt

SEQ ID NO: 248442 - DNA, 25 bp, Probe Sequence
gtagcctgtacagcgaggataagct

SEQ ID NO: 248443 - DNA, 25 bp, Probe Sequence
gtagccctgcctacttggaaagttg

SEQ ID NO: 248444 - DNA, 25 bp, Probe Sequence
gtacaggctgcccagttaaacatga

SEQ ID NO: 248445 - DNA, 25 bp, Probe Sequence
gtaagtctcgctcttgccaaagaaa

SEQ ID NO: 248446 - DNA, 25 bp, Probe Sequence
gtacctgctctcaaattgaaaaaaa

SEQ ID NO: 248447 - DNA, 25 bp, Probe Sequence
gtacttcattcaaaaagccaaaata

SEQ ID NO: 248448 - DNA, 25 bp, Probe Sequence
gtcacctgcaaaaaataccataagt

SEQ ID NO: 248449 - DNA, 25 bp, Probe Sequence
gtactcggagatcaagatccacaga

SEQ ID NO: 248450 - DNA, 25 bp, Probe Sequence
gtaccaggaatcggagtcaacggaa

SEQ ID NO: 248451 - DNA, 25 bp, Probe Sequence
gtagccaagcagagttgtagagggg

SEQ ID NO: 248452 - DNA, 25 bp, Probe Sequence
gtaccagaagcaaggtctcagactt

SEQ ID NO: 248453 - DNA, 25 bp, Probe Sequence
gtaccatcatacaactgtctcacat

SEQ ID NO: 248454 - DNA, 25 bp, Probe Sequence
gtacccgtcacagttttcatagtgc

SEQ ID NO: 248455 - DNA, 25 bp, Probe Sequence
gtaccttgtgtctctttcaagtgcc

SEQ ID NO: 248456 - DNA, 25 bp, Probe Sequence
gtagccttgttaaccctcagaggcc

SEQ ID NO: 248457 - DNA, 25 bp, Probe Sequence
gtaccctttactacactcatgagtg

SEQ ID NO: 248458 - DNA, 25 bp, Probe Sequence
gtaccctttactactctcagggaca

SEQ ID NO: 248459 - DNA, 25 bp, Probe Sequence
gtaccactttgattttcttggaata

SEQ ID NO: 248460 - DNA, 25 bp, Probe Sequence
gtactgcactttgtttttccaagga

SEQ ID NO: 248461 - DNA, 25 bp, Probe Sequence
gtactgacaatctgtgttttccagg

SEQ ID NO: 248462 - DNA, 25 bp, Probe Sequence
gtactgtaatgcttgtatgtataaa

SEQ ID NO: 248463 - DNA, 25 bp, Probe Sequence
gtacgagaagctacctgtgaaagag

SEQ ID NO: 248464 - DNA, 25 bp, Probe Sequence
gtacttcaatgggcttgatacggtt

SEQ ID NO: 248465 - DNA, 25 bp, Probe Sequence
gtcaccctaggaagtgaaggattct

SEQ ID NO: 248466 - DNA, 25 bp, Probe Sequence
gtaccaaagtcaactgcacgtgttt

SEQ ID NO: 248467 - DNA, 25 bp, Probe Sequence
gtacctacagatatgtgcacgttgc

SEQ ID NO: 248468 - DNA, 25 bp, Probe Sequence
gtaccacacagatgttcctgtctcc

SEQ ID NO: 248469 - DNA, 25 bp, Probe Sequence
gtagcccataacatttatgctctgc

SEQ ID NO: 248470 - DNA, 25 bp, Probe Sequence
gtggccgaataccttaacggggctg

SEQ ID NO: 248471 - DNA, 25 bp, Probe Sequence
gtaccatagaaccttagtcgggact

SEQ ID NO: 248472 - DNA, 25 bp, Probe Sequence
gtaacaaaactaaagcatgggcaac

SEQ ID NO: 248473 - DNA, 25 bp, Probe Sequence
gtaaaggcccgggagcggctagagc

SEQ ID NO: 248474 - DNA, 25 bp, Probe Sequence
tccatatggacccaggtcggtttac

SEQ ID NO: 248475 - DNA, 25 bp, Probe Sequence
tcgacaggaccgagtccctaaaccg

SEQ ID NO: 248476 - DNA, 25 bp, Probe Sequence
tccaagtgacccagggcctgacaaa

SEQ ID NO: 248477 - DNA, 25 bp, Probe Sequence
tgccgattccctaagggttacgcca

SEQ ID NO: 248478 - DNA, 25 bp, Probe Sequence
gtcctgggactgagggttactccag

SEQ ID NO: 248479 - DNA, 25 bp, Probe Sequence
gtaccaggactgaggtcatttctac

SEQ ID NO: 248480 - DNA, 25 bp, Probe Sequence
gtaccagcaaggagactttggttac

SEQ ID NO: 248481 - DNA, 25 bp, Probe Sequence
gtacctgaaggtggacttcgcagac

SEQ ID NO: 248482 - DNA, 25 bp, Probe Sequence
gtacgcgtatttcactgtcagaggc

SEQ ID NO: 248483 - DNA, 25 bp, Probe Sequence
gtacttgtagttccacttatagcct

SEQ ID NO: 248484 - DNA, 25 bp, Probe Sequence
gtaccttgagttgagtattacacat

SEQ ID NO: 248485 - DNA, 25 bp, Probe Sequence
gtaccttggtggtgtttaatcaaca

SEQ ID NO: 248486 - DNA, 25 bp, Probe Sequence
gtacgaccaggagcgttttgataac

SEQ ID NO: 248487 - DNA, 25 bp, Probe Sequence
gtaccaccaggtccgtgtttatgat

SEQ ID NO: 248488 - DNA, 25 bp, Probe Sequence
gtagccataccgtttgattgtttga

SEQ ID NO: 248489 - DNA, 25 bp, Probe Sequence
gtaccatactggtctttgcttttag

SEQ ID NO: 248490 - DNA, 25 bp, Probe Sequence
gtacaatagtgcatcttccactttc

SEQ ID NO: 248491 - DNA, 25 bp, Probe Sequence
gtacctcaggtaataccagctttag

SEQ ID NO: 248492 - DNA, 25 bp, Probe Sequence
gtacccttgataaaccatctctaga

SEQ ID NO: 248493 - DNA, 25 bp, Probe Sequence
gtacctttgagaacttcctaggaag

SEQ ID NO: 248494 - DNA, 25 bp, Probe Sequence
gtacctttgtggattcttacatgag

SEQ ID NO: 248495 - DNA, 25 bp, Probe Sequence
gtctactacggcagttttacacatg

SEQ ID NO: 248496 - DNA, 25 bp, Probe Sequence
gtcattctaacgggtatgattacag

SEQ ID NO: 248497 - DNA, 25 bp, Probe Sequence
gtcatcctaacccaaggcataactg

SEQ ID NO: 248498 - DNA, 25 bp, Probe Sequence
gtcactcttactgcacagacttatc

SEQ ID NO: 248499 - DNA, 25 bp, Probe Sequence
gtcactcttactgcacagacttatc

SEQ ID NO: 248500 - DNA, 25 bp, Probe Sequence
gtacttgaactggcaggaaatgcat

SEQ ID NO: 248501 - DNA, 25 bp, Probe Sequence
gtacttggcctgtatataatggcat

SEQ ID NO: 248502 - DNA, 25 bp, Probe Sequence
gtacctgaccagtattagttgcata

SEQ ID NO: 248503 - DNA, 25 bp, Probe Sequence
gtagcctgactctgagatcagttta

SEQ ID NO: 248504 - DNA, 25 bp, Probe Sequence
gtaccatgcctcagaaaatgttatt

SEQ ID NO: 248505 - DNA, 25 bp, Probe Sequence
gtaccatgcctcagaaaatgttatt

SEQ ID NO: 248506 - DNA, 25 bp, Probe Sequence
gtaccatctgatgctggaagttttg

SEQ ID NO: 248507 - DNA, 25 bp, Probe Sequence
gtacttcattcgagatgagtttctg

SEQ ID NO: 248508 - DNA, 25 bp, Probe Sequence
gtaattaccgtattagtatcgccta

SEQ ID NO: 248509 - DNA, 25 bp, Probe Sequence
gtacatgtacgtattagtcatcgct

SEQ ID NO: 248510 - DNA, 25 bp, Probe Sequence
gtacatctacgtattagtcatcgct

SEQ ID NO: 248511 - DNA, 25 bp, Probe Sequence
gtacatctacgtattagtcatcgct

SEQ ID NO: 248512 - DNA, 25 bp, Probe Sequence
gtacatctacgtattagtcatcgct

SEQ ID NO: 248513 - DNA, 25 bp, Probe Sequence
gtacatctacgtattagtcatcgct

SEQ ID NO: 248514 - DNA, 25 bp, Probe Sequence
gtacatctacgtattagtcatcgct

SEQ ID NO: 248515 - DNA, 25 bp, Probe Sequence
gtacatctacgtattagtcatcgct

SEQ ID NO: 248516 - DNA, 25 bp, Probe Sequence
gtacatctacgtattagtcatcgct

SEQ ID NO: 248517 - DNA, 25 bp, Probe Sequence
gtacatctacgtattagtcatcgct

SEQ ID NO: 248518 - DNA, 25 bp, Probe Sequence
gtacatctacgtattagtcatcgct

SEQ ID NO: 248519 - DNA, 25 bp, Probe Sequence
gtacatctacgtattagtcatcgct

SEQ ID NO: 248520 - DNA, 25 bp, Probe Sequence
gtacatctacgtattagtcatcgct

SEQ ID NO: 248521 - DNA, 25 bp, Probe Sequence
gtacatctacgtattagtcatcgct

SEQ ID NO: 248522 - DNA, 25 bp, Probe Sequence
gtacatctacgtattagtcatcgct

SEQ ID NO: 248523 - DNA, 25 bp, Probe Sequence
gtacatctacgtattagtcatcgct

SEQ ID NO: 248524 - DNA, 25 bp, Probe Sequence
gtacatctacgtattagtcatcgct

SEQ ID NO: 248525 - DNA, 25 bp, Probe Sequence
gtacatctacgtattagtcatcgct

SEQ ID NO: 248526 - DNA, 25 bp, Probe Sequence
gtacatctacgtattagtcatcgct

SEQ ID NO: 248527 - DNA, 25 bp, Probe Sequence
gtacatctacgtattagtcatcgct

SEQ ID NO: 248528 - DNA, 25 bp, Probe Sequence
gtacatctacgtattagtcatcgct

SEQ ID NO: 248529 - DNA, 25 bp, Probe Sequence
gtacatctacgtattagtcatcgct

SEQ ID NO: 248530 - DNA, 25 bp, Probe Sequence
gtacatctacgtattagtcatcgct

SEQ ID NO: 248531 - DNA, 25 bp, Probe Sequence
gtacatctacgtattagtcatcgct

SEQ ID NO: 248532 - DNA, 25 bp, Probe Sequence
gtacatctacgtattagtcatcgct

SEQ ID NO: 248533 - DNA, 25 bp, Probe Sequence
gtacatctacgtattagtcatcgct

SEQ ID NO: 248534 - DNA, 25 bp, Probe Sequence
gtacatctacgtattagtcatcgct

SEQ ID NO: 248535 - DNA, 25 bp, Probe Sequence
gtacatctacgtattagtcatcgct

SEQ ID NO: 248536 - DNA, 25 bp, Probe Sequence
gtacatctacgtattagtcatcgct

SEQ ID NO: 248537 - DNA, 25 bp, Probe Sequence
gtacatctacgtattagtcatcgct

SEQ ID NO: 248538 - DNA, 25 bp, Probe Sequence
gtacatctacgtattagtcatcgct

SEQ ID NO: 248539 - DNA, 25 bp, Probe Sequence
gtacatctacgtattagtcatcgct

SEQ ID NO: 248540 - DNA, 25 bp, Probe Sequence
gtacatctacgtattagtcatcgct

SEQ ID NO: 248541 - DNA, 25 bp, Probe Sequence
gtacatctacgtattagtcatcgct

SEQ ID NO: 248542 - DNA, 25 bp, Probe Sequence
gtacatctacgtattagtcatcgct

SEQ ID NO: 248543 - DNA, 25 bp, Probe Sequence
gtacatctacgtattagtcatcgct

SEQ ID NO: 248544 - DNA, 25 bp, Probe Sequence
gtacatctacgtattagtcatcgct

SEQ ID NO: 248545 - DNA, 25 bp, Probe Sequence
gtacatctacgtattagtcatcgct

SEQ ID NO: 248546 - DNA, 25 bp, Probe Sequence
gtacatctacgtattagtcatcgct

SEQ ID NO: 248547 - DNA, 25 bp, Probe Sequence
gtacatctacgtattagtcatcgct

SEQ ID NO: 248548 - DNA, 25 bp, Probe Sequence
gtacatctacgtattagtcatcgct

SEQ ID NO: 248549 - DNA, 25 bp, Probe Sequence
gtacatctacgtattagtcatcgct

SEQ ID NO: 248550 - DNA, 25 bp, Probe Sequence
gtacatctacgtattagtcatcgct

SEQ ID NO: 248551 - DNA, 25 bp, Probe Sequence
gtacatctacgtattagtcatcgct

SEQ ID NO: 248552 - DNA, 25 bp, Probe Sequence
gtacatctacgtattagtcatcgct

SEQ ID NO: 248553 - DNA, 25 bp, Probe Sequence
gtacatctacgtattagtcatcgct

SEQ ID NO: 248554 - DNA, 25 bp, Probe Sequence
gtacatctacgtattagtcatcgct

SEQ ID NO: 248555 - DNA, 25 bp, Probe Sequence
gtacatctacgtattagtcatcgct

SEQ ID NO: 248556 - DNA, 25 bp, Probe Sequence
gtacatctacgtattagtcatcgct

SEQ ID NO: 248557 - DNA, 25 bp, Probe Sequence
gtacatctacgtattagtcatcgct

SEQ ID NO: 248558 - DNA, 25 bp, Probe Sequence
gtacatctacgtattagtcatcgct

SEQ ID NO: 248559 - DNA, 25 bp, Probe Sequence
gtacatctacgtattagtcatcgct

SEQ ID NO: 248560 - DNA, 25 bp, Probe Sequence
gtacatctacgtattagtcatccgc

SEQ ID NO: 248561 - DNA, 25 bp, Probe Sequence
gtacatctacgtatttagtcatcgc

SEQ ID NO: 248562 - DNA, 25 bp, Probe Sequence
gtacatctacgtatttagtcatcgc

SEQ ID NO: 248563 - DNA, 25 bp, Probe Sequence
gtactataccatgctttcagatctg

SEQ ID NO: 248564 - DNA, 25 bp, Probe Sequence
gtactctagcctgggtgacagagcg

SEQ ID NO: 248565 - DNA, 25 bp, Probe Sequence
gtactctactcggcagtgcaagggc

SEQ ID NO: 248566 - DNA, 25 bp, Probe Sequence
gtacgcagcctgcgagtgcaaggcc

SEQ ID NO: 248567 - DNA, 25 bp, Probe Sequence
gtaccgctctgcagcaagagagtac

SEQ ID NO: 248568 - DNA, 25 bp, Probe Sequence
gtacctctcgtaacacagcaataca

SEQ ID NO: 248569 - DNA, 25 bp, Probe Sequence
gtacatccctgaaactgagcacatt

SEQ ID NO: 248570 - DNA, 25 bp, Probe Sequence
gtacaggactaggaatggcacattt

SEQ ID NO: 248571 - DNA, 25 bp, Probe Sequence
gtacagagacgctcaaagcttttcc

SEQ ID NO: 248572 - DNA, 25 bp, Probe Sequence
gtactctgatccacaaagctctttt

SEQ ID NO: 248573 - DNA, 25 bp, Probe Sequence
gtaccatgtgccacaactgctgtgg

SEQ ID NO: 248574 - DNA, 25 bp, Probe Sequence
gtactctgtgcatgaaaatcaggga

SEQ ID NO: 248575 - DNA, 25 bp, Probe Sequence
gtacttctacagagatcctgaagag

SEQ ID NO: 248576 - DNA, 25 bp, Probe Sequence
gtacttctacagagatcctgaagag

SEQ ID NO: 248577 - DNA, 25 bp, Probe Sequence
gtactgaccaacatatctcatgaat

SEQ ID NO: 248578 - DNA, 25 bp, Probe Sequence
gtaccagcccaggatgagctcattt

SEQ ID NO: 248579 - DNA, 25 bp, Probe Sequence
gtaccagcacaatttgagcattccc

SEQ ID NO: 248580 - DNA, 25 bp, Probe Sequence
gtactccagtgattctgagagcccc

SEQ ID NO: 248581 - DNA, 25 bp, Probe Sequence
gtactcgcatgttcaatcaggtcca

SEQ ID NO: 248582 - DNA, 25 bp, Probe Sequence
gtacctgcagcttctgcagagggcc

SEQ ID NO: 248583 - DNA, 25 bp, Probe Sequence
gtactctgccttggagcagagcacc

SEQ ID NO: 248584 - DNA, 25 bp, Probe Sequence
gtactgcgacctggcacagtgccag

SEQ ID NO: 248585 - DNA, 25 bp, Probe Sequence
gtactcgacctgtaccagcgagggc

SEQ ID NO: 248586 - DNA, 25 bp, Probe Sequence
gtacccagacatgcccactgaaggc

SEQ ID NO: 248587 - DNA, 25 bp, Probe Sequence
gtactccagaggtgccactggtgga

SEQ ID NO: 248588 - DNA, 25 bp, Probe Sequence
gtacgcaaagagaaccagtggtgtg

SEQ ID NO: 248589 - DNA, 25 bp, Probe Sequence
gtacgctgaaagatacagaggaggt

SEQ ID NO: 248590 - DNA, 25 bp, Probe Sequence
gtacttgaaatatcaagacaattgc

SEQ ID NO: 248591 - DNA, 25 bp, Probe Sequence
gtacctgcagaataataaagtcatc

SEQ ID NO: 248592 - DNA, 25 bp, Probe Sequence
gtacctgcagaataataaagtcatc

SEQ ID NO: 248593 - DNA, 25 bp, Probe Sequence
gtacgtggacactataaaggtcagc

SEQ ID NO: 248594 - DNA, 25 bp, Probe Sequence
gtaccagtaccaataacagtgccag

SEQ ID NO: 248595 - DNA, 25 bp, Probe Sequence
gtactcagtgtcaaataagcaggca

SEQ ID NO: 248596 - DNA, 25 bp, Probe Sequence
gtaccagtgtctgtgacgagctcag

SEQ ID NO: 248597 - DNA, 25 bp, Probe Sequence
gtaccatggttgtgcacatgcttca

SEQ ID NO: 248598 - DNA, 25 bp, Probe Sequence
gtacctgtaatctcagctactcagg

SEQ ID NO: 248599 - DNA, 25 bp, Probe Sequence
gtacagctgtacaataagctaagca

SEQ ID NO: 248600 - DNA, 25 bp, Probe Sequence
gtaccatgtacctaatccaaatatc

SEQ ID NO: 248601 - DNA, 25 bp, Probe Sequence
gtacattgaacccaacagcactata

SEQ ID NO: 248602 - DNA, 25 bp, Probe Sequence
gtacatagaaggtcatgcagatgat

SEQ ID NO: 248603 - DNA, 25 bp, Probe Sequence
gtacatggccaggctcatcaatgct

SEQ ID NO: 248604 - DNA, 25 bp, Probe Sequence
gtacatccatcatttgcaactgctg

SEQ ID NO: 248605 - DNA, 25 bp, Probe Sequence
gtactcactgcagtactacatgggc

SEQ ID NO: 248606 - DNA, 25 bp, Probe Sequence
gtaccctgatgctacagacgaggac

SEQ ID NO: 248607 - DNA, 25 bp, Probe Sequence
gtaccatgtatgtagcagccgtgga

SEQ ID NO: 248608 - DNA, 25 bp, Probe Sequence
gtacctatgtgagggctgggcatga

SEQ ID NO: 248609 - DNA, 25 bp, Probe Sequence
gtacctggtgggctggcagagcata

SEQ ID NO: 248610 - DNA, 25 bp, Probe Sequence
gtacctggtgggctggcagagcata

SEQ ID NO: 248611 - DNA, 25 bp, Probe Sequence
gtacctggtgggctggcagagcata

SEQ ID NO: 248612 - DNA, 25 bp, Probe Sequence
gtaccatggtagcttaagatgacaa

SEQ ID NO: 248613 - DNA, 25 bp, Probe Sequence
gtactgagcacttgttataggaaca

SEQ ID NO: 248614 - DNA, 25 bp, Probe Sequence
gtacggacagcggtaaagaacatcg

SEQ ID NO: 248615 - DNA, 25 bp, Probe Sequence
gtacccacacatgcaaaataaatgg

SEQ ID NO: 248616 - DNA, 25 bp, Probe Sequence
gtacccaacttcaaaatgagataca

SEQ ID NO: 248617 - DNA, 25 bp, Probe Sequence
gtactggcagacatctacgtattag

SEQ ID NO: 248618 - DNA, 25 bp, Probe Sequence
gtactggatgaagctgacgaaatgt

SEQ ID NO: 248619 - DNA, 25 bp, Probe Sequence
gtactgggagaggtgccttttgtat

SEQ ID NO: 248620 - DNA, 25 bp, Probe Sequence
gtactggccagatgagttttttcta

SEQ ID NO: 248621 - DNA, 25 bp, Probe Sequence
gtacagattgcagagagttttttcc

SEQ ID NO: 248622 - DNA, 25 bp, Probe Sequence
gtactgtggctggtactttctgtac

SEQ ID NO: 248623 - DNA, 25 bp, Probe Sequence
gtactgcacggcatacgtgtcgtag

SEQ ID NO: 248624 - DNA, 25 bp, Probe Sequence
gtaccgggcgatgcttgtgcctgag

SEQ ID NO: 248625 - DNA, 25 bp, Probe Sequence
gtacctagtgtgtgtctgatgccgg

SEQ ID NO: 248626 - DNA, 25 bp, Probe Sequence
gtacaatcaggtttggtgtctggtg

SEQ ID NO: 248627 - DNA, 25 bp, Probe Sequence
gtaaagggctttggatatcctgagc

SEQ ID NO: 248628 - DNA, 25 bp, Probe Sequence
gtaaaggcgtctgacagtcctgaga

SEQ ID NO: 248629 - DNA, 25 bp, Probe Sequence
gtaaatacacccacgtactggacgc

SEQ ID NO: 248630 - DNA, 25 bp, Probe Sequence
gtaaatacaccgatgggcactctgt

SEQ ID NO: 248631 - DNA, 25 bp, Probe Sequence
gtaactggcatgtgggtgtaccctt

SEQ ID NO: 248632 - DNA, 25 bp, Probe Sequence
gtacaagccatccgggtggaaacct

SEQ ID NO: 248633 - DNA, 25 bp, Probe Sequence
gtactatgcctccgtggtcagagat

SEQ ID NO: 248634 - DNA, 25 bp, Probe Sequence
gtacatctttgctgtggctcacaga

SEQ ID NO: 248635 - DNA, 25 bp, Probe Sequence
gtacatcttactgtattcacaagtt

SEQ ID NO: 248636 - DNA, 25 bp, Probe Sequence
gtgacacttactttaggccgggtgt

SEQ ID NO: 248637 - DNA, 25 bp, Probe Sequence
gtaactgccacttaagcggcggttg

SEQ ID NO: 248638 - DNA, 25 bp, Probe Sequence
gtacatactacgtaatggccggctg

SEQ ID NO: 248639 - DNA, 25 bp, Probe Sequence
gtacaacagacttaagacccgttca

SEQ ID NO: 248640 - DNA, 25 bp, Probe Sequence
gtcccagtagtctaaaacacgttca

SEQ ID NO: 248641 - DNA, 25 bp, Probe Sequence
gtccaagggtaggcaaccaccttca

SEQ ID NO: 248642 - DNA, 25 bp, Probe Sequence
gtccagggagcgtgcaaaatttgtc

SEQ ID NO: 248643 - DNA, 25 bp, Probe Sequence
gtccaagggagcagccacgttagga

SEQ ID NO: 248644 - DNA, 25 bp, Probe Sequence
gtcaaaggaagaagcccggtggcgc

SEQ ID NO: 248645 - DNA, 25 bp, Probe Sequence
gtacaaagattcagcccagagggat

SEQ ID NO: 248646 - DNA, 25 bp, Probe Sequence
gtcaaaaatatcagtcggggagtag

SEQ ID NO: 248647 - DNA, 25 bp, Probe Sequence
gtacagataacctgatctaccaagt

SEQ ID NO: 248648 - DNA, 25 bp, Probe Sequence
gtactgtaacactgactgacgagga

SEQ ID NO: 248649 - DNA, 25 bp, Probe Sequence
gtacatgtaacattaaaggcataaa

SEQ ID NO: 248650 - DNA, 25 bp, Probe Sequence
gtactgttacaatgacagcagctgt

SEQ ID NO: 248651 - DNA, 25 bp, Probe Sequence
gtacctgtcaacagacaagctgatc

SEQ ID NO: 248652 - DNA, 25 bp, Probe Sequence
gtacactgtggagtcgacaggggcc

SEQ ID NO: 248653 - DNA, 25 bp, Probe Sequence
gtactggtggagtgtcaggaggcca

SEQ ID NO: 248654 - DNA, 25 bp, Probe Sequence
gtgagagagttgctcctcagggtcc

SEQ ID NO: 248655 - DNA, 25 bp, Probe Sequence
gtgaaaatgggacccaccgtctctc

SEQ ID NO: 248656 - DNA, 25 bp, Probe Sequence
gtaaaatgggaaacttgcctctgtt

SEQ ID NO: 248657 - DNA, 25 bp, Probe Sequence
gtacccattaaagcttgcactcgtt

SEQ ID NO: 248658 - DNA, 25 bp, Probe Sequence
gtacctcattagtaattgttttgtt

SEQ ID NO: 248659 - DNA, 25 bp, Probe Sequence
gtacctcttttcatgatctttttct

SEQ ID NO: 248660 - DNA, 25 bp, Probe Sequence
gtacctttgtacatgtttgattctg

SEQ ID NO: 248661 - DNA, 25 bp, Probe Sequence
gtaccattgtatgtatgttaatatt

SEQ ID NO: 248662 - DNA, 25 bp, Probe Sequence
gtacacttgctctttctgtggcaaa

SEQ ID NO: 248663 - DNA, 25 bp, Probe Sequence
gtacacgtgtgacttcgtccagtta

SEQ ID NO: 248664 - DNA, 25 bp, Probe Sequence
gtaccgggacatccggctgatggtc

SEQ ID NO: 248665 - DNA, 25 bp, Probe Sequence
gtacctgtggagcgaggtgtattcc

SEQ ID NO: 248666 - DNA, 25 bp, Probe Sequence
gtacctttgagcatgagtgtatcac

SEQ ID NO: 248667 - DNA, 25 bp, Probe Sequence
gtacctttgagcatgagtgtatcac

SEQ ID NO: 248668 - DNA, 25 bp, Probe Sequence
gtacttgtatattggaggcttcagg

SEQ ID NO: 248669 - DNA, 25 bp, Probe Sequence
gtacttgtcatatgtagccttcaca

SEQ ID NO: 248670 - DNA, 25 bp, Probe Sequence
gtacttgtcttaatacactaagtgt

SEQ ID NO: 248671 - DNA, 25 bp, Probe Sequence
gtacatggcacttactacatccaag

SEQ ID NO: 248672 - DNA, 25 bp, Probe Sequence
gtactagaggtaagatctgccaaga

SEQ ID NO: 248673 - DNA, 25 bp, Probe Sequence
gtactgatataaacacttccaaata

SEQ ID NO: 248674 - DNA, 25 bp, Probe Sequence
gtactccaaatgaactcttaaagaa

SEQ ID NO: 248675 - DNA, 25 bp, Probe Sequence
gtaccccaatgtatgctatcataag

SEQ ID NO: 248676 - DNA, 25 bp, Probe Sequence
gtacccagcaagatctcagctaaat

SEQ ID NO: 248677 - DNA, 25 bp, Probe Sequence
gtaccgcagcaacttcaattaccaa

SEQ ID NO: 248678 - DNA, 25 bp, Probe Sequence
gtaactccagtcccagttacagcat

SEQ ID NO: 248679 - DNA, 25 bp, Probe Sequence
gtactgttagtaccatttgcccagg

SEQ ID NO: 248680 - DNA, 25 bp, Probe Sequence
gtactttagtatttttcaccatttg

SEQ ID NO: 248681 - DNA, 25 bp, Probe Sequence
gtacataaagaagttttgcacacgt

SEQ ID NO: 248682 - DNA, 25 bp, Probe Sequence
gtactatgagaccagcttcttcaca

SEQ ID NO: 248683 - DNA, 25 bp, Probe Sequence
gtacgaggcaatgttcattccaatc

SEQ ID NO: 248684 - DNA, 25 bp, Probe Sequence
gtacgatgacagtgcaatcatacta

SEQ ID NO: 248685 - DNA, 25 bp, Probe Sequence
gtacctgaatgctgcgacaagcaga

SEQ ID NO: 248686 - DNA, 25 bp, Probe Sequence
gtaactggatttcagcaaggcattt

SEQ ID NO: 248687 - DNA, 25 bp, Probe Sequence
gtacctggatcattctgaagcaaat

SEQ ID NO: 248688 - DNA, 25 bp, Probe Sequence
gtacctggatcatatcacctgatgg

SEQ ID NO: 248689 - DNA, 25 bp, Probe Sequence
gtacctcgtaggaacgctgagctgc

SEQ ID NO: 248690 - DNA, 25 bp, Probe Sequence
gtacctggaggtgacgctgagtggc

SEQ ID NO: 248691 - DNA, 25 bp, Probe Sequence
gtaactccaggatatcagcgagatc

SEQ ID NO: 248692 - DNA, 25 bp, Probe Sequence
gtaagtctgggatttagggatgtat

SEQ ID NO: 248693 - DNA, 25 bp, Probe Sequence
gtaacttgggaaaaggccgcatgat

SEQ ID NO: 248694 - DNA, 25 bp, Probe Sequence
gtaacagggattataggcgcgtgcc

SEQ ID NO: 248695 - DNA, 25 bp, Probe Sequence
gtaaaaggatttaagttgcactgac

SEQ ID NO: 248696 - DNA, 25 bp, Probe Sequence
gtaaaagtggttagaatagttcctg

SEQ ID NO: 248697 - DNA, 25 bp, Probe Sequence
gtaaacagttttataagtagatctt

SEQ ID NO: 248698 - DNA, 25 bp, Probe Sequence
gtacttcgtgctttttgacagcgag

SEQ ID NO: 248699 - DNA, 25 bp, Probe Sequence
gtactgtgggtctggtgaagctgag

SEQ ID NO: 248700 - DNA, 25 bp, Probe Sequence
gtacggatggtctggcaacatggag

SEQ ID NO: 248701 - DNA, 25 bp, Probe Sequence
gtacaggaggtcatggctagggagg

SEQ ID NO: 248702 - DNA, 25 bp, Probe Sequence
gtaagggtgagggtcatagggcagg

SEQ ID NO: 248703 - DNA, 25 bp, Probe Sequence
gtacaagcttaggtggtatggccag

SEQ ID NO: 248704 - DNA, 25 bp, Probe Sequence
gtactactctagggagtatgctgga

SEQ ID NO: 248705 - DNA, 25 bp, Probe Sequence
gtactgacctgaaaacttgtgacaa

SEQ ID NO: 248706 - DNA, 25 bp, Probe Sequence
gtactgtccgcaaggttcatgtgac

SEQ ID NO: 248707 - DNA, 25 bp, Probe Sequence
gtacatgtcaccttaggtagtagga

SEQ ID NO: 248708 - DNA, 25 bp, Probe Sequence
gtacgttgctatccaggctgtgcta

SEQ ID NO: 248709 - DNA, 25 bp, Probe Sequence
gtacgtgtgtctggagtgcgggaag

SEQ ID NO: 248710 - DNA, 25 bp, Probe Sequence
gtacgtggattgggctggagccagg

SEQ ID NO: 248711 - DNA, 25 bp, Probe Sequence
gtactggcgattctctgagggcagg

SEQ ID NO: 248712 - DNA, 25 bp, Probe Sequence
gtacagtggattcaaaggccatggg

SEQ ID NO: 248713 - DNA, 25 bp, Probe Sequence
gtacatggtgactgaacgcgccacc

SEQ ID NO: 248714 - DNA, 25 bp, Probe Sequence
gtacagggcagcccaatctggtccc

SEQ ID NO: 248715 - DNA, 25 bp, Probe Sequence
gtacagggaagaagagccgtcagag

SEQ ID NO: 248716 - DNA, 25 bp, Probe Sequence
tgctacaaaaacaaggtcgtcggct

SEQ ID NO: 248717 - DNA, 25 bp, Probe Sequence
gtacttaaactattgtcgtgggcta

SEQ ID NO: 248718 - DNA, 25 bp, Probe Sequence
gtactttgagatcacttccgaggcc

SEQ ID NO: 248719 - DNA, 25 bp, Probe Sequence
gtactatgtgactcatgcttctgga

SEQ ID NO: 248720 - DNA, 25 bp, Probe Sequence
gtactcagatgacaatattatggaa

SEQ ID NO: 248721 - DNA, 25 bp, Probe Sequence
gtactcaacaccaacatcgatgggc

SEQ ID NO: 248722 - DNA, 25 bp, Probe Sequence
gtacataacccgttccattgaccgg

SEQ ID NO: 248723 - DNA, 25 bp, Probe Sequence
gtaacaacagccgcttctggaacgg

SEQ ID NO: 248724 - DNA, 25 bp, Probe Sequence
gtacccaatgacggttgcttgaact

SEQ ID NO: 248725 - DNA, 25 bp, Probe Sequence
gtacttcaaagtattattcaacttc

SEQ ID NO: 248726 - DNA, 25 bp, Probe Sequence
gtacttttggttatgcaaacacttt

SEQ ID NO: 248727 - DNA, 25 bp, Probe Sequence
gtactttcatactcttctaagtcct

SEQ ID NO: 248728 - DNA, 25 bp, Probe Sequence
gtcaccatttactaccaataacttt

SEQ ID NO: 248729 - DNA, 25 bp, Probe Sequence
gtactgcatttatagagatttagct

SEQ ID NO: 248730 - DNA, 25 bp, Probe Sequence
gtacgttatatattgtattaagggc

SEQ ID NO: 248731 - DNA, 25 bp, Probe Sequence
gtactatttgacatgaattaacagg

SEQ ID NO: 248732 - DNA, 25 bp, Probe Sequence
gtacttttgacttaatttccatatg

SEQ ID NO: 248733 - DNA, 25 bp, Probe Sequence
gtacccttgagattgaattttctct

SEQ ID NO: 248734 - DNA, 25 bp, Probe Sequence
gtactccttggatttgcatttttgt

SEQ ID NO: 248735 - DNA, 25 bp, Probe Sequence
gtactctttggagatgcccattcta

SEQ ID NO: 248736 - DNA, 25 bp, Probe Sequence
gtacttttgtgattagacacttcta

SEQ ID NO: 248737 - DNA, 25 bp, Probe Sequence
gtactttctgtactaaacatttcct

SEQ ID NO: 248738 - DNA, 25 bp, Probe Sequence
gtactcaagcttcgtaaaatatctg

SEQ ID NO: 248739 - DNA, 25 bp, Probe Sequence
gtactcactttttccaaatgatcct

SEQ ID NO: 248740 - DNA, 25 bp, Probe Sequence
gtacattctaattaccagtatatca

SEQ ID NO: 248741 - DNA, 25 bp, Probe Sequence
gtacagatctaatctaagtattatt

SEQ ID NO: 248742 - DNA, 25 bp, Probe Sequence
gtacagatcatatacctaccacctg

SEQ ID NO: 248743 - DNA, 25 bp, Probe Sequence
gtacgcctctggccgtaccactggc

SEQ ID NO: 248744 - DNA, 25 bp, Probe Sequence
gtacgactagggacttctactgcag

SEQ ID NO: 248745 - DNA, 25 bp, Probe Sequence
gtactatatagtcagcttgctttga

SEQ ID NO: 248746 - DNA, 25 bp, Probe Sequence
gtactatatcctttgcctgtaaata

SEQ ID NO: 248747 - DNA, 25 bp, Probe Sequence
gtactagagccagtatccttaacaa

SEQ ID NO: 248748 - DNA, 25 bp, Probe Sequence
gtacttggtggttactaacatcaac

SEQ ID NO: 248749 - DNA, 25 bp, Probe Sequence
gtactgtagtttttcttcaacatca

SEQ ID NO: 248750 - DNA, 25 bp, Probe Sequence
gtacgtcatgttgataatccaaatg

SEQ ID NO: 248751 - DNA, 25 bp, Probe Sequence
gtacttagtatctactcccaattgt

SEQ ID NO: 248752 - DNA, 25 bp, Probe Sequence
gtacttattaatacttcgattctgt

SEQ ID NO: 248753 - DNA, 25 bp, Probe Sequence
gtacgccttaatgttcattttgatt

SEQ ID NO: 248754 - DNA, 25 bp, Probe Sequence
gtacgtcttcatgggagtcatttta

SEQ ID NO: 248755 - DNA, 25 bp, Probe Sequence
gtacgttatttaatgtctgattgaa

SEQ ID NO: 248756 - DNA, 25 bp, Probe Sequence
gtacagtgtctttttttgtatagtt

SEQ ID NO: 248757 - DNA, 25 bp, Probe Sequence
gtaacttttttgtgtatgtacttag

SEQ ID NO: 248758 - DNA, 25 bp, Probe Sequence
gtaacttttctatggaactcttcaa

SEQ ID NO: 248759 - DNA, 25 bp, Probe Sequence
gtaacattccttaagtgaaatttgt

SEQ ID NO: 248760 - DNA, 25 bp, Probe Sequence
gtgtccctactatagtaaactcttc

SEQ ID NO: 248761 - DNA, 25 bp, Probe Sequence
gtacccacagtagagacaaacattt

SEQ ID NO: 248762 - DNA, 25 bp, Probe Sequence
gtacatctgtaccgggaataacatt

SEQ ID NO: 248763 - DNA, 25 bp, Probe Sequence
gtactctgattcctctggaaagaat

SEQ ID NO: 248764 - DNA, 25 bp, Probe Sequence
gtacccttctgcatggaaaatcata

SEQ ID NO: 248765 - DNA, 25 bp, Probe Sequence
gtgaacagttacctggaaatactga

SEQ ID NO: 248766 - DNA, 25 bp, Probe Sequence
gtacatagctcaatgcctggaatat

SEQ ID NO: 248767 - DNA, 25 bp, Probe Sequence
gtacatacacagaattgggagatca

SEQ ID NO: 248768 - DNA, 25 bp, Probe Sequence
gtacatccaagagtctggtgaggag

SEQ ID NO: 248769 - DNA, 25 bp, Probe Sequence
gtacacccccttctgaagagctaga

SEQ ID NO: 248770 - DNA, 25 bp, Probe Sequence
gtaaagtccgccatcagaagactga

SEQ ID NO: 248771 - DNA, 25 bp, Probe Sequence
gtaacaatccggataaacacgccta

SEQ ID NO: 248772 - DNA, 25 bp, Probe Sequence
gtaaaaccttttgatctagggctgg

SEQ ID NO: 248773 - DNA, 25 bp, Probe Sequence
gtaaatacaattcttatctagtggt

SEQ ID NO: 248774 - DNA, 25 bp, Probe Sequence
gtactgaagaattatttttgcatgt

SEQ ID NO: 248775 - DNA, 25 bp, Probe Sequence
gtactaagcatatggttatgggtca

SEQ ID NO: 248776 - DNA, 25 bp, Probe Sequence
gtacggaaacagctttagtgatgag

SEQ ID NO: 248777 - DNA, 25 bp, Probe Sequence
gtactgtaaacaggctttagtcatt

SEQ ID NO: 248778 - DNA, 25 bp, Probe Sequence
gtacagagaacagggcttgggccac

SEQ ID NO: 248779 - DNA, 25 bp, Probe Sequence
gtacgatatatcattcctctggtcc

SEQ ID NO: 248780 - DNA, 25 bp, Probe Sequence
gtacagctcatactttcctgctgac

SEQ ID NO: 248781 - DNA, 25 bp, Probe Sequence
gtgtcactaagtctgggattccaat

SEQ ID NO: 248782 - DNA, 25 bp, Probe Sequence
gtacactgaagaatttgcctccaaa

SEQ ID NO: 248783 - DNA, 25 bp, Probe Sequence
gtaacagaaccttacctccaggtgc

SEQ ID NO: 248784 - DNA, 25 bp, Probe Sequence
gtaaagaactgctttctccaggggt

SEQ ID NO: 248785 - DNA, 25 bp, Probe Sequence
gtaaagaactgctttctccaggggt

SEQ ID NO: 248786 - DNA, 25 bp, Probe Sequence
gtaaagaactgctttctccaggggt

SEQ ID NO: 248787 - DNA, 25 bp, Probe Sequence
gtaaaggcagtctttctctgggaaa

SEQ ID NO: 248788 - DNA, 25 bp, Probe Sequence
gtaacactatgttttgaagggacta

SEQ ID NO: 248789 - DNA, 25 bp, Probe Sequence
gtaacaaagtatgtacagtctactt

SEQ ID NO: 248790 - DNA, 25 bp, Probe Sequence
gtaaatgaagtaggctgccatattc

SEQ ID NO: 248791 - DNA, 25 bp, Probe Sequence
gtaaataagataagtcctactctag

SEQ ID NO: 248792 - DNA, 25 bp, Probe Sequence
gtactgataagttcgtctttcaaag

SEQ ID NO: 248793 - DNA, 25 bp, Probe Sequence
gtactatgcaacttatatcatgtta

SEQ ID NO: 248794 - DNA, 25 bp, Probe Sequence
gtacttgctgaattcaatcattttt

SEQ ID NO: 248795 - DNA, 25 bp, Probe Sequence
gtacttgtgtcatccagaatgtttt

SEQ ID NO: 248796 - DNA, 25 bp, Probe Sequence
gtacagtgtgtataaaccttcttct

SEQ ID NO: 248797 - DNA, 25 bp, Probe Sequence
gtaacggttaactcttctcttgtgt

SEQ ID NO: 248798 - DNA, 25 bp, Probe Sequence
gtaactaccaatcttctacttggtt

SEQ ID NO: 248799 - DNA, 25 bp, Probe Sequence
gtacactaaactcttcttgcttttg

SEQ ID NO: 248800 - DNA, 25 bp, Probe Sequence
gtaaataaagcagggtgggctcttt

SEQ ID NO: 248801 - DNA, 25 bp, Probe Sequence
gtaaataaaccaattggcactctgt

SEQ ID NO: 248802 - DNA, 25 bp, Probe Sequence
gtaaataaaccatatatgacacgga

SEQ ID NO: 248803 - DNA, 25 bp, Probe Sequence
gtactgaacagacaattaaccccat

SEQ ID NO: 248804 - DNA, 25 bp, Probe Sequence
gtactgaaacatcgtctttacccac

SEQ ID NO: 248805 - DNA, 25 bp, Probe Sequence
gtactattatctccgttataccaat

SEQ ID NO: 248806 - DNA, 25 bp, Probe Sequence
gtactcttcattcatttatctctaa

SEQ ID NO: 248807 - DNA, 25 bp, Probe Sequence
gtactctttcacgttgatacttttt

SEQ ID NO: 248808 - DNA, 25 bp, Probe Sequence
gtacagtctacttttgaactatttt

SEQ ID NO: 248809 - DNA, 25 bp, Probe Sequence
gtaagtgtaaggtgtacttggtatt

SEQ ID NO: 248810 - DNA, 25 bp, Probe Sequence
gtacagtgaactgttgtacactggt

SEQ ID NO: 248811 - DNA, 25 bp, Probe Sequence
gtacaggaggagtgtgctaagggct

SEQ ID NO: 248812 - DNA, 25 bp, Probe Sequence
gtactgtgggaatgctgcccatggc

SEQ ID NO: 248813 - DNA, 25 bp, Probe Sequence
gtacattggtgaaagtgctcatttg

SEQ ID NO: 248814 - DNA, 25 bp, Probe Sequence
gtacatggagtaccactcatcgcgg

SEQ ID NO: 248815 - DNA, 25 bp, Probe Sequence
gtactggagcaatcagatcacacgg

SEQ ID NO: 248816 - DNA, 25 bp, Probe Sequence
gtactcgaaaccttcaccgtgaagt

SEQ ID NO: 248817 - DNA, 25 bp, Probe Sequence
gtacttacctactcacattggagag

SEQ ID NO: 248818 - DNA, 25 bp, Probe Sequence
gtacttactgaaggagccccgagat

SEQ ID NO: 248819 - DNA, 25 bp, Probe Sequence
gtactttgtgaaggtggtgcccact

SEQ ID NO: 248820 - DNA, 25 bp, Probe Sequence
gtactttgtgaaggtggtgcccact

SEQ ID NO: 248821 - DNA, 25 bp, Probe Sequence
gtactttgtagagattgacttccta

SEQ ID NO: 248822 - DNA, 25 bp, Probe Sequence
gtactttgaggagaagtttcttatt

SEQ ID NO: 248823 - DNA, 25 bp, Probe Sequence
gtacattataggcccagcagctttt

SEQ ID NO: 248824 - DNA, 25 bp, Probe Sequence
gtacatcataaacaagactatctgc

SEQ ID NO: 248825 - DNA, 25 bp, Probe Sequence
gtacaaacaccttagcacatcactg

SEQ ID NO: 248826 - DNA, 25 bp, Probe Sequence
gtaaattcaggcttcagcacgccgt

SEQ ID NO: 248827 - DNA, 25 bp, Probe Sequence
gtaaatgtcggagccaacctcagca

SEQ ID NO: 248828 - DNA, 25 bp, Probe Sequence
gtaaatgtcggagccaacctcagca

SEQ ID NO: 248829 - DNA, 25 bp, Probe Sequence
gtaaatgtcggagccaacctcagca

SEQ ID NO: 248830 - DNA, 25 bp, Probe Sequence
gtacactttggtgaagacctcatcc

SEQ ID NO: 248831 - DNA, 25 bp, Probe Sequence
gtacacgatttttaaggaccacgtg

SEQ ID NO: 248832 - DNA, 25 bp, Probe Sequence
gtacactgtatttctagatggaccc

SEQ ID NO: 248833 - DNA, 25 bp, Probe Sequence
gtaagtacttataacatggtgtatc

SEQ ID NO: 248834 - DNA, 25 bp, Probe Sequence
gtacatgtactgattactgcctatt

SEQ ID NO: 248835 - DNA, 25 bp, Probe Sequence
gtactataatgctttacaactaatt

SEQ ID NO: 248836 - DNA, 25 bp, Probe Sequence
gtactgtactgttatataatttatt

SEQ ID NO: 248837 - DNA, 25 bp, Probe Sequence
gtactgtacagttaatcttatttgc

SEQ ID NO: 248838 - DNA, 25 bp, Probe Sequence
gtacattgcacagaaacttgtgtgg

SEQ ID NO: 248839 - DNA, 25 bp, Probe Sequence
gtacagtgacaggctccactttgag

SEQ ID NO: 248840 - DNA, 25 bp, Probe Sequence
gtacaatgatagttgccagaggctg

SEQ ID NO: 248841 - DNA, 25 bp, Probe Sequence
gtacaagaagactcacggcggcttt

SEQ ID NO: 248842 - DNA, 25 bp, Probe Sequence
gtaatagacaacatctatccccttt

SEQ ID NO: 248843 - DNA, 25 bp, Probe Sequence
gtaaaggcaacattccttacccatt

SEQ ID NO: 248844 - DNA, 25 bp, Probe Sequence
gtaagaggtatctccatcaagctgc

SEQ ID NO: 248845 - DNA, 25 bp, Probe Sequence
gtaagagagttgtcactactagatt

SEQ ID NO: 248846 - DNA, 25 bp, Probe Sequence
gtacaggggaagcctcctaacttga

SEQ ID NO: 248847 - DNA, 25 bp, Probe Sequence
gtaaggtaaaggactacaactgaag

SEQ ID NO: 248848 - DNA, 25 bp, Probe Sequence
gtaaaggaaagccacttccttgaat

SEQ ID NO: 248849 - DNA, 25 bp, Probe Sequence
gtacacaggaaacaacatttctctt

SEQ ID NO: 248850 - DNA, 25 bp, Probe Sequence
gtacttgtgaaacacagctgttctt

SEQ ID NO: 248851 - DNA, 25 bp, Probe Sequence
gtacttgtgaaacattgtgtgggat

SEQ ID NO: 248852 - DNA, 25 bp, Probe Sequence
gtactcttgaacttcttactggaac

SEQ ID NO: 248853 - DNA, 25 bp, Probe Sequence
gtacagtttacatcttcacggaagt

SEQ ID NO: 248854 - DNA, 25 bp, Probe Sequence
gtactctttacatttatcagtttac

SEQ ID NO: 248855 - DNA, 25 bp, Probe Sequence
gtactttgtaacatcacgttgcata

SEQ ID NO: 248856 - DNA, 25 bp, Probe Sequence
gtactagttgcagctctcgctgttc

SEQ ID NO: 248857 - DNA, 25 bp, Probe Sequence
gtactacaatgaggctgctggtaac

SEQ ID NO: 248858 - DNA, 25 bp, Probe Sequence
gtacatccaacagccatgagtaaca

SEQ ID NO: 248859 - DNA, 25 bp, Probe Sequence
gtcaagcctcaagatgctcagctca

SEQ ID NO: 248860 - DNA, 25 bp, Probe Sequence
gtacatgctctatctgatgctcgat

SEQ ID NO: 248861 - DNA, 25 bp, Probe Sequence
gtacattctcattgttgtccagcca

SEQ ID NO: 248862 - DNA, 25 bp, Probe Sequence
gtacattcttgggcaattgcagata

SEQ ID NO: 248863 - DNA, 25 bp, Probe Sequence
gtgatgcattaggtccacctggata

SEQ ID NO: 248864 - DNA, 25 bp, Probe Sequence
gtacattgatggacacttaagatga

SEQ ID NO: 248865 - DNA, 25 bp, Probe Sequence
gtactgcatgatcaacttcaaatct

SEQ ID NO: 248866 - DNA, 25 bp, Probe Sequence
gtactggtcccactgtgcagtacat

SEQ ID NO: 248867 - DNA, 25 bp, Probe Sequence
gtacttagccacctgatgactaatg

SEQ ID NO: 248868 - DNA, 25 bp, Probe Sequence
gtaatgtagaaactgcagcaccaag

SEQ ID NO: 248869 - DNA, 25 bp, Probe Sequence
gtacttaaaggttgcatgccaatga

SEQ ID NO: 248870 - DNA, 25 bp, Probe Sequence
gtacttgagatacctttctgcagga

SEQ ID NO: 248871 - DNA, 25 bp, Probe Sequence
gtacttgagctgtgaggtcatcgga

SEQ ID NO: 248872 - DNA, 25 bp, Probe Sequence
gtacattacgtattagtcatcgcta

SEQ ID NO: 248873 - DNA, 25 bp, Probe Sequence
gtacatctacgtatagtcatcgcta

SEQ ID NO: 248874 - DNA, 25 bp, Probe Sequence
gtacatctacgtaatagtcatcgct

SEQ ID NO: 248875 - DNA, 25 bp, Probe Sequence
gtacaatcccaagtattctgctgct

SEQ ID NO: 248876 - DNA, 25 bp, Probe Sequence
gtacaatcccaagtattctgctgct

SEQ ID NO: 248877 - DNA, 25 bp, Probe Sequence
gtacaatcccaagtattctgctgct

SEQ ID NO: 248878 - DNA, 25 bp, Probe Sequence
gtacagacagcatggatatttcctg

SEQ ID NO: 248879 - DNA, 25 bp, Probe Sequence
gtacaacagctccaagtattcacct

SEQ ID NO: 248880 - DNA, 25 bp, Probe Sequence
gtaaagcactccggatcttgcaact

SEQ ID NO: 248881 - DNA, 25 bp, Probe Sequence
gtaaacccgggtgcacagatgcacg

SEQ ID NO: 248882 - DNA, 25 bp, Probe Sequence
gtacaacctagccctgaaaagactg

SEQ ID NO: 248883 - DNA, 25 bp, Probe Sequence
gtaaagcactatgtctgggttgacc

SEQ ID NO: 248884 - DNA, 25 bp, Probe Sequence
gtaaagctctcggtcaagttcaaca

SEQ ID NO: 248885 - DNA, 25 bp, Probe Sequence
gtaaagccaccatacaggctataca

SEQ ID NO: 248886 - DNA, 25 bp, Probe Sequence
gtacaagctgccctagtgggtatct

SEQ ID NO: 248887 - DNA, 25 bp, Probe Sequence
gtacaaggccattagcgaggaactg

SEQ ID NO: 248888 - DNA, 25 bp, Probe Sequence
gtacaagcaccttatctatcacaga

SEQ ID NO: 248889 - DNA, 25 bp, Probe Sequence
gtactatgatccaaacaccaaaagc

SEQ ID NO: 248890 - DNA, 25 bp, Probe Sequence
gtaaagttctacaaaataaagctag

SEQ ID NO: 248891 - DNA, 25 bp, Probe Sequence
gtaacatactctaaaagtccaagga

SEQ ID NO: 248892 - DNA, 25 bp, Probe Sequence
gtacatcaccatcatcaaagaccaa

SEQ ID NO: 248893 - DNA, 25 bp, Probe Sequence
gtacatccatgtggccaaaatcatc

SEQ ID NO: 248894 - DNA, 25 bp, Probe Sequence
gtacagtctattccatagaatcaca

SEQ ID NO: 248895 - DNA, 25 bp, Probe Sequence
gtacagtttctctaaagatcagaca

SEQ ID NO: 248896 - DNA, 25 bp, Probe Sequence
gtactgtatgtcttcaaacctggca

SEQ ID NO: 248897 - DNA, 25 bp, Probe Sequence
gtacatttctacagaacctgtgatt

SEQ ID NO: 248898 - DNA, 25 bp, Probe Sequence
gtaatcttctaaatcctttgttgtc

SEQ ID NO: 248899 - DNA, 25 bp, Probe Sequence
gtaatttaaattggtcatggtagat

SEQ ID NO: 248900 - DNA, 25 bp, Probe Sequence
gtaattgtcaaagcctaggaagacc

SEQ ID NO: 248901 - DNA, 25 bp, Probe Sequence
gtactttggaattcttagtcacaga

SEQ ID NO: 248902 - DNA, 25 bp, Probe Sequence
gtacatgttgggtatcctactactt

SEQ ID NO: 248903 - DNA, 25 bp, Probe Sequence
gtaatgttgggtacccagctactct

SEQ ID NO: 248904 - DNA, 25 bp, Probe Sequence
gtaaaaggtttgctcagtatatcta

SEQ ID NO: 248905 - DNA, 25 bp, Probe Sequence
tgtaaaaggtttctccctactgtca

SEQ ID NO: 248906 - DNA, 25 bp, Probe Sequence
gggaaaatcgttcttactaagtcat

SEQ ID NO: 248907 - DNA, 25 bp, Probe Sequence
gtaaaaatccttcttagaaatgtat

SEQ ID NO: 248908 - DNA, 25 bp, Probe Sequence
gtaaatgtactcaccttagggattc

SEQ ID NO: 248909 - DNA, 25 bp, Probe Sequence
gtaacttttcgcactttggtgatct

SEQ ID NO: 248910 - DNA, 25 bp, Probe Sequence
gtaaatttgttccacgtcaagttct

SEQ ID NO: 248911 - DNA, 25 bp, Probe Sequence
gtacttttgtatcaactcagaattt

SEQ ID NO: 248912 - DNA, 25 bp, Probe Sequence
gtactttttatggcatgcccatgaa

SEQ ID NO: 248913 - DNA, 25 bp, Probe Sequence
gtactttcttatgctggatcaggta

SEQ ID NO: 248914 - DNA, 25 bp, Probe Sequence
gtacatttctctgagcagtcagggt

SEQ ID NO: 248915 - DNA, 25 bp, Probe Sequence
gtgaaggcctcgttgagagaaggtc

SEQ ID NO: 248916 - DNA, 25 bp, Probe Sequence
gtaagctgctctgaggtaaaggtcc

SEQ ID NO: 248917 - DNA, 25 bp, Probe Sequence
gtacagctgtctaagggttagggga

SEQ ID NO: 248918 - DNA, 25 bp, Probe Sequence
gtacacagtttggaagtttaggcaa

SEQ ID NO: 248919 - DNA, 25 bp, Probe Sequence
gtacatgtgtttggaactgttgaaa

SEQ ID NO: 248920 - DNA, 25 bp, Probe Sequence
gtacagtttctgaaattgttttaca

SEQ ID NO: 248921 - DNA, 25 bp, Probe Sequence
gtacaaattctttgttcattttagc

SEQ ID NO: 248922 - DNA, 25 bp, Probe Sequence
gtacaggatctttggtctactctat

SEQ ID NO: 248923 - DNA, 25 bp, Probe Sequence
gtacactctcatattgtctattgtt

SEQ ID NO: 248924 - DNA, 25 bp, Probe Sequence
gtactgcatgctgtttgtggcactt

SEQ ID NO: 248925 - DNA, 25 bp, Probe Sequence
gtacatgaccttatgggactttcct

SEQ ID NO: 248926 - DNA, 25 bp, Probe Sequence
gtacatgaccttatgggactttcct

SEQ ID NO: 248927 - DNA, 25 bp, Probe Sequence
gtacatgaccttatgggactttcct

SEQ ID NO: 248928 - DNA, 25 bp, Probe Sequence
gtacatgaccttatgggactttcct

SEQ ID NO: 248929 - DNA, 25 bp, Probe Sequence
gtacatgaccttatgggactttcct

SEQ ID NO: 248930 - DNA, 25 bp, Probe Sequence
gtacatgaccttatgggactttcct

SEQ ID NO: 248931 - DNA, 25 bp, Probe Sequence
gtacatgaccttatgggactttcct

SEQ ID NO: 248932 - DNA, 25 bp, Probe Sequence
gtacatgaccttatgggactttcct

SEQ ID NO: 248933 - DNA, 25 bp, Probe Sequence
gtacaggacctgatgggactttcct

SEQ ID NO: 248934 - DNA, 25 bp, Probe Sequence
gtacagggagtgaggagccttgctg

SEQ ID NO: 248935 - DNA, 25 bp, Probe Sequence
gtacacgcgagctgtggactggtgg

SEQ ID NO: 248936 - DNA, 25 bp, Probe Sequence
gtaacgtggcactggtaggttggga

SEQ ID NO: 248937 - DNA, 25 bp, Probe Sequence
gtcaacggggaccagtactgtgggg

SEQ ID NO: 248938 - DNA, 25 bp, Probe Sequence
gtacacggggcagatctactgggcg

SEQ ID NO: 248939 - DNA, 25 bp, Probe Sequence
gtaaatggttggctctacgggcttc

SEQ ID NO: 248940 - DNA, 25 bp, Probe Sequence
gtacaatcgtttcatcattcggcgt

SEQ ID NO: 248941 - DNA, 25 bp, Probe Sequence
gtacttccttcctgtgattgggttg

SEQ ID NO: 248942 - DNA, 25 bp, Probe Sequence
gtactttcctctaggtgatctgtga

SEQ ID NO: 248943 - DNA, 25 bp, Probe Sequence
gtacagtttttgtgctgagctctca

SEQ ID NO: 248944 - DNA, 25 bp, Probe Sequence
gtacagtttagttggagtgtagcac

SEQ ID NO: 248945 - DNA, 25 bp, Probe Sequence
gtacagttaatgctgcgtgctgctg

SEQ ID NO: 248946 - DNA, 25 bp, Probe Sequence
gtaaatggaagcttgagttgtgaaa

SEQ ID NO: 248947 - DNA, 25 bp, Probe Sequence
gtacagatgaaccttgtatttgtgt

SEQ ID NO: 248948 - DNA, 25 bp, Probe Sequence
tgtacctaacgccctatttttgcaa

SEQ ID NO: 248949 - DNA, 25 bp, Probe Sequence
gtaagtatatccccaatgttgcgtg

SEQ ID NO: 248950 - DNA, 25 bp, Probe Sequence
ggaagtttccgagaggagggtctat

SEQ ID NO: 248951 - DNA, 25 bp, Probe Sequence
gtaaggatttcgtgagtggggttga

SEQ ID NO: 248952 - DNA, 25 bp, Probe Sequence
gtaaggcttaacacagtgggtggtg

SEQ ID NO: 248953 - DNA, 25 bp, Probe Sequence
gtaaggttctagggctgggagctgg

SEQ ID NO: 248954 - DNA, 25 bp, Probe Sequence
gtaaagattctcatcgtggagatct

SEQ ID NO: 248955 - DNA, 25 bp, Probe Sequence
gtaacagttgatatctggctgtcct

SEQ ID NO: 248956 - DNA, 25 bp, Probe Sequence
gtacagaatcgaactctgcacttct

SEQ ID NO: 248957 - DNA, 25 bp, Probe Sequence
gtaagaatgcccatccagttttcta

SEQ ID NO: 248958 - DNA, 25 bp, Probe Sequence
gtaaacatacagattcctaattcta

SEQ ID NO: 248959 - DNA, 25 bp, Probe Sequence
gtaacccaagccacctatgtgacaa

SEQ ID NO: 248960 - DNA, 25 bp, Probe Sequence
gtaatcgctcaagcctgatctggga

SEQ ID NO: 248961 - DNA, 25 bp, Probe Sequence
gtacatgaccaagccggatggtacg

SEQ ID NO: 248962 - DNA, 25 bp, Probe Sequence
gtacatgatgcaaaccgagggggat

SEQ ID NO: 248963 - DNA, 25 bp, Probe Sequence
gtacaagaagagccgcagtgggagg

SEQ ID NO: 248964 - DNA, 25 bp, Probe Sequence
gtacaacaacatgcgcgtggagttc

SEQ ID NO: 248965 - DNA, 25 bp, Probe Sequence
gtacagcccgtactggtggagtgtc

SEQ ID NO: 248966 - DNA, 25 bp, Probe Sequence
gtaagtcctgtttggttgttgttgg

SEQ ID NO: 248967 - DNA, 25 bp, Probe Sequence
gtacagtcgctagtcaagtggtttt

SEQ ID NO: 248968 - DNA, 25 bp, Probe Sequence
gtacattccaagcagagtggccctc

SEQ ID NO: 248969 - DNA, 25 bp, Probe Sequence
gtacttccacagttatgattgtcct

SEQ ID NO: 248970 - DNA, 25 bp, Probe Sequence
gtactctaacatctagctggctttc

SEQ ID NO: 248971 - DNA, 25 bp, Probe Sequence
gtcacctgcaacagaagtgcgtacc

SEQ ID NO: 248972 - DNA, 25 bp, Probe Sequence
gtaactgcaagcaagtcatcgggac

SEQ ID NO: 248973 - DNA, 25 bp, Probe Sequence
gtgaacgcatctgcagatgccgggg

SEQ ID NO: 248974 - DNA, 25 bp, Probe Sequence
gtgaaccctgacgcacttggggttt

SEQ ID NO: 248975 - DNA, 25 bp, Probe Sequence
gtaagacctacagtacggaggagta

SEQ ID NO: 248976 - DNA, 25 bp, Probe Sequence
gtaaacttattgagggtagcagcta

SEQ ID NO: 248977 - DNA, 25 bp, Probe Sequence
ggcaacactttaagggttcggcaat

SEQ ID NO: 248978 - DNA, 25 bp, Probe Sequence
gtaaacttattctgagtcctaactg

SEQ ID NO: 248979 - DNA, 25 bp, Probe Sequence
gtaaaattacatctggtctcttcct

SEQ ID NO: 248980 - DNA, 25 bp, Probe Sequence
gtaatacatttcacacgtcttccgt

SEQ ID NO: 248981 - DNA, 25 bp, Probe Sequence
gtacatagtttaacacgtggtcctt

SEQ ID NO: 248982 - DNA, 25 bp, Probe Sequence
gtaatactttacagtgtgggccatc

SEQ ID NO: 248983 - DNA, 25 bp, Probe Sequence
gtaaatccttacaccttcgcagaac

SEQ ID NO: 248984 - DNA, 25 bp, Probe Sequence
gtaaaccttaaactgcattctagaa

SEQ ID NO: 248985 - DNA, 25 bp, Probe Sequence
gtacaacctgtagacttacttctca

SEQ ID NO: 248986 - DNA, 25 bp, Probe Sequence
gtgacggccttagatctctcgccgc

SEQ ID NO: 248987 - DNA, 25 bp, Probe Sequence
gtcacaggtgctggactacctcagc

SEQ ID NO: 248988 - DNA, 25 bp, Probe Sequence
tgatagcggtctgacttcaccgggg

SEQ ID NO: 248989 - DNA, 25 bp, Probe Sequence
gtgagggtttagagaacatggggag

SEQ ID NO: 248990 - DNA, 25 bp, Probe Sequence
gtaaggattctagtaactctgggga

SEQ ID NO: 248991 - DNA, 25 bp, Probe Sequence
gtgaaggtattagcaaccgagttgc

SEQ ID NO: 248992 - DNA, 25 bp, Probe Sequence
gtcaaacttccagaaccatggtagc

SEQ ID NO: 248993 - DNA, 25 bp, Probe Sequence
gtaaaactgagggaacctgagtatg

SEQ ID NO: 248994 - DNA, 25 bp, Probe Sequence
gtgaagtacggggacagcggggagc

SEQ ID NO: 248995 - DNA, 25 bp, Probe Sequence
gtacaacaaggggatcatgggtgaa

SEQ ID NO: 248996 - DNA, 25 bp, Probe Sequence
gtaaaaggagtacctgtggatgaaa

SEQ ID NO: 248997 - DNA, 25 bp, Probe Sequence
gtaacacggcagcacagctgtccaa

SEQ ID NO: 248998 - DNA, 25 bp, Probe Sequence
gtacaattacatcgattcttccaaa

SEQ ID NO: 248999 - DNA, 25 bp, Probe Sequence
gtacactttagtctcttggcagtag

SEQ ID NO: 249000 - DNA, 25 bp, Probe Sequence
gtacattcctagagttatgaagttc

SEQ ID NO: 249001 - DNA, 25 bp, Probe Sequence
gtactttctgttttttgtgacttca

SEQ ID NO: 249002 - DNA, 25 bp, Probe Sequence
gtaattttcctgttttgtattatct

SEQ ID NO: 249003 - DNA, 25 bp, Probe Sequence
gtaactttcctgctgtagttcttgc

SEQ ID NO: 249004 - DNA, 25 bp, Probe Sequence
gtacagttggggagtacattcttca

SEQ ID NO: 249005 - DNA, 25 bp, Probe Sequence
gtacatgggggtgcagatatctctt

SEQ ID NO: 249006 - DNA, 25 bp, Probe Sequence
gtacagggattcaggtttcttattc

SEQ ID NO: 249007 - DNA, 25 bp, Probe Sequence
gtacagggttaacataccagattta

SEQ ID NO: 249008 - DNA, 25 bp, Probe Sequence
gtaaacgtaactcaaccagtatata

SEQ ID NO: 249009 - DNA, 25 bp, Probe Sequence
gtaacacgtagagttcagacccttc

SEQ ID NO: 249010 - DNA, 25 bp, Probe Sequence
gtacaccagttggtgtcagacccga

SEQ ID NO: 249011 - DNA, 25 bp, Probe Sequence
gtaacctgataaattcatagcccaa

SEQ ID NO: 249012 - DNA, 25 bp, Probe Sequence
gtacatcctctgcatattgctacac

SEQ ID NO: 249013 - DNA, 25 bp, Probe Sequence
gtaagcactctgaaagcatgtctca

SEQ ID NO: 249014 - DNA, 25 bp, Probe Sequence
gtaacatattgccaccgtctaggct

SEQ ID NO: 249015 - DNA, 25 bp, Probe Sequence
gtacatatgatctgcaggtttgggc

SEQ ID NO: 249016 - DNA, 25 bp, Probe Sequence
gtacatatatctatttctctaggga

SEQ ID NO: 249017 - DNA, 25 bp, Probe Sequence
gtacattattttccttgctggataa

SEQ ID NO: 249018 - DNA, 25 bp, Probe Sequence
gtacaggaatattgacttaggaatt

SEQ ID NO: 249019 - DNA, 25 bp, Probe Sequence
gtacagaacatagaattaggcaaag

SEQ ID NO: 249020 - DNA, 25 bp, Probe Sequence
gtacagaactttgtctacagcacaa

SEQ ID NO: 249021 - DNA, 25 bp, Probe Sequence
gtaatgatcacgttccatccaaata

SEQ ID NO: 249022 - DNA, 25 bp, Probe Sequence
gtaaatcaatggaacatcccaagaa

SEQ ID NO: 249023 - DNA, 25 bp, Probe Sequence
gtaaagcctaagtccctcaaaacat

SEQ ID NO: 249024 - DNA, 25 bp, Probe Sequence
gtaataccaaagcacctcgattttc

SEQ ID NO: 249025 - DNA, 25 bp, Probe Sequence
gtaatcaagcaagggcctttggttt

SEQ ID NO: 249026 - DNA, 25 bp, Probe Sequence
gtaaaagccatgggccctcttgttc

SEQ ID NO: 249027 - DNA, 25 bp, Probe Sequence
gtaaaagccatgggccctcttgttc

SEQ ID NO: 249028 - DNA, 25 bp, Probe Sequence
gtaaaagatcgcgccggattattgc

SEQ ID NO: 249029 - DNA, 25 bp, Probe Sequence
gtaatacaacacgccggactgactc

SEQ ID NO: 249030 - DNA, 25 bp, Probe Sequence
gtacaagaccacaccggatgtcatc

SEQ ID NO: 249031 - DNA, 25 bp, Probe Sequence
gtacaagaccacaccggatgtcatc

SEQ ID NO: 249032 - DNA, 25 bp, Probe Sequence
gtaaatggcccgccggcatttatgc

SEQ ID NO: 249033 - DNA, 25 bp, Probe Sequence
gtaaatggcccgcctggcataaggc

SEQ ID NO: 249034 - DNA, 25 bp, Probe Sequence
gtaaatggcccgcctgggcatgatg

SEQ ID NO: 249035 - DNA, 25 bp, Probe Sequence
gtcgaatggccccacggaggggacg

SEQ ID NO: 249036 - DNA, 25 bp, Probe Sequence
gtaaagtccttcctggggtggatgc

SEQ ID NO: 249037 - DNA, 25 bp, Probe Sequence
gtacagttcctttcaagaggtaaca

SEQ ID NO: 249038 - DNA, 25 bp, Probe Sequence
gtccagttccctaaaagcctgttct

SEQ ID NO: 249039 - DNA, 25 bp, Probe Sequence
gtacagtgtcccctatagatcacgg

SEQ ID NO: 249040 - DNA, 25 bp, Probe Sequence
gtacaggatcccaatgacaagacca

SEQ ID NO: 249041 - DNA, 25 bp, Probe Sequence
gtacaggatcacagcataaaagaat

SEQ ID NO: 249042 - DNA, 25 bp, Probe Sequence
gtacagagatccagataagagttaa

SEQ ID NO: 249043 - DNA, 25 bp, Probe Sequence
gtacacagcaccagaatgtatatta

SEQ ID NO: 249044 - DNA, 25 bp, Probe Sequence
gtaacaatcaacctcagtactgtca

SEQ ID NO: 249045 - DNA, 25 bp, Probe Sequence
gtaagcaacaggctcactggtcacg

SEQ ID NO: 249046 - DNA, 25 bp, Probe Sequence
gtaactggagagctacgggcatgca

SEQ ID NO: 249047 - DNA, 25 bp, Probe Sequence
gtaaaggcagccaggcgtgagcagc

SEQ ID NO: 249048 - DNA, 25 bp, Probe Sequence
gtaactgcccacttggcagtacatc

SEQ ID NO: 249049 - DNA, 25 bp, Probe Sequence
gtacactgaccatgtgtatgtacat

SEQ ID NO: 249050 - DNA, 25 bp, Probe Sequence
gtcagcacgcccagttatggatgtt

SEQ ID NO: 249051 - DNA, 25 bp, Probe Sequence
gtacacatgtccatttatgtcctct

SEQ ID NO: 249052 - DNA, 25 bp, Probe Sequence
gtacatttccttgtagactctgtta

SEQ ID NO: 249053 - DNA, 25 bp, Probe Sequence
gtcaatatcctggtgttaacctgac

SEQ ID NO: 249054 - DNA, 25 bp, Probe Sequence
gtacattcactgttgttacatacat

SEQ ID NO: 249055 - DNA, 25 bp, Probe Sequence
gtacatacatatttttaaaccatta

SEQ ID NO: 249056 - DNA, 25 bp, Probe Sequence
gtacatacatatttttaaaccatta

SEQ ID NO: 249057 - DNA, 25 bp, Probe Sequence
gtacataagactttaaagaagctgt

SEQ ID NO: 249058 - DNA, 25 bp, Probe Sequence
gtacatggttcttaaaagacgatgt

SEQ ID NO: 249059 - DNA, 25 bp, Probe Sequence
gtacttgttgtgaaccaaaccagtg

SEQ ID NO: 249060 - DNA, 25 bp, Probe Sequence
gtaaccatagtaacaccaagcacgt

SEQ ID NO: 249061 - DNA, 25 bp, Probe Sequence
gtacatccacaaacagacgataacg

SEQ ID NO: 249062 - DNA, 25 bp, Probe Sequence
gtacacacacacaggcacagatgca

SEQ ID NO: 249063 - DNA, 25 bp, Probe Sequence
gtacaccatgaaccccaacaaattt

SEQ ID NO: 249064 - DNA, 25 bp, Probe Sequence
gtaacaaaacccaccagaatctaag

SEQ ID NO: 249065 - DNA, 25 bp, Probe Sequence
gtaatcaagtaatccccttttccag

SEQ ID NO: 249066 - DNA, 25 bp, Probe Sequence
gtaaagaaacagacccgcttcttgc

SEQ ID NO: 249067 - DNA, 25 bp, Probe Sequence
gtaaagagaaatgcctagtgtctat

SEQ ID NO: 249068 - DNA, 25 bp, Probe Sequence
gtacaaatggaatcccaatctatct

SEQ ID NO: 249069 - DNA, 25 bp, Probe Sequence
gtacagttggcaagatctccaagct

SEQ ID NO: 249070 - DNA, 25 bp, Probe Sequence
gtacagttccatagagcatttgaca

SEQ ID NO: 249071 - DNA, 25 bp, Probe Sequence
gtacaattctgaagacactcattca

SEQ ID NO: 249072 - DNA, 25 bp, Probe Sequence
gtaaactctgcatccagagattcat

SEQ ID NO: 249073 - DNA, 25 bp, Probe Sequence
gtacaagacacatccatgaaacaac

SEQ ID NO: 249074 - DNA, 25 bp, Probe Sequence
gtacaacaaattcctgtgacacaag

SEQ ID NO: 249075 - DNA, 25 bp, Probe Sequence
gtacaaaggtgtctcttgatcacag

SEQ ID NO: 249076 - DNA, 25 bp, Probe Sequence
gtacactgagtgctgctgtctgtat

SEQ ID NO: 249077 - DNA, 25 bp, Probe Sequence
gtacattgactgcagcactatttac

SEQ ID NO: 249078 - DNA, 25 bp, Probe Sequence
gtacatatactgacagctcatttat

SEQ ID NO: 249079 - DNA, 25 bp, Probe Sequence
gtacatatcattaagcattggctga

SEQ ID NO: 249080 - DNA, 25 bp, Probe Sequence
gtacattcattcaatcaaggcaaac

SEQ ID NO: 249081 - DNA, 25 bp, Probe Sequence
gtacattgccatctccaggaagact

SEQ ID NO: 249082 - DNA, 25 bp, Probe Sequence
gtacatcatcctgtgctcggaaatc

SEQ ID NO: 249083 - DNA, 25 bp, Probe Sequence
gtaatacttttcccgaaacacacat

SEQ ID NO: 249084 - DNA, 25 bp, Probe Sequence
gtaaacaatttcttaggacaccatt

SEQ ID NO: 249085 - DNA, 25 bp, Probe Sequence
gtaaaataatctgggacgacaggtt

SEQ ID NO: 249086 - DNA, 25 bp, Probe Sequence
gtaagaaatataagcattcgcaagg

SEQ ID NO: 249087 - DNA, 25 bp, Probe Sequence
gtacataggtgatcaattcacaagg

SEQ ID NO: 249088 - DNA, 25 bp, Probe Sequence
gtacatcaaggacagattaactgga

SEQ ID NO: 249089 - DNA, 25 bp, Probe Sequence
gtacatcaatggcgtggataccggt

SEQ ID NO: 249090 - DNA, 25 bp, Probe Sequence
gtacatcaatgcgcgtggatagtcg

SEQ ID NO: 249091 - DNA, 25 bp, Probe Sequence
gtacacagatccctgtgacatgagt

SEQ ID NO: 249092 - DNA, 25 bp, Probe Sequence
gtacagctgacccattgtggcactg

SEQ ID NO: 249093 - DNA, 25 bp, Probe Sequence
gtaagcgtccagccatctggatcga

SEQ ID NO: 249094 - DNA, 25 bp, Probe Sequence
gtacatgtgtttgtctggtcagatc

SEQ ID NO: 249095 - DNA, 25 bp, Probe Sequence
gtacattgttctggaatttcatcat

SEQ ID NO: 249096 - DNA, 25 bp, Probe Sequence
gtacatctgttcatgcatttttcca

SEQ ID NO: 249097 - DNA, 25 bp, Probe Sequence
gtacattctctcagatttgaaccag

SEQ ID NO: 249098 - DNA, 25 bp, Probe Sequence
gtacactccagctgtttgaagagag

SEQ ID NO: 249099 - DNA, 25 bp, Probe Sequence
gtacaatattcatgtcctaagacag

SEQ ID NO: 249100 - DNA, 25 bp, Probe Sequence
gtacaatattgatctcctaagacaa

SEQ ID NO: 249101 - DNA, 25 bp, Probe Sequence
gtaaataatgaactcgtgcaagaca

SEQ ID NO: 249102 - DNA, 25 bp, Probe Sequence
gtacatctatgggcgtggatacggt

SEQ ID NO: 249103 - DNA, 25 bp, Probe Sequence
gtacatgcaatgggcgtggatagcg

SEQ ID NO: 249104 - DNA, 25 bp, Probe Sequence
gtacatcaatgggcgtggatagcgg

SEQ ID NO: 249105 - DNA, 25 bp, Probe Sequence
gtacatcaatgggcgtggatagcgg

SEQ ID NO: 249106 - DNA, 25 bp, Probe Sequence
gtacatacatgggcgtgatagcggt

SEQ ID NO: 249107 - DNA, 25 bp, Probe Sequence
gtacatccatggcctgtgagacttt

SEQ ID NO: 249108 - DNA, 25 bp, Probe Sequence
gtacatttataggtcaacttatgat

SEQ ID NO: 249109 - DNA, 25 bp, Probe Sequence
gtacatttgggagtttttatgagaa

SEQ ID NO: 249110 - DNA, 25 bp, Probe Sequence
gtacaataggattttactgtcgaaa

SEQ ID NO: 249111 - DNA, 25 bp, Probe Sequence
gtaaatgtggtctttagtgtccagg

SEQ ID NO: 249112 - DNA, 25 bp, Probe Sequence
gtaacagtgttcttgtggtttgacc

SEQ ID NO: 249113 - DNA, 25 bp, Probe Sequence
gtaagggctctctgtggtttgactt

SEQ ID NO: 249114 - DNA, 25 bp, Probe Sequence
gtaagattgccctaggtattaactt

SEQ ID NO: 249115 - DNA, 25 bp, Probe Sequence
gtaatgttgcctggggcttaaccca

SEQ ID NO: 249116 - DNA, 25 bp, Probe Sequence
gtgaagttacatttgccctaaccct

SEQ ID NO: 249117 - DNA, 25 bp, Probe Sequence
gtaaattactgatgtatctaatcca

SEQ ID NO: 249118 - DNA, 25 bp, Probe Sequence
gtacaatttctgtgtgtttaagctc

SEQ ID NO: 249119 - DNA, 25 bp, Probe Sequence
gtacatttaatttgagttccaactg

SEQ ID NO: 249120 - DNA, 25 bp, Probe Sequence
gtacatctgttacctgatttgaaac

SEQ ID NO: 249121 - DNA, 25 bp, Probe Sequence
gtacatcgggactatcattcgaaac

SEQ ID NO: 249122 - DNA, 25 bp, Probe Sequence
gtacatcttggttaatatctggaca

SEQ ID NO: 249123 - DNA, 25 bp, Probe Sequence
gtacatctagagtgtgttctgtgaa

SEQ ID NO: 249124 - DNA, 25 bp, Probe Sequence
gtaaatgaatggcttatcttgacag

SEQ ID NO: 249125 - DNA, 25 bp, Probe Sequence
gtaaaccagaggctatgcttagatt

SEQ ID NO: 249126 - DNA, 25 bp, Probe Sequence
gtacagaatagagcgtgtgctgttg

SEQ ID NO: 249127 - DNA, 25 bp, Probe Sequence
gtacacaaagattcttgatgttctt

SEQ ID NO: 249128 - DNA, 25 bp, Probe Sequence
gtacatacaggttactgctttttta

SEQ ID NO: 249129 - DNA, 25 bp, Probe Sequence
gtacatacatgtgattacttctgtt

SEQ ID NO: 249130 - DNA, 25 bp, Probe Sequence
gtacagacattatttccactctggt

SEQ ID NO: 249131 - DNA, 25 bp, Probe Sequence
gtacagacttcttggtacccagtca

SEQ ID NO: 249132 - DNA, 25 bp, Probe Sequence
gtaacacctgtgtgtgtcaccagta

SEQ ID NO: 249133 - DNA, 25 bp, Probe Sequence
gtaacaagtgtctgttcatgccaaa

SEQ ID NO: 249134 - DNA, 25 bp, Probe Sequence
gtaagccagagtgagtcaaggcata

SEQ ID NO: 249135 - DNA, 25 bp, Probe Sequence
gtaatgtcaagtggagtaccccaga

SEQ ID NO: 249136 - DNA, 25 bp, Probe Sequence
gtaatctgaagagacttccttgcaa

SEQ ID NO: 249137 - DNA, 25 bp, Probe Sequence
gtaactcaagtgtcacctccttgga

SEQ ID NO: 249138 - DNA, 25 bp, Probe Sequence
gtaagctaagtccaggatgcctgtg

SEQ ID NO: 249139 - DNA, 25 bp, Probe Sequence
gtaacacagatgaaaggtgcaggtg

SEQ ID NO: 249140 - DNA, 25 bp, Probe Sequence
gtaaatcgctgaaaggggggaacat

SEQ ID NO: 249141 - DNA, 25 bp, Probe Sequence
gtaaatgtctgaaagcatgaggggc

SEQ ID NO: 249142 - DNA, 25 bp, Probe Sequence
gtaaatgtctgaaagcatgaggggc

SEQ ID NO: 249143 - DNA, 25 bp, Probe Sequence
gtaaaggttaagtatgaggtcaatg

SEQ ID NO: 249144 - DNA, 25 bp, Probe Sequence
gtaacaggttatggaatggtctctt

SEQ ID NO: 249145 - DNA, 25 bp, Probe Sequence
gtacaactgtttggaattgctcttg

SEQ ID NO: 249146 - DNA, 25 bp, Probe Sequence
gtaaccgttgtggacgatcagcctg

SEQ ID NO: 249147 - DNA, 25 bp, Probe Sequence
gtaactcgcattttaatgatccgct

SEQ ID NO: 249148 - DNA, 25 bp, Probe Sequence
gtaactctaagttgaattcaggcta

SEQ ID NO: 249149 - DNA, 25 bp, Probe Sequence
gtaactgtaagttcacatcaacctc

SEQ ID NO: 249150 - DNA, 25 bp, Probe Sequence
gtacatcggaagcacatcatgggcc

SEQ ID NO: 249151 - DNA, 25 bp, Probe Sequence
gtacaccagaagcacttcatgggcc

SEQ ID NO: 249152 - DNA, 25 bp, Probe Sequence
gtaaagcagacatcgttcttggcct

SEQ ID NO: 249153 - DNA, 25 bp, Probe Sequence
gtacaacgaataagcacctatggac

SEQ ID NO: 249154 - DNA, 25 bp, Probe Sequence
gtacaaaggccaatgcagcctcagg

SEQ ID NO: 249155 - DNA, 25 bp, Probe Sequence
gtacatcagagagtttgtcaccagt

SEQ ID NO: 249156 - DNA, 25 bp, Probe Sequence
gtaatgcgatgcttgggtcaaatgg

SEQ ID NO: 249157 - DNA, 25 bp, Probe Sequence
gtacatggatgaggcaggtgggtgc

SEQ ID NO: 249158 - DNA, 25 bp, Probe Sequence
gtacatctataggaagtgaagaggc

SEQ ID NO: 249159 - DNA, 25 bp, Probe Sequence
gtacaccatcatgaactcgttctgc

SEQ ID NO: 249160 - DNA, 25 bp, Probe Sequence
gtaacctcttcaaattgtactgttg

SEQ ID NO: 249161 - DNA, 25 bp, Probe Sequence
gtaactttggtaactgcatacttgt

SEQ ID NO: 249162 - DNA, 25 bp, Probe Sequence
gtaacttctgacttactgtcagttg

SEQ ID NO: 249163 - DNA, 25 bp, Probe Sequence
gtaaatcttcatgtgattgtcatgt

SEQ ID NO: 249164 - DNA, 25 bp, Probe Sequence
gtaaacatactgtgattctatctgg

SEQ ID NO: 249165 - DNA, 25 bp, Probe Sequence
gtaaaatgtcaaggatccagattag

SEQ ID NO: 249166 - DNA, 25 bp, Probe Sequence
gtacagatttaagagcaatgcgtaa

SEQ ID NO: 249167 - DNA, 25 bp, Probe Sequence
gtaaattatggagcacaatgtaaga

SEQ ID NO: 249168 - DNA, 25 bp, Probe Sequence
gtaaattagagtcatcttgcataat

SEQ ID NO: 249169 - DNA, 25 bp, Probe Sequence
gtaaatgtagggttaagcatggaca

SEQ ID NO: 249170 - DNA, 25 bp, Probe Sequence
gtaactgcaaactccaagctggtca

SEQ ID NO: 249171 - DNA, 25 bp, Probe Sequence
gtaacgaagcactgacatatgctac

SEQ ID NO: 249172 - DNA, 25 bp, Probe Sequence
gtacacaagatgcggaaatgatctc

SEQ ID NO: 249173 - DNA, 25 bp, Probe Sequence
gtacacacaggaagtagcctgactc

SEQ ID NO: 249174 - DNA, 25 bp, Probe Sequence
gtaaccattatagacgctatccacg

SEQ ID NO: 249175 - DNA, 25 bp, Probe Sequence
gtaatcctaaaagcatcttctcact

SEQ ID NO: 249176 - DNA, 25 bp, Probe Sequence
gtaacgccaatagggactttccatt

SEQ ID NO: 249177 - DNA, 25 bp, Probe Sequence
gtaacgccaatagggactttccatg

SEQ ID NO: 249178 - DNA, 25 bp, Probe Sequence
gtacatgacctaatgggactttcct

SEQ ID NO: 249179 - DNA, 25 bp, Probe Sequence
gtacatgaccttaatggactttcct

SEQ ID NO: 249180 - DNA, 25 bp, Probe Sequence
gtaaagactttcttactcttcgcag

SEQ ID NO: 249181 - DNA, 25 bp, Probe Sequence
gtaacaacgtctcgaactttctatg

SEQ ID NO: 249182 - DNA, 25 bp, Probe Sequence
gtaaaactgtatccaaattttcaga

SEQ ID NO: 249183 - DNA, 25 bp, Probe Sequence
gtaaaacctgagccattgattcttc

SEQ ID NO: 249184 - DNA, 25 bp, Probe Sequence
gtaaagaccttgctgaatgtttcca

SEQ ID NO: 249185 - DNA, 25 bp, Probe Sequence
gtaaacccaggactatttattccag

SEQ ID NO: 249186 - DNA, 25 bp, Probe Sequence
gtaaacccagcttttttcttgctat

SEQ ID NO: 249187 - DNA, 25 bp, Probe Sequence
gtaagttccatgtgctttacttgct

SEQ ID NO: 249188 - DNA, 25 bp, Probe Sequence
gtcaggattaactgttatcacctct

SEQ ID NO: 249189 - DNA, 25 bp, Probe Sequence
gtcagacataaagccatgtttcctc

SEQ ID NO: 249190 - DNA, 25 bp, Probe Sequence
gtaactattagagctgggcattctc

SEQ ID NO: 249191 - DNA, 25 bp, Probe Sequence
gtaatttaagaggtggatgtttggg

SEQ ID NO: 249192 - DNA, 25 bp, Probe Sequence
gtaactatgaacactggcagatttg

SEQ ID NO: 249193 - DNA, 25 bp, Probe Sequence
gtaaatcgactaactacagctgttg

SEQ ID NO: 249194 - DNA, 25 bp, Probe Sequence
gtaaatgctccaggactaactttgc

SEQ ID NO: 249195 - DNA, 25 bp, Probe Sequence
gtaactgctgctctgttaactgttc

SEQ ID NO: 249196 - DNA, 25 bp, Probe Sequence
gtaagctattaatgctaactcttgc

SEQ ID NO: 249197 - DNA, 25 bp, Probe Sequence
gtaactattctattgaaatacttgc

SEQ ID NO: 249198 - DNA, 25 bp, Probe Sequence
gtaaatactgcttgaccgtactctc

SEQ ID NO: 249199 - DNA, 25 bp, Probe Sequence
gtcaaacactgtcgactttagtccc

SEQ ID NO: 249200 - DNA, 25 bp, Probe Sequence
gtaaccagatggctctttttcccaa

SEQ ID NO: 249201 - DNA, 25 bp, Probe Sequence
gtaacaggtgcccttatgttgtgct

SEQ ID NO: 249202 - DNA, 25 bp, Probe Sequence
gtaaaggctccagtgtggtggccta

SEQ ID NO: 249203 - DNA, 25 bp, Probe Sequence
gtaaccagtcacagtgggtcctcaa

SEQ ID NO: 249204 - DNA, 25 bp, Probe Sequence
gtaagccctgtgaggagagctccca

SEQ ID NO: 249205 - DNA, 25 bp, Probe Sequence
gtaaatcctgtgttaggaaactgct

SEQ ID NO: 249206 - DNA, 25 bp, Probe Sequence
gtaaatcccaaaactgacagactct

SEQ ID NO: 249207 - DNA, 25 bp, Probe Sequence
gtaactactactaatcaacgcccat

SEQ ID NO: 249208 - DNA, 25 bp, Probe Sequence
gtaactgacaatcaaaaatccacag

SEQ ID NO: 249209 - DNA, 25 bp, Probe Sequence
gtaactacatcacaacacttctaag

SEQ ID NO: 249210 - DNA, 25 bp, Probe Sequence
gtaactgactaggagaagctggtat

SEQ ID NO: 249211 - DNA, 25 bp, Probe Sequence
gtacactgacttgagaccagttgaa

SEQ ID NO: 249212 - DNA, 25 bp, Probe Sequence
gtacactgagctacagaaacttgga

SEQ ID NO: 249213 - DNA, 25 bp, Probe Sequence
gtacagcagagataaaactctgaga

SEQ ID NO: 249214 - DNA, 25 bp, Probe Sequence
gtacagtgcatacataatacttgat

SEQ ID NO: 249215 - DNA, 25 bp, Probe Sequence
gtacagttattttcatctcttgaaa

SEQ ID NO: 249216 - DNA, 25 bp, Probe Sequence
gtaaagctgaaccacagtcttgaca

SEQ ID NO: 249217 - DNA, 25 bp, Probe Sequence
gtacactgttactcagatctacaca

SEQ ID NO: 249218 - DNA, 25 bp, Probe Sequence
gtacaatttacattagcatcccaca

SEQ ID NO: 249219 - DNA, 25 bp, Probe Sequence
gtacacatgttaattagcagttagt

SEQ ID NO: 249220 - DNA, 25 bp, Probe Sequence
gtaactttagaggaggatctgatgg

SEQ ID NO: 249221 - DNA, 25 bp, Probe Sequence
gtaactcttatggagacctagggga

SEQ ID NO: 249222 - DNA, 25 bp, Probe Sequence
gtaagttcacatcaacctcatgggt

SEQ ID NO: 249223 - DNA, 25 bp, Probe Sequence
gtaaggccccaaagcctgaaggctt

SEQ ID NO: 249224 - DNA, 25 bp, Probe Sequence
gtaaggccccaaagcctgaaggctt

SEQ ID NO: 249225 - DNA, 25 bp, Probe Sequence
gtaagtcctccatacaccataggtt

SEQ ID NO: 249226 - DNA, 25 bp, Probe Sequence
gtaaggccacagtaatcaagcaagg

SEQ ID NO: 249227 - DNA, 25 bp, Probe Sequence
gtaaaagacgtgaaccagcaggagt

SEQ ID NO: 249228 - DNA, 25 bp, Probe Sequence
gtaacaggaaatcagtagcacagag

SEQ ID NO: 249229 - DNA, 25 bp, Probe Sequence
gtacacaggcaatgccagcgcactc

SEQ ID NO: 249230 - DNA, 25 bp, Probe Sequence
gtacactggcagttcggccagctgg

SEQ ID NO: 249231 - DNA, 25 bp, Probe Sequence
gtacacatgtgacatcatggccact

SEQ ID NO: 249232 - DNA, 25 bp, Probe Sequence
gtacacagtagccagtgtgacccag

SEQ ID NO: 249233 - DNA, 25 bp, Probe Sequence
gtacacagtagccagtgtgacccag

SEQ ID NO: 249234 - DNA, 25 bp, Probe Sequence
gtacacagtagccagtgtgacccag

SEQ ID NO: 249235 - DNA, 25 bp, Probe Sequence
gtacaaggtggactgtgcatgcctc

SEQ ID NO: 249236 - DNA, 25 bp, Probe Sequence
gtaaagggcaggcatgcatagctaa

SEQ ID NO: 249237 - DNA, 25 bp, Probe Sequence
gtacaagcttgccaaagatagaata

SEQ ID NO: 249238 - DNA, 25 bp, Probe Sequence
gtaaatcttccataagcaaaatgac

SEQ ID NO: 249239 - DNA, 25 bp, Probe Sequence
gtaactcaaccttaagcaataatta

SEQ ID NO: 249240 - DNA, 25 bp, Probe Sequence
gtaagcaaagctgaactgtaaatct

SEQ ID NO: 249241 - DNA, 25 bp, Probe Sequence
gtacacacaaacctggtgtaaattg

SEQ ID NO: 249242 - DNA, 25 bp, Probe Sequence
gtacacacaaaaactggtgtaattg

SEQ ID NO: 249243 - DNA, 25 bp, Probe Sequence
gtaaaatgacatgtcttttctattg

SEQ ID NO: 249244 - DNA, 25 bp, Probe Sequence
gtaaagatgctcaccttgttcagaa

SEQ ID NO: 249245 - DNA, 25 bp, Probe Sequence
gtaacagatcaaacaccggcgctaa

SEQ ID NO: 249246 - DNA, 25 bp, Probe Sequence
gtaaagaaataactgaggctgcata

SEQ ID NO: 249247 - DNA, 25 bp, Probe Sequence
gtaactgaaatatcaggttctagaa

SEQ ID NO: 249248 - DNA, 25 bp, Probe Sequence
gtaactggaatcttcataggtcata

SEQ ID NO: 249249 - DNA, 25 bp, Probe Sequence
gtaaagatgtgtttctaggaatgaa

SEQ ID NO: 249250 - DNA, 25 bp, Probe Sequence
gtaaatctggtggctctggaaacaa

SEQ ID NO: 249251 - DNA, 25 bp, Probe Sequence
gtaaatattgctgtctgaaaaagtg

SEQ ID NO: 249252 - DNA, 25 bp, Probe Sequence
gtacaaaagctggtctgaagtcctt

SEQ ID NO: 249253 - DNA, 25 bp, Probe Sequence
gtacacaagtgcagccagctcaatc

SEQ ID NO: 249254 - DNA, 25 bp, Probe Sequence
gtaacaagatcattgccaccaggaa

SEQ ID NO: 249255 - DNA, 25 bp, Probe Sequence
gtaaagatcatcaccatcctggtca

SEQ ID NO: 249256 - DNA, 25 bp, Probe Sequence
gtaaagatcatcaccatcctggtca

SEQ ID NO: 249257 - DNA, 25 bp, Probe Sequence
gtacaagtgcaaattaactggtcaa

SEQ ID NO: 249258 - DNA, 25 bp, Probe Sequence
gtacaggtgcatattaattttcttg

SEQ ID NO: 249259 - DNA, 25 bp, Probe Sequence
gtacaagctgatgttttgtattttg

SEQ ID NO: 249260 - DNA, 25 bp, Probe Sequence
gtacagaggtttttctgtggttgta

SEQ ID NO: 249261 - DNA, 25 bp, Probe Sequence
gtaagcatgtttacctgttggcttg

SEQ ID NO: 249262 - DNA, 25 bp, Probe Sequence
gtaatgcctcttgacttgggcatcg

SEQ ID NO: 249263 - DNA, 25 bp, Probe Sequence
gtaaactgcttgaagtctgtggcat

SEQ ID NO: 249264 - DNA, 25 bp, Probe Sequence
gtaaactgtactagtctgtgtggga

SEQ ID NO: 249265 - DNA, 25 bp, Probe Sequence
gtaaactgtactagtctgtgtggga

SEQ ID NO: 249266 - DNA, 25 bp, Probe Sequence
gtaaacgtggtcaagggcatcgggg

SEQ ID NO: 249267 - DNA, 25 bp, Probe Sequence
gtaaacgctggtgtctgaatcaggg

SEQ ID NO: 249268 - DNA, 25 bp, Probe Sequence
gtaaacgacgtgtttgagcagctgg

SEQ ID NO: 249269 - DNA, 25 bp, Probe Sequence
gtaagcccagggatgtggcagctgc

SEQ ID NO: 249270 - DNA, 25 bp, Probe Sequence
gtacaccacagcccttgtggatgtg

SEQ ID NO: 249271 - DNA, 25 bp, Probe Sequence
gtacacacaccccatcgcgggtgtg

SEQ ID NO: 249272 - DNA, 25 bp, Probe Sequence
gtcaatcttcgcacacggcgagtgg

SEQ ID NO: 249273 - DNA, 25 bp, Probe Sequence
gtaactctgaccaatctgggaagtg

SEQ ID NO: 249274 - DNA, 25 bp, Probe Sequence
gtaatcctagcactttaggaagctg

SEQ ID NO: 249275 - DNA, 25 bp, Probe Sequence
gtaacgtcagttgatgctggaacat

SEQ ID NO: 249276 - DNA, 25 bp, Probe Sequence
gtaaggtcgagagctgctgagaaat

SEQ ID NO: 249277 - DNA, 25 bp, Probe Sequence
gtaatttcactctctgcattgactt

SEQ ID NO: 249278 - DNA, 25 bp, Probe Sequence
gtacagtatacctctcaacagttta

SEQ ID NO: 249279 - DNA, 25 bp, Probe Sequence
gtccagtagacccgaaaacattcca

SEQ ID NO: 249280 - DNA, 25 bp, Probe Sequence
gtctaggggcggcaatcaacagtct

SEQ ID NO: 249281 - DNA, 25 bp, Probe Sequence
gtaagggggctgtcacaaaagtcaa

SEQ ID NO: 249282 - DNA, 25 bp, Probe Sequence
gtaagtgggaggtccactggggcaa

SEQ ID NO: 249283 - DNA, 25 bp, Probe Sequence
gtaagtgggaggtccactggggcaa

SEQ ID NO: 249284 - DNA, 25 bp, Probe Sequence
gtaagaattgatcgttttggggaag

SEQ ID NO: 249285 - DNA, 25 bp, Probe Sequence
gtaagcataaatctttgaggcagtt

SEQ ID NO: 249286 - DNA, 25 bp, Probe Sequence
gtaactaaactggtcgagcgatgga

SEQ ID NO: 249287 - DNA, 25 bp, Probe Sequence
gtaactaaaatcttcctcaggacta

SEQ ID NO: 249288 - DNA, 25 bp, Probe Sequence
gtaagtcaacaacatcctgggattg

SEQ ID NO: 249289 - DNA, 25 bp, Probe Sequence
gtaactaacactggaccattggatc

SEQ ID NO: 249290 - DNA, 25 bp, Probe Sequence
gtaacctcagaaagcaagaatgtga

SEQ ID NO: 249291 - DNA, 25 bp, Probe Sequence
gtaattatagaagcaagaaggcgat

SEQ ID NO: 249292 - DNA, 25 bp, Probe Sequence
gtaatttaacccagagcagctccac

SEQ ID NO: 249293 - DNA, 25 bp, Probe Sequence
ggaattgttacagcaggggtccctt

SEQ ID NO: 249294 - DNA, 25 bp, Probe Sequence
gtcaactgtaaagcaggggtcagca

SEQ ID NO: 249295 - DNA, 25 bp, Probe Sequence
gtaagcttataacccttttcacaag

SEQ ID NO: 249296 - DNA, 25 bp, Probe Sequence
gtaagctttggcactcttttgactg

SEQ ID NO: 249297 - DNA, 25 bp, Probe Sequence
gtaactttgcatgttcttgttttgt

SEQ ID NO: 249298 - DNA, 25 bp, Probe Sequence
gtaagctgtttcatgaggtgtttct

SEQ ID NO: 249299 - DNA, 25 bp, Probe Sequence
gtacagcatgctatctatagttaat

SEQ ID NO: 249300 - DNA, 25 bp, Probe Sequence
gtacacataattatcatgttgatat

SEQ ID NO: 249301 - DNA, 25 bp, Probe Sequence
gtacaccttagttcatgttgcagct

SEQ ID NO: 249302 - DNA, 25 bp, Probe Sequence
gtacaagtcctttcagtgatgaggg

SEQ ID NO: 249303 - DNA, 25 bp, Probe Sequence
gtacaatgtcgtgagggcgccaggc

SEQ ID NO: 249304 - DNA, 25 bp, Probe Sequence
gtacaagttgtgggactgcatgcta

SEQ ID NO: 249305 - DNA, 25 bp, Probe Sequence
gtaaaattgcagtgatctggtgact

SEQ ID NO: 249306 - DNA, 25 bp, Probe Sequence
gtaaattggcaaatgactcaagact

SEQ ID NO: 249307 - DNA, 25 bp, Probe Sequence
gtaaaatgagataatgaccgtacat

SEQ ID NO: 249308 - DNA, 25 bp, Probe Sequence
gtaaattggatctatccttgataat

SEQ ID NO: 249309 - DNA, 25 bp, Probe Sequence
gtacaaggtgatatccaagaactgt

SEQ ID NO: 249310 - DNA, 25 bp, Probe Sequence
gtacacagggtatttctagaagcag

SEQ ID NO: 249311 - DNA, 25 bp, Probe Sequence
gtcacgctgggaacctgctaaaaaa

SEQ ID NO: 249312 - DNA, 25 bp, Probe Sequence
gtaacagggaccatgctaacagaaa

SEQ ID NO: 249313 - DNA, 25 bp, Probe Sequence
gtaacaggccatttggccaagaaag

SEQ ID NO: 249314 - DNA, 25 bp, Probe Sequence
gtaatcccaatactgggaagccaag

SEQ ID NO: 249315 - DNA, 25 bp, Probe Sequence
gtcatcgccatcaaagggaacccat

SEQ ID NO: 249316 - DNA, 25 bp, Probe Sequence
gtaacttctaagggattcactgcat

SEQ ID NO: 249317 - DNA, 25 bp, Probe Sequence
gtaaatgtttaatatctgactgaaa

SEQ ID NO: 249318 - DNA, 25 bp, Probe Sequence
gtacaatgtttagactgctatggta

SEQ ID NO: 249319 - DNA, 25 bp, Probe Sequence
gtacacagtttagtgatatctagga

SEQ ID NO: 249320 - DNA, 25 bp, Probe Sequence
gtacacagttatacatgtctatcaa

SEQ ID NO: 249321 - DNA, 25 bp, Probe Sequence
gtacaagcttatgctgtcttaaatt

SEQ ID NO: 249322 - DNA, 25 bp, Probe Sequence
gtacaaaataacttcattgcttaat

SEQ ID NO: 249323 - DNA, 25 bp, Probe Sequence
gtacaaaataacttcattgcttaat

SEQ ID NO: 249324 - DNA, 25 bp, Probe Sequence
gtaaagtataatgtcattgtttgct

SEQ ID NO: 249325 - DNA, 25 bp, Probe Sequence
gtaaggtaaatttcatgcatctttt

SEQ ID NO: 249326 - DNA, 25 bp, Probe Sequence
gtaagtggcaattccatacatattt

SEQ ID NO: 249327 - DNA, 25 bp, Probe Sequence
gtaagttgcaagacccatgatacta

SEQ ID NO: 249328 - DNA, 25 bp, Probe Sequence
gtaagctaatgggctagctgtactg

SEQ ID NO: 249329 - DNA, 25 bp, Probe Sequence
gtaactaggagccattgcatttatt

SEQ ID NO: 249330 - DNA, 25 bp, Probe Sequence
gtaaattctgggttcatttgtgatg

SEQ ID NO: 249331 - DNA, 25 bp, Probe Sequence
gtaagttctgtgcagtttggtatga

SEQ ID NO: 249332 - DNA, 25 bp, Probe Sequence
gtaactgttttggttttgctcacaa

SEQ ID NO: 249333 - DNA, 25 bp, Probe Sequence
gtaactgttttggttttgctcacaa

SEQ ID NO: 249334 - DNA, 25 bp, Probe Sequence
gtaaagtctttggtagcttctatcc

SEQ ID NO: 249335 - DNA, 25 bp, Probe Sequence
gtaaacctgttcatactattaaatt

SEQ ID NO: 249336 - DNA, 25 bp, Probe Sequence
gtaaacctgttcatcagtaacagtt

SEQ ID NO: 249337 - DNA, 25 bp, Probe Sequence
gtaagtcctttgatacagaagagtt

SEQ ID NO: 249338 - DNA, 25 bp, Probe Sequence
gtaaggtctatgaaaacaggggctt

SEQ ID NO: 249339 - DNA, 25 bp, Probe Sequence
gtaaggtgttaatgacaaggaatta

SEQ ID NO: 249340 - DNA, 25 bp, Probe Sequence
gtaagggctctaaaacaatggagta

SEQ ID NO: 249341 - DNA, 25 bp, Probe Sequence
gtaatcggtttttgtaatggcgtca

SEQ ID NO: 249342 - DNA, 25 bp, Probe Sequence
gtcaaccttttcagtaaagccctct

SEQ ID NO: 249343 - DNA, 25 bp, Probe Sequence
gtaagccaaattaggattaacttct

SEQ ID NO: 249344 - DNA, 25 bp, Probe Sequence
gtacagcctgaaatggtgtttaccc

SEQ ID NO: 249345 - DNA, 25 bp, Probe Sequence
gtaatgcaccacatagttataatgg

SEQ ID NO: 249346 - DNA, 25 bp, Probe Sequence
gtcaagacatccacagttatttcag

SEQ ID NO: 249347 - DNA, 25 bp, Probe Sequence
gtctaattgccgagttactgtcagc

SEQ ID NO: 249348 - DNA, 25 bp, Probe Sequence
gtcaggtggccgaagtgttcccact

SEQ ID NO: 249349 - DNA, 25 bp, Probe Sequence
gtcaatgacggtaaatggcccgcct

SEQ ID NO: 249350 - DNA, 25 bp, Probe Sequence
gtcaaggaggtttgaagtccacctg

SEQ ID NO: 249351 - DNA, 25 bp, Probe Sequence
gtcaaggacggtaaatgggccgcct

SEQ ID NO: 249352 - DNA, 25 bp, Probe Sequence
gtgaagcggtggctttggaccgccc

SEQ ID NO: 249353 - DNA, 25 bp, Probe Sequence
gtgaacggaggcactgtggccgaga

SEQ ID NO: 249354 - DNA, 25 bp, Probe Sequence
gggatcgccaggcgttttctgagca

SEQ ID NO: 249355 - DNA, 25 bp, Probe Sequence
tggtatgttcggcttgttttggccc

SEQ ID NO: 249356 - DNA, 25 bp, Probe Sequence
ggcatatttagtatttttcccccag

SEQ ID NO: 249357 - DNA, 25 bp, Probe Sequence
ggcctaagggctatgtttggtacca

SEQ ID NO: 249358 - DNA, 25 bp, Probe Sequence
ggcctaagggctatgtttggtacca

SEQ ID NO: 249359 - DNA, 25 bp, Probe Sequence
gtcactaaccctattgttcgcaatg

SEQ ID NO: 249360 - DNA, 25 bp, Probe Sequence
gtaagaaccctgaagttggtcctga

SEQ ID NO: 249361 - DNA, 25 bp, Probe Sequence
gtaacaaacctgcatgttgtgcaca

SEQ ID NO: 249362 - DNA, 25 bp, Probe Sequence
gtacaaattcctcattctgtcacct

SEQ ID NO: 249363 - DNA, 25 bp, Probe Sequence
gtacaaattcctcattctgtcacct

SEQ ID NO: 249364 - DNA, 25 bp, Probe Sequence
gtaaattttcagtttctacacactt

SEQ ID NO: 249365 - DNA, 25 bp, Probe Sequence
gtaaattttcagtttctacacactt

SEQ ID NO: 249366 - DNA, 25 bp, Probe Sequence
gtaaatgttttatttgtaagattct

SEQ ID NO: 249367 - DNA, 25 bp, Probe Sequence
gtaaatttcttattgatggcaacta

SEQ ID NO: 249368 - DNA, 25 bp, Probe Sequence
gtaaatttcttattgatggcaacta

SEQ ID NO: 249369 - DNA, 25 bp, Probe Sequence
gtaaatttcttattgatggcaacta

SEQ ID NO: 249370 - DNA, 25 bp, Probe Sequence
gtaaatttcttattgatggcaacta

SEQ ID NO: 249371 - DNA, 25 bp, Probe Sequence
gtaaatgttctgagtggagctacta

SEQ ID NO: 249372 - DNA, 25 bp, Probe Sequence
gtaactgttttgtgtatgtacttag

SEQ ID NO: 249373 - DNA, 25 bp, Probe Sequence
gtaaatgttctcgcttcagaactta

SEQ ID NO: 249374 - DNA, 25 bp, Probe Sequence
gtaaatgtctattgccgtaaattgt

SEQ ID NO: 249375 - DNA, 25 bp, Probe Sequence
gtaacttcttcgttgacacagtggt

SEQ ID NO: 249376 - DNA, 25 bp, Probe Sequence
gtaaaatctgtcgaaatgcaccatg

SEQ ID NO: 249377 - DNA, 25 bp, Probe Sequence
gtaatatactgtggacacaacttgc

SEQ ID NO: 249378 - DNA, 25 bp, Probe Sequence
gtaaatacttggacagaggttgctg

SEQ ID NO: 249379 - DNA, 25 bp, Probe Sequence
gtaaattcttacgacagtatttgtt

SEQ ID NO: 249380 - DNA, 25 bp, Probe Sequence
gtaagagtttacccagaatgtcaga

SEQ ID NO: 249381 - DNA, 25 bp, Probe Sequence
gtaagcctgttgtgctcaatcttca

SEQ ID NO: 249382 - DNA, 25 bp, Probe Sequence
gtaaacttgtgttgctaagtgctaa

SEQ ID NO: 249383 - DNA, 25 bp, Probe Sequence
gtaaacttgtgtattgagtcttaac

SEQ ID NO: 249384 - DNA, 25 bp, Probe Sequence
gtacaagttgttccttaagtctaga

SEQ ID NO: 249385 - DNA, 25 bp, Probe Sequence
gtaaagcctgctgatcttaagaaga

SEQ ID NO: 249386 - DNA, 25 bp, Probe Sequence
gtaacagttggtgtgacaagacaga

SEQ ID NO: 249387 - DNA, 25 bp, Probe Sequence
gtaagctgtgctgtttagaaacaac

SEQ ID NO: 249388 - DNA, 25 bp, Probe Sequence
gtaagactgctgtcatatttgacta

SEQ ID NO: 249389 - DNA, 25 bp, Probe Sequence
gtaaagctgtattgtcatatatcaa

SEQ ID NO: 249390 - DNA, 25 bp, Probe Sequence
gtaaaggtcattgcttcccactgac

SEQ ID NO: 249391 - DNA, 25 bp, Probe Sequence
gtaacgttcattggttcctttgata

SEQ ID NO: 249392 - DNA, 25 bp, Probe Sequence
gtaaggtctcttgtatgttgttaaa

SEQ ID NO: 249393 - DNA, 25 bp, Probe Sequence
gtaagatgtccttcatgttttctta

SEQ ID NO: 249394 - DNA, 25 bp, Probe Sequence
gtacaatttttcttcttttctatat

SEQ ID NO: 249395 - DNA, 25 bp, Probe Sequence
gtaaatctttttgcttctactttca

SEQ ID NO: 249396 - DNA, 25 bp, Probe Sequence
gtaaatctttttgcttctactttca

SEQ ID NO: 249397 - DNA, 25 bp, Probe Sequence
gtaaaactaattggtttatgctgtt

SEQ ID NO: 249398 - DNA, 25 bp, Probe Sequence
gtaactactaaatgtttatgcctct

SEQ ID NO: 249399 - DNA, 25 bp, Probe Sequence
gtaaccagtggatatttaatcttct

SEQ ID NO: 249400 - DNA, 25 bp, Probe Sequence
gtaaccgtgcgattatacaaattat

SEQ ID NO: 249401 - DNA, 25 bp, Probe Sequence
gtctaccttcgaaaccaagttatat

SEQ ID NO: 249402 - DNA, 25 bp, Probe Sequence
gtcgacctattgtgggacattttta

SEQ ID NO: 249403 - DNA, 25 bp, Probe Sequence
gggatactttgctggaaaactttct

SEQ ID NO: 249404 - DNA, 25 bp, Probe Sequence
gggaagccatttgcaaaaacctttg

SEQ ID NO: 249405 - DNA, 25 bp, Probe Sequence
gtaatcccacttgaaataacccttg

SEQ ID NO: 249406 - DNA, 25 bp, Probe Sequence
gtaatcctatttggtggtagggcct

SEQ ID NO: 249407 - DNA, 25 bp, Probe Sequence
gtaacccactgcagtgttaggagac

SEQ ID NO: 249408 - DNA, 25 bp, Probe Sequence
gtcaacacctccagttatcaggaat

SEQ ID NO: 249409 - DNA, 25 bp, Probe Sequence
gtcatccacctcgctttaaaaataa

SEQ ID NO: 249410 - DNA, 25 bp, Probe Sequence
gtcgatatcccagctttcaacaaaa

SEQ ID NO: 249411 - DNA, 25 bp, Probe Sequence
gtaaatcccactgtatacaaaactg

SEQ ID NO: 249412 - DNA, 25 bp, Probe Sequence
gtaaatcccattatgatttcacaca

SEQ ID NO: 249413 - DNA, 25 bp, Probe Sequence
gtaacacactacattatattcacat

SEQ ID NO: 249414 - DNA, 25 bp, Probe Sequence
gtaaaactctcaagtctgagtccat

SEQ ID NO: 249415 - DNA, 25 bp, Probe Sequence
gtacaataaaacctcatgacctcat

SEQ ID NO: 249416 - DNA, 25 bp, Probe Sequence
gtacaataaagctgccttgtctgca

SEQ ID NO: 249417 - DNA, 25 bp, Probe Sequence
gtaagcaaatagtgccctcagctac

SEQ ID NO: 249418 - DNA, 25 bp, Probe Sequence
gtaagccaagatcgtgccattgcac

SEQ ID NO: 249419 - DNA, 25 bp, Probe Sequence
gtaaacacagtgctgcgagatcgct

SEQ ID NO: 249420 - DNA, 25 bp, Probe Sequence
gtaatctacgtattagtcatcgcta

SEQ ID NO: 249421 - DNA, 25 bp, Probe Sequence
gtaacaagcccattatgctatcctt

SEQ ID NO: 249422 - DNA, 25 bp, Probe Sequence
gtaaactctccattttatcaattcc

SEQ ID NO: 249423 - DNA, 25 bp, Probe Sequence
gtaaaaatccactatttccattgaa

SEQ ID NO: 249424 - DNA, 25 bp, Probe Sequence
gtaataaaccacttcctcatttgat

SEQ ID NO: 249425 - DNA, 25 bp, Probe Sequence
gtaataaacccaattcattctgtaa

SEQ ID NO: 249426 - DNA, 25 bp, Probe Sequence
gtaaaatgagaccatcttattgctg

SEQ ID NO: 249427 - DNA, 25 bp, Probe Sequence
gtaaaagagacttgttatttattat

SEQ ID NO: 249428 - DNA, 25 bp, Probe Sequence
gtaaaagaactctctgttcatccat

SEQ ID NO: 249429 - DNA, 25 bp, Probe Sequence
gtaaaaggagcctctatattccaga

SEQ ID NO: 249430 - DNA, 25 bp, Probe Sequence
gtaaataggttcttcttgttctgag

SEQ ID NO: 249431 - DNA, 25 bp, Probe Sequence
gtaaatcagtttcacatcatgtatt

SEQ ID NO: 249432 - DNA, 25 bp, Probe Sequence
gtaaatcagatatacctatgttaac

SEQ ID NO: 249433 - DNA, 25 bp, Probe Sequence
gtcaccataggcaataccttttttc

SEQ ID NO: 249434 - DNA, 25 bp, Probe Sequence
gtcatccgaagaacaaattttttgt

SEQ ID NO: 249435 - DNA, 25 bp, Probe Sequence
gtcaccgtggctcaaacttgtaatc

SEQ ID NO: 249436 - DNA, 25 bp, Probe Sequence
gtcacaccagggcaactcttggaag

SEQ ID NO: 249437 - DNA, 25 bp, Probe Sequence
gtccaataaaaaattctttgtatgg

SEQ ID NO: 249438 - DNA, 25 bp, Probe Sequence
gggaaaaaatcgttctgtctttgtg

SEQ ID NO: 249439 - DNA, 25 bp, Probe Sequence
gtggaaaagaagattcaggccctga

SEQ ID NO: 249440 - DNA, 25 bp, Probe Sequence
gtgtaactacaaacttaccactggt

SEQ ID NO: 249441 - DNA, 25 bp, Probe Sequence
gtaaaccacattcttgacaactatt

SEQ ID NO: 249442 - DNA, 25 bp, Probe Sequence
gtaaaccacttgattcaataacaaa

SEQ ID NO: 249443 - DNA, 25 bp, Probe Sequence
gtaattcgcaatgattccatctaaa

SEQ ID NO: 249444 - DNA, 25 bp, Probe Sequence
gtaacttgcgagtatttgtctaaat

SEQ ID NO: 249445 - DNA, 25 bp, Probe Sequence
gtaactgtgtaatttgttcaagata

SEQ ID NO: 249446 - DNA, 25 bp, Probe Sequence
gtaatgttgtaatttgtacctaagt

SEQ ID NO: 249447 - DNA, 25 bp, Probe Sequence
gtaatgagttaccttatccttagaa

SEQ ID NO: 249448 - DNA, 25 bp, Probe Sequence
gtaatggtatcactgttgacccttg

SEQ ID NO: 249449 - DNA, 25 bp, Probe Sequence
gtaaattggcaccgtgtcacactgt

SEQ ID NO: 249450 - DNA, 25 bp, Probe Sequence
gtaaattggcaccgtgtcacactgt

SEQ ID NO: 249451 - DNA, 25 bp, Probe Sequence
gtgaagttggcacaggtaacatttg

SEQ ID NO: 249452 - DNA, 25 bp, Probe Sequence
gtcatctggggaaaagtaactcggg

SEQ ID NO: 249453 - DNA, 25 bp, Probe Sequence
gtcatctggggaaaagtaactcggg

SEQ ID NO: 249454 - DNA, 25 bp, Probe Sequence
gtcatcggtaattactattcgtctg

SEQ ID NO: 249455 - DNA, 25 bp, Probe Sequence
gtccctgttttaccatcctgggagc

SEQ ID NO: 249456 - DNA, 25 bp, Probe Sequence
gtcactattttatgtcccttatcac

SEQ ID NO: 249457 - DNA, 25 bp, Probe Sequence
gtcacagaattttgggacccattaa

SEQ ID NO: 249458 - DNA, 25 bp, Probe Sequence
gtaataattctgtgtgtcaggcctc

SEQ ID NO: 249459 - DNA, 25 bp, Probe Sequence
gtaaaattatacctgtaagtcacta

SEQ ID NO: 249460 - DNA, 25 bp, Probe Sequence
gtaaaatttttactaatgtcattat

SEQ ID NO: 249461 - DNA, 25 bp, Probe Sequence
gtaaaatttttactaatgtcattat

SEQ ID NO: 249462 - DNA, 25 bp, Probe Sequence
gtaaatctttgtacagaaactgatt

SEQ ID NO: 249463 - DNA, 25 bp, Probe Sequence
gtaaatctgctttgtggtgacctga

SEQ ID NO: 249464 - DNA, 25 bp, Probe Sequence
gtaaattgtgaaacagctgccctgt

SEQ ID NO: 249465 - DNA, 25 bp, Probe Sequence
gtaacacagcaatacagtcctcttg

SEQ ID NO: 249466 - DNA, 25 bp, Probe Sequence
gtaaagccaaaaccatcttctgtgt

SEQ ID NO: 249467 - DNA, 25 bp, Probe Sequence
gtaaatgctcaatcaacatctactg

SEQ ID NO: 249468 - DNA, 25 bp, Probe Sequence
gtaaatgcttaactgtagtcctgag

SEQ ID NO: 249469 - DNA, 25 bp, Probe Sequence
gtaaatgtatactttgatgtccctg

SEQ ID NO: 249470 - DNA, 25 bp, Probe Sequence
gtaagcagtttattctgagccccgg

SEQ ID NO: 249471 - DNA, 25 bp, Probe Sequence
gtaatgtggttgtgatagccccgca

SEQ ID NO: 249472 - DNA, 25 bp, Probe Sequence
gtaaggcgtggagacagctccatcc

SEQ ID NO: 249473 - DNA, 25 bp, Probe Sequence
gtaaaggagggggcacctgcatgtc

SEQ ID NO: 249474 - DNA, 25 bp, Probe Sequence
gtaaatgattggagccatctggctg

SEQ ID NO: 249475 - DNA, 25 bp, Probe Sequence
gtaaatgcctggacatagctcttgt

SEQ ID NO: 249476 - DNA, 25 bp, Probe Sequence
gtaagtgccttcaatactttgcatt

SEQ ID NO: 249477 - DNA, 25 bp, Probe Sequence
gtaagtctctttccatctacagagt

SEQ ID NO: 249478 - DNA, 25 bp, Probe Sequence
gtaaatcatctttccaatccagagg

SEQ ID NO: 249479 - DNA, 25 bp, Probe Sequence
gtcaatatagctgtccaagtgcgag

SEQ ID NO: 249480 - DNA, 25 bp, Probe Sequence
gtaattagcatggccccagtccatg

SEQ ID NO: 249481 - DNA, 25 bp, Probe Sequence
gtaataagcaggatccagtttgaga

SEQ ID NO: 249482 - DNA, 25 bp, Probe Sequence
gtaaatagcctgatgctcatttgga

SEQ ID NO: 249483 - DNA, 25 bp, Probe Sequence
gtaaatcacttaactcctctgaacc

SEQ ID NO: 249484 - DNA, 25 bp, Probe Sequence
gtaacaaccaagctctctcagaatt

SEQ ID NO: 249485 - DNA, 25 bp, Probe Sequence
gtaaagactaaggtttcgagagcat

SEQ ID NO: 249486 - DNA, 25 bp, Probe Sequence
gtaaaccgagaccatttgcaggagg

SEQ ID NO: 249487 - DNA, 25 bp, Probe Sequence
gtaacacaggaacaactgccggtga

SEQ ID NO: 249488 - DNA, 25 bp, Probe Sequence
gtaacaagaaataccgtgccctgag

SEQ ID NO: 249489 - DNA, 25 bp, Probe Sequence
gtaacaagaaataccgtgccctgag

SEQ ID NO: 249490 - DNA, 25 bp, Probe Sequence
gtaacaagaaataccgtgccctgag

SEQ ID NO: 249491 - DNA, 25 bp, Probe Sequence
gtaaaattatatcccgctccagaag

SEQ ID NO: 249492 - DNA, 25 bp, Probe Sequence
gtaaacttatgactcttcatttata

SEQ ID NO: 249493 - DNA, 25 bp, Probe Sequence
gtaactctgttgacattcctttatg

SEQ ID NO: 249494 - DNA, 25 bp, Probe Sequence
gtaacatctgtatcaggccctacat

SEQ ID NO: 249495 - DNA, 25 bp, Probe Sequence
gtaacagtctgatcgtgacgctgaa

SEQ ID NO: 249496 - DNA, 25 bp, Probe Sequence
gtaaactatgactgctgagtgataa

SEQ ID NO: 249497 - DNA, 25 bp, Probe Sequence
gtaaatctgatcatatctacatgta

SEQ ID NO: 249498 - DNA, 25 bp, Probe Sequence
gtaagcactacaatcatgtcaagtt

SEQ ID NO: 249499 - DNA, 25 bp, Probe Sequence
gtaacttacatgatgtcaaatccaa

SEQ ID NO: 249500 - DNA, 25 bp, Probe Sequence
gtgaaccatacgtgattaataaaga

SEQ ID NO: 249501 - DNA, 25 bp, Probe Sequence
gtaagtagaccccactgagaaacaa

SEQ ID NO: 249502 - DNA, 25 bp, Probe Sequence
gtaatgtagtcattccctcttaact

SEQ ID NO: 249503 - DNA, 25 bp, Probe Sequence
gtaatgatgtggaactcctctaaaa

SEQ ID NO: 249504 - DNA, 25 bp, Probe Sequence
gtaatgagggatcctgcaagcaaaa

SEQ ID NO: 249505 - DNA, 25 bp, Probe Sequence
gtaaatggtattagcggctgaagaa

SEQ ID NO: 249506 - DNA, 25 bp, Probe Sequence
gtaaaggatctttggagccagaaaa

SEQ ID NO: 249507 - DNA, 25 bp, Probe Sequence
gtaaaacagcaattggagctctaaa

SEQ ID NO: 249508 - DNA, 25 bp, Probe Sequence
gtaacaagcaagttgaactcagaaa

SEQ ID NO: 249509 - DNA, 25 bp, Probe Sequence
gtcactctggaatatagacccgtaa

SEQ ID NO: 249510 - DNA, 25 bp, Probe Sequence
gtcacctgaacataaaggccatggc

SEQ ID NO: 249511 - DNA, 25 bp, Probe Sequence
gtcatcctcaaccaagaaatccggg

SEQ ID NO: 249512 - DNA, 25 bp, Probe Sequence
gtcacccacagcaatgagaagcacg

SEQ ID NO: 249513 - DNA, 25 bp, Probe Sequence
gtcacccatgatgaaaactggactt

SEQ ID NO: 249514 - DNA, 25 bp, Probe Sequence
gtaatcacatatgcacagtatctat

SEQ ID NO: 249515 - DNA, 25 bp, Probe Sequence
gtaagcacacatgtaattgatgatt

SEQ ID NO: 249516 - DNA, 25 bp, Probe Sequence
gtaatggcatgagatagctggtgtt

SEQ ID NO: 249517 - DNA, 25 bp, Probe Sequence
gtaaggctgtgtaagatttgttttt

SEQ ID NO: 249518 - DNA, 25 bp, Probe Sequence
gtaaagctgtcacaatcaatgtttt

SEQ ID NO: 249519 - DNA, 25 bp, Probe Sequence
gtaaacccagctactcaggaggttg

SEQ ID NO: 249520 - DNA, 25 bp, Probe Sequence
gtaaacccagctactcaggaggttg

SEQ ID NO: 249521 - DNA, 25 bp, Probe Sequence
gtcagagtcccctcttggggactgg

SEQ ID NO: 249522 - DNA, 25 bp, Probe Sequence
gtcagagtcccctcttggggactgg

SEQ ID NO: 249523 - DNA, 25 bp, Probe Sequence
gtcagggtcccagctgtgggtgaga

SEQ ID NO: 249524 - DNA, 25 bp, Probe Sequence
gtcaatggagcagaggcggggaagg

SEQ ID NO: 249525 - DNA, 25 bp, Probe Sequence
gtaagagatacagttggggaaatgc

SEQ ID NO: 249526 - DNA, 25 bp, Probe Sequence
gtaaagccatagacttgtgcaaaac

SEQ ID NO: 249527 - DNA, 25 bp, Probe Sequence
gtaaaggccgaggatgctgctaaac

SEQ ID NO: 249528 - DNA, 25 bp, Probe Sequence
gtaaagtgccaaccatatccatcaa

SEQ ID NO: 249529 - DNA, 25 bp, Probe Sequence
gtaatcacaccatttcatacttcaa

SEQ ID NO: 249530 - DNA, 25 bp, Probe Sequence
gtaacagcctttcaattcatatact

SEQ ID NO: 249531 - DNA, 25 bp, Probe Sequence
gtaaaacatttaacattcatacagt

SEQ ID NO: 249532 - DNA, 25 bp, Probe Sequence
gtaaacacattaatttcctcaacat

SEQ ID NO: 249533 - DNA, 25 bp, Probe Sequence
gtaagaaattcaatacaactggaaa

SEQ ID NO: 249534 - DNA, 25 bp, Probe Sequence
gtaagtagttgtcatattctggaaa

SEQ ID NO: 249535 - DNA, 25 bp, Probe Sequence
gtaactgatgtcatacaacctggaa

SEQ ID NO: 249536 - DNA, 25 bp, Probe Sequence
gtaacattgtatgataacctgaaat

SEQ ID NO: 249537 - DNA, 25 bp, Probe Sequence
gtaaatgtttgtcatacagcttaat

SEQ ID NO: 249538 - DNA, 25 bp, Probe Sequence
gtaaggtgcctcccataaggaagaa

SEQ ID NO: 249539 - DNA, 25 bp, Probe Sequence
gtaagtctgaacctctaatggaaaa

SEQ ID NO: 249540 - DNA, 25 bp, Probe Sequence
gtaagtctatagcttaagcacttta

SEQ ID NO: 249541 - DNA, 25 bp, Probe Sequence
gtaagtctcatagtataccagcttt

SEQ ID NO: 249542 - DNA, 25 bp, Probe Sequence
gtaaacatcaacaaactgattcttg

SEQ ID NO: 249543 - DNA, 25 bp, Probe Sequence
gtaacaatgcagtctgcaagctttc

SEQ ID NO: 249544 - DNA, 25 bp, Probe Sequence
gtaaccacagtggcgagtgttcatt

SEQ ID NO: 249545 - DNA, 25 bp, Probe Sequence
gtaacaattggtggatgtattatta

SEQ ID NO: 249546 - DNA, 25 bp, Probe Sequence
gtaacacatatcctgcctttactaa

SEQ ID NO: 249547 - DNA, 25 bp, Probe Sequence
gtaaccattacagcctaaataaagc

SEQ ID NO: 249548 - DNA, 25 bp, Probe Sequence
gtaactttactgccattaaaaagat

SEQ ID NO: 249549 - DNA, 25 bp, Probe Sequence
gtaactttactgaagatcatcaaac

SEQ ID NO: 249550 - DNA, 25 bp, Probe Sequence
gtaacataaactaagaatctcacaa

SEQ ID NO: 249551 - DNA, 25 bp, Probe Sequence
gtcacttagttcacggtctcagtag

SEQ ID NO: 249552 - DNA, 25 bp, Probe Sequence
gtaattcagattaagcttctgggta

SEQ ID NO: 249553 - DNA, 25 bp, Probe Sequence
gtaatgttttgaggatatcggtgtt

SEQ ID NO: 249554 - DNA, 25 bp, Probe Sequence
gtaatggctttgtcaatatattggt

SEQ ID NO: 249555 - DNA, 25 bp, Probe Sequence
gtcacccatcttccaggtaagcagt

SEQ ID NO: 249556 - DNA, 25 bp, Probe Sequence
gtcaccctgggacagtaatgcctta

SEQ ID NO: 249557 - DNA, 25 bp, Probe Sequence
gtaacactattacagtattgctatt

SEQ ID NO: 249558 - DNA, 25 bp, Probe Sequence
gtaacatttccaaagctatgatcta

SEQ ID NO: 249559 - DNA, 25 bp, Probe Sequence
gtaatctcttcgggatctcagatat

SEQ ID NO: 249560 - DNA, 25 bp, Probe Sequence
gtaagcgttagcggcattaattcac

SEQ ID NO: 249561 - DNA, 25 bp, Probe Sequence
gtaaggtaagtatttgaagttgcca

SEQ ID NO: 249562 - DNA, 25 bp, Probe Sequence
gtaaggcgtagaatctgtccgtctg

SEQ ID NO: 249563 - DNA, 25 bp, Probe Sequence
gtaagaggtggaagagcccgtcagg

SEQ ID NO: 249564 - DNA, 25 bp, Probe Sequence
gtaaagcctgagacagctgccttgt

SEQ ID NO: 249565 - DNA, 25 bp, Probe Sequence
gtaaagtgtgagacagctgccttgt

SEQ ID NO: 249566 - DNA, 25 bp, Probe Sequence
gtaagagatggggttgctgcagtgt

SEQ ID NO: 249567 - DNA, 25 bp, Probe Sequence
gtaaagagtctgccttctggatctc

SEQ ID NO: 249568 - DNA, 25 bp, Probe Sequence
gtgaacacaactctttggttaatag

SEQ ID NO: 249569 - DNA, 25 bp, Probe Sequence
gtaatcccactgagtcggttgatca

SEQ ID NO: 249570 - DNA, 25 bp, Probe Sequence
gtaaggctgcctgaggggcctgaca

SEQ ID NO: 249571 - DNA, 25 bp, Probe Sequence
gtaagtgcccattgggtggcctgtt

SEQ ID NO: 249572 - DNA, 25 bp, Probe Sequence
gtaagtgcccattgggtggcctgtt

SEQ ID NO: 249573 - DNA, 25 bp, Probe Sequence
gtaacacccaagcagagtctctgtg

SEQ ID NO: 249574 - DNA, 25 bp, Probe Sequence
gtaacacagttacagcagttgcttc

SEQ ID NO: 249575 - DNA, 25 bp, Probe Sequence
gtaatcaggttaaacccacttccat

SEQ ID NO: 249576 - DNA, 25 bp, Probe Sequence
gtcaaaggttgacactccctgttca

SEQ ID NO: 249577 - DNA, 25 bp, Probe Sequence
gtcaacaggtaacacttccgctgct

SEQ ID NO: 249578 - DNA, 25 bp, Probe Sequence
gtcacaacgctcagacgttcaacct

SEQ ID NO: 249579 - DNA, 25 bp, Probe Sequence
gtcaatacctcatactgctttacct

SEQ ID NO: 249580 - DNA, 25 bp, Probe Sequence
gtcaaatcccagtggtgtgtgtcct

SEQ ID NO: 249581 - DNA, 25 bp, Probe Sequence
gtaaaccgcatggatgggcttcccc

SEQ ID NO: 249582 - DNA, 25 bp, Probe Sequence
gtaaaccgcatggatgggcttcccc

SEQ ID NO: 249583 - DNA, 25 bp, Probe Sequence
gtaaaccgcatggatgggcttcccc

SEQ ID NO: 249584 - DNA, 25 bp, Probe Sequence
gtaacttgccaggtggacttgacca

SEQ ID NO: 249585 - DNA, 25 bp, Probe Sequence
gtaactgtgtggggttctaatgcca

SEQ ID NO: 249586 - DNA, 25 bp, Probe Sequence
gtcacctattacggtcctactgagc

SEQ ID NO: 249587 - DNA, 25 bp, Probe Sequence
gtaaaattgagcaaggcctactagc

SEQ ID NO: 249588 - DNA, 25 bp, Probe Sequence
gtcaaatctttggggagctactagg

SEQ ID NO: 249589 - DNA, 25 bp, Probe Sequence
gtcaaattgtccggggtagttggca

SEQ ID NO: 249590 - DNA, 25 bp, Probe Sequence
gtaagggctccgtgcagtagttaac

SEQ ID NO: 249591 - DNA, 25 bp, Probe Sequence
gtaaggtccttagcaaagtctcaga

SEQ ID NO: 249592 - DNA, 25 bp, Probe Sequence
gtaaagcctcttttcagaagtgccg

SEQ ID NO: 249593 - DNA, 25 bp, Probe Sequence
gtaaaccgaatgtctccaaggtgca

SEQ ID NO: 249594 - DNA, 25 bp, Probe Sequence
gtaaaccgatcaaccacagagtggg

SEQ ID NO: 249595 - DNA, 25 bp, Probe Sequence
gtaaacttgctcaacgacatcgtga

SEQ ID NO: 249596 - DNA, 25 bp, Probe Sequence
gtaaacttcccagatatcaaaatag

SEQ ID NO: 249597 - DNA, 25 bp, Probe Sequence
gtaacactttccccttgaagagaag

SEQ ID NO: 249598 - DNA, 25 bp, Probe Sequence
gtcaacccttaccgcattgaaggcc

SEQ ID NO: 249599 - DNA, 25 bp, Probe Sequence
gtaagccctcatgtccaagggagcc

SEQ ID NO: 249600 - DNA, 25 bp, Probe Sequence
gtcaaggcctacttcaagcggggca

SEQ ID NO: 249601 - DNA, 25 bp, Probe Sequence
gtaaggcaatcttggcacacgtggg

SEQ ID NO: 249602 - DNA, 25 bp, Probe Sequence
gtaaacttcatactacattgtcagt

SEQ ID NO: 249603 - DNA, 25 bp, Probe Sequence
gtaacctaatagtacattgactgct

SEQ ID NO: 249604 - DNA, 25 bp, Probe Sequence
gtaactctgccatcagactggagct

SEQ ID NO: 249605 - DNA, 25 bp, Probe Sequence
gtaagtccagcatcaagcgggtgct

SEQ ID NO: 249606 - DNA, 25 bp, Probe Sequence
gtaagtacacacacggtgattcatg

SEQ ID NO: 249607 - DNA, 25 bp, Probe Sequence
gtaagtgaacgttgcaattgaccat

SEQ ID NO: 249608 - DNA, 25 bp, Probe Sequence
gtaactccagctgtcaaagatccat

SEQ ID NO: 249609 - DNA, 25 bp, Probe Sequence
gtaacctactcttgaatcagtcaca

SEQ ID NO: 249610 - DNA, 25 bp, Probe Sequence
gtcaagcctaccagagcagctgata

SEQ ID NO: 249611 - DNA, 25 bp, Probe Sequence
gtaagcctggcccataatgtgaaca

SEQ ID NO: 249612 - DNA, 25 bp, Probe Sequence
gtaacctgtggcctgatctgtaaat

SEQ ID NO: 249613 - DNA, 25 bp, Probe Sequence
gtaacctgtggcctgatctgtaaat

SEQ ID NO: 249614 - DNA, 25 bp, Probe Sequence
tgtaatcctgtaggttggtacttcc

SEQ ID NO: 249615 - DNA, 25 bp, Probe Sequence
gtaatatttaaggtggtccgtgata

SEQ ID NO: 249616 - DNA, 25 bp, Probe Sequence
gtaatgtcattgtgtttgaccttga

SEQ ID NO: 249617 - DNA, 25 bp, Probe Sequence
gtaattgcagataactttgactttc

SEQ ID NO: 249618 - DNA, 25 bp, Probe Sequence
gtaattgcagataactttgactttc

SEQ ID NO: 249619 - DNA, 25 bp, Probe Sequence
gtaactgagtgttctcttgtttctt

SEQ ID NO: 249620 - DNA, 25 bp, Probe Sequence
gtaaactaatacattgtctagcatt

SEQ ID NO: 249621 - DNA, 25 bp, Probe Sequence
gtaatatctacttttacttagagtt

SEQ ID NO: 249622 - DNA, 25 bp, Probe Sequence
gtaatcgttgttatactgtattgtt

SEQ ID NO: 249623 - DNA, 25 bp, Probe Sequence
gtaagcgatttgaaacactattttt

SEQ ID NO: 249624 - DNA, 25 bp, Probe Sequence
gtcaaggctttagacctttatccta

SEQ ID NO: 249625 - DNA, 25 bp, Probe Sequence
gtaagagctctaagtacctttccta

SEQ ID NO: 249626 - DNA, 25 bp, Probe Sequence
gtaagggctgaacacccttggtaga

SEQ ID NO: 249627 - DNA, 25 bp, Probe Sequence
gtaatgggtcacacaaacttggtgg

SEQ ID NO: 249628 - DNA, 25 bp, Probe Sequence
gtaattattacttcaaatcctttgg

SEQ ID NO: 249629 - DNA, 25 bp, Probe Sequence
gtaatctattatgcccgacatcttt

SEQ ID NO: 249630 - DNA, 25 bp, Probe Sequence
gtaagcatttccaccagaacttgag

SEQ ID NO: 249631 - DNA, 25 bp, Probe Sequence
gtaacaataaatcacagccacttga

SEQ ID NO: 249632 - DNA, 25 bp, Probe Sequence
gtaacctgaaatgccactattgtgg

SEQ ID NO: 249633 - DNA, 25 bp, Probe Sequence
gtaaactaatgaaagcctattgtga

SEQ ID NO: 249634 - DNA, 25 bp, Probe Sequence
gtaaactgagagtagagtgcttagt

SEQ ID NO: 249635 - DNA, 25 bp, Probe Sequence
gtaaactgagagatgcaaatgtaat

SEQ ID NO: 249636 - DNA, 25 bp, Probe Sequence
gtaaactggcaaggtaatgtcatta

SEQ ID NO: 249637 - DNA, 25 bp, Probe Sequence
gtaagaggtcactcttgagtgcatt

SEQ ID NO: 249638 - DNA, 25 bp, Probe Sequence
gtaacagccaactctggaagacatt

SEQ ID NO: 249639 - DNA, 25 bp, Probe Sequence
gtaacatcctcctctggataacttg

SEQ ID NO: 249640 - DNA, 25 bp, Probe Sequence
gtaacatcccctgtggatcaaagga

SEQ ID NO: 249641 - DNA, 25 bp, Probe Sequence
gtaactccacctgagttacaaagac

SEQ ID NO: 249642 - DNA, 25 bp, Probe Sequence
gtcacagttaccgcgtgtactacaa

SEQ ID NO: 249643 - DNA, 25 bp, Probe Sequence
gtaattaacctccggtgctctgaac

SEQ ID NO: 249644 - DNA, 25 bp, Probe Sequence
gtaatttatcctggcgttcttgtga

SEQ ID NO: 249645 - DNA, 25 bp, Probe Sequence
gtaatctttctttgcctaattgcag

SEQ ID NO: 249646 - DNA, 25 bp, Probe Sequence
gtaattctggctttctctaataaaa

SEQ ID NO: 249647 - DNA, 25 bp, Probe Sequence
gtaatctatgtgtttctgtaacaaa

SEQ ID NO: 249648 - DNA, 25 bp, Probe Sequence
gtaacttgtgtctcatgaaaatcag

SEQ ID NO: 249649 - DNA, 25 bp, Probe Sequence
gtaactccttcatgcaataaactga

SEQ ID NO: 249650 - DNA, 25 bp, Probe Sequence
gtaacagtttcatgcttataccaaa

SEQ ID NO: 249651 - DNA, 25 bp, Probe Sequence
gtaacagttgctaggcttcaatgcc

SEQ ID NO: 249652 - DNA, 25 bp, Probe Sequence
gtaacagttgctaggcttcaatgcc

SEQ ID NO: 249653 - DNA, 25 bp, Probe Sequence
gtaagatgcgggaagtgtcagctcc

SEQ ID NO: 249654 - DNA, 25 bp, Probe Sequence
gtaagatgctgggttggtgcacagt

SEQ ID NO: 249655 - DNA, 25 bp, Probe Sequence
gtaatgactggtttagtctgcagtc

SEQ ID NO: 249656 - DNA, 25 bp, Probe Sequence
gtaaggttcagatcagttgcaggcc

SEQ ID NO: 249657 - DNA, 25 bp, Probe Sequence
gtaagagtctccacacgatcaggga

SEQ ID NO: 249658 - DNA, 25 bp, Probe Sequence
gtcatggagaccttgaacgaaggcc

SEQ ID NO: 249659 - DNA, 25 bp, Probe Sequence
gtcaatgagccctgaagaacgagcc

SEQ ID NO: 249660 - DNA, 25 bp, Probe Sequence
gtcactcacctagacaaccagaggc

SEQ ID NO: 249661 - DNA, 25 bp, Probe Sequence
gtcatccaactcctgaaatccaata

SEQ ID NO: 249662 - DNA, 25 bp, Probe Sequence
gtctattagctccacaaagccaatc

SEQ ID NO: 249663 - DNA, 25 bp, Probe Sequence
gtaacatacccaaaatgctctgtct

SEQ ID NO: 249664 - DNA, 25 bp, Probe Sequence
gtcaagctagcagaaactccatttt

SEQ ID NO: 249665 - DNA, 25 bp, Probe Sequence
gtcaagtagaatgttactgcatttt

SEQ ID NO: 249666 - DNA, 25 bp, Probe Sequence
gtaactcaaatagtgtagtatttat

SEQ ID NO: 249667 - DNA, 25 bp, Probe Sequence
gtaatctcagaataaaggttgtcat

SEQ ID NO: 249668 - DNA, 25 bp, Probe Sequence
gtaactgaaagatacatggcttgca

SEQ ID NO: 249669 - DNA, 25 bp, Probe Sequence
gtcaaccaaagatcagcatggtccc

SEQ ID NO: 249670 - DNA, 25 bp, Probe Sequence
gtcaataaaggatccgggcccaaca

SEQ ID NO: 249671 - DNA, 25 bp, Probe Sequence
gtaatatgagggcttggggcaaaaa

SEQ ID NO: 249672 - DNA, 25 bp, Probe Sequence
gtctactgaggaccctgggacttaa

SEQ ID NO: 249673 - DNA, 25 bp, Probe Sequence
gtctcccagaggctcgggagggaac

SEQ ID NO: 249674 - DNA, 25 bp, Probe Sequence
gtgccatcctggtgggggagggcag

SEQ ID NO: 249675 - DNA, 25 bp, Probe Sequence
gtcacatcctccttgggagggtcca

SEQ ID NO: 249676 - DNA, 25 bp, Probe Sequence
gtcaatgcttccctggacatagacc

SEQ ID NO: 249677 - DNA, 25 bp, Probe Sequence
gtcaatctatggacatgcccatata

SEQ ID NO: 249678 - DNA, 25 bp, Probe Sequence
gtcaagtagcgaagctcctaccacc

SEQ ID NO: 249679 - DNA, 25 bp, Probe Sequence
gtaagtacgaggattaatcccagag

SEQ ID NO: 249680 - DNA, 25 bp, Probe Sequence
gtaagtacgtatattacatcttcaa

SEQ ID NO: 249681 - DNA, 25 bp, Probe Sequence
gtaaggcacgtgagtgtacactttt

SEQ ID NO: 249682 - DNA, 25 bp, Probe Sequence
gtaactacttggttgtatcataatt

SEQ ID NO: 249683 - DNA, 25 bp, Probe Sequence
gtaatgctagcagtggcactttata

SEQ ID NO: 249684 - DNA, 25 bp, Probe Sequence
gtaactggctgtgttctggtgaggc

SEQ ID NO: 249685 - DNA, 25 bp, Probe Sequence
gtaatctgtccttttctggtgcaga

SEQ ID NO: 249686 - DNA, 25 bp, Probe Sequence
gtaactgatttgtattctgtgagca

SEQ ID NO: 249687 - DNA, 25 bp, Probe Sequence
gtaatgttttgattttgtgacagtc

SEQ ID NO: 249688 - DNA, 25 bp, Probe Sequence
gtaacatctttggttgtggtagtcc

SEQ ID NO: 249689 - DNA, 25 bp, Probe Sequence
gtaacatattctggggaggatttcc

SEQ ID NO: 249690 - DNA, 25 bp, Probe Sequence
gtaatatagcctgggaagttctgtt

SEQ ID NO: 249691 - DNA, 25 bp, Probe Sequence
gtaatatatgtttggagactgctcg

SEQ ID NO: 249692 - DNA, 25 bp, Probe Sequence
gtaatgcacctttggcagcagtcac

SEQ ID NO: 249693 - DNA, 25 bp, Probe Sequence
gtaatgcctttgtacagctcatact

SEQ ID NO: 249694 - DNA, 25 bp, Probe Sequence
gtaatgcacttatccacaaatcatc

SEQ ID NO: 249695 - DNA, 25 bp, Probe Sequence
gtcaacagagcatacccaaagatca

SEQ ID NO: 249696 - DNA, 25 bp, Probe Sequence
gtcaaagactcataccaagaggaag

SEQ ID NO: 249697 - DNA, 25 bp, Probe Sequence
gtaagtttattaccaaagtgatatg

SEQ ID NO: 249698 - DNA, 25 bp, Probe Sequence
gtaacattcaattaccacaagaatt

SEQ ID NO: 249699 - DNA, 25 bp, Probe Sequence
gtaatttctttgtgcagaatgattt

SEQ ID NO: 249700 - DNA, 25 bp, Probe Sequence
gtgagaaaacttgcgagaattttgt

SEQ ID NO: 249701 - DNA, 25 bp, Probe Sequence
gtggaaatggttccttgcaaacttg

SEQ ID NO: 249702 - DNA, 25 bp, Probe Sequence
gtcaagaataacacttcaaagtcat

SEQ ID NO: 249703 - DNA, 25 bp, Probe Sequence
gtaatcaaaatgtacctagtttata

SEQ ID NO: 249704 - DNA, 25 bp, Probe Sequence
gtaatcagtcgatatcctggttttg

SEQ ID NO: 249705 - DNA, 25 bp, Probe Sequence
gtaacagtgcagattccacgttctt

SEQ ID NO: 249706 - DNA, 25 bp, Probe Sequence
gtaacaatgcattaatcacctgttt

SEQ ID NO: 249707 - DNA, 25 bp, Probe Sequence
gtaactatgtgctaatacctgaggt

SEQ ID NO: 249708 - DNA, 25 bp, Probe Sequence
gtaagcacaggctgagacctgggag

SEQ ID NO: 249709 - DNA, 25 bp, Probe Sequence
gtaactatggcaatgaagtcagtag

SEQ ID NO: 249710 - DNA, 25 bp, Probe Sequence
gtaactatgtgtaaagtcctcatca

SEQ ID NO: 249711 - DNA, 25 bp, Probe Sequence
gtaactagtctaccagtgacctcag

SEQ ID NO: 249712 - DNA, 25 bp, Probe Sequence
gtaacacaggctttaggatcctcag

SEQ ID NO: 249713 - DNA, 25 bp, Probe Sequence
gtaagaatggctttgtggtgctcaa

SEQ ID NO: 249714 - DNA, 25 bp, Probe Sequence
gtaaccttctgcttgtggtgcatta

SEQ ID NO: 249715 - DNA, 25 bp, Probe Sequence
gtaactcttgtgtagattgtctcta

SEQ ID NO: 249716 - DNA, 25 bp, Probe Sequence
gtaacatatttcagcattggctcta

SEQ ID NO: 249717 - DNA, 25 bp, Probe Sequence
gtaattatcctcaagttgtgtgcta

SEQ ID NO: 249718 - DNA, 25 bp, Probe Sequence
gtaattccagctccaatagcgtata

SEQ ID NO: 249719 - DNA, 25 bp, Probe Sequence
gtaattatcccctgagagtcatccg

SEQ ID NO: 249720 - DNA, 25 bp, Probe Sequence
gtaacttgccccttggcagaacatc

SEQ ID NO: 249721 - DNA, 25 bp, Probe Sequence
gtcatagtgctcaccttgggaaaag

SEQ ID NO: 249722 - DNA, 25 bp, Probe Sequence
gtcaaggcctacttgtgggacaaca

SEQ ID NO: 249723 - DNA, 25 bp, Probe Sequence
gtcaagagtcagtttggggccaggc

SEQ ID NO: 249724 - DNA, 25 bp, Probe Sequence
gtcaagagtcagtttggggccaggc

SEQ ID NO: 249725 - DNA, 25 bp, Probe Sequence
gtcagcgtgtttacggaggaagagg

SEQ ID NO: 249726 - DNA, 25 bp, Probe Sequence
gtcaccgtctcgctgagggacggtg

SEQ ID NO: 249727 - DNA, 25 bp, Probe Sequence
gtcactgcactccagcttgggtgac

SEQ ID NO: 249728 - DNA, 25 bp, Probe Sequence
gtcacattctaagtctaggagtcgg

SEQ ID NO: 249729 - DNA, 25 bp, Probe Sequence
gtaatcatgctcaatgtctacaggt

SEQ ID NO: 249730 - DNA, 25 bp, Probe Sequence
gtaatggcatcactattcatgaagt

SEQ ID NO: 249731 - DNA, 25 bp, Probe Sequence
gtaagtgctcagacctatgaacgta

SEQ ID NO: 249732 - DNA, 25 bp, Probe Sequence
gtaaggaaggcccatgaggcatgca

SEQ ID NO: 249733 - DNA, 25 bp, Probe Sequence
gtaaggggtctgcatgcagcagcac

SEQ ID NO: 249734 - DNA, 25 bp, Probe Sequence
gtaagaggacgccttcaggcaccac

SEQ ID NO: 249735 - DNA, 25 bp, Probe Sequence
gtaatgatcatgtcagccttcagaa

SEQ ID NO: 249736 - DNA, 25 bp, Probe Sequence
gtcacagattcaggagttcaaagag

SEQ ID NO: 249737 - DNA, 25 bp, Probe Sequence
gtcacattcatggggttcaaggcag

SEQ ID NO: 249738 - DNA, 25 bp, Probe Sequence
gtcacaatgctaagtggtatccgag

SEQ ID NO: 249739 - DNA, 25 bp, Probe Sequence
gtcagctacaatgggatcttggggc

SEQ ID NO: 249740 - DNA, 25 bp, Probe Sequence
gtaatacttcttgtgtgtatgcaca

SEQ ID NO: 249741 - DNA, 25 bp, Probe Sequence
gtaacacctctcaatggttgtgcac

SEQ ID NO: 249742 - DNA, 25 bp, Probe Sequence
gtaaccatctaaagagcttgtggcc

SEQ ID NO: 249743 - DNA, 25 bp, Probe Sequence
gtaaccatggataagatgctttaga

SEQ ID NO: 249744 - DNA, 25 bp, Probe Sequence
gtaaccatgggcttgctgacttagc

SEQ ID NO: 249745 - DNA, 25 bp, Probe Sequence
gtaaccatgggcttgctgacttagc

SEQ ID NO: 249746 - DNA, 25 bp, Probe Sequence
gtaaggctatggctctgattctaga

SEQ ID NO: 249747 - DNA, 25 bp, Probe Sequence
gtaatggtatggtttaattcagaga

SEQ ID NO: 249748 - DNA, 25 bp, Probe Sequence
gtaagctggggattagaatgtggta

SEQ ID NO: 249749 - DNA, 25 bp, Probe Sequence
gtaagctggggaatagactgtggaa

SEQ ID NO: 249750 - DNA, 25 bp, Probe Sequence
gtaacaggagcgtgctgagcgggca

SEQ ID NO: 249751 - DNA, 25 bp, Probe Sequence
gtcagaagggttgggcatgcggtat

SEQ ID NO: 249752 - DNA, 25 bp, Probe Sequence
gtcacaaggacatcgacctgttatt

SEQ ID NO: 249753 - DNA, 25 bp, Probe Sequence
gtaataggcagatcgacttctccac

SEQ ID NO: 249754 - DNA, 25 bp, Probe Sequence
gtaaggtagttctactatcatgccc

SEQ ID NO: 249755 - DNA, 25 bp, Probe Sequence
gtcaagaaaatgacggtcacagacc

SEQ ID NO: 249756 - DNA, 25 bp, Probe Sequence
gtcaagtaatggaggtcccagccct

SEQ ID NO: 249757 - DNA, 25 bp, Probe Sequence
gtaagtagatgagaagtcttcacgg

SEQ ID NO: 249758 - DNA, 25 bp, Probe Sequence
gtaagctgagaacacgccattgcac

SEQ ID NO: 249759 - DNA, 25 bp, Probe Sequence
gtaagctgagaacacgccattgcac

SEQ ID NO: 249760 - DNA, 25 bp, Probe Sequence
gtaagctgagaacaggtcattgcac

SEQ ID NO: 249761 - DNA, 25 bp, Probe Sequence
gtaagctgagaacaggtcattgcac

SEQ ID NO: 249762 - DNA, 25 bp, Probe Sequence
gtaagttattgaagctgtgattgac

SEQ ID NO: 249763 - DNA, 25 bp, Probe Sequence
gtaagatcctgtatgtgtgttgaga

SEQ ID NO: 249764 - DNA, 25 bp, Probe Sequence
gtaagacgagacctctggttgtgaa

SEQ ID NO: 249765 - DNA, 25 bp, Probe Sequence
gtaatgaatatgtgttgcttttgta

SEQ ID NO: 249766 - DNA, 25 bp, Probe Sequence
gtaatgaatatgtgttgcttttgta

SEQ ID NO: 249767 - DNA, 25 bp, Probe Sequence
gtaatgaatatgtgttgcttttgta

SEQ ID NO: 249768 - DNA, 25 bp, Probe Sequence
gtaagatatggtacctgcttctctg

SEQ ID NO: 249769 - DNA, 25 bp, Probe Sequence
gtaagataggttctgctttctgata

SEQ ID NO: 249770 - DNA, 25 bp, Probe Sequence
gtcaagattcgttggtgctcatgtc

SEQ ID NO: 249771 - DNA, 25 bp, Probe Sequence
gtcagagactatgtggtccatcgcc

SEQ ID NO: 249772 - DNA, 25 bp, Probe Sequence
gtcaattctaatagggcagtcgcca

SEQ ID NO: 249773 - DNA, 25 bp, Probe Sequence
gtcaagtcaaatatgtagattgcct

SEQ ID NO: 249774 - DNA, 25 bp, Probe Sequence
gtcaaagaaatcactcgttcccatc

SEQ ID NO: 249775 - DNA, 25 bp, Probe Sequence
gtaagagaatgtaacttgtctccag

SEQ ID NO: 249776 - DNA, 25 bp, Probe Sequence
gtaaggagactttgttgcttcccct

SEQ ID NO: 249777 - DNA, 25 bp, Probe Sequence
gtaatctggaagagtttcctgacct

SEQ ID NO: 249778 - DNA, 25 bp, Probe Sequence
tgtacgggaattgtttcaagttgct

SEQ ID NO: 249779 - DNA, 25 bp, Probe Sequence
gtcacgtgggttatgaagaagtctg

SEQ ID NO: 249780 - DNA, 25 bp, Probe Sequence
gtcaccttaggtagtaggaagaatt

SEQ ID NO: 249781 - DNA, 25 bp, Probe Sequence
ggtcgttgagttatgggaagaactt

SEQ ID NO: 249782 - DNA, 25 bp, Probe Sequence
gggccgagagttctttgacagcaac

SEQ ID NO: 249783 - DNA, 25 bp, Probe Sequence
gtggatggggttcttctgtaaaact

SEQ ID NO: 249784 - DNA, 25 bp, Probe Sequence
gtaagggtttgtaatctgtaagaat

SEQ ID NO: 249785 - DNA, 25 bp, Probe Sequence
gtaagcacctttaaatatctgacca

SEQ ID NO: 249786 - DNA, 25 bp, Probe Sequence
gtaacttttgtaaatacacacagca

SEQ ID NO: 249787 - DNA, 25 bp, Probe Sequence
gtaactcttggcaaggtaacctggg

SEQ ID NO: 249788 - DNA, 25 bp, Probe Sequence
gtaacttagccaaggatgaacactc

SEQ ID NO: 249789 - DNA, 25 bp, Probe Sequence
gtaactgtacccatgagagacactc

SEQ ID NO: 249790 - DNA, 25 bp, Probe Sequence
gtaactgcagacttcattagcacac

SEQ ID NO: 249791 - DNA, 25 bp, Probe Sequence
gtaatccagacactctgaagctcag

SEQ ID NO: 249792 - DNA, 25 bp, Probe Sequence
gtcagagccaggctctgcctggagg

SEQ ID NO: 249793 - DNA, 25 bp, Probe Sequence
gtaatcatgaggcacagcgctggca

SEQ ID NO: 249794 - DNA, 25 bp, Probe Sequence
gtaatgctgacccagcccagaaagg

SEQ ID NO: 249795 - DNA, 25 bp, Probe Sequence
gtaagtgacacaagccatgaagaca

SEQ ID NO: 249796 - DNA, 25 bp, Probe Sequence
gtaagcataagaagcctaagaggaa

SEQ ID NO: 249797 - DNA, 25 bp, Probe Sequence
gtcaagcctacaatgccctagagga

SEQ ID NO: 249798 - DNA, 25 bp, Probe Sequence
gtaagcctattagagctacacagaa

SEQ ID NO: 249799 - DNA, 25 bp, Probe Sequence
gtcggggagtaggactgaatgaaat

SEQ ID NO: 249800 - DNA, 25 bp, Probe Sequence
gtcgggtagtctcatttagcaagta

SEQ ID NO: 249801 - DNA, 25 bp, Probe Sequence
gtcgggtagtcatattttgcaagta

SEQ ID NO: 249802 - DNA, 25 bp, Probe Sequence
gtaagtgtaatacgcattttcaatg

SEQ ID NO: 249803 - DNA, 25 bp, Probe Sequence
gtaagctgttcaacaattcctccag

SEQ ID NO: 249804 - DNA, 25 bp, Probe Sequence
gtaagctgcttagaaggccctggaa

SEQ ID NO: 249805 - DNA, 25 bp, Probe Sequence
gtaagtgttcgggcaggaatctgga

SEQ ID NO: 249806 - DNA, 25 bp, Probe Sequence
gtaagcttcatagggatggacatca

SEQ ID NO: 249807 - DNA, 25 bp, Probe Sequence
gtaatttgcagggagatcgacgacg

SEQ ID NO: 249808 - DNA, 25 bp, Probe Sequence
gtaattctgagaggagttatggggg

SEQ ID NO: 249809 - DNA, 25 bp, Probe Sequence
gtcatattgcggcatagtgtcagga

SEQ ID NO: 249810 - DNA, 25 bp, Probe Sequence
gtcatattggttgaactcagtgaag

SEQ ID NO: 249811 - DNA, 25 bp, Probe Sequence
gtcacagcatggatgtaatgcctgg

SEQ ID NO: 249812 - DNA, 25 bp, Probe Sequence
gtcacagctcagacttcatagagct

SEQ ID NO: 249813 - DNA, 25 bp, Probe Sequence
gtaagtcactacaacacagctgcaa

SEQ ID NO: 249814 - DNA, 25 bp, Probe Sequence
gtaatgtcacttacacaaactgcaa

SEQ ID NO: 249815 - DNA, 25 bp, Probe Sequence
gtaatctcagctactcaggaggcta

SEQ ID NO: 249816 - DNA, 25 bp, Probe Sequence
gtaatcatctgcaaccatgtgtgtc

SEQ ID NO: 249817 - DNA, 25 bp, Probe Sequence
gtaatgagctgaagtgtgtgtgtaa

SEQ ID NO: 249818 - DNA, 25 bp, Probe Sequence
gtaagagcagcttgtttgactacac

SEQ ID NO: 249819 - DNA, 25 bp, Probe Sequence
gtaatggcaggctgtgtcatctcca

SEQ ID NO: 249820 - DNA, 25 bp, Probe Sequence
gtaagcaaggctggcttaccacttc

SEQ ID NO: 249821 - DNA, 25 bp, Probe Sequence
gtaagcaaagccctggaatcctgta

SEQ ID NO: 249822 - DNA, 25 bp, Probe Sequence
gtcagacacggtggtggaaccctac

SEQ ID NO: 249823 - DNA, 25 bp, Probe Sequence
gtcaacaggggcgtgaggtcccagg

SEQ ID NO: 249824 - DNA, 25 bp, Probe Sequence
gtcgagggggtgatggtcctatgtg

SEQ ID NO: 249825 - DNA, 25 bp, Probe Sequence
gtctgagggtcagattggtcccatt

SEQ ID NO: 249826 - DNA, 25 bp, Probe Sequence
gtcaagggtcactttggacctatca

SEQ ID NO: 249827 - DNA, 25 bp, Probe Sequence
gtcaacaaatcccttgtagctttga

SEQ ID NO: 249828 - DNA, 25 bp, Probe Sequence
gtcaatcaacactgcctcatgagct

SEQ ID NO: 249829 - DNA, 25 bp, Probe Sequence
gtcagtacacactgcctgggttagt

SEQ ID NO: 249830 - DNA, 25 bp, Probe Sequence
gtcaaacagctctgacatggcagtg

SEQ ID NO: 249831 - DNA, 25 bp, Probe Sequence
gtaacctgcatggtgacagctactg

SEQ ID NO: 249832 - DNA, 25 bp, Probe Sequence
gtcaacctcaggaaagtacccagct

SEQ ID NO: 249833 - DNA, 25 bp, Probe Sequence
gtaactccatgttgaagttcccctg

SEQ ID NO: 249834 - DNA, 25 bp, Probe Sequence
gtaactggggaaatattccacctga

SEQ ID NO: 249835 - DNA, 25 bp, Probe Sequence
gtaactgctttagtcatattaacct

SEQ ID NO: 249836 - DNA, 25 bp, Probe Sequence
gtcaagtgttctctaggtcaacctc

SEQ ID NO: 249837 - DNA, 25 bp, Probe Sequence
gtcaaatttcacttacttagtcact

SEQ ID NO: 249838 - DNA, 25 bp, Probe Sequence
gtcaaccttcaggttttagtcagcc

SEQ ID NO: 249839 - DNA, 25 bp, Probe Sequence
gtcaacggtcagcttgttggtgcca

SEQ ID NO: 249840 - DNA, 25 bp, Probe Sequence
gtaactgggcagattggctggcggc

SEQ ID NO: 249841 - DNA, 25 bp, Probe Sequence
gtcaccggaggtatagctgtgccca

SEQ ID NO: 249842 - DNA, 25 bp, Probe Sequence
gtcacggaaggtgggagactcccca

SEQ ID NO: 249843 - DNA, 25 bp, Probe Sequence
gtcaagaaaggggggccacctctct

SEQ ID NO: 249844 - DNA, 25 bp, Probe Sequence
gtcaattaagcataaggacgccctt

SEQ ID NO: 249845 - DNA, 25 bp, Probe Sequence
gtaattgccaaatagaacggacctt

SEQ ID NO: 249846 - DNA, 25 bp, Probe Sequence
gtaattggcaaataactcaagactc

SEQ ID NO: 249847 - DNA, 25 bp, Probe Sequence
gtaattcgccaaaatgacaaacaca

SEQ ID NO: 249848 - DNA, 25 bp, Probe Sequence
gtaattctctcactaccacaagaac

SEQ ID NO: 249849 - DNA, 25 bp, Probe Sequence
gtaatgtctgactatcactccagag

SEQ ID NO: 249850 - DNA, 25 bp, Probe Sequence
gtaatggcatgctacacctggcaac

SEQ ID NO: 249851 - DNA, 25 bp, Probe Sequence
gtaagactggaactctgacacacat

SEQ ID NO: 249852 - DNA, 25 bp, Probe Sequence
gtaagtctagctacctatccaatac

SEQ ID NO: 249853 - DNA, 25 bp, Probe Sequence
gtaagattttgtgcttcccaatcac

SEQ ID NO: 249854 - DNA, 25 bp, Probe Sequence
gtaagacttcttgcagtccttctgc

SEQ ID NO: 249855 - DNA, 25 bp, Probe Sequence
gtcaaacctctatagtcttaatgca

SEQ ID NO: 249856 - DNA, 25 bp, Probe Sequence
gtcaacatagtccagaacctgctaa

SEQ ID NO: 249857 - DNA, 25 bp, Probe Sequence
gtcaactgattagtaaccatcatca

SEQ ID NO: 249858 - DNA, 25 bp, Probe Sequence
gtaagctttacctagcacctgagca

SEQ ID NO: 249859 - DNA, 25 bp, Probe Sequence
gtcaacatttagtgcctcctgagca

SEQ ID NO: 249860 - DNA, 25 bp, Probe Sequence
gtcaacattcagtatacactgcgct

SEQ ID NO: 249861 - DNA, 25 bp, Probe Sequence
gtcattaccggatacacactacgag

SEQ ID NO: 249862 - DNA, 25 bp, Probe Sequence
tgttcaacccgtaactactactaat

SEQ ID NO: 249863 - DNA, 25 bp, Probe Sequence
gtccacggccgaaacatacggtgaa

SEQ ID NO: 249864 - DNA, 25 bp, Probe Sequence
gtaactggccagaggatacggatgt

SEQ ID NO: 249865 - DNA, 25 bp, Probe Sequence
gtaacgatgcactttggaagggagt

SEQ ID NO: 249866 - DNA, 25 bp, Probe Sequence
gtaacggactcggagaaggcagatt

SEQ ID NO: 249867 - DNA, 25 bp, Probe Sequence
gtcaggggccttcagaactgcaatt

SEQ ID NO: 249868 - DNA, 25 bp, Probe Sequence
gtcagggtctcttcggagacccagg

SEQ ID NO: 249869 - DNA, 25 bp, Probe Sequence
gtcacggctatattcggaggcattc

SEQ ID NO: 249870 - DNA, 25 bp, Probe Sequence
gtaagagccacattaggatccagtc

SEQ ID NO: 249871 - DNA, 25 bp, Probe Sequence
gtcaagatgctccacataagatcca

SEQ ID NO: 249872 - DNA, 25 bp, Probe Sequence
gtaagctgctcagctggctgatccc

SEQ ID NO: 249873 - DNA, 25 bp, Probe Sequence
gtcaatggtgaggatgcggtcccct

SEQ ID NO: 249874 - DNA, 25 bp, Probe Sequence
gtaatgttgggaagagatcactatt

SEQ ID NO: 249875 - DNA, 25 bp, Probe Sequence
gtaatcctgtggagagtgttggcag

SEQ ID NO: 249876 - DNA, 25 bp, Probe Sequence
gtaacctgctgcacggatacatggg

SEQ ID NO: 249877 - DNA, 25 bp, Probe Sequence
gtaacctgatcgtggagagtgaggc

SEQ ID NO: 249878 - DNA, 25 bp, Probe Sequence
gtaagactatcgcaataggagagag

SEQ ID NO: 249879 - DNA, 25 bp, Probe Sequence
gtcacgcaaacccaagaggcggagg

SEQ ID NO: 249880 - DNA, 25 bp, Probe Sequence
gtcaccaaagactaacctccaagtg

SEQ ID NO: 249881 - DNA, 25 bp, Probe Sequence
gtaatagaacaaaccctgccaagtg

SEQ ID NO: 249882 - DNA, 25 bp, Probe Sequence
gtaataaactattctctctgtcata

SEQ ID NO: 249883 - DNA, 25 bp, Probe Sequence
gtaatcacaacttactttctgcttg

SEQ ID NO: 249884 - DNA, 25 bp, Probe Sequence
gtaatcacaacttactttctgcttg

SEQ ID NO: 249885 - DNA, 25 bp, Probe Sequence
gtaaccaagcataccatttctttgt

SEQ ID NO: 249886 - DNA, 25 bp, Probe Sequence
gtaagccaagacccagtttgcattg

SEQ ID NO: 249887 - DNA, 25 bp, Probe Sequence
gtcaaaatggacacaatcttcttgt

SEQ ID NO: 249888 - DNA, 25 bp, Probe Sequence
gtcaaagtggccattacatcctctt

SEQ ID NO: 249889 - DNA, 25 bp, Probe Sequence
gtcaagagggtcatcgactacgccg

SEQ ID NO: 249890 - DNA, 25 bp, Probe Sequence
gtcttaaggctccctgaaaccttgg

SEQ ID NO: 249891 - DNA, 25 bp, Probe Sequence
gtcaataagatgtccctgcacaacc

SEQ ID NO: 249892 - DNA, 25 bp, Probe Sequence
gtaataaaaatgctctcagacactg

SEQ ID NO: 249893 - DNA, 25 bp, Probe Sequence
gtaatcatccaattgttcttggccc

SEQ ID NO: 249894 - DNA, 25 bp, Probe Sequence
gtcaaagtcaacctagattggctcc

SEQ ID NO: 249895 - DNA, 25 bp, Probe Sequence
gtcaaactatccctttatgcaatcg

SEQ ID NO: 249896 - DNA, 25 bp, Probe Sequence
gtaatactttgcctttttcactgtg

SEQ ID NO: 249897 - DNA, 25 bp, Probe Sequence
gtaattgtttgtctttaactgtcaa

SEQ ID NO: 249898 - DNA, 25 bp, Probe Sequence
gtaatggcctttcttatactctaga

SEQ ID NO: 249899 - DNA, 25 bp, Probe Sequence
gtaatggcctttcttatactgtaga

SEQ ID NO: 249900 - DNA, 25 bp, Probe Sequence
gtgtaccactttgattttcttggaa

SEQ ID NO: 249901 - DNA, 25 bp, Probe Sequence
gtaaccactggagtatttgctttta

SEQ ID NO: 249902 - DNA, 25 bp, Probe Sequence
gtaattgactggatttagatttatc

SEQ ID NO: 249903 - DNA, 25 bp, Probe Sequence
gtaatattaagcaatttctagttat

SEQ ID NO: 249904 - DNA, 25 bp, Probe Sequence
gtgaaatctaaagtccggagtctag

SEQ ID NO: 249905 - DNA, 25 bp, Probe Sequence
gtgaaactcagttttccaaccgagt

SEQ ID NO: 249906 - DNA, 25 bp, Probe Sequence
gtaataccagctttagccaactttc

SEQ ID NO: 249907 - DNA, 25 bp, Probe Sequence
gtaatccccttttccagaatgcatt

SEQ ID NO: 249908 - DNA, 25 bp, Probe Sequence
gtaatcccagttatctcaggagact

SEQ ID NO: 249909 - DNA, 25 bp, Probe Sequence
gtaatcccagttactcggaggctaa

SEQ ID NO: 249910 - DNA, 25 bp, Probe Sequence
gtaatcccagctactcgggaggctg

SEQ ID NO: 249911 - DNA, 25 bp, Probe Sequence
gtaatcccagcactttgggaggccg

SEQ ID NO: 249912 - DNA, 25 bp, Probe Sequence
gtaatcccagcacttggagaggctg

SEQ ID NO: 249913 - DNA, 25 bp, Probe Sequence
gtaatcacggcaatctgggaggctg

SEQ ID NO: 249914 - DNA, 25 bp, Probe Sequence
gtaataggctgcatcctgctgagga

SEQ ID NO: 249915 - DNA, 25 bp, Probe Sequence
gtaattgagcctctctgatgatgga

SEQ ID NO: 249916 - DNA, 25 bp, Probe Sequence
gtaatgagaaacttcgagatgcgaa

SEQ ID NO: 249917 - DNA, 25 bp, Probe Sequence
gtcgtggcaaccttgggatcgagtt

SEQ ID NO: 249918 - DNA, 25 bp, Probe Sequence
gtcacaggcaatgtggagggccagt

SEQ ID NO: 249919 - DNA, 25 bp, Probe Sequence
gtcaaggagagcgggcaggtgctgg

SEQ ID NO: 249920 - DNA, 25 bp, Probe Sequence
gtcaagatgaagaaacggggggatt

SEQ ID NO: 249921 - DNA, 25 bp, Probe Sequence
gtaagatacagaaacatagctgagg

SEQ ID NO: 249922 - DNA, 25 bp, Probe Sequence
gtaagaatcaagtcactctcatggg

SEQ ID NO: 249923 - DNA, 25 bp, Probe Sequence
gtaagcagctgaggtctcttgaggg

SEQ ID NO: 249924 - DNA, 25 bp, Probe Sequence
gtcacaggcaggggccttgaggatg

SEQ ID NO: 249925 - DNA, 25 bp, Probe Sequence
gtcactggctggggcagccccagtg

SEQ ID NO: 249926 - DNA, 25 bp, Probe Sequence
gtcacaggtgcacgaagtcccgtgt

SEQ ID NO: 249927 - DNA, 25 bp, Probe Sequence
gtcacactaacctgtcacttgttgg

SEQ ID NO: 249928 - DNA, 25 bp, Probe Sequence
gtcaccccacactgtaggtgcagtg

SEQ ID NO: 249929 - DNA, 25 bp, Probe Sequence
gtcagccccaacagggagctgggtt

SEQ ID NO: 249930 - DNA, 25 bp, Probe Sequence
gtcagcccaaccagtgcgtgggcca

SEQ ID NO: 249931 - DNA, 25 bp, Probe Sequence
gtaatggaatccaaggtgggtggca

SEQ ID NO: 249932 - DNA, 25 bp, Probe Sequence
gtaaggctcagtaagaggctggtgg

SEQ ID NO: 249933 - DNA, 25 bp, Probe Sequence
gtaagtgtgagtaagagctggtgtc

SEQ ID NO: 249934 - DNA, 25 bp, Probe Sequence
gtaagctgcatagttgtactgtgcc

SEQ ID NO: 249935 - DNA, 25 bp, Probe Sequence
gtaagtgcatacagttttctctaat

SEQ ID NO: 249936 - DNA, 25 bp, Probe Sequence
gtaaggtcactcttggtgtctctaa

SEQ ID NO: 249937 - DNA, 25 bp, Probe Sequence
gtaagctctttattggtggcttaag

SEQ ID NO: 249938 - DNA, 25 bp, Probe Sequence
gtaatccagtcttctggtggattaa

SEQ ID NO: 249939 - DNA, 25 bp, Probe Sequence
gtaatgccatgtaaatagttgttat

SEQ ID NO: 249940 - DNA, 25 bp, Probe Sequence
gtaatgctctgaatttagtatgata

SEQ ID NO: 249941 - DNA, 25 bp, Probe Sequence
gtaatgtgctttaatgagtcgcagg

SEQ ID NO: 249942 - DNA, 25 bp, Probe Sequence
gtaatgagtgttcgatatttgctat

SEQ ID NO: 249943 - DNA, 25 bp, Probe Sequence
gtaattgtttggtagttgtaactgc

SEQ ID NO: 249944 - DNA, 25 bp, Probe Sequence
gtcaaattgttgctagcttgaaatc

SEQ ID NO: 249945 - DNA, 25 bp, Probe Sequence
gtcaaagcggctctagctctgataa

SEQ ID NO: 249946 - DNA, 25 bp, Probe Sequence
gtcaaatgtggtctcaatccaggat

SEQ ID NO: 249947 - DNA, 25 bp, Probe Sequence
gtctgctcgggtcatcaactatgag

SEQ ID NO: 249948 - DNA, 25 bp, Probe Sequence
gtcgtcgcggtagaaatggaggatg

SEQ ID NO: 249949 - DNA, 25 bp, Probe Sequence
gtcccctggtctgccaaaaggatgg

SEQ ID NO: 249950 - DNA, 25 bp, Probe Sequence
gtccaaccggctgtgcgaacggaag

SEQ ID NO: 249951 - DNA, 25 bp, Probe Sequence
gtcaccacgcggttctggaaaggca

SEQ ID NO: 249952 - DNA, 25 bp, Probe Sequence
gtcaccagcagctcttgggaaggac

SEQ ID NO: 249953 - DNA, 25 bp, Probe Sequence
gtcaccaaggacgttaaaggcattt

SEQ ID NO: 249954 - DNA, 25 bp, Probe Sequence
gtcactcgaaacgttttcatccatg

SEQ ID NO: 249955 - DNA, 25 bp, Probe Sequence
gtcacttattccatttgtacctaag

SEQ ID NO: 249956 - DNA, 25 bp, Probe Sequence
gtaatgtgatctgcatttttaccta

SEQ ID NO: 249957 - DNA, 25 bp, Probe Sequence
gtaatggattttctcttagcttttg

SEQ ID NO: 249958 - DNA, 25 bp, Probe Sequence
gtaattgcttttcatgagtagtatg

SEQ ID NO: 249959 - DNA, 25 bp, Probe Sequence
gtaattgttccttgtgcatgttaat

SEQ ID NO: 249960 - DNA, 25 bp, Probe Sequence
gtaatatgtctcaaccagatttatt

SEQ ID NO: 249961 - DNA, 25 bp, Probe Sequence
gtaatttacagaccatcagatcttc

SEQ ID NO: 249962 - DNA, 25 bp, Probe Sequence
gtaagttacagatctgactcttcat

SEQ ID NO: 249963 - DNA, 25 bp, Probe Sequence
gtaatgttgcataatgttcactttt

SEQ ID NO: 249964 - DNA, 25 bp, Probe Sequence
gtaatgatggctgatccctatttgt

SEQ ID NO: 249965 - DNA, 25 bp, Probe Sequence
gtaagtggcgaattcgaatatgctg

SEQ ID NO: 249966 - DNA, 25 bp, Probe Sequence
gtaaggagctggaaaactgatctga

SEQ ID NO: 249967 - DNA, 25 bp, Probe Sequence
gtaagtatggtgcagaatttcatgc

SEQ ID NO: 249968 - DNA, 25 bp, Probe Sequence
gtaagtgcggtgcagttttcaactg

SEQ ID NO: 249969 - DNA, 25 bp, Probe Sequence
gtcaatggggtggagtattttacgg

SEQ ID NO: 249970 - DNA, 25 bp, Probe Sequence
gtcaatgggagttcgttttggcacc

SEQ ID NO: 249971 - DNA, 25 bp, Probe Sequence
gtcaatgggattttttttggcacca

SEQ ID NO: 249972 - DNA, 25 bp, Probe Sequence
gtcaatgggatttgtttttggcacc

SEQ ID NO: 249973 - DNA, 25 bp, Probe Sequence
gtcaatgggagtttgttttggcacc

SEQ ID NO: 249974 - DNA, 25 bp, Probe Sequence
gtcaatgggagtttgttttggcacc

SEQ ID NO: 249975 - DNA, 25 bp, Probe Sequence
gtcaatgggagtttgttttggcacc

SEQ ID NO: 249976 - DNA, 25 bp, Probe Sequence
gtcaatgggagtttgttttggcacc

SEQ ID NO: 249977 - DNA, 25 bp, Probe Sequence
gtcaatgggagtttgttttggcacc

SEQ ID NO: 249978 - DNA, 25 bp, Probe Sequence
gtcaatgggagtttgttttggcacc

SEQ ID NO: 249979 - DNA, 25 bp, Probe Sequence
gtcaatgggagtttgttttggcacc

SEQ ID NO: 249980 - DNA, 25 bp, Probe Sequence
gtcaatgggagtttgttttggcacc

SEQ ID NO: 249981 - DNA, 25 bp, Probe Sequence
gtcaatgggagtttgttttggcacc

SEQ ID NO: 249982 - DNA, 25 bp, Probe Sequence
gtcaatgggagtttgttttggcacc

SEQ ID NO: 249983 - DNA, 25 bp, Probe Sequence
gtcaatgggagtttgttttggcacc

SEQ ID NO: 249984 - DNA, 25 bp, Probe Sequence
gtcaatgggagtttgttttggcacc

SEQ ID NO: 249985 - DNA, 25 bp, Probe Sequence
gtcaatgggagtttgttttggcacc

SEQ ID NO: 249986 - DNA, 25 bp, Probe Sequence
gtcaatgggagtttgttttggcacc

SEQ ID NO: 249987 - DNA, 25 bp, Probe Sequence
gtcaatgggagtttgttttggcacc

SEQ ID NO: 249988 - DNA, 25 bp, Probe Sequence
gtcaatgggagtttgttttggcacc

SEQ ID NO: 249989 - DNA, 25 bp, Probe Sequence
gtcaatgggagtttgttttggcacc

SEQ ID NO: 249990 - DNA, 25 bp, Probe Sequence
gtcaatgggagtttgttttggcacc

SEQ ID NO: 249991 - DNA, 25 bp, Probe Sequence
gtcaatgggagtttgttttggcacc

SEQ ID NO: 249992 - DNA, 25 bp, Probe Sequence
gtcaatgggagtttgttttggcacc

SEQ ID NO: 249993 - DNA, 25 bp, Probe Sequence
gtcaatgggagtttgttttggcacc

SEQ ID NO: 249994 - DNA, 25 bp, Probe Sequence
gtcaatgggagtttgttttggcacc

SEQ ID NO: 249995 - DNA, 25 bp, Probe Sequence
gtcaatgggagtttgttttggcacc

SEQ ID NO: 249996 - DNA, 25 bp, Probe Sequence
gtcaatggggagtttgtttggcacc

SEQ ID NO: 249997 - DNA, 25 bp, Probe Sequence
gtcaaggaccctctttatagctacc

SEQ ID NO: 249998 - DNA, 25 bp, Probe Sequence
gtcaaggacaccgtagtaagaggac

SEQ ID NO: 249999 - DNA, 25 bp, Probe Sequence
gtcacatggcaacagctggctaata

SEQ ID NO: 250000 - DNA, 25 bp, Probe Sequence
gtcaccgccaggactgaatgttaca

SEQ ID NO: 250001 - DNA, 25 bp, Probe Sequence
gtcagggcagatcttattttacagt

SEQ ID NO: 250002 - DNA, 25 bp, Probe Sequence
gtcaaggctgagctttgattgtgcc

SEQ ID NO: 250003 - DNA, 25 bp, Probe Sequence
gtcactggctaaagttacatggcca

SEQ ID NO: 250004 - DNA, 25 bp, Probe Sequence
gtcactggatacaggttgtaccatt

SEQ ID NO: 250005 - DNA, 25 bp, Probe Sequence
gtcagctgagtacagttttcccata

SEQ ID NO: 250006 - DNA, 25 bp, Probe Sequence
gtcaatgagttggagtttacctaaa

SEQ ID NO: 250007 - DNA, 25 bp, Probe Sequence
gtcttaagtaggctttcttcaatac

SEQ ID NO: 250008 - DNA, 25 bp, Probe Sequence
gtgaattgggggctttctttgtgac

SEQ ID NO: 250009 - DNA, 25 bp, Probe Sequence
gtaattgtggtgtgtcaacttcata

SEQ ID NO: 250010 - DNA, 25 bp, Probe Sequence
gtaattgtgctgagggaaactgctt

SEQ ID NO: 250011 - DNA, 25 bp, Probe Sequence
gtaattggttagccccagacttggg

SEQ ID NO: 250012 - DNA, 25 bp, Probe Sequence
gtaattggctaaccagccaagatcc

SEQ ID NO: 250013 - DNA, 25 bp, Probe Sequence
gtaattgactaccatgtaatagaac

SEQ ID NO: 250014 - DNA, 25 bp, Probe Sequence
gtcaattgccttcctatatatcagc

SEQ ID NO: 250015 - DNA, 25 bp, Probe Sequence
gtaatctcctgtgatctgtgctagc

SEQ ID NO: 250016 - DNA, 25 bp, Probe Sequence
gtaattatctgtgatggatggacac

SEQ ID NO: 250017 - DNA, 25 bp, Probe Sequence
gtaatttctatttgcactgtgcctt

SEQ ID NO: 250018 - DNA, 25 bp, Probe Sequence
gtaattgtcatttacctgggtatga

SEQ ID NO: 250019 - DNA, 25 bp, Probe Sequence
gtaaggcaatctttcctgttgtaaa

SEQ ID NO: 250020 - DNA, 25 bp, Probe Sequence
gtcaaggcacttatggtttttaatc

SEQ ID NO: 250021 - DNA, 25 bp, Probe Sequence
gtcaagagttattctgtttgtttaa

SEQ ID NO: 250022 - DNA, 25 bp, Probe Sequence
gtcaagagttatttttagacctgaa

SEQ ID NO: 250023 - DNA, 25 bp, Probe Sequence
gtaaggtgttctacttgaaaatgaa

SEQ ID NO: 250024 - DNA, 25 bp, Probe Sequence
gtaaggtgttctacttgaaaatgaa

SEQ ID NO: 250025 - DNA, 25 bp, Probe Sequence
gtaagggtgattataaccagcaaag

SEQ ID NO: 250026 - DNA, 25 bp, Probe Sequence
gtcaagtggtgaaaagaacggaggg

SEQ ID NO: 250027 - DNA, 25 bp, Probe Sequence
gtcaaggtgatcaaccagtaccagg

SEQ ID NO: 250028 - DNA, 25 bp, Probe Sequence
gtcaaggtgatcaaccagtaccagg

SEQ ID NO: 250029 - DNA, 25 bp, Probe Sequence
gtcaaggtgatcaaccagtaccagg

SEQ ID NO: 250030 - DNA, 25 bp, Probe Sequence
gtaatgttgatcccaagatgagaga

SEQ ID NO: 250031 - DNA, 25 bp, Probe Sequence
gtaatggtcattccagagactatga

SEQ ID NO: 250032 - DNA, 25 bp, Probe Sequence
gtcaatagctcagtcctgcagtttg

SEQ ID NO: 250033 - DNA, 25 bp, Probe Sequence
gtaaggcatatgtcacttgcctctg

SEQ ID NO: 250034 - DNA, 25 bp, Probe Sequence
gtcaaggcattgtatgttgcttctg

SEQ ID NO: 250035 - DNA, 25 bp, Probe Sequence
gtcggatagtgatgactgaactgca

SEQ ID NO: 250036 - DNA, 25 bp, Probe Sequence
gtcagagtgaaatacgtgtccaccg

SEQ ID NO: 250037 - DNA, 25 bp, Probe Sequence
gtcagcagggtaaaccgatcaacca

SEQ ID NO: 250038 - DNA, 25 bp, Probe Sequence
gtcagtggtggagaccgactacgac

SEQ ID NO: 250039 - DNA, 25 bp, Probe Sequence
gtcagtcctgacgtgaactacgagg

SEQ ID NO: 250040 - DNA, 25 bp, Probe Sequence
gtcagctcaggaggcatcaattagc

SEQ ID NO: 250041 - DNA, 25 bp, Probe Sequence
gtcagcgctgagggcatttgctacc

SEQ ID NO: 250042 - DNA, 25 bp, Probe Sequence
gtcagagaagcccatatggcaagta

SEQ ID NO: 250043 - DNA, 25 bp, Probe Sequence
gtcatgtaccatcaataaagtaccc

SEQ ID NO: 250044 - DNA, 25 bp, Probe Sequence
gtcactcagagtctaaagaagacca

SEQ ID NO: 250045 - DNA, 25 bp, Probe Sequence
gtcactatggtgaggaaatggacat

SEQ ID NO: 250046 - DNA, 25 bp, Probe Sequence
gtcacatttcagatggaggctgtaa

SEQ ID NO: 250047 - DNA, 25 bp, Probe Sequence
gtcacttacatttggaatctaaacc

SEQ ID NO: 250048 - DNA, 25 bp, Probe Sequence
gtcagttaccttagttaacaagctg

SEQ ID NO: 250049 - DNA, 25 bp, Probe Sequence
gtcagaggaccgtgtctcaaagaag

SEQ ID NO: 250050 - DNA, 25 bp, Probe Sequence
gtcaaaggccgtgttccattcaatg

SEQ ID NO: 250051 - DNA, 25 bp, Probe Sequence
gtcaagcaggcgctcttgtgaatta

SEQ ID NO: 250052 - DNA, 25 bp, Probe Sequence
gtcacagaactccttgtagactttc

SEQ ID NO: 250053 - DNA, 25 bp, Probe Sequence
gtcaatgaaaagccatccagtctct

SEQ ID NO: 250054 - DNA, 25 bp, Probe Sequence
gtcaataaagatctcacctctggct

SEQ ID NO: 250055 - DNA, 25 bp, Probe Sequence
gtaataaagatactcgctctctgta

SEQ ID NO: 250056 - DNA, 25 bp, Probe Sequence
gtaatcaccagaatgcatttctctt

SEQ ID NO: 250057 - DNA, 25 bp, Probe Sequence
gtcagatccaagagcaggattcact

SEQ ID NO: 250058 - DNA, 25 bp, Probe Sequence
gtcacctcaatgggactgcttcaca

SEQ ID NO: 250059 - DNA, 25 bp, Probe Sequence
gtcacacatttccaatctcttgcaa

SEQ ID NO: 250060 - DNA, 25 bp, Probe Sequence
gtcaatcagcctcatgactttatag

SEQ ID NO: 250061 - DNA, 25 bp, Probe Sequence
gtaatagcacagttattggtaatgc

SEQ ID NO: 250062 - DNA, 25 bp, Probe Sequence
gtaatcatgaggctactgagtttgg

SEQ ID NO: 250063 - DNA, 25 bp, Probe Sequence
gtaatcattgggtcattcgtctgtg

SEQ ID NO: 250064 - DNA, 25 bp, Probe Sequence
gtaatcatatcatacatactgttgt

SEQ ID NO: 250065 - DNA, 25 bp, Probe Sequence
gtaatgctacaattcagaggcattt

SEQ ID NO: 250066 - DNA, 25 bp, Probe Sequence
gtaatgatgataactcgtggaatat

SEQ ID NO: 250067 - DNA, 25 bp, Probe Sequence
gtaataggtagaagtggcatcattt

SEQ ID NO: 250068 - DNA, 25 bp, Probe Sequence
gtcaatgagactaaagtggttttgt

SEQ ID NO: 250069 - DNA, 25 bp, Probe Sequence
gtgaatgtgactaagaagcctgggg

SEQ ID NO: 250070 - DNA, 25 bp, Probe Sequence
gtaatgtcaccgaaaccatgggcat

SEQ ID NO: 250071 - DNA, 25 bp, Probe Sequence
gtaattgcacctaatgcatccaggt

SEQ ID NO: 250072 - DNA, 25 bp, Probe Sequence
gtaatctgacctgcagacttcattt

SEQ ID NO: 250073 - DNA, 25 bp, Probe Sequence
gtcaatcgatgcagcaaacttcatt

SEQ ID NO: 250074 - DNA, 25 bp, Probe Sequence
gtcaacggcagtggacacttctgtg

SEQ ID NO: 250075 - DNA, 25 bp, Probe Sequence
gtcaacgtgacagacacctttgtat

SEQ ID NO: 250076 - DNA, 25 bp, Probe Sequence
gtgaatcagtggctaacctggttag

SEQ ID NO: 250077 - DNA, 25 bp, Probe Sequence
ggattaacgagttacctcgtccgag

SEQ ID NO: 250078 - DNA, 25 bp, Probe Sequence
ggttaccatagttaccaccaaggat

SEQ ID NO: 250079 - DNA, 25 bp, Probe Sequence
gtcttaccttggtgtcaccttgtat

SEQ ID NO: 250080 - DNA, 25 bp, Probe Sequence
gtaataccctggtttctttctgtct

SEQ ID NO: 250081 - DNA, 25 bp, Probe Sequence
gtaattccaagttttcctttgctgt

SEQ ID NO: 250082 - DNA, 25 bp, Probe Sequence
gtaattttactaattccttgtgcag

SEQ ID NO: 250083 - DNA, 25 bp, Probe Sequence
gtaatgttgtaccatttgcactgtg

SEQ ID NO: 250084 - DNA, 25 bp, Probe Sequence
gtaattatgttccagattgaccatg

SEQ ID NO: 250085 - DNA, 25 bp, Probe Sequence
gtaattagtcatcggtatgaccatg

SEQ ID NO: 250086 - DNA, 25 bp, Probe Sequence
gtaatttgcatcctggtgatcacct

SEQ ID NO: 250087 - DNA, 25 bp, Probe Sequence
gtaatcctatgcattttacgcatta

SEQ ID NO: 250088 - DNA, 25 bp, Probe Sequence
gtaatacatagaaacttccacaata

SEQ ID NO: 250089 - DNA, 25 bp, Probe Sequence
gtcaattcttgaaagttaacagcat

SEQ ID NO: 250090 - DNA, 25 bp, Probe Sequence
gtcacagaaatttagttaacatctt

SEQ ID NO: 250091 - DNA, 25 bp, Probe Sequence
gtcacttggttaatttaagcacttc

SEQ ID NO: 250092 - DNA, 25 bp, Probe Sequence
gtcacagtgtgaaataattcaaact

SEQ ID NO: 250093 - DNA, 25 bp, Probe Sequence
gtcagggtggtctagaacaaacgca

SEQ ID NO: 250094 - DNA, 25 bp, Probe Sequence
gtcaggttagctgaaccgacactca

SEQ ID NO: 250095 - DNA, 25 bp, Probe Sequence
gtcaggatctcctggaacgccattc

SEQ ID NO: 250096 - DNA, 25 bp, Probe Sequence
gtcagctacttctgaaactgcagca

SEQ ID NO: 250097 - DNA, 25 bp, Probe Sequence
gtaatgacttcatagaaatggcatt

SEQ ID NO: 250098 - DNA, 25 bp, Probe Sequence
gtgaaaatcttacaacaggcttatg

SEQ ID NO: 250099 - DNA, 25 bp, Probe Sequence
gtgaaaatcttacaacaggcttatg

SEQ ID NO: 250100 - DNA, 25 bp, Probe Sequence
gtaataactttccaaagtttctgct

SEQ ID NO: 250101 - DNA, 25 bp, Probe Sequence
gtcaatatccttacgcataaccttg

SEQ ID NO: 250102 - DNA, 25 bp, Probe Sequence
gtcaaatgtcataatcagcaaacgg

SEQ ID NO: 250103 - DNA, 25 bp, Probe Sequence
gtcaaatgccaaacactagctctgt

SEQ ID NO: 250104 - DNA, 25 bp, Probe Sequence
gtcaaatgccaaacactagctctgt

SEQ ID NO: 250105 - DNA, 25 bp, Probe Sequence
gtcaaatgccaaacactagctctgt

SEQ ID NO: 250106 - DNA, 25 bp, Probe Sequence
gtcaaatgccaaacactagctctgt

SEQ ID NO: 250107 - DNA, 25 bp, Probe Sequence
gtcaaatgccaaacactagctctgt

SEQ ID NO: 250108 - DNA, 25 bp, Probe Sequence
gtcaaatgtataatcagcttgtatt

SEQ ID NO: 250109 - DNA, 25 bp, Probe Sequence
gtaatgcagtgtaatatctaacttt

SEQ ID NO: 250110 - DNA, 25 bp, Probe Sequence
gtcaatcgcttgaagaatatcactc

SEQ ID NO: 250111 - DNA, 25 bp, Probe Sequence
gtcaacctagaagcatacatccagt

SEQ ID NO: 250112 - DNA, 25 bp, Probe Sequence
gtcagaccaatactcccactgaaac

SEQ ID NO: 250113 - DNA, 25 bp, Probe Sequence
gtcacctactacttggactggatcc

SEQ ID NO: 250114 - DNA, 25 bp, Probe Sequence
gtcacctactacttggactggatcc

SEQ ID NO: 250115 - DNA, 25 bp, Probe Sequence
gtcacctactacttggactggatcc

SEQ ID NO: 250116 - DNA, 25 bp, Probe Sequence
gtcaccaagcatagcactgtacagc

SEQ ID NO: 250117 - DNA, 25 bp, Probe Sequence
gtcagcctaagacctgcaacatgag

SEQ ID NO: 250118 - DNA, 25 bp, Probe Sequence
gtcagacaagaacccagagcatccg

SEQ ID NO: 250119 - DNA, 25 bp, Probe Sequence
gtgaggaaaacctgccattgtggcc

SEQ ID NO: 250120 - DNA, 25 bp, Probe Sequence
gtctggaaaccttcgcatcttggac

SEQ ID NO: 250121 - DNA, 25 bp, Probe Sequence
gtctctaattactacctcttaacct

SEQ ID NO: 250122 - DNA, 25 bp, Probe Sequence
gtcttggggacgttcctaaacactg

SEQ ID NO: 250123 - DNA, 25 bp, Probe Sequence
gtcagggggaagatcctttggcact

SEQ ID NO: 250124 - DNA, 25 bp, Probe Sequence
gtcaggagggaaaggcctaggaagc

SEQ ID NO: 250125 - DNA, 25 bp, Probe Sequence
gtcaggaggggggaggctgaggggt

SEQ ID NO: 250126 - DNA, 25 bp, Probe Sequence
gtcgggggctgaggggcaacgaaga

SEQ ID NO: 250127 - DNA, 25 bp, Probe Sequence
gtcttggggcaagcgcccacttaga

SEQ ID NO: 250128 - DNA, 25 bp, Probe Sequence
gtcattgggaaatgccgcccattta

SEQ ID NO: 250129 - DNA, 25 bp, Probe Sequence
gtcacggtaaagtccgccatcagaa

SEQ ID NO: 250130 - DNA, 25 bp, Probe Sequence
gtcacggagatgggacccctgagat

SEQ ID NO: 250131 - DNA, 25 bp, Probe Sequence
gtcatcgtttggaaagcgtcgcaat

SEQ ID NO: 250132 - DNA, 25 bp, Probe Sequence
gtcacagttcttggtgactgtccca

SEQ ID NO: 250133 - DNA, 25 bp, Probe Sequence
gtcaccgacgatggcatggctgtgg

SEQ ID NO: 250134 - DNA, 25 bp, Probe Sequence
gtcaacatcacgccagctgaggtgg

SEQ ID NO: 250135 - DNA, 25 bp, Probe Sequence
gtcagccaattgcctggcaggtggt

SEQ ID NO: 250136 - DNA, 25 bp, Probe Sequence
gtcagcgcagtgacgtgggctggcg

SEQ ID NO: 250137 - DNA, 25 bp, Probe Sequence
gtcagcctgggcaatggctgcgtag

SEQ ID NO: 250138 - DNA, 25 bp, Probe Sequence
gtcagcctgcatacagaggatcggg

SEQ ID NO: 250139 - DNA, 25 bp, Probe Sequence
gtcactgtttcaccgtctgaaggta

SEQ ID NO: 250140 - DNA, 25 bp, Probe Sequence
gtcactgtttcactactcagcatgg

SEQ ID NO: 250141 - DNA, 25 bp, Probe Sequence
gtcaattcattaacactgccatgac

SEQ ID NO: 250142 - DNA, 25 bp, Probe Sequence
gtaatccagagagaatgctcagaaa

SEQ ID NO: 250143 - DNA, 25 bp, Probe Sequence
gtcacttgccaacaaggcagaaaat

SEQ ID NO: 250144 - DNA, 25 bp, Probe Sequence
gtcacgtccactaatcggcaaaagg

SEQ ID NO: 250145 - DNA, 25 bp, Probe Sequence
gtccaaccgccgtagacaggaagga

SEQ ID NO: 250146 - DNA, 25 bp, Probe Sequence
gtcaaacacggcttaattagaagaa

SEQ ID NO: 250147 - DNA, 25 bp, Probe Sequence
gtaatattctaggtacctcacaaaa

SEQ ID NO: 250148 - DNA, 25 bp, Probe Sequence
gtcaatttcgcggaattctccaaga

SEQ ID NO: 250149 - DNA, 25 bp, Probe Sequence
gtcactttgcctgctgtattcaagg

SEQ ID NO: 250150 - DNA, 25 bp, Probe Sequence
gtcacttaccaaatgtcacatagcc

SEQ ID NO: 250151 - DNA, 25 bp, Probe Sequence
gtcatctcaagtcaagtcactggtc

SEQ ID NO: 250152 - DNA, 25 bp, Probe Sequence
gtcatctcaagtcaagtcactggtc

SEQ ID NO: 250153 - DNA, 25 bp, Probe Sequence
gtcacccaggctggagtgcagtggt

SEQ ID NO: 250154 - DNA, 25 bp, Probe Sequence
gtcaaaatagtccaccagtgattct

SEQ ID NO: 250155 - DNA, 25 bp, Probe Sequence
gtcaaaggtcatcaagcagtgttca

SEQ ID NO: 250156 - DNA, 25 bp, Probe Sequence
gtcactattgtatgaagagatttac

SEQ ID NO: 250157 - DNA, 25 bp, Probe Sequence
gtcacttgtgtaccgagagcttgaa

SEQ ID NO: 250158 - DNA, 25 bp, Probe Sequence
gtcactatttacaatcagagccaaa

SEQ ID NO: 250159 - DNA, 25 bp, Probe Sequence
gtcgagtttacttcatgaggaggtc

SEQ ID NO: 250160 - DNA, 25 bp, Probe Sequence
gtcgagtttacttcatgaggaggtc

SEQ ID NO: 250161 - DNA, 25 bp, Probe Sequence
gtcagtgagtgttctttaggtggta

SEQ ID NO: 250162 - DNA, 25 bp, Probe Sequence
gtcttggagacctctgggtggaagt

SEQ ID NO: 250163 - DNA, 25 bp, Probe Sequence
gtccgacaaccattggggtggggct

SEQ ID NO: 250164 - DNA, 25 bp, Probe Sequence
gtcaccaaacaacttggttgtgaac

SEQ ID NO: 250165 - DNA, 25 bp, Probe Sequence
gtcaataaacaacagctgaagcaaa

SEQ ID NO: 250166 - DNA, 25 bp, Probe Sequence
gtcaataccacaaaccagcaagcaa

SEQ ID NO: 250167 - DNA, 25 bp, Probe Sequence
gtcaataccctgtcactgagcatta

SEQ ID NO: 250168 - DNA, 25 bp, Probe Sequence
gtcagtaaccgtgcgattatacaaa

SEQ ID NO: 250169 - DNA, 25 bp, Probe Sequence
gtcttaaatttcagttacacaggag

SEQ ID NO: 250170 - DNA, 25 bp, Probe Sequence
gtcattaaatggaagtgtctgccaa

SEQ ID NO: 250171 - DNA, 25 bp, Probe Sequence
gtcaataatgacgtatgttcccata

SEQ ID NO: 250172 - DNA, 25 bp, Probe Sequence
gtcaatttgggttgtgtccatcata

SEQ ID NO: 250173 - DNA, 25 bp, Probe Sequence
gtaattttgtgtctgctggtataca

SEQ ID NO: 250174 - DNA, 25 bp, Probe Sequence
gtaatttatgatctacatggcatta

SEQ ID NO: 250175 - DNA, 25 bp, Probe Sequence
gtcaatatgtattcttagtacttaa

SEQ ID NO: 250176 - DNA, 25 bp, Probe Sequence
gtaattttcctgcaatacttaataa

SEQ ID NO: 250177 - DNA, 25 bp, Probe Sequence
gtcaaatttcagagacatggtaaaa

SEQ ID NO: 250178 - DNA, 25 bp, Probe Sequence
gtcaaaattgacagatgggatctaa

SEQ ID NO: 250179 - DNA, 25 bp, Probe Sequence
gtcaaatattacctgcagggattct

SEQ ID NO: 250180 - DNA, 25 bp, Probe Sequence
gtcaatactaacccgctggtttgcc

SEQ ID NO: 250181 - DNA, 25 bp, Probe Sequence
gtcagtcctaaataggttttcctca

SEQ ID NO: 250182 - DNA, 25 bp, Probe Sequence
gtcagtccattttcaagttttggtc

SEQ ID NO: 250183 - DNA, 25 bp, Probe Sequence
gtcacccaggatgaagtataatgga

SEQ ID NO: 250184 - DNA, 25 bp, Probe Sequence
gtcaccaaggcagcgcatgtatgtt

SEQ ID NO: 250185 - DNA, 25 bp, Probe Sequence
gtcaccacagttacctgtcaatgta

SEQ ID NO: 250186 - DNA, 25 bp, Probe Sequence
gtcagccacagcttctctattaaat

SEQ ID NO: 250187 - DNA, 25 bp, Probe Sequence
gtcaacagatatacactcaataaca

SEQ ID NO: 250188 - DNA, 25 bp, Probe Sequence
gtcaacaaactgttcagaaacacca

SEQ ID NO: 250189 - DNA, 25 bp, Probe Sequence
gtcacttaactgttccagaatacac

SEQ ID NO: 250190 - DNA, 25 bp, Probe Sequence
gtcacttgaattggtcctatttctc

SEQ ID NO: 250191 - DNA, 25 bp, Probe Sequence
gtaattatggtgcactttttcgcta

SEQ ID NO: 250192 - DNA, 25 bp, Probe Sequence
gtcttgagtagtgacttctttggtg

SEQ ID NO: 250193 - DNA, 25 bp, Probe Sequence
gtcaggagatcgagaccatcctggc

SEQ ID NO: 250194 - DNA, 25 bp, Probe Sequence
gtcagctggtagagcaagcccatga

SEQ ID NO: 250195 - DNA, 25 bp, Probe Sequence
gtcaatggtcagggatgagcaatct

SEQ ID NO: 250196 - DNA, 25 bp, Probe Sequence
gtcaattgtcactgtcatcagaatc

SEQ ID NO: 250197 - DNA, 25 bp, Probe Sequence
gtcaagcatgttgggcctcaagatc

SEQ ID NO: 250198 - DNA, 25 bp, Probe Sequence
gtcaagcatcttcggccgatattta

SEQ ID NO: 250199 - DNA, 25 bp, Probe Sequence
gtcaagcctaagtccttgagttccg

SEQ ID NO: 250200 - DNA, 25 bp, Probe Sequence
gtcacagtaacgttcattggttcct

SEQ ID NO: 250201 - DNA, 25 bp, Probe Sequence
gtcacagaagactttaatccgtcaa

SEQ ID NO: 250202 - DNA, 25 bp, Probe Sequence
gtcacagacaggatgtacccagtct

SEQ ID NO: 250203 - DNA, 25 bp, Probe Sequence
gtcacgtcggagactgacaccaggt

SEQ ID NO: 250204 - DNA, 25 bp, Probe Sequence
gtcactgcacagtgcatctcagccc

SEQ ID NO: 250205 - DNA, 25 bp, Probe Sequence
gtcaatgatgagtcctctctggtca

SEQ ID NO: 250206 - DNA, 25 bp, Probe Sequence
gtcaatttagctgcatcatgggtca

SEQ ID NO: 250207 - DNA, 25 bp, Probe Sequence
gtcaatttagctgcatcatgggtca

SEQ ID NO: 250208 - DNA, 25 bp, Probe Sequence
gtcgattctggttctagggaccaat

SEQ ID NO: 250209 - DNA, 25 bp, Probe Sequence
gtaattcatggttttgttgccacaa

SEQ ID NO: 250210 - DNA, 25 bp, Probe Sequence
gtaattgtgttatttggtgccagac

SEQ ID NO: 250211 - DNA, 25 bp, Probe Sequence
gtaatttggcaacttgagctctccc

SEQ ID NO: 250212 - DNA, 25 bp, Probe Sequence
gtcagacttagaggggacttccagc

SEQ ID NO: 250213 - DNA, 25 bp, Probe Sequence
gtcagtctcttaggtaacttcctgt

SEQ ID NO: 250214 - DNA, 25 bp, Probe Sequence
gtcagttttattttctattccttgt

SEQ ID NO: 250215 - DNA, 25 bp, Probe Sequence
gtcacttttcaagtactttctgact

SEQ ID NO: 250216 - DNA, 25 bp, Probe Sequence
gtcaatttgctctagtgtcttatta

SEQ ID NO: 250217 - DNA, 25 bp, Probe Sequence
gtaattttgatagctgttttagttt

SEQ ID NO: 250218 - DNA, 25 bp, Probe Sequence
gtaattcttgacactctttctataa

SEQ ID NO: 250219 - DNA, 25 bp, Probe Sequence
gtaattataggcttgttttcttaat

SEQ ID NO: 250220 - DNA, 25 bp, Probe Sequence
gtaatttatgccttagtcttgtttt

SEQ ID NO: 250221 - DNA, 25 bp, Probe Sequence
gtaattttgtgcattggcatatgtc

SEQ ID NO: 250222 - DNA, 25 bp, Probe Sequence
gtcaacctgtggactgtggcattcc

SEQ ID NO: 250223 - DNA, 25 bp, Probe Sequence
gtcaagacgtgtcatgtacatttgt

SEQ ID NO: 250224 - DNA, 25 bp, Probe Sequence
gtcaagtccattgtagactttgtga

SEQ ID NO: 250225 - DNA, 25 bp, Probe Sequence
gtcaacctttctagtagtttatgat

SEQ ID NO: 250226 - DNA, 25 bp, Probe Sequence
gtcaaccctcttacaagacttagtg

SEQ ID NO: 250227 - DNA, 25 bp, Probe Sequence
gtcacaccctccgaaagatgagtag

SEQ ID NO: 250228 - DNA, 25 bp, Probe Sequence
gtcacaccctccgaaagatgagtag

SEQ ID NO: 250229 - DNA, 25 bp, Probe Sequence
gtcacccctgcctaaagatagaatg

SEQ ID NO: 250230 - DNA, 25 bp, Probe Sequence
gtcaatcgttccttatcaggagacc

SEQ ID NO: 250231 - DNA, 25 bp, Probe Sequence
gtcagatcctgccgaaatccggacc

SEQ ID NO: 250232 - DNA, 25 bp, Probe Sequence
gtcaaatcatggccaaatcgcagtg

SEQ ID NO: 250233 - DNA, 25 bp, Probe Sequence
gtcaagatctagcgataatgacgat

SEQ ID NO: 250234 - DNA, 25 bp, Probe Sequence
gtcaagcttactacagtgaaagaat

SEQ ID NO: 250235 - DNA, 25 bp, Probe Sequence
gtcagacttcaaacgtaacagcaga

SEQ ID NO: 250236 - DNA, 25 bp, Probe Sequence
gtcatgaaggatgacgtcggacaga

SEQ ID NO: 250237 - DNA, 25 bp, Probe Sequence
gtcaaagggccactgccaaggcgac

SEQ ID NO: 250238 - DNA, 25 bp, Probe Sequence
gtcacaagggtactccacaggagga

SEQ ID NO: 250239 - DNA, 25 bp, Probe Sequence
gtcaaggagttctgccagcaggagg

SEQ ID NO: 250240 - DNA, 25 bp, Probe Sequence
gtcagcggtttgttcacacaggaat

SEQ ID NO: 250241 - DNA, 25 bp, Probe Sequence
gtcaaggctcttagtacaggaatat

SEQ ID NO: 250242 - DNA, 25 bp, Probe Sequence
gtcaggcactgaaccaaaggagaat

SEQ ID NO: 250243 - DNA, 25 bp, Probe Sequence
gtcacgcatgccacacaagaaggac

SEQ ID NO: 250244 - DNA, 25 bp, Probe Sequence
gtcacagacctgctcaggagatgga

SEQ ID NO: 250245 - DNA, 25 bp, Probe Sequence
gtcaatgaaatgctagggggccagg

SEQ ID NO: 250246 - DNA, 25 bp, Probe Sequence
gtcaggaccgagaacctgggctagg

SEQ ID NO: 250247 - DNA, 25 bp, Probe Sequence
gtcaggtgtgggcagttgggcaagc

SEQ ID NO: 250248 - DNA, 25 bp, Probe Sequence
gtcagtgttgtgggtgtccctggag

SEQ ID NO: 250249 - DNA, 25 bp, Probe Sequence
gtcagcttgtgggtgtggacctgaa

SEQ ID NO: 250250 - DNA, 25 bp, Probe Sequence
gtcacagccgggatgaagccgatcc

SEQ ID NO: 250251 - DNA, 25 bp, Probe Sequence
gtcaggccctgtctgggccagaact

SEQ ID NO: 250252 - DNA, 25 bp, Probe Sequence
gtcagtccctacttaggaaatactc

SEQ ID NO: 250253 - DNA, 25 bp, Probe Sequence
gtgcagttttagcgggtacaagatc

SEQ ID NO: 250254 - DNA, 25 bp, Probe Sequence
gtcagcttgctttgaggctagtaaa

SEQ ID NO: 250255 - DNA, 25 bp, Probe Sequence
gtcagattgcttatgcccgtataga

SEQ ID NO: 250256 - DNA, 25 bp, Probe Sequence
gtcagctgtgacaggcccttagctg

SEQ ID NO: 250257 - DNA, 25 bp, Probe Sequence
gtcagcattgaggtcacctgctttc

SEQ ID NO: 250258 - DNA, 25 bp, Probe Sequence
gtcacaagattgacagcttctgctg

SEQ ID NO: 250259 - DNA, 25 bp, Probe Sequence
gtcaatcagtgactagcttcctgta

SEQ ID NO: 250260 - DNA, 25 bp, Probe Sequence
gtcaatggaatcatgtactctgtga

SEQ ID NO: 250261 - DNA, 25 bp, Probe Sequence
gtcaagtgcataacatgtacctggt

SEQ ID NO: 250262 - DNA, 25 bp, Probe Sequence
gtcaagccaaatatgacctgttaca

SEQ ID NO: 250263 - DNA, 25 bp, Probe Sequence
gtcacacctaaacacagctttagca

SEQ ID NO: 250264 - DNA, 25 bp, Probe Sequence
gtcacaactcaataacccatacaga

SEQ ID NO: 250265 - DNA, 25 bp, Probe Sequence
gtcaaactacattgagcccctgagg

SEQ ID NO: 250266 - DNA, 25 bp, Probe Sequence
gtcaaattacatttcctactgcagt

SEQ ID NO: 250267 - DNA, 25 bp, Probe Sequence
gtcaaattacatttcctactgcagt

SEQ ID NO: 250268 - DNA, 25 bp, Probe Sequence
gtcagatgattccattctccgattg

SEQ ID NO: 250269 - DNA, 25 bp, Probe Sequence
gtcatgtgcactgaatgttccactg

SEQ ID NO: 250270 - DNA, 25 bp, Probe Sequence
gtcttgaccctttaccatattttgt

SEQ ID NO: 250271 - DNA, 25 bp, Probe Sequence
gtcaatggcccgaaacacatattat

SEQ ID NO: 250272 - DNA, 25 bp, Probe Sequence
gtaattgcctagaaatatctttctc

SEQ ID NO: 250273 - DNA, 25 bp, Probe Sequence
gtaattgtgtagatgaagtatgtgt

SEQ ID NO: 250274 - DNA, 25 bp, Probe Sequence
gtaattcgtgagactgaagttgctt

SEQ ID NO: 250275 - DNA, 25 bp, Probe Sequence
gtcaatgccgtaatggatttgtgct

SEQ ID NO: 250276 - DNA, 25 bp, Probe Sequence
gtcaagggttcactgcatttctcct

SEQ ID NO: 250277 - DNA, 25 bp, Probe Sequence
gtcaagggttcactgcatttctcct

SEQ ID NO: 250278 - DNA, 25 bp, Probe Sequence
gtcaaggcatatacacactttctca

SEQ ID NO: 250279 - DNA, 25 bp, Probe Sequence
gtcaactgttgtctcttttcaaacc

SEQ ID NO: 250280 - DNA, 25 bp, Probe Sequence
gtcagactttctcttggtataagca

SEQ ID NO: 250281 - DNA, 25 bp, Probe Sequence
gtcacactgtttcctgggattcaag

SEQ ID NO: 250282 - DNA, 25 bp, Probe Sequence
gtcacactgtttcctgggattcaag

SEQ ID NO: 250283 - DNA, 25 bp, Probe Sequence
gtcggcaggttcgaggcgattcgag

SEQ ID NO: 250284 - DNA, 25 bp, Probe Sequence
gtcacgcatctgatgaagcgaattc

SEQ ID NO: 250285 - DNA, 25 bp, Probe Sequence
gtcacttctgctgtacagatatcga

SEQ ID NO: 250286 - DNA, 25 bp, Probe Sequence
gtcacgctttgattcacagactcaa

SEQ ID NO: 250287 - DNA, 25 bp, Probe Sequence
gtcaatttgctattcatgaagaaac

SEQ ID NO: 250288 - DNA, 25 bp, Probe Sequence
gtcaatgcctgtaatccgaaaactt

SEQ ID NO: 250289 - DNA, 25 bp, Probe Sequence
gtcatgaactatatccgtaacctgg

SEQ ID NO: 250290 - DNA, 25 bp, Probe Sequence
gtcaataatatcactctgtacatcc

SEQ ID NO: 250291 - DNA, 25 bp, Probe Sequence
gtcgcaaaacttatgtgaccccgcg

SEQ ID NO: 250292 - DNA, 25 bp, Probe Sequence
gtcagaataggtttttcacaccacc

SEQ ID NO: 250293 - DNA, 25 bp, Probe Sequence
gtcaaaaggatagcgctgccaccac

SEQ ID NO: 250294 - DNA, 25 bp, Probe Sequence
gtcaataaaagagctgtctgactgc

SEQ ID NO: 250295 - DNA, 25 bp, Probe Sequence
gtcaaaaccacatcagatctcttgc

SEQ ID NO: 250296 - DNA, 25 bp, Probe Sequence
gtcagtgaacgccaggagtgctttc

SEQ ID NO: 250297 - DNA, 25 bp, Probe Sequence
gtcacgaactcctgagtactcacca

SEQ ID NO: 250298 - DNA, 25 bp, Probe Sequence
gtcaccacctccagggtctaagagg

SEQ ID NO: 250299 - DNA, 25 bp, Probe Sequence
gtcaccaacactgaagacctaaggt

SEQ ID NO: 250300 - DNA, 25 bp, Probe Sequence
gtcacttatgccaaaaacccaaact

SEQ ID NO: 250301 - DNA, 25 bp, Probe Sequence
gtcaatttggcaattagcactccac

SEQ ID NO: 250302 - DNA, 25 bp, Probe Sequence
gtcaattatgccaaataatctcttt

SEQ ID NO: 250303 - DNA, 25 bp, Probe Sequence
gtcaatatttagtaaagcttttctt

SEQ ID NO: 250304 - DNA, 25 bp, Probe Sequence
gtcaatatttagtaaagcttttctt

SEQ ID NO: 250305 - DNA, 25 bp, Probe Sequence
gtcaatatttagtaaagcttttctt

SEQ ID NO: 250306 - DNA, 25 bp, Probe Sequence
gtcaattttctgcatcaacttgact

SEQ ID NO: 250307 - DNA, 25 bp, Probe Sequence
gtcaagacattgcttcaacattgcc

SEQ ID NO: 250308 - DNA, 25 bp, Probe Sequence
gtcaaaatctggtttcagaaccgta

SEQ ID NO: 250309 - DNA, 25 bp, Probe Sequence
gtcaaaagcgcttgttctttcgtgc

SEQ ID NO: 250310 - DNA, 25 bp, Probe Sequence
gtcaactggtgtttcttgttcattg

SEQ ID NO: 250311 - DNA, 25 bp, Probe Sequence
gtcagcaccgggttatctttcttta

SEQ ID NO: 250312 - DNA, 25 bp, Probe Sequence
gtcaccactgtgcgtatcagattta

SEQ ID NO: 250313 - DNA, 25 bp, Probe Sequence
gtcatgctgccgcaggatgatcagt

SEQ ID NO: 250314 - DNA, 25 bp, Probe Sequence
gtcagcatgcctctagaggcaagga

SEQ ID NO: 250315 - DNA, 25 bp, Probe Sequence
gtcacatgcagcaactagcaggcgg

SEQ ID NO: 250316 - DNA, 25 bp, Probe Sequence
gtcatgcagatgatctgagcgagat

SEQ ID NO: 250317 - DNA, 25 bp, Probe Sequence
gtcaagatgatttggcagattcaga

SEQ ID NO: 250318 - DNA, 25 bp, Probe Sequence
gtcaagtacagtcctgattgcatca

SEQ ID NO: 250319 - DNA, 25 bp, Probe Sequence
gtcaagtcactggtctgtttgcatt

SEQ ID NO: 250320 - DNA, 25 bp, Probe Sequence
gtcaagtcactggtctgtttgcatt

SEQ ID NO: 250321 - DNA, 25 bp, Probe Sequence
gtcaattagcacatgttttgcatat

SEQ ID NO: 250322 - DNA, 25 bp, Probe Sequence
gtcacttgaatcccgtgattgtcat

SEQ ID NO: 250323 - DNA, 25 bp, Probe Sequence
gtcacattgaaattggtggcttcat

SEQ ID NO: 250324 - DNA, 25 bp, Probe Sequence
gtcactaaatagtttgcagtacgtt

SEQ ID NO: 250325 - DNA, 25 bp, Probe Sequence
gtcactaaaggatttgcagcttgcg

SEQ ID NO: 250326 - DNA, 25 bp, Probe Sequence
gtcaccaccaggacctactgtgaga

SEQ ID NO: 250327 - DNA, 25 bp, Probe Sequence
gtcacgcagttctcttacgtggact

SEQ ID NO: 250328 - DNA, 25 bp, Probe Sequence
gtcaacatgttctctgaacttgaga

SEQ ID NO: 250329 - DNA, 25 bp, Probe Sequence
gtcaactgtagatgctgaagctgtc

SEQ ID NO: 250330 - DNA, 25 bp, Probe Sequence
gtcaagcttttaccaggcattctct

SEQ ID NO: 250331 - DNA, 25 bp, Probe Sequence
gtgcgttctttagaccaatgcattg

SEQ ID NO: 250332 - DNA, 25 bp, Probe Sequence
gtcacctttatagaagcaatgcatt

SEQ ID NO: 250333 - DNA, 25 bp, Probe Sequence
gtcacacttcataaaagagcaagag

SEQ ID NO: 250334 - DNA, 25 bp, Probe Sequence
gtcacatcttgctgataaccaggga

SEQ ID NO: 250335 - DNA, 25 bp, Probe Sequence
gtcaacttcagataccactggagaa

SEQ ID NO: 250336 - DNA, 25 bp, Probe Sequence
gtcaatcttcagttatccccaaatg

SEQ ID NO: 250337 - DNA, 25 bp, Probe Sequence
gtcgtttcgttagcacacagtatgt

SEQ ID NO: 250338 - DNA, 25 bp, Probe Sequence
gtcagattttttcctccaagagttg

SEQ ID NO: 250339 - DNA, 25 bp, Probe Sequence
gtcagattttttcctccaagagttg

SEQ ID NO: 250340 - DNA, 25 bp, Probe Sequence
gtcagataattaatttccaaaggcg

SEQ ID NO: 250341 - DNA, 25 bp, Probe Sequence
gtcagaaatattactcctcagaacc

SEQ ID NO: 250342 - DNA, 25 bp, Probe Sequence
gtcagaaagcataactactctaggc

SEQ ID NO: 250343 - DNA, 25 bp, Probe Sequence
gtcaagaagccgatcatcctggtct

SEQ ID NO: 250344 - DNA, 25 bp, Probe Sequence
gtcaagatatcaagaccatcctggc

SEQ ID NO: 250345 - DNA, 25 bp, Probe Sequence
gtcaacagacaagctgatccgcatc

SEQ ID NO: 250346 - DNA, 25 bp, Probe Sequence
gtcagatcagcggaggctgaccggc

SEQ ID NO: 250347 - DNA, 25 bp, Probe Sequence
gtcgtagctgagaaggaccgtcccc

SEQ ID NO: 250348 - DNA, 25 bp, Probe Sequence
gtcagttgtgtgatacctggacccc

SEQ ID NO: 250349 - DNA, 25 bp, Probe Sequence
gtcagtgtcttaaaggggcctgcgc

SEQ ID NO: 250350 - DNA, 25 bp, Probe Sequence
gtcagcactttaatgggtgtccctg

SEQ ID NO: 250351 - DNA, 25 bp, Probe Sequence
gtcagccttcgctatgatggagcac

SEQ ID NO: 250352 - DNA, 25 bp, Probe Sequence
gtcacacattccttagggccatgaa

SEQ ID NO: 250353 - DNA, 25 bp, Probe Sequence
gtcacactgaccttgcagagttctg

SEQ ID NO: 250354 - DNA, 25 bp, Probe Sequence
gtcacactgaccttgcagagttctg

SEQ ID NO: 250355 - DNA, 25 bp, Probe Sequence
gtcacactgaccttgcagagttctg

SEQ ID NO: 250356 - DNA, 25 bp, Probe Sequence
gtcagcaccatcctggaaggttatt

SEQ ID NO: 250357 - DNA, 25 bp, Probe Sequence
gtcagaaacctgcagggactccatg

SEQ ID NO: 250358 - DNA, 25 bp, Probe Sequence
gtcacgagaacccagtggacatcct

SEQ ID NO: 250359 - DNA, 25 bp, Probe Sequence
gtcacagactgaccgagtggacctg

SEQ ID NO: 250360 - DNA, 25 bp, Probe Sequence
gtcaatgccatcttcgagtggtcca

SEQ ID NO: 250361 - DNA, 25 bp, Probe Sequence
gtcacatggtagtgagtgaggccaa

SEQ ID NO: 250362 - DNA, 25 bp, Probe Sequence
gtcagggtgcagtgggacgtcagag

SEQ ID NO: 250363 - DNA, 25 bp, Probe Sequence
gtcagagggagctggtacagtagtg

SEQ ID NO: 250364 - DNA, 25 bp, Probe Sequence
gtcatctgggtctgttagtgtagtg

SEQ ID NO: 250365 - DNA, 25 bp, Probe Sequence
gtcactggagctttgttgggaaaaa

SEQ ID NO: 250366 - DNA, 25 bp, Probe Sequence
gtcacagtgatgaagattcgggaaa

SEQ ID NO: 250367 - DNA, 25 bp, Probe Sequence
gtcacagtgatgcatgtcttagcac

SEQ ID NO: 250368 - DNA, 25 bp, Probe Sequence
gtcaatgctctgaaatctgtggagc

SEQ ID NO: 250369 - DNA, 25 bp, Probe Sequence
gtcacttgctaagttgatgtcagcg

SEQ ID NO: 250370 - DNA, 25 bp, Probe Sequence
gtcacattgcatacctggatgtaaa

SEQ ID NO: 250371 - DNA, 25 bp, Probe Sequence
gtcagcattgcacctgctatggaga

SEQ ID NO: 250372 - DNA, 25 bp, Probe Sequence
gtcacttgcaaccgtggaggagcca

SEQ ID NO: 250373 - DNA, 25 bp, Probe Sequence
gtcactgtcagatggtctgcagcga

SEQ ID NO: 250374 - DNA, 25 bp, Probe Sequence
gtcactggcagaaggtcgcctctac

SEQ ID NO: 250375 - DNA, 25 bp, Probe Sequence
gtcacaggagaacggctgcctgcca

SEQ ID NO: 250376 - DNA, 25 bp, Probe Sequence
gtcacatatgagtagtggctctccc

SEQ ID NO: 250377 - DNA, 25 bp, Probe Sequence
gtctcatagagaagccgcttccggc

SEQ ID NO: 250378 - DNA, 25 bp, Probe Sequence
gtcaatgggagtttgttttggcacc

SEQ ID NO: 250379 - DNA, 25 bp, Probe Sequence
gtcaatgggagtttgttttggcacc

SEQ ID NO: 250380 - DNA, 25 bp, Probe Sequence
gtcaatgggagtttgttttggcacc

SEQ ID NO: 250381 - DNA, 25 bp, Probe Sequence
gtcaatgggagtttgttttggcacc

SEQ ID NO: 250382 - DNA, 25 bp, Probe Sequence
gtcaatgggagtttgttttggcacc

SEQ ID NO: 250383 - DNA, 25 bp, Probe Sequence
gtcaatgggagtttgttttggcacc

SEQ ID NO: 250384 - DNA, 25 bp, Probe Sequence
gtcaatgggagtttgttttggcacc

SEQ ID NO: 250385 - DNA, 25 bp, Probe Sequence
gtcaatgggagtttgttttggcacc

SEQ ID NO: 250386 - DNA, 25 bp, Probe Sequence
gtcaatgggagtttgttttggcacc

SEQ ID NO: 250387 - DNA, 25 bp, Probe Sequence
gtcaatgggagtttgttttggcacc

SEQ ID NO: 250388 - DNA, 25 bp, Probe Sequence
gtcaatgggagtttgttttggcacc

SEQ ID NO: 250389 - DNA, 25 bp, Probe Sequence
gtcaatgggagtttgttttggcacc

SEQ ID NO: 250390 - DNA, 25 bp, Probe Sequence
gtcaatgggagtttgttttggcacc

SEQ ID NO: 250391 - DNA, 25 bp, Probe Sequence
gtcaatgggagtttgttttggcacc

SEQ ID NO: 250392 - DNA, 25 bp, Probe Sequence
gtcaatgggagtttgttttggcacc

SEQ ID NO: 250393 - DNA, 25 bp, Probe Sequence
gtcaatgggagtttgttttggcacc

SEQ ID NO: 250394 - DNA, 25 bp, Probe Sequence
gtcaatgggagtttgttttggcacc

SEQ ID NO: 250395 - DNA, 25 bp, Probe Sequence
gtcaatgggagtttgttttggcacc

SEQ ID NO: 250396 - DNA, 25 bp, Probe Sequence
gtcaatgggagtttgttttggcacc

SEQ ID NO: 250397 - DNA, 25 bp, Probe Sequence
gtcaatgggagtttgttttggcacc

SEQ ID NO: 250398 - DNA, 25 bp, Probe Sequence
gtcaatgggagtttgttttggcacc

SEQ ID NO: 250399 - DNA, 25 bp, Probe Sequence
gtcaatgggagtttgttttggcacc

SEQ ID NO: 250400 - DNA, 25 bp, Probe Sequence
gtcaatgggagtttgttttggcacc

SEQ ID NO: 250401 - DNA, 25 bp, Probe Sequence
gtcaatgggagtttgttttggcacc

SEQ ID NO: 250402 - DNA, 25 bp, Probe Sequence
gtcaatgggagtttgttttggcacc

SEQ ID NO: 250403 - DNA, 25 bp, Probe Sequence
gtcaatgggagtttgttttggcacc

SEQ ID NO: 250404 - DNA, 25 bp, Probe Sequence
gtcaatgggagtttgttttggcacc

SEQ ID NO: 250405 - DNA, 25 bp, Probe Sequence
gtcaatgggagtttgttttggcacc

SEQ ID NO: 250406 - DNA, 25 bp, Probe Sequence
gtcaatgggagtttgttttggcacc

SEQ ID NO: 250407 - DNA, 25 bp, Probe Sequence
gtcaatgggagtttgttttggcacc

SEQ ID NO: 250408 - DNA, 25 bp, Probe Sequence
gtcaatgggagtttgttttggcacc

SEQ ID NO: 250409 - DNA, 25 bp, Probe Sequence
gtcaatgggagtttgttttggcacc

SEQ ID NO: 250410 - DNA, 25 bp, Probe Sequence
gtcaatgggagtttgttttggcacc

SEQ ID NO: 250411 - DNA, 25 bp, Probe Sequence
gtcaatgggagtttgttttggcacc

SEQ ID NO: 250412 - DNA, 25 bp, Probe Sequence
gtcaatgggagtttgttttggcacc

SEQ ID NO: 250413 - DNA, 25 bp, Probe Sequence
gtcaatgggagtttgttttggcacc

SEQ ID NO: 250414 - DNA, 25 bp, Probe Sequence
gtcaatgggagtttgttttggcacc

SEQ ID NO: 250415 - DNA, 25 bp, Probe Sequence
gtcaatgggagtttgttttggcacc

SEQ ID NO: 250416 - DNA, 25 bp, Probe Sequence
gtcaatgggagtttgttttggcacc

SEQ ID NO: 250417 - DNA, 25 bp, Probe Sequence
gtcaatgggagtttgttttggcacc

SEQ ID NO: 250418 - DNA, 25 bp, Probe Sequence
gtcaatgggagtttgtttgggcacc

SEQ ID NO: 250419 - DNA, 25 bp, Probe Sequence
gtcaatgggagtttgtttggcacca

SEQ ID NO: 250420 - DNA, 25 bp, Probe Sequence
gtcaatgggagtttgtttggcacca

SEQ ID NO: 250421 - DNA, 25 bp, Probe Sequence
gtcaatgggagtttgtttggcacca

SEQ ID NO: 250422 - DNA, 25 bp, Probe Sequence
gtcaatgggatttttttggcaccaa

SEQ ID NO: 250423 - DNA, 25 bp, Probe Sequence
gtcaatgggatttgttttggcacca

SEQ ID NO: 250424 - DNA, 25 bp, Probe Sequence
gtcaatggagtttgtttggcaccaa

SEQ ID NO: 250425 - DNA, 25 bp, Probe Sequence
gtcaatggattttgttgggcaccga

SEQ ID NO: 250426 - DNA, 25 bp, Probe Sequence
gtcagagctttgtttctgggctact

SEQ ID NO: 250427 - DNA, 25 bp, Probe Sequence
gtcaggcttggttctcagatggtca

SEQ ID NO: 250428 - DNA, 25 bp, Probe Sequence
gtcaccattgcagatgcttaagtca

SEQ ID NO: 250429 - DNA, 25 bp, Probe Sequence
gtcaccattgactttgacacagtga

SEQ ID NO: 250430 - DNA, 25 bp, Probe Sequence
gtcaacattgggagcctcatctgca

SEQ ID NO: 250431 - DNA, 25 bp, Probe Sequence
gtcacctagggaagcacttgctcaa

SEQ ID NO: 250432 - DNA, 25 bp, Probe Sequence
gtcactggatggggagcacttaaat

SEQ ID NO: 250433 - DNA, 25 bp, Probe Sequence
gtcacatgtaggtggcgtgtatgag

SEQ ID NO: 250434 - DNA, 25 bp, Probe Sequence
gtcaagtgggaaggcgtatggcgag

SEQ ID NO: 250435 - DNA, 25 bp, Probe Sequence
gtcaagtggatattgtcctaagctt

SEQ ID NO: 250436 - DNA, 25 bp, Probe Sequence
gtcaggcctgattatctaaaagcta

SEQ ID NO: 250437 - DNA, 25 bp, Probe Sequence
gtcaggctggtctcgaactcctgac

SEQ ID NO: 250438 - DNA, 25 bp, Probe Sequence
gtcaggctggtctcgaactcctgac

SEQ ID NO: 250439 - DNA, 25 bp, Probe Sequence
gtcagtggtggacctgacctgccgt

SEQ ID NO: 250440 - DNA, 25 bp, Probe Sequence
gtcagaggtttcctacctgtctgat

SEQ ID NO: 250441 - DNA, 25 bp, Probe Sequence
gtcatggggtaacatcccctgtgga

SEQ ID NO: 250442 - DNA, 25 bp, Probe Sequence
gtcaggtttcaacagccctagggga

SEQ ID NO: 250443 - DNA, 25 bp, Probe Sequence
gtcagtttcacatcaaaactgtggg

SEQ ID NO: 250444 - DNA, 25 bp, Probe Sequence
gtcagtttcaaggacatcggctgga

SEQ ID NO: 250445 - DNA, 25 bp, Probe Sequence
gtcagtttcaaggacatcggctgga

SEQ ID NO: 250446 - DNA, 25 bp, Probe Sequence
gtcactctctagaccaactgatgca

SEQ ID NO: 250447 - DNA, 25 bp, Probe Sequence
gtcactgcatcttgtatcgattatg

SEQ ID NO: 250448 - DNA, 25 bp, Probe Sequence
gtcacttcttgttgcaattaacaga

SEQ ID NO: 250449 - DNA, 25 bp, Probe Sequence
gtcactgacgtgaataacatgagtc

SEQ ID NO: 250450 - DNA, 25 bp, Probe Sequence
gtcagctggcaggatctcaaagatt

SEQ ID NO: 250451 - DNA, 25 bp, Probe Sequence
gtcagctggcaggatctcaaagatt

SEQ ID NO: 250452 - DNA, 25 bp, Probe Sequence
gtcagtgctgacaaataacatttaa

SEQ ID NO: 250453 - DNA, 25 bp, Probe Sequence
gtcagttcagaagtaagcgctctaa

SEQ ID NO: 250454 - DNA, 25 bp, Probe Sequence
gtcagtctagaactctagcagttca

SEQ ID NO: 250455 - DNA, 25 bp, Probe Sequence
gtcagcttacatccctgagcaggaa

SEQ ID NO: 250456 - DNA, 25 bp, Probe Sequence
gtcagtggcctaggccgcaggacac

SEQ ID NO: 250457 - DNA, 25 bp, Probe Sequence
gtcagtgcgcgtagatgtcaataaa

SEQ ID NO: 250458 - DNA, 25 bp, Probe Sequence
gtcagatgagagaccagtacatata

SEQ ID NO: 250459 - DNA, 25 bp, Probe Sequence
gtcagatgagagaccagtacatata

SEQ ID NO: 250460 - DNA, 25 bp, Probe Sequence
gtcacatcagtgactggtatatctt

SEQ ID NO: 250461 - DNA, 25 bp, Probe Sequence
gtcagacagatgtggttgcatccta

SEQ ID NO: 250462 - DNA, 25 bp, Probe Sequence
gtcaacagagctgtgtgctgcactg

SEQ ID NO: 250463 - DNA, 25 bp, Probe Sequence
gtcacaggagctgtgattccccctg

SEQ ID NO: 250464 - DNA, 25 bp, Probe Sequence
gtcatgacggtaaatggcccgcctg

SEQ ID NO: 250465 - DNA, 25 bp, Probe Sequence
gtcatgaaagtaacatagtacctta

SEQ ID NO: 250466 - DNA, 25 bp, Probe Sequence
gtcagaaaataacagcgtgctgctt

SEQ ID NO: 250467 - DNA, 25 bp, Probe Sequence
gtcagaagcacttagcgttggcctc

SEQ ID NO: 250468 - DNA, 25 bp, Probe Sequence
gtcacaagcctgtcagcctaagacc

SEQ ID NO: 250469 - DNA, 25 bp, Probe Sequence
gtcagcacccactagtcttgacaac

SEQ ID NO: 250470 - DNA, 25 bp, Probe Sequence
gtcacatcccagaacatttaaagcg

SEQ ID NO: 250471 - DNA, 25 bp, Probe Sequence
gtcacacaccagcactttatacact

SEQ ID NO: 250472 - DNA, 25 bp, Probe Sequence
gtcacacaccagcactttatacact

SEQ ID NO: 250473 - DNA, 25 bp, Probe Sequence
gtcacaacgaatacttctggaagct

SEQ ID NO: 250474 - DNA, 25 bp, Probe Sequence
gtcaaatgtcctgtctcatggaagc

SEQ ID NO: 250475 - DNA, 25 bp, Probe Sequence
gtcgaaatccacctgtcaggacgcc

SEQ ID NO: 250476 - DNA, 25 bp, Probe Sequence
gtctgaaatccaggcctgcagggac

SEQ ID NO: 250477 - DNA, 25 bp, Probe Sequence
gtcagcaagacggtgtatggggacc

SEQ ID NO: 250478 - DNA, 25 bp, Probe Sequence
gtcagccggctggtggagagggagg

SEQ ID NO: 250479 - DNA, 25 bp, Probe Sequence
gtcacctgtgagctggagagaaccc

SEQ ID NO: 250480 - DNA, 25 bp, Probe Sequence
gtcatcttggagcgtatggaggact

SEQ ID NO: 250481 - DNA, 25 bp, Probe Sequence
gtcttttggagtgaccagcaacttt

SEQ ID NO: 250482 - DNA, 25 bp, Probe Sequence
gtcacttaggagagaccatccctat

SEQ ID NO: 250483 - DNA, 25 bp, Probe Sequence
gtcactgtagcgatgactccacgct

SEQ ID NO: 250484 - DNA, 25 bp, Probe Sequence
gtcactgttgccaaactataccatg

SEQ ID NO: 250485 - DNA, 25 bp, Probe Sequence
gtcactttgcctaaatctagctcta

SEQ ID NO: 250486 - DNA, 25 bp, Probe Sequence
gtcacttgtctctataactacagat

SEQ ID NO: 250487 - DNA, 25 bp, Probe Sequence
gtcacattgtcacatcattttagtt

SEQ ID NO: 250488 - DNA, 25 bp, Probe Sequence
gtcacatgttatcacctactactat

SEQ ID NO: 250489 - DNA, 25 bp, Probe Sequence
gtcataaatatcttcctaccacatc

SEQ ID NO: 250490 - DNA, 25 bp, Probe Sequence
gtcatgaagttcctgacttccgtcc

SEQ ID NO: 250491 - DNA, 25 bp, Probe Sequence
gtcatacctttatctatagccttcc

SEQ ID NO: 250492 - DNA, 25 bp, Probe Sequence
gtcagaatcctttacattcaacttt

SEQ ID NO: 250493 - DNA, 25 bp, Probe Sequence
gtcaaatccttatcagatcattgtt

SEQ ID NO: 250494 - DNA, 25 bp, Probe Sequence
gtcaaacagctcgataagccttttt

SEQ ID NO: 250495 - DNA, 25 bp, Probe Sequence
gtcaaatgatgtgcaaaacctttta

SEQ ID NO: 250496 - DNA, 25 bp, Probe Sequence
gtcaacagcatcaacaaacccttgg

SEQ ID NO: 250497 - DNA, 25 bp, Probe Sequence
gtcacactgattaaatttcttctga

SEQ ID NO: 250498 - DNA, 25 bp, Probe Sequence
gtcaactgaccaaacactgctttga

SEQ ID NO: 250499 - DNA, 25 bp, Probe Sequence
gtcaccgacagaaggactgcttttg

SEQ ID NO: 250500 - DNA, 25 bp, Probe Sequence
gtcactccatcgatgttcttcttcg

SEQ ID NO: 250501 - DNA, 25 bp, Probe Sequence
gtcacgagcaccaatgagcttacta

SEQ ID NO: 250502 - DNA, 25 bp, Probe Sequence
gtcacaaatctcaaagctgtacatt

SEQ ID NO: 250503 - DNA, 25 bp, Probe Sequence
gtcaagaagaagtcagcttgagcat

SEQ ID NO: 250504 - DNA, 25 bp, Probe Sequence
gtcaagcaggaaatcactgccacac

SEQ ID NO: 250505 - DNA, 25 bp, Probe Sequence
gtcaagctggccaagcacaaagagc

SEQ ID NO: 250506 - DNA, 25 bp, Probe Sequence
gtcaacctgctctacagcaaagaca

SEQ ID NO: 250507 - DNA, 25 bp, Probe Sequence
gtcacggtgctctcagaaaatatat

SEQ ID NO: 250508 - DNA, 25 bp, Probe Sequence
gtcttggtgcacttaggtcactgta

SEQ ID NO: 250509 - DNA, 25 bp, Probe Sequence
gtcagtgagtcagaggcagaaccta

SEQ ID NO: 250510 - DNA, 25 bp, Probe Sequence
gtcagatggtctgcagcgagtcaca

SEQ ID NO: 250511 - DNA, 25 bp, Probe Sequence
gtcagatgtctggggcgcagatcaa

SEQ ID NO: 250512 - DNA, 25 bp, Probe Sequence
gtcagatgtctggggcgcagatcaa

SEQ ID NO: 250513 - DNA, 25 bp, Probe Sequence
gtcagcatttcggtctgcatatctg

SEQ ID NO: 250514 - DNA, 25 bp, Probe Sequence
gtcagctttgggacgatagtgcagc

SEQ ID NO: 250515 - DNA, 25 bp, Probe Sequence
gtcacatactgatgtcgtcagtgga

SEQ ID NO: 250516 - DNA, 25 bp, Probe Sequence
gtctatgacagacccttcactgtga

SEQ ID NO: 250517 - DNA, 25 bp, Probe Sequence
gtcacagatagagccttctgtgttg

SEQ ID NO: 250518 - DNA, 25 bp, Probe Sequence
gtcagaaaagggctgctggtggtgg

SEQ ID NO: 250519 - DNA, 25 bp, Probe Sequence
gtcagggggagacttgctggtgggt

SEQ ID NO: 250520 - DNA, 25 bp, Probe Sequence
gtcaggcagggacaactgggaggat

SEQ ID NO: 250521 - DNA, 25 bp, Probe Sequence
gtcaggggcaaggactgttggagga

SEQ ID NO: 250522 - DNA, 25 bp, Probe Sequence
gtcaggggcaaggactgttggagga

SEQ ID NO: 250523 - DNA, 25 bp, Probe Sequence
gtcaccagcccaggatctttggggg

SEQ ID NO: 250524 - DNA, 25 bp, Probe Sequence
gtcactcagcctacagttgggatga

SEQ ID NO: 250525 - DNA, 25 bp, Probe Sequence
gtcaccagccagaatgttcagtact

SEQ ID NO: 250526 - DNA, 25 bp, Probe Sequence
gtcacctagcagatatgtattactt

SEQ ID NO: 250527 - DNA, 25 bp, Probe Sequence
gtcactgtaaatcattcttaagccc

SEQ ID NO: 250528 - DNA, 25 bp, Probe Sequence
gtcattctaattctaccataaccac

SEQ ID NO: 250529 - DNA, 25 bp, Probe Sequence
gtcagattaattccatgatcactaa

SEQ ID NO: 250530 - DNA, 25 bp, Probe Sequence
gtcagagtacaacgtgatggcaaca

SEQ ID NO: 250531 - DNA, 25 bp, Probe Sequence
gtgaagtaaaagagggacccctgcg

SEQ ID NO: 250532 - DNA, 25 bp, Probe Sequence
gtgaagaccaaaaaggtcaccccat

SEQ ID NO: 250533 - DNA, 25 bp, Probe Sequence
gtcaaaagcaagttagttacctcct

SEQ ID NO: 250534 - DNA, 25 bp, Probe Sequence
gtcttaaaagtattgattgaacacc

SEQ ID NO: 250535 - DNA, 25 bp, Probe Sequence
gtcttacatatactttctagaaaac

SEQ ID NO: 250536 - DNA, 25 bp, Probe Sequence
gtcttaccagccactttgcaaaaac

SEQ ID NO: 250537 - DNA, 25 bp, Probe Sequence
gtcttccctccagtcttctgaggga

SEQ ID NO: 250538 - DNA, 25 bp, Probe Sequence
gtcttccctcaattaggtctcgtaa

SEQ ID NO: 250539 - DNA, 25 bp, Probe Sequence
gtcttccgtggatgtttcagttaca

SEQ ID NO: 250540 - DNA, 25 bp, Probe Sequence
gtcttccgtggatgtttcagttaca

SEQ ID NO: 250541 - DNA, 25 bp, Probe Sequence
gtcgtactggatgtaactagtctac

SEQ ID NO: 250542 - DNA, 25 bp, Probe Sequence
gtcgtactgatgggctaggtagttc

SEQ ID NO: 250543 - DNA, 25 bp, Probe Sequence
gtctgtcctagaggttggtttccct

SEQ ID NO: 250544 - DNA, 25 bp, Probe Sequence
gtcttacacagagagggtattccct

SEQ ID NO: 250545 - DNA, 25 bp, Probe Sequence
gtcttgactgagttcagtcctactc

SEQ ID NO: 250546 - DNA, 25 bp, Probe Sequence
gtcattgaaatgctccgccatatac

SEQ ID NO: 250547 - DNA, 25 bp, Probe Sequence
gtcactgtaagcctgcccagtaggc

SEQ ID NO: 250548 - DNA, 25 bp, Probe Sequence
gtcagcttaacattccacagatggg

SEQ ID NO: 250549 - DNA, 25 bp, Probe Sequence
gtcagcttaacattccacagatggg

SEQ ID NO: 250550 - DNA, 25 bp, Probe Sequence
gtcagtacaacttcatcgcagatgt

SEQ ID NO: 250551 - DNA, 25 bp, Probe Sequence
gtcatgtaccatgactggcggctgg

SEQ ID NO: 250552 - DNA, 25 bp, Probe Sequence
gtcatgtacatgaccgttttgtagc

SEQ ID NO: 250553 - DNA, 25 bp, Probe Sequence
gtcagataatcaggtttttcttgca

SEQ ID NO: 250554 - DNA, 25 bp, Probe Sequence
gtcagagccaacacctttgttgcag

SEQ ID NO: 250555 - DNA, 25 bp, Probe Sequence
gtcagagccaaccgtggtcaggatc

SEQ ID NO: 250556 - DNA, 25 bp, Probe Sequence
gtcaggtggacccgggctgacattt

SEQ ID NO: 250557 - DNA, 25 bp, Probe Sequence
gtcagggcaacaccgtggtaacttt

SEQ ID NO: 250558 - DNA, 25 bp, Probe Sequence
gtcagcgaaaccattgttttctgtt

SEQ ID NO: 250559 - DNA, 25 bp, Probe Sequence
gtcagaagaagctcattttgtttgc

SEQ ID NO: 250560 - DNA, 25 bp, Probe Sequence
gtcaaagagcaactcagtctgctgg

SEQ ID NO: 250561 - DNA, 25 bp, Probe Sequence
gtcaaatgcacaaccagttctgcaa

SEQ ID NO: 250562 - DNA, 25 bp, Probe Sequence
gtcacatagcccctagattgctcaa

SEQ ID NO: 250563 - DNA, 25 bp, Probe Sequence
gtcacatggtaacaattatgcactg

SEQ ID NO: 250564 - DNA, 25 bp, Probe Sequence
gtcacagggaagcagatttcagtct

SEQ ID NO: 250565 - DNA, 25 bp, Probe Sequence
gtcacagggggacatgaatcatgtc

SEQ ID NO: 250566 - DNA, 25 bp, Probe Sequence
gtcagcagggggggagagtcactca

SEQ ID NO: 250567 - DNA, 25 bp, Probe Sequence
gtcacgtcgtaaaaagacaccaatt

SEQ ID NO: 250568 - DNA, 25 bp, Probe Sequence
gtcagcttcctctttaggaacccac

SEQ ID NO: 250569 - DNA, 25 bp, Probe Sequence
gtcacttttccttagaaggtcacac

SEQ ID NO: 250570 - DNA, 25 bp, Probe Sequence
gtcttttatctggtcaggggaaaca

SEQ ID NO: 250571 - DNA, 25 bp, Probe Sequence
gtcagtttggggtcagtggtataaa

SEQ ID NO: 250572 - DNA, 25 bp, Probe Sequence
gtcgtattgggcgcctggtcaccag

SEQ ID NO: 250573 - DNA, 25 bp, Probe Sequence
gtcttttggagagcttgttccagca

SEQ ID NO: 250574 - DNA, 25 bp, Probe Sequence
gtctttaaacctgtgtggcaatccc

SEQ ID NO: 250575 - DNA, 25 bp, Probe Sequence
gtctttaaacactcctcaaaactga

SEQ ID NO: 250576 - DNA, 25 bp, Probe Sequence
gtctctgtttccttacctataaaat

SEQ ID NO: 250577 - DNA, 25 bp, Probe Sequence
gtcttttctcccattttacagtatt

SEQ ID NO: 250578 - DNA, 25 bp, Probe Sequence
gtcactttttctcatgttctaatta

SEQ ID NO: 250579 - DNA, 25 bp, Probe Sequence
gtcaccttttcttgattccagaaac

SEQ ID NO: 250580 - DNA, 25 bp, Probe Sequence
gtcagccatttttaatgatctcgga

SEQ ID NO: 250581 - DNA, 25 bp, Probe Sequence
gtcagctgtctttcagaagacctgg

SEQ ID NO: 250582 - DNA, 25 bp, Probe Sequence
gtcaggtacactggacagagccatg

SEQ ID NO: 250583 - DNA, 25 bp, Probe Sequence
gtcagaggagccggcatgggttggc

SEQ ID NO: 250584 - DNA, 25 bp, Probe Sequence
gtcagaggaggggatatgggcagag

SEQ ID NO: 250585 - DNA, 25 bp, Probe Sequence
gtcagacagaggcttcaggtacaac

SEQ ID NO: 250586 - DNA, 25 bp, Probe Sequence
gtcagaagttctatcaggcagagct

SEQ ID NO: 250587 - DNA, 25 bp, Probe Sequence
gtcacacagtaggcccagtgcaagt

SEQ ID NO: 250588 - DNA, 25 bp, Probe Sequence
gtcacacgcatagatccacgaggca

SEQ ID NO: 250589 - DNA, 25 bp, Probe Sequence
gtcacctataggaacctgagcacct

SEQ ID NO: 250590 - DNA, 25 bp, Probe Sequence
gtcactaatagaatatctctgaagc

SEQ ID NO: 250591 - DNA, 25 bp, Probe Sequence
gtcactacaacacagctgcaaagta

SEQ ID NO: 250592 - DNA, 25 bp, Probe Sequence
gtcacttacacaaactgcaaatatt

SEQ ID NO: 250593 - DNA, 25 bp, Probe Sequence
gtcactctctaaatgaccaaagttg

SEQ ID NO: 250594 - DNA, 25 bp, Probe Sequence
gtcactcgatgtcattccaaagtta

SEQ ID NO: 250595 - DNA, 25 bp, Probe Sequence
gtcactgcagagttattccgatagt

SEQ ID NO: 250596 - DNA, 25 bp, Probe Sequence
gtcactggacatgttcatcctagaa

SEQ ID NO: 250597 - DNA, 25 bp, Probe Sequence
gtcactggtctgtttgcatttgata

SEQ ID NO: 250598 - DNA, 25 bp, Probe Sequence
gtcactggtctgtttgcatttgata

SEQ ID NO: 250599 - DNA, 25 bp, Probe Sequence
gtcaggagttttactgcctgtagca

SEQ ID NO: 250600 - DNA, 25 bp, Probe Sequence
gtcagcattctttgaactgccttac

SEQ ID NO: 250601 - DNA, 25 bp, Probe Sequence
gtcagagtcacttgtagtccattta

SEQ ID NO: 250602 - DNA, 25 bp, Probe Sequence
gtgaggtcccttttgctatttggaa

SEQ ID NO: 250603 - DNA, 25 bp, Probe Sequence
gtgaagtctccgatggctattgagg

SEQ ID NO: 250604 - DNA, 25 bp, Probe Sequence
gtgacaggcctagctatagttagga

SEQ ID NO: 250605 - DNA, 25 bp, Probe Sequence
gtcacgtggctagaaacttggctgt

SEQ ID NO: 250606 - DNA, 25 bp, Probe Sequence
gtcagaattctaccaggacttgtgt

SEQ ID NO: 250607 - DNA, 25 bp, Probe Sequence
gtcagaatgcttacgggtgttattt

SEQ ID NO: 250608 - DNA, 25 bp, Probe Sequence
gtcagagagctctggtctgttgtat

SEQ ID NO: 250609 - DNA, 25 bp, Probe Sequence
gtcacaagcgcatggtttccaacca

SEQ ID NO: 250610 - DNA, 25 bp, Probe Sequence
gtcagcaagacccagttatttacca

SEQ ID NO: 250611 - DNA, 25 bp, Probe Sequence
gtcacaaacttcagcaactttccag

SEQ ID NO: 250612 - DNA, 25 bp, Probe Sequence
gtcactgaccatattgaagttgtcc

SEQ ID NO: 250613 - DNA, 25 bp, Probe Sequence
gtcacagaatttctaagttccccaa

SEQ ID NO: 250614 - DNA, 25 bp, Probe Sequence
gtcaggaagcttcgtgaggtcatgc

SEQ ID NO: 250615 - DNA, 25 bp, Probe Sequence
gtcagatgacacatttgtgaaatgc

SEQ ID NO: 250616 - DNA, 25 bp, Probe Sequence
gtcaggaagctgtctcgtgcagact

SEQ ID NO: 250617 - DNA, 25 bp, Probe Sequence
gtcaggaccagtgcctgtgatctcc

SEQ ID NO: 250618 - DNA, 25 bp, Probe Sequence
gtcactgtaagaacctggagcccaa

SEQ ID NO: 250619 - DNA, 25 bp, Probe Sequence
gtcggtaaatacgggacccgctatg

SEQ ID NO: 250620 - DNA, 25 bp, Probe Sequence
gtcaggtaattgaaggaaccccttg

SEQ ID NO: 250621 - DNA, 25 bp, Probe Sequence
gtcaggaagttcaaagacccagcct

SEQ ID NO: 250622 - DNA, 25 bp, Probe Sequence
gtcaggagtgtaccaacacgtcacc

SEQ ID NO: 250623 - DNA, 25 bp, Probe Sequence
gtcatggtgatgcaccagacaggcc

SEQ ID NO: 250624 - DNA, 25 bp, Probe Sequence
gtcacagtgttcacagcacagcaca

SEQ ID NO: 250625 - DNA, 25 bp, Probe Sequence
gtcacagtattttcatcaatgaatt

SEQ ID NO: 250626 - DNA, 25 bp, Probe Sequence
gtcagagtattaatgatcatgagaa

SEQ ID NO: 250627 - DNA, 25 bp, Probe Sequence
gtcagcagtcatgcacgctgataaa

SEQ ID NO: 250628 - DNA, 25 bp, Probe Sequence
gtcagcactctttcagctatctatg

SEQ ID NO: 250629 - DNA, 25 bp, Probe Sequence
gtcactctctattagataatggagt

SEQ ID NO: 250630 - DNA, 25 bp, Probe Sequence
gtcactctctcactaggcaagaact

SEQ ID NO: 250631 - DNA, 25 bp, Probe Sequence
gtcactcttcatcgatgatacgatc

SEQ ID NO: 250632 - DNA, 25 bp, Probe Sequence
gtcatgttgtgattgagcgatcgac

SEQ ID NO: 250633 - DNA, 25 bp, Probe Sequence
gtctgatcttgatgggggcactggc

SEQ ID NO: 250634 - DNA, 25 bp, Probe Sequence
gtcttcttggggacgtatgtggccg

SEQ ID NO: 250635 - DNA, 25 bp, Probe Sequence
gtcattggagggctgcgtatttgta

SEQ ID NO: 250636 - DNA, 25 bp, Probe Sequence
gtcactggaccttgcggaatttgct

SEQ ID NO: 250637 - DNA, 25 bp, Probe Sequence
gtcactgatgagcccgggtactatg

SEQ ID NO: 250638 - DNA, 25 bp, Probe Sequence
gtcactgactgggcctggtacaaga

SEQ ID NO: 250639 - DNA, 25 bp, Probe Sequence
gtcagcggctggattttatttatct

SEQ ID NO: 250640 - DNA, 25 bp, Probe Sequence
gtcacagcctgtatattttagtcat

SEQ ID NO: 250641 - DNA, 25 bp, Probe Sequence
gtcagcagccttggtaaggggtctg

SEQ ID NO: 250642 - DNA, 25 bp, Probe Sequence
gtcacagccttcttcaagtggctcc

SEQ ID NO: 250643 - DNA, 25 bp, Probe Sequence
gtcggccttgcaatgttgtgagtcc

SEQ ID NO: 250644 - DNA, 25 bp, Probe Sequence
gtcagatcctgtgttttgagtccca

SEQ ID NO: 250645 - DNA, 25 bp, Probe Sequence
gtcagctccgtgtggttattgtcaa

SEQ ID NO: 250646 - DNA, 25 bp, Probe Sequence
gtcagtcagggaaggtttgtttatg

SEQ ID NO: 250647 - DNA, 25 bp, Probe Sequence
gtcagggtgtgtgggtgtttttagg

SEQ ID NO: 250648 - DNA, 25 bp, Probe Sequence
gtcatggtgatatttgggttttttg

SEQ ID NO: 250649 - DNA, 25 bp, Probe Sequence
gtcatggtgatatttgggttttttg

SEQ ID NO: 250650 - DNA, 25 bp, Probe Sequence
gtcttgttgaaacgactttgtcctg

SEQ ID NO: 250651 - DNA, 25 bp, Probe Sequence
gtcacatttttcttgttttgtcctt

SEQ ID NO: 250652 - DNA, 25 bp, Probe Sequence
gtcacattgctctttttgtattttc

SEQ ID NO: 250653 - DNA, 25 bp, Probe Sequence
gtcacattcatgttattttatcatt

SEQ ID NO: 250654 - DNA, 25 bp, Probe Sequence
gtcacattgatggtgtatggatcca

SEQ ID NO: 250655 - DNA, 25 bp, Probe Sequence
gtcactctgggtcatcagcatgtcc

SEQ ID NO: 250656 - DNA, 25 bp, Probe Sequence
gtcatcaatgacctcaaccattggg

SEQ ID NO: 250657 - DNA, 25 bp, Probe Sequence
gtcaccaagtctcccttatggaggc

SEQ ID NO: 250658 - DNA, 25 bp, Probe Sequence
gtcaccaagctcataccttgggtgc

SEQ ID NO: 250659 - DNA, 25 bp, Probe Sequence
gtcaccaagttgggccgcttggtca

SEQ ID NO: 250660 - DNA, 25 bp, Probe Sequence
gtcaccaagtctgcccagaaagctc

SEQ ID NO: 250661 - DNA, 25 bp, Probe Sequence
gtcaccaagtctgcccagaaagctc

SEQ ID NO: 250662 - DNA, 25 bp, Probe Sequence
gtcaccaagtctgcccagaaagctc

SEQ ID NO: 250663 - DNA, 25 bp, Probe Sequence
gtcaccagggttactcagacctgcc

SEQ ID NO: 250664 - DNA, 25 bp, Probe Sequence
gtcacggaggataagatcaatgccc

SEQ ID NO: 250665 - DNA, 25 bp, Probe Sequence
gtcacggagaagatgttcgccgagg

SEQ ID NO: 250666 - DNA, 25 bp, Probe Sequence
gtcactggaaagagtgccagtcagc

SEQ ID NO: 250667 - DNA, 25 bp, Probe Sequence
gtcagctggaaaatccagtcactag

SEQ ID NO: 250668 - DNA, 25 bp, Probe Sequence
gtcacaggagaccatccaatcacag

SEQ ID NO: 250669 - DNA, 25 bp, Probe Sequence
gtcaggggactgtctgtcatgcctg

SEQ ID NO: 250670 - DNA, 25 bp, Probe Sequence
gtcagttgtacttctgctccataga

SEQ ID NO: 250671 - DNA, 25 bp, Probe Sequence
gtcagggtatcttttaccagacact

SEQ ID NO: 250672 - DNA, 25 bp, Probe Sequence
gtcagaagatttattatccatgaga

SEQ ID NO: 250673 - DNA, 25 bp, Probe Sequence
gtcaggatatttggattagccagaa

SEQ ID NO: 250674 - DNA, 25 bp, Probe Sequence
gtcaggattattactgtagttgaaa

SEQ ID NO: 250675 - DNA, 25 bp, Probe Sequence
gtcatcggtattacccatgtgtgat

SEQ ID NO: 250676 - DNA, 25 bp, Probe Sequence
gtcatggaggtcgagaccagcctga

SEQ ID NO: 250677 - DNA, 25 bp, Probe Sequence
gtcatggacagtggctatcggccta

SEQ ID NO: 250678 - DNA, 25 bp, Probe Sequence
gtcaggccaatggtcacagacctag

SEQ ID NO: 250679 - DNA, 25 bp, Probe Sequence
gtcacgccaatggctcagcagtcac

SEQ ID NO: 250680 - DNA, 25 bp, Probe Sequence
gtctcagcagaagatacgatcgtct

SEQ ID NO: 250681 - DNA, 25 bp, Probe Sequence
gtcaccatacatgaacaaatgatcc

SEQ ID NO: 250682 - DNA, 25 bp, Probe Sequence
gtcagccatgaggtcaggaacaaca

SEQ ID NO: 250683 - DNA, 25 bp, Probe Sequence
gtcactttggctggccaccagaaaa

SEQ ID NO: 250684 - DNA, 25 bp, Probe Sequence
gtcactttattcctccatcaaaaaa

SEQ ID NO: 250685 - DNA, 25 bp, Probe Sequence
gtcacctgtttaatgccaagataac

SEQ ID NO: 250686 - DNA, 25 bp, Probe Sequence
gtcaccttgtatgtcgaactgcata

SEQ ID NO: 250687 - DNA, 25 bp, Probe Sequence
gtcactaataggatctcaactcata

SEQ ID NO: 250688 - DNA, 25 bp, Probe Sequence
gtcactggtctggctttcagaatta

SEQ ID NO: 250689 - DNA, 25 bp, Probe Sequence
gtcactggtctggctttcagaatta

SEQ ID NO: 250690 - DNA, 25 bp, Probe Sequence
gtcaggggtcagtgtggcaactacc

SEQ ID NO: 250691 - DNA, 25 bp, Probe Sequence
gtcagtgctggcaaagatgggacac

SEQ ID NO: 250692 - DNA, 25 bp, Probe Sequence
gtcagctttggattgctggggccag

SEQ ID NO: 250693 - DNA, 25 bp, Probe Sequence
gtcagttctgaaatgggtgcgtcat

SEQ ID NO: 250694 - DNA, 25 bp, Probe Sequence
gtcagtgactgcacattggtttctg

SEQ ID NO: 250695 - DNA, 25 bp, Probe Sequence
gtcactgacagcacaagtttcactg

SEQ ID NO: 250696 - DNA, 25 bp, Probe Sequence
gtcactgaatgataagatttgcacc

SEQ ID NO: 250697 - DNA, 25 bp, Probe Sequence
gtcactgaatgataagatttgcacc

SEQ ID NO: 250698 - DNA, 25 bp, Probe Sequence
gtcactacaatattacattctgcaa

SEQ ID NO: 250699 - DNA, 25 bp, Probe Sequence
gtcagcttcagtattcatgttccat

SEQ ID NO: 250700 - DNA, 25 bp, Probe Sequence
gtcactgatagtatgtatttcttta

SEQ ID NO: 250701 - DNA, 25 bp, Probe Sequence
gtcactatagattatttggttattt

SEQ ID NO: 250702 - DNA, 25 bp, Probe Sequence
gtcactcaaagctatatggctattt

SEQ ID NO: 250703 - DNA, 25 bp, Probe Sequence
gtcactgcatgataattgagttttc

SEQ ID NO: 250704 - DNA, 25 bp, Probe Sequence
gtcatcgtataccatgtgatcgttt

SEQ ID NO: 250705 - DNA, 25 bp, Probe Sequence
gtcaccagtgcctatggatcatgct

SEQ ID NO: 250706 - DNA, 25 bp, Probe Sequence
gtcactagtgtctaatgaagctttt

SEQ ID NO: 250707 - DNA, 25 bp, Probe Sequence
gtcatcgtggttatgaccatcttct

SEQ ID NO: 250708 - DNA, 25 bp, Probe Sequence
gtcacgctgaatatatgaccacgct

SEQ ID NO: 250709 - DNA, 25 bp, Probe Sequence
gtcacggacttgtcatgcacaagcg

SEQ ID NO: 250710 - DNA, 25 bp, Probe Sequence
gtcagcagtgactttctcagcaaca

SEQ ID NO: 250711 - DNA, 25 bp, Probe Sequence
gtctagctacctatccaatactaaa

SEQ ID NO: 250712 - DNA, 25 bp, Probe Sequence
gtcttgtaaaccacattcttgacaa

SEQ ID NO: 250713 - DNA, 25 bp, Probe Sequence
gtctcctgacaacctaaccattgac

SEQ ID NO: 250714 - DNA, 25 bp, Probe Sequence
gtctcacgtagaccaaaattctgat

SEQ ID NO: 250715 - DNA, 25 bp, Probe Sequence
gtctctgcgttacaaactcctagga

SEQ ID NO: 250716 - DNA, 25 bp, Probe Sequence
gtctctgcgttacaaactcctagga

SEQ ID NO: 250717 - DNA, 25 bp, Probe Sequence
gtctaagcttcctaaggtccttgta

SEQ ID NO: 250718 - DNA, 25 bp, Probe Sequence
gtctacagttcaacaccgtttctgc

SEQ ID NO: 250719 - DNA, 25 bp, Probe Sequence
gtctaagtcttgatccctaatgcct

SEQ ID NO: 250720 - DNA, 25 bp, Probe Sequence
gtcataggccttctctgaaaatgta

SEQ ID NO: 250721 - DNA, 25 bp, Probe Sequence
gtcataagcttgcgttgattaagtc

SEQ ID NO: 250722 - DNA, 25 bp, Probe Sequence
gtcattgccgtggatgggattaacc

SEQ ID NO: 250723 - DNA, 25 bp, Probe Sequence
gtcatcccttcactgaggctgtgaa

SEQ ID NO: 250724 - DNA, 25 bp, Probe Sequence
gtcaccttgtctagcaggatgcaaa

SEQ ID NO: 250725 - DNA, 25 bp, Probe Sequence
gtcactctgtgactgagggagaaga

SEQ ID NO: 250726 - DNA, 25 bp, Probe Sequence
gtcactctggagtacagcgggagaa

SEQ ID NO: 250727 - DNA, 25 bp, Probe Sequence
gtcactatggagttcaaaggacaga

SEQ ID NO: 250728 - DNA, 25 bp, Probe Sequence
gtcagtatgacatttcacgggagat

SEQ ID NO: 250729 - DNA, 25 bp, Probe Sequence
gtcgtattctgctactcgaacagat

SEQ ID NO: 250730 - DNA, 25 bp, Probe Sequence
gtcagatgctttcatttacacagat

SEQ ID NO: 250731 - DNA, 25 bp, Probe Sequence
gtcagacttggctttgattcacaca

SEQ ID NO: 250732 - DNA, 25 bp, Probe Sequence
gtcatgaggttgcttgatacccagc

SEQ ID NO: 250733 - DNA, 25 bp, Probe Sequence
gtcatgggtgaggtctgcaggatcc

SEQ ID NO: 250734 - DNA, 25 bp, Probe Sequence
gtcatggcgctgaaggtagcgaccg

SEQ ID NO: 250735 - DNA, 25 bp, Probe Sequence
gtcatagcctacaactgagctcacc

SEQ ID NO: 250736 - DNA, 25 bp, Probe Sequence
gtcagcactgaagtactaccagctc

SEQ ID NO: 250737 - DNA, 25 bp, Probe Sequence
gtcagcaacaatatgctacacagct

SEQ ID NO: 250738 - DNA, 25 bp, Probe Sequence
gtcactccgtttcaaagtctgtctt

SEQ ID NO: 250739 - DNA, 25 bp, Probe Sequence
gtcaggccgttttagaagagctttt

SEQ ID NO: 250740 - DNA, 25 bp, Probe Sequence
gtcaggcagttttagagtagggttt

SEQ ID NO: 250741 - DNA, 25 bp, Probe Sequence
gtctgggtttcttgagtgtgggtac

SEQ ID NO: 250742 - DNA, 25 bp, Probe Sequence
gtcatggagtcaattcagggagttt

SEQ ID NO: 250743 - DNA, 25 bp, Probe Sequence
gtctggaacctttgggagatctagt

SEQ ID NO: 250744 - DNA, 25 bp, Probe Sequence
gtcagagatacctggcctggtctgg

SEQ ID NO: 250745 - DNA, 25 bp, Probe Sequence
gtcagagaacaaggacgctggtgtg

SEQ ID NO: 250746 - DNA, 25 bp, Probe Sequence
gtcagagagatacctcaccatggat

SEQ ID NO: 250747 - DNA, 25 bp, Probe Sequence
gtcagcacagaacacactgagactt

SEQ ID NO: 250748 - DNA, 25 bp, Probe Sequence
gtcagatggacaccccatgcaattt

SEQ ID NO: 250749 - DNA, 25 bp, Probe Sequence
gtcagggccagggctcatgaatctc

SEQ ID NO: 250750 - DNA, 25 bp, Probe Sequence
gtcaggcccagtgcagcatgaatgt

SEQ ID NO: 250751 - DNA, 25 bp, Probe Sequence
gtcactgcccagcaacatgatggag

SEQ ID NO: 250752 - DNA, 25 bp, Probe Sequence
gtcatcagcatcgagaagacaggtg

SEQ ID NO: 250753 - DNA, 25 bp, Probe Sequence
gtcatccttgcaatccattggggtc

SEQ ID NO: 250754 - DNA, 25 bp, Probe Sequence
gtcaccaatgataccaaggaagccc

SEQ ID NO: 250755 - DNA, 25 bp, Probe Sequence
gtcaccagtgtcgtcagcagagaga

SEQ ID NO: 250756 - DNA, 25 bp, Probe Sequence
gtcatgaagctgccggacagacaca

SEQ ID NO: 250757 - DNA, 25 bp, Probe Sequence
gtcatggcacgggaacatgctccat

SEQ ID NO: 250758 - DNA, 25 bp, Probe Sequence
gtcatctgcaaagacaagctccagg

SEQ ID NO: 250759 - DNA, 25 bp, Probe Sequence
gtcatgtgcaagaccacggtgggag

SEQ ID NO: 250760 - DNA, 25 bp, Probe Sequence
gtcttgccagaccaggtagaggagg

SEQ ID NO: 250761 - DNA, 25 bp, Probe Sequence
gtgcatctgcgtgaacgtaggaagg

SEQ ID NO: 250762 - DNA, 25 bp, Probe Sequence
gtcactggggagtcttatgcaggga

SEQ ID NO: 250763 - DNA, 25 bp, Probe Sequence
gtcactgatggaaggtttgcggatg

SEQ ID NO: 250764 - DNA, 25 bp, Probe Sequence
gtcaggatggtacagattgcagaga

SEQ ID NO: 250765 - DNA, 25 bp, Probe Sequence
gtcaggctggcttctgatgttcagt

SEQ ID NO: 250766 - DNA, 25 bp, Probe Sequence
gtcagtgctacttgaggtcatcagc

SEQ ID NO: 250767 - DNA, 25 bp, Probe Sequence
gtcagctgcttgtgaaactcagcca

SEQ ID NO: 250768 - DNA, 25 bp, Probe Sequence
gtcagtgggacaaactccagcacag

SEQ ID NO: 250769 - DNA, 25 bp, Probe Sequence
gtcaggcttaaaaatccatgcacaa

SEQ ID NO: 250770 - DNA, 25 bp, Probe Sequence
gtcagagttctaatccatcttgcac

SEQ ID NO: 250771 - DNA, 25 bp, Probe Sequence
gtcagtttcagcaagaatttcccag

SEQ ID NO: 250772 - DNA, 25 bp, Probe Sequence
gtcagttatctcatattggtggaaa

SEQ ID NO: 250773 - DNA, 25 bp, Probe Sequence
gtcagtgtcgtcgtatcggtgggta

SEQ ID NO: 250774 - DNA, 25 bp, Probe Sequence
gtcagtcatagtctatcagctggag

SEQ ID NO: 250775 - DNA, 25 bp, Probe Sequence
gtcagttatgcaattacactcaagg

SEQ ID NO: 250776 - DNA, 25 bp, Probe Sequence
gtcagttgatgctggaacatgacag

SEQ ID NO: 250777 - DNA, 25 bp, Probe Sequence
gtcagttggtctcgcaccagatagt

SEQ ID NO: 250778 - DNA, 25 bp, Probe Sequence
gtcagtttgttgtccctattgtaga

SEQ ID NO: 250779 - DNA, 25 bp, Probe Sequence
gtcagtatctatagaccaggtctgt

SEQ ID NO: 250780 - DNA, 25 bp, Probe Sequence
gtcagttcatgaggcaacgtcgcgt

SEQ ID NO: 250781 - DNA, 25 bp, Probe Sequence
gtcactgtcatcagaatctgtcggc

SEQ ID NO: 250782 - DNA, 25 bp, Probe Sequence
gtcactgtcatcagaatctgtcggc

SEQ ID NO: 250783 - DNA, 25 bp, Probe Sequence
gtcacgacatccgaactggagggac

SEQ ID NO: 250784 - DNA, 25 bp, Probe Sequence
gtcagctactgcggaaaaggaagga

SEQ ID NO: 250785 - DNA, 25 bp, Probe Sequence
gtcaccaggggaagtttgaaccaca

SEQ ID NO: 250786 - DNA, 25 bp, Probe Sequence
gtcagtaggggcatggtataaggaa

SEQ ID NO: 250787 - DNA, 25 bp, Probe Sequence
gtctttctggagaggttataggtca

SEQ ID NO: 250788 - DNA, 25 bp, Probe Sequence
gtctttccaagggactgttcacggc

SEQ ID NO: 250789 - DNA, 25 bp, Probe Sequence
gtctttacgcacaatacttccaagg

SEQ ID NO: 250790 - DNA, 25 bp, Probe Sequence
gtcatctccaggcttgacttcaatg

SEQ ID NO: 250791 - DNA, 25 bp, Probe Sequence
gtcacccaggaggatggcaaagaga

SEQ ID NO: 250792 - DNA, 25 bp, Probe Sequence
gtcacctcagtaccatccaggaggc

SEQ ID NO: 250793 - DNA, 25 bp, Probe Sequence
gtcacctaaagcttcacggtctcaa

SEQ ID NO: 250794 - DNA, 25 bp, Probe Sequence
gtcacctcaatatttactatttcaa

SEQ ID NO: 250795 - DNA, 25 bp, Probe Sequence
gtcaccagattcattacaattcaaa

SEQ ID NO: 250796 - DNA, 25 bp, Probe Sequence
gtcaccgatgtcatcatcaagaaca

SEQ ID NO: 250797 - DNA, 25 bp, Probe Sequence
gtcatgtaattagtcatctggaaca

SEQ ID NO: 250798 - DNA, 25 bp, Probe Sequence
gtcatgtcctgaggctctctaagaa

SEQ ID NO: 250799 - DNA, 25 bp, Probe Sequence
gtcttcctgacactttaattaccaa

SEQ ID NO: 250800 - DNA, 25 bp, Probe Sequence
gtctttaacactggtattttccaat

SEQ ID NO: 250801 - DNA, 25 bp, Probe Sequence
gtcttacaactcagttgttttgagt

SEQ ID NO: 250802 - DNA, 25 bp, Probe Sequence
gtctatacacttgattagttgttga

SEQ ID NO: 250803 - DNA, 25 bp, Probe Sequence
gtctgtaccttgatacgatagttac

SEQ ID NO: 250804 - DNA, 25 bp, Probe Sequence
gtgcttacttttcaacataattccc

SEQ ID NO: 250805 - DNA, 25 bp, Probe Sequence
gtcttactggtttgacagcaatttc

SEQ ID NO: 250806 - DNA, 25 bp, Probe Sequence
gtcattcaaggtgtacaggtagatc

SEQ ID NO: 250807 - DNA, 25 bp, Probe Sequence
gtctttcagtatggtaaggtacagt

SEQ ID NO: 250808 - DNA, 25 bp, Probe Sequence
gtcttgatttcgcttaggccagagt

SEQ ID NO: 250809 - DNA, 25 bp, Probe Sequence
gtctttttctggactgaagcctgca

SEQ ID NO: 250810 - DNA, 25 bp, Probe Sequence
gtctgtctttgatggttcctctgac

SEQ ID NO: 250811 - DNA, 25 bp, Probe Sequence
gtcaccttgtgacatttggcttacc

SEQ ID NO: 250812 - DNA, 25 bp, Probe Sequence
gtcaccttgagttatttgatctctc

SEQ ID NO: 250813 - DNA, 25 bp, Probe Sequence
gtcaccttgcgtttgtgaaattata

SEQ ID NO: 250814 - DNA, 25 bp, Probe Sequence
gtcattttgcggtgaaaacataatg

SEQ ID NO: 250815 - DNA, 25 bp, Probe Sequence
ttaatgttcggttaaaaatgtgaca

SEQ ID NO: 250816 - DNA, 25 bp, Probe Sequence
gtcttttaggattagaagaattaca

SEQ ID NO: 250817 - DNA, 25 bp, Probe Sequence
gtgcccctaggttggtgggtctaca

SEQ ID NO: 250818 - DNA, 25 bp, Probe Sequence
gtcaccactacagtaagctggttta

SEQ ID NO: 250819 - DNA, 25 bp, Probe Sequence
gtcaccactgtagaatgtgttttgc

SEQ ID NO: 250820 - DNA, 25 bp, Probe Sequence
gtcaccagcttatattgtcatttag

SEQ ID NO: 250821 - DNA, 25 bp, Probe Sequence
gtcaccatcatttctagtatattag

SEQ ID NO: 250822 - DNA, 25 bp, Probe Sequence
gtcaccatcatgtattggaaattat

SEQ ID NO: 250823 - DNA, 25 bp, Probe Sequence
gtcacctcatgatttgctgttactt

SEQ ID NO: 250824 - DNA, 25 bp, Probe Sequence
gtcatgctaaggtatgtgttacata

SEQ ID NO: 250825 - DNA, 25 bp, Probe Sequence
gtcaccaagagatgatggttatgca

SEQ ID NO: 250826 - DNA, 25 bp, Probe Sequence
gtcaccagtgaagagcctatgtgca

SEQ ID NO: 250827 - DNA, 25 bp, Probe Sequence
gtcagccttgaaggacctcaagatc

SEQ ID NO: 250828 - DNA, 25 bp, Probe Sequence
gtcagcctatttggatccgaattgt

SEQ ID NO: 250829 - DNA, 25 bp, Probe Sequence
gtcagtcattttggttttcttctat

SEQ ID NO: 250830 - DNA, 25 bp, Probe Sequence
gtcagtgcttttctcttctttgaga

SEQ ID NO: 250831 - DNA, 25 bp, Probe Sequence
gtcagtgcttttctcttctttgaga

SEQ ID NO: 250832 - DNA, 25 bp, Probe Sequence
gtcagtgttttggtgcacctttttg

SEQ ID NO: 250833 - DNA, 25 bp, Probe Sequence
gtcagcagattcctttacttttgtt

SEQ ID NO: 250834 - DNA, 25 bp, Probe Sequence
gtcatgcagttgccaattccatttt

SEQ ID NO: 250835 - DNA, 25 bp, Probe Sequence
gtcttgttgccgtatccatttatgt

SEQ ID NO: 250836 - DNA, 25 bp, Probe Sequence
gtcagtgttggtagtggaatttgta

SEQ ID NO: 250837 - DNA, 25 bp, Probe Sequence
gtcatatggatggtaggtgcctttt

SEQ ID NO: 250838 - DNA, 25 bp, Probe Sequence
gtcagagtgaagaaacagtgctttt

SEQ ID NO: 250839 - DNA, 25 bp, Probe Sequence
gtcatgttgaagaaccagcatcacc

SEQ ID NO: 250840 - DNA, 25 bp, Probe Sequence
gtcattgatgggacatgaagacatc

SEQ ID NO: 250841 - DNA, 25 bp, Probe Sequence
gtcatggtgggattgccatcctgcg

SEQ ID NO: 250842 - DNA, 25 bp, Probe Sequence
gtcagcgcaggccatggcctgcctg

SEQ ID NO: 250843 - DNA, 25 bp, Probe Sequence
gtcagcagcagagggacctgcgtga

SEQ ID NO: 250844 - DNA, 25 bp, Probe Sequence
gtcagcagcagagggacctgcgtga

SEQ ID NO: 250845 - DNA, 25 bp, Probe Sequence
gtcagagcagatggtcgcctgtgtt

SEQ ID NO: 250846 - DNA, 25 bp, Probe Sequence
gtcagagcagatgtggagggttcct

SEQ ID NO: 250847 - DNA, 25 bp, Probe Sequence
gtcaggcagagaatgggggtctcgc

SEQ ID NO: 250848 - DNA, 25 bp, Probe Sequence
gtcaggcgtgcaattttggtctgcg

SEQ ID NO: 250849 - DNA, 25 bp, Probe Sequence
gtcagccctgctagagtttgcttgc

SEQ ID NO: 250850 - DNA, 25 bp, Probe Sequence
gtcatgcccgcttgagggtcaggac

SEQ ID NO: 250851 - DNA, 25 bp, Probe Sequence
gtcagtccactttgacttcgtactg

SEQ ID NO: 250852 - DNA, 25 bp, Probe Sequence
gtcatcttccttcacttttagggtc

SEQ ID NO: 250853 - DNA, 25 bp, Probe Sequence
gtcatctttcttctattttattccc

SEQ ID NO: 250854 - DNA, 25 bp, Probe Sequence
gtctgtactttagtatttttcacca

SEQ ID NO: 250855 - DNA, 25 bp, Probe Sequence
gtcttttattccagtattccaccaa

SEQ ID NO: 250856 - DNA, 25 bp, Probe Sequence
gtcttttattccagtattccaccaa

SEQ ID NO: 250857 - DNA, 25 bp, Probe Sequence
gtcttttattccagtattccaccaa

SEQ ID NO: 250858 - DNA, 25 bp, Probe Sequence
gtcttttatgaccttgttaccttag

SEQ ID NO: 250859 - DNA, 25 bp, Probe Sequence
gtctttggtcgtatttacgccttca

SEQ ID NO: 250860 - DNA, 25 bp, Probe Sequence
gtcattggctttgtcatttaccctt

SEQ ID NO: 250861 - DNA, 25 bp, Probe Sequence
gtcatcttgtttgtctttatggctt

SEQ ID NO: 250862 - DNA, 25 bp, Probe Sequence
gtcataaaatcgatcagtttggtga

SEQ ID NO: 250863 - DNA, 25 bp, Probe Sequence
gtcatactttgcgttaggtgtgctg

SEQ ID NO: 250864 - DNA, 25 bp, Probe Sequence
gtctttggttgcttaactggctgtg

SEQ ID NO: 250865 - DNA, 25 bp, Probe Sequence
gtcttgtacaaaaaatcaggctggt

SEQ ID NO: 250866 - DNA, 25 bp, Probe Sequence
gtcttgcaatcaggtcagaaaggga

SEQ ID NO: 250867 - DNA, 25 bp, Probe Sequence
gtcattgtctcctcaataaagaatt

SEQ ID NO: 250868 - DNA, 25 bp, Probe Sequence
gtcagtctgcttagaaataacagaa

SEQ ID NO: 250869 - DNA, 25 bp, Probe Sequence
gtcagagctcaccgaaaacaacagg

SEQ ID NO: 250870 - DNA, 25 bp, Probe Sequence
gtcagagatcagggccaaacaaggc

SEQ ID NO: 250871 - DNA, 25 bp, Probe Sequence
gtcagagtccgaggcaaaatcagtc

SEQ ID NO: 250872 - DNA, 25 bp, Probe Sequence
gtcagacgtcgattgcagaaaggag

SEQ ID NO: 250873 - DNA, 25 bp, Probe Sequence
gtcattcgtctgtggaaagggcagt

SEQ ID NO: 250874 - DNA, 25 bp, Probe Sequence
gtcttgggcatgatgggctgggcca

SEQ ID NO: 250875 - DNA, 25 bp, Probe Sequence
gtcaggaggcagataatgctggtgc

SEQ ID NO: 250876 - DNA, 25 bp, Probe Sequence
gtcagagcggccagagatgctgagc

SEQ ID NO: 250877 - DNA, 25 bp, Probe Sequence
gtcaggaggccggagatcaggaaac

SEQ ID NO: 250878 - DNA, 25 bp, Probe Sequence
gtcagggatgccgaagacatgaaca

SEQ ID NO: 250879 - DNA, 25 bp, Probe Sequence
gtcagtgagatatttgaacatgaaa

SEQ ID NO: 250880 - DNA, 25 bp, Probe Sequence
gtcagctgaatatggaagagatctt

SEQ ID NO: 250881 - DNA, 25 bp, Probe Sequence
gtcagtgcataattccaagtggctt

SEQ ID NO: 250882 - DNA, 25 bp, Probe Sequence
gtcagatgcttgtatccacagttga

SEQ ID NO: 250883 - DNA, 25 bp, Probe Sequence
gtcagagttgagagacagaggcacc

SEQ ID NO: 250884 - DNA, 25 bp, Probe Sequence
gtcagatttcagagttcaggagcca

SEQ ID NO: 250885 - DNA, 25 bp, Probe Sequence
gtcagcttacgtcgtgtgctgggca

SEQ ID NO: 250886 - DNA, 25 bp, Probe Sequence
gtcttcttcgaagtggctgtgaatg

SEQ ID NO: 250887 - DNA, 25 bp, Probe Sequence
gtcttcagtggctgtggaggcaaca

SEQ ID NO: 250888 - DNA, 25 bp, Probe Sequence
gtcagtccatggctgatggaggaca

SEQ ID NO: 250889 - DNA, 25 bp, Probe Sequence
gtggtccccctggcagggacaaatg

SEQ ID NO: 250890 - DNA, 25 bp, Probe Sequence
gtggtccccctggcagggacaaatg

SEQ ID NO: 250891 - DNA, 25 bp, Probe Sequence
gtggtccccctggcagggacaaatg

SEQ ID NO: 250892 - DNA, 25 bp, Probe Sequence
ggtgttcccgctggaggtaattggc

SEQ ID NO: 250893 - DNA, 25 bp, Probe Sequence
gtgatttttctggcgagttaagtcc

SEQ ID NO: 250894 - DNA, 25 bp, Probe Sequence
gtcttttcctgtggtgttaggtctt

SEQ ID NO: 250895 - DNA, 25 bp, Probe Sequence
gtcagtttacctctgtgtatggtca

SEQ ID NO: 250896 - DNA, 25 bp, Probe Sequence
gtcagctttcatctttgtggatggt

SEQ ID NO: 250897 - DNA, 25 bp, Probe Sequence
gtcagtatttgtgcatattgtgatg

SEQ ID NO: 250898 - DNA, 25 bp, Probe Sequence
gtcagtctgtgtcacatccagtgat

SEQ ID NO: 250899 - DNA, 25 bp, Probe Sequence
gtcagcttggatcattcaccttaac

SEQ ID NO: 250900 - DNA, 25 bp, Probe Sequence
gtcatcaaggatactgtcccttatt

SEQ ID NO: 250901 - DNA, 25 bp, Probe Sequence
gtcatagcagttcagtgcctttgtt

SEQ ID NO: 250902 - DNA, 25 bp, Probe Sequence
gtcaggcaccagaatgtgcctcaga

SEQ ID NO: 250903 - DNA, 25 bp, Probe Sequence
gtcatagcctcagctggcgatgata

SEQ ID NO: 250904 - DNA, 25 bp, Probe Sequence
gtcatctgtctaactacgtgaagaa

SEQ ID NO: 250905 - DNA, 25 bp, Probe Sequence
gtcatctgttaatacgcatattcac

SEQ ID NO: 250906 - DNA, 25 bp, Probe Sequence
gtcattcttcacaatcacgacttct

SEQ ID NO: 250907 - DNA, 25 bp, Probe Sequence
gtcagtctctacaagtagccctgct

SEQ ID NO: 250908 - DNA, 25 bp, Probe Sequence
gtcagtctctcctttatgaattgct

SEQ ID NO: 250909 - DNA, 25 bp, Probe Sequence
gtcagactcccgcgtgaagatgtca

SEQ ID NO: 250910 - DNA, 25 bp, Probe Sequence
gtcagacatccaagtttacatcatt

SEQ ID NO: 250911 - DNA, 25 bp, Probe Sequence
gtcagcctgccaggttctgttattt

SEQ ID NO: 250912 - DNA, 25 bp, Probe Sequence
gtcagctgtcactgttgttttcttg

SEQ ID NO: 250913 - DNA, 25 bp, Probe Sequence
gtcagctgccaattgtgttttcctg

SEQ ID NO: 250914 - DNA, 25 bp, Probe Sequence
gtcagctgcccgaatgttgttgcac

SEQ ID NO: 250915 - DNA, 25 bp, Probe Sequence
gtcattgcccagggtattggcaagc

SEQ ID NO: 250916 - DNA, 25 bp, Probe Sequence
gtcagtgcctagtcactatttacaa

SEQ ID NO: 250917 - DNA, 25 bp, Probe Sequence
gtcaggtaagcaggtcaaatataga

SEQ ID NO: 250918 - DNA, 25 bp, Probe Sequence
gtcaggatatcctatgccaaataaa

SEQ ID NO: 250919 - DNA, 25 bp, Probe Sequence
gtcattgtcccatgccaaatctaag

SEQ ID NO: 250920 - DNA, 25 bp, Probe Sequence
gtcattggccttaccagttgtcagg

SEQ ID NO: 250921 - DNA, 25 bp, Probe Sequence
gtcagggcgttaactggttccactg

SEQ ID NO: 250922 - DNA, 25 bp, Probe Sequence
gtcaggtgcgttatctcagcttctt

SEQ ID NO: 250923 - DNA, 25 bp, Probe Sequence
gtcagagtcctgggaccatcttgtt

SEQ ID NO: 250924 - DNA, 25 bp, Probe Sequence
gtcaggctttgaccaacatatttct

SEQ ID NO: 250925 - DNA, 25 bp, Probe Sequence
gtcagcatttctgccagacatttca

SEQ ID NO: 250926 - DNA, 25 bp, Probe Sequence
gtcagcattttctaagccattgttt

SEQ ID NO: 250927 - DNA, 25 bp, Probe Sequence
gtctcttttcaaaccaaattgggag

SEQ ID NO: 250928 - DNA, 25 bp, Probe Sequence
gtgttcaaattaacccagttggaat

SEQ ID NO: 250929 - DNA, 25 bp, Probe Sequence
gtcttaaatcttttgggtttgaatg

SEQ ID NO: 250930 - DNA, 25 bp, Probe Sequence
gtcttaaccaacatggcgttccaca

SEQ ID NO: 250931 - DNA, 25 bp, Probe Sequence
gtcttaaccaacatggcgttccaca

SEQ ID NO: 250932 - DNA, 25 bp, Probe Sequence
gtcttaaccaacatggcgttccaca

SEQ ID NO: 250933 - DNA, 25 bp, Probe Sequence
gtcttaaccaacatggcgttccaca

SEQ ID NO: 250934 - DNA, 25 bp, Probe Sequence
gtcttacccaatgaggcgatcctac

SEQ ID NO: 250935 - DNA, 25 bp, Probe Sequence
gtcttacctcaatggggtcatgccc

SEQ ID NO: 250936 - DNA, 25 bp, Probe Sequence
gtcatgaacctccctggggatcaac

SEQ ID NO: 250937 - DNA, 25 bp, Probe Sequence
gtcagtgaccatcccgagctgaata

SEQ ID NO: 250938 - DNA, 25 bp, Probe Sequence
gtcagctatccaaacaagccaccat

SEQ ID NO: 250939 - DNA, 25 bp, Probe Sequence
gtcagcttctagttcaaccatcaat

SEQ ID NO: 250940 - DNA, 25 bp, Probe Sequence
gtcagattcttgtctaacttcaatt

SEQ ID NO: 250941 - DNA, 25 bp, Probe Sequence
gtgcgactctagatagatcgttctt

SEQ ID NO: 250942 - DNA, 25 bp, Probe Sequence
gtcagacctgatatagtcctccttg

SEQ ID NO: 250943 - DNA, 25 bp, Probe Sequence
tgtcagtttaagtagtccttttgtt

SEQ ID NO: 250944 - DNA, 25 bp, Probe Sequence
gtcagtttacaccaatagtttcttg

SEQ ID NO: 250945 - DNA, 25 bp, Probe Sequence
gtcaggatccaacaaagctttcttt

SEQ ID NO: 250946 - DNA, 25 bp, Probe Sequence
gtcaggacaaatcttcaggacttgt

SEQ ID NO: 250947 - DNA, 25 bp, Probe Sequence
gtcaggacataaattttgtcgcttg

SEQ ID NO: 250948 - DNA, 25 bp, Probe Sequence
gtcatgcaataaatgttctggtttt

SEQ ID NO: 250949 - DNA, 25 bp, Probe Sequence
gtcatcaaggggatatagctattta

SEQ ID NO: 250950 - DNA, 25 bp, Probe Sequence
gtcatccctgggtctaggaaatagt

SEQ ID NO: 250951 - DNA, 25 bp, Probe Sequence
gtcatcagcctggtgatgctgagga

SEQ ID NO: 250952 - DNA, 25 bp, Probe Sequence
gtcatgcacaagcgatgctgaagat

SEQ ID NO: 250953 - DNA, 25 bp, Probe Sequence
gtcatgacagtgcttgcatcctatt

SEQ ID NO: 250954 - DNA, 25 bp, Probe Sequence
gtcatgaaggccatgcagtctctca

SEQ ID NO: 250955 - DNA, 25 bp, Probe Sequence
gtcatgaaggccatgcagtctctca

SEQ ID NO: 250956 - DNA, 25 bp, Probe Sequence
gtcatgaaggccatgcagtctctca

SEQ ID NO: 250957 - DNA, 25 bp, Probe Sequence
gtcatgttgaacagcattttagcat

SEQ ID NO: 250958 - DNA, 25 bp, Probe Sequence
gtcgatgccaccgcatttatagatc

SEQ ID NO: 250959 - DNA, 25 bp, Probe Sequence
gtcagagaatcctaggtatataatc

SEQ ID NO: 250960 - DNA, 25 bp, Probe Sequence
gtcatcataaactaggtattgcatt

SEQ ID NO: 250961 - DNA, 25 bp, Probe Sequence
gtcattagcaacatggctgagcctt

SEQ ID NO: 250962 - DNA, 25 bp, Probe Sequence
gtcagtcgaacaagtcatgaagatt

SEQ ID NO: 250963 - DNA, 25 bp, Probe Sequence
gtcagatcaataacagattaatttg

SEQ ID NO: 250964 - DNA, 25 bp, Probe Sequence
gtcatccactaagatgattctttgt

SEQ ID NO: 250965 - DNA, 25 bp, Probe Sequence
gtcagcactctttttagatctttgt

SEQ ID NO: 250966 - DNA, 25 bp, Probe Sequence
gtcagcactctttttagatctttgt

SEQ ID NO: 250967 - DNA, 25 bp, Probe Sequence
gtcatactgtatctggaatgctttg

SEQ ID NO: 250968 - DNA, 25 bp, Probe Sequence
gtctagcattgatttggttcctgtg

SEQ ID NO: 250969 - DNA, 25 bp, Probe Sequence
gtctccataagtcattttgcgttaa

SEQ ID NO: 250970 - DNA, 25 bp, Probe Sequence
gtctttacaaaatagccagttataa

SEQ ID NO: 250971 - DNA, 25 bp, Probe Sequence
gtccgttaacacctaatagtgatta

SEQ ID NO: 250972 - DNA, 25 bp, Probe Sequence
gtcttttaatcttctgaaggtgatt

SEQ ID NO: 250973 - DNA, 25 bp, Probe Sequence
gtcttgatttcaccattgtcggtga

SEQ ID NO: 250974 - DNA, 25 bp, Probe Sequence
tccttgtgattacattggccccacc

SEQ ID NO: 250975 - DNA, 25 bp, Probe Sequence
gtctttactatgtattggccctacc

SEQ ID NO: 250976 - DNA, 25 bp, Probe Sequence
gtcttgtaaagagtctgccttctgg

SEQ ID NO: 250977 - DNA, 25 bp, Probe Sequence
gtcggtaaagacgtcttctagagcc

SEQ ID NO: 250978 - DNA, 25 bp, Probe Sequence
gtcttgataaattggccctctaggc

SEQ ID NO: 250979 - DNA, 25 bp, Probe Sequence
gtcatggataactcagaccccaact

SEQ ID NO: 250980 - DNA, 25 bp, Probe Sequence
gtcagagagaacacagacctccggg

SEQ ID NO: 250981 - DNA, 25 bp, Probe Sequence
gtcagaaattcgagaccagcccggc

SEQ ID NO: 250982 - DNA, 25 bp, Probe Sequence
gtcaggagttcgagaccagtctggt

SEQ ID NO: 250983 - DNA, 25 bp, Probe Sequence
gtcaggagttcgagaccagcttggc

SEQ ID NO: 250984 - DNA, 25 bp, Probe Sequence
gtcaggagttcgagaccagcttggc

SEQ ID NO: 250985 - DNA, 25 bp, Probe Sequence
gtcaggcgttcgagaccagcctggc

SEQ ID NO: 250986 - DNA, 25 bp, Probe Sequence
gtcgttttgcggaacgcgactggca

SEQ ID NO: 250987 - DNA, 25 bp, Probe Sequence
gtcatgttttgattataggctttgg

SEQ ID NO: 250988 - DNA, 25 bp, Probe Sequence
gtcatgcgtttatggcaggtagctg

SEQ ID NO: 250989 - DNA, 25 bp, Probe Sequence
gtcaggttcgatcagaggctactac

SEQ ID NO: 250990 - DNA, 25 bp, Probe Sequence
gtcagagtctcctaaagagcccgaa

SEQ ID NO: 250991 - DNA, 25 bp, Probe Sequence
gtcagattcttctaaatcagccagc

SEQ ID NO: 250992 - DNA, 25 bp, Probe Sequence
gtcatcttgctttatgaaactgcgc

SEQ ID NO: 250993 - DNA, 25 bp, Probe Sequence
gtcatctctgcctgagatccattct

SEQ ID NO: 250994 - DNA, 25 bp, Probe Sequence
gtcttcagccaatgacttgcttgca

SEQ ID NO: 250995 - DNA, 25 bp, Probe Sequence
gtctatactcgagtgacttcttatc

SEQ ID NO: 250996 - DNA, 25 bp, Probe Sequence
gtcttaggggtgtcatgctgttttc

SEQ ID NO: 250997 - DNA, 25 bp, Probe Sequence
gtcttctggagcctttctgattttc

SEQ ID NO: 250998 - DNA, 25 bp, Probe Sequence
gtcttccagaggatgcttgattcca

SEQ ID NO: 250999 - DNA, 25 bp, Probe Sequence
gtcatctcctattcattgcttttat

SEQ ID NO: 251000 - DNA, 25 bp, Probe Sequence
gtcatgcttctgtatctacttcatg

SEQ ID NO: 251001 - DNA, 25 bp, Probe Sequence
gtcatgcagtggtcatggaactcat

SEQ ID NO: 251002 - DNA, 25 bp, Probe Sequence
gtcatgcatgaggtcagctttctgc

SEQ ID NO: 251003 - DNA, 25 bp, Probe Sequence
gtcatctgaggtgggcatctctgag

SEQ ID NO: 251004 - DNA, 25 bp, Probe Sequence
gtctcatggtctagcatgcatcttg

SEQ ID NO: 251005 - DNA, 25 bp, Probe Sequence
gtcagtgctgatgtagcatgcttgt

SEQ ID NO: 251006 - DNA, 25 bp, Probe Sequence
gtcaggccattatatctgtgatgcc

SEQ ID NO: 251007 - DNA, 25 bp, Probe Sequence
gtcatgtgctcagacaacgactgat

SEQ ID NO: 251008 - DNA, 25 bp, Probe Sequence
gtcatgtatctctgcaaagcatcaa

SEQ ID NO: 251009 - DNA, 25 bp, Probe Sequence
gtctcttccagactcatagcatcag

SEQ ID NO: 251010 - DNA, 25 bp, Probe Sequence
gtctttgctgagcacatcagtgatg

SEQ ID NO: 251011 - DNA, 25 bp, Probe Sequence
gtcagatctctggaacatcatgtga

SEQ ID NO: 251012 - DNA, 25 bp, Probe Sequence
gtcagatctctggaacatcatgtga

SEQ ID NO: 251013 - DNA, 25 bp, Probe Sequence
gtctatccatgtggaatgctggaca

SEQ ID NO: 251014 - DNA, 25 bp, Probe Sequence
gtctatccagacctactggcaacaa

SEQ ID NO: 251015 - DNA, 25 bp, Probe Sequence
gtcttcagagatcctgctcttaaac

SEQ ID NO: 251016 - DNA, 25 bp, Probe Sequence
gtctaacctgatacaagtagttgac

SEQ ID NO: 251017 - DNA, 25 bp, Probe Sequence
gtcatactcctggaacaaaggtgta

SEQ ID NO: 251018 - DNA, 25 bp, Probe Sequence
gtctaccctgaagtccatcaggttt

SEQ ID NO: 251019 - DNA, 25 bp, Probe Sequence
gtctacctgctaagtcaagggttca

SEQ ID NO: 251020 - DNA, 25 bp, Probe Sequence
gtctacctgctaagtcaagggttca

SEQ ID NO: 251021 - DNA, 25 bp, Probe Sequence
gtcattcactttatatagggtttgc

SEQ ID NO: 251022 - DNA, 25 bp, Probe Sequence
gtctatgctcgtgtttcaaggtttg

SEQ ID NO: 251023 - DNA, 25 bp, Probe Sequence
gtcatatttgctttctaggaggttt

SEQ ID NO: 251024 - DNA, 25 bp, Probe Sequence
gtcattatgatttcattatcacatg

SEQ ID NO: 251025 - DNA, 25 bp, Probe Sequence
gtctttattagactcatgctgatta

SEQ ID NO: 251026 - DNA, 25 bp, Probe Sequence
gtctacaagtatgattgctgttaca

SEQ ID NO: 251027 - DNA, 25 bp, Probe Sequence
gtcatacaacctggaatttctgaat

SEQ ID NO: 251028 - DNA, 25 bp, Probe Sequence
gtcttaattttccattggctatgat

SEQ ID NO: 251029 - DNA, 25 bp, Probe Sequence
gtctttatttatggtcgtgcccttc

SEQ ID NO: 251030 - DNA, 25 bp, Probe Sequence
gtctactcaattgtgactgtccctc

SEQ ID NO: 251031 - DNA, 25 bp, Probe Sequence
gtctaatatttaaacatgtactggc

SEQ ID NO: 251032 - DNA, 25 bp, Probe Sequence
gtctcaacgttcaggcttactcaga

SEQ ID NO: 251033 - DNA, 25 bp, Probe Sequence
gtctcaacgttcaggcttactcaga

SEQ ID NO: 251034 - DNA, 25 bp, Probe Sequence
gtcttatagtccaaactttctctgt

SEQ ID NO: 251035 - DNA, 25 bp, Probe Sequence
gtctttcctctagtactaccagtat

SEQ ID NO: 251036 - DNA, 25 bp, Probe Sequence
gtctttcctctgagtctaaactgca

SEQ ID NO: 251037 - DNA, 25 bp, Probe Sequence
gtctttgggtagctcttaagccata

SEQ ID NO: 251038 - DNA, 25 bp, Probe Sequence
gtcatttggggaggactatccaggc

SEQ ID NO: 251039 - DNA, 25 bp, Probe Sequence
gtctatctgcgtctgaaagatccag

SEQ ID NO: 251040 - DNA, 25 bp, Probe Sequence
gtcttcgatcggcacaagatgctca

SEQ ID NO: 251041 - DNA, 25 bp, Probe Sequence
gtcttctgtctgtcgagcgaggagc

SEQ ID NO: 251042 - DNA, 25 bp, Probe Sequence
gtctatctatctggctggcagggaa

SEQ ID NO: 251043 - DNA, 25 bp, Probe Sequence
gtcttgccatatttgccaggctggt

SEQ ID NO: 251044 - DNA, 25 bp, Probe Sequence
gtcatcgcgtagtagccatggtgat

SEQ ID NO: 251045 - DNA, 25 bp, Probe Sequence
gtcatctgctagttaccatggtgat

SEQ ID NO: 251046 - DNA, 25 bp, Probe Sequence
gtccattcacacagcctggctgatc

SEQ ID NO: 251047 - DNA, 25 bp, Probe Sequence
gtccccgaatgggtggataccgtca

SEQ ID NO: 251048 - DNA, 25 bp, Probe Sequence
gtccccgaatgggtggataccgtca

SEQ ID NO: 251049 - DNA, 25 bp, Probe Sequence
gtccccgaatgggtggataccgtca

SEQ ID NO: 251050 - DNA, 25 bp, Probe Sequence
gtgtctactgaaaagggaacctgct

SEQ ID NO: 251051 - DNA, 25 bp, Probe Sequence
gtctccggaatcagggaacagtttc

SEQ ID NO: 251052 - DNA, 25 bp, Probe Sequence
gtcttcggacgcaagaagacagcga

SEQ ID NO: 251053 - DNA, 25 bp, Probe Sequence
gtcatccgaacacagactggctgga

SEQ ID NO: 251054 - DNA, 25 bp, Probe Sequence
gtccttacaactggacaggcggccc

SEQ ID NO: 251055 - DNA, 25 bp, Probe Sequence
gtctttctacagtgacaggccacac

SEQ ID NO: 251056 - DNA, 25 bp, Probe Sequence
gtcatttccagatttcattacctcc

SEQ ID NO: 251057 - DNA, 25 bp, Probe Sequence
gtcttcgcaaaagctttcctcagca

SEQ ID NO: 251058 - DNA, 25 bp, Probe Sequence
gtcatcccaaatatggttccatccc

SEQ ID NO: 251059 - DNA, 25 bp, Probe Sequence
gtcatcccaaatatggttccatccc

SEQ ID NO: 251060 - DNA, 25 bp, Probe Sequence
gtcattccaaatatgagatgcattg

SEQ ID NO: 251061 - DNA, 25 bp, Probe Sequence
gtcattcctaatgtggctaatgtca

SEQ ID NO: 251062 - DNA, 25 bp, Probe Sequence
gtctgtccaaatgagttcacttcca

SEQ ID NO: 251063 - DNA, 25 bp, Probe Sequence
gtcttccagtgaaggggacatccca

SEQ ID NO: 251064 - DNA, 25 bp, Probe Sequence
gtcattttgtgatataggactccca

SEQ ID NO: 251065 - DNA, 25 bp, Probe Sequence
gtcattttttcttagaacttcagct

SEQ ID NO: 251066 - DNA, 25 bp, Probe Sequence
gtcatttaccctttgagagttccac

SEQ ID NO: 251067 - DNA, 25 bp, Probe Sequence
gtcattcatagcactatatcgagta

SEQ ID NO: 251068 - DNA, 25 bp, Probe Sequence
gtctcatacagtgcttaggatgtct

SEQ ID NO: 251069 - DNA, 25 bp, Probe Sequence
gtctcattcgtggttgagcacaggc

SEQ ID NO: 251070 - DNA, 25 bp, Probe Sequence
gtctttgatgcggtgggctcagagc

SEQ ID NO: 251071 - DNA, 25 bp, Probe Sequence
gtcttctgagtgttggagcttggct

SEQ ID NO: 251072 - DNA, 25 bp, Probe Sequence
gtctattgggaaagccatttgtaca

SEQ ID NO: 251073 - DNA, 25 bp, Probe Sequence
gtcagttaggatttccttctgcata

SEQ ID NO: 251074 - DNA, 25 bp, Probe Sequence
gtcaggtgaggcatctttacatcta

SEQ ID NO: 251075 - DNA, 25 bp, Probe Sequence
gtcatggtgtgtacctgtaatctca

SEQ ID NO: 251076 - DNA, 25 bp, Probe Sequence
gtcaggatggtgtcacatttttatg

SEQ ID NO: 251077 - DNA, 25 bp, Probe Sequence
gtcaggctttgattgataattgtag

SEQ ID NO: 251078 - DNA, 25 bp, Probe Sequence
gtcaggcagttgtgctagtttctag

SEQ ID NO: 251079 - DNA, 25 bp, Probe Sequence
gtcaggcgttagtaatgtccttatt

SEQ ID NO: 251080 - DNA, 25 bp, Probe Sequence
gtcatggctttactttggtcaatta

SEQ ID NO: 251081 - DNA, 25 bp, Probe Sequence
gtcattgtcttacatatactttcta

SEQ ID NO: 251082 - DNA, 25 bp, Probe Sequence
gtctttcactcacaacacttaacag

SEQ ID NO: 251083 - DNA, 25 bp, Probe Sequence
gtcatttttaccaactgtgtaaagg

SEQ ID NO: 251084 - DNA, 25 bp, Probe Sequence
gtcttttgtaccaacaggggagaag

SEQ ID NO: 251085 - DNA, 25 bp, Probe Sequence
gtctacttctactgtattggcgagc

SEQ ID NO: 251086 - DNA, 25 bp, Probe Sequence
gtctaccttacaaattccaggcagg

SEQ ID NO: 251087 - DNA, 25 bp, Probe Sequence
gtcatacctctatttagtaattgcg

SEQ ID NO: 251088 - DNA, 25 bp, Probe Sequence
gtcccccagaatgcagccaatcggg

SEQ ID NO: 251089 - DNA, 25 bp, Probe Sequence
gtcgccccgagagaagagccagggt

SEQ ID NO: 251090 - DNA, 25 bp, Probe Sequence
gtctacccgacataagtcgagggac

SEQ ID NO: 251091 - DNA, 25 bp, Probe Sequence
gtctacccaggatgaggtcgctgca

SEQ ID NO: 251092 - DNA, 25 bp, Probe Sequence
gtcagtgcccagtcatttggggctt

SEQ ID NO: 251093 - DNA, 25 bp, Probe Sequence
gtcagtgtccagccatgcataaggg

SEQ ID NO: 251094 - DNA, 25 bp, Probe Sequence
gtcatgtgtcccagcataaggcatc

SEQ ID NO: 251095 - DNA, 25 bp, Probe Sequence
gtctatggagccaagatatgtggac

SEQ ID NO: 251096 - DNA, 25 bp, Probe Sequence
gtcattcatgacgtggtcttggagc

SEQ ID NO: 251097 - DNA, 25 bp, Probe Sequence
gtcatgccatgagcagccttatgga

SEQ ID NO: 251098 - DNA, 25 bp, Probe Sequence
gtcattcatgatgcggccagagcag

SEQ ID NO: 251099 - DNA, 25 bp, Probe Sequence
gtcatgatcagcactgagtgggcag

SEQ ID NO: 251100 - DNA, 25 bp, Probe Sequence
gtcatgactgcatttggaggcaaag

SEQ ID NO: 251101 - DNA, 25 bp, Probe Sequence
gtcatggtgctcattcactgcaaac

SEQ ID NO: 251102 - DNA, 25 bp, Probe Sequence
gtcatcgtcgcaattcttcagacct

SEQ ID NO: 251103 - DNA, 25 bp, Probe Sequence
gtcatggtcgatatgaccaccctcc

SEQ ID NO: 251104 - DNA, 25 bp, Probe Sequence
gtctgagacttaagcactcggtccc

SEQ ID NO: 251105 - DNA, 25 bp, Probe Sequence
gtctgtagttaacctagggctgcaa

SEQ ID NO: 251106 - DNA, 25 bp, Probe Sequence
gtcattagtcatatgcttagtagcc

SEQ ID NO: 251107 - DNA, 25 bp, Probe Sequence
gtcatgttccatatatgttatacct

SEQ ID NO: 251108 - DNA, 25 bp, Probe Sequence
gtcagtgagtataaatttacacctt

SEQ ID NO: 251109 - DNA, 25 bp, Probe Sequence
gtgcgttggaaattctaggcccttc

SEQ ID NO: 251110 - DNA, 25 bp, Probe Sequence
gtccctggcaaaattttccactctg

SEQ ID NO: 251111 - DNA, 25 bp, Probe Sequence
gtcctggcacgtgttttggacttcc

SEQ ID NO: 251112 - DNA, 25 bp, Probe Sequence
gtcttgtatcctggtttcatgtgtt

SEQ ID NO: 251113 - DNA, 25 bp, Probe Sequence
gtctttcatcacttgtgggtttctc

SEQ ID NO: 251114 - DNA, 25 bp, Probe Sequence
gtctgcttatccttggaaggtgaca

SEQ ID NO: 251115 - DNA, 25 bp, Probe Sequence
gtctggctacacctgcaacggtgaa

SEQ ID NO: 251116 - DNA, 25 bp, Probe Sequence
gtcatccctgagctgaacgggaagc

SEQ ID NO: 251117 - DNA, 25 bp, Probe Sequence
gtcatcccgggatgagcagggggcc

SEQ ID NO: 251118 - DNA, 25 bp, Probe Sequence
gtcatactggggtgcgagagaggtg

SEQ ID NO: 251119 - DNA, 25 bp, Probe Sequence
gtctccttgggccaccaaaggtggt

SEQ ID NO: 251120 - DNA, 25 bp, Probe Sequence
gtctattatgggcaaccaatctttg

SEQ ID NO: 251121 - DNA, 25 bp, Probe Sequence
gtcatatatttgcttaccttttggg

SEQ ID NO: 251122 - DNA, 25 bp, Probe Sequence
gtcatatgttgtctttgttgtagtg

SEQ ID NO: 251123 - DNA, 25 bp, Probe Sequence
gtcatcatttcctttctggagaaag

SEQ ID NO: 251124 - DNA, 25 bp, Probe Sequence
gtcatttttgttcagtggaatagag

SEQ ID NO: 251125 - DNA, 25 bp, Probe Sequence
gtcattttccttaagatggttacag

SEQ ID NO: 251126 - DNA, 25 bp, Probe Sequence
gtcttttcttatgtgtttcttcaag

SEQ ID NO: 251127 - DNA, 25 bp, Probe Sequence
gtcatgtttctcaagcagtttttct

SEQ ID NO: 251128 - DNA, 25 bp, Probe Sequence
gtcattttctcagtaagttcttctc

SEQ ID NO: 251129 - DNA, 25 bp, Probe Sequence
gtctcatatttaggaaaactttcca

SEQ ID NO: 251130 - DNA, 25 bp, Probe Sequence
gtctgcaactttggaaaactcctct

SEQ ID NO: 251131 - DNA, 25 bp, Probe Sequence
gtccaggctggaaaagaacttcttt

SEQ ID NO: 251132 - DNA, 25 bp, Probe Sequence
gtctcagactgggcagggaggcttt

SEQ ID NO: 251133 - DNA, 25 bp, Probe Sequence
gtcccacatgtggaagaacctttaa

SEQ ID NO: 251134 - DNA, 25 bp, Probe Sequence
gtctcacactgtgaaccacttagga

SEQ ID NO: 251135 - DNA, 25 bp, Probe Sequence
gtcatatccgtggaccatttgtagg

SEQ ID NO: 251136 - DNA, 25 bp, Probe Sequence
gtcataccagtaatactttgctgag

SEQ ID NO: 251137 - DNA, 25 bp, Probe Sequence
gtcatttcactactggtgttctgtt

SEQ ID NO: 251138 - DNA, 25 bp, Probe Sequence
gtcttcccatattgtgtctttttta

SEQ ID NO: 251139 - DNA, 25 bp, Probe Sequence
tgactctaccagtggccttttaacc

SEQ ID NO: 251140 - DNA, 25 bp, Probe Sequence
gtctatgaccattaggcctatttag

SEQ ID NO: 251141 - DNA, 25 bp, Probe Sequence
gtctagaaattatcagctacttagc

SEQ ID NO: 251142 - DNA, 25 bp, Probe Sequence
tgttagaggaatgactcccccaggt

SEQ ID NO: 251143 - DNA, 25 bp, Probe Sequence
ttgggggaatgcacctccccaaagc

SEQ ID NO: 251144 - DNA, 25 bp, Probe Sequence
gtgcgggtatagacacccccaaata

SEQ ID NO: 251145 - DNA, 25 bp, Probe Sequence
gtctaggctaagtatgcacctaaat

SEQ ID NO: 251146 - DNA, 25 bp, Probe Sequence
gtcttcacgaagtcagtcctgagga

SEQ ID NO: 251147 - DNA, 25 bp, Probe Sequence
gtctatcagtacgtcggcaatggaa

SEQ ID NO: 251148 - DNA, 25 bp, Probe Sequence
gtctgttggaagaggcaaggaaaaa

SEQ ID NO: 251149 - DNA, 25 bp, Probe Sequence
gtctttggggcttactattcaaaag

SEQ ID NO: 251150 - DNA, 25 bp, Probe Sequence
tgtctgttaggggatactttaagaa

SEQ ID NO: 251151 - DNA, 25 bp, Probe Sequence
gtcgatctacgggatctttccatta

SEQ ID NO: 251152 - DNA, 25 bp, Probe Sequence
gtcttctggactggttttcacatta

SEQ ID NO: 251153 - DNA, 25 bp, Probe Sequence
gtcttctcgacacaatattaatgga

SEQ ID NO: 251154 - DNA, 25 bp, Probe Sequence
gtctttagaccttaatgtacataag

SEQ ID NO: 251155 - DNA, 25 bp, Probe Sequence
gtcttgtggactgtgtcagtgagta

SEQ ID NO: 251156 - DNA, 25 bp, Probe Sequence
gtcattttgagtgttggtgttaagc

SEQ ID NO: 251157 - DNA, 25 bp, Probe Sequence
gtcatttcggttctgatcttgtcaa

SEQ ID NO: 251158 - DNA, 25 bp, Probe Sequence
gtcatttcagaagttagtttgtata

SEQ ID NO: 251159 - DNA, 25 bp, Probe Sequence
gtcatcttgagctcttcatttattt

SEQ ID NO: 251160 - DNA, 25 bp, Probe Sequence
gtcatttgcccgtcaagttatttac

SEQ ID NO: 251161 - DNA, 25 bp, Probe Sequence
gtcattacccaaagacttgggaact

SEQ ID NO: 251162 - DNA, 25 bp, Probe Sequence
gtcattccccatatgtgttggagaa

SEQ ID NO: 251163 - DNA, 25 bp, Probe Sequence
gtcattgctccgtttgtgtttgtac

SEQ ID NO: 251164 - DNA, 25 bp, Probe Sequence
gtctagctggcgtggtatgtttata

SEQ ID NO: 251165 - DNA, 25 bp, Probe Sequence
gtcatataggcactgggttgtttct

SEQ ID NO: 251166 - DNA, 25 bp, Probe Sequence
gtcatggggttgttttgctgtttgg

SEQ ID NO: 251167 - DNA, 25 bp, Probe Sequence
gtcaggcggtggatgatatttttgc

SEQ ID NO: 251168 - DNA, 25 bp, Probe Sequence
gtcatggtgttgcgtaaatcatatt

SEQ ID NO: 251169 - DNA, 25 bp, Probe Sequence
gtcatggttctgcttcaagaacaga

SEQ ID NO: 251170 - DNA, 25 bp, Probe Sequence
gtcatgtgtccgcttcaagcaatgc

SEQ ID NO: 251171 - DNA, 25 bp, Probe Sequence
gtctgagacccagttatacaaccca

SEQ ID NO: 251172 - DNA, 25 bp, Probe Sequence
gtctttggcctcacataaactacac

SEQ ID NO: 251173 - DNA, 25 bp, Probe Sequence
gtctttgaccataaacaaaccatca

SEQ ID NO: 251174 - DNA, 25 bp, Probe Sequence
gtctgtatacactgggtaacctgat

SEQ ID NO: 251175 - DNA, 25 bp, Probe Sequence
gtcttcaccaccatggagaaggctg

SEQ ID NO: 251176 - DNA, 25 bp, Probe Sequence
gtcttccacaacatattgaacctgt

SEQ ID NO: 251177 - DNA, 25 bp, Probe Sequence
gtcttggcacagtctcatgttaact

SEQ ID NO: 251178 - DNA, 25 bp, Probe Sequence
gtcttcagcaaggatcagtttccgg

SEQ ID NO: 251179 - DNA, 25 bp, Probe Sequence
gtcttacatgataattttccctggt

SEQ ID NO: 251180 - DNA, 25 bp, Probe Sequence
gtcttagaatcatgtttcaccagaa

SEQ ID NO: 251181 - DNA, 25 bp, Probe Sequence
gtctagagactattttgagaaccac

SEQ ID NO: 251182 - DNA, 25 bp, Probe Sequence
gtcatccatgacaactttggtatcg

SEQ ID NO: 251183 - DNA, 25 bp, Probe Sequence
gtcattgcactcaagcctgggcaat

SEQ ID NO: 251184 - DNA, 25 bp, Probe Sequence
gtcattgactcatcatctgtcagta

SEQ ID NO: 251185 - DNA, 25 bp, Probe Sequence
gtcattgtccatgcctacagataat

SEQ ID NO: 251186 - DNA, 25 bp, Probe Sequence
gtcatggtgccagcctgactgagaa

SEQ ID NO: 251187 - DNA, 25 bp, Probe Sequence
gtcatgcggccggagcagatcatga

SEQ ID NO: 251188 - DNA, 25 bp, Probe Sequence
gtcatgttcaccaactgcatgcaga

SEQ ID NO: 251189 - DNA, 25 bp, Probe Sequence
gtcatgtatacttacggcaacaagc

SEQ ID NO: 251190 - DNA, 25 bp, Probe Sequence
gtcatgaatactcagtgtaaacact

SEQ ID NO: 251191 - DNA, 25 bp, Probe Sequence
gtctcaaagccatgttattctgcct

SEQ ID NO: 251192 - DNA, 25 bp, Probe Sequence
gtctaacacacttctttttctaagg

SEQ ID NO: 251193 - DNA, 25 bp, Probe Sequence
gtcataaatcacctgttttggatac

SEQ ID NO: 251194 - DNA, 25 bp, Probe Sequence
gtctaataacacttacttggtcttt

SEQ ID NO: 251195 - DNA, 25 bp, Probe Sequence
gtcctgaacaactggggagatttcc

SEQ ID NO: 251196 - DNA, 25 bp, Probe Sequence
gtctctaaaagatgggcttattccc

SEQ ID NO: 251197 - DNA, 25 bp, Probe Sequence
gtcttaaacaggtcttattttcatc

SEQ ID NO: 251198 - DNA, 25 bp, Probe Sequence
gtctttaggcagcagcttttaatac

SEQ ID NO: 251199 - DNA, 25 bp, Probe Sequence
gtctatataagcggagctcgcttag

SEQ ID NO: 251200 - DNA, 25 bp, Probe Sequence
gtcttacacctcaagtgctgctaaa

SEQ ID NO: 251201 - DNA, 25 bp, Probe Sequence
gtcattacaggacagactctgaaaa

SEQ ID NO: 251202 - DNA, 25 bp, Probe Sequence
gtcattacagtggaagacttcgaga

SEQ ID NO: 251203 - DNA, 25 bp, Probe Sequence
gtcatcaacttgcaatacctcacag

SEQ ID NO: 251204 - DNA, 25 bp, Probe Sequence
gtctgcaacgggctaatccacggaa

SEQ ID NO: 251205 - DNA, 25 bp, Probe Sequence
gtccagacaggacagaaatccggaa

SEQ ID NO: 251206 - DNA, 25 bp, Probe Sequence
gtccaatcgtcggtaaatccggcac

SEQ ID NO: 251207 - DNA, 25 bp, Probe Sequence
gtccaatcagatccccaaaacggta

SEQ ID NO: 251208 - DNA, 25 bp, Probe Sequence
gtctaatcactcccctagaaagtaa

SEQ ID NO: 251209 - DNA, 25 bp, Probe Sequence
gtctagatctgatatccattaagga

SEQ ID NO: 251210 - DNA, 25 bp, Probe Sequence
gtctgaatgctgatatcaacaaacg

SEQ ID NO: 251211 - DNA, 25 bp, Probe Sequence
gtctttctagtaagcactaatcctt

SEQ ID NO: 251212 - DNA, 25 bp, Probe Sequence
gtcttatgaaaagcactggacacat

SEQ ID NO: 251213 - DNA, 25 bp, Probe Sequence
gtcttataaagactgaaggcaaagg

SEQ ID NO: 251214 - DNA, 25 bp, Probe Sequence
gtcttattttgttggcggagaagat

SEQ ID NO: 251215 - DNA, 25 bp, Probe Sequence
gtctttttgcgattggcttagtcag

SEQ ID NO: 251216 - DNA, 25 bp, Probe Sequence
gtcattgtttgctgttattagtaat

SEQ ID NO: 251217 - DNA, 25 bp, Probe Sequence
gtcattttttggtattctcagaata

SEQ ID NO: 251218 - DNA, 25 bp, Probe Sequence
gtctttaggtggaaattctggatat

SEQ ID NO: 251219 - DNA, 25 bp, Probe Sequence
gtcatttcacttctaacttggtata

SEQ ID NO: 251220 - DNA, 25 bp, Probe Sequence
gtcattgtcacactttcaaattttt

SEQ ID NO: 251221 - DNA, 25 bp, Probe Sequence
gtcttgaaacttaaactctgtgctt

SEQ ID NO: 251222 - DNA, 25 bp, Probe Sequence
gtcggacgagcgcaaaagcgccttc

SEQ ID NO: 251223 - DNA, 25 bp, Probe Sequence
gtcatggacagaggaacaaagccag

SEQ ID NO: 251224 - DNA, 25 bp, Probe Sequence
gtcatgagattaggactccacgcca

SEQ ID NO: 251225 - DNA, 25 bp, Probe Sequence
gtctacatgtgtgacctgcacacca

SEQ ID NO: 251226 - DNA, 25 bp, Probe Sequence
gtcattgagtgtcaccagagaccag

SEQ ID NO: 251227 - DNA, 25 bp, Probe Sequence
gtcttcatgtaaaccagaggctatg

SEQ ID NO: 251228 - DNA, 25 bp, Probe Sequence
gtcttcatgtgaactctcagggaat

SEQ ID NO: 251229 - DNA, 25 bp, Probe Sequence
gtcttcagcagtgttcagagccaag

SEQ ID NO: 251230 - DNA, 25 bp, Probe Sequence
gtcattccaatcagccaactaagtt

SEQ ID NO: 251231 - DNA, 25 bp, Probe Sequence
gtcatctcctataagacagaagaaa

SEQ ID NO: 251232 - DNA, 25 bp, Probe Sequence
gtcattacctataaccggacatatg

SEQ ID NO: 251233 - DNA, 25 bp, Probe Sequence
gtcattgccacttcaaccaaaatcg

SEQ ID NO: 251234 - DNA, 25 bp, Probe Sequence
gtcttggcactattacacaaaatca

SEQ ID NO: 251235 - DNA, 25 bp, Probe Sequence
gtcttggagctgaatagccgagttc

SEQ ID NO: 251236 - DNA, 25 bp, Probe Sequence
gtcattgtgagtgattgctttttcc

SEQ ID NO: 251237 - DNA, 25 bp, Probe Sequence
gtctgggagctagttttctaactcc

SEQ ID NO: 251238 - DNA, 25 bp, Probe Sequence
gtctagtgactaggattttgttcct

SEQ ID NO: 251239 - DNA, 25 bp, Probe Sequence
gtctagtgcctgggaatcttgagtc

SEQ ID NO: 251240 - DNA, 25 bp, Probe Sequence
gtctagatctcagttaatgcttatg

SEQ ID NO: 251241 - DNA, 25 bp, Probe Sequence
gtcttttcacactgcagctttggga

SEQ ID NO: 251242 - DNA, 25 bp, Probe Sequence
gtctatagtcccagctagttgggag

SEQ ID NO: 251243 - DNA, 25 bp, Probe Sequence
gtcttatggcccagaactgcatttg

SEQ ID NO: 251244 - DNA, 25 bp, Probe Sequence
gtctgttccccacaatgttttgtac

SEQ ID NO: 251245 - DNA, 25 bp, Probe Sequence
gtctgtttttcataattgctcttta

SEQ ID NO: 251246 - DNA, 25 bp, Probe Sequence
gtctaggtctttgatattgctcttt

SEQ ID NO: 251247 - DNA, 25 bp, Probe Sequence
gtctgaggacttaaataccattcca

SEQ ID NO: 251248 - DNA, 25 bp, Probe Sequence
gtcggtgacgtggaaccgtcacgca

SEQ ID NO: 251249 - DNA, 25 bp, Probe Sequence
gtctaaacgctgggaacgtccaaat

SEQ ID NO: 251250 - DNA, 25 bp, Probe Sequence
gtctatacacagcgtgaacctcaca

SEQ ID NO: 251251 - DNA, 25 bp, Probe Sequence
gtctataaagcatttaacccccctg

SEQ ID NO: 251252 - DNA, 25 bp, Probe Sequence
gtctgtaactggttcatcaacgccc

SEQ ID NO: 251253 - DNA, 25 bp, Probe Sequence
gtctgtaactggttcatcaacgccc

SEQ ID NO: 251254 - DNA, 25 bp, Probe Sequence
gtctgtaacctgtcagcaaggcctt

SEQ ID NO: 251255 - DNA, 25 bp, Probe Sequence
gtctggaaatcacccaaggcttgca

SEQ ID NO: 251256 - DNA, 25 bp, Probe Sequence
gtccgaactagtctcaggcttcaac

SEQ ID NO: 251257 - DNA, 25 bp, Probe Sequence
gtccgaactagtctcaggcttcaac

SEQ ID NO: 251258 - DNA, 25 bp, Probe Sequence
gtctcgaccaagagctgaagctgat

SEQ ID NO: 251259 - DNA, 25 bp, Probe Sequence
gtcatccgtttcagctgacagctgc

SEQ ID NO: 251260 - DNA, 25 bp, Probe Sequence
gtcatcgctattaccatgtgatcgt

SEQ ID NO: 251261 - DNA, 25 bp, Probe Sequence
gtcatcgctattaccatggtggagc

SEQ ID NO: 251262 - DNA, 25 bp, Probe Sequence
gtcatcggtatgaccatggtgatgc

SEQ ID NO: 251263 - DNA, 25 bp, Probe Sequence
gtcatcgctattaccatggtgatgc

SEQ ID NO: 251264 - DNA, 25 bp, Probe Sequence
gtcatcgctattaccatggtgatcg

SEQ ID NO: 251265 - DNA, 25 bp, Probe Sequence
gtcatcgctattaccatggtgatcg

SEQ ID NO: 251266 - DNA, 25 bp, Probe Sequence
gtcatcgctattaccatgggatgcg

SEQ ID NO: 251267 - DNA, 25 bp, Probe Sequence
gtcatcttcatcgaccggaagcgca

SEQ ID NO: 251268 - DNA, 25 bp, Probe Sequence
gtcatctttgcaggcggtcaggcct

SEQ ID NO: 251269 - DNA, 25 bp, Probe Sequence
gtcatctcttcagcaatccagaggt

SEQ ID NO: 251270 - DNA, 25 bp, Probe Sequence
gtcatccagtctattcacagaagtg

SEQ ID NO: 251271 - DNA, 25 bp, Probe Sequence
gtctaagtccaaccaataagtgttt

SEQ ID NO: 251272 - DNA, 25 bp, Probe Sequence
gtctagttcgaatcctagaggttgt

SEQ ID NO: 251273 - DNA, 25 bp, Probe Sequence
gtcttgtgggagatgcgtagggggt

SEQ ID NO: 251274 - DNA, 25 bp, Probe Sequence
gtcttaaacatgagggagcgtgggt

SEQ ID NO: 251275 - DNA, 25 bp, Probe Sequence
gtcatctacaagctgggtggcgatg

SEQ ID NO: 251276 - DNA, 25 bp, Probe Sequence
gtctctatccagctcggtaaagaaa

SEQ ID NO: 251277 - DNA, 25 bp, Probe Sequence
gtctttctcccctggactagaaatc

SEQ ID NO: 251278 - DNA, 25 bp, Probe Sequence
gtctctctctacctcatttttagaa

SEQ ID NO: 251279 - DNA, 25 bp, Probe Sequence
gtcatctccttcaaatactttaata

SEQ ID NO: 251280 - DNA, 25 bp, Probe Sequence
gtcattgcccttgaattactaaatt

SEQ ID NO: 251281 - DNA, 25 bp, Probe Sequence
gtctgagcctttaaagtcaaaagca

SEQ ID NO: 251282 - DNA, 25 bp, Probe Sequence
gtctagctttgagtcgttcaacctc

SEQ ID NO: 251283 - DNA, 25 bp, Probe Sequence
gtcttgtttcactgatcttagcttt

SEQ ID NO: 251284 - DNA, 25 bp, Probe Sequence
gtcttgatgttttttctgtaatgta

SEQ ID NO: 251285 - DNA, 25 bp, Probe Sequence
gtctgcgttcctgttagcataatgt

SEQ ID NO: 251286 - DNA, 25 bp, Probe Sequence
gtcatctgtacaattagtccataat

SEQ ID NO: 251287 - DNA, 25 bp, Probe Sequence
gtcatcttgcataatatagtcgttc

SEQ ID NO: 251288 - DNA, 25 bp, Probe Sequence
gtcttggtcacaaggctcagcttct

SEQ ID NO: 251289 - DNA, 25 bp, Probe Sequence
gtcttgtgtttaggctcgtctgacc

SEQ ID NO: 251290 - DNA, 25 bp, Probe Sequence
gtcatatggttttacttttctcccg

SEQ ID NO: 251291 - DNA, 25 bp, Probe Sequence
gtcatattgttattttctctcatct

SEQ ID NO: 251292 - DNA, 25 bp, Probe Sequence
gtcatattgctgtcttgtatataca

SEQ ID NO: 251293 - DNA, 25 bp, Probe Sequence
gtcatcattggctgttgcaagcatc

SEQ ID NO: 251294 - DNA, 25 bp, Probe Sequence
gtcatcaatggcggttctcatgctg

SEQ ID NO: 251295 - DNA, 25 bp, Probe Sequence
gtcatagcgacagtgatcgtcatca

SEQ ID NO: 251296 - DNA, 25 bp, Probe Sequence
gtcatactccatggattgtgatcat

SEQ ID NO: 251297 - DNA, 25 bp, Probe Sequence
gtcattgccaatgatatggcagctt

SEQ ID NO: 251298 - DNA, 25 bp, Probe Sequence
gtcttcaatctgttttgagcttgga

SEQ ID NO: 251299 - DNA, 25 bp, Probe Sequence
gtcatacatatgatttcgcagtctg

SEQ ID NO: 251300 - DNA, 25 bp, Probe Sequence
gtcatcagatattttagccacctac

SEQ ID NO: 251301 - DNA, 25 bp, Probe Sequence
gtcatatggtttttgcccacacaga

SEQ ID NO: 251302 - DNA, 25 bp, Probe Sequence
gtctcggcccatttgaagaccagga

SEQ ID NO: 251303 - DNA, 25 bp, Probe Sequence
gtccaggcacattgtgtacccctgg

SEQ ID NO: 251304 - DNA, 25 bp, Probe Sequence
gtcatcgccaagatggacgccactg

SEQ ID NO: 251305 - DNA, 25 bp, Probe Sequence
gtcatcgccaagatggacgccactg

SEQ ID NO: 251306 - DNA, 25 bp, Probe Sequence
gtcatagccaagatggatgccacag

SEQ ID NO: 251307 - DNA, 25 bp, Probe Sequence
gtcataggcatagagagttgcacat

SEQ ID NO: 251308 - DNA, 25 bp, Probe Sequence
gtcatactgaactcactgctagcta

SEQ ID NO: 251309 - DNA, 25 bp, Probe Sequence
gtcatccatgaataattaagaagca

SEQ ID NO: 251310 - DNA, 25 bp, Probe Sequence
gtcattatcacataatctcaagtta

SEQ ID NO: 251311 - DNA, 25 bp, Probe Sequence
gtctttacattcaatggaagttgta

SEQ ID NO: 251312 - DNA, 25 bp, Probe Sequence
gtctttatcattcagggttcaatca

SEQ ID NO: 251313 - DNA, 25 bp, Probe Sequence
gtcttgtgcctttgatggtgttcat

SEQ ID NO: 251314 - DNA, 25 bp, Probe Sequence
gtcttgactctttgtgtgtgactgt

SEQ ID NO: 251315 - DNA, 25 bp, Probe Sequence
gtcatatcaatcatagcattttctg

SEQ ID NO: 251316 - DNA, 25 bp, Probe Sequence
gtcatcatcaaactaatgaggtctg

SEQ ID NO: 251317 - DNA, 25 bp, Probe Sequence
gtctctctcataccaacagaacttc

SEQ ID NO: 251318 - DNA, 25 bp, Probe Sequence
gtcatcagccaacagactgaatgtt

SEQ ID NO: 251319 - DNA, 25 bp, Probe Sequence
gtcatcaacaatccagactgaagtc

SEQ ID NO: 251320 - DNA, 25 bp, Probe Sequence
gtctcagaactccaggctacatatc

SEQ ID NO: 251321 - DNA, 25 bp, Probe Sequence
gtctcagtttgccagtcttgcaatc

SEQ ID NO: 251322 - DNA, 25 bp, Probe Sequence
gtctatcttcattagtcttcaaaga

SEQ ID NO: 251323 - DNA, 25 bp, Probe Sequence
gtcttatgtattatcctaaaatcca

SEQ ID NO: 251324 - DNA, 25 bp, Probe Sequence
gtcttctgtattctccaacttttaa

SEQ ID NO: 251325 - DNA, 25 bp, Probe Sequence
gtctaattcacttactaactttctt

SEQ ID NO: 251326 - DNA, 25 bp, Probe Sequence
gtctgaagtcaaccactacttttcc

SEQ ID NO: 251327 - DNA, 25 bp, Probe Sequence
gtcttggtctggcactaaatttctc

SEQ ID NO: 251328 - DNA, 25 bp, Probe Sequence
gtcttggtctggcactaaatttctc

SEQ ID NO: 251329 - DNA, 25 bp, Probe Sequence
gtcttgctgttgacatatttaatgt

SEQ ID NO: 251330 - DNA, 25 bp, Probe Sequence
gtcttgcttatggcatgagggacct

SEQ ID NO: 251331 - DNA, 25 bp, Probe Sequence
gtcatcgctataccatggtgatccg

SEQ ID NO: 251332 - DNA, 25 bp, Probe Sequence
gtcatacatattccatttgtccttt

SEQ ID NO: 251333 - DNA, 25 bp, Probe Sequence
gtctaaatttcagttgtgtcttgcc

SEQ ID NO: 251334 - DNA, 25 bp, Probe Sequence
gtctaaattctaggtgatttcctca

SEQ ID NO: 251335 - DNA, 25 bp, Probe Sequence
gtctagtaaatttgtgatcttccca

SEQ ID NO: 251336 - DNA, 25 bp, Probe Sequence
gtctatgcaaaaatggtacttctac

SEQ ID NO: 251337 - DNA, 25 bp, Probe Sequence
gtcttctgaattaggtgacttagat

SEQ ID NO: 251338 - DNA, 25 bp, Probe Sequence
gtccctaattctgatatcgtatgtg

SEQ ID NO: 251339 - DNA, 25 bp, Probe Sequence
gtcgttcctacagttacgtgtgtgg

SEQ ID NO: 251340 - DNA, 25 bp, Probe Sequence
gtcgttactcaaatgtacagttggc

SEQ ID NO: 251341 - DNA, 25 bp, Probe Sequence
gtcttgctttcacttgtgagcagtt

SEQ ID NO: 251342 - DNA, 25 bp, Probe Sequence
gtcttacttcagaatgcatcctttg

SEQ ID NO: 251343 - DNA, 25 bp, Probe Sequence
gtcttactcagttatgttctttggc

SEQ ID NO: 251344 - DNA, 25 bp, Probe Sequence
gtcttcagctctatttatcttagga

SEQ ID NO: 251345 - DNA, 25 bp, Probe Sequence
gtctacagtccagatgttcttcgta

SEQ ID NO: 251346 - DNA, 25 bp, Probe Sequence
gtctactccagacagttattccata

SEQ ID NO: 251347 - DNA, 25 bp, Probe Sequence
gtctaattctgtgagcctacctata

SEQ ID NO: 251348 - DNA, 25 bp, Probe Sequence
gtctacatactttcatcctgactct

SEQ ID NO: 251349 - DNA, 25 bp, Probe Sequence
gtcataagacatcttcaagacatct

SEQ ID NO: 251350 - DNA, 25 bp, Probe Sequence
gtcatagggaggatttgagctcata

SEQ ID NO: 251351 - DNA, 25 bp, Probe Sequence
gtctcattatagagttctcagccat

SEQ ID NO: 251352 - DNA, 25 bp, Probe Sequence
gtcatcagttagcaaattcatccac

SEQ ID NO: 251353 - DNA, 25 bp, Probe Sequence
gtcatcaggaatcaaaacccacagt

SEQ ID NO: 251354 - DNA, 25 bp, Probe Sequence
gtgcagggaaagagaacctcaccag

SEQ ID NO: 251355 - DNA, 25 bp, Probe Sequence
gtcttggcacaacagaattacaccg

SEQ ID NO: 251356 - DNA, 25 bp, Probe Sequence
gtctcaacccatcaggttcagacca

SEQ ID NO: 251357 - DNA, 25 bp, Probe Sequence
gtctacagtcctcaggtctaggcag

SEQ ID NO: 251358 - DNA, 25 bp, Probe Sequence
gtctacaatcctgtattcaaggcgc

SEQ ID NO: 251359 - DNA, 25 bp, Probe Sequence
gtctacaacagttttataaggccct

SEQ ID NO: 251360 - DNA, 25 bp, Probe Sequence
gtctacataactttcgtaatggccc

SEQ ID NO: 251361 - DNA, 25 bp, Probe Sequence
gtctgcatcatttctttagttatcc

SEQ ID NO: 251362 - DNA, 25 bp, Probe Sequence
gtctgcattttcttggagaaattta

SEQ ID NO: 251363 - DNA, 25 bp, Probe Sequence
gtcatctttgtatggagtcaatagt

SEQ ID NO: 251364 - DNA, 25 bp, Probe Sequence
gtcattatggtttggagatgcaatt

SEQ ID NO: 251365 - DNA, 25 bp, Probe Sequence
gtcattaagtgcagaaataactaag

SEQ ID NO: 251366 - DNA, 25 bp, Probe Sequence
gtgctgcaaaaagacaggaactaag

SEQ ID NO: 251367 - DNA, 25 bp, Probe Sequence
gtctagaaaaacctgccaaatatga

SEQ ID NO: 251368 - DNA, 25 bp, Probe Sequence
gtcatcagaatctgtcggccaaaag

SEQ ID NO: 251369 - DNA, 25 bp, Probe Sequence
gtctcatcattctgttggctaaaat

SEQ ID NO: 251370 - DNA, 25 bp, Probe Sequence
gtctatatgtgcggcttttcagaag

SEQ ID NO: 251371 - DNA, 25 bp, Probe Sequence
gtcttatgaggctttcctcaagaga

SEQ ID NO: 251372 - DNA, 25 bp, Probe Sequence
gtcattagtgtattaaccagcagga

SEQ ID NO: 251373 - DNA, 25 bp, Probe Sequence
gtctaagtgttctgagctggaggag

SEQ ID NO: 251374 - DNA, 25 bp, Probe Sequence
gtctagcagagttgtgtcaggggga

SEQ ID NO: 251375 - DNA, 25 bp, Probe Sequence
gtctcaactatattgtccaggctgg

SEQ ID NO: 251376 - DNA, 25 bp, Probe Sequence
gtctctgctttgagtcaaggggctt

SEQ ID NO: 251377 - DNA, 25 bp, Probe Sequence
gtctttatctaggtatgagggagct

SEQ ID NO: 251378 - DNA, 25 bp, Probe Sequence
gtcttgttctgtgatgaggggaggg

SEQ ID NO: 251379 - DNA, 25 bp, Probe Sequence
gtctgagcccatttctggggggaga

SEQ ID NO: 251380 - DNA, 25 bp, Probe Sequence
gtctcccctaatgcgggggctggac

SEQ ID NO: 251381 - DNA, 25 bp, Probe Sequence
gtccacccttccaggaaagggacat

SEQ ID NO: 251382 - DNA, 25 bp, Probe Sequence
gtccagcccccgcattagggggaga

SEQ ID NO: 251383 - DNA, 25 bp, Probe Sequence
gtcatagaaccccagattcaggctt

SEQ ID NO: 251384 - DNA, 25 bp, Probe Sequence
gtcataaaacaccatcattaagaat

SEQ ID NO: 251385 - DNA, 25 bp, Probe Sequence
gtcatttgaaaccaatatcctgata

SEQ ID NO: 251386 - DNA, 25 bp, Probe Sequence
gtcatttgaagatcacaccttttaa

SEQ ID NO: 251387 - DNA, 25 bp, Probe Sequence
gtcattataaatgcagctgccttta

SEQ ID NO: 251388 - DNA, 25 bp, Probe Sequence
gtcattcttagtccagtcagtctta

SEQ ID NO: 251389 - DNA, 25 bp, Probe Sequence
gtctttcagcaccaagtcatgttta

SEQ ID NO: 251390 - DNA, 25 bp, Probe Sequence
gtctcattcgatacagcaaagttta

SEQ ID NO: 251391 - DNA, 25 bp, Probe Sequence
gtctcatttgatatccacaacttat

SEQ ID NO: 251392 - DNA, 25 bp, Probe Sequence
gtctctatgaatttaactactgtca

SEQ ID NO: 251393 - DNA, 25 bp, Probe Sequence
gtctctaggtgatccacaaggctca

SEQ ID NO: 251394 - DNA, 25 bp, Probe Sequence
gtctcaacggcagcgacgaagagca

SEQ ID NO: 251395 - DNA, 25 bp, Probe Sequence
gtccaacgtgcagactccacgtttt

SEQ ID NO: 251396 - DNA, 25 bp, Probe Sequence
gtctcagtagtctagacgcaacgtc

SEQ ID NO: 251397 - DNA, 25 bp, Probe Sequence
gtctatgatatttcagtcacaacaa

SEQ ID NO: 251398 - DNA, 25 bp, Probe Sequence
gtcttgtaaaagcccagatcactgt

SEQ ID NO: 251399 - DNA, 25 bp, Probe Sequence
gtcttctcaaattctgtaggatctg

SEQ ID NO: 251400 - DNA, 25 bp, Probe Sequence
gtcttctgtaattcattgagcagtt

SEQ ID NO: 251401 - DNA, 25 bp, Probe Sequence
gtcttctgtaattcattgagcagtt

SEQ ID NO: 251402 - DNA, 25 bp, Probe Sequence
gtcttctgtaattcattgagcagtt

SEQ ID NO: 251403 - DNA, 25 bp, Probe Sequence
gtcttctgtaattcattgagcagtt

SEQ ID NO: 251404 - DNA, 25 bp, Probe Sequence
gtcttgttcataaattgacaatgtc

SEQ ID NO: 251405 - DNA, 25 bp, Probe Sequence
gtcttgcttgattgaaaacgacatc

SEQ ID NO: 251406 - DNA, 25 bp, Probe Sequence
gtcttgaggatacacgggacccaga

SEQ ID NO: 251407 - DNA, 25 bp, Probe Sequence
gtgtggatcctaaccggaactggga

SEQ ID NO: 251408 - DNA, 25 bp, Probe Sequence
gtctggtcctaaccagtgagcactg

SEQ ID NO: 251409 - DNA, 25 bp, Probe Sequence
gtcttccccaaaattgatcactccg

SEQ ID NO: 251410 - DNA, 25 bp, Probe Sequence
gtcttctcctcattcatatttagct

SEQ ID NO: 251411 - DNA, 25 bp, Probe Sequence
gtctttccttttttctgagagattc

SEQ ID NO: 251412 - DNA, 25 bp, Probe Sequence
gtctccccctctaagaggaggatcc

SEQ ID NO: 251413 - DNA, 25 bp, Probe Sequence
gtcttccgtctccatttggattatc

SEQ ID NO: 251414 - DNA, 25 bp, Probe Sequence
gtcttcctttcgatataaaactctt

SEQ ID NO: 251415 - DNA, 25 bp, Probe Sequence
gtctactttggctgtaaaataccct

SEQ ID NO: 251416 - DNA, 25 bp, Probe Sequence
gtctagtttcaaggtctaaatacca

SEQ ID NO: 251417 - DNA, 25 bp, Probe Sequence
gtcttgttttgtgtcatgaattact

SEQ ID NO: 251418 - DNA, 25 bp, Probe Sequence
gtcggtattggaattgcaggtctga

SEQ ID NO: 251419 - DNA, 25 bp, Probe Sequence
gtctggtttctaacatgcaggtagc

SEQ ID NO: 251420 - DNA, 25 bp, Probe Sequence
gtcttactcagttacatagggccat

SEQ ID NO: 251421 - DNA, 25 bp, Probe Sequence
gtcttggccctcaactggggcaagt

SEQ ID NO: 251422 - DNA, 25 bp, Probe Sequence
gtcttccatccaaaaggggcagggc

SEQ ID NO: 251423 - DNA, 25 bp, Probe Sequence
gtctcctcttaattgaagggagggc

SEQ ID NO: 251424 - DNA, 25 bp, Probe Sequence
gtctccacagtagctagagggagtt

SEQ ID NO: 251425 - DNA, 25 bp, Probe Sequence
gtcttgtcggggagatgggcatgtt

SEQ ID NO: 251426 - DNA, 25 bp, Probe Sequence
gtctttccgagtgtgagcacagctc

SEQ ID NO: 251427 - DNA, 25 bp, Probe Sequence
gtctttatctgcctattactcagcc

SEQ ID NO: 251428 - DNA, 25 bp, Probe Sequence
gtcttcttgtggatctatctcatca

SEQ ID NO: 251429 - DNA, 25 bp, Probe Sequence
gtctattcgggagtctgagtataga

SEQ ID NO: 251430 - DNA, 25 bp, Probe Sequence
gtctttctggattcctagatgaggt

SEQ ID NO: 251431 - DNA, 25 bp, Probe Sequence
gtcatttctctttactggatgttta

SEQ ID NO: 251432 - DNA, 25 bp, Probe Sequence
gtcttttcactatcttatttgctaa

SEQ ID NO: 251433 - DNA, 25 bp, Probe Sequence
gtcattttcctttctgtattaatta

SEQ ID NO: 251434 - DNA, 25 bp, Probe Sequence
gtcatttgtgacatcatctatatta

SEQ ID NO: 251435 - DNA, 25 bp, Probe Sequence
gtcatttggcaacatctacagacaa

SEQ ID NO: 251436 - DNA, 25 bp, Probe Sequence
gtcatttgtcaatcacttacacaag

SEQ ID NO: 251437 - DNA, 25 bp, Probe Sequence
gtcttcagccactcacttataaaga

SEQ ID NO: 251438 - DNA, 25 bp, Probe Sequence
gtcttcaggcacgcatgtgtaccag

SEQ ID NO: 251439 - DNA, 25 bp, Probe Sequence
gtcattaatataggctggttcatca

SEQ ID NO: 251440 - DNA, 25 bp, Probe Sequence
gtcattataaatgcttgatcaatag

SEQ ID NO: 251441 - DNA, 25 bp, Probe Sequence
gtctctacaaatatttatacagcac

SEQ ID NO: 251442 - DNA, 25 bp, Probe Sequence
gtcctttacttgtggaatcagagcc

SEQ ID NO: 251443 - DNA, 25 bp, Probe Sequence
gtcttaatactttagaggacccaca

SEQ ID NO: 251444 - DNA, 25 bp, Probe Sequence
gtcattcaaacttaggaaacacacc

SEQ ID NO: 251445 - DNA, 25 bp, Probe Sequence
gtgcttccggctccaggaaataacc

SEQ ID NO: 251446 - DNA, 25 bp, Probe Sequence
gtcttcacttgcactgggggaacag

SEQ ID NO: 251447 - DNA, 25 bp, Probe Sequence
gtcttctgcttctcccaggagaaca

SEQ ID NO: 251448 - DNA, 25 bp, Probe Sequence
gtgttcgttcaagcctagcaatcca

SEQ ID NO: 251449 - DNA, 25 bp, Probe Sequence
gtcttggttcaaattctacctccac

SEQ ID NO: 251450 - DNA, 25 bp, Probe Sequence
gtctttgattcatattctactttca

SEQ ID NO: 251451 - DNA, 25 bp, Probe Sequence
gtctttgattcatattctactttca

SEQ ID NO: 251452 - DNA, 25 bp, Probe Sequence
gtctttatggcttatttgcctttat

SEQ ID NO: 251453 - DNA, 25 bp, Probe Sequence
gtcattttggttttcttctatagcc

SEQ ID NO: 251454 - DNA, 25 bp, Probe Sequence
gtctttatgaagttgtttgtaagca

SEQ ID NO: 251455 - DNA, 25 bp, Probe Sequence
gtcggttagaattcgttctacaaca

SEQ ID NO: 251456 - DNA, 25 bp, Probe Sequence
gtcttgcttaaatcatccggacaaa

SEQ ID NO: 251457 - DNA, 25 bp, Probe Sequence
gtcttcagtaactgctgctctgtta

SEQ ID NO: 251458 - DNA, 25 bp, Probe Sequence
gtcttttaacagtctctctttatat

SEQ ID NO: 251459 - DNA, 25 bp, Probe Sequence
gtctttttcaagtttctgtcttcct

SEQ ID NO: 251460 - DNA, 25 bp, Probe Sequence
gtctttttaatgttagtgatccacc

SEQ ID NO: 251461 - DNA, 25 bp, Probe Sequence
gtcttcttagtttatagattctcaa

SEQ ID NO: 251462 - DNA, 25 bp, Probe Sequence
gtcttctattgttggaccacttaca

SEQ ID NO: 251463 - DNA, 25 bp, Probe Sequence
gtcttcgactgcaggaccaatgtcc

SEQ ID NO: 251464 - DNA, 25 bp, Probe Sequence
gtctaaactccaggatacagtatcc

SEQ ID NO: 251465 - DNA, 25 bp, Probe Sequence
gtctctaatctacaagcacatttgc

SEQ ID NO: 251466 - DNA, 25 bp, Probe Sequence
gtctgcctatgcttaaagccaactg

SEQ ID NO: 251467 - DNA, 25 bp, Probe Sequence
gtctccattcttatggccagcattc

SEQ ID NO: 251468 - DNA, 25 bp, Probe Sequence
gtctctcatgttagaagcttccttc

SEQ ID NO: 251469 - DNA, 25 bp, Probe Sequence
gtctattgtttgggtgcatgctttc

SEQ ID NO: 251470 - DNA, 25 bp, Probe Sequence
gtctttttgcatcagtactttgtat

SEQ ID NO: 251471 - DNA, 25 bp, Probe Sequence
gtctttggtgcttttcacttgtgtt

SEQ ID NO: 251472 - DNA, 25 bp, Probe Sequence
gtcttatattgtagttcattttgtt

SEQ ID NO: 251473 - DNA, 25 bp, Probe Sequence
gtcttattcctaattcctgtatgtt

SEQ ID NO: 251474 - DNA, 25 bp, Probe Sequence
gtcttcattgccaatttgttcttgt

SEQ ID NO: 251475 - DNA, 25 bp, Probe Sequence
gtcttcattgccaatttgttcttgt

SEQ ID NO: 251476 - DNA, 25 bp, Probe Sequence
gtcttagtggtacctgtgtctttac

SEQ ID NO: 251477 - DNA, 25 bp, Probe Sequence
gtcttgcaatgagcacctgtgctgt

SEQ ID NO: 251478 - DNA, 25 bp, Probe Sequence
gtcttcaaggactctgcatgcagat

SEQ ID NO: 251479 - DNA, 25 bp, Probe Sequence
gtcttaatgaaatatatcaacccaa

SEQ ID NO: 251480 - DNA, 25 bp, Probe Sequence
gtcttccagaatacaaactactccc

SEQ ID NO: 251481 - DNA, 25 bp, Probe Sequence
gtctgacttgaaataaaccagttct

SEQ ID NO: 251482 - DNA, 25 bp, Probe Sequence
gtctgaatcatgtctgtatccccag

SEQ ID NO: 251483 - DNA, 25 bp, Probe Sequence
gtctaatgcatgttttcatccacta

SEQ ID NO: 251484 - DNA, 25 bp, Probe Sequence
gtctacgtgtttgtctaacgaagtc

SEQ ID NO: 251485 - DNA, 25 bp, Probe Sequence
gtctagcgtgttatgctataacgaa

SEQ ID NO: 251486 - DNA, 25 bp, Probe Sequence
gtctatcgtggttgtgaatccccaa

SEQ ID NO: 251487 - DNA, 25 bp, Probe Sequence
gtctacggtctgtgaagctgctgcc

SEQ ID NO: 251488 - DNA, 25 bp, Probe Sequence
gtcttccagttgggtgatctgcacc

SEQ ID NO: 251489 - DNA, 25 bp, Probe Sequence
gtcttccattgatctctgattgtcc

SEQ ID NO: 251490 - DNA, 25 bp, Probe Sequence
gtcttgatttgttgcacatcatatt

SEQ ID NO: 251491 - DNA, 25 bp, Probe Sequence
gtcttgatattctgtgactcattat

SEQ ID NO: 251492 - DNA, 25 bp, Probe Sequence
gtctccctgatctgaactatttgct

SEQ ID NO: 251493 - DNA, 25 bp, Probe Sequence
gtcttccatatctatacctttgtgc

SEQ ID NO: 251494 - DNA, 25 bp, Probe Sequence
gtcattggagactattgcaacttgg

SEQ ID NO: 251495 - DNA, 25 bp, Probe Sequence
gtcttcgagagtttctgcatcgtgg

SEQ ID NO: 251496 - DNA, 25 bp, Probe Sequence
gtcttgatgaggaacttgatcgagt

SEQ ID NO: 251497 - DNA, 25 bp, Probe Sequence
gtcttgtttgcttcttgcatctgat

SEQ ID NO: 251498 - DNA, 25 bp, Probe Sequence
gtcttgtttgcttcttgcatctgat

SEQ ID NO: 251499 - DNA, 25 bp, Probe Sequence
gtcattgctgtttcatctactgttg

SEQ ID NO: 251500 - DNA, 25 bp, Probe Sequence
gtcattgcatttcttccattgtgaa

SEQ ID NO: 251501 - DNA, 25 bp, Probe Sequence
gtcttgcttgtcattctgtttgcag

SEQ ID NO: 251502 - DNA, 25 bp, Probe Sequence
gtctattgctgtattcagtgttcac

SEQ ID NO: 251503 - DNA, 25 bp, Probe Sequence
gtcttggtttgattaggattgccag

SEQ ID NO: 251504 - DNA, 25 bp, Probe Sequence
gtcttcgtgcttgctgtggagatgc

SEQ ID NO: 251505 - DNA, 25 bp, Probe Sequence
gtcttcctctatgtttgacgaatat

SEQ ID NO: 251506 - DNA, 25 bp, Probe Sequence
gtcttcgtccatctgttgacaaatg

SEQ ID NO: 251507 - DNA, 25 bp, Probe Sequence
gtcttcgaccgcggggacatgaaga

SEQ ID NO: 251508 - DNA, 25 bp, Probe Sequence
gtcttccaccggatatgtatgaatg

SEQ ID NO: 251509 - DNA, 25 bp, Probe Sequence
gtctttcacccagatatatcaaatg

SEQ ID NO: 251510 - DNA, 25 bp, Probe Sequence
gtctttgctcccacaaatgaagcct

SEQ ID NO: 251511 - DNA, 25 bp, Probe Sequence
gtctttgggccaagataagggcagt

SEQ ID NO: 251512 - DNA, 25 bp, Probe Sequence
gtcttggtggcccaatggaagtggc

SEQ ID NO: 251513 - DNA, 25 bp, Probe Sequence
gtcattggggtccccaacgtgggca

SEQ ID NO: 251514 - DNA, 25 bp, Probe Sequence
gtctgggaagtggggcacacggggc

SEQ ID NO: 251515 - DNA, 25 bp, Probe Sequence
gtcctggacccgaagtccaagtggc

SEQ ID NO: 251516 - DNA, 25 bp, Probe Sequence
gtccaggacctcacagatctaatca

SEQ ID NO: 251517 - DNA, 25 bp, Probe Sequence
gtctcggaggccctaatcaggatct

SEQ ID NO: 251518 - DNA, 25 bp, Probe Sequence
gtctcagcgaggtgtaaagttgttc

SEQ ID NO: 251519 - DNA, 25 bp, Probe Sequence
gtctacatgaagtttacagattggt

SEQ ID NO: 251520 - DNA, 25 bp, Probe Sequence
gtctatctcaactctattgattggt

SEQ ID NO: 251521 - DNA, 25 bp, Probe Sequence
gtctatctcagtgccagatatggtg

SEQ ID NO: 251522 - DNA, 25 bp, Probe Sequence
gtcttatcatggacaatttgggcta

SEQ ID NO: 251523 - DNA, 25 bp, Probe Sequence
gtctttcatggggtgatgctgggct

SEQ ID NO: 251524 - DNA, 25 bp, Probe Sequence
gtctgctccatggagggcacgtggt

SEQ ID NO: 251525 - DNA, 25 bp, Probe Sequence
gtctctccatgcctagggaagtcta

SEQ ID NO: 251526 - DNA, 25 bp, Probe Sequence
gtcttcctgagccatggcgaaggca

SEQ ID NO: 251527 - DNA, 25 bp, Probe Sequence
gtctgtcctggtgtgtgaaggctgg

SEQ ID NO: 251528 - DNA, 25 bp, Probe Sequence
gtcttccgtgtgctggatacactgg

SEQ ID NO: 251529 - DNA, 25 bp, Probe Sequence
gtcttctaatgtctggaaagcaact

SEQ ID NO: 251530 - DNA, 25 bp, Probe Sequence
ggttgtacgtccagaaaaggctatg

SEQ ID NO: 251531 - DNA, 25 bp, Probe Sequence
gtggcgtccttccgtaaaaagtatg

SEQ ID NO: 251532 - DNA, 25 bp, Probe Sequence
gtcggcccattctgtttagaaatat

SEQ ID NO: 251533 - DNA, 25 bp, Probe Sequence
gtctgtcccaactgtttgaacagtg

SEQ ID NO: 251534 - DNA, 25 bp, Probe Sequence
gtcttaccaggctgatcttgaatct

SEQ ID NO: 251535 - DNA, 25 bp, Probe Sequence
gtcttcaccttgctgcattgtgacc

SEQ ID NO: 251536 - DNA, 25 bp, Probe Sequence
gtcttatattgttctgactgctgac

SEQ ID NO: 251537 - DNA, 25 bp, Probe Sequence
gtcttcacttggtctgacttgtacc

SEQ ID NO: 251538 - DNA, 25 bp, Probe Sequence
gtctaagattggttacttctatacc

SEQ ID NO: 251539 - DNA, 25 bp, Probe Sequence
gtctaagactccagacttgcgttca

SEQ ID NO: 251540 - DNA, 25 bp, Probe Sequence
gtctgtgaacccacagctcggttgc

SEQ ID NO: 251541 - DNA, 25 bp, Probe Sequence
ttcttcaaccgcacgacggacgtga

SEQ ID NO: 251542 - DNA, 25 bp, Probe Sequence
gtcttcaagccgtgggaggagcgga

SEQ ID NO: 251543 - DNA, 25 bp, Probe Sequence
gtctttcgcactcaggtgatggact

SEQ ID NO: 251544 - DNA, 25 bp, Probe Sequence
gtctttatcacttattcgatggaca

SEQ ID NO: 251545 - DNA, 25 bp, Probe Sequence
gtctgcaagtcagagtccgtgccac

SEQ ID NO: 251546 - DNA, 25 bp, Probe Sequence
gtctacaccaacgtctgcagataca

SEQ ID NO: 251547 - DNA, 25 bp, Probe Sequence
gtctcacaccctccagggaatgaat

SEQ ID NO: 251548 - DNA, 25 bp, Probe Sequence
gtctacgccttaacaagcacatgaa

SEQ ID NO: 251549 - DNA, 25 bp, Probe Sequence
gtctacatcccaggcagcaatgcca

SEQ ID NO: 251550 - DNA, 25 bp, Probe Sequence
gtctaaccgggaagatgctgccgag

SEQ ID NO: 251551 - DNA, 25 bp, Probe Sequence
gtcttaccacggtgatgcctgtgtg

SEQ ID NO: 251552 - DNA, 25 bp, Probe Sequence
gtctttacctgcgtagtccagtttc

SEQ ID NO: 251553 - DNA, 25 bp, Probe Sequence
gtcttctcaagtgatgagtccagtg

SEQ ID NO: 251554 - DNA, 25 bp, Probe Sequence
gtcttgccagagtaattctctcact

SEQ ID NO: 251555 - DNA, 25 bp, Probe Sequence
gtcttgccaatggtttccatcactc

SEQ ID NO: 251556 - DNA, 25 bp, Probe Sequence
gtctggtccatgttggtctcatacc

SEQ ID NO: 251557 - DNA, 25 bp, Probe Sequence
gtctgcagctccaggtacatatcac

SEQ ID NO: 251558 - DNA, 25 bp, Probe Sequence
gtccgtctttgtcaataacatggtg

SEQ ID NO: 251559 - DNA, 25 bp, Probe Sequence
gtccgagtttgtctgtaacctgtca

SEQ ID NO: 251560 - DNA, 25 bp, Probe Sequence
gtcttgcgttttctaaatcaatgct

SEQ ID NO: 251561 - DNA, 25 bp, Probe Sequence
gtctcgtttttggctaattgattgt

SEQ ID NO: 251562 - DNA, 25 bp, Probe Sequence
tgtccgtttaacacgttgcttgttt

SEQ ID NO: 251563 - DNA, 25 bp, Probe Sequence
gtccttttaagcactggtaatttct

SEQ ID NO: 251564 - DNA, 25 bp, Probe Sequence
gtcctttctagatactgtaactttt

SEQ ID NO: 251565 - DNA, 25 bp, Probe Sequence
gtctctttttgatcaaccaattttt

SEQ ID NO: 251566 - DNA, 25 bp, Probe Sequence
gtcttctatttggcaaacagcaatg

SEQ ID NO: 251567 - DNA, 25 bp, Probe Sequence
gtctctctagttgaaccctgggaac

SEQ ID NO: 251568 - DNA, 25 bp, Probe Sequence
gtcctctagataaaacacccgatta

SEQ ID NO: 251569 - DNA, 25 bp, Probe Sequence
gtctctgctttaatcaggacaccgt

SEQ ID NO: 251570 - DNA, 25 bp, Probe Sequence
gtcttgcctgttagcatgaagcttc

SEQ ID NO: 251571 - DNA, 25 bp, Probe Sequence
gtctgatgcatccttgatggcaagc

SEQ ID NO: 251572 - DNA, 25 bp, Probe Sequence
gtctagctcctttggatgcagtcct

SEQ ID NO: 251573 - DNA, 25 bp, Probe Sequence
gtctaggcactaagggagtttgggg

SEQ ID NO: 251574 - DNA, 25 bp, Probe Sequence
gtctagagcctcttggggaaggggc

SEQ ID NO: 251575 - DNA, 25 bp, Probe Sequence
gtctaggccatctgagtgtgacaag

SEQ ID NO: 251576 - DNA, 25 bp, Probe Sequence
gtcttgctcctatggagtcacataa

SEQ ID NO: 251577 - DNA, 25 bp, Probe Sequence
gtcttgcctataagctaatatcata

SEQ ID NO: 251578 - DNA, 25 bp, Probe Sequence
gtcttctcttacttaatacataacc

SEQ ID NO: 251579 - DNA, 25 bp, Probe Sequence
gtcttctcactaaatactacaaaat

SEQ ID NO: 251580 - DNA, 25 bp, Probe Sequence
gtcttctaaaaagccacgacatgaa

SEQ ID NO: 251581 - DNA, 25 bp, Probe Sequence
gtctatcttaagaagccctggccaa

SEQ ID NO: 251582 - DNA, 25 bp, Probe Sequence
gtctgtttacagaaatttgctgtta

SEQ ID NO: 251583 - DNA, 25 bp, Probe Sequence
gtctggcctacagaatgcggcctct

SEQ ID NO: 251584 - DNA, 25 bp, Probe Sequence
gtctgggaactttaggatcctctag

SEQ ID NO: 251585 - DNA, 25 bp, Probe Sequence
gtctggaaagtttccgaccctggct

SEQ ID NO: 251586 - DNA, 25 bp, Probe Sequence
gtgccgaaagagcactggactccgg

SEQ ID NO: 251587 - DNA, 25 bp, Probe Sequence
gtctcagagcaggggagtggcttcc

SEQ ID NO: 251588 - DNA, 25 bp, Probe Sequence
gtctcactaggcatgctgttgtaca

SEQ ID NO: 251589 - DNA, 25 bp, Probe Sequence
gtctcactaggcatgctgttgtaca

SEQ ID NO: 251590 - DNA, 25 bp, Probe Sequence
gtctcatctcattcgtctgattgga

SEQ ID NO: 251591 - DNA, 25 bp, Probe Sequence
gtcttctgcatcagattattgcaac

SEQ ID NO: 251592 - DNA, 25 bp, Probe Sequence
gtctttaggtacaattcatacctcg

SEQ ID NO: 251593 - DNA, 25 bp, Probe Sequence
gtctttctggtcctttctggaccag

SEQ ID NO: 251594 - DNA, 25 bp, Probe Sequence
gtctaattgcgttgtttgtaactca

SEQ ID NO: 251595 - DNA, 25 bp, Probe Sequence
gtctcatagatgctccttttgacct

SEQ ID NO: 251596 - DNA, 25 bp, Probe Sequence
gtcttctcatgactccttgttacac

SEQ ID NO: 251597 - DNA, 25 bp, Probe Sequence
gtctctctcatactgggtttaactc

SEQ ID NO: 251598 - DNA, 25 bp, Probe Sequence
gtctcatcgtctcggggggagacct

SEQ ID NO: 251599 - DNA, 25 bp, Probe Sequence
gtcttctgtctgctgtgtgggaagc

SEQ ID NO: 251600 - DNA, 25 bp, Probe Sequence
gtcttcattatgagagcaggagaga

SEQ ID NO: 251601 - DNA, 25 bp, Probe Sequence
gtctatcttatgccagaagacaaga

SEQ ID NO: 251602 - DNA, 25 bp, Probe Sequence
gtctacagtgagtctgagatggcac

SEQ ID NO: 251603 - DNA, 25 bp, Probe Sequence
gtctacaagaacgagtgcgccttct

SEQ ID NO: 251604 - DNA, 25 bp, Probe Sequence
gtctacatgggcaaagtgaccttct

SEQ ID NO: 251605 - DNA, 25 bp, Probe Sequence
gtctactgttcacgaaatcctgtgc

SEQ ID NO: 251606 - DNA, 25 bp, Probe Sequence
gtctacatgtacgtgttcatcctgg

SEQ ID NO: 251607 - DNA, 25 bp, Probe Sequence
gtctacatctagtgttacttttaat

SEQ ID NO: 251608 - DNA, 25 bp, Probe Sequence
gtcgtatccaaaataacctttaatg

SEQ ID NO: 251609 - DNA, 25 bp, Probe Sequence
gtctttacataaattgttcatatta

SEQ ID NO: 251610 - DNA, 25 bp, Probe Sequence
gtctttatcattctatgttattatt

SEQ ID NO: 251611 - DNA, 25 bp, Probe Sequence
gtctcgtactggatatacgttaatt

SEQ ID NO: 251612 - DNA, 25 bp, Probe Sequence
gtctcgtagtcgatctaggtcaaat

SEQ ID NO: 251613 - DNA, 25 bp, Probe Sequence
gtctggatttctcttgggatctaac

SEQ ID NO: 251614 - DNA, 25 bp, Probe Sequence
gtcttattttcatcggagttaatcc

SEQ ID NO: 251615 - DNA, 25 bp, Probe Sequence
gtcttattgtttctctactaagaac

SEQ ID NO: 251616 - DNA, 25 bp, Probe Sequence
gtcttatttcttctcatcattaacg

SEQ ID NO: 251617 - DNA, 25 bp, Probe Sequence
gtctctctttttcttgattagtctg

SEQ ID NO: 251618 - DNA, 25 bp, Probe Sequence
gtctgtgattttccagggtttggtg

SEQ ID NO: 251619 - DNA, 25 bp, Probe Sequence
gtctgtgtttcgcaaaagttggaga

SEQ ID NO: 251620 - DNA, 25 bp, Probe Sequence
gtcgtggtacttttcaacgtggcag

SEQ ID NO: 251621 - DNA, 25 bp, Probe Sequence
gtcgtagggcttataaagtggaata

SEQ ID NO: 251622 - DNA, 25 bp, Probe Sequence
gtcggggtgtctatgcaaaggaagc

SEQ ID NO: 251623 - DNA, 25 bp, Probe Sequence
gtcgggagtttgagaccagcctggc

SEQ ID NO: 251624 - DNA, 25 bp, Probe Sequence
gtctggatgatgaggtaccccacgg

SEQ ID NO: 251625 - DNA, 25 bp, Probe Sequence
gtcggcatgtctaagtaccaggaag

SEQ ID NO: 251626 - DNA, 25 bp, Probe Sequence
gtcggcatgtctaagtaccaggaag

SEQ ID NO: 251627 - DNA, 25 bp, Probe Sequence
gtgcgaagtctggtaaggacgaagc

SEQ ID NO: 251628 - DNA, 25 bp, Probe Sequence
gtctcagagatctgtagggccgagg

SEQ ID NO: 251629 - DNA, 25 bp, Probe Sequence
gtcctaatcaggaatgacccggaag

SEQ ID NO: 251630 - DNA, 25 bp, Probe Sequence
gtctctgaagacctgatgacccagc

SEQ ID NO: 251631 - DNA, 25 bp, Probe Sequence
gtctgacacagacccatgacatgtc

SEQ ID NO: 251632 - DNA, 25 bp, Probe Sequence
gtctgcaattcactgccaatgctct

SEQ ID NO: 251633 - DNA, 25 bp, Probe Sequence
gtctactcatcattgcaggcgttta

SEQ ID NO: 251634 - DNA, 25 bp, Probe Sequence
gtctcaccacagacgtctttgctaa

SEQ ID NO: 251635 - DNA, 25 bp, Probe Sequence
gtctcacgcaagttttatactctaa

SEQ ID NO: 251636 - DNA, 25 bp, Probe Sequence
gtctcacgcaagttttatactctaa

SEQ ID NO: 251637 - DNA, 25 bp, Probe Sequence
gtctcccacagttgtataaattgga

SEQ ID NO: 251638 - DNA, 25 bp, Probe Sequence
gtctgggccaccttcagaaggtgga

SEQ ID NO: 251639 - DNA, 25 bp, Probe Sequence
gtcggccgacggacataaggagaca

SEQ ID NO: 251640 - DNA, 25 bp, Probe Sequence
gtcgtcatcgacatatacaggtgtg

SEQ ID NO: 251641 - DNA, 25 bp, Probe Sequence
gtctttctgatgagtacgtgtcggc

SEQ ID NO: 251642 - DNA, 25 bp, Probe Sequence
gtctttctcttaatatttgctctgg

SEQ ID NO: 251643 - DNA, 25 bp, Probe Sequence
gtctttgctcttagaattgtcactc

SEQ ID NO: 251644 - DNA, 25 bp, Probe Sequence
gtctccgattattaggtgatcaccc

SEQ ID NO: 251645 - DNA, 25 bp, Probe Sequence
gtccctagaaaactgttaagtgcca

SEQ ID NO: 251646 - DNA, 25 bp, Probe Sequence
gtctcctaagacagagttagagtca

SEQ ID NO: 251647 - DNA, 25 bp, Probe Sequence
gtctttaatgacacaatatatctat

SEQ ID NO: 251648 - DNA, 25 bp, Probe Sequence
gtctttaatagcagcatgagttata

SEQ ID NO: 251649 - DNA, 25 bp, Probe Sequence
gtctattattagagtcacctatgac

SEQ ID NO: 251650 - DNA, 25 bp, Probe Sequence
gtctattcataagaaccccaacaca

SEQ ID NO: 251651 - DNA, 25 bp, Probe Sequence
gtcttagcaggagaatggcccaaac

SEQ ID NO: 251652 - DNA, 25 bp, Probe Sequence
gtctacacaggaaactgtgcccact

SEQ ID NO: 251653 - DNA, 25 bp, Probe Sequence
gtctgacaaggacccgtgtcacatc

SEQ ID NO: 251654 - DNA, 25 bp, Probe Sequence
gtctatgacaagttcagcgtgggag

SEQ ID NO: 251655 - DNA, 25 bp, Probe Sequence
gtctttcttagtgcctgtgtggatt

SEQ ID NO: 251656 - DNA, 25 bp, Probe Sequence
gtctttttagcattcctttctgctt

SEQ ID NO: 251657 - DNA, 25 bp, Probe Sequence
gtctattttatatctgttttgctgt

SEQ ID NO: 251658 - DNA, 25 bp, Probe Sequence
gtcttttgtaattctggctttctct

SEQ ID NO: 251659 - DNA, 25 bp, Probe Sequence
gtctttgtgttctgtggtacttgct

SEQ ID NO: 251660 - DNA, 25 bp, Probe Sequence
gtctggatggttttatagcaacttt

SEQ ID NO: 251661 - DNA, 25 bp, Probe Sequence
gtctgttgtctttataggaaatttg

SEQ ID NO: 251662 - DNA, 25 bp, Probe Sequence
gtctttgtgctttaatgcactcaat

SEQ ID NO: 251663 - DNA, 25 bp, Probe Sequence
gtcttatgtgtcaaaagtcctagga

SEQ ID NO: 251664 - DNA, 25 bp, Probe Sequence
gtctatgcggacaaaagcctccaaa

SEQ ID NO: 251665 - DNA, 25 bp, Probe Sequence
gtctgcgaggcactaaagttcacaa

SEQ ID NO: 251666 - DNA, 25 bp, Probe Sequence
gtcttaagcctacagtatcagatca

SEQ ID NO: 251667 - DNA, 25 bp, Probe Sequence
gtctcgtacctacagatatgtgcac

SEQ ID NO: 251668 - DNA, 25 bp, Probe Sequence
gtctcattagcctgtgactctgtga

SEQ ID NO: 251669 - DNA, 25 bp, Probe Sequence
gtctattatagctgagcaatctgtg

SEQ ID NO: 251670 - DNA, 25 bp, Probe Sequence
gtctctgtgagactcgagaactttc

SEQ ID NO: 251671 - DNA, 25 bp, Probe Sequence
gtctcaatggatctagaacttcatc

SEQ ID NO: 251672 - DNA, 25 bp, Probe Sequence
gtctggtcagatctagttttatgca

SEQ ID NO: 251673 - DNA, 25 bp, Probe Sequence
gtctgtgtcagtcggggatttggga

SEQ ID NO: 251674 - DNA, 25 bp, Probe Sequence
gtctggatcccgaggtatggcagag

SEQ ID NO: 251675 - DNA, 25 bp, Probe Sequence
gtccatgaacccaggttctcactct

SEQ ID NO: 251676 - DNA, 25 bp, Probe Sequence
gtctgtaaggtcatgtgcttccacc

SEQ ID NO: 251677 - DNA, 25 bp, Probe Sequence
gtctttgaagtcttatgtattatcc

SEQ ID NO: 251678 - DNA, 25 bp, Probe Sequence
gtctatttagtgtgcatgtttttcc

SEQ ID NO: 251679 - DNA, 25 bp, Probe Sequence
gtctgtgccatggatttcgtttttc

SEQ ID NO: 251680 - DNA, 25 bp, Probe Sequence
gtctgtgccatttgcctggatgaat

SEQ ID NO: 251681 - DNA, 25 bp, Probe Sequence
gtctttgcatttctgcgaaagatca

SEQ ID NO: 251682 - DNA, 25 bp, Probe Sequence
gtctctccaggatcgcatgaaagaa

SEQ ID NO: 251683 - DNA, 25 bp, Probe Sequence
gtctttcagctgtgactgcaggaag

SEQ ID NO: 251684 - DNA, 25 bp, Probe Sequence
gtcttagcaatgttgatctgactca

SEQ ID NO: 251685 - DNA, 25 bp, Probe Sequence
gtcttatcactggtcactgagtctg

SEQ ID NO: 251686 - DNA, 25 bp, Probe Sequence
gtcttagcatttactgtagttggag

SEQ ID NO: 251687 - DNA, 25 bp, Probe Sequence
gtctcttcaaatacgtatggactgg

SEQ ID NO: 251688 - DNA, 25 bp, Probe Sequence
gtcttatgctaaacggtggaatgta

SEQ ID NO: 251689 - DNA, 25 bp, Probe Sequence
gtcttttaagcctgggtcatggaac

SEQ ID NO: 251690 - DNA, 25 bp, Probe Sequence
gtctttatacgcttaggctctctgg

SEQ ID NO: 251691 - DNA, 25 bp, Probe Sequence
gtctaaaagcagcaaggccgtggtg

SEQ ID NO: 251692 - DNA, 25 bp, Probe Sequence
tgaggcccaaggcaaaccggagctg

SEQ ID NO: 251693 - DNA, 25 bp, Probe Sequence
gtctgtggcaaagagccccgaagct

SEQ ID NO: 251694 - DNA, 25 bp, Probe Sequence
gtctcggaaaggtcactacgatctt

SEQ ID NO: 251695 - DNA, 25 bp, Probe Sequence
gtctcggaaggaaattccgtctcct

SEQ ID NO: 251696 - DNA, 25 bp, Probe Sequence
gtcctggaaggaattataatcccca

SEQ ID NO: 251697 - DNA, 25 bp, Probe Sequence
gtctgctgataaaatatttaacccc

SEQ ID NO: 251698 - DNA, 25 bp, Probe Sequence
gtctcagatcaagtaattccttcac

SEQ ID NO: 251699 - DNA, 25 bp, Probe Sequence
gtctctgatcaagcagattccacga

SEQ ID NO: 251700 - DNA, 25 bp, Probe Sequence
gtctgctggatcaacagaatcccga

SEQ ID NO: 251701 - DNA, 25 bp, Probe Sequence
gtctctgttggatgaacccaatccc

SEQ ID NO: 251702 - DNA, 25 bp, Probe Sequence
gtctgcttcttgtaaaaacctgaac

SEQ ID NO: 251703 - DNA, 25 bp, Probe Sequence
gtctcttctcatcccaaaacaatgc

SEQ ID NO: 251704 - DNA, 25 bp, Probe Sequence
gtctctttcacctaataaatacaga

SEQ ID NO: 251705 - DNA, 25 bp, Probe Sequence
gtctttctatactgtggactaatga

SEQ ID NO: 251706 - DNA, 25 bp, Probe Sequence
gtcgagtcaaactgtgggattctga

SEQ ID NO: 251707 - DNA, 25 bp, Probe Sequence
gtctgttcaaaccggcacggtctga

SEQ ID NO: 251708 - DNA, 25 bp, Probe Sequence
gtctttagtgtccaggctctgttta

SEQ ID NO: 251709 - DNA, 25 bp, Probe Sequence
gtctatataagcagaggctcgttta

SEQ ID NO: 251710 - DNA, 25 bp, Probe Sequence
gtctatgatagagccgagctcgttt

SEQ ID NO: 251711 - DNA, 25 bp, Probe Sequence
gtctatctatgatcaccgtgctttg

SEQ ID NO: 251712 - DNA, 25 bp, Probe Sequence
gtctgcacttgagttcacttgagtt

SEQ ID NO: 251713 - DNA, 25 bp, Probe Sequence
gtctaattgaatacagcttgctctt

SEQ ID NO: 251714 - DNA, 25 bp, Probe Sequence
gtctgaatgttcacatgcatattta

SEQ ID NO: 251715 - DNA, 25 bp, Probe Sequence
gtctagtttcattcattctttcagt

SEQ ID NO: 251716 - DNA, 25 bp, Probe Sequence
gtgctgaggttttagcttttctatg

SEQ ID NO: 251717 - DNA, 25 bp, Probe Sequence
gtctggcgtgatcaacattttgtta

SEQ ID NO: 251718 - DNA, 25 bp, Probe Sequence
gtctgggatgatttttagttgttac

SEQ ID NO: 251719 - DNA, 25 bp, Probe Sequence
gtctaccatgattatttttttaagc

SEQ ID NO: 251720 - DNA, 25 bp, Probe Sequence
gtctacctgtcaacggtttgtggag

SEQ ID NO: 251721 - DNA, 25 bp, Probe Sequence
gtctttgtggctacttgtttgtgga

SEQ ID NO: 251722 - DNA, 25 bp, Probe Sequence
gtctcattcggtgttttgggaagag

SEQ ID NO: 251723 - DNA, 25 bp, Probe Sequence
gtccagttttgtctttgggccaaga

SEQ ID NO: 251724 - DNA, 25 bp, Probe Sequence
gtcccctctggtgtttggggatgga

SEQ ID NO: 251725 - DNA, 25 bp, Probe Sequence
gtcccctctgtgagttaatgtttcc

SEQ ID NO: 251726 - DNA, 25 bp, Probe Sequence
gtcccctctgtgagttaatgtttcc

SEQ ID NO: 251727 - DNA, 25 bp, Probe Sequence
gtctcccctggatggattgtgaaat

SEQ ID NO: 251728 - DNA, 25 bp, Probe Sequence
gtctatcccaggaagatgatcgcta

SEQ ID NO: 251729 - DNA, 25 bp, Probe Sequence
gtctcataccatggagagatgcctc

SEQ ID NO: 251730 - DNA, 25 bp, Probe Sequence
gtctatgacctgaacattggcggaa

SEQ ID NO: 251731 - DNA, 25 bp, Probe Sequence
gtctgagatcaaactgcaaggcggc

SEQ ID NO: 251732 - DNA, 25 bp, Probe Sequence
gtctatgaaaatggtagcggcagca

SEQ ID NO: 251733 - DNA, 25 bp, Probe Sequence
gtctcatgggtagatagtggtgcag

SEQ ID NO: 251734 - DNA, 25 bp, Probe Sequence
gtctgctggatccgctaagggatca

SEQ ID NO: 251735 - DNA, 25 bp, Probe Sequence
gtctcaggcagggcatcattcagta

SEQ ID NO: 251736 - DNA, 25 bp, Probe Sequence
gtctgagcagctcggaattgagctt

SEQ ID NO: 251737 - DNA, 25 bp, Probe Sequence
gtctggcagatggctgagtatcagc

SEQ ID NO: 251738 - DNA, 25 bp, Probe Sequence
gtctggtgatccgatgtacaacagg

SEQ ID NO: 251739 - DNA, 25 bp, Probe Sequence
gtctggtgaccattgatgccccagg

SEQ ID NO: 251740 - DNA, 25 bp, Probe Sequence
gtctttgacaattattctgccaatg

SEQ ID NO: 251741 - DNA, 25 bp, Probe Sequence
gtctgttagagttatgtggcccatc

SEQ ID NO: 251742 - DNA, 25 bp, Probe Sequence
gtctgagtcataatatagaggccta

SEQ ID NO: 251743 - DNA, 25 bp, Probe Sequence
gtctgagtatagagagaatggcttg

SEQ ID NO: 251744 - DNA, 25 bp, Probe Sequence
gtctggagtgcgggaagggcttcgg

SEQ ID NO: 251745 - DNA, 25 bp, Probe Sequence
gtctctgttgatgggcaaggagttc

SEQ ID NO: 251746 - DNA, 25 bp, Probe Sequence
gtctgttgtatctctagtcagttca

SEQ ID NO: 251747 - DNA, 25 bp, Probe Sequence
gtctttgttcaatggtcagcttttc

SEQ ID NO: 251748 - DNA, 25 bp, Probe Sequence
gtctcctgacaaaagttacttattg

SEQ ID NO: 251749 - DNA, 25 bp, Probe Sequence
gtctcagtcacagcttttacatttt

SEQ ID NO: 251750 - DNA, 25 bp, Probe Sequence
gtctttcagctccatatttacttat

SEQ ID NO: 251751 - DNA, 25 bp, Probe Sequence
gtctattcagcttcgtttattttca

SEQ ID NO: 251752 - DNA, 25 bp, Probe Sequence
gtctttagtatactttgtatgttct

SEQ ID NO: 251753 - DNA, 25 bp, Probe Sequence
gtctttaagatgcatccatgtttcc

SEQ ID NO: 251754 - DNA, 25 bp, Probe Sequence
gtctgctgggtgtgaccatgtttcc

SEQ ID NO: 251755 - DNA, 25 bp, Probe Sequence
gtctctgggctgcagtaagccggcc

SEQ ID NO: 251756 - DNA, 25 bp, Probe Sequence
gtctctggcgtgctgaacggaggca

SEQ ID NO: 251757 - DNA, 25 bp, Probe Sequence
gtctagcctgggcaacagagcgaga

SEQ ID NO: 251758 - DNA, 25 bp, Probe Sequence
gtctggttggggaaatgacaatatg

SEQ ID NO: 251759 - DNA, 25 bp, Probe Sequence
gtctatgtatgtgtaaaacaatctg

SEQ ID NO: 251760 - DNA, 25 bp, Probe Sequence
gtctcagattgggattaacataaaa

SEQ ID NO: 251761 - DNA, 25 bp, Probe Sequence
gtctctgatgtagcttatacaaaac

SEQ ID NO: 251762 - DNA, 25 bp, Probe Sequence
gtctatgatgttgctgttcacagct

SEQ ID NO: 251763 - DNA, 25 bp, Probe Sequence
gtctatggttgtttagagcagtcaa

SEQ ID NO: 251764 - DNA, 25 bp, Probe Sequence
gtctattatctgtttaagtctcata

SEQ ID NO: 251765 - DNA, 25 bp, Probe Sequence
gtctgtattatctgtaagatctgtc

SEQ ID NO: 251766 - DNA, 25 bp, Probe Sequence
gtctggagttaaagataatctactt

SEQ ID NO: 251767 - DNA, 25 bp, Probe Sequence
gtctgtttctagaagaaacctctta

SEQ ID NO: 251768 - DNA, 25 bp, Probe Sequence
gtctttacttgaaaaactcttgatc

SEQ ID NO: 251769 - DNA, 25 bp, Probe Sequence
gtcgtatgacctagtaaactttgta

SEQ ID NO: 251770 - DNA, 25 bp, Probe Sequence
gtcgaattcctactgacaacattat

SEQ ID NO: 251771 - DNA, 25 bp, Probe Sequence
gtctaatagcctaatacaacatgta

SEQ ID NO: 251772 - DNA, 25 bp, Probe Sequence
gtctacaatgttacccagcatgctg

SEQ ID NO: 251773 - DNA, 25 bp, Probe Sequence
gtctacaatgttacccagcatgctg

SEQ ID NO: 251774 - DNA, 25 bp, Probe Sequence
gtctaacagtttgcctgctgtattt

SEQ ID NO: 251775 - DNA, 25 bp, Probe Sequence
gtctaaagattgtggttcagtttcc

SEQ ID NO: 251776 - DNA, 25 bp, Probe Sequence
gtctagaaattatggtccttgatat

SEQ ID NO: 251777 - DNA, 25 bp, Probe Sequence
gtctaaacatattaacctctctgaa

SEQ ID NO: 251778 - DNA, 25 bp, Probe Sequence
gtctgaataatgaaacacatccctg

SEQ ID NO: 251779 - DNA, 25 bp, Probe Sequence
gtctcaaaaggaaagcataactgca

SEQ ID NO: 251780 - DNA, 25 bp, Probe Sequence
gtctaaaaggtagtgtgacccaaat

SEQ ID NO: 251781 - DNA, 25 bp, Probe Sequence
gtcctaaggggatttacccacatga

SEQ ID NO: 251782 - DNA, 25 bp, Probe Sequence
gtcccaaaaggctgttcaaaatgag

SEQ ID NO: 251783 - DNA, 25 bp, Probe Sequence
gtctcccaaagaattcacatcaaaa

SEQ ID NO: 251784 - DNA, 25 bp, Probe Sequence
gtctctactaaaatgtctctacaaa

SEQ ID NO: 251785 - DNA, 25 bp, Probe Sequence
gtctgctctgatatacgtcgaacaa

SEQ ID NO: 251786 - DNA, 25 bp, Probe Sequence
gtcgtcgaactaggcctcaaaaaca

SEQ ID NO: 251787 - DNA, 25 bp, Probe Sequence
gtcgtaaaataaggcctggaacaca

SEQ ID NO: 251788 - DNA, 25 bp, Probe Sequence
gtcgtacataacttccggtaaatgc

SEQ ID NO: 251789 - DNA, 25 bp, Probe Sequence
gtggacctgacctgccgtctagaaa

SEQ ID NO: 251790 - DNA, 25 bp, Probe Sequence
gtgaactccacctccgtggaataaa

SEQ ID NO: 251791 - DNA, 25 bp, Probe Sequence
gtgcaactcaaagacctggaaaaat

SEQ ID NO: 251792 - DNA, 25 bp, Probe Sequence
gtctccaaggtctccatgtgaaaca

SEQ ID NO: 251793 - DNA, 25 bp, Probe Sequence
gtctccagaggatcttcagtaaaaa

SEQ ID NO: 251794 - DNA, 25 bp, Probe Sequence
gtctcaacagagttttccgaagaaa

SEQ ID NO: 251795 - DNA, 25 bp, Probe Sequence
gtctaactagtggtcaggcttaaaa

SEQ ID NO: 251796 - DNA, 25 bp, Probe Sequence
gtctacacggaggttgtgtttacaa

SEQ ID NO: 251797 - DNA, 25 bp, Probe Sequence
gtccaaggaggttctgttattaaag

SEQ ID NO: 251798 - DNA, 25 bp, Probe Sequence
gtcctaggactgccatcttttttaa

SEQ ID NO: 251799 - DNA, 25 bp, Probe Sequence
gtctgtaggccttgtttgttaataa

SEQ ID NO: 251800 - DNA, 25 bp, Probe Sequence
gtctgatatcccgtttctggtaata

SEQ ID NO: 251801 - DNA, 25 bp, Probe Sequence
gtcgtcaccatcatgtattggaaat

SEQ ID NO: 251802 - DNA, 25 bp, Probe Sequence
gtctgtgtacagtttttagaacatt

SEQ ID NO: 251803 - DNA, 25 bp, Probe Sequence
gtctgcttacaggtgttatttgtct

SEQ ID NO: 251804 - DNA, 25 bp, Probe Sequence
gtctttgtggggtattgttgtttct

SEQ ID NO: 251805 - DNA, 25 bp, Probe Sequence
gtctagaaggaatgtatttgttgct

SEQ ID NO: 251806 - DNA, 25 bp, Probe Sequence
gtctatacagagtcaatatattttt

SEQ ID NO: 251807 - DNA, 25 bp, Probe Sequence
gtctgatactagaaactaatttgct

SEQ ID NO: 251808 - DNA, 25 bp, Probe Sequence
gtctgtacttgtgaaacattgtgtg

SEQ ID NO: 251809 - DNA, 25 bp, Probe Sequence
gtgctgtacctttgagaacttccta

SEQ ID NO: 251810 - DNA, 25 bp, Probe Sequence
gtgctgtacctttgagaacttccta

SEQ ID NO: 251811 - DNA, 25 bp, Probe Sequence
gtctcaacactgcaaaatttcccat

SEQ ID NO: 251812 - DNA, 25 bp, Probe Sequence
gtctacaaatggcaggaaacctatc

SEQ ID NO: 251813 - DNA, 25 bp, Probe Sequence
gtctacattgggtatggaaattgtt

SEQ ID NO: 251814 - DNA, 25 bp, Probe Sequence
gtctacaaggagttctgtgactttt

SEQ ID NO: 251815 - DNA, 25 bp, Probe Sequence
gtctagcttggatatatgctacaat

SEQ ID NO: 251816 - DNA, 25 bp, Probe Sequence
gtctgagctctccaacatgattaca

SEQ ID NO: 251817 - DNA, 25 bp, Probe Sequence
gtctctggatcggaatttacctgat

SEQ ID NO: 251818 - DNA, 25 bp, Probe Sequence
gtctctgagaagtactttacctgaa

SEQ ID NO: 251819 - DNA, 25 bp, Probe Sequence
gtctggggaaaatttgacactagag

SEQ ID NO: 251820 - DNA, 25 bp, Probe Sequence
gtctgggagcaacactcgtagcgag

SEQ ID NO: 251821 - DNA, 25 bp, Probe Sequence
gtctcggaaacacagagccaggaat

SEQ ID NO: 251822 - DNA, 25 bp, Probe Sequence
gtctctggaactcgctacaaaggaa

SEQ ID NO: 251823 - DNA, 25 bp, Probe Sequence
gtcctggattccgataaaattaaag

SEQ ID NO: 251824 - DNA, 25 bp, Probe Sequence
gtctgttgcccaccatggaaattaa

SEQ ID NO: 251825 - DNA, 25 bp, Probe Sequence
gtctgttcatgccaaagtatacatt

SEQ ID NO: 251826 - DNA, 25 bp, Probe Sequence
gtctgtgtcacatccagtgattgtt

SEQ ID NO: 251827 - DNA, 25 bp, Probe Sequence
gtcgctgaacggcgtgcattatcaa

SEQ ID NO: 251828 - DNA, 25 bp, Probe Sequence
gtcggtatcggagttcttatactat

SEQ ID NO: 251829 - DNA, 25 bp, Probe Sequence
gtctgattactgcagctttgtatta

SEQ ID NO: 251830 - DNA, 25 bp, Probe Sequence
gtctgagagacctgtttgtaataat

SEQ ID NO: 251831 - DNA, 25 bp, Probe Sequence
gtctcaggcactttgttttagtaaa

SEQ ID NO: 251832 - DNA, 25 bp, Probe Sequence
gtccagaaccaatattatcgtaatt

SEQ ID NO: 251833 - DNA, 25 bp, Probe Sequence
gtcctaatcctggaattaagtacag

SEQ ID NO: 251834 - DNA, 25 bp, Probe Sequence
gtccaaacactgcagagtgaactac

SEQ ID NO: 251835 - DNA, 25 bp, Probe Sequence
gtcgccttcacacaggtgaactcgg

SEQ ID NO: 251836 - DNA, 25 bp, Probe Sequence
gtctcttgtccaagcaggtgtactt

SEQ ID NO: 251837 - DNA, 25 bp, Probe Sequence
gtctatctttgcgcatgggttgttt

SEQ ID NO: 251838 - DNA, 25 bp, Probe Sequence
gtctcctttctaatggtgcttactt

SEQ ID NO: 251839 - DNA, 25 bp, Probe Sequence
gtctctgttggccaaggacttgaca

SEQ ID NO: 251840 - DNA, 25 bp, Probe Sequence
gtctctggccagccagggactcaga

SEQ ID NO: 251841 - DNA, 25 bp, Probe Sequence
gtctcttgtcagctgtctttcagaa

SEQ ID NO: 251842 - DNA, 25 bp, Probe Sequence
gtctctggtaactctgttatggcag

SEQ ID NO: 251843 - DNA, 25 bp, Probe Sequence
gtctctggaaaatctggatctgtct

SEQ ID NO: 251844 - DNA, 25 bp, Probe Sequence
gtctcaaaaccatcaggatcctgcc

SEQ ID NO: 251845 - DNA, 25 bp, Probe Sequence
gtccaaaatccagcagggcggtcaa

SEQ ID NO: 251846 - DNA, 25 bp, Probe Sequence
gtctcaacttcagccaaagggccaa

SEQ ID NO: 251847 - DNA, 25 bp, Probe Sequence
gtctcacctggggcctagagtggaa

SEQ ID NO: 251848 - DNA, 25 bp, Probe Sequence
gtctcactctgttgtccaggttgga

SEQ ID NO: 251849 - DNA, 25 bp, Probe Sequence
gtctactgtgtctccactgatatca

SEQ ID NO: 251850 - DNA, 25 bp, Probe Sequence
gtctactatgaaccatcctgtactc

SEQ ID NO: 251851 - DNA, 25 bp, Probe Sequence
gtctccataaaagtcctgtcaccaa

SEQ ID NO: 251852 - DNA, 25 bp, Probe Sequence
gtcccatagataaacacctacttag

SEQ ID NO: 251853 - DNA, 25 bp, Probe Sequence
gtctgtcaatgtgtaacctgatgtc

SEQ ID NO: 251854 - DNA, 25 bp, Probe Sequence
gtctatctcattgggaacctgatgg

SEQ ID NO: 251855 - DNA, 25 bp, Probe Sequence
gtctgagtattctgatatccggagg

SEQ ID NO: 251856 - DNA, 25 bp, Probe Sequence
gtctgagttgtctgtttctagaaga

SEQ ID NO: 251857 - DNA, 25 bp, Probe Sequence
gtctgtataatcattttctagaagt

SEQ ID NO: 251858 - DNA, 25 bp, Probe Sequence
gtctggagaactgctcattgcaaga

SEQ ID NO: 251859 - DNA, 25 bp, Probe Sequence
gtctgggatacgtcatattctcaac

SEQ ID NO: 251860 - DNA, 25 bp, Probe Sequence
gtctggggaagtgatcacgctcagc

SEQ ID NO: 251861 - DNA, 25 bp, Probe Sequence
gtctgcggtacgaagtcagcgcttc

SEQ ID NO: 251862 - DNA, 25 bp, Probe Sequence
gtctgaccgaagaactcggctgtga

SEQ ID NO: 251863 - DNA, 25 bp, Probe Sequence
gtctgaccgtggaacgagactcata

SEQ ID NO: 251864 - DNA, 25 bp, Probe Sequence
gtcccctgggaagggcagctggggg

SEQ ID NO: 251865 - DNA, 25 bp, Probe Sequence
gtcccaaggagaacgaaggttgaag

SEQ ID NO: 251866 - DNA, 25 bp, Probe Sequence
gtcccatggggatccaagacctgag

SEQ ID NO: 251867 - DNA, 25 bp, Probe Sequence
gtctacagtggtttacaaggccaga

SEQ ID NO: 251868 - DNA, 25 bp, Probe Sequence
gtctacactgtctactgaccagagc

SEQ ID NO: 251869 - DNA, 25 bp, Probe Sequence
gtctaccattctactgcatgacaga

SEQ ID NO: 251870 - DNA, 25 bp, Probe Sequence
gtctaccttcataacaacaatatct

SEQ ID NO: 251871 - DNA, 25 bp, Probe Sequence
gtctaccttcataacaacaatatct

SEQ ID NO: 251872 - DNA, 25 bp, Probe Sequence
gtctaccttcataacaacaatatct

SEQ ID NO: 251873 - DNA, 25 bp, Probe Sequence
gtctaccttcataacaacaatatct

SEQ ID NO: 251874 - DNA, 25 bp, Probe Sequence
gtctatgttttctactccaattcat

SEQ ID NO: 251875 - DNA, 25 bp, Probe Sequence
gtctgtttcttctattcctagacat

SEQ ID NO: 251876 - DNA, 25 bp, Probe Sequence
gtctgttttgttctgcttcagattt

SEQ ID NO: 251877 - DNA, 25 bp, Probe Sequence
gtctagtttttgccacatctgcaat

SEQ ID NO: 251878 - DNA, 25 bp, Probe Sequence
gtctcagttcactttcaagtatcat

SEQ ID NO: 251879 - DNA, 25 bp, Probe Sequence
gtctagtcatacctgccaaatatga

SEQ ID NO: 251880 - DNA, 25 bp, Probe Sequence
gtctagcagtagatcctaatggaat

SEQ ID NO: 251881 - DNA, 25 bp, Probe Sequence
gtctgaagatagatcgccatcatga

SEQ ID NO: 251882 - DNA, 25 bp, Probe Sequence
gtctgagatctggatctgcccatca

SEQ ID NO: 251883 - DNA, 25 bp, Probe Sequence
gtctgagatctggatctgcccatca

SEQ ID NO: 251884 - DNA, 25 bp, Probe Sequence
gtctgagtgtgaggtgccactcatg

SEQ ID NO: 251885 - DNA, 25 bp, Probe Sequence
gtctgcagttccttgctaatctgag

SEQ ID NO: 251886 - DNA, 25 bp, Probe Sequence
gtctgatgtgtcattaagtgcagaa

SEQ ID NO: 251887 - DNA, 25 bp, Probe Sequence
gtctgatgtgtcattaagtgcagaa

SEQ ID NO: 251888 - DNA, 25 bp, Probe Sequence
gtctagtgatcttgtaaactcagca

SEQ ID NO: 251889 - DNA, 25 bp, Probe Sequence
gtctcaagtataaaaaccagagttc

SEQ ID NO: 251890 - DNA, 25 bp, Probe Sequence
gtctcaattataaacaacaaacact

SEQ ID NO: 251891 - DNA, 25 bp, Probe Sequence
gtctgtcaacaaatacaccaaaacc

SEQ ID NO: 251892 - DNA, 25 bp, Probe Sequence
gtctgcttactattcacatcagaaa

SEQ ID NO: 251893 - DNA, 25 bp, Probe Sequence
gtctgctggagcaagtgacatcaca

SEQ ID NO: 251894 - DNA, 25 bp, Probe Sequence
gtctctggccaagacacatcaggga

SEQ ID NO: 251895 - DNA, 25 bp, Probe Sequence
gtctcagaactgaataactgcagtg

SEQ ID NO: 251896 - DNA, 25 bp, Probe Sequence
gtctctgaacatcctaaatattggt

SEQ ID NO: 251897 - DNA, 25 bp, Probe Sequence
gtctcagaccatcttgtgagattgt

SEQ ID NO: 251898 - DNA, 25 bp, Probe Sequence
gtctcacactgactgttgtatttca

SEQ ID NO: 251899 - DNA, 25 bp, Probe Sequence
gtctcagatcattttcagtgattcc

SEQ ID NO: 251900 - DNA, 25 bp, Probe Sequence
gtctcagcatgttgactgggattgg

SEQ ID NO: 251901 - DNA, 25 bp, Probe Sequence
gtctcacagttgctgtctattaatt

SEQ ID NO: 251902 - DNA, 25 bp, Probe Sequence
gtctccgttttgtcttgtaaatgcc

SEQ ID NO: 251903 - DNA, 25 bp, Probe Sequence
gtctccggttccaggactgagagcc

SEQ ID NO: 251904 - DNA, 25 bp, Probe Sequence
gtctacgtgaaccagggggagatcc

SEQ ID NO: 251905 - DNA, 25 bp, Probe Sequence
gtcgtcctacaccaggtgtggaaga

SEQ ID NO: 251906 - DNA, 25 bp, Probe Sequence
gtctctttaaagctgctatgtgaac

SEQ ID NO: 251907 - DNA, 25 bp, Probe Sequence
gtctgccttcagtggtctgaggtcc

SEQ ID NO: 251908 - DNA, 25 bp, Probe Sequence
gtctccatgtggtttttgggtgttt

SEQ ID NO: 251909 - DNA, 25 bp, Probe Sequence
gtctctatgggtacctcagtggagt

SEQ ID NO: 251910 - DNA, 25 bp, Probe Sequence
gtctcaagacagtgccctgtgggtt

SEQ ID NO: 251911 - DNA, 25 bp, Probe Sequence
gtctgaagagtgggcctcgggtgcc

SEQ ID NO: 251912 - DNA, 25 bp, Probe Sequence
gtctaagagcgctcaggctgggtgc

SEQ ID NO: 251913 - DNA, 25 bp, Probe Sequence
gtctcttgaggctcaggcggagaag

SEQ ID NO: 251914 - DNA, 25 bp, Probe Sequence
gtctggcgacagtggtggaggaatg

SEQ ID NO: 251915 - DNA, 25 bp, Probe Sequence
gtcgtggatcactacaaggaggaga

SEQ ID NO: 251916 - DNA, 25 bp, Probe Sequence
gtctgtttatgctaaatctggccaa

SEQ ID NO: 251917 - DNA, 25 bp, Probe Sequence
gtctgctctgtttaattctgctgtc

SEQ ID NO: 251918 - DNA, 25 bp, Probe Sequence
gtctgtgctctgactgcaatttttc

SEQ ID NO: 251919 - DNA, 25 bp, Probe Sequence
gtcgatgcctttgattttattcgca

SEQ ID NO: 251920 - DNA, 25 bp, Probe Sequence
gtcgactttattcttctactctgaa

SEQ ID NO: 251921 - DNA, 25 bp, Probe Sequence
gtctgacttgtaccaattctagcac

SEQ ID NO: 251922 - DNA, 25 bp, Probe Sequence
gtctgtcttgttcaagttcagacga

SEQ ID NO: 251923 - DNA, 25 bp, Probe Sequence
gtctgtgttcttaatatgtctctat

SEQ ID NO: 251924 - DNA, 25 bp, Probe Sequence
gtctgtgtgactgtcatgcaggcct

SEQ ID NO: 251925 - DNA, 25 bp, Probe Sequence
gtctctgtctctagatatgcaagtt

SEQ ID NO: 251926 - DNA, 25 bp, Probe Sequence
gtctgagccctgaagagccagctcc

SEQ ID NO: 251927 - DNA, 25 bp, Probe Sequence
gtctgcgtccattagagcacagtcc

SEQ ID NO: 251928 - DNA, 25 bp, Probe Sequence
gtctgaggatgttcgacagcgtcac

SEQ ID NO: 251929 - DNA, 25 bp, Probe Sequence
gtctaagatgtaatgagtgctctct

SEQ ID NO: 251930 - DNA, 25 bp, Probe Sequence
gtctaattgcatattctcttcagag

SEQ ID NO: 251931 - DNA, 25 bp, Probe Sequence
gtctacatctccatatgttgtagtg

SEQ ID NO: 251932 - DNA, 25 bp, Probe Sequence
gtctcactgcctagtggttgtggct

SEQ ID NO: 251933 - DNA, 25 bp, Probe Sequence
gtctcttgctgcagatcagttgctg

SEQ ID NO: 251934 - DNA, 25 bp, Probe Sequence
gtctcctgtgcagaagtttgagggt

SEQ ID NO: 251935 - DNA, 25 bp, Probe Sequence
gtctcatcggcactaatgatctgga

SEQ ID NO: 251936 - DNA, 25 bp, Probe Sequence
gtcgcatcgctaatgatatttgcca

SEQ ID NO: 251937 - DNA, 25 bp, Probe Sequence
gtctcatcagtgatctttcaacagt

SEQ ID NO: 251938 - DNA, 25 bp, Probe Sequence
gtctgcagcacaacttttaacaaag

SEQ ID NO: 251939 - DNA, 25 bp, Probe Sequence
gtctcaggggtattgctaagccaag

SEQ ID NO: 251940 - DNA, 25 bp, Probe Sequence
gtctcatggaagcactggaggataa

SEQ ID NO: 251941 - DNA, 25 bp, Probe Sequence
gtctgcaggcaccaggctgggatga

SEQ ID NO: 251942 - DNA, 25 bp, Probe Sequence
gtctgcaggacgaggatggctacag

SEQ ID NO: 251943 - DNA, 25 bp, Probe Sequence
gtctggaaccaccgagtgctgaagg

SEQ ID NO: 251944 - DNA, 25 bp, Probe Sequence
gtctggacaacagagatgccatgat

SEQ ID NO: 251945 - DNA, 25 bp, Probe Sequence
gtctgggcaacccagatctaacccc

SEQ ID NO: 251946 - DNA, 25 bp, Probe Sequence
gtctgttgaactgcactctaaggcc

SEQ ID NO: 251947 - DNA, 25 bp, Probe Sequence
gtctgggaagagactctctaagtcc

SEQ ID NO: 251948 - DNA, 25 bp, Probe Sequence
gtccggaaaactggcacgaccatcg

SEQ ID NO: 251949 - DNA, 25 bp, Probe Sequence
gtctcggacagcgaatgcgccgaca

SEQ ID NO: 251950 - DNA, 25 bp, Probe Sequence
tgtcacgtccactaatcggcaaaag

SEQ ID NO: 251951 - DNA, 25 bp, Probe Sequence
gtctcgatgccataatcagaacaca

SEQ ID NO: 251952 - DNA, 25 bp, Probe Sequence
gtctcgatgccataatcagaacaca

SEQ ID NO: 251953 - DNA, 25 bp, Probe Sequence
gtctcaactgcataatagatacata

SEQ ID NO: 251954 - DNA, 25 bp, Probe Sequence
gtctcacaccactaatggaagctgc

SEQ ID NO: 251955 - DNA, 25 bp, Probe Sequence
gtctcattctgcttcaggggagctg

SEQ ID NO: 251956 - DNA, 25 bp, Probe Sequence
gtctcttgctcatagcaagcctgtg

SEQ ID NO: 251957 - DNA, 25 bp, Probe Sequence
gtctctgttgattccaagtttccta

SEQ ID NO: 251958 - DNA, 25 bp, Probe Sequence
gtctctgatagttattggtatttct

SEQ ID NO: 251959 - DNA, 25 bp, Probe Sequence
gtctcttactgtactgtctatctgc

SEQ ID NO: 251960 - DNA, 25 bp, Probe Sequence
gtctctctgacgagtctcagatcat

SEQ ID NO: 251961 - DNA, 25 bp, Probe Sequence
gtctctgcagttaagtgccatgaaa

SEQ ID NO: 251962 - DNA, 25 bp, Probe Sequence
gtcgcgcggatcatgatgccaacct

SEQ ID NO: 251963 - DNA, 25 bp, Probe Sequence
gtctggaggctgttagctaacttgc

SEQ ID NO: 251964 - DNA, 25 bp, Probe Sequence
gtcgggactgtggcacttatttctg

SEQ ID NO: 251965 - DNA, 25 bp, Probe Sequence
gtcggcagactggtgacttcacttt

SEQ ID NO: 251966 - DNA, 25 bp, Probe Sequence
gtcggcagactggtgacttcacttt

SEQ ID NO: 251967 - DNA, 25 bp, Probe Sequence
gtctcacagttggtaggtgcctgtt

SEQ ID NO: 251968 - DNA, 25 bp, Probe Sequence
gtctccatctattgatgagggtctt

SEQ ID NO: 251969 - DNA, 25 bp, Probe Sequence
gtctccactgatatcagcagtgacc

SEQ ID NO: 251970 - DNA, 25 bp, Probe Sequence
gtctgctaatgaagccctgtggcct

SEQ ID NO: 251971 - DNA, 25 bp, Probe Sequence
gtctgctaaataaacatgtgccctc

SEQ ID NO: 251972 - DNA, 25 bp, Probe Sequence
gtctccaaagaagatagctctctga

SEQ ID NO: 251973 - DNA, 25 bp, Probe Sequence
gtcccaaagaggctactgtaaggca

SEQ ID NO: 251974 - DNA, 25 bp, Probe Sequence
gtcccagaggagtgaatcctaggcc

SEQ ID NO: 251975 - DNA, 25 bp, Probe Sequence
gtcccaggcaagcggattgctttgc

SEQ ID NO: 251976 - DNA, 25 bp, Probe Sequence
gtcgccaaaactagtgttctttatt

SEQ ID NO: 251977 - DNA, 25 bp, Probe Sequence
gtcgcttaaagaagctggttgttaa

SEQ ID NO: 251978 - DNA, 25 bp, Probe Sequence
gtctgtttcccaagctagactgtgt

SEQ ID NO: 251979 - DNA, 25 bp, Probe Sequence
gtctgtctttccttatagaatgtgg

SEQ ID NO: 251980 - DNA, 25 bp, Probe Sequence
gtcgtgttacagttatacaatgatt

SEQ ID NO: 251981 - DNA, 25 bp, Probe Sequence
gtcgatgttcgatgttgtctgtcag

SEQ ID NO: 251982 - DNA, 25 bp, Probe Sequence
gtctgtgattccgggttgctgtgac

SEQ ID NO: 251983 - DNA, 25 bp, Probe Sequence
gtctctcatgcttcttgagttgctt

SEQ ID NO: 251984 - DNA, 25 bp, Probe Sequence
gtctcacatctacacgtggcttgga

SEQ ID NO: 251985 - DNA, 25 bp, Probe Sequence
gtctcagtctcccaagtagctggga

SEQ ID NO: 251986 - DNA, 25 bp, Probe Sequence
gtctgagatggtgcacaaagctgtg

SEQ ID NO: 251987 - DNA, 25 bp, Probe Sequence
gtctgagatggcaccactagcactc

SEQ ID NO: 251988 - DNA, 25 bp, Probe Sequence
gtctaaggacactttcagcagcctc

SEQ ID NO: 251989 - DNA, 25 bp, Probe Sequence
gtctcttggagggtgtcagcagccc

SEQ ID NO: 251990 - DNA, 25 bp, Probe Sequence
gtctctggtgtagctgatgatccga

SEQ ID NO: 251991 - DNA, 25 bp, Probe Sequence
gtctcaggaataagctggatctcca

SEQ ID NO: 251992 - DNA, 25 bp, Probe Sequence
gtcggatgaacacgtgggctccaag

SEQ ID NO: 251993 - DNA, 25 bp, Probe Sequence
gtctggagaaacgtggatgtggcac

SEQ ID NO: 251994 - DNA, 25 bp, Probe Sequence
gtctccaggaaggtggcgctgggct

SEQ ID NO: 251995 - DNA, 25 bp, Probe Sequence
gtctccaggaaggtggcgctgggct

SEQ ID NO: 251996 - DNA, 25 bp, Probe Sequence
gtctccacgaaggcgtcctggagtc

SEQ ID NO: 251997 - DNA, 25 bp, Probe Sequence
gtctctgcagtgtaaggtccttagc

SEQ ID NO: 251998 - DNA, 25 bp, Probe Sequence
gtctccaggagaggggtctatccac

SEQ ID NO: 251999 - DNA, 25 bp, Probe Sequence
gtcccagggaatctggctactcttc

SEQ ID NO: 252000 - DNA, 25 bp, Probe Sequence
gtcgccaggcgttatggggatttct

SEQ ID NO: 252001 - DNA, 25 bp, Probe Sequence
gtctcaaggttatagggatggccca

SEQ ID NO: 252002 - DNA, 25 bp, Probe Sequence
gtctcaagcatattaacagggaggg

SEQ ID NO: 252003 - DNA, 25 bp, Probe Sequence
gtctcatcaaggtgaacgggcggcc

SEQ ID NO: 252004 - DNA, 25 bp, Probe Sequence
gtcgcaataagacgcacacgttgtg

SEQ ID NO: 252005 - DNA, 25 bp, Probe Sequence
gtctcaggccgaggccactgtagtg

SEQ ID NO: 252006 - DNA, 25 bp, Probe Sequence
gtccgagcacaagccaagaagtttg

SEQ ID NO: 252007 - DNA, 25 bp, Probe Sequence
tgtccaaaaaccgaatgagccatta

SEQ ID NO: 252008 - DNA, 25 bp, Probe Sequence
gtccaagcaacagcctttgaatgta

SEQ ID NO: 252009 - DNA, 25 bp, Probe Sequence
gtccaaggatcatctccggaatgga

SEQ ID NO: 252010 - DNA, 25 bp, Probe Sequence
tttagagttgagttcccgagagggc

SEQ ID NO: 252011 - DNA, 25 bp, Probe Sequence
tttaacagggtcggtggtgagggct

SEQ ID NO: 252012 - DNA, 25 bp, Probe Sequence
gtccaacaggggttgggaggggcat

SEQ ID NO: 252013 - DNA, 25 bp, Probe Sequence
gtctcaacatctgtgttggggagag

SEQ ID NO: 252014 - DNA, 25 bp, Probe Sequence
gtctcgatccaggagtagggagcgg

SEQ ID NO: 252015 - DNA, 25 bp, Probe Sequence
gtctgcagtctccgagacggggacg

SEQ ID NO: 252016 - DNA, 25 bp, Probe Sequence
gtcggttcgtggagaggagaggtgc

SEQ ID NO: 252017 - DNA, 25 bp, Probe Sequence
gtcgttccaggggtagaggaggcat

SEQ ID NO: 252018 - DNA, 25 bp, Probe Sequence
gtccctcgcctacttagggaggcat

SEQ ID NO: 252019 - DNA, 25 bp, Probe Sequence
gtccccacttatctgagggggatac

SEQ ID NO: 252020 - DNA, 25 bp, Probe Sequence
gtccgccagtgcatcattagggggt

SEQ ID NO: 252021 - DNA, 25 bp, Probe Sequence
gtctccagcaagggattcgggcgaa

SEQ ID NO: 252022 - DNA, 25 bp, Probe Sequence
gtctctagcaatctatgtctgggaa

SEQ ID NO: 252023 - DNA, 25 bp, Probe Sequence
gtctcatagtataccagctttggta

SEQ ID NO: 252024 - DNA, 25 bp, Probe Sequence
gtctcataaaactaatttggcttca

SEQ ID NO: 252025 - DNA, 25 bp, Probe Sequence
gtctctatataaggaattttccggt

SEQ ID NO: 252026 - DNA, 25 bp, Probe Sequence
gtctcatatatttggagtttttctg

SEQ ID NO: 252027 - DNA, 25 bp, Probe Sequence
gtctcatagtagtagtgttgctttc

SEQ ID NO: 252028 - DNA, 25 bp, Probe Sequence
gtctcatagaaggctctggtggtac

SEQ ID NO: 252029 - DNA, 25 bp, Probe Sequence
gtctcatcaacgatctgatggtttt

SEQ ID NO: 252030 - DNA, 25 bp, Probe Sequence
gtctccacagagtttatgccatatt

SEQ ID NO: 252031 - DNA, 25 bp, Probe Sequence
gtctgctacggacaatccaagccat

SEQ ID NO: 252032 - DNA, 25 bp, Probe Sequence
gtctgcaacggacagctccaaggag

SEQ ID NO: 252033 - DNA, 25 bp, Probe Sequence
gtctgcaacggacagctccaaggag

SEQ ID NO: 252034 - DNA, 25 bp, Probe Sequence
gtcgcaaagctgggatcccaatcca

SEQ ID NO: 252035 - DNA, 25 bp, Probe Sequence
gtctgaaggctgagtcccagcattc

SEQ ID NO: 252036 - DNA, 25 bp, Probe Sequence
gtctgagaggaaaggccccaagcaa

SEQ ID NO: 252037 - DNA, 25 bp, Probe Sequence
gtctgcagggaaatggtcgggagga

SEQ ID NO: 252038 - DNA, 25 bp, Probe Sequence
gtctcagggaggaaatcatgtggcg

SEQ ID NO: 252039 - DNA, 25 bp, Probe Sequence
gtgaagagcgacacaactgcctgct

SEQ ID NO: 252040 - DNA, 25 bp, Probe Sequence
gtgaagaggacttccgcaaagctgg

SEQ ID NO: 252041 - DNA, 25 bp, Probe Sequence
gtgaagtggctatcctaaactggtt

SEQ ID NO: 252042 - DNA, 25 bp, Probe Sequence
gtcgtgttctgatcactactgactt

SEQ ID NO: 252043 - DNA, 25 bp, Probe Sequence
gtcgtgttctgtgcaccacgaacgt

SEQ ID NO: 252044 - DNA, 25 bp, Probe Sequence
gtcgtggtctgagacagggaacccc

SEQ ID NO: 252045 - DNA, 25 bp, Probe Sequence
gtctcggccgcagaagcgagatgac

SEQ ID NO: 252046 - DNA, 25 bp, Probe Sequence
gtctctgggtcggtcagtgacatgt

SEQ ID NO: 252047 - DNA, 25 bp, Probe Sequence
gtctctgaggacgtcatcggaggct

SEQ ID NO: 252048 - DNA, 25 bp, Probe Sequence
gtctgcaagggaattcttgtgtgct

SEQ ID NO: 252049 - DNA, 25 bp, Probe Sequence
gtcccaggccatttttgctggctat

SEQ ID NO: 252050 - DNA, 25 bp, Probe Sequence
gtcgccgtgcctaccatggtgacca

SEQ ID NO: 252051 - DNA, 25 bp, Probe Sequence
gtccaaggcccagatgttagccaag

SEQ ID NO: 252052 - DNA, 25 bp, Probe Sequence
gtccaaccaacaggtgtaaaagtgt

SEQ ID NO: 252053 - DNA, 25 bp, Probe Sequence
gtctcccgaaaggtctaagaagagc

SEQ ID NO: 252054 - DNA, 25 bp, Probe Sequence
gtctcctgaaatgggtctgaaaaat

SEQ ID NO: 252055 - DNA, 25 bp, Probe Sequence
gtctcttcaccgtgttaacataatc

SEQ ID NO: 252056 - DNA, 25 bp, Probe Sequence
gtctgtttccagtttagtaacacct

SEQ ID NO: 252057 - DNA, 25 bp, Probe Sequence
gtctgtgtcttctatttggcaaaca

SEQ ID NO: 252058 - DNA, 25 bp, Probe Sequence
gtctctgtctcaaatttgtggtcca

SEQ ID NO: 252059 - DNA, 25 bp, Probe Sequence
gtctcaggccaaatctatgctgtgg

SEQ ID NO: 252060 - DNA, 25 bp, Probe Sequence
gtccaactactaaactgggggatat

SEQ ID NO: 252061 - DNA, 25 bp, Probe Sequence
gtccaactactaaactgggggatat

SEQ ID NO: 252062 - DNA, 25 bp, Probe Sequence
gtcccctccaggagtgtgagggtag

SEQ ID NO: 252063 - DNA, 25 bp, Probe Sequence
gtcctgggggcgagatcggggtaga

SEQ ID NO: 252064 - DNA, 25 bp, Probe Sequence
gtcctggggacgtggagggtggcac

SEQ ID NO: 252065 - DNA, 25 bp, Probe Sequence
gtctctgggcaaggattggcaccgg

SEQ ID NO: 252066 - DNA, 25 bp, Probe Sequence
gtctgcctggaaggatgtacaccaa

SEQ ID NO: 252067 - DNA, 25 bp, Probe Sequence
gtctgactgggaggagtttgacaac

SEQ ID NO: 252068 - DNA, 25 bp, Probe Sequence
gtctggcttggagagtctctggagc

SEQ ID NO: 252069 - DNA, 25 bp, Probe Sequence
gtcggtgattgagagatcctgctgc

SEQ ID NO: 252070 - DNA, 25 bp, Probe Sequence
gtcggtgattgagatgatccttgct

SEQ ID NO: 252071 - DNA, 25 bp, Probe Sequence
gtctggtgttctgagtacttgattt

SEQ ID NO: 252072 - DNA, 25 bp, Probe Sequence
gtcgtgggccatgagctgactcatg

SEQ ID NO: 252073 - DNA, 25 bp, Probe Sequence
gtcgtgggagacgactaccatgcct

SEQ ID NO: 252074 - DNA, 25 bp, Probe Sequence
gtggtcggaaccaccaagatgcata

SEQ ID NO: 252075 - DNA, 25 bp, Probe Sequence
gtgttcagtgaacccaagaaatgta

SEQ ID NO: 252076 - DNA, 25 bp, Probe Sequence
gtgtacaaccccaacaaaatcttcg

SEQ ID NO: 252077 - DNA, 25 bp, Probe Sequence
gtgaagaaaaatgatcccaactttg

SEQ ID NO: 252078 - DNA, 25 bp, Probe Sequence
gtgcacccaaaactggaccagactt

SEQ ID NO: 252079 - DNA, 25 bp, Probe Sequence
gtctcttcaaagcttgacctgcaca

SEQ ID NO: 252080 - DNA, 25 bp, Probe Sequence
gtctcttggagattgttgaacgcag

SEQ ID NO: 252081 - DNA, 25 bp, Probe Sequence
tgtcctatggagcaatgtaaacgta

SEQ ID NO: 252082 - DNA, 25 bp, Probe Sequence
gtctctagtgagcacatgtacacac

SEQ ID NO: 252083 - DNA, 25 bp, Probe Sequence
gtctctataactacagataacatct

SEQ ID NO: 252084 - DNA, 25 bp, Probe Sequence
gtctctcatgaggttgcagttaaga

SEQ ID NO: 252085 - DNA, 25 bp, Probe Sequence
gtctctcagaccacagtataaccaa

SEQ ID NO: 252086 - DNA, 25 bp, Probe Sequence
gtctctcaaccatcctaagagctga

SEQ ID NO: 252087 - DNA, 25 bp, Probe Sequence
gtctctagaccaccacattgtgact

SEQ ID NO: 252088 - DNA, 25 bp, Probe Sequence
gtctctccttagctatttgatgctt

SEQ ID NO: 252089 - DNA, 25 bp, Probe Sequence
gtctcccttagattataagcactga

SEQ ID NO: 252090 - DNA, 25 bp, Probe Sequence
gtctcccagctatctataaccttag

SEQ ID NO: 252091 - DNA, 25 bp, Probe Sequence
gtctctctaggttttcaactatttc

SEQ ID NO: 252092 - DNA, 25 bp, Probe Sequence
gtcctcttggggttttgtaccatct

SEQ ID NO: 252093 - DNA, 25 bp, Probe Sequence
gtctccttaggaggtgttctaacat

SEQ ID NO: 252094 - DNA, 25 bp, Probe Sequence
gtctccttagaatacccaaatcata

SEQ ID NO: 252095 - DNA, 25 bp, Probe Sequence
gtctcctgtaagaaccctgaagttg

SEQ ID NO: 252096 - DNA, 25 bp, Probe Sequence
gtctccttggaaatccgtctagtta

SEQ ID NO: 252097 - DNA, 25 bp, Probe Sequence
gtcctcttgtaaagggtatcggtag

SEQ ID NO: 252098 - DNA, 25 bp, Probe Sequence
gtccccttcaacgaagatgacccta

SEQ ID NO: 252099 - DNA, 25 bp, Probe Sequence
gtctctcgaatcttccagagatatc

SEQ ID NO: 252100 - DNA, 25 bp, Probe Sequence
gtctccagaccgagatgaagatctc

SEQ ID NO: 252101 - DNA, 25 bp, Probe Sequence
gtctccaaccttcaggaattccgtt

SEQ ID NO: 252102 - DNA, 25 bp, Probe Sequence
tgtcccaaccctcaaagagctacgt

SEQ ID NO: 252103 - DNA, 25 bp, Probe Sequence
gtctccaacatggttaatgtggtaa

SEQ ID NO: 252104 - DNA, 25 bp, Probe Sequence
gtctcccatcaaatgtaaggtctat

SEQ ID NO: 252105 - DNA, 25 bp, Probe Sequence
gtctctctctaattaaatggatcct

SEQ ID NO: 252106 - DNA, 25 bp, Probe Sequence
gtctcctttcaaagaattgtgttgc

SEQ ID NO: 252107 - DNA, 25 bp, Probe Sequence
gtctccttttcagggatgtcgtggg

SEQ ID NO: 252108 - DNA, 25 bp, Probe Sequence
gtctccactaccgaggacacggagc

SEQ ID NO: 252109 - DNA, 25 bp, Probe Sequence
gtcgccatcatgattatctaccggg

SEQ ID NO: 252110 - DNA, 25 bp, Probe Sequence
gtctgcctagtttattgtccaagtt

SEQ ID NO: 252111 - DNA, 25 bp, Probe Sequence
gtctcctactgttatgttctccagt

SEQ ID NO: 252112 - DNA, 25 bp, Probe Sequence
gtctctcttggatgatgtttgccgt

SEQ ID NO: 252113 - DNA, 25 bp, Probe Sequence
gtctctcttggatgatgtttgccgt

SEQ ID NO: 252114 - DNA, 25 bp, Probe Sequence
gtctctacgctgtgaatattgcctg

SEQ ID NO: 252115 - DNA, 25 bp, Probe Sequence
gtctgtatgacttcagtatattcct

SEQ ID NO: 252116 - DNA, 25 bp, Probe Sequence
gtctgctatagctcagtgactgtgt

SEQ ID NO: 252117 - DNA, 25 bp, Probe Sequence
gtcctaagccaagacatttgacctt

SEQ ID NO: 252118 - DNA, 25 bp, Probe Sequence
gtcctcaaggactccatttcatctt

SEQ ID NO: 252119 - DNA, 25 bp, Probe Sequence
gtctgacgaggtgtgaactcctctg

SEQ ID NO: 252120 - DNA, 25 bp, Probe Sequence
gtcgagcgatggatttccgtctctg

SEQ ID NO: 252121 - DNA, 25 bp, Probe Sequence
gtctgagaaagttttctgcctcact

SEQ ID NO: 252122 - DNA, 25 bp, Probe Sequence
gtctgtgaaggtatctatactaata

SEQ ID NO: 252123 - DNA, 25 bp, Probe Sequence
gtctgatgccggttggtgtcaaaga

SEQ ID NO: 252124 - DNA, 25 bp, Probe Sequence
gtctgtggggttagagcccagagca

SEQ ID NO: 252125 - DNA, 25 bp, Probe Sequence
gtctggagggtaagcgacctgcaag

SEQ ID NO: 252126 - DNA, 25 bp, Probe Sequence
gtctggaggctggactgaacgcagc

SEQ ID NO: 252127 - DNA, 25 bp, Probe Sequence
gtctcggtgcagtactgcgacgtgc

SEQ ID NO: 252128 - DNA, 25 bp, Probe Sequence
gtctgtgagcatctaccacacttgc

SEQ ID NO: 252129 - DNA, 25 bp, Probe Sequence
gtctgtggcattcaggcacacgtct

SEQ ID NO: 252130 - DNA, 25 bp, Probe Sequence
gtctgtgccattaaagtcacgctgg

SEQ ID NO: 252131 - DNA, 25 bp, Probe Sequence
gtctgtggctataatgaccaaggga

SEQ ID NO: 252132 - DNA, 25 bp, Probe Sequence
gtctgcaggcctatgatgccaaggg

SEQ ID NO: 252133 - DNA, 25 bp, Probe Sequence
gtctctctgcaagaatgccaagtgc

SEQ ID NO: 252134 - DNA, 25 bp, Probe Sequence
gtctgcttcagggacatgagcaccg

SEQ ID NO: 252135 - DNA, 25 bp, Probe Sequence
gtctgctgtaaaggctgcagcctcc

SEQ ID NO: 252136 - DNA, 25 bp, Probe Sequence
gtctctgtacagaacttcctgctca

SEQ ID NO: 252137 - DNA, 25 bp, Probe Sequence
gtctctgcacacatatgcttggtta

SEQ ID NO: 252138 - DNA, 25 bp, Probe Sequence
gtctcccagatttctaagatgtgat

SEQ ID NO: 252139 - DNA, 25 bp, Probe Sequence
gtctccgcgatttttcagagtggaa

SEQ ID NO: 252140 - DNA, 25 bp, Probe Sequence
gtctctggccttttcaagcagtgga

SEQ ID NO: 252141 - DNA, 25 bp, Probe Sequence
gtctctgggaattgtgggattggca

SEQ ID NO: 252142 - DNA, 25 bp, Probe Sequence
gtctctctgggcaggtgtagtggtc

SEQ ID NO: 252143 - DNA, 25 bp, Probe Sequence
gtctcgtgtgacatgatgttatgtt

SEQ ID NO: 252144 - DNA, 25 bp, Probe Sequence
gtctctcgtggcgattgattatgct

SEQ ID NO: 252145 - DNA, 25 bp, Probe Sequence
gtctccgatggctattgaggctgga

SEQ ID NO: 252146 - DNA, 25 bp, Probe Sequence
gtctccagatacgtgaaggctggac

SEQ ID NO: 252147 - DNA, 25 bp, Probe Sequence
gtctccagaacacgaaaatgatagg

SEQ ID NO: 252148 - DNA, 25 bp, Probe Sequence
gtctggtgtaactgaaatgataggc

SEQ ID NO: 252149 - DNA, 25 bp, Probe Sequence
gtccctgtaactcaaatgtcaaccc

SEQ ID NO: 252150 - DNA, 25 bp, Probe Sequence
gtgtcctgggactgagggttactcc

SEQ ID NO: 252151 - DNA, 25 bp, Probe Sequence
gtctcctgggatcagagggtagtac

SEQ ID NO: 252152 - DNA, 25 bp, Probe Sequence
gtccgctaagtatggcgggcggcac

SEQ ID NO: 252153 - DNA, 25 bp, Probe Sequence
gtcctgcccctttgagggggtgcaa

SEQ ID NO: 252154 - DNA, 25 bp, Probe Sequence
gtcccaaccattttgagggtcacta

SEQ ID NO: 252155 - DNA, 25 bp, Probe Sequence
gtcgtgaaccttcatgggttcccag

SEQ ID NO: 252156 - DNA, 25 bp, Probe Sequence
gtcgatgcaacgagtgatgaggttc

SEQ ID NO: 252157 - DNA, 25 bp, Probe Sequence
gtcgcatccaccagtgtatcagcat

SEQ ID NO: 252158 - DNA, 25 bp, Probe Sequence
gtctgcctctccaggattgtatgtt

SEQ ID NO: 252159 - DNA, 25 bp, Probe Sequence
gtctgccatccccaaattatgtggt

SEQ ID NO: 252160 - DNA, 25 bp, Probe Sequence
gtctgtacccaatgtgtagtctttg

SEQ ID NO: 252161 - DNA, 25 bp, Probe Sequence
gtctgctactgctaaagctgttgat

SEQ ID NO: 252162 - DNA, 25 bp, Probe Sequence
gtctgcacctgcaagcagagtttga

SEQ ID NO: 252163 - DNA, 25 bp, Probe Sequence
gtctgcaacatcatgaagcctgaat

SEQ ID NO: 252164 - DNA, 25 bp, Probe Sequence
gggcccaacatgtggcatgcaatga

SEQ ID NO: 252165 - DNA, 25 bp, Probe Sequence
gtctgcctcaaattgctggtgaata

SEQ ID NO: 252166 - DNA, 25 bp, Probe Sequence
gtctgctagccatttaggtaagggt

SEQ ID NO: 252167 - DNA, 25 bp, Probe Sequence
gtctccagacatctagggaccagag

SEQ ID NO: 252168 - DNA, 25 bp, Probe Sequence
gtctgccaactggtagaggcaaagc

SEQ ID NO: 252169 - DNA, 25 bp, Probe Sequence
gtctgcctatgtggcaggagaaaag

SEQ ID NO: 252170 - DNA, 25 bp, Probe Sequence
gtctcgctcttgccaaagaaaagtc

SEQ ID NO: 252171 - DNA, 25 bp, Probe Sequence
gtctgcctgttggaaagtgtacctg

SEQ ID NO: 252172 - DNA, 25 bp, Probe Sequence
gtctgccattctgaatatgcttatt

SEQ ID NO: 252173 - DNA, 25 bp, Probe Sequence
gtctccagcaataggatgatttact

SEQ ID NO: 252174 - DNA, 25 bp, Probe Sequence
gtctccatattactgtttcatgact

SEQ ID NO: 252175 - DNA, 25 bp, Probe Sequence
gtctccatttggattatcaacatga

SEQ ID NO: 252176 - DNA, 25 bp, Probe Sequence
gtctgccaggggttatatatatata

SEQ ID NO: 252177 - DNA, 25 bp, Probe Sequence
gtctccctggagttatgttgaaggc

SEQ ID NO: 252178 - DNA, 25 bp, Probe Sequence
gtccccgttgtatgtatgagtggct

SEQ ID NO: 252179 - DNA, 25 bp, Probe Sequence
gtcccttgctcagaagaaggatcgg

SEQ ID NO: 252180 - DNA, 25 bp, Probe Sequence
gtctgcctcctaaaagaaggacagg

SEQ ID NO: 252181 - DNA, 25 bp, Probe Sequence
gtctcctcctttaactgagtcatca

SEQ ID NO: 252182 - DNA, 25 bp, Probe Sequence
gtctccttgcttctttgatgtgata

SEQ ID NO: 252183 - DNA, 25 bp, Probe Sequence
gtctgcctgtttagtaagtggcaat

SEQ ID NO: 252184 - DNA, 25 bp, Probe Sequence
gtctgacttgataactccagtgcca

SEQ ID NO: 252185 - DNA, 25 bp, Probe Sequence
gtctgcagcttcatactcgagattc

SEQ ID NO: 252186 - DNA, 25 bp, Probe Sequence
gtcgagctttctctcagagcatgct

SEQ ID NO: 252187 - DNA, 25 bp, Probe Sequence
gtcgactttcataattagcatctac

SEQ ID NO: 252188 - DNA, 25 bp, Probe Sequence
gtcgacagttgccagttacacgcac

SEQ ID NO: 252189 - DNA, 25 bp, Probe Sequence
gtctgatccctgcagaaaccaggtg

SEQ ID NO: 252190 - DNA, 25 bp, Probe Sequence
gtctgttgcctgaaacagcccagtc

SEQ ID NO: 252191 - DNA, 25 bp, Probe Sequence
gtctcctggctgaacagagtgccat

SEQ ID NO: 252192 - DNA, 25 bp, Probe Sequence
gtctcggagagaactggatgctgca

SEQ ID NO: 252193 - DNA, 25 bp, Probe Sequence
gtctcctgtagcatctggttcagtg

SEQ ID NO: 252194 - DNA, 25 bp, Probe Sequence
gtctcgagacatattgtgttagtgt

SEQ ID NO: 252195 - DNA, 25 bp, Probe Sequence
gtctgcggcctggtgatgtgatttt

SEQ ID NO: 252196 - DNA, 25 bp, Probe Sequence
gtctgcggcctggtgatgtgatttt

SEQ ID NO: 252197 - DNA, 25 bp, Probe Sequence
gtctgcggcctggtgatgtgatttt

SEQ ID NO: 252198 - DNA, 25 bp, Probe Sequence
gtctccgtcatggggttgttttgct

SEQ ID NO: 252199 - DNA, 25 bp, Probe Sequence
gtctcgaggatgtgggcttatttgt

SEQ ID NO: 252200 - DNA, 25 bp, Probe Sequence
gtctgcagggtgtggtaactgtttc

SEQ ID NO: 252201 - DNA, 25 bp, Probe Sequence
gtcctgggttccttgaacatgttcc

SEQ ID NO: 252202 - DNA, 25 bp, Probe Sequence
gtccatgaggttcaacaaagttgca

SEQ ID NO: 252203 - DNA, 25 bp, Probe Sequence
ttagcatttttgcacaaggaattgc

SEQ ID NO: 252204 - DNA, 25 bp, Probe Sequence
tctagttttggctgacaggaagctc

SEQ ID NO: 252205 - DNA, 25 bp, Probe Sequence
gtcgtgtttgactgactcggagctc

SEQ ID NO: 252206 - DNA, 25 bp, Probe Sequence
gtcgtgtctgttcaaaccggcacgg

SEQ ID NO: 252207 - DNA, 25 bp, Probe Sequence
gtctggctctgttgacaaaccgggc

SEQ ID NO: 252208 - DNA, 25 bp, Probe Sequence
gtctggctctgttgacaaaccgggc

SEQ ID NO: 252209 - DNA, 25 bp, Probe Sequence
gtctggtgcatgtgatgaaacctgc

SEQ ID NO: 252210 - DNA, 25 bp, Probe Sequence
gtctgtgtcagctgtgacaggccct

SEQ ID NO: 252211 - DNA, 25 bp, Probe Sequence
gtcctgtctcatagagaagccgctt

SEQ ID NO: 252212 - DNA, 25 bp, Probe Sequence
gtcctggccattcggagtcgatatg

SEQ ID NO: 252213 - DNA, 25 bp, Probe Sequence
gtcctggtcacccagacacaaagat

SEQ ID NO: 252214 - DNA, 25 bp, Probe Sequence
gtcgaagctcacgtggaccagaaaa

SEQ ID NO: 252215 - DNA, 25 bp, Probe Sequence
gtctgtactgatcctcaaccaataa

SEQ ID NO: 252216 - DNA, 25 bp, Probe Sequence
gtctgtcactattcctaaagcttaa

SEQ ID NO: 252217 - DNA, 25 bp, Probe Sequence
gtgctgtcgccttttagaaggagaa

SEQ ID NO: 252218 - DNA, 25 bp, Probe Sequence
gtctgtgctcctgggctacaaggac

SEQ ID NO: 252219 - DNA, 25 bp, Probe Sequence
gtcgtggccgaggccaacagagcac

SEQ ID NO: 252220 - DNA, 25 bp, Probe Sequence
gtcgtatgtggcatccaacagagag

SEQ ID NO: 252221 - DNA, 25 bp, Probe Sequence
gtccgtgtgagactgctaagcggcg

SEQ ID NO: 252222 - DNA, 25 bp, Probe Sequence
gtgccggggcctgaaggtcagggtc

SEQ ID NO: 252223 - DNA, 25 bp, Probe Sequence
gtccggaggttatgtcttcggtgtc

SEQ ID NO: 252224 - DNA, 25 bp, Probe Sequence
gtcccagaaggtgggtgttgcctgg

SEQ ID NO: 252225 - DNA, 25 bp, Probe Sequence
gtctccagcagatgaaggtttgcac

SEQ ID NO: 252226 - DNA, 25 bp, Probe Sequence
gtctccatcaggcagtggctgttgg

SEQ ID NO: 252227 - DNA, 25 bp, Probe Sequence
gtctcctgagcagcaggtggctcga

SEQ ID NO: 252228 - DNA, 25 bp, Probe Sequence
gtctccggcatggagagagagcgga

SEQ ID NO: 252229 - DNA, 25 bp, Probe Sequence
gtctccgtcatggcagtgatgaaaa

SEQ ID NO: 252230 - DNA, 25 bp, Probe Sequence
gtctgacctcagtagctattaaata

SEQ ID NO: 252231 - DNA, 25 bp, Probe Sequence
gtcgaggctagaggcatttggaaca

SEQ ID NO: 252232 - DNA, 25 bp, Probe Sequence
gtcgagtctatgctgtcttgtcaaa

SEQ ID NO: 252233 - DNA, 25 bp, Probe Sequence
gtctgagacttccacctttgagacc

SEQ ID NO: 252234 - DNA, 25 bp, Probe Sequence
gtctgcattttcaacctgttgcaat

SEQ ID NO: 252235 - DNA, 25 bp, Probe Sequence
gtctgctttttagtctttatcattc

SEQ ID NO: 252236 - DNA, 25 bp, Probe Sequence
gtcgggttggaccttaacatctgca

SEQ ID NO: 252237 - DNA, 25 bp, Probe Sequence
gtcggtctgggtgttaagtgctcca

SEQ ID NO: 252238 - DNA, 25 bp, Probe Sequence
gtctgttggggtcactgaaccccga

SEQ ID NO: 252239 - DNA, 25 bp, Probe Sequence
gtctgttagggaaagcaggagcctc

SEQ ID NO: 252240 - DNA, 25 bp, Probe Sequence
gtctgtctgaggctctgagcgtaca

SEQ ID NO: 252241 - DNA, 25 bp, Probe Sequence
gtctgtagaggccactgtgtttcta

SEQ ID NO: 252242 - DNA, 25 bp, Probe Sequence
gtctgtagagcctaatagtttccat

SEQ ID NO: 252243 - DNA, 25 bp, Probe Sequence
gtctgtcgtgcaccgatgagaactc

SEQ ID NO: 252244 - DNA, 25 bp, Probe Sequence
gtctgtctgctcacataagcattcc

SEQ ID NO: 252245 - DNA, 25 bp, Probe Sequence
gtcgacctcaagacatagacttcca

SEQ ID NO: 252246 - DNA, 25 bp, Probe Sequence
gtctgactccagaattcacacatgt

SEQ ID NO: 252247 - DNA, 25 bp, Probe Sequence
gtctccatctcagtacacaatcatt

SEQ ID NO: 252248 - DNA, 25 bp, Probe Sequence
gtctccttgatctgctgattgcatt

SEQ ID NO: 252249 - DNA, 25 bp, Probe Sequence
gtctccttggcagctgtattctgga

SEQ ID NO: 252250 - DNA, 25 bp, Probe Sequence
gtctgccctgtcacgtagttgaagg

SEQ ID NO: 252251 - DNA, 25 bp, Probe Sequence
gtcccttacctcttatggctaagtc

SEQ ID NO: 252252 - DNA, 25 bp, Probe Sequence
gtccacttattcactaggtaaattt

SEQ ID NO: 252253 - DNA, 25 bp, Probe Sequence
gtcgtctttatcgctcagaggagaa

SEQ ID NO: 252254 - DNA, 25 bp, Probe Sequence
gtcccagttcttgccagatagtgca

SEQ ID NO: 252255 - DNA, 25 bp, Probe Sequence
gtcctgccttttgtcagtggtttgt

SEQ ID NO: 252256 - DNA, 25 bp, Probe Sequence
gtcgcggttcttgtttgtggatcgc

SEQ ID NO: 252257 - DNA, 25 bp, Probe Sequence
gtctggtttctagacttgtgctgat

SEQ ID NO: 252258 - DNA, 25 bp, Probe Sequence
gtcggttgatcacctgagttgggat

SEQ ID NO: 252259 - DNA, 25 bp, Probe Sequence
gtcggttgatctccatgtttagtgt

SEQ ID NO: 252260 - DNA, 25 bp, Probe Sequence
gtcgtttattgtggcgcttgaggct

SEQ ID NO: 252261 - DNA, 25 bp, Probe Sequence
gtcggttatttaggtccagcagcta

SEQ ID NO: 252262 - DNA, 25 bp, Probe Sequence
gtctggttttcttgagacctcagat

SEQ ID NO: 252263 - DNA, 25 bp, Probe Sequence
gtcctgttttcttaggcactgaggg

SEQ ID NO: 252264 - DNA, 25 bp, Probe Sequence
gtcctgttttcttaggcactgaggg

SEQ ID NO: 252265 - DNA, 25 bp, Probe Sequence
gtcgctggttcgtggagacggaggg

SEQ ID NO: 252266 - DNA, 25 bp, Probe Sequence
gtcgtgtgttcatttggacctgtga

SEQ ID NO: 252267 - DNA, 25 bp, Probe Sequence
gtcgtgggctcattgtgaccactgg

SEQ ID NO: 252268 - DNA, 25 bp, Probe Sequence
gtcgtgggctcattgtgaccactgg

SEQ ID NO: 252269 - DNA, 25 bp, Probe Sequence
gtctgaggcagttcattgaggcagc

SEQ ID NO: 252270 - DNA, 25 bp, Probe Sequence
gtctgagatgctggtaatggccatg

SEQ ID NO: 252271 - DNA, 25 bp, Probe Sequence
gtctgcagtgctgtgtgatgatgac

SEQ ID NO: 252272 - DNA, 25 bp, Probe Sequence
gtctgcacagcatatgttcatgaat

SEQ ID NO: 252273 - DNA, 25 bp, Probe Sequence
gtctgcctgatgtagtctagaatcc

SEQ ID NO: 252274 - DNA, 25 bp, Probe Sequence
gtctgcccagaaagctcagaaggct

SEQ ID NO: 252275 - DNA, 25 bp, Probe Sequence
gtctgcccagaaagctcagaaggct

SEQ ID NO: 252276 - DNA, 25 bp, Probe Sequence
gtctgcccagaaagctcagaaggct

SEQ ID NO: 252277 - DNA, 25 bp, Probe Sequence
gtctgcccagaaagctcagaaggct

SEQ ID NO: 252278 - DNA, 25 bp, Probe Sequence
gtctgccccacaatcaagaatgtat

SEQ ID NO: 252279 - DNA, 25 bp, Probe Sequence
gtctgccccatcaatgatacgtgga

SEQ ID NO: 252280 - DNA, 25 bp, Probe Sequence
gtctgcccctgcaatagggtgtgtt

SEQ ID NO: 252281 - DNA, 25 bp, Probe Sequence
gtctgaagccttagagtgtgtgtgc

SEQ ID NO: 252282 - DNA, 25 bp, Probe Sequence
gtctgaaggtgtacaggtgccctct

SEQ ID NO: 252283 - DNA, 25 bp, Probe Sequence
gtctgaaggtgtacaggtgccctct

SEQ ID NO: 252284 - DNA, 25 bp, Probe Sequence
gtctgccaggtgaacggtgcctggg

SEQ ID NO: 252285 - DNA, 25 bp, Probe Sequence
gtgcttagttgaacagggccctgaa

SEQ ID NO: 252286 - DNA, 25 bp, Probe Sequence
gtctgctgagtttataaggttccaa

SEQ ID NO: 252287 - DNA, 25 bp, Probe Sequence
gtctgcgagattgtaggtgcctcaa

SEQ ID NO: 252288 - DNA, 25 bp, Probe Sequence
gtccaggtggtgaattttccaagaa

SEQ ID NO: 252289 - DNA, 25 bp, Probe Sequence
gtctgtggaggtgcttatgttcaaa

SEQ ID NO: 252290 - DNA, 25 bp, Probe Sequence
gtctgctgaaggacctgttgctgct

SEQ ID NO: 252291 - DNA, 25 bp, Probe Sequence
gtctgctcataagtacttgtgtcat

SEQ ID NO: 252292 - DNA, 25 bp, Probe Sequence
gtctgcaaagctggtgccgttgaga

SEQ ID NO: 252293 - DNA, 25 bp, Probe Sequence
gtccaaatgtttacgggagcctcct

SEQ ID NO: 252294 - DNA, 25 bp, Probe Sequence
gtccccagatactatttgggctctc

SEQ ID NO: 252295 - DNA, 25 bp, Probe Sequence
gtccctcttatcacttggactttca

SEQ ID NO: 252296 - DNA, 25 bp, Probe Sequence
gtgtgcactattacccggttttaca

SEQ ID NO: 252297 - DNA, 25 bp, Probe Sequence
gtctgaagtttcacgtgtgtttatg

SEQ ID NO: 252298 - DNA, 25 bp, Probe Sequence
gtcgtggagtccactggcgtcttca

SEQ ID NO: 252299 - DNA, 25 bp, Probe Sequence
gtcgggcagttcccattagatttag

SEQ ID NO: 252300 - DNA, 25 bp, Probe Sequence
gtccggagtctagagtacagttgag

SEQ ID NO: 252301 - DNA, 25 bp, Probe Sequence
gtccggagtcagtggttacagtgag

SEQ ID NO: 252302 - DNA, 25 bp, Probe Sequence
gtcggtggtcagagcggtgagcgag

SEQ ID NO: 252303 - DNA, 25 bp, Probe Sequence
gtctggtgcctggaggtgtgggagg

SEQ ID NO: 252304 - DNA, 25 bp, Probe Sequence
gtctggagcctgcaggcaggtgggg

SEQ ID NO: 252305 - DNA, 25 bp, Probe Sequence
gtcggagccgcgcgagatatggccc

SEQ ID NO: 252306 - DNA, 25 bp, Probe Sequence
gtcgggactgagcaggcaatggcct

SEQ ID NO: 252307 - DNA, 25 bp, Probe Sequence
gtcggcgttgctgggagaatgtgcc

SEQ ID NO: 252308 - DNA, 25 bp, Probe Sequence
gtctgaggttaggaaatatctggaa

SEQ ID NO: 252309 - DNA, 25 bp, Probe Sequence
gtcgcaggcattggacaaactggga

SEQ ID NO: 252310 - DNA, 25 bp, Probe Sequence
gtctgctgccttcatacagatgctg

SEQ ID NO: 252311 - DNA, 25 bp, Probe Sequence
gtctgctgccttgacggagtgacag

SEQ ID NO: 252312 - DNA, 25 bp, Probe Sequence
gtctgagacacggatccgggacagg

SEQ ID NO: 252313 - DNA, 25 bp, Probe Sequence
gtctgaaactactctggtgatcacc

SEQ ID NO: 252314 - DNA, 25 bp, Probe Sequence
gtctgaatgtctttcctttacacct

SEQ ID NO: 252315 - DNA, 25 bp, Probe Sequence
gtctgctagtggttgtcttaacatc

SEQ ID NO: 252316 - DNA, 25 bp, Probe Sequence
gtctgtaatggtgtgcttcaaggta

SEQ ID NO: 252317 - DNA, 25 bp, Probe Sequence
gtctgctcgaggagtctgtaaggtc

SEQ ID NO: 252318 - DNA, 25 bp, Probe Sequence
gtctgtcatgagagctgtcctgaat

SEQ ID NO: 252319 - DNA, 25 bp, Probe Sequence
gtctgatctgaatgctacaaaagcc

SEQ ID NO: 252320 - DNA, 25 bp, Probe Sequence
gtctgatcgagaatgccaaaaaaca

SEQ ID NO: 252321 - DNA, 25 bp, Probe Sequence
gtctgagccgaacaccagagacact

SEQ ID NO: 252322 - DNA, 25 bp, Probe Sequence
gtgcaggacggacaggaggcaccca

SEQ ID NO: 252323 - DNA, 25 bp, Probe Sequence
gtctgtgacgagctcaggagggctc

SEQ ID NO: 252324 - DNA, 25 bp, Probe Sequence
gtctgtgaggttgcaggcagggtgc

SEQ ID NO: 252325 - DNA, 25 bp, Probe Sequence
gtctgggtgtgtacggagggtctag

SEQ ID NO: 252326 - DNA, 25 bp, Probe Sequence
gtgagggtgatgttcgggaggaggc

SEQ ID NO: 252327 - DNA, 25 bp, Probe Sequence
gtcgaggcgagcacgggagtgggac

SEQ ID NO: 252328 - DNA, 25 bp, Probe Sequence
gtgcgcttaacgtgagggtgggtcc

SEQ ID NO: 252329 - DNA, 25 bp, Probe Sequence
gtgcgcttaacgtgagggtgggtcc

SEQ ID NO: 252330 - DNA, 25 bp, Probe Sequence
gggcctagagtggaagtgggggtgg

SEQ ID NO: 252331 - DNA, 25 bp, Probe Sequence
gtccgtcagcaagaaggggagagtc

SEQ ID NO: 252332 - DNA, 25 bp, Probe Sequence
gtccccagctaactagggaaggctt

SEQ ID NO: 252333 - DNA, 25 bp, Probe Sequence
gtccctaggaatctgggcatcacca

SEQ ID NO: 252334 - DNA, 25 bp, Probe Sequence
gtcctctagacttgaggggctaccc

SEQ ID NO: 252335 - DNA, 25 bp, Probe Sequence
gtccctaaggagtgagaaacccatt

SEQ ID NO: 252336 - DNA, 25 bp, Probe Sequence
gtccctataggatagagctggcagc

SEQ ID NO: 252337 - DNA, 25 bp, Probe Sequence
gtgcccttgggggtcaggggcttga

SEQ ID NO: 252338 - DNA, 25 bp, Probe Sequence
gtccggagcagctgttccgggttac

SEQ ID NO: 252339 - DNA, 25 bp, Probe Sequence
gtccgtgggcaagttgcccagggtg

SEQ ID NO: 252340 - DNA, 25 bp, Probe Sequence
gtccgcgttaaatgcaacacggatg

SEQ ID NO: 252341 - DNA, 25 bp, Probe Sequence
gtccaggcttctctgaaaccagggc

SEQ ID NO: 252342 - DNA, 25 bp, Probe Sequence
gtccgcctgttcagtaaccagatgc

SEQ ID NO: 252343 - DNA, 25 bp, Probe Sequence
gtccctcgttgcaggacagggtcat

SEQ ID NO: 252344 - DNA, 25 bp, Probe Sequence
gtccctcaaggagaccagggtacca

SEQ ID NO: 252345 - DNA, 25 bp, Probe Sequence
gtccaacgacaagacgaggattctc

SEQ ID NO: 252346 - DNA, 25 bp, Probe Sequence
gtcccacaaccgcagcgaggagttt

SEQ ID NO: 252347 - DNA, 25 bp, Probe Sequence
gtcccacaaccgcagcgaggagttt

SEQ ID NO: 252348 - DNA, 25 bp, Probe Sequence
gtcccacaaccgcagcgaggagttt

SEQ ID NO: 252349 - DNA, 25 bp, Probe Sequence
gtcccattaacacagtgagtagtac

SEQ ID NO: 252350 - DNA, 25 bp, Probe Sequence
gtcgctcatgtgtgcaacagggtat

SEQ ID NO: 252351 - DNA, 25 bp, Probe Sequence
gtctgcatcttatcactgggtgctt

SEQ ID NO: 252352 - DNA, 25 bp, Probe Sequence
gtctgtctgttaccataagtctgat

SEQ ID NO: 252353 - DNA, 25 bp, Probe Sequence
gtctgtgctgtctagtttgtgttca

SEQ ID NO: 252354 - DNA, 25 bp, Probe Sequence
gtcggcgtatatactatggcatgaa

SEQ ID NO: 252355 - DNA, 25 bp, Probe Sequence
gtcgggacagatactctgcgggcaa

SEQ ID NO: 252356 - DNA, 25 bp, Probe Sequence
gtgcgggtcataagcttgcgttgat

SEQ ID NO: 252357 - DNA, 25 bp, Probe Sequence
gtcgaggagaacttatggattgtga

SEQ ID NO: 252358 - DNA, 25 bp, Probe Sequence
gtccggaaattcatggttggctacg

SEQ ID NO: 252359 - DNA, 25 bp, Probe Sequence
gtccggaaattcatggttggctacg

SEQ ID NO: 252360 - DNA, 25 bp, Probe Sequence
gtccagaaagcttccgttttctacg

SEQ ID NO: 252361 - DNA, 25 bp, Probe Sequence
gtcccctagattgagttttgaaggc

SEQ ID NO: 252362 - DNA, 25 bp, Probe Sequence
gtccccaacctagcttggtgagggc

SEQ ID NO: 252363 - DNA, 25 bp, Probe Sequence
gtcccccacgtgtgaagtgtagtgg

SEQ ID NO: 252364 - DNA, 25 bp, Probe Sequence
gtcccctccgaagtgaactttgtgt

SEQ ID NO: 252365 - DNA, 25 bp, Probe Sequence
gtccccacaggcaatctgatttttt

SEQ ID NO: 252366 - DNA, 25 bp, Probe Sequence
gtcccccagaatcttggctgtttac

SEQ ID NO: 252367 - DNA, 25 bp, Probe Sequence
gtcccccatctaagtggtgctttgc

SEQ ID NO: 252368 - DNA, 25 bp, Probe Sequence
gtccatcccatggaagtggctgttt

SEQ ID NO: 252369 - DNA, 25 bp, Probe Sequence
gtcgcaccaagagagaagctgctgc

SEQ ID NO: 252370 - DNA, 25 bp, Probe Sequence
gtctgaaagagtgtggagtgctccc

SEQ ID NO: 252371 - DNA, 25 bp, Probe Sequence
gtcgcaggagagttctggggtacac

SEQ ID NO: 252372 - DNA, 25 bp, Probe Sequence
gtctgggggtcttagggatcagcca

SEQ ID NO: 252373 - DNA, 25 bp, Probe Sequence
gtctgggaggtctatgatagagccg

SEQ ID NO: 252374 - DNA, 25 bp, Probe Sequence
gtctggggagtctgtgaagcatatg

SEQ ID NO: 252375 - DNA, 25 bp, Probe Sequence
gtctgtgggactgatggaaatactt

SEQ ID NO: 252376 - DNA, 25 bp, Probe Sequence
gtctgtggagactgatgacaacttc

SEQ ID NO: 252377 - DNA, 25 bp, Probe Sequence
gtctgtaagccaggtggctcaattc

SEQ ID NO: 252378 - DNA, 25 bp, Probe Sequence
gtctgtataataagggcatctctat

SEQ ID NO: 252379 - DNA, 25 bp, Probe Sequence
gtcgtcaatgatgagtcctctctgg

SEQ ID NO: 252380 - DNA, 25 bp, Probe Sequence
gtctgtgcaagtcagaatccttgaa

SEQ ID NO: 252381 - DNA, 25 bp, Probe Sequence
gtctgtgaaatgataaatcctaaat

SEQ ID NO: 252382 - DNA, 25 bp, Probe Sequence
gtctggaggctgctagactcctatc

SEQ ID NO: 252383 - DNA, 25 bp, Probe Sequence
gtcggcaggcgctgagcaagcggac

SEQ ID NO: 252384 - DNA, 25 bp, Probe Sequence
gtctgtcggtgccgagggcaggatg

SEQ ID NO: 252385 - DNA, 25 bp, Probe Sequence
gtctgtgggtgccaagggcagccag

SEQ ID NO: 252386 - DNA, 25 bp, Probe Sequence
gtcgtgggtgttacgtgcaggaacg

SEQ ID NO: 252387 - DNA, 25 bp, Probe Sequence
gtcggacctgttccaggaggacctg

SEQ ID NO: 252388 - DNA, 25 bp, Probe Sequence
gtccgacctgtgatcgtggtacagc

SEQ ID NO: 252389 - DNA, 25 bp, Probe Sequence
gtcgggccgggtggtgatgaagagc

SEQ ID NO: 252390 - DNA, 25 bp, Probe Sequence
gtccagcgggggtgggagaatcatc

SEQ ID NO: 252391 - DNA, 25 bp, Probe Sequence
gtccgtgaggggacacgtatgacct

SEQ ID NO: 252392 - DNA, 25 bp, Probe Sequence
gtccgtgaggggacacgtatgacct

SEQ ID NO: 252393 - DNA, 25 bp, Probe Sequence
gtccgtgtgcggggaggtaacaaga

SEQ ID NO: 252394 - DNA, 25 bp, Probe Sequence
gtccgtgtgcggggaggtaacaaga

SEQ ID NO: 252395 - DNA, 25 bp, Probe Sequence
gtcgtggtcttgtggaggagacaga

SEQ ID NO: 252396 - DNA, 25 bp, Probe Sequence
gtgcggtgtctagggtagtgaatcc

SEQ ID NO: 252397 - DNA, 25 bp, Probe Sequence
gtgcgaccatctcctaaaggaatac

SEQ ID NO: 252398 - DNA, 25 bp, Probe Sequence
gtgcgcccttgaattaaagccatga

SEQ ID NO: 252399 - DNA, 25 bp, Probe Sequence
gtcgctctcatgggtacaaaatagt

SEQ ID NO: 252400 - DNA, 25 bp, Probe Sequence
gtcgtcattgtcttacatatacttt

SEQ ID NO: 252401 - DNA, 25 bp, Probe Sequence
gtctgtctcttgcttcaacagtgtt

SEQ ID NO: 252402 - DNA, 25 bp, Probe Sequence
gtctgttcatgtgttaagtgttata

SEQ ID NO: 252403 - DNA, 25 bp, Probe Sequence
gtctgttctgccatataaagtgaca

SEQ ID NO: 252404 - DNA, 25 bp, Probe Sequence
gtcggtggcctcttaaaggacagcg

SEQ ID NO: 252405 - DNA, 25 bp, Probe Sequence
gtcggtggcccaaaaagagtgctga

SEQ ID NO: 252406 - DNA, 25 bp, Probe Sequence
gtgcggtaccagacggaagcggtgg

SEQ ID NO: 252407 - DNA, 25 bp, Probe Sequence
gtgcggtaccagtgcacagaggggt

SEQ ID NO: 252408 - DNA, 25 bp, Probe Sequence
gtctggcaactacttcacggagacg

SEQ ID NO: 252409 - DNA, 25 bp, Probe Sequence
gtgctggaactgccttaccaaggcg

SEQ ID NO: 252410 - DNA, 25 bp, Probe Sequence
gtgattagacacttctagaccaggc

SEQ ID NO: 252411 - DNA, 25 bp, Probe Sequence
gtgctaagaactgtaatgctcagga

SEQ ID NO: 252412 - DNA, 25 bp, Probe Sequence
gtctggccaggtgctaatctggaga

SEQ ID NO: 252413 - DNA, 25 bp, Probe Sequence
gtcctgccggtcacagttgaggatt

SEQ ID NO: 252414 - DNA, 25 bp, Probe Sequence
gtcccaaggaacgccataggacttc

SEQ ID NO: 252415 - DNA, 25 bp, Probe Sequence
gtcccaaagagaggctcacctgtac

SEQ ID NO: 252416 - DNA, 25 bp, Probe Sequence
gtccaaatatggagccgccacattt

SEQ ID NO: 252417 - DNA, 25 bp, Probe Sequence
gtcccagtgaagagccactgccatt

SEQ ID NO: 252418 - DNA, 25 bp, Probe Sequence
gtcgcacgtgaaggaccactacatc

SEQ ID NO: 252419 - DNA, 25 bp, Probe Sequence
gtcctgctgggagaaactggcaagg

SEQ ID NO: 252420 - DNA, 25 bp, Probe Sequence
gtcctggggacgaagaccaagagga

SEQ ID NO: 252421 - DNA, 25 bp, Probe Sequence
gtccggatcgaaactggaaaagtca

SEQ ID NO: 252422 - DNA, 25 bp, Probe Sequence
gtcccagctcagttttccaaaagac

SEQ ID NO: 252423 - DNA, 25 bp, Probe Sequence
gtccaactacttccttaagatcatc

SEQ ID NO: 252424 - DNA, 25 bp, Probe Sequence
gtccaaccaggacctataagccaaa

SEQ ID NO: 252425 - DNA, 25 bp, Probe Sequence
gtccaaccaaacactgatgaacaac

SEQ ID NO: 252426 - DNA, 25 bp, Probe Sequence
gtcccctataaatctggtcagcaac

SEQ ID NO: 252427 - DNA, 25 bp, Probe Sequence
gtcccctgaaactcattgcagcaga

SEQ ID NO: 252428 - DNA, 25 bp, Probe Sequence
gtgcatggactaggaccctggaggc

SEQ ID NO: 252429 - DNA, 25 bp, Probe Sequence
gtgcatgggctaaaaccaggaaaac

SEQ ID NO: 252430 - DNA, 25 bp, Probe Sequence
gtctgggagatcctccaccgaaaac

SEQ ID NO: 252431 - DNA, 25 bp, Probe Sequence
gtctggtaatgcaccacctagaaca

SEQ ID NO: 252432 - DNA, 25 bp, Probe Sequence
gtctggaatatgttcttccgaaaca

SEQ ID NO: 252433 - DNA, 25 bp, Probe Sequence
gtctggagaatatgtaccaacaaca

SEQ ID NO: 252434 - DNA, 25 bp, Probe Sequence
gtctggagcataaggtttatctcaa

SEQ ID NO: 252435 - DNA, 25 bp, Probe Sequence
gtctggcagttgcctatgtttagca

SEQ ID NO: 252436 - DNA, 25 bp, Probe Sequence
gtctggagtgatagctactgtagaa

SEQ ID NO: 252437 - DNA, 25 bp, Probe Sequence
gtctgtcagtgaccttctgtagtaa

SEQ ID NO: 252438 - DNA, 25 bp, Probe Sequence
gtctgtgtcgacgatccagtggtca

SEQ ID NO: 252439 - DNA, 25 bp, Probe Sequence
gtctggccagactccatggcaaaac

SEQ ID NO: 252440 - DNA, 25 bp, Probe Sequence
gtcggacagatactctcgtgcaaaa

SEQ ID NO: 252441 - DNA, 25 bp, Probe Sequence
gtctggtagcatgtcattgatggga

SEQ ID NO: 252442 - DNA, 25 bp, Probe Sequence
gtctgttctggcggcattgtgggct

SEQ ID NO: 252443 - DNA, 25 bp, Probe Sequence
gtctgtggctagaacctgatgtggt

SEQ ID NO: 252444 - DNA, 25 bp, Probe Sequence
gtctgtctggagaactgctcattgc

SEQ ID NO: 252445 - DNA, 25 bp, Probe Sequence
gtctgttaaatgaatgtcatatgta

SEQ ID NO: 252446 - DNA, 25 bp, Probe Sequence
gtctgtgtaattcgatgtatatttt

SEQ ID NO: 252447 - DNA, 25 bp, Probe Sequence
gtctgtttgcatttgatacattttt

SEQ ID NO: 252448 - DNA, 25 bp, Probe Sequence
gtctgtcatccatttaagtgttccc

SEQ ID NO: 252449 - DNA, 25 bp, Probe Sequence
gtccccaaatctaaatcttctccag

SEQ ID NO: 252450 - DNA, 25 bp, Probe Sequence
gtcccagaacctacagataccctgc

SEQ ID NO: 252451 - DNA, 25 bp, Probe Sequence
gtcctgcataactttcgaactttgt

SEQ ID NO: 252452 - DNA, 25 bp, Probe Sequence
gtctggcaaggactttgtacatttg

SEQ ID NO: 252453 - DNA, 25 bp, Probe Sequence
gtcggcaccgagactgggatcttga

SEQ ID NO: 252454 - DNA, 25 bp, Probe Sequence
gtcgccctcgagatgattatcgtag

SEQ ID NO: 252455 - DNA, 25 bp, Probe Sequence
gtcccaatcgaccagtgtatcgacg

SEQ ID NO: 252456 - DNA, 25 bp, Probe Sequence
gtcccgaagccggatgcatacgacc

SEQ ID NO: 252457 - DNA, 25 bp, Probe Sequence
gtcgccagcaacctgaatctcaaac

SEQ ID NO: 252458 - DNA, 25 bp, Probe Sequence
gtcgggcagccgcacactatgagca

SEQ ID NO: 252459 - DNA, 25 bp, Probe Sequence
gtcgctggaacgaacttgatcagtt

SEQ ID NO: 252460 - DNA, 25 bp, Probe Sequence
gtcgcgtgtcaccaacgtgaaggtg

SEQ ID NO: 252461 - DNA, 25 bp, Probe Sequence
gtccggattcccgggatctgtggct

SEQ ID NO: 252462 - DNA, 25 bp, Probe Sequence
gtccctgacagcgcggaatctgggt

SEQ ID NO: 252463 - DNA, 25 bp, Probe Sequence
gtccctacaaacccatgattgtcag

SEQ ID NO: 252464 - DNA, 25 bp, Probe Sequence
gtcgagcattgcaaacgccatgtgt

SEQ ID NO: 252465 - DNA, 25 bp, Probe Sequence
gtctggcatgtcaggagccagagat

SEQ ID NO: 252466 - DNA, 25 bp, Probe Sequence
gtcgtgctgataggacagactggat

SEQ ID NO: 252467 - DNA, 25 bp, Probe Sequence
gtcgccatgaaggtcgagctgtgca

SEQ ID NO: 252468 - DNA, 25 bp, Probe Sequence
gtccattgccatatcggctcgcaaa

SEQ ID NO: 252469 - DNA, 25 bp, Probe Sequence
gtcctgcggattttatttgcaaaca

SEQ ID NO: 252470 - DNA, 25 bp, Probe Sequence
gtcgcgttgttatatttctaaacca

SEQ ID NO: 252471 - DNA, 25 bp, Probe Sequence
gtccagttcttgtggttctggagac

SEQ ID NO: 252472 - DNA, 25 bp, Probe Sequence
gtcctgttgttggagagttcccatg

SEQ ID NO: 252473 - DNA, 25 bp, Probe Sequence
gtcctttgtcgaagtggtcagccta

SEQ ID NO: 252474 - DNA, 25 bp, Probe Sequence
gtcctgtcagtatttgtggtgacct

SEQ ID NO: 252475 - DNA, 25 bp, Probe Sequence
gtcctgcctgtatatgtggcttcct

SEQ ID NO: 252476 - DNA, 25 bp, Probe Sequence
gtcctttttatgtgacattccctac

SEQ ID NO: 252477 - DNA, 25 bp, Probe Sequence
gtccttctttaagacacagacgtaa

SEQ ID NO: 252478 - DNA, 25 bp, Probe Sequence
gtccttttgtgaaacctagaactca

SEQ ID NO: 252479 - DNA, 25 bp, Probe Sequence
gtcctttagttttgtccagaactca

SEQ ID NO: 252480 - DNA, 25 bp, Probe Sequence
gtcctttcagtggtagactcgggga

SEQ ID NO: 252481 - DNA, 25 bp, Probe Sequence
gtccttccaagtctagcatttgggg

SEQ ID NO: 252482 - DNA, 25 bp, Probe Sequence
gtccttcaacgaggtcacttctggg

SEQ ID NO: 252483 - DNA, 25 bp, Probe Sequence
gtccgtaatcccaacactttgggag

SEQ ID NO: 252484 - DNA, 25 bp, Probe Sequence
gtcctgaaacccagaagtgatggag

SEQ ID NO: 252485 - DNA, 25 bp, Probe Sequence
gtcctcgaaaccacgagcaagtgag

SEQ ID NO: 252486 - DNA, 25 bp, Probe Sequence
gtccctcataattccacgagaaagg

SEQ ID NO: 252487 - DNA, 25 bp, Probe Sequence
gtccactgtttctcctataaatgta

SEQ ID NO: 252488 - DNA, 25 bp, Probe Sequence
gtcgacatctttcactttaatatta

SEQ ID NO: 252489 - DNA, 25 bp, Probe Sequence
gtcccaatttgtacttgtcaaaaat

SEQ ID NO: 252490 - DNA, 25 bp, Probe Sequence
gtcctattatttaccttaattacat

SEQ ID NO: 252491 - DNA, 25 bp, Probe Sequence
gtcgaattatcatctccttcaacta

SEQ ID NO: 252492 - DNA, 25 bp, Probe Sequence
gtcgatatgttcggcttttcatgta

SEQ ID NO: 252493 - DNA, 25 bp, Probe Sequence
gtctggctgtataactcttacagta

SEQ ID NO: 252494 - DNA, 25 bp, Probe Sequence
gtcccattgatgtactttacctgaa

SEQ ID NO: 252495 - DNA, 25 bp, Probe Sequence
gtcgcaatcatatactgtttctgca

SEQ ID NO: 252496 - DNA, 25 bp, Probe Sequence
gtctgggccaagactttcttgcagc

SEQ ID NO: 252497 - DNA, 25 bp, Probe Sequence
gtctgggcagagttcatcttcttga

SEQ ID NO: 252498 - DNA, 25 bp, Probe Sequence
gtcgggcatgagtctgtttcccaag

SEQ ID NO: 252499 - DNA, 25 bp, Probe Sequence
gtctgggtgtgtggatttccttcag

SEQ ID NO: 252500 - DNA, 25 bp, Probe Sequence
gtgcgacgggtggacattacactag

SEQ ID NO: 252501 - DNA, 25 bp, Probe Sequence
gtgcgacgggtggacattacactag

SEQ ID NO: 252502 - DNA, 25 bp, Probe Sequence
gtgaccagggaggaaatggcggcag

SEQ ID NO: 252503 - DNA, 25 bp, Probe Sequence
gtccctgggagttactggcgttgga

SEQ ID NO: 252504 - DNA, 25 bp, Probe Sequence
gtcccgtggaaaatgtggccctgag

SEQ ID NO: 252505 - DNA, 25 bp, Probe Sequence
gtctggcaatggtgttgctggcacc

SEQ ID NO: 252506 - DNA, 25 bp, Probe Sequence
gtctggctatggtggtgcaggaccc

SEQ ID NO: 252507 - DNA, 25 bp, Probe Sequence
gtcggctcaatctggtgcagagaaa

SEQ ID NO: 252508 - DNA, 25 bp, Probe Sequence
gtctggctgagttgctggaagcaaa

SEQ ID NO: 252509 - DNA, 25 bp, Probe Sequence
gtctgtgtctgtcctgagaacttac

SEQ ID NO: 252510 - DNA, 25 bp, Probe Sequence
gtcgtgtgctgggcaaacaatttaa

SEQ ID NO: 252511 - DNA, 25 bp, Probe Sequence
gtctgggctagatacatcacattaa

SEQ ID NO: 252512 - DNA, 25 bp, Probe Sequence
gtctgtggttgatgacctcaatatg

SEQ ID NO: 252513 - DNA, 25 bp, Probe Sequence
gtctgtggagtgtgtctcatgcttt

SEQ ID NO: 252514 - DNA, 25 bp, Probe Sequence
gtctgtgtgggactgtacacacttt

SEQ ID NO: 252515 - DNA, 25 bp, Probe Sequence
gtcgggtgtggtggcacacacctgt

SEQ ID NO: 252516 - DNA, 25 bp, Probe Sequence
gtctgtggtgacgatggccaaacct

SEQ ID NO: 252517 - DNA, 25 bp, Probe Sequence
gtctgggctgcaccaggcgaagaga

SEQ ID NO: 252518 - DNA, 25 bp, Probe Sequence
gtctggcgtgaggcgccggaatgct

SEQ ID NO: 252519 - DNA, 25 bp, Probe Sequence
gtctggctgtgacctcggtgaaagc

SEQ ID NO: 252520 - DNA, 25 bp, Probe Sequence
gtctggctgtgacctcggtgaaagc

SEQ ID NO: 252521 - DNA, 25 bp, Probe Sequence
gtctggctgtggttcagtgatactt

SEQ ID NO: 252522 - DNA, 25 bp, Probe Sequence
gtctgtgtgtgcaagatattaatgt

SEQ ID NO: 252523 - DNA, 25 bp, Probe Sequence
gtcgagatggctaatcagtattgag

SEQ ID NO: 252524 - DNA, 25 bp, Probe Sequence
gtcgcatgaacggtcaaatgggtgg

SEQ ID NO: 252525 - DNA, 25 bp, Probe Sequence
gtcggaagctgagcaagctgtggct

SEQ ID NO: 252526 - DNA, 25 bp, Probe Sequence
gtcggaagctgagcaagctgtggct

SEQ ID NO: 252527 - DNA, 25 bp, Probe Sequence
gtccgcaatgttgccagtgtctgtc

SEQ ID NO: 252528 - DNA, 25 bp, Probe Sequence
gtccgaagtattccagcaaatatcc

SEQ ID NO: 252529 - DNA, 25 bp, Probe Sequence
gtcccagaaatgcccagtaatcacc

SEQ ID NO: 252530 - DNA, 25 bp, Probe Sequence
gtcccagaataagcagcagcagcat

SEQ ID NO: 252531 - DNA, 25 bp, Probe Sequence
gtcgcatatgaattcatgtcccagg

SEQ ID NO: 252532 - DNA, 25 bp, Probe Sequence
gtcgatgtgaagacagacaaatggg

SEQ ID NO: 252533 - DNA, 25 bp, Probe Sequence
gtccaggacagttgaactgatggtt

SEQ ID NO: 252534 - DNA, 25 bp, Probe Sequence
gtccgagtcgtttattgtggcgctt

SEQ ID NO: 252535 - DNA, 25 bp, Probe Sequence
gtccaactctgtatttaggccattt

SEQ ID NO: 252536 - DNA, 25 bp, Probe Sequence
gtccccattatgacttagtcccttt

SEQ ID NO: 252537 - DNA, 25 bp, Probe Sequence
gtccccattttaggagttggcttct

SEQ ID NO: 252538 - DNA, 25 bp, Probe Sequence
gtcctcatttactggatttgacttc

SEQ ID NO: 252539 - DNA, 25 bp, Probe Sequence
gtcctatgttgagctggttattttg

SEQ ID NO: 252540 - DNA, 25 bp, Probe Sequence
gtcctctgactaggtttctaatttc

SEQ ID NO: 252541 - DNA, 25 bp, Probe Sequence
gtcccgagatgtgtcaggtaattga

SEQ ID NO: 252542 - DNA, 25 bp, Probe Sequence
gtcccaagtgcaacaaggaggtgta

SEQ ID NO: 252543 - DNA, 25 bp, Probe Sequence
gtccctccatgcaaaagtggggcta

SEQ ID NO: 252544 - DNA, 25 bp, Probe Sequence
gtcgcctcacacaagttctgggagc

SEQ ID NO: 252545 - DNA, 25 bp, Probe Sequence
gtccgccatcagaagactgaaggag

SEQ ID NO: 252546 - DNA, 25 bp, Probe Sequence
gtccctttgatagataatgctgagt

SEQ ID NO: 252547 - DNA, 25 bp, Probe Sequence
gtcccagggacacgaactggagatt

SEQ ID NO: 252548 - DNA, 25 bp, Probe Sequence
gtcccaggtgtcgggtctggagaag

SEQ ID NO: 252549 - DNA, 25 bp, Probe Sequence
gtcgccagttgtgcacttttacaag

SEQ ID NO: 252550 - DNA, 25 bp, Probe Sequence
gtcgccagaagtagacctgtctagg

SEQ ID NO: 252551 - DNA, 25 bp, Probe Sequence
gtcctagagaccacctatggagagt

SEQ ID NO: 252552 - DNA, 25 bp, Probe Sequence
gtcggggatcggggcaagagaggct

SEQ ID NO: 252553 - DNA, 25 bp, Probe Sequence
gtcctggagagaccgcacaaggggc

SEQ ID NO: 252554 - DNA, 25 bp, Probe Sequence
gtcctggaaatctcacatggtgggc

SEQ ID NO: 252555 - DNA, 25 bp, Probe Sequence
gtccgtttgatcttcaagaactgtg

SEQ ID NO: 252556 - DNA, 25 bp, Probe Sequence
gtccgtttgatcttcaagaactgtg

SEQ ID NO: 252557 - DNA, 25 bp, Probe Sequence
gtccagttgtatgttcagtctcttg

SEQ ID NO: 252558 - DNA, 25 bp, Probe Sequence
gtccctggtatgatgagtttctaga

SEQ ID NO: 252559 - DNA, 25 bp, Probe Sequence
gtccttgtgtagcaaatttcgagca

SEQ ID NO: 252560 - DNA, 25 bp, Probe Sequence
gtcgttggtgttagaagtaccagca

SEQ ID NO: 252561 - DNA, 25 bp, Probe Sequence
gtcgcttactttgagtgatcctcca

SEQ ID NO: 252562 - DNA, 25 bp, Probe Sequence
gtcgttacatcactgacggtaatgc

SEQ ID NO: 252563 - DNA, 25 bp, Probe Sequence
gtcctttcacagccatggagtagag

SEQ ID NO: 252564 - DNA, 25 bp, Probe Sequence
gtcgagcttcaaggaggctgtcaag

SEQ ID NO: 252565 - DNA, 25 bp, Probe Sequence
gtcgagcttcaaggaggctgtcaag

SEQ ID NO: 252566 - DNA, 25 bp, Probe Sequence
gtcgagctatgcccagaggctgtgg

SEQ ID NO: 252567 - DNA, 25 bp, Probe Sequence
gtcgagcagtgctttggtgatgggc

SEQ ID NO: 252568 - DNA, 25 bp, Probe Sequence
gtcgacacgatttgtttgtggcgtt

SEQ ID NO: 252569 - DNA, 25 bp, Probe Sequence
gtcggaagattgctggactcgctga

SEQ ID NO: 252570 - DNA, 25 bp, Probe Sequence
gtcctaagcttggggattcgctggt

SEQ ID NO: 252571 - DNA, 25 bp, Probe Sequence
gtcccaccttgcgggtgatgttgtg

SEQ ID NO: 252572 - DNA, 25 bp, Probe Sequence
gtcccaacctcggggatgtgtgcag

SEQ ID NO: 252573 - DNA, 25 bp, Probe Sequence
gtcccccagctgggtgggctggaat

SEQ ID NO: 252574 - DNA, 25 bp, Probe Sequence
gtccaccaaatgcattggcctaaat

SEQ ID NO: 252575 - DNA, 25 bp, Probe Sequence
gtcccattctttatggcctatagtc

SEQ ID NO: 252576 - DNA, 25 bp, Probe Sequence
gtcccttatttgaaggcatctaaag

SEQ ID NO: 252577 - DNA, 25 bp, Probe Sequence
gtcccttccatagtcaataccaaca

SEQ ID NO: 252578 - DNA, 25 bp, Probe Sequence
gtccgtcgcaaaatccaacatgaaa

SEQ ID NO: 252579 - DNA, 25 bp, Probe Sequence
gtcctgcaccaaactacaaagatta

SEQ ID NO: 252580 - DNA, 25 bp, Probe Sequence
gtcctgctacagtgataaaaatggt

SEQ ID NO: 252581 - DNA, 25 bp, Probe Sequence
gtcgatgttgcagctttcaacaagg

SEQ ID NO: 252582 - DNA, 25 bp, Probe Sequence
gtcgtttgtgcctgtgcgaccaggc

SEQ ID NO: 252583 - DNA, 25 bp, Probe Sequence
gtgcgttcgcgcgagttggaatcga

SEQ ID NO: 252584 - DNA, 25 bp, Probe Sequence
gtcgttcggatggtgggaggctgcc

SEQ ID NO: 252585 - DNA, 25 bp, Probe Sequence
gtcgcgcccaagtctgggaagtgcc

SEQ ID NO: 252586 - DNA, 25 bp, Probe Sequence
gtcccccaacactgagcaagtatgc

SEQ ID NO: 252587 - DNA, 25 bp, Probe Sequence
gtccccagcacctggaacagtaact

SEQ ID NO: 252588 - DNA, 25 bp, Probe Sequence
gtccctcaacttggctaaagaatct

SEQ ID NO: 252589 - DNA, 25 bp, Probe Sequence
gtccctaccgtgtaaatagaatcca

SEQ ID NO: 252590 - DNA, 25 bp, Probe Sequence
gtcccatacgtcatgaagtcacact

SEQ ID NO: 252591 - DNA, 25 bp, Probe Sequence
gtcctatcagccatggaaacaccat

SEQ ID NO: 252592 - DNA, 25 bp, Probe Sequence
gtccacgagctcaatagggaagcct

SEQ ID NO: 252593 - DNA, 25 bp, Probe Sequence
gtcccgatgcactttgaggggtgtt

SEQ ID NO: 252594 - DNA, 25 bp, Probe Sequence
gtgcccgacaaatgggctgggcctt

SEQ ID NO: 252595 - DNA, 25 bp, Probe Sequence
gtccttgtggaataagattcccttt

SEQ ID NO: 252596 - DNA, 25 bp, Probe Sequence
gtcctctggaattcccagattcctc

SEQ ID NO: 252597 - DNA, 25 bp, Probe Sequence
gtcctctaggtaactcaagtgtcac

SEQ ID NO: 252598 - DNA, 25 bp, Probe Sequence
gtcctcttgaggcactcaagcctga

SEQ ID NO: 252599 - DNA, 25 bp, Probe Sequence
gtcctctagtgcaacgccatagcaa

SEQ ID NO: 252600 - DNA, 25 bp, Probe Sequence
gtcccaagtctgacagccagagcgt

SEQ ID NO: 252601 - DNA, 25 bp, Probe Sequence
gtcccagagtcaccacagagactgt

SEQ ID NO: 252602 - DNA, 25 bp, Probe Sequence
gtccaaggatcaccgcaatttttga

SEQ ID NO: 252603 - DNA, 25 bp, Probe Sequence
gtcgcaagtcacagaattatttgaa

SEQ ID NO: 252604 - DNA, 25 bp, Probe Sequence
gtcgtggtcagcgtgaactgattat

SEQ ID NO: 252605 - DNA, 25 bp, Probe Sequence
gtcggagatgcaggtgagggaattc

SEQ ID NO: 252606 - DNA, 25 bp, Probe Sequence
gtcgtcagtgcagatttggacttcc

SEQ ID NO: 252607 - DNA, 25 bp, Probe Sequence
gtccgtggcatttttgtgacttccc

SEQ ID NO: 252608 - DNA, 25 bp, Probe Sequence
gtgccttcaattttggtatttcggt

SEQ ID NO: 252609 - DNA, 25 bp, Probe Sequence
gtcctgaaattttagtctattctgg

SEQ ID NO: 252610 - DNA, 25 bp, Probe Sequence
gtcccaactgtttgaacagtgtgct

SEQ ID NO: 252611 - DNA, 25 bp, Probe Sequence
gtccctcactggatgaactgtgaca

SEQ ID NO: 252612 - DNA, 25 bp, Probe Sequence
gtccctgcaggacttagcacgagat

SEQ ID NO: 252613 - DNA, 25 bp, Probe Sequence
gtcgctcacaggacttggatctgaa

SEQ ID NO: 252614 - DNA, 25 bp, Probe Sequence
gtcccaagtactcggtgtcagagca

SEQ ID NO: 252615 - DNA, 25 bp, Probe Sequence
gtcccataccactcatggatctgaa

SEQ ID NO: 252616 - DNA, 25 bp, Probe Sequence
gtcccataccactcatggatctgaa

SEQ ID NO: 252617 - DNA, 25 bp, Probe Sequence
gtgcccttaactacgaactgaattg

SEQ ID NO: 252618 - DNA, 25 bp, Probe Sequence
gtcccattaagcaactaccagattt

SEQ ID NO: 252619 - DNA, 25 bp, Probe Sequence
gtccttgtagatagactgccgagtt

SEQ ID NO: 252620 - DNA, 25 bp, Probe Sequence
gtcgctatgtacctggtgatcggtt

SEQ ID NO: 252621 - DNA, 25 bp, Probe Sequence
gtcccattccctgggatctggtggt

SEQ ID NO: 252622 - DNA, 25 bp, Probe Sequence
gtcccattccctgggatctggtggt

SEQ ID NO: 252623 - DNA, 25 bp, Probe Sequence
gtcccagctcctcaggagctgaggg

SEQ ID NO: 252624 - DNA, 25 bp, Probe Sequence
gtccagtctccacagtagctagagg

SEQ ID NO: 252625 - DNA, 25 bp, Probe Sequence
gtcgcttgtcgacaacagctttttg

SEQ ID NO: 252626 - DNA, 25 bp, Probe Sequence
gtcgcttgggacagtagctttccag

SEQ ID NO: 252627 - DNA, 25 bp, Probe Sequence
gtcgtatcggtgggtagtgttctat

SEQ ID NO: 252628 - DNA, 25 bp, Probe Sequence
gtcgtatcctggtgaatgtctgttc

SEQ ID NO: 252629 - DNA, 25 bp, Probe Sequence
gtcgtagtcatttcggttctgatct

SEQ ID NO: 252630 - DNA, 25 bp, Probe Sequence
gtcgctattaccagtggttgatgcg

SEQ ID NO: 252631 - DNA, 25 bp, Probe Sequence
gtgccaataaccaagtttattcagt

SEQ ID NO: 252632 - DNA, 25 bp, Probe Sequence
gtccttaagctttactaaacatgat

SEQ ID NO: 252633 - DNA, 25 bp, Probe Sequence
gtccttaagtacttcctgaagatga

SEQ ID NO: 252634 - DNA, 25 bp, Probe Sequence
gtcgtgaaacgagtgatgcctgaag

SEQ ID NO: 252635 - DNA, 25 bp, Probe Sequence
gtcgtacatgacaaatatccataaa

SEQ ID NO: 252636 - DNA, 25 bp, Probe Sequence
gtcgcatatccaaaaaccataccac

SEQ ID NO: 252637 - DNA, 25 bp, Probe Sequence
gtcccagcctgcaaaagacaaccac

SEQ ID NO: 252638 - DNA, 25 bp, Probe Sequence
gtccctggtgctacacgacaaatcc

SEQ ID NO: 252639 - DNA, 25 bp, Probe Sequence
gtccgcatgttgtaatcgtgcaaat

SEQ ID NO: 252640 - DNA, 25 bp, Probe Sequence
gtccgcatgttgtaatcgtgcaaat

SEQ ID NO: 252641 - DNA, 25 bp, Probe Sequence
gtccgcagaggtgaccgaaaagccg

SEQ ID NO: 252642 - DNA, 25 bp, Probe Sequence
gtccgtgaggcagcacacgaagtca

SEQ ID NO: 252643 - DNA, 25 bp, Probe Sequence
gtccatttggactacaagaagagct

SEQ ID NO: 252644 - DNA, 25 bp, Probe Sequence
gtccatttggactacaagaagagct

SEQ ID NO: 252645 - DNA, 25 bp, Probe Sequence
gtccatttggactacaagaagagct

SEQ ID NO: 252646 - DNA, 25 bp, Probe Sequence
gtccacgtggcaggtgactaaagca

SEQ ID NO: 252647 - DNA, 25 bp, Probe Sequence
gtccacaatggaatcacctaaagga

SEQ ID NO: 252648 - DNA, 25 bp, Probe Sequence
ggtaagggctactatctcaagggga

SEQ ID NO: 252649 - DNA, 25 bp, Probe Sequence
tggatacgggttgactccggggatt

SEQ ID NO: 252650 - DNA, 25 bp, Probe Sequence
gtgataccgtttgactcacggggat

SEQ ID NO: 252651 - DNA, 25 bp, Probe Sequence
gtgtcccctatagatcacgggagaa

SEQ ID NO: 252652 - DNA, 25 bp, Probe Sequence
gtccccactctagagcagggaggca

SEQ ID NO: 252653 - DNA, 25 bp, Probe Sequence
gtccagccactgtggagggggcagt

SEQ ID NO: 252654 - DNA, 25 bp, Probe Sequence
gtccctcattgcaggggggagcaga

SEQ ID NO: 252655 - DNA, 25 bp, Probe Sequence
gtcctccaagccctggaggggctga

SEQ ID NO: 252656 - DNA, 25 bp, Probe Sequence
gtccatctggagttttgaggggtga

SEQ ID NO: 252657 - DNA, 25 bp, Probe Sequence
gtcgtccgagtatatgcagaagcag

SEQ ID NO: 252658 - DNA, 25 bp, Probe Sequence
gtcgtgcctgtgtgtatcagaaggg

SEQ ID NO: 252659 - DNA, 25 bp, Probe Sequence
gtcgctggcattttggttgatggat

SEQ ID NO: 252660 - DNA, 25 bp, Probe Sequence
gtcgttgcttcagtgttctgtggtc

SEQ ID NO: 252661 - DNA, 25 bp, Probe Sequence
gtcgttattatccttgtggagtaat

SEQ ID NO: 252662 - DNA, 25 bp, Probe Sequence
tgtcgtaacataacttacggtaaat

SEQ ID NO: 252663 - DNA, 25 bp, Probe Sequence
gtcctacatacaagtctaatggtaa

SEQ ID NO: 252664 - DNA, 25 bp, Probe Sequence
gtcccactgtgcaggtgctattgtt

SEQ ID NO: 252665 - DNA, 25 bp, Probe Sequence
gtccagatttgtcgtgttacagtta

SEQ ID NO: 252666 - DNA, 25 bp, Probe Sequence
gtcgcaaggtggccgttactgatct

SEQ ID NO: 252667 - DNA, 25 bp, Probe Sequence
gtcctgagtaggtgcatttctgtct

SEQ ID NO: 252668 - DNA, 25 bp, Probe Sequence
gtcctgcggaaatgtgtcttgtctc

SEQ ID NO: 252669 - DNA, 25 bp, Probe Sequence
gtcctggtggcgtggtctatggagc

SEQ ID NO: 252670 - DNA, 25 bp, Probe Sequence
gtccagagggggatcgctgaggagc

SEQ ID NO: 252671 - DNA, 25 bp, Probe Sequence
gtccgaggggtgaagctcgtgggca

SEQ ID NO: 252672 - DNA, 25 bp, Probe Sequence
gtccaaggggctaagggcttccagc

SEQ ID NO: 252673 - DNA, 25 bp, Probe Sequence
gtgctaggggatgaggggcttcctg

SEQ ID NO: 252674 - DNA, 25 bp, Probe Sequence
gtggggggatggtggacagtcctgc

SEQ ID NO: 252675 - DNA, 25 bp, Probe Sequence
gtgagcgtgggaagaggtaaaccat

SEQ ID NO: 252676 - DNA, 25 bp, Probe Sequence
gtgatggtgaggatactttggagtc

SEQ ID NO: 252677 - DNA, 25 bp, Probe Sequence
gtgagcgctgggctgttttagtgcc

SEQ ID NO: 252678 - DNA, 25 bp, Probe Sequence
ggagggggcgttcactgaagacttc

SEQ ID NO: 252679 - DNA, 25 bp, Probe Sequence
ggaccggtggttcaaaagtgcatta

SEQ ID NO: 252680 - DNA, 25 bp, Probe Sequence
gtgctttttgcctttaagaaatatt

SEQ ID NO: 252681 - DNA, 25 bp, Probe Sequence
gtcctttgtgccttggcaaaaaagc

SEQ ID NO: 252682 - DNA, 25 bp, Probe Sequence
gtccttccatcccactgggaaaacg

SEQ ID NO: 252683 - DNA, 25 bp, Probe Sequence
gtcctctgccagcctacaggaggaa

SEQ ID NO: 252684 - DNA, 25 bp, Probe Sequence
gtcctctgccagcctacaggaggaa

SEQ ID NO: 252685 - DNA, 25 bp, Probe Sequence
gtcctctgccagcctacaggaggaa

SEQ ID NO: 252686 - DNA, 25 bp, Probe Sequence
gtccctggaacgccagatgcgtgaa

SEQ ID NO: 252687 - DNA, 25 bp, Probe Sequence
gtcctcaagggccacatagctgtga

SEQ ID NO: 252688 - DNA, 25 bp, Probe Sequence
gtcccagtggtgacatctcagtttg

SEQ ID NO: 252689 - DNA, 25 bp, Probe Sequence
gtccctgtggtatatactttctcct

SEQ ID NO: 252690 - DNA, 25 bp, Probe Sequence
gtcctcttggaatgacatttttggt

SEQ ID NO: 252691 - DNA, 25 bp, Probe Sequence
gtcccttacagtggtcatttaaagt

SEQ ID NO: 252692 - DNA, 25 bp, Probe Sequence
gtccggcgacagggtctacaagaac

SEQ ID NO: 252693 - DNA, 25 bp, Probe Sequence
gtccccgcacatgtgtttaatactc

SEQ ID NO: 252694 - DNA, 25 bp, Probe Sequence
gtccctccatctggtatgagtaacc

SEQ ID NO: 252695 - DNA, 25 bp, Probe Sequence
gtcctagccaatggtctggacaaca

SEQ ID NO: 252696 - DNA, 25 bp, Probe Sequence
gtcgttgtcatttttgcatgaccaa

SEQ ID NO: 252697 - DNA, 25 bp, Probe Sequence
gtcgctgtgatcatgatcttcgaga

SEQ ID NO: 252698 - DNA, 25 bp, Probe Sequence
gtccggatattgtcccgagatgtgt

SEQ ID NO: 252699 - DNA, 25 bp, Probe Sequence
gtcccaatgaaatactgagatgctg

SEQ ID NO: 252700 - DNA, 25 bp, Probe Sequence
gtcccgatgaaggagctctgagagg

SEQ ID NO: 252701 - DNA, 25 bp, Probe Sequence
gtccgtaggagccactatgaggagg

SEQ ID NO: 252702 - DNA, 25 bp, Probe Sequence
gtccccagcgaccgctataaggtgg

SEQ ID NO: 252703 - DNA, 25 bp, Probe Sequence
gtccccagcgaccgctataaggtgg

SEQ ID NO: 252704 - DNA, 25 bp, Probe Sequence
gtcgcccagatcaaggctcatgtag

SEQ ID NO: 252705 - DNA, 25 bp, Probe Sequence
gtccgccagtgaagctgctgatggg

SEQ ID NO: 252706 - DNA, 25 bp, Probe Sequence
gtcgctgccgtgatgtggaggagga

SEQ ID NO: 252707 - DNA, 25 bp, Probe Sequence
gtcgctgccgtgatgtggaggagga

SEQ ID NO: 252708 - DNA, 25 bp, Probe Sequence
gtcgctgccgtgatgtggaggagga

SEQ ID NO: 252709 - DNA, 25 bp, Probe Sequence
gtcgcctcagtggcgtgggcaatgt

SEQ ID NO: 252710 - DNA, 25 bp, Probe Sequence
gtcgcccaggctggagggcagtggc

SEQ ID NO: 252711 - DNA, 25 bp, Probe Sequence
gtgcgtcctgaggagagaaccggcg

SEQ ID NO: 252712 - DNA, 25 bp, Probe Sequence
gtcgtgagctggggagtgggctgtg

SEQ ID NO: 252713 - DNA, 25 bp, Probe Sequence
gtcgctgacataggtgggaggattg

SEQ ID NO: 252714 - DNA, 25 bp, Probe Sequence
gtcgaactctcgcgagagcgtatct

SEQ ID NO: 252715 - DNA, 25 bp, Probe Sequence
gtgcggaattcgatataagtacttt

SEQ ID NO: 252716 - DNA, 25 bp, Probe Sequence
gtcgaagatttggtaaactgtcatt

SEQ ID NO: 252717 - DNA, 25 bp, Probe Sequence
gtgctattctgcttgtttaactaga

SEQ ID NO: 252718 - DNA, 25 bp, Probe Sequence
gtgctattctgcttgtttaactaga

SEQ ID NO: 252719 - DNA, 25 bp, Probe Sequence
gtccatgttggtctcatacctcata

SEQ ID NO: 252720 - DNA, 25 bp, Probe Sequence
gtccatgggactgttacctacacat

SEQ ID NO: 252721 - DNA, 25 bp, Probe Sequence
gtccagaccacttaaaactacagct

SEQ ID NO: 252722 - DNA, 25 bp, Probe Sequence
gtccacaacctgctcaaaatacagt

SEQ ID NO: 252723 - DNA, 25 bp, Probe Sequence
gtcccaacctccggagaaaacagag

SEQ ID NO: 252724 - DNA, 25 bp, Probe Sequence
gtccgaacctaccaagagcacaaag

SEQ ID NO: 252725 - DNA, 25 bp, Probe Sequence
gtcctgaaccttttacagacttgcc

SEQ ID NO: 252726 - DNA, 25 bp, Probe Sequence
gtcctgagccggtttaagtctgtgg

SEQ ID NO: 252727 - DNA, 25 bp, Probe Sequence
gtcccggctgggatgaagtctggtg

SEQ ID NO: 252728 - DNA, 25 bp, Probe Sequence
gtccccgtagagttcatagtctatt

SEQ ID NO: 252729 - DNA, 25 bp, Probe Sequence
gtcccttgtaaatcaagatgttctg

SEQ ID NO: 252730 - DNA, 25 bp, Probe Sequence
gtccctttagaatcctcattacaat

SEQ ID NO: 252731 - DNA, 25 bp, Probe Sequence
gtcccttcgagtttctagttacaga

SEQ ID NO: 252732 - DNA, 25 bp, Probe Sequence
gtcctttggagttactgcagttact

SEQ ID NO: 252733 - DNA, 25 bp, Probe Sequence
gtgccaaaaagttaaatgtttctgg

SEQ ID NO: 252734 - DNA, 25 bp, Probe Sequence
gtgccggttagtcaggtttgttgaa

SEQ ID NO: 252735 - DNA, 25 bp, Probe Sequence
gtcctgtgttatagtagttttgtta

SEQ ID NO: 252736 - DNA, 25 bp, Probe Sequence
gtcctccatacaccataggttttta

SEQ ID NO: 252737 - DNA, 25 bp, Probe Sequence
gtcccagcataaggcatcaggttgt

SEQ ID NO: 252738 - DNA, 25 bp, Probe Sequence
gtcccagataaactcaggccagatc

SEQ ID NO: 252739 - DNA, 25 bp, Probe Sequence
gtccgcaaccagatagggagatgcc

SEQ ID NO: 252740 - DNA, 25 bp, Probe Sequence
gtcccacacatccaggaaagaggcc

SEQ ID NO: 252741 - DNA, 25 bp, Probe Sequence
gtccgcaaatggctgcaaaagccca

SEQ ID NO: 252742 - DNA, 25 bp, Probe Sequence
gtcgagcaaaaaggcaaagaccaag

SEQ ID NO: 252743 - DNA, 25 bp, Probe Sequence
gtccaataaaatgcctcaaccacgg

SEQ ID NO: 252744 - DNA, 25 bp, Probe Sequence
gtcccaaaaacaaatcgcagccagc

SEQ ID NO: 252745 - DNA, 25 bp, Probe Sequence
gtccgataccaataagtcagcctga

SEQ ID NO: 252746 - DNA, 25 bp, Probe Sequence
gtcccaccaccagagagatcggtga

SEQ ID NO: 252747 - DNA, 25 bp, Probe Sequence
gtccaagtcccggaagatcgcgatc

SEQ ID NO: 252748 - DNA, 25 bp, Probe Sequence
gtccatagtacccattaggacttcc

SEQ ID NO: 252749 - DNA, 25 bp, Probe Sequence
gtccgagattgcagattgagtaccc

SEQ ID NO: 252750 - DNA, 25 bp, Probe Sequence
gtcctagttgttccatgagtcagcc

SEQ ID NO: 252751 - DNA, 25 bp, Probe Sequence
gtcccagatggtttctattggctcg

SEQ ID NO: 252752 - DNA, 25 bp, Probe Sequence
gtgccaaatggtgccatgatcccca

SEQ ID NO: 252753 - DNA, 25 bp, Probe Sequence
gtccaacgaaagccatgaccacatg

SEQ ID NO: 252754 - DNA, 25 bp, Probe Sequence
gtcgctacagcaagaggtgcccata

SEQ ID NO: 252755 - DNA, 25 bp, Probe Sequence
gtcccacactagagctctacatact

SEQ ID NO: 252756 - DNA, 25 bp, Probe Sequence
gtcccaaggagcaagtatttacatt

SEQ ID NO: 252757 - DNA, 25 bp, Probe Sequence
gtgctaagggtccagtatttatttg

SEQ ID NO: 252758 - DNA, 25 bp, Probe Sequence
gtcgaagtggtcagcctatggtttg

SEQ ID NO: 252759 - DNA, 25 bp, Probe Sequence
gtcgcaaaggataccctggagttta

SEQ ID NO: 252760 - DNA, 25 bp, Probe Sequence
gtcgctgagaggttgaccaggaaat

SEQ ID NO: 252761 - DNA, 25 bp, Probe Sequence
gtcctgaaagaagctgtggccaata

SEQ ID NO: 252762 - DNA, 25 bp, Probe Sequence
gtcctgaagaagtggtacacgattt

SEQ ID NO: 252763 - DNA, 25 bp, Probe Sequence
gtcctgaggaagtggccactcttgt

SEQ ID NO: 252764 - DNA, 25 bp, Probe Sequence
gtcctgaggagagaaccggtgcgtc

SEQ ID NO: 252765 - DNA, 25 bp, Probe Sequence
gtccaaggaaggggcctggtggtgc

SEQ ID NO: 252766 - DNA, 25 bp, Probe Sequence
gtcccaggacgagctgtgggggctg

SEQ ID NO: 252767 - DNA, 25 bp, Probe Sequence
gtcccaatgggagctgctggggtgc

SEQ ID NO: 252768 - DNA, 25 bp, Probe Sequence
gtccccttgagaggtcagaggggcc

SEQ ID NO: 252769 - DNA, 25 bp, Probe Sequence
gtcgccgtctggatgaccagagggc

SEQ ID NO: 252770 - DNA, 25 bp, Probe Sequence
gtcgcacggcgtgcaagcacgggag

SEQ ID NO: 252771 - DNA, 25 bp, Probe Sequence
gtccctgtgatggccaggccagggg

SEQ ID NO: 252772 - DNA, 25 bp, Probe Sequence
gtccctgtgaaccatgagccatgga

SEQ ID NO: 252773 - DNA, 25 bp, Probe Sequence
gtccctggaaggggcgctgagaaag

SEQ ID NO: 252774 - DNA, 25 bp, Probe Sequence
gtccttgtaagcttcccttgaaaat

SEQ ID NO: 252775 - DNA, 25 bp, Probe Sequence
gtccctttgtatttccttaagaatg

SEQ ID NO: 252776 - DNA, 25 bp, Probe Sequence
gtccctgtcgttttaattataatat

SEQ ID NO: 252777 - DNA, 25 bp, Probe Sequence
gtccacttttgtcacaattcatttt

SEQ ID NO: 252778 - DNA, 25 bp, Probe Sequence
gtccctgtctttaaagagttcattg

SEQ ID NO: 252779 - DNA, 25 bp, Probe Sequence
gtccgggctgtgagcaagaggaagc

SEQ ID NO: 252780 - DNA, 25 bp, Probe Sequence
gtccacataggtctgcaaaggaatc

SEQ ID NO: 252781 - DNA, 25 bp, Probe Sequence
gtccagccaggactatgaaggtggt

SEQ ID NO: 252782 - DNA, 25 bp, Probe Sequence
gtccccaggccttgaggtggaatcc

SEQ ID NO: 252783 - DNA, 25 bp, Probe Sequence
gtgcccgtggccaataagagggaca

SEQ ID NO: 252784 - DNA, 25 bp, Probe Sequence
gtcccgtgcacaataagagcgaacc

SEQ ID NO: 252785 - DNA, 25 bp, Probe Sequence
gtgccaaggctaaaagacgaaatac

SEQ ID NO: 252786 - DNA, 25 bp, Probe Sequence
gtccgagagctagatggaagaacac

SEQ ID NO: 252787 - DNA, 25 bp, Probe Sequence
gtcccaactggccagacaagtaccc

SEQ ID NO: 252788 - DNA, 25 bp, Probe Sequence
gtcccaagtgccaaagaagcagacc

SEQ ID NO: 252789 - DNA, 25 bp, Probe Sequence
gtccctgaggacaaagggcaacctg

SEQ ID NO: 252790 - DNA, 25 bp, Probe Sequence
gtgcctcgatggcaaacggaagcct

SEQ ID NO: 252791 - DNA, 25 bp, Probe Sequence
gtccatgagtttcaagcggaaccgc

SEQ ID NO: 252792 - DNA, 25 bp, Probe Sequence
gtcctgaagttgcaacaaaacccaa

SEQ ID NO: 252793 - DNA, 25 bp, Probe Sequence
gtcctcaggttatcataaaccccat

SEQ ID NO: 252794 - DNA, 25 bp, Probe Sequence
gtcgccagaattgtcatagaacccc

SEQ ID NO: 252795 - DNA, 25 bp, Probe Sequence
gtcgcgagcacatgttcatatagtc

SEQ ID NO: 252796 - DNA, 25 bp, Probe Sequence
gtcctcagcagctggtaatcttgct

SEQ ID NO: 252797 - DNA, 25 bp, Probe Sequence
gtccaagccctggataatgctttac

SEQ ID NO: 252798 - DNA, 25 bp, Probe Sequence
gtccacgcctgttgaagttttatgt

SEQ ID NO: 252799 - DNA, 25 bp, Probe Sequence
gtccgtcaagcctaagtccttgagt

SEQ ID NO: 252800 - DNA, 25 bp, Probe Sequence
gtccccactgccaacgtgtcagtgg

SEQ ID NO: 252801 - DNA, 25 bp, Probe Sequence
gtccccactgccaacgtgtcagtgg

SEQ ID NO: 252802 - DNA, 25 bp, Probe Sequence
gtccccactgtgaaggatgaagagc

SEQ ID NO: 252803 - DNA, 25 bp, Probe Sequence
gtccccacagtatgagatgaataga

SEQ ID NO: 252804 - DNA, 25 bp, Probe Sequence
gtccccacagagcgaataaagccaa

SEQ ID NO: 252805 - DNA, 25 bp, Probe Sequence
gtccccagggatcaaacagaagcag

SEQ ID NO: 252806 - DNA, 25 bp, Probe Sequence
gtccccagggatcaacagaagcagc

SEQ ID NO: 252807 - DNA, 25 bp, Probe Sequence
gtcccacgtgaacagatagagaggc

SEQ ID NO: 252808 - DNA, 25 bp, Probe Sequence
gtccccctcatcagaaagaagtcct

SEQ ID NO: 252809 - DNA, 25 bp, Probe Sequence
gtcccgcctcatacaaattaagtta

SEQ ID NO: 252810 - DNA, 25 bp, Probe Sequence
gtcctactctatacaatgcttaccg

SEQ ID NO: 252811 - DNA, 25 bp, Probe Sequence
gtcctccctatgattcttattggtg

SEQ ID NO: 252812 - DNA, 25 bp, Probe Sequence
gtcgctccactttttcactatagag

SEQ ID NO: 252813 - DNA, 25 bp, Probe Sequence
gtcctgacctctcttatcaagagca

SEQ ID NO: 252814 - DNA, 25 bp, Probe Sequence
gtccatgagtttcttgctcaaaaaa

SEQ ID NO: 252815 - DNA, 25 bp, Probe Sequence
gtcctgaatggtgtttcataaactg

SEQ ID NO: 252816 - DNA, 25 bp, Probe Sequence
gtccatcgaggtgtttcataagttt

SEQ ID NO: 252817 - DNA, 25 bp, Probe Sequence
gtcctctgaacggagttcaaaggct

SEQ ID NO: 252818 - DNA, 25 bp, Probe Sequence
gtcccggcatcacagataaaatggt

SEQ ID NO: 252819 - DNA, 25 bp, Probe Sequence
gtccctggcatctgttcagagcagt

SEQ ID NO: 252820 - DNA, 25 bp, Probe Sequence
gtgccccgcactgtggaagagattg

SEQ ID NO: 252821 - DNA, 25 bp, Probe Sequence
gtcccactgcttggagggggcataa

SEQ ID NO: 252822 - DNA, 25 bp, Probe Sequence
gtccacctgttttcagaggatatag

SEQ ID NO: 252823 - DNA, 25 bp, Probe Sequence
gtccgcctttcttatatgaatcatc

SEQ ID NO: 252824 - DNA, 25 bp, Probe Sequence
gtccggttactttatgcagattgct

SEQ ID NO: 252825 - DNA, 25 bp, Probe Sequence
gtgctggcggctggtttacgccgct

SEQ ID NO: 252826 - DNA, 25 bp, Probe Sequence
gtccgcatggtcatcattaaccagc

SEQ ID NO: 252827 - DNA, 25 bp, Probe Sequence
gtcgctctgtctggagcataaccca

SEQ ID NO: 252828 - DNA, 25 bp, Probe Sequence
gtcctcgctgctgagaagagccact

SEQ ID NO: 252829 - DNA, 25 bp, Probe Sequence
gtcctcagggtgggcagagccacta

SEQ ID NO: 252830 - DNA, 25 bp, Probe Sequence
gtcctggggcaggaggatcaccgac

SEQ ID NO: 252831 - DNA, 25 bp, Probe Sequence
gtcctggaagtcccgatcaccaggt

SEQ ID NO: 252832 - DNA, 25 bp, Probe Sequence
gtccgagaagtcaggcacgtagctc

SEQ ID NO: 252833 - DNA, 25 bp, Probe Sequence
gtccaacgaggtggtcaagctgagc

SEQ ID NO: 252834 - DNA, 25 bp, Probe Sequence
gtccagcagggggcagtaagtgatc

SEQ ID NO: 252835 - DNA, 25 bp, Probe Sequence
gtccgagcgtggcctgctgaaggac

SEQ ID NO: 252836 - DNA, 25 bp, Probe Sequence
gtccgtctgtgtctgtgagggattg

SEQ ID NO: 252837 - DNA, 25 bp, Probe Sequence
gtccagtcaggtgtgtgttctttgt

SEQ ID NO: 252838 - DNA, 25 bp, Probe Sequence
gtccatgtagtttgtttcctactta

SEQ ID NO: 252839 - DNA, 25 bp, Probe Sequence
gtccgtagttttatagtcctatttg

SEQ ID NO: 252840 - DNA, 25 bp, Probe Sequence
gtcctgctacttgctaaagttctct

SEQ ID NO: 252841 - DNA, 25 bp, Probe Sequence
gtccatgccattaagtacaaattct

SEQ ID NO: 252842 - DNA, 25 bp, Probe Sequence
gtcctccattttaaacagatacctt

SEQ ID NO: 252843 - DNA, 25 bp, Probe Sequence
gtccctttgtgacttcaagaaccct

SEQ ID NO: 252844 - DNA, 25 bp, Probe Sequence
gtccctttgtgacttcaagaaccct

SEQ ID NO: 252845 - DNA, 25 bp, Probe Sequence
gtccctttgtgacttcaagaaccct

SEQ ID NO: 252846 - DNA, 25 bp, Probe Sequence
gtccccgatgaaccaagagaaccct

SEQ ID NO: 252847 - DNA, 25 bp, Probe Sequence
gtcgcctctggcagcgaaaagaccc

SEQ ID NO: 252848 - DNA, 25 bp, Probe Sequence
gtcgctgctgtgctgtggagaaaga

SEQ ID NO: 252849 - DNA, 25 bp, Probe Sequence
gtcgctgctgtgctgtggagaaaga

SEQ ID NO: 252850 - DNA, 25 bp, Probe Sequence
gtcgctgctgtgctgtggagaaaga

SEQ ID NO: 252851 - DNA, 25 bp, Probe Sequence
gtcgctgatgctcactctgaaataa

SEQ ID NO: 252852 - DNA, 25 bp, Probe Sequence
gtcccagcatccttgctgaactaca

SEQ ID NO: 252853 - DNA, 25 bp, Probe Sequence
gtcccagattggctcacactgagaa

SEQ ID NO: 252854 - DNA, 25 bp, Probe Sequence
gtcccagatatactacaactcaatg

SEQ ID NO: 252855 - DNA, 25 bp, Probe Sequence
gtcccggagagctgagcagtcaaga

SEQ ID NO: 252856 - DNA, 25 bp, Probe Sequence
gtcctggggctgttgagcagcataa

SEQ ID NO: 252857 - DNA, 25 bp, Probe Sequence
gtcctggggctgaatgggcaaatct

SEQ ID NO: 252858 - DNA, 25 bp, Probe Sequence
gtcctggtggtgcctatgggactgc

SEQ ID NO: 252859 - DNA, 25 bp, Probe Sequence
gtccaggtcgggtgtggactgtcct

SEQ ID NO: 252860 - DNA, 25 bp, Probe Sequence
gtccgggagttgtgatgggtacctg

SEQ ID NO: 252861 - DNA, 25 bp, Probe Sequence
gtccggggtattatgtgcttagctt

SEQ ID NO: 252862 - DNA, 25 bp, Probe Sequence
gtccgggtggttaagagcatatctc

SEQ ID NO: 252863 - DNA, 25 bp, Probe Sequence
gtccctgggtgacatgtcagatctt

SEQ ID NO: 252864 - DNA, 25 bp, Probe Sequence
gtccctcagggagatggctcatgtt

SEQ ID NO: 252865 - DNA, 25 bp, Probe Sequence
gtccccaagtgtgcaagctcagtat

SEQ ID NO: 252866 - DNA, 25 bp, Probe Sequence
gtcccacaagatgacaaccagtcgt

SEQ ID NO: 252867 - DNA, 25 bp, Probe Sequence
gtcccacaactcgtcaagcttgggt

SEQ ID NO: 252868 - DNA, 25 bp, Probe Sequence
gtccccatactcctatgatctgagt

SEQ ID NO: 252869 - DNA, 25 bp, Probe Sequence
gtccgacgaatccaatgatctcctt

SEQ ID NO: 252870 - DNA, 25 bp, Probe Sequence
gtccagcctaatcaaatgtcataat

SEQ ID NO: 252871 - DNA, 25 bp, Probe Sequence
gtccctctcactaatgtttcaacaa

SEQ ID NO: 252872 - DNA, 25 bp, Probe Sequence
gtcctcctcctgacgttgtaaatca

SEQ ID NO: 252873 - DNA, 25 bp, Probe Sequence
gtccattatttaccttgaacaatca

SEQ ID NO: 252874 - DNA, 25 bp, Probe Sequence
gtccatttataccctgtaaagccgt

SEQ ID NO: 252875 - DNA, 25 bp, Probe Sequence
gtccatggttacccttaagtcttca

SEQ ID NO: 252876 - DNA, 25 bp, Probe Sequence
gtccaggtgacatccactatagtct

SEQ ID NO: 252877 - DNA, 25 bp, Probe Sequence
gtccgtggaccaggaggattgcctt

SEQ ID NO: 252878 - DNA, 25 bp, Probe Sequence
gtccttgatgacgtctcggattgcc

SEQ ID NO: 252879 - DNA, 25 bp, Probe Sequence
gtcctgtgaagtgagggctgtgcct

SEQ ID NO: 252880 - DNA, 25 bp, Probe Sequence
gtccttgacaaaatgtgttctgcct

SEQ ID NO: 252881 - DNA, 25 bp, Probe Sequence
gtccctgcaagaactggttctgcca

SEQ ID NO: 252882 - DNA, 25 bp, Probe Sequence
gtccactgccaggcaggcatttccc

SEQ ID NO: 252883 - DNA, 25 bp, Probe Sequence
gtcctctccaacagaatatgctcca

SEQ ID NO: 252884 - DNA, 25 bp, Probe Sequence
gtccctcaatcagttgcagacattc

SEQ ID NO: 252885 - DNA, 25 bp, Probe Sequence
gtccccataatcagcaatgatgtct

SEQ ID NO: 252886 - DNA, 25 bp, Probe Sequence
gtccttctatactgcaagtcttttg

SEQ ID NO: 252887 - DNA, 25 bp, Probe Sequence
gtcctttttcgggagttagatgtat

SEQ ID NO: 252888 - DNA, 25 bp, Probe Sequence
gtcctccttgtgggtagttaagagt

SEQ ID NO: 252889 - DNA, 25 bp, Probe Sequence
gtccaccttcttgatattttaggat

SEQ ID NO: 252890 - DNA, 25 bp, Probe Sequence
gtcccattttcagactgctttaaaa

SEQ ID NO: 252891 - DNA, 25 bp, Probe Sequence
gtcccattttccaacatgttataat

SEQ ID NO: 252892 - DNA, 25 bp, Probe Sequence
gtccctttctccataaaattcttct

SEQ ID NO: 252893 - DNA, 25 bp, Probe Sequence
tgtccaatttctattaaaggttcct

SEQ ID NO: 252894 - DNA, 25 bp, Probe Sequence
tgtccaatttctattaaaggttcct

SEQ ID NO: 252895 - DNA, 25 bp, Probe Sequence
gtccatatttctacttataacctgt

SEQ ID NO: 252896 - DNA, 25 bp, Probe Sequence
gtcctttttctcagcatcagagcca

SEQ ID NO: 252897 - DNA, 25 bp, Probe Sequence
gtcctgttttgaatgccaaacccac

SEQ ID NO: 252898 - DNA, 25 bp, Probe Sequence
gtccagttatgtcaataaacccact

SEQ ID NO: 252899 - DNA, 25 bp, Probe Sequence
gtccatcttggtcaaggacacccag

SEQ ID NO: 252900 - DNA, 25 bp, Probe Sequence
gtccattgatggcctaagttcctcc

SEQ ID NO: 252901 - DNA, 25 bp, Probe Sequence
gtccattcatgtctagaaggcttac

SEQ ID NO: 252902 - DNA, 25 bp, Probe Sequence
gtcctgcatcttctataaacaggca

SEQ ID NO: 252903 - DNA, 25 bp, Probe Sequence
gtcctgccttgttattgtaagtgcc

SEQ ID NO: 252904 - DNA, 25 bp, Probe Sequence
gtcctggtggtattttcaatagcca

SEQ ID NO: 252905 - DNA, 25 bp, Probe Sequence
gtgccggggaattaaccaggccgtg

SEQ ID NO: 252906 - DNA, 25 bp, Probe Sequence
gtcctggaggaattaatgcctggaa

SEQ ID NO: 252907 - DNA, 25 bp, Probe Sequence
gtcctgaaggacttaaagcatctgc

SEQ ID NO: 252908 - DNA, 25 bp, Probe Sequence
gtgccaataaatgtgacaacttgga

SEQ ID NO: 252909 - DNA, 25 bp, Probe Sequence
gtgcctcttttgggccaattatgtg

SEQ ID NO: 252910 - DNA, 25 bp, Probe Sequence
gtccctttgttgcagactttgctga

SEQ ID NO: 252911 - DNA, 25 bp, Probe Sequence
gtcccttctgttggagattcctttc

SEQ ID NO: 252912 - DNA, 25 bp, Probe Sequence
gtccctctttggcagttgcattagt

SEQ ID NO: 252913 - DNA, 25 bp, Probe Sequence
gtgccctctttgaaagtgttaacct

SEQ ID NO: 252914 - DNA, 25 bp, Probe Sequence
gtcccagcttcgaaagtgtgtggat

SEQ ID NO: 252915 - DNA, 25 bp, Probe Sequence
gtcccagctactcgacaggatgagg

SEQ ID NO: 252916 - DNA, 25 bp, Probe Sequence
gtcccagctagcacctgagagctgg

SEQ ID NO: 252917 - DNA, 25 bp, Probe Sequence
gtcccagctagttgggaggctgaga

SEQ ID NO: 252918 - DNA, 25 bp, Probe Sequence
gtcccagctacttgggaagctgagg

SEQ ID NO: 252919 - DNA, 25 bp, Probe Sequence
gtccctgtcttgtgggagatgcgta

SEQ ID NO: 252920 - DNA, 25 bp, Probe Sequence
gtcccagtctattcgggagtctgag

SEQ ID NO: 252921 - DNA, 25 bp, Probe Sequence
gtccgcggctgatcgcggagctggc

SEQ ID NO: 252922 - DNA, 25 bp, Probe Sequence
gtcctggtggatcacgtggtggagt

SEQ ID NO: 252923 - DNA, 25 bp, Probe Sequence
gtgcctgttcgacatgggcggtgag

SEQ ID NO: 252924 - DNA, 25 bp, Probe Sequence
gtcctgaccgagttgggcagtctga

SEQ ID NO: 252925 - DNA, 25 bp, Probe Sequence
gtccagaactctttggtgactccaa

SEQ ID NO: 252926 - DNA, 25 bp, Probe Sequence
gtccagaaaattagggtcccagaag

SEQ ID NO: 252927 - DNA, 25 bp, Probe Sequence
gtccctaaaccgctccatagagaag

SEQ ID NO: 252928 - DNA, 25 bp, Probe Sequence
gtccgacaacaccgtgtccaaaaag

SEQ ID NO: 252929 - DNA, 25 bp, Probe Sequence
gtccagcacacagatgcggttcatg

SEQ ID NO: 252930 - DNA, 25 bp, Probe Sequence
gtccgggattgcccgggatctcacg

SEQ ID NO: 252931 - DNA, 25 bp, Probe Sequence
gtccggaattcccgggatcacggtg

SEQ ID NO: 252932 - DNA, 25 bp, Probe Sequence
gtccggaattcccgggatcagctgc

SEQ ID NO: 252933 - DNA, 25 bp, Probe Sequence
gtccggaattcccgggattgcctat

SEQ ID NO: 252934 - DNA, 25 bp, Probe Sequence
gtccggaattcccgggatctcaaca

SEQ ID NO: 252935 - DNA, 25 bp, Probe Sequence
gtccggaattcccgggatgccacag

SEQ ID NO: 252936 - DNA, 25 bp, Probe Sequence
gtccgggattcccgggatcgcgagc

SEQ ID NO: 252937 - DNA, 25 bp, Probe Sequence
gtccggaattcccgggatcgcgagc

SEQ ID NO: 252938 - DNA, 25 bp, Probe Sequence
gtccggaattcccgggatcgcgagc

SEQ ID NO: 252939 - DNA, 25 bp, Probe Sequence
gtccggaattcccgggatcgcgagc

SEQ ID NO: 252940 - DNA, 25 bp, Probe Sequence
gtccggaattcccgggatcgcgagc

SEQ ID NO: 252941 - DNA, 25 bp, Probe Sequence
gtccggaattcccgggatcgcgagc

SEQ ID NO: 252942 - DNA, 25 bp, Probe Sequence
gtccggaattcccgggatcgcgagc

SEQ ID NO: 252943 - DNA, 25 bp, Probe Sequence
gtccggaattcccgggatcgcgtgc

SEQ ID NO: 252944 - DNA, 25 bp, Probe Sequence
gtccggaattcccgggatgccttgg

SEQ ID NO: 252945 - DNA, 25 bp, Probe Sequence
gtccacgtttcctgaggagctttga

SEQ ID NO: 252946 - DNA, 25 bp, Probe Sequence
gtcccgactgtgccaaaaagctgta

SEQ ID NO: 252947 - DNA, 25 bp, Probe Sequence
gtcctagaggtggcaagaaggatga

SEQ ID NO: 252948 - DNA, 25 bp, Probe Sequence
gtccccagggctgcagaaggaggct

SEQ ID NO: 252949 - DNA, 25 bp, Probe Sequence
gtccccaacgccaagaagctcaggc

SEQ ID NO: 252950 - DNA, 25 bp, Probe Sequence
gtccagcccacgactgagaacaagg

SEQ ID NO: 252951 - DNA, 25 bp, Probe Sequence
gtcccgatcaccaggtgccatatgg

SEQ ID NO: 252952 - DNA, 25 bp, Probe Sequence
gtccctgataactgcgtctaagacc

SEQ ID NO: 252953 - DNA, 25 bp, Probe Sequence
gtcccgtgtcactgtttacatgacc

SEQ ID NO: 252954 - DNA, 25 bp, Probe Sequence
gtccaattgttctgctctaactgat

SEQ ID NO: 252955 - DNA, 25 bp, Probe Sequence
gtcctcaagtttgcctgcaaggtac

SEQ ID NO: 252956 - DNA, 25 bp, Probe Sequence
gtgttcatagtcaggcgttagtaat

SEQ ID NO: 252957 - DNA, 25 bp, Probe Sequence
gggccaaattatgtgtctagtaact

SEQ ID NO: 252958 - DNA, 25 bp, Probe Sequence
gggccatagtttgttaatctcaact

SEQ ID NO: 252959 - DNA, 25 bp, Probe Sequence
gtgtgaccgtttgctaaataaagtg

SEQ ID NO: 252960 - DNA, 25 bp, Probe Sequence
gtgctacctggtgccgacaagaaag

SEQ ID NO: 252961 - DNA, 25 bp, Probe Sequence
gtgccaggtggagctcaacaggaaa

SEQ ID NO: 252962 - DNA, 25 bp, Probe Sequence
gtccagactgtctctccaagagaac

SEQ ID NO: 252963 - DNA, 25 bp, Probe Sequence
gtccaggttctattgccaagaatgt

SEQ ID NO: 252964 - DNA, 25 bp, Probe Sequence
gtccaggatggccctgacaagtatg

SEQ ID NO: 252965 - DNA, 25 bp, Probe Sequence
gtccaggggcttggagagacctgcg

SEQ ID NO: 252966 - DNA, 25 bp, Probe Sequence
gtgccgggagctgaagaggcccaga

SEQ ID NO: 252967 - DNA, 25 bp, Probe Sequence
gtgccgggagctgaagaggcccaga

SEQ ID NO: 252968 - DNA, 25 bp, Probe Sequence
gtgccgggagctgaagaggcccaga

SEQ ID NO: 252969 - DNA, 25 bp, Probe Sequence
gtgccctcaataaagagaggcccag

SEQ ID NO: 252970 - DNA, 25 bp, Probe Sequence
gtccctgctatcagtggggcactga

SEQ ID NO: 252971 - DNA, 25 bp, Probe Sequence
gtccctgtgtcaggatggtacagat

SEQ ID NO: 252972 - DNA, 25 bp, Probe Sequence
gtcctctgctgtgcgatacgaaact

SEQ ID NO: 252973 - DNA, 25 bp, Probe Sequence
gtccactcttaagcactgaagatca

SEQ ID NO: 252974 - DNA, 25 bp, Probe Sequence
gtccctctggaagccatgtacatgc

SEQ ID NO: 252975 - DNA, 25 bp, Probe Sequence
gtgcaccctgggacccagaagtgcc

SEQ ID NO: 252976 - DNA, 25 bp, Probe Sequence
gtccctgcatgaggcccacgagttc

SEQ ID NO: 252977 - DNA, 25 bp, Probe Sequence
gtccctgatagccaacagctgggtc

SEQ ID NO: 252978 - DNA, 25 bp, Probe Sequence
gtccctgatgacaaagatcttgcct

SEQ ID NO: 252979 - DNA, 25 bp, Probe Sequence
gtgccctgatccaagtttactcaac

SEQ ID NO: 252980 - DNA, 25 bp, Probe Sequence
gtccgtttatcactttaccaacagt

SEQ ID NO: 252981 - DNA, 25 bp, Probe Sequence
gtccacttttcagtagataccaaat

SEQ ID NO: 252982 - DNA, 25 bp, Probe Sequence
gtccaccattggataaaccactatc

SEQ ID NO: 252983 - DNA, 25 bp, Probe Sequence
gtccccagggacaaaacactgtgtc

SEQ ID NO: 252984 - DNA, 25 bp, Probe Sequence
gtccctccagggaaaatgactttat

SEQ ID NO: 252985 - DNA, 25 bp, Probe Sequence
gtccctaagggatatgaattgtttt

SEQ ID NO: 252986 - DNA, 25 bp, Probe Sequence
gtgccctgaaagtacctgaaaggtt

SEQ ID NO: 252987 - DNA, 25 bp, Probe Sequence
gtccctgagaggttcttgaagatgt

SEQ ID NO: 252988 - DNA, 25 bp, Probe Sequence
gtccctgagaggttcttgaagatgt

SEQ ID NO: 252989 - DNA, 25 bp, Probe Sequence
gtcctctaagagttgattgctgtat

SEQ ID NO: 252990 - DNA, 25 bp, Probe Sequence
gtcctccatatgaccattatggcta

SEQ ID NO: 252991 - DNA, 25 bp, Probe Sequence
gtcctgcagttaccttgcatgttca

SEQ ID NO: 252992 - DNA, 25 bp, Probe Sequence
gtcctatgtatatcttctacatgca

SEQ ID NO: 252993 - DNA, 25 bp, Probe Sequence
gtcctgtgtagatatttacttcatc

SEQ ID NO: 252994 - DNA, 25 bp, Probe Sequence
gtgcccttgcaatatttccattgcc

SEQ ID NO: 252995 - DNA, 25 bp, Probe Sequence
gtccaaatgcaagatatccatccgc

SEQ ID NO: 252996 - DNA, 25 bp, Probe Sequence
gtccaagcaggtgtacttgcctgcg

SEQ ID NO: 252997 - DNA, 25 bp, Probe Sequence
gtccagacaggaagttcctcttgct

SEQ ID NO: 252998 - DNA, 25 bp, Probe Sequence
gtccaaaggcattttctcctgtgct

SEQ ID NO: 252999 - DNA, 25 bp, Probe Sequence
gtcctataagcttttccacttgatg

SEQ ID NO: 253000 - DNA, 25 bp, Probe Sequence
gtcctcatagactcattcatacttg

SEQ ID NO: 253001 - DNA, 25 bp, Probe Sequence
gtccagcacacattctcatacatac

SEQ ID NO: 253002 - DNA, 25 bp, Probe Sequence
gtccgaccagtgcatgcatatactg

SEQ ID NO: 253003 - DNA, 25 bp, Probe Sequence
gtcctacacaatggtgctattctgt

SEQ ID NO: 253004 - DNA, 25 bp, Probe Sequence
gtcctacaatttggattttgatcat

SEQ ID NO: 253005 - DNA, 25 bp, Probe Sequence
gtccgcacacatttaatcttttgca

SEQ ID NO: 253006 - DNA, 25 bp, Probe Sequence
gtccctccaagcaagacttttgtca

SEQ ID NO: 253007 - DNA, 25 bp, Probe Sequence
gtccaccaaactagatgttgcttgt

SEQ ID NO: 253008 - DNA, 25 bp, Probe Sequence
gtccaaccaataagtgtttggcggc

SEQ ID NO: 253009 - DNA, 25 bp, Probe Sequence
gtccatgggagtttgttttggcacc

SEQ ID NO: 253010 - DNA, 25 bp, Probe Sequence
gtgcctgggaactggtgtagctgca

SEQ ID NO: 253011 - DNA, 25 bp, Probe Sequence
gtccggcagaatctggccatgactg

SEQ ID NO: 253012 - DNA, 25 bp, Probe Sequence
gtccgacagtaccagatgaagactt

SEQ ID NO: 253013 - DNA, 25 bp, Probe Sequence
gtgccttagatacaagaaacctgag

SEQ ID NO: 253014 - DNA, 25 bp, Probe Sequence
gtcctttgtacgacagcagactcct

SEQ ID NO: 253015 - DNA, 25 bp, Probe Sequence
gtcctttgcaagagcgcagaccacc

SEQ ID NO: 253016 - DNA, 25 bp, Probe Sequence
gtccttagcaggagtgatggccaga

SEQ ID NO: 253017 - DNA, 25 bp, Probe Sequence
gtcctcgaggcgatgatattctcac

SEQ ID NO: 253018 - DNA, 25 bp, Probe Sequence
gtcctgcaagatcaatagagttctc

SEQ ID NO: 253019 - DNA, 25 bp, Probe Sequence
gtgccacaaattgaaagcttccacg

SEQ ID NO: 253020 - DNA, 25 bp, Probe Sequence
gtgccagaacgcacagaccttcaac

SEQ ID NO: 253021 - DNA, 25 bp, Probe Sequence
gtgccagaacgcacagaccttcaac

SEQ ID NO: 253022 - DNA, 25 bp, Probe Sequence
gtccaaaggctagacctatagagtt

SEQ ID NO: 253023 - DNA, 25 bp, Probe Sequence
gtcctaagctggagttctgattttt

SEQ ID NO: 253024 - DNA, 25 bp, Probe Sequence
gtcctaggtgtttccatctatgttt

SEQ ID NO: 253025 - DNA, 25 bp, Probe Sequence
gtcctgaccttttcaccatggaatc

SEQ ID NO: 253026 - DNA, 25 bp, Probe Sequence
gtcctgacctgtgatcacacatgac

SEQ ID NO: 253027 - DNA, 25 bp, Probe Sequence
gtcctgacacttgtggcatcaaatg

SEQ ID NO: 253028 - DNA, 25 bp, Probe Sequence
gtcctgccctctgatgagaaaggag

SEQ ID NO: 253029 - DNA, 25 bp, Probe Sequence
gtccgccactcacggacaagagctg

SEQ ID NO: 253030 - DNA, 25 bp, Probe Sequence
gtcctggcactgtggccaagaggtg

SEQ ID NO: 253031 - DNA, 25 bp, Probe Sequence
gtcctgtcctgatgccatcaaagag

SEQ ID NO: 253032 - DNA, 25 bp, Probe Sequence
gtcctgatccgatggagaaacaaag

SEQ ID NO: 253033 - DNA, 25 bp, Probe Sequence
gtcctatcccatatggagaagaaag

SEQ ID NO: 253034 - DNA, 25 bp, Probe Sequence
gtccgttccatctgtgagaaatcac

SEQ ID NO: 253035 - DNA, 25 bp, Probe Sequence
gtgccttgtcccaaaataaatcctt

SEQ ID NO: 253036 - DNA, 25 bp, Probe Sequence
gtgccccttctctaagaaaatgccc

SEQ ID NO: 253037 - DNA, 25 bp, Probe Sequence
gtgccaccccaggcaataaagacca

SEQ ID NO: 253038 - DNA, 25 bp, Probe Sequence
gtcctccgtcagaaattattactct

SEQ ID NO: 253039 - DNA, 25 bp, Probe Sequence
gtccttcagacagaagtatcttcct

SEQ ID NO: 253040 - DNA, 25 bp, Probe Sequence
gtccttagaggacattttctcatgc

SEQ ID NO: 253041 - DNA, 25 bp, Probe Sequence
gtccttaaggatattatgttgattg

SEQ ID NO: 253042 - DNA, 25 bp, Probe Sequence
gtgcctttacagatttacgtatggg

SEQ ID NO: 253043 - DNA, 25 bp, Probe Sequence
gtccgtgagaacatcattacttatg

SEQ ID NO: 253044 - DNA, 25 bp, Probe Sequence
gtccgtgagaacatcattacttatg

SEQ ID NO: 253045 - DNA, 25 bp, Probe Sequence
gtcctggaaccaagcatccacggat

SEQ ID NO: 253046 - DNA, 25 bp, Probe Sequence
tttggagagtccacaccacggacca

SEQ ID NO: 253047 - DNA, 25 bp, Probe Sequence
gtgtgagggtacacatccgggttct

SEQ ID NO: 253048 - DNA, 25 bp, Probe Sequence
gtgaaaaatacatccgcagggttcg

SEQ ID NO: 253049 - DNA, 25 bp, Probe Sequence
gtgaaaaactgctttcctgggtgaa

SEQ ID NO: 253050 - DNA, 25 bp, Probe Sequence
gtgtagccacggttttctggaaaag

SEQ ID NO: 253051 - DNA, 25 bp, Probe Sequence
gtgttcccgttgtccctggcacaga

SEQ ID NO: 253052 - DNA, 25 bp, Probe Sequence
gtgctgccacggcaggcccaggcca

SEQ ID NO: 253053 - DNA, 25 bp, Probe Sequence
gtgcctatgaggacagtgtccgccc

SEQ ID NO: 253054 - DNA, 25 bp, Probe Sequence
gtgctggaaggaagcggcctcatca

SEQ ID NO: 253055 - DNA, 25 bp, Probe Sequence
gtgcgggagatgaacgacctaccgg

SEQ ID NO: 253056 - DNA, 25 bp, Probe Sequence
gtgctgacggacacgtcgtacacgc

SEQ ID NO: 253057 - DNA, 25 bp, Probe Sequence
gtgctcacgggcacgggtaacgtga

SEQ ID NO: 253058 - DNA, 25 bp, Probe Sequence
gtgtccgggacctgttagaagaatg

SEQ ID NO: 253059 - DNA, 25 bp, Probe Sequence
gtgcccggtggtgtgtagagaaaag

SEQ ID NO: 253060 - DNA, 25 bp, Probe Sequence
gtccacggtggtttgatcaacaaga

SEQ ID NO: 253061 - DNA, 25 bp, Probe Sequence
gtccatcgccttcattgtgtaaatg

SEQ ID NO: 253062 - DNA, 25 bp, Probe Sequence
gtccaccgctctgtttaagaaaggt

SEQ ID NO: 253063 - DNA, 25 bp, Probe Sequence
gtccccacattaggcttaaaaacag

SEQ ID NO: 253064 - DNA, 25 bp, Probe Sequence
gtcccctcactagctgcatgagaaa

SEQ ID NO: 253065 - DNA, 25 bp, Probe Sequence
gtcccctgccatgcagagcaggaag

SEQ ID NO: 253066 - DNA, 25 bp, Probe Sequence
gtcctgactcctgccaagtgagtgg

SEQ ID NO: 253067 - DNA, 25 bp, Probe Sequence
gtcctgtctcatggaagcactggag

SEQ ID NO: 253068 - DNA, 25 bp, Probe Sequence
gtcctgattgcatcataattgtggt

SEQ ID NO: 253069 - DNA, 25 bp, Probe Sequence
gtcctgatggatgaacttttgatga

SEQ ID NO: 253070 - DNA, 25 bp, Probe Sequence
gtccaaagagaacctttctgtgaca

SEQ ID NO: 253071 - DNA, 25 bp, Probe Sequence
gtgccaacgaatttcccattctgaa

SEQ ID NO: 253072 - DNA, 25 bp, Probe Sequence
gtccatccagactgttctatccaaa

SEQ ID NO: 253073 - DNA, 25 bp, Probe Sequence
gtcctcctgtgctatttgtacaaat

SEQ ID NO: 253074 - DNA, 25 bp, Probe Sequence
gtccattcttgctaatggttagaac

SEQ ID NO: 253075 - DNA, 25 bp, Probe Sequence
gtccatagcctccattcgtatgaga

SEQ ID NO: 253076 - DNA, 25 bp, Probe Sequence
gtcctatgcgctcatgagcgtctgt

SEQ ID NO: 253077 - DNA, 25 bp, Probe Sequence
gtccaagccaacaacagtcgctggg

SEQ ID NO: 253078 - DNA, 25 bp, Probe Sequence
gtccgaggcaaaatcagtcaaggtg

SEQ ID NO: 253079 - DNA, 25 bp, Probe Sequence
gtcctgaagcactaccttcagaggg

SEQ ID NO: 253080 - DNA, 25 bp, Probe Sequence
gtcctacaaccagtattctcagaga

SEQ ID NO: 253081 - DNA, 25 bp, Probe Sequence
gtcctgctcatttgcactattctat

SEQ ID NO: 253082 - DNA, 25 bp, Probe Sequence
gtccacattatgtcagctttctcat

SEQ ID NO: 253083 - DNA, 25 bp, Probe Sequence
gtccactcctgatgctgttatgggc

SEQ ID NO: 253084 - DNA, 25 bp, Probe Sequence
gtccattcctacctggacatgtccc

SEQ ID NO: 253085 - DNA, 25 bp, Probe Sequence
gtcctatctgtacttcacacagttc

SEQ ID NO: 253086 - DNA, 25 bp, Probe Sequence
gtgctgtcctgttttactggacccc

SEQ ID NO: 253087 - DNA, 25 bp, Probe Sequence
gtcctctgctgtgttgactggaccc

SEQ ID NO: 253088 - DNA, 25 bp, Probe Sequence
gtccttgtgactggagcagctggtc

SEQ ID NO: 253089 - DNA, 25 bp, Probe Sequence
gtccttgtgacatgtcaggcagttt

SEQ ID NO: 253090 - DNA, 25 bp, Probe Sequence
gtccttggcgaatcgataatcattg

SEQ ID NO: 253091 - DNA, 25 bp, Probe Sequence
gtccataaggaattcgatgatgaca

SEQ ID NO: 253092 - DNA, 25 bp, Probe Sequence
gtcctacactgctattgttgctaca

SEQ ID NO: 253093 - DNA, 25 bp, Probe Sequence
gtccaggttggaggcatctctgaca

SEQ ID NO: 253094 - DNA, 25 bp, Probe Sequence
gtccaggactgggcatactcatatg

SEQ ID NO: 253095 - DNA, 25 bp, Probe Sequence
gtccagcagaagggcacctcagaaa

SEQ ID NO: 253096 - DNA, 25 bp, Probe Sequence
gtccagagactggcagaccttggcc

SEQ ID NO: 253097 - DNA, 25 bp, Probe Sequence
gtgcctgcaagtgggaccttgctgg

SEQ ID NO: 253098 - DNA, 25 bp, Probe Sequence
gtccgagacagggacgcgtgtgggc

SEQ ID NO: 253099 - DNA, 25 bp, Probe Sequence
gtcctcaccggtgcagagttggcac

SEQ ID NO: 253100 - DNA, 25 bp, Probe Sequence
gtcctcagctcggtcaagaatgttg

SEQ ID NO: 253101 - DNA, 25 bp, Probe Sequence
gtcctcacatctgtcagaaaattgt

SEQ ID NO: 253102 - DNA, 25 bp, Probe Sequence
gtcctcatctcttaagctaaatctg

SEQ ID NO: 253103 - DNA, 25 bp, Probe Sequence
gtcctcctttcagtctgagacacgg

SEQ ID NO: 253104 - DNA, 25 bp, Probe Sequence
gtcctgcagcggaacctggagcagg

SEQ ID NO: 253105 - DNA, 25 bp, Probe Sequence
gtccgcagcaacaacatctgccaca

SEQ ID NO: 253106 - DNA, 25 bp, Probe Sequence
gtcctagccagcaacatggatctcc

SEQ ID NO: 253107 - DNA, 25 bp, Probe Sequence
gtcctggccagatgaaatgctgccg

SEQ ID NO: 253108 - DNA, 25 bp, Probe Sequence
gtcctggatcaataaagtcatacgc

SEQ ID NO: 253109 - DNA, 25 bp, Probe Sequence
gtcctgtggcatccacgaaactacc

SEQ ID NO: 253110 - DNA, 25 bp, Probe Sequence
gtccgtggcatgcatcaagcacatc

SEQ ID NO: 253111 - DNA, 25 bp, Probe Sequence
gtccttgatgtgcagctggcattcc

SEQ ID NO: 253112 - DNA, 25 bp, Probe Sequence
gtcctggatgtccacattgaccacg

SEQ ID NO: 253113 - DNA, 25 bp, Probe Sequence
tgaccatggtgattacttccggctg

SEQ ID NO: 253114 - DNA, 25 bp, Probe Sequence
gtccatgtataaacttgaagtggtt

SEQ ID NO: 253115 - DNA, 25 bp, Probe Sequence
gtcctgatgccagccttgaagatgc

SEQ ID NO: 253116 - DNA, 25 bp, Probe Sequence
gtccttgcggtcgtaggtgatgcca

SEQ ID NO: 253117 - DNA, 25 bp, Probe Sequence
gtccttgcaatgttctaggtgaccc

SEQ ID NO: 253118 - DNA, 25 bp, Probe Sequence
gtgccttgagagtttcacctgggct

SEQ ID NO: 253119 - DNA, 25 bp, Probe Sequence
gtccttggagacttacccagtgatg

SEQ ID NO: 253120 - DNA, 25 bp, Probe Sequence
gtccttggaccattctgatccagtt

SEQ ID NO: 253121 - DNA, 25 bp, Probe Sequence
gtccttaccagcttcagatctttgc

SEQ ID NO: 253122 - DNA, 25 bp, Probe Sequence
gtgccctatcccttaactatgagca

SEQ ID NO: 253123 - DNA, 25 bp, Probe Sequence
gtgccctacccagaatggggagcag

SEQ ID NO: 253124 - DNA, 25 bp, Probe Sequence
gtgctcagccaagaccaaggaggga

SEQ ID NO: 253125 - DNA, 25 bp, Probe Sequence
gtgccggctacagggaaggagggaa

SEQ ID NO: 253126 - DNA, 25 bp, Probe Sequence
gtgccgactccgtggaggaagtaaa

SEQ ID NO: 253127 - DNA, 25 bp, Probe Sequence
gtgctcggtccttccgaggaagcta

SEQ ID NO: 253128 - DNA, 25 bp, Probe Sequence
gtccatgtattttccgtgagaatgc

SEQ ID NO: 253129 - DNA, 25 bp, Probe Sequence
gtccagtttctcatctctggactgc

SEQ ID NO: 253130 - DNA, 25 bp, Probe Sequence
gtgccttagtccatttaggctgcta

SEQ ID NO: 253131 - DNA, 25 bp, Probe Sequence
gtccatctatgttgttcttaggcat

SEQ ID NO: 253132 - DNA, 25 bp, Probe Sequence
gtccaaatgtttagcttaggtctga

SEQ ID NO: 253133 - DNA, 25 bp, Probe Sequence
gtccataatgtttcatgtttgtcct

SEQ ID NO: 253134 - DNA, 25 bp, Probe Sequence
gtcctatttaactttgtgttcccag

SEQ ID NO: 253135 - DNA, 25 bp, Probe Sequence
gtccgatttaatcctatgttgtcac

SEQ ID NO: 253136 - DNA, 25 bp, Probe Sequence
gtgccagatataactgtcttgtttc

SEQ ID NO: 253137 - DNA, 25 bp, Probe Sequence
gtgccagatataactgtcttgtttc

SEQ ID NO: 253138 - DNA, 25 bp, Probe Sequence
gtccagcatcatagacgagctcttc

SEQ ID NO: 253139 - DNA, 25 bp, Probe Sequence
gtccaatgtggatgcagcttacgaa

SEQ ID NO: 253140 - DNA, 25 bp, Probe Sequence
gtccaagtggattaatgatgtcatg

SEQ ID NO: 253141 - DNA, 25 bp, Probe Sequence
gtccacgctgtttagagctgaccac

SEQ ID NO: 253142 - DNA, 25 bp, Probe Sequence
gtccagggcaaggacgtgagccagt

SEQ ID NO: 253143 - DNA, 25 bp, Probe Sequence
gtccagggagaggcgggatcacggc

SEQ ID NO: 253144 - DNA, 25 bp, Probe Sequence
gtcctaaggcaggggcgagcacgga

SEQ ID NO: 253145 - DNA, 25 bp, Probe Sequence
gtcctcaatgaacggtgcggcattt

SEQ ID NO: 253146 - DNA, 25 bp, Probe Sequence
gtcctcaagattcgagatggcagca

SEQ ID NO: 253147 - DNA, 25 bp, Probe Sequence
gtcctctctatcctggatgagctca

SEQ ID NO: 253148 - DNA, 25 bp, Probe Sequence
gtcctcagcctgccagtgaatgtga

SEQ ID NO: 253149 - DNA, 25 bp, Probe Sequence
gtcctcagacgacagcacagcaagc

SEQ ID NO: 253150 - DNA, 25 bp, Probe Sequence
gtgctacatgacgacaaagctgcta

SEQ ID NO: 253151 - DNA, 25 bp, Probe Sequence
gtgctacatgacgacaaagctgcta

SEQ ID NO: 253152 - DNA, 25 bp, Probe Sequence
gtgctacatgacgacaaagctgcta

SEQ ID NO: 253153 - DNA, 25 bp, Probe Sequence
gtgctgtctggcggcaccaccatgt

SEQ ID NO: 253154 - DNA, 25 bp, Probe Sequence
gtgctctgcttggacagcaggcctg

SEQ ID NO: 253155 - DNA, 25 bp, Probe Sequence
gtgctctgcttggacagcaggcctg

SEQ ID NO: 253156 - DNA, 25 bp, Probe Sequence
gtgctctgcataggaaggagggctc

SEQ ID NO: 253157 - DNA, 25 bp, Probe Sequence
gtgaccattgccctagagggcccac

SEQ ID NO: 253158 - DNA, 25 bp, Probe Sequence
gtgcattttcacctgaggtttccct

SEQ ID NO: 253159 - DNA, 25 bp, Probe Sequence
gtccttgtcagcatgaggttatcta

SEQ ID NO: 253160 - DNA, 25 bp, Probe Sequence
gtcctgtgccataaagtgatatatt

SEQ ID NO: 253161 - DNA, 25 bp, Probe Sequence
gtgccgatggcaatgatggttatga

SEQ ID NO: 253162 - DNA, 25 bp, Probe Sequence
gtcctgcatcgccatgatgtgtaac

SEQ ID NO: 253163 - DNA, 25 bp, Probe Sequence
gtcctgctccgaagcagtcatctct

SEQ ID NO: 253164 - DNA, 25 bp, Probe Sequence
gtcctgcatcagaaacgagctttgg

SEQ ID NO: 253165 - DNA, 25 bp, Probe Sequence
gtcctgcatcagaaacgagctttgg

SEQ ID NO: 253166 - DNA, 25 bp, Probe Sequence
gtccatgcaatgaattgctgagcat

SEQ ID NO: 253167 - DNA, 25 bp, Probe Sequence
gtcctgcaaaaggctagctcggcac

SEQ ID NO: 253168 - DNA, 25 bp, Probe Sequence
gtcctgaggaagagcgccagagcct

SEQ ID NO: 253169 - DNA, 25 bp, Probe Sequence
gtccagttggagaccgtcaaccttc

SEQ ID NO: 253170 - DNA, 25 bp, Probe Sequence
gtccaggggacatcgtcatcacccc

SEQ ID NO: 253171 - DNA, 25 bp, Probe Sequence
gtgccaggagacgattcgtaccgcc

SEQ ID NO: 253172 - DNA, 25 bp, Probe Sequence
gtgctcaggtgattatccttcgctc

SEQ ID NO: 253173 - DNA, 25 bp, Probe Sequence
gtgcacaagccttactttggttacc

SEQ ID NO: 253174 - DNA, 25 bp, Probe Sequence
gtgcctatgcgtttgtatatgctct

SEQ ID NO: 253175 - DNA, 25 bp, Probe Sequence
gtccattgatgttgtcacttgtcat

SEQ ID NO: 253176 - DNA, 25 bp, Probe Sequence
gtccatctggtctaaggtggctgct

SEQ ID NO: 253177 - DNA, 25 bp, Probe Sequence
gtcctctggtgcgaaattccggatt

SEQ ID NO: 253178 - DNA, 25 bp, Probe Sequence
gtccacgttcaggatattgttgttt

SEQ ID NO: 253179 - DNA, 25 bp, Probe Sequence
gtccacgtatctttgggtctttgat

SEQ ID NO: 253180 - DNA, 25 bp, Probe Sequence
gtccaccttcatttaactctttgaa

SEQ ID NO: 253181 - DNA, 25 bp, Probe Sequence
gtccaccagtctttaaataactact

SEQ ID NO: 253182 - DNA, 25 bp, Probe Sequence
gtccaacaactcgatggcacaagcc

SEQ ID NO: 253183 - DNA, 25 bp, Probe Sequence
gtcctagctacttgggagcagaggc

SEQ ID NO: 253184 - DNA, 25 bp, Probe Sequence
gtcctgcacttcaggtgcaagctgg

SEQ ID NO: 253185 - DNA, 25 bp, Probe Sequence
gtgccacctacaacgtcatagtgga

SEQ ID NO: 253186 - DNA, 25 bp, Probe Sequence
gtgcgcaagggaacctctgttgaga

SEQ ID NO: 253187 - DNA, 25 bp, Probe Sequence
gtccaagggatcgctgatgattacg

SEQ ID NO: 253188 - DNA, 25 bp, Probe Sequence
gtgcccagaagtcccaaattatcag

SEQ ID NO: 253189 - DNA, 25 bp, Probe Sequence
gtgccaagaagcccaacaatggaaa

SEQ ID NO: 253190 - DNA, 25 bp, Probe Sequence
gtgccaggcaacccttcagaaaggc

SEQ ID NO: 253191 - DNA, 25 bp, Probe Sequence
gtccagcgacactcattcattgaag

SEQ ID NO: 253192 - DNA, 25 bp, Probe Sequence
gtcctggactctactacgtggatga

SEQ ID NO: 253193 - DNA, 25 bp, Probe Sequence
gtccagagacctattatgaggtgca

SEQ ID NO: 253194 - DNA, 25 bp, Probe Sequence
gtccaagaccatttccatggagctc

SEQ ID NO: 253195 - DNA, 25 bp, Probe Sequence
gtccaaactttcatcaggcacatac

SEQ ID NO: 253196 - DNA, 25 bp, Probe Sequence
gtcctttcttatacacgtacataca

SEQ ID NO: 253197 - DNA, 25 bp, Probe Sequence
gtccttggttgcaactactactaca

SEQ ID NO: 253198 - DNA, 25 bp, Probe Sequence
gtccttggcttgactatacaggcct

SEQ ID NO: 253199 - DNA, 25 bp, Probe Sequence
gtcctctgagcttactatacatcag

SEQ ID NO: 253200 - DNA, 25 bp, Probe Sequence
gtccatctagctatctatgacctac

SEQ ID NO: 253201 - DNA, 25 bp, Probe Sequence
gtccagctcagtatctgcaacaaga

SEQ ID NO: 253202 - DNA, 25 bp, Probe Sequence
gtccaccagtgattctgtaaagagt

SEQ ID NO: 253203 - DNA, 25 bp, Probe Sequence
gtgccacactgtggccttagaagag

SEQ ID NO: 253204 - DNA, 25 bp, Probe Sequence
gtgccagcactagcctaggaggttt

SEQ ID NO: 253205 - DNA, 25 bp, Probe Sequence
gtgccagcatacacctagctagaga

SEQ ID NO: 253206 - DNA, 25 bp, Probe Sequence
gtccacatcctgtgtatctgagcac

SEQ ID NO: 253207 - DNA, 25 bp, Probe Sequence
gtccacagcacttttgatatcaagc

SEQ ID NO: 253208 - DNA, 25 bp, Probe Sequence
gtccaaattccaatgatgtatcagc

SEQ ID NO: 253209 - DNA, 25 bp, Probe Sequence
gtgccaaattccgaagcaatcttcc

SEQ ID NO: 253210 - DNA, 25 bp, Probe Sequence
gtgccagaatcctctcagagtcatt

SEQ ID NO: 253211 - DNA, 25 bp, Probe Sequence
gtccagaccctaatcagcacactgg

SEQ ID NO: 253212 - DNA, 25 bp, Probe Sequence
gtccaagccatcactatacctgact

SEQ ID NO: 253213 - DNA, 25 bp, Probe Sequence
gtccaacctatactaacctgaatag

SEQ ID NO: 253214 - DNA, 25 bp, Probe Sequence
gtccacacgttattatggccgaaag

SEQ ID NO: 253215 - DNA, 25 bp, Probe Sequence
gtccacactaagttagacaccaata

SEQ ID NO: 253216 - DNA, 25 bp, Probe Sequence
gtccttcaaagatgaccaccatata

SEQ ID NO: 253217 - DNA, 25 bp, Probe Sequence
gtgctttccaaacaatacctatcat

SEQ ID NO: 253218 - DNA, 25 bp, Probe Sequence
gtgccttccagagggactactatgt

SEQ ID NO: 253219 - DNA, 25 bp, Probe Sequence
gtcctctcgcattgtaaatacataa

SEQ ID NO: 253220 - DNA, 25 bp, Probe Sequence
gtccatttctggaacctacaaactc

SEQ ID NO: 253221 - DNA, 25 bp, Probe Sequence
gtccattactggaacctatgatctg

SEQ ID NO: 253222 - DNA, 25 bp, Probe Sequence
gtccttaggcttacaatgtgcactg

SEQ ID NO: 253223 - DNA, 25 bp, Probe Sequence
gtccatctaagctcatcgtgctact

SEQ ID NO: 253224 - DNA, 25 bp, Probe Sequence
gtcctccaagcagccagatacagtg

SEQ ID NO: 253225 - DNA, 25 bp, Probe Sequence
gtcctctaacccggattcagtggca

SEQ ID NO: 253226 - DNA, 25 bp, Probe Sequence
gtcctttagcccaaagtcagtgtct

SEQ ID NO: 253227 - DNA, 25 bp, Probe Sequence
gtccttcactcccaaaatgaggctt

SEQ ID NO: 253228 - DNA, 25 bp, Probe Sequence
gtccttaacccattaatcactgcag

SEQ ID NO: 253229 - DNA, 25 bp, Probe Sequence
gtccttctcacttcagagagacact

SEQ ID NO: 253230 - DNA, 25 bp, Probe Sequence
gtgcattttctcctaatggaagctt

SEQ ID NO: 253231 - DNA, 25 bp, Probe Sequence
gtcctgtgacctacaaggtgactgt

SEQ ID NO: 253232 - DNA, 25 bp, Probe Sequence
gtgccggaagccaagtggtggcgac

SEQ ID NO: 253233 - DNA, 25 bp, Probe Sequence
gtgccttaagcagagtcaggagacc

SEQ ID NO: 253234 - DNA, 25 bp, Probe Sequence
gtcctttcagaaggccgtgaagcat

SEQ ID NO: 253235 - DNA, 25 bp, Probe Sequence
gtcctttcagtcttcacagtggaga

SEQ ID NO: 253236 - DNA, 25 bp, Probe Sequence
gtcctcattcaggcaataaatacta

SEQ ID NO: 253237 - DNA, 25 bp, Probe Sequence
gtgctcatcttgaaacttgaaacta

SEQ ID NO: 253238 - DNA, 25 bp, Probe Sequence
gtgctctgcatagtttactgaaacg

SEQ ID NO: 253239 - DNA, 25 bp, Probe Sequence
gtcctcagatttaacaatatgtggg

SEQ ID NO: 253240 - DNA, 25 bp, Probe Sequence
gtcctcttgctcaaaaatctgtttg

SEQ ID NO: 253241 - DNA, 25 bp, Probe Sequence
gtcctagtgccaccaatctcataat

SEQ ID NO: 253242 - DNA, 25 bp, Probe Sequence
gtcctcgtgctcgtagatcaaacat

SEQ ID NO: 253243 - DNA, 25 bp, Probe Sequence
gtcctcaactccagatacatgatta

SEQ ID NO: 253244 - DNA, 25 bp, Probe Sequence
gtccatcagacctggaatcttctgc

SEQ ID NO: 253245 - DNA, 25 bp, Probe Sequence
gtccaagtcttacgatatgttcatg

SEQ ID NO: 253246 - DNA, 25 bp, Probe Sequence
gtccatggccacattgtaggtcttg

SEQ ID NO: 253247 - DNA, 25 bp, Probe Sequence
gtcctgaggtgcatttcctgtttgt

SEQ ID NO: 253248 - DNA, 25 bp, Probe Sequence
gtcctgaggtgcatttcctgttgta

SEQ ID NO: 253249 - DNA, 25 bp, Probe Sequence
gtgcctagcaatatttccagttgac

SEQ ID NO: 253250 - DNA, 25 bp, Probe Sequence
gtgcctacactgattatatcgtccc

SEQ ID NO: 253251 - DNA, 25 bp, Probe Sequence
gtgctcttcacgttttgacggtggt

SEQ ID NO: 253252 - DNA, 25 bp, Probe Sequence
gtgctctctcagcactgggatgggc

SEQ ID NO: 253253 - DNA, 25 bp, Probe Sequence
gtgctgctaagtagggctagggcaa

SEQ ID NO: 253254 - DNA, 25 bp, Probe Sequence
gtcctagggatgctgctggctagag

SEQ ID NO: 253255 - DNA, 25 bp, Probe Sequence
gtcctacgtgatctgagttcagacc

SEQ ID NO: 253256 - DNA, 25 bp, Probe Sequence
gtcctcacttcaaggttatcaatct

SEQ ID NO: 253257 - DNA, 25 bp, Probe Sequence
gtcctgcatttaatgtcttgaacat

SEQ ID NO: 253258 - DNA, 25 bp, Probe Sequence
gtgctgatgcacggagttttgaaat

SEQ ID NO: 253259 - DNA, 25 bp, Probe Sequence
gtgcttgtcctggttattgtcggta

SEQ ID NO: 253260 - DNA, 25 bp, Probe Sequence
gtccagattagctttcatttgggga

SEQ ID NO: 253261 - DNA, 25 bp, Probe Sequence
gtccagacagcctgtatcttggggg

SEQ ID NO: 253262 - DNA, 25 bp, Probe Sequence
gtccaggcagccatcttgtctggag

SEQ ID NO: 253263 - DNA, 25 bp, Probe Sequence
gtccatgtcactgatctttctggca

SEQ ID NO: 253264 - DNA, 25 bp, Probe Sequence
gtgcacgtccgttatttcagtgact

SEQ ID NO: 253265 - DNA, 25 bp, Probe Sequence
gtgctgttcctgtaagtttgctatt

SEQ ID NO: 253266 - DNA, 25 bp, Probe Sequence
gtgctgttcctgtaagtttgctatt

SEQ ID NO: 253267 - DNA, 25 bp, Probe Sequence
gtgctgttcctgtaagtttgctatt

SEQ ID NO: 253268 - DNA, 25 bp, Probe Sequence
gtgctgttcctgtaagtttgctatt

SEQ ID NO: 253269 - DNA, 25 bp, Probe Sequence
gtccttcctcctagtttgtagattt

SEQ ID NO: 253270 - DNA, 25 bp, Probe Sequence
gtcctttatcatgttttgaagattg

SEQ ID NO: 253271 - DNA, 25 bp, Probe Sequence
gtcctctgttgtatgtttaagatgt

SEQ ID NO: 253272 - DNA, 25 bp, Probe Sequence
gtccttgatgttgtgtgactaagta

SEQ ID NO: 253273 - DNA, 25 bp, Probe Sequence
gggcctcagtaaattgactccggac

SEQ ID NO: 253274 - DNA, 25 bp, Probe Sequence
gggcccatgaagaaagcccctcgtt

SEQ ID NO: 253275 - DNA, 25 bp, Probe Sequence
gtgctgccctgaagaatggcgccac

SEQ ID NO: 253276 - DNA, 25 bp, Probe Sequence
gtgccagcagcatggactgcgtgcc

SEQ ID NO: 253277 - DNA, 25 bp, Probe Sequence
gtgcctagcatagtacctgactcaa

SEQ ID NO: 253278 - DNA, 25 bp, Probe Sequence
gtcctcagtaccattgtgtgcatga

SEQ ID NO: 253279 - DNA, 25 bp, Probe Sequence
gtccacctgagccaacgtggcagaa

SEQ ID NO: 253280 - DNA, 25 bp, Probe Sequence
gtccagctagcagccactgggaatc

SEQ ID NO: 253281 - DNA, 25 bp, Probe Sequence
gtccagttgcagcctaatggtgaac

SEQ ID NO: 253282 - DNA, 25 bp, Probe Sequence
gtgccatgttcgacttcagcgagaa

SEQ ID NO: 253283 - DNA, 25 bp, Probe Sequence
gtgcctttaaccaagcgaggagtcc

SEQ ID NO: 253284 - DNA, 25 bp, Probe Sequence
gtgcctttaacctactgaaatgcag

SEQ ID NO: 253285 - DNA, 25 bp, Probe Sequence
gtccttatccattacctcaaagcag

SEQ ID NO: 253286 - DNA, 25 bp, Probe Sequence
gtcctttcagctgccttgaaagagc

SEQ ID NO: 253287 - DNA, 25 bp, Probe Sequence
gtccttcacatcaccattttgagac

SEQ ID NO: 253288 - DNA, 25 bp, Probe Sequence
gtccatgccaacataacctctgggc

SEQ ID NO: 253289 - DNA, 25 bp, Probe Sequence
gtgcctgacggtgaacactctggac

SEQ ID NO: 253290 - DNA, 25 bp, Probe Sequence
gtccatggggctgccaacttcagac

SEQ ID NO: 253291 - DNA, 25 bp, Probe Sequence
gtccattgggcatcacatccgggac

SEQ ID NO: 253292 - DNA, 25 bp, Probe Sequence
gtccaatgaggaccagtccatgggc

SEQ ID NO: 253293 - DNA, 25 bp, Probe Sequence
gtccaatgaggaccagtccatgggc

SEQ ID NO: 253294 - DNA, 25 bp, Probe Sequence
gtccactgggagcattgccaagcgg

SEQ ID NO: 253295 - DNA, 25 bp, Probe Sequence
gtccactgggagcattgccaagcgg

SEQ ID NO: 253296 - DNA, 25 bp, Probe Sequence
gtccactgggagcattgccaagcgg

SEQ ID NO: 253297 - DNA, 25 bp, Probe Sequence
gtccattgaccacagtgtcacaggg

SEQ ID NO: 253298 - DNA, 25 bp, Probe Sequence
gtccttgcaagacgctgatgctcaa

SEQ ID NO: 253299 - DNA, 25 bp, Probe Sequence
gtcctataataggctttagagcctt

SEQ ID NO: 253300 - DNA, 25 bp, Probe Sequence
gtgcgtgtgaacactctcaagacct

SEQ ID NO: 253301 - DNA, 25 bp, Probe Sequence
gtgcgtgtgaacactctcaagacct

SEQ ID NO: 253302 - DNA, 25 bp, Probe Sequence
gtgcgtgcatgcgcacgtgtgcaag

SEQ ID NO: 253303 - DNA, 25 bp, Probe Sequence
gtgaccagggactttgcaacctaca

SEQ ID NO: 253304 - DNA, 25 bp, Probe Sequence
ggagacgtggacagccaacgttggt

SEQ ID NO: 253305 - DNA, 25 bp, Probe Sequence
gtgtacagtgacaggctccactttg

SEQ ID NO: 253306 - DNA, 25 bp, Probe Sequence
gtgctacaagacagtccaccgtttt

SEQ ID NO: 253307 - DNA, 25 bp, Probe Sequence
gtgattgaaggcagtcttcagccta

SEQ ID NO: 253308 - DNA, 25 bp, Probe Sequence
gtgttagggattccttccaatagtt

SEQ ID NO: 253309 - DNA, 25 bp, Probe Sequence
gtgtgtggggttctccaaagagggg

SEQ ID NO: 253310 - DNA, 25 bp, Probe Sequence
gtgtatgggtttcaggaaaccaagg

SEQ ID NO: 253311 - DNA, 25 bp, Probe Sequence
gtgttgggagggtggttcaacaaag

SEQ ID NO: 253312 - DNA, 25 bp, Probe Sequence
gtgacttgggggagcctttacaaag

SEQ ID NO: 253313 - DNA, 25 bp, Probe Sequence
ggacgtgggcacaggccgtgaaaca

SEQ ID NO: 253314 - DNA, 25 bp, Probe Sequence
gtgacggcggaatcccgctgtaagc

SEQ ID NO: 253315 - DNA, 25 bp, Probe Sequence
gtgacggcggaatcccgctgtaagc

SEQ ID NO: 253316 - DNA, 25 bp, Probe Sequence
gtgcagggcggtatgccgccaaacg

SEQ ID NO: 253317 - DNA, 25 bp, Probe Sequence
gtgagccagagggttccagacaaag

SEQ ID NO: 253318 - DNA, 25 bp, Probe Sequence
gtgacccagggcctgacaaaaataa

SEQ ID NO: 253319 - DNA, 25 bp, Probe Sequence
gtgtcctgacggcttcgaagaaacg

SEQ ID NO: 253320 - DNA, 25 bp, Probe Sequence
ggtcaggccccgaggcaaaagcaag

SEQ ID NO: 253321 - DNA, 25 bp, Probe Sequence
ggaagggccctgaggaaggcacact

SEQ ID NO: 253322 - DNA, 25 bp, Probe Sequence
gtgagacgtgccctgaaactgaaca

SEQ ID NO: 253323 - DNA, 25 bp, Probe Sequence
gtgccatgcgttcgctgaaaggcat

SEQ ID NO: 253324 - DNA, 25 bp, Probe Sequence
gtccatcagtgatctgccataccac

SEQ ID NO: 253325 - DNA, 25 bp, Probe Sequence
gtccatcagtgatctgccataccac

SEQ ID NO: 253326 - DNA, 25 bp, Probe Sequence
gtccatcagctttgggctacaagga

SEQ ID NO: 253327 - DNA, 25 bp, Probe Sequence
gtccacatgtttgggcagaatctgg

SEQ ID NO: 253328 - DNA, 25 bp, Probe Sequence
gtccactgcctttctgacaatgtgt

SEQ ID NO: 253329 - DNA, 25 bp, Probe Sequence
gtccaaatactgtctgtcaatgtgt

SEQ ID NO: 253330 - DNA, 25 bp, Probe Sequence
gtccagatgttcttcgtaataaaag

SEQ ID NO: 253331 - DNA, 25 bp, Probe Sequence
gtccaagaccacattaataaacagg

SEQ ID NO: 253332 - DNA, 25 bp, Probe Sequence
gtccaactcctcatgaaatatattc

SEQ ID NO: 253333 - DNA, 25 bp, Probe Sequence
gtgctaagccctgtcaaataatcct

SEQ ID NO: 253334 - DNA, 25 bp, Probe Sequence
gtgcattagtttgcctggagaatcc

SEQ ID NO: 253335 - DNA, 25 bp, Probe Sequence
gtgctggatttatgtcaggagaagc

SEQ ID NO: 253336 - DNA, 25 bp, Probe Sequence
gtgcttggaaacgtgggaagagctc

SEQ ID NO: 253337 - DNA, 25 bp, Probe Sequence
gtgcctgaaaaccttctcaagtgct

SEQ ID NO: 253338 - DNA, 25 bp, Probe Sequence
gtgccgcctgaaagtgtcttgggct

SEQ ID NO: 253339 - DNA, 25 bp, Probe Sequence
gtgcccctgaaagtgtactcagagg

SEQ ID NO: 253340 - DNA, 25 bp, Probe Sequence
gtccaccgcaaatgcttctaggcgg

SEQ ID NO: 253341 - DNA, 25 bp, Probe Sequence
gtccaccgcaaatgcttctaggcgg

SEQ ID NO: 253342 - DNA, 25 bp, Probe Sequence
gtccatatccaatggcctcataggg

SEQ ID NO: 253343 - DNA, 25 bp, Probe Sequence
gtgcaattccaaaagccaaggtgag

SEQ ID NO: 253344 - DNA, 25 bp, Probe Sequence
gtgcatctcccataaacgaggtact

SEQ ID NO: 253345 - DNA, 25 bp, Probe Sequence
gtgccttcctaggacacaggggact

SEQ ID NO: 253346 - DNA, 25 bp, Probe Sequence
gtgcctaacagtgcccaggaggact

SEQ ID NO: 253347 - DNA, 25 bp, Probe Sequence
gtgccttactgtacatgctcggagg

SEQ ID NO: 253348 - DNA, 25 bp, Probe Sequence
gtgctttaggtcaggccaatggtca

SEQ ID NO: 253349 - DNA, 25 bp, Probe Sequence
gtgctttcgatgtgggcacctgggc

SEQ ID NO: 253350 - DNA, 25 bp, Probe Sequence
gtgcctgtaaggaaggcccatgagg

SEQ ID NO: 253351 - DNA, 25 bp, Probe Sequence
gtccagaaggagcaggccctgggcc

SEQ ID NO: 253352 - DNA, 25 bp, Probe Sequence
gtccatgaaaaccaggggcttgccc

SEQ ID NO: 253353 - DNA, 25 bp, Probe Sequence
gtccataagtcagggaagggagctc

SEQ ID NO: 253354 - DNA, 25 bp, Probe Sequence
gtccaaaatctcatgaatggtgttt

SEQ ID NO: 253355 - DNA, 25 bp, Probe Sequence
gtccaagccatcattactaattttt

SEQ ID NO: 253356 - DNA, 25 bp, Probe Sequence
gtgctcagcccattttttatttgtt

SEQ ID NO: 253357 - DNA, 25 bp, Probe Sequence
gtgctatttaattctttctattttc

SEQ ID NO: 253358 - DNA, 25 bp, Probe Sequence
gtgctttaagggctgtgttttgctc

SEQ ID NO: 253359 - DNA, 25 bp, Probe Sequence
gtgcctttattgggagacttttgtc

SEQ ID NO: 253360 - DNA, 25 bp, Probe Sequence
gtgccttctactttataattatagt

SEQ ID NO: 253361 - DNA, 25 bp, Probe Sequence
gtgcctttacttcaggcttgataat

SEQ ID NO: 253362 - DNA, 25 bp, Probe Sequence
gtgcctttcctacagagcaagacaa

SEQ ID NO: 253363 - DNA, 25 bp, Probe Sequence
gtgccctgtccttgcaaaagcagat

SEQ ID NO: 253364 - DNA, 25 bp, Probe Sequence
gtgagcggcccatgaaaagccaaat

SEQ ID NO: 253365 - DNA, 25 bp, Probe Sequence
gtgagctggcgttggataccagtaa

SEQ ID NO: 253366 - DNA, 25 bp, Probe Sequence
gtgccatcggtctagaaccactaac

SEQ ID NO: 253367 - DNA, 25 bp, Probe Sequence
gtccattttgcacataccagtatat

SEQ ID NO: 253368 - DNA, 25 bp, Probe Sequence
gtcctttggcagaagctcctttaga

SEQ ID NO: 253369 - DNA, 25 bp, Probe Sequence
gtccttttgacaactctcttatata

SEQ ID NO: 253370 - DNA, 25 bp, Probe Sequence
gtcctttgttgctcatgctgtttaa

SEQ ID NO: 253371 - DNA, 25 bp, Probe Sequence
gtcctacatgcaagtacatgttttt

SEQ ID NO: 253372 - DNA, 25 bp, Probe Sequence
gtccacctctgattacatgtatgtt

SEQ ID NO: 253373 - DNA, 25 bp, Probe Sequence
gtgccagacttatgactttgttttc

SEQ ID NO: 253374 - DNA, 25 bp, Probe Sequence
gtgccagacttatgactttgttttc

SEQ ID NO: 253375 - DNA, 25 bp, Probe Sequence
gtgccgacttgcaaacggattggcc

SEQ ID NO: 253376 - DNA, 25 bp, Probe Sequence
gtgcctgacttgggataggactgag

SEQ ID NO: 253377 - DNA, 25 bp, Probe Sequence
gtgcttgagtggagtagggctgaga

SEQ ID NO: 253378 - DNA, 25 bp, Probe Sequence
gtgccaggtagaagctagggagggg

SEQ ID NO: 253379 - DNA, 25 bp, Probe Sequence
gtgcccttcagagccagtagcaggc

SEQ ID NO: 253380 - DNA, 25 bp, Probe Sequence
gtgccctaagacagcagattgcgga

SEQ ID NO: 253381 - DNA, 25 bp, Probe Sequence
gtgccttaaagttcattgtatggac

SEQ ID NO: 253382 - DNA, 25 bp, Probe Sequence
gtgcctgctgaataacttctatccc

SEQ ID NO: 253383 - DNA, 25 bp, Probe Sequence
gtgcctggcaaccaaatcgaatctc

SEQ ID NO: 253384 - DNA, 25 bp, Probe Sequence
gtccatcagcaagaaatacaggtgt

SEQ ID NO: 253385 - DNA, 25 bp, Probe Sequence
gtgccatcgtagcctaaaagcgtat

SEQ ID NO: 253386 - DNA, 25 bp, Probe Sequence
gtgcctttagttttaacagttcact

SEQ ID NO: 253387 - DNA, 25 bp, Probe Sequence
gtccttgttcttttgaagcttgtgc

SEQ ID NO: 253388 - DNA, 25 bp, Probe Sequence
gtccttgcttcctctgagcagaggc

SEQ ID NO: 253389 - DNA, 25 bp, Probe Sequence
gtgcctagctgtacagttatcaggg

SEQ ID NO: 253390 - DNA, 25 bp, Probe Sequence
gtgccaagcattactgcaggatctc

SEQ ID NO: 253391 - DNA, 25 bp, Probe Sequence
gtgccaagcagaacatcaccacggc

SEQ ID NO: 253392 - DNA, 25 bp, Probe Sequence
gtgccaagcatcatatcctaaggca

SEQ ID NO: 253393 - DNA, 25 bp, Probe Sequence
gtgcccacctttggcaagaagaagg

SEQ ID NO: 253394 - DNA, 25 bp, Probe Sequence
gtgctacaacgtcggtcagaaaatg

SEQ ID NO: 253395 - DNA, 25 bp, Probe Sequence
gtgcttcactgatctggtcagaata

SEQ ID NO: 253396 - DNA, 25 bp, Probe Sequence
gtgctctgagcttatacctcaattg

SEQ ID NO: 253397 - DNA, 25 bp, Probe Sequence
gtgcctagtatatcccagacagttt

SEQ ID NO: 253398 - DNA, 25 bp, Probe Sequence
gtgcgtgaggagtatcccgaccgca

SEQ ID NO: 253399 - DNA, 25 bp, Probe Sequence
gtgcgttcaagattcagcttcaccc

SEQ ID NO: 253400 - DNA, 25 bp, Probe Sequence
gtgcggtaatttatccacggcactc

SEQ ID NO: 253401 - DNA, 25 bp, Probe Sequence
gtgggtgaaatgggtccctgggtga

SEQ ID NO: 253402 - DNA, 25 bp, Probe Sequence
gtgcggtaggcgtgtacggtgggag

SEQ ID NO: 253403 - DNA, 25 bp, Probe Sequence
gtgtcaggggagtgaggggtggagg

SEQ ID NO: 253404 - DNA, 25 bp, Probe Sequence
gtgtagtgaggacccacggggagcc

SEQ ID NO: 253405 - DNA, 25 bp, Probe Sequence
gtgttctcaggatgaccgagtggga

SEQ ID NO: 253406 - DNA, 25 bp, Probe Sequence
gtgcttctgccgaaattcaagctgg

SEQ ID NO: 253407 - DNA, 25 bp, Probe Sequence
gtgcaatcgccatgtattcagaggg

SEQ ID NO: 253408 - DNA, 25 bp, Probe Sequence
gtccacagcagcattatccacaagg

SEQ ID NO: 253409 - DNA, 25 bp, Probe Sequence
gtccaggacatcttatctgcagcca

SEQ ID NO: 253410 - DNA, 25 bp, Probe Sequence
gtgctagggcaacttctgcctgaac

SEQ ID NO: 253411 - DNA, 25 bp, Probe Sequence
gtccagtggacagtgtgccctgatc

SEQ ID NO: 253412 - DNA, 25 bp, Probe Sequence
gtgccaggaacactgtggacgtctt

SEQ ID NO: 253413 - DNA, 25 bp, Probe Sequence
ggcccgaacattctacgtattagtc

SEQ ID NO: 253414 - DNA, 25 bp, Probe Sequence
tgtccctggacataaaagtttagtt

SEQ ID NO: 253415 - DNA, 25 bp, Probe Sequence
gtccattggactgtaaggtttatgt

SEQ ID NO: 253416 - DNA, 25 bp, Probe Sequence
gtccacttcaccttaatgggtcttg

SEQ ID NO: 253417 - DNA, 25 bp, Probe Sequence
gtccacgggcctgaagaagattgag

SEQ ID NO: 253418 - DNA, 25 bp, Probe Sequence
gtgccacgggccggacagaagttca

SEQ ID NO: 253419 - DNA, 25 bp, Probe Sequence
gtccacctggcacagaatatgcact

SEQ ID NO: 253420 - DNA, 25 bp, Probe Sequence
gtccacctggcacagttgctgaaga

SEQ ID NO: 253421 - DNA, 25 bp, Probe Sequence
gtccagtaggcacatttgatagaaa

SEQ ID NO: 253422 - DNA, 25 bp, Probe Sequence
gtgccagtatggttcatctgtcaca

SEQ ID NO: 253423 - DNA, 25 bp, Probe Sequence
gtgcgcctaggacatatggcatgca

SEQ ID NO: 253424 - DNA, 25 bp, Probe Sequence
gtccaatagtgacttgtcgcatgaa

SEQ ID NO: 253425 - DNA, 25 bp, Probe Sequence
gtccatagcatcagttgatccttac

SEQ ID NO: 253426 - DNA, 25 bp, Probe Sequence
gtgcgcaagcactttgatatgcctc

SEQ ID NO: 253427 - DNA, 25 bp, Probe Sequence
gtgccacgcatcttcatgaagggcg

SEQ ID NO: 253428 - DNA, 25 bp, Probe Sequence
gtgcttcgacatcatcgaggggctc

SEQ ID NO: 253429 - DNA, 25 bp, Probe Sequence
gtgctgtagaccggctgacggacac

SEQ ID NO: 253430 - DNA, 25 bp, Probe Sequence
gtgcggaggattcctacgaggcctc

SEQ ID NO: 253431 - DNA, 25 bp, Probe Sequence
gtgcgagaggcttacctatgggcca

SEQ ID NO: 253432 - DNA, 25 bp, Probe Sequence
gtgccagaacttctctatggtggac

SEQ ID NO: 253433 - DNA, 25 bp, Probe Sequence
gtccagacagcttgactgcttttaa

SEQ ID NO: 253434 - DNA, 25 bp, Probe Sequence
gtccagacagcttgactgcttttaa

SEQ ID NO: 253435 - DNA, 25 bp, Probe Sequence
gtccaacagttgaattgaatgtcta

SEQ ID NO: 253436 - DNA, 25 bp, Probe Sequence
gtccaccaggataagtgacacctag

SEQ ID NO: 253437 - DNA, 25 bp, Probe Sequence
gtgccggagcagaaaggaccctgga

SEQ ID NO: 253438 - DNA, 25 bp, Probe Sequence
gtccaggagagggagcgcccctggc

SEQ ID NO: 253439 - DNA, 25 bp, Probe Sequence
gtgctggtgaagatgaccgcccagg

SEQ ID NO: 253440 - DNA, 25 bp, Probe Sequence
ggtggctgaagtgtacgaccaggag

SEQ ID NO: 253441 - DNA, 25 bp, Probe Sequence
ggggtcaagtttgggtgactggtgc

SEQ ID NO: 253442 - DNA, 25 bp, Probe Sequence
ggggctcaaaggggatataatttct

SEQ ID NO: 253443 - DNA, 25 bp, Probe Sequence
gggctctacacacgggtaaagaact

SEQ ID NO: 253444 - DNA, 25 bp, Probe Sequence
gtgcgtccatcaaggatttcaggga

SEQ ID NO: 253445 - DNA, 25 bp, Probe Sequence
gtgcgacctgtgaggatgtgaagga

SEQ ID NO: 253446 - DNA, 25 bp, Probe Sequence
gtgctcacctcacagagtctggagg

SEQ ID NO: 253447 - DNA, 25 bp, Probe Sequence
gtgccacgtcatccatagtttattg

SEQ ID NO: 253448 - DNA, 25 bp, Probe Sequence
gtgccatgttcttcatcggtttcac

SEQ ID NO: 253449 - DNA, 25 bp, Probe Sequence
gtgcctttgtcagtctacaatgccc

SEQ ID NO: 253450 - DNA, 25 bp, Probe Sequence
gtgcctttgatggtgttcatttgca

SEQ ID NO: 253451 - DNA, 25 bp, Probe Sequence
gtgcctgtatcaagtgtctcagtgt

SEQ ID NO: 253452 - DNA, 25 bp, Probe Sequence
gtgccatgatgtgactgcagtagtg

SEQ ID NO: 253453 - DNA, 25 bp, Probe Sequence
gtgccagagcaggcgctgcaggaag

SEQ ID NO: 253454 - DNA, 25 bp, Probe Sequence
gtgcgatgatgggcctggcaacatt

SEQ ID NO: 253455 - DNA, 25 bp, Probe Sequence
gtgctgcattagacgtggaactatc

SEQ ID NO: 253456 - DNA, 25 bp, Probe Sequence
gtgctctctaacaggaccatcacag

SEQ ID NO: 253457 - DNA, 25 bp, Probe Sequence
gtgctacttggcagtacatctacgt

SEQ ID NO: 253458 - DNA, 25 bp, Probe Sequence
gtgccctggacttgggcatgtcctt

SEQ ID NO: 253459 - DNA, 25 bp, Probe Sequence
gtgcgttggcattggaggtgatcct

SEQ ID NO: 253460 - DNA, 25 bp, Probe Sequence
gtgcgacgtgagtctgagtctgatc

SEQ ID NO: 253461 - DNA, 25 bp, Probe Sequence
gtgctggcgtaaagacactgctccc

SEQ ID NO: 253462 - DNA, 25 bp, Probe Sequence
gtgcttggttcactgacaactacga

SEQ ID NO: 253463 - DNA, 25 bp, Probe Sequence
gtgctgggtgtagtggaacaatcgt

SEQ ID NO: 253464 - DNA, 25 bp, Probe Sequence
gtgctggacgaagtgctataactac

SEQ ID NO: 253465 - DNA, 25 bp, Probe Sequence
gtgcggactgggtatcagactggtc

SEQ ID NO: 253466 - DNA, 25 bp, Probe Sequence
gtgcgtgaagagccgcaagaggcgg

SEQ ID NO: 253467 - DNA, 25 bp, Probe Sequence
gtgcaggagacagccggagtcgctg

SEQ ID NO: 253468 - DNA, 25 bp, Probe Sequence
gtgcgggaaccaatgcagactggca

SEQ ID NO: 253469 - DNA, 25 bp, Probe Sequence
gtgcagattgatttagggactggca

SEQ ID NO: 253470 - DNA, 25 bp, Probe Sequence
gtgccgttgttctggcacggagacg

SEQ ID NO: 253471 - DNA, 25 bp, Probe Sequence
gtgctggttgtctcattacggaagg

SEQ ID NO: 253472 - DNA, 25 bp, Probe Sequence
gtgtacttgtacggtactggcagaa

SEQ ID NO: 253473 - DNA, 25 bp, Probe Sequence
gtgcttccatctgtggtgactggaa

SEQ ID NO: 253474 - DNA, 25 bp, Probe Sequence
gtgccaactctgaagttgaagtgaa

SEQ ID NO: 253475 - DNA, 25 bp, Probe Sequence
gtgctccacttgcagttctttaaag

SEQ ID NO: 253476 - DNA, 25 bp, Probe Sequence
gtgccaacattccatgtattttgaa

SEQ ID NO: 253477 - DNA, 25 bp, Probe Sequence
gtgccgtcattctgttttaagctca

SEQ ID NO: 253478 - DNA, 25 bp, Probe Sequence
gtgccgtcattctgttttaagctca

SEQ ID NO: 253479 - DNA, 25 bp, Probe Sequence
gtgccagtgcttaggctttggaagt

SEQ ID NO: 253480 - DNA, 25 bp, Probe Sequence
gtgctccctttggttatggacacat

SEQ ID NO: 253481 - DNA, 25 bp, Probe Sequence
gtgctaactgtggctatttcgacct

SEQ ID NO: 253482 - DNA, 25 bp, Probe Sequence
gtgaacactgtttgattttacttgg

SEQ ID NO: 253483 - DNA, 25 bp, Probe Sequence
ggtacctttgagttttcagccttat

SEQ ID NO: 253484 - DNA, 25 bp, Probe Sequence
ggtacccagtcataaatcacctgtt

SEQ ID NO: 253485 - DNA, 25 bp, Probe Sequence
ggtacccagtcataaatcacctgtt

SEQ ID NO: 253486 - DNA, 25 bp, Probe Sequence
ggattcgtaatcataagtaccggag

SEQ ID NO: 253487 - DNA, 25 bp, Probe Sequence
gtgatagggaaaggacgttccggag

SEQ ID NO: 253488 - DNA, 25 bp, Probe Sequence
gtgatagggaaaggacgttccggag

SEQ ID NO: 253489 - DNA, 25 bp, Probe Sequence
gtgagaggatgacacgtctgccggc

SEQ ID NO: 253490 - DNA, 25 bp, Probe Sequence
gtgaatggcattcagtctctctacg

SEQ ID NO: 253491 - DNA, 25 bp, Probe Sequence
gtgcgttctagatgtcatcctaaaa

SEQ ID NO: 253492 - DNA, 25 bp, Probe Sequence
gtgccaagtaagtatcatcctcatt

SEQ ID NO: 253493 - DNA, 25 bp, Probe Sequence
gtgcctggtgcatgagaaactcttg

SEQ ID NO: 253494 - DNA, 25 bp, Probe Sequence
gtccatgttcattcaaattttgtag

SEQ ID NO: 253495 - DNA, 25 bp, Probe Sequence
gtgctcagtccttgcaatgttctag

SEQ ID NO: 253496 - DNA, 25 bp, Probe Sequence
gtgcttggcatcaggtgtttagtag

SEQ ID NO: 253497 - DNA, 25 bp, Probe Sequence
gtgctggagatctttggctttgagg

SEQ ID NO: 253498 - DNA, 25 bp, Probe Sequence
gtgctggagaagtctggcttcgcgt

SEQ ID NO: 253499 - DNA, 25 bp, Probe Sequence
gtgccgagagagtttgttctgtgtt

SEQ ID NO: 253500 - DNA, 25 bp, Probe Sequence
gtccagcaggtgctttgaggcattt

SEQ ID NO: 253501 - DNA, 25 bp, Probe Sequence
gtgcccaggtgtacttgagctgtga

SEQ ID NO: 253502 - DNA, 25 bp, Probe Sequence
gtgccaagggtaagctggcctgctg

SEQ ID NO: 253503 - DNA, 25 bp, Probe Sequence
gtgcccaccgtgagggctgagtgct

SEQ ID NO: 253504 - DNA, 25 bp, Probe Sequence
gtgcccaactattacggggtctggc

SEQ ID NO: 253505 - DNA, 25 bp, Probe Sequence
gtgcccacaatgtaaacagggttgg

SEQ ID NO: 253506 - DNA, 25 bp, Probe Sequence
gtgcccagcttataagaatggtgtt

SEQ ID NO: 253507 - DNA, 25 bp, Probe Sequence
gtgcccagaccacaatatttcttct

SEQ ID NO: 253508 - DNA, 25 bp, Probe Sequence
gtccacaacacagtaattggtcact

SEQ ID NO: 253509 - DNA, 25 bp, Probe Sequence
gtgccaggaacatcattctgtccct

SEQ ID NO: 253510 - DNA, 25 bp, Probe Sequence
gtgcttcaaaatgatgtagtccctc

SEQ ID NO: 253511 - DNA, 25 bp, Probe Sequence
gtgcttttgaacattatttcactgc

SEQ ID NO: 253512 - DNA, 25 bp, Probe Sequence
gtgctgtatctattactcttttact

SEQ ID NO: 253513 - DNA, 25 bp, Probe Sequence
gtgcttcaaatgatccttcctactt

SEQ ID NO: 253514 - DNA, 25 bp, Probe Sequence
gtgcttagagtcatccctctacatg

SEQ ID NO: 253515 - DNA, 25 bp, Probe Sequence
gtgctgatgaagtcctttttactgg

SEQ ID NO: 253516 - DNA, 25 bp, Probe Sequence
gtgctgttagaccttttggctgcag

SEQ ID NO: 253517 - DNA, 25 bp, Probe Sequence
gtgcgtgaaacacaccaggctgtgg

SEQ ID NO: 253518 - DNA, 25 bp, Probe Sequence
gtgccagcgaaaccacgagggtgat

SEQ ID NO: 253519 - DNA, 25 bp, Probe Sequence
gtgccgcgataacagtacgtgtgca

SEQ ID NO: 253520 - DNA, 25 bp, Probe Sequence
gtgccgcggaaatgctccgctagca

SEQ ID NO: 253521 - DNA, 25 bp, Probe Sequence
gtgccaaagaaaagaactgcttgca

SEQ ID NO: 253522 - DNA, 25 bp, Probe Sequence
gtccagacatgcccaatgaacattt

SEQ ID NO: 253523 - DNA, 25 bp, Probe Sequence
gtccagcctagtctggactgcttcc

SEQ ID NO: 253524 - DNA, 25 bp, Probe Sequence
gtccagcgcaaggaggggctgcttc

SEQ ID NO: 253525 - DNA, 25 bp, Probe Sequence
gtccagcagcctgttctggatttgc

SEQ ID NO: 253526 - DNA, 25 bp, Probe Sequence
gtgccagcagccgcggtaattccag

SEQ ID NO: 253527 - DNA, 25 bp, Probe Sequence
gtgctacgtcgccctggacttcgag

SEQ ID NO: 253528 - DNA, 25 bp, Probe Sequence
gtgctggcagttcggctagatttct

SEQ ID NO: 253529 - DNA, 25 bp, Probe Sequence
gtgcccagcattgactaatgttcag

SEQ ID NO: 253530 - DNA, 25 bp, Probe Sequence
gtgcctcgattttttcatgtttttg

SEQ ID NO: 253531 - DNA, 25 bp, Probe Sequence
gtgccatcgggattttttgttggga

SEQ ID NO: 253532 - DNA, 25 bp, Probe Sequence
gtgttggggttttgattgtgggtag

SEQ ID NO: 253533 - DNA, 25 bp, Probe Sequence
gtgcctgggactatatatgtgtggg

SEQ ID NO: 253534 - DNA, 25 bp, Probe Sequence
gtgcctggctaactatagtcgaggg

SEQ ID NO: 253535 - DNA, 25 bp, Probe Sequence
gtgcggtcacattctaagtctagga

SEQ ID NO: 253536 - DNA, 25 bp, Probe Sequence
gtgctgggcaagtcaaaactataga

SEQ ID NO: 253537 - DNA, 25 bp, Probe Sequence
gtgctggtgatactcaaaacatgaa

SEQ ID NO: 253538 - DNA, 25 bp, Probe Sequence
gtgctgctgtagatgacaacctcca

SEQ ID NO: 253539 - DNA, 25 bp, Probe Sequence
gtgctcttctatcaaaagcctctgg

SEQ ID NO: 253540 - DNA, 25 bp, Probe Sequence
gtgcttttgagtcacaaacttgagc

SEQ ID NO: 253541 - DNA, 25 bp, Probe Sequence
gtgcctgtgggtctctacaagtgac

SEQ ID NO: 253542 - DNA, 25 bp, Probe Sequence
gtgcctggacgtacaataccacttc

SEQ ID NO: 253543 - DNA, 25 bp, Probe Sequence
gtgccaagaggataaaccagctgtc

SEQ ID NO: 253544 - DNA, 25 bp, Probe Sequence
gtgccaagggcaacaaacacctgca

SEQ ID NO: 253545 - DNA, 25 bp, Probe Sequence
gtgcttaggggcagagccacctgca

SEQ ID NO: 253546 - DNA, 25 bp, Probe Sequence
gtgcctaaggacagagctgacttgc

SEQ ID NO: 253547 - DNA, 25 bp, Probe Sequence
gtgcctgagggaagatgcctagtag

SEQ ID NO: 253548 - DNA, 25 bp, Probe Sequence
gtgcgtttgtgcatatgcgtgagtt

SEQ ID NO: 253549 - DNA, 25 bp, Probe Sequence
gtgcagtttcgctcagagcttgtct

SEQ ID NO: 253550 - DNA, 25 bp, Probe Sequence
gtgcagcgatgccgggagattttct

SEQ ID NO: 253551 - DNA, 25 bp, Probe Sequence
gtgctgaatcttggaggaggtttcg

SEQ ID NO: 253552 - DNA, 25 bp, Probe Sequence
gtgcttacattgtattaggtgttat

SEQ ID NO: 253553 - DNA, 25 bp, Probe Sequence
gtgcttagcatatgtaggagagttg

SEQ ID NO: 253554 - DNA, 25 bp, Probe Sequence
gtgccttcaaagtacgagaagctac

SEQ ID NO: 253555 - DNA, 25 bp, Probe Sequence
gtgcctatcagagaaggagacggag

SEQ ID NO: 253556 - DNA, 25 bp, Probe Sequence
gtccaagctacttaggaggctgagg

SEQ ID NO: 253557 - DNA, 25 bp, Probe Sequence
gtccacctctcttgaggcggtgagc

SEQ ID NO: 253558 - DNA, 25 bp, Probe Sequence
gtgctccgtctcagaggtgggatgc

SEQ ID NO: 253559 - DNA, 25 bp, Probe Sequence
gtgctccgtctcagaggtgggatgc

SEQ ID NO: 253560 - DNA, 25 bp, Probe Sequence
gtgctgggcgccatggagatggggc

SEQ ID NO: 253561 - DNA, 25 bp, Probe Sequence
gtgcttggcggcaggagtatttcaa

SEQ ID NO: 253562 - DNA, 25 bp, Probe Sequence
gtgcctagccagtattggtatttaa

SEQ ID NO: 253563 - DNA, 25 bp, Probe Sequence
gtgcttggtgagtcttggttctaaa

SEQ ID NO: 253564 - DNA, 25 bp, Probe Sequence
gtgctaaatgacttttttggccaaa

SEQ ID NO: 253565 - DNA, 25 bp, Probe Sequence
gtgctcaagagtctggtttggggct

SEQ ID NO: 253566 - DNA, 25 bp, Probe Sequence
gtgcccagagatcaggtgtccaggg

SEQ ID NO: 253567 - DNA, 25 bp, Probe Sequence
gtccacaatgcacatgtctgtcaca

SEQ ID NO: 253568 - DNA, 25 bp, Probe Sequence
gtgctgaccgcattatcaaaaccct

SEQ ID NO: 253569 - DNA, 25 bp, Probe Sequence
gtgcctctgggtacaaaagtgcctc

SEQ ID NO: 253570 - DNA, 25 bp, Probe Sequence
gtccaagtggcgaagcaaaatcctc

SEQ ID NO: 253571 - DNA, 25 bp, Probe Sequence
gtccagctggcctggacagtatccc

SEQ ID NO: 253572 - DNA, 25 bp, Probe Sequence
gtgccagtagccgtgcatacagcta

SEQ ID NO: 253573 - DNA, 25 bp, Probe Sequence
gtgccagtcagcagtcatgcacgct

SEQ ID NO: 253574 - DNA, 25 bp, Probe Sequence
gtgccagtcagaggtacagcagcct

SEQ ID NO: 253575 - DNA, 25 bp, Probe Sequence
gtgccagccaaagacagcagcattc

SEQ ID NO: 253576 - DNA, 25 bp, Probe Sequence
gtgccacaggaagccatcagcagtg

SEQ ID NO: 253577 - DNA, 25 bp, Probe Sequence
gtccaagcagataggctcacacgag

SEQ ID NO: 253578 - DNA, 25 bp, Probe Sequence
gtgccccagatgagctgcactacac

SEQ ID NO: 253579 - DNA, 25 bp, Probe Sequence
gtgcccaagtaattcactacagcct

SEQ ID NO: 253580 - DNA, 25 bp, Probe Sequence
gtgccctggtattgtcagacacacc

SEQ ID NO: 253581 - DNA, 25 bp, Probe Sequence
gtgcccgagccatatagcaggcacg

SEQ ID NO: 253582 - DNA, 25 bp, Probe Sequence
gtgccatcgaggttcaggaggcggc

SEQ ID NO: 253583 - DNA, 25 bp, Probe Sequence
gtgctattgagattccagtggtgac

SEQ ID NO: 253584 - DNA, 25 bp, Probe Sequence
gtgctttggcttgtcgaatgagcgt

SEQ ID NO: 253585 - DNA, 25 bp, Probe Sequence
gtgctttggcctcctcaaagcatcc

SEQ ID NO: 253586 - DNA, 25 bp, Probe Sequence
gtgctggagctggctttgccaagct

SEQ ID NO: 253587 - DNA, 25 bp, Probe Sequence
gtgctggtcccttataaactaatcc

SEQ ID NO: 253588 - DNA, 25 bp, Probe Sequence
gtgcgtgtgtcttttgaaacaccac

SEQ ID NO: 253589 - DNA, 25 bp, Probe Sequence
gtgcctgtatcttgtaaaacttcat

SEQ ID NO: 253590 - DNA, 25 bp, Probe Sequence
gtgcctctgattctatgtaacttgt

SEQ ID NO: 253591 - DNA, 25 bp, Probe Sequence
gtgcctcgattgaaggtgacctctg

SEQ ID NO: 253592 - DNA, 25 bp, Probe Sequence
gtgcatcgcaatatcgtgttccact

SEQ ID NO: 253593 - DNA, 25 bp, Probe Sequence
gtgctgtcagcaatatcctcattgc

SEQ ID NO: 253594 - DNA, 25 bp, Probe Sequence
gtgcttctgtttacacagtcatgtg

SEQ ID NO: 253595 - DNA, 25 bp, Probe Sequence
gtgctctctgagagaatcactcaat

SEQ ID NO: 253596 - DNA, 25 bp, Probe Sequence
gtgcccatgagaatgagatcaccaa

SEQ ID NO: 253597 - DNA, 25 bp, Probe Sequence
gtgccactaatgttgatctaaagct

SEQ ID NO: 253598 - DNA, 25 bp, Probe Sequence
gtgccactaatattgatctaaagct

SEQ ID NO: 253599 - DNA, 25 bp, Probe Sequence
gtgccatgttacagtcaaacagcta

SEQ ID NO: 253600 - DNA, 25 bp, Probe Sequence
gtgccttctgacaagccaaactact

SEQ ID NO: 253601 - DNA, 25 bp, Probe Sequence
gtgcctttcactgagcaaatcatac

SEQ ID NO: 253602 - DNA, 25 bp, Probe Sequence
gtgccattatcctgtggaatctgat

SEQ ID NO: 253603 - DNA, 25 bp, Probe Sequence
gtgccatttgcctggatgaatatga

SEQ ID NO: 253604 - DNA, 25 bp, Probe Sequence
gtgcctaggcctgggcagtggatgg

SEQ ID NO: 253605 - DNA, 25 bp, Probe Sequence
gtgccaagggcaaaagtgaagcagg

SEQ ID NO: 253606 - DNA, 25 bp, Probe Sequence
gtgccactggtggaagggtcagcgg

SEQ ID NO: 253607 - DNA, 25 bp, Probe Sequence
gtgcctctggatggactgggtcaca

SEQ ID NO: 253608 - DNA, 25 bp, Probe Sequence
gtgctccaggattgactggtggggc

SEQ ID NO: 253609 - DNA, 25 bp, Probe Sequence
gtgctttggatactcggatggagtg

SEQ ID NO: 253610 - DNA, 25 bp, Probe Sequence
gtgctgtggttccgtgaaggagatg

SEQ ID NO: 253611 - DNA, 25 bp, Probe Sequence
gtgcctgctgtctgctgtaaaggct

SEQ ID NO: 253612 - DNA, 25 bp, Probe Sequence
gtgcttgtcctggcagtaaggctct

SEQ ID NO: 253613 - DNA, 25 bp, Probe Sequence
gtgcattgccgaggattagagacca

SEQ ID NO: 253614 - DNA, 25 bp, Probe Sequence
gtgcatgtctgctctgatatacgtc

SEQ ID NO: 253615 - DNA, 25 bp, Probe Sequence
gtgcatgcatggcccatcaatagcc

SEQ ID NO: 253616 - DNA, 25 bp, Probe Sequence
gtgcaattgctgaacaaaccccgat

SEQ ID NO: 253617 - DNA, 25 bp, Probe Sequence
gtgcccatgctgaaagaggcctgcc

SEQ ID NO: 253618 - DNA, 25 bp, Probe Sequence
gtgcctcactccagcagtgagtgcc

SEQ ID NO: 253619 - DNA, 25 bp, Probe Sequence
gtgcctgcagtggccgaggagattc

SEQ ID NO: 253620 - DNA, 25 bp, Probe Sequence
gtgccaggtggacagccagtgtcct

SEQ ID NO: 253621 - DNA, 25 bp, Probe Sequence
gtgaaggcatggacatcccggtact

SEQ ID NO: 253622 - DNA, 25 bp, Probe Sequence
gtgacacctaggacccaggaaataa

SEQ ID NO: 253623 - DNA, 25 bp, Probe Sequence
gtgacttcctgggccacaaagatta

SEQ ID NO: 253624 - DNA, 25 bp, Probe Sequence
gtgagcttgaatcaaccaatctgat

SEQ ID NO: 253625 - DNA, 25 bp, Probe Sequence
gtgctcctgaatctacttttaataa

SEQ ID NO: 253626 - DNA, 25 bp, Probe Sequence
gtgctattgaatggcttttagtaat

SEQ ID NO: 253627 - DNA, 25 bp, Probe Sequence
gtgccactgaatggctagagggata

SEQ ID NO: 253628 - DNA, 25 bp, Probe Sequence
gtgcatctagatacactgaggtgga

SEQ ID NO: 253629 - DNA, 25 bp, Probe Sequence
gtgctgctctgtgactaggttgaaa

SEQ ID NO: 253630 - DNA, 25 bp, Probe Sequence
gtgcctcatttgatgggtgataaca

SEQ ID NO: 253631 - DNA, 25 bp, Probe Sequence
gtgctgtttgttagttatgaaatca

SEQ ID NO: 253632 - DNA, 25 bp, Probe Sequence
gtgctgttcgtagtttgtataatca

SEQ ID NO: 253633 - DNA, 25 bp, Probe Sequence
gtgctataactactttatgtaacat

SEQ ID NO: 253634 - DNA, 25 bp, Probe Sequence
gtgcctcaactgtttaagtgaatat

SEQ ID NO: 253635 - DNA, 25 bp, Probe Sequence
gtgcctcacacctgaattgaaaatt

SEQ ID NO: 253636 - DNA, 25 bp, Probe Sequence
gtgcgagcacacatggaatctgaca

SEQ ID NO: 253637 - DNA, 25 bp, Probe Sequence
gtgaccaaattgcactcgactcgat

SEQ ID NO: 253638 - DNA, 25 bp, Probe Sequence
gtgccctaattctcttgagttgcag

SEQ ID NO: 253639 - DNA, 25 bp, Probe Sequence
gtgccacttatccaccaggagggca

SEQ ID NO: 253640 - DNA, 25 bp, Probe Sequence
gtgccattgttttgccagtgaagcc

SEQ ID NO: 253641 - DNA, 25 bp, Probe Sequence
gtgcagttgctcaaaggcagtatag

SEQ ID NO: 253642 - DNA, 25 bp, Probe Sequence
gtgcttttcaaagatgctgctagtg

SEQ ID NO: 253643 - DNA, 25 bp, Probe Sequence
gtgctatgtgcagaaccactttggt

SEQ ID NO: 253644 - DNA, 25 bp, Probe Sequence
gtgctttcatacgcacctttgaggg

SEQ ID NO: 253645 - DNA, 25 bp, Probe Sequence
gtgctatcctacgaaatcatttgtt

SEQ ID NO: 253646 - DNA, 25 bp, Probe Sequence
gtgcctacctcttagacatgttgtg

SEQ ID NO: 253647 - DNA, 25 bp, Probe Sequence
gtgccggccagatgctgaggtctgg

SEQ ID NO: 253648 - DNA, 25 bp, Probe Sequence
gtgccgggcaaggtggtgatcaggg

SEQ ID NO: 253649 - DNA, 25 bp, Probe Sequence
gtgccatgagcacaggggctgaggg

SEQ ID NO: 253650 - DNA, 25 bp, Probe Sequence
gtgccaggagctaatggagccaggc

SEQ ID NO: 253651 - DNA, 25 bp, Probe Sequence
gtgccagaattaagtgagtcaagcc

SEQ ID NO: 253652 - DNA, 25 bp, Probe Sequence
gtgctagagctgtaatgtcagtaat

SEQ ID NO: 253653 - DNA, 25 bp, Probe Sequence
gtgctgaatggaactgctcgttaca

SEQ ID NO: 253654 - DNA, 25 bp, Probe Sequence
gtgctgaaggcaagcctggggttga

SEQ ID NO: 253655 - DNA, 25 bp, Probe Sequence
gtgctaggagcaagtctgggagcta

SEQ ID NO: 253656 - DNA, 25 bp, Probe Sequence
gtgccaggagtacatgtgagactat

SEQ ID NO: 253657 - DNA, 25 bp, Probe Sequence
gtgccagacaaacatatgatatcat

SEQ ID NO: 253658 - DNA, 25 bp, Probe Sequence
gtccaataaactcgtgctcatctgc

SEQ ID NO: 253659 - DNA, 25 bp, Probe Sequence
gtgccaaaataaagtctgtcatgcc

SEQ ID NO: 253660 - DNA, 25 bp, Probe Sequence
gtgcccaaccttcacgtcatgaagg

SEQ ID NO: 253661 - DNA, 25 bp, Probe Sequence
gtccaaagccttcagcctagatggt

SEQ ID NO: 253662 - DNA, 25 bp, Probe Sequence
gtgccaagagccctaaaaatggtta

SEQ ID NO: 253663 - DNA, 25 bp, Probe Sequence
gtgccaaggatcttgacaagttgtt

SEQ ID NO: 253664 - DNA, 25 bp, Probe Sequence
gtgcctatagtcctataagcttttc

SEQ ID NO: 253665 - DNA, 25 bp, Probe Sequence
gtgcctgtagtcccagaactttgga

SEQ ID NO: 253666 - DNA, 25 bp, Probe Sequence
gtgctttactctgaagactctagga

SEQ ID NO: 253667 - DNA, 25 bp, Probe Sequence
gtgctcaacctttgaataaccagga

SEQ ID NO: 253668 - DNA, 25 bp, Probe Sequence
ggctcagttcttgaaaaacggtgtc

SEQ ID NO: 253669 - DNA, 25 bp, Probe Sequence
gtgctcagttttgaaagataggcaa

SEQ ID NO: 253670 - DNA, 25 bp, Probe Sequence
gtgctagtttctccaaatgcaataa

SEQ ID NO: 253671 - DNA, 25 bp, Probe Sequence
gtgctcattctccctaaatagtaaa

SEQ ID NO: 253672 - DNA, 25 bp, Probe Sequence
gtgccatgtctcccatactagagat

SEQ ID NO: 253673 - DNA, 25 bp, Probe Sequence
gtgcagattgtcaactccaaatcta

SEQ ID NO: 253674 - DNA, 25 bp, Probe Sequence
gtgcaatccttacttgagaacttta

SEQ ID NO: 253675 - DNA, 25 bp, Probe Sequence
gtgaattccatactataaactagga

SEQ ID NO: 253676 - DNA, 25 bp, Probe Sequence
gtgcgttagcatctgaaccactgaa

SEQ ID NO: 253677 - DNA, 25 bp, Probe Sequence
gtgccttcagctctacagctaatca

SEQ ID NO: 253678 - DNA, 25 bp, Probe Sequence
gtgcctcatagtctacttagaaaga

SEQ ID NO: 253679 - DNA, 25 bp, Probe Sequence
gtgcctgctagacatctgctaaaat

SEQ ID NO: 253680 - DNA, 25 bp, Probe Sequence
gtgcctgctgagtcagcttgcatct

SEQ ID NO: 253681 - DNA, 25 bp, Probe Sequence
gtgcctgctgagtcagcttgcatct

SEQ ID NO: 253682 - DNA, 25 bp, Probe Sequence
gtgcctctgcagtacttgatgtatt

SEQ ID NO: 253683 - DNA, 25 bp, Probe Sequence
gtgcctcatcatgcaaggatctttt

SEQ ID NO: 253684 - DNA, 25 bp, Probe Sequence
gtgactcatgatgctcgaaccatcc

SEQ ID NO: 253685 - DNA, 25 bp, Probe Sequence
gtgagtctgagatggcaccactagc

SEQ ID NO: 253686 - DNA, 25 bp, Probe Sequence
ggagttaaagaaaattgaccaggcg

SEQ ID NO: 253687 - DNA, 25 bp, Probe Sequence
gtgacactaaccattttgacggacg

SEQ ID NO: 253688 - DNA, 25 bp, Probe Sequence
ggcgaccaagacaccttgaagggcc

SEQ ID NO: 253689 - DNA, 25 bp, Probe Sequence
gggctccaaatctgcctagaaaacc

SEQ ID NO: 253690 - DNA, 25 bp, Probe Sequence
gtgtttcattacagctccaaaaagc

SEQ ID NO: 253691 - DNA, 25 bp, Probe Sequence
gtgccttatttcacttaacatagac

SEQ ID NO: 253692 - DNA, 25 bp, Probe Sequence
gtgccttggtctaatattaacatga

SEQ ID NO: 253693 - DNA, 25 bp, Probe Sequence
gtgccattgtctttatatgaacata

SEQ ID NO: 253694 - DNA, 25 bp, Probe Sequence
gtgccattgtctttatatgaacata

SEQ ID NO: 253695 - DNA, 25 bp, Probe Sequence
gtgccatgtttcatcaaggcaccac

SEQ ID NO: 253696 - DNA, 25 bp, Probe Sequence
gtgcctgtggacatacgagatccag

SEQ ID NO: 253697 - DNA, 25 bp, Probe Sequence
gtgcatctgtcagccagactggaca

SEQ ID NO: 253698 - DNA, 25 bp, Probe Sequence
gtgcctctagctgggactgatggag

SEQ ID NO: 253699 - DNA, 25 bp, Probe Sequence
gtgccagtccatgggactgttacct

SEQ ID NO: 253700 - DNA, 25 bp, Probe Sequence
gtgccagacagctgaatctttatca

SEQ ID NO: 253701 - DNA, 25 bp, Probe Sequence
gtgccatacatgttattgttttcaa

SEQ ID NO: 253702 - DNA, 25 bp, Probe Sequence
gtgccacctgactttcagatgggaa

SEQ ID NO: 253703 - DNA, 25 bp, Probe Sequence
gtgcgcccgactactcgggcgcaga

SEQ ID NO: 253704 - DNA, 25 bp, Probe Sequence
gtgccagccaccatctgaggtggga

SEQ ID NO: 253705 - DNA, 25 bp, Probe Sequence
gtgcgccctcatatctatggatatg

SEQ ID NO: 253706 - DNA, 25 bp, Probe Sequence
gtgccatttgatattcatggatatc

SEQ ID NO: 253707 - DNA, 25 bp, Probe Sequence
gtgcctttgatgagtcaggtagcaa

SEQ ID NO: 253708 - DNA, 25 bp, Probe Sequence
gtgcctcatgggagtcatcttcaca

SEQ ID NO: 253709 - DNA, 25 bp, Probe Sequence
gtgcctgttgaatgtccatgctaca

SEQ ID NO: 253710 - DNA, 25 bp, Probe Sequence
gtgccatccagaaaaccatcataaa

SEQ ID NO: 253711 - DNA, 25 bp, Probe Sequence
gtgccaccagactagacctgtatca

SEQ ID NO: 253712 - DNA, 25 bp, Probe Sequence
gtgccattcgacaacacattgttat

SEQ ID NO: 253713 - DNA, 25 bp, Probe Sequence
gtgccttgtagaattgcattgtcta

SEQ ID NO: 253714 - DNA, 25 bp, Probe Sequence
gtgcctgtttgaagctactgctgcc

SEQ ID NO: 253715 - DNA, 25 bp, Probe Sequence
gtgccttggagaactcacagcagca

SEQ ID NO: 253716 - DNA, 25 bp, Probe Sequence
gtgctagtggagacacattcacaga

SEQ ID NO: 253717 - DNA, 25 bp, Probe Sequence
gtgcgagatgggaccagctctaagg

SEQ ID NO: 253718 - DNA, 25 bp, Probe Sequence
gtgctgaacggaccgctatccagaa

SEQ ID NO: 253719 - DNA, 25 bp, Probe Sequence
gtgctgatgatcagaatgctgcgat

SEQ ID NO: 253720 - DNA, 25 bp, Probe Sequence
gtgctgatattacatctcgttatgg

SEQ ID NO: 253721 - DNA, 25 bp, Probe Sequence
gtgcgaaccatgctccgaatgagtg

SEQ ID NO: 253722 - DNA, 25 bp, Probe Sequence
gtgcaactcctcttgggcaaggtga

SEQ ID NO: 253723 - DNA, 25 bp, Probe Sequence
gtgcacttccgagtggcgaggttca

SEQ ID NO: 253724 - DNA, 25 bp, Probe Sequence
gtgccttctgaagtgagggtttaga

SEQ ID NO: 253725 - DNA, 25 bp, Probe Sequence
gtgccctgtaacctgactggttaac

SEQ ID NO: 253726 - DNA, 25 bp, Probe Sequence
gtgcctttaccagtgtgtggatcat

SEQ ID NO: 253727 - DNA, 25 bp, Probe Sequence
gtgcccttgatcaaatctgtgctgt

SEQ ID NO: 253728 - DNA, 25 bp, Probe Sequence
gtgcctcattgagttcggtgcatct

SEQ ID NO: 253729 - DNA, 25 bp, Probe Sequence
gtgcccagacaggtgatggagtcat

SEQ ID NO: 253730 - DNA, 25 bp, Probe Sequence
gtgccttgactcagatggtgcatat

SEQ ID NO: 253731 - DNA, 25 bp, Probe Sequence
gtgctgcggttcacatgtgtaatcc

SEQ ID NO: 253732 - DNA, 25 bp, Probe Sequence
gtgctgcggttcatcatggagagtg

SEQ ID NO: 253733 - DNA, 25 bp, Probe Sequence
gtgccagacccttgatggaggatac

SEQ ID NO: 253734 - DNA, 25 bp, Probe Sequence
gtgctgcagaacggacttgggagcc

SEQ ID NO: 253735 - DNA, 25 bp, Probe Sequence
gtgcaggatagcagacctgggtgtg

SEQ ID NO: 253736 - DNA, 25 bp, Probe Sequence
gtgctgaataaacccttctgatctg

SEQ ID NO: 253737 - DNA, 25 bp, Probe Sequence
gtgcttaacacattgccttattcat

SEQ ID NO: 253738 - DNA, 25 bp, Probe Sequence
gtgctctacacagtcatccaggact

SEQ ID NO: 253739 - DNA, 25 bp, Probe Sequence
gtgcacttcatggtctcactggacc

SEQ ID NO: 253740 - DNA, 25 bp, Probe Sequence
gtgagagatctcctcgatctgaacc

SEQ ID NO: 253741 - DNA, 25 bp, Probe Sequence
gtgcagtggctcatgcctgtaatcc

SEQ ID NO: 253742 - DNA, 25 bp, Probe Sequence
gtgagctggggtctttacaacccct

SEQ ID NO: 253743 - DNA, 25 bp, Probe Sequence
gtgcctgttgttctcattacaaccc

SEQ ID NO: 253744 - DNA, 25 bp, Probe Sequence
gtgcctgtgcttactgtagtaccac

SEQ ID NO: 253745 - DNA, 25 bp, Probe Sequence
gtgctctgtgtttcaataccatcca

SEQ ID NO: 253746 - DNA, 25 bp, Probe Sequence
gtgcctatgattacacaataccacc

SEQ ID NO: 253747 - DNA, 25 bp, Probe Sequence
gtgctcctaaaggcagcaaccattc

SEQ ID NO: 253748 - DNA, 25 bp, Probe Sequence
gtgctggaaaaggcagccacacgtt

SEQ ID NO: 253749 - DNA, 25 bp, Probe Sequence
gtgcggaacatcaaggccaccgatc

SEQ ID NO: 253750 - DNA, 25 bp, Probe Sequence
gtgctggaattcaatggcgcatctc

SEQ ID NO: 253751 - DNA, 25 bp, Probe Sequence
gtgctgttgataatatctctcaccc

SEQ ID NO: 253752 - DNA, 25 bp, Probe Sequence
gtgctgagcgataacatgttccgct

SEQ ID NO: 253753 - DNA, 25 bp, Probe Sequence
gtgcaaggagctccatttccgagct

SEQ ID NO: 253754 - DNA, 25 bp, Probe Sequence
gtgctgagaggggatgtaggcccat

SEQ ID NO: 253755 - DNA, 25 bp, Probe Sequence
gtgctggggggtcatgagtgccaac

SEQ ID NO: 253756 - DNA, 25 bp, Probe Sequence
gtgcgggaggtgtttgagatggcca

SEQ ID NO: 253757 - DNA, 25 bp, Probe Sequence
gtgcccaggaactcagagaggcgcg

SEQ ID NO: 253758 - DNA, 25 bp, Probe Sequence
gtgcgccaggaaaacgtgacggtgt

SEQ ID NO: 253759 - DNA, 25 bp, Probe Sequence
gtgcgccaggtacaagcagtcagtt

SEQ ID NO: 253760 - DNA, 25 bp, Probe Sequence
gtgccctgtctaaagacactgcagg

SEQ ID NO: 253761 - DNA, 25 bp, Probe Sequence
gtgtccttgtagatagactgccgag

SEQ ID NO: 253762 - DNA, 25 bp, Probe Sequence
gtgcccttgaaagaactgattgaga

SEQ ID NO: 253763 - DNA, 25 bp, Probe Sequence
gtgcttctttcatgtcaggcgttaa

SEQ ID NO: 253764 - DNA, 25 bp, Probe Sequence
gtgcctttgtacctcaggtgtttta

SEQ ID NO: 253765 - DNA, 25 bp, Probe Sequence
gtgcggttcaccacagttgtattta

SEQ ID NO: 253766 - DNA, 25 bp, Probe Sequence
gtgagtgtaattctcctttcaggta

SEQ ID NO: 253767 - DNA, 25 bp, Probe Sequence
gtgagtgtaattctcctttcaggta

SEQ ID NO: 253768 - DNA, 25 bp, Probe Sequence
gtgagtgtaattctcctttcaggta

SEQ ID NO: 253769 - DNA, 25 bp, Probe Sequence
gtgaattaataaggccttttcgctt

SEQ ID NO: 253770 - DNA, 25 bp, Probe Sequence
gtgagaaaaatgagcctttgtgcgt

SEQ ID NO: 253771 - DNA, 25 bp, Probe Sequence
gtgaacaatacgaagtcccttccct

SEQ ID NO: 253772 - DNA, 25 bp, Probe Sequence
gtgaaaagactgaaaccggaccctg

SEQ ID NO: 253773 - DNA, 25 bp, Probe Sequence
gtgacaaagggcactgcgtggacct

SEQ ID NO: 253774 - DNA, 25 bp, Probe Sequence
ggtcaccagggctgcttttaactct

SEQ ID NO: 253775 - DNA, 25 bp, Probe Sequence
gtggaccattccactttttagctcc

SEQ ID NO: 253776 - DNA, 25 bp, Probe Sequence
gtgcgacactgtgcattgcattatg

SEQ ID NO: 253777 - DNA, 25 bp, Probe Sequence
gtgccatcctggtagcagctattgt

SEQ ID NO: 253778 - DNA, 25 bp, Probe Sequence
gtgctcagacaggtaaccactgctg

SEQ ID NO: 253779 - DNA, 25 bp, Probe Sequence
gtgctcacagctgtaatcccagcac

SEQ ID NO: 253780 - DNA, 25 bp, Probe Sequence
gtgctcacagacgatgttccacagg

SEQ ID NO: 253781 - DNA, 25 bp, Probe Sequence
gtgctcatcaggtaatctgctaagg

SEQ ID NO: 253782 - DNA, 25 bp, Probe Sequence
gtgctccggcagagtgctgaagcca

SEQ ID NO: 253783 - DNA, 25 bp, Probe Sequence
gtgcagtcactggaggttgaagcca

SEQ ID NO: 253784 - DNA, 25 bp, Probe Sequence
gtgcatgatcgtggtggtagccacc

SEQ ID NO: 253785 - DNA, 25 bp, Probe Sequence
gtgcagtcagaacgtggcagccatc

SEQ ID NO: 253786 - DNA, 25 bp, Probe Sequence
gtgatgatccttagtggcacatgaa

SEQ ID NO: 253787 - DNA, 25 bp, Probe Sequence
gtgcttgctagctgggcaagaaagc

SEQ ID NO: 253788 - DNA, 25 bp, Probe Sequence
gtgctgctgtactaaaagaacaact

SEQ ID NO: 253789 - DNA, 25 bp, Probe Sequence
gtgctgtgtcactcaaacaaccact

SEQ ID NO: 253790 - DNA, 25 bp, Probe Sequence
gtgctgatggccactaacagacctg

SEQ ID NO: 253791 - DNA, 25 bp, Probe Sequence
gtgctgaagcctgtcagccagcacc

SEQ ID NO: 253792 - DNA, 25 bp, Probe Sequence
gtgctgaagtctgcagagctggcaa

SEQ ID NO: 253793 - DNA, 25 bp, Probe Sequence
gtgctgaagtctgcagagctggcaa

SEQ ID NO: 253794 - DNA, 25 bp, Probe Sequence
gtgctcagaggcgtcgaggtgactg

SEQ ID NO: 253795 - DNA, 25 bp, Probe Sequence
gtgctgcctgcggaggatggtgagc

SEQ ID NO: 253796 - DNA, 25 bp, Probe Sequence
gtgcatgccatgagaggggtgctga

SEQ ID NO: 253797 - DNA, 25 bp, Probe Sequence
gtgctgcagtgcatgggggatgttt

SEQ ID NO: 253798 - DNA, 25 bp, Probe Sequence
gtgctcgtgctgtgcgaggatctca

SEQ ID NO: 253799 - DNA, 25 bp, Probe Sequence
gtgccattgctgagctgggcatcta

SEQ ID NO: 253800 - DNA, 25 bp, Probe Sequence
gtgcgtgtgcgttgatgggcactca

SEQ ID NO: 253801 - DNA, 25 bp, Probe Sequence
gtgacatgggtattgcaggcaccaa

SEQ ID NO: 253802 - DNA, 25 bp, Probe Sequence
gtgcctgtagtgtgatgtgtctgaa

SEQ ID NO: 253803 - DNA, 25 bp, Probe Sequence
gtgccgtcctgctgatgtggtaggc

SEQ ID NO: 253804 - DNA, 25 bp, Probe Sequence
gtgcctgtccatcttagaggaggac

SEQ ID NO: 253805 - DNA, 25 bp, Probe Sequence
gtgccattcaacactatgaagagaa

SEQ ID NO: 253806 - DNA, 25 bp, Probe Sequence
gtgccattaagaattctgcatcaga

SEQ ID NO: 253807 - DNA, 25 bp, Probe Sequence
gtgccatctgaatgattcttctgaa

SEQ ID NO: 253808 - DNA, 25 bp, Probe Sequence
gtgcctcagagctgtgacatttcaa

SEQ ID NO: 253809 - DNA, 25 bp, Probe Sequence
gtgcacacgtgcaggagctgtacca

SEQ ID NO: 253810 - DNA, 25 bp, Probe Sequence
gtgcagcaagagagctcagcttaac

SEQ ID NO: 253811 - DNA, 25 bp, Probe Sequence
gtgacaaggtttcgttttcattcct

SEQ ID NO: 253812 - DNA, 25 bp, Probe Sequence
gtgaaacttatttcactttcacact

SEQ ID NO: 253813 - DNA, 25 bp, Probe Sequence
gtgaatttgtattccctttcacctc

SEQ ID NO: 253814 - DNA, 25 bp, Probe Sequence
gtgaatttgtgacagctgcagttgc

SEQ ID NO: 253815 - DNA, 25 bp, Probe Sequence
gtgaattcttaatgtatgtcggatt

SEQ ID NO: 253816 - DNA, 25 bp, Probe Sequence
gtgaagtcctaggtgtttccatcta

SEQ ID NO: 253817 - DNA, 25 bp, Probe Sequence
gtgaaataccaggataattccaata

SEQ ID NO: 253818 - DNA, 25 bp, Probe Sequence
gtgaattccaatgaacttctgaaca

SEQ ID NO: 253819 - DNA, 25 bp, Probe Sequence
gtgaacccctaaaattgtagcaact

SEQ ID NO: 253820 - DNA, 25 bp, Probe Sequence
gtgaaactccatctccaaaaaaata

SEQ ID NO: 253821 - DNA, 25 bp, Probe Sequence
gtgaacaccccatgtgacaaaagaa

SEQ ID NO: 253822 - DNA, 25 bp, Probe Sequence
gtgaatactccctgcagcaaacaag

SEQ ID NO: 253823 - DNA, 25 bp, Probe Sequence
gtgaatccccagtacgatagcacct

SEQ ID NO: 253824 - DNA, 25 bp, Probe Sequence
gtgaattcccagtcactgagtccgt

SEQ ID NO: 253825 - DNA, 25 bp, Probe Sequence
gtgaattccaataccggctatgtta

SEQ ID NO: 253826 - DNA, 25 bp, Probe Sequence
gtgcaagggcaagctccgttgccta

SEQ ID NO: 253827 - DNA, 25 bp, Probe Sequence
gtgcaaagaacggcttggcttggct

SEQ ID NO: 253828 - DNA, 25 bp, Probe Sequence
gtgccctaaaggggactggctgctg

SEQ ID NO: 253829 - DNA, 25 bp, Probe Sequence
gtgccggatgactgaatacgactgt

SEQ ID NO: 253830 - DNA, 25 bp, Probe Sequence
gtgcctgcgtgttggtataggactt

SEQ ID NO: 253831 - DNA, 25 bp, Probe Sequence
gtgcctgcgtgttgagtgtgtgggc

SEQ ID NO: 253832 - DNA, 25 bp, Probe Sequence
gtgcctgctgacttaggtggcgtgt

SEQ ID NO: 253833 - DNA, 25 bp, Probe Sequence
gtgctgctgaactctgttgggtgaa

SEQ ID NO: 253834 - DNA, 25 bp, Probe Sequence
gtgcgcagaggctactgggggaaca

SEQ ID NO: 253835 - DNA, 25 bp, Probe Sequence
gtgctgccatcgttgtaggagtaga

SEQ ID NO: 253836 - DNA, 25 bp, Probe Sequence
gtgcaggatctctttaacagtagca

SEQ ID NO: 253837 - DNA, 25 bp, Probe Sequence
gtgcagtgaccttcataaagcatat

SEQ ID NO: 253838 - DNA, 25 bp, Probe Sequence
gtgcagtagacttcaacaatcttga

SEQ ID NO: 253839 - DNA, 25 bp, Probe Sequence
gtgctctgaactgccatgcaaaaga

SEQ ID NO: 253840 - DNA, 25 bp, Probe Sequence
gtgctgcttacgctcatgcagaaga

SEQ ID NO: 253841 - DNA, 25 bp, Probe Sequence
gtgctgctgcattcatggttagaag

SEQ ID NO: 253842 - DNA, 25 bp, Probe Sequence
gtgctcatgactgggtctatgaata

SEQ ID NO: 253843 - DNA, 25 bp, Probe Sequence
gtgatcaactgatgccttcaagcag

SEQ ID NO: 253844 - DNA, 25 bp, Probe Sequence
gtgcatcaagcctggtacatactga

SEQ ID NO: 253845 - DNA, 25 bp, Probe Sequence
gtgcccacacttaatgtcaatctat

SEQ ID NO: 253846 - DNA, 25 bp, Probe Sequence
gtgcccagttctatgacatcatctg

SEQ ID NO: 253847 - DNA, 25 bp, Probe Sequence
gtgctcagcagtgctacaacattct

SEQ ID NO: 253848 - DNA, 25 bp, Probe Sequence
gtgctgtgctgtacgacaagttcat

SEQ ID NO: 253849 - DNA, 25 bp, Probe Sequence
gtgctgcggaacgagaagtgccatg

SEQ ID NO: 253850 - DNA, 25 bp, Probe Sequence
gtgcgcatggaccaagtattgccag

SEQ ID NO: 253851 - DNA, 25 bp, Probe Sequence
gtgcgctggtcggaagattgctgga

SEQ ID NO: 253852 - DNA, 25 bp, Probe Sequence
gtgctctcggcggaagtgatcgctg

SEQ ID NO: 253853 - DNA, 25 bp, Probe Sequence
gtgctgtcgcgggaagtgcagaggc

SEQ ID NO: 253854 - DNA, 25 bp, Probe Sequence
gtgctgttctaccaactgatgcagg

SEQ ID NO: 253855 - DNA, 25 bp, Probe Sequence
gtgcttgtcgcagaactgtcagagc

SEQ ID NO: 253856 - DNA, 25 bp, Probe Sequence
gtgcttgtcacgagaggtacagctg

SEQ ID NO: 253857 - DNA, 25 bp, Probe Sequence
gtgcttcatgcctttagatgtacag

SEQ ID NO: 253858 - DNA, 25 bp, Probe Sequence
gtgcttcatgcctttagatgtacag

SEQ ID NO: 253859 - DNA, 25 bp, Probe Sequence
gtgcttatgctcttaattgccacct

SEQ ID NO: 253860 - DNA, 25 bp, Probe Sequence
gtgcagctattacaattcagccctg

SEQ ID NO: 253861 - DNA, 25 bp, Probe Sequence
gtgcagcagatatgccaatgggcca

SEQ ID NO: 253862 - DNA, 25 bp, Probe Sequence
gtgcagatgtagtcagctagagagc

SEQ ID NO: 253863 - DNA, 25 bp, Probe Sequence
gtgcagatttatccccagaggggtt

SEQ ID NO: 253864 - DNA, 25 bp, Probe Sequence
gtgctttccagactccaaagggtat

SEQ ID NO: 253865 - DNA, 25 bp, Probe Sequence
gtgctttccacagtcagaataggtt

SEQ ID NO: 253866 - DNA, 25 bp, Probe Sequence
gtgcttcatccagccaaagaggtcg

SEQ ID NO: 253867 - DNA, 25 bp, Probe Sequence
gtgcttcatccagccaaagaggtcg

SEQ ID NO: 253868 - DNA, 25 bp, Probe Sequence
gtgctagcatactggaagagggatt

SEQ ID NO: 253869 - DNA, 25 bp, Probe Sequence
gtgctatgccccggaagcggaagtg

SEQ ID NO: 253870 - DNA, 25 bp, Probe Sequence
gtgctgacccaggctaagtgtaaag

SEQ ID NO: 253871 - DNA, 25 bp, Probe Sequence
gtgctaccgagacatgggtgcccgg

SEQ ID NO: 253872 - DNA, 25 bp, Probe Sequence
gtgcgacatcgagagcttcgtgctg

SEQ ID NO: 253873 - DNA, 25 bp, Probe Sequence
gtgcgatcaaagttctacgtgcgag

SEQ ID NO: 253874 - DNA, 25 bp, Probe Sequence
gtgcagtcagcaatgttaaggaaga

SEQ ID NO: 253875 - DNA, 25 bp, Probe Sequence
gtgctgtctgcattttcttggagaa

SEQ ID NO: 253876 - DNA, 25 bp, Probe Sequence
gtgctctctaatttatcggcagctt

SEQ ID NO: 253877 - DNA, 25 bp, Probe Sequence
gtgcccaaactgtacgagcagctgt

SEQ ID NO: 253878 - DNA, 25 bp, Probe Sequence
gtgcagcgcatcttcgaaaacggct

SEQ ID NO: 253879 - DNA, 25 bp, Probe Sequence
gtgccgcataactataatcccagct

SEQ ID NO: 253880 - DNA, 25 bp, Probe Sequence
gtgcctgttcattcaagtccacagt

SEQ ID NO: 253881 - DNA, 25 bp, Probe Sequence
gtgcctgttttatgtgcacacatta

SEQ ID NO: 253882 - DNA, 25 bp, Probe Sequence
gtgctctgtttaaggtgcttgcatt

SEQ ID NO: 253883 - DNA, 25 bp, Probe Sequence
gtgctcactgtgtataggaatttgt

SEQ ID NO: 253884 - DNA, 25 bp, Probe Sequence
gtgctagggcaaaatgatatggttt

SEQ ID NO: 253885 - DNA, 25 bp, Probe Sequence
gtgtcggcgcaaaagacgtcttttc

SEQ ID NO: 253886 - DNA, 25 bp, Probe Sequence
gggcgacgtttagcgactattgcgc

SEQ ID NO: 253887 - DNA, 25 bp, Probe Sequence
gtggcaacgtttgcaaccgttcacg

SEQ ID NO: 253888 - DNA, 25 bp, Probe Sequence
gtgcgtactttttctacctgtacac

SEQ ID NO: 253889 - DNA, 25 bp, Probe Sequence
gtgcttactgtagtaccacactgtt

SEQ ID NO: 253890 - DNA, 25 bp, Probe Sequence
gtgcttaggatgtctttcacagagc

SEQ ID NO: 253891 - DNA, 25 bp, Probe Sequence
gtgctgtgacgttcgtggacaggcc

SEQ ID NO: 253892 - DNA, 25 bp, Probe Sequence
gtgcgcaagagttgcggtggcgggc

SEQ ID NO: 253893 - DNA, 25 bp, Probe Sequence
gtgcccagggtgggtgtctggcacc

SEQ ID NO: 253894 - DNA, 25 bp, Probe Sequence
gtgggcagtcggggttgcaggactg

SEQ ID NO: 253895 - DNA, 25 bp, Probe Sequence
gtgctgtgcaccctgggttataagg

SEQ ID NO: 253896 - DNA, 25 bp, Probe Sequence
gtgatggactccaatcttttccagg

SEQ ID NO: 253897 - DNA, 25 bp, Probe Sequence
gtgctgatccccaacttttaggaaa

SEQ ID NO: 253898 - DNA, 25 bp, Probe Sequence
gtgcttccaaattcttttggtgcaa

SEQ ID NO: 253899 - DNA, 25 bp, Probe Sequence
gtgcttgaaaatactcattaggtaa

SEQ ID NO: 253900 - DNA, 25 bp, Probe Sequence
gtgctgggaatcacttataccaaag

SEQ ID NO: 253901 - DNA, 25 bp, Probe Sequence
gtgctgggcacatagctgtgatcac

SEQ ID NO: 253902 - DNA, 25 bp, Probe Sequence
gtgcagggcctgcagcattgaacta

SEQ ID NO: 253903 - DNA, 25 bp, Probe Sequence
gtgcacgtccatgacttgcagagct

SEQ ID NO: 253904 - DNA, 25 bp, Probe Sequence
gtgcacagtcaatgagttggagttt

SEQ ID NO: 253905 - DNA, 25 bp, Probe Sequence
gtgcaagaccacggtgggagcctta

SEQ ID NO: 253906 - DNA, 25 bp, Probe Sequence
gtgctaaccagcaggtgtagacttt

SEQ ID NO: 253907 - DNA, 25 bp, Probe Sequence
gtgctaacccctcgatgtacatagc

SEQ ID NO: 253908 - DNA, 25 bp, Probe Sequence
gtgcgtatacctccgatgtgaaacc

SEQ ID NO: 253909 - DNA, 25 bp, Probe Sequence
gtgcagtattttcagtgtcaaatat

SEQ ID NO: 253910 - DNA, 25 bp, Probe Sequence
gtgcgcaagtttcttacacaattaa

SEQ ID NO: 253911 - DNA, 25 bp, Probe Sequence
gtgctgaacattgttctgaacactt

SEQ ID NO: 253912 - DNA, 25 bp, Probe Sequence
gtgctaccattattttgccacagac

SEQ ID NO: 253913 - DNA, 25 bp, Probe Sequence
gtgcttccttgctcagtgcaaaact

SEQ ID NO: 253914 - DNA, 25 bp, Probe Sequence
gtgctcctgaaggaagtgccaaaca

SEQ ID NO: 253915 - DNA, 25 bp, Probe Sequence
gtgcttagaagctttgtgaaatagc

SEQ ID NO: 253916 - DNA, 25 bp, Probe Sequence
gtgctacaacattcttggttcattc

SEQ ID NO: 253917 - DNA, 25 bp, Probe Sequence
gtgcagaaccactttggtccaaacc

SEQ ID NO: 253918 - DNA, 25 bp, Probe Sequence
gtgaaggttgctgtgggccaaaatc

SEQ ID NO: 253919 - DNA, 25 bp, Probe Sequence
gtgaaggttgctgtgggccaaaatc

SEQ ID NO: 253920 - DNA, 25 bp, Probe Sequence
gtgaatggtaagactagtgcaaaac

SEQ ID NO: 253921 - DNA, 25 bp, Probe Sequence
gtgctcatacttggactgggaaaac

SEQ ID NO: 253922 - DNA, 25 bp, Probe Sequence
gtgctccctctgccaggaggagaat

SEQ ID NO: 253923 - DNA, 25 bp, Probe Sequence
gtgcccacatcccaacagatgaaat

SEQ ID NO: 253924 - DNA, 25 bp, Probe Sequence
gtgccgtgcatcaccaaatgaaagt

SEQ ID NO: 253925 - DNA, 25 bp, Probe Sequence
gtgctggtatctcctctaagtaagg

SEQ ID NO: 253926 - DNA, 25 bp, Probe Sequence
gtgctggtatctcctctaagtaagg

SEQ ID NO: 253927 - DNA, 25 bp, Probe Sequence
gtgcttcatatccctctagaggagc

SEQ ID NO: 253928 - DNA, 25 bp, Probe Sequence
gtgctgagtattcactagagtggca

SEQ ID NO: 253929 - DNA, 25 bp, Probe Sequence
gtgcagagcttttaccagcaggagc

SEQ ID NO: 253930 - DNA, 25 bp, Probe Sequence
gtgcggcggatgaacaagcggcagc

SEQ ID NO: 253931 - DNA, 25 bp, Probe Sequence
gtgctggctgcacaggcaagggcag

SEQ ID NO: 253932 - DNA, 25 bp, Probe Sequence
gtgccctgccaaggcacagcgtaga

SEQ ID NO: 253933 - DNA, 25 bp, Probe Sequence
gtgccctgagcatcgaagagtcatg

SEQ ID NO: 253934 - DNA, 25 bp, Probe Sequence
gtgccctgatagtcagttcgaatgc

SEQ ID NO: 253935 - DNA, 25 bp, Probe Sequence
gtgcccatgatcatctttgctaagg

SEQ ID NO: 253936 - DNA, 25 bp, Probe Sequence
gtgcccagcacaatgctagtgtcag

SEQ ID NO: 253937 - DNA, 25 bp, Probe Sequence
gtgctcctcagattctgtgttcaga

SEQ ID NO: 253938 - DNA, 25 bp, Probe Sequence
gtgcgcctagacaggtacgtctgtt

SEQ ID NO: 253939 - DNA, 25 bp, Probe Sequence
gtgcgcgtcaacaggtaacacttcc

SEQ ID NO: 253940 - DNA, 25 bp, Probe Sequence
gtgcaggagaacaaggtagaccagt

SEQ ID NO: 253941 - DNA, 25 bp, Probe Sequence
gtgaacaggtcaagaataacacttc

SEQ ID NO: 253942 - DNA, 25 bp, Probe Sequence
gggagcctgccaatttaacagtctc

SEQ ID NO: 253943 - DNA, 25 bp, Probe Sequence
gtgaacacatccacttcacaagcct

SEQ ID NO: 253944 - DNA, 25 bp, Probe Sequence
gtgaacacatccacttcacaagcct

SEQ ID NO: 253945 - DNA, 25 bp, Probe Sequence
gtgaagcagatgacggctgcccgaa

SEQ ID NO: 253946 - DNA, 25 bp, Probe Sequence
gtgattggagtgtgtccggagatga

SEQ ID NO: 253947 - DNA, 25 bp, Probe Sequence
gtgcaggagaattttgacgtgaata

SEQ ID NO: 253948 - DNA, 25 bp, Probe Sequence
gtgcggtgtgcttttacgtgatggc

SEQ ID NO: 253949 - DNA, 25 bp, Probe Sequence
gtgcggtgtgcttttacgtgatggc

SEQ ID NO: 253950 - DNA, 25 bp, Probe Sequence
gtgcgtgcatgggagtgtacttgtg

SEQ ID NO: 253951 - DNA, 25 bp, Probe Sequence
gtgcggcagctggaagaccttgtga

SEQ ID NO: 253952 - DNA, 25 bp, Probe Sequence
gtgagctggcatgaggacctgttgg

SEQ ID NO: 253953 - DNA, 25 bp, Probe Sequence
gtgagctggcatgaggacctgttgg

SEQ ID NO: 253954 - DNA, 25 bp, Probe Sequence
gtgcaggtgattggggctctgattg

SEQ ID NO: 253955 - DNA, 25 bp, Probe Sequence
gtgcatggtggtgggtcacagtctg

SEQ ID NO: 253956 - DNA, 25 bp, Probe Sequence
gtgaagtggtgtggtaagtttggga

SEQ ID NO: 253957 - DNA, 25 bp, Probe Sequence
gtgacagtaggtggttaaattaaat

SEQ ID NO: 253958 - DNA, 25 bp, Probe Sequence
gtgacagggactgttaaagtcaaaa

SEQ ID NO: 253959 - DNA, 25 bp, Probe Sequence
gtgaagtggatgcccttaaaggaac

SEQ ID NO: 253960 - DNA, 25 bp, Probe Sequence
gtgaagtggctggttacatccggca

SEQ ID NO: 253961 - DNA, 25 bp, Probe Sequence
gtgcaactgtgtgtacaccagggat

SEQ ID NO: 253962 - DNA, 25 bp, Probe Sequence
gtgcaacctgctctacagcaaagac

SEQ ID NO: 253963 - DNA, 25 bp, Probe Sequence
gtgctacattgcccgcaagcacaac

SEQ ID NO: 253964 - DNA, 25 bp, Probe Sequence
gtgcccatgatgcaccagatggaac

SEQ ID NO: 253965 - DNA, 25 bp, Probe Sequence
gtgcaccagagcacgcacaggagcc

SEQ ID NO: 253966 - DNA, 25 bp, Probe Sequence
gtgcactccatcatcagcaaaatga

SEQ ID NO: 253967 - DNA, 25 bp, Probe Sequence
gtgcagctcaatactagcttcagta

SEQ ID NO: 253968 - DNA, 25 bp, Probe Sequence
gtgcatgaatagattctctcctgat

SEQ ID NO: 253969 - DNA, 25 bp, Probe Sequence
gtgcagaaagtatcttcctccaggc

SEQ ID NO: 253970 - DNA, 25 bp, Probe Sequence
gtgcagcgaagcttagcgttcatcc

SEQ ID NO: 253971 - DNA, 25 bp, Probe Sequence
gtgctgtcagacttcattgttattc

SEQ ID NO: 253972 - DNA, 25 bp, Probe Sequence
gtgcgccagaatgcaatgtggagtc

SEQ ID NO: 253973 - DNA, 25 bp, Probe Sequence
gtgcccagagcatagatgcatgaag

SEQ ID NO: 253974 - DNA, 25 bp, Probe Sequence
gtgctggggcagtagtcatggcaga

SEQ ID NO: 253975 - DNA, 25 bp, Probe Sequence
gtgcatgtggagaaagaatctagac

SEQ ID NO: 253976 - DNA, 25 bp, Probe Sequence
gtgcaggggtaattattagcgtggc

SEQ ID NO: 253977 - DNA, 25 bp, Probe Sequence
gtgcagaaggtcattattcacaaag

SEQ ID NO: 253978 - DNA, 25 bp, Probe Sequence
gtgcaaaaatctatcaccagcaaca

SEQ ID NO: 253979 - DNA, 25 bp, Probe Sequence
gtgaaatctgattgagtaaccaagc

SEQ ID NO: 253980 - DNA, 25 bp, Probe Sequence
gtgcatttcctgttgtacacacaag

SEQ ID NO: 253981 - DNA, 25 bp, Probe Sequence
gtgctttttgggaccatcactgaga

SEQ ID NO: 253982 - DNA, 25 bp, Probe Sequence
gtgatgattttgggacctgccgtat

SEQ ID NO: 253983 - DNA, 25 bp, Probe Sequence
gtgctattttaccaacgtcgagatg

SEQ ID NO: 253984 - DNA, 25 bp, Probe Sequence
gtgctttttgaactcattggccagg

SEQ ID NO: 253985 - DNA, 25 bp, Probe Sequence
gtgcttctttgattacaaggcccaa

SEQ ID NO: 253986 - DNA, 25 bp, Probe Sequence
gtgctgtgttatggtcgatggctcc

SEQ ID NO: 253987 - DNA, 25 bp, Probe Sequence
gtgctatgtgtgaagggaggcccgc

SEQ ID NO: 253988 - DNA, 25 bp, Probe Sequence
gtgcttggactcaggggtcctattt

SEQ ID NO: 253989 - DNA, 25 bp, Probe Sequence
gtgcatatgagacttgggggtccct

SEQ ID NO: 253990 - DNA, 25 bp, Probe Sequence
gtgaatgaaataaaggatcccccta

SEQ ID NO: 253991 - DNA, 25 bp, Probe Sequence
gtggcaaaaacatggacggaacttc

SEQ ID NO: 253992 - DNA, 25 bp, Probe Sequence
gtggcaaaaacatggacggaacttc

SEQ ID NO: 253993 - DNA, 25 bp, Probe Sequence
gtggctacaacatagggtttttata

SEQ ID NO: 253994 - DNA, 25 bp, Probe Sequence
gtgttacagacctcggttctcatta

SEQ ID NO: 253995 - DNA, 25 bp, Probe Sequence
gtgatttaattcatgggtactttta

SEQ ID NO: 253996 - DNA, 25 bp, Probe Sequence
gtgttgtagggttgcaggttttttg

SEQ ID NO: 253997 - DNA, 25 bp, Probe Sequence
gtgctattaatggctacaagtctgt

SEQ ID NO: 253998 - DNA, 25 bp, Probe Sequence
gtgctgattaaagtccacattttca

SEQ ID NO: 253999 - DNA, 25 bp, Probe Sequence
gtgctatctgtatttcccttgtaca

SEQ ID NO: 254000 - DNA, 25 bp, Probe Sequence
gtgctttgtgatctgtccagtgtca

SEQ ID NO: 254001 - DNA, 25 bp, Probe Sequence
gtgctctggtgacatgataaatata

SEQ ID NO: 254002 - DNA, 25 bp, Probe Sequence
gtgctggcttggccattaaatggaa

SEQ ID NO: 254003 - DNA, 25 bp, Probe Sequence
gtgcggctggttttggacagcgaca

SEQ ID NO: 254004 - DNA, 25 bp, Probe Sequence
gtgaactgattattggtgaccgaca

SEQ ID NO: 254005 - DNA, 25 bp, Probe Sequence
gtgctactgattgtttcattgcgaa

SEQ ID NO: 254006 - DNA, 25 bp, Probe Sequence
gtgcatatgcgtgagtttcattgcc

SEQ ID NO: 254007 - DNA, 25 bp, Probe Sequence
gtgcagagtgctgagctgcttcctg

SEQ ID NO: 254008 - DNA, 25 bp, Probe Sequence
gtgctttctgcatgcttagagcatg

SEQ ID NO: 254009 - DNA, 25 bp, Probe Sequence
gtgctttcattattatagatgcatc

SEQ ID NO: 254010 - DNA, 25 bp, Probe Sequence
gtgctattcagtcagaagttgccaa

SEQ ID NO: 254011 - DNA, 25 bp, Probe Sequence
gtgctattgcagtgaaagttctctt

SEQ ID NO: 254012 - DNA, 25 bp, Probe Sequence
gtgctagatgtataaatctttcttt

SEQ ID NO: 254013 - DNA, 25 bp, Probe Sequence
gtgctagtgtatgagttgttgttgg

SEQ ID NO: 254014 - DNA, 25 bp, Probe Sequence
gtgctggtcatacatttgtggtctg

SEQ ID NO: 254015 - DNA, 25 bp, Probe Sequence
gtgctggaatggttgtctggtatct

SEQ ID NO: 254016 - DNA, 25 bp, Probe Sequence
gtgctgtcagatcatagttggtatg

SEQ ID NO: 254017 - DNA, 25 bp, Probe Sequence
gtgcgtaccagaagtatgactcatg

SEQ ID NO: 254018 - DNA, 25 bp, Probe Sequence
gtgcgacctcagactaatgacatcc

SEQ ID NO: 254019 - DNA, 25 bp, Probe Sequence
gtgcaggccatagctgaaggtgtcc

SEQ ID NO: 254020 - DNA, 25 bp, Probe Sequence
ggacccaacacaaatggttcccagt

SEQ ID NO: 254021 - DNA, 25 bp, Probe Sequence
gtgacccaactgatattagctcatc

SEQ ID NO: 254022 - DNA, 25 bp, Probe Sequence
tgtacccataggacacataacctta

SEQ ID NO: 254023 - DNA, 25 bp, Probe Sequence
gtgcactcaacatgtaataaacttt

SEQ ID NO: 254024 - DNA, 25 bp, Probe Sequence
gtgctctctatctgtttaagacaaa

SEQ ID NO: 254025 - DNA, 25 bp, Probe Sequence
gtgctcttgtatttttaagtggatt

SEQ ID NO: 254026 - DNA, 25 bp, Probe Sequence
gtgctctttatgtatctaacagatg

SEQ ID NO: 254027 - DNA, 25 bp, Probe Sequence
gtgctctttatgtatctaacagatg

SEQ ID NO: 254028 - DNA, 25 bp, Probe Sequence
gtgctttattcttctaacgcagtaa

SEQ ID NO: 254029 - DNA, 25 bp, Probe Sequence
gtgctgtttttcctcatacaagtaa

SEQ ID NO: 254030 - DNA, 25 bp, Probe Sequence
gtgctgtgactcttcctcataagag

SEQ ID NO: 254031 - DNA, 25 bp, Probe Sequence
gtgcatcttccactttctagagaga

SEQ ID NO: 254032 - DNA, 25 bp, Probe Sequence
gtgctttacctgcagctcagatagc

SEQ ID NO: 254033 - DNA, 25 bp, Probe Sequence
gtgctctaataacgatgtatatatg

SEQ ID NO: 254034 - DNA, 25 bp, Probe Sequence
gtgctctaaatatgcattaccatga

SEQ ID NO: 254035 - DNA, 25 bp, Probe Sequence
gtgcttatgatatacttgtctgcag

SEQ ID NO: 254036 - DNA, 25 bp, Probe Sequence
gtgctgctgatgtaatacctgggca

SEQ ID NO: 254037 - DNA, 25 bp, Probe Sequence
gtgcagattaagagcctgggcagcc

SEQ ID NO: 254038 - DNA, 25 bp, Probe Sequence
gtgcagagtcagagtcctgggacca

SEQ ID NO: 254039 - DNA, 25 bp, Probe Sequence
gtgcagagtgaattgccgctgccgg

SEQ ID NO: 254040 - DNA, 25 bp, Probe Sequence
gtgagcgtgcgagtgcacgtccgtt

SEQ ID NO: 254041 - DNA, 25 bp, Probe Sequence
gtgagcaggtgggccgttgagttac

SEQ ID NO: 254042 - DNA, 25 bp, Probe Sequence
gtgagcaggtgggccgttgagttac

SEQ ID NO: 254043 - DNA, 25 bp, Probe Sequence
gtgggtctggaatggctggtgtact

SEQ ID NO: 254044 - DNA, 25 bp, Probe Sequence
gtgctggcttagaaagtgggggcaa

SEQ ID NO: 254045 - DNA, 25 bp, Probe Sequence
gtgagatctgttggaaagaggggaa

SEQ ID NO: 254046 - DNA, 25 bp, Probe Sequence
gtgcagacttgtgttggtggcggta

SEQ ID NO: 254047 - DNA, 25 bp, Probe Sequence
gtgcagaagtatattgagcggcccc

SEQ ID NO: 254048 - DNA, 25 bp, Probe Sequence
gtgcagcaggacactatcctggccg

SEQ ID NO: 254049 - DNA, 25 bp, Probe Sequence
gtgcaagtggatgcattcctgagtc

SEQ ID NO: 254050 - DNA, 25 bp, Probe Sequence
gtgcaattgttctatatcttcgctc

SEQ ID NO: 254051 - DNA, 25 bp, Probe Sequence
gtgactctgagtctagttcaccact

SEQ ID NO: 254052 - DNA, 25 bp, Probe Sequence
gtgaaaggagccaagaacagccaga

SEQ ID NO: 254053 - DNA, 25 bp, Probe Sequence
gtgacaaggacccaattcttcgaag

SEQ ID NO: 254054 - DNA, 25 bp, Probe Sequence
tgtaaataaccccattctttgcttg

SEQ ID NO: 254055 - DNA, 25 bp, Probe Sequence
gtgaaataactccccataaatttgc

SEQ ID NO: 254056 - DNA, 25 bp, Probe Sequence
gtgaaaggttgccccagaagtctta

SEQ ID NO: 254057 - DNA, 25 bp, Probe Sequence
gtgaagatgggtgactagatgatat

SEQ ID NO: 254058 - DNA, 25 bp, Probe Sequence
gtgcacgttggctgactgatgagga

SEQ ID NO: 254059 - DNA, 25 bp, Probe Sequence
gtgcaggtaccagtgtctgtgacga

SEQ ID NO: 254060 - DNA, 25 bp, Probe Sequence
gtgcaggtacatatgatggttccat

SEQ ID NO: 254061 - DNA, 25 bp, Probe Sequence
gtgcgtgttcatatatgggcttgct

SEQ ID NO: 254062 - DNA, 25 bp, Probe Sequence
gtgcagttaatacttggcgcttgaa

SEQ ID NO: 254063 - DNA, 25 bp, Probe Sequence
gtgctgttatcattttgaccatcat

SEQ ID NO: 254064 - DNA, 25 bp, Probe Sequence
gtgcatatgttatttaattcatcta

SEQ ID NO: 254065 - DNA, 25 bp, Probe Sequence
gtgcatcggtacttgagcaatgcct

SEQ ID NO: 254066 - DNA, 25 bp, Probe Sequence
gtgcattgaggatagatgcaggcgg

SEQ ID NO: 254067 - DNA, 25 bp, Probe Sequence
gtgcaggagtcccagtgcatgctgg

SEQ ID NO: 254068 - DNA, 25 bp, Probe Sequence
gtgcagtgactgtctcactgcctag

SEQ ID NO: 254069 - DNA, 25 bp, Probe Sequence
gtgcaggatgtgctgacaccatcca

SEQ ID NO: 254070 - DNA, 25 bp, Probe Sequence
gtgcactatggcttgtacaaccagt

SEQ ID NO: 254071 - DNA, 25 bp, Probe Sequence
gtgcactaggcacgtaacctgcaat

SEQ ID NO: 254072 - DNA, 25 bp, Probe Sequence
gtgcatcaaggccagtcctattcaa

SEQ ID NO: 254073 - DNA, 25 bp, Probe Sequence
gtgctaaagggagtacttcaatcag

SEQ ID NO: 254074 - DNA, 25 bp, Probe Sequence
gtgtcaaaggctgtgagcccttcat

SEQ ID NO: 254075 - DNA, 25 bp, Probe Sequence
gtgctcaaacgtgtatcacttttca

SEQ ID NO: 254076 - DNA, 25 bp, Probe Sequence
gtgcaaaacaggctctagcgttcga

SEQ ID NO: 254077 - DNA, 25 bp, Probe Sequence
gtgctcaaatagctgctccacgcac

SEQ ID NO: 254078 - DNA, 25 bp, Probe Sequence
gtgctaagatagtactgagtcccca

SEQ ID NO: 254079 - DNA, 25 bp, Probe Sequence
gtgcggaataggttgcttctaccac

SEQ ID NO: 254080 - DNA, 25 bp, Probe Sequence
gtgctgttaagcatccatttaaaaa

SEQ ID NO: 254081 - DNA, 25 bp, Probe Sequence
gtggttagcattcaagttaagaaat

SEQ ID NO: 254082 - DNA, 25 bp, Probe Sequence
gtgcagtgtagctttagtttaagaa

SEQ ID NO: 254083 - DNA, 25 bp, Probe Sequence
gtgcaggatcgctttgaggtcaata

SEQ ID NO: 254084 - DNA, 25 bp, Probe Sequence
gtgcaagatctggtgtagtacaaat

SEQ ID NO: 254085 - DNA, 25 bp, Probe Sequence
gtgcaggttgtgacattgtaccatt

SEQ ID NO: 254086 - DNA, 25 bp, Probe Sequence
gtgcattttgtgacatcgtccttcc

SEQ ID NO: 254087 - DNA, 25 bp, Probe Sequence
gtgctttatgaatctgtcctgtgag

SEQ ID NO: 254088 - DNA, 25 bp, Probe Sequence
gtgcaatttggtaccacactgtgag

SEQ ID NO: 254089 - DNA, 25 bp, Probe Sequence
gtgcaattagtggtacatcaagtga

SEQ ID NO: 254090 - DNA, 25 bp, Probe Sequence
gtgcacagtgagaaatgaacaagtt

SEQ ID NO: 254091 - DNA, 25 bp, Probe Sequence
gtgctcagtgagagagataaagtca

SEQ ID NO: 254092 - DNA, 25 bp, Probe Sequence
gtgcttggagaggcagataacgctg

SEQ ID NO: 254093 - DNA, 25 bp, Probe Sequence
gtgcttggatgaaaggacagcgtgg

SEQ ID NO: 254094 - DNA, 25 bp, Probe Sequence
gtgcttgtctggctaacacagctgc

SEQ ID NO: 254095 - DNA, 25 bp, Probe Sequence
gtgcttgtctgactagtatcacccc

SEQ ID NO: 254096 - DNA, 25 bp, Probe Sequence
gtgctttgtgaaactgtgcatcccc

SEQ ID NO: 254097 - DNA, 25 bp, Probe Sequence
gtgctgtctgtggagtgtgtctcat

SEQ ID NO: 254098 - DNA, 25 bp, Probe Sequence
gtgcagctcgtggacaatgtctact

SEQ ID NO: 254099 - DNA, 25 bp, Probe Sequence
gtgctgagggaaactgcttacatag

SEQ ID NO: 254100 - DNA, 25 bp, Probe Sequence
gtgctgagggaaactgcttacatag

SEQ ID NO: 254101 - DNA, 25 bp, Probe Sequence
gtgctgcagcgggacttgcgaaagg

SEQ ID NO: 254102 - DNA, 25 bp, Probe Sequence
gtgctgggcgagactgctggaacag

SEQ ID NO: 254103 - DNA, 25 bp, Probe Sequence
gtgctgggcaggggcatcagaaggt

SEQ ID NO: 254104 - DNA, 25 bp, Probe Sequence
gtgcaggagcagcggaagacagtct

SEQ ID NO: 254105 - DNA, 25 bp, Probe Sequence
gtgcatgtgccactcggaggaagcc

SEQ ID NO: 254106 - DNA, 25 bp, Probe Sequence
gtgcaggtacgaggagcgcagcacc

SEQ ID NO: 254107 - DNA, 25 bp, Probe Sequence
gtgctggtatttagagcgcagcggc

SEQ ID NO: 254108 - DNA, 25 bp, Probe Sequence
gtgctgggattataggcgtgagcca

SEQ ID NO: 254109 - DNA, 25 bp, Probe Sequence
gtgctgggattacaggcgtgagcca

SEQ ID NO: 254110 - DNA, 25 bp, Probe Sequence
gtgctgggattacaggcgtgagcca

SEQ ID NO: 254111 - DNA, 25 bp, Probe Sequence
gtgctgggattacaggcgtgagcca

SEQ ID NO: 254112 - DNA, 25 bp, Probe Sequence
gtgctgggattacaggtgtgagcca

SEQ ID NO: 254113 - DNA, 25 bp, Probe Sequence
gtgctatccatgccaaacgtgtaac

SEQ ID NO: 254114 - DNA, 25 bp, Probe Sequence
gtgcatatcacacagatatcaggta

SEQ ID NO: 254115 - DNA, 25 bp, Probe Sequence
gtgcataccaccatgtagcagctac

SEQ ID NO: 254116 - DNA, 25 bp, Probe Sequence
gtgcaggccatcatggaagcctacg

SEQ ID NO: 254117 - DNA, 25 bp, Probe Sequence
gtgaggcagctctggaacgtgaaga

SEQ ID NO: 254118 - DNA, 25 bp, Probe Sequence
gtgcaggtcttcggacgcaagaaga

SEQ ID NO: 254119 - DNA, 25 bp, Probe Sequence
tggaaatttcggaccaggaccagga

SEQ ID NO: 254120 - DNA, 25 bp, Probe Sequence
gtgataattaccatccttgaccagg

SEQ ID NO: 254121 - DNA, 25 bp, Probe Sequence
gtgtaatttcacaagggccatccct

SEQ ID NO: 254122 - DNA, 25 bp, Probe Sequence
gtgaactggtccaaggaggttctgt

SEQ ID NO: 254123 - DNA, 25 bp, Probe Sequence
ggagaccttcacagagggcgttttc

SEQ ID NO: 254124 - DNA, 25 bp, Probe Sequence
gtgaacctatttttggtggtcattt

SEQ ID NO: 254125 - DNA, 25 bp, Probe Sequence
gtgcaacgttattttttggccttgt

SEQ ID NO: 254126 - DNA, 25 bp, Probe Sequence
gtgaagcgtaaacatttatcctatg

SEQ ID NO: 254127 - DNA, 25 bp, Probe Sequence
gtgagggtagaaccttttgggactg

SEQ ID NO: 254128 - DNA, 25 bp, Probe Sequence
gtggggttaggttcccagaggactg

SEQ ID NO: 254129 - DNA, 25 bp, Probe Sequence
gtgcagatgtgataagtccccgagg

SEQ ID NO: 254130 - DNA, 25 bp, Probe Sequence
gtgatgctggaaacagttcctcgga

SEQ ID NO: 254131 - DNA, 25 bp, Probe Sequence
gtgatgctggaaacagttcctcgga

SEQ ID NO: 254132 - DNA, 25 bp, Probe Sequence
gtgatgctggaaacagttcctcgga

SEQ ID NO: 254133 - DNA, 25 bp, Probe Sequence
gtgctgatgtacatactttctcgta

SEQ ID NO: 254134 - DNA, 25 bp, Probe Sequence
gtgcagttacacagtttcctgtatc

SEQ ID NO: 254135 - DNA, 25 bp, Probe Sequence
gtgctgttagctctttattcttatt

SEQ ID NO: 254136 - DNA, 25 bp, Probe Sequence
gtgctttatatttgtctgattttat

SEQ ID NO: 254137 - DNA, 25 bp, Probe Sequence
gtgctctatgagtttgttgtaattt

SEQ ID NO: 254138 - DNA, 25 bp, Probe Sequence
gtgcagccgggtattgcgaatgctt

SEQ ID NO: 254139 - DNA, 25 bp, Probe Sequence
gtgcacacctttattcagaacttta

SEQ ID NO: 254140 - DNA, 25 bp, Probe Sequence
gtgcacttggttattggacattttt

SEQ ID NO: 254141 - DNA, 25 bp, Probe Sequence
gtgactagtttgaatgtcccatttt

SEQ ID NO: 254142 - DNA, 25 bp, Probe Sequence
gtgatacgtttgactccgggatttc

SEQ ID NO: 254143 - DNA, 25 bp, Probe Sequence
gtgtactttctaacaggggattggt

SEQ ID NO: 254144 - DNA, 25 bp, Probe Sequence
gtgctacaccccagcggggtgggtt

SEQ ID NO: 254145 - DNA, 25 bp, Probe Sequence
gtgtaagtccccagggactgtcagc

SEQ ID NO: 254146 - DNA, 25 bp, Probe Sequence
tgttacaaacctgtgggcctgttgc

SEQ ID NO: 254147 - DNA, 25 bp, Probe Sequence
tgtcaacagaaaacctggtacttta

SEQ ID NO: 254148 - DNA, 25 bp, Probe Sequence
gtgatagcaaacactcggtcctgtt

SEQ ID NO: 254149 - DNA, 25 bp, Probe Sequence
gtgcataaacaaattcggactctct

SEQ ID NO: 254150 - DNA, 25 bp, Probe Sequence
gtgctaaacagaatactgctatttt

SEQ ID NO: 254151 - DNA, 25 bp, Probe Sequence
ggtaaactggtatttcttggattgg

SEQ ID NO: 254152 - DNA, 25 bp, Probe Sequence
ggtaaactactaggactataactga

SEQ ID NO: 254153 - DNA, 25 bp, Probe Sequence
gtgctaaaatcagtgtaacttatac

SEQ ID NO: 254154 - DNA, 25 bp, Probe Sequence
gtgctcagtaaagtcttccatccaa

SEQ ID NO: 254155 - DNA, 25 bp, Probe Sequence
gtgcaggtaaatgctcattcccaag

SEQ ID NO: 254156 - DNA, 25 bp, Probe Sequence
gtgcaaatacaagccagtgcccgtg

SEQ ID NO: 254157 - DNA, 25 bp, Probe Sequence
gtgcaaataaacgctcactccgaat

SEQ ID NO: 254158 - DNA, 25 bp, Probe Sequence
gtgaaatgtcaaccctcactctaaa

SEQ ID NO: 254159 - DNA, 25 bp, Probe Sequence
gtgaatagtgaagtggctatcctaa

SEQ ID NO: 254160 - DNA, 25 bp, Probe Sequence
gtgacaagctgcacgtggatcctga

SEQ ID NO: 254161 - DNA, 25 bp, Probe Sequence
gtgaacgtgtcggtggtgtctgagg

SEQ ID NO: 254162 - DNA, 25 bp, Probe Sequence
gtgcataccatgataggggtgctga

SEQ ID NO: 254163 - DNA, 25 bp, Probe Sequence
gtgctcacccttttggagtcagagc

SEQ ID NO: 254164 - DNA, 25 bp, Probe Sequence
gtgctgacgccttactggcaatgct

SEQ ID NO: 254165 - DNA, 25 bp, Probe Sequence
gtgctttgcactggacctgatattt

SEQ ID NO: 254166 - DNA, 25 bp, Probe Sequence
gtgcttggctgtggcagcctagctt

SEQ ID NO: 254167 - DNA, 25 bp, Probe Sequence
gtgcattgtctgtgacatgcaactt

SEQ ID NO: 254168 - DNA, 25 bp, Probe Sequence
gtgcattgcattatggacagcactt

SEQ ID NO: 254169 - DNA, 25 bp, Probe Sequence
gtgcactgagtgatgtcaccatttc

SEQ ID NO: 254170 - DNA, 25 bp, Probe Sequence
gtgcattggcatatgtcagtttgtg

SEQ ID NO: 254171 - DNA, 25 bp, Probe Sequence
gtgcagtggcttctatgttttgggt

SEQ ID NO: 254172 - DNA, 25 bp, Probe Sequence
gtgcagtggcttctatgttttgggt

SEQ ID NO: 254173 - DNA, 25 bp, Probe Sequence
gtgcagtattagcttgcttttgctg

SEQ ID NO: 254174 - DNA, 25 bp, Probe Sequence
gtgcatgcatatactgtctctgttt

SEQ ID NO: 254175 - DNA, 25 bp, Probe Sequence
gtgctgaatgtcttatatgcattat

SEQ ID NO: 254176 - DNA, 25 bp, Probe Sequence
gtgcatggtggcttactgcctgtaa

SEQ ID NO: 254177 - DNA, 25 bp, Probe Sequence
gtgcatgttctctacacaattgtaa

SEQ ID NO: 254178 - DNA, 25 bp, Probe Sequence
gtgcatttgctgtcacaataaagta

SEQ ID NO: 254179 - DNA, 25 bp, Probe Sequence
gtgctctctgctggattctaaatta

SEQ ID NO: 254180 - DNA, 25 bp, Probe Sequence
gtgctatgctagctattaatttcat

SEQ ID NO: 254181 - DNA, 25 bp, Probe Sequence
gtgcattggagccattgtaacttca

SEQ ID NO: 254182 - DNA, 25 bp, Probe Sequence
gtgcatcgccagcatttcgatcctc

SEQ ID NO: 254183 - DNA, 25 bp, Probe Sequence
gtgatcagcgcagacctgcagtctc

SEQ ID NO: 254184 - DNA, 25 bp, Probe Sequence
gtgcaatggcatgatctcggctcac

SEQ ID NO: 254185 - DNA, 25 bp, Probe Sequence
gtgcagtggcatgatcttgactcac

SEQ ID NO: 254186 - DNA, 25 bp, Probe Sequence
gtgcagtgtgagcttctcatgctga

SEQ ID NO: 254187 - DNA, 25 bp, Probe Sequence
gtgcagtggaggattacttcatgcg

SEQ ID NO: 254188 - DNA, 25 bp, Probe Sequence
gtgcagtggtgcggtaatttatcca

SEQ ID NO: 254189 - DNA, 25 bp, Probe Sequence
gtgagggtctccacatttacttaac

SEQ ID NO: 254190 - DNA, 25 bp, Probe Sequence
gtgaggacccagagatgttccttaa

SEQ ID NO: 254191 - DNA, 25 bp, Probe Sequence
gtgaagaccgcagttgtgagtttgc

SEQ ID NO: 254192 - DNA, 25 bp, Probe Sequence
gtgcaagacatgccaatttgagaca

SEQ ID NO: 254193 - DNA, 25 bp, Probe Sequence
gtgaatgctgagacaattcgagaag

SEQ ID NO: 254194 - DNA, 25 bp, Probe Sequence
gtgagcatctgaccacttggaagtt

SEQ ID NO: 254195 - DNA, 25 bp, Probe Sequence
gtgacgtgagccttatgggagcgtt

SEQ ID NO: 254196 - DNA, 25 bp, Probe Sequence
gtgagcgtccattttgtggaacctg

SEQ ID NO: 254197 - DNA, 25 bp, Probe Sequence
gtgaaggctcttgcgggatggcctg

SEQ ID NO: 254198 - DNA, 25 bp, Probe Sequence
gtgaaggacgttcccaatagccaac

SEQ ID NO: 254199 - DNA, 25 bp, Probe Sequence
gtgaaggacgttcccaatagccaac

SEQ ID NO: 254200 - DNA, 25 bp, Probe Sequence
gtgaaaattgccaccaaggccaacc

SEQ ID NO: 254201 - DNA, 25 bp, Probe Sequence
gtgttggtggcctctgaagggaacc

SEQ ID NO: 254202 - DNA, 25 bp, Probe Sequence
gtgtttgtggtacttggaggctcaa

SEQ ID NO: 254203 - DNA, 25 bp, Probe Sequence
gtgcttagtctttgtaagggctctc

SEQ ID NO: 254204 - DNA, 25 bp, Probe Sequence
gtgctctaggtgggctaagtgcctc

SEQ ID NO: 254205 - DNA, 25 bp, Probe Sequence
gtgctccaaggctatgccaggtcat

SEQ ID NO: 254206 - DNA, 25 bp, Probe Sequence
gtgaattgagtctccaaggtctcca

SEQ ID NO: 254207 - DNA, 25 bp, Probe Sequence
gtgcaaggatgtgaacaaggtcgcc

SEQ ID NO: 254208 - DNA, 25 bp, Probe Sequence
gtgaaagctgtggaggctcggtccc

SEQ ID NO: 254209 - DNA, 25 bp, Probe Sequence
gtgaaagctgtggaggctcggtccc

SEQ ID NO: 254210 - DNA, 25 bp, Probe Sequence
gtgcaagcacgggaggttcggctga

SEQ ID NO: 254211 - DNA, 25 bp, Probe Sequence
gtgcacagcctaacggtggcaagcg

SEQ ID NO: 254212 - DNA, 25 bp, Probe Sequence
gtgcaacggaagccaggccaactgc

SEQ ID NO: 254213 - DNA, 25 bp, Probe Sequence
gtgcatgacggcagcctacacaagg

SEQ ID NO: 254214 - DNA, 25 bp, Probe Sequence
gtgcagaaggagccctaaggcagga

SEQ ID NO: 254215 - DNA, 25 bp, Probe Sequence
gtgcaacagtactgcgcaaacagag

SEQ ID NO: 254216 - DNA, 25 bp, Probe Sequence
gtgacacgtggctccagatcaaagc

SEQ ID NO: 254217 - DNA, 25 bp, Probe Sequence
gtgataagtgtcagatcaataacag

SEQ ID NO: 254218 - DNA, 25 bp, Probe Sequence
gtgaataagtctcatcaacgatctg

SEQ ID NO: 254219 - DNA, 25 bp, Probe Sequence
gtgacaaagctcgctatgacaggga

SEQ ID NO: 254220 - DNA, 25 bp, Probe Sequence
gtgataaagccagcggggagggact

SEQ ID NO: 254221 - DNA, 25 bp, Probe Sequence
gtgaaaccatcccggggtggaagca

SEQ ID NO: 254222 - DNA, 25 bp, Probe Sequence
gtgaaactccttccaaggctgaggg

SEQ ID NO: 254223 - DNA, 25 bp, Probe Sequence
gtgcaagacccattgcctatggcta

SEQ ID NO: 254224 - DNA, 25 bp, Probe Sequence
gtgaatggcccatgtaatacttgat

SEQ ID NO: 254225 - DNA, 25 bp, Probe Sequence
gtgaagtgcctatgatgaagcttta

SEQ ID NO: 254226 - DNA, 25 bp, Probe Sequence
gtgaatgtactcagttgaattaacc

SEQ ID NO: 254227 - DNA, 25 bp, Probe Sequence
gtgagatgtcctatggtaaccaagc

SEQ ID NO: 254228 - DNA, 25 bp, Probe Sequence
gtgaagtctttgggtgacctcatgg

SEQ ID NO: 254229 - DNA, 25 bp, Probe Sequence
gtgaacattttcagaggcctcagtg

SEQ ID NO: 254230 - DNA, 25 bp, Probe Sequence
gtgaaagattgtcccatatcctcag

SEQ ID NO: 254231 - DNA, 25 bp, Probe Sequence
gtgaaagctatctacctatcctgag

SEQ ID NO: 254232 - DNA, 25 bp, Probe Sequence
gtgacaaggagctcttattcataat

SEQ ID NO: 254233 - DNA, 25 bp, Probe Sequence
gtgcaatatggacagtactcctact

SEQ ID NO: 254234 - DNA, 25 bp, Probe Sequence
gtgcacactgtacagttcctcaacc

SEQ ID NO: 254235 - DNA, 25 bp, Probe Sequence
gtgaactctatttattcccacatca

SEQ ID NO: 254236 - DNA, 25 bp, Probe Sequence
gtgcacacctttgactacaactgca

SEQ ID NO: 254237 - DNA, 25 bp, Probe Sequence
gtgcaccttatcttatatacaatcc

SEQ ID NO: 254238 - DNA, 25 bp, Probe Sequence
gtgcagacttttgcagacaaatcaa

SEQ ID NO: 254239 - DNA, 25 bp, Probe Sequence
gtgcatacatctaagcctgaaccca

SEQ ID NO: 254240 - DNA, 25 bp, Probe Sequence
gtgacaatctgcaaggctgaacaac

SEQ ID NO: 254241 - DNA, 25 bp, Probe Sequence
gtgacacagctgcactggcaagaaa

SEQ ID NO: 254242 - DNA, 25 bp, Probe Sequence
gtgcaggcagcccacatgggaataa

SEQ ID NO: 254243 - DNA, 25 bp, Probe Sequence
gtgcaggtgccagtcaggggaagac

SEQ ID NO: 254244 - DNA, 25 bp, Probe Sequence
gtgcactagccatagctggtgacaa

SEQ ID NO: 254245 - DNA, 25 bp, Probe Sequence
gtgcttcccaaactgtcatgcatag

SEQ ID NO: 254246 - DNA, 25 bp, Probe Sequence
gtgcttggctactctgtgatggcag

SEQ ID NO: 254247 - DNA, 25 bp, Probe Sequence
gtgcagggtcactctgtgactgagg

SEQ ID NO: 254248 - DNA, 25 bp, Probe Sequence
gtgagctggtaccactggaagggct

SEQ ID NO: 254249 - DNA, 25 bp, Probe Sequence
gtgcagtgtgctcaagaggcaaggt

SEQ ID NO: 254250 - DNA, 25 bp, Probe Sequence
gtgcaggctgccagaagagcgaggc

SEQ ID NO: 254251 - DNA, 25 bp, Probe Sequence
gtgcatgtccttgaaggctgaatga

SEQ ID NO: 254252 - DNA, 25 bp, Probe Sequence
gtgcatgacgtttaaggccacgtat

SEQ ID NO: 254253 - DNA, 25 bp, Probe Sequence
gtgaacggattaaactatctaatta

SEQ ID NO: 254254 - DNA, 25 bp, Probe Sequence
gtgacacttttaaaatcatccgtat

SEQ ID NO: 254255 - DNA, 25 bp, Probe Sequence
gtgactgtctttaacttggctttag

SEQ ID NO: 254256 - DNA, 25 bp, Probe Sequence
gtgcattttttttggaggtcattca

SEQ ID NO: 254257 - DNA, 25 bp, Probe Sequence
gtgacttatgtctggggtgttgtga

SEQ ID NO: 254258 - DNA, 25 bp, Probe Sequence
gtgactggggtttggggttgcatac

SEQ ID NO: 254259 - DNA, 25 bp, Probe Sequence
gtgactggaagttacggtgctgctt

SEQ ID NO: 254260 - DNA, 25 bp, Probe Sequence
gtgacttcaagagcctctggcatct

SEQ ID NO: 254261 - DNA, 25 bp, Probe Sequence
gtgacttgaagaaccctgactttgt

SEQ ID NO: 254262 - DNA, 25 bp, Probe Sequence
gtgacttgaagaaccctgactttgt

SEQ ID NO: 254263 - DNA, 25 bp, Probe Sequence
gtgcaactaactgactctgttattg

SEQ ID NO: 254264 - DNA, 25 bp, Probe Sequence
gtgcaaatgcaagctagtggcttca

SEQ ID NO: 254265 - DNA, 25 bp, Probe Sequence
gtgcacctgcaagttaggggtcaca

SEQ ID NO: 254266 - DNA, 25 bp, Probe Sequence
gtgacttgtcgcatgaacggtcaaa

SEQ ID NO: 254267 - DNA, 25 bp, Probe Sequence
gtgcacgttcgcggagaggaaaaaa

SEQ ID NO: 254268 - DNA, 25 bp, Probe Sequence
gtgcagttctggcgaaggccaaggc

SEQ ID NO: 254269 - DNA, 25 bp, Probe Sequence
gtgcagatttggctcaagtaaagag

SEQ ID NO: 254270 - DNA, 25 bp, Probe Sequence
gtgcagctttgggtgatcttgaaaa

SEQ ID NO: 254271 - DNA, 25 bp, Probe Sequence
gtgcactgaatcgtttcatgtaaga

SEQ ID NO: 254272 - DNA, 25 bp, Probe Sequence
gtgcactgaatcgtttcatgtaaga

SEQ ID NO: 254273 - DNA, 25 bp, Probe Sequence
gtgcaggaccctgtcatgagaatga

SEQ ID NO: 254274 - DNA, 25 bp, Probe Sequence
gtgacgaccctggacatcgtcagag

SEQ ID NO: 254275 - DNA, 25 bp, Probe Sequence
gtgacgaccttgaagatcggccggt

SEQ ID NO: 254276 - DNA, 25 bp, Probe Sequence
gtgacgaccttgaagatcggcgggc

SEQ ID NO: 254277 - DNA, 25 bp, Probe Sequence
gtgacttccatccaggactgggttc

SEQ ID NO: 254278 - DNA, 25 bp, Probe Sequence
gtgacttccatccaggactgggttc

SEQ ID NO: 254279 - DNA, 25 bp, Probe Sequence
gtgcttcccatcagacacatgggct

SEQ ID NO: 254280 - DNA, 25 bp, Probe Sequence
gtgcttaccactaaactgttgtgca

SEQ ID NO: 254281 - DNA, 25 bp, Probe Sequence
gtgcttaccactaaactgttgtgca

SEQ ID NO: 254282 - DNA, 25 bp, Probe Sequence
gtgcttaccactaaactgttgtgca

SEQ ID NO: 254283 - DNA, 25 bp, Probe Sequence
gtgcttaccactaaactgttgtgca

SEQ ID NO: 254284 - DNA, 25 bp, Probe Sequence
gtgcttgaacttagggctgcttgtg

SEQ ID NO: 254285 - DNA, 25 bp, Probe Sequence
gtgcaataacttgtggccactggaa

SEQ ID NO: 254286 - DNA, 25 bp, Probe Sequence
gtgcagaaattttggtggactgtga

SEQ ID NO: 254287 - DNA, 25 bp, Probe Sequence
gtgaaaacttaggctttgtctgatg

SEQ ID NO: 254288 - DNA, 25 bp, Probe Sequence
gtgataagcctttctggtttcggag

SEQ ID NO: 254289 - DNA, 25 bp, Probe Sequence
gtgcatagagctgtgctgtggttcc

SEQ ID NO: 254290 - DNA, 25 bp, Probe Sequence
gtgcaagagcgagcgctgcgtgaac

SEQ ID NO: 254291 - DNA, 25 bp, Probe Sequence
gtgaaggtggccgtgtgtgacatcc

SEQ ID NO: 254292 - DNA, 25 bp, Probe Sequence
gtgaagttcagcattgaggatctca

SEQ ID NO: 254293 - DNA, 25 bp, Probe Sequence
gtgaatatcctggttgggactgccc

SEQ ID NO: 254294 - DNA, 25 bp, Probe Sequence
gtgaataactgtgtttcctaccgaa

SEQ ID NO: 254295 - DNA, 25 bp, Probe Sequence
gtgaccaaattggttgccctgaccg

SEQ ID NO: 254296 - DNA, 25 bp, Probe Sequence
gtgaaaaatcagggtgcctgcggca

SEQ ID NO: 254297 - DNA, 25 bp, Probe Sequence
gtgaaagacacagatacccagtatg

SEQ ID NO: 254298 - DNA, 25 bp, Probe Sequence
gtgacaaacttggctacttagtgga

SEQ ID NO: 254299 - DNA, 25 bp, Probe Sequence
gtgacaaacctttcaagattggaga

SEQ ID NO: 254300 - DNA, 25 bp, Probe Sequence
gtgacaacaacttccaaattggctc

SEQ ID NO: 254301 - DNA, 25 bp, Probe Sequence
gtgaccaacctgttcctattggtgc

SEQ ID NO: 254302 - DNA, 25 bp, Probe Sequence
gtgaacattttgtaccttctgctgg

SEQ ID NO: 254303 - DNA, 25 bp, Probe Sequence
gtgaggatactgcaattttcggaga

SEQ ID NO: 254304 - DNA, 25 bp, Probe Sequence
gtgcatggcaaaaaacattctcggc

SEQ ID NO: 254305 - DNA, 25 bp, Probe Sequence
gtgaatcaagcaaaacatacaaggg

SEQ ID NO: 254306 - DNA, 25 bp, Probe Sequence
gtgatacatacaaaagaatatagtt

SEQ ID NO: 254307 - DNA, 25 bp, Probe Sequence
gtgaagtatcagcagaaaatatctt

SEQ ID NO: 254308 - DNA, 25 bp, Probe Sequence
gtgcagctgattttaacaataacta

SEQ ID NO: 254309 - DNA, 25 bp, Probe Sequence
gtgacatgattcgtaactggagtta

SEQ ID NO: 254310 - DNA, 25 bp, Probe Sequence
gtgcaatatccatctactgtagtta

SEQ ID NO: 254311 - DNA, 25 bp, Probe Sequence
gtgcaatatccatctactgtagtta

SEQ ID NO: 254312 - DNA, 25 bp, Probe Sequence
gtgaaagcaaatgaagaagtctgag

SEQ ID NO: 254313 - DNA, 25 bp, Probe Sequence
gtgcaaagcaaagttattagctgag

SEQ ID NO: 254314 - DNA, 25 bp, Probe Sequence
gtgcaacacaggtatctattggtag

SEQ ID NO: 254315 - DNA, 25 bp, Probe Sequence
gtgcaacatctttataatttgtact

SEQ ID NO: 254316 - DNA, 25 bp, Probe Sequence
gtgactgcaattccaagttagtatt

SEQ ID NO: 254317 - DNA, 25 bp, Probe Sequence
gtgcatgcgcacgtgtgcaagtgtg

SEQ ID NO: 254318 - DNA, 25 bp, Probe Sequence
gtgcacgcatggctgagcatgtgtg

SEQ ID NO: 254319 - DNA, 25 bp, Probe Sequence
gtgcattctgaggatagcatatttc

SEQ ID NO: 254320 - DNA, 25 bp, Probe Sequence
gtgcatatatggtcaacagatcttt

SEQ ID NO: 254321 - DNA, 25 bp, Probe Sequence
gtgcacatatattcatgcaccctct

SEQ ID NO: 254322 - DNA, 25 bp, Probe Sequence
gtgcactataagaaccgcttctggc

SEQ ID NO: 254323 - DNA, 25 bp, Probe Sequence
gtgactatagagagtaattgggggc

SEQ ID NO: 254324 - DNA, 25 bp, Probe Sequence
gtgaaataaacactattttgacggc

SEQ ID NO: 254325 - DNA, 25 bp, Probe Sequence
gtgaaataaaccctgtttgcacctc

SEQ ID NO: 254326 - DNA, 25 bp, Probe Sequence
gtgaaaacagatcgacctttaccgg

SEQ ID NO: 254327 - DNA, 25 bp, Probe Sequence
gtgaagaatctacagctgctttaca

SEQ ID NO: 254328 - DNA, 25 bp, Probe Sequence
gtgaagatatctcctacttctccta

SEQ ID NO: 254329 - DNA, 25 bp, Probe Sequence
gtgaatgtgataccatacttaacta

SEQ ID NO: 254330 - DNA, 25 bp, Probe Sequence
gtgaatatgtacctacatggcaaaa

SEQ ID NO: 254331 - DNA, 25 bp, Probe Sequence
gtgcagaaataactaagacacaaat

SEQ ID NO: 254332 - DNA, 25 bp, Probe Sequence
gtgaagagtgacttgaagaactaaa

SEQ ID NO: 254333 - DNA, 25 bp, Probe Sequence
gtgacgtgagactgcaaagaccaat

SEQ ID NO: 254334 - DNA, 25 bp, Probe Sequence
gtgacgtgagactgcaaagaccaat

SEQ ID NO: 254335 - DNA, 25 bp, Probe Sequence
gtgacgtgagactgcaaagaccaat

SEQ ID NO: 254336 - DNA, 25 bp, Probe Sequence
gtgacagtgaaataagctcccacat

SEQ ID NO: 254337 - DNA, 25 bp, Probe Sequence
gtgactgtaaagcaagtccataagc

SEQ ID NO: 254338 - DNA, 25 bp, Probe Sequence
gtgacaggagttacaggttctaagc

SEQ ID NO: 254339 - DNA, 25 bp, Probe Sequence
gtgaaggtaatgtggttgtgatagc

SEQ ID NO: 254340 - DNA, 25 bp, Probe Sequence
gtgaagtcaggttcggggtgcatgg

SEQ ID NO: 254341 - DNA, 25 bp, Probe Sequence
gtgaactcagccaagcacagtggtg

SEQ ID NO: 254342 - DNA, 25 bp, Probe Sequence
gtgcaactgcaaatacaaaggagtg

SEQ ID NO: 254343 - DNA, 25 bp, Probe Sequence
gtgcattcgagagccaagatttgtg

SEQ ID NO: 254344 - DNA, 25 bp, Probe Sequence
gtgcacttgaggagctcagatttta

SEQ ID NO: 254345 - DNA, 25 bp, Probe Sequence
gtgagccatggggagtgcctgttaa

SEQ ID NO: 254346 - DNA, 25 bp, Probe Sequence
gtgaagttgggagtactgcttacaa

SEQ ID NO: 254347 - DNA, 25 bp, Probe Sequence
gtgaacaagtcgttactgtgtccat

SEQ ID NO: 254348 - DNA, 25 bp, Probe Sequence
gtgaacaaacaatatgtggtcaatt

SEQ ID NO: 254349 - DNA, 25 bp, Probe Sequence
gtgacacaaggaggcaaagttattt

SEQ ID NO: 254350 - DNA, 25 bp, Probe Sequence
gtgaatctaggagctgattttttga

SEQ ID NO: 254351 - DNA, 25 bp, Probe Sequence
gtgaatgctaagtccatcacccttt

SEQ ID NO: 254352 - DNA, 25 bp, Probe Sequence
gtgaatgctaagtccatcacccttt

SEQ ID NO: 254353 - DNA, 25 bp, Probe Sequence
gtgaatgctaagtccatcacccttt

SEQ ID NO: 254354 - DNA, 25 bp, Probe Sequence
gtgaatgctgggactcagccttcag

SEQ ID NO: 254355 - DNA, 25 bp, Probe Sequence
gtgaagccggcaaagctctcaagaa

SEQ ID NO: 254356 - DNA, 25 bp, Probe Sequence
gtgaaccggaacgtctaagagtcaa

SEQ ID NO: 254357 - DNA, 25 bp, Probe Sequence
gtgaaactagaagggcttagcagta

SEQ ID NO: 254358 - DNA, 25 bp, Probe Sequence
gtgagcaactaggactagcctgggc

SEQ ID NO: 254359 - DNA, 25 bp, Probe Sequence
gtgaagcctcaggactggatctcgg

SEQ ID NO: 254360 - DNA, 25 bp, Probe Sequence
gtgaactgtcatgcctggattttgg

SEQ ID NO: 254361 - DNA, 25 bp, Probe Sequence
gtgcacctgtcaagtcgggtttaac

SEQ ID NO: 254362 - DNA, 25 bp, Probe Sequence
gtgcacctgtcaagtcgggtttaca

SEQ ID NO: 254363 - DNA, 25 bp, Probe Sequence
gtgcactattacccggttttacaga

SEQ ID NO: 254364 - DNA, 25 bp, Probe Sequence
gtgcaccttaccaactttctgtaaa

SEQ ID NO: 254365 - DNA, 25 bp, Probe Sequence
gtgaacattacattgccatttttaa

SEQ ID NO: 254366 - DNA, 25 bp, Probe Sequence
gtgcataaacactcacgtctgcttc

SEQ ID NO: 254367 - DNA, 25 bp, Probe Sequence
gtgcatcctacatctcaggttctac

SEQ ID NO: 254368 - DNA, 25 bp, Probe Sequence
gtgcacgtgtatccgagggtctgca

SEQ ID NO: 254369 - DNA, 25 bp, Probe Sequence
gtgcagcaggtttctttagtcatca

SEQ ID NO: 254370 - DNA, 25 bp, Probe Sequence
gtgcaacagtcttctgattgagttt

SEQ ID NO: 254371 - DNA, 25 bp, Probe Sequence
gtgcaggcattctgtattgaattca

SEQ ID NO: 254372 - DNA, 25 bp, Probe Sequence
gtgcagaatgatttgaagtattgta

SEQ ID NO: 254373 - DNA, 25 bp, Probe Sequence
gtgacagaacaacagtaatgtgagg

SEQ ID NO: 254374 - DNA, 25 bp, Probe Sequence
gtgaacagacacgggtgaatgctgc

SEQ ID NO: 254375 - DNA, 25 bp, Probe Sequence
gtgaaaagacgtcaatatctgctca

SEQ ID NO: 254376 - DNA, 25 bp, Probe Sequence
gtgaatagtgccgcgataacagtac

SEQ ID NO: 254377 - DNA, 25 bp, Probe Sequence
gtgcagatgaatcccacagattaca

SEQ ID NO: 254378 - DNA, 25 bp, Probe Sequence
gtgcatgtatcttgcctcagatata

SEQ ID NO: 254379 - DNA, 25 bp, Probe Sequence
gtgcatctcagatgcctcagtaggc

SEQ ID NO: 254380 - DNA, 25 bp, Probe Sequence
gtgttcagggtccatgtatacgttg

SEQ ID NO: 254381 - DNA, 25 bp, Probe Sequence
gtgcatttggtgtgtgtatacttgc

SEQ ID NO: 254382 - DNA, 25 bp, Probe Sequence
gtgacaggtttgcctattatcttgc

SEQ ID NO: 254383 - DNA, 25 bp, Probe Sequence
gtgaaggtgtctaccattctactgc

SEQ ID NO: 254384 - DNA, 25 bp, Probe Sequence
gtgcttgggatcgtacatgttaatt

SEQ ID NO: 254385 - DNA, 25 bp, Probe Sequence
gtgcttgttgatggcatccagcttc

SEQ ID NO: 254386 - DNA, 25 bp, Probe Sequence
gtgagtgttcatagcagtagcattc

SEQ ID NO: 254387 - DNA, 25 bp, Probe Sequence
gtgagaattatcagacaatgtcgga

SEQ ID NO: 254388 - DNA, 25 bp, Probe Sequence
gtgaacatttctcctaagattataa

SEQ ID NO: 254389 - DNA, 25 bp, Probe Sequence
gtgaactgtgtccatttaagctgta

SEQ ID NO: 254390 - DNA, 25 bp, Probe Sequence
gtgaaggttatcagtaagcagctag

SEQ ID NO: 254391 - DNA, 25 bp, Probe Sequence
gtgaaggtttcaggtcgcagcctgt

SEQ ID NO: 254392 - DNA, 25 bp, Probe Sequence
gggcagtgtttcagatggccctgag

SEQ ID NO: 254393 - DNA, 25 bp, Probe Sequence
gtgagggactgtgttgactgacgag

SEQ ID NO: 254394 - DNA, 25 bp, Probe Sequence
gtgactgtggttgaggacgacgagg

SEQ ID NO: 254395 - DNA, 25 bp, Probe Sequence
gtgagccggaatgaggacctgttgg

SEQ ID NO: 254396 - DNA, 25 bp, Probe Sequence
tgaaccctggctgaactttgttggc

SEQ ID NO: 254397 - DNA, 25 bp, Probe Sequence
gtgcatccttagtgaacttctgttg

SEQ ID NO: 254398 - DNA, 25 bp, Probe Sequence
gtgacacctatatgaacacagtttg

SEQ ID NO: 254399 - DNA, 25 bp, Probe Sequence
gtgactcctaatggcacaaccttag

SEQ ID NO: 254400 - DNA, 25 bp, Probe Sequence
gtgaactcacaagcaattccttctg

SEQ ID NO: 254401 - DNA, 25 bp, Probe Sequence
gtgacctacccagagattgcttctc

SEQ ID NO: 254402 - DNA, 25 bp, Probe Sequence
gtgagggatacctcagatttttctt

SEQ ID NO: 254403 - DNA, 25 bp, Probe Sequence
gtgaagtgagaccttccttttactt

SEQ ID NO: 254404 - DNA, 25 bp, Probe Sequence
gtgaaggagacgttcgcttatcccc

SEQ ID NO: 254405 - DNA, 25 bp, Probe Sequence
gtgaacagagatttacctaaccaac

SEQ ID NO: 254406 - DNA, 25 bp, Probe Sequence
gtgaacaagatcatcaccttatctt

SEQ ID NO: 254407 - DNA, 25 bp, Probe Sequence
gtgaagataatctctcctatctgag

SEQ ID NO: 254408 - DNA, 25 bp, Probe Sequence
gtgaaagaacttgcctcactgcacg

SEQ ID NO: 254409 - DNA, 25 bp, Probe Sequence
gtgaaggaactggcactccaaacta

SEQ ID NO: 254410 - DNA, 25 bp, Probe Sequence
gtgtaagaaactcccacaaaccaat

SEQ ID NO: 254411 - DNA, 25 bp, Probe Sequence
gtgtcaaacaactgccattaaactt

SEQ ID NO: 254412 - DNA, 25 bp, Probe Sequence
gtgaaataccactacctttatagtt

SEQ ID NO: 254413 - DNA, 25 bp, Probe Sequence
gtgaacactccctattcgtataagc

SEQ ID NO: 254414 - DNA, 25 bp, Probe Sequence
gtgaacctcgaatctcatgttcagg

SEQ ID NO: 254415 - DNA, 25 bp, Probe Sequence
gtgaaggctcgatcctgcgagaagg

SEQ ID NO: 254416 - DNA, 25 bp, Probe Sequence
gtgaaggctcgatcctgcgagaagg

SEQ ID NO: 254417 - DNA, 25 bp, Probe Sequence
gtgaataatggaccccagagaagtc

SEQ ID NO: 254418 - DNA, 25 bp, Probe Sequence
gtgagatcaaagctcctccaaagcc

SEQ ID NO: 254419 - DNA, 25 bp, Probe Sequence
gtgcaacaaagatgcctcgcagcga

SEQ ID NO: 254420 - DNA, 25 bp, Probe Sequence
gtgcacatcaaaatgaccaaatcga

SEQ ID NO: 254421 - DNA, 25 bp, Probe Sequence
gtgaagctatgaatgcccacacacc

SEQ ID NO: 254422 - DNA, 25 bp, Probe Sequence
gtgaagctgagactcatggatcccc

SEQ ID NO: 254423 - DNA, 25 bp, Probe Sequence
gtgaactgcatggtgatggccgacc

SEQ ID NO: 254424 - DNA, 25 bp, Probe Sequence
gtgacagtgtgcagacagcaatgat

SEQ ID NO: 254425 - DNA, 25 bp, Probe Sequence
gtgcacatgcttcagaatcctatgg

SEQ ID NO: 254426 - DNA, 25 bp, Probe Sequence
gtgaatgctcgcatagatcacctgg

SEQ ID NO: 254427 - DNA, 25 bp, Probe Sequence
gtgcaggcttgtgcagacactcagg

SEQ ID NO: 254428 - DNA, 25 bp, Probe Sequence
gtgcaagactgtgctcaagctggcc

SEQ ID NO: 254429 - DNA, 25 bp, Probe Sequence
gtgcaaatgtgtgctcaagctaata

SEQ ID NO: 254430 - DNA, 25 bp, Probe Sequence
gtgcagaatggcctcataagctcac

SEQ ID NO: 254431 - DNA, 25 bp, Probe Sequence
gtgcagagagaccatgctagctgtc

SEQ ID NO: 254432 - DNA, 25 bp, Probe Sequence
gtgcagacaggccatgtgagccacc

SEQ ID NO: 254433 - DNA, 25 bp, Probe Sequence
gtgcagacagggctgtgtgaccaca

SEQ ID NO: 254434 - DNA, 25 bp, Probe Sequence
gtgcatgaaagagagggtcaccaag

SEQ ID NO: 254435 - DNA, 25 bp, Probe Sequence
gtgcagaaagaggagcccatcccac

SEQ ID NO: 254436 - DNA, 25 bp, Probe Sequence
gtgagagggagctctacatcccatc

SEQ ID NO: 254437 - DNA, 25 bp, Probe Sequence
gtgagcagggatgaccacataccag

SEQ ID NO: 254438 - DNA, 25 bp, Probe Sequence
gtgacagggtgaaacgccatctcaa

SEQ ID NO: 254439 - DNA, 25 bp, Probe Sequence
gtgcagcaggggctatggcttctac

SEQ ID NO: 254440 - DNA, 25 bp, Probe Sequence
gtgacagagacgctcaggctgtgtt

SEQ ID NO: 254441 - DNA, 25 bp, Probe Sequence
gtgaaacacaccaggctgtgggcct

SEQ ID NO: 254442 - DNA, 25 bp, Probe Sequence
gtgagaacaccctgttgaagaccct

SEQ ID NO: 254443 - DNA, 25 bp, Probe Sequence
gtgaaactcggctgtattaatcacg

SEQ ID NO: 254444 - DNA, 25 bp, Probe Sequence
gtgaatcccaagcgtgttatatcaa

SEQ ID NO: 254445 - DNA, 25 bp, Probe Sequence
gtgaatacactcctgttgttttaag

SEQ ID NO: 254446 - DNA, 25 bp, Probe Sequence
gtgcacatatgcctcaggtgtgctt

SEQ ID NO: 254447 - DNA, 25 bp, Probe Sequence
gtgcagccagatccagggctttgca

SEQ ID NO: 254448 - DNA, 25 bp, Probe Sequence
gtgagtcaggcctgggttggccacc

SEQ ID NO: 254449 - DNA, 25 bp, Probe Sequence
gtgagtcaggcctgggttggccacc

SEQ ID NO: 254450 - DNA, 25 bp, Probe Sequence
gtgactggagcctttggctttcacc

SEQ ID NO: 254451 - DNA, 25 bp, Probe Sequence
gtgcagctgtagaaaagtgcttgtc

SEQ ID NO: 254452 - DNA, 25 bp, Probe Sequence
gtgaattcatgatcaaggtttcctt

SEQ ID NO: 254453 - DNA, 25 bp, Probe Sequence
gtgaacttgtgacaggtttgcctat

SEQ ID NO: 254454 - DNA, 25 bp, Probe Sequence
gtgacaccggaggggattgttctgt

SEQ ID NO: 254455 - DNA, 25 bp, Probe Sequence
gtgaaccgagatcatgccattgtac

SEQ ID NO: 254456 - DNA, 25 bp, Probe Sequence
gtgaaccgagatcatgccattgtac

SEQ ID NO: 254457 - DNA, 25 bp, Probe Sequence
gtgaccctgtatgatcctagtagca

SEQ ID NO: 254458 - DNA, 25 bp, Probe Sequence
gtgacccattttactctggataagg

SEQ ID NO: 254459 - DNA, 25 bp, Probe Sequence
gtgaaacttttcctagatgcaaatg

SEQ ID NO: 254460 - DNA, 25 bp, Probe Sequence
gtgaaagcgaattcctagacacctg

SEQ ID NO: 254461 - DNA, 25 bp, Probe Sequence
gtgaagggacattctctacactcag

SEQ ID NO: 254462 - DNA, 25 bp, Probe Sequence
gtgaagtccaagacccagactatga

SEQ ID NO: 254463 - DNA, 25 bp, Probe Sequence
gtgaagatacaacttacagaatgag

SEQ ID NO: 254464 - DNA, 25 bp, Probe Sequence
gtgcaaatacactgtccaggatgag

SEQ ID NO: 254465 - DNA, 25 bp, Probe Sequence
gtgacaatccaatgccgagtggctg

SEQ ID NO: 254466 - DNA, 25 bp, Probe Sequence
gtgacgacctcatcctggagatcga

SEQ ID NO: 254467 - DNA, 25 bp, Probe Sequence
gtgactggcagtgtccagggaagaa

SEQ ID NO: 254468 - DNA, 25 bp, Probe Sequence
gtgcacggtgtcatccaggtggatg

SEQ ID NO: 254469 - DNA, 25 bp, Probe Sequence
gtgcactgaaacatgcaggggcgtg

SEQ ID NO: 254470 - DNA, 25 bp, Probe Sequence
gtgaatgaacctagagcggtgacat

SEQ ID NO: 254471 - DNA, 25 bp, Probe Sequence
gtgacataacacaggaaggaaccct

SEQ ID NO: 254472 - DNA, 25 bp, Probe Sequence
gtgaaatgcaccaaagcccgatacc

SEQ ID NO: 254473 - DNA, 25 bp, Probe Sequence
gtgaaagaggcttacccagaccaca

SEQ ID NO: 254474 - DNA, 25 bp, Probe Sequence
gtgaaagaggcttacccagaccaca

SEQ ID NO: 254475 - DNA, 25 bp, Probe Sequence
gtgagaagtgtgagaacctgaccac

SEQ ID NO: 254476 - DNA, 25 bp, Probe Sequence
gtgacaagagtgagactccgtctcc

SEQ ID NO: 254477 - DNA, 25 bp, Probe Sequence
gtgacaagagtgagactccgtctcc

SEQ ID NO: 254478 - DNA, 25 bp, Probe Sequence
gtgcaagaaggctgcttccagctcc

SEQ ID NO: 254479 - DNA, 25 bp, Probe Sequence
gtgcaatacagtttcattaactcct

SEQ ID NO: 254480 - DNA, 25 bp, Probe Sequence
gtgaatatcgtatcattgtaatcaa

SEQ ID NO: 254481 - DNA, 25 bp, Probe Sequence
gtgaaacgctggtccctactaaaat

SEQ ID NO: 254482 - DNA, 25 bp, Probe Sequence
gtgaaaccctgtctgtactaaaaat

SEQ ID NO: 254483 - DNA, 25 bp, Probe Sequence
gtgaaaccccatctgtactaaacat

SEQ ID NO: 254484 - DNA, 25 bp, Probe Sequence
gtgaaaccccatctgtactaaacat

SEQ ID NO: 254485 - DNA, 25 bp, Probe Sequence
ggaggtccaaccgtgatttaaacat

SEQ ID NO: 254486 - DNA, 25 bp, Probe Sequence
gggcgtccaaatatggttataaatg

SEQ ID NO: 254487 - DNA, 25 bp, Probe Sequence
gtgggctccctggtatggtaaaaag

SEQ ID NO: 254488 - DNA, 25 bp, Probe Sequence
gtgagcccccgagaggataaagcgg

SEQ ID NO: 254489 - DNA, 25 bp, Probe Sequence
gtgaccctcacgtaagattaacatc

SEQ ID NO: 254490 - DNA, 25 bp, Probe Sequence
gtgacacccggaaatgaggaccatc

SEQ ID NO: 254491 - DNA, 25 bp, Probe Sequence
gtgcagcaccacggaggatggggcc

SEQ ID NO: 254492 - DNA, 25 bp, Probe Sequence
gtgaccccaaggccagtgggcaaga

SEQ ID NO: 254493 - DNA, 25 bp, Probe Sequence
gtgaaccctgataccaggagcctgg

SEQ ID NO: 254494 - DNA, 25 bp, Probe Sequence
gtgaaccctgtgaccttgaagaaat

SEQ ID NO: 254495 - DNA, 25 bp, Probe Sequence
gtgaacaccatcatgcctttataaa

SEQ ID NO: 254496 - DNA, 25 bp, Probe Sequence
gtgacaccctatcttgtcaataaac

SEQ ID NO: 254497 - DNA, 25 bp, Probe Sequence
ggacctttcaggtttcactataaca

SEQ ID NO: 254498 - DNA, 25 bp, Probe Sequence
gtgacctatgacagtttgtcaaaaa

SEQ ID NO: 254499 - DNA, 25 bp, Probe Sequence
gtgaattatgacaatctatatgata

SEQ ID NO: 254500 - DNA, 25 bp, Probe Sequence
gtgaagtatgcacacggagacagtg

SEQ ID NO: 254501 - DNA, 25 bp, Probe Sequence
gtgaatttaaacgacagcagctgga

SEQ ID NO: 254502 - DNA, 25 bp, Probe Sequence
gtgaatgcctgattaggacatgggg

SEQ ID NO: 254503 - DNA, 25 bp, Probe Sequence
gtgagtgacgatgacagtgaggagg

SEQ ID NO: 254504 - DNA, 25 bp, Probe Sequence
gtgaggatcaactactttgaggatt

SEQ ID NO: 254505 - DNA, 25 bp, Probe Sequence
gtgagcccgaaagttggaggttgca

SEQ ID NO: 254506 - DNA, 25 bp, Probe Sequence
gtgaatccccagtttggggcttgtg

SEQ ID NO: 254507 - DNA, 25 bp, Probe Sequence
gtgaacccacgtttggtgagtgggt

SEQ ID NO: 254508 - DNA, 25 bp, Probe Sequence
gtgaacccagggagaggcactggtg

SEQ ID NO: 254509 - DNA, 25 bp, Probe Sequence
gtgaaccaagtgtttgggcaggatg

SEQ ID NO: 254510 - DNA, 25 bp, Probe Sequence
gtgaaccagcaggagttcgtcagag

SEQ ID NO: 254511 - DNA, 25 bp, Probe Sequence
gtgcaaagccacaagttatgctaag

SEQ ID NO: 254512 - DNA, 25 bp, Probe Sequence
gtgacagtgccatagtttggacagt

SEQ ID NO: 254513 - DNA, 25 bp, Probe Sequence
gtgcacagctaatgattcaatgcga

SEQ ID NO: 254514 - DNA, 25 bp, Probe Sequence
gtgcacacaaatcagtagcactgca

SEQ ID NO: 254515 - DNA, 25 bp, Probe Sequence
gtgaacacactctatgtcaactctc

SEQ ID NO: 254516 - DNA, 25 bp, Probe Sequence
gtgaacatcttaatgactagcttct

SEQ ID NO: 254517 - DNA, 25 bp, Probe Sequence
gtgaacgcagtgagaatagattcta

SEQ ID NO: 254518 - DNA, 25 bp, Probe Sequence
gtgactcctgtgaagaatcagggtc

SEQ ID NO: 254519 - DNA, 25 bp, Probe Sequence
gtgactcctgtgaaggatcaggctt

SEQ ID NO: 254520 - DNA, 25 bp, Probe Sequence
gtgactcctgtgaaggatcaggctt

SEQ ID NO: 254521 - DNA, 25 bp, Probe Sequence
gtgaccacgtgcatgtctatggcat

SEQ ID NO: 254522 - DNA, 25 bp, Probe Sequence
gtgagcaaccacttgagaaggcatt

SEQ ID NO: 254523 - DNA, 25 bp, Probe Sequence
gtgaccatctgcaattacgaagcat

SEQ ID NO: 254524 - DNA, 25 bp, Probe Sequence
gtgaccctcttccaagaacattcac

SEQ ID NO: 254525 - DNA, 25 bp, Probe Sequence
gtgaaactttcataacacatgttca

SEQ ID NO: 254526 - DNA, 25 bp, Probe Sequence
gtgagattttactaagacctgtttt

SEQ ID NO: 254527 - DNA, 25 bp, Probe Sequence
gtgaatttgtcctaaaatgacctgt

SEQ ID NO: 254528 - DNA, 25 bp, Probe Sequence
gtgaagtcgtcagaacacatcaacg

SEQ ID NO: 254529 - DNA, 25 bp, Probe Sequence
gtgcaagaaggagagaccatcgagg

SEQ ID NO: 254530 - DNA, 25 bp, Probe Sequence
gtgaggaggaggcgtccatcaacct

SEQ ID NO: 254531 - DNA, 25 bp, Probe Sequence
gtgaggaggaggcgtccatcaacct

SEQ ID NO: 254532 - DNA, 25 bp, Probe Sequence
gtgaggaggaggcgtccatcaacct

SEQ ID NO: 254533 - DNA, 25 bp, Probe Sequence
gtgagtaccagactttcttcaatcc

SEQ ID NO: 254534 - DNA, 25 bp, Probe Sequence
gtgagatcacaggagcctctttcct

SEQ ID NO: 254535 - DNA, 25 bp, Probe Sequence
gtgaatcggttgttctttcctcaca

SEQ ID NO: 254536 - DNA, 25 bp, Probe Sequence
gtgaatacgaattttcttcctcaga

SEQ ID NO: 254537 - DNA, 25 bp, Probe Sequence
gtgaatacgaattttcttcctcaga

SEQ ID NO: 254538 - DNA, 25 bp, Probe Sequence
gtgaccatcaacaagttcttccagc

SEQ ID NO: 254539 - DNA, 25 bp, Probe Sequence
gtgaaccactcatttttatgcaagt

SEQ ID NO: 254540 - DNA, 25 bp, Probe Sequence
gtgcacagaaccatttttgcaagat

SEQ ID NO: 254541 - DNA, 25 bp, Probe Sequence
gtgcaatgaatgatgcttttctgaa

SEQ ID NO: 254542 - DNA, 25 bp, Probe Sequence
gtgactgcaagcatttttccatctg

SEQ ID NO: 254543 - DNA, 25 bp, Probe Sequence
gtgacaaaagtgttgtcttcactgg

SEQ ID NO: 254544 - DNA, 25 bp, Probe Sequence
gtgcaaacagggttgttatcagctt

SEQ ID NO: 254545 - DNA, 25 bp, Probe Sequence
gtgaaacacaggaagtatgccagat

SEQ ID NO: 254546 - DNA, 25 bp, Probe Sequence
gtgcagaaacaaatggctgtccagt

SEQ ID NO: 254547 - DNA, 25 bp, Probe Sequence
gtgcagaatctcataggttgccaat

SEQ ID NO: 254548 - DNA, 25 bp, Probe Sequence
gtgaaatattcaaggctctccagca

SEQ ID NO: 254549 - DNA, 25 bp, Probe Sequence
gtgaaatattcaaggctctccagca

SEQ ID NO: 254550 - DNA, 25 bp, Probe Sequence
gtgaacacatggtagagtctccaac

SEQ ID NO: 254551 - DNA, 25 bp, Probe Sequence
gtgacagacaatgatgaggccgaca

SEQ ID NO: 254552 - DNA, 25 bp, Probe Sequence
gtgacagataaattcggcaagccag

SEQ ID NO: 254553 - DNA, 25 bp, Probe Sequence
gtgaataatcaattgtggaaccata

SEQ ID NO: 254554 - DNA, 25 bp, Probe Sequence
gtgaatattcaatctggtaccagtt

SEQ ID NO: 254555 - DNA, 25 bp, Probe Sequence
gtgaatattaaagtgtgctggacat

SEQ ID NO: 254556 - DNA, 25 bp, Probe Sequence
gtgaaagtctccgtggtggacacag

SEQ ID NO: 254557 - DNA, 25 bp, Probe Sequence
gtgacaaatatacataaggagacaa

SEQ ID NO: 254558 - DNA, 25 bp, Probe Sequence
gtgatcagatttggaatacctggaa

SEQ ID NO: 254559 - DNA, 25 bp, Probe Sequence
gtgacaacctcatcaagctgtggaa

SEQ ID NO: 254560 - DNA, 25 bp, Probe Sequence
gtgaaactgccagcatactcatgca

SEQ ID NO: 254561 - DNA, 25 bp, Probe Sequence
gtgacattttccgatacagcagcat

SEQ ID NO: 254562 - DNA, 25 bp, Probe Sequence
gtgcacttttacaagccgcaaaggc

SEQ ID NO: 254563 - DNA, 25 bp, Probe Sequence
gtgagtttctgtaggccctaagctg

SEQ ID NO: 254564 - DNA, 25 bp, Probe Sequence
gtgaatcttctgatgccgaatgagg

SEQ ID NO: 254565 - DNA, 25 bp, Probe Sequence
gtgaatttgctgcttctgagaggca

SEQ ID NO: 254566 - DNA, 25 bp, Probe Sequence
gtgaattatcagtgacatgtgaggc

SEQ ID NO: 254567 - DNA, 25 bp, Probe Sequence
gtgaagtgctagctgaaggatgagc

SEQ ID NO: 254568 - DNA, 25 bp, Probe Sequence
gtgaagatccgagtgaagcctgaca

SEQ ID NO: 254569 - DNA, 25 bp, Probe Sequence
gtgaatgatctctctgaatcctaag

SEQ ID NO: 254570 - DNA, 25 bp, Probe Sequence
gtgacttcatgctctgataactgcc

SEQ ID NO: 254571 - DNA, 25 bp, Probe Sequence
gtgacttcatgactggtatacctgc

SEQ ID NO: 254572 - DNA, 25 bp, Probe Sequence
gtgacattcaggatgttcaccatgt

SEQ ID NO: 254573 - DNA, 25 bp, Probe Sequence
gtgacatgtcagatctttgtacgta

SEQ ID NO: 254574 - DNA, 25 bp, Probe Sequence
gtgacatgtcaggcagttttagagt

SEQ ID NO: 254575 - DNA, 25 bp, Probe Sequence
gtgagcagacagtagtagtgataat

SEQ ID NO: 254576 - DNA, 25 bp, Probe Sequence
gtgagcagacttaaatggaacagaa

SEQ ID NO: 254577 - DNA, 25 bp, Probe Sequence
gtgcaatattagaaaggagacatga

SEQ ID NO: 254578 - DNA, 25 bp, Probe Sequence
gtgactttcggcaagaaactgcata

SEQ ID NO: 254579 - DNA, 25 bp, Probe Sequence
gtgacttctgcgataaacagatttt

SEQ ID NO: 254580 - DNA, 25 bp, Probe Sequence
gtgacattctcctcaggatccaatt

SEQ ID NO: 254581 - DNA, 25 bp, Probe Sequence
gtgaacctactgtcatttctcaatt

SEQ ID NO: 254582 - DNA, 25 bp, Probe Sequence
gtgaacaatatcccactttgcaaac

SEQ ID NO: 254583 - DNA, 25 bp, Probe Sequence
gtgaatgacaaaccctttgaatgaa

SEQ ID NO: 254584 - DNA, 25 bp, Probe Sequence
gtgcaagacattagccctttagtta

SEQ ID NO: 254585 - DNA, 25 bp, Probe Sequence
gtgcaagcgagtacctatggtatgt

SEQ ID NO: 254586 - DNA, 25 bp, Probe Sequence
gtgcaacgtgtaacttgtgcttttg

SEQ ID NO: 254587 - DNA, 25 bp, Probe Sequence
gtgcaacagttgatgtgcttctttg

SEQ ID NO: 254588 - DNA, 25 bp, Probe Sequence
gtgcaactgcttatattctcttggc

SEQ ID NO: 254589 - DNA, 25 bp, Probe Sequence
gtgaactgtacccatgatctcttgg

SEQ ID NO: 254590 - DNA, 25 bp, Probe Sequence
gtgacactggagagctgattgttga

SEQ ID NO: 254591 - DNA, 25 bp, Probe Sequence
gtgacacttcagagagctggtagtt

SEQ ID NO: 254592 - DNA, 25 bp, Probe Sequence
gtgactctgttgagacatggccagc

SEQ ID NO: 254593 - DNA, 25 bp, Probe Sequence
gtgaattaatgttgacatctgctcc

SEQ ID NO: 254594 - DNA, 25 bp, Probe Sequence
gtgacacgaataatacacgctggct

SEQ ID NO: 254595 - DNA, 25 bp, Probe Sequence
gtgaacgacacattccacaagcgtc

SEQ ID NO: 254596 - DNA, 25 bp, Probe Sequence
gtgacgtggacatccgcaaagacct

SEQ ID NO: 254597 - DNA, 25 bp, Probe Sequence
gtgaagtggatatcactgaaggaga

SEQ ID NO: 254598 - DNA, 25 bp, Probe Sequence
gtgcaactggtgctctggaagggca

SEQ ID NO: 254599 - DNA, 25 bp, Probe Sequence
gtgcaactggtgctctggaagggca

SEQ ID NO: 254600 - DNA, 25 bp, Probe Sequence
gtgcaactggtgctctggaagggca

SEQ ID NO: 254601 - DNA, 25 bp, Probe Sequence
gtgcaactcgttcctgcaggagaag

SEQ ID NO: 254602 - DNA, 25 bp, Probe Sequence
gtgcaactgccttccagtgagaaga

SEQ ID NO: 254603 - DNA, 25 bp, Probe Sequence
gtgcaaatgcacctcctgcaagaaa

SEQ ID NO: 254604 - DNA, 25 bp, Probe Sequence
gtgcacacagacttactctcaggtc

SEQ ID NO: 254605 - DNA, 25 bp, Probe Sequence
gtgacaagagcaagactccgtctca

SEQ ID NO: 254606 - DNA, 25 bp, Probe Sequence
gtgacaagagcaagactccgtctca

SEQ ID NO: 254607 - DNA, 25 bp, Probe Sequence
gtgaggagacaggccatgcctttca

SEQ ID NO: 254608 - DNA, 25 bp, Probe Sequence
gtgaggagacaggccatgcctttca

SEQ ID NO: 254609 - DNA, 25 bp, Probe Sequence
gtgagagcacacacttgctcgttag

SEQ ID NO: 254610 - DNA, 25 bp, Probe Sequence
gtgaacatacctaatgctcagattt

SEQ ID NO: 254611 - DNA, 25 bp, Probe Sequence
gtgaacatgccaatgactatgcaga

SEQ ID NO: 254612 - DNA, 25 bp, Probe Sequence
gtgaatctggcttcaggatgctgaa

SEQ ID NO: 254613 - DNA, 25 bp, Probe Sequence
gtgactgcggtgaagaatgctcaga

SEQ ID NO: 254614 - DNA, 25 bp, Probe Sequence
gtgacacaagtacaatctaaaagtt

SEQ ID NO: 254615 - DNA, 25 bp, Probe Sequence
gtgaacaagcaccaaattaaaagac

SEQ ID NO: 254616 - DNA, 25 bp, Probe Sequence
gtgaagccaagccaggaaacaccaa

SEQ ID NO: 254617 - DNA, 25 bp, Probe Sequence
gtgaaatcaaagttgcacaacccaa

SEQ ID NO: 254618 - DNA, 25 bp, Probe Sequence
gtgaaaaaagcatgccacccaaaaa

SEQ ID NO: 254619 - DNA, 25 bp, Probe Sequence
gtgaaattcttggaccggcgcaaga

SEQ ID NO: 254620 - DNA, 25 bp, Probe Sequence
gtgaaattcttggaccggcgcaaga

SEQ ID NO: 254621 - DNA, 25 bp, Probe Sequence
gtgaaattgtggggcatcgaccgag

SEQ ID NO: 254622 - DNA, 25 bp, Probe Sequence
gtgaatttctagagcaagtcccaaa

SEQ ID NO: 254623 - DNA, 25 bp, Probe Sequence
gtgacatgtctgtgggaagctccca

SEQ ID NO: 254624 - DNA, 25 bp, Probe Sequence
gtgaagggtaggagagctcagcctc

SEQ ID NO: 254625 - DNA, 25 bp, Probe Sequence
gtgaagaggctgagttagtccctta

SEQ ID NO: 254626 - DNA, 25 bp, Probe Sequence
gtgaataggatttttactccctttg

SEQ ID NO: 254627 - DNA, 25 bp, Probe Sequence
gtgaatataattttgtgtctccttc

SEQ ID NO: 254628 - DNA, 25 bp, Probe Sequence
gtgaaaatatccttggttggcattt

SEQ ID NO: 254629 - DNA, 25 bp, Probe Sequence
gtgatacaaacctgtcctggaattc

SEQ ID NO: 254630 - DNA, 25 bp, Probe Sequence
gtgttcaaaccttctggagaaaatc

SEQ ID NO: 254631 - DNA, 25 bp, Probe Sequence
gtgtctaaacacaccgttagagatc

SEQ ID NO: 254632 - DNA, 25 bp, Probe Sequence
gtgactgtatcatgttcggtttaat

SEQ ID NO: 254633 - DNA, 25 bp, Probe Sequence
gtgacggagcgagatcttgtttcaa

SEQ ID NO: 254634 - DNA, 25 bp, Probe Sequence
gtgacaagaccagacaggctttccc

SEQ ID NO: 254635 - DNA, 25 bp, Probe Sequence
gtgaaaaccataccagtggtttaca

SEQ ID NO: 254636 - DNA, 25 bp, Probe Sequence
gtgaataacgatttcccgtcttgac

SEQ ID NO: 254637 - DNA, 25 bp, Probe Sequence
gtgaataatcttttacttgcatgtt

SEQ ID NO: 254638 - DNA, 25 bp, Probe Sequence
gtgaagattgctgtatactatttat

SEQ ID NO: 254639 - DNA, 25 bp, Probe Sequence
gtgaatttgttattaagcatttgat

SEQ ID NO: 254640 - DNA, 25 bp, Probe Sequence
gtgaatgggtgtatggagaactgaa

SEQ ID NO: 254641 - DNA, 25 bp, Probe Sequence
gtgaatcggttttggcagatacatc

SEQ ID NO: 254642 - DNA, 25 bp, Probe Sequence
gtgaatggaccccaagcagtacact

SEQ ID NO: 254643 - DNA, 25 bp, Probe Sequence
gtgatgagctgtgccctgacagtaa

SEQ ID NO: 254644 - DNA, 25 bp, Probe Sequence
gtgaagatgtccaactacgtgaacg

SEQ ID NO: 254645 - DNA, 25 bp, Probe Sequence
gtgaagtgcccaagttcgtgagcac

SEQ ID NO: 254646 - DNA, 25 bp, Probe Sequence
gtgaagtctcacattatgcctgcag

SEQ ID NO: 254647 - DNA, 25 bp, Probe Sequence
gtgaatgatggcttatttgtcagcg

SEQ ID NO: 254648 - DNA, 25 bp, Probe Sequence
gtgacaatgtggattctgctgatgc

SEQ ID NO: 254649 - DNA, 25 bp, Probe Sequence
gtgaaggtggcttttgctttatagt

SEQ ID NO: 254650 - DNA, 25 bp, Probe Sequence
gtgacagcttgtggctttttattag

SEQ ID NO: 254651 - DNA, 25 bp, Probe Sequence
gtgacagctcgtgtggtgtttgttt

SEQ ID NO: 254652 - DNA, 25 bp, Probe Sequence
gtgatcaccagggtcagtttctgtt

SEQ ID NO: 254653 - DNA, 25 bp, Probe Sequence
gtgattccagtggactgtatctctg

SEQ ID NO: 254654 - DNA, 25 bp, Probe Sequence
gtgattccagtggactgtatctctg

SEQ ID NO: 254655 - DNA, 25 bp, Probe Sequence
gtgattgccctttcatatgatcttc

SEQ ID NO: 254656 - DNA, 25 bp, Probe Sequence
gggctgtccaatggcaatgtttgcc

SEQ ID NO: 254657 - DNA, 25 bp, Probe Sequence
gggctgctacacaacttatttcccc

SEQ ID NO: 254658 - DNA, 25 bp, Probe Sequence
gggcgatacaattttaactcacttc

SEQ ID NO: 254659 - DNA, 25 bp, Probe Sequence
gtgacctaaagaattaatgaccatt

SEQ ID NO: 254660 - DNA, 25 bp, Probe Sequence
gtgaccaaacaggcattaatattag

SEQ ID NO: 254661 - DNA, 25 bp, Probe Sequence
gtgagcccatactcatcaagtaccg

SEQ ID NO: 254662 - DNA, 25 bp, Probe Sequence
gtgagcctataccattagaatcaag

SEQ ID NO: 254663 - DNA, 25 bp, Probe Sequence
gtgagcccatagacacaagggaagt

SEQ ID NO: 254664 - DNA, 25 bp, Probe Sequence
gtgagcttgtagagcaactgaaact

SEQ ID NO: 254665 - DNA, 25 bp, Probe Sequence
gtgactttcagtggtcactcaggac

SEQ ID NO: 254666 - DNA, 25 bp, Probe Sequence
gtgaatttgcctgtaacaagccaga

SEQ ID NO: 254667 - DNA, 25 bp, Probe Sequence
gtgaatttccatgtcaacatagtcc

SEQ ID NO: 254668 - DNA, 25 bp, Probe Sequence
gtgtcattccacacatccacaaatc

SEQ ID NO: 254669 - DNA, 25 bp, Probe Sequence
gtgaattcaagtgcagctcaatact

SEQ ID NO: 254670 - DNA, 25 bp, Probe Sequence
gtgacaaaggatgcccagcagcact

SEQ ID NO: 254671 - DNA, 25 bp, Probe Sequence
gtgaaaaggagaaccccatgcggga

SEQ ID NO: 254672 - DNA, 25 bp, Probe Sequence
gtgaagagaggaagcagccccaggg

SEQ ID NO: 254673 - DNA, 25 bp, Probe Sequence
gtgaagagaggaagcagccccaggg

SEQ ID NO: 254674 - DNA, 25 bp, Probe Sequence
gtgaagtgttgaggacccgcagaga

SEQ ID NO: 254675 - DNA, 25 bp, Probe Sequence
gtgagggtgtactctgatccacaaa

SEQ ID NO: 254676 - DNA, 25 bp, Probe Sequence
gtgaacaggtatttcttcacagatc

SEQ ID NO: 254677 - DNA, 25 bp, Probe Sequence
gtgacacttcattgtaattcacagt

SEQ ID NO: 254678 - DNA, 25 bp, Probe Sequence
gtgacactgtctatcagtacgtcgg

SEQ ID NO: 254679 - DNA, 25 bp, Probe Sequence
gtgacgagttgatcgttctggctgg

SEQ ID NO: 254680 - DNA, 25 bp, Probe Sequence
gggccatgcttggcaaggttggctg

SEQ ID NO: 254681 - DNA, 25 bp, Probe Sequence
tggtgcgccccaaaggcgtggtcgc

SEQ ID NO: 254682 - DNA, 25 bp, Probe Sequence
gtgggaacccaagcgggagagccgc

SEQ ID NO: 254683 - DNA, 25 bp, Probe Sequence
ggggtattcctatagggcagttccg

SEQ ID NO: 254684 - DNA, 25 bp, Probe Sequence
gtggttttttatgtggccacccgag

SEQ ID NO: 254685 - DNA, 25 bp, Probe Sequence
gggcttaagtgtgcctggcaaccaa

SEQ ID NO: 254686 - DNA, 25 bp, Probe Sequence
gggttaccttacagagccactgaga

SEQ ID NO: 254687 - DNA, 25 bp, Probe Sequence
gtgagttaacacaacagggtcctgg

SEQ ID NO: 254688 - DNA, 25 bp, Probe Sequence
gtgacttaacaacattaggcctcaa

SEQ ID NO: 254689 - DNA, 25 bp, Probe Sequence
gtgagcatgtaaaagcggaaagtta

SEQ ID NO: 254690 - DNA, 25 bp, Probe Sequence
gtgagatagcaattcagcgaacaat

SEQ ID NO: 254691 - DNA, 25 bp, Probe Sequence
gtgattgatagtcaggaactttcca

SEQ ID NO: 254692 - DNA, 25 bp, Probe Sequence
gtgaccgagtctaggaatgctttta

SEQ ID NO: 254693 - DNA, 25 bp, Probe Sequence
gtgaaagagtctatgcagatgcagg

SEQ ID NO: 254694 - DNA, 25 bp, Probe Sequence
gtgacaaagcctctgaaagatgcat

SEQ ID NO: 254695 - DNA, 25 bp, Probe Sequence
gtgaaacagcctgacataagtgaaa

SEQ ID NO: 254696 - DNA, 25 bp, Probe Sequence
gtgaaagcaccatcatcatagagga

SEQ ID NO: 254697 - DNA, 25 bp, Probe Sequence
gtgagcaacaccacaatgactgtct

SEQ ID NO: 254698 - DNA, 25 bp, Probe Sequence
gtgaaaaggacttgctgacttgcta

SEQ ID NO: 254699 - DNA, 25 bp, Probe Sequence
gtgaaccagaggaatgtggcttcca

SEQ ID NO: 254700 - DNA, 25 bp, Probe Sequence
gtgacatctagaactagggctctta

SEQ ID NO: 254701 - DNA, 25 bp, Probe Sequence
gtgatcaattcacaaggccatctta

SEQ ID NO: 254702 - DNA, 25 bp, Probe Sequence
gtgaaattaaattggagtcttgata

SEQ ID NO: 254703 - DNA, 25 bp, Probe Sequence
gtgaaatataagcctgcggccttaa

SEQ ID NO: 254704 - DNA, 25 bp, Probe Sequence
gtgagcagtagaagcctgcagcggc

SEQ ID NO: 254705 - DNA, 25 bp, Probe Sequence
gtgacatgtcagtgatgctcctagc

SEQ ID NO: 254706 - DNA, 25 bp, Probe Sequence
gtgacagagcaagatgctgtctcaa

SEQ ID NO: 254707 - DNA, 25 bp, Probe Sequence
gtgacacatgagactcacagttgga

SEQ ID NO: 254708 - DNA, 25 bp, Probe Sequence
gtgacatcatcactcgataccagga

SEQ ID NO: 254709 - DNA, 25 bp, Probe Sequence
gtgtcaactgcagtgatactattca

SEQ ID NO: 254710 - DNA, 25 bp, Probe Sequence
gtgacagagtgaaattctatctcaa

SEQ ID NO: 254711 - DNA, 25 bp, Probe Sequence
gtgacagagcaagattccatctcaa

SEQ ID NO: 254712 - DNA, 25 bp, Probe Sequence
gtgacagcaacaggcactgctactg

SEQ ID NO: 254713 - DNA, 25 bp, Probe Sequence
gtgacagaaagggcctgacccggag

SEQ ID NO: 254714 - DNA, 25 bp, Probe Sequence
gtgaagaagagggctgtcaccacag

SEQ ID NO: 254715 - DNA, 25 bp, Probe Sequence
gtgaataataggccttcactgcccc

SEQ ID NO: 254716 - DNA, 25 bp, Probe Sequence
gtgaggaaagtgcgttctcccagca

SEQ ID NO: 254717 - DNA, 25 bp, Probe Sequence
gtgtagaagaatgcctgtttactca

SEQ ID NO: 254718 - DNA, 25 bp, Probe Sequence
gtgacagaacatacccctttactga

SEQ ID NO: 254719 - DNA, 25 bp, Probe Sequence
gtgaagaaaccttacatgttaccaa

SEQ ID NO: 254720 - DNA, 25 bp, Probe Sequence
gtgaaaactcaatagatttatctca

SEQ ID NO: 254721 - DNA, 25 bp, Probe Sequence
gtgactgttccctcaggggatctga

SEQ ID NO: 254722 - DNA, 25 bp, Probe Sequence
gtgaagttcccttgtgggaggccct

SEQ ID NO: 254723 - DNA, 25 bp, Probe Sequence
gtgaagttggtttggggtggcctgt

SEQ ID NO: 254724 - DNA, 25 bp, Probe Sequence
gtgaatgttggtttgacaggtgaaa

SEQ ID NO: 254725 - DNA, 25 bp, Probe Sequence
gtgaatgaatttttaaggtgatcta

SEQ ID NO: 254726 - DNA, 25 bp, Probe Sequence
gtgaagaattcctatcataagtatc

SEQ ID NO: 254727 - DNA, 25 bp, Probe Sequence
gtgaggatttccttgcaatgagtag

SEQ ID NO: 254728 - DNA, 25 bp, Probe Sequence
gtgagactcttttaaatcagtatgt

SEQ ID NO: 254729 - DNA, 25 bp, Probe Sequence
gtgttatttttataagttgttgaat

SEQ ID NO: 254730 - DNA, 25 bp, Probe Sequence
ggttaattcttggatgacgtcggcg

SEQ ID NO: 254731 - DNA, 25 bp, Probe Sequence
ggttcacgaattaaggcgtcgaggt

SEQ ID NO: 254732 - DNA, 25 bp, Probe Sequence
ggttctggaaggaactttcggctat

SEQ ID NO: 254733 - DNA, 25 bp, Probe Sequence
gtgtttggaacggacgttacctgct

SEQ ID NO: 254734 - DNA, 25 bp, Probe Sequence
gtgattatggggctagttgtcctcc

SEQ ID NO: 254735 - DNA, 25 bp, Probe Sequence
gtgacctagcggccatttatttctc

SEQ ID NO: 254736 - DNA, 25 bp, Probe Sequence
gtgaccatagggctctgcttttaaa

SEQ ID NO: 254737 - DNA, 25 bp, Probe Sequence
gtgaatgtgggtgatctgcttttat

SEQ ID NO: 254738 - DNA, 25 bp, Probe Sequence
gtgaactgagcgtatatctgttttt

SEQ ID NO: 254739 - DNA, 25 bp, Probe Sequence
gtgagattgatgctacgggtcttac

SEQ ID NO: 254740 - DNA, 25 bp, Probe Sequence
gtgagcggatgtgactggcgtctga

SEQ ID NO: 254741 - DNA, 25 bp, Probe Sequence
gtgaagctgagtttctgtccaatga

SEQ ID NO: 254742 - DNA, 25 bp, Probe Sequence
gtgagatccagttgtagctgccatc

SEQ ID NO: 254743 - DNA, 25 bp, Probe Sequence
gtgagatccagttgtagctgccatc

SEQ ID NO: 254744 - DNA, 25 bp, Probe Sequence
gtgagcaccagatctgtcttcactc

SEQ ID NO: 254745 - DNA, 25 bp, Probe Sequence
gtgagaagcaacgttctgcgctctc

SEQ ID NO: 254746 - DNA, 25 bp, Probe Sequence
gtgaaaacagcatgtgctgctgcct

SEQ ID NO: 254747 - DNA, 25 bp, Probe Sequence
gtgaaagatcaatccatctgccaga

SEQ ID NO: 254748 - DNA, 25 bp, Probe Sequence
gtgaaggacaacagcatcttcccaa

SEQ ID NO: 254749 - DNA, 25 bp, Probe Sequence
gtgaggaattcagggctttccccat

SEQ ID NO: 254750 - DNA, 25 bp, Probe Sequence
gtgagcgaattgggccttgtgacac

SEQ ID NO: 254751 - DNA, 25 bp, Probe Sequence
gtgacaaagctggaccttgaaccca

SEQ ID NO: 254752 - DNA, 25 bp, Probe Sequence
gtgaaatagtggttgtggaacagta

SEQ ID NO: 254753 - DNA, 25 bp, Probe Sequence
gtgagaaattgtgtggagtgacgga

SEQ ID NO: 254754 - DNA, 25 bp, Probe Sequence
gtgagacgacttatacagtgaaggg

SEQ ID NO: 254755 - DNA, 25 bp, Probe Sequence
gtgagacgaattcttgcaatgcata

SEQ ID NO: 254756 - DNA, 25 bp, Probe Sequence
gtgaaagtattgctgccttcataca

SEQ ID NO: 254757 - DNA, 25 bp, Probe Sequence
gtgaaatgaggtttccttcaacaga

SEQ ID NO: 254758 - DNA, 25 bp, Probe Sequence
gtgataaaggatcttgttcccgatt

SEQ ID NO: 254759 - DNA, 25 bp, Probe Sequence
gtgtacagacttcttggtacccagt

SEQ ID NO: 254760 - DNA, 25 bp, Probe Sequence
gtgtaccacttctgtgggcatggcc

SEQ ID NO: 254761 - DNA, 25 bp, Probe Sequence
gtgttccacttcctgtggaggtggc

SEQ ID NO: 254762 - DNA, 25 bp, Probe Sequence
gtgaacacctctcttggattgtggt

SEQ ID NO: 254763 - DNA, 25 bp, Probe Sequence
gtgaaccactgattttaatttgcct

SEQ ID NO: 254764 - DNA, 25 bp, Probe Sequence
gtgatggggtgtattaattttccgg

SEQ ID NO: 254765 - DNA, 25 bp, Probe Sequence
gtgggctgtgggattaatttcaacg

SEQ ID NO: 254766 - DNA, 25 bp, Probe Sequence
gtgggccaggggctaatggtgtcac

SEQ ID NO: 254767 - DNA, 25 bp, Probe Sequence
gtgggccaggggctaatggtgtcac

SEQ ID NO: 254768 - DNA, 25 bp, Probe Sequence
gtgggtacttgtctgtacgcttcac

SEQ ID NO: 254769 - DNA, 25 bp, Probe Sequence
gtgacttacttatctgtatcggtca

SEQ ID NO: 254770 - DNA, 25 bp, Probe Sequence
gtgacattacttttagtagcccaaa

SEQ ID NO: 254771 - DNA, 25 bp, Probe Sequence
gtgacatttcctgttgtgaagtaaa

SEQ ID NO: 254772 - DNA, 25 bp, Probe Sequence
gtgatattcttgccctttacaatac

SEQ ID NO: 254773 - DNA, 25 bp, Probe Sequence
gtgatattcttgccctttacaatac

SEQ ID NO: 254774 - DNA, 25 bp, Probe Sequence
gtgacatttttgaccttaatatcgt

SEQ ID NO: 254775 - DNA, 25 bp, Probe Sequence
gtgacttttgttctggaatacaggt

SEQ ID NO: 254776 - DNA, 25 bp, Probe Sequence
gtgacattttatattcccaccagga

SEQ ID NO: 254777 - DNA, 25 bp, Probe Sequence
gtgaggattttgattcctatctcgt

SEQ ID NO: 254778 - DNA, 25 bp, Probe Sequence
gtgaaatatcttgttactgctttta

SEQ ID NO: 254779 - DNA, 25 bp, Probe Sequence
gtgaacatttgtattctagtttata

SEQ ID NO: 254780 - DNA, 25 bp, Probe Sequence
gtgaaagcttatacaactagagttg

SEQ ID NO: 254781 - DNA, 25 bp, Probe Sequence
gtgatgagcaccattccttaggtag

SEQ ID NO: 254782 - DNA, 25 bp, Probe Sequence
gtgatagaggtttctttctggtatt

SEQ ID NO: 254783 - DNA, 25 bp, Probe Sequence
gtgatggacaggtttttggtgcgtt

SEQ ID NO: 254784 - DNA, 25 bp, Probe Sequence
gtgagtggggcatctgttggacttt

SEQ ID NO: 254785 - DNA, 25 bp, Probe Sequence
gtgagatgggaaactactggcgtat

SEQ ID NO: 254786 - DNA, 25 bp, Probe Sequence
gtgtaggtaaccagatggctctttt

SEQ ID NO: 254787 - DNA, 25 bp, Probe Sequence
gtgagaagtaacgttctgattcttt

SEQ ID NO: 254788 - DNA, 25 bp, Probe Sequence
gtgaaaaccagtataattcttctga

SEQ ID NO: 254789 - DNA, 25 bp, Probe Sequence
gtgaaaaccagtatgatctgtgctg

SEQ ID NO: 254790 - DNA, 25 bp, Probe Sequence
gtgagaaacccatttatactctact

SEQ ID NO: 254791 - DNA, 25 bp, Probe Sequence
gtgagaatgccgccaagttatccaa

SEQ ID NO: 254792 - DNA, 25 bp, Probe Sequence
gtgaggccctgccacgattaaagac

SEQ ID NO: 254793 - DNA, 25 bp, Probe Sequence
gtgatgtacctaaaagtcagaaacc

SEQ ID NO: 254794 - DNA, 25 bp, Probe Sequence
gtgagtagtcagtaactgggaccac

SEQ ID NO: 254795 - DNA, 25 bp, Probe Sequence
gtgacttgtatgaaaccctgaccat

SEQ ID NO: 254796 - DNA, 25 bp, Probe Sequence
gtgaccgggagatccagctggagat

SEQ ID NO: 254797 - DNA, 25 bp, Probe Sequence
gtgacgaggctaaggccgtggatat

SEQ ID NO: 254798 - DNA, 25 bp, Probe Sequence
gtgacaacgtagagcgcgtgctgaa

SEQ ID NO: 254799 - DNA, 25 bp, Probe Sequence
gtgaagagctggaatgtgggggaaa

SEQ ID NO: 254800 - DNA, 25 bp, Probe Sequence
gtgacaaggtgtactggcagcggca

SEQ ID NO: 254801 - DNA, 25 bp, Probe Sequence
gtgacaaggctaactgtgactggat

SEQ ID NO: 254802 - DNA, 25 bp, Probe Sequence
gtgacacggctcaagtctacatgga

SEQ ID NO: 254803 - DNA, 25 bp, Probe Sequence
gtgacctggattatctacagtgagc

SEQ ID NO: 254804 - DNA, 25 bp, Probe Sequence
gtgatctctctgactttcaatcagt

SEQ ID NO: 254805 - DNA, 25 bp, Probe Sequence
gtgacatttggcttaccagcatttg

SEQ ID NO: 254806 - DNA, 25 bp, Probe Sequence
gtgagatgttaagcccactttgttc

SEQ ID NO: 254807 - DNA, 25 bp, Probe Sequence
gtgttatccaagttaacttttctgc

SEQ ID NO: 254808 - DNA, 25 bp, Probe Sequence
gtgattgttagaggtagttttcttg

SEQ ID NO: 254809 - DNA, 25 bp, Probe Sequence
gtgatagtcaacagggtcttcgtgg

SEQ ID NO: 254810 - DNA, 25 bp, Probe Sequence
gtgataggaaaggggtctgtgatgg

SEQ ID NO: 254811 - DNA, 25 bp, Probe Sequence
gtgatgggtagatagtgtgttggag

SEQ ID NO: 254812 - DNA, 25 bp, Probe Sequence
gtgatggctccaatgaagctggtgg

SEQ ID NO: 254813 - DNA, 25 bp, Probe Sequence
gtgatagcatccaatgacctatgta

SEQ ID NO: 254814 - DNA, 25 bp, Probe Sequence
gtgaaatcctatccaggatctcagc

SEQ ID NO: 254815 - DNA, 25 bp, Probe Sequence
gtgaccatcgcaaccaggattgaca

SEQ ID NO: 254816 - DNA, 25 bp, Probe Sequence
gtgaccatcagctttaggatataca

SEQ ID NO: 254817 - DNA, 25 bp, Probe Sequence
gtgacccacttgaatggctgatcta

SEQ ID NO: 254818 - DNA, 25 bp, Probe Sequence
gtgagctgtgatgttaggcagatta

SEQ ID NO: 254819 - DNA, 25 bp, Probe Sequence
gtgacattgcatggttgatggaata

SEQ ID NO: 254820 - DNA, 25 bp, Probe Sequence
gtgacatgtccacttatgccaatga

SEQ ID NO: 254821 - DNA, 25 bp, Probe Sequence
gtgacagctgtatattgctcagagc

SEQ ID NO: 254822 - DNA, 25 bp, Probe Sequence
gtgactgctcaattttctgctcagc

SEQ ID NO: 254823 - DNA, 25 bp, Probe Sequence
gtgactgatacaatgttatgtgctg

SEQ ID NO: 254824 - DNA, 25 bp, Probe Sequence
gtgagcaaagtttgtagctgctgga

SEQ ID NO: 254825 - DNA, 25 bp, Probe Sequence
gtgagcaaagtggttagtggaaaac

SEQ ID NO: 254826 - DNA, 25 bp, Probe Sequence
gtgaacatattgcttagtaacaaat

SEQ ID NO: 254827 - DNA, 25 bp, Probe Sequence
gtgaaaataagttgttcatccaaaa

SEQ ID NO: 254828 - DNA, 25 bp, Probe Sequence
gtgaaaaccaggtggcatccagcga

SEQ ID NO: 254829 - DNA, 25 bp, Probe Sequence
gtgagtgaccgcccaaggtcacagg

SEQ ID NO: 254830 - DNA, 25 bp, Probe Sequence
gtgagtgaggggacaaggggcaggt

SEQ ID NO: 254831 - DNA, 25 bp, Probe Sequence
gtgagggaaggggagtcaggcggtg

SEQ ID NO: 254832 - DNA, 25 bp, Probe Sequence
gtgagggccgagtgagagcgtgctc

SEQ ID NO: 254833 - DNA, 25 bp, Probe Sequence
gtgagggccgagtgagagcgtgctc

SEQ ID NO: 254834 - DNA, 25 bp, Probe Sequence
gtgactggttgagcgggcaggccag

SEQ ID NO: 254835 - DNA, 25 bp, Probe Sequence
tggacggtatttcaacggccaggac

SEQ ID NO: 254836 - DNA, 25 bp, Probe Sequence
tgccggggaattaaccaggccgtgg

SEQ ID NO: 254837 - DNA, 25 bp, Probe Sequence
ttggtagtaatcacccaggggctgg

SEQ ID NO: 254838 - DNA, 25 bp, Probe Sequence
tgttgttggtacacccgggagagtg

SEQ ID NO: 254839 - DNA, 25 bp, Probe Sequence
tttgtatttttgatcaagacggagt

SEQ ID NO: 254840 - DNA, 25 bp, Probe Sequence
tgctttacttttaaacccgagattg

SEQ ID NO: 254841 - DNA, 25 bp, Probe Sequence
tttgaaggtcggaaacgccagactt

SEQ ID NO: 254842 - DNA, 25 bp, Probe Sequence
gtgaaacgaagcaatgtgagagagc

SEQ ID NO: 254843 - DNA, 25 bp, Probe Sequence
gtgagaactgagcccgcagggcagc

SEQ ID NO: 254844 - DNA, 25 bp, Probe Sequence
gtgaaagctcagactcagaggaaga

SEQ ID NO: 254845 - DNA, 25 bp, Probe Sequence
gtgaaccgtgaccgagtgactgcac

SEQ ID NO: 254846 - DNA, 25 bp, Probe Sequence
gtgaggcctgtgaggagtcgtgccc

SEQ ID NO: 254847 - DNA, 25 bp, Probe Sequence
gtgaggccatcgaggcaatcctggc

SEQ ID NO: 254848 - DNA, 25 bp, Probe Sequence
gtgagaggatcgagccattgaaagc

SEQ ID NO: 254849 - DNA, 25 bp, Probe Sequence
gtgagtggatccgctcacaggaggc

SEQ ID NO: 254850 - DNA, 25 bp, Probe Sequence
gtgaggtggcccctgagaggtgggg

SEQ ID NO: 254851 - DNA, 25 bp, Probe Sequence
gtgaggtggccctgagaaggtgggg

SEQ ID NO: 254852 - DNA, 25 bp, Probe Sequence
gtgaccgagcccgaggtgagaatgg

SEQ ID NO: 254853 - DNA, 25 bp, Probe Sequence
gtgaccagcacctacggctggacag

SEQ ID NO: 254854 - DNA, 25 bp, Probe Sequence
gtgaccaaagtcagagtggatcatg

SEQ ID NO: 254855 - DNA, 25 bp, Probe Sequence
gtgaccaacatgcacgagatgggag

SEQ ID NO: 254856 - DNA, 25 bp, Probe Sequence
gtgaaacagctgccctgtgtgggac

SEQ ID NO: 254857 - DNA, 25 bp, Probe Sequence
gtgaaacagctgccctgtgtgggac

SEQ ID NO: 254858 - DNA, 25 bp, Probe Sequence
gtgagacagcttccttgtgtgggac

SEQ ID NO: 254859 - DNA, 25 bp, Probe Sequence
gtgaacagcctgatgtttgggacct

SEQ ID NO: 254860 - DNA, 25 bp, Probe Sequence
gtgataagcctgcatgtgtctggga

SEQ ID NO: 254861 - DNA, 25 bp, Probe Sequence
gtgacagagccatggtgtgtttgta

SEQ ID NO: 254862 - DNA, 25 bp, Probe Sequence
gtgttggccaggctggtctcgaaca

SEQ ID NO: 254863 - DNA, 25 bp, Probe Sequence
gtgttggtcaaggtacatcctgaag

SEQ ID NO: 254864 - DNA, 25 bp, Probe Sequence
gtgagtgctgtaggattaattcgaa

SEQ ID NO: 254865 - DNA, 25 bp, Probe Sequence
gtgaactttggggacttctgagatc

SEQ ID NO: 254866 - DNA, 25 bp, Probe Sequence
gtgtggccttggctactttgaggca

SEQ ID NO: 254867 - DNA, 25 bp, Probe Sequence
gtggtacttaacacttgtagccatc

SEQ ID NO: 254868 - DNA, 25 bp, Probe Sequence
gtgactagttgaatcccttgtaacg

SEQ ID NO: 254869 - DNA, 25 bp, Probe Sequence
gtgactagctatactccaactttac

SEQ ID NO: 254870 - DNA, 25 bp, Probe Sequence
gtgactccaaaacaacttacatcca

SEQ ID NO: 254871 - DNA, 25 bp, Probe Sequence
gtgacttctaaactttatcccatcg

SEQ ID NO: 254872 - DNA, 25 bp, Probe Sequence
gtgaccgtgaactttctaacgcata

SEQ ID NO: 254873 - DNA, 25 bp, Probe Sequence
gtgaccttgaacttcacatttccca

SEQ ID NO: 254874 - DNA, 25 bp, Probe Sequence
gtgaccatgtaactctgaccaatct

SEQ ID NO: 254875 - DNA, 25 bp, Probe Sequence
gtgactagcttcctgtagccaatca

SEQ ID NO: 254876 - DNA, 25 bp, Probe Sequence
gtgactcactctggagatcaccttc

SEQ ID NO: 254877 - DNA, 25 bp, Probe Sequence
gtgacgagctcaggagggctctgac

SEQ ID NO: 254878 - DNA, 25 bp, Probe Sequence
gtgacgatgacagtgaggaggaaca

SEQ ID NO: 254879 - DNA, 25 bp, Probe Sequence
gtgacagtccacggaatgtgataaa

SEQ ID NO: 254880 - DNA, 25 bp, Probe Sequence
gtgaaatgcccaggatgctataaaa

SEQ ID NO: 254881 - DNA, 25 bp, Probe Sequence
gtgaaactgcgaatggctcattaaa

SEQ ID NO: 254882 - DNA, 25 bp, Probe Sequence
gtgagaactgcgagcactttgtgaa

SEQ ID NO: 254883 - DNA, 25 bp, Probe Sequence
gtgagggcttaggcagctgtagaac

SEQ ID NO: 254884 - DNA, 25 bp, Probe Sequence
gtgagggaggagacgtgaggcaact

SEQ ID NO: 254885 - DNA, 25 bp, Probe Sequence
gtgagggagctgtttgtcatggcac

SEQ ID NO: 254886 - DNA, 25 bp, Probe Sequence
gtgaggggctacaagaaaacgcttt

SEQ ID NO: 254887 - DNA, 25 bp, Probe Sequence
gtgggggccaaaaggacagagcctg

SEQ ID NO: 254888 - DNA, 25 bp, Probe Sequence
gtgaggggtaaaagctgatctggtt

SEQ ID NO: 254889 - DNA, 25 bp, Probe Sequence
gtgacctgatgtaaacagtgtcttc

SEQ ID NO: 254890 - DNA, 25 bp, Probe Sequence
gtgaccttgtgaaccactcattttt

SEQ ID NO: 254891 - DNA, 25 bp, Probe Sequence
gtgacacttatctcactgttttata

SEQ ID NO: 254892 - DNA, 25 bp, Probe Sequence
gtgagccttatgggagcgtttccta

SEQ ID NO: 254893 - DNA, 25 bp, Probe Sequence
gtgacctccactgagtgtttgtcga

SEQ ID NO: 254894 - DNA, 25 bp, Probe Sequence
gtgaccatcggcttaagaatttcta

SEQ ID NO: 254895 - DNA, 25 bp, Probe Sequence
gtgaccagcggaaacaggtgtgtgt

SEQ ID NO: 254896 - DNA, 25 bp, Probe Sequence
gtggtaggcagaacctaggcttgga

SEQ ID NO: 254897 - DNA, 25 bp, Probe Sequence
gtgactaggtacatgtagacttgaa

SEQ ID NO: 254898 - DNA, 25 bp, Probe Sequence
gtgacttgagtacttttgacttaat

SEQ ID NO: 254899 - DNA, 25 bp, Probe Sequence
gtgacttaatatctattccatttgt

SEQ ID NO: 254900 - DNA, 25 bp, Probe Sequence
gtgaccccatatatgattttcttta

SEQ ID NO: 254901 - DNA, 25 bp, Probe Sequence
gtgaccttaatgagatttttatgat

SEQ ID NO: 254902 - DNA, 25 bp, Probe Sequence
gtgaccttttgctagtagcatttca

SEQ ID NO: 254903 - DNA, 25 bp, Probe Sequence
gtgacttgtttctggatgattctaa

SEQ ID NO: 254904 - DNA, 25 bp, Probe Sequence
gtgatttttggctggactggcaaca

SEQ ID NO: 254905 - DNA, 25 bp, Probe Sequence
gtgaaatttgtgtagaacttaatat

SEQ ID NO: 254906 - DNA, 25 bp, Probe Sequence
gtgaaatgctgtagaaccctaaata

SEQ ID NO: 254907 - DNA, 25 bp, Probe Sequence
gtgaaagtgttgtcaccactgtaga

SEQ ID NO: 254908 - DNA, 25 bp, Probe Sequence
gtgaaagttttctgccatcatagag

SEQ ID NO: 254909 - DNA, 25 bp, Probe Sequence
gtgaaagcttgattcctgccatatg

SEQ ID NO: 254910 - DNA, 25 bp, Probe Sequence
gtgaaagtcagaatcgcctcagcat

SEQ ID NO: 254911 - DNA, 25 bp, Probe Sequence
gtgagaagtgcagtaccagcatcgc

SEQ ID NO: 254912 - DNA, 25 bp, Probe Sequence
gtgacaatggcattctcagctgcac

SEQ ID NO: 254913 - DNA, 25 bp, Probe Sequence
gtgacactggcattgctgggtggtg

SEQ ID NO: 254914 - DNA, 25 bp, Probe Sequence
gtgacgctgagtggcatggactggg

SEQ ID NO: 254915 - DNA, 25 bp, Probe Sequence
gtgacagcggaggggcactggtgtt

SEQ ID NO: 254916 - DNA, 25 bp, Probe Sequence
gtgacagcctaccttgactggatta

SEQ ID NO: 254917 - DNA, 25 bp, Probe Sequence
gtgacagccattgtgagactgatgc

SEQ ID NO: 254918 - DNA, 25 bp, Probe Sequence
gtgacagccaccctggaggagaaga

SEQ ID NO: 254919 - DNA, 25 bp, Probe Sequence
gtgacacacactttgaagagtaaca

SEQ ID NO: 254920 - DNA, 25 bp, Probe Sequence
gtgaggcaactgtggcagggaaaaa

SEQ ID NO: 254921 - DNA, 25 bp, Probe Sequence
ggaaactctgggcggcaaaaaactg

SEQ ID NO: 254922 - DNA, 25 bp, Probe Sequence
gggaattctgggctgccaggaaacg

SEQ ID NO: 254923 - DNA, 25 bp, Probe Sequence
gtggaaattgacagtacggtataag

SEQ ID NO: 254924 - DNA, 25 bp, Probe Sequence
gtgaaacttgtcagcttgtgggaaa

SEQ ID NO: 254925 - DNA, 25 bp, Probe Sequence
gtgaaactcttaagtatatctggaa

SEQ ID NO: 254926 - DNA, 25 bp, Probe Sequence
gtgagtgactgcacagagttcactg

SEQ ID NO: 254927 - DNA, 25 bp, Probe Sequence
gtgatggacttccagtgtgagcact

SEQ ID NO: 254928 - DNA, 25 bp, Probe Sequence
gtgatggcctttttgatgggttttg

SEQ ID NO: 254929 - DNA, 25 bp, Probe Sequence
gtgagatgccttagtctgtgggggt

SEQ ID NO: 254930 - DNA, 25 bp, Probe Sequence
gtgatgctgtttatcttggtttgac

SEQ ID NO: 254931 - DNA, 25 bp, Probe Sequence
gtgactcacttagatgtcgtttcct

SEQ ID NO: 254932 - DNA, 25 bp, Probe Sequence
gtgatgcccttagatgtccggggct

SEQ ID NO: 254933 - DNA, 25 bp, Probe Sequence
gtgagccgtgtcgtatgacctagta

SEQ ID NO: 254934 - DNA, 25 bp, Probe Sequence
gtgagccgtgtcgtatgacctagta

SEQ ID NO: 254935 - DNA, 25 bp, Probe Sequence
gtgacgctgtggggcaagactagga

SEQ ID NO: 254936 - DNA, 25 bp, Probe Sequence
gtgacactataggacaagtttgtac

SEQ ID NO: 254937 - DNA, 25 bp, Probe Sequence
gtgacactataggacaagtttgtac

SEQ ID NO: 254938 - DNA, 25 bp, Probe Sequence
gtgacactatagtacaagtcttgta

SEQ ID NO: 254939 - DNA, 25 bp, Probe Sequence
gtgacactatagaacaagtttgtac

SEQ ID NO: 254940 - DNA, 25 bp, Probe Sequence
gtgacactatagaacaagtttgtac

SEQ ID NO: 254941 - DNA, 25 bp, Probe Sequence
gtgacactatagaacaagtttgtac

SEQ ID NO: 254942 - DNA, 25 bp, Probe Sequence
gtgacactatagaacaagtttgtac

SEQ ID NO: 254943 - DNA, 25 bp, Probe Sequence
gtgacactatagaacaagtttgtac

SEQ ID NO: 254944 - DNA, 25 bp, Probe Sequence
gtgacactatagaacaagtttgtac

SEQ ID NO: 254945 - DNA, 25 bp, Probe Sequence
gtgacactatagaacaagtttgtac

SEQ ID NO: 254946 - DNA, 25 bp, Probe Sequence
gtgacactatagaacaagtttgtac

SEQ ID NO: 254947 - DNA, 25 bp, Probe Sequence
gtgacactatagaacaagtttgtac

SEQ ID NO: 254948 - DNA, 25 bp, Probe Sequence
gtgacactatagaacaagtttgtac

SEQ ID NO: 254949 - DNA, 25 bp, Probe Sequence
gtgacactatagaacaagtttgtac

SEQ ID NO: 254950 - DNA, 25 bp, Probe Sequence
gtgacactatagaacaagtttgtac

SEQ ID NO: 254951 - DNA, 25 bp, Probe Sequence
gtgacactatagaacaagtttgtac

SEQ ID NO: 254952 - DNA, 25 bp, Probe Sequence
gtgacactatagaacaagtttgtac

SEQ ID NO: 254953 - DNA, 25 bp, Probe Sequence
gtgacactatagaacaagtttgtac

SEQ ID NO: 254954 - DNA, 25 bp, Probe Sequence
gtgacactatagaacaagtttgtac

SEQ ID NO: 254955 - DNA, 25 bp, Probe Sequence
gtgacactatagaacaagtttgtac

SEQ ID NO: 254956 - DNA, 25 bp, Probe Sequence
gtgacactatagaacaagtttgtac

SEQ ID NO: 254957 - DNA, 25 bp, Probe Sequence
gtgacactatagaacaagtttgtac

SEQ ID NO: 254958 - DNA, 25 bp, Probe Sequence
gtgacactatagaacaagtttgtac

SEQ ID NO: 254959 - DNA, 25 bp, Probe Sequence
gtgacactatagaacaagtttgtac

SEQ ID NO: 254960 - DNA, 25 bp, Probe Sequence
gtgacactatagaacaagtttgtac

SEQ ID NO: 254961 - DNA, 25 bp, Probe Sequence
gtgacactatagaacaagtttgtac

SEQ ID NO: 254962 - DNA, 25 bp, Probe Sequence
gtgacactatagaacaagtttgtac

SEQ ID NO: 254963 - DNA, 25 bp, Probe Sequence
gtgacactatagaacaagtttgtac

SEQ ID NO: 254964 - DNA, 25 bp, Probe Sequence
gtgacactatagaacaagtttgtac

SEQ ID NO: 254965 - DNA, 25 bp, Probe Sequence
gtgacactatagaacaagtttgtac

SEQ ID NO: 254966 - DNA, 25 bp, Probe Sequence
gtgacactatagaacaagtttgtac

SEQ ID NO: 254967 - DNA, 25 bp, Probe Sequence
gtgacactatagaacaagtttgtac

SEQ ID NO: 254968 - DNA, 25 bp, Probe Sequence
gtgacactatagaacaagtttgtac

SEQ ID NO: 254969 - DNA, 25 bp, Probe Sequence
gtgacactatagaacaagtttgtac

SEQ ID NO: 254970 - DNA, 25 bp, Probe Sequence
gtgacactatagaacaagtttgtac

SEQ ID NO: 254971 - DNA, 25 bp, Probe Sequence
gtgacactatagaacaagtttgtac

SEQ ID NO: 254972 - DNA, 25 bp, Probe Sequence
gtgacactatagaacaagtttgtac

SEQ ID NO: 254973 - DNA, 25 bp, Probe Sequence
gtgacactatagaacaagtttgtac

SEQ ID NO: 254974 - DNA, 25 bp, Probe Sequence
gtgacactatagaacaagtttgtac

SEQ ID NO: 254975 - DNA, 25 bp, Probe Sequence
gtgacactatagaacaagtttgtac

SEQ ID NO: 254976 - DNA, 25 bp, Probe Sequence
gtgacactatagaacaagtttgtac

SEQ ID NO: 254977 - DNA, 25 bp, Probe Sequence
gtgacactatagaacaagtttgtac

SEQ ID NO: 254978 - DNA, 25 bp, Probe Sequence
gtgacactatagaacaagtttgtac

SEQ ID NO: 254979 - DNA, 25 bp, Probe Sequence
gtgacactatagaacaagtttgtac

SEQ ID NO: 254980 - DNA, 25 bp, Probe Sequence
gtgacactatagaacaagtttgtac

SEQ ID NO: 254981 - DNA, 25 bp, Probe Sequence
gtgacactatagaacaagtttgtac

SEQ ID NO: 254982 - DNA, 25 bp, Probe Sequence
gtgacactatagaacaagtttgtac

SEQ ID NO: 254983 - DNA, 25 bp, Probe Sequence
gtgacactatagaacaagtttgtac

SEQ ID NO: 254984 - DNA, 25 bp, Probe Sequence
gtgacactatagaacaagtttgtac

SEQ ID NO: 254985 - DNA, 25 bp, Probe Sequence
gtgacactatagaacaagtttgtac

SEQ ID NO: 254986 - DNA, 25 bp, Probe Sequence
gtgacactatagaacaagtttgtac

SEQ ID NO: 254987 - DNA, 25 bp, Probe Sequence
gtgacactatagaacaagtttgtac

SEQ ID NO: 254988 - DNA, 25 bp, Probe Sequence
gtgacactatagaacaagtttgtac

SEQ ID NO: 254989 - DNA, 25 bp, Probe Sequence
gtgacactatagaacaagtttgtac

SEQ ID NO: 254990 - DNA, 25 bp, Probe Sequence
gtgacactatagaacaagtttgtac

SEQ ID NO: 254991 - DNA, 25 bp, Probe Sequence
gtgacactatagaacaagtttgtac

SEQ ID NO: 254992 - DNA, 25 bp, Probe Sequence
gtgacactatagaacaagtttgtac

SEQ ID NO: 254993 - DNA, 25 bp, Probe Sequence
gtgacactatagaacaagtttgtac

SEQ ID NO: 254994 - DNA, 25 bp, Probe Sequence
gtgacactatagaacaagtttgtac

SEQ ID NO: 254995 - DNA, 25 bp, Probe Sequence
gtgacactatagaacaagtttgtac

SEQ ID NO: 254996 - DNA, 25 bp, Probe Sequence
gtgacactatagaacaagtttgtac

SEQ ID NO: 254997 - DNA, 25 bp, Probe Sequence
gtgacactatagaacaagtttgtac

SEQ ID NO: 254998 - DNA, 25 bp, Probe Sequence
gtgacactatagaacaagtttgtac

SEQ ID NO: 254999 - DNA, 25 bp, Probe Sequence
gtgacactatagaacaagtttgtac

SEQ ID NO: 255000 - DNA, 25 bp, Probe Sequence
gtgacactatagaacaagtttgtac

SEQ ID NO: 255001 - DNA, 25 bp, Probe Sequence
gtgacactatagaacaagtttgtac

SEQ ID NO: 255002 - DNA, 25 bp, Probe Sequence
gtgacactatagaaccagtttgtac

SEQ ID NO: 255003 - DNA, 25 bp, Probe Sequence
gtgatcctattttcgtatttgccat

SEQ ID NO: 255004 - DNA, 25 bp, Probe Sequence
gtgacctcattttcagaattctgct

SEQ ID NO: 255005 - DNA, 25 bp, Probe Sequence
gtgagttcattgaccagtcacgcct

SEQ ID NO: 255006 - DNA, 25 bp, Probe Sequence
gtgagctgagattgcaccattgcac

SEQ ID NO: 255007 - DNA, 25 bp, Probe Sequence
gtgatgtgatcttggctcactgcag

SEQ ID NO: 255008 - DNA, 25 bp, Probe Sequence
gtgatggcattactctgcactatag

SEQ ID NO: 255009 - DNA, 25 bp, Probe Sequence
gtgacagtatcactctaatataata

SEQ ID NO: 255010 - DNA, 25 bp, Probe Sequence
gtgagaatatcatctgtttatggac

SEQ ID NO: 255011 - DNA, 25 bp, Probe Sequence
gtgagagtaacaggccatttggcca

SEQ ID NO: 255012 - DNA, 25 bp, Probe Sequence
gtgacttcacacgccataatggcac

SEQ ID NO: 255013 - DNA, 25 bp, Probe Sequence
gtgacgtcaagctcctgaagcacaa

SEQ ID NO: 255014 - DNA, 25 bp, Probe Sequence
gtgacatgtcaacactgctgagaga

SEQ ID NO: 255015 - DNA, 25 bp, Probe Sequence
gtgacatgtcaacactgctgagaga

SEQ ID NO: 255016 - DNA, 25 bp, Probe Sequence
gtgatcatgtagtaaatgtagggtt

SEQ ID NO: 255017 - DNA, 25 bp, Probe Sequence
gtgacttcagtgtgtgtattgtgta

SEQ ID NO: 255018 - DNA, 25 bp, Probe Sequence
gtgacattcacttggatgaagtggt

SEQ ID NO: 255019 - DNA, 25 bp, Probe Sequence
gtgagcacgtgtttgtgaagggcta

SEQ ID NO: 255020 - DNA, 25 bp, Probe Sequence
gtgaccacgcagtctgtgatggggt

SEQ ID NO: 255021 - DNA, 25 bp, Probe Sequence
gtgaccttgctgtcgtatgtggcat

SEQ ID NO: 255022 - DNA, 25 bp, Probe Sequence
gtgacacttgattcagatcaggtcg

SEQ ID NO: 255023 - DNA, 25 bp, Probe Sequence
gtgagcgattttgacagcgatgagg

SEQ ID NO: 255024 - DNA, 25 bp, Probe Sequence
gtgagaattcctgagagcctgagca

SEQ ID NO: 255025 - DNA, 25 bp, Probe Sequence
gtgaggtgttctgagctcactgacc

SEQ ID NO: 255026 - DNA, 25 bp, Probe Sequence
gtgacgcgttctagcagacactgac

SEQ ID NO: 255027 - DNA, 25 bp, Probe Sequence
gtgacggtgtttggatgcttgactc

SEQ ID NO: 255028 - DNA, 25 bp, Probe Sequence
gtgactgggttcgagatgtggcctg

SEQ ID NO: 255029 - DNA, 25 bp, Probe Sequence
gtgagtgggaaggagcagaaagctg

SEQ ID NO: 255030 - DNA, 25 bp, Probe Sequence
gtgagtgggaaggagcagaaagctg

SEQ ID NO: 255031 - DNA, 25 bp, Probe Sequence
gtgaccagagaaggcagctacggct

SEQ ID NO: 255032 - DNA, 25 bp, Probe Sequence
gtgaccacgtcagggacatctggtt

SEQ ID NO: 255033 - DNA, 25 bp, Probe Sequence
gtgaccatgcgcagggttctgatgt

SEQ ID NO: 255034 - DNA, 25 bp, Probe Sequence
gtgaccaccgtgaagtgcctatgat

SEQ ID NO: 255035 - DNA, 25 bp, Probe Sequence
gtgacccggcacaaggacatagaca

SEQ ID NO: 255036 - DNA, 25 bp, Probe Sequence
gtgaccttggacaaatcaccaaatt

SEQ ID NO: 255037 - DNA, 25 bp, Probe Sequence
gtgaccctgagatcaacaccaagaa

SEQ ID NO: 255038 - DNA, 25 bp, Probe Sequence
gtgagtgccaggaaaatacaccaaa

SEQ ID NO: 255039 - DNA, 25 bp, Probe Sequence
gtggctcatcagagagacgcaaccc

SEQ ID NO: 255040 - DNA, 25 bp, Probe Sequence
gtgagtgctaggcaaggctacttca

SEQ ID NO: 255041 - DNA, 25 bp, Probe Sequence
gtgatgtagaagcaaggtaatgtat

SEQ ID NO: 255042 - DNA, 25 bp, Probe Sequence
gtgattcagaacatgaccgaattca

SEQ ID NO: 255043 - DNA, 25 bp, Probe Sequence
gtgatactgagagctacctattggc

SEQ ID NO: 255044 - DNA, 25 bp, Probe Sequence
gtgtctatggtgctgcaccttgctg

SEQ ID NO: 255045 - DNA, 25 bp, Probe Sequence
gtgttgtgggcccacgatttgcagc

SEQ ID NO: 255046 - DNA, 25 bp, Probe Sequence
gtgtcattgaacacctgatatgaag

SEQ ID NO: 255047 - DNA, 25 bp, Probe Sequence
gtgtgcttagccaggtgcctgatat

SEQ ID NO: 255048 - DNA, 25 bp, Probe Sequence
gtgttgtaacctgctgcacggatac

SEQ ID NO: 255049 - DNA, 25 bp, Probe Sequence
gtgttgcatcaatctagttcctaga

SEQ ID NO: 255050 - DNA, 25 bp, Probe Sequence
gtgttgcaagggaacctcctagcac

SEQ ID NO: 255051 - DNA, 25 bp, Probe Sequence
gtgaggaatagttgagccccaagtc

SEQ ID NO: 255052 - DNA, 25 bp, Probe Sequence
gtgacagaattgatatcccacctgg

SEQ ID NO: 255053 - DNA, 25 bp, Probe Sequence
gtgactagggaaatccctctctgag

SEQ ID NO: 255054 - DNA, 25 bp, Probe Sequence
gtgagctcaagctgatcattccttt

SEQ ID NO: 255055 - DNA, 25 bp, Probe Sequence
gtgaccagactgaatttcctcataa

SEQ ID NO: 255056 - DNA, 25 bp, Probe Sequence
gtgacgcaatcaatgtttactcgaa

SEQ ID NO: 255057 - DNA, 25 bp, Probe Sequence
gtgatcagctacagcttgtcaccgt

SEQ ID NO: 255058 - DNA, 25 bp, Probe Sequence
gtgagactcagccgctgtctcgccg

SEQ ID NO: 255059 - DNA, 25 bp, Probe Sequence
gtgatgaatagccgaggcatctggc

SEQ ID NO: 255060 - DNA, 25 bp, Probe Sequence
gtgacatggtgcctgagaggcaggc

SEQ ID NO: 255061 - DNA, 25 bp, Probe Sequence
gtgagcagcagtgataagccagctg

SEQ ID NO: 255062 - DNA, 25 bp, Probe Sequence
gtgagtgagctgtatagtgcctgct

SEQ ID NO: 255063 - DNA, 25 bp, Probe Sequence
gtgaggttgtcatggcctcagctat

SEQ ID NO: 255064 - DNA, 25 bp, Probe Sequence
gtgagcttcttatggcaggagctgt

SEQ ID NO: 255065 - DNA, 25 bp, Probe Sequence
gtgaggtctatataagcagagctcg

SEQ ID NO: 255066 - DNA, 25 bp, Probe Sequence
gtggggaataagaaggacctgaggc

SEQ ID NO: 255067 - DNA, 25 bp, Probe Sequence
gtgaggggagactagggaccgatga

SEQ ID NO: 255068 - DNA, 25 bp, Probe Sequence
gtgaggtgtgagggaggagacgtga

SEQ ID NO: 255069 - DNA, 25 bp, Probe Sequence
gtgagactgctaagcggcgacacgt

SEQ ID NO: 255070 - DNA, 25 bp, Probe Sequence
gtgagtgtgataaggctgctgccac

SEQ ID NO: 255071 - DNA, 25 bp, Probe Sequence
gtgagctgtatagtgcctgctgact

SEQ ID NO: 255072 - DNA, 25 bp, Probe Sequence
gtgactgtggtgtccttgagatgct

SEQ ID NO: 255073 - DNA, 25 bp, Probe Sequence
gtgacattggcgtgcttcatatggc

SEQ ID NO: 255074 - DNA, 25 bp, Probe Sequence
gtgactgtgttgtgattcatagtac

SEQ ID NO: 255075 - DNA, 25 bp, Probe Sequence
gtgactggtatatcttcatcagtga

SEQ ID NO: 255076 - DNA, 25 bp, Probe Sequence
gtgacatgagtttactggtgtaaaa

SEQ ID NO: 255077 - DNA, 25 bp, Probe Sequence
gtgactgaaaagcctaagtgcaaaa

SEQ ID NO: 255078 - DNA, 25 bp, Probe Sequence
gtgactaagaagcctggggagcaga

SEQ ID NO: 255079 - DNA, 25 bp, Probe Sequence
gtgactaacaggctggtgcatacac

SEQ ID NO: 255080 - DNA, 25 bp, Probe Sequence
gtgacttgaaagttgcggctaagct

SEQ ID NO: 255081 - DNA, 25 bp, Probe Sequence
gtgacttcactaggtggcctaagcc

SEQ ID NO: 255082 - DNA, 25 bp, Probe Sequence
gtgacttactcaggtcagtatctaa

SEQ ID NO: 255083 - DNA, 25 bp, Probe Sequence
gtgagctatgatcacgccgctatat

SEQ ID NO: 255084 - DNA, 25 bp, Probe Sequence
gtgactatacaaagcgtcttagaaa

SEQ ID NO: 255085 - DNA, 25 bp, Probe Sequence
gtgagcttaccagggtctttgcaga

SEQ ID NO: 255086 - DNA, 25 bp, Probe Sequence
gtgacttacgcctgtaatctcagca

SEQ ID NO: 255087 - DNA, 25 bp, Probe Sequence
gtgacctgattgaaagtaatcatcc

SEQ ID NO: 255088 - DNA, 25 bp, Probe Sequence
gtgatactttgaaccttatgctcct

SEQ ID NO: 255089 - DNA, 25 bp, Probe Sequence
gtgacagttatgacaggcttacctt

SEQ ID NO: 255090 - DNA, 25 bp, Probe Sequence
gtgagagttagaatttatacctatt

SEQ ID NO: 255091 - DNA, 25 bp, Probe Sequence
gggagttgcgatgatattgccacct

SEQ ID NO: 255092 - DNA, 25 bp, Probe Sequence
ggaggcttggaatgttccaatcgta

SEQ ID NO: 255093 - DNA, 25 bp, Probe Sequence
gtgatggcttgactcaagtccacgt

SEQ ID NO: 255094 - DNA, 25 bp, Probe Sequence
gtgagccttcattaactcgaagtga

SEQ ID NO: 255095 - DNA, 25 bp, Probe Sequence
gtgacatttcagtacatctggtaga

SEQ ID NO: 255096 - DNA, 25 bp, Probe Sequence
gtgacattggaagtcatcttggagc

SEQ ID NO: 255097 - DNA, 25 bp, Probe Sequence
gtgagatgggagatcacttgagccc

SEQ ID NO: 255098 - DNA, 25 bp, Probe Sequence
gtgagattctgaattccttacctgc

SEQ ID NO: 255099 - DNA, 25 bp, Probe Sequence
gtgtttcaggagcgcattaactgcc

SEQ ID NO: 255100 - DNA, 25 bp, Probe Sequence
gtgactctcacatgggcatcgaaga

SEQ ID NO: 255101 - DNA, 25 bp, Probe Sequence
gtgaccatcgaaaggagcaagagca

SEQ ID NO: 255102 - DNA, 25 bp, Probe Sequence
gtgaccaaagcaaatgagccataca

SEQ ID NO: 255103 - DNA, 25 bp, Probe Sequence
gtgaccacatcgagttacaacaata

SEQ ID NO: 255104 - DNA, 25 bp, Probe Sequence
gtgacccttgttaccaaaacacaat

SEQ ID NO: 255105 - DNA, 25 bp, Probe Sequence
gtgacccttggggtaggcaagacca

SEQ ID NO: 255106 - DNA, 25 bp, Probe Sequence
gtgactcagtggcagagtaggcacg

SEQ ID NO: 255107 - DNA, 25 bp, Probe Sequence
gtgagccctggctgtgacaggaagg

SEQ ID NO: 255108 - DNA, 25 bp, Probe Sequence
gtgacaggctggggcaacctgaagg

SEQ ID NO: 255109 - DNA, 25 bp, Probe Sequence
gtgacctcggtgaaagccgacagga

SEQ ID NO: 255110 - DNA, 25 bp, Probe Sequence
gtgatcctggttccatagccaacac

SEQ ID NO: 255111 - DNA, 25 bp, Probe Sequence
gtgaccagaatctgccatggcaaca

SEQ ID NO: 255112 - DNA, 25 bp, Probe Sequence
gtgaccagacatgagaaggttgcca

SEQ ID NO: 255113 - DNA, 25 bp, Probe Sequence
gtgaccagacatgagaaggttgcca

SEQ ID NO: 255114 - DNA, 25 bp, Probe Sequence
gtgagcaagagatatgggggcttca

SEQ ID NO: 255115 - DNA, 25 bp, Probe Sequence
gtgagaaagatctttgtgggcacaa

SEQ ID NO: 255116 - DNA, 25 bp, Probe Sequence
gtgacagcacctgtttgtgcctcaa

SEQ ID NO: 255117 - DNA, 25 bp, Probe Sequence
gtgatccacattgttaggtgctgac

SEQ ID NO: 255118 - DNA, 25 bp, Probe Sequence
gtgagccacattcatttggtgccct

SEQ ID NO: 255119 - DNA, 25 bp, Probe Sequence
gtgagctacattcatgggagcagcc

SEQ ID NO: 255120 - DNA, 25 bp, Probe Sequence
gtgagctacattcatgggagcagcc

SEQ ID NO: 255121 - DNA, 25 bp, Probe Sequence
gtgacctgcttggatctagacagca

SEQ ID NO: 255122 - DNA, 25 bp, Probe Sequence
gtgacctcgcatatgtatgacatcc

SEQ ID NO: 255123 - DNA, 25 bp, Probe Sequence
gtgagcctcctggtgtagagttctt

SEQ ID NO: 255124 - DNA, 25 bp, Probe Sequence
gtgagcctcctggtgtagagttctt

SEQ ID NO: 255125 - DNA, 25 bp, Probe Sequence
gtgacccactctttgaagctgttgg

SEQ ID NO: 255126 - DNA, 25 bp, Probe Sequence
gtgacctccttctgcaaagtggcag

SEQ ID NO: 255127 - DNA, 25 bp, Probe Sequence
gtgacctgccttttgaggggacatt

SEQ ID NO: 255128 - DNA, 25 bp, Probe Sequence
gtgacctgccagggagaggggagag

SEQ ID NO: 255129 - DNA, 25 bp, Probe Sequence
gtgatcattccagttaagcggggcg

SEQ ID NO: 255130 - DNA, 25 bp, Probe Sequence
gtgtcttccttaaacggagagcccg

SEQ ID NO: 255131 - DNA, 25 bp, Probe Sequence
gtgtagttcttagacctaaggtctg

SEQ ID NO: 255132 - DNA, 25 bp, Probe Sequence
gtgtaatgcttttttttaagaggtg

SEQ ID NO: 255133 - DNA, 25 bp, Probe Sequence
ggaactgtttgggtttagggcatct

SEQ ID NO: 255134 - DNA, 25 bp, Probe Sequence
gtgacagtatttggagatttaggga

SEQ ID NO: 255135 - DNA, 25 bp, Probe Sequence
gtgacttttttgaatattgcagggt

SEQ ID NO: 255136 - DNA, 25 bp, Probe Sequence
gggctgttaacagggttgcaggcga

SEQ ID NO: 255137 - DNA, 25 bp, Probe Sequence
gtgagcagttaaaagccttgcaagc

SEQ ID NO: 255138 - DNA, 25 bp, Probe Sequence
gtgagcactctactgcaagacttaa

SEQ ID NO: 255139 - DNA, 25 bp, Probe Sequence
gtgactgactcactatggaactaga

SEQ ID NO: 255140 - DNA, 25 bp, Probe Sequence
gtgactgacatacatagcagatata

SEQ ID NO: 255141 - DNA, 25 bp, Probe Sequence
gtgagtacaaccttgctgtgaagga

SEQ ID NO: 255142 - DNA, 25 bp, Probe Sequence
gtgagcatacaaccctgctttagag

SEQ ID NO: 255143 - DNA, 25 bp, Probe Sequence
gtgatttgcagaccctgtctaaagg

SEQ ID NO: 255144 - DNA, 25 bp, Probe Sequence
gtgttggctggggtgtcaataaagc

SEQ ID NO: 255145 - DNA, 25 bp, Probe Sequence
gtgtgggtggtggttctatagaggg

SEQ ID NO: 255146 - DNA, 25 bp, Probe Sequence
gtgtgggtggtggttctatagaggg

SEQ ID NO: 255147 - DNA, 25 bp, Probe Sequence
gtgatggggtgccagattgagtagg

SEQ ID NO: 255148 - DNA, 25 bp, Probe Sequence
gtgatcgcggtggagttgtgtgacc

SEQ ID NO: 255149 - DNA, 25 bp, Probe Sequence
gtgacctcagctaagactgggtcct

SEQ ID NO: 255150 - DNA, 25 bp, Probe Sequence
gtgactctcctgaaattgtaaactt

SEQ ID NO: 255151 - DNA, 25 bp, Probe Sequence
gtgactgtccttattaactttcttt

SEQ ID NO: 255152 - DNA, 25 bp, Probe Sequence
gtgacgtcgtttcgttttgtgtatt

SEQ ID NO: 255153 - DNA, 25 bp, Probe Sequence
gtgagggcggtgtgttgtatgtctt

SEQ ID NO: 255154 - DNA, 25 bp, Probe Sequence
gtgagggcggtgtgttgtatgtctt

SEQ ID NO: 255155 - DNA, 25 bp, Probe Sequence
gtgagggagagtgtctctgttcttt

SEQ ID NO: 255156 - DNA, 25 bp, Probe Sequence
gtgaggacaatgtggcttgctcctt

SEQ ID NO: 255157 - DNA, 25 bp, Probe Sequence
gtgaggacaatgtggcttgctcctt

SEQ ID NO: 255158 - DNA, 25 bp, Probe Sequence
gtgatgagaaacggagtggcctgct

SEQ ID NO: 255159 - DNA, 25 bp, Probe Sequence
gtgatatgcacctgcaacggagact

SEQ ID NO: 255160 - DNA, 25 bp, Probe Sequence
gtgagacacctacaacgagatgcct

SEQ ID NO: 255161 - DNA, 25 bp, Probe Sequence
gtgagacacctacaatcaccagtct

SEQ ID NO: 255162 - DNA, 25 bp, Probe Sequence
gggagtacttcaagatcaccctcta

SEQ ID NO: 255163 - DNA, 25 bp, Probe Sequence
gtgtagaatttctagatcccccgat

SEQ ID NO: 255164 - DNA, 25 bp, Probe Sequence
gtgtagaatttctagatcccccgat

SEQ ID NO: 255165 - DNA, 25 bp, Probe Sequence
gtgtagaatttctagatcccccgat

SEQ ID NO: 255166 - DNA, 25 bp, Probe Sequence
gtggagaaaaaagaaccgcgtggct

SEQ ID NO: 255167 - DNA, 25 bp, Probe Sequence
gggagtaaggtagaagaccgcttct

SEQ ID NO: 255168 - DNA, 25 bp, Probe Sequence
gggagtagaaaagcaagcccctata

SEQ ID NO: 255169 - DNA, 25 bp, Probe Sequence
gggcaataaactttccatttccatt

SEQ ID NO: 255170 - DNA, 25 bp, Probe Sequence
gtgtcaaacacctctgtatttttta

SEQ ID NO: 255171 - DNA, 25 bp, Probe Sequence
gtgtaaactactcttatcctaagta

SEQ ID NO: 255172 - DNA, 25 bp, Probe Sequence
gtgtatagcctattcactttcctag

SEQ ID NO: 255173 - DNA, 25 bp, Probe Sequence
gtgatattgccataattgttccgaa

SEQ ID NO: 255174 - DNA, 25 bp, Probe Sequence
gtgactgtatcattaactgcttttg

SEQ ID NO: 255175 - DNA, 25 bp, Probe Sequence
gtgactcttagtgtctgtttctgac

SEQ ID NO: 255176 - DNA, 25 bp, Probe Sequence
gtgactttcagttgttgttctgtat

SEQ ID NO: 255177 - DNA, 25 bp, Probe Sequence
gtgactggcagctcatttttggtat

SEQ ID NO: 255178 - DNA, 25 bp, Probe Sequence
gtgactgtcacaactgttatgtttt

SEQ ID NO: 255179 - DNA, 25 bp, Probe Sequence
gtgatgcgactcctgtttattttgc

SEQ ID NO: 255180 - DNA, 25 bp, Probe Sequence
gtgactgcacattggtttctgttct

SEQ ID NO: 255181 - DNA, 25 bp, Probe Sequence
gtgactaacaagtatgctttgcctt

SEQ ID NO: 255182 - DNA, 25 bp, Probe Sequence
gtgactatttcatatgcattttgcc

SEQ ID NO: 255183 - DNA, 25 bp, Probe Sequence
gtgacttgtgtctactgcttaaatc

SEQ ID NO: 255184 - DNA, 25 bp, Probe Sequence
gtgacttctgagtacagttaagttc

SEQ ID NO: 255185 - DNA, 25 bp, Probe Sequence
gtgacttcgaattagtttgcacttc

SEQ ID NO: 255186 - DNA, 25 bp, Probe Sequence
gtgatccctgaaaagttccagcata

SEQ ID NO: 255187 - DNA, 25 bp, Probe Sequence
gtgatccagcgatagatgttccaaa

SEQ ID NO: 255188 - DNA, 25 bp, Probe Sequence
gtgacctcatgaaatgagttgcagc

SEQ ID NO: 255189 - DNA, 25 bp, Probe Sequence
gtgagactgatgtcaatgagtgtga

SEQ ID NO: 255190 - DNA, 25 bp, Probe Sequence
gtgatggagatgtcaagcaggtggc

SEQ ID NO: 255191 - DNA, 25 bp, Probe Sequence
gtgagtgagttatggtgctggctat

SEQ ID NO: 255192 - DNA, 25 bp, Probe Sequence
gtgagatatttcaggtgggatcaaa

SEQ ID NO: 255193 - DNA, 25 bp, Probe Sequence
gtgagcacatttgggagctggagaa

SEQ ID NO: 255194 - DNA, 25 bp, Probe Sequence
gtgagcacatctagctgatgataaa

SEQ ID NO: 255195 - DNA, 25 bp, Probe Sequence
gtgagcaatgcccatagacctgaat

SEQ ID NO: 255196 - DNA, 25 bp, Probe Sequence
gtgaggagccatattactacatgga

SEQ ID NO: 255197 - DNA, 25 bp, Probe Sequence
gtgatgagagcctatttacaacagc

SEQ ID NO: 255198 - DNA, 25 bp, Probe Sequence
gtgacgatcctcatgtgatcatgaa

SEQ ID NO: 255199 - DNA, 25 bp, Probe Sequence
gtgactaccctatctcatataagtg

SEQ ID NO: 255200 - DNA, 25 bp, Probe Sequence
gtgactcccttattcaagataactg

SEQ ID NO: 255201 - DNA, 25 bp, Probe Sequence
gtgagtcccagattgaccagtagca

SEQ ID NO: 255202 - DNA, 25 bp, Probe Sequence
gtgagtctccaataccggagctttt

SEQ ID NO: 255203 - DNA, 25 bp, Probe Sequence
gtgagtccatcagaaacaggagctg

SEQ ID NO: 255204 - DNA, 25 bp, Probe Sequence
gtgagaccacaaatgaatgccggga

SEQ ID NO: 255205 - DNA, 25 bp, Probe Sequence
gtgagaccaaattgagctcgggggg

SEQ ID NO: 255206 - DNA, 25 bp, Probe Sequence
gtgacctatacaggttctggtggtg

SEQ ID NO: 255207 - DNA, 25 bp, Probe Sequence
gtgaccgaagctggctttggtgctg

SEQ ID NO: 255208 - DNA, 25 bp, Probe Sequence
gtgagagccaagctgtcctgggcta

SEQ ID NO: 255209 - DNA, 25 bp, Probe Sequence
gtgaggaagagtcgggcatgggtgc

SEQ ID NO: 255210 - DNA, 25 bp, Probe Sequence
gtgaggaatgggctggcttggtctg

SEQ ID NO: 255211 - DNA, 25 bp, Probe Sequence
gtgacgtcatgcgagttggttttgg

SEQ ID NO: 255212 - DNA, 25 bp, Probe Sequence
gtgacgtttctgagtgtagtgtggt

SEQ ID NO: 255213 - DNA, 25 bp, Probe Sequence
gtgacgttgtctaagatgtaatgag

SEQ ID NO: 255214 - DNA, 25 bp, Probe Sequence
gtgactgcttcccaatatttatgat

SEQ ID NO: 255215 - DNA, 25 bp, Probe Sequence
gtgactgctgctgccgaaaatatca

SEQ ID NO: 255216 - DNA, 25 bp, Probe Sequence
gtgagctctacgtccagaagcataa

SEQ ID NO: 255217 - DNA, 25 bp, Probe Sequence
gtgagcactaaattcaatacataat

SEQ ID NO: 255218 - DNA, 25 bp, Probe Sequence
gtgagaagaaatgcagatacaagta

SEQ ID NO: 255219 - DNA, 25 bp, Probe Sequence
gtgagtagccttgaataatgtgtat

SEQ ID NO: 255220 - DNA, 25 bp, Probe Sequence
gtgactactgttaatattttgtata

SEQ ID NO: 255221 - DNA, 25 bp, Probe Sequence
gtgaccattttgctatctgtttgta

SEQ ID NO: 255222 - DNA, 25 bp, Probe Sequence
gtgaccgtttgacatctgtggtaga

SEQ ID NO: 255223 - DNA, 25 bp, Probe Sequence
gtgacctgtacttgtactatggaag

SEQ ID NO: 255224 - DNA, 25 bp, Probe Sequence
gtgactctgtatttgtcttagagaa

SEQ ID NO: 255225 - DNA, 25 bp, Probe Sequence
gtgactctgtgatgtatcatgatag

SEQ ID NO: 255226 - DNA, 25 bp, Probe Sequence
gtgacctgcgcaatgtttatatgct

SEQ ID NO: 255227 - DNA, 25 bp, Probe Sequence
gtgagcttgcatttgtgagttattg

SEQ ID NO: 255228 - DNA, 25 bp, Probe Sequence
gtgatggtgcattgtgtggtagaat

SEQ ID NO: 255229 - DNA, 25 bp, Probe Sequence
gtgaggtgctgatgagtgattgaca

SEQ ID NO: 255230 - DNA, 25 bp, Probe Sequence
gtgagccaggattgtgcgactgcac

SEQ ID NO: 255231 - DNA, 25 bp, Probe Sequence
gtgaccgatgcaattctacagacag

SEQ ID NO: 255232 - DNA, 25 bp, Probe Sequence
gtgagttgtgcaattcacagcaaag

SEQ ID NO: 255233 - DNA, 25 bp, Probe Sequence
gtgagcattgtggaacccaaagatg

SEQ ID NO: 255234 - DNA, 25 bp, Probe Sequence
gtgttgtggtcctccagaggcatgt

SEQ ID NO: 255235 - DNA, 25 bp, Probe Sequence
gtgttgagagtcacccatgagctcc

SEQ ID NO: 255236 - DNA, 25 bp, Probe Sequence
gtgagtatagtaacccaagatgcca

SEQ ID NO: 255237 - DNA, 25 bp, Probe Sequence
gtgatgactacttcatcccaagcca

SEQ ID NO: 255238 - DNA, 25 bp, Probe Sequence
gtgatatcataattacctaacagca

SEQ ID NO: 255239 - DNA, 25 bp, Probe Sequence
gtgatatgacaagaccagagaaatt

SEQ ID NO: 255240 - DNA, 25 bp, Probe Sequence
gtgagtgataagtgtcagatcaata

SEQ ID NO: 255241 - DNA, 25 bp, Probe Sequence
gtgagtgtatcatttctattaacag

SEQ ID NO: 255242 - DNA, 25 bp, Probe Sequence
gtgagtgatggcttttatggtactg

SEQ ID NO: 255243 - DNA, 25 bp, Probe Sequence
gtgaggatggcatcttccgtcatga

SEQ ID NO: 255244 - DNA, 25 bp, Probe Sequence
gtgaggatggcatcttccgtcatga

SEQ ID NO: 255245 - DNA, 25 bp, Probe Sequence
gtgatgagtcagccacttactgtct

SEQ ID NO: 255246 - DNA, 25 bp, Probe Sequence
gtgattgtgagcttgctttctgact

SEQ ID NO: 255247 - DNA, 25 bp, Probe Sequence
gtgaggctgagatgtctccatctct

SEQ ID NO: 255248 - DNA, 25 bp, Probe Sequence
gtgagtcgagatggtgccactgcat

SEQ ID NO: 255249 - DNA, 25 bp, Probe Sequence
gtgagccgagatcatgctactgcat

SEQ ID NO: 255250 - DNA, 25 bp, Probe Sequence
gtgagccagaggatgtcagctgcca

SEQ ID NO: 255251 - DNA, 25 bp, Probe Sequence
gtgaccaacgaagagtgccagaaga

SEQ ID NO: 255252 - DNA, 25 bp, Probe Sequence
gtgaccaaaacagcagtggctcaca

SEQ ID NO: 255253 - DNA, 25 bp, Probe Sequence
gtgaggagaatagccgggcccactc

SEQ ID NO: 255254 - DNA, 25 bp, Probe Sequence
gtgggaaagagaaccaccccactct

SEQ ID NO: 255255 - DNA, 25 bp, Probe Sequence
gtgatggaattaaaccacccccaat

SEQ ID NO: 255256 - DNA, 25 bp, Probe Sequence
gtgattatatttcacccatctctca

SEQ ID NO: 255257 - DNA, 25 bp, Probe Sequence
gtgagtcatttgcatcactcgacct

SEQ ID NO: 255258 - DNA, 25 bp, Probe Sequence
gtggattttgaacccaactctacct

SEQ ID NO: 255259 - DNA, 25 bp, Probe Sequence
gtgttttgtgaacaatatcccactt

SEQ ID NO: 255260 - DNA, 25 bp, Probe Sequence
gtgttttgtgaacaatatcccactt

SEQ ID NO: 255261 - DNA, 25 bp, Probe Sequence
gtgttttgtgaacaatatcccactt

SEQ ID NO: 255262 - DNA, 25 bp, Probe Sequence
gtgtttctttaaaaatcgctctccg

SEQ ID NO: 255263 - DNA, 25 bp, Probe Sequence
gtgtttttctatatagttccttgcc

SEQ ID NO: 255264 - DNA, 25 bp, Probe Sequence
gtgtacatttttatattctcctttt

SEQ ID NO: 255265 - DNA, 25 bp, Probe Sequence
gtgtaaaccttaaactgcattctag

SEQ ID NO: 255266 - DNA, 25 bp, Probe Sequence
gtgtcacaaaactcaactggtcata

SEQ ID NO: 255267 - DNA, 25 bp, Probe Sequence
gtgtctaaaacagactcttgtattc

SEQ ID NO: 255268 - DNA, 25 bp, Probe Sequence
gtgacgaaatactggttttaccgct

SEQ ID NO: 255269 - DNA, 25 bp, Probe Sequence
gtgaggaaaagcacctggtttcggc

SEQ ID NO: 255270 - DNA, 25 bp, Probe Sequence
gtgggcaaactaagccgattttccg

SEQ ID NO: 255271 - DNA, 25 bp, Probe Sequence
gtgggctacggaaccgtgagttccg

SEQ ID NO: 255272 - DNA, 25 bp, Probe Sequence
gggagtacgaatacacgggcgtcaa

SEQ ID NO: 255273 - DNA, 25 bp, Probe Sequence
gtgtagatccatatttcggaggtct

SEQ ID NO: 255274 - DNA, 25 bp, Probe Sequence
gtgtaagctagtattctgtgtgttc

SEQ ID NO: 255275 - DNA, 25 bp, Probe Sequence
gtgataatttgtaattgtgacttgt

SEQ ID NO: 255276 - DNA, 25 bp, Probe Sequence
gtgatagcattgctttcgtgtaaat

SEQ ID NO: 255277 - DNA, 25 bp, Probe Sequence
gtgatactggtagttggtgtgaaac

SEQ ID NO: 255278 - DNA, 25 bp, Probe Sequence
gtgtacgaggacaagaagggcactc

SEQ ID NO: 255279 - DNA, 25 bp, Probe Sequence
gtgatgacgcacttccaaatgggtt

SEQ ID NO: 255280 - DNA, 25 bp, Probe Sequence
gtgatgactgaactgcacaaagtga

SEQ ID NO: 255281 - DNA, 25 bp, Probe Sequence
gtgttgctgcacctgaagaacgagc

SEQ ID NO: 255282 - DNA, 25 bp, Probe Sequence
gtgttggctccttgcagtgacagcc

SEQ ID NO: 255283 - DNA, 25 bp, Probe Sequence
gtgattgcagtaatagcggccaccc

SEQ ID NO: 255284 - DNA, 25 bp, Probe Sequence
gtgatctgcaatggtcagctgtgct

SEQ ID NO: 255285 - DNA, 25 bp, Probe Sequence
gtgatcgagtggtctgtgttcctat

SEQ ID NO: 255286 - DNA, 25 bp, Probe Sequence
gtgatgactatttcttattccattc

SEQ ID NO: 255287 - DNA, 25 bp, Probe Sequence
gtgatgaacattttgagactccgtc

SEQ ID NO: 255288 - DNA, 25 bp, Probe Sequence
gtgatgaacattttgagactccgtc

SEQ ID NO: 255289 - DNA, 25 bp, Probe Sequence
gtgagagccttgtatacacttcaat

SEQ ID NO: 255290 - DNA, 25 bp, Probe Sequence
gtgaggccaagaatcatagtttcat

SEQ ID NO: 255291 - DNA, 25 bp, Probe Sequence
gtgatgtccaaaattcaggtctctg

SEQ ID NO: 255292 - DNA, 25 bp, Probe Sequence
gtgttcccaatcaggtgactgtgag

SEQ ID NO: 255293 - DNA, 25 bp, Probe Sequence
gtgttccagaccgtgtctgacttag

SEQ ID NO: 255294 - DNA, 25 bp, Probe Sequence
gggcctcaacctatagactttgtcc

SEQ ID NO: 255295 - DNA, 25 bp, Probe Sequence
gggcctcaacctatagactttgtcc

SEQ ID NO: 255296 - DNA, 25 bp, Probe Sequence
ggtcccaaccaagaaatctaactca

SEQ ID NO: 255297 - DNA, 25 bp, Probe Sequence
gggcccatccttccaaaatgtaaat

SEQ ID NO: 255298 - DNA, 25 bp, Probe Sequence
gggcctctgcctctaaaatggtgaa

SEQ ID NO: 255299 - DNA, 25 bp, Probe Sequence
gtgaccgtttgctaaataaagtgaa

SEQ ID NO: 255300 - DNA, 25 bp, Probe Sequence
gtgatccctatggagaattaaaggt

SEQ ID NO: 255301 - DNA, 25 bp, Probe Sequence
gtgtccaccagatgatatataaacg

SEQ ID NO: 255302 - DNA, 25 bp, Probe Sequence
gtgttctccgagtaagtgaaactca

SEQ ID NO: 255303 - DNA, 25 bp, Probe Sequence
gtgtacttggcttaactcaagaaca

SEQ ID NO: 255304 - DNA, 25 bp, Probe Sequence
gtgtcactgtggtcttacataaaca

SEQ ID NO: 255305 - DNA, 25 bp, Probe Sequence
gtgtcattaagtgcagaaataacta

SEQ ID NO: 255306 - DNA, 25 bp, Probe Sequence
gtgtcattaagtgcagaaataacta

SEQ ID NO: 255307 - DNA, 25 bp, Probe Sequence
gtgtatttgctggggaaaacctaat

SEQ ID NO: 255308 - DNA, 25 bp, Probe Sequence
gtgttatgtctggggccacagttgc

SEQ ID NO: 255309 - DNA, 25 bp, Probe Sequence
gtgtaagtatatccccaatgttgcg

SEQ ID NO: 255310 - DNA, 25 bp, Probe Sequence
gtgagaagttaaacctgagacagag

SEQ ID NO: 255311 - DNA, 25 bp, Probe Sequence
gggcggagctaaagttgcagacaag

SEQ ID NO: 255312 - DNA, 25 bp, Probe Sequence
gtgaggcggctatatttaatgaaga

SEQ ID NO: 255313 - DNA, 25 bp, Probe Sequence
gtgaccttatattattgctaaggga

SEQ ID NO: 255314 - DNA, 25 bp, Probe Sequence
gtgaccttttgctgtgcttgatgtt

SEQ ID NO: 255315 - DNA, 25 bp, Probe Sequence
gtgatcctttagctggttggctcag

SEQ ID NO: 255316 - DNA, 25 bp, Probe Sequence
gtgatcactgattagaatgagttgg

SEQ ID NO: 255317 - DNA, 25 bp, Probe Sequence
gtgagcagctcccaggaggcatgga

SEQ ID NO: 255318 - DNA, 25 bp, Probe Sequence
gtgggccccaggcagaggaaggccg

SEQ ID NO: 255319 - DNA, 25 bp, Probe Sequence
gtgttttccgggaagggcaggcgcg

SEQ ID NO: 255320 - DNA, 25 bp, Probe Sequence
gtgtttgtctcctctaaagacgccg

SEQ ID NO: 255321 - DNA, 25 bp, Probe Sequence
gtgttgaattacgccagaagacctg

SEQ ID NO: 255322 - DNA, 25 bp, Probe Sequence
gtggttaacatctcagaaaactctg

SEQ ID NO: 255323 - DNA, 25 bp, Probe Sequence
tgggttaagcctgcagggatcccgg

SEQ ID NO: 255324 - DNA, 25 bp, Probe Sequence
gggattaaccatgacgtgaccacgg

SEQ ID NO: 255325 - DNA, 25 bp, Probe Sequence
gggctctaatccaaaagtaccacag

SEQ ID NO: 255326 - DNA, 25 bp, Probe Sequence
gggccagataccaccagaatgcccg

SEQ ID NO: 255327 - DNA, 25 bp, Probe Sequence
gtggggcagacccgaaaatccagcg

SEQ ID NO: 255328 - DNA, 25 bp, Probe Sequence
gtgagggagatcgcgcaggatttca

SEQ ID NO: 255329 - DNA, 25 bp, Probe Sequence
gtgaggcattgtgtcctggatcgtc

SEQ ID NO: 255330 - DNA, 25 bp, Probe Sequence
gtgaggagtccatcctgtacatctc

SEQ ID NO: 255331 - DNA, 25 bp, Probe Sequence
gtgaggatacacatcacatatcact

SEQ ID NO: 255332 - DNA, 25 bp, Probe Sequence
gtgagaggcatgccttcattctgca

SEQ ID NO: 255333 - DNA, 25 bp, Probe Sequence
gtgagaggcactctcactcacttat

SEQ ID NO: 255334 - DNA, 25 bp, Probe Sequence
gtgatgagaacaaggacgactatac

SEQ ID NO: 255335 - DNA, 25 bp, Probe Sequence
gtgagcaagacagggcttaccatcc

SEQ ID NO: 255336 - DNA, 25 bp, Probe Sequence
gtgagatgaggctagcgattgccct

SEQ ID NO: 255337 - DNA, 25 bp, Probe Sequence
gtgagactgctgaacacattgccca

SEQ ID NO: 255338 - DNA, 25 bp, Probe Sequence
gtgagatcattggacactggacaca

SEQ ID NO: 255339 - DNA, 25 bp, Probe Sequence
gtgagataggacacttgtgcagcag

SEQ ID NO: 255340 - DNA, 25 bp, Probe Sequence
gtgagcacaagatgccctgtgcagc

SEQ ID NO: 255341 - DNA, 25 bp, Probe Sequence
gtgagccaagattgcaccagtgcac

SEQ ID NO: 255342 - DNA, 25 bp, Probe Sequence
gtgagcgaagatcgagccactgcac

SEQ ID NO: 255343 - DNA, 25 bp, Probe Sequence
gtgagccaagatcacgccattgcac

SEQ ID NO: 255344 - DNA, 25 bp, Probe Sequence
gtgagcggagatcacaccattgcac

SEQ ID NO: 255345 - DNA, 25 bp, Probe Sequence
gtgagccgaaattgcaccattgcac

SEQ ID NO: 255346 - DNA, 25 bp, Probe Sequence
gtgagccaaaattgagccactgcac

SEQ ID NO: 255347 - DNA, 25 bp, Probe Sequence
gtgagctctaagaatgaacacatca

SEQ ID NO: 255348 - DNA, 25 bp, Probe Sequence
gtgaccttagcgaagcaagcacatg

SEQ ID NO: 255349 - DNA, 25 bp, Probe Sequence
gtgtccttaggtaaatcacttaact

SEQ ID NO: 255350 - DNA, 25 bp, Probe Sequence
gtgtctctagggttaagccaaaaga

SEQ ID NO: 255351 - DNA, 25 bp, Probe Sequence
gtgttcacaagggttactcctcaaa

SEQ ID NO: 255352 - DNA, 25 bp, Probe Sequence
gtgttcacaagggttactcctcaaa

SEQ ID NO: 255353 - DNA, 25 bp, Probe Sequence
gtgatgtcaaacctctatagtctta

SEQ ID NO: 255354 - DNA, 25 bp, Probe Sequence
gtgatctagacatgccttaggtaac

SEQ ID NO: 255355 - DNA, 25 bp, Probe Sequence
gtgtaaaaagccttcacatgtaccc

SEQ ID NO: 255356 - DNA, 25 bp, Probe Sequence
gtgtaaacaaacaaagtgtaccact

SEQ ID NO: 255357 - DNA, 25 bp, Probe Sequence
gtgggttcaaacaaaggtgcaatca

SEQ ID NO: 255358 - DNA, 25 bp, Probe Sequence
gtgggtctccaataagtggttccat

SEQ ID NO: 255359 - DNA, 25 bp, Probe Sequence
gtgaggtctcctttctaatggtgct

SEQ ID NO: 255360 - DNA, 25 bp, Probe Sequence
gtgttgttgcctttgtatgtggttc

SEQ ID NO: 255361 - DNA, 25 bp, Probe Sequence
gtgttggccactcttgatgtgaggc

SEQ ID NO: 255362 - DNA, 25 bp, Probe Sequence
gtgttactatcgctttggacaggtt

SEQ ID NO: 255363 - DNA, 25 bp, Probe Sequence
gtgttgcattttcttgggaatgtgt

SEQ ID NO: 255364 - DNA, 25 bp, Probe Sequence
gtgttcttttctaagccatggagtg

SEQ ID NO: 255365 - DNA, 25 bp, Probe Sequence
gtgtttgtttgtatccttgcagtta

SEQ ID NO: 255366 - DNA, 25 bp, Probe Sequence
gtgttttttttttccatgatgtcca

SEQ ID NO: 255367 - DNA, 25 bp, Probe Sequence
gtgtttttcttctgccaatttacta

SEQ ID NO: 255368 - DNA, 25 bp, Probe Sequence
gtgtccttaaacttccaatcttact

SEQ ID NO: 255369 - DNA, 25 bp, Probe Sequence
gtgttttaactccctgaactatact

SEQ ID NO: 255370 - DNA, 25 bp, Probe Sequence
gtgttttgggctccacaggacttac

SEQ ID NO: 255371 - DNA, 25 bp, Probe Sequence
tgttgtttgggctgcctaacttcca

SEQ ID NO: 255372 - DNA, 25 bp, Probe Sequence
gtgagtttggaggggaacgtgtcag

SEQ ID NO: 255373 - DNA, 25 bp, Probe Sequence
gtgagtgtctctagggtgatacgtg

SEQ ID NO: 255374 - DNA, 25 bp, Probe Sequence
gtgagttgactgatgttgtgagtgt

SEQ ID NO: 255375 - DNA, 25 bp, Probe Sequence
gtgagtgtgcatgtgtgtgtgtgtg

SEQ ID NO: 255376 - DNA, 25 bp, Probe Sequence
gtgaggtgattgctgctgggatggt

SEQ ID NO: 255377 - DNA, 25 bp, Probe Sequence
gtgaggtgattgctgctgggatggt

SEQ ID NO: 255378 - DNA, 25 bp, Probe Sequence
gtgaggatgttgttagacagggtct

SEQ ID NO: 255379 - DNA, 25 bp, Probe Sequence
gtgagtgcagtattctaaacatttc

SEQ ID NO: 255380 - DNA, 25 bp, Probe Sequence
gtgagtgaatatatgaaacacttca

SEQ ID NO: 255381 - DNA, 25 bp, Probe Sequence
gtgagcgagtctaataatccagcta

SEQ ID NO: 255382 - DNA, 25 bp, Probe Sequence
gtgagcaagatggaaatcctgcagc

SEQ ID NO: 255383 - DNA, 25 bp, Probe Sequence
gtgagctgagatcacaccactgcac

SEQ ID NO: 255384 - DNA, 25 bp, Probe Sequence
gtgagctgagatcacaccactgcac

SEQ ID NO: 255385 - DNA, 25 bp, Probe Sequence
gtgagctatgaacaccactgcactc

SEQ ID NO: 255386 - DNA, 25 bp, Probe Sequence
gtgagttgtgattgcaccactgccc

SEQ ID NO: 255387 - DNA, 25 bp, Probe Sequence
gtgagttatgatcgcaccactgtac

SEQ ID NO: 255388 - DNA, 25 bp, Probe Sequence
gtgagatatttggatccatggtgta

SEQ ID NO: 255389 - DNA, 25 bp, Probe Sequence
gtgatatattctgatgtatgggtgc

SEQ ID NO: 255390 - DNA, 25 bp, Probe Sequence
gtgattctgatatatgtacttgtca

SEQ ID NO: 255391 - DNA, 25 bp, Probe Sequence
gtgtactcaaggactactcagctaa

SEQ ID NO: 255392 - DNA, 25 bp, Probe Sequence
gtgtgttaaggggtcggctaagtgg

SEQ ID NO: 255393 - DNA, 25 bp, Probe Sequence
gtgttaaaggacccaggcttcatta

SEQ ID NO: 255394 - DNA, 25 bp, Probe Sequence
gtgttgaaatagagggaccattgtc

SEQ ID NO: 255395 - DNA, 25 bp, Probe Sequence
gtgttgcaagaagtcaaggacctca

SEQ ID NO: 255396 - DNA, 25 bp, Probe Sequence
gtgaccaagaacgtgagcaagccca

SEQ ID NO: 255397 - DNA, 25 bp, Probe Sequence
gtgttacctaccacaatggcacagg

SEQ ID NO: 255398 - DNA, 25 bp, Probe Sequence
gtgttacctttctctattacagctt

SEQ ID NO: 255399 - DNA, 25 bp, Probe Sequence
gtgttccctttttcataattactgt

SEQ ID NO: 255400 - DNA, 25 bp, Probe Sequence
gtgtattcacttaccctagttcatt

SEQ ID NO: 255401 - DNA, 25 bp, Probe Sequence
gtgttaactagtgtcaatatccatt

SEQ ID NO: 255402 - DNA, 25 bp, Probe Sequence
gtgtttattactgatttgaccttac

SEQ ID NO: 255403 - DNA, 25 bp, Probe Sequence
gtgttacttccaggttatggcatct

SEQ ID NO: 255404 - DNA, 25 bp, Probe Sequence
gtgttagtgtaagtgttcagggtcc

SEQ ID NO: 255405 - DNA, 25 bp, Probe Sequence
ggttcgtccaatgtttgggtgccct

SEQ ID NO: 255406 - DNA, 25 bp, Probe Sequence
ggtctttaaaatattgttgaacact

SEQ ID NO: 255407 - DNA, 25 bp, Probe Sequence
gtgagttttacagtttctgttaaca

SEQ ID NO: 255408 - DNA, 25 bp, Probe Sequence
gtgttttccaccatttcgtaatcaa

SEQ ID NO: 255409 - DNA, 25 bp, Probe Sequence
gtgtttttaccatttgccttaatat

SEQ ID NO: 255410 - DNA, 25 bp, Probe Sequence
gtgttttataccagtgtttgcaagt

SEQ ID NO: 255411 - DNA, 25 bp, Probe Sequence
gtgttcttagggatgtgttatagac

SEQ ID NO: 255412 - DNA, 25 bp, Probe Sequence
gtgtattttgcttttcgtgttagaa

SEQ ID NO: 255413 - DNA, 25 bp, Probe Sequence
gtgtttgtactgtttaattttggca

SEQ ID NO: 255414 - DNA, 25 bp, Probe Sequence
gtgatctttacgcttaactgttgtg

SEQ ID NO: 255415 - DNA, 25 bp, Probe Sequence
gtgatccttagtatgttaattctta

SEQ ID NO: 255416 - DNA, 25 bp, Probe Sequence
gtgagccctgttaaacaagatttct

SEQ ID NO: 255417 - DNA, 25 bp, Probe Sequence
gtgttacagttatacaatgattttt

SEQ ID NO: 255418 - DNA, 25 bp, Probe Sequence
gtgataatccttaaatgaacatttt

SEQ ID NO: 255419 - DNA, 25 bp, Probe Sequence
gtgagttcatctgtaatattttttt

SEQ ID NO: 255420 - DNA, 25 bp, Probe Sequence
gtgagtttagttctttgcttgcttt

SEQ ID NO: 255421 - DNA, 25 bp, Probe Sequence
gtgatgttggaatcgtttcttttgt

SEQ ID NO: 255422 - DNA, 25 bp, Probe Sequence
gtgatttggaaattttgatgcttgt

SEQ ID NO: 255423 - DNA, 25 bp, Probe Sequence
gtgatgagggaattgatttttttta

SEQ ID NO: 255424 - DNA, 25 bp, Probe Sequence
gtgagatgtggatgttgcttttgca

SEQ ID NO: 255425 - DNA, 25 bp, Probe Sequence
gtgagtagatagctctttcttgaga

SEQ ID NO: 255426 - DNA, 25 bp, Probe Sequence
gtgatgatatgaaccagtttctttt

SEQ ID NO: 255427 - DNA, 25 bp, Probe Sequence
gtgatgaatgcaagaggcgtttcta

SEQ ID NO: 255428 - DNA, 25 bp, Probe Sequence
gtgagtatcattgtgtgtttctagt

SEQ ID NO: 255429 - DNA, 25 bp, Probe Sequence
gtgatgttcttgattgacttgtaat

SEQ ID NO: 255430 - DNA, 25 bp, Probe Sequence
gtgatgtttctgaatactaccaaac

SEQ ID NO: 255431 - DNA, 25 bp, Probe Sequence
gtgattttattagctatctacaaag

SEQ ID NO: 255432 - DNA, 25 bp, Probe Sequence
gtgagattgtttgcctatctcataa

SEQ ID NO: 255433 - DNA, 25 bp, Probe Sequence
gtggaggtgttctctacttatgccc

SEQ ID NO: 255434 - DNA, 25 bp, Probe Sequence
gtgagaggctgtagtgcctccctgg

SEQ ID NO: 255435 - DNA, 25 bp, Probe Sequence
gtgagagagtgggacaccccgacaa

SEQ ID NO: 255436 - DNA, 25 bp, Probe Sequence
gtgagaaggcaggacaggccacaaa

SEQ ID NO: 255437 - DNA, 25 bp, Probe Sequence
gtgtatcaggcagcaagcccatgga

SEQ ID NO: 255438 - DNA, 25 bp, Probe Sequence
gtgtacggccaacgccaagtagggg

SEQ ID NO: 255439 - DNA, 25 bp, Probe Sequence
gtgtacggagcagctctaagccggc

SEQ ID NO: 255440 - DNA, 25 bp, Probe Sequence
gtgatagcggtctgacttcaccggg

SEQ ID NO: 255441 - DNA, 25 bp, Probe Sequence
gtgatcttgggcagaacataccggg

SEQ ID NO: 255442 - DNA, 25 bp, Probe Sequence
gtgatttggccaccaaactcctgga

SEQ ID NO: 255443 - DNA, 25 bp, Probe Sequence
gtgtttcccaaatcttctctagatt

SEQ ID NO: 255444 - DNA, 25 bp, Probe Sequence
gtgttgtccaaaatgcctgtttagt

SEQ ID NO: 255445 - DNA, 25 bp, Probe Sequence
gtgttgtccaaaatgcctgtttagt

SEQ ID NO: 255446 - DNA, 25 bp, Probe Sequence
gtgttgagccaatctgtgcagtctt

SEQ ID NO: 255447 - DNA, 25 bp, Probe Sequence
gtgttgaccgagattatgtgctgaa

SEQ ID NO: 255448 - DNA, 25 bp, Probe Sequence
gtgttgaccgagattatgtgctgaa

SEQ ID NO: 255449 - DNA, 25 bp, Probe Sequence
gtgattaccggcattttattaaact

SEQ ID NO: 255450 - DNA, 25 bp, Probe Sequence
gtgattaaaggcattcattataaag

SEQ ID NO: 255451 - DNA, 25 bp, Probe Sequence
gtgattgcgcaacatttatagaaaa

SEQ ID NO: 255452 - DNA, 25 bp, Probe Sequence
gtgagatgcccaaattaacagaaca

SEQ ID NO: 255453 - DNA, 25 bp, Probe Sequence
gtgaggcccatggttgagaaatgaa

SEQ ID NO: 255454 - DNA, 25 bp, Probe Sequence
gtgagagctccggtgacgaaagtcc

SEQ ID NO: 255455 - DNA, 25 bp, Probe Sequence
gtgagatcgccaggttctacaagct

SEQ ID NO: 255456 - DNA, 25 bp, Probe Sequence
gtgatgatatcactggttcccaact

SEQ ID NO: 255457 - DNA, 25 bp, Probe Sequence
gtgatgtctgatcgagaatgccaaa

SEQ ID NO: 255458 - DNA, 25 bp, Probe Sequence
gtgatgtcgctgtcaggatcatgcc

SEQ ID NO: 255459 - DNA, 25 bp, Probe Sequence
gtgagtctgtcatgagagctgtcct

SEQ ID NO: 255460 - DNA, 25 bp, Probe Sequence
gtgatgcctgttgagtcagatgctt

SEQ ID NO: 255461 - DNA, 25 bp, Probe Sequence
gtgatgcctgttgagtcagatgctt

SEQ ID NO: 255462 - DNA, 25 bp, Probe Sequence
gtgatgttgttttgtaggcattcaa

SEQ ID NO: 255463 - DNA, 25 bp, Probe Sequence
gtgagttgtgggtgcagcgactgaa

SEQ ID NO: 255464 - DNA, 25 bp, Probe Sequence
gtggttctgggggcggactccagaa

SEQ ID NO: 255465 - DNA, 25 bp, Probe Sequence
gtgagaacatggaaccggactccaa

SEQ ID NO: 255466 - DNA, 25 bp, Probe Sequence
gtgagaacatggaaccggactccaa

SEQ ID NO: 255467 - DNA, 25 bp, Probe Sequence
gtgaggacaggaagcctgaacccgg

SEQ ID NO: 255468 - DNA, 25 bp, Probe Sequence
gtgaggacgagagtaagaactccca

SEQ ID NO: 255469 - DNA, 25 bp, Probe Sequence
gtgaggaggtggagagacagcccac

SEQ ID NO: 255470 - DNA, 25 bp, Probe Sequence
gtgaggaggtggggagagcacccca

SEQ ID NO: 255471 - DNA, 25 bp, Probe Sequence
gtgaggaggtggggagaccacccca

SEQ ID NO: 255472 - DNA, 25 bp, Probe Sequence
tgcggggtggtctgccaccccgtga

SEQ ID NO: 255473 - DNA, 25 bp, Probe Sequence
tccgggctaaaactacccctgagtg

SEQ ID NO: 255474 - DNA, 25 bp, Probe Sequence
tccgggctaaaactacccctgagtg

SEQ ID NO: 255475 - DNA, 25 bp, Probe Sequence
tcctgggtcagggagaacgcgggga

SEQ ID NO: 255476 - DNA, 25 bp, Probe Sequence
tcctaggtcgttcaaccaggttttg

SEQ ID NO: 255477 - DNA, 25 bp, Probe Sequence
tattgggtccggtataccaggtatt

SEQ ID NO: 255478 - DNA, 25 bp, Probe Sequence
gtgttgagcacacctatattcacat

SEQ ID NO: 255479 - DNA, 25 bp, Probe Sequence
gtgttgagttggcattgtacagaaa

SEQ ID NO: 255480 - DNA, 25 bp, Probe Sequence
gtgttggtccgtagcatggagcaga

SEQ ID NO: 255481 - DNA, 25 bp, Probe Sequence
gtgttggagccgggaggacaaacag

SEQ ID NO: 255482 - DNA, 25 bp, Probe Sequence
gtgaggtgacctgggactgcatgaa

SEQ ID NO: 255483 - DNA, 25 bp, Probe Sequence
gtgaggctgaccagagccggttgac

SEQ ID NO: 255484 - DNA, 25 bp, Probe Sequence
gtgaggctacagtgactgaggggag

SEQ ID NO: 255485 - DNA, 25 bp, Probe Sequence
gtgaggctacagtgactgaggggag

SEQ ID NO: 255486 - DNA, 25 bp, Probe Sequence
gtgaggctacagtgactgaggggag

SEQ ID NO: 255487 - DNA, 25 bp, Probe Sequence
gtgaggagactgtggaaggtgtgag

SEQ ID NO: 255488 - DNA, 25 bp, Probe Sequence
gtgagtatactgtggagaggacttc

SEQ ID NO: 255489 - DNA, 25 bp, Probe Sequence
gtgtttgactgcaggaagaacgtgc

SEQ ID NO: 255490 - DNA, 25 bp, Probe Sequence
gtgtaacactggggacaactctgtc

SEQ ID NO: 255491 - DNA, 25 bp, Probe Sequence
gtgttaccatggcaaaactggaaga

SEQ ID NO: 255492 - DNA, 25 bp, Probe Sequence
gtgttaccttggacaatttggctaa

SEQ ID NO: 255493 - DNA, 25 bp, Probe Sequence
ggtatacccgaaatcttgtggatca

SEQ ID NO: 255494 - DNA, 25 bp, Probe Sequence
ggtactactagatgtctttaggcag

SEQ ID NO: 255495 - DNA, 25 bp, Probe Sequence
gtgtatcgggagtgtgtttagtctg

SEQ ID NO: 255496 - DNA, 25 bp, Probe Sequence
gtgttaggggattatttctcagttg

SEQ ID NO: 255497 - DNA, 25 bp, Probe Sequence
gtgtatcatgcgagttttttttggt

SEQ ID NO: 255498 - DNA, 25 bp, Probe Sequence
gtgtactacgtttggtattttgtct

SEQ ID NO: 255499 - DNA, 25 bp, Probe Sequence
gtgtattaaatttttcacttagtct

SEQ ID NO: 255500 - DNA, 25 bp, Probe Sequence
gtggttcaaagttatttctatgttt

SEQ ID NO: 255501 - DNA, 25 bp, Probe Sequence
gtgtttcaaagtcttcatgccaggc

SEQ ID NO: 255502 - DNA, 25 bp, Probe Sequence
gtgttaaagatggctccttggcggc

SEQ ID NO: 255503 - DNA, 25 bp, Probe Sequence
gtgttgagcgtggcctacgtgagcc

SEQ ID NO: 255504 - DNA, 25 bp, Probe Sequence
gtgattagattgcctctaccatgtg

SEQ ID NO: 255505 - DNA, 25 bp, Probe Sequence
gtgtaaatgtactcaccttagggat

SEQ ID NO: 255506 - DNA, 25 bp, Probe Sequence
gtgttgccaaaatcccttcggacat

SEQ ID NO: 255507 - DNA, 25 bp, Probe Sequence
gtgtttataaagtctcctccgtgat

SEQ ID NO: 255508 - DNA, 25 bp, Probe Sequence
gtgatcttaaaagctccaggcagaa

SEQ ID NO: 255509 - DNA, 25 bp, Probe Sequence
gtgatttcaaaagccttggtctcag

SEQ ID NO: 255510 - DNA, 25 bp, Probe Sequence
gtgtttaccaagccgttggtctcct

SEQ ID NO: 255511 - DNA, 25 bp, Probe Sequence
gtgtcttaacgtgaattgagtctcc

SEQ ID NO: 255512 - DNA, 25 bp, Probe Sequence
gtgtctttcagcaccaagtcatgtt

SEQ ID NO: 255513 - DNA, 25 bp, Probe Sequence
gtgatttgtccagcgacactcattc

SEQ ID NO: 255514 - DNA, 25 bp, Probe Sequence
gtgatatgtaacactgaggccttgt

SEQ ID NO: 255515 - DNA, 25 bp, Probe Sequence
gtgatcgtgacacttctactctttc

SEQ ID NO: 255516 - DNA, 25 bp, Probe Sequence
gtgatcgtgatcccttttatttgca

SEQ ID NO: 255517 - DNA, 25 bp, Probe Sequence
gtgatgttatccttcttatatattg

SEQ ID NO: 255518 - DNA, 25 bp, Probe Sequence
gtgataattgccttagattttgtta

SEQ ID NO: 255519 - DNA, 25 bp, Probe Sequence
gtgatgaattcaatgctagttctta

SEQ ID NO: 255520 - DNA, 25 bp, Probe Sequence
gtgagagtataatatgtggctgaca

SEQ ID NO: 255521 - DNA, 25 bp, Probe Sequence
gtgatgtggacataattgcctacaa

SEQ ID NO: 255522 - DNA, 25 bp, Probe Sequence
gtgatgtgggaactatttaacagat

SEQ ID NO: 255523 - DNA, 25 bp, Probe Sequence
gtgttgggaacaatgtttaacattt

SEQ ID NO: 255524 - DNA, 25 bp, Probe Sequence
gtgtatccgaaaattgctaagacag

SEQ ID NO: 255525 - DNA, 25 bp, Probe Sequence
gtgttcctgaaaagatcctattaaa

SEQ ID NO: 255526 - DNA, 25 bp, Probe Sequence
gtgatccttaaagactgctatataa

SEQ ID NO: 255527 - DNA, 25 bp, Probe Sequence
gtgatcatctaataaagcatcttat

SEQ ID NO: 255528 - DNA, 25 bp, Probe Sequence
gtgatttcatcatagaggtctgttt

SEQ ID NO: 255529 - DNA, 25 bp, Probe Sequence
gtgtttccactgagtgctcgttact

SEQ ID NO: 255530 - DNA, 25 bp, Probe Sequence
gtgttcccgctggaggtaattggct

SEQ ID NO: 255531 - DNA, 25 bp, Probe Sequence
gtgatattccttgaagtagatgtgg

SEQ ID NO: 255532 - DNA, 25 bp, Probe Sequence
gtgttagcctcagacactactgagg

SEQ ID NO: 255533 - DNA, 25 bp, Probe Sequence
gtgttcagcccagacacaggtgctg

SEQ ID NO: 255534 - DNA, 25 bp, Probe Sequence
gtgttcagtaaggtcgagagctgct

SEQ ID NO: 255535 - DNA, 25 bp, Probe Sequence
gtgttggttcagattgaggcttttg

SEQ ID NO: 255536 - DNA, 25 bp, Probe Sequence
gtgttgtatgtctttgggtgtttgt

SEQ ID NO: 255537 - DNA, 25 bp, Probe Sequence
gtgttttttgttgtttttgcattgg

SEQ ID NO: 255538 - DNA, 25 bp, Probe Sequence
gtgatttattccacttaaatatgtt

SEQ ID NO: 255539 - DNA, 25 bp, Probe Sequence
gtgatattttctattaaatccagta

SEQ ID NO: 255540 - DNA, 25 bp, Probe Sequence
gtgattcatagtacatttaaagaga

SEQ ID NO: 255541 - DNA, 25 bp, Probe Sequence
gtgatcttattctcgaaacagaaac

SEQ ID NO: 255542 - DNA, 25 bp, Probe Sequence
gtgatttgtcctctgaagaaaaact

SEQ ID NO: 255543 - DNA, 25 bp, Probe Sequence
gtgattctgtccctccaaagaaata

SEQ ID NO: 255544 - DNA, 25 bp, Probe Sequence
gtgattcattatctgggaagaacca

SEQ ID NO: 255545 - DNA, 25 bp, Probe Sequence
gtgattcatctagatggtgccatga

SEQ ID NO: 255546 - DNA, 25 bp, Probe Sequence
gtgatcacattagtactgattcata

SEQ ID NO: 255547 - DNA, 25 bp, Probe Sequence
gtgatcactgtattcagctctgtca

SEQ ID NO: 255548 - DNA, 25 bp, Probe Sequence
gtgatcattatgaatcccttcagtc

SEQ ID NO: 255549 - DNA, 25 bp, Probe Sequence
gtgatgagcgtgattcctctcgatc

SEQ ID NO: 255550 - DNA, 25 bp, Probe Sequence
gtgatggcgtgatatgcacctgcaa

SEQ ID NO: 255551 - DNA, 25 bp, Probe Sequence
gtgatggcggaactgactgcttgct

SEQ ID NO: 255552 - DNA, 25 bp, Probe Sequence
gtgagggctggaaagccatatgatt

SEQ ID NO: 255553 - DNA, 25 bp, Probe Sequence
gtgaggatgtggaagagacagcagc

SEQ ID NO: 255554 - DNA, 25 bp, Probe Sequence
gtgatgtgtaggaggaagagctcag

SEQ ID NO: 255555 - DNA, 25 bp, Probe Sequence
gtgaggagactcagcagaaggtgca

SEQ ID NO: 255556 - DNA, 25 bp, Probe Sequence
gtgaggacatccagctagattacaa

SEQ ID NO: 255557 - DNA, 25 bp, Probe Sequence
gtgaggcttcagtgtacagcaacca

SEQ ID NO: 255558 - DNA, 25 bp, Probe Sequence
gtgaggcttctgggtgcataccagt

SEQ ID NO: 255559 - DNA, 25 bp, Probe Sequence
gtgattgtttccagatgaccagatt

SEQ ID NO: 255560 - DNA, 25 bp, Probe Sequence
gtgttgtttccataagtgacatgaa

SEQ ID NO: 255561 - DNA, 25 bp, Probe Sequence
gtgttttcctgcagcaattccataa

SEQ ID NO: 255562 - DNA, 25 bp, Probe Sequence
gtgtttgtgcctgtcagacacttaa

SEQ ID NO: 255563 - DNA, 25 bp, Probe Sequence
gtgtataggtcggaaacaactaata

SEQ ID NO: 255564 - DNA, 25 bp, Probe Sequence
gtgtatgggtctggtcaaagagctt

SEQ ID NO: 255565 - DNA, 25 bp, Probe Sequence
gtgatgatggtgtcctttagggctc

SEQ ID NO: 255566 - DNA, 25 bp, Probe Sequence
gtgattgcttatgtcattagtgcct

SEQ ID NO: 255567 - DNA, 25 bp, Probe Sequence
gtgattgttcacctgcagtactgtg

SEQ ID NO: 255568 - DNA, 25 bp, Probe Sequence
gtgttgtcttcactggctacagtgg

SEQ ID NO: 255569 - DNA, 25 bp, Probe Sequence
gtgttgtatacttactacctgctgg

SEQ ID NO: 255570 - DNA, 25 bp, Probe Sequence
gtgttgtgattcatagtacatttaa

SEQ ID NO: 255571 - DNA, 25 bp, Probe Sequence
gtgtctgaatgtgtgaggccttgga

SEQ ID NO: 255572 - DNA, 25 bp, Probe Sequence
gtgatctaaaggacatgacctccga

SEQ ID NO: 255573 - DNA, 25 bp, Probe Sequence
gtgattatagtaactactccctgct

SEQ ID NO: 255574 - DNA, 25 bp, Probe Sequence
gtgatttactactatgcagctgccc

SEQ ID NO: 255575 - DNA, 25 bp, Probe Sequence
gtgtctacaccaatatcagccacca

SEQ ID NO: 255576 - DNA, 25 bp, Probe Sequence
gtgtgaagaccaacatcgccttcct

SEQ ID NO: 255577 - DNA, 25 bp, Probe Sequence
gtgtaataggcagatcgacttctcc

SEQ ID NO: 255578 - DNA, 25 bp, Probe Sequence
gtgtagatggggttcgagctttcct

SEQ ID NO: 255579 - DNA, 25 bp, Probe Sequence
gtgttgatgagggccatgcagcagc

SEQ ID NO: 255580 - DNA, 25 bp, Probe Sequence
gtgatcattgggttcaggagttgag

SEQ ID NO: 255581 - DNA, 25 bp, Probe Sequence
gtgtacagaggtccgggtctgagac

SEQ ID NO: 255582 - DNA, 25 bp, Probe Sequence
gtgttgctatggcacccagattaac

SEQ ID NO: 255583 - DNA, 25 bp, Probe Sequence
gtgttgccatcctcaaggctaacct

SEQ ID NO: 255584 - DNA, 25 bp, Probe Sequence
gtgtctgtccgctttcaggaagaca

SEQ ID NO: 255585 - DNA, 25 bp, Probe Sequence
gtgttgtcagccatcttgggaagac

SEQ ID NO: 255586 - DNA, 25 bp, Probe Sequence
gtgatcccaccactggggagactga

SEQ ID NO: 255587 - DNA, 25 bp, Probe Sequence
gtgtctgcccgacagggagacggca

SEQ ID NO: 255588 - DNA, 25 bp, Probe Sequence
gtgatcatccacaagccaaagaaca

SEQ ID NO: 255589 - DNA, 25 bp, Probe Sequence
gtgatctagtcaagccacagttatc

SEQ ID NO: 255590 - DNA, 25 bp, Probe Sequence
gtgattgagtacctgcagagctttc

SEQ ID NO: 255591 - DNA, 25 bp, Probe Sequence
gtgatatgatgctcggctgattttt

SEQ ID NO: 255592 - DNA, 25 bp, Probe Sequence
gtgattgatgctgttttcttttaaa

SEQ ID NO: 255593 - DNA, 25 bp, Probe Sequence
gtgattgatgctgttttcttttaaa

SEQ ID NO: 255594 - DNA, 25 bp, Probe Sequence
gtgtaactgaatttttgtatccaaa

SEQ ID NO: 255595 - DNA, 25 bp, Probe Sequence
gtgtaactggaatcttttgcctctc

SEQ ID NO: 255596 - DNA, 25 bp, Probe Sequence
gtgtatgcacgtaaagtttgtactt

SEQ ID NO: 255597 - DNA, 25 bp, Probe Sequence
gtgatccactgtaatagtccagttt

SEQ ID NO: 255598 - DNA, 25 bp, Probe Sequence
gtgatccttcttacttccagaatgt

SEQ ID NO: 255599 - DNA, 25 bp, Probe Sequence
gtgatccaccatgttggcacaaatt

SEQ ID NO: 255600 - DNA, 25 bp, Probe Sequence
gtgattgaatctgattggacatttt

SEQ ID NO: 255601 - DNA, 25 bp, Probe Sequence
gtgattctttgactgtgacactatt

SEQ ID NO: 255602 - DNA, 25 bp, Probe Sequence
gtgaggtttatgcctacatttattc

SEQ ID NO: 255603 - DNA, 25 bp, Probe Sequence
gtgatggtcttcaagccaattgttg

SEQ ID NO: 255604 - DNA, 25 bp, Probe Sequence
gtgatgtatcatgatagtcacaaac

SEQ ID NO: 255605 - DNA, 25 bp, Probe Sequence
gtgatggtcatcaaagacagcccac

SEQ ID NO: 255606 - DNA, 25 bp, Probe Sequence
gtgatgttccacaagtgcagctgta

SEQ ID NO: 255607 - DNA, 25 bp, Probe Sequence
gtgattccagataaccagctgtaac

SEQ ID NO: 255608 - DNA, 25 bp, Probe Sequence
gtgatttcagatgggggctggctac

SEQ ID NO: 255609 - DNA, 25 bp, Probe Sequence
gtgttgtattgggatggggctgagg

SEQ ID NO: 255610 - DNA, 25 bp, Probe Sequence
gtgtatctactgtattcgtccagag

SEQ ID NO: 255611 - DNA, 25 bp, Probe Sequence
gtgtttactgctttcagtcgacctg

SEQ ID NO: 255612 - DNA, 25 bp, Probe Sequence
gtgtttcatactttagcatcaacgc

SEQ ID NO: 255613 - DNA, 25 bp, Probe Sequence
gtgttctcatgagcctaaggaccat

SEQ ID NO: 255614 - DNA, 25 bp, Probe Sequence
gtgttctcagtagtctaagtattcc

SEQ ID NO: 255615 - DNA, 25 bp, Probe Sequence
gtgatctcttgtccactaagtatct

SEQ ID NO: 255616 - DNA, 25 bp, Probe Sequence
gtgattctgtgtctacatgttattt

SEQ ID NO: 255617 - DNA, 25 bp, Probe Sequence
gtgattccggtttttgtcagtacat

SEQ ID NO: 255618 - DNA, 25 bp, Probe Sequence
gtgtctctgcgggattgtttcaacc

SEQ ID NO: 255619 - DNA, 25 bp, Probe Sequence
gtgatgccagggaatgttcttcttc

SEQ ID NO: 255620 - DNA, 25 bp, Probe Sequence
gtgatgcccggaatatctggggtcc

SEQ ID NO: 255621 - DNA, 25 bp, Probe Sequence
gtgatgccggaatatcggggtcaag

SEQ ID NO: 255622 - DNA, 25 bp, Probe Sequence
gtgaggcagatatgtatcggggata

SEQ ID NO: 255623 - DNA, 25 bp, Probe Sequence
gtgattcgtcatagtctctggggta

SEQ ID NO: 255624 - DNA, 25 bp, Probe Sequence
gtgattcgctctagacttttgttgg

SEQ ID NO: 255625 - DNA, 25 bp, Probe Sequence
gtgatttctgaagcgtttgtgtgtg

SEQ ID NO: 255626 - DNA, 25 bp, Probe Sequence
gtgattctctgctaggcctaagatt

SEQ ID NO: 255627 - DNA, 25 bp, Probe Sequence
gtgtttctaaaggctacgtcttcca

SEQ ID NO: 255628 - DNA, 25 bp, Probe Sequence
gtgtttcatatgccaagtacgcccc

SEQ ID NO: 255629 - DNA, 25 bp, Probe Sequence
gtgatgtgtccttctattgacccac

SEQ ID NO: 255630 - DNA, 25 bp, Probe Sequence
gtgatggtagcgttggtgccaggcc

SEQ ID NO: 255631 - DNA, 25 bp, Probe Sequence
gtgatggggctgttgagatgcctgt

SEQ ID NO: 255632 - DNA, 25 bp, Probe Sequence
gtgaggagtgcggggagcttctcct

SEQ ID NO: 255633 - DNA, 25 bp, Probe Sequence
gtgatggagggcagggcagctccca

SEQ ID NO: 255634 - DNA, 25 bp, Probe Sequence
gtgtcagaaacaaggacctctcccg

SEQ ID NO: 255635 - DNA, 25 bp, Probe Sequence
gtgtccaagacactgagatgggccc

SEQ ID NO: 255636 - DNA, 25 bp, Probe Sequence
gtgtccagcagtatggaatggttca

SEQ ID NO: 255637 - DNA, 25 bp, Probe Sequence
gtgatctagctaaaaaaggagtgaa

SEQ ID NO: 255638 - DNA, 25 bp, Probe Sequence
gtgatcaaccagtaccaggtggtga

SEQ ID NO: 255639 - DNA, 25 bp, Probe Sequence
gtgataaatcagtaccgggcaatag

SEQ ID NO: 255640 - DNA, 25 bp, Probe Sequence
gtgaggtcatgcttacaggggacat

SEQ ID NO: 255641 - DNA, 25 bp, Probe Sequence
gtgaggttgcaggcagggtgcgaat

SEQ ID NO: 255642 - DNA, 25 bp, Probe Sequence
gtgattttgacctgagtgctaagag

SEQ ID NO: 255643 - DNA, 25 bp, Probe Sequence
gtgatttttcactgacagtaatgac

SEQ ID NO: 255644 - DNA, 25 bp, Probe Sequence
gtgatggtttgcttcgggaacatgt

SEQ ID NO: 255645 - DNA, 25 bp, Probe Sequence
gtgatgcgtttggccagtacaatca

SEQ ID NO: 255646 - DNA, 25 bp, Probe Sequence
gtgatggatgtgacacctcataaaa

SEQ ID NO: 255647 - DNA, 25 bp, Probe Sequence
gtgatgaatcacaacagaattaaga

SEQ ID NO: 255648 - DNA, 25 bp, Probe Sequence
gtgatgaatcaacaagatttccaca

SEQ ID NO: 255649 - DNA, 25 bp, Probe Sequence
gtgatgaggaggtggattatagcaa

SEQ ID NO: 255650 - DNA, 25 bp, Probe Sequence
gtgatgaggaggtggattatagcaa

SEQ ID NO: 255651 - DNA, 25 bp, Probe Sequence
gtgatgtggggatgtgtagtgaaag

SEQ ID NO: 255652 - DNA, 25 bp, Probe Sequence
gtgatgtgctggaacgggagtttca

SEQ ID NO: 255653 - DNA, 25 bp, Probe Sequence
gtgatgttagctataaatgtttcat

SEQ ID NO: 255654 - DNA, 25 bp, Probe Sequence
gtgatttatctttcaagagtctctc

SEQ ID NO: 255655 - DNA, 25 bp, Probe Sequence
gtgattcgttgaagaggaggtgctc

SEQ ID NO: 255656 - DNA, 25 bp, Probe Sequence
gtgatccctctgggaagagcttgtc

SEQ ID NO: 255657 - DNA, 25 bp, Probe Sequence
gtgatacccagcatgtgaacatctg

SEQ ID NO: 255658 - DNA, 25 bp, Probe Sequence
gtgtacattgagactggcagccatc

SEQ ID NO: 255659 - DNA, 25 bp, Probe Sequence
gtgatatacctgagccagcacatca

SEQ ID NO: 255660 - DNA, 25 bp, Probe Sequence
gtgatgtacctcagccacatatacc

SEQ ID NO: 255661 - DNA, 25 bp, Probe Sequence
gtgttacattattccaatgataccc

SEQ ID NO: 255662 - DNA, 25 bp, Probe Sequence
gtgttactataaaattgaactctaa

SEQ ID NO: 255663 - DNA, 25 bp, Probe Sequence
gtgttggctgataaaattgccctga

SEQ ID NO: 255664 - DNA, 25 bp, Probe Sequence
gtgttggtgattccagtggactgta

SEQ ID NO: 255665 - DNA, 25 bp, Probe Sequence
gtgttgccaattcagatgaacagct

SEQ ID NO: 255666 - DNA, 25 bp, Probe Sequence
gtgatggccacagtcaagaaaggca

SEQ ID NO: 255667 - DNA, 25 bp, Probe Sequence
gtgatccacaaggctcagataaggc

SEQ ID NO: 255668 - DNA, 25 bp, Probe Sequence
gtgatacaaatcgcagagctgaggc

SEQ ID NO: 255669 - DNA, 25 bp, Probe Sequence
gtgttctgcctcacatgatcgagag

SEQ ID NO: 255670 - DNA, 25 bp, Probe Sequence
gtgattattctcgcatgataaggat

SEQ ID NO: 255671 - DNA, 25 bp, Probe Sequence
gtgattattccctagtgaatgagaa

SEQ ID NO: 255672 - DNA, 25 bp, Probe Sequence
gtgttctcccgctgcagaggagacg

SEQ ID NO: 255673 - DNA, 25 bp, Probe Sequence
gtgttgccgtgctcagacagaaacg

SEQ ID NO: 255674 - DNA, 25 bp, Probe Sequence
gtgttccgtctccaataattaatca

SEQ ID NO: 255675 - DNA, 25 bp, Probe Sequence
gtgttcctgttgcttggactttaac

SEQ ID NO: 255676 - DNA, 25 bp, Probe Sequence
gtgtaccggtgggaggttctataat

SEQ ID NO: 255677 - DNA, 25 bp, Probe Sequence
gtgtaacctaggagattttatagtt

SEQ ID NO: 255678 - DNA, 25 bp, Probe Sequence
gtgtagtttccgagatgtactatat

SEQ ID NO: 255679 - DNA, 25 bp, Probe Sequence
gtgtaaatatccccactgtactgtt

SEQ ID NO: 255680 - DNA, 25 bp, Probe Sequence
gtgttgaatctcacacactgtactt

SEQ ID NO: 255681 - DNA, 25 bp, Probe Sequence
gtgttgagtctcttgattgtgtcat

SEQ ID NO: 255682 - DNA, 25 bp, Probe Sequence
gtgtctaggccatctgagtgtgaca

SEQ ID NO: 255683 - DNA, 25 bp, Probe Sequence
gtgttctgtctcacaggtctgacat

SEQ ID NO: 255684 - DNA, 25 bp, Probe Sequence
gtgttctttccccaggggcatgact

SEQ ID NO: 255685 - DNA, 25 bp, Probe Sequence
gtgtttttccacaagtgccgcaaat

SEQ ID NO: 255686 - DNA, 25 bp, Probe Sequence
gtgtttagatcggaagtgcctacaa

SEQ ID NO: 255687 - DNA, 25 bp, Probe Sequence
ggtctttcactgacaattccaacat

SEQ ID NO: 255688 - DNA, 25 bp, Probe Sequence
gtgattgaatcactaacacccacca

SEQ ID NO: 255689 - DNA, 25 bp, Probe Sequence
gtgattcatgaggaatccaccccca

SEQ ID NO: 255690 - DNA, 25 bp, Probe Sequence
gtgtatcatatgccaagtacgcccc

SEQ ID NO: 255691 - DNA, 25 bp, Probe Sequence
gtgtatcatatgccaagtacgcccc

SEQ ID NO: 255692 - DNA, 25 bp, Probe Sequence
gtgtatcatatgccaagtacgcccc

SEQ ID NO: 255693 - DNA, 25 bp, Probe Sequence
gtgtatcatatgccaagtacgcccc

SEQ ID NO: 255694 - DNA, 25 bp, Probe Sequence
gtgtatcatatgccaagtacgcccc

SEQ ID NO: 255695 - DNA, 25 bp, Probe Sequence
gtgtatcatatgccaagtacgcccc

SEQ ID NO: 255696 - DNA, 25 bp, Probe Sequence
gtgtatcatatgccaagtacgcccc

SEQ ID NO: 255697 - DNA, 25 bp, Probe Sequence
gtgtatcatatgccaagtacgcccc

SEQ ID NO: 255698 - DNA, 25 bp, Probe Sequence
gtgtatcatatgccaagtacgcccc

SEQ ID NO: 255699 - DNA, 25 bp, Probe Sequence
gtgtatcatatgccaagtacgcccc

SEQ ID NO: 255700 - DNA, 25 bp, Probe Sequence
gtgtatcatatgccaagtacgcccc

SEQ ID NO: 255701 - DNA, 25 bp, Probe Sequence
gtgtatcatatgccaagtacgcccc

SEQ ID NO: 255702 - DNA, 25 bp, Probe Sequence
gtgtatcatatgcctagtacgcccc

SEQ ID NO: 255703 - DNA, 25 bp, Probe Sequence
gtgtcaatggcattgcttgggcccc

SEQ ID NO: 255704 - DNA, 25 bp, Probe Sequence
gtgatacattttatggagtgcctca

SEQ ID NO: 255705 - DNA, 25 bp, Probe Sequence
gtgatgacttgtaactgtaatccca

SEQ ID NO: 255706 - DNA, 25 bp, Probe Sequence
gtgatctgcttttatctaaatgcaa

SEQ ID NO: 255707 - DNA, 25 bp, Probe Sequence
gtgatgcgcttttgtcagctacatc

SEQ ID NO: 255708 - DNA, 25 bp, Probe Sequence
gtgatggttatattgcctagcaagc

SEQ ID NO: 255709 - DNA, 25 bp, Probe Sequence
gtgatcagttaatgcctaagagtga

SEQ ID NO: 255710 - DNA, 25 bp, Probe Sequence
gtgtattctagatcatctaagatcc

SEQ ID NO: 255711 - DNA, 25 bp, Probe Sequence
gtgttctctgagacccatgatcagg

SEQ ID NO: 255712 - DNA, 25 bp, Probe Sequence
gtgttctgtggtacttgctgagaga

SEQ ID NO: 255713 - DNA, 25 bp, Probe Sequence
gtgattgttggcacatcctatgcaa

SEQ ID NO: 255714 - DNA, 25 bp, Probe Sequence
gtgtctttggcccatttgtaagtcc

SEQ ID NO: 255715 - DNA, 25 bp, Probe Sequence
gtgtctgtatacactgggtaacctg

SEQ ID NO: 255716 - DNA, 25 bp, Probe Sequence
gtgtccttcattgctggtttaactg

SEQ ID NO: 255717 - DNA, 25 bp, Probe Sequence
gtgttgtacatgtctctggtttcag

SEQ ID NO: 255718 - DNA, 25 bp, Probe Sequence
gtgattgtcaaatgtggtcccagaa

SEQ ID NO: 255719 - DNA, 25 bp, Probe Sequence
gtgattgtcatgtaaggcttaacac

SEQ ID NO: 255720 - DNA, 25 bp, Probe Sequence
gtgatgcgttggaaggttaatcgaa

SEQ ID NO: 255721 - DNA, 25 bp, Probe Sequence
gtgtcgatatcgcagctttcaacaa

SEQ ID NO: 255722 - DNA, 25 bp, Probe Sequence
gtgttggatccatgtaatcaccaga

SEQ ID NO: 255723 - DNA, 25 bp, Probe Sequence
gtgttggactgctaggagaacttgt

SEQ ID NO: 255724 - DNA, 25 bp, Probe Sequence
gtgtttctatgattgtaaactatta

SEQ ID NO: 255725 - DNA, 25 bp, Probe Sequence
gtgttgcttggactattataattta

SEQ ID NO: 255726 - DNA, 25 bp, Probe Sequence
gtgttttggtgttttgcacttctgt

SEQ ID NO: 255727 - DNA, 25 bp, Probe Sequence
gtgttttggtgttttgcacttctgt

SEQ ID NO: 255728 - DNA, 25 bp, Probe Sequence
gggcggtggaaaatagcctttgcca

SEQ ID NO: 255729 - DNA, 25 bp, Probe Sequence
gtgggtggaaaaatcaacgtggcct

SEQ ID NO: 255730 - DNA, 25 bp, Probe Sequence
gtgggtggaataagttgatttggcc

SEQ ID NO: 255731 - DNA, 25 bp, Probe Sequence
gggccttgacaaagtgtaaaccgca

SEQ ID NO: 255732 - DNA, 25 bp, Probe Sequence
gggccttgacaaagtgtaaaccgca

SEQ ID NO: 255733 - DNA, 25 bp, Probe Sequence
gggccttgacaaagtgtaaaccgca

SEQ ID NO: 255734 - DNA, 25 bp, Probe Sequence
gggctgtttaaagtgtcacccctca

SEQ ID NO: 255735 - DNA, 25 bp, Probe Sequence
gtgtttttggaagtttccagccgca

SEQ ID NO: 255736 - DNA, 25 bp, Probe Sequence
gtgttttctagttataaccaccagc

SEQ ID NO: 255737 - DNA, 25 bp, Probe Sequence
gtgttctctcaagaagaaagcgtca

SEQ ID NO: 255738 - DNA, 25 bp, Probe Sequence
gtgttcaccaatgagaggttcccat

SEQ ID NO: 255739 - DNA, 25 bp, Probe Sequence
gtgttcagccctgtggagttcaaca

SEQ ID NO: 255740 - DNA, 25 bp, Probe Sequence
gtgtccccagtcatagaaacaacct

SEQ ID NO: 255741 - DNA, 25 bp, Probe Sequence
gtgtccgggtggttaagagcatatc

SEQ ID NO: 255742 - DNA, 25 bp, Probe Sequence
gtgtatccgagggtctgcaggacga

SEQ ID NO: 255743 - DNA, 25 bp, Probe Sequence
gtgtcaccgtggggacaggagagaa

SEQ ID NO: 255744 - DNA, 25 bp, Probe Sequence
gtgatacctggggagtctggagaca

SEQ ID NO: 255745 - DNA, 25 bp, Probe Sequence
gtgtccacggtggtttgatcaacaa

SEQ ID NO: 255746 - DNA, 25 bp, Probe Sequence
gtgataaatgttgtttcaaattact

SEQ ID NO: 255747 - DNA, 25 bp, Probe Sequence
gtgataaaagtcgtttcacaaataa

SEQ ID NO: 255748 - DNA, 25 bp, Probe Sequence
gtgataacacagatctttacaactt

SEQ ID NO: 255749 - DNA, 25 bp, Probe Sequence
gtgataaacactaggttgattccat

SEQ ID NO: 255750 - DNA, 25 bp, Probe Sequence
gtgtaaagactatgatctcatccca

SEQ ID NO: 255751 - DNA, 25 bp, Probe Sequence
gtgtaggagaatttgcagtcagcca

SEQ ID NO: 255752 - DNA, 25 bp, Probe Sequence
gtgtcaccagattttggtcaccaat

SEQ ID NO: 255753 - DNA, 25 bp, Probe Sequence
gtgatgcattagcttctgggaacaa

SEQ ID NO: 255754 - DNA, 25 bp, Probe Sequence
gtgatctcctggcattggagaccct

SEQ ID NO: 255755 - DNA, 25 bp, Probe Sequence
gtgtctgtctgcagattggctaccc

SEQ ID NO: 255756 - DNA, 25 bp, Probe Sequence
gtgatgctggccaaatggtgctcag

SEQ ID NO: 255757 - DNA, 25 bp, Probe Sequence
gtgatcggcctgcatgaggatgacg

SEQ ID NO: 255758 - DNA, 25 bp, Probe Sequence
gtgatcttgcctgtgagatgagggc

SEQ ID NO: 255759 - DNA, 25 bp, Probe Sequence
gtgtttgctcactaagcagggtcgt

SEQ ID NO: 255760 - DNA, 25 bp, Probe Sequence
gtgtttatcagcaagtcgtgagtca

SEQ ID NO: 255761 - DNA, 25 bp, Probe Sequence
gtgttgagatccagtgcagttgtga

SEQ ID NO: 255762 - DNA, 25 bp, Probe Sequence
gtgttggactgttgccacagtgcag

SEQ ID NO: 255763 - DNA, 25 bp, Probe Sequence
gtgtattgactttacaaagcagaca

SEQ ID NO: 255764 - DNA, 25 bp, Probe Sequence
gtgtcttacctttgcaagattgacc

SEQ ID NO: 255765 - DNA, 25 bp, Probe Sequence
gtgtttacctttccagaatacagcc

SEQ ID NO: 255766 - DNA, 25 bp, Probe Sequence
gtgtttacttatagaagttcaacca

SEQ ID NO: 255767 - DNA, 25 bp, Probe Sequence
gtgtatgtatttctgctgagtgata

SEQ ID NO: 255768 - DNA, 25 bp, Probe Sequence
gtgattgttttgtttactgtaagtt

SEQ ID NO: 255769 - DNA, 25 bp, Probe Sequence
gtgttgttatttttaggtgaatgtt

SEQ ID NO: 255770 - DNA, 25 bp, Probe Sequence
gtgttttcttgttcaaggatggtga

SEQ ID NO: 255771 - DNA, 25 bp, Probe Sequence
tgtcctaatttatattggaggtatg

SEQ ID NO: 255772 - DNA, 25 bp, Probe Sequence
gtgttaatttagtgttgcaggtaga

SEQ ID NO: 255773 - DNA, 25 bp, Probe Sequence
gtgtttttatattcgttctttagat

SEQ ID NO: 255774 - DNA, 25 bp, Probe Sequence
gtggtcccttcaaagttgttataat

SEQ ID NO: 255775 - DNA, 25 bp, Probe Sequence
gtgttcaccttcaaaatgttctatt

SEQ ID NO: 255776 - DNA, 25 bp, Probe Sequence
gtgtctactcatacatagaattgcc

SEQ ID NO: 255777 - DNA, 25 bp, Probe Sequence
gtgtccacactgactacattgtccc

SEQ ID NO: 255778 - DNA, 25 bp, Probe Sequence
gtgattaactgcttatattttgcca

SEQ ID NO: 255779 - DNA, 25 bp, Probe Sequence
gtgattgtactcttatcatgtcatt

SEQ ID NO: 255780 - DNA, 25 bp, Probe Sequence
gtgatcgtggtacagcattagctga

SEQ ID NO: 255781 - DNA, 25 bp, Probe Sequence
gtgatcagggttgagatgtcaggaa

SEQ ID NO: 255782 - DNA, 25 bp, Probe Sequence
gtgtgcagggttcttgctgggagta

SEQ ID NO: 255783 - DNA, 25 bp, Probe Sequence
gtgttggccattggtactgggcagg

SEQ ID NO: 255784 - DNA, 25 bp, Probe Sequence
gtgttggtacaggcttctgcatgcc

SEQ ID NO: 255785 - DNA, 25 bp, Probe Sequence
gtgttcgtcacaggatttggatcca

SEQ ID NO: 255786 - DNA, 25 bp, Probe Sequence
gtgttttccaaagctagatacactg

SEQ ID NO: 255787 - DNA, 25 bp, Probe Sequence
gtgattgttccataataaacttctg

SEQ ID NO: 255788 - DNA, 25 bp, Probe Sequence
gtgttattctactctaaatttcatg

SEQ ID NO: 255789 - DNA, 25 bp, Probe Sequence
gtgttattgaactgtaattctctca

SEQ ID NO: 255790 - DNA, 25 bp, Probe Sequence
gtgttgggtatcagtatcttctctc

SEQ ID NO: 255791 - DNA, 25 bp, Probe Sequence
gtgttgagagaacgtccttctgtcc

SEQ ID NO: 255792 - DNA, 25 bp, Probe Sequence
gtgttgaagatactgcagtcatttt

SEQ ID NO: 255793 - DNA, 25 bp, Probe Sequence
gtgttgaagatactgcagtcatttt

SEQ ID NO: 255794 - DNA, 25 bp, Probe Sequence
gtgatgccaaaacgcgtcttcttaa

SEQ ID NO: 255795 - DNA, 25 bp, Probe Sequence
gtgtcccaaaaggctgttcaaaatg

SEQ ID NO: 255796 - DNA, 25 bp, Probe Sequence
gtgtcacctcaaaggccttgaagaa

SEQ ID NO: 255797 - DNA, 25 bp, Probe Sequence
gtgtacacacagaggcacatgtgca

SEQ ID NO: 255798 - DNA, 25 bp, Probe Sequence
gtgtatgcatgcagtttcaaggcac

SEQ ID NO: 255799 - DNA, 25 bp, Probe Sequence
gtgatatgccacttttagatagcta

SEQ ID NO: 255800 - DNA, 25 bp, Probe Sequence
gtgatcagtcatttttatgtagaaa

SEQ ID NO: 255801 - DNA, 25 bp, Probe Sequence
gtgtcattgcatttaattcccatac

SEQ ID NO: 255802 - DNA, 25 bp, Probe Sequence
gtggatgtaaataaccccattcttt

SEQ ID NO: 255803 - DNA, 25 bp, Probe Sequence
gggtctcagttagcccaagtttctt

SEQ ID NO: 255804 - DNA, 25 bp, Probe Sequence
ggtgactagctatactccaacttta

SEQ ID NO: 255805 - DNA, 25 bp, Probe Sequence
gggccttgctgagaaccaaggtttt

SEQ ID NO: 255806 - DNA, 25 bp, Probe Sequence
ggacctgcattagaaacatttttta

SEQ ID NO: 255807 - DNA, 25 bp, Probe Sequence
gtgtactcttagcaatccattattt

SEQ ID NO: 255808 - DNA, 25 bp, Probe Sequence
gtgtacatctaagagccctctgcag

SEQ ID NO: 255809 - DNA, 25 bp, Probe Sequence
gtgtactcgacagattatctctgag

SEQ ID NO: 255810 - DNA, 25 bp, Probe Sequence
gtgtattacatctcattatccttcc

SEQ ID NO: 255811 - DNA, 25 bp, Probe Sequence
gtgttcgtatctttatttattccct

SEQ ID NO: 255812 - DNA, 25 bp, Probe Sequence
gtgatcttgtatgtttgttttctga

SEQ ID NO: 255813 - DNA, 25 bp, Probe Sequence
gtgatctcgcaaagttattcttcca

SEQ ID NO: 255814 - DNA, 25 bp, Probe Sequence
gtgatctccattactttattttcct

SEQ ID NO: 255815 - DNA, 25 bp, Probe Sequence
gtgttccatggtgtgtatttttatt

SEQ ID NO: 255816 - DNA, 25 bp, Probe Sequence
gtgttccatagtttattgttttcct

SEQ ID NO: 255817 - DNA, 25 bp, Probe Sequence
gtgttccataaattatcttgccttt

SEQ ID NO: 255818 - DNA, 25 bp, Probe Sequence
gtgtgtcttaagtaacttacgtgtc

SEQ ID NO: 255819 - DNA, 25 bp, Probe Sequence
gtgttttactgtcagattaaattac

SEQ ID NO: 255820 - DNA, 25 bp, Probe Sequence
gtgttttactgtcagattaaattac

SEQ ID NO: 255821 - DNA, 25 bp, Probe Sequence
gtgtttggacggctcaggatactgt

SEQ ID NO: 255822 - DNA, 25 bp, Probe Sequence
gtgtttgcgtagccttagggaagga

SEQ ID NO: 255823 - DNA, 25 bp, Probe Sequence
gtgatttggccaggctctatgggag

SEQ ID NO: 255824 - DNA, 25 bp, Probe Sequence
gtgatttggccaggctctatgggag

SEQ ID NO: 255825 - DNA, 25 bp, Probe Sequence
gtgttcgtgtaggcataatgtgagg

SEQ ID NO: 255826 - DNA, 25 bp, Probe Sequence
gtgttcgtgtaggcataatgtgagg

SEQ ID NO: 255827 - DNA, 25 bp, Probe Sequence
gtgttgatgtgcacagctaatgatt

SEQ ID NO: 255828 - DNA, 25 bp, Probe Sequence
gtgtgcatgaggatcagaatagtct

SEQ ID NO: 255829 - DNA, 25 bp, Probe Sequence
gtgtgctcagtgccatgaagatgga

SEQ ID NO: 255830 - DNA, 25 bp, Probe Sequence
gtgtcttctgcactcatgatatgga

SEQ ID NO: 255831 - DNA, 25 bp, Probe Sequence
gtgatcatatcggcactaagtgaca

SEQ ID NO: 255832 - DNA, 25 bp, Probe Sequence
gtgtcagagcagccacctaagagca

SEQ ID NO: 255833 - DNA, 25 bp, Probe Sequence
gtgtcaggcactcatctaagaactc

SEQ ID NO: 255834 - DNA, 25 bp, Probe Sequence
gtgtcagcatgcatagtgctaagaa

SEQ ID NO: 255835 - DNA, 25 bp, Probe Sequence
gtgtatacatcttgatcattagcaa

SEQ ID NO: 255836 - DNA, 25 bp, Probe Sequence
gtgttcatctgtgacattaaaagtt

SEQ ID NO: 255837 - DNA, 25 bp, Probe Sequence
gtgttgccgcttcattaagtggttc

SEQ ID NO: 255838 - DNA, 25 bp, Probe Sequence
gtgttccctaggttgtagctgtgat

SEQ ID NO: 255839 - DNA, 25 bp, Probe Sequence
gtgttcctaaggtgtgaatcttgag

SEQ ID NO: 255840 - DNA, 25 bp, Probe Sequence
gtgtacctagagccaaggaaattgg

SEQ ID NO: 255841 - DNA, 25 bp, Probe Sequence
gtgtacagcaaccaaaatggtaggg

SEQ ID NO: 255842 - DNA, 25 bp, Probe Sequence
gtgtccgaaccaggggctgtaatgg

SEQ ID NO: 255843 - DNA, 25 bp, Probe Sequence
gtgtcctgaagtggggagcgcttat

SEQ ID NO: 255844 - DNA, 25 bp, Probe Sequence
gtgtccaaaggttgtcacagttcat

SEQ ID NO: 255845 - DNA, 25 bp, Probe Sequence
gtgttcggagagatggaagaccatg

SEQ ID NO: 255846 - DNA, 25 bp, Probe Sequence
gtgtccaggggcttggagagacctg

SEQ ID NO: 255847 - DNA, 25 bp, Probe Sequence
gtgtttcgggcatgggcaaagcctg

SEQ ID NO: 255848 - DNA, 25 bp, Probe Sequence
gtgtttctgggctgcgaagacatgg

SEQ ID NO: 255849 - DNA, 25 bp, Probe Sequence
gtgtttcgtgtctaccatatatgca

SEQ ID NO: 255850 - DNA, 25 bp, Probe Sequence
gtgttctttgcttacaattgtgact

SEQ ID NO: 255851 - DNA, 25 bp, Probe Sequence
gtgttctcttctgttactgatatgt

SEQ ID NO: 255852 - DNA, 25 bp, Probe Sequence
gtgtattcattcatattgactgtaa

SEQ ID NO: 255853 - DNA, 25 bp, Probe Sequence
gtgatacttgatatataacgatata

SEQ ID NO: 255854 - DNA, 25 bp, Probe Sequence
gtggactggatcaacgaccggatac

SEQ ID NO: 255855 - DNA, 25 bp, Probe Sequence
gtgtatagaccatcgatgccagcgt

SEQ ID NO: 255856 - DNA, 25 bp, Probe Sequence
gtgttacacatatattgtcagaatt

SEQ ID NO: 255857 - DNA, 25 bp, Probe Sequence
gtgttgccaatgtgatgatattaag

SEQ ID NO: 255858 - DNA, 25 bp, Probe Sequence
gtgtcctacatggggttgtgaagcg

SEQ ID NO: 255859 - DNA, 25 bp, Probe Sequence
gtgtcctttagggctcttggagcag

SEQ ID NO: 255860 - DNA, 25 bp, Probe Sequence
gtgtccttaagggttctgtagtgtt

SEQ ID NO: 255861 - DNA, 25 bp, Probe Sequence
gtgtccttaagtacttcctgaagat

SEQ ID NO: 255862 - DNA, 25 bp, Probe Sequence
gtgttctaattgatctctcctaaag

SEQ ID NO: 255863 - DNA, 25 bp, Probe Sequence
gtgtccatcataatgtttcgcctta

SEQ ID NO: 255864 - DNA, 25 bp, Probe Sequence
gtgttcatctgaggactgcatcggt

SEQ ID NO: 255865 - DNA, 25 bp, Probe Sequence
gtgttcatctgaggactgcatcggt

SEQ ID NO: 255866 - DNA, 25 bp, Probe Sequence
gtgtccatcgagcacgtctgaaacc

SEQ ID NO: 255867 - DNA, 25 bp, Probe Sequence
gtgtcccctggagagcaagatagcc

SEQ ID NO: 255868 - DNA, 25 bp, Probe Sequence
gtgtacctcgtaggaacgctgagct

SEQ ID NO: 255869 - DNA, 25 bp, Probe Sequence
gtgtcactctctaaatgaccaaagt

SEQ ID NO: 255870 - DNA, 25 bp, Probe Sequence
gtgttcgctctaaacaaaacagtgg

SEQ ID NO: 255871 - DNA, 25 bp, Probe Sequence
gtgttcctttagacaaagttgtgac

SEQ ID NO: 255872 - DNA, 25 bp, Probe Sequence
gtgatttttttccacaagatctgta

SEQ ID NO: 255873 - DNA, 25 bp, Probe Sequence
gtgatttttttccacaagatctgta

SEQ ID NO: 255874 - DNA, 25 bp, Probe Sequence
gtgatattttctactactacatatt

SEQ ID NO: 255875 - DNA, 25 bp, Probe Sequence
gtgttttcatctcctaaaagtgttt

SEQ ID NO: 255876 - DNA, 25 bp, Probe Sequence
gtgtttaataccaagaagagtactt

SEQ ID NO: 255877 - DNA, 25 bp, Probe Sequence
gtgtgtaaaacctagtagagcttgc

SEQ ID NO: 255878 - DNA, 25 bp, Probe Sequence
gtgttcatttaccaagttgacccag

SEQ ID NO: 255879 - DNA, 25 bp, Probe Sequence
gtgattttcatagaacctaccactt

SEQ ID NO: 255880 - DNA, 25 bp, Probe Sequence
gtgttgttcacagtaatccttacca

SEQ ID NO: 255881 - DNA, 25 bp, Probe Sequence
gtgttttgcaaaaatagcttcagca

SEQ ID NO: 255882 - DNA, 25 bp, Probe Sequence
gtgttgcttctattttacctcaaat

SEQ ID NO: 255883 - DNA, 25 bp, Probe Sequence
gtgttctgtggattcttactctgta

SEQ ID NO: 255884 - DNA, 25 bp, Probe Sequence
gtgatactgaggattctgaccctgt

SEQ ID NO: 255885 - DNA, 25 bp, Probe Sequence
gtgtaaagagttgtcctctctgtct

SEQ ID NO: 255886 - DNA, 25 bp, Probe Sequence
gtgtcaaactttgttccctggattc

SEQ ID NO: 255887 - DNA, 25 bp, Probe Sequence
gtgtatatttttgtgtccagttata

SEQ ID NO: 255888 - DNA, 25 bp, Probe Sequence
gtgtcaatgttaacctgtctcagat

SEQ ID NO: 255889 - DNA, 25 bp, Probe Sequence
gtgatagagctaacccttatctgta

SEQ ID NO: 255890 - DNA, 25 bp, Probe Sequence
gtgatagagcaagaacctgtctcaa

SEQ ID NO: 255891 - DNA, 25 bp, Probe Sequence
gtgttgaaatcaaacctgccgcaac

SEQ ID NO: 255892 - DNA, 25 bp, Probe Sequence
gtgttgagagttgcactcccagaaa

SEQ ID NO: 255893 - DNA, 25 bp, Probe Sequence
gtgtctaattgtgcctagccagtat

SEQ ID NO: 255894 - DNA, 25 bp, Probe Sequence
gtgttcagttctgttacacagtgca

SEQ ID NO: 255895 - DNA, 25 bp, Probe Sequence
gtgttggttaagttgacaaggcaaa

SEQ ID NO: 255896 - DNA, 25 bp, Probe Sequence
gtgtctggttaagtgtcccatggaa

SEQ ID NO: 255897 - DNA, 25 bp, Probe Sequence
gtgtctggttaagtgtcccatggaa

SEQ ID NO: 255898 - DNA, 25 bp, Probe Sequence
gtgtgctcagtaaagtcttccatcc

SEQ ID NO: 255899 - DNA, 25 bp, Probe Sequence
gtgttcagcataccagtttgtctct

SEQ ID NO: 255900 - DNA, 25 bp, Probe Sequence
gtgttcacatatgtttttcattttc

SEQ ID NO: 255901 - DNA, 25 bp, Probe Sequence
gtgttcacagtggtcatttccatac

SEQ ID NO: 255902 - DNA, 25 bp, Probe Sequence
gtgttctcagtataactccatctgc

SEQ ID NO: 255903 - DNA, 25 bp, Probe Sequence
gtgttcctgaatgaagctgcttttg

SEQ ID NO: 255904 - DNA, 25 bp, Probe Sequence
gtgattcctgatagaacagacttta

SEQ ID NO: 255905 - DNA, 25 bp, Probe Sequence
gtgtagcactgaagaactgtcagct

SEQ ID NO: 255906 - DNA, 25 bp, Probe Sequence
gtgtcaacttcatatcttgagtaga

SEQ ID NO: 255907 - DNA, 25 bp, Probe Sequence
gtgtgcaactaactgactctgttat

SEQ ID NO: 255908 - DNA, 25 bp, Probe Sequence
gtgtgaattccaataccggctatgt

SEQ ID NO: 255909 - DNA, 25 bp, Probe Sequence
gtgtacatatcattaagcattggct

SEQ ID NO: 255910 - DNA, 25 bp, Probe Sequence
gtgtcacttcagtaattctggtagc

SEQ ID NO: 255911 - DNA, 25 bp, Probe Sequence
gtgtccagtatgtaaagctgggatc

SEQ ID NO: 255912 - DNA, 25 bp, Probe Sequence
gtgtcggttctatgactgatgaaca

SEQ ID NO: 255913 - DNA, 25 bp, Probe Sequence
gtgttgggattactgactcataacc

SEQ ID NO: 255914 - DNA, 25 bp, Probe Sequence
gtgtagcaggtcacaacttaccctt

SEQ ID NO: 255915 - DNA, 25 bp, Probe Sequence
gtgttcgggcaggaatctggacctt

SEQ ID NO: 255916 - DNA, 25 bp, Probe Sequence
gtgtttaacgtcgatggataccatt

SEQ ID NO: 255917 - DNA, 25 bp, Probe Sequence
gtgtataaacctccattaagccatt

SEQ ID NO: 255918 - DNA, 25 bp, Probe Sequence
gtgtaaacacttcatgttagcctac

SEQ ID NO: 255919 - DNA, 25 bp, Probe Sequence
gtgtaaactttctttgtcaatctat

SEQ ID NO: 255920 - DNA, 25 bp, Probe Sequence
gtgttcaacttttgtgtgcttttaa

SEQ ID NO: 255921 - DNA, 25 bp, Probe Sequence
gtgtctcagactgtgtttctttcct

SEQ ID NO: 255922 - DNA, 25 bp, Probe Sequence
gtgttatgttgcgttttcattttca

SEQ ID NO: 255923 - DNA, 25 bp, Probe Sequence
gtgttttctgcagttatttctcttg

SEQ ID NO: 255924 - DNA, 25 bp, Probe Sequence
gtgttttccactagtatatccctgt

SEQ ID NO: 255925 - DNA, 25 bp, Probe Sequence
gtgtatttaaatagcacctccctta

SEQ ID NO: 255926 - DNA, 25 bp, Probe Sequence
gtgttctgtatagatctgcctacct

SEQ ID NO: 255927 - DNA, 25 bp, Probe Sequence
gtgattctatcatgtacagtttcca

SEQ ID NO: 255928 - DNA, 25 bp, Probe Sequence
gtgttccatcaggtactgtgtctgc

SEQ ID NO: 255929 - DNA, 25 bp, Probe Sequence
gtgttagcagcagctacttatcctg

SEQ ID NO: 255930 - DNA, 25 bp, Probe Sequence
gtgttagagagatactataccctag

SEQ ID NO: 255931 - DNA, 25 bp, Probe Sequence
gtgtctcagaactgaataactgcag

SEQ ID NO: 255932 - DNA, 25 bp, Probe Sequence
gtgttcagccacataaaaatgctaa

SEQ ID NO: 255933 - DNA, 25 bp, Probe Sequence
gtgttagtcacaaatctcaaagctg

SEQ ID NO: 255934 - DNA, 25 bp, Probe Sequence
gtgttttccacctgcagaacggagt

SEQ ID NO: 255935 - DNA, 25 bp, Probe Sequence
gtgtctgggccaccttcagaaggtg

SEQ ID NO: 255936 - DNA, 25 bp, Probe Sequence
gtgtctaatctccttctgagaagga

SEQ ID NO: 255937 - DNA, 25 bp, Probe Sequence
gtgtctccccctctaagaggaggat

SEQ ID NO: 255938 - DNA, 25 bp, Probe Sequence
gtgttcccccaatgaaaggatgaaa

SEQ ID NO: 255939 - DNA, 25 bp, Probe Sequence
gtgtctggcactgaaaataaggaaa

SEQ ID NO: 255940 - DNA, 25 bp, Probe Sequence
gtgtgcagtggtgtatcaataaaga

SEQ ID NO: 255941 - DNA, 25 bp, Probe Sequence
gtgtcatgtgagggcgtcagtatag

SEQ ID NO: 255942 - DNA, 25 bp, Probe Sequence
gtgtctgtgacgagctcaggagggc

SEQ ID NO: 255943 - DNA, 25 bp, Probe Sequence
gtgtcttgccatatggagggcacct

SEQ ID NO: 255944 - DNA, 25 bp, Probe Sequence
gtgtcttgcggagtgcagaaggctt

SEQ ID NO: 255945 - DNA, 25 bp, Probe Sequence
gtgtttgcttattcaagagatcttc

SEQ ID NO: 255946 - DNA, 25 bp, Probe Sequence
gtgtttgtacattgcacagaaactt

SEQ ID NO: 255947 - DNA, 25 bp, Probe Sequence
gtgttcgtgtcttgcactggaattc

SEQ ID NO: 255948 - DNA, 25 bp, Probe Sequence
gtgttggtgttaagcatgaaacaaa

SEQ ID NO: 255949 - DNA, 25 bp, Probe Sequence
gtgttgttttgaactgataggagga

SEQ ID NO: 255950 - DNA, 25 bp, Probe Sequence
gtgattgcttttctgcgtcaggtac

SEQ ID NO: 255951 - DNA, 25 bp, Probe Sequence
gtgtttcatgttctgtgtcacgtga

SEQ ID NO: 255952 - DNA, 25 bp, Probe Sequence
gtgttcataaagcatggatctcgta

SEQ ID NO: 255953 - DNA, 25 bp, Probe Sequence
gtgttgcaaaagtatagattattca

SEQ ID NO: 255954 - DNA, 25 bp, Probe Sequence
gtgttgtcaccactgtagaatgtgt

SEQ ID NO: 255955 - DNA, 25 bp, Probe Sequence
gtgtttcacctgctgcaattgtgac

SEQ ID NO: 255956 - DNA, 25 bp, Probe Sequence
gtgttaccctgcgtcagaaatgcca

SEQ ID NO: 255957 - DNA, 25 bp, Probe Sequence
gtgtaagccctgcctgaaacagacc

SEQ ID NO: 255958 - DNA, 25 bp, Probe Sequence
gtggtggccctgggaaaggaccaat

SEQ ID NO: 255959 - DNA, 25 bp, Probe Sequence
gtggtggccacagtcgaaaaatccc

SEQ ID NO: 255960 - DNA, 25 bp, Probe Sequence
gggtacccttgataaaccatctcta

SEQ ID NO: 255961 - DNA, 25 bp, Probe Sequence
gtgtgtaccgttcaatcaaccaatt

SEQ ID NO: 255962 - DNA, 25 bp, Probe Sequence
gtgtaagggttccacattttcacat

SEQ ID NO: 255963 - DNA, 25 bp, Probe Sequence
gtgtaacagagcaggatttattcaa

SEQ ID NO: 255964 - DNA, 25 bp, Probe Sequence
gtgtagacagtctgaacagtttaag

SEQ ID NO: 255965 - DNA, 25 bp, Probe Sequence
gggaaagtgggacagcttgtagggg

SEQ ID NO: 255966 - DNA, 25 bp, Probe Sequence
gtgggaactaaacttgatcttaggg

SEQ ID NO: 255967 - DNA, 25 bp, Probe Sequence
gtgtggaagcacgtctcaaatttag

SEQ ID NO: 255968 - DNA, 25 bp, Probe Sequence
gtgtgtgacgcagttttacacccgc

SEQ ID NO: 255969 - DNA, 25 bp, Probe Sequence
gtgtatgacagctttccttcacaca

SEQ ID NO: 255970 - DNA, 25 bp, Probe Sequence
gtgtaaacactgaccataactagaa

SEQ ID NO: 255971 - DNA, 25 bp, Probe Sequence
gtgtaaacactgtctctactaaaaa

SEQ ID NO: 255972 - DNA, 25 bp, Probe Sequence
gtgtgaaacaatgttgtccaacaat

SEQ ID NO: 255973 - DNA, 25 bp, Probe Sequence
gtgtaaaggcagacataggctcaaa

SEQ ID NO: 255974 - DNA, 25 bp, Probe Sequence
gtgtaattggcaaataactcaagac

SEQ ID NO: 255975 - DNA, 25 bp, Probe Sequence
gtgtttgtggcacctagatcgacgg

SEQ ID NO: 255976 - DNA, 25 bp, Probe Sequence
gtgtttgggaacagacatgatgcgg

SEQ ID NO: 255977 - DNA, 25 bp, Probe Sequence
gtgttcgcggaacggacaggtgaga

SEQ ID NO: 255978 - DNA, 25 bp, Probe Sequence
gtgtaggaggaagagctcaggtgga

SEQ ID NO: 255979 - DNA, 25 bp, Probe Sequence
gtgtctggtggaggacgccaaggtg

SEQ ID NO: 255980 - DNA, 25 bp, Probe Sequence
gtgtctagtggatcaggccacagga

SEQ ID NO: 255981 - DNA, 25 bp, Probe Sequence
gtgtttggaatatggcctacagaga

SEQ ID NO: 255982 - DNA, 25 bp, Probe Sequence
gtggtcaaagaatggccccaggaac

SEQ ID NO: 255983 - DNA, 25 bp, Probe Sequence
gtgggcgaggactgagcctcggtgt

SEQ ID NO: 255984 - DNA, 25 bp, Probe Sequence
gtgtttgggatcggacctcagtttc

SEQ ID NO: 255985 - DNA, 25 bp, Probe Sequence
gtgtttcgtgaagacctctgtacca

SEQ ID NO: 255986 - DNA, 25 bp, Probe Sequence
gtgtttctgtatatccgtctgtacg

SEQ ID NO: 255987 - DNA, 25 bp, Probe Sequence
gtgtttccagatggttcttctaacc

SEQ ID NO: 255988 - DNA, 25 bp, Probe Sequence
gtgtctcaacagagttttccgaaga

SEQ ID NO: 255989 - DNA, 25 bp, Probe Sequence
tggactgaaagtgctttccggaagt

SEQ ID NO: 255990 - DNA, 25 bp, Probe Sequence
ggactgaaagtgctttccggaagtt

SEQ ID NO: 255991 - DNA, 25 bp, Probe Sequence
gtgttgaaagttcttcctggagcag

SEQ ID NO: 255992 - DNA, 25 bp, Probe Sequence
gtgttgcacaagtacgttttgtgac

SEQ ID NO: 255993 - DNA, 25 bp, Probe Sequence
gtgtttactgtagtgtatcttgtac

SEQ ID NO: 255994 - DNA, 25 bp, Probe Sequence
gtgtttacttaaactgtgctgctaa

SEQ ID NO: 255995 - DNA, 25 bp, Probe Sequence
gtgttcttttcagccttgctaaact

SEQ ID NO: 255996 - DNA, 25 bp, Probe Sequence
gtgttgtggtttgtctttctaatta

SEQ ID NO: 255997 - DNA, 25 bp, Probe Sequence
gtgttgtgttttgtgctgtgtccac

SEQ ID NO: 255998 - DNA, 25 bp, Probe Sequence
gtgttgtgttttgtgctgtgtccac

SEQ ID NO: 255999 - DNA, 25 bp, Probe Sequence
gtgttggttgttttatggcatctct

SEQ ID NO: 256000 - DNA, 25 bp, Probe Sequence
gtgttgtttggttctactgcattgt

SEQ ID NO: 256001 - DNA, 25 bp, Probe Sequence
gtgttgtttggttctactgcattgt

SEQ ID NO: 256002 - DNA, 25 bp, Probe Sequence
gtgttgttgctgggactttgctaac

SEQ ID NO: 256003 - DNA, 25 bp, Probe Sequence
gtgtttatggccaatctattctcaa

SEQ ID NO: 256004 - DNA, 25 bp, Probe Sequence
gtgttctgttgacctttactcagac

SEQ ID NO: 256005 - DNA, 25 bp, Probe Sequence
gtgttctgttaagttctttcatttg

SEQ ID NO: 256006 - DNA, 25 bp, Probe Sequence
gtgttctggagagtgttctttattc

SEQ ID NO: 256007 - DNA, 25 bp, Probe Sequence
gtgttatggggacttgctttttcca

SEQ ID NO: 256008 - DNA, 25 bp, Probe Sequence
gtgtttgcggtggttgacgtagtgc

SEQ ID NO: 256009 - DNA, 25 bp, Probe Sequence
gtgttgggggtggtgatcaggcagg

SEQ ID NO: 256010 - DNA, 25 bp, Probe Sequence
gtgttgcgagctctggagagggggt

SEQ ID NO: 256011 - DNA, 25 bp, Probe Sequence
accagctgcgggcgatggagcgcag

SEQ ID NO: 256012 - DNA, 25 bp, Probe Sequence
gtgtttgagcagctggcgtgtgagg

SEQ ID NO: 256013 - DNA, 25 bp, Probe Sequence
gtgtttgcagagctagtggatgtgt

SEQ ID NO: 256014 - DNA, 25 bp, Probe Sequence
gtggattgagggtaggaggtttgga

SEQ ID NO: 256015 - DNA, 25 bp, Probe Sequence
gtgtttgaggatgacgtgcgctttg

SEQ ID NO: 256016 - DNA, 25 bp, Probe Sequence
gtgttgggtgagtacaaccttgctg

SEQ ID NO: 256017 - DNA, 25 bp, Probe Sequence
gtgtctgggttataggcctgatggg

SEQ ID NO: 256018 - DNA, 25 bp, Probe Sequence
gtgtatggggtatgagatggtagga

SEQ ID NO: 256019 - DNA, 25 bp, Probe Sequence
gtggatgtgggtgacaacggcagga

SEQ ID NO: 256020 - DNA, 25 bp, Probe Sequence
gggccagaggatgaaccggcccact

SEQ ID NO: 256021 - DNA, 25 bp, Probe Sequence
ggccatgaacgggaaccggcctatc

SEQ ID NO: 256022 - DNA, 25 bp, Probe Sequence
ggcctacaaggaataccggccccat

SEQ ID NO: 256023 - DNA, 25 bp, Probe Sequence
gtgttaacattgagactctggcccc

SEQ ID NO: 256024 - DNA, 25 bp, Probe Sequence
gtgttattgtaaaagtctggcctct

SEQ ID NO: 256025 - DNA, 25 bp, Probe Sequence
gtgttatctgtaaccattacagcct

SEQ ID NO: 256026 - DNA, 25 bp, Probe Sequence
gtgttttatacttcatctgacatcc

SEQ ID NO: 256027 - DNA, 25 bp, Probe Sequence
gtgtttgtttgttatctcagtccag

SEQ ID NO: 256028 - DNA, 25 bp, Probe Sequence
gtgtttttgcggcatgctgagttga

SEQ ID NO: 256029 - DNA, 25 bp, Probe Sequence
gtgtttgtctggtcagatctagttt

SEQ ID NO: 256030 - DNA, 25 bp, Probe Sequence
gtgtacagttggggagtacattctt

SEQ ID NO: 256031 - DNA, 25 bp, Probe Sequence
gtgtacaattctgaagacactcatt

SEQ ID NO: 256032 - DNA, 25 bp, Probe Sequence
gtgtgcacaagaacttgagaacttg

SEQ ID NO: 256033 - DNA, 25 bp, Probe Sequence
gtgtccgcaacctgcagaagcaagt

SEQ ID NO: 256034 - DNA, 25 bp, Probe Sequence
gtgtccaaacactgcagagtgaact

SEQ ID NO: 256035 - DNA, 25 bp, Probe Sequence
gtgttcaaatctttgagagtgagct

SEQ ID NO: 256036 - DNA, 25 bp, Probe Sequence
gtgtataagcttttaaggtctgact

SEQ ID NO: 256037 - DNA, 25 bp, Probe Sequence
gtgttgaagcttttcatatttgctg

SEQ ID NO: 256038 - DNA, 25 bp, Probe Sequence
gtgtgtcaactatttctttaggcct

SEQ ID NO: 256039 - DNA, 25 bp, Probe Sequence
gtgttctgggatttctctagaggct

SEQ ID NO: 256040 - DNA, 25 bp, Probe Sequence
gtgttcttgatatagcctaaggtgt

SEQ ID NO: 256041 - DNA, 25 bp, Probe Sequence
gtgtccctaatgtgtttagattgct

SEQ ID NO: 256042 - DNA, 25 bp, Probe Sequence
gtgtatcttacaaatgttttttgct

SEQ ID NO: 256043 - DNA, 25 bp, Probe Sequence
gtgtattgtatactttttttacata

SEQ ID NO: 256044 - DNA, 25 bp, Probe Sequence
gtgttagtagagtttgatttgtatc

SEQ ID NO: 256045 - DNA, 25 bp, Probe Sequence
gtgttaacatggtatatgtattgtt

SEQ ID NO: 256046 - DNA, 25 bp, Probe Sequence
gtgtttatatggcgttttgtctgtg

SEQ ID NO: 256047 - DNA, 25 bp, Probe Sequence
gtgtttataggcttcttgtgtgtta

SEQ ID NO: 256048 - DNA, 25 bp, Probe Sequence
gtgttgctgtaccttagctgtgttt

SEQ ID NO: 256049 - DNA, 25 bp, Probe Sequence
gtgtatgtgtacctttcagcatcct

SEQ ID NO: 256050 - DNA, 25 bp, Probe Sequence
gtgtcgtatgacctagtaaactttg

SEQ ID NO: 256051 - DNA, 25 bp, Probe Sequence
gtgtcgtatgacctagtaaactttg

SEQ ID NO: 256052 - DNA, 25 bp, Probe Sequence
ggactggagattaattaataccttt

SEQ ID NO: 256053 - DNA, 25 bp, Probe Sequence
gtgtcttggttaactaattctgttt

SEQ ID NO: 256054 - DNA, 25 bp, Probe Sequence
gtgtcttggctttatttatctcgtc

SEQ ID NO: 256055 - DNA, 25 bp, Probe Sequence
gtgtttgaactgtcactgattcttg

SEQ ID NO: 256056 - DNA, 25 bp, Probe Sequence
gtgtttgatttgtctcatatatttg

SEQ ID NO: 256057 - DNA, 25 bp, Probe Sequence
gtgttgactttgaacttctttaacg

SEQ ID NO: 256058 - DNA, 25 bp, Probe Sequence
gtgttgcactttagactggtgtctg

SEQ ID NO: 256059 - DNA, 25 bp, Probe Sequence
gtgttcctggcaatagtgtgttctg

SEQ ID NO: 256060 - DNA, 25 bp, Probe Sequence
gtgttatgtgaatttgagtttgctg

SEQ ID NO: 256061 - DNA, 25 bp, Probe Sequence
gtgtctttactgttttctgtgtggc

SEQ ID NO: 256062 - DNA, 25 bp, Probe Sequence
gtgtccttccaagtctagcatttgg

SEQ ID NO: 256063 - DNA, 25 bp, Probe Sequence
gtgtccatttaagctgtattctgcc

SEQ ID NO: 256064 - DNA, 25 bp, Probe Sequence
gtgtctactgcttaaatctttatgc

SEQ ID NO: 256065 - DNA, 25 bp, Probe Sequence
gtgtgcccttttaatctttactagt

SEQ ID NO: 256066 - DNA, 25 bp, Probe Sequence
gtggagtttcgtaatttcccagact

SEQ ID NO: 256067 - DNA, 25 bp, Probe Sequence
gtgggattgtgtacctttctaagaa

SEQ ID NO: 256068 - DNA, 25 bp, Probe Sequence
gtgggcaggttatattttaagttca

SEQ ID NO: 256069 - DNA, 25 bp, Probe Sequence
gtgggcctgttgcaatactttaaaa

SEQ ID NO: 256070 - DNA, 25 bp, Probe Sequence
gtgggcctgttgcaatactttaaaa

SEQ ID NO: 256071 - DNA, 25 bp, Probe Sequence
gtgggccgagttcttttggataaag

SEQ ID NO: 256072 - DNA, 25 bp, Probe Sequence
gggagggacatacagaataggaaca

SEQ ID NO: 256073 - DNA, 25 bp, Probe Sequence
gtggatggagaaccccaataataac

SEQ ID NO: 256074 - DNA, 25 bp, Probe Sequence
gtgtttgaaccaaccatagttaaag

SEQ ID NO: 256075 - DNA, 25 bp, Probe Sequence
gtgtttcaacaatctcaagcagtaa

SEQ ID NO: 256076 - DNA, 25 bp, Probe Sequence
gtgttccacacagagtacggagcac

SEQ ID NO: 256077 - DNA, 25 bp, Probe Sequence
gtgttcaccaaggaggacctcactg

SEQ ID NO: 256078 - DNA, 25 bp, Probe Sequence
gtgtctaggagggatgaccccactc

SEQ ID NO: 256079 - DNA, 25 bp, Probe Sequence
gtgtttggggcatgaatctctcctc

SEQ ID NO: 256080 - DNA, 25 bp, Probe Sequence
gtgtttggggcatgaatctctcctc

SEQ ID NO: 256081 - DNA, 25 bp, Probe Sequence
gtgtttgactgactcggagctcacc

SEQ ID NO: 256082 - DNA, 25 bp, Probe Sequence
gtgtattgactgcctcagtgacaca

SEQ ID NO: 256083 - DNA, 25 bp, Probe Sequence
gtgtttggctccgtgagagacgacg

SEQ ID NO: 256084 - DNA, 25 bp, Probe Sequence
gtgttatttcgcgtaagcattgttg

SEQ ID NO: 256085 - DNA, 25 bp, Probe Sequence
gtgttattgttgcattactgtgttg

SEQ ID NO: 256086 - DNA, 25 bp, Probe Sequence
gtgtctatgatgttgctgttcacag

SEQ ID NO: 256087 - DNA, 25 bp, Probe Sequence
gtgtgctgactgatctttccagtct

SEQ ID NO: 256088 - DNA, 25 bp, Probe Sequence
gtgtcataagacatcttcaagacat

SEQ ID NO: 256089 - DNA, 25 bp, Probe Sequence
gtgtcatgtacatttgtatcaaaaa

SEQ ID NO: 256090 - DNA, 25 bp, Probe Sequence
gtgtattgtgccttgttctaaaact

SEQ ID NO: 256091 - DNA, 25 bp, Probe Sequence
gtgtggaggccatttttagagatac

SEQ ID NO: 256092 - DNA, 25 bp, Probe Sequence
tttggcaacggtgacttgagtactt

SEQ ID NO: 256093 - DNA, 25 bp, Probe Sequence
tttggctggggagcacttaattctt

SEQ ID NO: 256094 - DNA, 25 bp, Probe Sequence
ttttctggggcctcgctaattgaat

SEQ ID NO: 256095 - DNA, 25 bp, Probe Sequence
ttttcggaactgaggccatgattaa

SEQ ID NO: 256096 - DNA, 25 bp, Probe Sequence
tttgggcgacccagcgccgaaaagc

SEQ ID NO: 256097 - DNA, 25 bp, Probe Sequence
tttggggtcctcacggagaagaaca

SEQ ID NO: 256098 - DNA, 25 bp, Probe Sequence
tcttgcgggtctgtcagggttggaa

SEQ ID NO: 256099 - DNA, 25 bp, Probe Sequence
gtgtggaggtctgacagggtaggaa

SEQ ID NO: 256100 - DNA, 25 bp, Probe Sequence
ggtcggacatacttgagggtaggaa

SEQ ID NO: 256101 - DNA, 25 bp, Probe Sequence
gggcggaatttcaagatggatcggg

SEQ ID NO: 256102 - DNA, 25 bp, Probe Sequence
gtgtggcagtattttagtaccgggt

SEQ ID NO: 256103 - DNA, 25 bp, Probe Sequence
gtgggaggattgcttgaacccggga

SEQ ID NO: 256104 - DNA, 25 bp, Probe Sequence
gggggaatgtttggcaacctttgtg

SEQ ID NO: 256105 - DNA, 25 bp, Probe Sequence
gggcggaatgttggtacccattggt

SEQ ID NO: 256106 - DNA, 25 bp, Probe Sequence
gggcagtgagtgagggacccctaat

SEQ ID NO: 256107 - DNA, 25 bp, Probe Sequence
gggcgaagtgaaggagacaccgttc

SEQ ID NO: 256108 - DNA, 25 bp, Probe Sequence
gtgggccggaagatcccacgattcc

SEQ ID NO: 256109 - DNA, 25 bp, Probe Sequence
gggtccattaaaatatccggttgcg

SEQ ID NO: 256110 - DNA, 25 bp, Probe Sequence
gtggtggtataaaattcccctcgcg

SEQ ID NO: 256111 - DNA, 25 bp, Probe Sequence
gtggagcctaagagttaccctaaga

SEQ ID NO: 256112 - DNA, 25 bp, Probe Sequence
ttagtctgtcaaggaaaacccttag

SEQ ID NO: 256113 - DNA, 25 bp, Probe Sequence
ttcgttctacgtgaacccgtcagat

SEQ ID NO: 256114 - DNA, 25 bp, Probe Sequence
gtgttcatcaaagtaattgctcaca

SEQ ID NO: 256115 - DNA, 25 bp, Probe Sequence
gtgttcacatagcctttgtgcaaaa

SEQ ID NO: 256116 - DNA, 25 bp, Probe Sequence
gtgttacatatggccaagtggaaaa

SEQ ID NO: 256117 - DNA, 25 bp, Probe Sequence
gtgtttacgcccgagatgaaacaga

SEQ ID NO: 256118 - DNA, 25 bp, Probe Sequence
gtgttttcttcttggatagaacata

SEQ ID NO: 256119 - DNA, 25 bp, Probe Sequence
gtgtctcttccagggggaattctca

SEQ ID NO: 256120 - DNA, 25 bp, Probe Sequence
gtggtggtcccggtggaatgttcag

SEQ ID NO: 256121 - DNA, 25 bp, Probe Sequence
gtgtgtggcaaaggccgggtgttgg

SEQ ID NO: 256122 - DNA, 25 bp, Probe Sequence
gtgtattcagaaatccaagttggtg

SEQ ID NO: 256123 - DNA, 25 bp, Probe Sequence
gtgtttcaatttaaagtgctagtgt

SEQ ID NO: 256124 - DNA, 25 bp, Probe Sequence
gtgtttcaatttctatgtctaacgt

SEQ ID NO: 256125 - DNA, 25 bp, Probe Sequence
gtgtttaatactcatagaccagatc

SEQ ID NO: 256126 - DNA, 25 bp, Probe Sequence
gtgtcttaagcacagaagtcactga

SEQ ID NO: 256127 - DNA, 25 bp, Probe Sequence
gtgtcttcacccctgaactaagaca

SEQ ID NO: 256128 - DNA, 25 bp, Probe Sequence
gtgttacaccctcacattagtgtgc

SEQ ID NO: 256129 - DNA, 25 bp, Probe Sequence
gtgtctacatccggaatgctgtgga

SEQ ID NO: 256130 - DNA, 25 bp, Probe Sequence
gtgtttattcaccaatttgtacatt

SEQ ID NO: 256131 - DNA, 25 bp, Probe Sequence
gtggctaatgtagaaatgttaagtg

SEQ ID NO: 256132 - DNA, 25 bp, Probe Sequence
gtgttcagagtagtaagatgcttta

SEQ ID NO: 256133 - DNA, 25 bp, Probe Sequence
gtgttcatggtagtctctgatagtt

SEQ ID NO: 256134 - DNA, 25 bp, Probe Sequence
gtgtttggatgccttctgcatatga

SEQ ID NO: 256135 - DNA, 25 bp, Probe Sequence
gtgtttggagttctctatataaact

SEQ ID NO: 256136 - DNA, 25 bp, Probe Sequence
gtgttttgagttccctcattcttat

SEQ ID NO: 256137 - DNA, 25 bp, Probe Sequence
gtgtttcaaggcaaccttttctgca

SEQ ID NO: 256138 - DNA, 25 bp, Probe Sequence
gtgtcaacaaggagcctgttgccga

SEQ ID NO: 256139 - DNA, 25 bp, Probe Sequence
gtgtcaggcaatctggactttccag

SEQ ID NO: 256140 - DNA, 25 bp, Probe Sequence
gtgtatggtgtgcttacctgtccac

SEQ ID NO: 256141 - DNA, 25 bp, Probe Sequence
gtgtatgtgtgtactctgcacgtat

SEQ ID NO: 256142 - DNA, 25 bp, Probe Sequence
gtgtatgcatgtttagtgacgttta

SEQ ID NO: 256143 - DNA, 25 bp, Probe Sequence
gtgtcatcttatcgaggaggctctg

SEQ ID NO: 256144 - DNA, 25 bp, Probe Sequence
gtgtctcattaaagtgattgctggg

SEQ ID NO: 256145 - DNA, 25 bp, Probe Sequence
gtgtttgtgaatgatattgaggcag

SEQ ID NO: 256146 - DNA, 25 bp, Probe Sequence
gtgtttctgcgagaatggaatggaa

SEQ ID NO: 256147 - DNA, 25 bp, Probe Sequence
gtgtccctggcccaatgataatggc

SEQ ID NO: 256148 - DNA, 25 bp, Probe Sequence
gtgtgccgtgaggctcatagttgat

SEQ ID NO: 256149 - DNA, 25 bp, Probe Sequence
gtgtgcctggcaaccaaatcgaatc

SEQ ID NO: 256150 - DNA, 25 bp, Probe Sequence
gtgtcgtgaagttctagacaaattt

SEQ ID NO: 256151 - DNA, 25 bp, Probe Sequence
gtgtcctatagttacatggaaagca

SEQ ID NO: 256152 - DNA, 25 bp, Probe Sequence
gtgtcctatcccatatggagaagaa

SEQ ID NO: 256153 - DNA, 25 bp, Probe Sequence
gtgtcaatatccattaatgagtcta

SEQ ID NO: 256154 - DNA, 25 bp, Probe Sequence
gtggcaattccatacatattttaga

SEQ ID NO: 256155 - DNA, 25 bp, Probe Sequence
gtgtgaattcaatacaggctatgta

SEQ ID NO: 256156 - DNA, 25 bp, Probe Sequence
gtgtgaattcaatacaggctatgta

SEQ ID NO: 256157 - DNA, 25 bp, Probe Sequence
gtgtcagatcaataacagattaatt

SEQ ID NO: 256158 - DNA, 25 bp, Probe Sequence
gtgtagacaaataccagttcccatt

SEQ ID NO: 256159 - DNA, 25 bp, Probe Sequence
gtgtattgcaattggccgttacctt

SEQ ID NO: 256160 - DNA, 25 bp, Probe Sequence
gtgtatacagatgagggtgtccgct

SEQ ID NO: 256161 - DNA, 25 bp, Probe Sequence
gtgttcacatgggggctttgactct

SEQ ID NO: 256162 - DNA, 25 bp, Probe Sequence
gtgtccaaggacagtttgtcattaa

SEQ ID NO: 256163 - DNA, 25 bp, Probe Sequence
gtgtccagactgtcagagttctaat

SEQ ID NO: 256164 - DNA, 25 bp, Probe Sequence
gtgtacgtctgggaggtctatgata

SEQ ID NO: 256165 - DNA, 25 bp, Probe Sequence
gtgtctgcgttcggagttttcagaa

SEQ ID NO: 256166 - DNA, 25 bp, Probe Sequence
gtgtatctatttgagtctggaaata

SEQ ID NO: 256167 - DNA, 25 bp, Probe Sequence
gtgtttacacatgagatctaaggca

SEQ ID NO: 256168 - DNA, 25 bp, Probe Sequence
gtgtctgtatacacgccaaaggcag

SEQ ID NO: 256169 - DNA, 25 bp, Probe Sequence
gtgtattattccagccagaatggga

SEQ ID NO: 256170 - DNA, 25 bp, Probe Sequence
gtgtattattccagccagaatggga

SEQ ID NO: 256171 - DNA, 25 bp, Probe Sequence
gtgtttattacctcagtgtgggtgc

SEQ ID NO: 256172 - DNA, 25 bp, Probe Sequence
gtgttttttattcctgtggggctca

SEQ ID NO: 256173 - DNA, 25 bp, Probe Sequence
gtgttttttattcttggatacattt

SEQ ID NO: 256174 - DNA, 25 bp, Probe Sequence
gtgtttcattttgctattggaattt

SEQ ID NO: 256175 - DNA, 25 bp, Probe Sequence
gtgttacttttattatttggatgta

SEQ ID NO: 256176 - DNA, 25 bp, Probe Sequence
gtgttagctgttattattagtgtgt

SEQ ID NO: 256177 - DNA, 25 bp, Probe Sequence
gtgtccagttttctaatgagtaggt

SEQ ID NO: 256178 - DNA, 25 bp, Probe Sequence
gtgtcatccttgtgcttaagaaatg

SEQ ID NO: 256179 - DNA, 25 bp, Probe Sequence
gtgtcctttgatgcctaaaaatttt

SEQ ID NO: 256180 - DNA, 25 bp, Probe Sequence
gtgtccatatcgtgcccagaaaagt

SEQ ID NO: 256181 - DNA, 25 bp, Probe Sequence
gtgtgctcatacttggactgggaaa

SEQ ID NO: 256182 - DNA, 25 bp, Probe Sequence
gtgtgcattcattctgtaggtaaaa

SEQ ID NO: 256183 - DNA, 25 bp, Probe Sequence
gtgtgcctgtatggagtggaatgaa

SEQ ID NO: 256184 - DNA, 25 bp, Probe Sequence
gtgtcactgtcagatggtctgcagc

SEQ ID NO: 256185 - DNA, 25 bp, Probe Sequence
gtgtcactgtaggtactgtgcccag

SEQ ID NO: 256186 - DNA, 25 bp, Probe Sequence
gtgtccagattcatgacgtgcctgc

SEQ ID NO: 256187 - DNA, 25 bp, Probe Sequence
gtgtccagattcatgacgtgcctgc

SEQ ID NO: 256188 - DNA, 25 bp, Probe Sequence
gtgtacgtggtccacgctgcagtgc

SEQ ID NO: 256189 - DNA, 25 bp, Probe Sequence
gtgtacgtgttattccaagccttta

SEQ ID NO: 256190 - DNA, 25 bp, Probe Sequence
gtgtatcttgtaaatagccagccat

SEQ ID NO: 256191 - DNA, 25 bp, Probe Sequence
gtgtactcgtgcagcatggacggca

SEQ ID NO: 256192 - DNA, 25 bp, Probe Sequence
gtgtacactgttactcagatctaca

SEQ ID NO: 256193 - DNA, 25 bp, Probe Sequence
gtgtaatctgaaatctagctgctga

SEQ ID NO: 256194 - DNA, 25 bp, Probe Sequence
gtgtccatctaaaatagcgccagcg

SEQ ID NO: 256195 - DNA, 25 bp, Probe Sequence
gtgtgcgcctaataaggccatcctt

SEQ ID NO: 256196 - DNA, 25 bp, Probe Sequence
gtgtgggatctctgaaggccctatt

SEQ ID NO: 256197 - DNA, 25 bp, Probe Sequence
gtgtctggtcctaagtggagccaat

SEQ ID NO: 256198 - DNA, 25 bp, Probe Sequence
gtgtcttgggctaaggacccacacc

SEQ ID NO: 256199 - DNA, 25 bp, Probe Sequence
gtgtttgtgcctcataacaacccac

SEQ ID NO: 256200 - DNA, 25 bp, Probe Sequence
gtggaagtgactcatccaaactcca

SEQ ID NO: 256201 - DNA, 25 bp, Probe Sequence
gtgtggagtacggcttccaggttaa

SEQ ID NO: 256202 - DNA, 25 bp, Probe Sequence
gtgtggattgatgttggcagccgtt

SEQ ID NO: 256203 - DNA, 25 bp, Probe Sequence
gtgtgcaatgagaccatgatggccc

SEQ ID NO: 256204 - DNA, 25 bp, Probe Sequence
gtgtctgcatgagcatgtggcctcc

SEQ ID NO: 256205 - DNA, 25 bp, Probe Sequence
gtgtatgaagaattgtcccctggct

SEQ ID NO: 256206 - DNA, 25 bp, Probe Sequence
gtgtaggacacattagccttctgga

SEQ ID NO: 256207 - DNA, 25 bp, Probe Sequence
gtgtagaagcgcacagacttgatgg

SEQ ID NO: 256208 - DNA, 25 bp, Probe Sequence
gtgtgaccacgtgcatgtctatggc

SEQ ID NO: 256209 - DNA, 25 bp, Probe Sequence
gtgtccgatagatcgttcaggccgc

SEQ ID NO: 256210 - DNA, 25 bp, Probe Sequence
gtgtccgatcaatagctcacgcagc

SEQ ID NO: 256211 - DNA, 25 bp, Probe Sequence
gtgtctgtggctggaactgcccagc

SEQ ID NO: 256212 - DNA, 25 bp, Probe Sequence
gtgtcagtggtggacctgacctgcc

SEQ ID NO: 256213 - DNA, 25 bp, Probe Sequence
gtgtcagtggtggacctgacctgcc

SEQ ID NO: 256214 - DNA, 25 bp, Probe Sequence
gtgtcagagagatacctcaccatgg

SEQ ID NO: 256215 - DNA, 25 bp, Probe Sequence
gtgtcacagtgttcacagcacagca

SEQ ID NO: 256216 - DNA, 25 bp, Probe Sequence
gtgtcaggatggtacagattgcaga

SEQ ID NO: 256217 - DNA, 25 bp, Probe Sequence
gtgtgcgaatggtaccagcgtgtgt

SEQ ID NO: 256218 - DNA, 25 bp, Probe Sequence
gtgtggatatggcaccaattctacc

SEQ ID NO: 256219 - DNA, 25 bp, Probe Sequence
gtgtggttgctcacgcaagtaatcc

SEQ ID NO: 256220 - DNA, 25 bp, Probe Sequence
gtgtcagttcatcattaagctaaac

SEQ ID NO: 256221 - DNA, 25 bp, Probe Sequence
gtgtcctgagccgattacagctagg

SEQ ID NO: 256222 - DNA, 25 bp, Probe Sequence
gtgtcctcagatcgaggactgtgtg

SEQ ID NO: 256223 - DNA, 25 bp, Probe Sequence
gtgtcatccctggttgagctggatc

SEQ ID NO: 256224 - DNA, 25 bp, Probe Sequence
gtgtcacaagctcctgtcagggagc

SEQ ID NO: 256225 - DNA, 25 bp, Probe Sequence
gtgtaaaccgcatggatgggcttcc

SEQ ID NO: 256226 - DNA, 25 bp, Probe Sequence
gtgtaggaactgggaattggtttca

SEQ ID NO: 256227 - DNA, 25 bp, Probe Sequence
gtgtaggactctgtaatcttttgat

SEQ ID NO: 256228 - DNA, 25 bp, Probe Sequence
gtgtaggccaccattataatttata

SEQ ID NO: 256229 - DNA, 25 bp, Probe Sequence
gtgtagtccagctgtgctcaaatgg

SEQ ID NO: 256230 - DNA, 25 bp, Probe Sequence
gtgtgagtccatcactgtgaaattg

SEQ ID NO: 256231 - DNA, 25 bp, Probe Sequence
gtgtgcaatcactataagtatattt

SEQ ID NO: 256232 - DNA, 25 bp, Probe Sequence
gtgtcatatagttaattgataagca

SEQ ID NO: 256233 - DNA, 25 bp, Probe Sequence
gtgtatcaagtaatggtgcaaagcc

SEQ ID NO: 256234 - DNA, 25 bp, Probe Sequence
gtgtcatgcagagtatttctaaagt

SEQ ID NO: 256235 - DNA, 25 bp, Probe Sequence
gtgtatgcggatgatttagaattgt

SEQ ID NO: 256236 - DNA, 25 bp, Probe Sequence
gtgtagacattgtattccacaattt

SEQ ID NO: 256237 - DNA, 25 bp, Probe Sequence
gtgtattatgttgttcaaatgcatt

SEQ ID NO: 256238 - DNA, 25 bp, Probe Sequence
gtgtttatatctggttctatatttt

SEQ ID NO: 256239 - DNA, 25 bp, Probe Sequence
gtgtggttatatagccctttattta

SEQ ID NO: 256240 - DNA, 25 bp, Probe Sequence
gtgtggttatatagccctttattta

SEQ ID NO: 256241 - DNA, 25 bp, Probe Sequence
gtgtatgctttgaagcaccttccct

SEQ ID NO: 256242 - DNA, 25 bp, Probe Sequence
gtgtatgctttgaagcaccttccct

SEQ ID NO: 256243 - DNA, 25 bp, Probe Sequence
gtgtatgtttgatacagcgtcgcca

SEQ ID NO: 256244 - DNA, 25 bp, Probe Sequence
gtgtttaatgatgatgactccgcaa

SEQ ID NO: 256245 - DNA, 25 bp, Probe Sequence
gtgtcttattgagtatggctagcga

SEQ ID NO: 256246 - DNA, 25 bp, Probe Sequence
gtgtcttattttttgcatcaagtaa

SEQ ID NO: 256247 - DNA, 25 bp, Probe Sequence
gtgtccttgttaagtgatcaaaagt

SEQ ID NO: 256248 - DNA, 25 bp, Probe Sequence
gtgtctccttgctctggtaaaagat

SEQ ID NO: 256249 - DNA, 25 bp, Probe Sequence
gtgtctccttgctctggtaaaagat

SEQ ID NO: 256250 - DNA, 25 bp, Probe Sequence
gtgtctccttgctctggtaaaagat

SEQ ID NO: 256251 - DNA, 25 bp, Probe Sequence
gtgtatcctgtgcactggcagttta

SEQ ID NO: 256252 - DNA, 25 bp, Probe Sequence
gtgtttttgctgttgattgctattt

SEQ ID NO: 256253 - DNA, 25 bp, Probe Sequence
gtgtctttgggcagtatgtagttat

SEQ ID NO: 256254 - DNA, 25 bp, Probe Sequence
gtgtatttgtgtattttgagggttt

SEQ ID NO: 256255 - DNA, 25 bp, Probe Sequence
gtgtttttgttgttgttgttgttgt

SEQ ID NO: 256256 - DNA, 25 bp, Probe Sequence
gtgtttcctctcattgtagtttcag

SEQ ID NO: 256257 - DNA, 25 bp, Probe Sequence
gtgtttgactccattgacaacctag

SEQ ID NO: 256258 - DNA, 25 bp, Probe Sequence
gtgtgtagacccttggctaactaaa

SEQ ID NO: 256259 - DNA, 25 bp, Probe Sequence
gtgtgtgttcatccttgttaaaaaa

SEQ ID NO: 256260 - DNA, 25 bp, Probe Sequence
gtgtattgcatctcttgatttaatc

SEQ ID NO: 256261 - DNA, 25 bp, Probe Sequence
gtgtattgccaactttgttaagtgg

SEQ ID NO: 256262 - DNA, 25 bp, Probe Sequence
gtgtaccccaatgtatgctatcata

SEQ ID NO: 256263 - DNA, 25 bp, Probe Sequence
gtgtacctgtaatctcagctactca

SEQ ID NO: 256264 - DNA, 25 bp, Probe Sequence
gtgtaactggagtgctatgcagacc

SEQ ID NO: 256265 - DNA, 25 bp, Probe Sequence
gtgtagagcttactgtctgggacca

SEQ ID NO: 256266 - DNA, 25 bp, Probe Sequence
gtgtatgagttgttgttgggaaagg

SEQ ID NO: 256267 - DNA, 25 bp, Probe Sequence
gtgtatgtggaaatgtgctgggcaa

SEQ ID NO: 256268 - DNA, 25 bp, Probe Sequence
gtgtatgtgtgttgtgtgtgtgtgt

SEQ ID NO: 256269 - DNA, 25 bp, Probe Sequence
gtgtagagtgtcgatgttgcagctt

SEQ ID NO: 256270 - DNA, 25 bp, Probe Sequence
gtgtcacagttcttggtgactgtcc

SEQ ID NO: 256271 - DNA, 25 bp, Probe Sequence
gtgtacgtgctattgagttgtgaac

SEQ ID NO: 256272 - DNA, 25 bp, Probe Sequence
gtgtacgtgctattgagttgtgaac

SEQ ID NO: 256273 - DNA, 25 bp, Probe Sequence
gtgtcatcgtgtatgagcacaggga

SEQ ID NO: 256274 - DNA, 25 bp, Probe Sequence
gtgtacgctgaaagatacagaggag

SEQ ID NO: 256275 - DNA, 25 bp, Probe Sequence
gtgtgacgtggacatccgcaaagac

SEQ ID NO: 256276 - DNA, 25 bp, Probe Sequence
gtggactagaacaacccaaatagca

SEQ ID NO: 256277 - DNA, 25 bp, Probe Sequence
gtgtgactatgaccagttaacaaca

SEQ ID NO: 256278 - DNA, 25 bp, Probe Sequence
gtgtgcctcagaattgctatttcaa

SEQ ID NO: 256279 - DNA, 25 bp, Probe Sequence
gtgtcccaggacatgataataagat

SEQ ID NO: 256280 - DNA, 25 bp, Probe Sequence
gtgggagggactatatcaaagtaga

SEQ ID NO: 256281 - DNA, 25 bp, Probe Sequence
gtgggccgtatctgtcacaataaat

SEQ ID NO: 256282 - DNA, 25 bp, Probe Sequence
gtggacaggtactctacaacaaatc

SEQ ID NO: 256283 - DNA, 25 bp, Probe Sequence
gtggacaggtactctacaacaaatc

SEQ ID NO: 256284 - DNA, 25 bp, Probe Sequence
gtgtgaaggaactggcactccaaac

SEQ ID NO: 256285 - DNA, 25 bp, Probe Sequence
gtgtcccgaagccggatgcatacga

SEQ ID NO: 256286 - DNA, 25 bp, Probe Sequence
gtgtccaacgaggtggtcaagctga

SEQ ID NO: 256287 - DNA, 25 bp, Probe Sequence
gtgtcagagggagctggtacagtag

SEQ ID NO: 256288 - DNA, 25 bp, Probe Sequence
gtgtgagtgggaatgtggttttgga

SEQ ID NO: 256289 - DNA, 25 bp, Probe Sequence
gtgtggctgagtgcctcgatttttt

SEQ ID NO: 256290 - DNA, 25 bp, Probe Sequence
gtgtgactactggatcaggactttt

SEQ ID NO: 256291 - DNA, 25 bp, Probe Sequence
gtgtagcttctgaaaggtgctttct

SEQ ID NO: 256292 - DNA, 25 bp, Probe Sequence
gtggcagccctgtgagggtttgcca

SEQ ID NO: 256293 - DNA, 25 bp, Probe Sequence
gtgtcagccacgatgagcgtatgct

SEQ ID NO: 256294 - DNA, 25 bp, Probe Sequence
gtgtctgaacagactcagcagtgtg

SEQ ID NO: 256295 - DNA, 25 bp, Probe Sequence
gtgtctgagaacatgctgtgtgcgg

SEQ ID NO: 256296 - DNA, 25 bp, Probe Sequence
gtgtctgaatcatgtctgtatcccc

SEQ ID NO: 256297 - DNA, 25 bp, Probe Sequence
gtgtaaattcaggcttcagcacgcc

SEQ ID NO: 256298 - DNA, 25 bp, Probe Sequence
gtgtatagtgacccgtcagatcgcc

SEQ ID NO: 256299 - DNA, 25 bp, Probe Sequence
gtgtatagatgcagccgttgcaggc

SEQ ID NO: 256300 - DNA, 25 bp, Probe Sequence
gtgtaaactgaggcatgtggagatg

SEQ ID NO: 256301 - DNA, 25 bp, Probe Sequence
gtgtataactctagagcttgaattt

SEQ ID NO: 256302 - DNA, 25 bp, Probe Sequence
gtgtacacacccaagtcatcaagac

SEQ ID NO: 256303 - DNA, 25 bp, Probe Sequence
gtgtgaaccccatgctgcatgagta

SEQ ID NO: 256304 - DNA, 25 bp, Probe Sequence
gtgtgataaacacggtcatgaataa

SEQ ID NO: 256305 - DNA, 25 bp, Probe Sequence
gtgtattttcccttgcatcagataa

SEQ ID NO: 256306 - DNA, 25 bp, Probe Sequence
gtgtatgttcccagtgacacttcag

SEQ ID NO: 256307 - DNA, 25 bp, Probe Sequence
gtgtggtcccacaggatatgtagag

SEQ ID NO: 256308 - DNA, 25 bp, Probe Sequence
gtgtccccacagagcgaataaagcc

SEQ ID NO: 256309 - DNA, 25 bp, Probe Sequence
ggtcgcctctggcagcgaaaagacc

SEQ ID NO: 256310 - DNA, 25 bp, Probe Sequence
gtgtgcagccctcagaggaaagaaa

SEQ ID NO: 256311 - DNA, 25 bp, Probe Sequence
gtgtgaccctcatgaggcaacgtgt

SEQ ID NO: 256312 - DNA, 25 bp, Probe Sequence
gtgtcacctccttggagaagccttc

SEQ ID NO: 256313 - DNA, 25 bp, Probe Sequence
gtgtagactgccttggagttctttc

SEQ ID NO: 256314 - DNA, 25 bp, Probe Sequence
gtgtagatccaggtgtctgtttttt

SEQ ID NO: 256315 - DNA, 25 bp, Probe Sequence
gtgtagtgatgagattcctttagct

SEQ ID NO: 256316 - DNA, 25 bp, Probe Sequence
gtgtaagcatgtttacctgttggct

SEQ ID NO: 256317 - DNA, 25 bp, Probe Sequence
gtgtaagatgtccttcatgttttct

SEQ ID NO: 256318 - DNA, 25 bp, Probe Sequence
gtgtagaagccgctctgtatccatc

SEQ ID NO: 256319 - DNA, 25 bp, Probe Sequence
gtgtattatcactgtctgttctgca

SEQ ID NO: 256320 - DNA, 25 bp, Probe Sequence
gtgtctcttcactagtcatttagaa

SEQ ID NO: 256321 - DNA, 25 bp, Probe Sequence
gtgtatttcacaatgtcgtgctaaa

SEQ ID NO: 256322 - DNA, 25 bp, Probe Sequence
gtgtcatttgacatggttctctgaa

SEQ ID NO: 256323 - DNA, 25 bp, Probe Sequence
gtgtcatactaattcagtatccaga

SEQ ID NO: 256324 - DNA, 25 bp, Probe Sequence
gtgtaagctaaattgctgatccaaa

SEQ ID NO: 256325 - DNA, 25 bp, Probe Sequence
gtgtaactacaaggccatcgaaatg

SEQ ID NO: 256326 - DNA, 25 bp, Probe Sequence
gtgtacacaactggcctcatttaat

SEQ ID NO: 256327 - DNA, 25 bp, Probe Sequence
gtgtatgcacattctctttagttaa

SEQ ID NO: 256328 - DNA, 25 bp, Probe Sequence
gtgtctgcgttcctgttagcataat

SEQ ID NO: 256329 - DNA, 25 bp, Probe Sequence
gtgtctgtgttcgtgtaggcataat

SEQ ID NO: 256330 - DNA, 25 bp, Probe Sequence
gtgtatctatgtgctcaaggaacat

SEQ ID NO: 256331 - DNA, 25 bp, Probe Sequence
gtgtatgtttcccaagtgacgcaaa

SEQ ID NO: 256332 - DNA, 25 bp, Probe Sequence
gtgtcagttttcatagtatccatat

SEQ ID NO: 256333 - DNA, 25 bp, Probe Sequence
gtgtaagatttaatggttccacttg

SEQ ID NO: 256334 - DNA, 25 bp, Probe Sequence
gtgtacgatttaattgattcgatgc

SEQ ID NO: 256335 - DNA, 25 bp, Probe Sequence
gtgtactctcccattgactagatgg

SEQ ID NO: 256336 - DNA, 25 bp, Probe Sequence
gtgtactctctaaattggtaaggtc

SEQ ID NO: 256337 - DNA, 25 bp, Probe Sequence
gtgtaagcgccaaatagtctggggt

SEQ ID NO: 256338 - DNA, 25 bp, Probe Sequence
gtgtatagcgcctataactcgctgc

SEQ ID NO: 256339 - DNA, 25 bp, Probe Sequence
gtgtatgatggcctgataactccag

SEQ ID NO: 256340 - DNA, 25 bp, Probe Sequence
gtgtagatggtgtaagactctcagc

SEQ ID NO: 256341 - DNA, 25 bp, Probe Sequence
gtgtgcagatgtgataagtccccga

SEQ ID NO: 256342 - DNA, 25 bp, Probe Sequence
gtgtgagctgatgtaccacctagga

SEQ ID NO: 256343 - DNA, 25 bp, Probe Sequence
gtgtgagtttagtcacaactcctga

SEQ ID NO: 256344 - DNA, 25 bp, Probe Sequence
gtgtgagtttagtcacaactcctga

SEQ ID NO: 256345 - DNA, 25 bp, Probe Sequence
gtgtcatttgaaaccaatatcctga

SEQ ID NO: 256346 - DNA, 25 bp, Probe Sequence
gtgtattatacaaatcactatcgct

SEQ ID NO: 256347 - DNA, 25 bp, Probe Sequence
gtgtacttatatccacactgcacac

SEQ ID NO: 256348 - DNA, 25 bp, Probe Sequence
gtgtatcttgtgtccagactgtcag

SEQ ID NO: 256349 - DNA, 25 bp, Probe Sequence
gtgtcatgtcatagaccatacttag

SEQ ID NO: 256350 - DNA, 25 bp, Probe Sequence
gtgtcttatatgtaatcctgtaggt

SEQ ID NO: 256351 - DNA, 25 bp, Probe Sequence
gtgtctatgtattaatgcgttggaa

SEQ ID NO: 256352 - DNA, 25 bp, Probe Sequence
gtgtgcctgataccaagttgtaaaa

SEQ ID NO: 256353 - DNA, 25 bp, Probe Sequence
gtggttggagactttatttaccaag

SEQ ID NO: 256354 - DNA, 25 bp, Probe Sequence
gtggttaaaacttacctcattagca

SEQ ID NO: 256355 - DNA, 25 bp, Probe Sequence
gtgtcttacaaacagaactcccagg

SEQ ID NO: 256356 - DNA, 25 bp, Probe Sequence
gtgtgctctacaataaaaaccaaat

SEQ ID NO: 256357 - DNA, 25 bp, Probe Sequence
gtgtgcgtacgtgtatataactgaa

SEQ ID NO: 256358 - DNA, 25 bp, Probe Sequence
gtgtggcgacggataaggcctgaac

SEQ ID NO: 256359 - DNA, 25 bp, Probe Sequence
gtgtgccgactccgtggaggaagta

SEQ ID NO: 256360 - DNA, 25 bp, Probe Sequence
gtgtccgtatccagaaggatagtga

SEQ ID NO: 256361 - DNA, 25 bp, Probe Sequence
gtgtactttccaggataaatagtca

SEQ ID NO: 256362 - DNA, 25 bp, Probe Sequence
gtggttcttccagaaactgcggttt

SEQ ID NO: 256363 - DNA, 25 bp, Probe Sequence
gtgtgattttttgaatagttcttta

SEQ ID NO: 256364 - DNA, 25 bp, Probe Sequence
gtgtatttcttttaactgtgtatat

SEQ ID NO: 256365 - DNA, 25 bp, Probe Sequence
gtgtgcatttataacaaacttctaa

SEQ ID NO: 256366 - DNA, 25 bp, Probe Sequence
gtgtatgtctttactaaattgggag

SEQ ID NO: 256367 - DNA, 25 bp, Probe Sequence
gtgtctgtttatgtaactctgactt

SEQ ID NO: 256368 - DNA, 25 bp, Probe Sequence
gtgtgtttaagcttaggaatgccct

SEQ ID NO: 256369 - DNA, 25 bp, Probe Sequence
gtggtgttgggtgagtacaaccttg

SEQ ID NO: 256370 - DNA, 25 bp, Probe Sequence
ggatctgtttggaaacaaccccttg

SEQ ID NO: 256371 - DNA, 25 bp, Probe Sequence
gtgtgtcttttgaaacaccacctct

SEQ ID NO: 256372 - DNA, 25 bp, Probe Sequence
gtgtactttttcaacaagcacgacc

SEQ ID NO: 256373 - DNA, 25 bp, Probe Sequence
gtgtctgtgtatattacaagcctac

SEQ ID NO: 256374 - DNA, 25 bp, Probe Sequence
gtgtctgcctatgcttaaagccaac

SEQ ID NO: 256375 - DNA, 25 bp, Probe Sequence
gtgtcatcctttttggaaccaacaa

SEQ ID NO: 256376 - DNA, 25 bp, Probe Sequence
gtgtccgctttgtaggacaccacct

SEQ ID NO: 256377 - DNA, 25 bp, Probe Sequence
gtgtccgctttgtaggacaccacct

SEQ ID NO: 256378 - DNA, 25 bp, Probe Sequence
gtggaccatttgtaggtttccctct

SEQ ID NO: 256379 - DNA, 25 bp, Probe Sequence
gtgtgaccttaggaagtctctgccc

SEQ ID NO: 256380 - DNA, 25 bp, Probe Sequence
gtgtacctaagggagtagtgtcact

SEQ ID NO: 256381 - DNA, 25 bp, Probe Sequence
gtgtaccaaagggtcatgtggatca

SEQ ID NO: 256382 - DNA, 25 bp, Probe Sequence
gtgtaacaacagccgcttctggaac

SEQ ID NO: 256383 - DNA, 25 bp, Probe Sequence
gtgtcaagcaggcgctcttgtgaat

SEQ ID NO: 256384 - DNA, 25 bp, Probe Sequence
gtgtgcaagcagtgactttagacct

SEQ ID NO: 256385 - DNA, 25 bp, Probe Sequence
gtgtacacaaagtttctcatatcct

SEQ ID NO: 256386 - DNA, 25 bp, Probe Sequence
gtgggccaaaatcatgccattgcac

SEQ ID NO: 256387 - DNA, 25 bp, Probe Sequence
gtgggccaaaatcatgccattgcac

SEQ ID NO: 256388 - DNA, 25 bp, Probe Sequence
gtgtgtgcaaatacactgtccagga

SEQ ID NO: 256389 - DNA, 25 bp, Probe Sequence
gggctgccagcagtacgtgggaaag

SEQ ID NO: 256390 - DNA, 25 bp, Probe Sequence
gtggcccagctggactgggacgtag

SEQ ID NO: 256391 - DNA, 25 bp, Probe Sequence
gtgtccacagctggacaggagagac

SEQ ID NO: 256392 - DNA, 25 bp, Probe Sequence
gtgtgctgttgtgcacgtcaggacg

SEQ ID NO: 256393 - DNA, 25 bp, Probe Sequence
gtgtcgtggctgtcgagtgcattga

SEQ ID NO: 256394 - DNA, 25 bp, Probe Sequence
gtgtcattggtgggaagcagtgtca

SEQ ID NO: 256395 - DNA, 25 bp, Probe Sequence
gtgtatggggcatgagatggtatga

SEQ ID NO: 256396 - DNA, 25 bp, Probe Sequence
gtgtatggtgactggaggtgctaac

SEQ ID NO: 256397 - DNA, 25 bp, Probe Sequence
gtgtatggtgactggaggtgctaac

SEQ ID NO: 256398 - DNA, 25 bp, Probe Sequence
gtgtcagtggctttggagcaggcta

SEQ ID NO: 256399 - DNA, 25 bp, Probe Sequence
gtgtcaggcctttgcagtaggcttg

SEQ ID NO: 256400 - DNA, 25 bp, Probe Sequence
gtgtagtatcttggcatttgtattg

SEQ ID NO: 256401 - DNA, 25 bp, Probe Sequence
gtgtatgtacttagctgtactataa

SEQ ID NO: 256402 - DNA, 25 bp, Probe Sequence
gtgtatgtacttagctgtactataa

SEQ ID NO: 256403 - DNA, 25 bp, Probe Sequence
gtgtaatcactaagtctttgtagat

SEQ ID NO: 256404 - DNA, 25 bp, Probe Sequence
gtgtactccaaagttgtgatgtaaa

SEQ ID NO: 256405 - DNA, 25 bp, Probe Sequence
gtgtacttgcaaaaagttgtgagac

SEQ ID NO: 256406 - DNA, 25 bp, Probe Sequence
gtgtgacggtatgagaatctgtgaa

SEQ ID NO: 256407 - DNA, 25 bp, Probe Sequence
gtgtactgattgctataatggtgaa

SEQ ID NO: 256408 - DNA, 25 bp, Probe Sequence
gtgtacgagctcatgaaagtgttgt

SEQ ID NO: 256409 - DNA, 25 bp, Probe Sequence
gtgtactgatctagaaaagctgttt

SEQ ID NO: 256410 - DNA, 25 bp, Probe Sequence
gtgtacttgtggaaaggtgtgtttg

SEQ ID NO: 256411 - DNA, 25 bp, Probe Sequence
gtgtcattttggcaaagtggtctgt

SEQ ID NO: 256412 - DNA, 25 bp, Probe Sequence
gtgtcagtcttcctaatttgatttg

SEQ ID NO: 256413 - DNA, 25 bp, Probe Sequence
gtgtaccattggcatatttgtcttc

SEQ ID NO: 256414 - DNA, 25 bp, Probe Sequence
gtgtcaaattgtgtgcattcattct

SEQ ID NO: 256415 - DNA, 25 bp, Probe Sequence
gtgtcaatactggcttatgaattat

SEQ ID NO: 256416 - DNA, 25 bp, Probe Sequence
gtgtcactagtgtctaatgaagctt

SEQ ID NO: 256417 - DNA, 25 bp, Probe Sequence
gtgtgagcgagtctaataatccagc

SEQ ID NO: 256418 - DNA, 25 bp, Probe Sequence
gtgtgaggacttctgcatcttacag

SEQ ID NO: 256419 - DNA, 25 bp, Probe Sequence
gtgtctaccattctactgcatgaca

SEQ ID NO: 256420 - DNA, 25 bp, Probe Sequence
gtgtctcactgaagcttactgagcc

SEQ ID NO: 256421 - DNA, 25 bp, Probe Sequence
gtgtacctaactaaggatgatctag

SEQ ID NO: 256422 - DNA, 25 bp, Probe Sequence
gtgtacttcacactactagatgtta

SEQ ID NO: 256423 - DNA, 25 bp, Probe Sequence
gtggcctggccaatgtccagttgta

SEQ ID NO: 256424 - DNA, 25 bp, Probe Sequence
gtggatcggagtagtgctcagcatt

SEQ ID NO: 256425 - DNA, 25 bp, Probe Sequence
gtggaccaggtgagggctatttaag

SEQ ID NO: 256426 - DNA, 25 bp, Probe Sequence
gtgtgtccgttgagcttgcttttaa

SEQ ID NO: 256427 - DNA, 25 bp, Probe Sequence
gtgtgctgctagagggttctttttc

SEQ ID NO: 256428 - DNA, 25 bp, Probe Sequence
gtgtgctttaagggctgtgttttgc

SEQ ID NO: 256429 - DNA, 25 bp, Probe Sequence
gtgtcagttatagggctgtgccttg

SEQ ID NO: 256430 - DNA, 25 bp, Probe Sequence
gtgtctgcttcatggtgctgaacgt

SEQ ID NO: 256431 - DNA, 25 bp, Probe Sequence
gtgtgctgttgctatgcagtgtgat

SEQ ID NO: 256432 - DNA, 25 bp, Probe Sequence
gtgtgagtctgctatgggattagaa

SEQ ID NO: 256433 - DNA, 25 bp, Probe Sequence
gtgtgcaatcgctatgagtttctga

SEQ ID NO: 256434 - DNA, 25 bp, Probe Sequence
gtgtgcagagcggtggtttgagact

SEQ ID NO: 256435 - DNA, 25 bp, Probe Sequence
gtgtcagcagcggatgttgtgttgt

SEQ ID NO: 256436 - DNA, 25 bp, Probe Sequence
gtggcagccatgaaggctcatggtg

SEQ ID NO: 256437 - DNA, 25 bp, Probe Sequence
gtgtgcacctaattgtgtggctgaa

SEQ ID NO: 256438 - DNA, 25 bp, Probe Sequence
gtgtgcacaatacttgtggcccaca

SEQ ID NO: 256439 - DNA, 25 bp, Probe Sequence
gtgtgacaaaggatgcccagcagca

SEQ ID NO: 256440 - DNA, 25 bp, Probe Sequence
gtgtagcaagatctgtgagcctggc

SEQ ID NO: 256441 - DNA, 25 bp, Probe Sequence
gtgtggaattttacacctggcctgc

SEQ ID NO: 256442 - DNA, 25 bp, Probe Sequence
gtggagacatttgtcaagtacctga

SEQ ID NO: 256443 - DNA, 25 bp, Probe Sequence
gtgtcgactttggaaagatacggac

SEQ ID NO: 256444 - DNA, 25 bp, Probe Sequence
gtgtgtgacctcgcatatgtatgac

SEQ ID NO: 256445 - DNA, 25 bp, Probe Sequence
gtgtacactccagctgtttgaagag

SEQ ID NO: 256446 - DNA, 25 bp, Probe Sequence
gtgtgaaactcggctgtattaatca

SEQ ID NO: 256447 - DNA, 25 bp, Probe Sequence
gtgtgagaaatcttgctaatctata

SEQ ID NO: 256448 - DNA, 25 bp, Probe Sequence
gtgtaatgatatttctgtacttttg

SEQ ID NO: 256449 - DNA, 25 bp, Probe Sequence
gtgtgacatgtatatattatcttaa

SEQ ID NO: 256450 - DNA, 25 bp, Probe Sequence
gtgtgacgcctgtatattccagtta

SEQ ID NO: 256451 - DNA, 25 bp, Probe Sequence
gtgtccaactgaaattatcgctttt

SEQ ID NO: 256452 - DNA, 25 bp, Probe Sequence
gtgtctaccatgattatttttttaa

SEQ ID NO: 256453 - DNA, 25 bp, Probe Sequence
gtgtgtcccaatgacttttctttac

SEQ ID NO: 256454 - DNA, 25 bp, Probe Sequence
gtgtgtcccaatgacttttctttac

SEQ ID NO: 256455 - DNA, 25 bp, Probe Sequence
gtgtgtccgaatgactttcctttac

SEQ ID NO: 256456 - DNA, 25 bp, Probe Sequence
gtggtggtgactgaaataactttac

SEQ ID NO: 256457 - DNA, 25 bp, Probe Sequence
ggagccgtaacgacaataatcgtgt

SEQ ID NO: 256458 - DNA, 25 bp, Probe Sequence
gtggtcgcggggacaaactacttca

SEQ ID NO: 256459 - DNA, 25 bp, Probe Sequence
taggtcagttcggaaacttgaaata

SEQ ID NO: 256460 - DNA, 25 bp, Probe Sequence
tggcagtggttctggtactaaaaat

SEQ ID NO: 256461 - DNA, 25 bp, Probe Sequence
gtggggttcgctctactatggagat

SEQ ID NO: 256462 - DNA, 25 bp, Probe Sequence
gtggaggtctgacagggtaggaata

SEQ ID NO: 256463 - DNA, 25 bp, Probe Sequence
gtgggggtgggggagatagcaacca

SEQ ID NO: 256464 - DNA, 25 bp, Probe Sequence
gtgggcaagtcatagaagtcgaaac

SEQ ID NO: 256465 - DNA, 25 bp, Probe Sequence
gtgtggcaagttcggggccgtgaac

SEQ ID NO: 256466 - DNA, 25 bp, Probe Sequence
gtgtgcgccatcattgggggcatgt

SEQ ID NO: 256467 - DNA, 25 bp, Probe Sequence
gtgtgcaaactcttgagggttgatt

SEQ ID NO: 256468 - DNA, 25 bp, Probe Sequence
tgttgcaaagtagtgaatggcaaat

SEQ ID NO: 256469 - DNA, 25 bp, Probe Sequence
gtgtgcttcagttgggtggcaaatt

SEQ ID NO: 256470 - DNA, 25 bp, Probe Sequence
gtgtgctacatttgtgcttgtgaat

SEQ ID NO: 256471 - DNA, 25 bp, Probe Sequence
gtgtgcatcgcaccgtgctgtaaat

SEQ ID NO: 256472 - DNA, 25 bp, Probe Sequence
gtgtcaccagctttctttaaggtct

SEQ ID NO: 256473 - DNA, 25 bp, Probe Sequence
gtgtccaggctctgtttatgggtat

SEQ ID NO: 256474 - DNA, 25 bp, Probe Sequence
gtgtcctgtgtctggttaagtgtcc

SEQ ID NO: 256475 - DNA, 25 bp, Probe Sequence
gtgtcctgtgtctggttaagtgtcc

SEQ ID NO: 256476 - DNA, 25 bp, Probe Sequence
gtgtccttgaagtggtgaagtgccc

SEQ ID NO: 256477 - DNA, 25 bp, Probe Sequence
gtgtactgtgagctggcggagaggc

SEQ ID NO: 256478 - DNA, 25 bp, Probe Sequence
gtgtccgatgagaatgatgccaaga

SEQ ID NO: 256479 - DNA, 25 bp, Probe Sequence
gtgtccgtgaggcagcacacgaagt

SEQ ID NO: 256480 - DNA, 25 bp, Probe Sequence
gtgtccgagaagtcaggcacgtagc

SEQ ID NO: 256481 - DNA, 25 bp, Probe Sequence
gtgtgccgagagatgggactgtgcg

SEQ ID NO: 256482 - DNA, 25 bp, Probe Sequence
gtgtgccagggcaagtggacgcagc

SEQ ID NO: 256483 - DNA, 25 bp, Probe Sequence
gtgtgagcactggccagagtgacca

SEQ ID NO: 256484 - DNA, 25 bp, Probe Sequence
gtgtgcagcctatcaagctggccag

SEQ ID NO: 256485 - DNA, 25 bp, Probe Sequence
gtgtggtgctagaaactggtcccca

SEQ ID NO: 256486 - DNA, 25 bp, Probe Sequence
gtgtggtaatgttcacctgcagtcc

SEQ ID NO: 256487 - DNA, 25 bp, Probe Sequence
gtgtgttatacttgctttggtgatt

SEQ ID NO: 256488 - DNA, 25 bp, Probe Sequence
gggctgttacttgctttgagttgga

SEQ ID NO: 256489 - DNA, 25 bp, Probe Sequence
gggcttttgtttatggctgcttagg

SEQ ID NO: 256490 - DNA, 25 bp, Probe Sequence
gtgggttttagtgttggtcacaggt

SEQ ID NO: 256491 - DNA, 25 bp, Probe Sequence
gtggtggttctaccaggaggtaatc

SEQ ID NO: 256492 - DNA, 25 bp, Probe Sequence
gtggggttctaatgccagtttccta

SEQ ID NO: 256493 - DNA, 25 bp, Probe Sequence
gtgtgggcttaataccatgtctatt

SEQ ID NO: 256494 - DNA, 25 bp, Probe Sequence
gtggggcctcaatctaaggccttcc

SEQ ID NO: 256495 - DNA, 25 bp, Probe Sequence
gtggttgttaggatcaagggctatc

SEQ ID NO: 256496 - DNA, 25 bp, Probe Sequence
gtgtgggcttaggtttgggactaga

SEQ ID NO: 256497 - DNA, 25 bp, Probe Sequence
gtgtgggcttaggtttgggactaga

SEQ ID NO: 256498 - DNA, 25 bp, Probe Sequence
gtggggatttgagttataagaattg

SEQ ID NO: 256499 - DNA, 25 bp, Probe Sequence
gtgggtatttaatctgtattattcc

SEQ ID NO: 256500 - DNA, 25 bp, Probe Sequence
gtgggattatttgtagttttttcat

SEQ ID NO: 256501 - DNA, 25 bp, Probe Sequence
gtggagattaccgaagacttcttct

SEQ ID NO: 256502 - DNA, 25 bp, Probe Sequence
gtgtacatctaccgcgggagatttc

SEQ ID NO: 256503 - DNA, 25 bp, Probe Sequence
gtgtcagcaccatcctggaaggtta

SEQ ID NO: 256504 - DNA, 25 bp, Probe Sequence
gtgtggcccagttctgaaagcttta

SEQ ID NO: 256505 - DNA, 25 bp, Probe Sequence
gtgtgtcccactttaagcatgtatc

SEQ ID NO: 256506 - DNA, 25 bp, Probe Sequence
gtgtgtccctattataaatgcattg

SEQ ID NO: 256507 - DNA, 25 bp, Probe Sequence
gtgtgaccatgttcattataatctc

SEQ ID NO: 256508 - DNA, 25 bp, Probe Sequence
gtgtcaggctttatatatattcagc

SEQ ID NO: 256509 - DNA, 25 bp, Probe Sequence
gtgtcagatctggtttaataatgca

SEQ ID NO: 256510 - DNA, 25 bp, Probe Sequence
gtgtcaacttttaagcaacagcact

SEQ ID NO: 256511 - DNA, 25 bp, Probe Sequence
gtgtcttctatttggcaaacagcaa

SEQ ID NO: 256512 - DNA, 25 bp, Probe Sequence
gtgtgccctgatctggataaaatag

SEQ ID NO: 256513 - DNA, 25 bp, Probe Sequence
gtgtgcccaatgagaataagtattc

SEQ ID NO: 256514 - DNA, 25 bp, Probe Sequence
gtgtctatgcaaaggaagctcagtt

SEQ ID NO: 256515 - DNA, 25 bp, Probe Sequence
gtgtcttcataataactagtcattt

SEQ ID NO: 256516 - DNA, 25 bp, Probe Sequence
gtgtctgttaagcaaatgttatcta

SEQ ID NO: 256517 - DNA, 25 bp, Probe Sequence
gtgtctgttaaatgaatgtcatatg

SEQ ID NO: 256518 - DNA, 25 bp, Probe Sequence
gtgtggttacaaatgaacccatgga

SEQ ID NO: 256519 - DNA, 25 bp, Probe Sequence
gtgtgtttgccaatagatacccatt

SEQ ID NO: 256520 - DNA, 25 bp, Probe Sequence
gtgtgagctggcgttggataccagt

SEQ ID NO: 256521 - DNA, 25 bp, Probe Sequence
gtgtggctgacagtctcagtttgcc

SEQ ID NO: 256522 - DNA, 25 bp, Probe Sequence
gtgtgagatgtggatcccttagccc

SEQ ID NO: 256523 - DNA, 25 bp, Probe Sequence
gtggatggtgtctcctttactaaat

SEQ ID NO: 256524 - DNA, 25 bp, Probe Sequence
gtgtgaggctgttagactgttagat

SEQ ID NO: 256525 - DNA, 25 bp, Probe Sequence
gtgtaagctgcatagttgtactgtg

SEQ ID NO: 256526 - DNA, 25 bp, Probe Sequence
gtgtcaaccacaacaagtacatggt

SEQ ID NO: 256527 - DNA, 25 bp, Probe Sequence
gtgtcagaccacagactgcgttgga

SEQ ID NO: 256528 - DNA, 25 bp, Probe Sequence
gtgtctacaccaaagtcgctgagta

SEQ ID NO: 256529 - DNA, 25 bp, Probe Sequence
gtgtcccattaacacagtgagtagt

SEQ ID NO: 256530 - DNA, 25 bp, Probe Sequence
gtgtgctatatttagaacagtctta

SEQ ID NO: 256531 - DNA, 25 bp, Probe Sequence
gtgtcttctgcttatgaagcgcctt

SEQ ID NO: 256532 - DNA, 25 bp, Probe Sequence
gtgtctggagccatgaaggccttgt

SEQ ID NO: 256533 - DNA, 25 bp, Probe Sequence
gtgtctgctggtatacagaccagtt

SEQ ID NO: 256534 - DNA, 25 bp, Probe Sequence
gtgtctctggtgagaagttcatatc

SEQ ID NO: 256535 - DNA, 25 bp, Probe Sequence
gtgtccattatcctgaagttgctat

SEQ ID NO: 256536 - DNA, 25 bp, Probe Sequence
gtgtaatctgacctgcagacttcat

SEQ ID NO: 256537 - DNA, 25 bp, Probe Sequence
gtgtcgacgatccagtggtcatcat

SEQ ID NO: 256538 - DNA, 25 bp, Probe Sequence
gtgtctacagtccagatgttcttcg

SEQ ID NO: 256539 - DNA, 25 bp, Probe Sequence
gtgtgctacacacagatattttcat

SEQ ID NO: 256540 - DNA, 25 bp, Probe Sequence
gtgtgctcaagctaataagttattg

SEQ ID NO: 256541 - DNA, 25 bp, Probe Sequence
gtgtccttctacaatatgtgtgatg

SEQ ID NO: 256542 - DNA, 25 bp, Probe Sequence
gtgtcagtgactgcacattggtttc

SEQ ID NO: 256543 - DNA, 25 bp, Probe Sequence
gtgtgcattactggctaatcttttt

SEQ ID NO: 256544 - DNA, 25 bp, Probe Sequence
gtgtgcatgcatttaataccttttt

SEQ ID NO: 256545 - DNA, 25 bp, Probe Sequence
gtgtcagcgtgttatgatgccgtcc

SEQ ID NO: 256546 - DNA, 25 bp, Probe Sequence
gtgtcagcgtgttatgatgccgtcc

SEQ ID NO: 256547 - DNA, 25 bp, Probe Sequence
gtgtcaggtgtggatagccatttct

SEQ ID NO: 256548 - DNA, 25 bp, Probe Sequence
gtgtcagggggaagatcctttggca

SEQ ID NO: 256549 - DNA, 25 bp, Probe Sequence
gtgtcagggtggtgacttcacacgc

SEQ ID NO: 256550 - DNA, 25 bp, Probe Sequence
gtgtccggtgtggccacggacatcc

SEQ ID NO: 256551 - DNA, 25 bp, Probe Sequence
gtgtcctggggaatactggccatgc

SEQ ID NO: 256552 - DNA, 25 bp, Probe Sequence
gtgtgccggaatatcagcaggcggc

SEQ ID NO: 256553 - DNA, 25 bp, Probe Sequence
gtgggctggaacatgcagctgctac

SEQ ID NO: 256554 - DNA, 25 bp, Probe Sequence
gtgtcctgtgaatgtatcgctactg

SEQ ID NO: 256555 - DNA, 25 bp, Probe Sequence
gtgtccgaaataatgtccttctcca

SEQ ID NO: 256556 - DNA, 25 bp, Probe Sequence
gtgtcctacacaatggtgctattct

SEQ ID NO: 256557 - DNA, 25 bp, Probe Sequence
gtgtcctacacaatggtgctattct

SEQ ID NO: 256558 - DNA, 25 bp, Probe Sequence
gtgtcttaacaccagatgctacttt

SEQ ID NO: 256559 - DNA, 25 bp, Probe Sequence
gtgtcttctatctcattgtattttt

SEQ ID NO: 256560 - DNA, 25 bp, Probe Sequence
gtgtctttgctatgctttttatcat

SEQ ID NO: 256561 - DNA, 25 bp, Probe Sequence
gtgtcattttattttagtcattatt

SEQ ID NO: 256562 - DNA, 25 bp, Probe Sequence
gtggtcgcttactttgagtgatcct

SEQ ID NO: 256563 - DNA, 25 bp, Probe Sequence
gtggtccatggtgattgtgtacgat

SEQ ID NO: 256564 - DNA, 25 bp, Probe Sequence
gtggtccgaatcagtggtgggaacg

SEQ ID NO: 256565 - DNA, 25 bp, Probe Sequence
gtgggactgaagacagtggtcaaga

SEQ ID NO: 256566 - DNA, 25 bp, Probe Sequence
gtgggagcgaaaaattattggcatt

SEQ ID NO: 256567 - DNA, 25 bp, Probe Sequence
gtgggacgacagtgaaatctagagt

SEQ ID NO: 256568 - DNA, 25 bp, Probe Sequence
tgagtcgggaagtaaaattcgggct

SEQ ID NO: 256569 - DNA, 25 bp, Probe Sequence
tggttaggaaaacatctcctgggtt

SEQ ID NO: 256570 - DNA, 25 bp, Probe Sequence
ggttttggaccatttatgccgggat

SEQ ID NO: 256571 - DNA, 25 bp, Probe Sequence
gtgtcctatggagatattacagtgg

SEQ ID NO: 256572 - DNA, 25 bp, Probe Sequence
gtgtctctcacagcttgtaaagtgt

SEQ ID NO: 256573 - DNA, 25 bp, Probe Sequence
gtgtctctcacagcttgtaaagtgt

SEQ ID NO: 256574 - DNA, 25 bp, Probe Sequence
gtgtctctcacggcttgtaaattgt

SEQ ID NO: 256575 - DNA, 25 bp, Probe Sequence
gtgtcttgcactggaattcaacatt

SEQ ID NO: 256576 - DNA, 25 bp, Probe Sequence
gtgtgctctgagcgaaggcaaggtg

SEQ ID NO: 256577 - DNA, 25 bp, Probe Sequence
gtgtctctagggtgatacgtgggtg

SEQ ID NO: 256578 - DNA, 25 bp, Probe Sequence
gtgtctgtagggttaaaggtctgct

SEQ ID NO: 256579 - DNA, 25 bp, Probe Sequence
gtgtcgtcgctgtttagacacctct

SEQ ID NO: 256580 - DNA, 25 bp, Probe Sequence
gtgtctgttggtgtagatgcgcgtc

SEQ ID NO: 256581 - DNA, 25 bp, Probe Sequence
gtgtggttgagctgaatgagggccg

SEQ ID NO: 256582 - DNA, 25 bp, Probe Sequence
gtgtctgctctacagatgaaagtcc

SEQ ID NO: 256583 - DNA, 25 bp, Probe Sequence
gtgtctcttgatcacagtaacccga

SEQ ID NO: 256584 - DNA, 25 bp, Probe Sequence
gtgtgtttgatatgcttaaccggag

SEQ ID NO: 256585 - DNA, 25 bp, Probe Sequence
gtggtgcctatctacttaagggggc

SEQ ID NO: 256586 - DNA, 25 bp, Probe Sequence
gggtgcctatttattggggatctgc

SEQ ID NO: 256587 - DNA, 25 bp, Probe Sequence
gtgggttatttttggtgggatggag

SEQ ID NO: 256588 - DNA, 25 bp, Probe Sequence
gtgtgcctaattctagggaggtggg

SEQ ID NO: 256589 - DNA, 25 bp, Probe Sequence
gtgtggctaattataattcagcgtt

SEQ ID NO: 256590 - DNA, 25 bp, Probe Sequence
gtggtgtacaccgttactcagatgt

SEQ ID NO: 256591 - DNA, 25 bp, Probe Sequence
gtggtgtacaccgttactcagatgt

SEQ ID NO: 256592 - DNA, 25 bp, Probe Sequence
gtggttcattcctttcagccatcgt

SEQ ID NO: 256593 - DNA, 25 bp, Probe Sequence
gtgtgattcctagttgtagccaccg

SEQ ID NO: 256594 - DNA, 25 bp, Probe Sequence
gtgtgagtacagggggcagcccagc

SEQ ID NO: 256595 - DNA, 25 bp, Probe Sequence
gtgtgttgaagccgggctcagacac

SEQ ID NO: 256596 - DNA, 25 bp, Probe Sequence
gtgtgcttgctagctgggcaagaaa

SEQ ID NO: 256597 - DNA, 25 bp, Probe Sequence
gtgtgctaccagcccggaaagacac

SEQ ID NO: 256598 - DNA, 25 bp, Probe Sequence
gtgtgaacaggtcaagaataacact

SEQ ID NO: 256599 - DNA, 25 bp, Probe Sequence
gtgtgagaagggccagagggtccag

SEQ ID NO: 256600 - DNA, 25 bp, Probe Sequence
gtgtgagaagggccagagggtccag

SEQ ID NO: 256601 - DNA, 25 bp, Probe Sequence
gtgggaaggtggcttgagttcagga

SEQ ID NO: 256602 - DNA, 25 bp, Probe Sequence
gggccagatcgtgtttgagttcgtg

SEQ ID NO: 256603 - DNA, 25 bp, Probe Sequence
gtgggaatcctggctatatagttgg

SEQ ID NO: 256604 - DNA, 25 bp, Probe Sequence
gtgtggaacctgatcagatacatct

SEQ ID NO: 256605 - DNA, 25 bp, Probe Sequence
gtgtgaaactgtatctgccactcat

SEQ ID NO: 256606 - DNA, 25 bp, Probe Sequence
gtgtgcagaaagtatcttcctccag

SEQ ID NO: 256607 - DNA, 25 bp, Probe Sequence
gtggcaagaatatgttcccccagcc

SEQ ID NO: 256608 - DNA, 25 bp, Probe Sequence
gtggcaaattaagtgtgaccgcaac

SEQ ID NO: 256609 - DNA, 25 bp, Probe Sequence
gtggaaggtccagtaccaccagagc

SEQ ID NO: 256610 - DNA, 25 bp, Probe Sequence
gtggaagggctcggagacctacagc

SEQ ID NO: 256611 - DNA, 25 bp, Probe Sequence
gtgggttggctcggaagactccgtc

SEQ ID NO: 256612 - DNA, 25 bp, Probe Sequence
gtggagtattacggaaactgcccca

SEQ ID NO: 256613 - DNA, 25 bp, Probe Sequence
gtgtgactactgacggagaagaccc

SEQ ID NO: 256614 - DNA, 25 bp, Probe Sequence
gtggcccagctcaaacagaaggtca

SEQ ID NO: 256615 - DNA, 25 bp, Probe Sequence
gtgtgaatcctgaaacaaagggacc

SEQ ID NO: 256616 - DNA, 25 bp, Probe Sequence
gtgtgtacgctgaaagatacagagg

SEQ ID NO: 256617 - DNA, 25 bp, Probe Sequence
gtgtgtccgtgaggcagcacacgaa

SEQ ID NO: 256618 - DNA, 25 bp, Probe Sequence
gtggtacaggaactgccactacgcc

SEQ ID NO: 256619 - DNA, 25 bp, Probe Sequence
gtggtacaggaactgccactacgcc

SEQ ID NO: 256620 - DNA, 25 bp, Probe Sequence
gtggtaaggaaatgccgattcttca

SEQ ID NO: 256621 - DNA, 25 bp, Probe Sequence
gtggaaaaaaaccgactttctgcat

SEQ ID NO: 256622 - DNA, 25 bp, Probe Sequence
gtgggtagaaaacctgactcttcgt

SEQ ID NO: 256623 - DNA, 25 bp, Probe Sequence
gtgggtcacacaaggtctacattac

SEQ ID NO: 256624 - DNA, 25 bp, Probe Sequence
gtggtgacccatgggattttctctc

SEQ ID NO: 256625 - DNA, 25 bp, Probe Sequence
gtgtgtacaccagggatctgtttgg

SEQ ID NO: 256626 - DNA, 25 bp, Probe Sequence
gtgggaactcatggttctttggaaa

SEQ ID NO: 256627 - DNA, 25 bp, Probe Sequence
gtgggagaagatgacccgtggaaca

SEQ ID NO: 256628 - DNA, 25 bp, Probe Sequence
gtgggaaaagcttccggcagggcat

SEQ ID NO: 256629 - DNA, 25 bp, Probe Sequence
gtgggaaaggattttgtcagtctag

SEQ ID NO: 256630 - DNA, 25 bp, Probe Sequence
gtgtgtaagaggtagggggcctagg

SEQ ID NO: 256631 - DNA, 25 bp, Probe Sequence
gtgtgttagggccctggcgtgaaac

SEQ ID NO: 256632 - DNA, 25 bp, Probe Sequence
gtgtggtaggacccggcgggtgtgc

SEQ ID NO: 256633 - DNA, 25 bp, Probe Sequence
gtgggtgacaacggcaggaggggac

SEQ ID NO: 256634 - DNA, 25 bp, Probe Sequence
gtgtgggagatcccggatgggggcc

SEQ ID NO: 256635 - DNA, 25 bp, Probe Sequence
gtgggagaatcatcggggtcaggtc

SEQ ID NO: 256636 - DNA, 25 bp, Probe Sequence
gtgtgtgagagagcggctggttcat

SEQ ID NO: 256637 - DNA, 25 bp, Probe Sequence
gtgggataggattggcggctcattc

SEQ ID NO: 256638 - DNA, 25 bp, Probe Sequence
gtgggagatgcgtagggggtcataa

SEQ ID NO: 256639 - DNA, 25 bp, Probe Sequence
gtgtcgatatgttcggcttttcatg

SEQ ID NO: 256640 - DNA, 25 bp, Probe Sequence
gtgtcctgtgcttggatgcttttta

SEQ ID NO: 256641 - DNA, 25 bp, Probe Sequence
gtgtcgcttgttggaggtttgcttt

SEQ ID NO: 256642 - DNA, 25 bp, Probe Sequence
gtgtcgcttgttggaggtttgcttt

SEQ ID NO: 256643 - DNA, 25 bp, Probe Sequence
gtgtgtgaattgggggctttctttg

SEQ ID NO: 256644 - DNA, 25 bp, Probe Sequence
gtgtgtgacagggagggtcttactc

SEQ ID NO: 256645 - DNA, 25 bp, Probe Sequence
gtgtggccaggggtggccatgtaag

SEQ ID NO: 256646 - DNA, 25 bp, Probe Sequence
gtgtggccaggaagtagccagggtg

SEQ ID NO: 256647 - DNA, 25 bp, Probe Sequence
gtgtgaccagaaaggcagccctgtc

SEQ ID NO: 256648 - DNA, 25 bp, Probe Sequence
gtgtggggaaggacacttctgccat

SEQ ID NO: 256649 - DNA, 25 bp, Probe Sequence
gtgggatggaagtttttgctacatg

SEQ ID NO: 256650 - DNA, 25 bp, Probe Sequence
gtgggggagaacgtttcccatctga

SEQ ID NO: 256651 - DNA, 25 bp, Probe Sequence
gtgggcaggaacggcgtcctgccac

SEQ ID NO: 256652 - DNA, 25 bp, Probe Sequence
gtgggagtgaagggaatccctcacc

SEQ ID NO: 256653 - DNA, 25 bp, Probe Sequence
gtgtggtgtgtaagtatatccccaa

SEQ ID NO: 256654 - DNA, 25 bp, Probe Sequence
gtgtggtctggtacttccgaatcaa

SEQ ID NO: 256655 - DNA, 25 bp, Probe Sequence
gtgtggtctggtacttccgaatcaa

SEQ ID NO: 256656 - DNA, 25 bp, Probe Sequence
gtgtggtctggtacttccgaatcaa

SEQ ID NO: 256657 - DNA, 25 bp, Probe Sequence
gtgtgatactcgagtacctggatca

SEQ ID NO: 256658 - DNA, 25 bp, Probe Sequence
gtgtgccacattaaatacccgtgca

SEQ ID NO: 256659 - DNA, 25 bp, Probe Sequence
gtgtgaccacttaaagctgctcgtt

SEQ ID NO: 256660 - DNA, 25 bp, Probe Sequence
gtgtgtaagttaaagtggccacatt

SEQ ID NO: 256661 - DNA, 25 bp, Probe Sequence
gtgtgtaagtatatccccaatgttg

SEQ ID NO: 256662 - DNA, 25 bp, Probe Sequence
gtgtgtagacattgtattccacaat

SEQ ID NO: 256663 - DNA, 25 bp, Probe Sequence
gtgtctggaatgctcaatgtcaaat

SEQ ID NO: 256664 - DNA, 25 bp, Probe Sequence
gtgtctggccagactccatggcaaa

SEQ ID NO: 256665 - DNA, 25 bp, Probe Sequence
gtgtctggcctgataatatgaaact

SEQ ID NO: 256666 - DNA, 25 bp, Probe Sequence
gtgtcccttgtgaagaaggatgtct

SEQ ID NO: 256667 - DNA, 25 bp, Probe Sequence
gtgtcctcttgctcaaaaatctgtt

SEQ ID NO: 256668 - DNA, 25 bp, Probe Sequence
gtgtcctgtgtacatatagaattgt

SEQ ID NO: 256669 - DNA, 25 bp, Probe Sequence
gtgtgcctgtgtcccattaacacag

SEQ ID NO: 256670 - DNA, 25 bp, Probe Sequence
gtgtgtcggaccctggagacacagc

SEQ ID NO: 256671 - DNA, 25 bp, Probe Sequence
gtgtctggagacactgagaacgcca

SEQ ID NO: 256672 - DNA, 25 bp, Probe Sequence
gtgtcgggtttctagagaagccaat

SEQ ID NO: 256673 - DNA, 25 bp, Probe Sequence
gtgtctgcaatttctcaaaatagct

SEQ ID NO: 256674 - DNA, 25 bp, Probe Sequence
gtgtctgaactaataaagtggctga

SEQ ID NO: 256675 - DNA, 25 bp, Probe Sequence
gtgtcgaagcgaaagctgggccgcc

SEQ ID NO: 256676 - DNA, 25 bp, Probe Sequence
gtgggaatgcaaaatggtccaggca

SEQ ID NO: 256677 - DNA, 25 bp, Probe Sequence
gtgggcttcaagaagcgtgcacctc

SEQ ID NO: 256678 - DNA, 25 bp, Probe Sequence
gtggacttcctgagtccaatcccac

SEQ ID NO: 256679 - DNA, 25 bp, Probe Sequence
gtggatgttccgtgtgtttggccac

SEQ ID NO: 256680 - DNA, 25 bp, Probe Sequence
gtggtctccagcaagggattcgggc

SEQ ID NO: 256681 - DNA, 25 bp, Probe Sequence
gtgtccatccaggtggagtacatgg

SEQ ID NO: 256682 - DNA, 25 bp, Probe Sequence
gtgtccatcagcagggactatgcag

SEQ ID NO: 256683 - DNA, 25 bp, Probe Sequence
gtgtctatcagcaagcgtcattgtg

SEQ ID NO: 256684 - DNA, 25 bp, Probe Sequence
gtgtgcacacacagatgtcatcttg

SEQ ID NO: 256685 - DNA, 25 bp, Probe Sequence
gtgtgatgacctaactcagcatggc

SEQ ID NO: 256686 - DNA, 25 bp, Probe Sequence
gtggagtactagagcctggccaagt

SEQ ID NO: 256687 - DNA, 25 bp, Probe Sequence
gtggcagtttagaaggatgtccgga

SEQ ID NO: 256688 - DNA, 25 bp, Probe Sequence
gtgtgctggggatgagaagtacggg

SEQ ID NO: 256689 - DNA, 25 bp, Probe Sequence
gtgtctgggagatgagattggctgc

SEQ ID NO: 256690 - DNA, 25 bp, Probe Sequence
gtgtctgtgacttaatgatttcatg

SEQ ID NO: 256691 - DNA, 25 bp, Probe Sequence
gtgtctgtgacatttcctgttgtga

SEQ ID NO: 256692 - DNA, 25 bp, Probe Sequence
gtgtgcatgtttttccttaatgatg

SEQ ID NO: 256693 - DNA, 25 bp, Probe Sequence
gtgtgattcttaattcttcattgag

SEQ ID NO: 256694 - DNA, 25 bp, Probe Sequence
gtgtgttctttccgggatcacaaac

SEQ ID NO: 256695 - DNA, 25 bp, Probe Sequence
gtgtgctatgctaattaggtgtcca

SEQ ID NO: 256696 - DNA, 25 bp, Probe Sequence
gtgtgcaatctcatttgactatacg

SEQ ID NO: 256697 - DNA, 25 bp, Probe Sequence
gtggatattttttgcagtctacctc

SEQ ID NO: 256698 - DNA, 25 bp, Probe Sequence
gtggttttcatttcactgtttccca

SEQ ID NO: 256699 - DNA, 25 bp, Probe Sequence
gtggggtatatcccctatcttcacg

SEQ ID NO: 256700 - DNA, 25 bp, Probe Sequence
gtgggtgtcgaccacagtattccag

SEQ ID NO: 256701 - DNA, 25 bp, Probe Sequence
gtggggcatctgttggactttccac

SEQ ID NO: 256702 - DNA, 25 bp, Probe Sequence
gtgggagtcctgtgaatctctccaa

SEQ ID NO: 256703 - DNA, 25 bp, Probe Sequence
gtgggaggcacctgtaatcccagct

SEQ ID NO: 256704 - DNA, 25 bp, Probe Sequence
gtggagggcactgaaacccgagtaa

SEQ ID NO: 256705 - DNA, 25 bp, Probe Sequence
gtggaaggcacagaacacctggggc

SEQ ID NO: 256706 - DNA, 25 bp, Probe Sequence
gtggaagagattctagaccgggaga

SEQ ID NO: 256707 - DNA, 25 bp, Probe Sequence
gtggggcaaggtgaacgtggatgaa

SEQ ID NO: 256708 - DNA, 25 bp, Probe Sequence
gtggggcaaggtgaacgtggatgaa

SEQ ID NO: 256709 - DNA, 25 bp, Probe Sequence
gggcgggagaactcactgaggatga

SEQ ID NO: 256710 - DNA, 25 bp, Probe Sequence
gtgtgcggatgataactactgacga

SEQ ID NO: 256711 - DNA, 25 bp, Probe Sequence
gtggggcatacagcctaatgacaaa

SEQ ID NO: 256712 - DNA, 25 bp, Probe Sequence
gtggtggtccaacttactggaacca

SEQ ID NO: 256713 - DNA, 25 bp, Probe Sequence
gtggggaaagacagcctgtacacca

SEQ ID NO: 256714 - DNA, 25 bp, Probe Sequence
agctccactaggccttttaatccta

SEQ ID NO: 256715 - DNA, 25 bp, Probe Sequence
gtgtggatggggtcaggttgtgggc

SEQ ID NO: 256716 - DNA, 25 bp, Probe Sequence
gtgtgatgaggtgctgagaataatg

SEQ ID NO: 256717 - DNA, 25 bp, Probe Sequence
gtgtgcataggggcactgaagaatt

SEQ ID NO: 256718 - DNA, 25 bp, Probe Sequence
gtgtgcatatgcaggctctgggaat

SEQ ID NO: 256719 - DNA, 25 bp, Probe Sequence
gtgtgccagaagactcgggaggacc

SEQ ID NO: 256720 - DNA, 25 bp, Probe Sequence
gtgggcaaagcctagtagagaacca

SEQ ID NO: 256721 - DNA, 25 bp, Probe Sequence
gtgggcacaggccgtgaaacattta

SEQ ID NO: 256722 - DNA, 25 bp, Probe Sequence
gtgggaaagctgaatgacactttta

SEQ ID NO: 256723 - DNA, 25 bp, Probe Sequence
gtgggattactgctaagatttgtat

SEQ ID NO: 256724 - DNA, 25 bp, Probe Sequence
gtggtaattcatcttggtttgctat

SEQ ID NO: 256725 - DNA, 25 bp, Probe Sequence
gtgtgtcacaaaatttggtattcat

SEQ ID NO: 256726 - DNA, 25 bp, Probe Sequence
gtgtgcggctacatgtctggaatat

SEQ ID NO: 256727 - DNA, 25 bp, Probe Sequence
gtgtgctgggtcatgtaaaatatta

SEQ ID NO: 256728 - DNA, 25 bp, Probe Sequence
gtgtggctggtcgtaaacagttttg

SEQ ID NO: 256729 - DNA, 25 bp, Probe Sequence
gtggggggtggaaatgcagtttagc

SEQ ID NO: 256730 - DNA, 25 bp, Probe Sequence
gtggagggagggaatcagggtttat

SEQ ID NO: 256731 - DNA, 25 bp, Probe Sequence
gtgtggtggtgggagacggagctgt

SEQ ID NO: 256732 - DNA, 25 bp, Probe Sequence
gtgtgagggaggagacgtgaggcaa

SEQ ID NO: 256733 - DNA, 25 bp, Probe Sequence
gtgtgggcttccttgagggaggcaa

SEQ ID NO: 256734 - DNA, 25 bp, Probe Sequence
gtgtgggcttccttgagggaggcaa

SEQ ID NO: 256735 - DNA, 25 bp, Probe Sequence
gtgtgggcttccttgagggaggcaa

SEQ ID NO: 256736 - DNA, 25 bp, Probe Sequence
gtgtgggcttccttgagggaggcaa

SEQ ID NO: 256737 - DNA, 25 bp, Probe Sequence
gtgtcggctttgtggagtggaggtg

SEQ ID NO: 256738 - DNA, 25 bp, Probe Sequence
gtgtgtggtttgtggagttagactg

SEQ ID NO: 256739 - DNA, 25 bp, Probe Sequence
gtggtgtgtttcgtgggaacaactg

SEQ ID NO: 256740 - DNA, 25 bp, Probe Sequence
gtgggtgtttttaaactcacttgat

SEQ ID NO: 256741 - DNA, 25 bp, Probe Sequence
gtggggctaactgtagaccaggcga

SEQ ID NO: 256742 - DNA, 25 bp, Probe Sequence
gtggcggggactgtgaaccgaggca

SEQ ID NO: 256743 - DNA, 25 bp, Probe Sequence
gtggcggggactgtgaaccgaggca

SEQ ID NO: 256744 - DNA, 25 bp, Probe Sequence
ggggttggactggactaccagaagg

SEQ ID NO: 256745 - DNA, 25 bp, Probe Sequence
tggggttgaactttttttgacagtg

SEQ ID NO: 256746 - DNA, 25 bp, Probe Sequence
gggattgtaattctattttaatctc

SEQ ID NO: 256747 - DNA, 25 bp, Probe Sequence
gggcatctgttctggtttttaacca

SEQ ID NO: 256748 - DNA, 25 bp, Probe Sequence
ttagtttttcctgaactccaaccag

SEQ ID NO: 256749 - DNA, 25 bp, Probe Sequence
ttagtttaccctcaagccgatgact

SEQ ID NO: 256750 - DNA, 25 bp, Probe Sequence
gtgtgccccgattcatcaagtacac

SEQ ID NO: 256751 - DNA, 25 bp, Probe Sequence
gtgtgcccaggattatgaagaagct

SEQ ID NO: 256752 - DNA, 25 bp, Probe Sequence
gtgtgcccagaaccagggtgacatc

SEQ ID NO: 256753 - DNA, 25 bp, Probe Sequence
gtgtgtggggcaccaggggatgcac

SEQ ID NO: 256754 - DNA, 25 bp, Probe Sequence
gtgtgggtggtccagtttggactga

SEQ ID NO: 256755 - DNA, 25 bp, Probe Sequence
gtgtgggtgcaggctgttttgtagc

SEQ ID NO: 256756 - DNA, 25 bp, Probe Sequence
gtgtggtgactcctttatattcgta

SEQ ID NO: 256757 - DNA, 25 bp, Probe Sequence
gtgtgaatgcacaggtgggtattta

SEQ ID NO: 256758 - DNA, 25 bp, Probe Sequence
gtgggatgagatttgggagttctat

SEQ ID NO: 256759 - DNA, 25 bp, Probe Sequence
gtggggaattatgaacttactgtgt

SEQ ID NO: 256760 - DNA, 25 bp, Probe Sequence
gtgggggtacaggacacctagattt

SEQ ID NO: 256761 - DNA, 25 bp, Probe Sequence
gtgtggtactgacaaccctagtgtc

SEQ ID NO: 256762 - DNA, 25 bp, Probe Sequence
gtgtggtaggcagaacctaggcttg

SEQ ID NO: 256763 - DNA, 25 bp, Probe Sequence
gtgggtcatcgggaatactagggag

SEQ ID NO: 256764 - DNA, 25 bp, Probe Sequence
gtgggaagcaggggacattcagggc

SEQ ID NO: 256765 - DNA, 25 bp, Probe Sequence
gtgggacgcaccaaactggaggtca

SEQ ID NO: 256766 - DNA, 25 bp, Probe Sequence
gtgggaagacggacgtggaggatcc

SEQ ID NO: 256767 - DNA, 25 bp, Probe Sequence
gtgggcaaggcagatattggaggag

SEQ ID NO: 256768 - DNA, 25 bp, Probe Sequence
gtgggcaaagccttcaatcagggca

SEQ ID NO: 256769 - DNA, 25 bp, Probe Sequence
gtgggcaaagccttcaatcagggca

SEQ ID NO: 256770 - DNA, 25 bp, Probe Sequence
gtgtggtatagcatcctcaaggaca

SEQ ID NO: 256771 - DNA, 25 bp, Probe Sequence
ggctgagttagtcccttagaaacgt

SEQ ID NO: 256772 - DNA, 25 bp, Probe Sequence
gggctttagttcctctcataaaagg

SEQ ID NO: 256773 - DNA, 25 bp, Probe Sequence
gtgtgctttaattcagctttagaaa

SEQ ID NO: 256774 - DNA, 25 bp, Probe Sequence
gtggttaacgtactgttggatcaac

SEQ ID NO: 256775 - DNA, 25 bp, Probe Sequence
gtgtgtggcagtgttttattgaaac

SEQ ID NO: 256776 - DNA, 25 bp, Probe Sequence
gtgggggcatttctttatatcacct

SEQ ID NO: 256777 - DNA, 25 bp, Probe Sequence
gggagggtgcttggcacttattgaa

SEQ ID NO: 256778 - DNA, 25 bp, Probe Sequence
ggtcgtgggctcggagtttgtacag

SEQ ID NO: 256779 - DNA, 25 bp, Probe Sequence
gtgtgcgtgtggtggagtgattgtc

SEQ ID NO: 256780 - DNA, 25 bp, Probe Sequence
gtgtccatgtgccagggaaatcgtg

SEQ ID NO: 256781 - DNA, 25 bp, Probe Sequence
gtgtcctggccagatgaaatgctgc

SEQ ID NO: 256782 - DNA, 25 bp, Probe Sequence
gtgtcctgctccattgagatggatg

SEQ ID NO: 256783 - DNA, 25 bp, Probe Sequence
gtgtgccctgcgactgtaatggcaa

SEQ ID NO: 256784 - DNA, 25 bp, Probe Sequence
gtgtgacctcgcatatgtatgacat

SEQ ID NO: 256785 - DNA, 25 bp, Probe Sequence
gtgtgcctacatcaatgattccatt

SEQ ID NO: 256786 - DNA, 25 bp, Probe Sequence
gtgtggctaatctacatttatcaat

SEQ ID NO: 256787 - DNA, 25 bp, Probe Sequence
gtgggctagacttatactaaaagaa

SEQ ID NO: 256788 - DNA, 25 bp, Probe Sequence
gtggtcctgcaccaaactacaaaga

SEQ ID NO: 256789 - DNA, 25 bp, Probe Sequence
gtgggcgtcactaaagcaaaaacag

SEQ ID NO: 256790 - DNA, 25 bp, Probe Sequence
gtgtgcctgtcagtatgaaaaagat

SEQ ID NO: 256791 - DNA, 25 bp, Probe Sequence
gtgtgttgtcaatgcaagtcaatca

SEQ ID NO: 256792 - DNA, 25 bp, Probe Sequence
gtgtgtcttcaggagaatgtgcagt

SEQ ID NO: 256793 - DNA, 25 bp, Probe Sequence
gtgtgagctttgaatagatggcatt

SEQ ID NO: 256794 - DNA, 25 bp, Probe Sequence
gtgtgaagtgtagtggcatccattt

SEQ ID NO: 256795 - DNA, 25 bp, Probe Sequence
gtgtgacagggagggtcttactctg

SEQ ID NO: 256796 - DNA, 25 bp, Probe Sequence
gtgtgatgaggccgaggctgcctcc

SEQ ID NO: 256797 - DNA, 25 bp, Probe Sequence
gtgtgctgtgagggaagggctgcct

SEQ ID NO: 256798 - DNA, 25 bp, Probe Sequence
gtgtgtgtgaggcatcgtcatgtcc

SEQ ID NO: 256799 - DNA, 25 bp, Probe Sequence
gtgtgtgcgcgtgtgcgtttcaata

SEQ ID NO: 256800 - DNA, 25 bp, Probe Sequence
gtgtgtgcgcgtgtgcgtttcaata

SEQ ID NO: 256801 - DNA, 25 bp, Probe Sequence
gtgtgtgcgcgtgtgcgtttcaata

SEQ ID NO: 256802 - DNA, 25 bp, Probe Sequence
gtgtgtcagagttccagtcttacag

SEQ ID NO: 256803 - DNA, 25 bp, Probe Sequence
gtggggagtatccaacttagggtca

SEQ ID NO: 256804 - DNA, 25 bp, Probe Sequence
gtggggtgaaccgacttcaaggaat

SEQ ID NO: 256805 - DNA, 25 bp, Probe Sequence
gtgtgttctaacccaattcaaggaa

SEQ ID NO: 256806 - DNA, 25 bp, Probe Sequence
gtgtgtttaagctcaacatatagaa

SEQ ID NO: 256807 - DNA, 25 bp, Probe Sequence
gtgtgtacttgacaaccaacatgta

SEQ ID NO: 256808 - DNA, 25 bp, Probe Sequence
gtgtgtcctttattctaaacagtaa

SEQ ID NO: 256809 - DNA, 25 bp, Probe Sequence
gtgtgttctttgtctaaaaatagtc

SEQ ID NO: 256810 - DNA, 25 bp, Probe Sequence
gtggtttgttactgtagcacttttt

SEQ ID NO: 256811 - DNA, 25 bp, Probe Sequence
gtggggtggggctgttgatatttca

SEQ ID NO: 256812 - DNA, 25 bp, Probe Sequence
gtgtgtttagtctgttttatttgca

SEQ ID NO: 256813 - DNA, 25 bp, Probe Sequence
gtggactgtaaatgttttatttgta

SEQ ID NO: 256814 - DNA, 25 bp, Probe Sequence
gtgtggctggaactgagtattttct

SEQ ID NO: 256815 - DNA, 25 bp, Probe Sequence
gtgtggctggcaagcgagcattacc

SEQ ID NO: 256816 - DNA, 25 bp, Probe Sequence
gtgtgcgtgtgcaagagccgctacc

SEQ ID NO: 256817 - DNA, 25 bp, Probe Sequence
gtgtgctgtgtggggcagttcaaca

SEQ ID NO: 256818 - DNA, 25 bp, Probe Sequence
gtgtgctgtgtggggcagttcaaca

SEQ ID NO: 256819 - DNA, 25 bp, Probe Sequence
gtgtgcggatgatgtggcctatatc

SEQ ID NO: 256820 - DNA, 25 bp, Probe Sequence
gtgtggtgatgatctggcacgagaa

SEQ ID NO: 256821 - DNA, 25 bp, Probe Sequence
gtgtgtgctgtcgcttgtcgacaac

SEQ ID NO: 256822 - DNA, 25 bp, Probe Sequence
gtgtgtgagacggtgctgatggact

SEQ ID NO: 256823 - DNA, 25 bp, Probe Sequence
gtgtggaggcgggcatgatcgcact

SEQ ID NO: 256824 - DNA, 25 bp, Probe Sequence
gtgtggagtgacggaactgcagtgc

SEQ ID NO: 256825 - DNA, 25 bp, Probe Sequence
gtgtgagtgtgataaggctgctgcc

SEQ ID NO: 256826 - DNA, 25 bp, Probe Sequence
gtgtgagtgtgataaggctgctgcc

SEQ ID NO: 256827 - DNA, 25 bp, Probe Sequence
gtgtgtgtgtgtgtgaggcatcgtc

SEQ ID NO: 256828 - DNA, 25 bp, Probe Sequence
gtgtgtcaggtgctgcagagcgttc

SEQ ID NO: 256829 - DNA, 25 bp, Probe Sequence
gtgtgtcaggtgctgcagagcgttc

SEQ ID NO: 256830 - DNA, 25 bp, Probe Sequence
gtgggcaggatcatgcctcagtgca

SEQ ID NO: 256831 - DNA, 25 bp, Probe Sequence
gtgggcaagagaatccgcgtcaaac

SEQ ID NO: 256832 - DNA, 25 bp, Probe Sequence
gtgggcatcaaaacaagagcaacat

SEQ ID NO: 256833 - DNA, 25 bp, Probe Sequence
gtggggaggatgtcaatgccgccat

SEQ ID NO: 256834 - DNA, 25 bp, Probe Sequence
ggaggggaagccagagtccactttt

SEQ ID NO: 256835 - DNA, 25 bp, Probe Sequence
gtgtggggaagatcgagcactcctt

SEQ ID NO: 256836 - DNA, 25 bp, Probe Sequence
gtgtggaggacgtaccatctgacct

SEQ ID NO: 256837 - DNA, 25 bp, Probe Sequence
gtgtggtggacacacgccatgaggt

SEQ ID NO: 256838 - DNA, 25 bp, Probe Sequence
gtgtggtggccaggaaacgcaggtt

SEQ ID NO: 256839 - DNA, 25 bp, Probe Sequence
gtgtgctgtgagccagcggaaccac

SEQ ID NO: 256840 - DNA, 25 bp, Probe Sequence
gtgtgctgtgagccagcggaaccac

SEQ ID NO: 256841 - DNA, 25 bp, Probe Sequence
gtgtgtgtgcaaaggtccagccacc

SEQ ID NO: 256842 - DNA, 25 bp, Probe Sequence
gtgtgatgtgcatgggagcaacttg

SEQ ID NO: 256843 - DNA, 25 bp, Probe Sequence
gtgtgattgtcagggagaattggcc

SEQ ID NO: 256844 - DNA, 25 bp, Probe Sequence
gtggtagcatcctcagcagagtggc

SEQ ID NO: 256845 - DNA, 25 bp, Probe Sequence
gtgtggagacaggcctgaagctggc

SEQ ID NO: 256846 - DNA, 25 bp, Probe Sequence
gtgtgtgagaaagaacagcacagtc

SEQ ID NO: 256847 - DNA, 25 bp, Probe Sequence
gtgtgggacactgattagacaatca

SEQ ID NO: 256848 - DNA, 25 bp, Probe Sequence
gtgtggaagacggactaagcctaga

SEQ ID NO: 256849 - DNA, 25 bp, Probe Sequence
gtgtgtaaggtggcctattcctctg

SEQ ID NO: 256850 - DNA, 25 bp, Probe Sequence
gtgtggcaagagagcctcacacctc

SEQ ID NO: 256851 - DNA, 25 bp, Probe Sequence
gtgtgagacagtaatccgatccctt

SEQ ID NO: 256852 - DNA, 25 bp, Probe Sequence
gtggcagacatggctacctgcagct

SEQ ID NO: 256853 - DNA, 25 bp, Probe Sequence
gtgtgaatatcaatacctgcctttc

SEQ ID NO: 256854 - DNA, 25 bp, Probe Sequence
gtgtgactctagaacccgataatgc

SEQ ID NO: 256855 - DNA, 25 bp, Probe Sequence
gtgtgagctgcttggacctattaaa

SEQ ID NO: 256856 - DNA, 25 bp, Probe Sequence
gtgtgatgtgtctgaactaataaag

SEQ ID NO: 256857 - DNA, 25 bp, Probe Sequence
gtggtgtgtcaccattccactagat

SEQ ID NO: 256858 - DNA, 25 bp, Probe Sequence
gtgtggctgccaagaacctgcagga

SEQ ID NO: 256859 - DNA, 25 bp, Probe Sequence
gtgtggcatcaccagaacactcagt

SEQ ID NO: 256860 - DNA, 25 bp, Probe Sequence
gtgtgcagatcactgcaggtcagga

SEQ ID NO: 256861 - DNA, 25 bp, Probe Sequence
gtgtgaatcgtgggtgggatggccg

SEQ ID NO: 256862 - DNA, 25 bp, Probe Sequence
gtgtgaggcgtcaggagagaggcca

SEQ ID NO: 256863 - DNA, 25 bp, Probe Sequence
gtgtggggcacacggaaggcattgc

SEQ ID NO: 256864 - DNA, 25 bp, Probe Sequence
gtggggacacggtggagatcctaga

SEQ ID NO: 256865 - DNA, 25 bp, Probe Sequence
gtggagcccgagtttgggaccaagg

SEQ ID NO: 256866 - DNA, 25 bp, Probe Sequence
gtgtggcaccggatgtggacttcaa

SEQ ID NO: 256867 - DNA, 25 bp, Probe Sequence
gtgtggaccgtgaaggttctccagt

SEQ ID NO: 256868 - DNA, 25 bp, Probe Sequence
gtgggactctgttgatggtgtcctt

SEQ ID NO: 256869 - DNA, 25 bp, Probe Sequence
gtggatgaatttgaggtcttctatg

SEQ ID NO: 256870 - DNA, 25 bp, Probe Sequence
gtggggatttgaatgcttcgttatg

SEQ ID NO: 256871 - DNA, 25 bp, Probe Sequence
gtgggggtacacatcaatttgagtt

SEQ ID NO: 256872 - DNA, 25 bp, Probe Sequence
gtggggctgctaactacacagattg

SEQ ID NO: 256873 - DNA, 25 bp, Probe Sequence
gtggggccttggaactcaagttgca

SEQ ID NO: 256874 - DNA, 25 bp, Probe Sequence
gtgtgtgtgcacatgttacaaaggc

SEQ ID NO: 256875 - DNA, 25 bp, Probe Sequence
gtgtggtccctggtgagagctatag

SEQ ID NO: 256876 - DNA, 25 bp, Probe Sequence
gtgtggtccctggtgagagctatag

SEQ ID NO: 256877 - DNA, 25 bp, Probe Sequence
gtgtggtccctggtgagagctatag

SEQ ID NO: 256878 - DNA, 25 bp, Probe Sequence
gtgggctctcttgatgagaagatga

SEQ ID NO: 256879 - DNA, 25 bp, Probe Sequence
gtgtggcaatgtgaactgaagctga

SEQ ID NO: 256880 - DNA, 25 bp, Probe Sequence
gtgggcactgcaaaagtgaactgca

SEQ ID NO: 256881 - DNA, 25 bp, Probe Sequence
gtgtgctgacttgataagaggcgca

SEQ ID NO: 256882 - DNA, 25 bp, Probe Sequence
gtgtggtcttgttcagaagcagcca

SEQ ID NO: 256883 - DNA, 25 bp, Probe Sequence
gtgtgtgttttatactgcaacaata

SEQ ID NO: 256884 - DNA, 25 bp, Probe Sequence
gtgtgtgtggttctcgtcaacaaaa

SEQ ID NO: 256885 - DNA, 25 bp, Probe Sequence
gtgtgtgaccgatgtcggcagaaaa

SEQ ID NO: 256886 - DNA, 25 bp, Probe Sequence
gtgtgtccggagatgagatgaaaaa

SEQ ID NO: 256887 - DNA, 25 bp, Probe Sequence
gtgtgtcctggaactagagcccatc

SEQ ID NO: 256888 - DNA, 25 bp, Probe Sequence
gtgtgttctgtgaatgctagctctc

SEQ ID NO: 256889 - DNA, 25 bp, Probe Sequence
gtgtgtcttggtttagttatggttt

SEQ ID NO: 256890 - DNA, 25 bp, Probe Sequence
gtgtgctttggacttctttaggcag

SEQ ID NO: 256891 - DNA, 25 bp, Probe Sequence
gtgtgcttttacgtgatggcgggtg

SEQ ID NO: 256892 - DNA, 25 bp, Probe Sequence
gtgtgcttttacgtgatggcgggtg

SEQ ID NO: 256893 - DNA, 25 bp, Probe Sequence
tgtgtgttttggggtacggggagag

SEQ ID NO: 256894 - DNA, 25 bp, Probe Sequence
gtgtgtttcgtgggaacaactgggc

SEQ ID NO: 256895 - DNA, 25 bp, Probe Sequence
gtgtgtttgcggtggtcatcacgga

SEQ ID NO: 256896 - DNA, 25 bp, Probe Sequence
gtgtgtttgcggtggtcatcacgga

SEQ ID NO: 256897 - DNA, 25 bp, Probe Sequence
gtgtgttcttagtggttatactggg

SEQ ID NO: 256898 - DNA, 25 bp, Probe Sequence
gtgtggcttctagagtgtttgtgtg

SEQ ID NO: 256899 - DNA, 25 bp, Probe Sequence
gtgtgtttctacagtatgtttttcc

SEQ ID NO: 256900 - DNA, 25 bp, Probe Sequence
gtgtgtaccccaatgtatgctatca

SEQ ID NO: 256901 - DNA, 25 bp, Probe Sequence
gtggctatccactgttagttcagaa

SEQ ID NO: 256902 - DNA, 25 bp, Probe Sequence
gtggtaccccagatagacatggaag

SEQ ID NO: 256903 - DNA, 25 bp, Probe Sequence
gtggggccgacagctatgagatgga

SEQ ID NO: 256904 - DNA, 25 bp, Probe Sequence
gtgggaacgaatgtctgaatcaggc

SEQ ID NO: 256905 - DNA, 25 bp, Probe Sequence
gtggggaagaagtcctcattccgca

SEQ ID NO: 256906 - DNA, 25 bp, Probe Sequence
gtggaggaacaagaccgtggctgcc

SEQ ID NO: 256907 - DNA, 25 bp, Probe Sequence
gtgggtgagaaaggtcctggtccgc

SEQ ID NO: 256908 - DNA, 25 bp, Probe Sequence
gtgtggaagaaatctcgtggccgag

SEQ ID NO: 256909 - DNA, 25 bp, Probe Sequence
gtgtgcagaatgtaatgctcttttg

SEQ ID NO: 256910 - DNA, 25 bp, Probe Sequence
gtgtgcactctgtaacatctttggt

SEQ ID NO: 256911 - DNA, 25 bp, Probe Sequence
gtgtgcactctgtaacatctttggt

SEQ ID NO: 256912 - DNA, 25 bp, Probe Sequence
gtgtgactaataagcactactggta

SEQ ID NO: 256913 - DNA, 25 bp, Probe Sequence
gtgtgatctagacatgccttaggta

SEQ ID NO: 256914 - DNA, 25 bp, Probe Sequence
gtggtccagtgttctgatttggaac

SEQ ID NO: 256915 - DNA, 25 bp, Probe Sequence
gtggtccagtgttctgatttgggtc

SEQ ID NO: 256916 - DNA, 25 bp, Probe Sequence
gggttcggtttgactaccgtcatga

SEQ ID NO: 256917 - DNA, 25 bp, Probe Sequence
gtggagtcggagtggacaccgctca

SEQ ID NO: 256918 - DNA, 25 bp, Probe Sequence
gtggggcaggagtgagtgcctcgtg

SEQ ID NO: 256919 - DNA, 25 bp, Probe Sequence
gtggatagtggacagagacctttgt

SEQ ID NO: 256920 - DNA, 25 bp, Probe Sequence
gtggaagctaacaagaacccgtgga

SEQ ID NO: 256921 - DNA, 25 bp, Probe Sequence
gtggacctccatagaagacaccggg

SEQ ID NO: 256922 - DNA, 25 bp, Probe Sequence
gtggagcacggatacagaaactgag

SEQ ID NO: 256923 - DNA, 25 bp, Probe Sequence
gggaacggctttggcagacagtaac

SEQ ID NO: 256924 - DNA, 25 bp, Probe Sequence
ggaattcgttttgctggaggagaga

SEQ ID NO: 256925 - DNA, 25 bp, Probe Sequence
gtggtgggttttcaggcaatagagg

SEQ ID NO: 256926 - DNA, 25 bp, Probe Sequence
gtgggtggtttgcgaggatgaggga

SEQ ID NO: 256927 - DNA, 25 bp, Probe Sequence
gtgggctagagtatgggaaggttga

SEQ ID NO: 256928 - DNA, 25 bp, Probe Sequence
tctggcacttggatcgggggtgtag

SEQ ID NO: 256929 - DNA, 25 bp, Probe Sequence
gtggacttggcttcagtgaggtaga

SEQ ID NO: 256930 - DNA, 25 bp, Probe Sequence
gggagctaatcattgcatgtgcatg

SEQ ID NO: 256931 - DNA, 25 bp, Probe Sequence
gtgtgcagctaactgatgtgtgtgt

SEQ ID NO: 256932 - DNA, 25 bp, Probe Sequence
gtgtgcatgcaaaatattgtttctt

SEQ ID NO: 256933 - DNA, 25 bp, Probe Sequence
gtgtgcatcgcaatatcgtgttcca

SEQ ID NO: 256934 - DNA, 25 bp, Probe Sequence
gtgtgtggcaagtggttgcaccaac

SEQ ID NO: 256935 - DNA, 25 bp, Probe Sequence
gtgtgtagagtgtcgatgttgcagc

SEQ ID NO: 256936 - DNA, 25 bp, Probe Sequence
gtgtgtgaacatgctggctgtggca

SEQ ID NO: 256937 - DNA, 25 bp, Probe Sequence
gtgtgtgaacatgctggctgtggca

SEQ ID NO: 256938 - DNA, 25 bp, Probe Sequence
gtggtgaaaccaactgctgaacgca

SEQ ID NO: 256939 - DNA, 25 bp, Probe Sequence
gtggtgaaaccaactgctgaacgca

SEQ ID NO: 256940 - DNA, 25 bp, Probe Sequence
gtggtgaaaccaactgctgaacgca

SEQ ID NO: 256941 - DNA, 25 bp, Probe Sequence
gtggtgaaaccaactgctgaacgca

SEQ ID NO: 256942 - DNA, 25 bp, Probe Sequence
gtgtgttaatttggctgtaatggca

SEQ ID NO: 256943 - DNA, 25 bp, Probe Sequence
gtgtgaatatgtgtgcctgtagagg

SEQ ID NO: 256944 - DNA, 25 bp, Probe Sequence
gtgtgtattctcttgacggggagag

SEQ ID NO: 256945 - DNA, 25 bp, Probe Sequence
gtgtggattctgttgaaggagaggg

SEQ ID NO: 256946 - DNA, 25 bp, Probe Sequence
gtgggttttcaggcaatagaggagg

SEQ ID NO: 256947 - DNA, 25 bp, Probe Sequence
gtggtgtttgctcactaagcagggt

SEQ ID NO: 256948 - DNA, 25 bp, Probe Sequence
gtggtttcgatttatccgatgccct

SEQ ID NO: 256949 - DNA, 25 bp, Probe Sequence
gtgtgttctcgatttgtgaagtcct

SEQ ID NO: 256950 - DNA, 25 bp, Probe Sequence
gtggtttcagcagtgtgctacagtt

SEQ ID NO: 256951 - DNA, 25 bp, Probe Sequence
gtggtttcagctggtgcattatttc

SEQ ID NO: 256952 - DNA, 25 bp, Probe Sequence
gtgtgtatgctgcttttcttttcta

SEQ ID NO: 256953 - DNA, 25 bp, Probe Sequence
gtgtgactgtgactaaactatttta

SEQ ID NO: 256954 - DNA, 25 bp, Probe Sequence
gtgggcaatcagtgaagtttatgta

SEQ ID NO: 256955 - DNA, 25 bp, Probe Sequence
gtggggtatgtttagctttacaatc

SEQ ID NO: 256956 - DNA, 25 bp, Probe Sequence
gtgtgggtatgtttccttataagaa

SEQ ID NO: 256957 - DNA, 25 bp, Probe Sequence
gtgtgggctcttttcactgtagaca

SEQ ID NO: 256958 - DNA, 25 bp, Probe Sequence
gtgtggtatgcttttcactgtgtga

SEQ ID NO: 256959 - DNA, 25 bp, Probe Sequence
gtgtgatttgtgttatactggttgt

SEQ ID NO: 256960 - DNA, 25 bp, Probe Sequence
gtgtgattgtgatgttgcctggtct

SEQ ID NO: 256961 - DNA, 25 bp, Probe Sequence
gtgtgatcatggcaaacctcgtttt

SEQ ID NO: 256962 - DNA, 25 bp, Probe Sequence
gtggatcaaggacaccatcgtggcc

SEQ ID NO: 256963 - DNA, 25 bp, Probe Sequence
gtgtggcacaggctacgtgttgagc

SEQ ID NO: 256964 - DNA, 25 bp, Probe Sequence
gtgtgtgcgttggtgcacgttatgg

SEQ ID NO: 256965 - DNA, 25 bp, Probe Sequence
gtgtgtgtgtgtgtgcatcgcaata

SEQ ID NO: 256966 - DNA, 25 bp, Probe Sequence
gtgtgtggtgtttgctcactaagca

SEQ ID NO: 256967 - DNA, 25 bp, Probe Sequence
gtgtggtgtttgctcactaagcagg

SEQ ID NO: 256968 - DNA, 25 bp, Probe Sequence
gtgtgactgtttctcatgtttgaat

SEQ ID NO: 256969 - DNA, 25 bp, Probe Sequence
gtgtgtcagatttcctcagattaga

SEQ ID NO: 256970 - DNA, 25 bp, Probe Sequence
gtgtgttatctgtaaccattacagc

SEQ ID NO: 256971 - DNA, 25 bp, Probe Sequence
gtggtctcctctgacttcaacagcg

SEQ ID NO: 256972 - DNA, 25 bp, Probe Sequence
gtgtgtctcctcttaattgaaggga

SEQ ID NO: 256973 - DNA, 25 bp, Probe Sequence
gtgggacctagccaggtaagcagga

SEQ ID NO: 256974 - DNA, 25 bp, Probe Sequence
gtggacaggcaacaggtggaaagac

SEQ ID NO: 256975 - DNA, 25 bp, Probe Sequence
gtggggtggaaacagtgaagagcag

SEQ ID NO: 256976 - DNA, 25 bp, Probe Sequence
gtggggggccaagattgtcatgaga

SEQ ID NO: 256977 - DNA, 25 bp, Probe Sequence
gtgggaggtggttttctgactgaga

SEQ ID NO: 256978 - DNA, 25 bp, Probe Sequence
gtgtggaagttcaccttgactgaga

SEQ ID NO: 256979 - DNA, 25 bp, Probe Sequence
gtgggcaaggtcatccctgagctga

SEQ ID NO: 256980 - DNA, 25 bp, Probe Sequence
gtgggcaaggtcatccctgagctga

SEQ ID NO: 256981 - DNA, 25 bp, Probe Sequence
gtggtggagagtgtcttcaagctga

SEQ ID NO: 256982 - DNA, 25 bp, Probe Sequence
gtggtggagagtgtcttcaagctga

SEQ ID NO: 256983 - DNA, 25 bp, Probe Sequence
gtggggtatgattatcaccaagcca

SEQ ID NO: 256984 - DNA, 25 bp, Probe Sequence
gtggggttgataacaccttggactg

SEQ ID NO: 256985 - DNA, 25 bp, Probe Sequence
gtgggaaagaacaacctggaggtgg

SEQ ID NO: 256986 - DNA, 25 bp, Probe Sequence
gtgtgttaagaatagcactggtgtg

SEQ ID NO: 256987 - DNA, 25 bp, Probe Sequence
gtgtgtgtgtaacagacactggata

SEQ ID NO: 256988 - DNA, 25 bp, Probe Sequence
gtgtgttgaatgtcacaaatgttaa

SEQ ID NO: 256989 - DNA, 25 bp, Probe Sequence
gtgtgtctcgtgtcagtaatttata

SEQ ID NO: 256990 - DNA, 25 bp, Probe Sequence
gtgtgttgcctggcaggataccttg

SEQ ID NO: 256991 - DNA, 25 bp, Probe Sequence
gtgtgtgctcaaacgtgtatcactt

SEQ ID NO: 256992 - DNA, 25 bp, Probe Sequence
gtggtccactgagctataacttact

SEQ ID NO: 256993 - DNA, 25 bp, Probe Sequence
gtggtacaataccattaaccaaagg

SEQ ID NO: 256994 - DNA, 25 bp, Probe Sequence
gtggtggaaaatatagactgcaaac

SEQ ID NO: 256995 - DNA, 25 bp, Probe Sequence
gtgggcagcaaattcttgagccatg

SEQ ID NO: 256996 - DNA, 25 bp, Probe Sequence
gtgtgatggtcaatttatatgccaa

SEQ ID NO: 256997 - DNA, 25 bp, Probe Sequence
gtgtgtctgttaaatgaatgtcata

SEQ ID NO: 256998 - DNA, 25 bp, Probe Sequence
gtgtgtgtgtatccataaaatgcat

SEQ ID NO: 256999 - DNA, 25 bp, Probe Sequence
gtgtgttttccttgaactgtctgta

SEQ ID NO: 257000 - DNA, 25 bp, Probe Sequence
gtgtgttttccttgaactgtctgta

SEQ ID NO: 257001 - DNA, 25 bp, Probe Sequence
gtgtgttttccttgaactgtctgta

SEQ ID NO: 257002 - DNA, 25 bp, Probe Sequence
gtgtgtgcatttttgataactgtgt

SEQ ID NO: 257003 - DNA, 25 bp, Probe Sequence
gtgtgtattttaatatagcctgacc

SEQ ID NO: 257004 - DNA, 25 bp, Probe Sequence
gtggtttccatttagaccgaggccg

SEQ ID NO: 257005 - DNA, 25 bp, Probe Sequence
gtggggctttttggagccagaggca

SEQ ID NO: 257006 - DNA, 25 bp, Probe Sequence
gtgggggtgtattagcagccaaata

SEQ ID NO: 257007 - DNA, 25 bp, Probe Sequence
gtgggggtggcacacagcgaagtaa

SEQ ID NO: 257008 - DNA, 25 bp, Probe Sequence
gtgggaggggcccacaggaagctca

SEQ ID NO: 257009 - DNA, 25 bp, Probe Sequence
gtgggaggggcccacaggaagctca

SEQ ID NO: 257010 - DNA, 25 bp, Probe Sequence
gtgggaggggcccacaggaagctca

SEQ ID NO: 257011 - DNA, 25 bp, Probe Sequence
gtgggagcacctgcttcaggaagct

SEQ ID NO: 257012 - DNA, 25 bp, Probe Sequence
gtgggagcagcgctggatcaagaat

SEQ ID NO: 257013 - DNA, 25 bp, Probe Sequence
gtgtgagacactggaaggcaagaaa

SEQ ID NO: 257014 - DNA, 25 bp, Probe Sequence
gtgggacctcaaagtccgatgccaa

SEQ ID NO: 257015 - DNA, 25 bp, Probe Sequence
gtgggcatcaaactgagacccccat

SEQ ID NO: 257016 - DNA, 25 bp, Probe Sequence
gtgggcacaaaaggaatccctcatc

SEQ ID NO: 257017 - DNA, 25 bp, Probe Sequence
gtgggcaaagggcattccttgagct

SEQ ID NO: 257018 - DNA, 25 bp, Probe Sequence
gtggaaacagtgccctatcttttct

SEQ ID NO: 257019 - DNA, 25 bp, Probe Sequence
gggccacaagggctactagactgga

SEQ ID NO: 257020 - DNA, 25 bp, Probe Sequence
gggcttacagggatcttcagaccag

SEQ ID NO: 257021 - DNA, 25 bp, Probe Sequence
gtgtgtctactgggttttaacttat

SEQ ID NO: 257022 - DNA, 25 bp, Probe Sequence
gtggcctaagtgtgatttaactctt

SEQ ID NO: 257023 - DNA, 25 bp, Probe Sequence
gtggcctaagtgtgatttaactctt

SEQ ID NO: 257024 - DNA, 25 bp, Probe Sequence
gtgggctaattgctgatgctaagac

SEQ ID NO: 257025 - DNA, 25 bp, Probe Sequence
gtgggtactctgccagcagatggga

SEQ ID NO: 257026 - DNA, 25 bp, Probe Sequence
gtgggcatatttccgagcagtggct

SEQ ID NO: 257027 - DNA, 25 bp, Probe Sequence
gtggtgctatgtggccgggaagcct

SEQ ID NO: 257028 - DNA, 25 bp, Probe Sequence
gtgtgggcatgtggccaggcagatg

SEQ ID NO: 257029 - DNA, 25 bp, Probe Sequence
gtgggaatgctgcccatggcatagg

SEQ ID NO: 257030 - DNA, 25 bp, Probe Sequence
gtgggaaggcgcacgcagaggatcc

SEQ ID NO: 257031 - DNA, 25 bp, Probe Sequence
gtgggaggtgctgtggacagggctc

SEQ ID NO: 257032 - DNA, 25 bp, Probe Sequence
gtgtgtgggggtggtgatcaggcag

SEQ ID NO: 257033 - DNA, 25 bp, Probe Sequence
gtgtgtgctgtgaacagggaaggag

SEQ ID NO: 257034 - DNA, 25 bp, Probe Sequence
gtgtgtctgagaatgatggctgtgg

SEQ ID NO: 257035 - DNA, 25 bp, Probe Sequence
gtgggcatagcattagctgcttcct

SEQ ID NO: 257036 - DNA, 25 bp, Probe Sequence
gtgggcatgacactgcccattgctc

SEQ ID NO: 257037 - DNA, 25 bp, Probe Sequence
gtgtgtatcacaagctcttcgatgc

SEQ ID NO: 257038 - DNA, 25 bp, Probe Sequence
gtgtgtatcaatagtgcattccttt

SEQ ID NO: 257039 - DNA, 25 bp, Probe Sequence
gtgtgattgaatctgattggacatt

SEQ ID NO: 257040 - DNA, 25 bp, Probe Sequence
gtggcttcctttttgagatattaaa

SEQ ID NO: 257041 - DNA, 25 bp, Probe Sequence
gtgtgtttattttatgatattgcta

SEQ ID NO: 257042 - DNA, 25 bp, Probe Sequence
gtgtgttcatttatgtatctgatgt

SEQ ID NO: 257043 - DNA, 25 bp, Probe Sequence
gtgtgttcatcagttatttgtgagg

SEQ ID NO: 257044 - DNA, 25 bp, Probe Sequence
gtgtgtcctgcctgtatatgtggct

SEQ ID NO: 257045 - DNA, 25 bp, Probe Sequence
gtgtgtcctgcctgtatatgtggct

SEQ ID NO: 257046 - DNA, 25 bp, Probe Sequence
gtgtgtcctgcctgtatatgtggct

SEQ ID NO: 257047 - DNA, 25 bp, Probe Sequence
gtgtgtcctgcctgtatatgtggct

SEQ ID NO: 257048 - DNA, 25 bp, Probe Sequence
gtggtgccatccgagaatttgcaga

SEQ ID NO: 257049 - DNA, 25 bp, Probe Sequence
gtgtgtgtgtgagggatacctcaga

SEQ ID NO: 257050 - DNA, 25 bp, Probe Sequence
gtgtgtattgtgtatatacctcaag

SEQ ID NO: 257051 - DNA, 25 bp, Probe Sequence
gtgtgtgtgtgtgcaaaggtccagc

SEQ ID NO: 257052 - DNA, 25 bp, Probe Sequence
gtggtgaatgtgactaagaagcctg

SEQ ID NO: 257053 - DNA, 25 bp, Probe Sequence
gtgggaatgtgcctctgaatggcca

SEQ ID NO: 257054 - DNA, 25 bp, Probe Sequence
gtgggaatgtgggaacagtgacagc

SEQ ID NO: 257055 - DNA, 25 bp, Probe Sequence
gtggtcgagcgacaacatgcagaca

SEQ ID NO: 257056 - DNA, 25 bp, Probe Sequence
gtgtgtctagcaccaagactggcac

SEQ ID NO: 257057 - DNA, 25 bp, Probe Sequence
gtgtgtcctgcatcaagaaggcctc

SEQ ID NO: 257058 - DNA, 25 bp, Probe Sequence
gtgtgtcctcagttaaaactgtgca

SEQ ID NO: 257059 - DNA, 25 bp, Probe Sequence
gtgggcttcagatttaaggctgaca

SEQ ID NO: 257060 - DNA, 25 bp, Probe Sequence
gtggtgtgtacatgttccgcatgga

SEQ ID NO: 257061 - DNA, 25 bp, Probe Sequence
gtgggatgtggtgttccacatgtgc

SEQ ID NO: 257062 - DNA, 25 bp, Probe Sequence
gtgggcttgtgttttgtcactgtga

SEQ ID NO: 257063 - DNA, 25 bp, Probe Sequence
gtgggcttgtgttttgtcactgtga

SEQ ID NO: 257064 - DNA, 25 bp, Probe Sequence
gtgtgggctgtgagtgtaagtgtga

SEQ ID NO: 257065 - DNA, 25 bp, Probe Sequence
gtgtgtgggcagaagtgttggggtt

SEQ ID NO: 257066 - DNA, 25 bp, Probe Sequence
gtgtgggcacactatgtggtggggt

SEQ ID NO: 257067 - DNA, 25 bp, Probe Sequence
gtgggaccctctgagtgggtggtca

SEQ ID NO: 257068 - DNA, 25 bp, Probe Sequence
gtgggagccttatagtggcagtgcg

SEQ ID NO: 257069 - DNA, 25 bp, Probe Sequence
gtggggcctaaaggtgctgcaggag

SEQ ID NO: 257070 - DNA, 25 bp, Probe Sequence
gtgggagcctaaggaagcgtggggt

SEQ ID NO: 257071 - DNA, 25 bp, Probe Sequence
gtgggcacactatgtggtggggtgg

SEQ ID NO: 257072 - DNA, 25 bp, Probe Sequence
gtgggcatttgatgcgggaggtggg

SEQ ID NO: 257073 - DNA, 25 bp, Probe Sequence
gtgggctttaggggctacagagtcg

SEQ ID NO: 257074 - DNA, 25 bp, Probe Sequence
gtggttattagaagcccaatagtgc

SEQ ID NO: 257075 - DNA, 25 bp, Probe Sequence
gtggataaagtggccccaggagggc

SEQ ID NO: 257076 - DNA, 25 bp, Probe Sequence
gtggtaaatggggtccagaggacta

SEQ ID NO: 257077 - DNA, 25 bp, Probe Sequence
gtgtggtaatgagggatcctgcaag

SEQ ID NO: 257078 - DNA, 25 bp, Probe Sequence
gtggtgtttgatgtcacctccggaa

SEQ ID NO: 257079 - DNA, 25 bp, Probe Sequence
gtgtgtgtgtttgtaggtcctggac

SEQ ID NO: 257080 - DNA, 25 bp, Probe Sequence
gtgtgtgtattaattagtgtgcctt

SEQ ID NO: 257081 - DNA, 25 bp, Probe Sequence
gtgggcatttataatctggtccaga

SEQ ID NO: 257082 - DNA, 25 bp, Probe Sequence
gtgtgtatattatctcttgctctaa

SEQ ID NO: 257083 - DNA, 25 bp, Probe Sequence
gtgtgtatattttcttgatctattt

SEQ ID NO: 257084 - DNA, 25 bp, Probe Sequence
gtgggtcatttgacttgatttttta

SEQ ID NO: 257085 - DNA, 25 bp, Probe Sequence
gtgtggattttgtttagttgtgtgt

SEQ ID NO: 257086 - DNA, 25 bp, Probe Sequence
gtgtgtgacttgaaattcagtagta

SEQ ID NO: 257087 - DNA, 25 bp, Probe Sequence
gtgtgtacctgtaatctcagctact

SEQ ID NO: 257088 - DNA, 25 bp, Probe Sequence
gtggtattctgtatactctccttac

SEQ ID NO: 257089 - DNA, 25 bp, Probe Sequence
gtggtatctttaattgtatctcctt

SEQ ID NO: 257090 - DNA, 25 bp, Probe Sequence
gggctgtttttgagcttctcattgt

SEQ ID NO: 257091 - DNA, 25 bp, Probe Sequence
gtggttttttgtcttctgttgtcca

SEQ ID NO: 257092 - DNA, 25 bp, Probe Sequence
gtggtggttactggaattctgtttc

SEQ ID NO: 257093 - DNA, 25 bp, Probe Sequence
gggccaggtactgaaattatatgct

SEQ ID NO: 257094 - DNA, 25 bp, Probe Sequence
ggttcagggggtcagttatcatgtc

SEQ ID NO: 257095 - DNA, 25 bp, Probe Sequence
gggttgggggtaaggtcacagatca

SEQ ID NO: 257096 - DNA, 25 bp, Probe Sequence
gggggtgtcggttggtggaaatatg

SEQ ID NO: 257097 - DNA, 25 bp, Probe Sequence
gtggggcgggtctatggggagaaag

SEQ ID NO: 257098 - DNA, 25 bp, Probe Sequence
gtggggcgggtctatggggagaaag

SEQ ID NO: 257099 - DNA, 25 bp, Probe Sequence
gtggggggatggtaagagaaaagag

SEQ ID NO: 257100 - DNA, 25 bp, Probe Sequence
gtgggagaggatgtagggaaattag

SEQ ID NO: 257101 - DNA, 25 bp, Probe Sequence
gtgggaggtatgtctagggggcagt

SEQ ID NO: 257102 - DNA, 25 bp, Probe Sequence
gtgtggagacattgggcaaggggag

SEQ ID NO: 257103 - DNA, 25 bp, Probe Sequence
gtgtggcacacaagctggggataaa

SEQ ID NO: 257104 - DNA, 25 bp, Probe Sequence
gtgtggcggcatcctagtgagaaag

SEQ ID NO: 257105 - DNA, 25 bp, Probe Sequence
gtgtgtggctgctctgagtgaggaa

SEQ ID NO: 257106 - DNA, 25 bp, Probe Sequence
gtgtgggtgtgattgtgtgagcaac

SEQ ID NO: 257107 - DNA, 25 bp, Probe Sequence
gtgtgtgcgtgagtggtgtgcaggc

SEQ ID NO: 257108 - DNA, 25 bp, Probe Sequence
gtgggcactgatgggcgtgccctgc

SEQ ID NO: 257109 - DNA, 25 bp, Probe Sequence
gtgggcattcatggagattctcctc

SEQ ID NO: 257110 - DNA, 25 bp, Probe Sequence
gtgggcaggctgggattcctgcccc

SEQ ID NO: 257111 - DNA, 25 bp, Probe Sequence
gtgggcaggtggtggcactgagccc

SEQ ID NO: 257112 - DNA, 25 bp, Probe Sequence
gtgtgggcgtggtgcagtacagcca

SEQ ID NO: 257113 - DNA, 25 bp, Probe Sequence
gtgtgggcgtggtgcagtacagcca

SEQ ID NO: 257114 - DNA, 25 bp, Probe Sequence
gtgtgggcttgcttagattactata

SEQ ID NO: 257115 - DNA, 25 bp, Probe Sequence
gtgtgtgcgcccttgaattaaagcc

SEQ ID NO: 257116 - DNA, 25 bp, Probe Sequence
gtgtgtggaccatggtcaggtagca

SEQ ID NO: 257117 - DNA, 25 bp, Probe Sequence
gtgggtgacgagctgtactgtgaga

SEQ ID NO: 257118 - DNA, 25 bp, Probe Sequence
gtgggtgacgagctgtactgtgaga

SEQ ID NO: 257119 - DNA, 25 bp, Probe Sequence
gtgtggtccagaaatgtactgtgta

SEQ ID NO: 257120 - DNA, 25 bp, Probe Sequence
gtgtgtgtcctacacaatggtgcta

SEQ ID NO: 257121 - DNA, 25 bp, Probe Sequence
gtgtgtgtcctggaactagagccca

SEQ ID NO: 257122 - DNA, 25 bp, Probe Sequence
gtgtggtcagtcaagaccgtgcctc

SEQ ID NO: 257123 - DNA, 25 bp, Probe Sequence
gtgggttttggagtctgagcctcag

SEQ ID NO: 257124 - DNA, 25 bp, Probe Sequence
gtggtttttgaaatcctgacttgga

SEQ ID NO: 257125 - DNA, 25 bp, Probe Sequence
gtggttttgtaaatctcagctatat

SEQ ID NO: 257126 - DNA, 25 bp, Probe Sequence
gtggtgtttgtaacaatcactgttc

SEQ ID NO: 257127 - DNA, 25 bp, Probe Sequence
gtgtggtgttattacttagcgttat

SEQ ID NO: 257128 - DNA, 25 bp, Probe Sequence
gtgtgtgtttatatcttagtttttc

SEQ ID NO: 257129 - DNA, 25 bp, Probe Sequence
ggtgtgttctaatgatttttttcca

SEQ ID NO: 257130 - DNA, 25 bp, Probe Sequence
ggggttctaaaacactcttacatat

SEQ ID NO: 257131 - DNA, 25 bp, Probe Sequence
gtgggctattgaaggaaaagttaca

SEQ ID NO: 257132 - DNA, 25 bp, Probe Sequence
gtggtttagttgctagaagtcatga

SEQ ID NO: 257133 - DNA, 25 bp, Probe Sequence
gtggtgatttttctggcgagttaag

SEQ ID NO: 257134 - DNA, 25 bp, Probe Sequence
gtggtgatttatatgttaagtggaa

SEQ ID NO: 257135 - DNA, 25 bp, Probe Sequence
gtgggtttgctcagtattagtagac

SEQ ID NO: 257136 - DNA, 25 bp, Probe Sequence
gtgggtttctctgttgtagacatct

SEQ ID NO: 257137 - DNA, 25 bp, Probe Sequence
gtgggataatctcaaattaccatgc

SEQ ID NO: 257138 - DNA, 25 bp, Probe Sequence
gtgggataacgcgatgactgtgacc

SEQ ID NO: 257139 - DNA, 25 bp, Probe Sequence
gtgggataacgcgatgactgtgacc

SEQ ID NO: 257140 - DNA, 25 bp, Probe Sequence
gtgggagctaatcattgcatgtgca

SEQ ID NO: 257141 - DNA, 25 bp, Probe Sequence
gtgtgggctatatagctgtggctca

SEQ ID NO: 257142 - DNA, 25 bp, Probe Sequence
gtgtgtgcactgtaagaaggagctg

SEQ ID NO: 257143 - DNA, 25 bp, Probe Sequence
gtgtgtgcacgtgtgtgtgtgtgtg

SEQ ID NO: 257144 - DNA, 25 bp, Probe Sequence
gtgtgtgactgtttctcatgtttga

SEQ ID NO: 257145 - DNA, 25 bp, Probe Sequence
gtgtggatctgttcctagtataggc

SEQ ID NO: 257146 - DNA, 25 bp, Probe Sequence
gtgtggattgtatttagtgactcac

SEQ ID NO: 257147 - DNA, 25 bp, Probe Sequence
gtgtggcactgatttatcaagacaa

SEQ ID NO: 257148 - DNA, 25 bp, Probe Sequence
gtgtggtctgatgttctgagagcat

SEQ ID NO: 257149 - DNA, 25 bp, Probe Sequence
gtgtgggcacatgttatggcagatt

SEQ ID NO: 257150 - DNA, 25 bp, Probe Sequence
gtgggcagtaggatatgcggatctt

SEQ ID NO: 257151 - DNA, 25 bp, Probe Sequence
gtgtgggcatagcattagctgcttc

SEQ ID NO: 257152 - DNA, 25 bp, Probe Sequence
gtgtggcgtacactctcatattgtc

SEQ ID NO: 257153 - DNA, 25 bp, Probe Sequence
gtgtgtggatcacccatatttgttt

SEQ ID NO: 257154 - DNA, 25 bp, Probe Sequence
gtgtggagtcacgtatgcttggtat

SEQ ID NO: 257155 - DNA, 25 bp, Probe Sequence
gtgtgtgtgtgtgtatgtttgcata

SEQ ID NO: 257156 - DNA, 25 bp, Probe Sequence
gtgtgtgtgcccttatgcatagtca

SEQ ID NO: 257157 - DNA, 25 bp, Probe Sequence
gtgtgtggcctttgcatcatttatc

SEQ ID NO: 257158 - DNA, 25 bp, Probe Sequence
gtgtggtggctcatgcctgtaatcc

SEQ ID NO: 257159 - DNA, 25 bp, Probe Sequence
gtggtggtgtgacgcctgtatattc

SEQ ID NO: 257160 - DNA, 25 bp, Probe Sequence
gtggtggtgtgcacctatagtccca

SEQ ID NO: 257161 - DNA, 25 bp, Probe Sequence
gtggtggtgcacacctgtagtctca

SEQ ID NO: 257162 - DNA, 25 bp, Probe Sequence
gtggtgactcacacttgtaatccca

SEQ ID NO: 257163 - DNA, 25 bp, Probe Sequence
gtggaaccatctaactggaacttcc

SEQ ID NO: 257164 - DNA, 25 bp, Probe Sequence
gtggatcacctgaggctgggagttc

SEQ ID NO: 257165 - DNA, 25 bp, Probe Sequence
gtggatcacctgaggtcaggagttc

SEQ ID NO: 257166 - DNA, 25 bp, Probe Sequence
gtggatcacttgaggacaggagttc

SEQ ID NO: 257167 - DNA, 25 bp, Probe Sequence
gtggatctttatcaagaggtttcct

SEQ ID NO: 257168 - DNA, 25 bp, Probe Sequence
gggccgcttggtgagaggtttggtt

SEQ ID NO: 257169 - DNA, 25 bp, Probe Sequence
gggccagttggattcaattttttat

SEQ ID NO: 257170 - DNA, 25 bp, Probe Sequence
gggcctggggaatgcttttttatct

SEQ ID NO: 257171 - DNA, 25 bp, Probe Sequence
gggcctggggaatgcttttttatct

SEQ ID NO: 257172 - DNA, 25 bp, Probe Sequence
gtggatctagggttactttctttat

SEQ ID NO: 257173 - DNA, 25 bp, Probe Sequence
gtggactcagggataccagttcatc

SEQ ID NO: 257174 - DNA, 25 bp, Probe Sequence
gtggaccaggaggattgcctttaat

SEQ ID NO: 257175 - DNA, 25 bp, Probe Sequence
gtggtactaggattatacattgtaa

SEQ ID NO: 257176 - DNA, 25 bp, Probe Sequence
gtgggcaacagagtaagacctgtaa

SEQ ID NO: 257177 - DNA, 25 bp, Probe Sequence
gtgggctgtcaagacgtgtcatgta

SEQ ID NO: 257178 - DNA, 25 bp, Probe Sequence
gtgtggtggcacacacctgtagtcc

SEQ ID NO: 257179 - DNA, 25 bp, Probe Sequence
gtgtggtagcacattcctatatttc

SEQ ID NO: 257180 - DNA, 25 bp, Probe Sequence
gtggcagtgaacatacctaatgctc

SEQ ID NO: 257181 - DNA, 25 bp, Probe Sequence
gtgggccgagcaatacctgaagatc

SEQ ID NO: 257182 - DNA, 25 bp, Probe Sequence
gtgggcagggaatcctggagcactt

SEQ ID NO: 257183 - DNA, 25 bp, Probe Sequence
gtgggagtggcatagttggtgctgt

SEQ ID NO: 257184 - DNA, 25 bp, Probe Sequence
gtggggttgagacctgggtcgatgc

SEQ ID NO: 257185 - DNA, 25 bp, Probe Sequence
gtggaggttgtagccgagatcacgc

SEQ ID NO: 257186 - DNA, 25 bp, Probe Sequence
gtggagggtcactcataggacacca

SEQ ID NO: 257187 - DNA, 25 bp, Probe Sequence
gtgtgggggcactgtgggaagcctt

SEQ ID NO: 257188 - DNA, 25 bp, Probe Sequence
gtggctgggtaatcgggaagcccta

SEQ ID NO: 257189 - DNA, 25 bp, Probe Sequence
gtggcttggttcccagggacagtca

SEQ ID NO: 257190 - DNA, 25 bp, Probe Sequence
gtgggtggaatagtggaggccttca

SEQ ID NO: 257191 - DNA, 25 bp, Probe Sequence
gtgggtggaatagtggaggccttca

SEQ ID NO: 257192 - DNA, 25 bp, Probe Sequence
gtgggatactatctatgggctccta

SEQ ID NO: 257193 - DNA, 25 bp, Probe Sequence
gtgggttcatatcttggcaccactc

SEQ ID NO: 257194 - DNA, 25 bp, Probe Sequence
gtggtatccatgacggtgagcacct

SEQ ID NO: 257195 - DNA, 25 bp, Probe Sequence
gtggttctattcctttgacactacg

SEQ ID NO: 257196 - DNA, 25 bp, Probe Sequence
gtggcagttttactgttgtcgctac

SEQ ID NO: 257197 - DNA, 25 bp, Probe Sequence
gtggttatttactcatgtgccttca

SEQ ID NO: 257198 - DNA, 25 bp, Probe Sequence
gtggtatattacactttctgcttca

SEQ ID NO: 257199 - DNA, 25 bp, Probe Sequence
gtggacattattccacagttctctg

SEQ ID NO: 257200 - DNA, 25 bp, Probe Sequence
gtgggcatcagaactagcacctttg

SEQ ID NO: 257201 - DNA, 25 bp, Probe Sequence
gtggagactgcaagtaaggctttta

SEQ ID NO: 257202 - DNA, 25 bp, Probe Sequence
gtggacaccattaacaggtctttga

SEQ ID NO: 257203 - DNA, 25 bp, Probe Sequence
gtggaccgcaagaaagcatgacttt

SEQ ID NO: 257204 - DNA, 25 bp, Probe Sequence
gtggtccatgaaaaagcagatgact

SEQ ID NO: 257205 - DNA, 25 bp, Probe Sequence
gtggtccagaaaagatctgcatccg

SEQ ID NO: 257206 - DNA, 25 bp, Probe Sequence
gtggttaggaaaacatctcctgggt

SEQ ID NO: 257207 - DNA, 25 bp, Probe Sequence
gtggagtatagaagaatatccttgg

SEQ ID NO: 257208 - DNA, 25 bp, Probe Sequence
gtgggtcaaaattctattctgggtc

SEQ ID NO: 257209 - DNA, 25 bp, Probe Sequence
gtgggttcaatttgccattggtttc

SEQ ID NO: 257210 - DNA, 25 bp, Probe Sequence
gtggtttcagtatgacaatcttttg

SEQ ID NO: 257211 - DNA, 25 bp, Probe Sequence
gtggtggccatttagccaccatctt

SEQ ID NO: 257212 - DNA, 25 bp, Probe Sequence
gtggggcacatctaactcaactgtg

SEQ ID NO: 257213 - DNA, 25 bp, Probe Sequence
gtggggagcatggaactcctgggct

SEQ ID NO: 257214 - DNA, 25 bp, Probe Sequence
gtggggagggaatcactggtgctat

SEQ ID NO: 257215 - DNA, 25 bp, Probe Sequence
gtgggtgggctgtcaagacgtgtca

SEQ ID NO: 257216 - DNA, 25 bp, Probe Sequence
gtgtggtggagagagtacagtgatc

SEQ ID NO: 257217 - DNA, 25 bp, Probe Sequence
gtgggctcagaacactacgtcagca

SEQ ID NO: 257218 - DNA, 25 bp, Probe Sequence
gtgggctcagaacactacgtcagca

SEQ ID NO: 257219 - DNA, 25 bp, Probe Sequence
gggcgtctgaagctctaggttcagc

SEQ ID NO: 257220 - DNA, 25 bp, Probe Sequence
gtgggctctaagatctaagatggcc

SEQ ID NO: 257221 - DNA, 25 bp, Probe Sequence
gtgggctgtaatgttgatggccgcc

SEQ ID NO: 257222 - DNA, 25 bp, Probe Sequence
gtgggtgaatgtggttatggccgaa

SEQ ID NO: 257223 - DNA, 25 bp, Probe Sequence
gtgggagaattgcttgaacctggaa

SEQ ID NO: 257224 - DNA, 25 bp, Probe Sequence
gtgggaggattgcttgaggccagga

SEQ ID NO: 257225 - DNA, 25 bp, Probe Sequence
gtgggggattgattgcatgagccca

SEQ ID NO: 257226 - DNA, 25 bp, Probe Sequence
gtgggaggactatattgccccatgc

SEQ ID NO: 257227 - DNA, 25 bp, Probe Sequence
gtggtgtaaccatattgccgcaatg

SEQ ID NO: 257228 - DNA, 25 bp, Probe Sequence
gtgtggtacgtgagatctgctccaa

SEQ ID NO: 257229 - DNA, 25 bp, Probe Sequence
gtggtgtccgagaagtcaggcacgt

SEQ ID NO: 257230 - DNA, 25 bp, Probe Sequence
gtgggtgacaggagttacaggttct

SEQ ID NO: 257231 - DNA, 25 bp, Probe Sequence
gggcgtacggcgttgtacggtggat

SEQ ID NO: 257232 - DNA, 25 bp, Probe Sequence
gggctttaggggctacagagtcgag

SEQ ID NO: 257233 - DNA, 25 bp, Probe Sequence
gggaaatggggtgaacggtgctggc

SEQ ID NO: 257234 - DNA, 25 bp, Probe Sequence
gtggaaacgcgtcagaatcgcctgg

SEQ ID NO: 257235 - DNA, 25 bp, Probe Sequence
gtgggaactgttcagtggcctgtga

SEQ ID NO: 257236 - DNA, 25 bp, Probe Sequence
tctaccaactgtttagggccctgat

SEQ ID NO: 257237 - DNA, 25 bp, Probe Sequence
tctgtaaagagtttagggtttgatt

SEQ ID NO: 257238 - DNA, 25 bp, Probe Sequence
tgtgtccaagtttattcaggttttt

SEQ ID NO: 257239 - DNA, 25 bp, Probe Sequence
gtggaaacattctttcgagtttgtt

SEQ ID NO: 257240 - DNA, 25 bp, Probe Sequence
gtgggttgctattttctagatttta

SEQ ID NO: 257241 - DNA, 25 bp, Probe Sequence
gtgggtattattatcaatttccatt

SEQ ID NO: 257242 - DNA, 25 bp, Probe Sequence
gtggagtaatttatgccttagtctt

SEQ ID NO: 257243 - DNA, 25 bp, Probe Sequence
gtggagggtaatcctgctcttaatc

SEQ ID NO: 257244 - DNA, 25 bp, Probe Sequence
gggcccagtaaagtgcatttgacat

SEQ ID NO: 257245 - DNA, 25 bp, Probe Sequence
gtggtcctgactcaacatgttactg

SEQ ID NO: 257246 - DNA, 25 bp, Probe Sequence
gtgggtgcgattctacactaactgt

SEQ ID NO: 257247 - DNA, 25 bp, Probe Sequence
gtgggtgagtttgacaaatcctgca

SEQ ID NO: 257248 - DNA, 25 bp, Probe Sequence
gtggtgtgcgtgaggacaaactccg

SEQ ID NO: 257249 - DNA, 25 bp, Probe Sequence
gtggattctctcctggaaaacctgg

SEQ ID NO: 257250 - DNA, 25 bp, Probe Sequence
gtggtccaccattggataaaccact

SEQ ID NO: 257251 - DNA, 25 bp, Probe Sequence
gtgggtcctcttccataaattcagc

SEQ ID NO: 257252 - DNA, 25 bp, Probe Sequence
gtgggtcctgtctcatagagaagcc

SEQ ID NO: 257253 - DNA, 25 bp, Probe Sequence
gtgggctccatgccaagaagggaag

SEQ ID NO: 257254 - DNA, 25 bp, Probe Sequence
gtgggcctgctattaaatgtggaat

SEQ ID NO: 257255 - DNA, 25 bp, Probe Sequence
gtgggcacatgttatggcagattga

SEQ ID NO: 257256 - DNA, 25 bp, Probe Sequence
gtggccctggatcgtgagcatccag

SEQ ID NO: 257257 - DNA, 25 bp, Probe Sequence
gtgggcagtgcgtgggagcacagcc

SEQ ID NO: 257258 - DNA, 25 bp, Probe Sequence
gtggggatagtgaggcatcgcaatg

SEQ ID NO: 257259 - DNA, 25 bp, Probe Sequence
gtgggagaagttggccccagatttt

SEQ ID NO: 257260 - DNA, 25 bp, Probe Sequence
gtggtagaacttgggcattcatttt

SEQ ID NO: 257261 - DNA, 25 bp, Probe Sequence
gtggttgaaccagtgtgttttttgg

SEQ ID NO: 257262 - DNA, 25 bp, Probe Sequence
gtggaataagccaattttacgtcgg

SEQ ID NO: 257263 - DNA, 25 bp, Probe Sequence
gtggaagaatggaagggagggggag

SEQ ID NO: 257264 - DNA, 25 bp, Probe Sequence
gtggaagacggttgtgggcggtgcc

SEQ ID NO: 257265 - DNA, 25 bp, Probe Sequence
gtgggaacagggctggtgcgagatc

SEQ ID NO: 257266 - DNA, 25 bp, Probe Sequence
gtgggatggaggagggtctgcagcc

SEQ ID NO: 257267 - DNA, 25 bp, Probe Sequence
gtgggatggatggtgtgttgtgggc

SEQ ID NO: 257268 - DNA, 25 bp, Probe Sequence
gtgggattgatggtggtgccgaggc

SEQ ID NO: 257269 - DNA, 25 bp, Probe Sequence
gtgggaggatcacttgagcccagga

SEQ ID NO: 257270 - DNA, 25 bp, Probe Sequence
gtgggtggatcacttgaggccagga

SEQ ID NO: 257271 - DNA, 25 bp, Probe Sequence
gtgggtggatcatctgaggttggga

SEQ ID NO: 257272 - DNA, 25 bp, Probe Sequence
gtggtggtagcatttgggtctgaga

SEQ ID NO: 257273 - DNA, 25 bp, Probe Sequence
gtgggcagaagatgggcagtcggca

SEQ ID NO: 257274 - DNA, 25 bp, Probe Sequence
gtgggcagggatagggggtggagag

SEQ ID NO: 257275 - DNA, 25 bp, Probe Sequence
gtgggatggagaaggacggtccgga

SEQ ID NO: 257276 - DNA, 25 bp, Probe Sequence
gtgggggcataagatctggctccag

SEQ ID NO: 257277 - DNA, 25 bp, Probe Sequence
gtgggcggtgttgtcatagcgacag

SEQ ID NO: 257278 - DNA, 25 bp, Probe Sequence
gtgggggctttggcagctatggaag

SEQ ID NO: 257279 - DNA, 25 bp, Probe Sequence
gtgggaggtctgagactcaggagag

SEQ ID NO: 257280 - DNA, 25 bp, Probe Sequence
gtgggacgtcagagactatgtggtc

SEQ ID NO: 257281 - DNA, 25 bp, Probe Sequence
gtgggccgaagatatgctcatgtgg

SEQ ID NO: 257282 - DNA, 25 bp, Probe Sequence
gtggtcatctggtagtatgccagga

SEQ ID NO: 257283 - DNA, 25 bp, Probe Sequence
gtggattctggtccgagccagtgac

SEQ ID NO: 257284 - DNA, 25 bp, Probe Sequence
gtggattatgacggtgggcggacaa

SEQ ID NO: 257285 - DNA, 25 bp, Probe Sequence
gtggatattaagatgaggttacaaa

SEQ ID NO: 257286 - DNA, 25 bp, Probe Sequence
gtgggactagacacggtgtccatat

SEQ ID NO: 257287 - DNA, 25 bp, Probe Sequence
gtggacctgaacacaggtgagccaa

SEQ ID NO: 257288 - DNA, 25 bp, Probe Sequence
gtggttctgaacacaccacagccat

SEQ ID NO: 257289 - DNA, 25 bp, Probe Sequence
gtggtcttggacacaaccatgcggg

SEQ ID NO: 257290 - DNA, 25 bp, Probe Sequence
gtggtcttggacacaaccatgcggg

SEQ ID NO: 257291 - DNA, 25 bp, Probe Sequence
gtggtctttgaagcacctgtggtgc

SEQ ID NO: 257292 - DNA, 25 bp, Probe Sequence
gtggttttgatcatctactgtggag

SEQ ID NO: 257293 - DNA, 25 bp, Probe Sequence
gtggttttgatcatctactgtggag

SEQ ID NO: 257294 - DNA, 25 bp, Probe Sequence
gggtccatttttgcacttgtaagtc

SEQ ID NO: 257295 - DNA, 25 bp, Probe Sequence
gtggacacttttgacagcttggcag

SEQ ID NO: 257296 - DNA, 25 bp, Probe Sequence
gtggtacttttcaacgtggcagagg

SEQ ID NO: 257297 - DNA, 25 bp, Probe Sequence
gtggtgacagatctattttcgaggg

SEQ ID NO: 257298 - DNA, 25 bp, Probe Sequence
gtgggaagatgccttacgtctgatc

SEQ ID NO: 257299 - DNA, 25 bp, Probe Sequence
gtgggaattgctccattctgaatga

SEQ ID NO: 257300 - DNA, 25 bp, Probe Sequence
gtgggacatattttcctgagagcag

SEQ ID NO: 257301 - DNA, 25 bp, Probe Sequence
gtggggctatttattgagacaccaa

SEQ ID NO: 257302 - DNA, 25 bp, Probe Sequence
gtgggcacattgttaattggccgcc

SEQ ID NO: 257303 - DNA, 25 bp, Probe Sequence
gtgggagctgtgttactagcactat

SEQ ID NO: 257304 - DNA, 25 bp, Probe Sequence
gtggtgtggatcgtcatgtatactt

SEQ ID NO: 257305 - DNA, 25 bp, Probe Sequence
gtggtgtggtcaatcagacatttac

SEQ ID NO: 257306 - DNA, 25 bp, Probe Sequence
gtggagtggctaattagaaaactag

SEQ ID NO: 257307 - DNA, 25 bp, Probe Sequence
gtggcagtggttttggcaaacgcta

SEQ ID NO: 257308 - DNA, 25 bp, Probe Sequence
gtgggtgggtacaggagccagcgag

SEQ ID NO: 257309 - DNA, 25 bp, Probe Sequence
gtggggggtatcaaggagcctggga

SEQ ID NO: 257310 - DNA, 25 bp, Probe Sequence
gtggggaggttacagaggctgactt

SEQ ID NO: 257311 - DNA, 25 bp, Probe Sequence
gtgggaagcctttgctagggtgtct

SEQ ID NO: 257312 - DNA, 25 bp, Probe Sequence
gtgggaaagcttatggatggtgctc

SEQ ID NO: 257313 - DNA, 25 bp, Probe Sequence
gtgggcagagaggtagggatggggc

SEQ ID NO: 257314 - DNA, 25 bp, Probe Sequence
gtggacctacagaggcacagagggc

SEQ ID NO: 257315 - DNA, 25 bp, Probe Sequence
gtgggtatcctgaggcacataggcc

SEQ ID NO: 257316 - DNA, 25 bp, Probe Sequence
gggcgtgatccgagtgaagccccag

SEQ ID NO: 257317 - DNA, 25 bp, Probe Sequence
gggagtgaccgcttgaaagccttct

SEQ ID NO: 257318 - DNA, 25 bp, Probe Sequence
gtggttgactactgcaacaggcttt

SEQ ID NO: 257319 - DNA, 25 bp, Probe Sequence
gggcttaccagtggcccaggtaatt

SEQ ID NO: 257320 - DNA, 25 bp, Probe Sequence
gggctgtgccaagtgtgcccaaggc

SEQ ID NO: 257321 - DNA, 25 bp, Probe Sequence
gtggagatccagtgtccagagcagg

SEQ ID NO: 257322 - DNA, 25 bp, Probe Sequence
gtggagaactcttggccaaaggttt

SEQ ID NO: 257323 - DNA, 25 bp, Probe Sequence
gtgggtatctcttagacttaggaat

SEQ ID NO: 257324 - DNA, 25 bp, Probe Sequence
gtgggtcagatttcagagttcagga

SEQ ID NO: 257325 - DNA, 25 bp, Probe Sequence
gtggtgccggctacagagtatcagc

SEQ ID NO: 257326 - DNA, 25 bp, Probe Sequence
gtggtgccagcgcatgatgggtata

SEQ ID NO: 257327 - DNA, 25 bp, Probe Sequence
gtggagaacagcctagtggcttata

SEQ ID NO: 257328 - DNA, 25 bp, Probe Sequence
gtggatagtagatctgtggcgatat

SEQ ID NO: 257329 - DNA, 25 bp, Probe Sequence
gtggatactggatttgctcctgtca

SEQ ID NO: 257330 - DNA, 25 bp, Probe Sequence
gtggtatttgcattcagtgccttac

SEQ ID NO: 257331 - DNA, 25 bp, Probe Sequence
gtggtatttgcattcagtgccttac

SEQ ID NO: 257332 - DNA, 25 bp, Probe Sequence
gtgggtcttgcatttatgtctacaa

SEQ ID NO: 257333 - DNA, 25 bp, Probe Sequence
gtggtgacttcactgatatttagtg

SEQ ID NO: 257334 - DNA, 25 bp, Probe Sequence
gtggtgtgtccaacacattatagtg

SEQ ID NO: 257335 - DNA, 25 bp, Probe Sequence
gtggaggccttcaactgattagaca

SEQ ID NO: 257336 - DNA, 25 bp, Probe Sequence
gtggaggccttcaactgattagaca

SEQ ID NO: 257337 - DNA, 25 bp, Probe Sequence
gtggaggccataatcaatcctacca

SEQ ID NO: 257338 - DNA, 25 bp, Probe Sequence
gggagagactcagcaacgacccata

SEQ ID NO: 257339 - DNA, 25 bp, Probe Sequence
gtggggacacacagacagacgccac

SEQ ID NO: 257340 - DNA, 25 bp, Probe Sequence
gtggggcagcaccgtgaagacgaat

SEQ ID NO: 257341 - DNA, 25 bp, Probe Sequence
gtgggagcagagagcttagcctgga

SEQ ID NO: 257342 - DNA, 25 bp, Probe Sequence
gtggatacagacgcttagctcttaa

SEQ ID NO: 257343 - DNA, 25 bp, Probe Sequence
gtggagaagtgggcttcagatttaa

SEQ ID NO: 257344 - DNA, 25 bp, Probe Sequence
gtgggactggagattaattaatacc

SEQ ID NO: 257345 - DNA, 25 bp, Probe Sequence
gtgggactgtggatctcactggaag

SEQ ID NO: 257346 - DNA, 25 bp, Probe Sequence
gggctggcattgccctcaacgacca

SEQ ID NO: 257347 - DNA, 25 bp, Probe Sequence
gggctggcattgccctcaacgacca

SEQ ID NO: 257348 - DNA, 25 bp, Probe Sequence
gtgggacttgaagaactgaccaata

SEQ ID NO: 257349 - DNA, 25 bp, Probe Sequence
gtgggaggtaaggcaacatggacaa

SEQ ID NO: 257350 - DNA, 25 bp, Probe Sequence
gtgggagataagtggttggccacat

SEQ ID NO: 257351 - DNA, 25 bp, Probe Sequence
gtggggaaggattggtgctggggca

SEQ ID NO: 257352 - DNA, 25 bp, Probe Sequence
gtggagggggaatgtgtgctggcca

SEQ ID NO: 257353 - DNA, 25 bp, Probe Sequence
gtggacgctgggacgcgtttgtagc

SEQ ID NO: 257354 - DNA, 25 bp, Probe Sequence
gtggatctggggactgagtgtggga

SEQ ID NO: 257355 - DNA, 25 bp, Probe Sequence
gtggtccaggagacggagggaacag

SEQ ID NO: 257356 - DNA, 25 bp, Probe Sequence
gtggtccggctaagtgagagcaacc

SEQ ID NO: 257357 - DNA, 25 bp, Probe Sequence
gtggtgctcttgttgggggaagtga

SEQ ID NO: 257358 - DNA, 25 bp, Probe Sequence
gtggtttgcctgaggctgtaactga

SEQ ID NO: 257359 - DNA, 25 bp, Probe Sequence
gtggttggttgcagttgtgtagtag

SEQ ID NO: 257360 - DNA, 25 bp, Probe Sequence
gtggatgatgatatgcttttgtgag

SEQ ID NO: 257361 - DNA, 25 bp, Probe Sequence
gtggttgaaatttttgataggtgtg

SEQ ID NO: 257362 - DNA, 25 bp, Probe Sequence
gtggtggagcacatctttgatcatc

SEQ ID NO: 257363 - DNA, 25 bp, Probe Sequence
gtggctgtggacatctttcaacact

SEQ ID NO: 257364 - DNA, 25 bp, Probe Sequence
gtggttggccacatagtggatacat

SEQ ID NO: 257365 - DNA, 25 bp, Probe Sequence
gtggtaggagcagtgaagtaaattc

SEQ ID NO: 257366 - DNA, 25 bp, Probe Sequence
gtggaagggttcgagctaagttctt

SEQ ID NO: 257367 - DNA, 25 bp, Probe Sequence
gtggagggttgagatgtagagtttt

SEQ ID NO: 257368 - DNA, 25 bp, Probe Sequence
gtgggggactgtaagttgggcttgc

SEQ ID NO: 257369 - DNA, 25 bp, Probe Sequence
gtgggagtactgagatgtgtgggtt

SEQ ID NO: 257370 - DNA, 25 bp, Probe Sequence
gtgggagatacgggcatagaggatg

SEQ ID NO: 257371 - DNA, 25 bp, Probe Sequence
gtggggatagaggcgctgtaggagc

SEQ ID NO: 257372 - DNA, 25 bp, Probe Sequence
gtggaggtcaaggaggccagaggca

SEQ ID NO: 257373 - DNA, 25 bp, Probe Sequence
gtgggagctaaatgacaaggactca

SEQ ID NO: 257374 - DNA, 25 bp, Probe Sequence
gtgggatctgattacagacggtgac

SEQ ID NO: 257375 - DNA, 25 bp, Probe Sequence
gtgggagtgtcaacagcgggccacc

SEQ ID NO: 257376 - DNA, 25 bp, Probe Sequence
gtggcgagtgttcattgtagtacct

SEQ ID NO: 257377 - DNA, 25 bp, Probe Sequence
gtgggaggttctataataagccatg

SEQ ID NO: 257378 - DNA, 25 bp, Probe Sequence
tctaaagtaaccataaaagcacgtt

SEQ ID NO: 257379 - DNA, 25 bp, Probe Sequence
tctcaaaaaaccaagtacagaagga

SEQ ID NO: 257380 - DNA, 25 bp, Probe Sequence
tgacgaaaaaggtgttgccaaggga

SEQ ID NO: 257381 - DNA, 25 bp, Probe Sequence
tgactaaattggccggttgccgtgg

SEQ ID NO: 257382 - DNA, 25 bp, Probe Sequence
tgactcagggggtggtcgggggagc

SEQ ID NO: 257383 - DNA, 25 bp, Probe Sequence
tgacccgggaagctttggttggcct

SEQ ID NO: 257384 - DNA, 25 bp, Probe Sequence
taaccttggccgctattggccagcc

SEQ ID NO: 257385 - DNA, 25 bp, Probe Sequence
taaccatggacccttaatggggact

SEQ ID NO: 257386 - DNA, 25 bp, Probe Sequence
gtggatccgtacagcagtgtgaaca

SEQ ID NO: 257387 - DNA, 25 bp, Probe Sequence
gtggcaattgcaaccgaggagaaaa

SEQ ID NO: 257388 - DNA, 25 bp, Probe Sequence
gtggactaaacctgagaatctcgat

SEQ ID NO: 257389 - DNA, 25 bp, Probe Sequence
gtggcttaaccctgtgaattccagc

SEQ ID NO: 257390 - DNA, 25 bp, Probe Sequence
gtggcggaacccaggaatctgtcct

SEQ ID NO: 257391 - DNA, 25 bp, Probe Sequence
gtgggtaggcccattgattcagctc

SEQ ID NO: 257392 - DNA, 25 bp, Probe Sequence
gtggtggtgcatggccgttcttagt

SEQ ID NO: 257393 - DNA, 25 bp, Probe Sequence
gtgggagattggcttatctttgata

SEQ ID NO: 257394 - DNA, 25 bp, Probe Sequence
gtggagtatcttggtgtattttgct

SEQ ID NO: 257395 - DNA, 25 bp, Probe Sequence
gtgggtagatcaaggatgttttcat

SEQ ID NO: 257396 - DNA, 25 bp, Probe Sequence
gtgggaaatacacatttgctgctca

SEQ ID NO: 257397 - DNA, 25 bp, Probe Sequence
gtgggacaccaacacatgatcccag

SEQ ID NO: 257398 - DNA, 25 bp, Probe Sequence
gtgggacattagtaactgcacacta

SEQ ID NO: 257399 - DNA, 25 bp, Probe Sequence
gtgggggtaaaagtcacagctgctt

SEQ ID NO: 257400 - DNA, 25 bp, Probe Sequence
gtggggcttggatcagtaagtctgg

SEQ ID NO: 257401 - DNA, 25 bp, Probe Sequence
gtgggagctgtggcaaactaaagtg

SEQ ID NO: 257402 - DNA, 25 bp, Probe Sequence
gtggagaccgctaaactaatgatgt

SEQ ID NO: 257403 - DNA, 25 bp, Probe Sequence
gtggagacggacatagtcgtggatc

SEQ ID NO: 257404 - DNA, 25 bp, Probe Sequence
gtggagtctggagacgacgtgcaga

SEQ ID NO: 257405 - DNA, 25 bp, Probe Sequence
gtggagccgagtgacaccattgaga

SEQ ID NO: 257406 - DNA, 25 bp, Probe Sequence
gtggagccgagtgacaccattgaga

SEQ ID NO: 257407 - DNA, 25 bp, Probe Sequence
gtggaccaagtgaccaccgtgaagt

SEQ ID NO: 257408 - DNA, 25 bp, Probe Sequence
gtggaactaggtcaccctaatcatt

SEQ ID NO: 257409 - DNA, 25 bp, Probe Sequence
gtggatttggttctcccatacattt

SEQ ID NO: 257410 - DNA, 25 bp, Probe Sequence
gtggctttggcacaacttcaacatt

SEQ ID NO: 257411 - DNA, 25 bp, Probe Sequence
gtggctttgaagaactttgccaaat

SEQ ID NO: 257412 - DNA, 25 bp, Probe Sequence
gtggtcagtgcattgttttttaaac

SEQ ID NO: 257413 - DNA, 25 bp, Probe Sequence
gtggtcagtgcattgttttttaaac

SEQ ID NO: 257414 - DNA, 25 bp, Probe Sequence
gtggtcagtgcattgttttttaaac

SEQ ID NO: 257415 - DNA, 25 bp, Probe Sequence
gtggtcgtctgtcttttctgaaaga

SEQ ID NO: 257416 - DNA, 25 bp, Probe Sequence
gtgggtgatctgcttttatctaaat

SEQ ID NO: 257417 - DNA, 25 bp, Probe Sequence
gtggtgtgacgcctgtatattccag

SEQ ID NO: 257418 - DNA, 25 bp, Probe Sequence
gggttacctagataatgccaaagtc

SEQ ID NO: 257419 - DNA, 25 bp, Probe Sequence
gggctttgcctaaggacacacaaat

SEQ ID NO: 257420 - DNA, 25 bp, Probe Sequence
gtggctactcctgacgaacaaaaca

SEQ ID NO: 257421 - DNA, 25 bp, Probe Sequence
gtggaactcctctaaaaattacagt

SEQ ID NO: 257422 - DNA, 25 bp, Probe Sequence
gtggacttcctattaagacttactt

SEQ ID NO: 257423 - DNA, 25 bp, Probe Sequence
gtggagcttcatgaataagccctca

SEQ ID NO: 257424 - DNA, 25 bp, Probe Sequence
gtggcacctctggaaaagtcatatg

SEQ ID NO: 257425 - DNA, 25 bp, Probe Sequence
gtggctgtcctggataaagttactg

SEQ ID NO: 257426 - DNA, 25 bp, Probe Sequence
gtggttggcatcttgaaaattcagg

SEQ ID NO: 257427 - DNA, 25 bp, Probe Sequence
gggccttgcatataaataacggagc

SEQ ID NO: 257428 - DNA, 25 bp, Probe Sequence
gtggcactagccaaacataaagggg

SEQ ID NO: 257429 - DNA, 25 bp, Probe Sequence
gtggacatccgcaaatctccatagg

SEQ ID NO: 257430 - DNA, 25 bp, Probe Sequence
gtggacttctgcaatgctgaccaag

SEQ ID NO: 257431 - DNA, 25 bp, Probe Sequence
gtggactgtgtgatatacctgagcc

SEQ ID NO: 257432 - DNA, 25 bp, Probe Sequence
gtggactggagcgtaactgccactt

SEQ ID NO: 257433 - DNA, 25 bp, Probe Sequence
gtggatcggatgggcaagtccctgc

SEQ ID NO: 257434 - DNA, 25 bp, Probe Sequence
gtggtgatcgtggcagaggtggccc

SEQ ID NO: 257435 - DNA, 25 bp, Probe Sequence
gtgggatgagccgagggtgtgctcc

SEQ ID NO: 257436 - DNA, 25 bp, Probe Sequence
gtggggagcgccggatttgctccca

SEQ ID NO: 257437 - DNA, 25 bp, Probe Sequence
gtgggagagcagattgctgttcccc

SEQ ID NO: 257438 - DNA, 25 bp, Probe Sequence
gtggtgcacactgtacagttcctca

SEQ ID NO: 257439 - DNA, 25 bp, Probe Sequence
gtggtcaggcttaaaaatccatgca

SEQ ID NO: 257440 - DNA, 25 bp, Probe Sequence
gtggtgcagtttaagattaagaggc

SEQ ID NO: 257441 - DNA, 25 bp, Probe Sequence
gtggtgaccttcagattagacagtc

SEQ ID NO: 257442 - DNA, 25 bp, Probe Sequence
gtggtatccattacacaatagacta

SEQ ID NO: 257443 - DNA, 25 bp, Probe Sequence
gtggttatattcccaacaacattaa

SEQ ID NO: 257444 - DNA, 25 bp, Probe Sequence
gtggatgttttacccacatgactta

SEQ ID NO: 257445 - DNA, 25 bp, Probe Sequence
gtggatgttttacccacatgactta

SEQ ID NO: 257446 - DNA, 25 bp, Probe Sequence
gtgggttttgaatgacatactatgt

SEQ ID NO: 257447 - DNA, 25 bp, Probe Sequence
gtgggttttgattgagttgactgtt

SEQ ID NO: 257448 - DNA, 25 bp, Probe Sequence
gtggggtgaggcttggattagcgtt

SEQ ID NO: 257449 - DNA, 25 bp, Probe Sequence
gtgggtgtagatggggttcgagctt

SEQ ID NO: 257450 - DNA, 25 bp, Probe Sequence
gtggttgtaatccttgttcagttct

SEQ ID NO: 257451 - DNA, 25 bp, Probe Sequence
gtggaggtatgtagctatttagtct

SEQ ID NO: 257452 - DNA, 25 bp, Probe Sequence
gtggggaattaccacatgggattct

SEQ ID NO: 257453 - DNA, 25 bp, Probe Sequence
gtggggagggaccctgcaggaatgc

SEQ ID NO: 257454 - DNA, 25 bp, Probe Sequence
gtggggatgaggtccactaccacat

SEQ ID NO: 257455 - DNA, 25 bp, Probe Sequence
gtgggggagcagtccattcagacat

SEQ ID NO: 257456 - DNA, 25 bp, Probe Sequence
gtggggaagcagttctcagcaaatg

SEQ ID NO: 257457 - DNA, 25 bp, Probe Sequence
gtggagtcatgactgtcctcatcaa

SEQ ID NO: 257458 - DNA, 25 bp, Probe Sequence
gtggatgctgctcattaatacagag

SEQ ID NO: 257459 - DNA, 25 bp, Probe Sequence
gtggtcatgctggtataaacaaact

SEQ ID NO: 257460 - DNA, 25 bp, Probe Sequence
gtggtgcagcagggcatgacaccct

SEQ ID NO: 257461 - DNA, 25 bp, Probe Sequence
gtggatgacagagcgagaccctgcc

SEQ ID NO: 257462 - DNA, 25 bp, Probe Sequence
gtggagacaggcctgaagctggccc

SEQ ID NO: 257463 - DNA, 25 bp, Probe Sequence
gtggagtcattgggcgactgggcca

SEQ ID NO: 257464 - DNA, 25 bp, Probe Sequence
gtggagccatgtcaggagcctggcc

SEQ ID NO: 257465 - DNA, 25 bp, Probe Sequence
gtggagccatgtcaggagcctggcc

SEQ ID NO: 257466 - DNA, 25 bp, Probe Sequence
gtggtgcgcggtaggagctgggcgc

SEQ ID NO: 257467 - DNA, 25 bp, Probe Sequence
gtggtgcgggtacccatgatgagcc

SEQ ID NO: 257468 - DNA, 25 bp, Probe Sequence
gtggtgctgtggaatgcccagccag

SEQ ID NO: 257469 - DNA, 25 bp, Probe Sequence
gtggagctggcaattgcaagcagta

SEQ ID NO: 257470 - DNA, 25 bp, Probe Sequence
gtggagtgacggaactgcagtgcct

SEQ ID NO: 257471 - DNA, 25 bp, Probe Sequence
gtggggacatggcacgagtcagcac

SEQ ID NO: 257472 - DNA, 25 bp, Probe Sequence
gtggcggctcaagtgaaggctccac

SEQ ID NO: 257473 - DNA, 25 bp, Probe Sequence
gtggggctggaggatagtgatctac

SEQ ID NO: 257474 - DNA, 25 bp, Probe Sequence
gtgggtggggagtcagtcatgtcac

SEQ ID NO: 257475 - DNA, 25 bp, Probe Sequence
gtgggtgggagtcagcacattcacg

SEQ ID NO: 257476 - DNA, 25 bp, Probe Sequence
gtgggtgagagcagggcactgtcca

SEQ ID NO: 257477 - DNA, 25 bp, Probe Sequence
gtgggtgcaagcagacctctactaa

SEQ ID NO: 257478 - DNA, 25 bp, Probe Sequence
gtgggtgcaagcagacctctactaa

SEQ ID NO: 257479 - DNA, 25 bp, Probe Sequence
gtgggtacatcaagtccatctgaca

SEQ ID NO: 257480 - DNA, 25 bp, Probe Sequence
gtggtgcaacaaagatgcctcgcag

SEQ ID NO: 257481 - DNA, 25 bp, Probe Sequence
gtggtaattatagtgacattgcatg

SEQ ID NO: 257482 - DNA, 25 bp, Probe Sequence
gtggtctatcaccactgaattcatg

SEQ ID NO: 257483 - DNA, 25 bp, Probe Sequence
gtggttcaaccaggcaagatcatcc

SEQ ID NO: 257484 - DNA, 25 bp, Probe Sequence
gtggttacctcagctatatcactgc

SEQ ID NO: 257485 - DNA, 25 bp, Probe Sequence
gtggttaccaaacaccacagccatt

SEQ ID NO: 257486 - DNA, 25 bp, Probe Sequence
gtggtccacgagtactataacagtc

SEQ ID NO: 257487 - DNA, 25 bp, Probe Sequence
gtggacagcggggatcttccaagtc

SEQ ID NO: 257488 - DNA, 25 bp, Probe Sequence
gtggaaggattgtagtcatcctgaa

SEQ ID NO: 257489 - DNA, 25 bp, Probe Sequence
gtggaagagtagagtcatctgggaa

SEQ ID NO: 257490 - DNA, 25 bp, Probe Sequence
gtggaaagtagcaccacttgacggc

SEQ ID NO: 257491 - DNA, 25 bp, Probe Sequence
gggaatcaattccccgttaatggag

SEQ ID NO: 257492 - DNA, 25 bp, Probe Sequence
gggcaacaaacacctgcagttaaag

SEQ ID NO: 257493 - DNA, 25 bp, Probe Sequence
gtggtaatgcaagactagagtaaga

SEQ ID NO: 257494 - DNA, 25 bp, Probe Sequence
gtggttataaattctcaggggaaat

SEQ ID NO: 257495 - DNA, 25 bp, Probe Sequence
gtggttttaatttgcatttccataa

SEQ ID NO: 257496 - DNA, 25 bp, Probe Sequence
gtggtttctagatcaccatctttaa

SEQ ID NO: 257497 - DNA, 25 bp, Probe Sequence
gtggtttcatcaatcatgcctattt

SEQ ID NO: 257498 - DNA, 25 bp, Probe Sequence
gtggtgtatatgtattgcagtatgt

SEQ ID NO: 257499 - DNA, 25 bp, Probe Sequence
gtggcagcagaagtaggcgtatggg

SEQ ID NO: 257500 - DNA, 25 bp, Probe Sequence
gtggggtgcatggaggaattgggac

SEQ ID NO: 257501 - DNA, 25 bp, Probe Sequence
gtggggtcagcagggactggtgcaa

SEQ ID NO: 257502 - DNA, 25 bp, Probe Sequence
gtggagtccgcgaagattcgagcga

SEQ ID NO: 257503 - DNA, 25 bp, Probe Sequence
gtggaggccgaatgtttgcaccaac

SEQ ID NO: 257504 - DNA, 25 bp, Probe Sequence
gtgggtgcctgtagtgtgatgtgtc

SEQ ID NO: 257505 - DNA, 25 bp, Probe Sequence
gtggtggctcttaaggaggtgttcc

SEQ ID NO: 257506 - DNA, 25 bp, Probe Sequence
gtggtgtgctttgcaggaggacttg

SEQ ID NO: 257507 - DNA, 25 bp, Probe Sequence
gtggggattgtgagctggggcattg

SEQ ID NO: 257508 - DNA, 25 bp, Probe Sequence
gtggggactgaacctggaagatcat

SEQ ID NO: 257509 - DNA, 25 bp, Probe Sequence
gtggggttagagcccagagcaagat

SEQ ID NO: 257510 - DNA, 25 bp, Probe Sequence
gtggtggttatggtcctagaggtgg

SEQ ID NO: 257511 - DNA, 25 bp, Probe Sequence
gtggtgctgagtattcactagagtg

SEQ ID NO: 257512 - DNA, 25 bp, Probe Sequence
gtggatcgattagtgtcaaaggctt

SEQ ID NO: 257513 - DNA, 25 bp, Probe Sequence
gtggatgctatttatgatccaagtt

SEQ ID NO: 257514 - DNA, 25 bp, Probe Sequence
gtggatgcttatttgatacatgtga

SEQ ID NO: 257515 - DNA, 25 bp, Probe Sequence
gtggtccttgtgacatgtcaggcag

SEQ ID NO: 257516 - DNA, 25 bp, Probe Sequence
gtggtcctggatgagatcaagccct

SEQ ID NO: 257517 - DNA, 25 bp, Probe Sequence
gtggttctgcggtgtaagtcgctct

SEQ ID NO: 257518 - DNA, 25 bp, Probe Sequence
gtggctacgaggtgatgtaggggtc

SEQ ID NO: 257519 - DNA, 25 bp, Probe Sequence
gtggatttgggactgtctgggggcc

SEQ ID NO: 257520 - DNA, 25 bp, Probe Sequence
gtggttatgggcaattcaggacagc

SEQ ID NO: 257521 - DNA, 25 bp, Probe Sequence
gtggtaatgagggatcctgcaagca

SEQ ID NO: 257522 - DNA, 25 bp, Probe Sequence
gtggtgagtcgggatcccgtcattg

SEQ ID NO: 257523 - DNA, 25 bp, Probe Sequence
gtggtggctggaggtggccgaattg

SEQ ID NO: 257524 - DNA, 25 bp, Probe Sequence
gtggcattggtgtggggtagcttgt

SEQ ID NO: 257525 - DNA, 25 bp, Probe Sequence
gtggttggtgattggcaggatcctg

SEQ ID NO: 257526 - DNA, 25 bp, Probe Sequence
gtggtgagcggtttgcagtgtccgt

SEQ ID NO: 257527 - DNA, 25 bp, Probe Sequence
gtgggtgagggattgcacttcagaa

SEQ ID NO: 257528 - DNA, 25 bp, Probe Sequence
gtggtggtggcgcagcagactgcga

SEQ ID NO: 257529 - DNA, 25 bp, Probe Sequence
gtggtgcctgaggtgtgcaggcgcg

SEQ ID NO: 257530 - DNA, 25 bp, Probe Sequence
gtggtctgtgaggttgcaggcaggg

SEQ ID NO: 257531 - DNA, 25 bp, Probe Sequence
gtggatctggaggggcacgtagagg

SEQ ID NO: 257532 - DNA, 25 bp, Probe Sequence
gtggagtgtggggcccagaaggggc

SEQ ID NO: 257533 - DNA, 25 bp, Probe Sequence
gtggggcatcggaaccataaggggg

SEQ ID NO: 257534 - DNA, 25 bp, Probe Sequence
gtggtgtctcggatggataaggtgg

SEQ ID NO: 257535 - DNA, 25 bp, Probe Sequence
gtggtttcagagatgaatctgggtg

SEQ ID NO: 257536 - DNA, 25 bp, Probe Sequence
gtggctttctgatttttggtagtcc

SEQ ID NO: 257537 - DNA, 25 bp, Probe Sequence
gtggcattccccttttgggaaagca

SEQ ID NO: 257538 - DNA, 25 bp, Probe Sequence
gtggcatcacccataaagggaacac

SEQ ID NO: 257539 - DNA, 25 bp, Probe Sequence
gtggatccccaacaacgtgaaggtg

SEQ ID NO: 257540 - DNA, 25 bp, Probe Sequence
gtggtcccaggacaaatggaagggt

SEQ ID NO: 257541 - DNA, 25 bp, Probe Sequence
gtggggtcaggacacagagtgggag

SEQ ID NO: 257542 - DNA, 25 bp, Probe Sequence
gtgggtgtaaagccactgcagtggg

SEQ ID NO: 257543 - DNA, 25 bp, Probe Sequence
gtgggtgtgaaggacgtggagtgtg

SEQ ID NO: 257544 - DNA, 25 bp, Probe Sequence
gtggggctaatgggaggtgttcagg

SEQ ID NO: 257545 - DNA, 25 bp, Probe Sequence
gtggggtgaatttaaggtgtcagag

SEQ ID NO: 257546 - DNA, 25 bp, Probe Sequence
gtggtggctcattcttataatttca

SEQ ID NO: 257547 - DNA, 25 bp, Probe Sequence
gtggtcccaaccatgtgatgtctgg

SEQ ID NO: 257548 - DNA, 25 bp, Probe Sequence
gtggtcccaaccatgtgatgtctgg

SEQ ID NO: 257549 - DNA, 25 bp, Probe Sequence
gtggtcccaaccatgtgatgtctgg

SEQ ID NO: 257550 - DNA, 25 bp, Probe Sequence
gtggactacaacacatgtgcaggtg

SEQ ID NO: 257551 - DNA, 25 bp, Probe Sequence
gtggaaaccagaacttcgcctggag

SEQ ID NO: 257552 - DNA, 25 bp, Probe Sequence
gtggaagaccaattgaacggagggg

SEQ ID NO: 257553 - DNA, 25 bp, Probe Sequence
gtggatagcggtttgactcacgggg

SEQ ID NO: 257554 - DNA, 25 bp, Probe Sequence
gtggtagcaggtggtggagcacatc

SEQ ID NO: 257555 - DNA, 25 bp, Probe Sequence
gtggagagcgacagtaggctgcatc

SEQ ID NO: 257556 - DNA, 25 bp, Probe Sequence
gtggtggtgatcacaggcgccacct

SEQ ID NO: 257557 - DNA, 25 bp, Probe Sequence
gtggtggctgtacaggaccatggcc

SEQ ID NO: 257558 - DNA, 25 bp, Probe Sequence
gtggctcaattacgaggagcactgg

SEQ ID NO: 257559 - DNA, 25 bp, Probe Sequence
gtggcgaatgtaaacgtccgcgcgg

SEQ ID NO: 257560 - DNA, 25 bp, Probe Sequence
gtggacaagttaccagccacgcaag

SEQ ID NO: 257561 - DNA, 25 bp, Probe Sequence
gtggacaagtgtacccgggagaggc

SEQ ID NO: 257562 - DNA, 25 bp, Probe Sequence
gtggtcagcgtgtttacggaggaag

SEQ ID NO: 257563 - DNA, 25 bp, Probe Sequence
gtggtaggtgtttgaacagaggcca

SEQ ID NO: 257564 - DNA, 25 bp, Probe Sequence
gtggtatatgtgtgcaaataaggac

SEQ ID NO: 257565 - DNA, 25 bp, Probe Sequence
gtggtttgagtgtctagcaaaggaa

SEQ ID NO: 257566 - DNA, 25 bp, Probe Sequence
gtggttatggtcctagaggtggcaa

SEQ ID NO: 257567 - DNA, 25 bp, Probe Sequence
gtggtgaaatggtttgaggctgtcc

SEQ ID NO: 257568 - DNA, 25 bp, Probe Sequence
gtggtgatcgagtggtctgtgttcc

SEQ ID NO: 257569 - DNA, 25 bp, Probe Sequence
gtggtgatcgagtggtctgtgttcc

SEQ ID NO: 257570 - DNA, 25 bp, Probe Sequence
gtggtctcaaatcgatttgcctccc

SEQ ID NO: 257571 - DNA, 25 bp, Probe Sequence
gtggttgcaatctggattcagcccg

SEQ ID NO: 257572 - DNA, 25 bp, Probe Sequence
gtggtctgcaatggacagcttcaag

SEQ ID NO: 257573 - DNA, 25 bp, Probe Sequence
gtggttgcacagtcacactgatatg

SEQ ID NO: 257574 - DNA, 25 bp, Probe Sequence
gtggtgtcagcagctcactgctaca

SEQ ID NO: 257575 - DNA, 25 bp, Probe Sequence
gtggacgagcgtccgcatgctaatc

SEQ ID NO: 257576 - DNA, 25 bp, Probe Sequence
gtggatcgacaggtccatgaaaacc

SEQ ID NO: 257577 - DNA, 25 bp, Probe Sequence
gtggtctgcagacattgatgaagaa

SEQ ID NO: 257578 - DNA, 25 bp, Probe Sequence
gtggaagaaccaatgctgaaagcat

SEQ ID NO: 257579 - DNA, 25 bp, Probe Sequence
gtggaagaacctttaatcagagaag

SEQ ID NO: 257580 - DNA, 25 bp, Probe Sequence
gtggaaaaggctgagcaacagaaaa

SEQ ID NO: 257581 - DNA, 25 bp, Probe Sequence
gtggaagaagtagaggaagtgagaa

SEQ ID NO: 257582 - DNA, 25 bp, Probe Sequence
gggaacgtgtcagagggagctggta

SEQ ID NO: 257583 - DNA, 25 bp, Probe Sequence
gtggattctgttgaaggagagggtg

SEQ ID NO: 257584 - DNA, 25 bp, Probe Sequence
gtggagtttcgtaaaaggatggaga

SEQ ID NO: 257585 - DNA, 25 bp, Probe Sequence
gtggagctttttaaccgtgattgga

SEQ ID NO: 257586 - DNA, 25 bp, Probe Sequence
gtggacttttgtgacaggtatgttg

SEQ ID NO: 257587 - DNA, 25 bp, Probe Sequence
gtggaccactgcctgaaaggtttgt

SEQ ID NO: 257588 - DNA, 25 bp, Probe Sequence
gtggatgtcctgcggattttatttg

SEQ ID NO: 257589 - DNA, 25 bp, Probe Sequence
gtggttgcatgtctgagattcttgt

SEQ ID NO: 257590 - DNA, 25 bp, Probe Sequence
gtggtcttgatgctagagtcaactt

SEQ ID NO: 257591 - DNA, 25 bp, Probe Sequence
gtggtcattaagtgagtatcattgt

SEQ ID NO: 257592 - DNA, 25 bp, Probe Sequence
gtggtattacgtcatgtcattggtg

SEQ ID NO: 257593 - DNA, 25 bp, Probe Sequence
gtggtttggcaggtatctcattggt

SEQ ID NO: 257594 - DNA, 25 bp, Probe Sequence
gtggtttgactatttctgtatgtct

SEQ ID NO: 257595 - DNA, 25 bp, Probe Sequence
gtggatttgatccatttcctctcta

SEQ ID NO: 257596 - DNA, 25 bp, Probe Sequence
gtggattctgcatatcatctttccc

SEQ ID NO: 257597 - DNA, 25 bp, Probe Sequence
gtggattctgcatatcatctttccc

SEQ ID NO: 257598 - DNA, 25 bp, Probe Sequence
gtggatatggcaccaattctaccct

SEQ ID NO: 257599 - DNA, 25 bp, Probe Sequence
gtggtatgggacacgctgaagccaa

SEQ ID NO: 257600 - DNA, 25 bp, Probe Sequence
gtggtagctagtgactgctggagtc

SEQ ID NO: 257601 - DNA, 25 bp, Probe Sequence
gtggtagctatcagacatggacaga

SEQ ID NO: 257602 - DNA, 25 bp, Probe Sequence
gtggctgcaggtagcagcactggcc

SEQ ID NO: 257603 - DNA, 25 bp, Probe Sequence
gtggatatgacccacactgccagaa

SEQ ID NO: 257604 - DNA, 25 bp, Probe Sequence
gtggtatgatcttgactcactgcaa

SEQ ID NO: 257605 - DNA, 25 bp, Probe Sequence
gtggaggattacttcatgcgcaatg

SEQ ID NO: 257606 - DNA, 25 bp, Probe Sequence
gtggatgccaaaccatcagacacat

SEQ ID NO: 257607 - DNA, 25 bp, Probe Sequence
gtggttcaaaatccagatctataat

SEQ ID NO: 257608 - DNA, 25 bp, Probe Sequence
gtggttcccagaaaatataatcaaa

SEQ ID NO: 257609 - DNA, 25 bp, Probe Sequence
gtggttcctcagtgcaatgacaatg

SEQ ID NO: 257610 - DNA, 25 bp, Probe Sequence
gtggtacccagagcaatacagcagg

SEQ ID NO: 257611 - DNA, 25 bp, Probe Sequence
gtggaatccacacagcagataccaa

SEQ ID NO: 257612 - DNA, 25 bp, Probe Sequence
gtggattgccgaagaggagctccca

SEQ ID NO: 257613 - DNA, 25 bp, Probe Sequence
gtggtgctgggaatggggtgcccca

SEQ ID NO: 257614 - DNA, 25 bp, Probe Sequence
gtggtggagcgaatgggccgattcc

SEQ ID NO: 257615 - DNA, 25 bp, Probe Sequence
gtggtggaggataccaccgccatcg

SEQ ID NO: 257616 - DNA, 25 bp, Probe Sequence
gtggtggaggaacttcatcccactg

SEQ ID NO: 257617 - DNA, 25 bp, Probe Sequence
gtggtggaggaacttcatcccactg

SEQ ID NO: 257618 - DNA, 25 bp, Probe Sequence
gtggtggaggagcatttccgcagga

SEQ ID NO: 257619 - DNA, 25 bp, Probe Sequence
gtggtggacaggaagcatgtccctg

SEQ ID NO: 257620 - DNA, 25 bp, Probe Sequence
gtggtctgtagaattcatgtccctt

SEQ ID NO: 257621 - DNA, 25 bp, Probe Sequence
gtggtgttgagagttgcactcccag

SEQ ID NO: 257622 - DNA, 25 bp, Probe Sequence
gtggttaagagcatatctcgccagg

SEQ ID NO: 257623 - DNA, 25 bp, Probe Sequence
gtggttcaagttatccggcagcgaa

SEQ ID NO: 257624 - DNA, 25 bp, Probe Sequence
gtggtagaggggatcctggacacac

SEQ ID NO: 257625 - DNA, 25 bp, Probe Sequence
gtggtgaagctgagtttctgtccaa

SEQ ID NO: 257626 - DNA, 25 bp, Probe Sequence
gtggtggcaaaggtttattccagag

SEQ ID NO: 257627 - DNA, 25 bp, Probe Sequence
gtggtagcacattcctatatttcca

SEQ ID NO: 257628 - DNA, 25 bp, Probe Sequence
gtggtggctcatgcctgtaatctca

SEQ ID NO: 257629 - DNA, 25 bp, Probe Sequence
gtggtggctcatgcctgtaatctca

SEQ ID NO: 257630 - DNA, 25 bp, Probe Sequence
gtggtggctcatgcctgtaatctca

SEQ ID NO: 257631 - DNA, 25 bp, Probe Sequence
gtggtggctcatgcctgtaatctca

SEQ ID NO: 257632 - DNA, 25 bp, Probe Sequence
gtggtggcacatgcctgtgatccat

SEQ ID NO: 257633 - DNA, 25 bp, Probe Sequence
gtggtggacacatttggatcacatt

SEQ ID NO: 257634 - DNA, 25 bp, Probe Sequence
gtggtggacacatttggatcacatt

SEQ ID NO: 257635 - DNA, 25 bp, Probe Sequence
gtggtggccagaattagatatcttt

SEQ ID NO: 257636 - DNA, 25 bp, Probe Sequence
gtggttgtcagattacagactttgt

SEQ ID NO: 257637 - DNA, 25 bp, Probe Sequence
gtggtattctggtcaagttattgtg

SEQ ID NO: 257638 - DNA, 25 bp, Probe Sequence
gggttttggcagtagcatcgatgtg

SEQ ID NO: 257639 - DNA, 25 bp, Probe Sequence
gtggttttgtgcttagccattgata

SEQ ID NO: 257640 - DNA, 25 bp, Probe Sequence
gtggtgttctgttctcagttcatga

SEQ ID NO: 257641 - DNA, 25 bp, Probe Sequence
gtggttcatgcctgtaatctcaagc

SEQ ID NO: 257642 - DNA, 25 bp, Probe Sequence
gtggtgtgtgtcctggaactagagc

SEQ ID NO: 257643 - DNA, 25 bp, Probe Sequence
gtggtggtgtggagcatagccaaga

SEQ ID NO: 257644 - DNA, 25 bp, Probe Sequence
gtggctggggcatggaaggcaagat

SEQ ID NO: 257645 - DNA, 25 bp, Probe Sequence
gtggatggcaggaggttgggaattc

SEQ ID NO: 257646 - DNA, 25 bp, Probe Sequence
gtggtggaggacggggtggcagacc

SEQ ID NO: 257647 - DNA, 25 bp, Probe Sequence
gtggcctagagctgggggaggacac

SEQ ID NO: 257648 - DNA, 25 bp, Probe Sequence
gtggagctgacctcctgggaaaaga

SEQ ID NO: 257649 - DNA, 25 bp, Probe Sequence
gtggagctgaccaattctgcgtgaa

SEQ ID NO: 257650 - DNA, 25 bp, Probe Sequence
gtggagcagacaactatggccgaga

SEQ ID NO: 257651 - DNA, 25 bp, Probe Sequence
gtggaagttcataatgtgccggatg

SEQ ID NO: 257652 - DNA, 25 bp, Probe Sequence
gtggacaaggcaagcgtccggcatg

SEQ ID NO: 257653 - DNA, 25 bp, Probe Sequence
gtggagcaaatgaagagacccttga

SEQ ID NO: 257654 - DNA, 25 bp, Probe Sequence
gtggagcaataggagagctgaactt

SEQ ID NO: 257655 - DNA, 25 bp, Probe Sequence
gtggagaaaagcactgacctttgtg

SEQ ID NO: 257656 - DNA, 25 bp, Probe Sequence
gtggagtacaaggggaccgtctggc

SEQ ID NO: 257657 - DNA, 25 bp, Probe Sequence
gtggaggacagtgtggactggaagg

SEQ ID NO: 257658 - DNA, 25 bp, Probe Sequence
gtggagtacgctttggactgagaag

SEQ ID NO: 257659 - DNA, 25 bp, Probe Sequence
gtggtaactgtattgttctagaaat

SEQ ID NO: 257660 - DNA, 25 bp, Probe Sequence
gtggtaattgtaagttctagaaaat

SEQ ID NO: 257661 - DNA, 25 bp, Probe Sequence
gtggtgcttttatgttataataaca

SEQ ID NO: 257662 - DNA, 25 bp, Probe Sequence
gtggtcttttcaagagtaaaccaga

SEQ ID NO: 257663 - DNA, 25 bp, Probe Sequence
gtggtcctttgcaagagcgcagacc

SEQ ID NO: 257664 - DNA, 25 bp, Probe Sequence
gtggactttagcatgcagagcagca

SEQ ID NO: 257665 - DNA, 25 bp, Probe Sequence
gtggtcccgcacaatgagtgcagcg

SEQ ID NO: 257666 - DNA, 25 bp, Probe Sequence
gtggtgcggcagtacatggccaggc

SEQ ID NO: 257667 - DNA, 25 bp, Probe Sequence
gtggtggtgccttctggagaggagc

SEQ ID NO: 257668 - DNA, 25 bp, Probe Sequence
gtggtggtgccttctggagaggagc

SEQ ID NO: 257669 - DNA, 25 bp, Probe Sequence
gtggtggtgccttctggagaggaac

SEQ ID NO: 257670 - DNA, 25 bp, Probe Sequence
gtggtgttgccatggcgatagtaat

SEQ ID NO: 257671 - DNA, 25 bp, Probe Sequence
gtggatgtgtgtcatgacgtagaaa

SEQ ID NO: 257672 - DNA, 25 bp, Probe Sequence
gtggtgctgggccagcacttcttca

SEQ ID NO: 257673 - DNA, 25 bp, Probe Sequence
gtggcatgtgctgtgaccatttata

SEQ ID NO: 257674 - DNA, 25 bp, Probe Sequence
gggcattcgtattgcgccgctagag

SEQ ID NO: 257675 - DNA, 25 bp, Probe Sequence
gtggcttcaataagcctggtggacc

SEQ ID NO: 257676 - DNA, 25 bp, Probe Sequence
gtggttgatattggcatgatggttg

SEQ ID NO: 257677 - DNA, 25 bp, Probe Sequence
gtggttgtgttgtagggttgcaggt

SEQ ID NO: 257678 - DNA, 25 bp, Probe Sequence
gtggttggtctgaagtccttgcaag

SEQ ID NO: 257679 - DNA, 25 bp, Probe Sequence
gtggttagaatgatccatcttgcta

SEQ ID NO: 257680 - DNA, 25 bp, Probe Sequence
gtggtacaacatggtccttggtgaa

SEQ ID NO: 257681 - DNA, 25 bp, Probe Sequence
gtggacaaccatttacttggtgtaa

SEQ ID NO: 257682 - DNA, 25 bp, Probe Sequence
gtggtagatccacctgtttgtggta

SEQ ID NO: 257683 - DNA, 25 bp, Probe Sequence
gtggtaatgcctgttttcatctgta

SEQ ID NO: 257684 - DNA, 25 bp, Probe Sequence
gtggtatcatcctaggtaagcttat

SEQ ID NO: 257685 - DNA, 25 bp, Probe Sequence
gtggtctcaatccaggataacattt

SEQ ID NO: 257686 - DNA, 25 bp, Probe Sequence
gtggatctaacgaaatcacaacgta

SEQ ID NO: 257687 - DNA, 25 bp, Probe Sequence
gtggatctatctcatcaaacaacac

SEQ ID NO: 257688 - DNA, 25 bp, Probe Sequence
gtggtatagcatcctcaaggacacc

SEQ ID NO: 257689 - DNA, 25 bp, Probe Sequence
gtggatgatgtgaccattgaggacc

SEQ ID NO: 257690 - DNA, 25 bp, Probe Sequence
gtggtgactgtgcatctggagaaga

SEQ ID NO: 257691 - DNA, 25 bp, Probe Sequence
gtggtgactgcgacagtgaagtcca

SEQ ID NO: 257692 - DNA, 25 bp, Probe Sequence
gtggtagtgcctatgaatgcagcaa

SEQ ID NO: 257693 - DNA, 25 bp, Probe Sequence
gtggtgaccaagatgaagatgcaga

SEQ ID NO: 257694 - DNA, 25 bp, Probe Sequence
gtggtaaatgagagcacagtgtgcc

SEQ ID NO: 257695 - DNA, 25 bp, Probe Sequence
gtggtcccacagtacaaggtggcct

SEQ ID NO: 257696 - DNA, 25 bp, Probe Sequence
gtggtgcacccaccacaaggatgac

SEQ ID NO: 257697 - DNA, 25 bp, Probe Sequence
gtggatgaggtcctaaaggatgaga

SEQ ID NO: 257698 - DNA, 25 bp, Probe Sequence
gtggaggtgtggatgaagtgcaggt

SEQ ID NO: 257699 - DNA, 25 bp, Probe Sequence
gtggagtggaggatgctaggatgtt

SEQ ID NO: 257700 - DNA, 25 bp, Probe Sequence
gtggagtggaggtgggggtgaatgg

SEQ ID NO: 257701 - DNA, 25 bp, Probe Sequence
gggcctggcagtgggtagggtagag

SEQ ID NO: 257702 - DNA, 25 bp, Probe Sequence
gggccaagcctagtgatcagggttg

SEQ ID NO: 257703 - DNA, 25 bp, Probe Sequence
gggccagaccagacagatgggggct

SEQ ID NO: 257704 - DNA, 25 bp, Probe Sequence
gtggacagcacagggaatgggggaa

SEQ ID NO: 257705 - DNA, 25 bp, Probe Sequence
gtggtcaccagggatcggggaggaa

SEQ ID NO: 257706 - DNA, 25 bp, Probe Sequence
ggtctccctgggagtgggtggaggc

SEQ ID NO: 257707 - DNA, 25 bp, Probe Sequence
ggaacctggaggcaaaagggggcag

SEQ ID NO: 257708 - DNA, 25 bp, Probe Sequence
gtggacctggagacgaaagagactg

SEQ ID NO: 257709 - DNA, 25 bp, Probe Sequence
gtggacctggattcttgaaggcagt

SEQ ID NO: 257710 - DNA, 25 bp, Probe Sequence
gtggtccttgattgtggaagaatgg

SEQ ID NO: 257711 - DNA, 25 bp, Probe Sequence
gtggtccttaggcttacaatgtgca

SEQ ID NO: 257712 - DNA, 25 bp, Probe Sequence
gtggacccttggtctgtgacaagga

SEQ ID NO: 257713 - DNA, 25 bp, Probe Sequence
gtggatcaccttagggtcaggggct

SEQ ID NO: 257714 - DNA, 25 bp, Probe Sequence
gtggtcagcctatggtttgcagagg

SEQ ID NO: 257715 - DNA, 25 bp, Probe Sequence
gtggtcactgtaacatttggggggt

SEQ ID NO: 257716 - DNA, 25 bp, Probe Sequence
gtggtcttgtacattttggctagtt

SEQ ID NO: 257717 - DNA, 25 bp, Probe Sequence
gtggtgcttgttggttgatgctgcc

SEQ ID NO: 257718 - DNA, 25 bp, Probe Sequence
gggctgcattgtattctcaggctcc

SEQ ID NO: 257719 - DNA, 25 bp, Probe Sequence
gggctatctgtaccctatggtctaa

SEQ ID NO: 257720 - DNA, 25 bp, Probe Sequence
gggccacttcataattttgtctaag

SEQ ID NO: 257721 - DNA, 25 bp, Probe Sequence
gggccactttatatactgtaagaga

SEQ ID NO: 257722 - DNA, 25 bp, Probe Sequence
gtggatactttgccgtcaattaagc

SEQ ID NO: 257723 - DNA, 25 bp, Probe Sequence
gtggttctttgtgtaataatatgct

SEQ ID NO: 257724 - DNA, 25 bp, Probe Sequence
gtggtcctctgagcttactatacat

SEQ ID NO: 257725 - DNA, 25 bp, Probe Sequence
gtggtatccgaggttcttaatatga

SEQ ID NO: 257726 - DNA, 25 bp, Probe Sequence
gtggctaatctacatttatcaataa

SEQ ID NO: 257727 - DNA, 25 bp, Probe Sequence
gtggattttatgtcttgttgaaacg

SEQ ID NO: 257728 - DNA, 25 bp, Probe Sequence
gtggttttcatccgtgttgcaagaa

SEQ ID NO: 257729 - DNA, 25 bp, Probe Sequence
gtggtctttcctgttgatcatgatg

SEQ ID NO: 257730 - DNA, 25 bp, Probe Sequence
gtggtctttccatgtggagactgat

SEQ ID NO: 257731 - DNA, 25 bp, Probe Sequence
gggcctgtctcagattgggattaac

SEQ ID NO: 257732 - DNA, 25 bp, Probe Sequence
gggcctggccctaggggtatcaggc

SEQ ID NO: 257733 - DNA, 25 bp, Probe Sequence
gtggccgtcctgagggggaagtgag

SEQ ID NO: 257734 - DNA, 25 bp, Probe Sequence
gtggccgtcctgagggggaagtgag

SEQ ID NO: 257735 - DNA, 25 bp, Probe Sequence
gtggccgtcctgagggggaagtgag

SEQ ID NO: 257736 - DNA, 25 bp, Probe Sequence
gtggccgtcctgagggggaagtgag

SEQ ID NO: 257737 - DNA, 25 bp, Probe Sequence
gtggccgtcctgagggggaagtgag

SEQ ID NO: 257738 - DNA, 25 bp, Probe Sequence
gtggccgtcctgagggggaagtgag

SEQ ID NO: 257739 - DNA, 25 bp, Probe Sequence
gggcctgtctggagcaggggtaggt

SEQ ID NO: 257740 - DNA, 25 bp, Probe Sequence
gggccaatttctcagggatgtcgga

SEQ ID NO: 257741 - DNA, 25 bp, Probe Sequence
gggccaattatgtgtggcagaccgg

SEQ ID NO: 257742 - DNA, 25 bp, Probe Sequence
gggctacaggcttggtgaggaccac

SEQ ID NO: 257743 - DNA, 25 bp, Probe Sequence
gtggcagccttgtggtgaggactca

SEQ ID NO: 257744 - DNA, 25 bp, Probe Sequence
gggcatgttcacagtggctggactc

SEQ ID NO: 257745 - DNA, 25 bp, Probe Sequence
gtggatttccagactgtgcgcaagt

SEQ ID NO: 257746 - DNA, 25 bp, Probe Sequence
gtggatttccaggctgaactgaggc

SEQ ID NO: 257747 - DNA, 25 bp, Probe Sequence
gtggacaataatgtgcacctgccgc

SEQ ID NO: 257748 - DNA, 25 bp, Probe Sequence
gtggacatatatacacgcctgctgc

SEQ ID NO: 257749 - DNA, 25 bp, Probe Sequence
gtggaggatgctaggatgttgctgc

SEQ ID NO: 257750 - DNA, 25 bp, Probe Sequence
gtggaggaggtggatgcagctatga

SEQ ID NO: 257751 - DNA, 25 bp, Probe Sequence
gggcaggcacttgatggctacaaat

SEQ ID NO: 257752 - DNA, 25 bp, Probe Sequence
gtggcaggtccagatatgtaaaatc

SEQ ID NO: 257753 - DNA, 25 bp, Probe Sequence
gtggacgacccagtgtggaacattc

SEQ ID NO: 257754 - DNA, 25 bp, Probe Sequence
gtggattgagccctcttggaaagac

SEQ ID NO: 257755 - DNA, 25 bp, Probe Sequence
gtggttggccaggagtgtgaagtac

SEQ ID NO: 257756 - DNA, 25 bp, Probe Sequence
gtggttgagcacaggctggtttacc

SEQ ID NO: 257757 - DNA, 25 bp, Probe Sequence
gtggattgagcccggatacttctga

SEQ ID NO: 257758 - DNA, 25 bp, Probe Sequence
gtggttagtcatcgcgtagtagcca

SEQ ID NO: 257759 - DNA, 25 bp, Probe Sequence
gtggtatcagattggagtcgtgagc

SEQ ID NO: 257760 - DNA, 25 bp, Probe Sequence
gtggttcagttggatgtggactctg

SEQ ID NO: 257761 - DNA, 25 bp, Probe Sequence
gtggtctgaattgaatggagtctgc

SEQ ID NO: 257762 - DNA, 25 bp, Probe Sequence
gtggactcaagtggaaagaaatgca

SEQ ID NO: 257763 - DNA, 25 bp, Probe Sequence
gtggttgcaagttgaacagggctac

SEQ ID NO: 257764 - DNA, 25 bp, Probe Sequence
gtggttccaatagtagggctgtgca

SEQ ID NO: 257765 - DNA, 25 bp, Probe Sequence
gtggattccacaaccaggatgattc

SEQ ID NO: 257766 - DNA, 25 bp, Probe Sequence
gtggttcctaacgagagcaattttt

SEQ ID NO: 257767 - DNA, 25 bp, Probe Sequence
gggacttctaaaaggaactatgtct

SEQ ID NO: 257768 - DNA, 25 bp, Probe Sequence
gggacttctaaaaggaactatgtct

SEQ ID NO: 257769 - DNA, 25 bp, Probe Sequence
ggtgcttttaaactagtaactgctt

SEQ ID NO: 257770 - DNA, 25 bp, Probe Sequence
gtggtattcggaacttgtaattctt

SEQ ID NO: 257771 - DNA, 25 bp, Probe Sequence
gtggttgtcttaacatcgtagtcct

SEQ ID NO: 257772 - DNA, 25 bp, Probe Sequence
gtggttatctttgttgtattggcat

SEQ ID NO: 257773 - DNA, 25 bp, Probe Sequence
gtggtttgtattgtctggtttctaa

SEQ ID NO: 257774 - DNA, 25 bp, Probe Sequence
gtggtttgacttctatggtgtttta

SEQ ID NO: 257775 - DNA, 25 bp, Probe Sequence
gtggcttggaagtcttaggtggtat

SEQ ID NO: 257776 - DNA, 25 bp, Probe Sequence
gtggctgtaaagctgtaggaccctt

SEQ ID NO: 257777 - DNA, 25 bp, Probe Sequence
gggctgttatagattctgataccac

SEQ ID NO: 257778 - DNA, 25 bp, Probe Sequence
gggatttaataagctggcacccttg

SEQ ID NO: 257779 - DNA, 25 bp, Probe Sequence
gggatttaaaatgaagctgtgactt

SEQ ID NO: 257780 - DNA, 25 bp, Probe Sequence
gtggtcttaaggttgaagtgtggtt

SEQ ID NO: 257781 - DNA, 25 bp, Probe Sequence
gtggttgtagagattgtagagaggg

SEQ ID NO: 257782 - DNA, 25 bp, Probe Sequence
gtggctattaacatggtgacagaag

SEQ ID NO: 257783 - DNA, 25 bp, Probe Sequence
gggctatcttacctagtaaccatac

SEQ ID NO: 257784 - DNA, 25 bp, Probe Sequence
gggcagcatcctcattaataattct

SEQ ID NO: 257785 - DNA, 25 bp, Probe Sequence
gtggcagctgggccattacaacttc

SEQ ID NO: 257786 - DNA, 25 bp, Probe Sequence
gtggcatcgcagtctcttagaattt

SEQ ID NO: 257787 - DNA, 25 bp, Probe Sequence
gtggatgggacatttacatgttttt

SEQ ID NO: 257788 - DNA, 25 bp, Probe Sequence
gtggagagtttattcactgtcttat

SEQ ID NO: 257789 - DNA, 25 bp, Probe Sequence
gtggagctgcctaaatcctgatttt

SEQ ID NO: 257790 - DNA, 25 bp, Probe Sequence
gtggagctaatattactctttttcc

SEQ ID NO: 257791 - DNA, 25 bp, Probe Sequence
gtggagtatatagatgcttttcatt

SEQ ID NO: 257792 - DNA, 25 bp, Probe Sequence
gtggagatttaggtgctgctctgct

SEQ ID NO: 257793 - DNA, 25 bp, Probe Sequence
gtggtcatttcagatgtgattcatc

SEQ ID NO: 257794 - DNA, 25 bp, Probe Sequence
gtggtcatttcagatgtgattcatc

SEQ ID NO: 257795 - DNA, 25 bp, Probe Sequence
gtggtcatttcagatgtgattcatc

SEQ ID NO: 257796 - DNA, 25 bp, Probe Sequence
gtggcctttctgaatgttatctcca

SEQ ID NO: 257797 - DNA, 25 bp, Probe Sequence
gtggcttttctgatctaacttctag

SEQ ID NO: 257798 - DNA, 25 bp, Probe Sequence
gtggatgttttgattgacacatgtc

SEQ ID NO: 257799 - DNA, 25 bp, Probe Sequence
gggctgccatcctcattgagaattc

SEQ ID NO: 257800 - DNA, 25 bp, Probe Sequence
gggctgccaacttcagacgaacaga

SEQ ID NO: 257801 - DNA, 25 bp, Probe Sequence
gggctgcgcaagtacaactacacgc

SEQ ID NO: 257802 - DNA, 25 bp, Probe Sequence
gtggagcggatgcacatcacagaca

SEQ ID NO: 257803 - DNA, 25 bp, Probe Sequence
gtggactgtgatgccacacagagtg

SEQ ID NO: 257804 - DNA, 25 bp, Probe Sequence
gtggactggatgaacaaggtgatgg

SEQ ID NO: 257805 - DNA, 25 bp, Probe Sequence
gtggaggacaggccagagaggaggc

SEQ ID NO: 257806 - DNA, 25 bp, Probe Sequence
gggcgccaaggctatgaactggatg

SEQ ID NO: 257807 - DNA, 25 bp, Probe Sequence
gggccaagggctaaacatgcatgtg

SEQ ID NO: 257808 - DNA, 25 bp, Probe Sequence
gtggaaagggcagtaactcgtggtg

SEQ ID NO: 257809 - DNA, 25 bp, Probe Sequence
gtggtcaagggagattgccttggga

SEQ ID NO: 257810 - DNA, 25 bp, Probe Sequence
gtggttcatgaggactttgcctctt

SEQ ID NO: 257811 - DNA, 25 bp, Probe Sequence
gtggttaggagagttgctgtcatga

SEQ ID NO: 257812 - DNA, 25 bp, Probe Sequence
gtggtacagggagttgagactgatg

SEQ ID NO: 257813 - DNA, 25 bp, Probe Sequence
gtggacgaggcttttgagcagctgg

SEQ ID NO: 257814 - DNA, 25 bp, Probe Sequence
gtggacgtcccattctatgagtggc

SEQ ID NO: 257815 - DNA, 25 bp, Probe Sequence
gtggagttcctatataagcagagct

SEQ ID NO: 257816 - DNA, 25 bp, Probe Sequence
gtggtttgccatttctacagagact

SEQ ID NO: 257817 - DNA, 25 bp, Probe Sequence
gtggacctccatatgctcataagaa

SEQ ID NO: 257818 - DNA, 25 bp, Probe Sequence
gtggacctccatatgctcataagaa

SEQ ID NO: 257819 - DNA, 25 bp, Probe Sequence
gtggatcactgcaaaactcaaggag

SEQ ID NO: 257820 - DNA, 25 bp, Probe Sequence
gtggatgcagctgcatgaggccgga

SEQ ID NO: 257821 - DNA, 25 bp, Probe Sequence
gtggagcagtcaagagccaaggaga

SEQ ID NO: 257822 - DNA, 25 bp, Probe Sequence
gtggcatctgtatgagcccagagtc

SEQ ID NO: 257823 - DNA, 25 bp, Probe Sequence
gtggcactttatagccacggctgca

SEQ ID NO: 257824 - DNA, 25 bp, Probe Sequence
gtggcctttgagtctcgggatgaag

SEQ ID NO: 257825 - DNA, 25 bp, Probe Sequence
gtggcctttaggagtagcaacatac

SEQ ID NO: 257826 - DNA, 25 bp, Probe Sequence
gtggcactggtaggttgggacacca

SEQ ID NO: 257827 - DNA, 25 bp, Probe Sequence
gtggccggaatggtggggccctaga

SEQ ID NO: 257828 - DNA, 25 bp, Probe Sequence
gggcgtgggatgaaagtggacttaa

SEQ ID NO: 257829 - DNA, 25 bp, Probe Sequence
gggctggaataaagaggtgccttca

SEQ ID NO: 257830 - DNA, 25 bp, Probe Sequence
gggcttgccaagagcagaggccctc

SEQ ID NO: 257831 - DNA, 25 bp, Probe Sequence
gggctctccaaataggagcctccca

SEQ ID NO: 257832 - DNA, 25 bp, Probe Sequence
gggcattacaaattctgtgagcttc

SEQ ID NO: 257833 - DNA, 25 bp, Probe Sequence
gtggacttcatcgaggtgtgtgttc

SEQ ID NO: 257834 - DNA, 25 bp, Probe Sequence
gtggttctttcacgtgttgtgtcca

SEQ ID NO: 257835 - DNA, 25 bp, Probe Sequence
gtggtttgtgacttgtggttttcat

SEQ ID NO: 257836 - DNA, 25 bp, Probe Sequence
gtggatttgtgctcttgtattttta

SEQ ID NO: 257837 - DNA, 25 bp, Probe Sequence
gtggaccctactattcatgttttga

SEQ ID NO: 257838 - DNA, 25 bp, Probe Sequence
gtggactttcacaaatatcttttta

SEQ ID NO: 257839 - DNA, 25 bp, Probe Sequence
gtggaccttaatttaccttgctaag

SEQ ID NO: 257840 - DNA, 25 bp, Probe Sequence
gtggatccttaattgtagcctttga

SEQ ID NO: 257841 - DNA, 25 bp, Probe Sequence
gtggttctcaaatataggcattctg

SEQ ID NO: 257842 - DNA, 25 bp, Probe Sequence
gtggttctgcaaatgaataccttca

SEQ ID NO: 257843 - DNA, 25 bp, Probe Sequence
gtggttagccatagatcattccttt

SEQ ID NO: 257844 - DNA, 25 bp, Probe Sequence
gtggatggaggcttgtctatccctc

SEQ ID NO: 257845 - DNA, 25 bp, Probe Sequence
gtggagataagaattctttcctcaa

SEQ ID NO: 257846 - DNA, 25 bp, Probe Sequence
gtggagactggaatcccttacacat

SEQ ID NO: 257847 - DNA, 25 bp, Probe Sequence
gtggacagtgctgaaccttatatat

SEQ ID NO: 257848 - DNA, 25 bp, Probe Sequence
gtggactgttggaagcctcataggt

SEQ ID NO: 257849 - DNA, 25 bp, Probe Sequence
ggtccgttggcatcaacacggggac

SEQ ID NO: 257850 - DNA, 25 bp, Probe Sequence
ggtctggtcggatgaacacgtgggc

SEQ ID NO: 257851 - DNA, 25 bp, Probe Sequence
ggtgggttctgaaaatcggtccagt

SEQ ID NO: 257852 - DNA, 25 bp, Probe Sequence
gggcgggtttgaagacgcgtcgttg

SEQ ID NO: 257853 - DNA, 25 bp, Probe Sequence
ggaacgggttatgtacgtcatgttg

SEQ ID NO: 257854 - DNA, 25 bp, Probe Sequence
gggccagtggttattcagcgttttt

SEQ ID NO: 257855 - DNA, 25 bp, Probe Sequence
gtggctcctggtcagtgtaattcta

SEQ ID NO: 257856 - DNA, 25 bp, Probe Sequence
gtggccccagatctctgtaatttta

SEQ ID NO: 257857 - DNA, 25 bp, Probe Sequence
gtggcctcaaaggcacttaatttga

SEQ ID NO: 257858 - DNA, 25 bp, Probe Sequence
gggcctcaaacaggtatactaccat

SEQ ID NO: 257859 - DNA, 25 bp, Probe Sequence
gggcctaaccagccttgggagtatt

SEQ ID NO: 257860 - DNA, 25 bp, Probe Sequence
gggcctgaacccgacagggaggagt

SEQ ID NO: 257861 - DNA, 25 bp, Probe Sequence
gggccggactcaggagcaagtgtgc

SEQ ID NO: 257862 - DNA, 25 bp, Probe Sequence
gtggctttagtagcacagaggatgc

SEQ ID NO: 257863 - DNA, 25 bp, Probe Sequence
gtggatgttgcactcaaacgggctg

SEQ ID NO: 257864 - DNA, 25 bp, Probe Sequence
gtggatgttgcactcaaacgggctg

SEQ ID NO: 257865 - DNA, 25 bp, Probe Sequence
gtggtttcactatattgtgtcaggc

SEQ ID NO: 257866 - DNA, 25 bp, Probe Sequence
gtggctttacattgcagataggaag

SEQ ID NO: 257867 - DNA, 25 bp, Probe Sequence
gggctttggcagctatggaagaacc

SEQ ID NO: 257868 - DNA, 25 bp, Probe Sequence
gggctttggtcgatggaccttgcac

SEQ ID NO: 257869 - DNA, 25 bp, Probe Sequence
gggctttggtcgatggaccttgcac

SEQ ID NO: 257870 - DNA, 25 bp, Probe Sequence
gggtaagggctcaggaagttgctcc

SEQ ID NO: 257871 - DNA, 25 bp, Probe Sequence
gggctacacggtgaagaagcatctg

SEQ ID NO: 257872 - DNA, 25 bp, Probe Sequence
gggctccgtttggcaatagcaatct

SEQ ID NO: 257873 - DNA, 25 bp, Probe Sequence
gggccctttgtgtttgaggatgctt

SEQ ID NO: 257874 - DNA, 25 bp, Probe Sequence
gtggacatagattttttgcaggagc

SEQ ID NO: 257875 - DNA, 25 bp, Probe Sequence
gtggcatcaacttttgcccaagagt

SEQ ID NO: 257876 - DNA, 25 bp, Probe Sequence
gtggataacttatatcttcagactg

SEQ ID NO: 257877 - DNA, 25 bp, Probe Sequence
gggtttgcttgacgatttcatgacg

SEQ ID NO: 257878 - DNA, 25 bp, Probe Sequence
gtggcatttcttctgtttcaggttt

SEQ ID NO: 257879 - DNA, 25 bp, Probe Sequence
gtggttttgttctttatcgttggtg

SEQ ID NO: 257880 - DNA, 25 bp, Probe Sequence
gtggctttttatgtgtcttgttggg

SEQ ID NO: 257881 - DNA, 25 bp, Probe Sequence
gggctacattgtaatctgctttgtt

SEQ ID NO: 257882 - DNA, 25 bp, Probe Sequence
gtggcttttgtcaagcacttagatg

SEQ ID NO: 257883 - DNA, 25 bp, Probe Sequence
gtggctcgatttcagatcactgcaa

SEQ ID NO: 257884 - DNA, 25 bp, Probe Sequence
gggctggattctgaagcaatggaga

SEQ ID NO: 257885 - DNA, 25 bp, Probe Sequence
gtggctacttcatcaacaataaaca

SEQ ID NO: 257886 - DNA, 25 bp, Probe Sequence
gtggctttccagagacagtcaggac

SEQ ID NO: 257887 - DNA, 25 bp, Probe Sequence
gggctttccagggaatgaagaagct

SEQ ID NO: 257888 - DNA, 25 bp, Probe Sequence
gggctggcagcccacaaaaaaagcc

SEQ ID NO: 257889 - DNA, 25 bp, Probe Sequence
tatcgttccatgaacgggaaaggcc

SEQ ID NO: 257890 - DNA, 25 bp, Probe Sequence
gtggttccatgaacgaggacaggag

SEQ ID NO: 257891 - DNA, 25 bp, Probe Sequence
gtggatatcactgaaggagatagga

SEQ ID NO: 257892 - DNA, 25 bp, Probe Sequence
gtggatgacttctatgatggaatca

SEQ ID NO: 257893 - DNA, 25 bp, Probe Sequence
gtggagcaccgatgatgtgcagatc

SEQ ID NO: 257894 - DNA, 25 bp, Probe Sequence
gtggctgcaggcgggggtgatcagc

SEQ ID NO: 257895 - DNA, 25 bp, Probe Sequence
gtggctgcaggcgggggtgatcagc

SEQ ID NO: 257896 - DNA, 25 bp, Probe Sequence
gtggatgaagctgtagcagttctac

SEQ ID NO: 257897 - DNA, 25 bp, Probe Sequence
gtggatatgtgtgatagctgatttc

SEQ ID NO: 257898 - DNA, 25 bp, Probe Sequence
gtggataatacattcaggtggtgct

SEQ ID NO: 257899 - DNA, 25 bp, Probe Sequence
gtggaaaacatctcttgtgatcttt

SEQ ID NO: 257900 - DNA, 25 bp, Probe Sequence
gtggaaaaatcaacgtggcctttga

SEQ ID NO: 257901 - DNA, 25 bp, Probe Sequence
gtggaagaaacatcctgtccaccgt

SEQ ID NO: 257902 - DNA, 25 bp, Probe Sequence
gtggaagacaatttccagcggcctc

SEQ ID NO: 257903 - DNA, 25 bp, Probe Sequence
gtggaaatgcacaccagcagggacc

SEQ ID NO: 257904 - DNA, 25 bp, Probe Sequence
gtggaaatttcggaccaggaccagg

SEQ ID NO: 257905 - DNA, 25 bp, Probe Sequence
gtggcaatacatgccaacctgggcc

SEQ ID NO: 257906 - DNA, 25 bp, Probe Sequence
gtggcaaaagctgataagctggctg

SEQ ID NO: 257907 - DNA, 25 bp, Probe Sequence
gtggaacaggatgatcagatttgtg

SEQ ID NO: 257908 - DNA, 25 bp, Probe Sequence
gtggatgacggatgaggactctggg

SEQ ID NO: 257909 - DNA, 25 bp, Probe Sequence
gtggagacaaagtgggctctgggtt

SEQ ID NO: 257910 - DNA, 25 bp, Probe Sequence
gtggagaacaagtgccttcagggct

SEQ ID NO: 257911 - DNA, 25 bp, Probe Sequence
gtggagaaagcactgacctgtcatg

SEQ ID NO: 257912 - DNA, 25 bp, Probe Sequence
gggcttggcagccatgagccttatt

SEQ ID NO: 257913 - DNA, 25 bp, Probe Sequence
gtggcctggatccaggacttcatca

SEQ ID NO: 257914 - DNA, 25 bp, Probe Sequence
gtggcaggggccctgccttcaaacc

SEQ ID NO: 257915 - DNA, 25 bp, Probe Sequence
gtggcaggggtccctatgatccaac

SEQ ID NO: 257916 - DNA, 25 bp, Probe Sequence
gtggcagttggtttaagatccttct

SEQ ID NO: 257917 - DNA, 25 bp, Probe Sequence
gtggagttgatgactttctgttttc

SEQ ID NO: 257918 - DNA, 25 bp, Probe Sequence
gtggaggtagatgagtctttgttcc

SEQ ID NO: 257919 - DNA, 25 bp, Probe Sequence
gtggaggtggacgagtcgggaacca

SEQ ID NO: 257920 - DNA, 25 bp, Probe Sequence
gtggaggtggacgacccactgaagg

SEQ ID NO: 257921 - DNA, 25 bp, Probe Sequence
gtggaagctggacacactatgtgac

SEQ ID NO: 257922 - DNA, 25 bp, Probe Sequence
gtggatttagactagccaaatgaca

SEQ ID NO: 257923 - DNA, 25 bp, Probe Sequence
gtggatgttaaagccaacaagcacc

SEQ ID NO: 257924 - DNA, 25 bp, Probe Sequence
gtggctttaaatgtcacagatgaca

SEQ ID NO: 257925 - DNA, 25 bp, Probe Sequence
gtggctttagacaccacgtggctca

SEQ ID NO: 257926 - DNA, 25 bp, Probe Sequence
gtggccttggacaaaactggtccaa

SEQ ID NO: 257927 - DNA, 25 bp, Probe Sequence
gtggcctatcgcgatgacaagggct

SEQ ID NO: 257928 - DNA, 25 bp, Probe Sequence
gtggcacgatcagcagcactagttg

SEQ ID NO: 257929 - DNA, 25 bp, Probe Sequence
gtggcaatctcagatgcagtttgga

SEQ ID NO: 257930 - DNA, 25 bp, Probe Sequence
gtggttgatgcgggttttggcagta

SEQ ID NO: 257931 - DNA, 25 bp, Probe Sequence
gtggatttcttgctccgattgcaaa

SEQ ID NO: 257932 - DNA, 25 bp, Probe Sequence
gtggcttttagcaatccacttgcat

SEQ ID NO: 257933 - DNA, 25 bp, Probe Sequence
gtggctatgtcttcttaagcctctg

SEQ ID NO: 257934 - DNA, 25 bp, Probe Sequence
gtggctatttttaattgctttggat

SEQ ID NO: 257935 - DNA, 25 bp, Probe Sequence
gggcatcagaatatttccttatggt

SEQ ID NO: 257936 - DNA, 25 bp, Probe Sequence
gtggctgcaggaaatagatcgttat

SEQ ID NO: 257937 - DNA, 25 bp, Probe Sequence
gtggctgagtgaaatcttcctcgtc

SEQ ID NO: 257938 - DNA, 25 bp, Probe Sequence
gtggctgacagttatcttccaaccc

SEQ ID NO: 257939 - DNA, 25 bp, Probe Sequence
gtggctcacacttgtaatcccacca

SEQ ID NO: 257940 - DNA, 25 bp, Probe Sequence
gtggctcagcctataatctcagcac

SEQ ID NO: 257941 - DNA, 25 bp, Probe Sequence
gtggctagggatgtactcatgctca

SEQ ID NO: 257942 - DNA, 25 bp, Probe Sequence
gtggctatggaggcagctccttcta

SEQ ID NO: 257943 - DNA, 25 bp, Probe Sequence
gggccatgagctgactcatgctttt

SEQ ID NO: 257944 - DNA, 25 bp, Probe Sequence
gggctgctggatgacgatgacatag

SEQ ID NO: 257945 - DNA, 25 bp, Probe Sequence
gtggctgctggatcagggcagccgg

SEQ ID NO: 257946 - DNA, 25 bp, Probe Sequence
gtggcagggaaagcagcgtgcgggg

SEQ ID NO: 257947 - DNA, 25 bp, Probe Sequence
gtggctagggaaacctggagcggtc

SEQ ID NO: 257948 - DNA, 25 bp, Probe Sequence
gtggctgaaggcacccaggtgcttg

SEQ ID NO: 257949 - DNA, 25 bp, Probe Sequence
ggcctgaaagttgggaatggttggg

SEQ ID NO: 257950 - DNA, 25 bp, Probe Sequence
gtggctgaacagttcgggtggactg

SEQ ID NO: 257951 - DNA, 25 bp, Probe Sequence
gtggcattacaattagtagtgggca

SEQ ID NO: 257952 - DNA, 25 bp, Probe Sequence
gtggcttcacatttaaaccagtatc

SEQ ID NO: 257953 - DNA, 25 bp, Probe Sequence
gtggctctcttcttaaaagcaccat

SEQ ID NO: 257954 - DNA, 25 bp, Probe Sequence
gggcttcttcgttaatagattattt

SEQ ID NO: 257955 - DNA, 25 bp, Probe Sequence
gggcttcttcgttaatagattattt

SEQ ID NO: 257956 - DNA, 25 bp, Probe Sequence
gggcttcttcgttaatagattattt

SEQ ID NO: 257957 - DNA, 25 bp, Probe Sequence
gtggctgtgtaccagtaaaagttta

SEQ ID NO: 257958 - DNA, 25 bp, Probe Sequence
gtggctgtctaatgtaatcctttaa

SEQ ID NO: 257959 - DNA, 25 bp, Probe Sequence
gtggcaggcacctgtaatctcagct

SEQ ID NO: 257960 - DNA, 25 bp, Probe Sequence
gggcagtgcacctgcaagttagggg

SEQ ID NO: 257961 - DNA, 25 bp, Probe Sequence
gtggatgtccacggggttcagaagg

SEQ ID NO: 257962 - DNA, 25 bp, Probe Sequence
gtggagtaccatggaggtcactgca

SEQ ID NO: 257963 - DNA, 25 bp, Probe Sequence
gtggactcaacggagaggccagcaa

SEQ ID NO: 257964 - DNA, 25 bp, Probe Sequence
gtggactcaacggagaggccagcaa

SEQ ID NO: 257965 - DNA, 25 bp, Probe Sequence
gtggacattacccagaagccacagc

SEQ ID NO: 257966 - DNA, 25 bp, Probe Sequence
gtggatcatcttgtggaagctaatc

SEQ ID NO: 257967 - DNA, 25 bp, Probe Sequence
gtggatgcatcctttgagaactata

SEQ ID NO: 257968 - DNA, 25 bp, Probe Sequence
gtggatcttcacttgtagcacaaat

SEQ ID NO: 257969 - DNA, 25 bp, Probe Sequence
gtggcttcatcaatttatgtgctaa

SEQ ID NO: 257970 - DNA, 25 bp, Probe Sequence
gggccttcactgttcagtgtcacta

SEQ ID NO: 257971 - DNA, 25 bp, Probe Sequence
gtggctatttcatctcactgagcct

SEQ ID NO: 257972 - DNA, 25 bp, Probe Sequence
gggctgatccacaacatgactgccc

SEQ ID NO: 257973 - DNA, 25 bp, Probe Sequence
gtggcagtgccagcactggtgccag

SEQ ID NO: 257974 - DNA, 25 bp, Probe Sequence
gtggaggccgtcaaagtgcacagct

SEQ ID NO: 257975 - DNA, 25 bp, Probe Sequence
gtggaggccgtcaaagtgcacagct

SEQ ID NO: 257976 - DNA, 25 bp, Probe Sequence
gtggaggtcctcaaagagcaaatca

SEQ ID NO: 257977 - DNA, 25 bp, Probe Sequence
gtggaggtgactggcgataaataca

SEQ ID NO: 257978 - DNA, 25 bp, Probe Sequence
gtggctgtggttggctgaaaaaaaa

SEQ ID NO: 257979 - DNA, 25 bp, Probe Sequence
gtggatttttcgcagaacattaata

SEQ ID NO: 257980 - DNA, 25 bp, Probe Sequence
gtggagttttctgtgagaataaagc

SEQ ID NO: 257981 - DNA, 25 bp, Probe Sequence
gtggcacctgttgacggaaaaggcc

SEQ ID NO: 257982 - DNA, 25 bp, Probe Sequence
gtggcagcacgtgtacgagaagaag

SEQ ID NO: 257983 - DNA, 25 bp, Probe Sequence
gtggcaggcagtactctcagaaaaa

SEQ ID NO: 257984 - DNA, 25 bp, Probe Sequence
gtggcatgcgcttgtttaaaaaaac

SEQ ID NO: 257985 - DNA, 25 bp, Probe Sequence
gtggctgtctttccattaaagaaac

SEQ ID NO: 257986 - DNA, 25 bp, Probe Sequence
gggcggcctatagatccaagagaag

SEQ ID NO: 257987 - DNA, 25 bp, Probe Sequence
ggggagcttagatgatcccaaaatg

SEQ ID NO: 257988 - DNA, 25 bp, Probe Sequence
gggtctgttcgaagataccaacctg

SEQ ID NO: 257989 - DNA, 25 bp, Probe Sequence
gtggccgtgggaaagaacaacctgg

SEQ ID NO: 257990 - DNA, 25 bp, Probe Sequence
gggcctgtgggacaagatagccgcg

SEQ ID NO: 257991 - DNA, 25 bp, Probe Sequence
gggcctgtgggacaagatagccgcg

SEQ ID NO: 257992 - DNA, 25 bp, Probe Sequence
gggccggtagttcgagaagctccgg

SEQ ID NO: 257993 - DNA, 25 bp, Probe Sequence
gggccagagtctgtgtggacaaccg

SEQ ID NO: 257994 - DNA, 25 bp, Probe Sequence
ggcatccggtttgaggacaatggca

SEQ ID NO: 257995 - DNA, 25 bp, Probe Sequence
ggtcccagttgctgtcacaaaggag

SEQ ID NO: 257996 - DNA, 25 bp, Probe Sequence
ggtcccagttgctgtcacaaaggag

SEQ ID NO: 257997 - DNA, 25 bp, Probe Sequence
gggctgcaatttggcctaagaaggg

SEQ ID NO: 257998 - DNA, 25 bp, Probe Sequence
gggcgtgatcgtggaggagaagggc

SEQ ID NO: 257999 - DNA, 25 bp, Probe Sequence
gtggctgaaagcgtgatggagaagg

SEQ ID NO: 258000 - DNA, 25 bp, Probe Sequence
gtggcgaaagtcttgttaatgtcat

SEQ ID NO: 258001 - DNA, 25 bp, Probe Sequence
gtggaatcagagccttacttatgta

SEQ ID NO: 258002 - DNA, 25 bp, Probe Sequence
gtggaagcagtgctgtagttactgg

SEQ ID NO: 258003 - DNA, 25 bp, Probe Sequence
gggcggatgatgtttactaacgatg

SEQ ID NO: 258004 - DNA, 25 bp, Probe Sequence
gggcaggcatgcatagctaaaactt

SEQ ID NO: 258005 - DNA, 25 bp, Probe Sequence
gtggaggccgtgtccaaagactttg

SEQ ID NO: 258006 - DNA, 25 bp, Probe Sequence
gtggaggttgtgctgaaaggcaact

SEQ ID NO: 258007 - DNA, 25 bp, Probe Sequence
gtggaggtggtagtagacagtgata

SEQ ID NO: 258008 - DNA, 25 bp, Probe Sequence
gtggaggaggaagagctcagataga

SEQ ID NO: 258009 - DNA, 25 bp, Probe Sequence
gtggaggaagatgcagagtcagaag

SEQ ID NO: 258010 - DNA, 25 bp, Probe Sequence
gtggagagtataacagagtctgaga

SEQ ID NO: 258011 - DNA, 25 bp, Probe Sequence
gtggaatggtgaccagagagtggaa

SEQ ID NO: 258012 - DNA, 25 bp, Probe Sequence
gtggcattgggacatcaggggaaca

SEQ ID NO: 258013 - DNA, 25 bp, Probe Sequence
gtggcaggtgtagtatctggggcga

SEQ ID NO: 258014 - DNA, 25 bp, Probe Sequence
gtggaagtttcaatgcgaggaagca

SEQ ID NO: 258015 - DNA, 25 bp, Probe Sequence
gtggagaagtacactgagctacaga

SEQ ID NO: 258016 - DNA, 25 bp, Probe Sequence
gtggaaattacttaaatagcaggtt

SEQ ID NO: 258017 - DNA, 25 bp, Probe Sequence
tcccaatagtacccaaatcctggtg

SEQ ID NO: 258018 - DNA, 25 bp, Probe Sequence
tcctcaagaccatccgaggcctggt

SEQ ID NO: 258019 - DNA, 25 bp, Probe Sequence
tccatagaagaccccgggaccgatc

SEQ ID NO: 258020 - DNA, 25 bp, Probe Sequence
tccaaaggaccgtccgtgacggccg

SEQ ID NO: 258021 - DNA, 25 bp, Probe Sequence
tccaaaggaccgtccgtgacggccg

SEQ ID NO: 258022 - DNA, 25 bp, Probe Sequence
tccaaaggaccgtccgtgacggccg

SEQ ID NO: 258023 - DNA, 25 bp, Probe Sequence
taataaaaccagactattcaggccc

SEQ ID NO: 258024 - DNA, 25 bp, Probe Sequence
gtggaacccatctctgatgaagact

SEQ ID NO: 258025 - DNA, 25 bp, Probe Sequence
gtggcacatatacaccatggaatac

SEQ ID NO: 258026 - DNA, 25 bp, Probe Sequence
gtggcacatatacaccatggaatac

SEQ ID NO: 258027 - DNA, 25 bp, Probe Sequence
gtggcagcaacaactcacaggactg

SEQ ID NO: 258028 - DNA, 25 bp, Probe Sequence
gtggagacaatccctcaggactagg

SEQ ID NO: 258029 - DNA, 25 bp, Probe Sequence
gtggaggaggcaccaagtgtctcag

SEQ ID NO: 258030 - DNA, 25 bp, Probe Sequence
gggagtaacaccattgtccagtcta

SEQ ID NO: 258031 - DNA, 25 bp, Probe Sequence
ggggaaagccttgttccatgtcaca

SEQ ID NO: 258032 - DNA, 25 bp, Probe Sequence
gtggagaacatgcctggatttccag

SEQ ID NO: 258033 - DNA, 25 bp, Probe Sequence
gtggatgataagtctgcttgattta

SEQ ID NO: 258034 - DNA, 25 bp, Probe Sequence
gtggatgatcaatcctttattatta

SEQ ID NO: 258035 - DNA, 25 bp, Probe Sequence
gtggaacagtcaacctttctagtag

SEQ ID NO: 258036 - DNA, 25 bp, Probe Sequence
gtggaaatgtgatcacttcctctga

SEQ ID NO: 258037 - DNA, 25 bp, Probe Sequence
gtggaacgtacatcctgactctgac

SEQ ID NO: 258038 - DNA, 25 bp, Probe Sequence
gtggaatgtgtaaaagctgaatctg

SEQ ID NO: 258039 - DNA, 25 bp, Probe Sequence
gtggaactgctataatgtgtcattg

SEQ ID NO: 258040 - DNA, 25 bp, Probe Sequence
gtggaacctgaaatattgcctgatg

SEQ ID NO: 258041 - DNA, 25 bp, Probe Sequence
gtggccaccatatgtgtgtgcctag

SEQ ID NO: 258042 - DNA, 25 bp, Probe Sequence
gtggctcacgcctgtaatcccagca

SEQ ID NO: 258043 - DNA, 25 bp, Probe Sequence
gtggcaggagcctgtaatcctagct

SEQ ID NO: 258044 - DNA, 25 bp, Probe Sequence
gtggcaggagcctgtaatcctagct

SEQ ID NO: 258045 - DNA, 25 bp, Probe Sequence
gtggcaacacctttaagtctagctc

SEQ ID NO: 258046 - DNA, 25 bp, Probe Sequence
gtggacataagcattgggccatagt

SEQ ID NO: 258047 - DNA, 25 bp, Probe Sequence
gtggagacaacagtgtgtcccaatg

SEQ ID NO: 258048 - DNA, 25 bp, Probe Sequence
gtggagctcattgctttctccaagc

SEQ ID NO: 258049 - DNA, 25 bp, Probe Sequence
gtggcattataggtgtttccacatg

SEQ ID NO: 258050 - DNA, 25 bp, Probe Sequence
gtggcgcgattgggacagtcgccag

SEQ ID NO: 258051 - DNA, 25 bp, Probe Sequence
gtggcaaatgtggctaccctgccaa

SEQ ID NO: 258052 - DNA, 25 bp, Probe Sequence
gtggcgcttgaggctacaagtccaa

SEQ ID NO: 258053 - DNA, 25 bp, Probe Sequence
gggctgtcatagttaattgaccata

SEQ ID NO: 258054 - DNA, 25 bp, Probe Sequence
gggcttgatacggtttgactcacgg

SEQ ID NO: 258055 - DNA, 25 bp, Probe Sequence
gggctctgcatggcaggttagctca

SEQ ID NO: 258056 - DNA, 25 bp, Probe Sequence
gggcctgaccatggagcataagcaa

SEQ ID NO: 258057 - DNA, 25 bp, Probe Sequence
gtggcctgtactggatgtgaactga

SEQ ID NO: 258058 - DNA, 25 bp, Probe Sequence
tgtggttaactggactgacctaaac

SEQ ID NO: 258059 - DNA, 25 bp, Probe Sequence
gtggcttacactggaaattatgaaa

SEQ ID NO: 258060 - DNA, 25 bp, Probe Sequence
gtggctttctcaggaattttcaata

SEQ ID NO: 258061 - DNA, 25 bp, Probe Sequence
gggtttctgcaccaaatacttaggc

SEQ ID NO: 258062 - DNA, 25 bp, Probe Sequence
gggcctacatacaaaattttatggc

SEQ ID NO: 258063 - DNA, 25 bp, Probe Sequence
gtggcttaagcctaagtctcttcag

SEQ ID NO: 258064 - DNA, 25 bp, Probe Sequence
gtggcttaacaatcagacttcttct

SEQ ID NO: 258065 - DNA, 25 bp, Probe Sequence
gtggactgacaagccaatcatatca

SEQ ID NO: 258066 - DNA, 25 bp, Probe Sequence
gtggcagtgacatgtccacttatgc

SEQ ID NO: 258067 - DNA, 25 bp, Probe Sequence
gtggcagccacatgtggcgttgtga

SEQ ID NO: 258068 - DNA, 25 bp, Probe Sequence
gtggacagcacttagtagctgtgga

SEQ ID NO: 258069 - DNA, 25 bp, Probe Sequence
gtggacagcacttagtagctgtgga

SEQ ID NO: 258070 - DNA, 25 bp, Probe Sequence
gtggacgagcagatgctgagcgtgc

SEQ ID NO: 258071 - DNA, 25 bp, Probe Sequence
gtggacgagcagatgctggccatcc

SEQ ID NO: 258072 - DNA, 25 bp, Probe Sequence
gtggagcagagacttgatggccgcc

SEQ ID NO: 258073 - DNA, 25 bp, Probe Sequence
gtggacatgggatgagacggccttc

SEQ ID NO: 258074 - DNA, 25 bp, Probe Sequence
gggcgcaagaaagtgacggccgtgc

SEQ ID NO: 258075 - DNA, 25 bp, Probe Sequence
gggcgagtggaatgatgttccctgc

SEQ ID NO: 258076 - DNA, 25 bp, Probe Sequence
gggccagtttctggatttctccaca

SEQ ID NO: 258077 - DNA, 25 bp, Probe Sequence
gggccaccagacagatagtccatac

SEQ ID NO: 258078 - DNA, 25 bp, Probe Sequence
gggccctagacaatacgatggaacg

SEQ ID NO: 258079 - DNA, 25 bp, Probe Sequence
gggccctagagcagatgtgcgtccc

SEQ ID NO: 258080 - DNA, 25 bp, Probe Sequence
gggcctctagtgacagatccagaga

SEQ ID NO: 258081 - DNA, 25 bp, Probe Sequence
gtggctcttgtgcaatgaacatcaa

SEQ ID NO: 258082 - DNA, 25 bp, Probe Sequence
gtggcctcgtggttataagcaaggc

SEQ ID NO: 258083 - DNA, 25 bp, Probe Sequence
gtggacttgctttgtgaagagacag

SEQ ID NO: 258084 - DNA, 25 bp, Probe Sequence
gtggcacaatgcataaaagatactc

SEQ ID NO: 258085 - DNA, 25 bp, Probe Sequence
gtggcccatgcaagcaaggagtaat

SEQ ID NO: 258086 - DNA, 25 bp, Probe Sequence
gtggcccatgagttaggtcatacgt

SEQ ID NO: 258087 - DNA, 25 bp, Probe Sequence
gtggctcctgagttgagtgattttg

SEQ ID NO: 258088 - DNA, 25 bp, Probe Sequence
gtggcttgctagtatgtttttatga

SEQ ID NO: 258089 - DNA, 25 bp, Probe Sequence
gtggcttgctagtatgtttttatga

SEQ ID NO: 258090 - DNA, 25 bp, Probe Sequence
gtggcttgctagtatgtttttatga

SEQ ID NO: 258091 - DNA, 25 bp, Probe Sequence
gtggcggctgagaagtgcctttagt

SEQ ID NO: 258092 - DNA, 25 bp, Probe Sequence
gtggctgtcgagaaacctttaatat

SEQ ID NO: 258093 - DNA, 25 bp, Probe Sequence
gtggctgtggagaaagctttaatat

SEQ ID NO: 258094 - DNA, 25 bp, Probe Sequence
gtggccgtgaggaatgtcccaatga

SEQ ID NO: 258095 - DNA, 25 bp, Probe Sequence
gtggacctgcatggacatgcttcca

SEQ ID NO: 258096 - DNA, 25 bp, Probe Sequence
gtggcctctgcagcaacatgatgcc

SEQ ID NO: 258097 - DNA, 25 bp, Probe Sequence
gtggccaggcagaataatgacagtg

SEQ ID NO: 258098 - DNA, 25 bp, Probe Sequence
gggccagtgacaatctgcaaggctg

SEQ ID NO: 258099 - DNA, 25 bp, Probe Sequence
gtggacaggagcactgcacagcagt

SEQ ID NO: 258100 - DNA, 25 bp, Probe Sequence
gtggacacacaggaccactcagtgg

SEQ ID NO: 258101 - DNA, 25 bp, Probe Sequence
gtggaatatgaccctaccagaggtt

SEQ ID NO: 258102 - DNA, 25 bp, Probe Sequence
gtggaatagcagcaaatctacaaga

SEQ ID NO: 258103 - DNA, 25 bp, Probe Sequence
gtggagcttctaaaactggaatgac

SEQ ID NO: 258104 - DNA, 25 bp, Probe Sequence
gtggcccttaaatctgtcacagcct

SEQ ID NO: 258105 - DNA, 25 bp, Probe Sequence
gtggccactgtggatttttcgcaga

SEQ ID NO: 258106 - DNA, 25 bp, Probe Sequence
gtggcgttgagtatttgtgcgcaag

SEQ ID NO: 258107 - DNA, 25 bp, Probe Sequence
gtggcgattgattatgcttgtgtga

SEQ ID NO: 258108 - DNA, 25 bp, Probe Sequence
gtggctgagtatggtgtgtatgtga

SEQ ID NO: 258109 - DNA, 25 bp, Probe Sequence
gtggctgagtatggtgtgtatgtga

SEQ ID NO: 258110 - DNA, 25 bp, Probe Sequence
gtggctgagcaaggattcgtcatca

SEQ ID NO: 258111 - DNA, 25 bp, Probe Sequence
gtggctgacaccgttcgtcaagaat

SEQ ID NO: 258112 - DNA, 25 bp, Probe Sequence
ggggtcaccgtgtctgacaaagtgt

SEQ ID NO: 258113 - DNA, 25 bp, Probe Sequence
gggcctaaggtctgtcaaaggtctt

SEQ ID NO: 258114 - DNA, 25 bp, Probe Sequence
gggcctagggagggctcgaagtcgc

SEQ ID NO: 258115 - DNA, 25 bp, Probe Sequence
gggcgaggaggaaggctccgaatcc

SEQ ID NO: 258116 - DNA, 25 bp, Probe Sequence
gggcgaggaggaaggctccgaatcc

SEQ ID NO: 258117 - DNA, 25 bp, Probe Sequence
gggcgatgaggatgcgtctcgcatg

SEQ ID NO: 258118 - DNA, 25 bp, Probe Sequence
gggcgatgaggatgcgtctcgcatg

SEQ ID NO: 258119 - DNA, 25 bp, Probe Sequence
gtggcagattggtaggcgtgcctgc

SEQ ID NO: 258120 - DNA, 25 bp, Probe Sequence
gtggctgataactatgcctctgccg

SEQ ID NO: 258121 - DNA, 25 bp, Probe Sequence
gtggctgcaaaagctcatgcgctca

SEQ ID NO: 258122 - DNA, 25 bp, Probe Sequence
gtggcagatatctacctagcatctc

SEQ ID NO: 258123 - DNA, 25 bp, Probe Sequence
gtggaatgatgccacctggaccagg

SEQ ID NO: 258124 - DNA, 25 bp, Probe Sequence
gtggacagtcctgcggaaatgtgtc

SEQ ID NO: 258125 - DNA, 25 bp, Probe Sequence
gtggacagtctggccactgtcaagg

SEQ ID NO: 258126 - DNA, 25 bp, Probe Sequence
gtggagacgtgcgggtgtgcagaag

SEQ ID NO: 258127 - DNA, 25 bp, Probe Sequence
gtggaacagttctgtgtggcacaca

SEQ ID NO: 258128 - DNA, 25 bp, Probe Sequence
gtggcaacgtagagcggttccagac

SEQ ID NO: 258129 - DNA, 25 bp, Probe Sequence
gtggcaatggaagactggttacatg

SEQ ID NO: 258130 - DNA, 25 bp, Probe Sequence
gtggactgaaaggactggttgaaag

SEQ ID NO: 258131 - DNA, 25 bp, Probe Sequence
gtggacgacaagcacctattgaaaa

SEQ ID NO: 258132 - DNA, 25 bp, Probe Sequence
gtggctggaaagtactttggaaaat

SEQ ID NO: 258133 - DNA, 25 bp, Probe Sequence
gggctggaaaggttacttcaaaatg

SEQ ID NO: 258134 - DNA, 25 bp, Probe Sequence
gggctgatgttagcaagaccctaaa

SEQ ID NO: 258135 - DNA, 25 bp, Probe Sequence
gggctctgtaagccagaaccttact

SEQ ID NO: 258136 - DNA, 25 bp, Probe Sequence
gtggcctgaatgatagtatttaact

SEQ ID NO: 258137 - DNA, 25 bp, Probe Sequence
gtggccagaatgcggtgatcaaaac

SEQ ID NO: 258138 - DNA, 25 bp, Probe Sequence
gggccagtgagactgaaatcaagaa

SEQ ID NO: 258139 - DNA, 25 bp, Probe Sequence
gtggcgatgtcagcggatgtcacga

SEQ ID NO: 258140 - DNA, 25 bp, Probe Sequence
gtggacagtcaccggatgtcagcac

SEQ ID NO: 258141 - DNA, 25 bp, Probe Sequence
gtggacagccacagcagttgctgca

SEQ ID NO: 258142 - DNA, 25 bp, Probe Sequence
gtggaatactgtggatgtctgtgca

SEQ ID NO: 258143 - DNA, 25 bp, Probe Sequence
gtggaattactggatcatgtggcaa

SEQ ID NO: 258144 - DNA, 25 bp, Probe Sequence
gtggactccactgatgagaggcata

SEQ ID NO: 258145 - DNA, 25 bp, Probe Sequence
gtggactacctgcctgagagggatg

SEQ ID NO: 258146 - DNA, 25 bp, Probe Sequence
gtggactggctcaccgagaagatgc

SEQ ID NO: 258147 - DNA, 25 bp, Probe Sequence
gtggactggctcaccgagaagatgc

SEQ ID NO: 258148 - DNA, 25 bp, Probe Sequence
gtggagctggtccggcggatagaga

SEQ ID NO: 258149 - DNA, 25 bp, Probe Sequence
gggccatggtgggccgcttgaatga

SEQ ID NO: 258150 - DNA, 25 bp, Probe Sequence
gtggcacatgaatgaacgtccagat

SEQ ID NO: 258151 - DNA, 25 bp, Probe Sequence
gtggcactgttctaatcattcacca

SEQ ID NO: 258152 - DNA, 25 bp, Probe Sequence
gggcatctctattagatctttaggg

SEQ ID NO: 258153 - DNA, 25 bp, Probe Sequence
ggcttttagtaatctacatgggtaa

SEQ ID NO: 258154 - DNA, 25 bp, Probe Sequence
ggtctttagccatgcacaaacggta

SEQ ID NO: 258155 - DNA, 25 bp, Probe Sequence
ggtctttagccatgcacaaacggta

SEQ ID NO: 258156 - DNA, 25 bp, Probe Sequence
ggtctttagccatgcacaaacggta

SEQ ID NO: 258157 - DNA, 25 bp, Probe Sequence
gggcatttcctagactgtacggtca

SEQ ID NO: 258158 - DNA, 25 bp, Probe Sequence
gggcgttcactgaagacttccaggg

SEQ ID NO: 258159 - DNA, 25 bp, Probe Sequence
gggctgtaacgtggcactggtaggt

SEQ ID NO: 258160 - DNA, 25 bp, Probe Sequence
gggctgtgggtttcagcttgaaggt

SEQ ID NO: 258161 - DNA, 25 bp, Probe Sequence
gtggcgacggataaggcctgaactg

SEQ ID NO: 258162 - DNA, 25 bp, Probe Sequence
gtggctgccgtgtaagagtggaact

SEQ ID NO: 258163 - DNA, 25 bp, Probe Sequence
tggcgtgctcttcattggggccaat

SEQ ID NO: 258164 - DNA, 25 bp, Probe Sequence
gtggctacctgcattggggccactt

SEQ ID NO: 258165 - DNA, 25 bp, Probe Sequence
gtggctatactggttgcctgggcaa

SEQ ID NO: 258166 - DNA, 25 bp, Probe Sequence
gtggctatcctgctgaagcttggaa

SEQ ID NO: 258167 - DNA, 25 bp, Probe Sequence
gtggctgatcggcatggagctggtc

SEQ ID NO: 258168 - DNA, 25 bp, Probe Sequence
gtggctggatgaattggaggagatg

SEQ ID NO: 258169 - DNA, 25 bp, Probe Sequence
gtggcaggtggttatgacgagagag

SEQ ID NO: 258170 - DNA, 25 bp, Probe Sequence
gggctttggtattgactgagtggct

SEQ ID NO: 258171 - DNA, 25 bp, Probe Sequence
gggctgtatttgtgcactaaatctt

SEQ ID NO: 258172 - DNA, 25 bp, Probe Sequence
gggtcgtctatgtgtcatatggttt

SEQ ID NO: 258173 - DNA, 25 bp, Probe Sequence
gtggccttcaactggatcattgttc

SEQ ID NO: 258174 - DNA, 25 bp, Probe Sequence
gggcttacactatgatgtttgagtc

SEQ ID NO: 258175 - DNA, 25 bp, Probe Sequence
gggcttcacttgtaaggttagactt

SEQ ID NO: 258176 - DNA, 25 bp, Probe Sequence
ggcccaatgctttaaccttaagctg

SEQ ID NO: 258177 - DNA, 25 bp, Probe Sequence
gtggcacagatcagaaaacttacag

SEQ ID NO: 258178 - DNA, 25 bp, Probe Sequence
gtggacatacggaaagactgtgact

SEQ ID NO: 258179 - DNA, 25 bp, Probe Sequence
gtggaaccggacatcaaggatctgg

SEQ ID NO: 258180 - DNA, 25 bp, Probe Sequence
gtggaatccgaagtcctgggactgc

SEQ ID NO: 258181 - DNA, 25 bp, Probe Sequence
gtggaatcccaaatgttgaaggtgc

SEQ ID NO: 258182 - DNA, 25 bp, Probe Sequence
gtggaattccaacttgaaggattgc

SEQ ID NO: 258183 - DNA, 25 bp, Probe Sequence
gtggaatttatgtgcaagaggttgc

SEQ ID NO: 258184 - DNA, 25 bp, Probe Sequence
gtggaatgttaataaatttcagttt

SEQ ID NO: 258185 - DNA, 25 bp, Probe Sequence
gtggaagactaaccaagatttggac

SEQ ID NO: 258186 - DNA, 25 bp, Probe Sequence
gggaaactactggcgtattttgagc

SEQ ID NO: 258187 - DNA, 25 bp, Probe Sequence
gtggaaactggggcttatgctgctg

SEQ ID NO: 258188 - DNA, 25 bp, Probe Sequence
gtggcaagacaactggctttggcat

SEQ ID NO: 258189 - DNA, 25 bp, Probe Sequence
gtggaagacaagatgctctcgacag

SEQ ID NO: 258190 - DNA, 25 bp, Probe Sequence
gtggaagacaagatgctctcgacag

SEQ ID NO: 258191 - DNA, 25 bp, Probe Sequence
gtggaaccagtgatgcctcaaagac

SEQ ID NO: 258192 - DNA, 25 bp, Probe Sequence
gtggaaatcagtgggcctgctatta

SEQ ID NO: 258193 - DNA, 25 bp, Probe Sequence
gtggacaatcagtgtagtgtttaca

SEQ ID NO: 258194 - DNA, 25 bp, Probe Sequence
gtggcacgtgacagctagggttcaa

SEQ ID NO: 258195 - DNA, 25 bp, Probe Sequence
gggccctgcactcatgagggcttcc

SEQ ID NO: 258196 - DNA, 25 bp, Probe Sequence
gggcctctctcaaggatgaggtttt

SEQ ID NO: 258197 - DNA, 25 bp, Probe Sequence
gggccatattagcagcggttattcg

SEQ ID NO: 258198 - DNA, 25 bp, Probe Sequence
gggccatgattatcgcagaacgaca

SEQ ID NO: 258199 - DNA, 25 bp, Probe Sequence
ggaactgaacaagaactcgaacccg

SEQ ID NO: 258200 - DNA, 25 bp, Probe Sequence
gtggccgacgaagaactcgtgcact

SEQ ID NO: 258201 - DNA, 25 bp, Probe Sequence
gtggcctgccggataagccaggagt

SEQ ID NO: 258202 - DNA, 25 bp, Probe Sequence
gtggctcgagccattaaccagaagc

SEQ ID NO: 258203 - DNA, 25 bp, Probe Sequence
gtggccgaggttaaacggaatcaca

SEQ ID NO: 258204 - DNA, 25 bp, Probe Sequence
gtggccgaggttgacaaggtcacag

SEQ ID NO: 258205 - DNA, 25 bp, Probe Sequence
gtggctcaagggagtcaccttcaat

SEQ ID NO: 258206 - DNA, 25 bp, Probe Sequence
gtggcttcagggagtgttcccaggg

SEQ ID NO: 258207 - DNA, 25 bp, Probe Sequence
gtggcaaaggccgggtgttggccgg

SEQ ID NO: 258208 - DNA, 25 bp, Probe Sequence
gggcagtaactcgtggtgttgccat

SEQ ID NO: 258209 - DNA, 25 bp, Probe Sequence
gggcagtaacattgggtcctgggtc

SEQ ID NO: 258210 - DNA, 25 bp, Probe Sequence
gtggcactaatctggtgtcactctc

SEQ ID NO: 258211 - DNA, 25 bp, Probe Sequence
gtggcacaacatgaagctccctgtg

SEQ ID NO: 258212 - DNA, 25 bp, Probe Sequence
gggcagcaagcatctatgctgccag

SEQ ID NO: 258213 - DNA, 25 bp, Probe Sequence
gtggcaaagcatttatatcatcctc

SEQ ID NO: 258214 - DNA, 25 bp, Probe Sequence
gtggcaggagcatctacacagcttg

SEQ ID NO: 258215 - DNA, 25 bp, Probe Sequence
gtggcagctgccaacaagaagcatt

SEQ ID NO: 258216 - DNA, 25 bp, Probe Sequence
gtggcactgagaccacagcaaacac

SEQ ID NO: 258217 - DNA, 25 bp, Probe Sequence
gggccagatgcaccggcagaaagca

SEQ ID NO: 258218 - DNA, 25 bp, Probe Sequence
gtggccgccaggggcagataatcta

SEQ ID NO: 258219 - DNA, 25 bp, Probe Sequence
gggctccctggtggacaatattcag

SEQ ID NO: 258220 - DNA, 25 bp, Probe Sequence
gggcccctgaggagcaatatgatcc

SEQ ID NO: 258221 - DNA, 25 bp, Probe Sequence
gggccactttggagagacagaatct

SEQ ID NO: 258222 - DNA, 25 bp, Probe Sequence
gtggcccttttgtgggcagcaaatt

SEQ ID NO: 258223 - DNA, 25 bp, Probe Sequence
gtggcccatttcattgaccaaactt

SEQ ID NO: 258224 - DNA, 25 bp, Probe Sequence
gtggcatcatttattgtgatcgaaa

SEQ ID NO: 258225 - DNA, 25 bp, Probe Sequence
gtggacatcctcatcatggatgatg

SEQ ID NO: 258226 - DNA, 25 bp, Probe Sequence
gtggcctctctggctatggatgtgt

SEQ ID NO: 258227 - DNA, 25 bp, Probe Sequence
gggctctctgatgggcagaggtcta

SEQ ID NO: 258228 - DNA, 25 bp, Probe Sequence
gtggcatctctggaagagcagggtg

SEQ ID NO: 258229 - DNA, 25 bp, Probe Sequence
gtggctccgtgaagtcagaggagga

SEQ ID NO: 258230 - DNA, 25 bp, Probe Sequence
gtggcttcggggtcatggaggagaa

SEQ ID NO: 258231 - DNA, 25 bp, Probe Sequence
gtggcctgagggctgtcgagtgagc

SEQ ID NO: 258232 - DNA, 25 bp, Probe Sequence
gtggcttagaggtgtctgcctatgc

SEQ ID NO: 258233 - DNA, 25 bp, Probe Sequence
gtggcttcatggataatcccttccg

SEQ ID NO: 258234 - DNA, 25 bp, Probe Sequence
gtggcttcatggataatcccttccg

SEQ ID NO: 258235 - DNA, 25 bp, Probe Sequence
gtggcttcaggagaacctgctggct

SEQ ID NO: 258236 - DNA, 25 bp, Probe Sequence
gtggaatggaaaaatctctcttgct

SEQ ID NO: 258237 - DNA, 25 bp, Probe Sequence
gtggaaggatcctcatccacatcct

SEQ ID NO: 258238 - DNA, 25 bp, Probe Sequence
gtggaaggactcatgaccacagtcc

SEQ ID NO: 258239 - DNA, 25 bp, Probe Sequence
gtggaaggatctactgataggcagg

SEQ ID NO: 258240 - DNA, 25 bp, Probe Sequence
gtggcagaggttgcagtgagctgag

SEQ ID NO: 258241 - DNA, 25 bp, Probe Sequence
gtggctgatggcaccatgtgtggtc

SEQ ID NO: 258242 - DNA, 25 bp, Probe Sequence
gtggctgtcagtggacatggggagc

SEQ ID NO: 258243 - DNA, 25 bp, Probe Sequence
gtggctgtagatgaactgagcaggc

SEQ ID NO: 258244 - DNA, 25 bp, Probe Sequence
gtggcagcgaagaagactgagcccc

SEQ ID NO: 258245 - DNA, 25 bp, Probe Sequence
gtggcagcgaagaagactgagcccc

SEQ ID NO: 258246 - DNA, 25 bp, Probe Sequence
gtggacaaaggaacaagcccccaga

SEQ ID NO: 258247 - DNA, 25 bp, Probe Sequence
gtggcacaacagtatgccaccccac

SEQ ID NO: 258248 - DNA, 25 bp, Probe Sequence
gtggaagacatatctcacctcaact

SEQ ID NO: 258249 - DNA, 25 bp, Probe Sequence
gtggaatgagaaaccaatgtcaaca

SEQ ID NO: 258250 - DNA, 25 bp, Probe Sequence
gtggaaagaaccggcatgctaaggc

SEQ ID NO: 258251 - DNA, 25 bp, Probe Sequence
gtggcataaatactgcggcagcatt

SEQ ID NO: 258252 - DNA, 25 bp, Probe Sequence
gggcggaatacattcacacagtaac

SEQ ID NO: 258253 - DNA, 25 bp, Probe Sequence
gggctggaacaagtaccagggccac

SEQ ID NO: 258254 - DNA, 25 bp, Probe Sequence
gtggctggaacaatacacccaggcc

SEQ ID NO: 258255 - DNA, 25 bp, Probe Sequence
gtggctgtgaattctttatccctgg

SEQ ID NO: 258256 - DNA, 25 bp, Probe Sequence
gtggcataaggtgatgttccctgtg

SEQ ID NO: 258257 - DNA, 25 bp, Probe Sequence
gtggcaggaggttttggactcgatg

SEQ ID NO: 258258 - DNA, 25 bp, Probe Sequence
gggctgtgggttccagaactctata

SEQ ID NO: 258259 - DNA, 25 bp, Probe Sequence
gtggctgaggagacttaaactttac

SEQ ID NO: 258260 - DNA, 25 bp, Probe Sequence
gtggctactttcttaaactacatga

SEQ ID NO: 258261 - DNA, 25 bp, Probe Sequence
gtggcttaagctttgaaaccacaga

SEQ ID NO: 258262 - DNA, 25 bp, Probe Sequence
gggctatgaagttatttacctcaca

SEQ ID NO: 258263 - DNA, 25 bp, Probe Sequence
gggctaaactgatttccttgccaac

SEQ ID NO: 258264 - DNA, 25 bp, Probe Sequence
gtggaaagactgaggcttctgccta

SEQ ID NO: 258265 - DNA, 25 bp, Probe Sequence
gtggcatcagaagtgattggttccc

SEQ ID NO: 258266 - DNA, 25 bp, Probe Sequence
gtggcacagctcagtatggagtcac

SEQ ID NO: 258267 - DNA, 25 bp, Probe Sequence
gtggccagctacaacatgggcagca

SEQ ID NO: 258268 - DNA, 25 bp, Probe Sequence
gtggctgcagtagcatagaggcgcc

SEQ ID NO: 258269 - DNA, 25 bp, Probe Sequence
gtggccagtaccaagagtcggtggg

SEQ ID NO: 258270 - DNA, 25 bp, Probe Sequence
gtggcaagggccaaggccggtggga

SEQ ID NO: 258271 - DNA, 25 bp, Probe Sequence
gtggaatgggtcttttcggtggaga

SEQ ID NO: 258272 - DNA, 25 bp, Probe Sequence
tgggaggggtttgtgggtgaactcg

SEQ ID NO: 258273 - DNA, 25 bp, Probe Sequence
gggagggagctctgtgggttaactc

SEQ ID NO: 258274 - DNA, 25 bp, Probe Sequence
gggcgtggattatgcgggtttgact

SEQ ID NO: 258275 - DNA, 25 bp, Probe Sequence
gtggctgagttccacacggagttgg

SEQ ID NO: 258276 - DNA, 25 bp, Probe Sequence
gggcgagttcgaggaggaggcggag

SEQ ID NO: 258277 - DNA, 25 bp, Probe Sequence
gggccactatgccactgaggggaac

SEQ ID NO: 258278 - DNA, 25 bp, Probe Sequence
gggctgtctagtatgcgggagaaaa

SEQ ID NO: 258279 - DNA, 25 bp, Probe Sequence
ggagttcggtaaagggcatagctaa

SEQ ID NO: 258280 - DNA, 25 bp, Probe Sequence
gggtcgggtaggaaggtatgctgca

SEQ ID NO: 258281 - DNA, 25 bp, Probe Sequence
gggcccgttgaggatgaggccgcta

SEQ ID NO: 258282 - DNA, 25 bp, Probe Sequence
gggcctcgaagggtgtggcacaggc

SEQ ID NO: 258283 - DNA, 25 bp, Probe Sequence
gggcgtggaagggcattaggagtgt

SEQ ID NO: 258284 - DNA, 25 bp, Probe Sequence
gggcgggagagctcattgaggatga

SEQ ID NO: 258285 - DNA, 25 bp, Probe Sequence
gtggccaagaggtgcttgaggtcaa

SEQ ID NO: 258286 - DNA, 25 bp, Probe Sequence
gtggccacgcagtatggctgggtgc

SEQ ID NO: 258287 - DNA, 25 bp, Probe Sequence
gggcagcacaggctgccgggtggtg

SEQ ID NO: 258288 - DNA, 25 bp, Probe Sequence
gggccaaaggctgcgaggttgtggt

SEQ ID NO: 258289 - DNA, 25 bp, Probe Sequence
gggccagaagtgcggaatgttgtgt

SEQ ID NO: 258290 - DNA, 25 bp, Probe Sequence
gggccagtgagtttgggagtgctga

SEQ ID NO: 258291 - DNA, 25 bp, Probe Sequence
gtggcacttatttctgggaccatgt

SEQ ID NO: 258292 - DNA, 25 bp, Probe Sequence
gtggcctatatcaatgtggaaacaa

SEQ ID NO: 258293 - DNA, 25 bp, Probe Sequence
gtggaatataaactgtacacataat

SEQ ID NO: 258294 - DNA, 25 bp, Probe Sequence
gtggaatttgaggttaacatcgtgg

SEQ ID NO: 258295 - DNA, 25 bp, Probe Sequence
gggaatttagttaagtgccaggtgg

SEQ ID NO: 258296 - DNA, 25 bp, Probe Sequence
gggaattctcactggggcgaaggag

SEQ ID NO: 258297 - DNA, 25 bp, Probe Sequence
gggccttggctctgagttggaaaag

SEQ ID NO: 258298 - DNA, 25 bp, Probe Sequence
gggagctttcttgggttgtaaagag

SEQ ID NO: 258299 - DNA, 25 bp, Probe Sequence
gggagttttgtggttcatgatatac

SEQ ID NO: 258300 - DNA, 25 bp, Probe Sequence
gggtgtttgttagtctcaaaactgt

SEQ ID NO: 258301 - DNA, 25 bp, Probe Sequence
gagaagtttgccccaattaagcgtg

SEQ ID NO: 258302 - DNA, 25 bp, Probe Sequence
ggtggttttcagtttagctacggca

SEQ ID NO: 258303 - DNA, 25 bp, Probe Sequence
gggccgttactgattgagctacgag

SEQ ID NO: 258304 - DNA, 25 bp, Probe Sequence
gtggcacaggctacgtgttgagcgt

SEQ ID NO: 258305 - DNA, 25 bp, Probe Sequence
gtggaagtcaccattgcagatgctt

SEQ ID NO: 258306 - DNA, 25 bp, Probe Sequence
gtggcaagtccctttgtgacttcaa

SEQ ID NO: 258307 - DNA, 25 bp, Probe Sequence
gtggcaagtccatctatggggagaa

SEQ ID NO: 258308 - DNA, 25 bp, Probe Sequence
gtggctagaccaaccagtgggaaac

SEQ ID NO: 258309 - DNA, 25 bp, Probe Sequence
gggctgacttcaatccatgtaggaa

SEQ ID NO: 258310 - DNA, 25 bp, Probe Sequence
gggctgatgcagaaactcttcggaa

SEQ ID NO: 258311 - DNA, 25 bp, Probe Sequence
gggcatctgccttactgattaaaat

SEQ ID NO: 258312 - DNA, 25 bp, Probe Sequence
gggcttcctttggtatcaaagtact

SEQ ID NO: 258313 - DNA, 25 bp, Probe Sequence
gggctaactttgctgctaggagttc

SEQ ID NO: 258314 - DNA, 25 bp, Probe Sequence
gggctcaacttctatggtatggact

SEQ ID NO: 258315 - DNA, 25 bp, Probe Sequence
gggccagcttccttggtatagagca

SEQ ID NO: 258316 - DNA, 25 bp, Probe Sequence
gggccacttctctgatgtcagatgc

SEQ ID NO: 258317 - DNA, 25 bp, Probe Sequence
gtggccactatttctagtcaatttc

SEQ ID NO: 258318 - DNA, 25 bp, Probe Sequence
gtggccaccactgtttagaatgacc

SEQ ID NO: 258319 - DNA, 25 bp, Probe Sequence
gtggaatctcctccgaaatgaatga

SEQ ID NO: 258320 - DNA, 25 bp, Probe Sequence
gtggaatgcccagccagttaagcac

SEQ ID NO: 258321 - DNA, 25 bp, Probe Sequence
gggaaatgccgcccatttaagtaca

SEQ ID NO: 258322 - DNA, 25 bp, Probe Sequence
gggcaactcaggattttaagttcca

SEQ ID NO: 258323 - DNA, 25 bp, Probe Sequence
gtggcaggccatatttaacaagttc

SEQ ID NO: 258324 - DNA, 25 bp, Probe Sequence
gtggcagacaaatgtgtgaatcctg

SEQ ID NO: 258325 - DNA, 25 bp, Probe Sequence
gtggcagaacgatctgggcacacat

SEQ ID NO: 258326 - DNA, 25 bp, Probe Sequence
gtggcagagagctcactgggactga

SEQ ID NO: 258327 - DNA, 25 bp, Probe Sequence
gtggcagagagctcactgggactga

SEQ ID NO: 258328 - DNA, 25 bp, Probe Sequence
gtggcaagcactgatcagtggagtg

SEQ ID NO: 258329 - DNA, 25 bp, Probe Sequence
gtggcgagcctggatgcagaagtcg

SEQ ID NO: 258330 - DNA, 25 bp, Probe Sequence
gtggcagtgttaatgagaaatcaga

SEQ ID NO: 258331 - DNA, 25 bp, Probe Sequence
gtggctgacattatataagatgcga

SEQ ID NO: 258332 - DNA, 25 bp, Probe Sequence
gtggcttgtgagataagcagtgctg

SEQ ID NO: 258333 - DNA, 25 bp, Probe Sequence
gtggcatctgaggtgtacaaggctg

SEQ ID NO: 258334 - DNA, 25 bp, Probe Sequence
gggaatggtctgtcacaatctgctc

SEQ ID NO: 258335 - DNA, 25 bp, Probe Sequence
gggctaggtagttcaatcctctgtc

SEQ ID NO: 258336 - DNA, 25 bp, Probe Sequence
ggtagggtagtgtcaaactgctttg

SEQ ID NO: 258337 - DNA, 25 bp, Probe Sequence
ggaacggaagttcaatttgtctgtt

SEQ ID NO: 258338 - DNA, 25 bp, Probe Sequence
gggactggggttgagttctgtctgg

SEQ ID NO: 258339 - DNA, 25 bp, Probe Sequence
gggactggggtttcggattgagttg

SEQ ID NO: 258340 - DNA, 25 bp, Probe Sequence
gggcccaggagtttgaggttgcagt

SEQ ID NO: 258341 - DNA, 25 bp, Probe Sequence
gtggcccggagtcagtgggtgaggt

SEQ ID NO: 258342 - DNA, 25 bp, Probe Sequence
gtggcccggagtcagtgggtgaggt

SEQ ID NO: 258343 - DNA, 25 bp, Probe Sequence
gtggccctctggacaagtggcgggc

SEQ ID NO: 258344 - DNA, 25 bp, Probe Sequence
gggcccctggtgtgtggcaaaggcc

SEQ ID NO: 258345 - DNA, 25 bp, Probe Sequence
ggtgcccgagggcaggaacgtgacc

SEQ ID NO: 258346 - DNA, 25 bp, Probe Sequence
gggcccagaggaaaccagggtgaca

SEQ ID NO: 258347 - DNA, 25 bp, Probe Sequence
gggacccaaaactcagagtgtggag

SEQ ID NO: 258348 - DNA, 25 bp, Probe Sequence
gggcccctaggtagacagacttggg

SEQ ID NO: 258349 - DNA, 25 bp, Probe Sequence
gggcccctgggattagccaggtggg

SEQ ID NO: 258350 - DNA, 25 bp, Probe Sequence
gtggctccctcggaatgctaagggg

SEQ ID NO: 258351 - DNA, 25 bp, Probe Sequence
gggcccacttgtctgtaatggtgtg

SEQ ID NO: 258352 - DNA, 25 bp, Probe Sequence
gggcccacgaggactgtgatgagga

SEQ ID NO: 258353 - DNA, 25 bp, Probe Sequence
gggcccaccagagctgtggagaggg

SEQ ID NO: 258354 - DNA, 25 bp, Probe Sequence
ggaccttgtgcctcctgtgggaggc

SEQ ID NO: 258355 - DNA, 25 bp, Probe Sequence
ggaccttgtgcctcctgtgggaggc

SEQ ID NO: 258356 - DNA, 25 bp, Probe Sequence
ggaccttgtgcctcctgtgggaggc

SEQ ID NO: 258357 - DNA, 25 bp, Probe Sequence
ggaccttcgtctccctgagggagac

SEQ ID NO: 258358 - DNA, 25 bp, Probe Sequence
gggcacctggttctgaagggagaag

SEQ ID NO: 258359 - DNA, 25 bp, Probe Sequence
gggccactctctactggtaggaaga

SEQ ID NO: 258360 - DNA, 25 bp, Probe Sequence
gggctgccctgtacggcaaagaatg

SEQ ID NO: 258361 - DNA, 25 bp, Probe Sequence
gggccattggttgggttcaattgcc

SEQ ID NO: 258362 - DNA, 25 bp, Probe Sequence
gggctttgtgacagtctctaattcc

SEQ ID NO: 258363 - DNA, 25 bp, Probe Sequence
gtggctacgtgatttgagcttcaaa

SEQ ID NO: 258364 - DNA, 25 bp, Probe Sequence
gtggctacgtgagcgcctacaagaa

SEQ ID NO: 258365 - DNA, 25 bp, Probe Sequence
gtggctactgtgttggcccagtaga

SEQ ID NO: 258366 - DNA, 25 bp, Probe Sequence
gtggccattcattctggcttcaaac

SEQ ID NO: 258367 - DNA, 25 bp, Probe Sequence
gggctctgctatttgtttgcagaac

SEQ ID NO: 258368 - DNA, 25 bp, Probe Sequence
gtggctcgctttgatgctggagaac

SEQ ID NO: 258369 - DNA, 25 bp, Probe Sequence
gtggctcagcatccaaatccgataa

SEQ ID NO: 258370 - DNA, 25 bp, Probe Sequence
gtggcatggcagcaaatgccaacat

SEQ ID NO: 258371 - DNA, 25 bp, Probe Sequence
gtggcatgcggggatggccatcact

SEQ ID NO: 258372 - DNA, 25 bp, Probe Sequence
gtggccgtgatggatagcgacacca

SEQ ID NO: 258373 - DNA, 25 bp, Probe Sequence
gggccgtatgtaacagctgaccaac

SEQ ID NO: 258374 - DNA, 25 bp, Probe Sequence
gggccgtatgtaacagctgaccaac

SEQ ID NO: 258375 - DNA, 25 bp, Probe Sequence
gtggctccagatcaaagcggccaag

SEQ ID NO: 258376 - DNA, 25 bp, Probe Sequence
gtggctctcagacgaagaggcgaga

SEQ ID NO: 258377 - DNA, 25 bp, Probe Sequence
gggcctccagcgaggcctgagaagg

SEQ ID NO: 258378 - DNA, 25 bp, Probe Sequence
gggcctacgccgtagacaacacagg

SEQ ID NO: 258379 - DNA, 25 bp, Probe Sequence
ggtccatttgggtgacaaccagtga

SEQ ID NO: 258380 - DNA, 25 bp, Probe Sequence
gggcttgtagggggagagaccagga

SEQ ID NO: 258381 - DNA, 25 bp, Probe Sequence
gggctgttcagaagcttagaggtca

SEQ ID NO: 258382 - DNA, 25 bp, Probe Sequence
gggctgttcatctacttcaggaatc

SEQ ID NO: 258383 - DNA, 25 bp, Probe Sequence
gggctgttcatctacttcaggaatc

SEQ ID NO: 258384 - DNA, 25 bp, Probe Sequence
gggctgttcatctacttcaggaatc

SEQ ID NO: 258385 - DNA, 25 bp, Probe Sequence
gtggcatgtcacaaacttcagcaac

SEQ ID NO: 258386 - DNA, 25 bp, Probe Sequence
gtggcatacatcatcaggtcgcacg

SEQ ID NO: 258387 - DNA, 25 bp, Probe Sequence
gtggcatccatttctgatgtatgca

SEQ ID NO: 258388 - DNA, 25 bp, Probe Sequence
gtggctgcagctgactatgtattcc

SEQ ID NO: 258389 - DNA, 25 bp, Probe Sequence
gtggctgcagcagagttagctgtct

SEQ ID NO: 258390 - DNA, 25 bp, Probe Sequence
gtggcgcagatgcagctgaagtact

SEQ ID NO: 258391 - DNA, 25 bp, Probe Sequence
gtggctcgagcccataatgtaccag

SEQ ID NO: 258392 - DNA, 25 bp, Probe Sequence
gtggcgtgaggccaagctggaccac

SEQ ID NO: 258393 - DNA, 25 bp, Probe Sequence
gggctgtgtgaccacagctgggccc

SEQ ID NO: 258394 - DNA, 25 bp, Probe Sequence
gtggctcagtgacacggagacatcc

SEQ ID NO: 258395 - DNA, 25 bp, Probe Sequence
gtggcaggtgactaaagcagactct

SEQ ID NO: 258396 - DNA, 25 bp, Probe Sequence
gggtggatgatctgaagcagctgca

SEQ ID NO: 258397 - DNA, 25 bp, Probe Sequence
gggcgacatgtcagcagtcaatgat

SEQ ID NO: 258398 - DNA, 25 bp, Probe Sequence
gtggcatgacatctgggtcatctgt

SEQ ID NO: 258399 - DNA, 25 bp, Probe Sequence
gggctacatctgtgtatactgtcct

SEQ ID NO: 258400 - DNA, 25 bp, Probe Sequence
gggctgacaaacgtacatggttctt

SEQ ID NO: 258401 - DNA, 25 bp, Probe Sequence
gggcttcaaacagacatggggaggc

SEQ ID NO: 258402 - DNA, 25 bp, Probe Sequence
gggcttacaacagccagacgggcca

SEQ ID NO: 258403 - DNA, 25 bp, Probe Sequence
gggctaaaaaccatgcactctggaa

SEQ ID NO: 258404 - DNA, 25 bp, Probe Sequence
gggtaaagaactatgttgactggat

SEQ ID NO: 258405 - DNA, 25 bp, Probe Sequence
gggaaggcaaacggggtgcctgtgt

SEQ ID NO: 258406 - DNA, 25 bp, Probe Sequence
gggaagtacaatcaggtttggtgtc

SEQ ID NO: 258407 - DNA, 25 bp, Probe Sequence
gggaatgttaatctagtttctttag

SEQ ID NO: 258408 - DNA, 25 bp, Probe Sequence
ggtaagttacagcttgttttttgag

SEQ ID NO: 258409 - DNA, 25 bp, Probe Sequence
gggcaagttagcactttattcccgc

SEQ ID NO: 258410 - DNA, 25 bp, Probe Sequence
gggcaaaatacgatttcatttaaca

SEQ ID NO: 258411 - DNA, 25 bp, Probe Sequence
ggcctaagatagggtttcatttatt

SEQ ID NO: 258412 - DNA, 25 bp, Probe Sequence
gggctagggcaggttttctgttttg

SEQ ID NO: 258413 - DNA, 25 bp, Probe Sequence
gggctatgggagatttcttgttttc

SEQ ID NO: 258414 - DNA, 25 bp, Probe Sequence
gtggctgttggagtttagtttttat

SEQ ID NO: 258415 - DNA, 25 bp, Probe Sequence
gggctgattgtgctttatgaatctg

SEQ ID NO: 258416 - DNA, 25 bp, Probe Sequence
gggctgtgtggacctaattgactgc

SEQ ID NO: 258417 - DNA, 25 bp, Probe Sequence
gggctttgtgtacagaggtccgggt

SEQ ID NO: 258418 - DNA, 25 bp, Probe Sequence
gggcatttgatgcgggaggtgggtg

SEQ ID NO: 258419 - DNA, 25 bp, Probe Sequence
gggccttgtgccagttgaagaggtg

SEQ ID NO: 258420 - DNA, 25 bp, Probe Sequence
gggcctttgccaggggagctaaggt

SEQ ID NO: 258421 - DNA, 25 bp, Probe Sequence
gggcctttacagcaggacgtgaagc

SEQ ID NO: 258422 - DNA, 25 bp, Probe Sequence
gggcttttcaacagagcacagctgc

SEQ ID NO: 258423 - DNA, 25 bp, Probe Sequence
gggcggtgatcatctctgacaacgc

SEQ ID NO: 258424 - DNA, 25 bp, Probe Sequence
gggcgtgatagcggtctgacttcac

SEQ ID NO: 258425 - DNA, 25 bp, Probe Sequence
gggcatggccacatgttacatgtac

SEQ ID NO: 258426 - DNA, 25 bp, Probe Sequence
gggcaggacatcaagtgtatcatat

SEQ ID NO: 258427 - DNA, 25 bp, Probe Sequence
gtggcatgggcaatagtatataacc

SEQ ID NO: 258428 - DNA, 25 bp, Probe Sequence
gggctgctgaaaagctagagaaatc

SEQ ID NO: 258429 - DNA, 25 bp, Probe Sequence
gggctgaggaacctctggcaaatcc

SEQ ID NO: 258430 - DNA, 25 bp, Probe Sequence
gggcggagatatccttatgccaccc

SEQ ID NO: 258431 - DNA, 25 bp, Probe Sequence
gggccaagtattttatccacatcag

SEQ ID NO: 258432 - DNA, 25 bp, Probe Sequence
gtggccgaggactttgattgcacat

SEQ ID NO: 258433 - DNA, 25 bp, Probe Sequence
gtggctcttgtaggagtgatgtcac

SEQ ID NO: 258434 - DNA, 25 bp, Probe Sequence
gtggctagtgtgtggatcagaaccc

SEQ ID NO: 258435 - DNA, 25 bp, Probe Sequence
gtggctgcgttcatggtagaaccaa

SEQ ID NO: 258436 - DNA, 25 bp, Probe Sequence
gtggctggtgttaggtcacacagct

SEQ ID NO: 258437 - DNA, 25 bp, Probe Sequence
gtggcgatttgaccagataaatgct

SEQ ID NO: 258438 - DNA, 25 bp, Probe Sequence
gggcctaatgcacgcactaaagcac

SEQ ID NO: 258439 - DNA, 25 bp, Probe Sequence
gggctcacaagcctgattcaaacag

SEQ ID NO: 258440 - DNA, 25 bp, Probe Sequence
gtggccacagagcctattccaagag

SEQ ID NO: 258441 - DNA, 25 bp, Probe Sequence
gtggccaggatgctcagctggccag

SEQ ID NO: 258442 - DNA, 25 bp, Probe Sequence
gtggcctgagagccatctgtgacct

SEQ ID NO: 258443 - DNA, 25 bp, Probe Sequence
gtggccgagcagatggctatgtgct

SEQ ID NO: 258444 - DNA, 25 bp, Probe Sequence
gtggccgagcagatggctatgtgct

SEQ ID NO: 258445 - DNA, 25 bp, Probe Sequence
gggctagagcagaaggcataggcca

SEQ ID NO: 258446 - DNA, 25 bp, Probe Sequence
gtggccagagagcggaagtgcccgg

SEQ ID NO: 258447 - DNA, 25 bp, Probe Sequence
gtggccgggtgacggcagagtccag

SEQ ID NO: 258448 - DNA, 25 bp, Probe Sequence
gggccggaggacaatgtggtcatca

SEQ ID NO: 258449 - DNA, 25 bp, Probe Sequence
gggcccaggagtaatttctcagcat

SEQ ID NO: 258450 - DNA, 25 bp, Probe Sequence
gggcgacagcaagacctgtctcaaa

SEQ ID NO: 258451 - DNA, 25 bp, Probe Sequence
gggaaacacaaactctttagaacat

SEQ ID NO: 258452 - DNA, 25 bp, Probe Sequence
gggaaacacaaactctttagaacat

SEQ ID NO: 258453 - DNA, 25 bp, Probe Sequence
gggtcaccaaggaagccagtaaaat

SEQ ID NO: 258454 - DNA, 25 bp, Probe Sequence
gggctctcaaaactcaacagtaaaa

SEQ ID NO: 258455 - DNA, 25 bp, Probe Sequence
gggccttcaactctactacaaaagc

SEQ ID NO: 258456 - DNA, 25 bp, Probe Sequence
gggccctcaaatttatcaagaaaag

SEQ ID NO: 258457 - DNA, 25 bp, Probe Sequence
gggctccggaaaatcataaaacaag

SEQ ID NO: 258458 - DNA, 25 bp, Probe Sequence
gggccctgaatggagctaaaatcac

SEQ ID NO: 258459 - DNA, 25 bp, Probe Sequence
gggcacactaatgggtacagaaccg

SEQ ID NO: 258460 - DNA, 25 bp, Probe Sequence
gggcatcactaaggtcttcagcaat

SEQ ID NO: 258461 - DNA, 25 bp, Probe Sequence
gtggccagtagaagctctttcagct

SEQ ID NO: 258462 - DNA, 25 bp, Probe Sequence
gggccttagaactttgcatagcagc

SEQ ID NO: 258463 - DNA, 25 bp, Probe Sequence
gggccattacaacttcataatcaca

SEQ ID NO: 258464 - DNA, 25 bp, Probe Sequence
gggccctgacaagtttttccacagg

SEQ ID NO: 258465 - DNA, 25 bp, Probe Sequence
gggccctgacaagtttttccacagg

SEQ ID NO: 258466 - DNA, 25 bp, Probe Sequence
gggcccagagagaattttgaaagca

SEQ ID NO: 258467 - DNA, 25 bp, Probe Sequence
gtggcccagaaaagcatgaagtaac

SEQ ID NO: 258468 - DNA, 25 bp, Probe Sequence
gtggcggacaaaacaggcagcatca

SEQ ID NO: 258469 - DNA, 25 bp, Probe Sequence
gggcggccaaatccagtatacaagg

SEQ ID NO: 258470 - DNA, 25 bp, Probe Sequence
gggccagcgcaaatactggaacctg

SEQ ID NO: 258471 - DNA, 25 bp, Probe Sequence
ggtccccaattgagaatgtcttgct

SEQ ID NO: 258472 - DNA, 25 bp, Probe Sequence
gggccacaactttggaatgtttcat

SEQ ID NO: 258473 - DNA, 25 bp, Probe Sequence
gggctcaaacgtaggcgtctgtgtt

SEQ ID NO: 258474 - DNA, 25 bp, Probe Sequence
gtggccacgtcacttgtgtttattt

SEQ ID NO: 258475 - DNA, 25 bp, Probe Sequence
gggcccatgtcgcttgaatattatt

SEQ ID NO: 258476 - DNA, 25 bp, Probe Sequence
gggccaggtctggattaatggcttt

SEQ ID NO: 258477 - DNA, 25 bp, Probe Sequence
gtggccaattattttgactggatta

SEQ ID NO: 258478 - DNA, 25 bp, Probe Sequence
gtggcccgtatcttgggcatggtgt

SEQ ID NO: 258479 - DNA, 25 bp, Probe Sequence
gggctcacgtaggcagagttggtgg

SEQ ID NO: 258480 - DNA, 25 bp, Probe Sequence
gggccacatcaagaagtgtggttga

SEQ ID NO: 258481 - DNA, 25 bp, Probe Sequence
gggcgagatcaagacatcgggtttg

SEQ ID NO: 258482 - DNA, 25 bp, Probe Sequence
gggagaataagagccggcagatccg

SEQ ID NO: 258483 - DNA, 25 bp, Probe Sequence
gggcgaagacaaacggatgcacccg

SEQ ID NO: 258484 - DNA, 25 bp, Probe Sequence
gggctgccagacatacgctggagcc

SEQ ID NO: 258485 - DNA, 25 bp, Probe Sequence
gtggctccgcagatacctggagaac

SEQ ID NO: 258486 - DNA, 25 bp, Probe Sequence
gtggcctctatgaatcccatgtagg

SEQ ID NO: 258487 - DNA, 25 bp, Probe Sequence
gtggccttcatgatttatctcatgt

SEQ ID NO: 258488 - DNA, 25 bp, Probe Sequence
gggcgtgtcaataatatcactctgt

SEQ ID NO: 258489 - DNA, 25 bp, Probe Sequence
gggctaggcactttatatctgtgtg

SEQ ID NO: 258490 - DNA, 25 bp, Probe Sequence
gggccaggcatttttttctggattc

SEQ ID NO: 258491 - DNA, 25 bp, Probe Sequence
gggccaggcatttttttctggattc

SEQ ID NO: 258492 - DNA, 25 bp, Probe Sequence
gggccaggcatttttttctggattc

SEQ ID NO: 258493 - DNA, 25 bp, Probe Sequence
gtggctcagagcttttacttgaggt

SEQ ID NO: 258494 - DNA, 25 bp, Probe Sequence
gtggctcacaacattttgtcaggta

SEQ ID NO: 258495 - DNA, 25 bp, Probe Sequence
gtggctctcaacaccttgtatttaa

SEQ ID NO: 258496 - DNA, 25 bp, Probe Sequence
gggacttttcccatatatttcacac

SEQ ID NO: 258497 - DNA, 25 bp, Probe Sequence
gggactgtacacactttatttactt

SEQ ID NO: 258498 - DNA, 25 bp, Probe Sequence
gggacttaccggggtgatgttagat

SEQ ID NO: 258499 - DNA, 25 bp, Probe Sequence
gggctgccttccaggaggatgatgt

SEQ ID NO: 258500 - DNA, 25 bp, Probe Sequence
gggctcctgatgctggccaggagtg

SEQ ID NO: 258501 - DNA, 25 bp, Probe Sequence
gggccctgtgtgggacagggtacgc

SEQ ID NO: 258502 - DNA, 25 bp, Probe Sequence
gggcctgtgcttgaacctgaggcac

SEQ ID NO: 258503 - DNA, 25 bp, Probe Sequence
gggcattgtgacacaactctgtgag

SEQ ID NO: 258504 - DNA, 25 bp, Probe Sequence
gtggccttacatcagtagctgtcag

SEQ ID NO: 258505 - DNA, 25 bp, Probe Sequence
gtggccttgacacattacaagcctg

SEQ ID NO: 258506 - DNA, 25 bp, Probe Sequence
gtggccactggtcttgaaggcccac

SEQ ID NO: 258507 - DNA, 25 bp, Probe Sequence
gggctcttagtgtttagtgggccac

SEQ ID NO: 258508 - DNA, 25 bp, Probe Sequence
gggcttttagctctgtgggtgccct

SEQ ID NO: 258509 - DNA, 25 bp, Probe Sequence
gggcttttagtgcaactggtgctct

SEQ ID NO: 258510 - DNA, 25 bp, Probe Sequence
gggcttttagtgcaactggtgctct

SEQ ID NO: 258511 - DNA, 25 bp, Probe Sequence
gggcttttagtgcaactggtgctct

SEQ ID NO: 258512 - DNA, 25 bp, Probe Sequence
gggctttaggatgttctggatgctt

SEQ ID NO: 258513 - DNA, 25 bp, Probe Sequence
gggcttaatggtttcctggtgattc

SEQ ID NO: 258514 - DNA, 25 bp, Probe Sequence
gggcttagcagtaagcccccttgtc

SEQ ID NO: 258515 - DNA, 25 bp, Probe Sequence
gggatgggttaagcctgcagggatc

SEQ ID NO: 258516 - DNA, 25 bp, Probe Sequence
gtggctggtttgaagccccaggtat

SEQ ID NO: 258517 - DNA, 25 bp, Probe Sequence
gggctggtctacaagttctagagta

SEQ ID NO: 258518 - DNA, 25 bp, Probe Sequence
gtggctcattcttataatttcagca

SEQ ID NO: 258519 - DNA, 25 bp, Probe Sequence
gggccatatcttaaatgcatatatt

SEQ ID NO: 258520 - DNA, 25 bp, Probe Sequence
gtggccttcatgttattcagaattg

SEQ ID NO: 258521 - DNA, 25 bp, Probe Sequence
gtggcctattgaaatcatcaacagg

SEQ ID NO: 258522 - DNA, 25 bp, Probe Sequence
gtggcctttgtcaaacacactgaga

SEQ ID NO: 258523 - DNA, 25 bp, Probe Sequence
gggcttgtattaaaccactgaacaa

SEQ ID NO: 258524 - DNA, 25 bp, Probe Sequence
gggcttatcactgggaaaacacaaa

SEQ ID NO: 258525 - DNA, 25 bp, Probe Sequence
gggcttcatcctgcacaataaactc

SEQ ID NO: 258526 - DNA, 25 bp, Probe Sequence
gggcttcgtctaacacaaaacagcc

SEQ ID NO: 258527 - DNA, 25 bp, Probe Sequence
gggattcgtcttgactgaaatcgac

SEQ ID NO: 258528 - DNA, 25 bp, Probe Sequence
gggaccgtcagggagaaaatggcca

SEQ ID NO: 258529 - DNA, 25 bp, Probe Sequence
gggaccgtcagggagaaaatggcca

SEQ ID NO: 258530 - DNA, 25 bp, Probe Sequence
gggaccgtcagggagaaaatggcca

SEQ ID NO: 258531 - DNA, 25 bp, Probe Sequence
gggagccccaagaacagagtcaggc

SEQ ID NO: 258532 - DNA, 25 bp, Probe Sequence
gggcttggccaaaacaggctcaggc

SEQ ID NO: 258533 - DNA, 25 bp, Probe Sequence
gggctgggacagaggagatcatcgg

SEQ ID NO: 258534 - DNA, 25 bp, Probe Sequence
gtggctgggtagagtggctcacacc

SEQ ID NO: 258535 - DNA, 25 bp, Probe Sequence
gtggctgggttcagtgattcacgcc

SEQ ID NO: 258536 - DNA, 25 bp, Probe Sequence
gtggctgacagtctcagtttgccag

SEQ ID NO: 258537 - DNA, 25 bp, Probe Sequence
gtggctggggccaactatggccatg

SEQ ID NO: 258538 - DNA, 25 bp, Probe Sequence
gtggctgggagggactatggccagt

SEQ ID NO: 258539 - DNA, 25 bp, Probe Sequence
gggcatgggtgggacttgtgaccct

SEQ ID NO: 258540 - DNA, 25 bp, Probe Sequence
gggcaggctcttcaagtgtggccct

SEQ ID NO: 258541 - DNA, 25 bp, Probe Sequence
gggcaactgctacaagagcaactcc

SEQ ID NO: 258542 - DNA, 25 bp, Probe Sequence
gggcaactctgtcaacgaaggcttg

SEQ ID NO: 258543 - DNA, 25 bp, Probe Sequence
gggcaaccctaaggtgaaggctcat

SEQ ID NO: 258544 - DNA, 25 bp, Probe Sequence
gggcagaccccactgttgaaagtga

SEQ ID NO: 258545 - DNA, 25 bp, Probe Sequence
gggaatacctgacctaggtatgata

SEQ ID NO: 258546 - DNA, 25 bp, Probe Sequence
gggaaatttggggggatggatatat

SEQ ID NO: 258547 - DNA, 25 bp, Probe Sequence
gggaatactagggagaaggtttcat

SEQ ID NO: 258548 - DNA, 25 bp, Probe Sequence
gggcagaacataccgggtggtccct

SEQ ID NO: 258549 - DNA, 25 bp, Probe Sequence
gggccaaaagggcctggtcatcgcc

SEQ ID NO: 258550 - DNA, 25 bp, Probe Sequence
gggccaaaagggcctggtcatcgcc

SEQ ID NO: 258551 - DNA, 25 bp, Probe Sequence
gggccaacacttggacatgtgtccc

SEQ ID NO: 258552 - DNA, 25 bp, Probe Sequence
gggccaagactgggactattcccca

SEQ ID NO: 258553 - DNA, 25 bp, Probe Sequence
gggccaggagtgggtctgcaggccc

SEQ ID NO: 258554 - DNA, 25 bp, Probe Sequence
gggccacgtgatatgaagagctgtc

SEQ ID NO: 258555 - DNA, 25 bp, Probe Sequence
gggccatggcagtggcaagctcttc

SEQ ID NO: 258556 - DNA, 25 bp, Probe Sequence
gggccatggcagtgacatgtttgtc

SEQ ID NO: 258557 - DNA, 25 bp, Probe Sequence
gggccaggctaaggtttgagtccgg

SEQ ID NO: 258558 - DNA, 25 bp, Probe Sequence
gtggcggtggaaatttcggaccagg

SEQ ID NO: 258559 - DNA, 25 bp, Probe Sequence
gggcagggtagtgatggcggaccgc

SEQ ID NO: 258560 - DNA, 25 bp, Probe Sequence
gggcctggcatagagtaggtactcc

SEQ ID NO: 258561 - DNA, 25 bp, Probe Sequence
ggacttcgtactgctaggaagctcc

SEQ ID NO: 258562 - DNA, 25 bp, Probe Sequence
gggctatctggactaccggaagaag

SEQ ID NO: 258563 - DNA, 25 bp, Probe Sequence
gggctagtgggattactgctaagat

SEQ ID NO: 258564 - DNA, 25 bp, Probe Sequence
gggcttatgggatacagctggacaa

SEQ ID NO: 258565 - DNA, 25 bp, Probe Sequence
gggccagtcgctggaacagctggaa

SEQ ID NO: 258566 - DNA, 25 bp, Probe Sequence
gggccagtcgctggaacagctggaa

SEQ ID NO: 258567 - DNA, 25 bp, Probe Sequence
gggcagaccgatagaatcattggta

SEQ ID NO: 258568 - DNA, 25 bp, Probe Sequence
gggaatgctgcgctgattttagcca

SEQ ID NO: 258569 - DNA, 25 bp, Probe Sequence
gggcaatggctgcgtagccatcagc

SEQ ID NO: 258570 - DNA, 25 bp, Probe Sequence
gggcatgatggcaagggacaaagct

SEQ ID NO: 258571 - DNA, 25 bp, Probe Sequence
gggcttggagggtcacataggtaga

SEQ ID NO: 258572 - DNA, 25 bp, Probe Sequence
ggagtcacgttgataccgactagat

SEQ ID NO: 258573 - DNA, 25 bp, Probe Sequence
gggtcttgcaaaattcctgacgaga

SEQ ID NO: 258574 - DNA, 25 bp, Probe Sequence
gggctgctgagctagaattcccacc

SEQ ID NO: 258575 - DNA, 25 bp, Probe Sequence
gggctgcgagtgcaagatcacgcgc

SEQ ID NO: 258576 - DNA, 25 bp, Probe Sequence
gggctggcctggaattgacgatggt

SEQ ID NO: 258577 - DNA, 25 bp, Probe Sequence
gggctccctaacatatgagagtgct

SEQ ID NO: 258578 - DNA, 25 bp, Probe Sequence
gggcccactgcatctgattggcagt

SEQ ID NO: 258579 - DNA, 25 bp, Probe Sequence
gggccgacgacactgtgtacatgga

SEQ ID NO: 258580 - DNA, 25 bp, Probe Sequence
gtggccaaggaagctgtacatgcag

SEQ ID NO: 258581 - DNA, 25 bp, Probe Sequence
gggctctgaggaacctgtgttcagg

SEQ ID NO: 258582 - DNA, 25 bp, Probe Sequence
gggctgtgaccaagctaggcttcaa

SEQ ID NO: 258583 - DNA, 25 bp, Probe Sequence
gggctgctgaggggctagtgcagtg

SEQ ID NO: 258584 - DNA, 25 bp, Probe Sequence
gggcaggatgtgatctttggctgtg

SEQ ID NO: 258585 - DNA, 25 bp, Probe Sequence
gggctggatgtggtccagtggacag

SEQ ID NO: 258586 - DNA, 25 bp, Probe Sequence
gtggctggaggccatcaagatgggg

SEQ ID NO: 258587 - DNA, 25 bp, Probe Sequence
gggctcaaggcattctacaagggca

SEQ ID NO: 258588 - DNA, 25 bp, Probe Sequence
gggcatgcagaagttggaagatgag

SEQ ID NO: 258589 - DNA, 25 bp, Probe Sequence
gggcatggatagctgtaaaggggac

SEQ ID NO: 258590 - DNA, 25 bp, Probe Sequence
gggagaatcaacagaaagggaactt

SEQ ID NO: 258591 - DNA, 25 bp, Probe Sequence
gggaacagctacacagggagctaga

SEQ ID NO: 258592 - DNA, 25 bp, Probe Sequence
gggccacgctgagcacgaaggcaaa

SEQ ID NO: 258593 - DNA, 25 bp, Probe Sequence
gggcccagttaatggcagagcaaga

SEQ ID NO: 258594 - DNA, 25 bp, Probe Sequence
gggcccattagaaacaggagaagta

SEQ ID NO: 258595 - DNA, 25 bp, Probe Sequence
gtggccttaagagaatgtagaatga

SEQ ID NO: 258596 - DNA, 25 bp, Probe Sequence
gtggccttaagagaatgtagaatga

SEQ ID NO: 258597 - DNA, 25 bp, Probe Sequence
gggccttgaagagtaattgactgga

SEQ ID NO: 258598 - DNA, 25 bp, Probe Sequence
gggcctcccagagtgaaggccgtga

SEQ ID NO: 258599 - DNA, 25 bp, Probe Sequence
gggctccccagatgaggatgcaggg

SEQ ID NO: 258600 - DNA, 25 bp, Probe Sequence
gggctgccacgaccaagtgacagca

SEQ ID NO: 258601 - DNA, 25 bp, Probe Sequence
gggcccacgatttgcagcagaacat

SEQ ID NO: 258602 - DNA, 25 bp, Probe Sequence
gggcccagagtgacaacgcatacac

SEQ ID NO: 258603 - DNA, 25 bp, Probe Sequence
gggcttcagatttaaggctgacagg

SEQ ID NO: 258604 - DNA, 25 bp, Probe Sequence
gggcttcagatttaaggctgacagg

SEQ ID NO: 258605 - DNA, 25 bp, Probe Sequence
gggctcatcgcttagcagaactaca

SEQ ID NO: 258606 - DNA, 25 bp, Probe Sequence
gggctcatctgcagagggcactgca

SEQ ID NO: 258607 - DNA, 25 bp, Probe Sequence
gggcctcggaagtgatctcaaagta

SEQ ID NO: 258608 - DNA, 25 bp, Probe Sequence
gggacctgggactgatctcaggctg

SEQ ID NO: 258609 - DNA, 25 bp, Probe Sequence
gggacactggattctgagcccagtt

SEQ ID NO: 258610 - DNA, 25 bp, Probe Sequence
gggaataatgtaaagcccgctgtta

SEQ ID NO: 258611 - DNA, 25 bp, Probe Sequence
gggcaaggatcagaggcccaggctt

SEQ ID NO: 258612 - DNA, 25 bp, Probe Sequence
gggccagaacacagtgcccggagtc

SEQ ID NO: 258613 - DNA, 25 bp, Probe Sequence
gggctaccattcagtgacacggaac

SEQ ID NO: 258614 - DNA, 25 bp, Probe Sequence
gggctactctttgatgaatttcaag

SEQ ID NO: 258615 - DNA, 25 bp, Probe Sequence
ttggcgacgtttccatcaacgtaag

SEQ ID NO: 258616 - DNA, 25 bp, Probe Sequence
ttggacgccttcccaaatctgaagg

SEQ ID NO: 258617 - DNA, 25 bp, Probe Sequence
gtggccaggattctcaacctaacag

SEQ ID NO: 258618 - DNA, 25 bp, Probe Sequence
gggccatggttttcatagctctaaa

SEQ ID NO: 258619 - DNA, 25 bp, Probe Sequence
gggcagttgctcttacatgagctaa

SEQ ID NO: 258620 - DNA, 25 bp, Probe Sequence
gggcagttgctcttacatgagctaa

SEQ ID NO: 258621 - DNA, 25 bp, Probe Sequence
gggcagcttcctaatatgctttaca

SEQ ID NO: 258622 - DNA, 25 bp, Probe Sequence
gggctctctactatgacttgatcag

SEQ ID NO: 258623 - DNA, 25 bp, Probe Sequence
gggctctctaatgtgatttgcagtt

SEQ ID NO: 258624 - DNA, 25 bp, Probe Sequence
gggccagctaaacatgcttcatcgt

SEQ ID NO: 258625 - DNA, 25 bp, Probe Sequence
gggctggctaacattgctatattga

SEQ ID NO: 258626 - DNA, 25 bp, Probe Sequence
gggcggtaagttggatttcgatgaa

SEQ ID NO: 258627 - DNA, 25 bp, Probe Sequence
gggtcctgacaggtggatttcgaca

SEQ ID NO: 258628 - DNA, 25 bp, Probe Sequence
gggccttgagcatctggattctgcc

SEQ ID NO: 258629 - DNA, 25 bp, Probe Sequence
gggccttgagcatctggattctgcc

SEQ ID NO: 258630 - DNA, 25 bp, Probe Sequence
gggccgctggattctgaggaccagc

SEQ ID NO: 258631 - DNA, 25 bp, Probe Sequence
gggaagtggctttgggaccacaggt

SEQ ID NO: 258632 - DNA, 25 bp, Probe Sequence
ggtacaggtcctcctggaacaggtc

SEQ ID NO: 258633 - DNA, 25 bp, Probe Sequence
gggcacgttccatgtgaacacggtc

SEQ ID NO: 258634 - DNA, 25 bp, Probe Sequence
gggctcctgtcctgtaaaagggcat

SEQ ID NO: 258635 - DNA, 25 bp, Probe Sequence
gggccatccttctaccaaaagtggc

SEQ ID NO: 258636 - DNA, 25 bp, Probe Sequence
gggccacttctcaacgaaaaggtga

SEQ ID NO: 258637 - DNA, 25 bp, Probe Sequence
gggctcaaattcttcgaaagtggtt

SEQ ID NO: 258638 - DNA, 25 bp, Probe Sequence
gggctgaaagtctctgaagacctga

SEQ ID NO: 258639 - DNA, 25 bp, Probe Sequence
gggctatttggctggtgagacacga

SEQ ID NO: 258640 - DNA, 25 bp, Probe Sequence
gggacagtgtggtggtaccaggaag

SEQ ID NO: 258641 - DNA, 25 bp, Probe Sequence
gggcaagagagggggaaacaggtat

SEQ ID NO: 258642 - DNA, 25 bp, Probe Sequence
gggaaatggggacaaactggctctc

SEQ ID NO: 258643 - DNA, 25 bp, Probe Sequence
gggaacaatttccaaaactgtccag

SEQ ID NO: 258644 - DNA, 25 bp, Probe Sequence
gggctgacctttcaaaccagagggt

SEQ ID NO: 258645 - DNA, 25 bp, Probe Sequence
gggccccatcttgatgggccaaggg

SEQ ID NO: 258646 - DNA, 25 bp, Probe Sequence
gtggccacagctgtgcaatggacca

SEQ ID NO: 258647 - DNA, 25 bp, Probe Sequence
gggctcacatatacgaatgaatgcc

SEQ ID NO: 258648 - DNA, 25 bp, Probe Sequence
gggcgcagatgaaccagattcagtc

SEQ ID NO: 258649 - DNA, 25 bp, Probe Sequence
gggcgctgatgaaggagatcgaggc

SEQ ID NO: 258650 - DNA, 25 bp, Probe Sequence
gggcatcatgaggagatgaatcgag

SEQ ID NO: 258651 - DNA, 25 bp, Probe Sequence
gggcagcagcagaagatatagtggc

SEQ ID NO: 258652 - DNA, 25 bp, Probe Sequence
gggctaggcttgatggtggccaggc

SEQ ID NO: 258653 - DNA, 25 bp, Probe Sequence
gggccagtgcatattagtggacagc

SEQ ID NO: 258654 - DNA, 25 bp, Probe Sequence
gggccagtgcatattagtggacagc

SEQ ID NO: 258655 - DNA, 25 bp, Probe Sequence
gggcgagctgcgagcgagtgagccc

SEQ ID NO: 258656 - DNA, 25 bp, Probe Sequence
gggccatgcaggagcttgaagcact

SEQ ID NO: 258657 - DNA, 25 bp, Probe Sequence
gggccttgtgctacctgaagatgca

SEQ ID NO: 258658 - DNA, 25 bp, Probe Sequence
gggcttctggctgactacaaggaac

SEQ ID NO: 258659 - DNA, 25 bp, Probe Sequence
gggcttttcctaggagaacgataag

SEQ ID NO: 258660 - DNA, 25 bp, Probe Sequence
tggagctttaccaccgtacgaaaga

SEQ ID NO: 258661 - DNA, 25 bp, Probe Sequence
tacttttagctagtccgtcgggacg

SEQ ID NO: 258662 - DNA, 25 bp, Probe Sequence
gggccagggcacaacatctgaagcc

SEQ ID NO: 258663 - DNA, 25 bp, Probe Sequence
gggccactgtcgatatgaggacctc

SEQ ID NO: 258664 - DNA, 25 bp, Probe Sequence
gggccttacttcaatacaagcccct

SEQ ID NO: 258665 - DNA, 25 bp, Probe Sequence
ggccgttaccttaagcactgagcca

SEQ ID NO: 258666 - DNA, 25 bp, Probe Sequence
gggcagttaccctaagacagagcct

SEQ ID NO: 258667 - DNA, 25 bp, Probe Sequence
gggatccgaccctgatgaatatgcc

SEQ ID NO: 258668 - DNA, 25 bp, Probe Sequence
gggctccgacactgctgtaaatgcc

SEQ ID NO: 258669 - DNA, 25 bp, Probe Sequence
gggccactgaaatctgtcaagagta

SEQ ID NO: 258670 - DNA, 25 bp, Probe Sequence
gtggccaaagaatattccgggcacg

SEQ ID NO: 258671 - DNA, 25 bp, Probe Sequence
gggcccaatgaataatccgccagaa

SEQ ID NO: 258672 - DNA, 25 bp, Probe Sequence
gggccacgatgacagattacggcga

SEQ ID NO: 258673 - DNA, 25 bp, Probe Sequence
gggccacgaagcgtgttactttgaa

SEQ ID NO: 258674 - DNA, 25 bp, Probe Sequence
gggcagcagccaagggtaacttgaa

SEQ ID NO: 258675 - DNA, 25 bp, Probe Sequence
gggctgagctaacaggaccaatgga

SEQ ID NO: 258676 - DNA, 25 bp, Probe Sequence
gggctggctggtgagcagctacaag

SEQ ID NO: 258677 - DNA, 25 bp, Probe Sequence
gggctcgggctggcagcagtgaaag

SEQ ID NO: 258678 - DNA, 25 bp, Probe Sequence
gggctccagagactcactgtggaag

SEQ ID NO: 258679 - DNA, 25 bp, Probe Sequence
gggctgaaagcacaggtggcatatg

SEQ ID NO: 258680 - DNA, 25 bp, Probe Sequence
gggctacatcagggtgcgattctat

SEQ ID NO: 258681 - DNA, 25 bp, Probe Sequence
gggctagtcacagttgcagattata

SEQ ID NO: 258682 - DNA, 25 bp, Probe Sequence
gggccagaacgactgcagcatttac

SEQ ID NO: 258683 - DNA, 25 bp, Probe Sequence
gggccaagacgtcaatttagctgca

SEQ ID NO: 258684 - DNA, 25 bp, Probe Sequence
gggccaagacgtcaatttagctgca

SEQ ID NO: 258685 - DNA, 25 bp, Probe Sequence
gtggccaagatctgtgaacctactg

SEQ ID NO: 258686 - DNA, 25 bp, Probe Sequence
gggctgcaagtgggtctccaataag

SEQ ID NO: 258687 - DNA, 25 bp, Probe Sequence
gggcattggctgcggtcgcaaagga

SEQ ID NO: 258688 - DNA, 25 bp, Probe Sequence
gggcatgatgggctgggccaaatga

SEQ ID NO: 258689 - DNA, 25 bp, Probe Sequence
gggcatcatagtagttggaataata

SEQ ID NO: 258690 - DNA, 25 bp, Probe Sequence
gggcctgagtttacaaacacatcac

SEQ ID NO: 258691 - DNA, 25 bp, Probe Sequence
gggcctcagtggtcacttgaccacc

SEQ ID NO: 258692 - DNA, 25 bp, Probe Sequence
gggccagcagtggtctttgaagcac

SEQ ID NO: 258693 - DNA, 25 bp, Probe Sequence
gggccagatggcgtctgtagcaact

SEQ ID NO: 258694 - DNA, 25 bp, Probe Sequence
gtggccaatatggggatgtggaatt

SEQ ID NO: 258695 - DNA, 25 bp, Probe Sequence
gggccagaaggtgtcgatgcactac

SEQ ID NO: 258696 - DNA, 25 bp, Probe Sequence
gggctggacggcaagtccgtctagc

SEQ ID NO: 258697 - DNA, 25 bp, Probe Sequence
gggcttgactggacagtggccccaa

SEQ ID NO: 258698 - DNA, 25 bp, Probe Sequence
gggctgggctaggaatggccttgga

SEQ ID NO: 258699 - DNA, 25 bp, Probe Sequence
gggcttggtcagcagcatggagttc

SEQ ID NO: 258700 - DNA, 25 bp, Probe Sequence
gggctgctgagttcaaatgagtttt

SEQ ID NO: 258701 - DNA, 25 bp, Probe Sequence
gggctcgaagaaaataattctctat

SEQ ID NO: 258702 - DNA, 25 bp, Probe Sequence
gggctaatgaagaaaacttctctta

SEQ ID NO: 258703 - DNA, 25 bp, Probe Sequence
gggcaacaaagtgagatcctatctt

SEQ ID NO: 258704 - DNA, 25 bp, Probe Sequence
gggcgacggagtgagactctgtctc

SEQ ID NO: 258705 - DNA, 25 bp, Probe Sequence
gggcgacaagagcgagactctgtct

SEQ ID NO: 258706 - DNA, 25 bp, Probe Sequence
gggcgacaaagcaagaccgatctct

SEQ ID NO: 258707 - DNA, 25 bp, Probe Sequence
gggccacaaagcaagactgtctcaa

SEQ ID NO: 258708 - DNA, 25 bp, Probe Sequence
gggccagcagaacgagcagtgacaa

SEQ ID NO: 258709 - DNA, 25 bp, Probe Sequence
gggccagatatacgtgcatctcact

SEQ ID NO: 258710 - DNA, 25 bp, Probe Sequence
gggccagaatcatgcagatccactc

SEQ ID NO: 258711 - DNA, 25 bp, Probe Sequence
gggcctgaagcaagagccagcccgg

SEQ ID NO: 258712 - DNA, 25 bp, Probe Sequence
gggcatgtacaatgccatcacccgg

SEQ ID NO: 258713 - DNA, 25 bp, Probe Sequence
gggcagtagtcatggcagactcccg

SEQ ID NO: 258714 - DNA, 25 bp, Probe Sequence
gggctgatcttactggaatctctcc

SEQ ID NO: 258715 - DNA, 25 bp, Probe Sequence
gggcttcttgaaggaacttgccatt

SEQ ID NO: 258716 - DNA, 25 bp, Probe Sequence
gggccactggaaggaacatggagct

SEQ ID NO: 258717 - DNA, 25 bp, Probe Sequence
gggcctctgaacggaacagtgtccc

SEQ ID NO: 258718 - DNA, 25 bp, Probe Sequence
taggactccagagaaccggacccta

SEQ ID NO: 258719 - DNA, 25 bp, Probe Sequence
taggaccaaagagcattccgaccca

SEQ ID NO: 258720 - DNA, 25 bp, Probe Sequence
gggaccaacgacttaactagcccat

SEQ ID NO: 258721 - DNA, 25 bp, Probe Sequence
gggaccagctctgtgtaggtaacca

SEQ ID NO: 258722 - DNA, 25 bp, Probe Sequence
gggcctatgcttgtaatttaatcct

SEQ ID NO: 258723 - DNA, 25 bp, Probe Sequence
gggcctaattaacatctctatatcc

SEQ ID NO: 258724 - DNA, 25 bp, Probe Sequence
gggctctcattttaccagtcatgaa

SEQ ID NO: 258725 - DNA, 25 bp, Probe Sequence
gggcgtcaatgaatacgacaatgga

SEQ ID NO: 258726 - DNA, 25 bp, Probe Sequence
gggcgccagtgaattaataaggcct

SEQ ID NO: 258727 - DNA, 25 bp, Probe Sequence
gggctgccaggaaacgatttgggcc

SEQ ID NO: 258728 - DNA, 25 bp, Probe Sequence
gggcgttggatatcgtttgactcac

SEQ ID NO: 258729 - DNA, 25 bp, Probe Sequence
gggcgtggatagcggtttgactcac

SEQ ID NO: 258730 - DNA, 25 bp, Probe Sequence
gggcgtggataacggtttgactcac

SEQ ID NO: 258731 - DNA, 25 bp, Probe Sequence
gggcgtggataacggtgtgactcac

SEQ ID NO: 258732 - DNA, 25 bp, Probe Sequence
gggctggatagccggtttgactcac

SEQ ID NO: 258733 - DNA, 25 bp, Probe Sequence
gggcatcaatcagccttgtctaccc

SEQ ID NO: 258734 - DNA, 25 bp, Probe Sequence
gggcatcattcagtaattagctcaa

SEQ ID NO: 258735 - DNA, 25 bp, Probe Sequence
gggccagtcagagtgttagcagcag

SEQ ID NO: 258736 - DNA, 25 bp, Probe Sequence
gggcaagtagcaggactaggcatgt

SEQ ID NO: 258737 - DNA, 25 bp, Probe Sequence
gggcaagtgacagccctggtttctc

SEQ ID NO: 258738 - DNA, 25 bp, Probe Sequence
gggcgaggactgagcctcggtgttt

SEQ ID NO: 258739 - DNA, 25 bp, Probe Sequence
gggcggagactgtctcctcaagttc

SEQ ID NO: 258740 - DNA, 25 bp, Probe Sequence
ggaaaaaggcactccaaggtcctgt

SEQ ID NO: 258741 - DNA, 25 bp, Probe Sequence
ggtacaaaacacaaccgaggagcgt

SEQ ID NO: 258742 - DNA, 25 bp, Probe Sequence
gggacaataaccacagtcagggcgt

SEQ ID NO: 258743 - DNA, 25 bp, Probe Sequence
gggactatgagctcttcgtggaggc

SEQ ID NO: 258744 - DNA, 25 bp, Probe Sequence
gggctttggcaactatggtgctcag

SEQ ID NO: 258745 - DNA, 25 bp, Probe Sequence
gggcccagagcagctggaggccgaa

SEQ ID NO: 258746 - DNA, 25 bp, Probe Sequence
gggcccagatcatcgggggccacga

SEQ ID NO: 258747 - DNA, 25 bp, Probe Sequence
gggcccatatcctggatgtggacac

SEQ ID NO: 258748 - DNA, 25 bp, Probe Sequence
gggcgtcttctctgagatggaagcc

SEQ ID NO: 258749 - DNA, 25 bp, Probe Sequence
gggccatctacctagcggaggaggc

SEQ ID NO: 258750 - DNA, 25 bp, Probe Sequence
gggccatctacctagcggaggaggc

SEQ ID NO: 258751 - DNA, 25 bp, Probe Sequence
gggcctttctctacagggcaagagt

SEQ ID NO: 258752 - DNA, 25 bp, Probe Sequence
gggcccacctgctgagggagaagtc

SEQ ID NO: 258753 - DNA, 25 bp, Probe Sequence
gggctggagccctgaggagaggggc

SEQ ID NO: 258754 - DNA, 25 bp, Probe Sequence
gggctaatgacctgggagctagacc

SEQ ID NO: 258755 - DNA, 25 bp, Probe Sequence
gggctgagtaaatgccggcttacca

SEQ ID NO: 258756 - DNA, 25 bp, Probe Sequence
gggctgatgtggaggccaggtatcc

SEQ ID NO: 258757 - DNA, 25 bp, Probe Sequence
gggcaggatgagatgatcgacgtca

SEQ ID NO: 258758 - DNA, 25 bp, Probe Sequence
gggcagtgtagcaagacccctgcct

SEQ ID NO: 258759 - DNA, 25 bp, Probe Sequence
gggatggggcaccaagccaagcccc

SEQ ID NO: 258760 - DNA, 25 bp, Probe Sequence
gggatggggcaccaagccaagcccc

SEQ ID NO: 258761 - DNA, 25 bp, Probe Sequence
gggatggggcaccaagccaagcccc

SEQ ID NO: 258762 - DNA, 25 bp, Probe Sequence
gggaaggaaccatggagggcccatc

SEQ ID NO: 258763 - DNA, 25 bp, Probe Sequence
ggccaaggtccgagtgctggacccg

SEQ ID NO: 258764 - DNA, 25 bp, Probe Sequence
gggaagtggccgagatctgtaccct

SEQ ID NO: 258765 - DNA, 25 bp, Probe Sequence
gggaagggccagataggcaacttca

SEQ ID NO: 258766 - DNA, 25 bp, Probe Sequence
gggaaagggatcgcagggacaccaa

SEQ ID NO: 258767 - DNA, 25 bp, Probe Sequence
gggaagacaggatgggagtgtagcc

SEQ ID NO: 258768 - DNA, 25 bp, Probe Sequence
gggaagaaccagtggacaattccct

SEQ ID NO: 258769 - DNA, 25 bp, Probe Sequence
ggagtggaaccctggaataacaagt

SEQ ID NO: 258770 - DNA, 25 bp, Probe Sequence
ggggtaacgcactgtattaaatatg

SEQ ID NO: 258771 - DNA, 25 bp, Probe Sequence
gggcggaaaggcactatttcacaat

SEQ ID NO: 258772 - DNA, 25 bp, Probe Sequence
ggatcagggaaacacgttgtcacta

SEQ ID NO: 258773 - DNA, 25 bp, Probe Sequence
gggctggtgcaagggacgcttggac

SEQ ID NO: 258774 - DNA, 25 bp, Probe Sequence
gggcgaggagcatagacagtgtgga

SEQ ID NO: 258775 - DNA, 25 bp, Probe Sequence
gggccgagatgcagtgactcgggca

SEQ ID NO: 258776 - DNA, 25 bp, Probe Sequence
gggctcagagtgttgtactcgtaaa

SEQ ID NO: 258777 - DNA, 25 bp, Probe Sequence
gggcaatgttgattaatctcagtat

SEQ ID NO: 258778 - DNA, 25 bp, Probe Sequence
gggacaattatctatatgccacctg

SEQ ID NO: 258779 - DNA, 25 bp, Probe Sequence
gggcaaacatcttgtgtgccccgtc

SEQ ID NO: 258780 - DNA, 25 bp, Probe Sequence
gggaatgaatgcttttatcttcttc

SEQ ID NO: 258781 - DNA, 25 bp, Probe Sequence
gggaatatggcactctgttcattgt

SEQ ID NO: 258782 - DNA, 25 bp, Probe Sequence
gggactgatgtcatcttgagctctt

SEQ ID NO: 258783 - DNA, 25 bp, Probe Sequence
gggactatatatgtgtgggctacca

SEQ ID NO: 258784 - DNA, 25 bp, Probe Sequence
gggtcaatgcattttggggtgagct

SEQ ID NO: 258785 - DNA, 25 bp, Probe Sequence
gggccttctatggctgaggggagtc

SEQ ID NO: 258786 - DNA, 25 bp, Probe Sequence
gggcctacatctgtggagaggagac

SEQ ID NO: 258787 - DNA, 25 bp, Probe Sequence
gggcctggatctgcttatagagcag

SEQ ID NO: 258788 - DNA, 25 bp, Probe Sequence
gggcaataatatggcatttaagagg

SEQ ID NO: 258789 - DNA, 25 bp, Probe Sequence
gggcctgaacataatttcaagagga

SEQ ID NO: 258790 - DNA, 25 bp, Probe Sequence
gggcctgattacattccaacagagg

SEQ ID NO: 258791 - DNA, 25 bp, Probe Sequence
gggcagtgtgttattcagaatacag

SEQ ID NO: 258792 - DNA, 25 bp, Probe Sequence
gggcagtagctgcttttgtcataaa

SEQ ID NO: 258793 - DNA, 25 bp, Probe Sequence
gggaatgtctgcctgatgtagtcta

SEQ ID NO: 258794 - DNA, 25 bp, Probe Sequence
ggggtttccaatgtgtataggtcgg

SEQ ID NO: 258795 - DNA, 25 bp, Probe Sequence
tggggtttccaatgtgtataggtcg

SEQ ID NO: 258796 - DNA, 25 bp, Probe Sequence
ggtgttacccaaggtcacaaggccg

SEQ ID NO: 258797 - DNA, 25 bp, Probe Sequence
gggctgacagcacagaagtcacaag

SEQ ID NO: 258798 - DNA, 25 bp, Probe Sequence
gggcctagcagatgaagcttgccag

SEQ ID NO: 258799 - DNA, 25 bp, Probe Sequence
gggcctagagtgaagactgtgctgt

SEQ ID NO: 258800 - DNA, 25 bp, Probe Sequence
gggcctcaaggcaatgagggctgca

SEQ ID NO: 258801 - DNA, 25 bp, Probe Sequence
gggcctcaaggcaatgagggctgca

SEQ ID NO: 258802 - DNA, 25 bp, Probe Sequence
gggcctcaaggcaatgagggctgca

SEQ ID NO: 258803 - DNA, 25 bp, Probe Sequence
gggctgctgaagcccacggcctgca

SEQ ID NO: 258804 - DNA, 25 bp, Probe Sequence
ggtgtccaaggctcaggttggggtt

SEQ ID NO: 258805 - DNA, 25 bp, Probe Sequence
gggcttcgtgtctgactttgaggag

SEQ ID NO: 258806 - DNA, 25 bp, Probe Sequence
gggctggactgtgggatctgattac

SEQ ID NO: 258807 - DNA, 25 bp, Probe Sequence
gggcgcagacttcgagagcgaggac

SEQ ID NO: 258808 - DNA, 25 bp, Probe Sequence
gggctgaacctgaagatgcgcgggc

SEQ ID NO: 258809 - DNA, 25 bp, Probe Sequence
gggctgaacctgaagatgcgcgggc

SEQ ID NO: 258810 - DNA, 25 bp, Probe Sequence
gggcggatctcgagatcacggagat

SEQ ID NO: 258811 - DNA, 25 bp, Probe Sequence
gggcggatcacgaggtcaggagatc

SEQ ID NO: 258812 - DNA, 25 bp, Probe Sequence
gggcggatcacgaggtcaggagatc

SEQ ID NO: 258813 - DNA, 25 bp, Probe Sequence
gggcggatcacgaggtcaggagatc

SEQ ID NO: 258814 - DNA, 25 bp, Probe Sequence
gggcggatcacgaggtcaggagatc

SEQ ID NO: 258815 - DNA, 25 bp, Probe Sequence
gggcggatcacgaggtcaggagatg

SEQ ID NO: 258816 - DNA, 25 bp, Probe Sequence
ggggattccaggagtcgtggtttct

SEQ ID NO: 258817 - DNA, 25 bp, Probe Sequence
gggagacaagggagtcggtgtccct

SEQ ID NO: 258818 - DNA, 25 bp, Probe Sequence
gggaagccgaggtgggcggatcacc

SEQ ID NO: 258819 - DNA, 25 bp, Probe Sequence
gggaagccgaggtgggcggatcacc

SEQ ID NO: 258820 - DNA, 25 bp, Probe Sequence
gggaatgtcgggtggtttcatggac

SEQ ID NO: 258821 - DNA, 25 bp, Probe Sequence
ggagatttttggtccagttcttgtg

SEQ ID NO: 258822 - DNA, 25 bp, Probe Sequence
gggaatgtttggcaacctttgtgtt

SEQ ID NO: 258823 - DNA, 25 bp, Probe Sequence
gggaagttatcgtcgacatctttca

SEQ ID NO: 258824 - DNA, 25 bp, Probe Sequence
gggaacctgacgtctaagtgtccag

SEQ ID NO: 258825 - DNA, 25 bp, Probe Sequence
gggaaaatgacatctaagctttacc

SEQ ID NO: 258826 - DNA, 25 bp, Probe Sequence
gggctaaatccatgaagtttgtgga

SEQ ID NO: 258827 - DNA, 25 bp, Probe Sequence
gggcttaatgagagggatctttgta

SEQ ID NO: 258828 - DNA, 25 bp, Probe Sequence
gggcttcacaggaagggttggtgta

SEQ ID NO: 258829 - DNA, 25 bp, Probe Sequence
gggctaccagtgatgggttggctgg

SEQ ID NO: 258830 - DNA, 25 bp, Probe Sequence
gggaaccgtgataagcctttctggt

SEQ ID NO: 258831 - DNA, 25 bp, Probe Sequence
gggagtggggatgagtccgtcaagc

SEQ ID NO: 258832 - DNA, 25 bp, Probe Sequence
gggcaggtgggagcagtatagtata

SEQ ID NO: 258833 - DNA, 25 bp, Probe Sequence
gggcgcctggtagaggacatggaaa

SEQ ID NO: 258834 - DNA, 25 bp, Probe Sequence
ggggacttgtagggatgcctttcta

SEQ ID NO: 258835 - DNA, 25 bp, Probe Sequence
gggctgagacgatggggttttctag

SEQ ID NO: 258836 - DNA, 25 bp, Probe Sequence
gggctatagcgatggggactgcgga

SEQ ID NO: 258837 - DNA, 25 bp, Probe Sequence
gggcctgaccaacagagactgcggc

SEQ ID NO: 258838 - DNA, 25 bp, Probe Sequence
gggacatgaccttgaaatgctggcg

SEQ ID NO: 258839 - DNA, 25 bp, Probe Sequence
gggccgatgtctgggaacttgggac

SEQ ID NO: 258840 - DNA, 25 bp, Probe Sequence
gggcaagttcatgaaacctgggaag

SEQ ID NO: 258841 - DNA, 25 bp, Probe Sequence
gggcaagtaattcacaccaggccaa

SEQ ID NO: 258842 - DNA, 25 bp, Probe Sequence
gggaagaagattcatacgcctctac

SEQ ID NO: 258843 - DNA, 25 bp, Probe Sequence
gggaaaagactttcagccctcaaga

SEQ ID NO: 258844 - DNA, 25 bp, Probe Sequence
gggaacagtggtactaacccacgat

SEQ ID NO: 258845 - DNA, 25 bp, Probe Sequence
gggagaactggtacagtcccaccga

SEQ ID NO: 258846 - DNA, 25 bp, Probe Sequence
gggcattaacggcagtgcctaccga

SEQ ID NO: 258847 - DNA, 25 bp, Probe Sequence
gggcaggaacggcgtcctgccacag

SEQ ID NO: 258848 - DNA, 25 bp, Probe Sequence
gggcagtgaaccatgtgccctgccc

SEQ ID NO: 258849 - DNA, 25 bp, Probe Sequence
gggcagaaagccatggaccagctgg

SEQ ID NO: 258850 - DNA, 25 bp, Probe Sequence
gggcagatcaagactggtgcccctt

SEQ ID NO: 258851 - DNA, 25 bp, Probe Sequence
gggcaacagacaagattccctctta

SEQ ID NO: 258852 - DNA, 25 bp, Probe Sequence
gggcagaaacggttcacattccatt

SEQ ID NO: 258853 - DNA, 25 bp, Probe Sequence
gggcagatcacaaggtcaagatatc

SEQ ID NO: 258854 - DNA, 25 bp, Probe Sequence
gggctgtcaagacgtgtcatgtaca

SEQ ID NO: 258855 - DNA, 25 bp, Probe Sequence
gggctggtggagcgctcattaatga

SEQ ID NO: 258856 - DNA, 25 bp, Probe Sequence
gggcgtggtgacttggcatatccaa

SEQ ID NO: 258857 - DNA, 25 bp, Probe Sequence
gggcactaggactgacaatccaggc

SEQ ID NO: 258858 - DNA, 25 bp, Probe Sequence
gggccgcggagacaaaccaggcctc

SEQ ID NO: 258859 - DNA, 25 bp, Probe Sequence
gggccgcaggcgggaaaagcagccc

SEQ ID NO: 258860 - DNA, 25 bp, Probe Sequence
gggcgctgggctcagtagaagcaga

SEQ ID NO: 258861 - DNA, 25 bp, Probe Sequence
gggcccgtgcatcatctataatgag

SEQ ID NO: 258862 - DNA, 25 bp, Probe Sequence
gggcactcgactttcatgtggagga

SEQ ID NO: 258863 - DNA, 25 bp, Probe Sequence
gggcactcagcatttcctgatgaca

SEQ ID NO: 258864 - DNA, 25 bp, Probe Sequence
gggcaccctgcagcagtgatgatcc

SEQ ID NO: 258865 - DNA, 25 bp, Probe Sequence
gggcatcctggctgcagatgagtcc

SEQ ID NO: 258866 - DNA, 25 bp, Probe Sequence
gggcatcctggctgcagatgagtcc

SEQ ID NO: 258867 - DNA, 25 bp, Probe Sequence
gggcatcctggctgcagatgagtcc

SEQ ID NO: 258868 - DNA, 25 bp, Probe Sequence
gggctctgctctgagagtagggcgg

SEQ ID NO: 258869 - DNA, 25 bp, Probe Sequence
gggcatgcttcgggaattgatggtg

SEQ ID NO: 258870 - DNA, 25 bp, Probe Sequence
gggctcttcagaaagcatctgcatg

SEQ ID NO: 258871 - DNA, 25 bp, Probe Sequence
gggcacgccagtggagcatgtgcgc

SEQ ID NO: 258872 - DNA, 25 bp, Probe Sequence
gggcatgctcagctggacatacaga

SEQ ID NO: 258873 - DNA, 25 bp, Probe Sequence
gggcagccaggggaatactattgtt

SEQ ID NO: 258874 - DNA, 25 bp, Probe Sequence
gggcatgaagggttgaatgtattga

SEQ ID NO: 258875 - DNA, 25 bp, Probe Sequence
gggcaaagggcaagcaggatcttac

SEQ ID NO: 258876 - DNA, 25 bp, Probe Sequence
gggcaaagagggggacaagtacaag

SEQ ID NO: 258877 - DNA, 25 bp, Probe Sequence
gggcaaagactttatgactagtaca

SEQ ID NO: 258878 - DNA, 25 bp, Probe Sequence
gggcaacttcttctgcattaggaag

SEQ ID NO: 258879 - DNA, 25 bp, Probe Sequence
gggctatttctccaatgtacaataa

SEQ ID NO: 258880 - DNA, 25 bp, Probe Sequence
gggcgaatagcttaagtacaaagtc

SEQ ID NO: 258881 - DNA, 25 bp, Probe Sequence
gggcagatatagcattaataaaact

SEQ ID NO: 258882 - DNA, 25 bp, Probe Sequence
gggaaaaggatcacatactcagtct

SEQ ID NO: 258883 - DNA, 25 bp, Probe Sequence
gggactaaggatcaccattacttta

SEQ ID NO: 258884 - DNA, 25 bp, Probe Sequence
gggactaagtatgacacttgactca

SEQ ID NO: 258885 - DNA, 25 bp, Probe Sequence
gggacaaagctacaacttggcctgt

SEQ ID NO: 258886 - DNA, 25 bp, Probe Sequence
gggacaaatatcctaacccaactat

SEQ ID NO: 258887 - DNA, 25 bp, Probe Sequence
gggaaaaacccaggccttgacattg

SEQ ID NO: 258888 - DNA, 25 bp, Probe Sequence
gggaaaaatctcctcgacattggtc

SEQ ID NO: 258889 - DNA, 25 bp, Probe Sequence
gggcaaaatgtggcagtgcagacat

SEQ ID NO: 258890 - DNA, 25 bp, Probe Sequence
gggaagccatgggcagtccagatca

SEQ ID NO: 258891 - DNA, 25 bp, Probe Sequence
gggaagatgaagccggccagagccc

SEQ ID NO: 258892 - DNA, 25 bp, Probe Sequence
gggctggaaatgccaccctgagccc

SEQ ID NO: 258893 - DNA, 25 bp, Probe Sequence
gggctgcgaagacatggctctggcc

SEQ ID NO: 258894 - DNA, 25 bp, Probe Sequence
gggctggatggatagggtgctgtgc

SEQ ID NO: 258895 - DNA, 25 bp, Probe Sequence
gggcgagtgaatctcgtgtctggcc

SEQ ID NO: 258896 - DNA, 25 bp, Probe Sequence
gggcagggaatcctggagcacttgt

SEQ ID NO: 258897 - DNA, 25 bp, Probe Sequence
gggcatgggaatttagcctctcttt

SEQ ID NO: 258898 - DNA, 25 bp, Probe Sequence
gggcagagccactaaacttgtttta

SEQ ID NO: 258899 - DNA, 25 bp, Probe Sequence
gggctgaccagtagagaatttcctt

SEQ ID NO: 258900 - DNA, 25 bp, Probe Sequence
gggcgacagagtgagaatctgtctc

SEQ ID NO: 258901 - DNA, 25 bp, Probe Sequence
gggcgacagagtgagactccatcta

SEQ ID NO: 258902 - DNA, 25 bp, Probe Sequence
gggcgacagagtgagactccatctc

SEQ ID NO: 258903 - DNA, 25 bp, Probe Sequence
gggctacagagtgagactgcatctc

SEQ ID NO: 258904 - DNA, 25 bp, Probe Sequence
gggcgaagtttattcagcatccggc

SEQ ID NO: 258905 - DNA, 25 bp, Probe Sequence
gggcaaggttattcccatcctgccc

SEQ ID NO: 258906 - DNA, 25 bp, Probe Sequence
gggcagggagtgtaccacacagggc

SEQ ID NO: 258907 - DNA, 25 bp, Probe Sequence
gggcaggaggatcaccgacgtgatg

SEQ ID NO: 258908 - DNA, 25 bp, Probe Sequence
gggcggaggtgaaggtggggcagga

SEQ ID NO: 258909 - DNA, 25 bp, Probe Sequence
gggcgatgaggtacggtggggaagg

SEQ ID NO: 258910 - DNA, 25 bp, Probe Sequence
gggcgaaggagtggactggagcgta

SEQ ID NO: 258911 - DNA, 25 bp, Probe Sequence
gggcgacagaggggcactggtttac

SEQ ID NO: 258912 - DNA, 25 bp, Probe Sequence
gggcggcaggagggaggtttgtgag

SEQ ID NO: 258913 - DNA, 25 bp, Probe Sequence
gggcgagcgagggagaggagggaga

SEQ ID NO: 258914 - DNA, 25 bp, Probe Sequence
gggcgagcgagggagaggagggaga

SEQ ID NO: 258915 - DNA, 25 bp, Probe Sequence
gggctactatctcaaggggaagatt

SEQ ID NO: 258916 - DNA, 25 bp, Probe Sequence
gggctacttccgagaccagaaggac

SEQ ID NO: 258917 - DNA, 25 bp, Probe Sequence
gggttcctggtgagagacagaggga

SEQ ID NO: 258918 - DNA, 25 bp, Probe Sequence
gggttcctgtatggtggaagctggg

SEQ ID NO: 258919 - DNA, 25 bp, Probe Sequence
gggttcctgtatggtggaagctggg

SEQ ID NO: 258920 - DNA, 25 bp, Probe Sequence
gggctatcctgggggtgaacttgaa

SEQ ID NO: 258921 - DNA, 25 bp, Probe Sequence
gggtatcctgtagggtgacctggaa

SEQ ID NO: 258922 - DNA, 25 bp, Probe Sequence
gggcaacctggagaagacctgagac

SEQ ID NO: 258923 - DNA, 25 bp, Probe Sequence
gggcaaaatggagctcgaggccatg

SEQ ID NO: 258924 - DNA, 25 bp, Probe Sequence
gggcaaacaggcagttggccagaga

SEQ ID NO: 258925 - DNA, 25 bp, Probe Sequence
gggcaagactggacgtgtggacaag

SEQ ID NO: 258926 - DNA, 25 bp, Probe Sequence
gggctagaaatgtgtgttgatgcaa

SEQ ID NO: 258927 - DNA, 25 bp, Probe Sequence
gggcagaaaatctacgtattaattc

SEQ ID NO: 258928 - DNA, 25 bp, Probe Sequence
gggcagcaaacatccttgttctgat

SEQ ID NO: 258929 - DNA, 25 bp, Probe Sequence
gggcatgactataaccatttttgta

SEQ ID NO: 258930 - DNA, 25 bp, Probe Sequence
gggctcctactataaataattttga

SEQ ID NO: 258931 - DNA, 25 bp, Probe Sequence
gggcaacttcaagacacataattgt

SEQ ID NO: 258932 - DNA, 25 bp, Probe Sequence
gggcaattgttagccttacatgttg

SEQ ID NO: 258933 - DNA, 25 bp, Probe Sequence
gggaatgttgtatctttggaggggt

SEQ ID NO: 258934 - DNA, 25 bp, Probe Sequence
gggaattgtagtttgtttagcctgg

SEQ ID NO: 258935 - DNA, 25 bp, Probe Sequence
gggaaatggtttctgtaaccattgt

SEQ ID NO: 258936 - DNA, 25 bp, Probe Sequence
gggacaaggcttcacataaaaaatt

SEQ ID NO: 258937 - DNA, 25 bp, Probe Sequence
gggaaaccatctcaataaacacatt

SEQ ID NO: 258938 - DNA, 25 bp, Probe Sequence
gggaaaccatctcaataaacacatt

SEQ ID NO: 258939 - DNA, 25 bp, Probe Sequence
gggaaaccatctcaataaacacatt

SEQ ID NO: 258940 - DNA, 25 bp, Probe Sequence
gggaaacttctataacgtctacatt

SEQ ID NO: 258941 - DNA, 25 bp, Probe Sequence
gggaacctcctctggagctgaaaga

SEQ ID NO: 258942 - DNA, 25 bp, Probe Sequence
gggacaggttggtggcacgagcaag

SEQ ID NO: 258943 - DNA, 25 bp, Probe Sequence
gggcaagaggatcattgaacgagac

SEQ ID NO: 258944 - DNA, 25 bp, Probe Sequence
gggcaatgaggaatatttgacaatt

SEQ ID NO: 258945 - DNA, 25 bp, Probe Sequence
gggctatgggattctgactaccttg

SEQ ID NO: 258946 - DNA, 25 bp, Probe Sequence
gggcttagagaactacaaggcctgc

SEQ ID NO: 258947 - DNA, 25 bp, Probe Sequence
gggctgttgagtctatctcagtgcc

SEQ ID NO: 258948 - DNA, 25 bp, Probe Sequence
gggcttgatgggctatgtcagtggc

SEQ ID NO: 258949 - DNA, 25 bp, Probe Sequence
gggctaatctggctgagtagtcagt

SEQ ID NO: 258950 - DNA, 25 bp, Probe Sequence
gggcaaatctgtccaaacagctagt

SEQ ID NO: 258951 - DNA, 25 bp, Probe Sequence
gggaaggcagtcgccatgatgcatc

SEQ ID NO: 258952 - DNA, 25 bp, Probe Sequence
gggaaggagatggttctagtaccac

SEQ ID NO: 258953 - DNA, 25 bp, Probe Sequence
gggcaaggccatactttagtacttc

SEQ ID NO: 258954 - DNA, 25 bp, Probe Sequence
ggagaatggcacactttcaacgact

SEQ ID NO: 258955 - DNA, 25 bp, Probe Sequence
gggaatctggctactcttcaaagac

SEQ ID NO: 258956 - DNA, 25 bp, Probe Sequence
gggcaacaggctttttctgtgagac

SEQ ID NO: 258957 - DNA, 25 bp, Probe Sequence
gggaactttgccagcattgatgaac

SEQ ID NO: 258958 - DNA, 25 bp, Probe Sequence
gggaaggcctccatattatacacct

SEQ ID NO: 258959 - DNA, 25 bp, Probe Sequence
gggaaacctacatttgtatcccata

SEQ ID NO: 258960 - DNA, 25 bp, Probe Sequence
gggaaacctgtccatcgtgaggact

SEQ ID NO: 258961 - DNA, 25 bp, Probe Sequence
gggaagcctttgctagggtgtcttg

SEQ ID NO: 258962 - DNA, 25 bp, Probe Sequence
gggaaggctatgagtgaagtgggct

SEQ ID NO: 258963 - DNA, 25 bp, Probe Sequence
gggaactgccagaggaagatctggc

SEQ ID NO: 258964 - DNA, 25 bp, Probe Sequence
gggaacatccacaatgagtggtcat

SEQ ID NO: 258965 - DNA, 25 bp, Probe Sequence
gggaacatacacgttagagtcaaac

SEQ ID NO: 258966 - DNA, 25 bp, Probe Sequence
gggcagaaacccaattacatcaaga

SEQ ID NO: 258967 - DNA, 25 bp, Probe Sequence
gggcagacacccgaagagaattcag

SEQ ID NO: 258968 - DNA, 25 bp, Probe Sequence
gggcaaatccaccatgaagaagtct

SEQ ID NO: 258969 - DNA, 25 bp, Probe Sequence
gggcaacatctctagcatgaatgca

SEQ ID NO: 258970 - DNA, 25 bp, Probe Sequence
gggcaagcacgtggcatacatcatc

SEQ ID NO: 258971 - DNA, 25 bp, Probe Sequence
gggaatgcacttgtcatatagctgg

SEQ ID NO: 258972 - DNA, 25 bp, Probe Sequence
gggaacattgatggcgaatactggc

SEQ ID NO: 258973 - DNA, 25 bp, Probe Sequence
gggcatagagtagagaatagcttca

SEQ ID NO: 258974 - DNA, 25 bp, Probe Sequence
gggcaggagtaggaattgagtgata

SEQ ID NO: 258975 - DNA, 25 bp, Probe Sequence
gggaaagaaggtgggtcatgtatta

SEQ ID NO: 258976 - DNA, 25 bp, Probe Sequence
gggaacaaacgttggttgtgtgtgt

SEQ ID NO: 258977 - DNA, 25 bp, Probe Sequence
gggacagtagggttggtgggagttg

SEQ ID NO: 258978 - DNA, 25 bp, Probe Sequence
gggaagcataggaaactttggaagt

SEQ ID NO: 258979 - DNA, 25 bp, Probe Sequence
gggacagccacgaaaccaaatgggt

SEQ ID NO: 258980 - DNA, 25 bp, Probe Sequence
gggcacccaagtcagcatggaagag

SEQ ID NO: 258981 - DNA, 25 bp, Probe Sequence
gggcagcaccgtgaagacgaatatg

SEQ ID NO: 258982 - DNA, 25 bp, Probe Sequence
gggctgcaccaggcgaagagagaaa

SEQ ID NO: 258983 - DNA, 25 bp, Probe Sequence
gggctcaccgcccaaagaagagaaa

SEQ ID NO: 258984 - DNA, 25 bp, Probe Sequence
gggctacgagcccaacgaggatggc

SEQ ID NO: 258985 - DNA, 25 bp, Probe Sequence
gggctaccacagcagccgagagaag

SEQ ID NO: 258986 - DNA, 25 bp, Probe Sequence
gggcaacccaaactagaaataggat

SEQ ID NO: 258987 - DNA, 25 bp, Probe Sequence
gggaacgcggaaggatcataacgga

SEQ ID NO: 258988 - DNA, 25 bp, Probe Sequence
gggaacaaggtagcataagatggag

SEQ ID NO: 258989 - DNA, 25 bp, Probe Sequence
gggaactacctagatgaagagagta

SEQ ID NO: 258990 - DNA, 25 bp, Probe Sequence
gggacctccactggtgacagagaag

SEQ ID NO: 258991 - DNA, 25 bp, Probe Sequence
gggcacctccattctgtgaggaagt

SEQ ID NO: 258992 - DNA, 25 bp, Probe Sequence
gggcacatctcccacttggagagag

SEQ ID NO: 258993 - DNA, 25 bp, Probe Sequence
gggcacatctcccacttggagagag

SEQ ID NO: 258994 - DNA, 25 bp, Probe Sequence
gggcaattggcgggcatggaggtgg

SEQ ID NO: 258995 - DNA, 25 bp, Probe Sequence
gggacttgcgtggacagtcagggtt

SEQ ID NO: 258996 - DNA, 25 bp, Probe Sequence
gggcagcttggggacgaaggggagc

SEQ ID NO: 258997 - DNA, 25 bp, Probe Sequence
gggaccaattaacaatgcgggatgt

SEQ ID NO: 258998 - DNA, 25 bp, Probe Sequence
gggcacccattctgtacagggagtg

SEQ ID NO: 258999 - DNA, 25 bp, Probe Sequence
ggtgcactttttcgctatttaagtt

SEQ ID NO: 259000 - DNA, 25 bp, Probe Sequence
gggcactttgaccttcattattatg

SEQ ID NO: 259001 - DNA, 25 bp, Probe Sequence
gggcatttggaacatctgcatttgg

SEQ ID NO: 259002 - DNA, 25 bp, Probe Sequence
gggctattggactctctgtagcaga

SEQ ID NO: 259003 - DNA, 25 bp, Probe Sequence
gggctaagggatgctcagatggcag

SEQ ID NO: 259004 - DNA, 25 bp, Probe Sequence
gggctatgagaccatcctgaaagag

SEQ ID NO: 259005 - DNA, 25 bp, Probe Sequence
gggctgtgaatgctcggagagggtc

SEQ ID NO: 259006 - DNA, 25 bp, Probe Sequence
gggcttgatatgactttgaggggac

SEQ ID NO: 259007 - DNA, 25 bp, Probe Sequence
gggctatgagagatttcaggtgaga

SEQ ID NO: 259008 - DNA, 25 bp, Probe Sequence
gggcaacagaatatgtcagggcaac

SEQ ID NO: 259009 - DNA, 25 bp, Probe Sequence
gggcaggtgttagggcgagtgaatc

SEQ ID NO: 259010 - DNA, 25 bp, Probe Sequence
gggcaggcagcttaagtgtgagttt

SEQ ID NO: 259011 - DNA, 25 bp, Probe Sequence
gggcatggactaatttgtatctgtt

SEQ ID NO: 259012 - DNA, 25 bp, Probe Sequence
gggcatggtcatgtagagtacagtg

SEQ ID NO: 259013 - DNA, 25 bp, Probe Sequence
gggcatcttaggaagcagtccctgg

SEQ ID NO: 259014 - DNA, 25 bp, Probe Sequence
gggctctatgggaaggaccagcagg

SEQ ID NO: 259015 - DNA, 25 bp, Probe Sequence
ggtccttcaggaagtactccagaag

SEQ ID NO: 259016 - DNA, 25 bp, Probe Sequence
ggtccttaagctttactaaacatga

SEQ ID NO: 259017 - DNA, 25 bp, Probe Sequence
ggtcagttaggttaaccacccagag

SEQ ID NO: 259018 - DNA, 25 bp, Probe Sequence
gggactatcaggaaaacgcaccaaa

SEQ ID NO: 259019 - DNA, 25 bp, Probe Sequence
gggactatcaggaaaacgcaccaaa

SEQ ID NO: 259020 - DNA, 25 bp, Probe Sequence
gggaaccatgagaaaagtggcacca

SEQ ID NO: 259021 - DNA, 25 bp, Probe Sequence
gggaatcccaaattagtgacatgtc

SEQ ID NO: 259022 - DNA, 25 bp, Probe Sequence
gggaatcccaaattagtgacatgtc

SEQ ID NO: 259023 - DNA, 25 bp, Probe Sequence
gggaatcactaattttcccattcct

SEQ ID NO: 259024 - DNA, 25 bp, Probe Sequence
gggcataactaatattctcctgttc

SEQ ID NO: 259025 - DNA, 25 bp, Probe Sequence
gggcactattaatatacttctctcc

SEQ ID NO: 259026 - DNA, 25 bp, Probe Sequence
gggcactgactgtaggatatgttcc

SEQ ID NO: 259027 - DNA, 25 bp, Probe Sequence
gggcacaacttcagagcattcatca

SEQ ID NO: 259028 - DNA, 25 bp, Probe Sequence
gggacaattaccgagcctatgaaga

SEQ ID NO: 259029 - DNA, 25 bp, Probe Sequence
gggcacaaaacatacttagaatgaa

SEQ ID NO: 259030 - DNA, 25 bp, Probe Sequence
gggacgtttctgcatttggactgaa

SEQ ID NO: 259031 - DNA, 25 bp, Probe Sequence
gggacggcaggacatcctggacgac

SEQ ID NO: 259032 - DNA, 25 bp, Probe Sequence
gggacagctgaggatgggcctagca

SEQ ID NO: 259033 - DNA, 25 bp, Probe Sequence
gggcactgtgaccagggttcacatt

SEQ ID NO: 259034 - DNA, 25 bp, Probe Sequence
gggcagattgtcagaagcttcagtt

SEQ ID NO: 259035 - DNA, 25 bp, Probe Sequence
gggcatcacttcacaatgttcaact

SEQ ID NO: 259036 - DNA, 25 bp, Probe Sequence
gggcaactgaagccttttgagaccc

SEQ ID NO: 259037 - DNA, 25 bp, Probe Sequence
gggcaagcaggatcttacgatgact

SEQ ID NO: 259038 - DNA, 25 bp, Probe Sequence
gggcattcaggaccttgaggacacg

SEQ ID NO: 259039 - DNA, 25 bp, Probe Sequence
gggcttctgataccctcaaacatgg

SEQ ID NO: 259040 - DNA, 25 bp, Probe Sequence
gggcatgttgtataccaaaagagtg

SEQ ID NO: 259041 - DNA, 25 bp, Probe Sequence
gggagttcaaaataaccagagttcg

SEQ ID NO: 259042 - DNA, 25 bp, Probe Sequence
gggggggaaatatggtatgaggtcg

SEQ ID NO: 259043 - DNA, 25 bp, Probe Sequence
gggaggggaacctgtaatcaggtag

SEQ ID NO: 259044 - DNA, 25 bp, Probe Sequence
gggtcggctaagtgggacattagta

SEQ ID NO: 259045 - DNA, 25 bp, Probe Sequence
gggaggttacagaggctgacttcag

SEQ ID NO: 259046 - DNA, 25 bp, Probe Sequence
gggaggttacagaggctgacttcag

SEQ ID NO: 259047 - DNA, 25 bp, Probe Sequence
gggacctggacgaatttgacttctg

SEQ ID NO: 259048 - DNA, 25 bp, Probe Sequence
gggacctggacgaatttgacttctg

SEQ ID NO: 259049 - DNA, 25 bp, Probe Sequence
gggacctggacgaatttgacttctg

SEQ ID NO: 259050 - DNA, 25 bp, Probe Sequence
gggaacgtgactggattccctcact

SEQ ID NO: 259051 - DNA, 25 bp, Probe Sequence
gggcaaatgtttgtgtggcctcctt

SEQ ID NO: 259052 - DNA, 25 bp, Probe Sequence
gggaaatggattcttgtcctgttgt

SEQ ID NO: 259053 - DNA, 25 bp, Probe Sequence
gggaatgggaatccttgctgcactg

SEQ ID NO: 259054 - DNA, 25 bp, Probe Sequence
gggctttggaagccatctctgactg

SEQ ID NO: 259055 - DNA, 25 bp, Probe Sequence
gggcttggagaagatctctgcctac

SEQ ID NO: 259056 - DNA, 25 bp, Probe Sequence
gggctttatggagatattcactttg

SEQ ID NO: 259057 - DNA, 25 bp, Probe Sequence
gggcactttacagaatccagttgtg

SEQ ID NO: 259058 - DNA, 25 bp, Probe Sequence
gggaaatgtacctggcacgtttgaa

SEQ ID NO: 259059 - DNA, 25 bp, Probe Sequence
gggaaagtacccagcaagatctcag

SEQ ID NO: 259060 - DNA, 25 bp, Probe Sequence
gggaatagtacacccaccaacgagg

SEQ ID NO: 259061 - DNA, 25 bp, Probe Sequence
gggcaaaatcaagccccacctgatg

SEQ ID NO: 259062 - DNA, 25 bp, Probe Sequence
gggcaaaatcaagccccacctgatg

SEQ ID NO: 259063 - DNA, 25 bp, Probe Sequence
gggaaaaatacctccagcttggcga

SEQ ID NO: 259064 - DNA, 25 bp, Probe Sequence
gggaagaaatagccttacagcccct

SEQ ID NO: 259065 - DNA, 25 bp, Probe Sequence
gggcaaggattctctgtacgcccag

SEQ ID NO: 259066 - DNA, 25 bp, Probe Sequence
gggaagacaacgtagtcaccctcgg

SEQ ID NO: 259067 - DNA, 25 bp, Probe Sequence
gggaagacaacgtagtcaccctcgg

SEQ ID NO: 259068 - DNA, 25 bp, Probe Sequence
gggaaaataagcgaggcaccgccgc

SEQ ID NO: 259069 - DNA, 25 bp, Probe Sequence
gggaaagtagaggatggctcgatgt

SEQ ID NO: 259070 - DNA, 25 bp, Probe Sequence
gggaaggaatgaatgtggtgcaatc

SEQ ID NO: 259071 - DNA, 25 bp, Probe Sequence
gggctatggaactatgcaggtggct

SEQ ID NO: 259072 - DNA, 25 bp, Probe Sequence
gggctcaggaactcagagtcccagt

SEQ ID NO: 259073 - DNA, 25 bp, Probe Sequence
gggcacggaattcgaagacccagca

SEQ ID NO: 259074 - DNA, 25 bp, Probe Sequence
gggatcgcagtttggaaactccggc

SEQ ID NO: 259075 - DNA, 25 bp, Probe Sequence
gggcaggggcgtctaatatcctggc

SEQ ID NO: 259076 - DNA, 25 bp, Probe Sequence
gggaaggacagtcttcattcctcct

SEQ ID NO: 259077 - DNA, 25 bp, Probe Sequence
gggaagaacattattcatctctcct

SEQ ID NO: 259078 - DNA, 25 bp, Probe Sequence
gggaaggagcacattctccatgctc

SEQ ID NO: 259079 - DNA, 25 bp, Probe Sequence
gggacaagagcaaagcccactgcca

SEQ ID NO: 259080 - DNA, 25 bp, Probe Sequence
gggactgaagcaactgtacatccac

SEQ ID NO: 259081 - DNA, 25 bp, Probe Sequence
gggcagcagagacggctacagcccc

SEQ ID NO: 259082 - DNA, 25 bp, Probe Sequence
gggacaagtggcgttcagccacccg

SEQ ID NO: 259083 - DNA, 25 bp, Probe Sequence
gggaaaagggcaaagctcaccagct

SEQ ID NO: 259084 - DNA, 25 bp, Probe Sequence
gggacaaggggcaggtcccaggagc

SEQ ID NO: 259085 - DNA, 25 bp, Probe Sequence
gggtccgtgggcaagttgcccaggg

SEQ ID NO: 259086 - DNA, 25 bp, Probe Sequence
gggaacgggcagaattggccactga

SEQ ID NO: 259087 - DNA, 25 bp, Probe Sequence
gggcaaggggagaattcacatcctg

SEQ ID NO: 259088 - DNA, 25 bp, Probe Sequence
gggaagtctaagagtccatgccaga

SEQ ID NO: 259089 - DNA, 25 bp, Probe Sequence
gggacagtgcaacaagtaaccagac

SEQ ID NO: 259090 - DNA, 25 bp, Probe Sequence
gggaacacacaaagaattacacaac

SEQ ID NO: 259091 - DNA, 25 bp, Probe Sequence
gggaaacaaacgatatatctcatgg

SEQ ID NO: 259092 - DNA, 25 bp, Probe Sequence
gggaaaaaactcaataactagctat

SEQ ID NO: 259093 - DNA, 25 bp, Probe Sequence
gggtccgaaaccagcaagaagtatg

SEQ ID NO: 259094 - DNA, 25 bp, Probe Sequence
gggacctgaaaggatccagaaatgg

SEQ ID NO: 259095 - DNA, 25 bp, Probe Sequence
gggacggaaacatcagcaccaaaga

SEQ ID NO: 259096 - DNA, 25 bp, Probe Sequence
gggacaggaaccaaacatcacggga

SEQ ID NO: 259097 - DNA, 25 bp, Probe Sequence
gggactggatcaaagagaacactgg

SEQ ID NO: 259098 - DNA, 25 bp, Probe Sequence
gggacggcaatagcaaatgcagttg

SEQ ID NO: 259099 - DNA, 25 bp, Probe Sequence
gggactggcagcttcaaattccttg

SEQ ID NO: 259100 - DNA, 25 bp, Probe Sequence
gggcactgtcaagtccaagtacaag

SEQ ID NO: 259101 - DNA, 25 bp, Probe Sequence
gggcatcgtcaaggacatcatccac

SEQ ID NO: 259102 - DNA, 25 bp, Probe Sequence
gggcattgtagatccatatccacca

SEQ ID NO: 259103 - DNA, 25 bp, Probe Sequence
gggcaggtgaaaatgcatttcccca

SEQ ID NO: 259104 - DNA, 25 bp, Probe Sequence
gggaaggacagttgatttccaacat

SEQ ID NO: 259105 - DNA, 25 bp, Probe Sequence
gggacagagaccttgatgatattca

SEQ ID NO: 259106 - DNA, 25 bp, Probe Sequence
gggaaaatcagctgcagtgatggca

SEQ ID NO: 259107 - DNA, 25 bp, Probe Sequence
gggaaggtcacatgcagtggccaag

SEQ ID NO: 259108 - DNA, 25 bp, Probe Sequence
gggaaggttagacttgctgcccaga

SEQ ID NO: 259109 - DNA, 25 bp, Probe Sequence
gggacgcgttcataactgtcctcaa

SEQ ID NO: 259110 - DNA, 25 bp, Probe Sequence
gggagaagcttcagaaagttccgag

SEQ ID NO: 259111 - DNA, 25 bp, Probe Sequence
gggtggagactttggtggttcgtag

SEQ ID NO: 259112 - DNA, 25 bp, Probe Sequence
gggagagaacttggttggttttcag

SEQ ID NO: 259113 - DNA, 25 bp, Probe Sequence
gggaagattcttgtaggtgtatgct

SEQ ID NO: 259114 - DNA, 25 bp, Probe Sequence
gggacagtgtgctcagtaaagtctt

SEQ ID NO: 259115 - DNA, 25 bp, Probe Sequence
gggactgtttccctcaaattttgtg

SEQ ID NO: 259116 - DNA, 25 bp, Probe Sequence
gggaccttatttgaggatgtgttct

SEQ ID NO: 259117 - DNA, 25 bp, Probe Sequence
gggactattacccaagagaggtatc

SEQ ID NO: 259118 - DNA, 25 bp, Probe Sequence
gggcactttcttaagcaagcaggtt

SEQ ID NO: 259119 - DNA, 25 bp, Probe Sequence
gggcactctatataaggagcgattc

SEQ ID NO: 259120 - DNA, 25 bp, Probe Sequence
gggacctgaatgaaagggaatccaa

SEQ ID NO: 259121 - DNA, 25 bp, Probe Sequence
gggcacaggaggccaagggcagctc

SEQ ID NO: 259122 - DNA, 25 bp, Probe Sequence
gggcacagtagtaaagctgcctgcc

SEQ ID NO: 259123 - DNA, 25 bp, Probe Sequence
gggacgctagtaaccatgggcttgc

SEQ ID NO: 259124 - DNA, 25 bp, Probe Sequence
gggacgctagtaaccatgggcttgc

SEQ ID NO: 259125 - DNA, 25 bp, Probe Sequence
gggacttagttaccaggcagaagca

SEQ ID NO: 259126 - DNA, 25 bp, Probe Sequence
gggacttacttaactgcataaagag

SEQ ID NO: 259127 - DNA, 25 bp, Probe Sequence
gggaattcatccatgatgtgcatga

SEQ ID NO: 259128 - DNA, 25 bp, Probe Sequence
gggacatgccatgcattcaatgcta

SEQ ID NO: 259129 - DNA, 25 bp, Probe Sequence
gggacatcatgacatcatcactgat

SEQ ID NO: 259130 - DNA, 25 bp, Probe Sequence
gggagcacacagctcttcttaaaat

SEQ ID NO: 259131 - DNA, 25 bp, Probe Sequence
gggacaaatcccaatctgctgaaat

SEQ ID NO: 259132 - DNA, 25 bp, Probe Sequence
gggtatacctctaactgtgcaaagc

SEQ ID NO: 259133 - DNA, 25 bp, Probe Sequence
gggcttacctgtacactgacttgag

SEQ ID NO: 259134 - DNA, 25 bp, Probe Sequence
gggcattacctcttagtgatatttg

SEQ ID NO: 259135 - DNA, 25 bp, Probe Sequence
gggttaaccttgactatatttagag

SEQ ID NO: 259136 - DNA, 25 bp, Probe Sequence
gggttaaccttgactatatttagag

SEQ ID NO: 259137 - DNA, 25 bp, Probe Sequence
gggatgtataccagactatggcatt

SEQ ID NO: 259138 - DNA, 25 bp, Probe Sequence
gggcatgtgtgggaaatcctgcgtt

SEQ ID NO: 259139 - DNA, 25 bp, Probe Sequence
gggctacgtggacgacacgcagttc

SEQ ID NO: 259140 - DNA, 25 bp, Probe Sequence
gggcttcgtggtgagcactgcagcc

SEQ ID NO: 259141 - DNA, 25 bp, Probe Sequence
gggcatttgatgtaccagacgcaga

SEQ ID NO: 259142 - DNA, 25 bp, Probe Sequence
gggcaattggcagatcaagcgccag

SEQ ID NO: 259143 - DNA, 25 bp, Probe Sequence
gggcaattggcagatcaagcgccag

SEQ ID NO: 259144 - DNA, 25 bp, Probe Sequence
gggaatctagacttggatctgccag

SEQ ID NO: 259145 - DNA, 25 bp, Probe Sequence
gggctattagagttatatctccctg

SEQ ID NO: 259146 - DNA, 25 bp, Probe Sequence
gggcttgtccaagttcattgccctg

SEQ ID NO: 259147 - DNA, 25 bp, Probe Sequence
gggcattgtacaagttcttccctct

SEQ ID NO: 259148 - DNA, 25 bp, Probe Sequence
gggcttaaagtcatcttgtcctgct

SEQ ID NO: 259149 - DNA, 25 bp, Probe Sequence
gggcttatacatgaatttgttttga

SEQ ID NO: 259150 - DNA, 25 bp, Probe Sequence
gggcttaaacccataggtagtcagg

SEQ ID NO: 259151 - DNA, 25 bp, Probe Sequence
ggtcttcaaatctctttttagctca

SEQ ID NO: 259152 - DNA, 25 bp, Probe Sequence
gggtataagatctgaacttttcatc

SEQ ID NO: 259153 - DNA, 25 bp, Probe Sequence
gggaataaatgagattctctgtaat

SEQ ID NO: 259154 - DNA, 25 bp, Probe Sequence
gggaacaaatgatctactcaggaag

SEQ ID NO: 259155 - DNA, 25 bp, Probe Sequence
gggaaaacactagagctgcaggtac

SEQ ID NO: 259156 - DNA, 25 bp, Probe Sequence
gggaaacccataaaggcgcactgcc

SEQ ID NO: 259157 - DNA, 25 bp, Probe Sequence
gggaagacccaatcagagctggtga

SEQ ID NO: 259158 - DNA, 25 bp, Probe Sequence
gggaaatcccagtacagatcgtttc

SEQ ID NO: 259159 - DNA, 25 bp, Probe Sequence
gggaaatcctcattgacgattcaat

SEQ ID NO: 259160 - DNA, 25 bp, Probe Sequence
gggcaaatcctgtgacttgtgctta

SEQ ID NO: 259161 - DNA, 25 bp, Probe Sequence
gggcaatgtattttacgctgtgtta

SEQ ID NO: 259162 - DNA, 25 bp, Probe Sequence
gggcaattgctctaagacagctctt

SEQ ID NO: 259163 - DNA, 25 bp, Probe Sequence
gggcagcttcacaaggcaagtcttc

SEQ ID NO: 259164 - DNA, 25 bp, Probe Sequence
gggagcttcacttggacaacaacaa

SEQ ID NO: 259165 - DNA, 25 bp, Probe Sequence
gggagcttcacttggacaacaacaa

SEQ ID NO: 259166 - DNA, 25 bp, Probe Sequence
gggagcttcacttggacaacaacaa

SEQ ID NO: 259167 - DNA, 25 bp, Probe Sequence
gggagttgcccacatagaaacagaa

SEQ ID NO: 259168 - DNA, 25 bp, Probe Sequence
gggaactgtcgacaaacactcagtg

SEQ ID NO: 259169 - DNA, 25 bp, Probe Sequence
gggaactggccaacaacatgcagga

SEQ ID NO: 259170 - DNA, 25 bp, Probe Sequence
gggcaagctgccagtcaagtggaca

SEQ ID NO: 259171 - DNA, 25 bp, Probe Sequence
gggaagatgcacaaccaaggggtta

SEQ ID NO: 259172 - DNA, 25 bp, Probe Sequence
gggaaggccaatgcaagtggttcag

SEQ ID NO: 259173 - DNA, 25 bp, Probe Sequence
gggagggtccatgtagtcagaccaa

SEQ ID NO: 259174 - DNA, 25 bp, Probe Sequence
gggaaattccatcttccagatcaat

SEQ ID NO: 259175 - DNA, 25 bp, Probe Sequence
gggaatatctgctctctgttagatc

SEQ ID NO: 259176 - DNA, 25 bp, Probe Sequence
gggaaatgctgggcaatgctcgggc

SEQ ID NO: 259177 - DNA, 25 bp, Probe Sequence
gggaacaggagaggtcactgggcct

SEQ ID NO: 259178 - DNA, 25 bp, Probe Sequence
gggcattcatgatgggacctgcccc

SEQ ID NO: 259179 - DNA, 25 bp, Probe Sequence
gggatgccatgaagggcgaccgtgc

SEQ ID NO: 259180 - DNA, 25 bp, Probe Sequence
gggcaggcatataggggatggcgag

SEQ ID NO: 259181 - DNA, 25 bp, Probe Sequence
gggcagaattattgggtagggcggg

SEQ ID NO: 259182 - DNA, 25 bp, Probe Sequence
gggcatgagaccaagggtgcggcgg

SEQ ID NO: 259183 - DNA, 25 bp, Probe Sequence
gggacaagccgagtgaggggcggcc

SEQ ID NO: 259184 - DNA, 25 bp, Probe Sequence
gggacaaccatggctggcatggggg

SEQ ID NO: 259185 - DNA, 25 bp, Probe Sequence
gggaacaaaggctgcagggtctgac

SEQ ID NO: 259186 - DNA, 25 bp, Probe Sequence
gggaagccaaggtgggagtatcgct

SEQ ID NO: 259187 - DNA, 25 bp, Probe Sequence
gggacaccgagagagtgaggtcact

SEQ ID NO: 259188 - DNA, 25 bp, Probe Sequence
gggacgacgggagctgcatgaaagc

SEQ ID NO: 259189 - DNA, 25 bp, Probe Sequence
gggcaagaggtgcagcccgaggcac

SEQ ID NO: 259190 - DNA, 25 bp, Probe Sequence
gggaaggatgtgggtctctagtgcc

SEQ ID NO: 259191 - DNA, 25 bp, Probe Sequence
gggaaggatgtgggtctctagtgcc

SEQ ID NO: 259192 - DNA, 25 bp, Probe Sequence
gggaactatggctatgctaatagtg

SEQ ID NO: 259193 - DNA, 25 bp, Probe Sequence
gggcaagcgggcagctgaagatgat

SEQ ID NO: 259194 - DNA, 25 bp, Probe Sequence
gggacatggggagcttagatgatcc

SEQ ID NO: 259195 - DNA, 25 bp, Probe Sequence
gggcacagggaagttctggtgtcat

SEQ ID NO: 259196 - DNA, 25 bp, Probe Sequence
gggcacagggaagttctggtgtcat

SEQ ID NO: 259197 - DNA, 25 bp, Probe Sequence
gggcagtgggagttatggggtcatc

SEQ ID NO: 259198 - DNA, 25 bp, Probe Sequence
gggcaggggagttctgaggctcctg

SEQ ID NO: 259199 - DNA, 25 bp, Probe Sequence
gggcaaggggctccgagggagcgcc

SEQ ID NO: 259200 - DNA, 25 bp, Probe Sequence
gggcagaatggggctcggtgagacc

SEQ ID NO: 259201 - DNA, 25 bp, Probe Sequence
gggcagaatggggctcggtgagacc

SEQ ID NO: 259202 - DNA, 25 bp, Probe Sequence
gggcactgaggggcaacagggaccc

SEQ ID NO: 259203 - DNA, 25 bp, Probe Sequence
gggcacgagaggaaactggtgacca

SEQ ID NO: 259204 - DNA, 25 bp, Probe Sequence
gggcaacagagtaagacctgtaaaa

SEQ ID NO: 259205 - DNA, 25 bp, Probe Sequence
gggcattccagctgagacactgtga

SEQ ID NO: 259206 - DNA, 25 bp, Probe Sequence
gggagctgccattaagatcattcgg

SEQ ID NO: 259207 - DNA, 25 bp, Probe Sequence
gggcagctgactaagagccctctgg

SEQ ID NO: 259208 - DNA, 25 bp, Probe Sequence
gggcaggtgctgagtgcccatgtgt

SEQ ID NO: 259209 - DNA, 25 bp, Probe Sequence
gggcatttgaggctgccatatgagt

SEQ ID NO: 259210 - DNA, 25 bp, Probe Sequence
gggcatcctgggctacactgagcac

SEQ ID NO: 259211 - DNA, 25 bp, Probe Sequence
gggcatccattgatttcaagactga

SEQ ID NO: 259212 - DNA, 25 bp, Probe Sequence
gggcttgcatggagttagatcctgc

SEQ ID NO: 259213 - DNA, 25 bp, Probe Sequence
gggcatggagtgcgtgaagagccgc

SEQ ID NO: 259214 - DNA, 25 bp, Probe Sequence
gggcatggcgctggagtgagatggg

SEQ ID NO: 259215 - DNA, 25 bp, Probe Sequence
gggcagatcgcttgagccaaggagt

SEQ ID NO: 259216 - DNA, 25 bp, Probe Sequence
gggaaggctaaggacaggagtgggg

SEQ ID NO: 259217 - DNA, 25 bp, Probe Sequence
gggaagggaagccgtcaggtgggcg

SEQ ID NO: 259218 - DNA, 25 bp, Probe Sequence
gggaaggagcagtcagtgttgtggg

SEQ ID NO: 259219 - DNA, 25 bp, Probe Sequence
gggaagcaggagtagtattgatgta

SEQ ID NO: 259220 - DNA, 25 bp, Probe Sequence
gggcaggggcatcagaaggtgctaa

SEQ ID NO: 259221 - DNA, 25 bp, Probe Sequence
gggcaggggcttaaacagtgccagc

SEQ ID NO: 259222 - DNA, 25 bp, Probe Sequence
gggaggggttcgtacaggagcaata

SEQ ID NO: 259223 - DNA, 25 bp, Probe Sequence
gggagtcatggcacagtacggtgga

SEQ ID NO: 259224 - DNA, 25 bp, Probe Sequence
gggagtcagggagctagggcaggga

SEQ ID NO: 259225 - DNA, 25 bp, Probe Sequence
gggaccgtgactcaatgcggcagat

SEQ ID NO: 259226 - DNA, 25 bp, Probe Sequence
gggaaggaatgtaaacgtgcatgta

SEQ ID NO: 259227 - DNA, 25 bp, Probe Sequence
gggaagtgacagcctcatcaagggt

SEQ ID NO: 259228 - DNA, 25 bp, Probe Sequence
gggaggataactttcacagggtaat

SEQ ID NO: 259229 - DNA, 25 bp, Probe Sequence
gggactatgaaatccacgatgggat

SEQ ID NO: 259230 - DNA, 25 bp, Probe Sequence
gggactgcttactactaagtggctg

SEQ ID NO: 259231 - DNA, 25 bp, Probe Sequence
gggcactgtgtacacatgagggggt

SEQ ID NO: 259232 - DNA, 25 bp, Probe Sequence
gggcatctgctgtgcatacagacgt

SEQ ID NO: 259233 - DNA, 25 bp, Probe Sequence
gggcaccatgaacagacagctgaag

SEQ ID NO: 259234 - DNA, 25 bp, Probe Sequence
gggactctcagcagagtttgatagt

SEQ ID NO: 259235 - DNA, 25 bp, Probe Sequence
gggacttactaggtttgaatgcggt

SEQ ID NO: 259236 - DNA, 25 bp, Probe Sequence
gggactttccaggacgtcaagggtg

SEQ ID NO: 259237 - DNA, 25 bp, Probe Sequence
gggactttccatgacgtcaatgggt

SEQ ID NO: 259238 - DNA, 25 bp, Probe Sequence
gggacttccagtgacgtcaatgggt

SEQ ID NO: 259239 - DNA, 25 bp, Probe Sequence
gggacacacgagttcacagtcgagc

SEQ ID NO: 259240 - DNA, 25 bp, Probe Sequence
gggcaacactggtcctcagtgtcac

SEQ ID NO: 259241 - DNA, 25 bp, Probe Sequence
gggaaatatggtatgaggtcgccac

SEQ ID NO: 259242 - DNA, 25 bp, Probe Sequence
gggaaaaggattaggtgggcacata

SEQ ID NO: 259243 - DNA, 25 bp, Probe Sequence
gggaaagctggaatgggatgggaac

SEQ ID NO: 259244 - DNA, 25 bp, Probe Sequence
gggaatgcggtgaggcagtgtggaa

SEQ ID NO: 259245 - DNA, 25 bp, Probe Sequence
gggcagttggtgaagcagatgctgg

SEQ ID NO: 259246 - DNA, 25 bp, Probe Sequence
gggacagttgagaagctgactgggc

SEQ ID NO: 259247 - DNA, 25 bp, Probe Sequence
gggacactcaggaagtgcctctgga

SEQ ID NO: 259248 - DNA, 25 bp, Probe Sequence
gggaattaggcatctgccctgatga

SEQ ID NO: 259249 - DNA, 25 bp, Probe Sequence
gggacaaagccatctgggcagtcag

SEQ ID NO: 259250 - DNA, 25 bp, Probe Sequence
gggaaattgcccggggaatctgtcg

SEQ ID NO: 259251 - DNA, 25 bp, Probe Sequence
gggaagccttctggggcgaattacg

SEQ ID NO: 259252 - DNA, 25 bp, Probe Sequence
gggaaccttgtggtgagtaactatc

SEQ ID NO: 259253 - DNA, 25 bp, Probe Sequence
gggcagggttgggctgaatcaaatg

SEQ ID NO: 259254 - DNA, 25 bp, Probe Sequence
gggaggtggggcctcaatctaaggc

SEQ ID NO: 259255 - DNA, 25 bp, Probe Sequence
gggaagggggctcattcacagagag

SEQ ID NO: 259256 - DNA, 25 bp, Probe Sequence
gggaaggagaaccatttgatcagaa

SEQ ID NO: 259257 - DNA, 25 bp, Probe Sequence
gggcacacggaaggcattgctgtag

SEQ ID NO: 259258 - DNA, 25 bp, Probe Sequence
gggaccgatgaatcttgctttaaca

SEQ ID NO: 259259 - DNA, 25 bp, Probe Sequence
gggaccggatatttcttatttctca

SEQ ID NO: 259260 - DNA, 25 bp, Probe Sequence
gggacctggttatgttgttattctc

SEQ ID NO: 259261 - DNA, 25 bp, Probe Sequence
gggacctggacttgaatttgattga

SEQ ID NO: 259262 - DNA, 25 bp, Probe Sequence
gggacctacacttaatctatatgct

SEQ ID NO: 259263 - DNA, 25 bp, Probe Sequence
gggaagccaacttcactgtatcctc

SEQ ID NO: 259264 - DNA, 25 bp, Probe Sequence
gggaagtcaattaagctttactgct

SEQ ID NO: 259265 - DNA, 25 bp, Probe Sequence
gggcaagtcatagaagtcgaaacat

SEQ ID NO: 259266 - DNA, 25 bp, Probe Sequence
gggcacatgttatggcagattgaaa

SEQ ID NO: 259267 - DNA, 25 bp, Probe Sequence
ggtcctctgaacggagttcaaaggc

SEQ ID NO: 259268 - DNA, 25 bp, Probe Sequence
ggtgtcctggacggtgtcctaatgg

SEQ ID NO: 259269 - DNA, 25 bp, Probe Sequence
gggtcgtggccgaggccaacagagc

SEQ ID NO: 259270 - DNA, 25 bp, Probe Sequence
gggagtggaccgaggacgaggtgct

SEQ ID NO: 259271 - DNA, 25 bp, Probe Sequence
gggaaagcgccgagatgacgggctt

SEQ ID NO: 259272 - DNA, 25 bp, Probe Sequence
gggaaactccgaggacagagggcta

SEQ ID NO: 259273 - DNA, 25 bp, Probe Sequence
gggaagcctccgtcaggagagacgc

SEQ ID NO: 259274 - DNA, 25 bp, Probe Sequence
gggacatgttccacgagaagcacga

SEQ ID NO: 259275 - DNA, 25 bp, Probe Sequence
gggacatgttccacgagaagcacga

SEQ ID NO: 259276 - DNA, 25 bp, Probe Sequence
gggaagaatccaactgatgagtatc

SEQ ID NO: 259277 - DNA, 25 bp, Probe Sequence
gggaatgaatgtcacttgtgtaccg

SEQ ID NO: 259278 - DNA, 25 bp, Probe Sequence
gggagtggagctcatttttacaagc

SEQ ID NO: 259279 - DNA, 25 bp, Probe Sequence
gggaggtaggaattgttttaatgca

SEQ ID NO: 259280 - DNA, 25 bp, Probe Sequence
gggaagtgggaaatattaaagcatc

SEQ ID NO: 259281 - DNA, 25 bp, Probe Sequence
gggaaggttctaataataaagccag

SEQ ID NO: 259282 - DNA, 25 bp, Probe Sequence
gggcaaggtttgaataggaagagaa

SEQ ID NO: 259283 - DNA, 25 bp, Probe Sequence
gggacggccctgaagagtgcaagga

SEQ ID NO: 259284 - DNA, 25 bp, Probe Sequence
gggatccagacccaaggtgccaaac

SEQ ID NO: 259285 - DNA, 25 bp, Probe Sequence
ggctaccaggaagagtctgccgaag

SEQ ID NO: 259286 - DNA, 25 bp, Probe Sequence
ggtaccaatacgagttcccataggg

SEQ ID NO: 259287 - DNA, 25 bp, Probe Sequence
ggtgactagacagtgggattcccat

SEQ ID NO: 259288 - DNA, 25 bp, Probe Sequence
gggatctgataactgggattctgcc

SEQ ID NO: 259289 - DNA, 25 bp, Probe Sequence
gggcaagaaagcaaggtgctgtctc

SEQ ID NO: 259290 - DNA, 25 bp, Probe Sequence
gggaatgaccagcaggtatttctat

SEQ ID NO: 259291 - DNA, 25 bp, Probe Sequence
gggaagatgccatagttttcgttac

SEQ ID NO: 259292 - DNA, 25 bp, Probe Sequence
gggaagatgccttacgtctgatctt

SEQ ID NO: 259293 - DNA, 25 bp, Probe Sequence
gggacaatggtgggcagttgctctt

SEQ ID NO: 259294 - DNA, 25 bp, Probe Sequence
gggacaatggtgggcagttgctctt

SEQ ID NO: 259295 - DNA, 25 bp, Probe Sequence
gggaaatgtggacctggattcttga

SEQ ID NO: 259296 - DNA, 25 bp, Probe Sequence
gggaagaggtgatctgtaatgttac

SEQ ID NO: 259297 - DNA, 25 bp, Probe Sequence
gggaagaggctgtgcctgttgagtc

SEQ ID NO: 259298 - DNA, 25 bp, Probe Sequence
gggaatatgaggtatccgtaagacc

SEQ ID NO: 259299 - DNA, 25 bp, Probe Sequence
tgactggattagctaccatgtagga

SEQ ID NO: 259300 - DNA, 25 bp, Probe Sequence
gggcagcagggccctagtagcagcc

SEQ ID NO: 259301 - DNA, 25 bp, Probe Sequence
gggaagagtgctttagggacccact

SEQ ID NO: 259302 - DNA, 25 bp, Probe Sequence
gggacgatgccttggatggagacga

SEQ ID NO: 259303 - DNA, 25 bp, Probe Sequence
gggaatgctgtcgggactgagcagg

SEQ ID NO: 259304 - DNA, 25 bp, Probe Sequence
gggcaagctgtgtgcatgcacgggc

SEQ ID NO: 259305 - DNA, 25 bp, Probe Sequence
gggcaatgtgactgctgacaaagat

SEQ ID NO: 259306 - DNA, 25 bp, Probe Sequence
gggcagtgagacaagccagctggaa

SEQ ID NO: 259307 - DNA, 25 bp, Probe Sequence
gggacaagcatcaagcacgcagcaa

SEQ ID NO: 259308 - DNA, 25 bp, Probe Sequence
gggacaatgaagacaagcacacagg

SEQ ID NO: 259309 - DNA, 25 bp, Probe Sequence
tgtttgacgacgaaaacacagccca

SEQ ID NO: 259310 - DNA, 25 bp, Probe Sequence
gggaactgacagagcaaccacccat

SEQ ID NO: 259311 - DNA, 25 bp, Probe Sequence
gggcaacagagggagtacccctatt

SEQ ID NO: 259312 - DNA, 25 bp, Probe Sequence
gggacacagagacagtacctgtaat

SEQ ID NO: 259313 - DNA, 25 bp, Probe Sequence
gggaagctgacagagatacctacag

SEQ ID NO: 259314 - DNA, 25 bp, Probe Sequence
gggaagctgtcgggagggctaggac

SEQ ID NO: 259315 - DNA, 25 bp, Probe Sequence
gggcagggtcagcatgaggagggga

SEQ ID NO: 259316 - DNA, 25 bp, Probe Sequence
gggcagaaccagcagcaggggctgc

SEQ ID NO: 259317 - DNA, 25 bp, Probe Sequence
gggcagtacatacatgggcgtgata

SEQ ID NO: 259318 - DNA, 25 bp, Probe Sequence
gggcagcaaattcttgagccatgaa

SEQ ID NO: 259319 - DNA, 25 bp, Probe Sequence
gggcagagtgtgcttggagtcagag

SEQ ID NO: 259320 - DNA, 25 bp, Probe Sequence
gggcagctggggttggaggatgaga

SEQ ID NO: 259321 - DNA, 25 bp, Probe Sequence
gggcagtggcggcagaatgttggct

SEQ ID NO: 259322 - DNA, 25 bp, Probe Sequence
gggcacatggggaagagtttagatt

SEQ ID NO: 259323 - DNA, 25 bp, Probe Sequence
gggcagcataagaggttgcttacat

SEQ ID NO: 259324 - DNA, 25 bp, Probe Sequence
ggacgaaagcttggctccaaagcat

SEQ ID NO: 259325 - DNA, 25 bp, Probe Sequence
gggcaacaactgttcctcaaagcta

SEQ ID NO: 259326 - DNA, 25 bp, Probe Sequence
gggaaaacgttcgtcaacatcacgc

SEQ ID NO: 259327 - DNA, 25 bp, Probe Sequence
gggcaaaatcgcttcagttaaactg

SEQ ID NO: 259328 - DNA, 25 bp, Probe Sequence
gggacaaactcactcagtaaaacat

SEQ ID NO: 259329 - DNA, 25 bp, Probe Sequence
gggcacaacattatcctcaaaactt

SEQ ID NO: 259330 - DNA, 25 bp, Probe Sequence
gggcaaaaccttgctaattttctca

SEQ ID NO: 259331 - DNA, 25 bp, Probe Sequence
gggcacaatgaccttgtcgaaatcc

SEQ ID NO: 259332 - DNA, 25 bp, Probe Sequence
gggcaaatgtcgaagtgctggaatt

SEQ ID NO: 259333 - DNA, 25 bp, Probe Sequence
gggaaaacgtcacgctgaatatatg

SEQ ID NO: 259334 - DNA, 25 bp, Probe Sequence
gggaaatggggcactatgatcaatc

SEQ ID NO: 259335 - DNA, 25 bp, Probe Sequence
gggacggtggccagagatgccagca

SEQ ID NO: 259336 - DNA, 25 bp, Probe Sequence
gggcacgtggagcaagagatcctgg

SEQ ID NO: 259337 - DNA, 25 bp, Probe Sequence
gggaagctgaggcaagagaatcgct

SEQ ID NO: 259338 - DNA, 25 bp, Probe Sequence
gggacttggaaaggagagtcagtat

SEQ ID NO: 259339 - DNA, 25 bp, Probe Sequence
gggacttggcatttaggattccatc

SEQ ID NO: 259340 - DNA, 25 bp, Probe Sequence
gggaatgtgggctttgtgttcacca

SEQ ID NO: 259341 - DNA, 25 bp, Probe Sequence
gggtttgtgcaggacatgcgtctca

SEQ ID NO: 259342 - DNA, 25 bp, Probe Sequence
gggaccgatgtggacatcgtcttct

SEQ ID NO: 259343 - DNA, 25 bp, Probe Sequence
gggcaacagagtgagactgtcttaa

SEQ ID NO: 259344 - DNA, 25 bp, Probe Sequence
gggcaacatagtgagaccttgtctc

SEQ ID NO: 259345 - DNA, 25 bp, Probe Sequence
gggcaacatagtgagatcccatctc

SEQ ID NO: 259346 - DNA, 25 bp, Probe Sequence
gggcaacagagggagactccatctc

SEQ ID NO: 259347 - DNA, 25 bp, Probe Sequence
gggcaacagatgctgagctttcctc

SEQ ID NO: 259348 - DNA, 25 bp, Probe Sequence
gggcacagattgatagcatttacta

SEQ ID NO: 259349 - DNA, 25 bp, Probe Sequence
gggacatgatggactacatgctcca

SEQ ID NO: 259350 - DNA, 25 bp, Probe Sequence
gggaatgatggaatatcctcacgga

SEQ ID NO: 259351 - DNA, 25 bp, Probe Sequence
gggaggcaggaattcaatgcccaga

SEQ ID NO: 259352 - DNA, 25 bp, Probe Sequence
gggggcagagattgacgcccccggt

SEQ ID NO: 259353 - DNA, 25 bp, Probe Sequence
gggaagcagagctgcaagccgtcct

SEQ ID NO: 259354 - DNA, 25 bp, Probe Sequence
gggcaatgtggtgagacctgtctct

SEQ ID NO: 259355 - DNA, 25 bp, Probe Sequence
gggcagctgtttgagaacaggtccc

SEQ ID NO: 259356 - DNA, 25 bp, Probe Sequence
gggaggctttaatcaccaacccatc

SEQ ID NO: 259357 - DNA, 25 bp, Probe Sequence
gggacctcttaattactagacctca

SEQ ID NO: 259358 - DNA, 25 bp, Probe Sequence
gggacctcttaattactagacctca

SEQ ID NO: 259359 - DNA, 25 bp, Probe Sequence
gggaacttctatttgacctgcaacc

SEQ ID NO: 259360 - DNA, 25 bp, Probe Sequence
gggaaattctcatgtatgtgccccc

SEQ ID NO: 259361 - DNA, 25 bp, Probe Sequence
gggaaacttcatgggtttcctcatc

SEQ ID NO: 259362 - DNA, 25 bp, Probe Sequence
gggaaatttcatcccttcccatagt

SEQ ID NO: 259363 - DNA, 25 bp, Probe Sequence
gggattagtttaccctcaagccgat

SEQ ID NO: 259364 - DNA, 25 bp, Probe Sequence
gggaaactttaaatacaagcctgag

SEQ ID NO: 259365 - DNA, 25 bp, Probe Sequence
gggaaacttttcaaccataggtcat

SEQ ID NO: 259366 - DNA, 25 bp, Probe Sequence
gggaataattctgtgtccaagttta

SEQ ID NO: 259367 - DNA, 25 bp, Probe Sequence
gggaaaattatggactgggactctt

SEQ ID NO: 259368 - DNA, 25 bp, Probe Sequence
gggaatagtttggaccttgtgcctc

SEQ ID NO: 259369 - DNA, 25 bp, Probe Sequence
gggacaagctcaataacttagtctt

SEQ ID NO: 259370 - DNA, 25 bp, Probe Sequence
gggcaaagggcattccttgagctgt

SEQ ID NO: 259371 - DNA, 25 bp, Probe Sequence
gggcacatacggattcttgctgccg

SEQ ID NO: 259372 - DNA, 25 bp, Probe Sequence
gggcaatacagcgagattgtgtctc

SEQ ID NO: 259373 - DNA, 25 bp, Probe Sequence
gggcaacacagcaagatcctgtctt

SEQ ID NO: 259374 - DNA, 25 bp, Probe Sequence
gggcaacacagcaagatcctgtctt

SEQ ID NO: 259375 - DNA, 25 bp, Probe Sequence
gggcaacagagcgagactctgtttc

SEQ ID NO: 259376 - DNA, 25 bp, Probe Sequence
gggcaacagagcgagactctgtttc

SEQ ID NO: 259377 - DNA, 25 bp, Probe Sequence
gggcaacagagcgagactccatcac

SEQ ID NO: 259378 - DNA, 25 bp, Probe Sequence
gggcaacagagcgagactccatctc

SEQ ID NO: 259379 - DNA, 25 bp, Probe Sequence
gggcaacatgacaagaccccatctc

SEQ ID NO: 259380 - DNA, 25 bp, Probe Sequence
gggcaaatacaactgccctgttccc

SEQ ID NO: 259381 - DNA, 25 bp, Probe Sequence
gggcaatataccaatctcctgaggc

SEQ ID NO: 259382 - DNA, 25 bp, Probe Sequence
gggcaattcaaaactggctgatgag

SEQ ID NO: 259383 - DNA, 25 bp, Probe Sequence
gggcaaacaaagaaggctctggagg

SEQ ID NO: 259384 - DNA, 25 bp, Probe Sequence
gggaagagataactgtggcttggac

SEQ ID NO: 259385 - DNA, 25 bp, Probe Sequence
gggaagttgaacttgagctagaggc

SEQ ID NO: 259386 - DNA, 25 bp, Probe Sequence
gggaatttgacataggatgagagtc

SEQ ID NO: 259387 - DNA, 25 bp, Probe Sequence
gggacttgtggctgtggagaaagct

SEQ ID NO: 259388 - DNA, 25 bp, Probe Sequence
gggactctagcctgggtgacagagt

SEQ ID NO: 259389 - DNA, 25 bp, Probe Sequence
gggacttgtcccaagtctgacagcc

SEQ ID NO: 259390 - DNA, 25 bp, Probe Sequence
gggactgagttcaggttaccagaac

SEQ ID NO: 259391 - DNA, 25 bp, Probe Sequence
gggacaagttgaaagtggagcggga

SEQ ID NO: 259392 - DNA, 25 bp, Probe Sequence
gggaaactcttgtgggaggagcaga

SEQ ID NO: 259393 - DNA, 25 bp, Probe Sequence
gggaagttcttaacgcaggaacaga

SEQ ID NO: 259394 - DNA, 25 bp, Probe Sequence
gggaatgttttacctgaaattcagt

SEQ ID NO: 259395 - DNA, 25 bp, Probe Sequence
gggaagatgtttttcaaactcagag

SEQ ID NO: 259396 - DNA, 25 bp, Probe Sequence
gggaaatatgctagttcccctccag

SEQ ID NO: 259397 - DNA, 25 bp, Probe Sequence
gggaagaagtgattctgtccctcca

SEQ ID NO: 259398 - DNA, 25 bp, Probe Sequence
gggaagtagctgaccttcagcctca

SEQ ID NO: 259399 - DNA, 25 bp, Probe Sequence
gggcaagtgagcatgcacggacctc

SEQ ID NO: 259400 - DNA, 25 bp, Probe Sequence
gggacaggacacgaatgaagcctcc

SEQ ID NO: 259401 - DNA, 25 bp, Probe Sequence
gggaagagactgcattgtggcccca

SEQ ID NO: 259402 - DNA, 25 bp, Probe Sequence
gggaagagagtcgtgtgggcccagg

SEQ ID NO: 259403 - DNA, 25 bp, Probe Sequence
gggaaggcgacagtgcctaagacag

SEQ ID NO: 259404 - DNA, 25 bp, Probe Sequence
gggcaagggcaaatccaccatgaag

SEQ ID NO: 259405 - DNA, 25 bp, Probe Sequence
gggaaaacaatactcatcctgaatg

SEQ ID NO: 259406 - DNA, 25 bp, Probe Sequence
gggaatgaagaagctctcctacatc

SEQ ID NO: 259407 - DNA, 25 bp, Probe Sequence
gggaaaaccagtgtgcctacatcaa

SEQ ID NO: 259408 - DNA, 25 bp, Probe Sequence
gggaaacaccttctgagaccaaaat

SEQ ID NO: 259409 - DNA, 25 bp, Probe Sequence
gggaatactcacattttgttaagaa

SEQ ID NO: 259410 - DNA, 25 bp, Probe Sequence
gggcacagaacatgtttgtttaatg

SEQ ID NO: 259411 - DNA, 25 bp, Probe Sequence
gggacatgtgactgatgaggtttca

SEQ ID NO: 259412 - DNA, 25 bp, Probe Sequence
gggacagaggagcaaggtttaaatt

SEQ ID NO: 259413 - DNA, 25 bp, Probe Sequence
gggaagcagggcaaagtggttcaag

SEQ ID NO: 259414 - DNA, 25 bp, Probe Sequence
gggaagagaggccaaatgttacaat

SEQ ID NO: 259415 - DNA, 25 bp, Probe Sequence
gggaatctaagcacaatgcattcaa

SEQ ID NO: 259416 - DNA, 25 bp, Probe Sequence
gggaattcaagtacaggacatcttt

SEQ ID NO: 259417 - DNA, 25 bp, Probe Sequence
gggaagtcatatccgtggaccattt

SEQ ID NO: 259418 - DNA, 25 bp, Probe Sequence
gggaattatcatctggctaaatatt

SEQ ID NO: 259419 - DNA, 25 bp, Probe Sequence
gggaatttgctttcgtgatatattt

SEQ ID NO: 259420 - DNA, 25 bp, Probe Sequence
gggagatggttatctgcctcaattt

SEQ ID NO: 259421 - DNA, 25 bp, Probe Sequence
gggagcggtctatgtgaccaaatat

SEQ ID NO: 259422 - DNA, 25 bp, Probe Sequence
gggagggacagatgtgaggtcaatg

SEQ ID NO: 259423 - DNA, 25 bp, Probe Sequence
gggactgcccagtcagtgggctgta

SEQ ID NO: 259424 - DNA, 25 bp, Probe Sequence
gggaatgcacccttgtgagaggtca

SEQ ID NO: 259425 - DNA, 25 bp, Probe Sequence
gggaatgcactggcagggatcaggt

SEQ ID NO: 259426 - DNA, 25 bp, Probe Sequence
gggaagatcagaagccagtcatgga

SEQ ID NO: 259427 - DNA, 25 bp, Probe Sequence
gggaagacataccacgtaggagaac

SEQ ID NO: 259428 - DNA, 25 bp, Probe Sequence
gggaagacataccacgtaggagaac

SEQ ID NO: 259429 - DNA, 25 bp, Probe Sequence
ggtgaaagcttatctctagtaaaaa

SEQ ID NO: 259430 - DNA, 25 bp, Probe Sequence
gggaaaccatgatgtctgagtaaaa

SEQ ID NO: 259431 - DNA, 25 bp, Probe Sequence
gggaatcccagaatgtcaagccaaa

SEQ ID NO: 259432 - DNA, 25 bp, Probe Sequence
gggaattccagaagctattgtctat

SEQ ID NO: 259433 - DNA, 25 bp, Probe Sequence
gggacttccgaggcaacttgaactc

SEQ ID NO: 259434 - DNA, 25 bp, Probe Sequence
gggaaaccagcagaaccaggacgcc

SEQ ID NO: 259435 - DNA, 25 bp, Probe Sequence
gggaaaccatgagtaatgccacaat

SEQ ID NO: 259436 - DNA, 25 bp, Probe Sequence
gggaatacacatacaaacacacaat

SEQ ID NO: 259437 - DNA, 25 bp, Probe Sequence
gggaatcactatccgagcaatcacc

SEQ ID NO: 259438 - DNA, 25 bp, Probe Sequence
gggcaacagccagcagacagatcaa

SEQ ID NO: 259439 - DNA, 25 bp, Probe Sequence
gggaagccagccaggagagcaagtt

SEQ ID NO: 259440 - DNA, 25 bp, Probe Sequence
gggaagatagacaagaggcacacag

SEQ ID NO: 259441 - DNA, 25 bp, Probe Sequence
gggaagatagcacaaggcctaatga

SEQ ID NO: 259442 - DNA, 25 bp, Probe Sequence
gggaaacagcacacaagtctaaggg

SEQ ID NO: 259443 - DNA, 25 bp, Probe Sequence
gggataagagtcccacagtctaggg

SEQ ID NO: 259444 - DNA, 25 bp, Probe Sequence
gggtactagacacatcagcctaaag

SEQ ID NO: 259445 - DNA, 25 bp, Probe Sequence
gggacacataaaaactgcctccaag

SEQ ID NO: 259446 - DNA, 25 bp, Probe Sequence
gggaaataatgacacatgccttgaa

SEQ ID NO: 259447 - DNA, 25 bp, Probe Sequence
gggaaactaaacatgcctgtgaaga

SEQ ID NO: 259448 - DNA, 25 bp, Probe Sequence
gggaatgacaacttcggtcgtggag

SEQ ID NO: 259449 - DNA, 25 bp, Probe Sequence
gggaatgacaacttcggtcgtggag

SEQ ID NO: 259450 - DNA, 25 bp, Probe Sequence
gggaatgaacaagcgcctattggtg

SEQ ID NO: 259451 - DNA, 25 bp, Probe Sequence
gggaagaacacagcgcagaatgaag

SEQ ID NO: 259452 - DNA, 25 bp, Probe Sequence
gggagagacacagcccactgaacaa

SEQ ID NO: 259453 - DNA, 25 bp, Probe Sequence
gggatggatgcaacctagcttaaca

SEQ ID NO: 259454 - DNA, 25 bp, Probe Sequence
gggatggatgcaacctagcttaaca

SEQ ID NO: 259455 - DNA, 25 bp, Probe Sequence
gggagtgagcttgctagctgctcca

SEQ ID NO: 259456 - DNA, 25 bp, Probe Sequence
gggacatcacatagtgcaagttcga

SEQ ID NO: 259457 - DNA, 25 bp, Probe Sequence
gggaatcctgattgagagccgcaaa

SEQ ID NO: 259458 - DNA, 25 bp, Probe Sequence
gggaagcctgtgtatcgtggagaaa

SEQ ID NO: 259459 - DNA, 25 bp, Probe Sequence
gggagagggaggtcactggaaaggg

SEQ ID NO: 259460 - DNA, 25 bp, Probe Sequence
gggaatgggttgtcaagccagactt

SEQ ID NO: 259461 - DNA, 25 bp, Probe Sequence
gggttttgtcattcaagccgttatt

SEQ ID NO: 259462 - DNA, 25 bp, Probe Sequence
ggtctactgtgtctctagggttaag

SEQ ID NO: 259463 - DNA, 25 bp, Probe Sequence
gggaagcgatggatcacaaggttaa

SEQ ID NO: 259464 - DNA, 25 bp, Probe Sequence
gggaagcacggaatatagggttaga

SEQ ID NO: 259465 - DNA, 25 bp, Probe Sequence
gggataattccaaattaggtttgag

SEQ ID NO: 259466 - DNA, 25 bp, Probe Sequence
gggtaaagcactatgtctgggttga

SEQ ID NO: 259467 - DNA, 25 bp, Probe Sequence
gggaagaagagtgcattctagcctg

SEQ ID NO: 259468 - DNA, 25 bp, Probe Sequence
gggaacaagatgctgatccaacctg

SEQ ID NO: 259469 - DNA, 25 bp, Probe Sequence
gggaattaaggtttcaacctgtgag

SEQ ID NO: 259470 - DNA, 25 bp, Probe Sequence
gggaattatgggagtacaattgcaa

SEQ ID NO: 259471 - DNA, 25 bp, Probe Sequence
gggactctggctatagtactttgaa

SEQ ID NO: 259472 - DNA, 25 bp, Probe Sequence
gggaccctgtacgtgtacatcattt

SEQ ID NO: 259473 - DNA, 25 bp, Probe Sequence
gggacacctggatggtttctcttag

SEQ ID NO: 259474 - DNA, 25 bp, Probe Sequence
gggagacctggattggggtctcaaa

SEQ ID NO: 259475 - DNA, 25 bp, Probe Sequence
gggacaacgaggtggacttccaaga

SEQ ID NO: 259476 - DNA, 25 bp, Probe Sequence
gggacaactgggaggatgagcccca

SEQ ID NO: 259477 - DNA, 25 bp, Probe Sequence
gggacttcgggtgggcagaggcacc

SEQ ID NO: 259478 - DNA, 25 bp, Probe Sequence
gggagcttctggataactaaacaca

SEQ ID NO: 259479 - DNA, 25 bp, Probe Sequence
gggacttcggtgcagattaagagcc

SEQ ID NO: 259480 - DNA, 25 bp, Probe Sequence
gggaaatctttccagtggcaaagtc

SEQ ID NO: 259481 - DNA, 25 bp, Probe Sequence
gggaagatcttgctagtgccatagg

SEQ ID NO: 259482 - DNA, 25 bp, Probe Sequence
gggaagacttgcctcattaataggt

SEQ ID NO: 259483 - DNA, 25 bp, Probe Sequence
gggaagagcttgtcctttaagcagg

SEQ ID NO: 259484 - DNA, 25 bp, Probe Sequence
gggactagttagctttaagcaccct

SEQ ID NO: 259485 - DNA, 25 bp, Probe Sequence
gggactgagatgcaggatttcttca

SEQ ID NO: 259486 - DNA, 25 bp, Probe Sequence
gggacttgaggttgcatttttgagc

SEQ ID NO: 259487 - DNA, 25 bp, Probe Sequence
gggactagaggctcagtgttgggag

SEQ ID NO: 259488 - DNA, 25 bp, Probe Sequence
gggacaagcagcctgtcaaggtgct

SEQ ID NO: 259489 - DNA, 25 bp, Probe Sequence
gggacaagcagcctgtcaaggtgct

SEQ ID NO: 259490 - DNA, 25 bp, Probe Sequence
gggaaacacagcttcacaatggcca

SEQ ID NO: 259491 - DNA, 25 bp, Probe Sequence
gggaaacacagcttcacaatggcca

SEQ ID NO: 259492 - DNA, 25 bp, Probe Sequence
gggaaagaggtgtctcagatgagaa

SEQ ID NO: 259493 - DNA, 25 bp, Probe Sequence
gggataatcgttgctcaaaaacctg

SEQ ID NO: 259494 - DNA, 25 bp, Probe Sequence
ggtgaccggatccttcatacaaacc

SEQ ID NO: 259495 - DNA, 25 bp, Probe Sequence
gggcaatcagggcttcaacaacaac

SEQ ID NO: 259496 - DNA, 25 bp, Probe Sequence
gggacacacggacaaacaacagaca

SEQ ID NO: 259497 - DNA, 25 bp, Probe Sequence
gggacacacggacaaacaacagaca

SEQ ID NO: 259498 - DNA, 25 bp, Probe Sequence
gggacacttgtaaatagaaatcagg

SEQ ID NO: 259499 - DNA, 25 bp, Probe Sequence
gggacacgtatgacctcagaaacac

SEQ ID NO: 259500 - DNA, 25 bp, Probe Sequence
gggacacgtatgacctcagaaacac

SEQ ID NO: 259501 - DNA, 25 bp, Probe Sequence
ggggctaaatccgcagcaaactgcc

SEQ ID NO: 259502 - DNA, 25 bp, Probe Sequence
gggactataacctgaacgacatact

SEQ ID NO: 259503 - DNA, 25 bp, Probe Sequence
gggacgcaaacggtgaacgcagtga

SEQ ID NO: 259504 - DNA, 25 bp, Probe Sequence
gggaccaagcactgggatcaagagc

SEQ ID NO: 259505 - DNA, 25 bp, Probe Sequence
gggactggtgcaaatgggtccagaa

SEQ ID NO: 259506 - DNA, 25 bp, Probe Sequence
gggactgtggcaaacggggagccct

SEQ ID NO: 259507 - DNA, 25 bp, Probe Sequence
gggacttgcgaaaggtgctggacca

SEQ ID NO: 259508 - DNA, 25 bp, Probe Sequence
gggactctccaaaatgtcgtgaaca

SEQ ID NO: 259509 - DNA, 25 bp, Probe Sequence
gggacagccaaaaatgtgcgaacta

SEQ ID NO: 259510 - DNA, 25 bp, Probe Sequence
gggacaggcaagacaactggcaagc

SEQ ID NO: 259511 - DNA, 25 bp, Probe Sequence
gggagccagaagactgattggaggg

SEQ ID NO: 259512 - DNA, 25 bp, Probe Sequence
gggaagatgaagttggctgtgcagg

SEQ ID NO: 259513 - DNA, 25 bp, Probe Sequence
gggaagcagaggttgcagtgagctg

SEQ ID NO: 259514 - DNA, 25 bp, Probe Sequence
gggaagagatggtgttgagtggaaa

SEQ ID NO: 259515 - DNA, 25 bp, Probe Sequence
gggaagagtgtgtatctcgtatgga

SEQ ID NO: 259516 - DNA, 25 bp, Probe Sequence
gggaaggtgctattgctgcttaaga

SEQ ID NO: 259517 - DNA, 25 bp, Probe Sequence
gggacagttgctggcatgtcttcat

SEQ ID NO: 259518 - DNA, 25 bp, Probe Sequence
gggacagtcagtggctttctcagcc

SEQ ID NO: 259519 - DNA, 25 bp, Probe Sequence
gggacattcagggctgtctacaaca

SEQ ID NO: 259520 - DNA, 25 bp, Probe Sequence
ggagacctcaaggcttccaaggaat

SEQ ID NO: 259521 - DNA, 25 bp, Probe Sequence
tgggactgtaagccttcccgtaaat

SEQ ID NO: 259522 - DNA, 25 bp, Probe Sequence
gggactttccaacttggcagtaaat

SEQ ID NO: 259523 - DNA, 25 bp, Probe Sequence
gggacttcccaaaatgtcgtacact

SEQ ID NO: 259524 - DNA, 25 bp, Probe Sequence
gggacattttaaaacctgtacacag

SEQ ID NO: 259525 - DNA, 25 bp, Probe Sequence
gggacattttccagcaaattccaag

SEQ ID NO: 259526 - DNA, 25 bp, Probe Sequence
gggacatctttttcacagacttgcc

SEQ ID NO: 259527 - DNA, 25 bp, Probe Sequence
gggaaactgcttacatagacattgc

SEQ ID NO: 259528 - DNA, 25 bp, Probe Sequence
gggacaatctgggctcataaacatg

SEQ ID NO: 259529 - DNA, 25 bp, Probe Sequence
gggacctgcagcactgcagaaatgc

SEQ ID NO: 259530 - DNA, 25 bp, Probe Sequence
gggatcatctaaactgagtccagct

SEQ ID NO: 259531 - DNA, 25 bp, Probe Sequence
gggatcgcaacatctggatcgtgaa

SEQ ID NO: 259532 - DNA, 25 bp, Probe Sequence
gggacagacaaactgctgtcgggct

SEQ ID NO: 259533 - DNA, 25 bp, Probe Sequence
gggacccagaatcctatatgtggcc

SEQ ID NO: 259534 - DNA, 25 bp, Probe Sequence
gggacctgagaaagcgtacttcacc

SEQ ID NO: 259535 - DNA, 25 bp, Probe Sequence
ggtgacctgaaaaactatccgattc

SEQ ID NO: 259536 - DNA, 25 bp, Probe Sequence
gggaactgaaattactattgccttt

SEQ ID NO: 259537 - DNA, 25 bp, Probe Sequence
gggacacttaaatctaccctcttag

SEQ ID NO: 259538 - DNA, 25 bp, Probe Sequence
gggaatctagagtatatcaaccctc

SEQ ID NO: 259539 - DNA, 25 bp, Probe Sequence
gggaacaaatgtgatctgaccacaa

SEQ ID NO: 259540 - DNA, 25 bp, Probe Sequence
gggagaacagttgagcagacagcca

SEQ ID NO: 259541 - DNA, 25 bp, Probe Sequence
gggaacatcagttctacgagaccct

SEQ ID NO: 259542 - DNA, 25 bp, Probe Sequence
gggaacatcagttctacgagaccct

SEQ ID NO: 259543 - DNA, 25 bp, Probe Sequence
gggaaacagttccaggaacgcctgc

SEQ ID NO: 259544 - DNA, 25 bp, Probe Sequence
gggacacaagttcagagaagggcag

SEQ ID NO: 259545 - DNA, 25 bp, Probe Sequence
gggaaggagttcacagaagcggtgg

SEQ ID NO: 259546 - DNA, 25 bp, Probe Sequence
gggaagcggttcaagagatggggtg

SEQ ID NO: 259547 - DNA, 25 bp, Probe Sequence
gggaatgggggtgagtggagggctc

SEQ ID NO: 259548 - DNA, 25 bp, Probe Sequence
gggttggggtgggcatttgatgcgg

SEQ ID NO: 259549 - DNA, 25 bp, Probe Sequence
gggttagtggggctttctatggagc

SEQ ID NO: 259550 - DNA, 25 bp, Probe Sequence
gggacaggggggctttggatggcac

SEQ ID NO: 259551 - DNA, 25 bp, Probe Sequence
gggaagccaggccaaagtgggggca

SEQ ID NO: 259552 - DNA, 25 bp, Probe Sequence
gggaactgagggaaagatggggaga

SEQ ID NO: 259553 - DNA, 25 bp, Probe Sequence
gggacgcttggacaacgggcaagtt

SEQ ID NO: 259554 - DNA, 25 bp, Probe Sequence
gggaccttgggttacattagatagt

SEQ ID NO: 259555 - DNA, 25 bp, Probe Sequence
gggacctttagtcacaagggatctg

SEQ ID NO: 259556 - DNA, 25 bp, Probe Sequence
gggacattttgtcaactatgggtat

SEQ ID NO: 259557 - DNA, 25 bp, Probe Sequence
gggactactgttcattccagttttc

SEQ ID NO: 259558 - DNA, 25 bp, Probe Sequence
gggactgagggttactccagttgct

SEQ ID NO: 259559 - DNA, 25 bp, Probe Sequence
gggaaggtggcttgagttcaggagt

SEQ ID NO: 259560 - DNA, 25 bp, Probe Sequence
gggaacgggaatgtctgcctgatgt

SEQ ID NO: 259561 - DNA, 25 bp, Probe Sequence
ggtgagtcgggatcccgtcattgta

SEQ ID NO: 259562 - DNA, 25 bp, Probe Sequence
gggaactgggatataagtcataata

SEQ ID NO: 259563 - DNA, 25 bp, Probe Sequence
gggaactggtgtagctgcaaggatt

SEQ ID NO: 259564 - DNA, 25 bp, Probe Sequence
gggaagataagtaatgcaagatgtg

SEQ ID NO: 259565 - DNA, 25 bp, Probe Sequence
gggaagaaagaccatgaatgtagtg

SEQ ID NO: 259566 - DNA, 25 bp, Probe Sequence
gggaggactatgcccatggttttgg

SEQ ID NO: 259567 - DNA, 25 bp, Probe Sequence
gggacagcaactaccttgcttttgg

SEQ ID NO: 259568 - DNA, 25 bp, Probe Sequence
gggacatcccatacgtagttttgag

SEQ ID NO: 259569 - DNA, 25 bp, Probe Sequence
gggacataacatccagaagtcattt

SEQ ID NO: 259570 - DNA, 25 bp, Probe Sequence
gggacattgagatcacttgtcttgt

SEQ ID NO: 259571 - DNA, 25 bp, Probe Sequence
gggaagtgatgatcagctccctggg

SEQ ID NO: 259572 - DNA, 25 bp, Probe Sequence
gggaatgtggatcagtccttcccat

SEQ ID NO: 259573 - DNA, 25 bp, Probe Sequence
gggaagctgtgggtccacattccct

SEQ ID NO: 259574 - DNA, 25 bp, Probe Sequence
gggaaatggtgccttcaagaccttc

SEQ ID NO: 259575 - DNA, 25 bp, Probe Sequence
gggagaacagcgtcttttacctgtc

SEQ ID NO: 259576 - DNA, 25 bp, Probe Sequence
gggaaagcccctataatgaattcag

SEQ ID NO: 259577 - DNA, 25 bp, Probe Sequence
gggaaatccccaaaaatatgtatgt

SEQ ID NO: 259578 - DNA, 25 bp, Probe Sequence
gggaaaccgctaatatttgttagat

SEQ ID NO: 259579 - DNA, 25 bp, Probe Sequence
gggaaacccttatcttgcaaagtga

SEQ ID NO: 259580 - DNA, 25 bp, Probe Sequence
gggaaattctgtttaagcgaaagtg

SEQ ID NO: 259581 - DNA, 25 bp, Probe Sequence
gggaaaggctgttattacctagagt

SEQ ID NO: 259582 - DNA, 25 bp, Probe Sequence
gggaaagtattctgtactcttagat

SEQ ID NO: 259583 - DNA, 25 bp, Probe Sequence
gggaaaatatcctctacctgatggt

SEQ ID NO: 259584 - DNA, 25 bp, Probe Sequence
gggaaaatccactccaattgtgcaa

SEQ ID NO: 259585 - DNA, 25 bp, Probe Sequence
gggaaaactgtcgccagttgtgcac

SEQ ID NO: 259586 - DNA, 25 bp, Probe Sequence
gggaagaggttccagaatgttgcca

SEQ ID NO: 259587 - DNA, 25 bp, Probe Sequence
gggaaagctttggcagaatcttgga

SEQ ID NO: 259588 - DNA, 25 bp, Probe Sequence
gggagaattgttgcaaagtagtgaa

SEQ ID NO: 259589 - DNA, 25 bp, Probe Sequence
gggagaagatttgccaatggtgctt

SEQ ID NO: 259590 - DNA, 25 bp, Probe Sequence
gggaaagaatatttgatcatgggtc

SEQ ID NO: 259591 - DNA, 25 bp, Probe Sequence
gggaagaactattgtgctcagagac

SEQ ID NO: 259592 - DNA, 25 bp, Probe Sequence
gggaaaagctttagtcataacacaa

SEQ ID NO: 259593 - DNA, 25 bp, Probe Sequence
gggaaaggctttatcaggtatcatc

SEQ ID NO: 259594 - DNA, 25 bp, Probe Sequence
gggaacagtgctcttttgtgtcccc

SEQ ID NO: 259595 - DNA, 25 bp, Probe Sequence
gggagacttttcattttgttctgta

SEQ ID NO: 259596 - DNA, 25 bp, Probe Sequence
gggacaggttctatttttgctctat

SEQ ID NO: 259597 - DNA, 25 bp, Probe Sequence
gggagaaggttgactttttgcactt

SEQ ID NO: 259598 - DNA, 25 bp, Probe Sequence
gggagaggccttaaatttgcaacta

SEQ ID NO: 259599 - DNA, 25 bp, Probe Sequence
gggactcccattaaagtgctgacgt

SEQ ID NO: 259600 - DNA, 25 bp, Probe Sequence
gggacatcccatttaaggagaacta

SEQ ID NO: 259601 - DNA, 25 bp, Probe Sequence
gggacattccgtttgaaatgtactg

SEQ ID NO: 259602 - DNA, 25 bp, Probe Sequence
gggacaacaagtttgaccatgcaat

SEQ ID NO: 259603 - DNA, 25 bp, Probe Sequence
gggagtagaactttgactctaagag

SEQ ID NO: 259604 - DNA, 25 bp, Probe Sequence
gggggaccctttgtcatgaagagcc

SEQ ID NO: 259605 - DNA, 25 bp, Probe Sequence
gggatggtacctctggttgagaacc

SEQ ID NO: 259606 - DNA, 25 bp, Probe Sequence
gggtattatcttctggtaatataga

SEQ ID NO: 259607 - DNA, 25 bp, Probe Sequence
gggacattatcttgttgtgaaaaat

SEQ ID NO: 259608 - DNA, 25 bp, Probe Sequence
gggacactttaggatgctacaaaat

SEQ ID NO: 259609 - DNA, 25 bp, Probe Sequence
gggacactttagaccattagacaat

SEQ ID NO: 259610 - DNA, 25 bp, Probe Sequence
ggtacaccttagttcatgttgcagc

SEQ ID NO: 259611 - DNA, 25 bp, Probe Sequence
gggaccttaagaagctgattgcagc

SEQ ID NO: 259612 - DNA, 25 bp, Probe Sequence
gggactgcagtacaatgctagtcag

SEQ ID NO: 259613 - DNA, 25 bp, Probe Sequence
gggactcaattcaggctatgtatga

SEQ ID NO: 259614 - DNA, 25 bp, Probe Sequence
gggacagaaatcaggtattggcagt

SEQ ID NO: 259615 - DNA, 25 bp, Probe Sequence
gggaaattgaggtcgttgtgagagt

SEQ ID NO: 259616 - DNA, 25 bp, Probe Sequence
gggaagcattacactttgctaaatc

SEQ ID NO: 259617 - DNA, 25 bp, Probe Sequence
gggaagcatatgtcattccccatat

SEQ ID NO: 259618 - DNA, 25 bp, Probe Sequence
gggaacagaggcatcagcatcgaag

SEQ ID NO: 259619 - DNA, 25 bp, Probe Sequence
gggagacagagtgaagcatcaacct

SEQ ID NO: 259620 - DNA, 25 bp, Probe Sequence
gggaaatgagatgaccactttttag

SEQ ID NO: 259621 - DNA, 25 bp, Probe Sequence
gggaactgacaggacaatgttttta

SEQ ID NO: 259622 - DNA, 25 bp, Probe Sequence
gggaagcagacagacaagggtaaaa

SEQ ID NO: 259623 - DNA, 25 bp, Probe Sequence
gggaacaactggactatggagtaca

SEQ ID NO: 259624 - DNA, 25 bp, Probe Sequence
gggaacacctctggcttgtagaagg

SEQ ID NO: 259625 - DNA, 25 bp, Probe Sequence
gggagccgttctgtttcaaaggaat

SEQ ID NO: 259626 - DNA, 25 bp, Probe Sequence
gggagtctgtttgttccaatgggtt

SEQ ID NO: 259627 - DNA, 25 bp, Probe Sequence
gggatatggttttttcctggagttg

SEQ ID NO: 259628 - DNA, 25 bp, Probe Sequence
gggtcgttttgatgtcaggtggatt

SEQ ID NO: 259629 - DNA, 25 bp, Probe Sequence
gggaggtgtttgtggcacctagatc

SEQ ID NO: 259630 - DNA, 25 bp, Probe Sequence
gggagttcactttgggcctatggat

SEQ ID NO: 259631 - DNA, 25 bp, Probe Sequence
gggagctacactatgggcgagagga

SEQ ID NO: 259632 - DNA, 25 bp, Probe Sequence
gggagatgcaacactgagagccaag

SEQ ID NO: 259633 - DNA, 25 bp, Probe Sequence
gggagctctacaggctgaactggga

SEQ ID NO: 259634 - DNA, 25 bp, Probe Sequence
gggagcattctgggagagcaaggga

SEQ ID NO: 259635 - DNA, 25 bp, Probe Sequence
gggagcaggctatgggaagacggag

SEQ ID NO: 259636 - DNA, 25 bp, Probe Sequence
gggaccgctataaggccagtcggac

SEQ ID NO: 259637 - DNA, 25 bp, Probe Sequence
gggactgttttggagcgtgtctgga

SEQ ID NO: 259638 - DNA, 25 bp, Probe Sequence
gggacttgtagggatgcctttctag

SEQ ID NO: 259639 - DNA, 25 bp, Probe Sequence
gggacttgggagaatccttaggctg

SEQ ID NO: 259640 - DNA, 25 bp, Probe Sequence
gggaccagggcatattaaaggcttt

SEQ ID NO: 259641 - DNA, 25 bp, Probe Sequence
gggaccagggcatattaaaggcttt

SEQ ID NO: 259642 - DNA, 25 bp, Probe Sequence
gggagctgggacacttaacagatgc

SEQ ID NO: 259643 - DNA, 25 bp, Probe Sequence
gggactccatgctccttgagaggag

SEQ ID NO: 259644 - DNA, 25 bp, Probe Sequence
gggacaagcatttcatcttgggaag

SEQ ID NO: 259645 - DNA, 25 bp, Probe Sequence
gggagcacagtggaccatcagggag

SEQ ID NO: 259646 - DNA, 25 bp, Probe Sequence
gggacacgatccgagtcagaggcag

SEQ ID NO: 259647 - DNA, 25 bp, Probe Sequence
gggacctgctattcttcgaggcagt

SEQ ID NO: 259648 - DNA, 25 bp, Probe Sequence
gggatcatttaaagatcgcggaatg

SEQ ID NO: 259649 - DNA, 25 bp, Probe Sequence
gggaacctgcacatatccaggatat

SEQ ID NO: 259650 - DNA, 25 bp, Probe Sequence
gggaagcctgtgatgactacagact

SEQ ID NO: 259651 - DNA, 25 bp, Probe Sequence
gggaacagttgattcacccagcagc

SEQ ID NO: 259652 - DNA, 25 bp, Probe Sequence
gggaacgtatcattaaccatgctgc

SEQ ID NO: 259653 - DNA, 25 bp, Probe Sequence
gggacagtgtaagatttcatcatgc

SEQ ID NO: 259654 - DNA, 25 bp, Probe Sequence
gggacggatacaattttcacacagg

SEQ ID NO: 259655 - DNA, 25 bp, Probe Sequence
gggacggataaccatttcacacagg

SEQ ID NO: 259656 - DNA, 25 bp, Probe Sequence
gggacggataaccatttcacacagg

SEQ ID NO: 259657 - DNA, 25 bp, Probe Sequence
gggacggataacaatttcacacagg

SEQ ID NO: 259658 - DNA, 25 bp, Probe Sequence
gggacggataacaatttcacacagg

SEQ ID NO: 259659 - DNA, 25 bp, Probe Sequence
gggacggataacaatttcacacagg

SEQ ID NO: 259660 - DNA, 25 bp, Probe Sequence
gggacggataacaatttcacacagg

SEQ ID NO: 259661 - DNA, 25 bp, Probe Sequence
gggacggataacaatttcacacagg

SEQ ID NO: 259662 - DNA, 25 bp, Probe Sequence
gggacggataacaatttcacacagg

SEQ ID NO: 259663 - DNA, 25 bp, Probe Sequence
gggacggataacaatttcacacagg

SEQ ID NO: 259664 - DNA, 25 bp, Probe Sequence
gggacggataacaatttcacacagg

SEQ ID NO: 259665 - DNA, 25 bp, Probe Sequence
gggacggataacaatttcacacagg

SEQ ID NO: 259666 - DNA, 25 bp, Probe Sequence
gggacggataacaatttcacacagg

SEQ ID NO: 259667 - DNA, 25 bp, Probe Sequence
gggacggataacaatttcacacagg

SEQ ID NO: 259668 - DNA, 25 bp, Probe Sequence
gggacggataacaatttcacacagg

SEQ ID NO: 259669 - DNA, 25 bp, Probe Sequence
gggacggataacaatttcacacagg

SEQ ID NO: 259670 - DNA, 25 bp, Probe Sequence
gggacggataacaatttcacacagg

SEQ ID NO: 259671 - DNA, 25 bp, Probe Sequence
gggacggataacaatttcacacagg

SEQ ID NO: 259672 - DNA, 25 bp, Probe Sequence
gggacggataacaatttcacacagg

SEQ ID NO: 259673 - DNA, 25 bp, Probe Sequence
gggacggataacaatttcacacagg

SEQ ID NO: 259674 - DNA, 25 bp, Probe Sequence
gggacggataacaatttcacacagg

SEQ ID NO: 259675 - DNA, 25 bp, Probe Sequence
gggacggataacaatttcacacagg

SEQ ID NO: 259676 - DNA, 25 bp, Probe Sequence
gggacggataacaatttcacacagg

SEQ ID NO: 259677 - DNA, 25 bp, Probe Sequence
gggacggataacaatttcacacagg

SEQ ID NO: 259678 - DNA, 25 bp, Probe Sequence
gggacggataacaatttcacacagg

SEQ ID NO: 259679 - DNA, 25 bp, Probe Sequence
gggacggataacaatttcacacagg

SEQ ID NO: 259680 - DNA, 25 bp, Probe Sequence
gggacggataacaatttcacacagg

SEQ ID NO: 259681 - DNA, 25 bp, Probe Sequence
gggacggataacaatttcacacagg

SEQ ID NO: 259682 - DNA, 25 bp, Probe Sequence
gggacggataacaatttcacacagg

SEQ ID NO: 259683 - DNA, 25 bp, Probe Sequence
gggacggataacaatttcacacagg

SEQ ID NO: 259684 - DNA, 25 bp, Probe Sequence
gggacggataacaatttcacacagg

SEQ ID NO: 259685 - DNA, 25 bp, Probe Sequence
gggacggataacaatttcacacagg

SEQ ID NO: 259686 - DNA, 25 bp, Probe Sequence
gggacggataacaatttcacacagg

SEQ ID NO: 259687 - DNA, 25 bp, Probe Sequence
gggacggataacaatttcacacagg

SEQ ID NO: 259688 - DNA, 25 bp, Probe Sequence
gggacggataacaatttcacacagg

SEQ ID NO: 259689 - DNA, 25 bp, Probe Sequence
gggacggataacaatttcacacagg

SEQ ID NO: 259690 - DNA, 25 bp, Probe Sequence
gggacggataacaatttcacacagg

SEQ ID NO: 259691 - DNA, 25 bp, Probe Sequence
gggacggataacaatttcacacagg

SEQ ID NO: 259692 - DNA, 25 bp, Probe Sequence
gggacggataacaatttcacacagg

SEQ ID NO: 259693 - DNA, 25 bp, Probe Sequence
gggacggataacaatttcacacagg

SEQ ID NO: 259694 - DNA, 25 bp, Probe Sequence
gggacggataacaatttcacacagg

SEQ ID NO: 259695 - DNA, 25 bp, Probe Sequence
gggacggataacaatttcacacagg

SEQ ID NO: 259696 - DNA, 25 bp, Probe Sequence
gggacggataacaatttcacacagg

SEQ ID NO: 259697 - DNA, 25 bp, Probe Sequence
gggacggataacaatttcacacagg

SEQ ID NO: 259698 - DNA, 25 bp, Probe Sequence
gggacggataacaatttcacacagg

SEQ ID NO: 259699 - DNA, 25 bp, Probe Sequence
gggacggataacaatttcacacagg

SEQ ID NO: 259700 - DNA, 25 bp, Probe Sequence
gggacggataacaatttcacacagg

SEQ ID NO: 259701 - DNA, 25 bp, Probe Sequence
gggacggataacaatttcacacagg

SEQ ID NO: 259702 - DNA, 25 bp, Probe Sequence
gggacggataacaatttcacacagg

SEQ ID NO: 259703 - DNA, 25 bp, Probe Sequence
gggacggataacaatttcacacagg

SEQ ID NO: 259704 - DNA, 25 bp, Probe Sequence
gggacggataacaatttcacacagg

SEQ ID NO: 259705 - DNA, 25 bp, Probe Sequence
gggacggataacaatttcacacagg

SEQ ID NO: 259706 - DNA, 25 bp, Probe Sequence
gggacggataacaatttcacacagg

SEQ ID NO: 259707 - DNA, 25 bp, Probe Sequence
gggacggataacaatttcacacagg

SEQ ID NO: 259708 - DNA, 25 bp, Probe Sequence
gggacggataacaatttcacacagg

SEQ ID NO: 259709 - DNA, 25 bp, Probe Sequence
gggacggataacaatttcacacagg

SEQ ID NO: 259710 - DNA, 25 bp, Probe Sequence
gggacggataacaatttcacacagg

SEQ ID NO: 259711 - DNA, 25 bp, Probe Sequence
gggacggataacaatttcacacagg

SEQ ID NO: 259712 - DNA, 25 bp, Probe Sequence
gggacggataacaatttcacacagg

SEQ ID NO: 259713 - DNA, 25 bp, Probe Sequence
gggacggataacaatttcacacagg

SEQ ID NO: 259714 - DNA, 25 bp, Probe Sequence
gggacggataacaatttcacacagg

SEQ ID NO: 259715 - DNA, 25 bp, Probe Sequence
gggacggataacaatttcacacagg

SEQ ID NO: 259716 - DNA, 25 bp, Probe Sequence
gggacggataacaatttcacacagg

SEQ ID NO: 259717 - DNA, 25 bp, Probe Sequence
gggacggataacaatttcacacagg

SEQ ID NO: 259718 - DNA, 25 bp, Probe Sequence
gggacggataacaatttcacacagg

SEQ ID NO: 259719 - DNA, 25 bp, Probe Sequence
gggacggataacaatttcacacagg

SEQ ID NO: 259720 - DNA, 25 bp, Probe Sequence
gggacggataacaatttcacacagg

SEQ ID NO: 259721 - DNA, 25 bp, Probe Sequence
gggacggataacaatttcacacagg

SEQ ID NO: 259722 - DNA, 25 bp, Probe Sequence
gggacggataacaatttcacacagg

SEQ ID NO: 259723 - DNA, 25 bp, Probe Sequence
gggacggataacaatttcacacagg

SEQ ID NO: 259724 - DNA, 25 bp, Probe Sequence
gggacggataacaatttcacacagg

SEQ ID NO: 259725 - DNA, 25 bp, Probe Sequence
gggacggataacaatttcacacagg

SEQ ID NO: 259726 - DNA, 25 bp, Probe Sequence
gggacggataacaatttcacacagg

SEQ ID NO: 259727 - DNA, 25 bp, Probe Sequence
gggacggataacaatttcacacagg

SEQ ID NO: 259728 - DNA, 25 bp, Probe Sequence
gggacggataacaatttcacacagg

SEQ ID NO: 259729 - DNA, 25 bp, Probe Sequence
gggacggataacaatttcacacagg

SEQ ID NO: 259730 - DNA, 25 bp, Probe Sequence
gggacggataacaatttcacacagg

SEQ ID NO: 259731 - DNA, 25 bp, Probe Sequence
gggacggataacaatttcacacagg

SEQ ID NO: 259732 - DNA, 25 bp, Probe Sequence
gggacggataacaatttcacacagg

SEQ ID NO: 259733 - DNA, 25 bp, Probe Sequence
gggacggataacaatttcacacagg

SEQ ID NO: 259734 - DNA, 25 bp, Probe Sequence
gggacggataacaatttcacacagg

SEQ ID NO: 259735 - DNA, 25 bp, Probe Sequence
gggacggataacaatttcacacagg

SEQ ID NO: 259736 - DNA, 25 bp, Probe Sequence
gggacggataacaatttcacacagg

SEQ ID NO: 259737 - DNA, 25 bp, Probe Sequence
gggacggataacaatttcacacagg

SEQ ID NO: 259738 - DNA, 25 bp, Probe Sequence
gggacggataacaatttcacacagg

SEQ ID NO: 259739 - DNA, 25 bp, Probe Sequence
gggacggataacaatttcacacagg

SEQ ID NO: 259740 - DNA, 25 bp, Probe Sequence
gggacggataacaatttcacacagg

SEQ ID NO: 259741 - DNA, 25 bp, Probe Sequence
gggacggataacaatttcacacagg

SEQ ID NO: 259742 - DNA, 25 bp, Probe Sequence
gggacggataacaatttcacacagg

SEQ ID NO: 259743 - DNA, 25 bp, Probe Sequence
gggacggataacaatttcacacagg

SEQ ID NO: 259744 - DNA, 25 bp, Probe Sequence
gggacggataacaatttcacacagg

SEQ ID NO: 259745 - DNA, 25 bp, Probe Sequence
gggacggataacaatttcacacagg

SEQ ID NO: 259746 - DNA, 25 bp, Probe Sequence
gggacggataacaatttcacacagg

SEQ ID NO: 259747 - DNA, 25 bp, Probe Sequence
gggaggggaacattccatccccagt

SEQ ID NO: 259748 - DNA, 25 bp, Probe Sequence
gggagggctgaacacacattaccgc

SEQ ID NO: 259749 - DNA, 25 bp, Probe Sequence
gggagaaggccggaagcttaccagc

SEQ ID NO: 259750 - DNA, 25 bp, Probe Sequence
ggtggtatgacccaaaggttcctct

SEQ ID NO: 259751 - DNA, 25 bp, Probe Sequence
gggactgagagcgccaagggtcttt

SEQ ID NO: 259752 - DNA, 25 bp, Probe Sequence
gggactgggcttccgaaatgtcgtc

SEQ ID NO: 259753 - DNA, 25 bp, Probe Sequence
gggacttctggtcccaacatttcct

SEQ ID NO: 259754 - DNA, 25 bp, Probe Sequence
gggacttctacttgcagtacattac

SEQ ID NO: 259755 - DNA, 25 bp, Probe Sequence
gggacttctactgcagtaatctacg

SEQ ID NO: 259756 - DNA, 25 bp, Probe Sequence
gggacttctattgcagtacattacg

SEQ ID NO: 259757 - DNA, 25 bp, Probe Sequence
gggactctttctgcagatactgtaa

SEQ ID NO: 259758 - DNA, 25 bp, Probe Sequence
gggacctttgcataggccattataa

SEQ ID NO: 259759 - DNA, 25 bp, Probe Sequence
gggactcctggagcaggcacatagt

SEQ ID NO: 259760 - DNA, 25 bp, Probe Sequence
gggacactctggacaatgacatcat

SEQ ID NO: 259761 - DNA, 25 bp, Probe Sequence
gggacactctggacaatgacatcat

SEQ ID NO: 259762 - DNA, 25 bp, Probe Sequence
gggacattagtaactgcacactatt

SEQ ID NO: 259763 - DNA, 25 bp, Probe Sequence
gggacagtagctttccagctaagat

SEQ ID NO: 259764 - DNA, 25 bp, Probe Sequence
gggactgtaatttgccagattccat

SEQ ID NO: 259765 - DNA, 25 bp, Probe Sequence
gggactgtgaagatcaacatctcca

SEQ ID NO: 259766 - DNA, 25 bp, Probe Sequence
gggactgcatgctactgtctagagc

SEQ ID NO: 259767 - DNA, 25 bp, Probe Sequence
gggactgagatgtattccatagact

SEQ ID NO: 259768 - DNA, 25 bp, Probe Sequence
gggacttagtacttacgacttcatt

SEQ ID NO: 259769 - DNA, 25 bp, Probe Sequence
gggacttagtacttacgacttcatt

SEQ ID NO: 259770 - DNA, 25 bp, Probe Sequence
gggagcattaggtcttcctacttag

SEQ ID NO: 259771 - DNA, 25 bp, Probe Sequence
gggactatagtgcaacctatttggg

SEQ ID NO: 259772 - DNA, 25 bp, Probe Sequence
gggattatgattcaccctctttgga

SEQ ID NO: 259773 - DNA, 25 bp, Probe Sequence
gggatttgatacttaggcctttgaa

SEQ ID NO: 259774 - DNA, 25 bp, Probe Sequence
gggatattcacctgggactgttaat

SEQ ID NO: 259775 - DNA, 25 bp, Probe Sequence
gggttggctccatgaccaagatcta

SEQ ID NO: 259776 - DNA, 25 bp, Probe Sequence
gggttggctccatgaccaagatcta

SEQ ID NO: 259777 - DNA, 25 bp, Probe Sequence
ggtgtcggagcctgacctgaattaa

SEQ ID NO: 259778 - DNA, 25 bp, Probe Sequence
ggtgtcggagcctgacctgaattaa

SEQ ID NO: 259779 - DNA, 25 bp, Probe Sequence
gggagcggagcagcgaacagaatcc

SEQ ID NO: 259780 - DNA, 25 bp, Probe Sequence
gggagcaggagtgcagaacaaacaa

SEQ ID NO: 259781 - DNA, 25 bp, Probe Sequence
gggagaggagatgccaaaacgccag

SEQ ID NO: 259782 - DNA, 25 bp, Probe Sequence
ggggagtagctattgggaacaggga

SEQ ID NO: 259783 - DNA, 25 bp, Probe Sequence
gggtcattcgtctgtggaaagggca

SEQ ID NO: 259784 - DNA, 25 bp, Probe Sequence
gggttatttttgtgaacagcctgat

SEQ ID NO: 259785 - DNA, 25 bp, Probe Sequence
gggactatatgatttcttaccccca

SEQ ID NO: 259786 - DNA, 25 bp, Probe Sequence
gggatttatactatctcccaggcca

SEQ ID NO: 259787 - DNA, 25 bp, Probe Sequence
gggatttaacagatgtcttcatgta

SEQ ID NO: 259788 - DNA, 25 bp, Probe Sequence
gggtcgtagacgtgtctgtacccag

SEQ ID NO: 259789 - DNA, 25 bp, Probe Sequence
gggttccagaaggtgttgcttcccg

SEQ ID NO: 259790 - DNA, 25 bp, Probe Sequence
gggttcaagaagctttctacctcac

SEQ ID NO: 259791 - DNA, 25 bp, Probe Sequence
gggttcaagaagctttctacctcac

SEQ ID NO: 259792 - DNA, 25 bp, Probe Sequence
gggagctaaaagcctttgcatcccc

SEQ ID NO: 259793 - DNA, 25 bp, Probe Sequence
gggagctagaactcaaggtgcccct

SEQ ID NO: 259794 - DNA, 25 bp, Probe Sequence
ggtggatattacgtaacttgcccct

SEQ ID NO: 259795 - DNA, 25 bp, Probe Sequence
gggtatttacctatgttggtgcctt

SEQ ID NO: 259796 - DNA, 25 bp, Probe Sequence
gggtatttacctatgttggtgcctt

SEQ ID NO: 259797 - DNA, 25 bp, Probe Sequence
gggtatttacctatgttggtgcctt

SEQ ID NO: 259798 - DNA, 25 bp, Probe Sequence
gggtatttacctatgttggtgcctt

SEQ ID NO: 259799 - DNA, 25 bp, Probe Sequence
gggtatttacctatgttggtgcctt

SEQ ID NO: 259800 - DNA, 25 bp, Probe Sequence
gggagtctttttaacttggtgcctg

SEQ ID NO: 259801 - DNA, 25 bp, Probe Sequence
gggagccattcattgtacagttgca

SEQ ID NO: 259802 - DNA, 25 bp, Probe Sequence
gggagctcatattgatgtacgtaac

SEQ ID NO: 259803 - DNA, 25 bp, Probe Sequence
gggactgtatctttagttcatgacc

SEQ ID NO: 259804 - DNA, 25 bp, Probe Sequence
gggagttcatgtcatagttagccct

SEQ ID NO: 259805 - DNA, 25 bp, Probe Sequence
gggagttgcccagaggaatccctgt

SEQ ID NO: 259806 - DNA, 25 bp, Probe Sequence
gggagttgcccagaggaatccctgt

SEQ ID NO: 259807 - DNA, 25 bp, Probe Sequence
gggagaggtccacagacaatccagg

SEQ ID NO: 259808 - DNA, 25 bp, Probe Sequence
gggaggatggtactggatctggccc

SEQ ID NO: 259809 - DNA, 25 bp, Probe Sequence
ggtgaaggagtacctcctggcaact

SEQ ID NO: 259810 - DNA, 25 bp, Probe Sequence
gggacagaggattcaccctgtgttc

SEQ ID NO: 259811 - DNA, 25 bp, Probe Sequence
gggagatgaggcaaccggtgggaca

SEQ ID NO: 259812 - DNA, 25 bp, Probe Sequence
gggaaattctaccgggatgatgacc

SEQ ID NO: 259813 - DNA, 25 bp, Probe Sequence
gggaaatctgctacctagtctatac

SEQ ID NO: 259814 - DNA, 25 bp, Probe Sequence
gggagaattgtgaactttccatcag

SEQ ID NO: 259815 - DNA, 25 bp, Probe Sequence
gggagaatggagaacttggcctctt

SEQ ID NO: 259816 - DNA, 25 bp, Probe Sequence
gggacttggagggttggtcctcttg

SEQ ID NO: 259817 - DNA, 25 bp, Probe Sequence
gggagtgctaggggttaggcttttg

SEQ ID NO: 259818 - DNA, 25 bp, Probe Sequence
gggaggtagaaggggaggacactgg

SEQ ID NO: 259819 - DNA, 25 bp, Probe Sequence
gggaggaagaagaggaggacgtgga

SEQ ID NO: 259820 - DNA, 25 bp, Probe Sequence
gggaggacgtgatgagtgaggactt

SEQ ID NO: 259821 - DNA, 25 bp, Probe Sequence
gggaggtatgtctagggggcagtgt

SEQ ID NO: 259822 - DNA, 25 bp, Probe Sequence
gggaggtgtctgcctggaaggatgt

SEQ ID NO: 259823 - DNA, 25 bp, Probe Sequence
gggagacaacatgcaggaaggattc

SEQ ID NO: 259824 - DNA, 25 bp, Probe Sequence
gggatcccagcagggggaggcaatc

SEQ ID NO: 259825 - DNA, 25 bp, Probe Sequence
gggatcccatgaagagaggggtcct

SEQ ID NO: 259826 - DNA, 25 bp, Probe Sequence
gggattccaggagtcgtggtttctt

SEQ ID NO: 259827 - DNA, 25 bp, Probe Sequence
gggacggggaatcgtgtggctactt

SEQ ID NO: 259828 - DNA, 25 bp, Probe Sequence
gggacaggaagatggttggcgacgt

SEQ ID NO: 259829 - DNA, 25 bp, Probe Sequence
gggagcgtgaagcgcttttccacaa

SEQ ID NO: 259830 - DNA, 25 bp, Probe Sequence
gggaggccaaggtcaagtttgaaga

SEQ ID NO: 259831 - DNA, 25 bp, Probe Sequence
gggagctgagccagtcatggttgtg

SEQ ID NO: 259832 - DNA, 25 bp, Probe Sequence
gggactggtcagctggagctatgat

SEQ ID NO: 259833 - DNA, 25 bp, Probe Sequence
gggagctggtacagtagtgttggac

SEQ ID NO: 259834 - DNA, 25 bp, Probe Sequence
gggatacagtaaaggagcttgtgga

SEQ ID NO: 259835 - DNA, 25 bp, Probe Sequence
gggataggtacaatgtcgtgagggc

SEQ ID NO: 259836 - DNA, 25 bp, Probe Sequence
gggagggtgactacgaggagggcat

SEQ ID NO: 259837 - DNA, 25 bp, Probe Sequence
gggagtgtgggtacatttgaaggca

SEQ ID NO: 259838 - DNA, 25 bp, Probe Sequence
gggagctgtgggagtgattttggcc

SEQ ID NO: 259839 - DNA, 25 bp, Probe Sequence
gggagcctgggcaagtgattcaatc

SEQ ID NO: 259840 - DNA, 25 bp, Probe Sequence
gggagctctggttgcaatattagtt

SEQ ID NO: 259841 - DNA, 25 bp, Probe Sequence
gggatgctgcatagtagagttggtg

SEQ ID NO: 259842 - DNA, 25 bp, Probe Sequence
gggagccattgagagctgggtgagg

SEQ ID NO: 259843 - DNA, 25 bp, Probe Sequence
gggacatcaggacagaacgtgagtg

SEQ ID NO: 259844 - DNA, 25 bp, Probe Sequence
gggaccagtgcacagagagactcag

SEQ ID NO: 259845 - DNA, 25 bp, Probe Sequence
gggaccagctctaaggacattacga

SEQ ID NO: 259846 - DNA, 25 bp, Probe Sequence
gggacggctgtggatggaaattcgc

SEQ ID NO: 259847 - DNA, 25 bp, Probe Sequence
gggaccgtctgtggctataatgacc

SEQ ID NO: 259848 - DNA, 25 bp, Probe Sequence
gggaccttgctgggcattatatgcc

SEQ ID NO: 259849 - DNA, 25 bp, Probe Sequence
gggactttgccagtgacaaagccgg

SEQ ID NO: 259850 - DNA, 25 bp, Probe Sequence
gggattgcatctgggcttaaaccca

SEQ ID NO: 259851 - DNA, 25 bp, Probe Sequence
gggagactcttggtccaagacctgg

SEQ ID NO: 259852 - DNA, 25 bp, Probe Sequence
gggagccagcttggtaaatgggggc

SEQ ID NO: 259853 - DNA, 25 bp, Probe Sequence
gggagccctccagacataaggaggc

SEQ ID NO: 259854 - DNA, 25 bp, Probe Sequence
gggaggcctctacacagaagaaagc

SEQ ID NO: 259855 - DNA, 25 bp, Probe Sequence
gggaccccaacagcgaggagaacag

SEQ ID NO: 259856 - DNA, 25 bp, Probe Sequence
gggaccgagaacgaggcagggaaag

SEQ ID NO: 259857 - DNA, 25 bp, Probe Sequence
gggacacgggaaaggtggcagagaa

SEQ ID NO: 259858 - DNA, 25 bp, Probe Sequence
gggacggtgcatcaagcagggggag

SEQ ID NO: 259859 - DNA, 25 bp, Probe Sequence
gggagcagggctcaactggaggaac

SEQ ID NO: 259860 - DNA, 25 bp, Probe Sequence
gggagaatagcttgaacctgggaag

SEQ ID NO: 259861 - DNA, 25 bp, Probe Sequence
gggactgatgtttacatctttggaa

SEQ ID NO: 259862 - DNA, 25 bp, Probe Sequence
gggactgagtgagccttttgcagga

SEQ ID NO: 259863 - DNA, 25 bp, Probe Sequence
gggactggctacatactttgcagag

SEQ ID NO: 259864 - DNA, 25 bp, Probe Sequence
gggtcgtgtagttgatgcccttggt

SEQ ID NO: 259865 - DNA, 25 bp, Probe Sequence
gggacagggagttatccagctgggt

SEQ ID NO: 259866 - DNA, 25 bp, Probe Sequence
gggacagaggatttgtcaagatggt

SEQ ID NO: 259867 - DNA, 25 bp, Probe Sequence
gggacttggcatatacacagatgta

SEQ ID NO: 259868 - DNA, 25 bp, Probe Sequence
gggactctgatggtcttcagcattc

SEQ ID NO: 259869 - DNA, 25 bp, Probe Sequence
gggactctgatggtcttcagcattc

SEQ ID NO: 259870 - DNA, 25 bp, Probe Sequence
gggatgctgctgagcatcccgcagt

SEQ ID NO: 259871 - DNA, 25 bp, Probe Sequence
gggactgcatgaagacacagctcag

SEQ ID NO: 259872 - DNA, 25 bp, Probe Sequence
gggaccatagctctcagtcagaaga

SEQ ID NO: 259873 - DNA, 25 bp, Probe Sequence
gggacatcttgctcaagtcaggagg

SEQ ID NO: 259874 - DNA, 25 bp, Probe Sequence
gggagcctcatctgcaatgtagggg

SEQ ID NO: 259875 - DNA, 25 bp, Probe Sequence
gggacccatcattgatgactgatga

SEQ ID NO: 259876 - DNA, 25 bp, Probe Sequence
ggggccccttgatctgtaaaggtgt

SEQ ID NO: 259877 - DNA, 25 bp, Probe Sequence
gggtcccttactgcattatcaaggg

SEQ ID NO: 259878 - DNA, 25 bp, Probe Sequence
gggtcccttactgcattatcaaggg

SEQ ID NO: 259879 - DNA, 25 bp, Probe Sequence
gggtatgccttccagtatttcataa

SEQ ID NO: 259880 - DNA, 25 bp, Probe Sequence
gggattccttccaatagttagatct

SEQ ID NO: 259881 - DNA, 25 bp, Probe Sequence
gggttccacgtgtaagctttgagcc

SEQ ID NO: 259882 - DNA, 25 bp, Probe Sequence
gggtacaagcgggagcacattaacc

SEQ ID NO: 259883 - DNA, 25 bp, Probe Sequence
ggggcctacgtaggacaggaacctg

SEQ ID NO: 259884 - DNA, 25 bp, Probe Sequence
gggtgccttttaggagtccaggccg

SEQ ID NO: 259885 - DNA, 25 bp, Probe Sequence
gggagttcattcaaaagtgcctgca

SEQ ID NO: 259886 - DNA, 25 bp, Probe Sequence
gggagttcctgctaaatgactagac

SEQ ID NO: 259887 - DNA, 25 bp, Probe Sequence
gggagcttgtcctaaaagctatggc

SEQ ID NO: 259888 - DNA, 25 bp, Probe Sequence
gggagtcttccataaagttttgcat

SEQ ID NO: 259889 - DNA, 25 bp, Probe Sequence
gggacttcgttgtaatggttttgct

SEQ ID NO: 259890 - DNA, 25 bp, Probe Sequence
gggactccgtgggaaggaggcttgt

SEQ ID NO: 259891 - DNA, 25 bp, Probe Sequence
gggagcccgatgtggaggtggagtt

SEQ ID NO: 259892 - DNA, 25 bp, Probe Sequence
gggagccgtgactgacgacgaagtt

SEQ ID NO: 259893 - DNA, 25 bp, Probe Sequence
gggagtctgtggttgactactgcaa

SEQ ID NO: 259894 - DNA, 25 bp, Probe Sequence
gggagctcgtggatgaggaggcaga

SEQ ID NO: 259895 - DNA, 25 bp, Probe Sequence
gggagtatgctggaggcagagggca

SEQ ID NO: 259896 - DNA, 25 bp, Probe Sequence
gggaggtgctgtggacagggctccc

SEQ ID NO: 259897 - DNA, 25 bp, Probe Sequence
gggacaggttcttggtgctgtacct

SEQ ID NO: 259898 - DNA, 25 bp, Probe Sequence
gggacgggattacgatgttcaccac

SEQ ID NO: 259899 - DNA, 25 bp, Probe Sequence
gggacggatgaacaatgttcacaca

SEQ ID NO: 259900 - DNA, 25 bp, Probe Sequence
gggacggataacaaatttcacacag

SEQ ID NO: 259901 - DNA, 25 bp, Probe Sequence
gggactgtaaactcattcaaccatt

SEQ ID NO: 259902 - DNA, 25 bp, Probe Sequence
gggactgtaaactagttcaaccatt

SEQ ID NO: 259903 - DNA, 25 bp, Probe Sequence
gggagcatttaacaggctcaccctc

SEQ ID NO: 259904 - DNA, 25 bp, Probe Sequence
gggacatctttctttgagtgaccgt

SEQ ID NO: 259905 - DNA, 25 bp, Probe Sequence
gggactcttctgcatattgctgacc

SEQ ID NO: 259906 - DNA, 25 bp, Probe Sequence
gggactcttgtgctttcatacgcac

SEQ ID NO: 259907 - DNA, 25 bp, Probe Sequence
gggacctggtggtgtcaactcaggc

SEQ ID NO: 259908 - DNA, 25 bp, Probe Sequence
gggacttttctgtgttacataggat

SEQ ID NO: 259909 - DNA, 25 bp, Probe Sequence
gggacttttctgtttgctggaagtg

SEQ ID NO: 259910 - DNA, 25 bp, Probe Sequence
gggactttcctactgtcagtaaatc

SEQ ID NO: 259911 - DNA, 25 bp, Probe Sequence
gggacgttctacttggcagtacatc

SEQ ID NO: 259912 - DNA, 25 bp, Probe Sequence
gggactttctacttggcagtacatc

SEQ ID NO: 259913 - DNA, 25 bp, Probe Sequence
gggactttcctactggcagtacatc

SEQ ID NO: 259914 - DNA, 25 bp, Probe Sequence
gggactttcgtactggcagacatct

SEQ ID NO: 259915 - DNA, 25 bp, Probe Sequence
gggacatttctgaagcgagcgtctt

SEQ ID NO: 259916 - DNA, 25 bp, Probe Sequence
gggacctgatctatgatacgctttt

SEQ ID NO: 259917 - DNA, 25 bp, Probe Sequence
gggagctattccaatcatgtccttt

SEQ ID NO: 259918 - DNA, 25 bp, Probe Sequence
gggacttctcatggattttcttggc

SEQ ID NO: 259919 - DNA, 25 bp, Probe Sequence
gggagcttcgctggacgttaatgtg

SEQ ID NO: 259920 - DNA, 25 bp, Probe Sequence
gggagtggtatccagtgttcaagtg

SEQ ID NO: 259921 - DNA, 25 bp, Probe Sequence
gggagatgcgtagggggtcataagg

SEQ ID NO: 259922 - DNA, 25 bp, Probe Sequence
gggagatacatctggggactataag

SEQ ID NO: 259923 - DNA, 25 bp, Probe Sequence
gggactacctcatggctgaaaacag

SEQ ID NO: 259924 - DNA, 25 bp, Probe Sequence
gggacgaaagcttggctccaaagca

SEQ ID NO: 259925 - DNA, 25 bp, Probe Sequence
gggactgaagagggtgcacgttggc

SEQ ID NO: 259926 - DNA, 25 bp, Probe Sequence
gggactgaagagggtgcacgttggc

SEQ ID NO: 259927 - DNA, 25 bp, Probe Sequence
gggactagacacggtgtccatatgg

SEQ ID NO: 259928 - DNA, 25 bp, Probe Sequence
gggactaagcactggtatcatatct

SEQ ID NO: 259929 - DNA, 25 bp, Probe Sequence
gggactgggcacagtggttcatgcc

SEQ ID NO: 259930 - DNA, 25 bp, Probe Sequence
gggactgggcaaatgtttgtgtggc

SEQ ID NO: 259931 - DNA, 25 bp, Probe Sequence
gggagctgaggatggttaatgggta

SEQ ID NO: 259932 - DNA, 25 bp, Probe Sequence
gggagctgatagtgagttattgtag

SEQ ID NO: 259933 - DNA, 25 bp, Probe Sequence
gggacgaatatccacttttccatga

SEQ ID NO: 259934 - DNA, 25 bp, Probe Sequence
gggagcagtataaagcttatttgta

SEQ ID NO: 259935 - DNA, 25 bp, Probe Sequence
gggacgatagtgcagctttgggtga

SEQ ID NO: 259936 - DNA, 25 bp, Probe Sequence
gggacgagtgccagctatgtgaggt

SEQ ID NO: 259937 - DNA, 25 bp, Probe Sequence
gggagaattggctagccatgtgcag

SEQ ID NO: 259938 - DNA, 25 bp, Probe Sequence
gggaccaagctgaccaaacagcagc

SEQ ID NO: 259939 - DNA, 25 bp, Probe Sequence
gggagtggctctgtaaggacgcctt

SEQ ID NO: 259940 - DNA, 25 bp, Probe Sequence
gggacgtgcttttgagcaggaccca

SEQ ID NO: 259941 - DNA, 25 bp, Probe Sequence
gggacgtgtgaatgcctggcaagcc

SEQ ID NO: 259942 - DNA, 25 bp, Probe Sequence
gggactgcatgggaagcacggaata

SEQ ID NO: 259943 - DNA, 25 bp, Probe Sequence
gggactgggagacgacaggaatatt

SEQ ID NO: 259944 - DNA, 25 bp, Probe Sequence
gggactggcggcaacagcggaatat

SEQ ID NO: 259945 - DNA, 25 bp, Probe Sequence
gggactggcggcaacagcggaatat

SEQ ID NO: 259946 - DNA, 25 bp, Probe Sequence
gggactcggagatcatgcagcagaa

SEQ ID NO: 259947 - DNA, 25 bp, Probe Sequence
tggcggctgccatgataccagcaag

SEQ ID NO: 259948 - DNA, 25 bp, Probe Sequence
tgtcggagccaagttcgacccttat

SEQ ID NO: 259949 - DNA, 25 bp, Probe Sequence
tgtagggacaggggtcccactatgt

SEQ ID NO: 259950 - DNA, 25 bp, Probe Sequence
tgtcgggagaatgtgtgccctgcga

SEQ ID NO: 259951 - DNA, 25 bp, Probe Sequence
ggcgggagaggcagtcccgccagac

SEQ ID NO: 259952 - DNA, 25 bp, Probe Sequence
gggagacagaggagaggccccggac

SEQ ID NO: 259953 - DNA, 25 bp, Probe Sequence
gggagacgggatggagacacggggc

SEQ ID NO: 259954 - DNA, 25 bp, Probe Sequence
gggagacgaaggagacgctggggag

SEQ ID NO: 259955 - DNA, 25 bp, Probe Sequence
gggagacgaaggagacgctggggag

SEQ ID NO: 259956 - DNA, 25 bp, Probe Sequence
gggagatcgagtctatacgctgaag

SEQ ID NO: 259957 - DNA, 25 bp, Probe Sequence
gggagtcgaggtagctatcctgaga

SEQ ID NO: 259958 - DNA, 25 bp, Probe Sequence
gggagtcgtcagattatactggaga

SEQ ID NO: 259959 - DNA, 25 bp, Probe Sequence
gggagaggtagagaaattgacagaa

SEQ ID NO: 259960 - DNA, 25 bp, Probe Sequence
gggagcaggggaaagttaagcatgt

SEQ ID NO: 259961 - DNA, 25 bp, Probe Sequence
gggaggggtgatttgtgataacagt

SEQ ID NO: 259962 - DNA, 25 bp, Probe Sequence
gggaggtggttttctgactgagatg

SEQ ID NO: 259963 - DNA, 25 bp, Probe Sequence
gggatcgggtttactcagaagttcg

SEQ ID NO: 259964 - DNA, 25 bp, Probe Sequence
gggagtttgcagatcccaaatgttc

SEQ ID NO: 259965 - DNA, 25 bp, Probe Sequence
gggagaagtgacattgcatcaaagc

SEQ ID NO: 259966 - DNA, 25 bp, Probe Sequence
gggactaggaactgcatatattcat

SEQ ID NO: 259967 - DNA, 25 bp, Probe Sequence
gggtcaacttactgtataattctgg

SEQ ID NO: 259968 - DNA, 25 bp, Probe Sequence
ggtgtcaaaaagtggaaagtgttca

SEQ ID NO: 259969 - DNA, 25 bp, Probe Sequence
gggtgttaaagctcgaaaattctga

SEQ ID NO: 259970 - DNA, 25 bp, Probe Sequence
gggttttagatctcttttcatttgt

SEQ ID NO: 259971 - DNA, 25 bp, Probe Sequence
gggtatttgagatggctaattatgt

SEQ ID NO: 259972 - DNA, 25 bp, Probe Sequence
gggtattgggtgcttaactgtctaa

SEQ ID NO: 259973 - DNA, 25 bp, Probe Sequence
gggatgagctggggttagaccgtcg

SEQ ID NO: 259974 - DNA, 25 bp, Probe Sequence
gggaggtggtaggcaggacctctgg

SEQ ID NO: 259975 - DNA, 25 bp, Probe Sequence
gggaggccgaaggagagatatgctt

SEQ ID NO: 259976 - DNA, 25 bp, Probe Sequence
gggacctggcacaggatgaagctgt

SEQ ID NO: 259977 - DNA, 25 bp, Probe Sequence
gggagtttgagcatggagaatcgct

SEQ ID NO: 259978 - DNA, 25 bp, Probe Sequence
gggactgtgtacattggagatgctc

SEQ ID NO: 259979 - DNA, 25 bp, Probe Sequence
gggacgtgtgaactatggtgcatat

SEQ ID NO: 259980 - DNA, 25 bp, Probe Sequence
gggaggcttaagttgcagatgcttc

SEQ ID NO: 259981 - DNA, 25 bp, Probe Sequence
gggaggttaagagtagcatgaagaa

SEQ ID NO: 259982 - DNA, 25 bp, Probe Sequence
gggagcgtttgggcgcagcattaaa

SEQ ID NO: 259983 - DNA, 25 bp, Probe Sequence
gggagcctgatgaggacgcttatga

SEQ ID NO: 259984 - DNA, 25 bp, Probe Sequence
gggaggcagcagacttgggtaatga

SEQ ID NO: 259985 - DNA, 25 bp, Probe Sequence
gggagtccagaggtgtcagtaatta

SEQ ID NO: 259986 - DNA, 25 bp, Probe Sequence
gggagtacattgggatggtaggtca

SEQ ID NO: 259987 - DNA, 25 bp, Probe Sequence
gggagtcacattgcctggctatgct

SEQ ID NO: 259988 - DNA, 25 bp, Probe Sequence
gggattacactggctgcagtacatc

SEQ ID NO: 259989 - DNA, 25 bp, Probe Sequence
gggatgtacgtatttttgcatgcag

SEQ ID NO: 259990 - DNA, 25 bp, Probe Sequence
gggatgtactgaagcttcttcccgt

SEQ ID NO: 259991 - DNA, 25 bp, Probe Sequence
gggagtggctgaagcctacttcact

SEQ ID NO: 259992 - DNA, 25 bp, Probe Sequence
gggagaggcgaccagtgcagtctcc

SEQ ID NO: 259993 - DNA, 25 bp, Probe Sequence
gggagcgactaggagctgagccttc

SEQ ID NO: 259994 - DNA, 25 bp, Probe Sequence
gggagcagttacaagggcctgcatc

SEQ ID NO: 259995 - DNA, 25 bp, Probe Sequence
gggatcgttacccgaactgcatcag

SEQ ID NO: 259996 - DNA, 25 bp, Probe Sequence
gggatctatttctagtgaaccacag

SEQ ID NO: 259997 - DNA, 25 bp, Probe Sequence
gggactgcatttctggaaacatact

SEQ ID NO: 259998 - DNA, 25 bp, Probe Sequence
gggacgtttcatgagtggacaagct

SEQ ID NO: 259999 - DNA, 25 bp, Probe Sequence
gggagcaatttggtagttgtagaca

SEQ ID NO: 260000 - DNA, 25 bp, Probe Sequence
gggggatttggctggtgccgaagtg

SEQ ID NO: 260001 - DNA, 25 bp, Probe Sequence
gggactgggggaggagtccgaggtg

SEQ ID NO: 260002 - DNA, 25 bp, Probe Sequence
ggggaggggaggagtccagggagag

SEQ ID NO: 260003 - DNA, 25 bp, Probe Sequence
ggggtggggggtatcaaggagcctg

SEQ ID NO: 260004 - DNA, 25 bp, Probe Sequence
gggttcgtagaagattcaagggcca

SEQ ID NO: 260005 - DNA, 25 bp, Probe Sequence
gggttagtaagcacaggctgagacc

SEQ ID NO: 260006 - DNA, 25 bp, Probe Sequence
gggttatgaaaccccaatgctgccc

SEQ ID NO: 260007 - DNA, 25 bp, Probe Sequence
gggattgaaccaaacctagtgcttc

SEQ ID NO: 260008 - DNA, 25 bp, Probe Sequence
gggattcggaggaacctgagtgcct

SEQ ID NO: 260009 - DNA, 25 bp, Probe Sequence
gggaccagaggtaacacggcagcac

SEQ ID NO: 260010 - DNA, 25 bp, Probe Sequence
gggagctacagcgttgaacaaccac

SEQ ID NO: 260011 - DNA, 25 bp, Probe Sequence
gggataaaccatttaccagccacta

SEQ ID NO: 260012 - DNA, 25 bp, Probe Sequence
gggtcaaactacattgagcccctga

SEQ ID NO: 260013 - DNA, 25 bp, Probe Sequence
gggtcaagtaatattagctctggta

SEQ ID NO: 260014 - DNA, 25 bp, Probe Sequence
ggtaaaccagcaaatttggctcgat

SEQ ID NO: 260015 - DNA, 25 bp, Probe Sequence
ggtatagagccgggtttgcgtttat

SEQ ID NO: 260016 - DNA, 25 bp, Probe Sequence
ggtgagggcctggccctaggggtat

SEQ ID NO: 260017 - DNA, 25 bp, Probe Sequence
gggagataccgaagcctactgtggt

SEQ ID NO: 260018 - DNA, 25 bp, Probe Sequence
gggagataccgatacatcttctgca

SEQ ID NO: 260019 - DNA, 25 bp, Probe Sequence
gggagtaagaatttcatcatggcca

SEQ ID NO: 260020 - DNA, 25 bp, Probe Sequence
gggagagtcagctatcttgtctggt

SEQ ID NO: 260021 - DNA, 25 bp, Probe Sequence
gggagaccagcaaatcggtgcactg

SEQ ID NO: 260022 - DNA, 25 bp, Probe Sequence
gggagaacacgggggatgccgagct

SEQ ID NO: 260023 - DNA, 25 bp, Probe Sequence
gggagaagcagagctaggttggagc

SEQ ID NO: 260024 - DNA, 25 bp, Probe Sequence
gggagcaccaagctgggtagtcccc

SEQ ID NO: 260025 - DNA, 25 bp, Probe Sequence
gggagccaagagctgggtaagcctt

SEQ ID NO: 260026 - DNA, 25 bp, Probe Sequence
gggagctataagatggatgtgaagt

SEQ ID NO: 260027 - DNA, 25 bp, Probe Sequence
gggagttacactcaggctgcaagca

SEQ ID NO: 260028 - DNA, 25 bp, Probe Sequence
gggagctttcacttgggacaacaac

SEQ ID NO: 260029 - DNA, 25 bp, Probe Sequence
gggagctggtattaggggagacacc

SEQ ID NO: 260030 - DNA, 25 bp, Probe Sequence
gggatgtatgttcaggggaatgcca

SEQ ID NO: 260031 - DNA, 25 bp, Probe Sequence
gggattttttgttgggacagccacg

SEQ ID NO: 260032 - DNA, 25 bp, Probe Sequence
gggagattttagaggaacctgcatt

SEQ ID NO: 260033 - DNA, 25 bp, Probe Sequence
gggagaatgattgtgggaacactga

SEQ ID NO: 260034 - DNA, 25 bp, Probe Sequence
gggaggtgatatacttagtccattg

SEQ ID NO: 260035 - DNA, 25 bp, Probe Sequence
gggagcgtgaatgacatggccctgg

SEQ ID NO: 260036 - DNA, 25 bp, Probe Sequence
gggagttgaatctttgaggcctggc

SEQ ID NO: 260037 - DNA, 25 bp, Probe Sequence
gggtttgagctagtcatggagcctg

SEQ ID NO: 260038 - DNA, 25 bp, Probe Sequence
gggagatcgacacgtcatggaccat

SEQ ID NO: 260039 - DNA, 25 bp, Probe Sequence
gggagagaaatgcttgataccactt

SEQ ID NO: 260040 - DNA, 25 bp, Probe Sequence
gggagagaagctccgagtacctgcg

SEQ ID NO: 260041 - DNA, 25 bp, Probe Sequence
gggagaaccaaggagctgacttcgg

SEQ ID NO: 260042 - DNA, 25 bp, Probe Sequence
gggaggggcaagggctactatgatg

SEQ ID NO: 260043 - DNA, 25 bp, Probe Sequence
gggatggggcatggtcaaacttagc

SEQ ID NO: 260044 - DNA, 25 bp, Probe Sequence
gggagagggtcagaagcacttagcg

SEQ ID NO: 260045 - DNA, 25 bp, Probe Sequence
gggagaggaacagggccctggagca

SEQ ID NO: 260046 - DNA, 25 bp, Probe Sequence
gggagaggagccgtggataatggaa

SEQ ID NO: 260047 - DNA, 25 bp, Probe Sequence
gggagtggaacctgtcgattaagaa

SEQ ID NO: 260048 - DNA, 25 bp, Probe Sequence
gggagggtaagtgtagttcaagcaa

SEQ ID NO: 260049 - DNA, 25 bp, Probe Sequence
gggatggattactggattgttaaaa

SEQ ID NO: 260050 - DNA, 25 bp, Probe Sequence
gggaggtcatgggggcaatcttaaa

SEQ ID NO: 260051 - DNA, 25 bp, Probe Sequence
gggagagacttgggtcagacttaga

SEQ ID NO: 260052 - DNA, 25 bp, Probe Sequence
gggaggcagttggtacctttcaaga

SEQ ID NO: 260053 - DNA, 25 bp, Probe Sequence
gggagtatgttgtcataacatttaa

SEQ ID NO: 260054 - DNA, 25 bp, Probe Sequence
gggagtgatttttatgaacttaact

SEQ ID NO: 260055 - DNA, 25 bp, Probe Sequence
gggatatttttcaatccactttagc

SEQ ID NO: 260056 - DNA, 25 bp, Probe Sequence
gggagtttgttgttgccatgggaag

SEQ ID NO: 260057 - DNA, 25 bp, Probe Sequence
gggagtttgttgtggcaccaaaatc

SEQ ID NO: 260058 - DNA, 25 bp, Probe Sequence
gggatgtttgttttggcaccaatat

SEQ ID NO: 260059 - DNA, 25 bp, Probe Sequence
gggagcctctgcacagtggctccct

SEQ ID NO: 260060 - DNA, 25 bp, Probe Sequence
gggatggccgctaaatagctcacgt

SEQ ID NO: 260061 - DNA, 25 bp, Probe Sequence
gggaggctccaaaaggacaagatat

SEQ ID NO: 260062 - DNA, 25 bp, Probe Sequence
gggagagctctccagagcagacaca

SEQ ID NO: 260063 - DNA, 25 bp, Probe Sequence
gggagcagatgctgaggtgaaagat

SEQ ID NO: 260064 - DNA, 25 bp, Probe Sequence
gggagcagtgcgtagacatagatga

SEQ ID NO: 260065 - DNA, 25 bp, Probe Sequence
gggagcaggagaccaagttggacct

SEQ ID NO: 260066 - DNA, 25 bp, Probe Sequence
gggagagtgagacccagtggaggga

SEQ ID NO: 260067 - DNA, 25 bp, Probe Sequence
gggaggcatggagtgccatggaagg

SEQ ID NO: 260068 - DNA, 25 bp, Probe Sequence
gggagtgcatcggtacttgagcaat

SEQ ID NO: 260069 - DNA, 25 bp, Probe Sequence
gggagttccttatttatcactagca

SEQ ID NO: 260070 - DNA, 25 bp, Probe Sequence
gggagttccagtgctggtcactaga

SEQ ID NO: 260071 - DNA, 25 bp, Probe Sequence
gggagggccagagctttttggttct

SEQ ID NO: 260072 - DNA, 25 bp, Probe Sequence
gggagagtacaagcctttgagagtg

SEQ ID NO: 260073 - DNA, 25 bp, Probe Sequence
gggagtgttcacacctttgacagtg

SEQ ID NO: 260074 - DNA, 25 bp, Probe Sequence
gggagatttctcaatccctgaaagg

SEQ ID NO: 260075 - DNA, 25 bp, Probe Sequence
gggagatcacttgagcccagaagat

SEQ ID NO: 260076 - DNA, 25 bp, Probe Sequence
gggagacacaatgagacagccaagt

SEQ ID NO: 260077 - DNA, 25 bp, Probe Sequence
gggatatccagatgagaagcaaatc

SEQ ID NO: 260078 - DNA, 25 bp, Probe Sequence
gggatatgctgcaacagagcgggaa

SEQ ID NO: 260079 - DNA, 25 bp, Probe Sequence
gggatagggatgcagcagcgagctg

SEQ ID NO: 260080 - DNA, 25 bp, Probe Sequence
gggtaggagcaaccactgactggtc

SEQ ID NO: 260081 - DNA, 25 bp, Probe Sequence
gggtaggagcaaccactgactggtc

SEQ ID NO: 260082 - DNA, 25 bp, Probe Sequence
gggtaggagcaaccactgactggtc

SEQ ID NO: 260083 - DNA, 25 bp, Probe Sequence
gggtggtatcatagccaccctggct

SEQ ID NO: 260084 - DNA, 25 bp, Probe Sequence
gggattgcttataacaccctgttac

SEQ ID NO: 260085 - DNA, 25 bp, Probe Sequence
gggatatggtacaacccttgtcacc

SEQ ID NO: 260086 - DNA, 25 bp, Probe Sequence
gggatgttgcttactctttttgccc

SEQ ID NO: 260087 - DNA, 25 bp, Probe Sequence
gggattgctttcatctaattctggc

SEQ ID NO: 260088 - DNA, 25 bp, Probe Sequence
gggtctgatttcactaccctgagtc

SEQ ID NO: 260089 - DNA, 25 bp, Probe Sequence
gggagtgagttcattgaccagtcac

SEQ ID NO: 260090 - DNA, 25 bp, Probe Sequence
gggagtgattttggccacactgtca

SEQ ID NO: 260091 - DNA, 25 bp, Probe Sequence
gggagttgttttgcacctaaatcga

SEQ ID NO: 260092 - DNA, 25 bp, Probe Sequence
ggagtttgttttggcaccgaaatca

SEQ ID NO: 260093 - DNA, 25 bp, Probe Sequence
gggagttgttttggcaccagatcaa

SEQ ID NO: 260094 - DNA, 25 bp, Probe Sequence
gggacctttgataggctacgatact

SEQ ID NO: 260095 - DNA, 25 bp, Probe Sequence
gggacccattataggcaataaacac

SEQ ID NO: 260096 - DNA, 25 bp, Probe Sequence
gggagtacttcaatcagaaagacaa

SEQ ID NO: 260097 - DNA, 25 bp, Probe Sequence
gggagaagcggcgaaaggagcaaga

SEQ ID NO: 260098 - DNA, 25 bp, Probe Sequence
gggagacagggtgaagggagtgatt

SEQ ID NO: 260099 - DNA, 25 bp, Probe Sequence
gggtgagtggatgaaggtgggtatt

SEQ ID NO: 260100 - DNA, 25 bp, Probe Sequence
gggtgaattgtgggggtggttaatg

SEQ ID NO: 260101 - DNA, 25 bp, Probe Sequence
ggttgtaggattcaggggttaatgg

SEQ ID NO: 260102 - DNA, 25 bp, Probe Sequence
ggtgttccagttcaaggcagtaaat

SEQ ID NO: 260103 - DNA, 25 bp, Probe Sequence
ggtgttacggaaatcggcctacaag

SEQ ID NO: 260104 - DNA, 25 bp, Probe Sequence
gggtctaaaggtgcgggagtatgag

SEQ ID NO: 260105 - DNA, 25 bp, Probe Sequence
ggggaaactcttgtgggaggagcag

SEQ ID NO: 260106 - DNA, 25 bp, Probe Sequence
gggagaagacttggtggggctggag

SEQ ID NO: 260107 - DNA, 25 bp, Probe Sequence
gggaggagacgtgaggcaactgtgg

SEQ ID NO: 260108 - DNA, 25 bp, Probe Sequence
ggggaacggctttggcagacagtaa

SEQ ID NO: 260109 - DNA, 25 bp, Probe Sequence
gggagtcaggggtggagacctaatt

SEQ ID NO: 260110 - DNA, 25 bp, Probe Sequence
gggagccaggatactggggtccttt

SEQ ID NO: 260111 - DNA, 25 bp, Probe Sequence
gggaccgcaatggcagcgggacgct

SEQ ID NO: 260112 - DNA, 25 bp, Probe Sequence
gggagtgccaaggcaggtggatcac

SEQ ID NO: 260113 - DNA, 25 bp, Probe Sequence
gggggcacctggagggatgccccca

SEQ ID NO: 260114 - DNA, 25 bp, Probe Sequence
ggggcccgagagatggtggcccctc

SEQ ID NO: 260115 - DNA, 25 bp, Probe Sequence
gggacccgaggacgtgatgtgaccc

SEQ ID NO: 260116 - DNA, 25 bp, Probe Sequence
gggaccccgatgtcagtaggaacct

SEQ ID NO: 260117 - DNA, 25 bp, Probe Sequence
gggaccccgatgtcagtaggaacct

SEQ ID NO: 260118 - DNA, 25 bp, Probe Sequence
gggacccacgtggagtaggtgacat

SEQ ID NO: 260119 - DNA, 25 bp, Probe Sequence
gggaccctggatggatgtagggcag

SEQ ID NO: 260120 - DNA, 25 bp, Probe Sequence
gggaccgctggcttataagcgatca

SEQ ID NO: 260121 - DNA, 25 bp, Probe Sequence
gggaccatcttgttctgcaaggtga

SEQ ID NO: 260122 - DNA, 25 bp, Probe Sequence
gggaggatttgagctcataggaaca

SEQ ID NO: 260123 - DNA, 25 bp, Probe Sequence
gggaggtgttcaggtcatgggagca

SEQ ID NO: 260124 - DNA, 25 bp, Probe Sequence
gggagttgtggagatcatgggaagc

SEQ ID NO: 260125 - DNA, 25 bp, Probe Sequence
gggtttggggccatggtggagggca

SEQ ID NO: 260126 - DNA, 25 bp, Probe Sequence
gggtattgggggtggctgtgaaaga

SEQ ID NO: 260127 - DNA, 25 bp, Probe Sequence
gggtatcaggcggggaggttgggag

SEQ ID NO: 260128 - DNA, 25 bp, Probe Sequence
gggatactgcacacggagaggaggg

SEQ ID NO: 260129 - DNA, 25 bp, Probe Sequence
gggatatatccagctcaggagggag

SEQ ID NO: 260130 - DNA, 25 bp, Probe Sequence
gggacgtctagtccacaggaagacc

SEQ ID NO: 260131 - DNA, 25 bp, Probe Sequence
gggacgtctagtccacaggaagacc

SEQ ID NO: 260132 - DNA, 25 bp, Probe Sequence
gggagcggtatggcccagaaaacct

SEQ ID NO: 260133 - DNA, 25 bp, Probe Sequence
gggacgagtcatgcatcctgaaaca

SEQ ID NO: 260134 - DNA, 25 bp, Probe Sequence
gggagcagactctcatcatgcaaat

SEQ ID NO: 260135 - DNA, 25 bp, Probe Sequence
gggagcaacagctgtcagccaacat

SEQ ID NO: 260136 - DNA, 25 bp, Probe Sequence
gggatcacaatctttcagctaactt

SEQ ID NO: 260137 - DNA, 25 bp, Probe Sequence
gggatccaggcattatacggacctc

SEQ ID NO: 260138 - DNA, 25 bp, Probe Sequence
ggtggccagatggttccaggactac

SEQ ID NO: 260139 - DNA, 25 bp, Probe Sequence
ggtggccagatggttccaggactac

SEQ ID NO: 260140 - DNA, 25 bp, Probe Sequence
gggagcaaaggcactaccagtagag

SEQ ID NO: 260141 - DNA, 25 bp, Probe Sequence
gggagccaaggctttatacgtctaa

SEQ ID NO: 260142 - DNA, 25 bp, Probe Sequence
gggaccagagacatgttacctacaa

SEQ ID NO: 260143 - DNA, 25 bp, Probe Sequence
gggtccgtgtctttgtatattcaat

SEQ ID NO: 260144 - DNA, 25 bp, Probe Sequence
gggtctacttctactgtattggcga

SEQ ID NO: 260145 - DNA, 25 bp, Probe Sequence
gggtatacttatactctatagggtc

SEQ ID NO: 260146 - DNA, 25 bp, Probe Sequence
ggtattaatgtactagtaaggtgtt

SEQ ID NO: 260147 - DNA, 25 bp, Probe Sequence
gggacgcacagttatcgtgaagggc

SEQ ID NO: 260148 - DNA, 25 bp, Probe Sequence
gggaggcaaggattcctggaagcgt

SEQ ID NO: 260149 - DNA, 25 bp, Probe Sequence
gggaggcaaggattcctgccagggt

SEQ ID NO: 260150 - DNA, 25 bp, Probe Sequence
gggaggcaaggattcctgccagggt

SEQ ID NO: 260151 - DNA, 25 bp, Probe Sequence
gggaggcaaggattcctgccagggt

SEQ ID NO: 260152 - DNA, 25 bp, Probe Sequence
gggaggcaaggattcatgtcagggt

SEQ ID NO: 260153 - DNA, 25 bp, Probe Sequence
gggaggcagaggttgcagtaagcca

SEQ ID NO: 260154 - DNA, 25 bp, Probe Sequence
gggaggggagcaggcaggaggagca

SEQ ID NO: 260155 - DNA, 25 bp, Probe Sequence
gggagcgaggtcagaggagggcatg

SEQ ID NO: 260156 - DNA, 25 bp, Probe Sequence
gggaggacgtcatgagggcagtgag

SEQ ID NO: 260157 - DNA, 25 bp, Probe Sequence
gggagtacagacaggcgacaggata

SEQ ID NO: 260158 - DNA, 25 bp, Probe Sequence
gggagtggaatctcaccatcaagaa

SEQ ID NO: 260159 - DNA, 25 bp, Probe Sequence
ggagatctggaagccctcaaaaagg

SEQ ID NO: 260160 - DNA, 25 bp, Probe Sequence
gggtattaaggcatcaaatcaggag

SEQ ID NO: 260161 - DNA, 25 bp, Probe Sequence
gggtttcagtccttatcaaagagag

SEQ ID NO: 260162 - DNA, 25 bp, Probe Sequence
gggatttgcattcagagatcaggaa

SEQ ID NO: 260163 - DNA, 25 bp, Probe Sequence
gggagactgtctccagagaaagaaa

SEQ ID NO: 260164 - DNA, 25 bp, Probe Sequence
gggatcacattcattgcacacaaga

SEQ ID NO: 260165 - DNA, 25 bp, Probe Sequence
gggatcacattcattgcacacaaga

SEQ ID NO: 260166 - DNA, 25 bp, Probe Sequence
gggtacatatgttgtcataaaaggt

SEQ ID NO: 260167 - DNA, 25 bp, Probe Sequence
gggtaatcatgttgccaaattgctg

SEQ ID NO: 260168 - DNA, 25 bp, Probe Sequence
gggtcaacagttttcctatgctttg

SEQ ID NO: 260169 - DNA, 25 bp, Probe Sequence
gggtgcaaagaacggcttggcttgg

SEQ ID NO: 260170 - DNA, 25 bp, Probe Sequence
gggatgaaaaggctgcttcaaggcc

SEQ ID NO: 260171 - DNA, 25 bp, Probe Sequence
gggaggtgaaggttgctgtgggcca

SEQ ID NO: 260172 - DNA, 25 bp, Probe Sequence
gggaggtgaaggttgctgtgggcca

SEQ ID NO: 260173 - DNA, 25 bp, Probe Sequence
gggagttgagggagcagacggtgca

SEQ ID NO: 260174 - DNA, 25 bp, Probe Sequence
gggagcctagtggagagcagacgtg

SEQ ID NO: 260175 - DNA, 25 bp, Probe Sequence
gggagctcttgacagaaagcagttc

SEQ ID NO: 260176 - DNA, 25 bp, Probe Sequence
gggagccgaggaagatagatcactt

SEQ ID NO: 260177 - DNA, 25 bp, Probe Sequence
gggagatcgaggaccacagagcaca

SEQ ID NO: 260178 - DNA, 25 bp, Probe Sequence
gggagaagcagagtcaccagcgaga

SEQ ID NO: 260179 - DNA, 25 bp, Probe Sequence
gggagctatggggcccagggattgt

SEQ ID NO: 260180 - DNA, 25 bp, Probe Sequence
gggatcgggaccgcgggtatgacaa

SEQ ID NO: 260181 - DNA, 25 bp, Probe Sequence
gggagggagggcgggaggtagatat

SEQ ID NO: 260182 - DNA, 25 bp, Probe Sequence
gggaggcgggagtggagtggaagaa

SEQ ID NO: 260183 - DNA, 25 bp, Probe Sequence
gggaggcgggagtggagtggaagaa

SEQ ID NO: 260184 - DNA, 25 bp, Probe Sequence
gggaggtgccagttacagcaggtga

SEQ ID NO: 260185 - DNA, 25 bp, Probe Sequence
gggatggggcgttgtcagaagcgga

SEQ ID NO: 260186 - DNA, 25 bp, Probe Sequence
gggttagcaggtggtcaccagggat

SEQ ID NO: 260187 - DNA, 25 bp, Probe Sequence
gggttaggatgaggtgacctgaggg

SEQ ID NO: 260188 - DNA, 25 bp, Probe Sequence
gggagtgcgggaggtgtttgagatg

SEQ ID NO: 260189 - DNA, 25 bp, Probe Sequence
gggagtgctgggacgcaaacggtga

SEQ ID NO: 260190 - DNA, 25 bp, Probe Sequence
gggaggctgaggactgcaagaggag

SEQ ID NO: 260191 - DNA, 25 bp, Probe Sequence
gggaggctgaggactgcaagaggag

SEQ ID NO: 260192 - DNA, 25 bp, Probe Sequence
gggaggttgggctaaggagagatgg

SEQ ID NO: 260193 - DNA, 25 bp, Probe Sequence
gggagcttttggtgagaaggtgttg

SEQ ID NO: 260194 - DNA, 25 bp, Probe Sequence
gggagccaggtgggaaaagtgggtg

SEQ ID NO: 260195 - DNA, 25 bp, Probe Sequence
ggggaaatggggacaaactggctct

SEQ ID NO: 260196 - DNA, 25 bp, Probe Sequence
ggggtacggggagaggcgatgctat

SEQ ID NO: 260197 - DNA, 25 bp, Probe Sequence
gggatggccggggaaatggcggctt

SEQ ID NO: 260198 - DNA, 25 bp, Probe Sequence
gggtcagggaggctaatggttgctt

SEQ ID NO: 260199 - DNA, 25 bp, Probe Sequence
gggagggtgaggcaggagaattgct

SEQ ID NO: 260200 - DNA, 25 bp, Probe Sequence
gggaggctgaggtgggagaattgct

SEQ ID NO: 260201 - DNA, 25 bp, Probe Sequence
gggaggctgaggtgggaggattgct

SEQ ID NO: 260202 - DNA, 25 bp, Probe Sequence
gggagtgacaggttgggatgtggga

SEQ ID NO: 260203 - DNA, 25 bp, Probe Sequence
gggagctgggtgaatgaggtgctgg

SEQ ID NO: 260204 - DNA, 25 bp, Probe Sequence
gggagctgactgatatggtggtgtg

SEQ ID NO: 260205 - DNA, 25 bp, Probe Sequence
gggagtgcgctggtcggaagattgc

SEQ ID NO: 260206 - DNA, 25 bp, Probe Sequence
gggaggcagcgttcagggagattac

SEQ ID NO: 260207 - DNA, 25 bp, Probe Sequence
gggagaagacctagagagaattatg

SEQ ID NO: 260208 - DNA, 25 bp, Probe Sequence
gggagtctgagtatagagagaatgg

SEQ ID NO: 260209 - DNA, 25 bp, Probe Sequence
gggagtgctacaaatcagacgaagg

SEQ ID NO: 260210 - DNA, 25 bp, Probe Sequence
gggagatgattagaaacgaagctgt

SEQ ID NO: 260211 - DNA, 25 bp, Probe Sequence
gggagttgtacccaacagtctcatt

SEQ ID NO: 260212 - DNA, 25 bp, Probe Sequence
gggattagactccctacagtccttc

SEQ ID NO: 260213 - DNA, 25 bp, Probe Sequence
gggagctagagccctttatttcttc

SEQ ID NO: 260214 - DNA, 25 bp, Probe Sequence
gggagctagagccctttatttcttc

SEQ ID NO: 260215 - DNA, 25 bp, Probe Sequence
ggtaaatgtcagattttttcctcca

SEQ ID NO: 260216 - DNA, 25 bp, Probe Sequence
ggtaaatgtcagattttttcctcca

SEQ ID NO: 260217 - DNA, 25 bp, Probe Sequence
gggagatcccagataattttaaaca

SEQ ID NO: 260218 - DNA, 25 bp, Probe Sequence
gggagactcctgaaaatcagcctaa

SEQ ID NO: 260219 - DNA, 25 bp, Probe Sequence
gggaggcaccatgcaaatgtcttcc

SEQ ID NO: 260220 - DNA, 25 bp, Probe Sequence
gggagggacaaggcttctctgtccg

SEQ ID NO: 260221 - DNA, 25 bp, Probe Sequence
gggaggaacaagaccttcctctgct

SEQ ID NO: 260222 - DNA, 25 bp, Probe Sequence
gggaggaaactgacctcatttctcc

SEQ ID NO: 260223 - DNA, 25 bp, Probe Sequence
gggagccagtgaggtcccagtagtc

SEQ ID NO: 260224 - DNA, 25 bp, Probe Sequence
gggagcacaggtttctctagtagat

SEQ ID NO: 260225 - DNA, 25 bp, Probe Sequence
gggagcaagtatgttcagatgtagt

SEQ ID NO: 260226 - DNA, 25 bp, Probe Sequence
gggatgcaaatgttttcagttagaa

SEQ ID NO: 260227 - DNA, 25 bp, Probe Sequence
gggagaacacatttctaatttgaat

SEQ ID NO: 260228 - DNA, 25 bp, Probe Sequence
gggagtctcactaactccatttcac

SEQ ID NO: 260229 - DNA, 25 bp, Probe Sequence
gggaggctgacctagtgatatttca

SEQ ID NO: 260230 - DNA, 25 bp, Probe Sequence
gggaggagaccatggctgactacct

SEQ ID NO: 260231 - DNA, 25 bp, Probe Sequence
gggagtaggcacttcctgaatccct

SEQ ID NO: 260232 - DNA, 25 bp, Probe Sequence
gggagaggtgccttttgtatcccca

SEQ ID NO: 260233 - DNA, 25 bp, Probe Sequence
gggagtagttgggtgttctcccgct

SEQ ID NO: 260234 - DNA, 25 bp, Probe Sequence
tggcgagaactttttttctccgcgt

SEQ ID NO: 260235 - DNA, 25 bp, Probe Sequence
gggagagactgttctgttctgttcc

SEQ ID NO: 260236 - DNA, 25 bp, Probe Sequence
gggagagtgtctctgttcttttgct

SEQ ID NO: 260237 - DNA, 25 bp, Probe Sequence
gggagaatcttccatgttggtgttt

SEQ ID NO: 260238 - DNA, 25 bp, Probe Sequence
gggagatgacctagaaagggctttg

SEQ ID NO: 260239 - DNA, 25 bp, Probe Sequence
gggtttccattccaatagagtattg

SEQ ID NO: 260240 - DNA, 25 bp, Probe Sequence
gggtaccagcatccaagtgaagcta

SEQ ID NO: 260241 - DNA, 25 bp, Probe Sequence
gggtcaggccatcagtgtggagcca

SEQ ID NO: 260242 - DNA, 25 bp, Probe Sequence
gggtcaatcggaaggcgctatgcca

SEQ ID NO: 260243 - DNA, 25 bp, Probe Sequence
gggttatcgccaagctgaattccag

SEQ ID NO: 260244 - DNA, 25 bp, Probe Sequence
gggtgtgccccaaataaactcagga

SEQ ID NO: 260245 - DNA, 25 bp, Probe Sequence
gggtttcaccatgtttagccaggat

SEQ ID NO: 260246 - DNA, 25 bp, Probe Sequence
gggtttcactatgatgactacaagc

SEQ ID NO: 260247 - DNA, 25 bp, Probe Sequence
gggagttcccattagacttgaagtt

SEQ ID NO: 260248 - DNA, 25 bp, Probe Sequence
gggagatatctggcttatgtctata

SEQ ID NO: 260249 - DNA, 25 bp, Probe Sequence
gggatctcatctaatctcatggctt

SEQ ID NO: 260250 - DNA, 25 bp, Probe Sequence
gggattctctggtcacagttttggg

SEQ ID NO: 260251 - DNA, 25 bp, Probe Sequence
gggattcgtagccagagtctttgat

SEQ ID NO: 260252 - DNA, 25 bp, Probe Sequence
gggattcaaacctgcatattgtgat

SEQ ID NO: 260253 - DNA, 25 bp, Probe Sequence
gggttcaatagttggcttctggaat

SEQ ID NO: 260254 - DNA, 25 bp, Probe Sequence
gggtacaacgtatgttcattatttg

SEQ ID NO: 260255 - DNA, 25 bp, Probe Sequence
gggatagaagcccttgcttattttt

SEQ ID NO: 260256 - DNA, 25 bp, Probe Sequence
gggatgaaagccacgtagattcctc

SEQ ID NO: 260257 - DNA, 25 bp, Probe Sequence
gggagaccagatacccaaattcgcc

SEQ ID NO: 260258 - DNA, 25 bp, Probe Sequence
ggtaaccagatggctctttttccca

SEQ ID NO: 260259 - DNA, 25 bp, Probe Sequence
ggtgaagctcaagggctttttccag

SEQ ID NO: 260260 - DNA, 25 bp, Probe Sequence
gggagacgaagctgccttgttagag

SEQ ID NO: 260261 - DNA, 25 bp, Probe Sequence
gggagacgacaggaatattactaac

SEQ ID NO: 260262 - DNA, 25 bp, Probe Sequence
gggtgactggtgcagagttacttcc

SEQ ID NO: 260263 - DNA, 25 bp, Probe Sequence
gggttttggccaagttacagtcaat

SEQ ID NO: 260264 - DNA, 25 bp, Probe Sequence
gggtttgtccgcatgttgtaatcgt

SEQ ID NO: 260265 - DNA, 25 bp, Probe Sequence
gggtcggacccacatatttaagatt

SEQ ID NO: 260266 - DNA, 25 bp, Probe Sequence
gggtccttcccaaagatgttaagtg

SEQ ID NO: 260267 - DNA, 25 bp, Probe Sequence
gggtccttcccaaagatgttaagtg

SEQ ID NO: 260268 - DNA, 25 bp, Probe Sequence
gggatccgtctcttaagtaattggt

SEQ ID NO: 260269 - DNA, 25 bp, Probe Sequence
gggatcgccctttttgtagatgagg

SEQ ID NO: 260270 - DNA, 25 bp, Probe Sequence
gggaggctcctttcgtgatagaggg

SEQ ID NO: 260271 - DNA, 25 bp, Probe Sequence
gggagtctatgcggttaatcagggg

SEQ ID NO: 260272 - DNA, 25 bp, Probe Sequence
gggatgttgtcagtggagcaatagg

SEQ ID NO: 260273 - DNA, 25 bp, Probe Sequence
gggagacagtcatgtgaccaggcgc

SEQ ID NO: 260274 - DNA, 25 bp, Probe Sequence
ggtgaaccctgataccaggagcctg

SEQ ID NO: 260275 - DNA, 25 bp, Probe Sequence
gggtgcgcccgactactcgggcgca

SEQ ID NO: 260276 - DNA, 25 bp, Probe Sequence
gggttccctggaacatagttcgatg

SEQ ID NO: 260277 - DNA, 25 bp, Probe Sequence
gggtctccggagaataattgtccat

SEQ ID NO: 260278 - DNA, 25 bp, Probe Sequence
gggttctcatggatcgaagtgacct

SEQ ID NO: 260279 - DNA, 25 bp, Probe Sequence
gggtacacgagcacaacgtgcaggt

SEQ ID NO: 260280 - DNA, 25 bp, Probe Sequence
gggattactgactcataaccaggtc

SEQ ID NO: 260281 - DNA, 25 bp, Probe Sequence
gggattaatatccagcatatacaag

SEQ ID NO: 260282 - DNA, 25 bp, Probe Sequence
gggattatcatctcagttaagacac

SEQ ID NO: 260283 - DNA, 25 bp, Probe Sequence
gggatcttctcccattgacaggagc

SEQ ID NO: 260284 - DNA, 25 bp, Probe Sequence
gggatctgggatcattggcagccac

SEQ ID NO: 260285 - DNA, 25 bp, Probe Sequence
gggagggctgattttcgagagccga

SEQ ID NO: 260286 - DNA, 25 bp, Probe Sequence
gggaggtctatataagcagagctcg

SEQ ID NO: 260287 - DNA, 25 bp, Probe Sequence
gggaggtctatataagcagagctcg

SEQ ID NO: 260288 - DNA, 25 bp, Probe Sequence
gggaggtctatataagcagagctcg

SEQ ID NO: 260289 - DNA, 25 bp, Probe Sequence
gggaggtctatataagcagagctcg

SEQ ID NO: 260290 - DNA, 25 bp, Probe Sequence
gggaggtctatataacagagctctt

SEQ ID NO: 260291 - DNA, 25 bp, Probe Sequence
gggagaacattatgaactgcatctt

SEQ ID NO: 260292 - DNA, 25 bp, Probe Sequence
gggagaaccaatgaatccattgtcc

SEQ ID NO: 260293 - DNA, 25 bp, Probe Sequence
gggagaactcaattcagtaccagtt

SEQ ID NO: 260294 - DNA, 25 bp, Probe Sequence
gggagaactcactgaggatgaggtg

SEQ ID NO: 260295 - DNA, 25 bp, Probe Sequence
gggagggtacatggatgaggcaggt

SEQ ID NO: 260296 - DNA, 25 bp, Probe Sequence
gggagattgtctactgtgggcaggt

SEQ ID NO: 260297 - DNA, 25 bp, Probe Sequence
gggttattcttcttgatggcagtct

SEQ ID NO: 260298 - DNA, 25 bp, Probe Sequence
gggagaatctcattttggccatgct

SEQ ID NO: 260299 - DNA, 25 bp, Probe Sequence
gggagacaatcgctttagcatgctg

SEQ ID NO: 260300 - DNA, 25 bp, Probe Sequence
gggagcacagacccagtttgatgtt

SEQ ID NO: 260301 - DNA, 25 bp, Probe Sequence
gggatgcaaacgccatttcttatca

SEQ ID NO: 260302 - DNA, 25 bp, Probe Sequence
gggatcaacacctttttcatacaag

SEQ ID NO: 260303 - DNA, 25 bp, Probe Sequence
gggatagtacatgtttctgctaaag

SEQ ID NO: 260304 - DNA, 25 bp, Probe Sequence
ggtgttggacacatttgcgccaaaa

SEQ ID NO: 260305 - DNA, 25 bp, Probe Sequence
gggttgtgactggctttggtgcaaa

SEQ ID NO: 260306 - DNA, 25 bp, Probe Sequence
gggattgactcggatttgagtgatc

SEQ ID NO: 260307 - DNA, 25 bp, Probe Sequence
gggatgtgacatctgaagctaggat

SEQ ID NO: 260308 - DNA, 25 bp, Probe Sequence
gggatgggcatgcagagcatgtctg

SEQ ID NO: 260309 - DNA, 25 bp, Probe Sequence
gggagatggaggcatcatgtctgtt

SEQ ID NO: 260310 - DNA, 25 bp, Probe Sequence
gggagtaggcaggcatgtgttggca

SEQ ID NO: 260311 - DNA, 25 bp, Probe Sequence
gggagtggacaggagtggatgcgat

SEQ ID NO: 260312 - DNA, 25 bp, Probe Sequence
gggagcaagacagagacgcaggatg

SEQ ID NO: 260313 - DNA, 25 bp, Probe Sequence
gggatccagacatcagagggtgtgt

SEQ ID NO: 260314 - DNA, 25 bp, Probe Sequence
gggagtcacacaagagatgggagga

SEQ ID NO: 260315 - DNA, 25 bp, Probe Sequence
gggagattagtggtgatggagagga

SEQ ID NO: 260316 - DNA, 25 bp, Probe Sequence
gggtatggactggatgcagcgtagg

SEQ ID NO: 260317 - DNA, 25 bp, Probe Sequence
ggcgttgtacggtgggaggtctata

SEQ ID NO: 260318 - DNA, 25 bp, Probe Sequence
gggaggctaaggtggaaggatcgct

SEQ ID NO: 260319 - DNA, 25 bp, Probe Sequence
gggaggcaaaggcgggaggatcact

SEQ ID NO: 260320 - DNA, 25 bp, Probe Sequence
gggaggccgaagcgggtggatcact

SEQ ID NO: 260321 - DNA, 25 bp, Probe Sequence
gggaggccaaggagggtggatcact

SEQ ID NO: 260322 - DNA, 25 bp, Probe Sequence
gggagagcacaacgtcgaagttctg

SEQ ID NO: 260323 - DNA, 25 bp, Probe Sequence
gggagaacaaagtaatacattctag

SEQ ID NO: 260324 - DNA, 25 bp, Probe Sequence
gggagaataaaatgacatatccttt

SEQ ID NO: 260325 - DNA, 25 bp, Probe Sequence
gggatatttaaactcaatcaccata

SEQ ID NO: 260326 - DNA, 25 bp, Probe Sequence
gggatgttgctatataaataccaaa

SEQ ID NO: 260327 - DNA, 25 bp, Probe Sequence
gggagatgggcatgttgtataccaa

SEQ ID NO: 260328 - DNA, 25 bp, Probe Sequence
gggagagggatcgtcctcattcaga

SEQ ID NO: 260329 - DNA, 25 bp, Probe Sequence
gggataggattggcggctcattcaa

SEQ ID NO: 260330 - DNA, 25 bp, Probe Sequence
gggataggtatgactggcttaagag

SEQ ID NO: 260331 - DNA, 25 bp, Probe Sequence
gggaggagctcaagcaacttcgaag

SEQ ID NO: 260332 - DNA, 25 bp, Probe Sequence
gggagacacataagcaattcactgc

SEQ ID NO: 260333 - DNA, 25 bp, Probe Sequence
gggaggcacaaagaatagctctgag

SEQ ID NO: 260334 - DNA, 25 bp, Probe Sequence
gggatggcccggccaaagtctaggc

SEQ ID NO: 260335 - DNA, 25 bp, Probe Sequence
gggaggtcactggaaaggggagagc

SEQ ID NO: 260336 - DNA, 25 bp, Probe Sequence
gggagggagctggtattaggggaga

SEQ ID NO: 260337 - DNA, 25 bp, Probe Sequence
gggatgaggcaggtatcactagagg

SEQ ID NO: 260338 - DNA, 25 bp, Probe Sequence
gggagagcgatacatcacgcatgag

SEQ ID NO: 260339 - DNA, 25 bp, Probe Sequence
gggagacgaaggttgcagatgagct

SEQ ID NO: 260340 - DNA, 25 bp, Probe Sequence
gggagtaaagggacaagagcttaga

SEQ ID NO: 260341 - DNA, 25 bp, Probe Sequence
gggagtaacagggcagaaatgatta

SEQ ID NO: 260342 - DNA, 25 bp, Probe Sequence
gggaggaacttgcataaatatatat

SEQ ID NO: 260343 - DNA, 25 bp, Probe Sequence
gggaggcatcagttgctatatatta

SEQ ID NO: 260344 - DNA, 25 bp, Probe Sequence
gggagaccagctatgaattctagga

SEQ ID NO: 260345 - DNA, 25 bp, Probe Sequence
gggagagaagtcataattcagggct

SEQ ID NO: 260346 - DNA, 25 bp, Probe Sequence
gggagatgatgacatttcttcagtg

SEQ ID NO: 260347 - DNA, 25 bp, Probe Sequence
gggagatggaggttgtagtcagctg

SEQ ID NO: 260348 - DNA, 25 bp, Probe Sequence
gggaggtggagattgtggtgagctg

SEQ ID NO: 260349 - DNA, 25 bp, Probe Sequence
gggaggtgcgtgtggatgtatgtgg

SEQ ID NO: 260350 - DNA, 25 bp, Probe Sequence
gggagattggtgttaagcttgggaa

SEQ ID NO: 260351 - DNA, 25 bp, Probe Sequence
gggagttagatgtatagagtgtttg

SEQ ID NO: 260352 - DNA, 25 bp, Probe Sequence
gggattctagattaatgggggttgc

SEQ ID NO: 260353 - DNA, 25 bp, Probe Sequence
gggtttggtaaaggctccagtgtgg

SEQ ID NO: 260354 - DNA, 25 bp, Probe Sequence
gggttatgttaaccttccatgcctg

SEQ ID NO: 260355 - DNA, 25 bp, Probe Sequence
gggtcttgagataacctttgaagct

SEQ ID NO: 260356 - DNA, 25 bp, Probe Sequence
gggatctgtggctcacacttgtaat

SEQ ID NO: 260357 - DNA, 25 bp, Probe Sequence
gggatttggtcaacactaacatgat

SEQ ID NO: 260358 - DNA, 25 bp, Probe Sequence
gggataatggcaagccactcataat

SEQ ID NO: 260359 - DNA, 25 bp, Probe Sequence
gggatcattggcagccacatgtaga

SEQ ID NO: 260360 - DNA, 25 bp, Probe Sequence
gggatatgtcgtccacaatgtcaca

SEQ ID NO: 260361 - DNA, 25 bp, Probe Sequence
gggagtgctcagtctgtgcaagtca

SEQ ID NO: 260362 - DNA, 25 bp, Probe Sequence
gggatgctgttggcttcagagatca

SEQ ID NO: 260363 - DNA, 25 bp, Probe Sequence
gggatgcttgtgtaatcgaccacct

SEQ ID NO: 260364 - DNA, 25 bp, Probe Sequence
gggtcttgtaaagagtctgccttct

SEQ ID NO: 260365 - DNA, 25 bp, Probe Sequence
gggttagggtgtgtgttcaccttca

SEQ ID NO: 260366 - DNA, 25 bp, Probe Sequence
gggattatcgcgagtggttgacctt

SEQ ID NO: 260367 - DNA, 25 bp, Probe Sequence
gggattactgttctggttatcttca

SEQ ID NO: 260368 - DNA, 25 bp, Probe Sequence
gggagtacagttcttttcattcata

SEQ ID NO: 260369 - DNA, 25 bp, Probe Sequence
gggtaacatttcattctccaatctt

SEQ ID NO: 260370 - DNA, 25 bp, Probe Sequence
gggttaattgtcctacatcaaactt

SEQ ID NO: 260371 - DNA, 25 bp, Probe Sequence
gggatttttggctacacacaaacca

SEQ ID NO: 260372 - DNA, 25 bp, Probe Sequence
gggatttttggataacagactgaca

SEQ ID NO: 260373 - DNA, 25 bp, Probe Sequence
gggtctcttctgaataaagcaatta

SEQ ID NO: 260374 - DNA, 25 bp, Probe Sequence
gggtttttatgaactagctgatttc

SEQ ID NO: 260375 - DNA, 25 bp, Probe Sequence
gggtttgaattcaccagcttggtat

SEQ ID NO: 260376 - DNA, 25 bp, Probe Sequence
ggtggggaaatctgaagtgggtaca

SEQ ID NO: 260377 - DNA, 25 bp, Probe Sequence
ggggctggaaatgttaggaggttgc

SEQ ID NO: 260378 - DNA, 25 bp, Probe Sequence
gggagtgtgaaagatactgggatgt

SEQ ID NO: 260379 - DNA, 25 bp, Probe Sequence
gggagttgaggctaagatatgggtt

SEQ ID NO: 260380 - DNA, 25 bp, Probe Sequence
gggagttcaggccagagatcccatg

SEQ ID NO: 260381 - DNA, 25 bp, Probe Sequence
gggatgtctgaagatagatcgccat

SEQ ID NO: 260382 - DNA, 25 bp, Probe Sequence
gggaggctgtcagatcaacttcact

SEQ ID NO: 260383 - DNA, 25 bp, Probe Sequence
gggaggttgcatggaatcttgtcct

SEQ ID NO: 260384 - DNA, 25 bp, Probe Sequence
gggatgggaggttgatttgctctct

SEQ ID NO: 260385 - DNA, 25 bp, Probe Sequence
gggatggggtattttgttcatttgt

SEQ ID NO: 260386 - DNA, 25 bp, Probe Sequence
gggattgggtgtttcattccatttc

SEQ ID NO: 260387 - DNA, 25 bp, Probe Sequence
tggaggggggtctcattctacaaag

SEQ ID NO: 260388 - DNA, 25 bp, Probe Sequence
gggagggaggacaacaccttcaaag

SEQ ID NO: 260389 - DNA, 25 bp, Probe Sequence
gggaggagcggaccgaccgctccaa

SEQ ID NO: 260390 - DNA, 25 bp, Probe Sequence
gggaggagtggagctatccttccat

SEQ ID NO: 260391 - DNA, 25 bp, Probe Sequence
gggagtggaggggcatagcctttcc

SEQ ID NO: 260392 - DNA, 25 bp, Probe Sequence
gggagtgatggatggacagcttctt

SEQ ID NO: 260393 - DNA, 25 bp, Probe Sequence
gggagtgatgatgatggaggtgatt

SEQ ID NO: 260394 - DNA, 25 bp, Probe Sequence
gggagtgatgatgatggaggtgatt

SEQ ID NO: 260395 - DNA, 25 bp, Probe Sequence
gggatgtgattgggaaggaattgca

SEQ ID NO: 260396 - DNA, 25 bp, Probe Sequence
gggatacatgtcttagaaaattcac

SEQ ID NO: 260397 - DNA, 25 bp, Probe Sequence
gggatattgtgttccataaattatc

SEQ ID NO: 260398 - DNA, 25 bp, Probe Sequence
gggagtttgcattcactgacaagct

SEQ ID NO: 260399 - DNA, 25 bp, Probe Sequence
gggaggtgatgcagcgtgacatagc

SEQ ID NO: 260400 - DNA, 25 bp, Probe Sequence
gggatggttgttgctgacaagaact

SEQ ID NO: 260401 - DNA, 25 bp, Probe Sequence
gggagggcattttgctaccaagcct

SEQ ID NO: 260402 - DNA, 25 bp, Probe Sequence
gggatgtggatacttggcccaaagt

SEQ ID NO: 260403 - DNA, 25 bp, Probe Sequence
gggagtggaagctgcagctgccacc

SEQ ID NO: 260404 - DNA, 25 bp, Probe Sequence
gggagtgaggagccttgctgctcat

SEQ ID NO: 260405 - DNA, 25 bp, Probe Sequence
gggatgaggatgagcctgctgagat

SEQ ID NO: 260406 - DNA, 25 bp, Probe Sequence
gggtggctatgctacttgccatgac

SEQ ID NO: 260407 - DNA, 25 bp, Probe Sequence
gggtggctatgctacttgccatgac

SEQ ID NO: 260408 - DNA, 25 bp, Probe Sequence
gggtggctatgctacttgccatgac

SEQ ID NO: 260409 - DNA, 25 bp, Probe Sequence
gggatcagtagaggcttgcactgcc

SEQ ID NO: 260410 - DNA, 25 bp, Probe Sequence
gggatcagtagaggcttgcactgcc

SEQ ID NO: 260411 - DNA, 25 bp, Probe Sequence
gggatcaccagagctgtgatgtcca

SEQ ID NO: 260412 - DNA, 25 bp, Probe Sequence
gggtcatgtcacacatggatgatcc

SEQ ID NO: 260413 - DNA, 25 bp, Probe Sequence
gggtcattcaccaggtgacaccact

SEQ ID NO: 260414 - DNA, 25 bp, Probe Sequence
gggttgtagccaaaggttcactctc

SEQ ID NO: 260415 - DNA, 25 bp, Probe Sequence
gggattccctaatatgtatactatc

SEQ ID NO: 260416 - DNA, 25 bp, Probe Sequence
ggtgatacttctaaactataactat

SEQ ID NO: 260417 - DNA, 25 bp, Probe Sequence
ggtgtagttctgagtcctgagactt

SEQ ID NO: 260418 - DNA, 25 bp, Probe Sequence
gggatgagtttatccactggagctt

SEQ ID NO: 260419 - DNA, 25 bp, Probe Sequence
gggatgagtaacacatacgggccac

SEQ ID NO: 260420 - DNA, 25 bp, Probe Sequence
gggtgagtgttcagagagggcccct

SEQ ID NO: 260421 - DNA, 25 bp, Probe Sequence
gggtattcttcatgcaggagacccc

SEQ ID NO: 260422 - DNA, 25 bp, Probe Sequence
gggtatttttgcgcaaactccttca

SEQ ID NO: 260423 - DNA, 25 bp, Probe Sequence
gggatttcatttttacaactctgct

SEQ ID NO: 260424 - DNA, 25 bp, Probe Sequence
gggatttccctgattctaattgcat

SEQ ID NO: 260425 - DNA, 25 bp, Probe Sequence
gggatctttccattatgtcgttact

SEQ ID NO: 260426 - DNA, 25 bp, Probe Sequence
gggatcatttctatagtgtgttact

SEQ ID NO: 260427 - DNA, 25 bp, Probe Sequence
gggatgattcacaagtcaagtggaa

SEQ ID NO: 260428 - DNA, 25 bp, Probe Sequence
gggatgacctgaagaaattgctaga

SEQ ID NO: 260429 - DNA, 25 bp, Probe Sequence
gggatacctatttgttctgcatgac

SEQ ID NO: 260430 - DNA, 25 bp, Probe Sequence
gggtaaccatcatgtatgcccacga

SEQ ID NO: 260431 - DNA, 25 bp, Probe Sequence
ggtgtagtggacaagttaccagcca

SEQ ID NO: 260432 - DNA, 25 bp, Probe Sequence
gggtcagttatccaactaccagcaa

SEQ ID NO: 260433 - DNA, 25 bp, Probe Sequence
gggtatggttgacactagcccaatg

SEQ ID NO: 260434 - DNA, 25 bp, Probe Sequence
gggattgaattaaaacagctgcgac

SEQ ID NO: 260435 - DNA, 25 bp, Probe Sequence
gggttgtttctatatcatcatcgtc

SEQ ID NO: 260436 - DNA, 25 bp, Probe Sequence
gggtatgttttaccatctgcatcca

SEQ ID NO: 260437 - DNA, 25 bp, Probe Sequence
gggtatttgcctggctttgttgctt

SEQ ID NO: 260438 - DNA, 25 bp, Probe Sequence
gggtttctgatctgtactttgtgtt

SEQ ID NO: 260439 - DNA, 25 bp, Probe Sequence
ggggtttttgttgtagcagtgttct

SEQ ID NO: 260440 - DNA, 25 bp, Probe Sequence
ggggtatttggctttgtacactttg

SEQ ID NO: 260441 - DNA, 25 bp, Probe Sequence
gggagtgatttggttctttgcccta

SEQ ID NO: 260442 - DNA, 25 bp, Probe Sequence
gggagggagtagaactttgactcta

SEQ ID NO: 260443 - DNA, 25 bp, Probe Sequence
gggaggggccagagttttctatgaa

SEQ ID NO: 260444 - DNA, 25 bp, Probe Sequence
gggataggcccagaagttcctgatg

SEQ ID NO: 260445 - DNA, 25 bp, Probe Sequence
gggataggcccagaagttcctgatg

SEQ ID NO: 260446 - DNA, 25 bp, Probe Sequence
gggaggagtccagggagaggcggga

SEQ ID NO: 260447 - DNA, 25 bp, Probe Sequence
gggagggtccagtatgaggtgagag

SEQ ID NO: 260448 - DNA, 25 bp, Probe Sequence
gggatcaggaccaggcacttgtagg

SEQ ID NO: 260449 - DNA, 25 bp, Probe Sequence
gggataggactgagtggtaggagga

SEQ ID NO: 260450 - DNA, 25 bp, Probe Sequence
gggtaggaggtttggatgggagtga

SEQ ID NO: 260451 - DNA, 25 bp, Probe Sequence
gggttcgtagtattggattattgta

SEQ ID NO: 260452 - DNA, 25 bp, Probe Sequence
gggttatttggtaggttcatgatta

SEQ ID NO: 260453 - DNA, 25 bp, Probe Sequence
gggtattacatgcatttttcactta

SEQ ID NO: 260454 - DNA, 25 bp, Probe Sequence
gggttcaagtgtatatattcctgta

SEQ ID NO: 260455 - DNA, 25 bp, Probe Sequence
gggttcaagtgtatatattcctgta

SEQ ID NO: 260456 - DNA, 25 bp, Probe Sequence
gggttgataggaattttctcttgct

SEQ ID NO: 260457 - DNA, 25 bp, Probe Sequence
gggagtgaatgatggcttatttgtc

SEQ ID NO: 260458 - DNA, 25 bp, Probe Sequence
gggagtgatatttaccttgatggta

SEQ ID NO: 260459 - DNA, 25 bp, Probe Sequence
gggaggattgcttgagcccatgggt

SEQ ID NO: 260460 - DNA, 25 bp, Probe Sequence
gggaggatcacttgagcccaggaga

SEQ ID NO: 260461 - DNA, 25 bp, Probe Sequence
gggaggatagcttgaggccaggagt

SEQ ID NO: 260462 - DNA, 25 bp, Probe Sequence
gggaggcagagcttgcagtgagccg

SEQ ID NO: 260463 - DNA, 25 bp, Probe Sequence
gggagtctatataagcagagctcgt

SEQ ID NO: 260464 - DNA, 25 bp, Probe Sequence
gggatgctctatgatcaggaccgtg

SEQ ID NO: 260465 - DNA, 25 bp, Probe Sequence
ggggcttaaaagctccatggactgg

SEQ ID NO: 260466 - DNA, 25 bp, Probe Sequence
ggggtatcaaggagcctgggacgtg

SEQ ID NO: 260467 - DNA, 25 bp, Probe Sequence
gggggtaaggtcacagatcaacagg

SEQ ID NO: 260468 - DNA, 25 bp, Probe Sequence
gggatggggaggaccaagacccagg

SEQ ID NO: 260469 - DNA, 25 bp, Probe Sequence
gggaggagtacgtcaagaagccgat

SEQ ID NO: 260470 - DNA, 25 bp, Probe Sequence
gggagtgaggagcccatactcagcc

SEQ ID NO: 260471 - DNA, 25 bp, Probe Sequence
gggagtgaggagcccatactcagcc

SEQ ID NO: 260472 - DNA, 25 bp, Probe Sequence
gggatgttggagctaatgccagctg

SEQ ID NO: 260473 - DNA, 25 bp, Probe Sequence
gggatttcagagcacctgctagtct

SEQ ID NO: 260474 - DNA, 25 bp, Probe Sequence
gggagtggagatttcctgctggtct

SEQ ID NO: 260475 - DNA, 25 bp, Probe Sequence
gggatgggagtcatcgctgtggagc

SEQ ID NO: 260476 - DNA, 25 bp, Probe Sequence
gggatgcggttttggcagtacatca

SEQ ID NO: 260477 - DNA, 25 bp, Probe Sequence
gggatgctgtgtctagtgattaaac

SEQ ID NO: 260478 - DNA, 25 bp, Probe Sequence
gggatgttgctgaacagttggagaa

SEQ ID NO: 260479 - DNA, 25 bp, Probe Sequence
gggatggagctgaaagcctggcggc

SEQ ID NO: 260480 - DNA, 25 bp, Probe Sequence
gggatggagctgaaagcctggcggc

SEQ ID NO: 260481 - DNA, 25 bp, Probe Sequence
gggatggagcggcagcaaggggtgt

SEQ ID NO: 260482 - DNA, 25 bp, Probe Sequence
gggagtgagagggagagacgcggtc

SEQ ID NO: 260483 - DNA, 25 bp, Probe Sequence
gggatgaactgggggacaggtctgc

SEQ ID NO: 260484 - DNA, 25 bp, Probe Sequence
gggtaacatggcttgggcctttggg

SEQ ID NO: 260485 - DNA, 25 bp, Probe Sequence
gggtaagctgactaaaccacttggg

SEQ ID NO: 260486 - DNA, 25 bp, Probe Sequence
gggtcaaagctgcgaaacctgtggg

SEQ ID NO: 260487 - DNA, 25 bp, Probe Sequence
gggtcatagtcacaaataccagggg

SEQ ID NO: 260488 - DNA, 25 bp, Probe Sequence
gggttaccaggttcatacattgctg

SEQ ID NO: 260489 - DNA, 25 bp, Probe Sequence
gggttacactgccttcaatggcgtg

SEQ ID NO: 260490 - DNA, 25 bp, Probe Sequence
gggttactcgatgtaagggattcct

SEQ ID NO: 260491 - DNA, 25 bp, Probe Sequence
gggttcctcgtggtatgggacacgc

SEQ ID NO: 260492 - DNA, 25 bp, Probe Sequence
gggttcctaggactagggcccatca

SEQ ID NO: 260493 - DNA, 25 bp, Probe Sequence
gggttccaagccttaggggatgccg

SEQ ID NO: 260494 - DNA, 25 bp, Probe Sequence
gggttcctatactgacggtgatcgt

SEQ ID NO: 260495 - DNA, 25 bp, Probe Sequence
gggtaccttacatcaatggcaagtt

SEQ ID NO: 260496 - DNA, 25 bp, Probe Sequence
gggtactcgtatgccaagaggatga

SEQ ID NO: 260497 - DNA, 25 bp, Probe Sequence
gggtcctggcaagccattgggcaga

SEQ ID NO: 260498 - DNA, 25 bp, Probe Sequence
gggtgactggaagacctgtcacagt

SEQ ID NO: 260499 - DNA, 25 bp, Probe Sequence
gggtactgagattgtagccttcaaa

SEQ ID NO: 260500 - DNA, 25 bp, Probe Sequence
gggtagcagcagatgtagtttcaga

SEQ ID NO: 260501 - DNA, 25 bp, Probe Sequence
gggtagcagcagatgtagtttcaga

SEQ ID NO: 260502 - DNA, 25 bp, Probe Sequence
gggatcagcacacttgtcaaggtca

SEQ ID NO: 260503 - DNA, 25 bp, Probe Sequence
gggatgcacaggagtttgctgctga

SEQ ID NO: 260504 - DNA, 25 bp, Probe Sequence
gggtccaggtggggattgtgagctg

SEQ ID NO: 260505 - DNA, 25 bp, Probe Sequence
gggttaggaaggaatcatgaggatg

SEQ ID NO: 260506 - DNA, 25 bp, Probe Sequence
gggttggcgtgaggattcatgggct

SEQ ID NO: 260507 - DNA, 25 bp, Probe Sequence
gggattgggctgtgaaaaggcagtg

SEQ ID NO: 260508 - DNA, 25 bp, Probe Sequence
ggtgatcttgggcagaacataccgg

SEQ ID NO: 260509 - DNA, 25 bp, Probe Sequence
gggatccttgggaagccaaacggag

SEQ ID NO: 260510 - DNA, 25 bp, Probe Sequence
gggatcctacggaaggagcttcgga

SEQ ID NO: 260511 - DNA, 25 bp, Probe Sequence
gggtcctcacggagaagaacaccag

SEQ ID NO: 260512 - DNA, 25 bp, Probe Sequence
gggtcctcaaagaagtaaggccaca

SEQ ID NO: 260513 - DNA, 25 bp, Probe Sequence
gggtcacccaagcaacaaagtcccg

SEQ ID NO: 260514 - DNA, 25 bp, Probe Sequence
gggtcaccctgaccagaatgaacag

SEQ ID NO: 260515 - DNA, 25 bp, Probe Sequence
gggatacggctactgaggataaact

SEQ ID NO: 260516 - DNA, 25 bp, Probe Sequence
gggtaagctgctctgaggtaaaggt

SEQ ID NO: 260517 - DNA, 25 bp, Probe Sequence
gggataagctggctgcaataaaact

SEQ ID NO: 260518 - DNA, 25 bp, Probe Sequence
gggtaactgtcatcaataataactt

SEQ ID NO: 260519 - DNA, 25 bp, Probe Sequence
tgggttcaactagattaaaaggctg

SEQ ID NO: 260520 - DNA, 25 bp, Probe Sequence
tgggttcaactagattaaaaggctg

SEQ ID NO: 260521 - DNA, 25 bp, Probe Sequence
gggtttcactgtgttagccagggtg

SEQ ID NO: 260522 - DNA, 25 bp, Probe Sequence
gggtctgttcttgtggaccagagcc

SEQ ID NO: 260523 - DNA, 25 bp, Probe Sequence
gggaggttctataataagccatgag

SEQ ID NO: 260524 - DNA, 25 bp, Probe Sequence
gggaggcatctctgttaccaatgag

SEQ ID NO: 260525 - DNA, 25 bp, Probe Sequence
gggaggtctatgatagagccgagct

SEQ ID NO: 260526 - DNA, 25 bp, Probe Sequence
gggaggcctcagagaactctggaac

SEQ ID NO: 260527 - DNA, 25 bp, Probe Sequence
ggggttctcagaaaactcagtttct

SEQ ID NO: 260528 - DNA, 25 bp, Probe Sequence
ggggcactgggtgatactcagtttc

SEQ ID NO: 260529 - DNA, 25 bp, Probe Sequence
gggaggtggtgacagaccagttcct

SEQ ID NO: 260530 - DNA, 25 bp, Probe Sequence
gggaggtggatgtgacaacaacttc

SEQ ID NO: 260531 - DNA, 25 bp, Probe Sequence
gggaggctacatttcacaaccctct

SEQ ID NO: 260532 - DNA, 25 bp, Probe Sequence
gggaggctagatggaaggaccgttt

SEQ ID NO: 260533 - DNA, 25 bp, Probe Sequence
gggatggctgagtgcacaggtgccg

SEQ ID NO: 260534 - DNA, 25 bp, Probe Sequence
gggatgtgtgtgtgcacgtgtgtgt

SEQ ID NO: 260535 - DNA, 25 bp, Probe Sequence
gggatggtggtgaaaatgctgattg

SEQ ID NO: 260536 - DNA, 25 bp, Probe Sequence
gggatggggtggatgatctgaagca

SEQ ID NO: 260537 - DNA, 25 bp, Probe Sequence
gggaggagagcgtgtgcgctccagc

SEQ ID NO: 260538 - DNA, 25 bp, Probe Sequence
gggaggagatcaacagggctggcat

SEQ ID NO: 260539 - DNA, 25 bp, Probe Sequence
gggaggaatagaggaggctggtaca

SEQ ID NO: 260540 - DNA, 25 bp, Probe Sequence
gggaggccaaagcaggtggatcact

SEQ ID NO: 260541 - DNA, 25 bp, Probe Sequence
gggaggccgaggtggccagatcacc

SEQ ID NO: 260542 - DNA, 25 bp, Probe Sequence
gggaggccgaggtgacaggatcgtt

SEQ ID NO: 260543 - DNA, 25 bp, Probe Sequence
gggaggcggaggttgcaatgagccg

SEQ ID NO: 260544 - DNA, 25 bp, Probe Sequence
gggaggggagagttaacctgctggc

SEQ ID NO: 260545 - DNA, 25 bp, Probe Sequence
gggaggtggggagtcaccttgtggc

SEQ ID NO: 260546 - DNA, 25 bp, Probe Sequence
gggaggtggtgtttgagcttgaagg

SEQ ID NO: 260547 - DNA, 25 bp, Probe Sequence
gggaggggcctgagagattatagtg

SEQ ID NO: 260548 - DNA, 25 bp, Probe Sequence
ggggtttcctgcagaatttgcgatg

SEQ ID NO: 260549 - DNA, 25 bp, Probe Sequence
gggttttcctagctacatctggtac

SEQ ID NO: 260550 - DNA, 25 bp, Probe Sequence
gggtttctctgttgtagacatcttg

SEQ ID NO: 260551 - DNA, 25 bp, Probe Sequence
gggtttctctgtatagtactggcat

SEQ ID NO: 260552 - DNA, 25 bp, Probe Sequence
gggtttttggaatctacatgtcttg

SEQ ID NO: 260553 - DNA, 25 bp, Probe Sequence
gggtagttctggaaagctactttgt

SEQ ID NO: 260554 - DNA, 25 bp, Probe Sequence
gggtaattgcttaaacatgcctggt

SEQ ID NO: 260555 - DNA, 25 bp, Probe Sequence
gggtaatgtcatgtagccaccctta

SEQ ID NO: 260556 - DNA, 25 bp, Probe Sequence
gggatcattttggaagacctcctgt

SEQ ID NO: 260557 - DNA, 25 bp, Probe Sequence
gggatgtcaggggaagaactcagtg

SEQ ID NO: 260558 - DNA, 25 bp, Probe Sequence
gggttcagaggccgaggaggcactg

SEQ ID NO: 260559 - DNA, 25 bp, Probe Sequence
gggattcattggcccataggtacat

SEQ ID NO: 260560 - DNA, 25 bp, Probe Sequence
gggttcacattggccaagttatcat

SEQ ID NO: 260561 - DNA, 25 bp, Probe Sequence
gggattacatctccaagtggctcaa

SEQ ID NO: 260562 - DNA, 25 bp, Probe Sequence
gggatataactgtaatgccaccaca

SEQ ID NO: 260563 - DNA, 25 bp, Probe Sequence
gggattacaggcatgagccaccgcg

SEQ ID NO: 260564 - DNA, 25 bp, Probe Sequence
gggattacaggcatgagccaccgcg

SEQ ID NO: 260565 - DNA, 25 bp, Probe Sequence
gggattaaccatgatgtcacttcag

SEQ ID NO: 260566 - DNA, 25 bp, Probe Sequence
ggggtacaagctgtgatcactgatc

SEQ ID NO: 260567 - DNA, 25 bp, Probe Sequence
gggttggagactgttcaagatcgac

SEQ ID NO: 260568 - DNA, 25 bp, Probe Sequence
gggtctgagaaagtgtacaggtcta

SEQ ID NO: 260569 - DNA, 25 bp, Probe Sequence
gggaggagagaaggtagagctgttc

SEQ ID NO: 260570 - DNA, 25 bp, Probe Sequence
gggatgccaaatttgatagactgct

SEQ ID NO: 260571 - DNA, 25 bp, Probe Sequence
gggatccaaaatatgtgaccttaat

SEQ ID NO: 260572 - DNA, 25 bp, Probe Sequence
gggatgcaagacttcaattacctta

SEQ ID NO: 260573 - DNA, 25 bp, Probe Sequence
gggatgccatcagtgtcatgtctga

SEQ ID NO: 260574 - DNA, 25 bp, Probe Sequence
gggatcgagagcgtggctatgacaa

SEQ ID NO: 260575 - DNA, 25 bp, Probe Sequence
gggatgccagtggcaagcactgatc

SEQ ID NO: 260576 - DNA, 25 bp, Probe Sequence
gggatcattggctatgtaaaagcag

SEQ ID NO: 260577 - DNA, 25 bp, Probe Sequence
gggtcctgtctcatagagaagccgc

SEQ ID NO: 260578 - DNA, 25 bp, Probe Sequence
gggtcgctctgtctggagcataacc

SEQ ID NO: 260579 - DNA, 25 bp, Probe Sequence
gggtcgctctgtctggagcataacc

SEQ ID NO: 260580 - DNA, 25 bp, Probe Sequence
gggatcagctttcctgggagattgg

SEQ ID NO: 260581 - DNA, 25 bp, Probe Sequence
gggatgcacttaggtggtgaatgtg

SEQ ID NO: 260582 - DNA, 25 bp, Probe Sequence
gggatgccgctagtgaggctgaggg

SEQ ID NO: 260583 - DNA, 25 bp, Probe Sequence
gggatctagcgagagagatgcagaa

SEQ ID NO: 260584 - DNA, 25 bp, Probe Sequence
gggtcacaggagacagatgaggagt

SEQ ID NO: 260585 - DNA, 25 bp, Probe Sequence
gggtcacaggagacagatgaggagt

SEQ ID NO: 260586 - DNA, 25 bp, Probe Sequence
gggtatcctgaggcacataggcctt

SEQ ID NO: 260587 - DNA, 25 bp, Probe Sequence
gggtagcagtgggccatggggcttc

SEQ ID NO: 260588 - DNA, 25 bp, Probe Sequence
gggatcagaggtccctggagtttct

SEQ ID NO: 260589 - DNA, 25 bp, Probe Sequence
gggtgaagcaggcgttgttgttccg

SEQ ID NO: 260590 - DNA, 25 bp, Probe Sequence
gggatgaagaagtgatgtgtttaaa

SEQ ID NO: 260591 - DNA, 25 bp, Probe Sequence
gggaggcagaagttatggttagcag

SEQ ID NO: 260592 - DNA, 25 bp, Probe Sequence
gggaggcagaagtctacagtgagtc

SEQ ID NO: 260593 - DNA, 25 bp, Probe Sequence
gggaggcagaggttgtggcgagccg

SEQ ID NO: 260594 - DNA, 25 bp, Probe Sequence
gggaggagatagtttgggatgcagt

SEQ ID NO: 260595 - DNA, 25 bp, Probe Sequence
gggatctgagtaggtctgggatgga

SEQ ID NO: 260596 - DNA, 25 bp, Probe Sequence
gggatctgagtaggtctgggatgga

SEQ ID NO: 260597 - DNA, 25 bp, Probe Sequence
gggtcggtcagagctgacgatgaag

SEQ ID NO: 260598 - DNA, 25 bp, Probe Sequence
ggtgattggggctctgattggcaag

SEQ ID NO: 260599 - DNA, 25 bp, Probe Sequence
ggtgtcgggacatggttgggggaat

SEQ ID NO: 260600 - DNA, 25 bp, Probe Sequence
gggatgtgggaatgactggggtgag

SEQ ID NO: 260601 - DNA, 25 bp, Probe Sequence
gggattggcaattgtccccagggac

SEQ ID NO: 260602 - DNA, 25 bp, Probe Sequence
gggattacgatgttcaccacaggaa

SEQ ID NO: 260603 - DNA, 25 bp, Probe Sequence
gggtgaacgggtgcgcaaggacatc

SEQ ID NO: 260604 - DNA, 25 bp, Probe Sequence
tgggagaaggaaaccaaaggatcta

SEQ ID NO: 260605 - DNA, 25 bp, Probe Sequence
gggataacgaacaacagcaacgtct

SEQ ID NO: 260606 - DNA, 25 bp, Probe Sequence
gggtaacagattgagaacctgtctc

SEQ ID NO: 260607 - DNA, 25 bp, Probe Sequence
gggatgagagaaagtgggacctggt

SEQ ID NO: 260608 - DNA, 25 bp, Probe Sequence
gggatgagggagactgttcacctgc

SEQ ID NO: 260609 - DNA, 25 bp, Probe Sequence
gggtatggacagacagtaatctcct

SEQ ID NO: 260610 - DNA, 25 bp, Probe Sequence
gggatatcgacaagcagtttctgtt

SEQ ID NO: 260611 - DNA, 25 bp, Probe Sequence
gggattcagagcaggtgattctatg

SEQ ID NO: 260612 - DNA, 25 bp, Probe Sequence
gggaggcgatgtcgggcatatcatt

SEQ ID NO: 260613 - DNA, 25 bp, Probe Sequence
gggaggctgagatgggagaatagct

SEQ ID NO: 260614 - DNA, 25 bp, Probe Sequence
gggaggctgagtcaggagaatggtg

SEQ ID NO: 260615 - DNA, 25 bp, Probe Sequence
gggaggctgaagcaggagaattgct

SEQ ID NO: 260616 - DNA, 25 bp, Probe Sequence
gggaggctgaggcaagagaatcact

SEQ ID NO: 260617 - DNA, 25 bp, Probe Sequence
gggaggctgaggcaagaggatcact

SEQ ID NO: 260618 - DNA, 25 bp, Probe Sequence
gggtgccttgactcagatggtgcat

SEQ ID NO: 260619 - DNA, 25 bp, Probe Sequence
gggaggcttatctcactgagtgagc

SEQ ID NO: 260620 - DNA, 25 bp, Probe Sequence
gggaggctctcttgaagtcaggagt

SEQ ID NO: 260621 - DNA, 25 bp, Probe Sequence
gggatcgctctgtggcatacaggag

SEQ ID NO: 260622 - DNA, 25 bp, Probe Sequence
gggaggcatgagtgagctacagtgg

SEQ ID NO: 260623 - DNA, 25 bp, Probe Sequence
gggaggccagaggagcccattgaaa

SEQ ID NO: 260624 - DNA, 25 bp, Probe Sequence
gggaggcaaaggtgctattgaccac

SEQ ID NO: 260625 - DNA, 25 bp, Probe Sequence
gggaggcaaactcctggatgcgacc

SEQ ID NO: 260626 - DNA, 25 bp, Probe Sequence
gggatagcaccatttctggatctca

SEQ ID NO: 260627 - DNA, 25 bp, Probe Sequence
gggattgtgctcatatctggaacag

SEQ ID NO: 260628 - DNA, 25 bp, Probe Sequence
gggattactgagattgtgccactgc

SEQ ID NO: 260629 - DNA, 25 bp, Probe Sequence
gggataactggtcctcataccatgc

SEQ ID NO: 260630 - DNA, 25 bp, Probe Sequence
gggatacaaggctggcatgactcac

SEQ ID NO: 260631 - DNA, 25 bp, Probe Sequence
gggatttgatggcgtgatgtctcac

SEQ ID NO: 260632 - DNA, 25 bp, Probe Sequence
gggatttgtgtgaggtcttactata

SEQ ID NO: 260633 - DNA, 25 bp, Probe Sequence
gggtaatctggaagagtttcctgac

SEQ ID NO: 260634 - DNA, 25 bp, Probe Sequence
gggttttggaggaatatacctgaat

SEQ ID NO: 260635 - DNA, 25 bp, Probe Sequence
gggttttggaggacattagcattct

SEQ ID NO: 260636 - DNA, 25 bp, Probe Sequence
gggatccttgtacaattcacagtgt

SEQ ID NO: 260637 - DNA, 25 bp, Probe Sequence
gggatgctctttgtaatatcggatg

SEQ ID NO: 260638 - DNA, 25 bp, Probe Sequence
gggatggtgtttgacttcggaggaa

SEQ ID NO: 260639 - DNA, 25 bp, Probe Sequence
gggatggtgtttgacttcggaggaa

SEQ ID NO: 260640 - DNA, 25 bp, Probe Sequence
ggccggttttgtgttagcagcggaa

SEQ ID NO: 260641 - DNA, 25 bp, Probe Sequence
ggggggtttgtgctatacactggga

SEQ ID NO: 260642 - DNA, 25 bp, Probe Sequence
ggggggatggatatataagggggag

SEQ ID NO: 260643 - DNA, 25 bp, Probe Sequence
gggggaacagttcatggttggggag

SEQ ID NO: 260644 - DNA, 25 bp, Probe Sequence
ggggaagaagttgagtttgccggca

SEQ ID NO: 260645 - DNA, 25 bp, Probe Sequence
gggtgacagaagagaccttgtctcg

SEQ ID NO: 260646 - DNA, 25 bp, Probe Sequence
gggtacagaaccatcactggtccag

SEQ ID NO: 260647 - DNA, 25 bp, Probe Sequence
gggtcacaatatgttcggtgttcag

SEQ ID NO: 260648 - DNA, 25 bp, Probe Sequence
gggtccaattggttccaagacgcgt

SEQ ID NO: 260649 - DNA, 25 bp, Probe Sequence
tggttccaaagggttccaccctatg

SEQ ID NO: 260650 - DNA, 25 bp, Probe Sequence
gggtccaggaaggttacacctgcga

SEQ ID NO: 260651 - DNA, 25 bp, Probe Sequence
gggttcggatacaatgtcacacagg

SEQ ID NO: 260652 - DNA, 25 bp, Probe Sequence
ggggtcggccaactgatggccggct

SEQ ID NO: 260653 - DNA, 25 bp, Probe Sequence
gggattcagagcgaagttggcggga

SEQ ID NO: 260654 - DNA, 25 bp, Probe Sequence
gggtttgggaacattgatggcgaat

SEQ ID NO: 260655 - DNA, 25 bp, Probe Sequence
gggttgctgggatctgtcaagtgga

SEQ ID NO: 260656 - DNA, 25 bp, Probe Sequence
gggtgatgagggttcagcctactgg

SEQ ID NO: 260657 - DNA, 25 bp, Probe Sequence
gggatgatagaagttctcactttgg

SEQ ID NO: 260658 - DNA, 25 bp, Probe Sequence
gggatgaacacagttctgccggcag

SEQ ID NO: 260659 - DNA, 25 bp, Probe Sequence
gggatgaacacagttctgccggcag

SEQ ID NO: 260660 - DNA, 25 bp, Probe Sequence
gggatgaacacagttctgccggcag

SEQ ID NO: 260661 - DNA, 25 bp, Probe Sequence
gggatgaacaactggcctgtgaact

SEQ ID NO: 260662 - DNA, 25 bp, Probe Sequence
gggtacatcaaagttgactggcaac

SEQ ID NO: 260663 - DNA, 25 bp, Probe Sequence
gggtcacacaaacttggtggtcctg

SEQ ID NO: 260664 - DNA, 25 bp, Probe Sequence
gggtcagataaatttgtatgagctc

SEQ ID NO: 260665 - DNA, 25 bp, Probe Sequence
gggtcagcactatgtctttgaggca

SEQ ID NO: 260666 - DNA, 25 bp, Probe Sequence
gggtacaccatcttcttgagaatga

SEQ ID NO: 260667 - DNA, 25 bp, Probe Sequence
ggaaacctcagctggggaagaattt

SEQ ID NO: 260668 - DNA, 25 bp, Probe Sequence
gggatgaccgcgtttgtggaaaaga

SEQ ID NO: 260669 - DNA, 25 bp, Probe Sequence
gggatctttagctctgtatgaaaaa

SEQ ID NO: 260670 - DNA, 25 bp, Probe Sequence
ggtgacaagtagggcatgtaaaaga

SEQ ID NO: 260671 - DNA, 25 bp, Probe Sequence
gggatagatgcttgtttgtaaaaac

SEQ ID NO: 260672 - DNA, 25 bp, Probe Sequence
gggatagagaagtctttaaatgacc

SEQ ID NO: 260673 - DNA, 25 bp, Probe Sequence
gggtgggaacctatcatacagactg

SEQ ID NO: 260674 - DNA, 25 bp, Probe Sequence
gggtcaggaaccctaatgagaacgg

SEQ ID NO: 260675 - DNA, 25 bp, Probe Sequence
gggatgaggatcacgatgaagacaa

SEQ ID NO: 260676 - DNA, 25 bp, Probe Sequence
gggatgaagaccctcgaagcgcaac

SEQ ID NO: 260677 - DNA, 25 bp, Probe Sequence
gggatgagcaacgggctgaaggcac

SEQ ID NO: 260678 - DNA, 25 bp, Probe Sequence
gggtagaagctgggccgatgaccac

SEQ ID NO: 260679 - DNA, 25 bp, Probe Sequence
gggataacgcgatgactgtgaccct

SEQ ID NO: 260680 - DNA, 25 bp, Probe Sequence
gggataaccagggacattcacctgt

SEQ ID NO: 260681 - DNA, 25 bp, Probe Sequence
gggatgatcagcgaacaaattgcac

SEQ ID NO: 260682 - DNA, 25 bp, Probe Sequence
gggatgtggtgttccacatgtgcct

SEQ ID NO: 260683 - DNA, 25 bp, Probe Sequence
gggtggtggacctcatggcccacat

SEQ ID NO: 260684 - DNA, 25 bp, Probe Sequence
gggtatggtgcctgtcatacccacc

SEQ ID NO: 260685 - DNA, 25 bp, Probe Sequence
gggtggtgaccaatgcattaccttc

SEQ ID NO: 260686 - DNA, 25 bp, Probe Sequence
gggtttttactgttacctgatcaat

SEQ ID NO: 260687 - DNA, 25 bp, Probe Sequence
gggttagtgttttatatcctataat

SEQ ID NO: 260688 - DNA, 25 bp, Probe Sequence
gggttagatgtgtgttatctgtaac

SEQ ID NO: 260689 - DNA, 25 bp, Probe Sequence
gggttatattgcattctcacgtgaa

SEQ ID NO: 260690 - DNA, 25 bp, Probe Sequence
gggattaatagcttttgacctcaag

SEQ ID NO: 260691 - DNA, 25 bp, Probe Sequence
gggtttgatcaaatttatcctaaga

SEQ ID NO: 260692 - DNA, 25 bp, Probe Sequence
gggtagtcttttttatccatcaagt

SEQ ID NO: 260693 - DNA, 25 bp, Probe Sequence
gggtattttttgttgatgctttagt

SEQ ID NO: 260694 - DNA, 25 bp, Probe Sequence
gggatgcatttttgagtttgtatta

SEQ ID NO: 260695 - DNA, 25 bp, Probe Sequence
gggtgattccttgtttttagactat

SEQ ID NO: 260696 - DNA, 25 bp, Probe Sequence
gggtgattccttgtttttagactat

SEQ ID NO: 260697 - DNA, 25 bp, Probe Sequence
gggtgattccttgtttttagactat

SEQ ID NO: 260698 - DNA, 25 bp, Probe Sequence
gggatgaacctggagctttattatc

SEQ ID NO: 260699 - DNA, 25 bp, Probe Sequence
gggtatccctgacctttatgatgat

SEQ ID NO: 260700 - DNA, 25 bp, Probe Sequence
gggtatccctggtcagtaagaatta

SEQ ID NO: 260701 - DNA, 25 bp, Probe Sequence
gggtgcatctgcgtgaacgtaggaa

SEQ ID NO: 260702 - DNA, 25 bp, Probe Sequence
gggtcacatgcagcaactagcaggc

SEQ ID NO: 260703 - DNA, 25 bp, Probe Sequence
gggtctgcatgcagcagcactgacg

SEQ ID NO: 260704 - DNA, 25 bp, Probe Sequence
ggggccatgcaggagcttgaagcac

SEQ ID NO: 260705 - DNA, 25 bp, Probe Sequence
gggtgccatggcagctacatattct

SEQ ID NO: 260706 - DNA, 25 bp, Probe Sequence
gggtgctgctccagtattatggcat

SEQ ID NO: 260707 - DNA, 25 bp, Probe Sequence
gggttgctatggggattgctggctc

SEQ ID NO: 260708 - DNA, 25 bp, Probe Sequence
gggttctagagggcatgtgatgact

SEQ ID NO: 260709 - DNA, 25 bp, Probe Sequence
gggttgtcagatagtctatgtatgt

SEQ ID NO: 260710 - DNA, 25 bp, Probe Sequence
gggttgtgaactacatatatgcatt

SEQ ID NO: 260711 - DNA, 25 bp, Probe Sequence
gggatcctgaagaaatcatatgtta

SEQ ID NO: 260712 - DNA, 25 bp, Probe Sequence
gggtcgcgaagaaatcacagccaag

SEQ ID NO: 260713 - DNA, 25 bp, Probe Sequence
ggttccagtgagagaaaccaaccac

SEQ ID NO: 260714 - DNA, 25 bp, Probe Sequence
gggtccagtcagtagacaaaaacca

SEQ ID NO: 260715 - DNA, 25 bp, Probe Sequence
gggtctgcaactttggaaaactcct

SEQ ID NO: 260716 - DNA, 25 bp, Probe Sequence
gggtctgccctaaggataaatgatc

SEQ ID NO: 260717 - DNA, 25 bp, Probe Sequence
gggttcgctcatgtggacacagtga

SEQ ID NO: 260718 - DNA, 25 bp, Probe Sequence
gggattcagctgttgttgaagggaa

SEQ ID NO: 260719 - DNA, 25 bp, Probe Sequence
gggattccatgttttgtgctggtgc

SEQ ID NO: 260720 - DNA, 25 bp, Probe Sequence
gggtctcctgaaagtggctgaggtc

SEQ ID NO: 260721 - DNA, 25 bp, Probe Sequence
gggtgtctacaataggctcagtccc

SEQ ID NO: 260722 - DNA, 25 bp, Probe Sequence
gggtaccatcaatatggccgagctc

SEQ ID NO: 260723 - DNA, 25 bp, Probe Sequence
gggatgaggatagagtggcctgaga

SEQ ID NO: 260724 - DNA, 25 bp, Probe Sequence
gggtgtggtgtcacatgccagtaac

SEQ ID NO: 260725 - DNA, 25 bp, Probe Sequence
gggttggagtcatcccagtaaggtc

SEQ ID NO: 260726 - DNA, 25 bp, Probe Sequence
gggtattgatgtgccccaggtagtg

SEQ ID NO: 260727 - DNA, 25 bp, Probe Sequence
gggatattcatgtttccacaaatca

SEQ ID NO: 260728 - DNA, 25 bp, Probe Sequence
gggatttctactgccagtgagctca

SEQ ID NO: 260729 - DNA, 25 bp, Probe Sequence
gggtcttgctgatgactcaggactc

SEQ ID NO: 260730 - DNA, 25 bp, Probe Sequence
gggtctgtgcacaaatccatcaacc

SEQ ID NO: 260731 - DNA, 25 bp, Probe Sequence
gggtctgagtcattttgccaatgtc

SEQ ID NO: 260732 - DNA, 25 bp, Probe Sequence
gggatctggtatcttcaaaatccag

SEQ ID NO: 260733 - DNA, 25 bp, Probe Sequence
gggatctccttttgtgaaaaccagt

SEQ ID NO: 260734 - DNA, 25 bp, Probe Sequence
gggtttccttattgaaaaatcagtg

SEQ ID NO: 260735 - DNA, 25 bp, Probe Sequence
gggttgaccttatgagaaactgcat

SEQ ID NO: 260736 - DNA, 25 bp, Probe Sequence
gggatgaccgcttacaaagttctgt

SEQ ID NO: 260737 - DNA, 25 bp, Probe Sequence
gggtggcctttagcacagtatcagt

SEQ ID NO: 260738 - DNA, 25 bp, Probe Sequence
gggtcccttgtagcacaggagactg

SEQ ID NO: 260739 - DNA, 25 bp, Probe Sequence
gggtccaagtgatgctcagggaaaa

SEQ ID NO: 260740 - DNA, 25 bp, Probe Sequence
gggatccgaggatataggaccaaga

SEQ ID NO: 260741 - DNA, 25 bp, Probe Sequence
ggtgtcccggaaatagagaccagaa

SEQ ID NO: 260742 - DNA, 25 bp, Probe Sequence
gggtcctggggacgaagaccaagag

SEQ ID NO: 260743 - DNA, 25 bp, Probe Sequence
ggggtggggtacacagacacagggt

SEQ ID NO: 260744 - DNA, 25 bp, Probe Sequence
gggggaggttggtggaccatggagt

SEQ ID NO: 260745 - DNA, 25 bp, Probe Sequence
gggtggggtttgagatgtttgggtg

SEQ ID NO: 260746 - DNA, 25 bp, Probe Sequence
gggtgagaagggatcgcagtttgga

SEQ ID NO: 260747 - DNA, 25 bp, Probe Sequence
ggggatagtgggggcgtttttgcag

SEQ ID NO: 260748 - DNA, 25 bp, Probe Sequence
gggataggtgaacggcgtcctttga

SEQ ID NO: 260749 - DNA, 25 bp, Probe Sequence
gggtacctgaaatggtcctcttaag

SEQ ID NO: 260750 - DNA, 25 bp, Probe Sequence
ggggatccaaaatatgtgaccttaa

SEQ ID NO: 260751 - DNA, 25 bp, Probe Sequence
ggggctacaaagtgggcccttctgg

SEQ ID NO: 260752 - DNA, 25 bp, Probe Sequence
gggtctacaagaacgagtgcgcctt

SEQ ID NO: 260753 - DNA, 25 bp, Probe Sequence
gggtcccacagattgaagtcacctt

SEQ ID NO: 260754 - DNA, 25 bp, Probe Sequence
gggtcctgcaattctacagtttctt

SEQ ID NO: 260755 - DNA, 25 bp, Probe Sequence
gggtttgatttctaagtgtttcaca

SEQ ID NO: 260756 - DNA, 25 bp, Probe Sequence
gggtttatttaagggagattgcaag

SEQ ID NO: 260757 - DNA, 25 bp, Probe Sequence
gggtatatatctaggagtggaactg

SEQ ID NO: 260758 - DNA, 25 bp, Probe Sequence
gggtcatcaactatgaggagttcaa

SEQ ID NO: 260759 - DNA, 25 bp, Probe Sequence
gggtatatactaatagtaggtgtat

SEQ ID NO: 260760 - DNA, 25 bp, Probe Sequence
gggttagccctaatgtagaatgtca

SEQ ID NO: 260761 - DNA, 25 bp, Probe Sequence
gggttggcctttgcatgggaggcag

SEQ ID NO: 260762 - DNA, 25 bp, Probe Sequence
gggttacacttttatgggcatgact

SEQ ID NO: 260763 - DNA, 25 bp, Probe Sequence
gggatttttcttttgaggcatgcac

SEQ ID NO: 260764 - DNA, 25 bp, Probe Sequence
gggatttggcacttggggacatgag

SEQ ID NO: 260765 - DNA, 25 bp, Probe Sequence
gggtttggccttgggagatcctggc

SEQ ID NO: 260766 - DNA, 25 bp, Probe Sequence
gggtttatccaaagggatggctgga

SEQ ID NO: 260767 - DNA, 25 bp, Probe Sequence
gggtattatcagctggggtgtgggc

SEQ ID NO: 260768 - DNA, 25 bp, Probe Sequence
gggtatctatgcagggaagggggca

SEQ ID NO: 260769 - DNA, 25 bp, Probe Sequence
gggtgcatctcctggtcaggagggg

SEQ ID NO: 260770 - DNA, 25 bp, Probe Sequence
gggatctgcttctcccaggagaaca

SEQ ID NO: 260771 - DNA, 25 bp, Probe Sequence
gggatcgcttacacctgagacgaac

SEQ ID NO: 260772 - DNA, 25 bp, Probe Sequence
gggattttacatatgctggacagaa

SEQ ID NO: 260773 - DNA, 25 bp, Probe Sequence
gggttgtgctaatttctgtccagaa

SEQ ID NO: 260774 - DNA, 25 bp, Probe Sequence
ggtgttggacacttactgaagcaga

SEQ ID NO: 260775 - DNA, 25 bp, Probe Sequence
gggtgtggccacaccaagaagacgg

SEQ ID NO: 260776 - DNA, 25 bp, Probe Sequence
gggtccgagcacaagccaagaagtt

SEQ ID NO: 260777 - DNA, 25 bp, Probe Sequence
gggtccgacagtaccagatgaagac

SEQ ID NO: 260778 - DNA, 25 bp, Probe Sequence
gggtacaaagttccacatgccagaa

SEQ ID NO: 260779 - DNA, 25 bp, Probe Sequence
gggtgaaaagttactacctgtcaag

SEQ ID NO: 260780 - DNA, 25 bp, Probe Sequence
ggggacacaactcttaccagtagtg

SEQ ID NO: 260781 - DNA, 25 bp, Probe Sequence
gggatccccactcttaatcagtggt

SEQ ID NO: 260782 - DNA, 25 bp, Probe Sequence
ggtcccccacgtgtgaagtgtagtg

SEQ ID NO: 260783 - DNA, 25 bp, Probe Sequence
gggttccttcgtgctgaagttagtg

SEQ ID NO: 260784 - DNA, 25 bp, Probe Sequence
gggttttatagtgatacagtggtgt

SEQ ID NO: 260785 - DNA, 25 bp, Probe Sequence
gggtataatcaagggtactgttcgt

SEQ ID NO: 260786 - DNA, 25 bp, Probe Sequence
ggtgtaaccataactgatcctttca

SEQ ID NO: 260787 - DNA, 25 bp, Probe Sequence
gggataactgatttctatggctttc

SEQ ID NO: 260788 - DNA, 25 bp, Probe Sequence
gggataactgatttctatggctttc

SEQ ID NO: 260789 - DNA, 25 bp, Probe Sequence
gggtagcagctaaatcttgatattt

SEQ ID NO: 260790 - DNA, 25 bp, Probe Sequence
gggttgcagcttatgacatgcatga

SEQ ID NO: 260791 - DNA, 25 bp, Probe Sequence
gggtctgcaggtgtcacatgatcac

SEQ ID NO: 260792 - DNA, 25 bp, Probe Sequence
gggtctgcaggtgtcacatgatcac

SEQ ID NO: 260793 - DNA, 25 bp, Probe Sequence
gggtgtggtggactcagatgatctc

SEQ ID NO: 260794 - DNA, 25 bp, Probe Sequence
gggtgtgggccgaagatatgctcat

SEQ ID NO: 260795 - DNA, 25 bp, Probe Sequence
gggtttcagcccagcagaagcatta

SEQ ID NO: 260796 - DNA, 25 bp, Probe Sequence
gggttagagcccagagcaagatgga

SEQ ID NO: 260797 - DNA, 25 bp, Probe Sequence
gggtatagacacccccaaataggtg

SEQ ID NO: 260798 - DNA, 25 bp, Probe Sequence
gggttttcaccttagcaacaatggg

SEQ ID NO: 260799 - DNA, 25 bp, Probe Sequence
gggtgctttccacagtcagaatagg

SEQ ID NO: 260800 - DNA, 25 bp, Probe Sequence
gggttttggcagcgtcaagtcagag

SEQ ID NO: 260801 - DNA, 25 bp, Probe Sequence
gggtctatggggagaaagggagcga

SEQ ID NO: 260802 - DNA, 25 bp, Probe Sequence
gggtcacttcggtgcaaaggcaacg

SEQ ID NO: 260803 - DNA, 25 bp, Probe Sequence
gggtcctgctgggagaaactggcaa

SEQ ID NO: 260804 - DNA, 25 bp, Probe Sequence
gggtgaggcaggagaattgcttgaa

SEQ ID NO: 260805 - DNA, 25 bp, Probe Sequence
gggtcatgccggggcaattattgct

SEQ ID NO: 260806 - DNA, 25 bp, Probe Sequence
gggatacacgagtgcctcatttgat

SEQ ID NO: 260807 - DNA, 25 bp, Probe Sequence
ggttacggagaaggcttccgctgga

SEQ ID NO: 260808 - DNA, 25 bp, Probe Sequence
ggttacggagaaggcttccgctgga

SEQ ID NO: 260809 - DNA, 25 bp, Probe Sequence
ggtgggtggaaaagtgttcgccgag

SEQ ID NO: 260810 - DNA, 25 bp, Probe Sequence
gggtggggcaggagtgagtgcctcg

SEQ ID NO: 260811 - DNA, 25 bp, Probe Sequence
ggggagtggaggggcatagcctttc

SEQ ID NO: 260812 - DNA, 25 bp, Probe Sequence
gggtgcaggggcatggcaccctttc

SEQ ID NO: 260813 - DNA, 25 bp, Probe Sequence
gggtgccgagagatgtaaggctttg

SEQ ID NO: 260814 - DNA, 25 bp, Probe Sequence
gggtccagagtggagtccaggcttc

SEQ ID NO: 260815 - DNA, 25 bp, Probe Sequence
gggatagcaagttcagcaccatcgc

SEQ ID NO: 260816 - DNA, 25 bp, Probe Sequence
gggatcaacagaagcagccgtgggc

SEQ ID NO: 260817 - DNA, 25 bp, Probe Sequence
gggtcagagcagtgcccgaggaagc

SEQ ID NO: 260818 - DNA, 25 bp, Probe Sequence
gggtcagagcagtgcccgaggaagc

SEQ ID NO: 260819 - DNA, 25 bp, Probe Sequence
gggtcagagcatgttcgtggagaac

SEQ ID NO: 260820 - DNA, 25 bp, Probe Sequence
gggttgatgctgaattagggagtga

SEQ ID NO: 260821 - DNA, 25 bp, Probe Sequence
gggggtgctaagaggggtagagaga

SEQ ID NO: 260822 - DNA, 25 bp, Probe Sequence
gggtgttaaagtgctgaggtgaaag

SEQ ID NO: 260823 - DNA, 25 bp, Probe Sequence
gggtgtggccattaactttgtaaag

SEQ ID NO: 260824 - DNA, 25 bp, Probe Sequence
gggtttggtctatctcattgggaac

SEQ ID NO: 260825 - DNA, 25 bp, Probe Sequence
gggttcgagctaagttcttgggaga

SEQ ID NO: 260826 - DNA, 25 bp, Probe Sequence
ggaaactagaggcttcttggtgaag

SEQ ID NO: 260827 - DNA, 25 bp, Probe Sequence
ggtaatgtagggttatatttgggag

SEQ ID NO: 260828 - DNA, 25 bp, Probe Sequence
ggtcggtaggcgtgtacggtgtgag

SEQ ID NO: 260829 - DNA, 25 bp, Probe Sequence
ggtaggtagggctgtgggttccaga

SEQ ID NO: 260830 - DNA, 25 bp, Probe Sequence
ggtaggtatagagccgggtttgcgt

SEQ ID NO: 260831 - DNA, 25 bp, Probe Sequence
ggtaggatttatatctaagtttggt

SEQ ID NO: 260832 - DNA, 25 bp, Probe Sequence
ggtgaggtttgaacccacgtgggag

SEQ ID NO: 260833 - DNA, 25 bp, Probe Sequence
gggtagatttgacatccaccgggac

SEQ ID NO: 260834 - DNA, 25 bp, Probe Sequence
gggtgtgattggagtgtgtccggag

SEQ ID NO: 260835 - DNA, 25 bp, Probe Sequence
gggtgcgaagggggcatgtcacgac

SEQ ID NO: 260836 - DNA, 25 bp, Probe Sequence
gggtcgaaggtggatttagcagtaa

SEQ ID NO: 260837 - DNA, 25 bp, Probe Sequence
gggggaaggggcatatgtcactaat

SEQ ID NO: 260838 - DNA, 25 bp, Probe Sequence
gggttgagaggagctctggtcgttt

SEQ ID NO: 260839 - DNA, 25 bp, Probe Sequence
ggagtctgaaggaccctagttccta

SEQ ID NO: 260840 - DNA, 25 bp, Probe Sequence
gggtcagaaggattcctatgtgggc

SEQ ID NO: 260841 - DNA, 25 bp, Probe Sequence
gggttgggctgaatcaaatgggagc

SEQ ID NO: 260842 - DNA, 25 bp, Probe Sequence
gggttcacctgaacacagagtgtat

SEQ ID NO: 260843 - DNA, 25 bp, Probe Sequence
gggttcctgcgatcagaagtctacc

SEQ ID NO: 260844 - DNA, 25 bp, Probe Sequence
gggatacagctggacaagaagatta

SEQ ID NO: 260845 - DNA, 25 bp, Probe Sequence
gggtaactacattgagaaatctgaa

SEQ ID NO: 260846 - DNA, 25 bp, Probe Sequence
gggtaacatacttcaacaagccaga

SEQ ID NO: 260847 - DNA, 25 bp, Probe Sequence
gggtaacatacttcaacaagccaga

SEQ ID NO: 260848 - DNA, 25 bp, Probe Sequence
gggtcaacagaatcaaaacctgcat

SEQ ID NO: 260849 - DNA, 25 bp, Probe Sequence
gggtttaatatgtccaactcctcat

SEQ ID NO: 260850 - DNA, 25 bp, Probe Sequence
gggtattatttgtgactctcctgaa

SEQ ID NO: 260851 - DNA, 25 bp, Probe Sequence
gggtataaagtgtaaccatcagtta

SEQ ID NO: 260852 - DNA, 25 bp, Probe Sequence
gggtggaacagtcaacctttctagt

SEQ ID NO: 260853 - DNA, 25 bp, Probe Sequence
gggtaggtaggaaactcttctacag

SEQ ID NO: 260854 - DNA, 25 bp, Probe Sequence
gggtaatgtagcttgtcctttttag

SEQ ID NO: 260855 - DNA, 25 bp, Probe Sequence
gggtagctaatgttgtattgtttta

SEQ ID NO: 260856 - DNA, 25 bp, Probe Sequence
gggtgactcacttagatgtcgtttc

SEQ ID NO: 260857 - DNA, 25 bp, Probe Sequence
gggtcatgacctgaagcacgacttc

SEQ ID NO: 260858 - DNA, 25 bp, Probe Sequence
gggatatgagccggtggccgtgtta

SEQ ID NO: 260859 - DNA, 25 bp, Probe Sequence
gggatataactccagggtatgttca

SEQ ID NO: 260860 - DNA, 25 bp, Probe Sequence
ggtaatagttcctctgtttatcacc

SEQ ID NO: 260861 - DNA, 25 bp, Probe Sequence
gggtcaagtgttgtgctggttgacg

SEQ ID NO: 260862 - DNA, 25 bp, Probe Sequence
gggtaacgaccaatgggtatgacca

SEQ ID NO: 260863 - DNA, 25 bp, Probe Sequence
ggagcaaaaactatgggttgtaatt

SEQ ID NO: 260864 - DNA, 25 bp, Probe Sequence
gggtaaaagctgatctggtttgact

SEQ ID NO: 260865 - DNA, 25 bp, Probe Sequence
gggtaacaatgggtggtcttctgat

SEQ ID NO: 260866 - DNA, 25 bp, Probe Sequence
gggattacagtgggggcatttcttt

SEQ ID NO: 260867 - DNA, 25 bp, Probe Sequence
gggtagatagtggtgcagtgcttta

SEQ ID NO: 260868 - DNA, 25 bp, Probe Sequence
gggtaaaggcagccaggcgtgagca

SEQ ID NO: 260869 - DNA, 25 bp, Probe Sequence
gggtagagagacgctgggtgacctg

SEQ ID NO: 260870 - DNA, 25 bp, Probe Sequence
gggtgaagtgccactgggtcaccgc

SEQ ID NO: 260871 - DNA, 25 bp, Probe Sequence
gggtaagggctggctccagataccc

SEQ ID NO: 260872 - DNA, 25 bp, Probe Sequence
gggattacaggcgttcgagtaccct

SEQ ID NO: 260873 - DNA, 25 bp, Probe Sequence
gggttctcaggctttcagcttgaac

SEQ ID NO: 260874 - DNA, 25 bp, Probe Sequence
gggtttaagcattgcttgctgtata

SEQ ID NO: 260875 - DNA, 25 bp, Probe Sequence
ggggttaggaatgtggtgctcttgt

SEQ ID NO: 260876 - DNA, 25 bp, Probe Sequence
ggggaaagttgagacgtgattaccg

SEQ ID NO: 260877 - DNA, 25 bp, Probe Sequence
gggtaaaaatgcggactgatgttag

SEQ ID NO: 260878 - DNA, 25 bp, Probe Sequence
gggtacagaatagagcgtgtgctgt

SEQ ID NO: 260879 - DNA, 25 bp, Probe Sequence
ctggtgtatctaggcagcgggcagc

SEQ ID NO: 260880 - DNA, 25 bp, Probe Sequence
gggtaatgaagatatcatgatcaca

SEQ ID NO: 260881 - DNA, 25 bp, Probe Sequence
gggtatgaccaatatgatgacttaa

SEQ ID NO: 260882 - DNA, 25 bp, Probe Sequence
gggattgtcctatggagcaatgtaa

SEQ ID NO: 260883 - DNA, 25 bp, Probe Sequence
gggattgtcctatggagcaatgtaa

SEQ ID NO: 260884 - DNA, 25 bp, Probe Sequence
ggagtttcctaaaagttcataacag

SEQ ID NO: 260885 - DNA, 25 bp, Probe Sequence
ggagtttcctaaaagttcataacag

SEQ ID NO: 260886 - DNA, 25 bp, Probe Sequence
gggtattcctgagactttatagagc

SEQ ID NO: 260887 - DNA, 25 bp, Probe Sequence
gggatttttgaggagctgttaagaa

SEQ ID NO: 260888 - DNA, 25 bp, Probe Sequence
gggatttcttctgagactgtggtga

SEQ ID NO: 260889 - DNA, 25 bp, Probe Sequence
gggattccgggaggtgcatgggtat

SEQ ID NO: 260890 - DNA, 25 bp, Probe Sequence
gggttacgggacagatgcagttatc

SEQ ID NO: 260891 - DNA, 25 bp, Probe Sequence
gggtcttccggtaggagctgtaatc

SEQ ID NO: 260892 - DNA, 25 bp, Probe Sequence
gggttgttcaggttttctgttgact

SEQ ID NO: 260893 - DNA, 25 bp, Probe Sequence
gggtaggatcctttatttgttcagt

SEQ ID NO: 260894 - DNA, 25 bp, Probe Sequence
gggtattagcctttaatttgtgcaa

SEQ ID NO: 260895 - DNA, 25 bp, Probe Sequence
ggtgaacaacccgtaatgaatggca

SEQ ID NO: 260896 - DNA, 25 bp, Probe Sequence
ggtgacactaaccattttgacggac

SEQ ID NO: 260897 - DNA, 25 bp, Probe Sequence
ggggactgaacatcgttcaccgaat

SEQ ID NO: 260898 - DNA, 25 bp, Probe Sequence
gggtgagtgaaggctacttcccgga

SEQ ID NO: 260899 - DNA, 25 bp, Probe Sequence
gggtggaggaggaacttcccaagtg

SEQ ID NO: 260900 - DNA, 25 bp, Probe Sequence
gggtctgggacagacttcactctca

SEQ ID NO: 260901 - DNA, 25 bp, Probe Sequence
gggtctgcttatgctagttcagtat

SEQ ID NO: 260902 - DNA, 25 bp, Probe Sequence
gggttctgtatttcagttctttcga

SEQ ID NO: 260903 - DNA, 25 bp, Probe Sequence
gggtatctatactaatgttttttat

SEQ ID NO: 260904 - DNA, 25 bp, Probe Sequence
gggtatatttcaagcatttatttat

SEQ ID NO: 260905 - DNA, 25 bp, Probe Sequence
gggtatgattacagtagctttgtag

SEQ ID NO: 260906 - DNA, 25 bp, Probe Sequence
gggttttactgtaagctgtgttcac

SEQ ID NO: 260907 - DNA, 25 bp, Probe Sequence
ggggtgcttactttagtcaattctt

SEQ ID NO: 260908 - DNA, 25 bp, Probe Sequence
gggtgactcccatcaggtaattatt

SEQ ID NO: 260909 - DNA, 25 bp, Probe Sequence
gggtgactcacccgtgaaaaggatt

SEQ ID NO: 260910 - DNA, 25 bp, Probe Sequence
ggtgctttccacagtcagaataggt

SEQ ID NO: 260911 - DNA, 25 bp, Probe Sequence
gggtgttggcaaggacgttagtgtc

SEQ ID NO: 260912 - DNA, 25 bp, Probe Sequence
gggtgctactgccaaacgttatggt

SEQ ID NO: 260913 - DNA, 25 bp, Probe Sequence
gggtctacaaaatatcttgagcact

SEQ ID NO: 260914 - DNA, 25 bp, Probe Sequence
gggtcacacaattgataatcctgcc

SEQ ID NO: 260915 - DNA, 25 bp, Probe Sequence
gggttcaagtgattttcctgcccag

SEQ ID NO: 260916 - DNA, 25 bp, Probe Sequence
gggttcaagtgattcacctgcctca

SEQ ID NO: 260917 - DNA, 25 bp, Probe Sequence
gggttctagatttgaactctgctgt

SEQ ID NO: 260918 - DNA, 25 bp, Probe Sequence
gggttctagatttgaactctgctgt

SEQ ID NO: 260919 - DNA, 25 bp, Probe Sequence
gggtttagatgtagattctctggtc

SEQ ID NO: 260920 - DNA, 25 bp, Probe Sequence
gggttataatgtaatcgctcaagcc

SEQ ID NO: 260921 - DNA, 25 bp, Probe Sequence
gggtatacagggttagctgcaatcc

SEQ ID NO: 260922 - DNA, 25 bp, Probe Sequence
gggtcaacagagctgtgtgctgcac

SEQ ID NO: 260923 - DNA, 25 bp, Probe Sequence
gggtcagaagagttgtgcacgcaga

SEQ ID NO: 260924 - DNA, 25 bp, Probe Sequence
gggtagagctagcatgccagcagct

SEQ ID NO: 260925 - DNA, 25 bp, Probe Sequence
gggggagatagcaaccaagtcatgc

SEQ ID NO: 260926 - DNA, 25 bp, Probe Sequence
tgtcgaggagaacaaagggaccccg

SEQ ID NO: 260927 - DNA, 25 bp, Probe Sequence
tcttggggattataagagaaacgcg

SEQ ID NO: 260928 - DNA, 25 bp, Probe Sequence
tgtgtgggtgctttagtaaaaaacg

SEQ ID NO: 260929 - DNA, 25 bp, Probe Sequence
ggagagggctatattacaaacccca

SEQ ID NO: 260930 - DNA, 25 bp, Probe Sequence
ggataaagccaagatgaaactcccc

SEQ ID NO: 260931 - DNA, 25 bp, Probe Sequence
ggtgaagcaccaactgagaaccctg

SEQ ID NO: 260932 - DNA, 25 bp, Probe Sequence
gggtgcgattctatgagggccctga

SEQ ID NO: 260933 - DNA, 25 bp, Probe Sequence
gggtgcgattctatgagggccctga

SEQ ID NO: 260934 - DNA, 25 bp, Probe Sequence
gggtgtttcactcaagagccactga

SEQ ID NO: 260935 - DNA, 25 bp, Probe Sequence
gggttgagtactctaagctctctac

SEQ ID NO: 260936 - DNA, 25 bp, Probe Sequence
gggttgactaacctctggtatctga

SEQ ID NO: 260937 - DNA, 25 bp, Probe Sequence
gggttgagattggcttctagtttgc

SEQ ID NO: 260938 - DNA, 25 bp, Probe Sequence
gggtatcagattctattgtgacttc

SEQ ID NO: 260939 - DNA, 25 bp, Probe Sequence
ggtgttcaatacatatttgattggt

SEQ ID NO: 260940 - DNA, 25 bp, Probe Sequence
gggttcagagcagattttgcttact

SEQ ID NO: 260941 - DNA, 25 bp, Probe Sequence
gggtcagcaaccgaattccagttta

SEQ ID NO: 260942 - DNA, 25 bp, Probe Sequence
gggtcagcaaccgaattctagttta

SEQ ID NO: 260943 - DNA, 25 bp, Probe Sequence
gggtctgagactgaaaatggtttac

SEQ ID NO: 260944 - DNA, 25 bp, Probe Sequence
gggttaattcaatacatggctgaaa

SEQ ID NO: 260945 - DNA, 25 bp, Probe Sequence
gggtgggatattacataaggtggaa

SEQ ID NO: 260946 - DNA, 25 bp, Probe Sequence
gggtgcatgcagcttattaaatgtg

SEQ ID NO: 260947 - DNA, 25 bp, Probe Sequence
gggtgcagtggaggattacttcatg

SEQ ID NO: 260948 - DNA, 25 bp, Probe Sequence
gggtaagtgaagtttgctatgctgc

SEQ ID NO: 260949 - DNA, 25 bp, Probe Sequence
gggttggtgggagttgcgatgatat

SEQ ID NO: 260950 - DNA, 25 bp, Probe Sequence
gggtggggggaagcactgattccca

SEQ ID NO: 260951 - DNA, 25 bp, Probe Sequence
gggtgagagtaacaggccatttggc

SEQ ID NO: 260952 - DNA, 25 bp, Probe Sequence
gggtgtgaaaggcagtccaggttgc

SEQ ID NO: 260953 - DNA, 25 bp, Probe Sequence
gggggaactgaaaggaaagcattgc

SEQ ID NO: 260954 - DNA, 25 bp, Probe Sequence
gggtggatcacgtgaggtcaagagt

SEQ ID NO: 260955 - DNA, 25 bp, Probe Sequence
ggggcttcacggaatgttacaatgt

SEQ ID NO: 260956 - DNA, 25 bp, Probe Sequence
gggtctaccaaggagttgatcaagt

SEQ ID NO: 260957 - DNA, 25 bp, Probe Sequence
ggtgcattaccggaagtggatcaag

SEQ ID NO: 260958 - DNA, 25 bp, Probe Sequence
gggttactggctcatgttgtaagaa

SEQ ID NO: 260959 - DNA, 25 bp, Probe Sequence
gggttgcctgagctcaggagttcaa

SEQ ID NO: 260960 - DNA, 25 bp, Probe Sequence
gggtgacaggagttacaggttctaa

SEQ ID NO: 260961 - DNA, 25 bp, Probe Sequence
ggtggtacccagaagcccttctgga

SEQ ID NO: 260962 - DNA, 25 bp, Probe Sequence
ggggaaccaaaagctctccatggat

SEQ ID NO: 260963 - DNA, 25 bp, Probe Sequence
gggtgtacaaaatcctatctagagt

SEQ ID NO: 260964 - DNA, 25 bp, Probe Sequence
gggtctgtataatcattttctagaa

SEQ ID NO: 260965 - DNA, 25 bp, Probe Sequence
gggtttatggatttgtattcatata

SEQ ID NO: 260966 - DNA, 25 bp, Probe Sequence
gggttatgtctatgttcattctata

SEQ ID NO: 260967 - DNA, 25 bp, Probe Sequence
gggttgcatacctggtggatcttga

SEQ ID NO: 260968 - DNA, 25 bp, Probe Sequence
gggttgcttcgagggtgatgaagaa

SEQ ID NO: 260969 - DNA, 25 bp, Probe Sequence
gggtttgctcaaggagtcaagagga

SEQ ID NO: 260970 - DNA, 25 bp, Probe Sequence
gggtactgtctaggaggactgggca

SEQ ID NO: 260971 - DNA, 25 bp, Probe Sequence
gggtgcctattacctgaagctggag

SEQ ID NO: 260972 - DNA, 25 bp, Probe Sequence
gggtttcacttgcccatagtgtgag

SEQ ID NO: 260973 - DNA, 25 bp, Probe Sequence
ggggtccatcctgtgatgagcttga

SEQ ID NO: 260974 - DNA, 25 bp, Probe Sequence
gggtgggacctaagatggcttggga

SEQ ID NO: 260975 - DNA, 25 bp, Probe Sequence
gggtgggagcctaaggaagcgtggg

SEQ ID NO: 260976 - DNA, 25 bp, Probe Sequence
gggtgggaggtatgtctagggggca

SEQ ID NO: 260977 - DNA, 25 bp, Probe Sequence
ggggggaaatatggtatgaggtcgc

SEQ ID NO: 260978 - DNA, 25 bp, Probe Sequence
ggtggggaaggtgcctattttagag

SEQ ID NO: 260979 - DNA, 25 bp, Probe Sequence
ggggggcaatgagcctttgttgcta

SEQ ID NO: 260980 - DNA, 25 bp, Probe Sequence
gggtgcggcggagatcgaattagta

SEQ ID NO: 260981 - DNA, 25 bp, Probe Sequence
ggggggcagggaactgtcattcatt

SEQ ID NO: 260982 - DNA, 25 bp, Probe Sequence
ggtggggaggtgtgctttagatttc

SEQ ID NO: 260983 - DNA, 25 bp, Probe Sequence
ggggggaggattactatataggatt

SEQ ID NO: 260984 - DNA, 25 bp, Probe Sequence
ggggagaacgtctccagacagaatt

SEQ ID NO: 260985 - DNA, 25 bp, Probe Sequence
ggggagaaccagtaccacataccca

SEQ ID NO: 260986 - DNA, 25 bp, Probe Sequence
ggggagaggtcattaccttgatcct

SEQ ID NO: 260987 - DNA, 25 bp, Probe Sequence
gggggagcagtattctcctggatcc

SEQ ID NO: 260988 - DNA, 25 bp, Probe Sequence
gggtggaatgatgccacctggacca

SEQ ID NO: 260989 - DNA, 25 bp, Probe Sequence
ggggtgatcagccccagatttgacg

SEQ ID NO: 260990 - DNA, 25 bp, Probe Sequence
ggggtgtcacgagcattgggtgtac

SEQ ID NO: 260991 - DNA, 25 bp, Probe Sequence
gggttttcaggcaatagaggaggac

SEQ ID NO: 260992 - DNA, 25 bp, Probe Sequence
gggtaatttggagttgagggtgcac

SEQ ID NO: 260993 - DNA, 25 bp, Probe Sequence
gggtattttgccactggaggaaagt

SEQ ID NO: 260994 - DNA, 25 bp, Probe Sequence
gggtctcgctggacgttggaggaaa

SEQ ID NO: 260995 - DNA, 25 bp, Probe Sequence
gggtctcgctggacgttggaggaaa

SEQ ID NO: 260996 - DNA, 25 bp, Probe Sequence
gggtctcctgggcaagaagaagaag

SEQ ID NO: 260997 - DNA, 25 bp, Probe Sequence
gggtgtcctatcccatatggagaag

SEQ ID NO: 260998 - DNA, 25 bp, Probe Sequence
gggtgctctttggacactggattat

SEQ ID NO: 260999 - DNA, 25 bp, Probe Sequence
gggtgctctttggacactggattat

SEQ ID NO: 261000 - DNA, 25 bp, Probe Sequence
gggtgagctgttcacggtcttatac

SEQ ID NO: 261001 - DNA, 25 bp, Probe Sequence
gggggcgtggaacagtttatctcag

SEQ ID NO: 261002 - DNA, 25 bp, Probe Sequence
ggggtggaaaatcagttgttaccat

SEQ ID NO: 261003 - DNA, 25 bp, Probe Sequence
ggaggtggggacacaactcttacca

SEQ ID NO: 261004 - DNA, 25 bp, Probe Sequence
ggggtggggaaagacagcctgtaca

SEQ ID NO: 261005 - DNA, 25 bp, Probe Sequence
ggggtgggggagagaatgacttctg

SEQ ID NO: 261006 - DNA, 25 bp, Probe Sequence
gggggatggaggtttaattgtaatg

SEQ ID NO: 261007 - DNA, 25 bp, Probe Sequence
ggggatgagggtgtaaattgtattg

SEQ ID NO: 261008 - DNA, 25 bp, Probe Sequence
ggggttaggacttagacatatcttt

SEQ ID NO: 261009 - DNA, 25 bp, Probe Sequence
ggggttaagtgggaacaatcattat

SEQ ID NO: 261010 - DNA, 25 bp, Probe Sequence
gggttcaatcagagaaacaatcagt

SEQ ID NO: 261011 - DNA, 25 bp, Probe Sequence
gggtctcaatcgataattttcatat

SEQ ID NO: 261012 - DNA, 25 bp, Probe Sequence
gggtccttgagaatacttctgttat

SEQ ID NO: 261013 - DNA, 25 bp, Probe Sequence
gggttttgacactaattgctgttga

SEQ ID NO: 261014 - DNA, 25 bp, Probe Sequence
ggggtggagacctaattgggctgat

SEQ ID NO: 261015 - DNA, 25 bp, Probe Sequence
gggtatggaaaattgttgtggtgtg

SEQ ID NO: 261016 - DNA, 25 bp, Probe Sequence
gggtatggaaattgttgtttgtgta

SEQ ID NO: 261017 - DNA, 25 bp, Probe Sequence
gggtcttgaaattcttggtggtgtg

SEQ ID NO: 261018 - DNA, 25 bp, Probe Sequence
gggtttcaccatattggtcaggctg

SEQ ID NO: 261019 - DNA, 25 bp, Probe Sequence
gggtttcaccatgttagtcaggctg

SEQ ID NO: 261020 - DNA, 25 bp, Probe Sequence
gggtcttcaacagtaaagtgcagtt

SEQ ID NO: 261021 - DNA, 25 bp, Probe Sequence
gggttattaagatacaggctgctgt

SEQ ID NO: 261022 - DNA, 25 bp, Probe Sequence
gggtgacattgaaaacggcctgctt

SEQ ID NO: 261023 - DNA, 25 bp, Probe Sequence
gggtatgatggtaaggcagtccttt

SEQ ID NO: 261024 - DNA, 25 bp, Probe Sequence
gggtaggagtgatctcagttttgtt

SEQ ID NO: 261025 - DNA, 25 bp, Probe Sequence
gggggagactgatgctagtccttgt

SEQ ID NO: 261026 - DNA, 25 bp, Probe Sequence
ggggggaagctctgagctcactttg

SEQ ID NO: 261027 - DNA, 25 bp, Probe Sequence
ggggagctaagaatgggccctttgc

SEQ ID NO: 261028 - DNA, 25 bp, Probe Sequence
gggtgggatcagatggggttttgct

SEQ ID NO: 261029 - DNA, 25 bp, Probe Sequence
ggggtggatagggtggggtctccat

SEQ ID NO: 261030 - DNA, 25 bp, Probe Sequence
gggtgggtagggagtggtatccagt

SEQ ID NO: 261031 - DNA, 25 bp, Probe Sequence
gggtgggttagtgggcattttgaca

SEQ ID NO: 261032 - DNA, 25 bp, Probe Sequence
ggtgtggcttaacggtatttcagaa

SEQ ID NO: 261033 - DNA, 25 bp, Probe Sequence
gggtgtgcatgtttggagtttgtag

SEQ ID NO: 261034 - DNA, 25 bp, Probe Sequence
gggtcagatttcagagttcaggagc

SEQ ID NO: 261035 - DNA, 25 bp, Probe Sequence
gggtcgagcttcctgataacgaggc

SEQ ID NO: 261036 - DNA, 25 bp, Probe Sequence
gggtgcagatctttgaaaacaaagg

SEQ ID NO: 261037 - DNA, 25 bp, Probe Sequence
gggtggctgctgttctgagaacatt

SEQ ID NO: 261038 - DNA, 25 bp, Probe Sequence
gggtgagagctgttggagaactgag

SEQ ID NO: 261039 - DNA, 25 bp, Probe Sequence
gggtgggctaaaaaccatgcactct

SEQ ID NO: 261040 - DNA, 25 bp, Probe Sequence
gggtgggctaaaaaccatgcactct

SEQ ID NO: 261041 - DNA, 25 bp, Probe Sequence
gggggacggcaagatgcacatcacc

SEQ ID NO: 261042 - DNA, 25 bp, Probe Sequence
ggggagcctgggctctgagattccc

SEQ ID NO: 261043 - DNA, 25 bp, Probe Sequence
ggggagcctgggctctgagattccc

SEQ ID NO: 261044 - DNA, 25 bp, Probe Sequence
ggggagcctgggctctgagattccc

SEQ ID NO: 261045 - DNA, 25 bp, Probe Sequence
gggggcaagaagatcacgctccccg

SEQ ID NO: 261046 - DNA, 25 bp, Probe Sequence
gggggcaagaagatcacgctccccg

SEQ ID NO: 261047 - DNA, 25 bp, Probe Sequence
tcgggtccaggactacaactcccgg

SEQ ID NO: 261048 - DNA, 25 bp, Probe Sequence
ggggccaaggcagtatacattcctc

SEQ ID NO: 261049 - DNA, 25 bp, Probe Sequence
gggtccaagtattcaatcctggctc

SEQ ID NO: 261050 - DNA, 25 bp, Probe Sequence
gggtctgagacctcataggctgcag

SEQ ID NO: 261051 - DNA, 25 bp, Probe Sequence
gggtctagaacagtgcctggcacat

SEQ ID NO: 261052 - DNA, 25 bp, Probe Sequence
gggtctgatgaagtttgtggactct

SEQ ID NO: 261053 - DNA, 25 bp, Probe Sequence
gggtctagaatgcttgtgttgagta

SEQ ID NO: 261054 - DNA, 25 bp, Probe Sequence
gggtcatatttgctttctaggaggt

SEQ ID NO: 261055 - DNA, 25 bp, Probe Sequence
gggtcttttttgaatgtccatgagg

SEQ ID NO: 261056 - DNA, 25 bp, Probe Sequence
gggtactttcttatgctggatcagg

SEQ ID NO: 261057 - DNA, 25 bp, Probe Sequence
gggtattttctaattcagatcatca

SEQ ID NO: 261058 - DNA, 25 bp, Probe Sequence
gggtcatttgttaatgtgactgatg

SEQ ID NO: 261059 - DNA, 25 bp, Probe Sequence
gggtcatgtattaatcagtgaacag

SEQ ID NO: 261060 - DNA, 25 bp, Probe Sequence
gggtatgaattccctgacacacatt

SEQ ID NO: 261061 - DNA, 25 bp, Probe Sequence
gggtacacttgctctagcatacttt

SEQ ID NO: 261062 - DNA, 25 bp, Probe Sequence
gggtaatggctgttctactatttag

SEQ ID NO: 261063 - DNA, 25 bp, Probe Sequence
gggtattgttgtttctgctattgtt

SEQ ID NO: 261064 - DNA, 25 bp, Probe Sequence
gggtattttctgtttcatgatgtat

SEQ ID NO: 261065 - DNA, 25 bp, Probe Sequence
gggtattctttgtacattgtcagat

SEQ ID NO: 261066 - DNA, 25 bp, Probe Sequence
ggggatcatgctagttagcatttca

SEQ ID NO: 261067 - DNA, 25 bp, Probe Sequence
ggtggtcatgccatgagcagcctta

SEQ ID NO: 261068 - DNA, 25 bp, Probe Sequence
gggtgtcatcaaagcagtggacaag

SEQ ID NO: 261069 - DNA, 25 bp, Probe Sequence
gggtatgctagaagcgagaatccgt

SEQ ID NO: 261070 - DNA, 25 bp, Probe Sequence
gggtatcggtaggatgatatgtcag

SEQ ID NO: 261071 - DNA, 25 bp, Probe Sequence
gggtagctgggatcatgctagtcac

SEQ ID NO: 261072 - DNA, 25 bp, Probe Sequence
gggtgatgatgctgaccctgagtcc

SEQ ID NO: 261073 - DNA, 25 bp, Probe Sequence
gggtcatgatttccacatcatgagc

SEQ ID NO: 261074 - DNA, 25 bp, Probe Sequence
gggtcatctttgaagcatcaaatcc

SEQ ID NO: 261075 - DNA, 25 bp, Probe Sequence
gggtcattctgcttggcacagatat

SEQ ID NO: 261076 - DNA, 25 bp, Probe Sequence
gggtatggctgatggcaagcattgt

SEQ ID NO: 261077 - DNA, 25 bp, Probe Sequence
gggtcggtcagtgacatgtaggtag

SEQ ID NO: 261078 - DNA, 25 bp, Probe Sequence
ggggaggtcagtcatttacagttag

SEQ ID NO: 261079 - DNA, 25 bp, Probe Sequence
ggggacgttggttatattctgttag

SEQ ID NO: 261080 - DNA, 25 bp, Probe Sequence
ggggagtggggtcatttctgtatat

SEQ ID NO: 261081 - DNA, 25 bp, Probe Sequence
ggggtgcagtggaggattacttcat

SEQ ID NO: 261082 - DNA, 25 bp, Probe Sequence
ggggtggttcaaagttatttctatg

SEQ ID NO: 261083 - DNA, 25 bp, Probe Sequence
gggtaccttcagtactttttgcaat

SEQ ID NO: 261084 - DNA, 25 bp, Probe Sequence
gggtaacttagaaggatggcatctc

SEQ ID NO: 261085 - DNA, 25 bp, Probe Sequence
gggggaatccagacgagtggcacag

SEQ ID NO: 261086 - DNA, 25 bp, Probe Sequence
gggtgggaacaggcaagggatcaga

SEQ ID NO: 261087 - DNA, 25 bp, Probe Sequence
ggggtggacgtgcacgggtgcatga

SEQ ID NO: 261088 - DNA, 25 bp, Probe Sequence
ggggtggacgtgcacgggtgcatga

SEQ ID NO: 261089 - DNA, 25 bp, Probe Sequence
ggggctggacgtcaggagccaagat

SEQ ID NO: 261090 - DNA, 25 bp, Probe Sequence
gggggagggatgcagggacatttac

SEQ ID NO: 261091 - DNA, 25 bp, Probe Sequence
gggggtgctcttccaaggatatttg

SEQ ID NO: 261092 - DNA, 25 bp, Probe Sequence
ggggctgtatttcagtagttgtaga

SEQ ID NO: 261093 - DNA, 25 bp, Probe Sequence
ggggtgcaggttcagtttatatgga

SEQ ID NO: 261094 - DNA, 25 bp, Probe Sequence
gggtggatagtatatttctatgggt

SEQ ID NO: 261095 - DNA, 25 bp, Probe Sequence
gggtggtcagaatggtttaggtggt

SEQ ID NO: 261096 - DNA, 25 bp, Probe Sequence
gggggtcgatcatgaatgtccgaag

SEQ ID NO: 261097 - DNA, 25 bp, Probe Sequence
ggggtgtcaataaagctgtgcttgg

SEQ ID NO: 261098 - DNA, 25 bp, Probe Sequence
gggtggtaatattggcattctgatt

SEQ ID NO: 261099 - DNA, 25 bp, Probe Sequence
gggggaagatcaggtcatactatct

SEQ ID NO: 261100 - DNA, 25 bp, Probe Sequence
gggggaaatatggtatgaggtcgcc

SEQ ID NO: 261101 - DNA, 25 bp, Probe Sequence
gggggatatgatagtctgcgcagcg

SEQ ID NO: 261102 - DNA, 25 bp, Probe Sequence
gggtgctgtggtacatggcagccag

SEQ ID NO: 261103 - DNA, 25 bp, Probe Sequence
gggtgctgtggtacatggcagccag

SEQ ID NO: 261104 - DNA, 25 bp, Probe Sequence
gggtgctggcaagtgtggcagctgc

SEQ ID NO: 261105 - DNA, 25 bp, Probe Sequence
gggggcagcaagcatctatgctgcc

SEQ ID NO: 261106 - DNA, 25 bp, Probe Sequence
ggggtgagaagcgatttctacctcg

SEQ ID NO: 261107 - DNA, 25 bp, Probe Sequence
gggtggatgaacgagggaacctgga

SEQ ID NO: 261108 - DNA, 25 bp, Probe Sequence
gggtgggaaggaaacaaccatgtca

SEQ ID NO: 261109 - DNA, 25 bp, Probe Sequence
gggtatgggagtagcattccacctt

SEQ ID NO: 261110 - DNA, 25 bp, Probe Sequence
gggtgtagatggggttcgagctttc

SEQ ID NO: 261111 - DNA, 25 bp, Probe Sequence
gggtgcaaagtggaactcgaggttc

SEQ ID NO: 261112 - DNA, 25 bp, Probe Sequence
gggtaggaaggatctctgagttctc

SEQ ID NO: 261113 - DNA, 25 bp, Probe Sequence
ggggaggagggtttatggatgtcaa

SEQ ID NO: 261114 - DNA, 25 bp, Probe Sequence
ggggggaggagatataggacaggaa

SEQ ID NO: 261115 - DNA, 25 bp, Probe Sequence
ggggggcgcgagggctaaaagagcg

SEQ ID NO: 261116 - DNA, 25 bp, Probe Sequence
gggggctggctacaccagaaagacc

SEQ ID NO: 261117 - DNA, 25 bp, Probe Sequence
gggtgtctgtatacacgccaaaggc

SEQ ID NO: 261118 - DNA, 25 bp, Probe Sequence
gggtgatgttgtgcacgtaggggca

SEQ ID NO: 261119 - DNA, 25 bp, Probe Sequence
ggggtgcaggctgccagaagagcga

SEQ ID NO: 261120 - DNA, 25 bp, Probe Sequence
gggtgtgagtctgtcatgagagctg

SEQ ID NO: 261121 - DNA, 25 bp, Probe Sequence
gggtgtgattgtgtgagcaactggg

SEQ ID NO: 261122 - DNA, 25 bp, Probe Sequence
gggtgatggcgtgatatgcacctgc

SEQ ID NO: 261123 - DNA, 25 bp, Probe Sequence
gggtaggctgtgtatggactcccaa

SEQ ID NO: 261124 - DNA, 25 bp, Probe Sequence
gggtgaggtctgcaggatccaagga

SEQ ID NO: 261125 - DNA, 25 bp, Probe Sequence
ggggcagaattgcttgacccagggg

SEQ ID NO: 261126 - DNA, 25 bp, Probe Sequence
ggtgggaggatgacttgaacgcagg

SEQ ID NO: 261127 - DNA, 25 bp, Probe Sequence
gggggagttggttaatagcagatac

SEQ ID NO: 261128 - DNA, 25 bp, Probe Sequence
ggggggctcgtgttgaatctagaac

SEQ ID NO: 261129 - DNA, 25 bp, Probe Sequence
gggtgtggctcaggaatgtaaggac

SEQ ID NO: 261130 - DNA, 25 bp, Probe Sequence
gggtgggctcagggagaacggccag

SEQ ID NO: 261131 - DNA, 25 bp, Probe Sequence
ggggtactgcaggggaagggctggc

SEQ ID NO: 261132 - DNA, 25 bp, Probe Sequence
gggtgtcctgaacagcaaggttggc

SEQ ID NO: 261133 - DNA, 25 bp, Probe Sequence
gggtccgtggaccaggaggattgcc

SEQ ID NO: 261134 - DNA, 25 bp, Probe Sequence
gggtctggggtctatgtgaggatgt

SEQ ID NO: 261135 - DNA, 25 bp, Probe Sequence
gggtcagcagggactggtgcaaatg

SEQ ID NO: 261136 - DNA, 25 bp, Probe Sequence
gggtaagggaatagatcactcagat

SEQ ID NO: 261137 - DNA, 25 bp, Probe Sequence
gggtgttcaggaaacatcactcaga

SEQ ID NO: 261138 - DNA, 25 bp, Probe Sequence
ggtggcttcctgatacaagacgact

SEQ ID NO: 261139 - DNA, 25 bp, Probe Sequence
ggggcactgcctgtaaggtcgagtg

SEQ ID NO: 261140 - DNA, 25 bp, Probe Sequence
gggtcagccctgacaaaggtcagct

SEQ ID NO: 261141 - DNA, 25 bp, Probe Sequence
gggtgcagcaggctcaaaggcataa

SEQ ID NO: 261142 - DNA, 25 bp, Probe Sequence
gggtcagaggtgccagtagtataat

SEQ ID NO: 261143 - DNA, 25 bp, Probe Sequence
gggtgctggggcagtagtcatggca

SEQ ID NO: 261144 - DNA, 25 bp, Probe Sequence
gggtctgcggtacgaagtcagcgct

SEQ ID NO: 261145 - DNA, 25 bp, Probe Sequence
gggtctggttgtagaagatcggctt

SEQ ID NO: 261146 - DNA, 25 bp, Probe Sequence
gggtcgtgtgtttgaagtgagtctt

SEQ ID NO: 261147 - DNA, 25 bp, Probe Sequence
gggtcctggtgtttgaggatgacgt

SEQ ID NO: 261148 - DNA, 25 bp, Probe Sequence
gggtcctcagtggatgtaggctggg

SEQ ID NO: 261149 - DNA, 25 bp, Probe Sequence
gggtcaccagtgcattatgtggcgt

SEQ ID NO: 261150 - DNA, 25 bp, Probe Sequence
ggtgtatcacagagttttgggttta

SEQ ID NO: 261151 - DNA, 25 bp, Probe Sequence
gggtgcatcacgaggttaggagttc

SEQ ID NO: 261152 - DNA, 25 bp, Probe Sequence
gggtccttggggaacatggagattc

SEQ ID NO: 261153 - DNA, 25 bp, Probe Sequence
gggtgcactcattttaacttaactc

SEQ ID NO: 261154 - DNA, 25 bp, Probe Sequence
tggggaccttttgagttgaatttat

SEQ ID NO: 261155 - DNA, 25 bp, Probe Sequence
gggtgaccggcttacagggatattt

SEQ ID NO: 261156 - DNA, 25 bp, Probe Sequence
gggtaactagctattgagtatattg

SEQ ID NO: 261157 - DNA, 25 bp, Probe Sequence
ggtgtaaattctttatgattaattg

SEQ ID NO: 261158 - DNA, 25 bp, Probe Sequence
gggtcataagcttgcgttgattaag

SEQ ID NO: 261159 - DNA, 25 bp, Probe Sequence
gggtcataagcttgcgttgattaag

SEQ ID NO: 261160 - DNA, 25 bp, Probe Sequence
ggggctcaacttctatggtatggac

SEQ ID NO: 261161 - DNA, 25 bp, Probe Sequence
ggggtcataaggatagacttgaagc

SEQ ID NO: 261162 - DNA, 25 bp, Probe Sequence
gggggctggaagttagacattaggg

SEQ ID NO: 261163 - DNA, 25 bp, Probe Sequence
ggggagttagatttcagagtccagg

SEQ ID NO: 261164 - DNA, 25 bp, Probe Sequence
ggggtggtagtagaggattaggttg

SEQ ID NO: 261165 - DNA, 25 bp, Probe Sequence
gggggtgggtgagcggctatagtgt

SEQ ID NO: 261166 - DNA, 25 bp, Probe Sequence
ggggttgggtttgagctacagtcat

SEQ ID NO: 261167 - DNA, 25 bp, Probe Sequence
ggggtttggtttgtggatttcattg

SEQ ID NO: 261168 - DNA, 25 bp, Probe Sequence
ggggtattttctccgcagaatttct

SEQ ID NO: 261169 - DNA, 25 bp, Probe Sequence
ggggtagattattgcctgcccctta

SEQ ID NO: 261170 - DNA, 25 bp, Probe Sequence
ggggtggatgataatccttccactg

SEQ ID NO: 261171 - DNA, 25 bp, Probe Sequence
gggtgatggaggacatctttgcttc

SEQ ID NO: 261172 - DNA, 25 bp, Probe Sequence
gggtctgtggaggtgcttatgttca

SEQ ID NO: 261173 - DNA, 25 bp, Probe Sequence
gggtctggatgagcttgaatttgaa

SEQ ID NO: 261174 - DNA, 25 bp, Probe Sequence
gggtcgggcaggttgacatatttat

SEQ ID NO: 261175 - DNA, 25 bp, Probe Sequence
gggtaaagcaaggctcctaactcat

SEQ ID NO: 261176 - DNA, 25 bp, Probe Sequence
gggtacatttattgctttaatctgc

SEQ ID NO: 261177 - DNA, 25 bp, Probe Sequence
gggtggctttaattgtataagtcaa

SEQ ID NO: 261178 - DNA, 25 bp, Probe Sequence
gggtgtcctcacaattttataacaa

SEQ ID NO: 261179 - DNA, 25 bp, Probe Sequence
ggggtcacccagaattgcttgaagg

SEQ ID NO: 261180 - DNA, 25 bp, Probe Sequence
ggggttgcccagatgagtgtgggtc

SEQ ID NO: 261181 - DNA, 25 bp, Probe Sequence
ggggcttcaactatagttgccctgt

SEQ ID NO: 261182 - DNA, 25 bp, Probe Sequence
ggggcaccaactaattttgttgttg

SEQ ID NO: 261183 - DNA, 25 bp, Probe Sequence
ggggactatagtgcaacctatttgg

SEQ ID NO: 261184 - DNA, 25 bp, Probe Sequence
ggggaatgtttggcaacctttgtgt

SEQ ID NO: 261185 - DNA, 25 bp, Probe Sequence
ggggaacttgtgtccctaatgtgtt

SEQ ID NO: 261186 - DNA, 25 bp, Probe Sequence
gggtgaatttggtggctttggttct

SEQ ID NO: 261187 - DNA, 25 bp, Probe Sequence
gggtgttttggggagactgtgggtg

SEQ ID NO: 261188 - DNA, 25 bp, Probe Sequence
gggtgtttttgtcaactgcttgtta

SEQ ID NO: 261189 - DNA, 25 bp, Probe Sequence
gggtgtttttgtgaccacttgtgaa

SEQ ID NO: 261190 - DNA, 25 bp, Probe Sequence
ggggtgtttatggcaagtcactttg

SEQ ID NO: 261191 - DNA, 25 bp, Probe Sequence
gggtgtttatggcaagtcactttga

SEQ ID NO: 261192 - DNA, 25 bp, Probe Sequence
gggtgtattttgcacaacagtatta

SEQ ID NO: 261193 - DNA, 25 bp, Probe Sequence
gggtaatttatttaacactccatat

SEQ ID NO: 261194 - DNA, 25 bp, Probe Sequence
gggggctttgaaataacaccaccag

SEQ ID NO: 261195 - DNA, 25 bp, Probe Sequence
gggggcactaggactgacaatccag

SEQ ID NO: 261196 - DNA, 25 bp, Probe Sequence
ggggtcaaaggaagacttgaagcac

SEQ ID NO: 261197 - DNA, 25 bp, Probe Sequence
ggggtttcggattgagttgcaagca

SEQ ID NO: 261198 - DNA, 25 bp, Probe Sequence
gggtctatttgcctaatgttgacaa

SEQ ID NO: 261199 - DNA, 25 bp, Probe Sequence
gggtaattcgtcacatggcaacagc

SEQ ID NO: 261200 - DNA, 25 bp, Probe Sequence
ggtggttgacgtagtgctcgaacgc

SEQ ID NO: 261201 - DNA, 25 bp, Probe Sequence
ggtcatgcttcaagcttggtccaga

SEQ ID NO: 261202 - DNA, 25 bp, Probe Sequence
ggtctgccatcagcttagttagcca

SEQ ID NO: 261203 - DNA, 25 bp, Probe Sequence
ggtcatgtaacctgagtatgcccag

SEQ ID NO: 261204 - DNA, 25 bp, Probe Sequence
gggtgtaactcgaaatattccacga

SEQ ID NO: 261205 - DNA, 25 bp, Probe Sequence
gggtctaaccggtctcaataaagca

SEQ ID NO: 261206 - DNA, 25 bp, Probe Sequence
gggtctaaagctcataatacacaaa

SEQ ID NO: 261207 - DNA, 25 bp, Probe Sequence
gggtcagagaagcaatagtcactaa

SEQ ID NO: 261208 - DNA, 25 bp, Probe Sequence
gggtcagaacagcagaaccagagca

SEQ ID NO: 261209 - DNA, 25 bp, Probe Sequence
gggtaaaaacactaatctggatcct

SEQ ID NO: 261210 - DNA, 25 bp, Probe Sequence
ggggaaaaaagcttcagcggtcact

SEQ ID NO: 261211 - DNA, 25 bp, Probe Sequence
gggtgacatcaagctctgtgagggt

SEQ ID NO: 261212 - DNA, 25 bp, Probe Sequence
gggtccagagcctcgtgagaggtca

SEQ ID NO: 261213 - DNA, 25 bp, Probe Sequence
gggtccagtgtcaacagtatcatgc

SEQ ID NO: 261214 - DNA, 25 bp, Probe Sequence
gggtgcatcgagaaggcctacgaga

SEQ ID NO: 261215 - DNA, 25 bp, Probe Sequence
gggtgcaatgggtggaatgggaggt

SEQ ID NO: 261216 - DNA, 25 bp, Probe Sequence
gggtaacctgatcgtggagagtgag

SEQ ID NO: 261217 - DNA, 25 bp, Probe Sequence
gggggatcgctgaggagcagatgga

SEQ ID NO: 261218 - DNA, 25 bp, Probe Sequence
ggggtgatcagctggggtgagggct

SEQ ID NO: 261219 - DNA, 25 bp, Probe Sequence
ggggtgatcagctggggtgagggct

SEQ ID NO: 261220 - DNA, 25 bp, Probe Sequence
gggtgctgacaaccagggtgcagga

SEQ ID NO: 261221 - DNA, 25 bp, Probe Sequence
gggtctgaagcaaaggcccagcaac

SEQ ID NO: 261222 - DNA, 25 bp, Probe Sequence
gggtctgaagatgaagccccttctg

SEQ ID NO: 261223 - DNA, 25 bp, Probe Sequence
gggtctgagtgtgaggtgccactca

SEQ ID NO: 261224 - DNA, 25 bp, Probe Sequence
gggtcaggttggcaagctactcatc

SEQ ID NO: 261225 - DNA, 25 bp, Probe Sequence
gggtcagttaagcctcagtattctt

SEQ ID NO: 261226 - DNA, 25 bp, Probe Sequence
gggtcagtttacctctgtgtatggt

SEQ ID NO: 261227 - DNA, 25 bp, Probe Sequence
ggggacctagacctcaggtggtctc

SEQ ID NO: 261228 - DNA, 25 bp, Probe Sequence
ggggagccatagactcagtgttttt

SEQ ID NO: 261229 - DNA, 25 bp, Probe Sequence
ggggagagaagcaaagtggttattt

SEQ ID NO: 261230 - DNA, 25 bp, Probe Sequence
ggggcagaaatccaaagttttagat

SEQ ID NO: 261231 - DNA, 25 bp, Probe Sequence
ggggcaactacaagaagcgttccag

SEQ ID NO: 261232 - DNA, 25 bp, Probe Sequence
ggggaaatcacataactggtacaag

SEQ ID NO: 261233 - DNA, 25 bp, Probe Sequence
ggggggcatgaataaaggctacagg

SEQ ID NO: 261234 - DNA, 25 bp, Probe Sequence
ggggggctatggaagagcggtaggg

SEQ ID NO: 261235 - DNA, 25 bp, Probe Sequence
ggggagagtctaaaagggctagagc

SEQ ID NO: 261236 - DNA, 25 bp, Probe Sequence
ggggtggcaggacagagggccaagc

SEQ ID NO: 261237 - DNA, 25 bp, Probe Sequence
ggggtcaggacacagagtgggaggg

SEQ ID NO: 261238 - DNA, 25 bp, Probe Sequence
gggtgggagaatcatcggggtcagg

SEQ ID NO: 261239 - DNA, 25 bp, Probe Sequence
gggtggggaaagacagcctgtacac

SEQ ID NO: 261240 - DNA, 25 bp, Probe Sequence
ggggggtatcaaggagcctgggacg

SEQ ID NO: 261241 - DNA, 25 bp, Probe Sequence
gggggatgatgtgaaaccaggaacc

SEQ ID NO: 261242 - DNA, 25 bp, Probe Sequence
gggtggtgatgggactgatccaggt

SEQ ID NO: 261243 - DNA, 25 bp, Probe Sequence
gggtgcttgagagctctgagcacag

SEQ ID NO: 261244 - DNA, 25 bp, Probe Sequence
gggtgctactgcacgtaacactcct

SEQ ID NO: 261245 - DNA, 25 bp, Probe Sequence
ggtctgcaactttggaaaactcctc

SEQ ID NO: 261246 - DNA, 25 bp, Probe Sequence
ggtctgaattttctaactgtcctct

SEQ ID NO: 261247 - DNA, 25 bp, Probe Sequence
ggttggacgtggggaatttctcctg

SEQ ID NO: 261248 - DNA, 25 bp, Probe Sequence
ggggtggggctgttgatatttcatc

SEQ ID NO: 261249 - DNA, 25 bp, Probe Sequence
gggtggtggtggttatactgtccga

SEQ ID NO: 261250 - DNA, 25 bp, Probe Sequence
gggtggtggtggttatactgtccga

SEQ ID NO: 261251 - DNA, 25 bp, Probe Sequence
gggtgactttggtaggtctgtctgg

SEQ ID NO: 261252 - DNA, 25 bp, Probe Sequence
gggtgcttattggtattgtctcctg

SEQ ID NO: 261253 - DNA, 25 bp, Probe Sequence
gggtcttaccagagagactccttca

SEQ ID NO: 261254 - DNA, 25 bp, Probe Sequence
gggggataggcacttggacccccat

SEQ ID NO: 261255 - DNA, 25 bp, Probe Sequence
gggggaatggagaggagcctctctg

SEQ ID NO: 261256 - DNA, 25 bp, Probe Sequence
tggggcgaattacggagggttctgg

SEQ ID NO: 261257 - DNA, 25 bp, Probe Sequence
gggggatattatgaagggccttgag

SEQ ID NO: 261258 - DNA, 25 bp, Probe Sequence
gggggatattatgaagggccttgag

SEQ ID NO: 261259 - DNA, 25 bp, Probe Sequence
gggggtctcattgaaaagctctctg

SEQ ID NO: 261260 - DNA, 25 bp, Probe Sequence
gggggctcatcaaactataatagct

SEQ ID NO: 261261 - DNA, 25 bp, Probe Sequence
gggggtctttcattgctagtgacta

SEQ ID NO: 261262 - DNA, 25 bp, Probe Sequence
ggggtgtcaattttctatcaacgca

SEQ ID NO: 261263 - DNA, 25 bp, Probe Sequence
ggggctgaaagtctctgaagacctg

SEQ ID NO: 261264 - DNA, 25 bp, Probe Sequence
ggggcaagactgttatcgagtaccg

SEQ ID NO: 261265 - DNA, 25 bp, Probe Sequence
gggtgattgttgtttggaataccta

SEQ ID NO: 261266 - DNA, 25 bp, Probe Sequence
gggtgatctgcttttatctaaatgc

SEQ ID NO: 261267 - DNA, 25 bp, Probe Sequence
gggtgagtctataatacaaaatgca

SEQ ID NO: 261268 - DNA, 25 bp, Probe Sequence
gggtggtattaaacaagtcaattct

SEQ ID NO: 261269 - DNA, 25 bp, Probe Sequence
gggtgggagtaataagctcacttat

SEQ ID NO: 261270 - DNA, 25 bp, Probe Sequence
gggtgggagtgtgcaaagccctgat

SEQ ID NO: 261271 - DNA, 25 bp, Probe Sequence
gggtggccgatgatgtaaccctgca

SEQ ID NO: 261272 - DNA, 25 bp, Probe Sequence
gggtggacatgaatggttccccaca

SEQ ID NO: 261273 - DNA, 25 bp, Probe Sequence
gggtggttgaatgatttcccactca

SEQ ID NO: 261274 - DNA, 25 bp, Probe Sequence
gggtggagtgttgagttggaaccat

SEQ ID NO: 261275 - DNA, 25 bp, Probe Sequence
gggtggtcgtgggagggctgaacac

SEQ ID NO: 261276 - DNA, 25 bp, Probe Sequence
gggtcgctgggggtggagagaacac

SEQ ID NO: 261277 - DNA, 25 bp, Probe Sequence
gggggtgggggagatagcaaccaag

SEQ ID NO: 261278 - DNA, 25 bp, Probe Sequence
ggggtatgcggatgaggtacacacc

SEQ ID NO: 261279 - DNA, 25 bp, Probe Sequence
ggggtgtgtaaccgtgtaacacgtg

SEQ ID NO: 261280 - DNA, 25 bp, Probe Sequence
gggtgattgtaactttattgccatt

SEQ ID NO: 261281 - DNA, 25 bp, Probe Sequence
gggtgacatgtcagatctttgtacg

SEQ ID NO: 261282 - DNA, 25 bp, Probe Sequence
gggtgacatgtcagatctttgtacg

SEQ ID NO: 261283 - DNA, 25 bp, Probe Sequence
gggtgacagagcaagactctgtctt

SEQ ID NO: 261284 - DNA, 25 bp, Probe Sequence
gggtgacagagcaagattccatctc

SEQ ID NO: 261285 - DNA, 25 bp, Probe Sequence
gggtgacaatggcattctcagctgc

SEQ ID NO: 261286 - DNA, 25 bp, Probe Sequence
gggtgaaatgacgttgccgattcac

SEQ ID NO: 261287 - DNA, 25 bp, Probe Sequence
gggtccacatacggtggcaatccac

SEQ ID NO: 261288 - DNA, 25 bp, Probe Sequence
gggtctctaacaggtgctcaaccta

SEQ ID NO: 261289 - DNA, 25 bp, Probe Sequence
gggtgtgtgaacatggctaacaatc

SEQ ID NO: 261290 - DNA, 25 bp, Probe Sequence
ggggctggagccaggtctggctatc

SEQ ID NO: 261291 - DNA, 25 bp, Probe Sequence
ggggctggacacaaggtcggtggcc

SEQ ID NO: 261292 - DNA, 25 bp, Probe Sequence
ggggtgtggcaggaggttttggact

SEQ ID NO: 261293 - DNA, 25 bp, Probe Sequence
gggtggggaaatagttctggtgcct

SEQ ID NO: 261294 - DNA, 25 bp, Probe Sequence
ggggggagacaaatgtgtagacctt

SEQ ID NO: 261295 - DNA, 25 bp, Probe Sequence
ggggcgagaacaagtgactctgacc

SEQ ID NO: 261296 - DNA, 25 bp, Probe Sequence
ggggatagactcaaggcctgagacc

SEQ ID NO: 261297 - DNA, 25 bp, Probe Sequence
ggggaagactttagtgtcagtcacc

SEQ ID NO: 261298 - DNA, 25 bp, Probe Sequence
gggtgaaagctggtggtgtgagcaa

SEQ ID NO: 261299 - DNA, 25 bp, Probe Sequence
gggtgaaaagcagtggctgtgcaga

SEQ ID NO: 261300 - DNA, 25 bp, Probe Sequence
gggtgaagagagactcggtgcgggc

SEQ ID NO: 261301 - DNA, 25 bp, Probe Sequence
gggtggacagaagcttgtggggtgc

SEQ ID NO: 261302 - DNA, 25 bp, Probe Sequence
gggtccaacagctctttgagtaggc

SEQ ID NO: 261303 - DNA, 25 bp, Probe Sequence
ggggcccccactgtggagataagaa

SEQ ID NO: 261304 - DNA, 25 bp, Probe Sequence
ggggaccgacaacaggagaggaata

SEQ ID NO: 261305 - DNA, 25 bp, Probe Sequence
ggggatcccagcagggggaggcaat

SEQ ID NO: 261306 - DNA, 25 bp, Probe Sequence
gggtgatccctcagggggaatacga

SEQ ID NO: 261307 - DNA, 25 bp, Probe Sequence
ggggcaccctcgaaggagggcaaag

SEQ ID NO: 261308 - DNA, 25 bp, Probe Sequence
ggggaagcccaaatcggggcgagtg

SEQ ID NO: 261309 - DNA, 25 bp, Probe Sequence
gggtgaaccgacttcaaggaatggg

SEQ ID NO: 261310 - DNA, 25 bp, Probe Sequence
gggtgaagtcacagctcaaggaaag

SEQ ID NO: 261311 - DNA, 25 bp, Probe Sequence
gggtgagggccttcttaagatacaa

SEQ ID NO: 261312 - DNA, 25 bp, Probe Sequence
gggtggtgaccatcgaaaggagcaa

SEQ ID NO: 261313 - DNA, 25 bp, Probe Sequence
gggtggtgaccatcgaaaggagcaa

SEQ ID NO: 261314 - DNA, 25 bp, Probe Sequence
gggtgtgtgtaagttaaagtggcca

SEQ ID NO: 261315 - DNA, 25 bp, Probe Sequence
gggtggttcagcttgtaaagtctgc

SEQ ID NO: 261316 - DNA, 25 bp, Probe Sequence
gggtgcactatggcttgtacaacca

SEQ ID NO: 261317 - DNA, 25 bp, Probe Sequence
gggtgactttgcagatctgctcacc

SEQ ID NO: 261318 - DNA, 25 bp, Probe Sequence
gggtgacaaagcgagactccatctc

SEQ ID NO: 261319 - DNA, 25 bp, Probe Sequence
gggtgaaggagacactactgccccc

SEQ ID NO: 261320 - DNA, 25 bp, Probe Sequence
gggtgtaggacacattagccttctg

SEQ ID NO: 261321 - DNA, 25 bp, Probe Sequence
gggtgtaggacacattagccttctg

SEQ ID NO: 261322 - DNA, 25 bp, Probe Sequence
ggggagggcacaaatcaacccactg

SEQ ID NO: 261323 - DNA, 25 bp, Probe Sequence
ggggaggacatcgacaccatctccc

SEQ ID NO: 261324 - DNA, 25 bp, Probe Sequence
ggggaatgccaagtttgtctccccg

SEQ ID NO: 261325 - DNA, 25 bp, Probe Sequence
ggggaagtcacctttgatacaacca

SEQ ID NO: 261326 - DNA, 25 bp, Probe Sequence
ggggagatttccactaatataccaa

SEQ ID NO: 261327 - DNA, 25 bp, Probe Sequence
ggggacttagccatggacttggcca

SEQ ID NO: 261328 - DNA, 25 bp, Probe Sequence
ggggactaccacaggtatctggcag

SEQ ID NO: 261329 - DNA, 25 bp, Probe Sequence
ggggactaccacaggtatctggcag

SEQ ID NO: 261330 - DNA, 25 bp, Probe Sequence
ggggacccgagatggtgacagtgca

SEQ ID NO: 261331 - DNA, 25 bp, Probe Sequence
ggggaacttgggtgtgcaactgagg

SEQ ID NO: 261332 - DNA, 25 bp, Probe Sequence
ggggatttctgtggtaggtaatagg

SEQ ID NO: 261333 - DNA, 25 bp, Probe Sequence
ggggttttatcttcctgtacagaga

SEQ ID NO: 261334 - DNA, 25 bp, Probe Sequence
ggggttttatgcaaaattccaagct

SEQ ID NO: 261335 - DNA, 25 bp, Probe Sequence
ggtgtatttcttgaagtttaatatt

SEQ ID NO: 261336 - DNA, 25 bp, Probe Sequence
gggtgatttctagaatggtttttgt

SEQ ID NO: 261337 - DNA, 25 bp, Probe Sequence
gggtgatctcacaaaactggtaagt

SEQ ID NO: 261338 - DNA, 25 bp, Probe Sequence
ggtgttgccacaaagcctggaatct

SEQ ID NO: 261339 - DNA, 25 bp, Probe Sequence
ggtttccaaaagctcctggctagag

SEQ ID NO: 261340 - DNA, 25 bp, Probe Sequence
ggtgttgccaaatatgtcctggggt

SEQ ID NO: 261341 - DNA, 25 bp, Probe Sequence
gggtgctgctgatgtaatacctggg

SEQ ID NO: 261342 - DNA, 25 bp, Probe Sequence
ggggtgctgagctgtgaatcccctg

SEQ ID NO: 261343 - DNA, 25 bp, Probe Sequence
gggtgctggagctgctcaatttccc

SEQ ID NO: 261344 - DNA, 25 bp, Probe Sequence
gggtgcagaaaagtgaattgactac

SEQ ID NO: 261345 - DNA, 25 bp, Probe Sequence
ggggcaatataagaagtaggacctg

SEQ ID NO: 261346 - DNA, 25 bp, Probe Sequence
gggtgatcataatgccaagtacgcc

SEQ ID NO: 261347 - DNA, 25 bp, Probe Sequence
ggggatgcacatttcgatgaggacg

SEQ ID NO: 261348 - DNA, 25 bp, Probe Sequence
gggtgcatgcactatttgtgatgtt

SEQ ID NO: 261349 - DNA, 25 bp, Probe Sequence
ggggtcatcagaatgtccagttttg

SEQ ID NO: 261350 - DNA, 25 bp, Probe Sequence
ggggtgcagaagaatccgagtgttt

SEQ ID NO: 261351 - DNA, 25 bp, Probe Sequence
gggggaggggatgcatgcaggggta

SEQ ID NO: 261352 - DNA, 25 bp, Probe Sequence
ggggcgagcacggaacaatggggcc

SEQ ID NO: 261353 - DNA, 25 bp, Probe Sequence
ggggctcggatctgaaaggcggcca

SEQ ID NO: 261354 - DNA, 25 bp, Probe Sequence
ggggtgctaggcagcaaaggcattc

SEQ ID NO: 261355 - DNA, 25 bp, Probe Sequence
gggtgtcgaggcaggaaggattgtt

SEQ ID NO: 261356 - DNA, 25 bp, Probe Sequence
gggtgccaagcactgcgtgaaggaa

SEQ ID NO: 261357 - DNA, 25 bp, Probe Sequence
gggtgcccagagagtgccatggaga

SEQ ID NO: 261358 - DNA, 25 bp, Probe Sequence
tgtggtgaccgacttcgacggagac

SEQ ID NO: 261359 - DNA, 25 bp, Probe Sequence
gggtgaccaagaggcgatccaagca

SEQ ID NO: 261360 - DNA, 25 bp, Probe Sequence
gggtgacagagcgagactgtctcaa

SEQ ID NO: 261361 - DNA, 25 bp, Probe Sequence
gggtgacagagaccctgtctcgaga

SEQ ID NO: 261362 - DNA, 25 bp, Probe Sequence
gggtgcagaagatcctggctgccaa

SEQ ID NO: 261363 - DNA, 25 bp, Probe Sequence
gggtgagtacaaccttgctgtgaag

SEQ ID NO: 261364 - DNA, 25 bp, Probe Sequence
gggtgataggcttgtccgggaagaa

SEQ ID NO: 261365 - DNA, 25 bp, Probe Sequence
gggtgatggctgtgcccagaagaac

SEQ ID NO: 261366 - DNA, 25 bp, Probe Sequence
gggtgagatggtatgccgagcagac

SEQ ID NO: 261367 - DNA, 25 bp, Probe Sequence
gggtgctgggtactccagaggtgcc

SEQ ID NO: 261368 - DNA, 25 bp, Probe Sequence
gggtgtgagtcttttcagcaacccg

SEQ ID NO: 261369 - DNA, 25 bp, Probe Sequence
gggtgtgagtcttttcagcaacccg

SEQ ID NO: 261370 - DNA, 25 bp, Probe Sequence
gggtgtgagtcttttcagcaacccg

SEQ ID NO: 261371 - DNA, 25 bp, Probe Sequence
gggtgtgagtcttttcagcaacccg

SEQ ID NO: 261372 - DNA, 25 bp, Probe Sequence
gggtgtgagtcttttcagcaacccg

SEQ ID NO: 261373 - DNA, 25 bp, Probe Sequence
gggtgtgactcctaatggcacaacc

SEQ ID NO: 261374 - DNA, 25 bp, Probe Sequence
gggtgataacactgaggcaattgga

SEQ ID NO: 261375 - DNA, 25 bp, Probe Sequence
ggggttccgatccaggaactggaag

SEQ ID NO: 261376 - DNA, 25 bp, Probe Sequence
gggtccccgatacgagaacaggatg

SEQ ID NO: 261377 - DNA, 25 bp, Probe Sequence
gggtcctcaagattcgagatggcag

SEQ ID NO: 261378 - DNA, 25 bp, Probe Sequence
gggtcctctagacttgaggggctac

SEQ ID NO: 261379 - DNA, 25 bp, Probe Sequence
gggtccctcagattataggtgccca

SEQ ID NO: 261380 - DNA, 25 bp, Probe Sequence
gggtccttgctgtatagacagtcct

SEQ ID NO: 261381 - DNA, 25 bp, Probe Sequence
gggggcagtctgtaaatcagtcacc

SEQ ID NO: 261382 - DNA, 25 bp, Probe Sequence
gggtggggctgttgatatttcatca

SEQ ID NO: 261383 - DNA, 25 bp, Probe Sequence
gggtggaagctgagatatagttgat

SEQ ID NO: 261384 - DNA, 25 bp, Probe Sequence
ggaggtgaacgacctaagattacgt

SEQ ID NO: 261385 - DNA, 25 bp, Probe Sequence
ggggtgccctgggctaatgttaggg

SEQ ID NO: 261386 - DNA, 25 bp, Probe Sequence
gggggacctagagcaacttactagt

SEQ ID NO: 261387 - DNA, 25 bp, Probe Sequence
gggggaaatgaagcaacttgtctaa

SEQ ID NO: 261388 - DNA, 25 bp, Probe Sequence
gggggagcaacagcaaacaggtgct

SEQ ID NO: 261389 - DNA, 25 bp, Probe Sequence
gggtggccaacatcatatacctctt

SEQ ID NO: 261390 - DNA, 25 bp, Probe Sequence
ggtgtaaataagtcataccttctta

SEQ ID NO: 261391 - DNA, 25 bp, Probe Sequence
ggtgagaaatcgttgctgcaccctt

SEQ ID NO: 261392 - DNA, 25 bp, Probe Sequence
ggtgaccaatgcattaccttctgtt

SEQ ID NO: 261393 - DNA, 25 bp, Probe Sequence
ggtgactaaagcagactcttcctct

SEQ ID NO: 261394 - DNA, 25 bp, Probe Sequence
ggggtacaatataacctctcatctc

SEQ ID NO: 261395 - DNA, 25 bp, Probe Sequence
ggggttaataagtctctagctctcc

SEQ ID NO: 261396 - DNA, 25 bp, Probe Sequence
ggggtatactacggtcaatgctctg

SEQ ID NO: 261397 - DNA, 25 bp, Probe Sequence
ggggtatactacggtcaatgctctg

SEQ ID NO: 261398 - DNA, 25 bp, Probe Sequence
ggggcttcaccaagttcaatgttga

SEQ ID NO: 261399 - DNA, 25 bp, Probe Sequence
gggtgtgtccttgttaagtgatcaa

SEQ ID NO: 261400 - DNA, 25 bp, Probe Sequence
gggtggtggttctatagagggataa

SEQ ID NO: 261401 - DNA, 25 bp, Probe Sequence
gggggggtcttggagagtgatgcaa

SEQ ID NO: 261402 - DNA, 25 bp, Probe Sequence
ggggtggtgatcaggcaggttcata

SEQ ID NO: 261403 - DNA, 25 bp, Probe Sequence
gggtggtgtgaatggaaatgtgata

SEQ ID NO: 261404 - DNA, 25 bp, Probe Sequence
gggtgttggatatggaggaggatgg

SEQ ID NO: 261405 - DNA, 25 bp, Probe Sequence
ggggtaggcaattctatgtaggttt

SEQ ID NO: 261406 - DNA, 25 bp, Probe Sequence
gggtgatgaggcttttagagaggtg

SEQ ID NO: 261407 - DNA, 25 bp, Probe Sequence
gggtgcccagcttataagaatggtg

SEQ ID NO: 261408 - DNA, 25 bp, Probe Sequence
gggtccaaaatctcatgaatggtgt

SEQ ID NO: 261409 - DNA, 25 bp, Probe Sequence
ggggcaaaaactcagaatggtgttt

SEQ ID NO: 261410 - DNA, 25 bp, Probe Sequence
gggggatgctaaagtaaatggtatt

SEQ ID NO: 261411 - DNA, 25 bp, Probe Sequence
ggggggtaatagtgacatgcaggca

SEQ ID NO: 261412 - DNA, 25 bp, Probe Sequence
gggggggcaaaagagagcagcagaa

SEQ ID NO: 261413 - DNA, 25 bp, Probe Sequence
ggggtgggaaaggtgaatgccagtg

SEQ ID NO: 261414 - DNA, 25 bp, Probe Sequence
ggggctgggaaacttatttattgat

SEQ ID NO: 261415 - DNA, 25 bp, Probe Sequence
gggggaggattactatataggatta

SEQ ID NO: 261416 - DNA, 25 bp, Probe Sequence
ggggagaagatgagtacttgaaata

SEQ ID NO: 261417 - DNA, 25 bp, Probe Sequence
ggggagaaatcagtaacactaaaat

SEQ ID NO: 261418 - DNA, 25 bp, Probe Sequence
ggggagcaaactaaagaccagaact

SEQ ID NO: 261419 - DNA, 25 bp, Probe Sequence
ggggtcaagaggaaagaatgcgtgc

SEQ ID NO: 261420 - DNA, 25 bp, Probe Sequence
ggggtcattggggcaaaagcattgt

SEQ ID NO: 261421 - DNA, 25 bp, Probe Sequence
ggggctttgattgcaaaagactggg

SEQ ID NO: 261422 - DNA, 25 bp, Probe Sequence
ggggctttcatacaaatagactgtt

SEQ ID NO: 261423 - DNA, 25 bp, Probe Sequence
ggggtttgcaagcaccacagtagct

SEQ ID NO: 261424 - DNA, 25 bp, Probe Sequence
ggggctttctatggagccatctgct

SEQ ID NO: 261425 - DNA, 25 bp, Probe Sequence
gggtgtctgtaatcacactctcttc

SEQ ID NO: 261426 - DNA, 25 bp, Probe Sequence
gggtgccgtgttatactgtttccca

SEQ ID NO: 261427 - DNA, 25 bp, Probe Sequence
ggggtagtgttagtgttcatttgcc

SEQ ID NO: 261428 - DNA, 25 bp, Probe Sequence
ggggttttacgcaatgacattgccc

SEQ ID NO: 261429 - DNA, 25 bp, Probe Sequence
gggtgcctgcttaggctatgttagc

SEQ ID NO: 261430 - DNA, 25 bp, Probe Sequence
gggtgcaagtctaacctgtctagca

SEQ ID NO: 261431 - DNA, 25 bp, Probe Sequence
gggtgagaggctacagtgtgtatat

SEQ ID NO: 261432 - DNA, 25 bp, Probe Sequence
gggtgtggagctccaagactttcca

SEQ ID NO: 261433 - DNA, 25 bp, Probe Sequence
gggtgtgaaccaaggcactactgcc

SEQ ID NO: 261434 - DNA, 25 bp, Probe Sequence
gggtgagaagccatggccagagctt

SEQ ID NO: 261435 - DNA, 25 bp, Probe Sequence
ggggacagagccagattcagagtaa

SEQ ID NO: 261436 - DNA, 25 bp, Probe Sequence
gggggcaggccaatactgaaaagag

SEQ ID NO: 261437 - DNA, 25 bp, Probe Sequence
gggggtcccagatatcaaaagattt

SEQ ID NO: 261438 - DNA, 25 bp, Probe Sequence
ggggttctacagtcgtaaaagagat

SEQ ID NO: 261439 - DNA, 25 bp, Probe Sequence
ggcggtacgaaccctaatggaggca

SEQ ID NO: 261440 - DNA, 25 bp, Probe Sequence
ggggaccaaacagccaaagattgca

SEQ ID NO: 261441 - DNA, 25 bp, Probe Sequence
gggggccaacaaagctcaggacaac

SEQ ID NO: 261442 - DNA, 25 bp, Probe Sequence
gggtgtggcagtggttttggcaaac

SEQ ID NO: 261443 - DNA, 25 bp, Probe Sequence
gggtgatgccaggttctatttggaa

SEQ ID NO: 261444 - DNA, 25 bp, Probe Sequence
ggggagccgagttgctctgttagaa

SEQ ID NO: 261445 - DNA, 25 bp, Probe Sequence
gggtgaggggtggtgcatgttgaga

SEQ ID NO: 261446 - DNA, 25 bp, Probe Sequence
gggtgagggttcctgtttggattag

SEQ ID NO: 261447 - DNA, 25 bp, Probe Sequence
gggggaggtggcagttatgctgtta

SEQ ID NO: 261448 - DNA, 25 bp, Probe Sequence
gggggaggtggatgtcagatctggt

SEQ ID NO: 261449 - DNA, 25 bp, Probe Sequence
gggtggaggtcgatggcagcatcat

SEQ ID NO: 261450 - DNA, 25 bp, Probe Sequence
gggtggatggctgcattgaacaatt

SEQ ID NO: 261451 - DNA, 25 bp, Probe Sequence
gggtgacatggtgatggccacagtc

SEQ ID NO: 261452 - DNA, 25 bp, Probe Sequence
gggtgacagagtgagaccctgtctg

SEQ ID NO: 261453 - DNA, 25 bp, Probe Sequence
gggtgacagagtgagacctggtctc

SEQ ID NO: 261454 - DNA, 25 bp, Probe Sequence
ggggtcacaaattgaaatggctcct

SEQ ID NO: 261455 - DNA, 25 bp, Probe Sequence
gggtgtcacacaagtagaagatttt

SEQ ID NO: 261456 - DNA, 25 bp, Probe Sequence
ggggtacaaggtggatgagaaaaga

SEQ ID NO: 261457 - DNA, 25 bp, Probe Sequence
gggggacagagactcagatgaggac

SEQ ID NO: 261458 - DNA, 25 bp, Probe Sequence
gggtggacagtcctaatggggatct

SEQ ID NO: 261459 - DNA, 25 bp, Probe Sequence
ggggcgttgtcagaagcggaagctc

SEQ ID NO: 261460 - DNA, 25 bp, Probe Sequence
ggggccaagtaccctgggaaatcag

SEQ ID NO: 261461 - DNA, 25 bp, Probe Sequence
gggggtgagctcagactttgaaaag

SEQ ID NO: 261462 - DNA, 25 bp, Probe Sequence
gggggtgactgctgcttattaagat

SEQ ID NO: 261463 - DNA, 25 bp, Probe Sequence
ggggcttgcagtttgttttggagat

SEQ ID NO: 261464 - DNA, 25 bp, Probe Sequence
ggggattgcagaaagtttttgaaca

SEQ ID NO: 261465 - DNA, 25 bp, Probe Sequence
gggggctctgaatgtattttgtacc

SEQ ID NO: 261466 - DNA, 25 bp, Probe Sequence
gggggccagaaatgttcggtgatcc

SEQ ID NO: 261467 - DNA, 25 bp, Probe Sequence
gggggactgaagagttcgagagatc

SEQ ID NO: 261468 - DNA, 25 bp, Probe Sequence
gggggagtaagaatgtgtgtgcaga

SEQ ID NO: 261469 - DNA, 25 bp, Probe Sequence
gggggcaataaatgttgagccaaga

SEQ ID NO: 261470 - DNA, 25 bp, Probe Sequence
gggggaataatttctcatcactagg

SEQ ID NO: 261471 - DNA, 25 bp, Probe Sequence
gggggactatgaaatccacgatggg

SEQ ID NO: 261472 - DNA, 25 bp, Probe Sequence
gggggactatgaaatccacgatggg

SEQ ID NO: 261473 - DNA, 25 bp, Probe Sequence
gggggatcttgacacacaatgatga

SEQ ID NO: 261474 - DNA, 25 bp, Probe Sequence
gggggaagtgagctccaagagtagc

SEQ ID NO: 261475 - DNA, 25 bp, Probe Sequence
gggggggtgggtgagagagacaggc

SEQ ID NO: 261476 - DNA, 25 bp, Probe Sequence
gggggagggggattagctagactag

SEQ ID NO: 261477 - DNA, 25 bp, Probe Sequence
ggggatgaggttgcttactaagctt

SEQ ID NO: 261478 - DNA, 25 bp, Probe Sequence
ggggaaagggcattcgacttactgt

SEQ ID NO: 261479 - DNA, 25 bp, Probe Sequence
ggggcgaaggagtggactggagcgt

SEQ ID NO: 261480 - DNA, 25 bp, Probe Sequence
gggggaatgctgtcgggactgagca

SEQ ID NO: 261481 - DNA, 25 bp, Probe Sequence
ggggtggatggggggagcaagcata

SEQ ID NO: 261482 - DNA, 25 bp, Probe Sequence
gggtggctgtggaagaatggcaaat

SEQ ID NO: 261483 - DNA, 25 bp, Probe Sequence
ggggtcattgccaatgatatggcag

SEQ ID NO: 261484 - DNA, 25 bp, Probe Sequence
ggggatctctccgtaagacgagacc

SEQ ID NO: 261485 - DNA, 25 bp, Probe Sequence
ggggtcctcacggagaagaacacca

SEQ ID NO: 261486 - DNA, 25 bp, Probe Sequence
ggggccctgcagggagatggacccc

SEQ ID NO: 261487 - DNA, 25 bp, Probe Sequence
ggggcctgaaggtcagggtcaccca

SEQ ID NO: 261488 - DNA, 25 bp, Probe Sequence
gggggatatgggccagggcatccca

SEQ ID NO: 261489 - DNA, 25 bp, Probe Sequence
ggggaaatatggtatgaggtcgcca

SEQ ID NO: 261490 - DNA, 25 bp, Probe Sequence
gggggaatcaggttacgtggcaagt

SEQ ID NO: 261491 - DNA, 25 bp, Probe Sequence
gggggcagtaagtgatcttggtagt

SEQ ID NO: 261492 - DNA, 25 bp, Probe Sequence
ggggagcgaaagtttcttggtctca

SEQ ID NO: 261493 - DNA, 25 bp, Probe Sequence
ggtggggcaatggttatttggttat

SEQ ID NO: 261494 - DNA, 25 bp, Probe Sequence
ggctgggcccatattggtttgtgtt

SEQ ID NO: 261495 - DNA, 25 bp, Probe Sequence
gggggacactccatgagtgtctgtg

SEQ ID NO: 261496 - DNA, 25 bp, Probe Sequence
gggggaggcccaatgaggtggctca

SEQ ID NO: 261497 - DNA, 25 bp, Probe Sequence
ggatggaaacccaggtcggtctgat

SEQ ID NO: 261498 - DNA, 25 bp, Probe Sequence
ggataaaccgccaggttgaacctct

SEQ ID NO: 261499 - DNA, 25 bp, Probe Sequence
ggcaaaacttacagcttaacccatt

SEQ ID NO: 261500 - DNA, 25 bp, Probe Sequence
ggcaaaacttacagcttaacccatt

SEQ ID NO: 261501 - DNA, 25 bp, Probe Sequence
ggtaaaatcttcacctgaaccaatt

SEQ ID NO: 261502 - DNA, 25 bp, Probe Sequence
ggtggaaaattcaccgtcgccattg

SEQ ID NO: 261503 - DNA, 25 bp, Probe Sequence
ggtggaaacttctgcctgttttcca

SEQ ID NO: 261504 - DNA, 25 bp, Probe Sequence
ggtgaaaaccgtagcctttgcattc

SEQ ID NO: 261505 - DNA, 25 bp, Probe Sequence
ggtgaaaccaggtggcttcttgccc

SEQ ID NO: 261506 - DNA, 25 bp, Probe Sequence
ggtgtcaaagatagagggcttcttg

SEQ ID NO: 261507 - DNA, 25 bp, Probe Sequence
gggtgatagagtgggacgctgtctc

SEQ ID NO: 261508 - DNA, 25 bp, Probe Sequence
gggtgatagagcaagaacctgtctc

SEQ ID NO: 261509 - DNA, 25 bp, Probe Sequence
ggggatagactatgcacaatttctg

SEQ ID NO: 261510 - DNA, 25 bp, Probe Sequence
ggggatgaggcccatgaagatcttc

SEQ ID NO: 261511 - DNA, 25 bp, Probe Sequence
ggggtgctgtgctgttagtaatgca

SEQ ID NO: 261512 - DNA, 25 bp, Probe Sequence
ggggttcgctctactatggagatca

SEQ ID NO: 261513 - DNA, 25 bp, Probe Sequence
ggggctttggcaactatggtgctca

SEQ ID NO: 261514 - DNA, 25 bp, Probe Sequence
ggggctattgtctctttattcagaa

SEQ ID NO: 261515 - DNA, 25 bp, Probe Sequence
ggggcgatatcctctgacgtatcat

SEQ ID NO: 261516 - DNA, 25 bp, Probe Sequence
ggggactactataatggcttgtcat

SEQ ID NO: 261517 - DNA, 25 bp, Probe Sequence
ggggacggctgtaatggtggctatc

SEQ ID NO: 261518 - DNA, 25 bp, Probe Sequence
ggggacaggtggaacaggccaacca

SEQ ID NO: 261519 - DNA, 25 bp, Probe Sequence
ggggaagagttgtacgcccaggcaa

SEQ ID NO: 261520 - DNA, 25 bp, Probe Sequence
ggggaacagtagtggccagtggaca

SEQ ID NO: 261521 - DNA, 25 bp, Probe Sequence
ggtggttccggaatggccaggaaga

SEQ ID NO: 261522 - DNA, 25 bp, Probe Sequence
ggggttccatgaattgtggggaagc

SEQ ID NO: 261523 - DNA, 25 bp, Probe Sequence
ggggctccagataataagggtgaag

SEQ ID NO: 261524 - DNA, 25 bp, Probe Sequence
gggggcttcatgaaaaggtatggag

SEQ ID NO: 261525 - DNA, 25 bp, Probe Sequence
gggggcttcatgagaggcttaaaga

SEQ ID NO: 261526 - DNA, 25 bp, Probe Sequence
gggtggttagcattcaagttaagaa

SEQ ID NO: 261527 - DNA, 25 bp, Probe Sequence
gggtgtgctgggcatcaaggtgaag

SEQ ID NO: 261528 - DNA, 25 bp, Probe Sequence
gggtgtatgtgagtgtgcaagggaa

SEQ ID NO: 261529 - DNA, 25 bp, Probe Sequence
gggtgtgtctgatgtggagagtgaa

SEQ ID NO: 261530 - DNA, 25 bp, Probe Sequence
ggtgtgtttgcagggtgatttccta

SEQ ID NO: 261531 - DNA, 25 bp, Probe Sequence
gggtgatctagccaggtacatttta

SEQ ID NO: 261532 - DNA, 25 bp, Probe Sequence
gggtgatctagccaggtacatttta

SEQ ID NO: 261533 - DNA, 25 bp, Probe Sequence
ggggaccgccagagattttatagtg

SEQ ID NO: 261534 - DNA, 25 bp, Probe Sequence
ggggacatcctcaaggttttgaacg

SEQ ID NO: 261535 - DNA, 25 bp, Probe Sequence
ggggagtaccaagtgcttttgagtc

SEQ ID NO: 261536 - DNA, 25 bp, Probe Sequence
ggtggaacagtcaacctttctagta

SEQ ID NO: 261537 - DNA, 25 bp, Probe Sequence
ggggaaagggaggcatccctcatgg

SEQ ID NO: 261538 - DNA, 25 bp, Probe Sequence
ggggaaagacagcctgtacaccatg

SEQ ID NO: 261539 - DNA, 25 bp, Probe Sequence
ggggtatggaagtcatctgtccctt

SEQ ID NO: 261540 - DNA, 25 bp, Probe Sequence
ggggtatcactatactgtcctcaaa

SEQ ID NO: 261541 - DNA, 25 bp, Probe Sequence
ggggatataacaaacaaagctacaa

SEQ ID NO: 261542 - DNA, 25 bp, Probe Sequence
gggtgattataaccagcaaagaaat

SEQ ID NO: 261543 - DNA, 25 bp, Probe Sequence
ggggtctacacgtctgacagaggga

SEQ ID NO: 261544 - DNA, 25 bp, Probe Sequence
ggggaaaactgtcgccagttgtgca

SEQ ID NO: 261545 - DNA, 25 bp, Probe Sequence
ggggaaaacttctctcatagatcca

SEQ ID NO: 261546 - DNA, 25 bp, Probe Sequence
ggggaccgtctgtggctataatgac

SEQ ID NO: 261547 - DNA, 25 bp, Probe Sequence
ggggccctatctttgggatttacat

SEQ ID NO: 261548 - DNA, 25 bp, Probe Sequence
ggtgctaccttttgggatatttatt

SEQ ID NO: 261549 - DNA, 25 bp, Probe Sequence
ggggagactatgtgtgagctttttt

SEQ ID NO: 261550 - DNA, 25 bp, Probe Sequence
gggggaggagggagctatttgtgta

SEQ ID NO: 261551 - DNA, 25 bp, Probe Sequence
ggggccacgaagcgtgttactttga

SEQ ID NO: 261552 - DNA, 25 bp, Probe Sequence
ggtggccataaacagtacttccttg

SEQ ID NO: 261553 - DNA, 25 bp, Probe Sequence
ggtggccataaacagtacttccttg

SEQ ID NO: 261554 - DNA, 25 bp, Probe Sequence
ggggcacaaagaaaccatcttcagc

SEQ ID NO: 261555 - DNA, 25 bp, Probe Sequence
ggggcagaaagagcaccccaggcga

SEQ ID NO: 261556 - DNA, 25 bp, Probe Sequence
ggggacaacagaagcactttcagta

SEQ ID NO: 261557 - DNA, 25 bp, Probe Sequence
ggggtgcaaagctagaatgcttcaa

SEQ ID NO: 261558 - DNA, 25 bp, Probe Sequence
ggggtcaatgagtacctgatggcac

SEQ ID NO: 261559 - DNA, 25 bp, Probe Sequence
ggggtccagagtggtgttgcatcac

SEQ ID NO: 261560 - DNA, 25 bp, Probe Sequence
gggtgtgctatggatggcttctaac

SEQ ID NO: 261561 - DNA, 25 bp, Probe Sequence
ggagtcctaggcacagctctaagcc

SEQ ID NO: 261562 - DNA, 25 bp, Probe Sequence
gggtggcatggggagcagctagaac

SEQ ID NO: 261563 - DNA, 25 bp, Probe Sequence
gggtggcatggggagcagctagaac

SEQ ID NO: 261564 - DNA, 25 bp, Probe Sequence
ggggactgcatgggaagcacggaat

SEQ ID NO: 261565 - DNA, 25 bp, Probe Sequence
ggggtgtgcaaccacaagcaggagt

SEQ ID NO: 261566 - DNA, 25 bp, Probe Sequence
gggggttaagagcacaggcagcgcc

SEQ ID NO: 261567 - DNA, 25 bp, Probe Sequence
gggggtgtcaaacagaggcatcagc

SEQ ID NO: 261568 - DNA, 25 bp, Probe Sequence
gggtggaggaagccaaacgcatcat

SEQ ID NO: 261569 - DNA, 25 bp, Probe Sequence
ggggcagcagcgtgaaaaccagtat

SEQ ID NO: 261570 - DNA, 25 bp, Probe Sequence
ggggcagcaccgtgaagacgaatat

SEQ ID NO: 261571 - DNA, 25 bp, Probe Sequence
ggggctccactgtgaagaacaccat

SEQ ID NO: 261572 - DNA, 25 bp, Probe Sequence
ggggtctctctgtgaaacacaatcc

SEQ ID NO: 261573 - DNA, 25 bp, Probe Sequence
ggggtgccttatggtcagacaaatt

SEQ ID NO: 261574 - DNA, 25 bp, Probe Sequence
ggtggttctaaattctgaaactgta

SEQ ID NO: 261575 - DNA, 25 bp, Probe Sequence
ggggtgtgcctgataccaagttgta

SEQ ID NO: 261576 - DNA, 25 bp, Probe Sequence
ggggtctgctctagcatcagtaagt

SEQ ID NO: 261577 - DNA, 25 bp, Probe Sequence
ggggtcagatgcagatctctactgt

SEQ ID NO: 261578 - DNA, 25 bp, Probe Sequence
ggggtcagatgcagatctctactgt

SEQ ID NO: 261579 - DNA, 25 bp, Probe Sequence
ggggtcagatgcagatctctactgt

SEQ ID NO: 261580 - DNA, 25 bp, Probe Sequence
ggggccatagaccatacatacgatc

SEQ ID NO: 261581 - DNA, 25 bp, Probe Sequence
ggtggccatagacaacaagttcgaa

SEQ ID NO: 261582 - DNA, 25 bp, Probe Sequence
ggggcatgatagcaaaaacctagac

SEQ ID NO: 261583 - DNA, 25 bp, Probe Sequence
ggggatgggtagaacaagactgaga

SEQ ID NO: 261584 - DNA, 25 bp, Probe Sequence
ggggatgggtagaacaagactgaga

SEQ ID NO: 261585 - DNA, 25 bp, Probe Sequence
ggggcaagatgcagtacaagttgaa

SEQ ID NO: 261586 - DNA, 25 bp, Probe Sequence
ggggcacaggcatgccaaatttgca

SEQ ID NO: 261587 - DNA, 25 bp, Probe Sequence
ggggcgacgtggacaataatgtgca

SEQ ID NO: 261588 - DNA, 25 bp, Probe Sequence
ggggggcagggcagaaatggactcc

SEQ ID NO: 261589 - DNA, 25 bp, Probe Sequence
ggggtggagaggggtgcaaggccct

SEQ ID NO: 261590 - DNA, 25 bp, Probe Sequence
gggggaatgaggggctgcaggaatc

SEQ ID NO: 261591 - DNA, 25 bp, Probe Sequence
gggggagctggtaactgatgaaatc

SEQ ID NO: 261592 - DNA, 25 bp, Probe Sequence
gggtggaggtggggatagaacatct

SEQ ID NO: 261593 - DNA, 25 bp, Probe Sequence
gggtggagaggggtgcaaggccctg

SEQ ID NO: 261594 - DNA, 25 bp, Probe Sequence
gggtgggcatttgatgcgggaggtg

SEQ ID NO: 261595 - DNA, 25 bp, Probe Sequence
gggggacactgggatagggaggtag

SEQ ID NO: 261596 - DNA, 25 bp, Probe Sequence
gggtgggagtgtggatggggaggaa

SEQ ID NO: 261597 - DNA, 25 bp, Probe Sequence
gggtggaggatggtgagggataaaa

SEQ ID NO: 261598 - DNA, 25 bp, Probe Sequence
ggggacatggatgtggacgaccaaa

SEQ ID NO: 261599 - DNA, 25 bp, Probe Sequence
ggggaagtacgggatctacaccaag

SEQ ID NO: 261600 - DNA, 25 bp, Probe Sequence
ggggaagattcaggaattcctctct

SEQ ID NO: 261601 - DNA, 25 bp, Probe Sequence
gggggaacatcagaactcatccttg

SEQ ID NO: 261602 - DNA, 25 bp, Probe Sequence
gggtggaacaaagctctgttctaga

SEQ ID NO: 261603 - DNA, 25 bp, Probe Sequence
gggggataaagagccttcaccagaa

SEQ ID NO: 261604 - DNA, 25 bp, Probe Sequence
gggtggttaagagcatatctcgcca

SEQ ID NO: 261605 - DNA, 25 bp, Probe Sequence
gggtggtaacaagagttccatccca

SEQ ID NO: 261606 - DNA, 25 bp, Probe Sequence
ggggagtacctaaatgttcacatga

SEQ ID NO: 261607 - DNA, 25 bp, Probe Sequence
ggggagtgaaaccaattctcagaga

SEQ ID NO: 261608 - DNA, 25 bp, Probe Sequence
ggggatggtggacagtcctgcggaa

SEQ ID NO: 261609 - DNA, 25 bp, Probe Sequence
ggggacatgggagagacctgggggt

SEQ ID NO: 261610 - DNA, 25 bp, Probe Sequence
ggggatgcttcatgtgaacgtggga

SEQ ID NO: 261611 - DNA, 25 bp, Probe Sequence
ggggtgcttacgatcacagctatgt

SEQ ID NO: 261612 - DNA, 25 bp, Probe Sequence
gggggcattacatgggatgcttgtg

SEQ ID NO: 261613 - DNA, 25 bp, Probe Sequence
ggggagataacacaggggttggact

SEQ ID NO: 261614 - DNA, 25 bp, Probe Sequence
ggggtgctgaggagagccgagttgg

SEQ ID NO: 261615 - DNA, 25 bp, Probe Sequence
ggggtggaaatactgccaaggctgg

SEQ ID NO: 261616 - DNA, 25 bp, Probe Sequence
ggggctggaaagcctcagcagaaag

SEQ ID NO: 261617 - DNA, 25 bp, Probe Sequence
tggcgacggataaggcctgaactgg

SEQ ID NO: 261618 - DNA, 25 bp, Probe Sequence
ggcgacggataaggcctgaactggg

SEQ ID NO: 261619 - DNA, 25 bp, Probe Sequence
ggtgacaggtagctgggacctaggc

SEQ ID NO: 261620 - DNA, 25 bp, Probe Sequence
ggtgaatggaagacacttacctaac

SEQ ID NO: 261621 - DNA, 25 bp, Probe Sequence
gggggggatgtgccctacagaagac

SEQ ID NO: 261622 - DNA, 25 bp, Probe Sequence
ggggggagagtcactcagagcaaga

SEQ ID NO: 261623 - DNA, 25 bp, Probe Sequence
ggggttgaagtcacatagctgggcc

SEQ ID NO: 261624 - DNA, 25 bp, Probe Sequence
ggggttaagagcacaggcagcgccc

SEQ ID NO: 261625 - DNA, 25 bp, Probe Sequence
ggggtggaagcactgacacccccca

SEQ ID NO: 261626 - DNA, 25 bp, Probe Sequence
gggtgggtgagacagccccacccaa

SEQ ID NO: 261627 - DNA, 25 bp, Probe Sequence
ggggtggtgagggcagttctgcacc

SEQ ID NO: 261628 - DNA, 25 bp, Probe Sequence
ggtgttggatggcacagtgggtaac

SEQ ID NO: 261629 - DNA, 25 bp, Probe Sequence
ggggtgctgtgggaactgggatcca

SEQ ID NO: 261630 - DNA, 25 bp, Probe Sequence
gggggctttggcaactatggtgctc

SEQ ID NO: 261631 - DNA, 25 bp, Probe Sequence
gggggctttggcagctatggaagaa

SEQ ID NO: 261632 - DNA, 25 bp, Probe Sequence
gggtggtttgcgaggatgagggacg

SEQ ID NO: 261633 - DNA, 25 bp, Probe Sequence
ggggggttgcagtggagagggacag

SEQ ID NO: 261634 - DNA, 25 bp, Probe Sequence
ggggggcagtggtgtggagaagcca

SEQ ID NO: 261635 - DNA, 25 bp, Probe Sequence
ggggaccagatgctttacaggagtg

SEQ ID NO: 261636 - DNA, 25 bp, Probe Sequence
ggggaccagatgctttacaggagtg

SEQ ID NO: 261637 - DNA, 25 bp, Probe Sequence
ggggcctgctcaaaattacaggcag

SEQ ID NO: 261638 - DNA, 25 bp, Probe Sequence
gggggctatgcagaattcctgtacc

SEQ ID NO: 261639 - DNA, 25 bp, Probe Sequence
gggggttgggagaattggctagcca

SEQ ID NO: 261640 - DNA, 25 bp, Probe Sequence
gggggatggagatgtagttgctgac

SEQ ID NO: 261641 - DNA, 25 bp, Probe Sequence
gggggtgggatggagagaatgctga

SEQ ID NO: 261642 - DNA, 25 bp, Probe Sequence
gggggtgggatggagagaatgctga

SEQ ID NO: 261643 - DNA, 25 bp, Probe Sequence
ggggattgggtgaggacagtggtct

SEQ ID NO: 261644 - DNA, 25 bp, Probe Sequence
ggggtgttggtgctgtaagaggtca

SEQ ID NO: 261645 - DNA, 25 bp, Probe Sequence
ggggtggttgtgattaaaggcattc

SEQ ID NO: 261646 - DNA, 25 bp, Probe Sequence
ggggggttgtgaactacatatatgc

SEQ ID NO: 261647 - DNA, 25 bp, Probe Sequence
ggggcgggaggtgacatcatgaagt

SEQ ID NO: 261648 - DNA, 25 bp, Probe Sequence
ggggggagaggggagggatagcatt

SEQ ID NO: 261649 - DNA, 25 bp, Probe Sequence
gggggtatggggaagctgtgacaga

SEQ ID NO: 261650 - DNA, 25 bp, Probe Sequence
gggggataagagtgagttgaatgaa

SEQ ID NO: 261651 - DNA, 25 bp, Probe Sequence
ggggtctaaagctgtgtgtgttgag

SEQ ID NO: 261652 - DNA, 25 bp, Probe Sequence
ggggtgtaactgcttgtctttcagc

SEQ ID NO: 261653 - DNA, 25 bp, Probe Sequence
ggggtgtttctgatgttattccagc

SEQ ID NO: 261654 - DNA, 25 bp, Probe Sequence
ggggtcttatctgttggactctgaa

SEQ ID NO: 261655 - DNA, 25 bp, Probe Sequence
ggggtattatgtgcttagcttgctt

SEQ ID NO: 261656 - DNA, 25 bp, Probe Sequence
ggggttgtcagttatctcatattgg

SEQ ID NO: 261657 - DNA, 25 bp, Probe Sequence
ggggcttgaggtttacaactggtat

SEQ ID NO: 261658 - DNA, 25 bp, Probe Sequence
ggggcttggatcagtaagtctggtt

SEQ ID NO: 261659 - DNA, 25 bp, Probe Sequence
ggggcatatatagagtaaggctttt

SEQ ID NO: 261660 - DNA, 25 bp, Probe Sequence
ggggaatattcgagcagaaccttta

SEQ ID NO: 261661 - DNA, 25 bp, Probe Sequence
ggggttcttcagagaacaccctcta

SEQ ID NO: 261662 - DNA, 25 bp, Probe Sequence
ggggattttcatgctgaacccattc

SEQ ID NO: 261663 - DNA, 25 bp, Probe Sequence
ggggaactgctatctgatgcccctc

SEQ ID NO: 261664 - DNA, 25 bp, Probe Sequence
ggggaacattagctagccagcccag

SEQ ID NO: 261665 - DNA, 25 bp, Probe Sequence
gggggccattcggatggccatgctc

SEQ ID NO: 261666 - DNA, 25 bp, Probe Sequence
gggggccacagggtgggctgtggag

SEQ ID NO: 261667 - DNA, 25 bp, Probe Sequence
gggggcctcgagctgaggtggaatg

SEQ ID NO: 261668 - DNA, 25 bp, Probe Sequence
ggaggggccggagtattgggaagag

SEQ ID NO: 261669 - DNA, 25 bp, Probe Sequence
ggggggactagatcctgtggagaag

SEQ ID NO: 261670 - DNA, 25 bp, Probe Sequence
gggggaactcagatccagggacaga

SEQ ID NO: 261671 - DNA, 25 bp, Probe Sequence
gggggagttcggagacgtgatgctg

SEQ ID NO: 261672 - DNA, 25 bp, Probe Sequence
ggggagtggaccgaggacgaggtgc

SEQ ID NO: 261673 - DNA, 25 bp, Probe Sequence
ggcccaagtaccgtggaaggtggat

SEQ ID NO: 261674 - DNA, 25 bp, Probe Sequence
ggtgcgcaagttcacgggcaaggcg

SEQ ID NO: 261675 - DNA, 25 bp, Probe Sequence
ggggattgtgagctggggcattggc

SEQ ID NO: 261676 - DNA, 25 bp, Probe Sequence
ggggacagctgaggatgggcctagc

SEQ ID NO: 261677 - DNA, 25 bp, Probe Sequence
ggggaagatgcaggatataccaaaa

SEQ ID NO: 261678 - DNA, 25 bp, Probe Sequence
gggggtatgcatgtatgaacacaca

SEQ ID NO: 261679 - DNA, 25 bp, Probe Sequence
gggggcatctgtgatcatagaatac

SEQ ID NO: 261680 - DNA, 25 bp, Probe Sequence
gggggcacggaattcgaagacccag

SEQ ID NO: 261681 - DNA, 25 bp, Probe Sequence
ggggctgcagggcagtgaaacccac

SEQ ID NO: 261682 - DNA, 25 bp, Probe Sequence
ggggcacgggcatgtgaaatttgca

SEQ ID NO: 261683 - DNA, 25 bp, Probe Sequence
tgggcccgggggacaaatatacgtg

SEQ ID NO: 261684 - DNA, 25 bp, Probe Sequence
ggggctcggtgagaccaacaaggtg

SEQ ID NO: 261685 - DNA, 25 bp, Probe Sequence
ggggctcggtgagaccaacaaggtg

SEQ ID NO: 261686 - DNA, 25 bp, Probe Sequence
ggggccagtggttaccaaagccaag

SEQ ID NO: 261687 - DNA, 25 bp, Probe Sequence
ggggcctagtaacaccaagccagtg

SEQ ID NO: 261688 - DNA, 25 bp, Probe Sequence
ggggtcaagaaacagccagcaagag

SEQ ID NO: 261689 - DNA, 25 bp, Probe Sequence
ggggtagtacaacagctccaagtat

SEQ ID NO: 261690 - DNA, 25 bp, Probe Sequence
ggggtagaacaagtggtactaggat

SEQ ID NO: 261691 - DNA, 25 bp, Probe Sequence
ggggtggaagcggatgagtaagaag

SEQ ID NO: 261692 - DNA, 25 bp, Probe Sequence
gggggtggagagaacactaagaggt

SEQ ID NO: 261693 - DNA, 25 bp, Probe Sequence
gggggtgtgtgataagcgagtgggt

SEQ ID NO: 261694 - DNA, 25 bp, Probe Sequence
gggggctcattcacagagagaggag

SEQ ID NO: 261695 - DNA, 25 bp, Probe Sequence
gggggtctatctgcgtctgaaagat

SEQ ID NO: 261696 - DNA, 25 bp, Probe Sequence
gggggtgtcttgggattgatgaact

SEQ ID NO: 261697 - DNA, 25 bp, Probe Sequence
ggggagtgcatcggtacttgagcaa

SEQ ID NO: 261698 - DNA, 25 bp, Probe Sequence
ggggatggtcgagtatctcagaaaa

SEQ ID NO: 261699 - DNA, 25 bp, Probe Sequence
ggggggtctcattctacaaagagag

SEQ ID NO: 261700 - DNA, 25 bp, Probe Sequence
ggggcaggactcctccaaaattatg

SEQ ID NO: 261701 - DNA, 25 bp, Probe Sequence
ggggttactgtcacattcatttatg

SEQ ID NO: 261702 - DNA, 25 bp, Probe Sequence
ggggtttcttcaaaatgtgtgtgtc

SEQ ID NO: 261703 - DNA, 25 bp, Probe Sequence
ggggattattaacattgtattgtct

SEQ ID NO: 261704 - DNA, 25 bp, Probe Sequence
ggggattatgattcaccctctttgg

SEQ ID NO: 261705 - DNA, 25 bp, Probe Sequence
ggtggttgagtttgcctcttatggt

SEQ ID NO: 261706 - DNA, 25 bp, Probe Sequence
ggggtagaatggaccttgtaggtgg

SEQ ID NO: 261707 - DNA, 25 bp, Probe Sequence
ggtggaaaatgggcctaaggtctgt

SEQ ID NO: 261708 - DNA, 25 bp, Probe Sequence
ggggaccagtaggacttgagggact

SEQ ID NO: 261709 - DNA, 25 bp, Probe Sequence
ggggatgctggtacaagttgtggga

SEQ ID NO: 261710 - DNA, 25 bp, Probe Sequence
gggggtggtgaagtgattgttcgaa

SEQ ID NO: 261711 - DNA, 25 bp, Probe Sequence
ggggcagatggtgagctctggttgc

SEQ ID NO: 261712 - DNA, 25 bp, Probe Sequence
ggtggagcaggtgatgccgatttcc

SEQ ID NO: 261713 - DNA, 25 bp, Probe Sequence
ggtgtgatgggtgtgtgcacatatg

SEQ ID NO: 261714 - DNA, 25 bp, Probe Sequence
ggtgtgtggctggcaagcgagcatt

SEQ ID NO: 261715 - DNA, 25 bp, Probe Sequence
ggtgatggcgtgatatgcacctgca

SEQ ID NO: 261716 - DNA, 25 bp, Probe Sequence
ggtgagggtctccacatttacttaa

SEQ ID NO: 261717 - DNA, 25 bp, Probe Sequence
ggtggaagtccttggttacttatca

SEQ ID NO: 261718 - DNA, 25 bp, Probe Sequence
ggggaagtacttcttgagttatgta

SEQ ID NO: 261719 - DNA, 25 bp, Probe Sequence
ggggaagttttctattactcctgtg

SEQ ID NO: 261720 - DNA, 25 bp, Probe Sequence
ggggagtgtcttacagttctcccgg

SEQ ID NO: 261721 - DNA, 25 bp, Probe Sequence
ggggagtgttagaactgttcccaat

SEQ ID NO: 261722 - DNA, 25 bp, Probe Sequence
ggggattttaaactgagtactcaag

SEQ ID NO: 261723 - DNA, 25 bp, Probe Sequence
ggggaggttacagaggctgacttca

SEQ ID NO: 261724 - DNA, 25 bp, Probe Sequence
ggggaggttacagaggctgacttca

SEQ ID NO: 261725 - DNA, 25 bp, Probe Sequence
ggtgtagggaattttgcctgccttc

SEQ ID NO: 261726 - DNA, 25 bp, Probe Sequence
gggggagagaatgacttctgccttc

SEQ ID NO: 261727 - DNA, 25 bp, Probe Sequence
ggggtggagagtgaggtctcctttc

SEQ ID NO: 261728 - DNA, 25 bp, Probe Sequence
ggggtggagaggaagagttgtttag

SEQ ID NO: 261729 - DNA, 25 bp, Probe Sequence
gggggggatatatagccagtattag

SEQ ID NO: 261730 - DNA, 25 bp, Probe Sequence
gggggggttgcatacaaagataaca

SEQ ID NO: 261731 - DNA, 25 bp, Probe Sequence
ggggctgttttctcacaatataaac

SEQ ID NO: 261732 - DNA, 25 bp, Probe Sequence
ggggtgctttccacagtcagaatag

SEQ ID NO: 261733 - DNA, 25 bp, Probe Sequence
gggggtcttcaatgcagttaattgg

SEQ ID NO: 261734 - DNA, 25 bp, Probe Sequence
ggggagttttcatcagttggagagg

SEQ ID NO: 261735 - DNA, 25 bp, Probe Sequence
ggggagaaatcctacatgttggaat

SEQ ID NO: 261736 - DNA, 25 bp, Probe Sequence
ggggagcaatatgttctgtgaaaat

SEQ ID NO: 261737 - DNA, 25 bp, Probe Sequence
ggggagcagtattctcctggatcct

SEQ ID NO: 261738 - DNA, 25 bp, Probe Sequence
ggggtgcagatatctcttggggatg

SEQ ID NO: 261739 - DNA, 25 bp, Probe Sequence
ggggctgcaggaatctctggagagc

SEQ ID NO: 261740 - DNA, 25 bp, Probe Sequence
ggggtgggcatttgatgcgggaggt

SEQ ID NO: 261741 - DNA, 25 bp, Probe Sequence
ggggatttgcagacaggccaggaga

SEQ ID NO: 261742 - DNA, 25 bp, Probe Sequence
ggggtgtgataggtggcacggagaa

SEQ ID NO: 261743 - DNA, 25 bp, Probe Sequence
ggggtgtgcaaggttgacccacaca

SEQ ID NO: 261744 - DNA, 25 bp, Probe Sequence
ggggtgtgaattaccataccatcca

SEQ ID NO: 261745 - DNA, 25 bp, Probe Sequence
gggggtgaacttgaaactctcatca

SEQ ID NO: 261746 - DNA, 25 bp, Probe Sequence
gggggtgaacttgaaactctcatca

SEQ ID NO: 261747 - DNA, 25 bp, Probe Sequence
gggggtggacttatcaacactataa

SEQ ID NO: 261748 - DNA, 25 bp, Probe Sequence
ggggagtagagccagttaacattta

SEQ ID NO: 261749 - DNA, 25 bp, Probe Sequence
ggggcaactggccatttgccaattt

SEQ ID NO: 261750 - DNA, 25 bp, Probe Sequence
ggggcaacatggaaagtcaggtact

SEQ ID NO: 261751 - DNA, 25 bp, Probe Sequence
ggggacaagtggagccaggtagagg

SEQ ID NO: 261752 - DNA, 25 bp, Probe Sequence
ggggccaactagggccaggtggaag

SEQ ID NO: 261753 - DNA, 25 bp, Probe Sequence
ggggaagatcttagaccaaggggag

SEQ ID NO: 261754 - DNA, 25 bp, Probe Sequence
ggaggacgccttcaacaagggacgg

SEQ ID NO: 261755 - DNA, 25 bp, Probe Sequence
ggtggttctcttcccaaagtggaag

SEQ ID NO: 261756 - DNA, 25 bp, Probe Sequence
ggggttatcttacatcagagtgata

SEQ ID NO: 261757 - DNA, 25 bp, Probe Sequence
ggggtaagcttagtctctgagtata

SEQ ID NO: 261758 - DNA, 25 bp, Probe Sequence
ggggctaatggtgtcactgtgtaaa

SEQ ID NO: 261759 - DNA, 25 bp, Probe Sequence
ggggctaatggtgtcactgtgtaaa

SEQ ID NO: 261760 - DNA, 25 bp, Probe Sequence
ggggatttagctttgcacttctaac

SEQ ID NO: 261761 - DNA, 25 bp, Probe Sequence
ggggcattgtacaagttcttccctc

SEQ ID NO: 261762 - DNA, 25 bp, Probe Sequence
ggtggatgttagcagttcttccctt

SEQ ID NO: 261763 - DNA, 25 bp, Probe Sequence
ggggattattggcgtctgctgaccc

SEQ ID NO: 261764 - DNA, 25 bp, Probe Sequence
ggggtaagctgacgtgctgtgcccc

SEQ ID NO: 261765 - DNA, 25 bp, Probe Sequence
ggtgaggatactttggagtccacac

SEQ ID NO: 261766 - DNA, 25 bp, Probe Sequence
ggtggctaacttagtcaattccatc

SEQ ID NO: 261767 - DNA, 25 bp, Probe Sequence
ggtgtgaaactcggctgtattaatc

SEQ ID NO: 261768 - DNA, 25 bp, Probe Sequence
ggggagtccagaggtgtcagtaatt

SEQ ID NO: 261769 - DNA, 25 bp, Probe Sequence
gggggtgcctaactgagcagtaggg

SEQ ID NO: 261770 - DNA, 25 bp, Probe Sequence
ggggctgtcttccagtgaaggggac

SEQ ID NO: 261771 - DNA, 25 bp, Probe Sequence
ggggatcgcttgcagtaaggagttc

SEQ ID NO: 261772 - DNA, 25 bp, Probe Sequence
ggggtgcctgtgctataaatgagtt

SEQ ID NO: 261773 - DNA, 25 bp, Probe Sequence
ggggcacattgggtaataagagtac

SEQ ID NO: 261774 - DNA, 25 bp, Probe Sequence
ggggaattggtatattcacagactg

SEQ ID NO: 261775 - DNA, 25 bp, Probe Sequence
ggggacttggaatcagtcggcagtc

SEQ ID NO: 261776 - DNA, 25 bp, Probe Sequence
ggggagctttggacacaggaccagt

SEQ ID NO: 261777 - DNA, 25 bp, Probe Sequence
ggaggacaagttgaatggacctttt

SEQ ID NO: 261778 - DNA, 25 bp, Probe Sequence
ggaggaccaggtcaagggacgttct

SEQ ID NO: 261779 - DNA, 25 bp, Probe Sequence
ggggatgagggtaggagggacttat

SEQ ID NO: 261780 - DNA, 25 bp, Probe Sequence
ggggcaagggtaggagttccagtag

SEQ ID NO: 261781 - DNA, 25 bp, Probe Sequence
ggggacagcggggagcagattgccg

SEQ ID NO: 261782 - DNA, 25 bp, Probe Sequence
ggggaagacggtgacattgcagggc

SEQ ID NO: 261783 - DNA, 25 bp, Probe Sequence
ggggacaaggtgtgagcctgagccc

SEQ ID NO: 261784 - DNA, 25 bp, Probe Sequence
ggggagctgtggatggaggcttgtc

SEQ ID NO: 261785 - DNA, 25 bp, Probe Sequence
ggggcagggcatactgggaaatgta

SEQ ID NO: 261786 - DNA, 25 bp, Probe Sequence
ggggcagggcatactgggaaatgta

SEQ ID NO: 261787 - DNA, 25 bp, Probe Sequence
ggggcctcatgatcctggatgaagt

SEQ ID NO: 261788 - DNA, 25 bp, Probe Sequence
ggggtcgattactttgattactgcc

SEQ ID NO: 261789 - DNA, 25 bp, Probe Sequence
ggtggtcgtgaagctctttgactct

SEQ ID NO: 261790 - DNA, 25 bp, Probe Sequence
ggggcttgtggggcttagagacatt

SEQ ID NO: 261791 - DNA, 25 bp, Probe Sequence
ggggcagttaaggttggagccatcc

SEQ ID NO: 261792 - DNA, 25 bp, Probe Sequence
ggggcaggctactttttggagcatc

SEQ ID NO: 261793 - DNA, 25 bp, Probe Sequence
ggtggaccaaaaacgtggacatctt

SEQ ID NO: 261794 - DNA, 25 bp, Probe Sequence
ggtggaaaaatcaacgtggcctttg

SEQ ID NO: 261795 - DNA, 25 bp, Probe Sequence
ggctataaaaatgtccttgagtttg

SEQ ID NO: 261796 - DNA, 25 bp, Probe Sequence
ggtaataataatggtaggtaacaat

SEQ ID NO: 261797 - DNA, 25 bp, Probe Sequence
ggcttctagatctggaaccttacca

SEQ ID NO: 261798 - DNA, 25 bp, Probe Sequence
tggcttctagatctggaaccttacc

SEQ ID NO: 261799 - DNA, 25 bp, Probe Sequence
ggggtagtgtatgcagaccttccac

SEQ ID NO: 261800 - DNA, 25 bp, Probe Sequence
ggggtaggagaacagccattccaca

SEQ ID NO: 261801 - DNA, 25 bp, Probe Sequence
ggggtcaaagaaatggcagatgtcc

SEQ ID NO: 261802 - DNA, 25 bp, Probe Sequence
ggggctaaggaaatgcaggcatgat

SEQ ID NO: 261803 - DNA, 25 bp, Probe Sequence
ggggcatcggagaagtgcagctgct

SEQ ID NO: 261804 - DNA, 25 bp, Probe Sequence
ggggagggagatggatgctcagttg

SEQ ID NO: 261805 - DNA, 25 bp, Probe Sequence
ggggagttgttatgccatgattttt

SEQ ID NO: 261806 - DNA, 25 bp, Probe Sequence
ggggagttgttatgccatgattttt

SEQ ID NO: 261807 - DNA, 25 bp, Probe Sequence
ggggtttgtcatcaccatattttct

SEQ ID NO: 261808 - DNA, 25 bp, Probe Sequence
ggggtgatatgtatacttttgcttc

SEQ ID NO: 261809 - DNA, 25 bp, Probe Sequence
ggggtgtggtgactcctttatattc

SEQ ID NO: 261810 - DNA, 25 bp, Probe Sequence
ggggtgttggcattcttgttattta

SEQ ID NO: 261811 - DNA, 25 bp, Probe Sequence
ggggctggtggctttgagattatta

SEQ ID NO: 261812 - DNA, 25 bp, Probe Sequence
ggggctggtggctttgagattatta

SEQ ID NO: 261813 - DNA, 25 bp, Probe Sequence
ggggcaggggatcctcagtatagcc

SEQ ID NO: 261814 - DNA, 25 bp, Probe Sequence
ggtgtggtttatctagttgaggctc

SEQ ID NO: 261815 - DNA, 25 bp, Probe Sequence
ggtggactgtctatatagttatggc

SEQ ID NO: 261816 - DNA, 25 bp, Probe Sequence
ggggatctgccatatttgtgttggt

SEQ ID NO: 261817 - DNA, 25 bp, Probe Sequence
ggggacacctagtttggttgtcatt

SEQ ID NO: 261818 - DNA, 25 bp, Probe Sequence
ggggacccaaggatgaattggctgt

SEQ ID NO: 261819 - DNA, 25 bp, Probe Sequence
ggggacccaaggatgaattggctgt

SEQ ID NO: 261820 - DNA, 25 bp, Probe Sequence
ggggaacaaacgttggttgtgtgtg

SEQ ID NO: 261821 - DNA, 25 bp, Probe Sequence
ggggaaattccgtggaggagcttga

SEQ ID NO: 261822 - DNA, 25 bp, Probe Sequence
ggggaagttctgcggcgacgcagtc

SEQ ID NO: 261823 - DNA, 25 bp, Probe Sequence
ggggcacgtttgaagatgcgagcgc

SEQ ID NO: 261824 - DNA, 25 bp, Probe Sequence
ggggcaaaatggagctcgaggccat

SEQ ID NO: 261825 - DNA, 25 bp, Probe Sequence
ggggaagaagtggccatgcgcaagc

SEQ ID NO: 261826 - DNA, 25 bp, Probe Sequence
ggggctcacaagatcacccagagca

SEQ ID NO: 261827 - DNA, 25 bp, Probe Sequence
ggggcccaatgaataatccgccaga

SEQ ID NO: 261828 - DNA, 25 bp, Probe Sequence
ggggcagataatctataactggcag

SEQ ID NO: 261829 - DNA, 25 bp, Probe Sequence
ggggatatattggtacaacatgact

SEQ ID NO: 261830 - DNA, 25 bp, Probe Sequence
ggggtatatatatccaaatgcctaa

SEQ ID NO: 261831 - DNA, 25 bp, Probe Sequence
ggggtatgattatcaccaagccaaa

SEQ ID NO: 261832 - DNA, 25 bp, Probe Sequence
ggggctatttaaagccaacccatgc

SEQ ID NO: 261833 - DNA, 25 bp, Probe Sequence
ggtggagtttgatctggcagacccg

SEQ ID NO: 261834 - DNA, 25 bp, Probe Sequence
ggtggtcattaagcggagatccggc

SEQ ID NO: 261835 - DNA, 25 bp, Probe Sequence
ggggatgctttagggtgagtctata

SEQ ID NO: 261836 - DNA, 25 bp, Probe Sequence
ggggatcattctctgaatggtctaa

SEQ ID NO: 261837 - DNA, 25 bp, Probe Sequence
ggggaacttcttcatgggtggttca

SEQ ID NO: 261838 - DNA, 25 bp, Probe Sequence
tgtgggtactcttttaggaggagtt

SEQ ID NO: 261839 - DNA, 25 bp, Probe Sequence
ggggtagcatttaagattcaggagt

SEQ ID NO: 261840 - DNA, 25 bp, Probe Sequence
ggggtgatgcatttaaaagggcagt

SEQ ID NO: 261841 - DNA, 25 bp, Probe Sequence
ggggtgaatcaaagcagagagcggc

SEQ ID NO: 261842 - DNA, 25 bp, Probe Sequence
ggggtagatgcctgaagaggagatt

SEQ ID NO: 261843 - DNA, 25 bp, Probe Sequence
ggggcaaggccaaaaagaagaagtg

SEQ ID NO: 261844 - DNA, 25 bp, Probe Sequence
ggggcggaaggatagagaaaagtgg

SEQ ID NO: 261845 - DNA, 25 bp, Probe Sequence
ggggccaaaggtcagtggcaggggg

SEQ ID NO: 261846 - DNA, 25 bp, Probe Sequence
ggggaaaaggagtgcgacgagggtg

SEQ ID NO: 261847 - DNA, 25 bp, Probe Sequence
ggggagaaagggagcgaggtcagag

SEQ ID NO: 261848 - DNA, 25 bp, Probe Sequence
ggggaaataatccttgcagggtaag

SEQ ID NO: 261849 - DNA, 25 bp, Probe Sequence
ggggaaccaagactgtgcaggagaa

SEQ ID NO: 261850 - DNA, 25 bp, Probe Sequence
ggtggggacaaacttggtggaggag

SEQ ID NO: 261851 - DNA, 25 bp, Probe Sequence
ggggcagagtcatacgtgtggccag

SEQ ID NO: 261852 - DNA, 25 bp, Probe Sequence
ggtggcctgagcatctgtatccagg

SEQ ID NO: 261853 - DNA, 25 bp, Probe Sequence
ggtgtcctgaggagtccaaggtgag

SEQ ID NO: 261854 - DNA, 25 bp, Probe Sequence
ggtgttctaacatgggcaagtggaa

SEQ ID NO: 261855 - DNA, 25 bp, Probe Sequence
ggggttagagcccagagcaagatgg

SEQ ID NO: 261856 - DNA, 25 bp, Probe Sequence
ggggtgctggatgagggcaagatga

SEQ ID NO: 261857 - DNA, 25 bp, Probe Sequence
ggggtgatccagaacggcagagaga

SEQ ID NO: 261858 - DNA, 25 bp, Probe Sequence
ggggttcagatgcactgacagtgga

SEQ ID NO: 261859 - DNA, 25 bp, Probe Sequence
ggggtccagatggcaagacacatgg

SEQ ID NO: 261860 - DNA, 25 bp, Probe Sequence
ggtggtcatcaagcacaaccggttc

SEQ ID NO: 261861 - DNA, 25 bp, Probe Sequence
ggtggaaatttcggaccaggaccag

SEQ ID NO: 261862 - DNA, 25 bp, Probe Sequence
ggggacttttagagccagcaggccc

SEQ ID NO: 261863 - DNA, 25 bp, Probe Sequence
ggggatattatgaagggccttgagc

SEQ ID NO: 261864 - DNA, 25 bp, Probe Sequence
ggggtgtttacgagcagctgtgagt

SEQ ID NO: 261865 - DNA, 25 bp, Probe Sequence
ggggaccttaagaagctgattgcag

SEQ ID NO: 261866 - DNA, 25 bp, Probe Sequence
ggggagtttatagttctgatgtctt

SEQ ID NO: 261867 - DNA, 25 bp, Probe Sequence
ggggatgattcttaccttggtaatt

SEQ ID NO: 261868 - DNA, 25 bp, Probe Sequence
ggggatgagatttgctgggctggta

SEQ ID NO: 261869 - DNA, 25 bp, Probe Sequence
ggtgttagctttctgggtgtacgga

SEQ ID NO: 261870 - DNA, 25 bp, Probe Sequence
ggtgttaggtatccaggaggcccag

SEQ ID NO: 261871 - DNA, 25 bp, Probe Sequence
ggggtaggatgaagagaaggcacac

SEQ ID NO: 261872 - DNA, 25 bp, Probe Sequence
ggggtcggcataggagatcgcttca

SEQ ID NO: 261873 - DNA, 25 bp, Probe Sequence
ggggttggtagggcagctggtagag

SEQ ID NO: 261874 - DNA, 25 bp, Probe Sequence
ggggtagaggagggcatgggaggga

SEQ ID NO: 261875 - DNA, 25 bp, Probe Sequence
ggggtgctgggaggagggagaggga

SEQ ID NO: 261876 - DNA, 25 bp, Probe Sequence
ggggtcaggccagatggggcaggaa

SEQ ID NO: 261877 - DNA, 25 bp, Probe Sequence
ggggtcggctaagtgggacattagt

SEQ ID NO: 261878 - DNA, 25 bp, Probe Sequence
ggggttgctcatgactgggatgtta

SEQ ID NO: 261879 - DNA, 25 bp, Probe Sequence
ggggatgtgtgcagacagggctgtg

SEQ ID NO: 261880 - DNA, 25 bp, Probe Sequence
ggggaagaatctacagttgctgatg

SEQ ID NO: 261881 - DNA, 25 bp, Probe Sequence
ggggttgaatctccagtgatctgta

SEQ ID NO: 261882 - DNA, 25 bp, Probe Sequence
ggtgggaaacccttatcttgcaaag

SEQ ID NO: 261883 - DNA, 25 bp, Probe Sequence
ggatcaggagacacctgtatttggg

SEQ ID NO: 261884 - DNA, 25 bp, Probe Sequence
ggatggggacttgtgaatttttcta

SEQ ID NO: 261885 - DNA, 25 bp, Probe Sequence
ggttgtggaaaccagaacttcgcct

SEQ ID NO: 261886 - DNA, 25 bp, Probe Sequence
ggttgtggaaaccagaacttcgcct

SEQ ID NO: 261887 - DNA, 25 bp, Probe Sequence
ggtgttgacaggtttgaacttgcac

SEQ ID NO: 261888 - DNA, 25 bp, Probe Sequence
ggtgtggatcgtcatgtatacttac

SEQ ID NO: 261889 - DNA, 25 bp, Probe Sequence
ggggagcatcattctgttatacttc

SEQ ID NO: 261890 - DNA, 25 bp, Probe Sequence
ggggcagtagtcattgcatgtctcc

SEQ ID NO: 261891 - DNA, 25 bp, Probe Sequence
ggggcagtagtcatggcagactccc

SEQ ID NO: 261892 - DNA, 25 bp, Probe Sequence
ggggcagccaccatcaagaagcccc

SEQ ID NO: 261893 - DNA, 25 bp, Probe Sequence
ggggaccacacagtagactatccct

SEQ ID NO: 261894 - DNA, 25 bp, Probe Sequence
ggggcagtacaaggagagcttcgcc

SEQ ID NO: 261895 - DNA, 25 bp, Probe Sequence
ggggaaaaatgtaagcctccctgtg

SEQ ID NO: 261896 - DNA, 25 bp, Probe Sequence
ggggaaaatattcagctctgccaca

SEQ ID NO: 261897 - DNA, 25 bp, Probe Sequence
ggggaataattcctaacacttcatt

SEQ ID NO: 261898 - DNA, 25 bp, Probe Sequence
ggtgacaacaaaagtcaaccgtcat

SEQ ID NO: 261899 - DNA, 25 bp, Probe Sequence
ggggaacaagatcggcaagccccac

SEQ ID NO: 261900 - DNA, 25 bp, Probe Sequence
ggggagtccaggggaacatcccaga

SEQ ID NO: 261901 - DNA, 25 bp, Probe Sequence
ggtgacagtcacggaggataagatc

SEQ ID NO: 261902 - DNA, 25 bp, Probe Sequence
ggggagatcatcgggggacatgagg

SEQ ID NO: 261903 - DNA, 25 bp, Probe Sequence
ggggatgtgcttggagaggcagata

SEQ ID NO: 261904 - DNA, 25 bp, Probe Sequence
ggggatgtggctggagcatgagcca

SEQ ID NO: 261905 - DNA, 25 bp, Probe Sequence
ggggagtctgtgaagcatatgtagt

SEQ ID NO: 261906 - DNA, 25 bp, Probe Sequence
ggggaggctgtgagagagggcttgt

SEQ ID NO: 261907 - DNA, 25 bp, Probe Sequence
ggggcagccaggaaaggcgatctct

SEQ ID NO: 261908 - DNA, 25 bp, Probe Sequence
ggggtctggggaaggcaatctgatt

SEQ ID NO: 261909 - DNA, 25 bp, Probe Sequence
ggtgtcctggggatgtgaaggagtt

SEQ ID NO: 261910 - DNA, 25 bp, Probe Sequence
ggtgtcgtggtggtcattaagcgga

SEQ ID NO: 261911 - DNA, 25 bp, Probe Sequence
ggtgtcagtggtaccatcttcaagg

SEQ ID NO: 261912 - DNA, 25 bp, Probe Sequence
ggttattagggcccattagaaacag

SEQ ID NO: 261913 - DNA, 25 bp, Probe Sequence
ggggaataggagctcttaaataatg

SEQ ID NO: 261914 - DNA, 25 bp, Probe Sequence
ggggaataggagattagagaaatat

SEQ ID NO: 261915 - DNA, 25 bp, Probe Sequence
ggggaaagggctagcgaagaggtga

SEQ ID NO: 261916 - DNA, 25 bp, Probe Sequence
ggggtcaggggaaggtagagctgga

SEQ ID NO: 261917 - DNA, 25 bp, Probe Sequence
ggtagttggcgaggggtaggatggg

SEQ ID NO: 261918 - DNA, 25 bp, Probe Sequence
ggtgatttggggtaattgggatagg

SEQ ID NO: 261919 - DNA, 25 bp, Probe Sequence
ggtgtttggggatggagcggcagca

SEQ ID NO: 261920 - DNA, 25 bp, Probe Sequence
ggtgtgtttgcgtagccttagggaa

SEQ ID NO: 261921 - DNA, 25 bp, Probe Sequence
ggtgtttggcaaagttctagagggc

SEQ ID NO: 261922 - DNA, 25 bp, Probe Sequence
ggtgtagatccatatttcggaggtc

SEQ ID NO: 261923 - DNA, 25 bp, Probe Sequence
ggtgtaatcagagcttcatccggga

SEQ ID NO: 261924 - DNA, 25 bp, Probe Sequence
ggtgatattatgacactgatactgc

SEQ ID NO: 261925 - DNA, 25 bp, Probe Sequence
ggtgtttaccatgcatacttaatca

SEQ ID NO: 261926 - DNA, 25 bp, Probe Sequence
ggtgacttacgaaagtctaacatca

SEQ ID NO: 261927 - DNA, 25 bp, Probe Sequence
ggggctgtcacaaaagtcaaagacc

SEQ ID NO: 261928 - DNA, 25 bp, Probe Sequence
ggtggcttagaaacagcggaaacct

SEQ ID NO: 261929 - DNA, 25 bp, Probe Sequence
ggtgtttaatcaacaggaggaacct

SEQ ID NO: 261930 - DNA, 25 bp, Probe Sequence
ggtgtttacacaagggtgtcaaact

SEQ ID NO: 261931 - DNA, 25 bp, Probe Sequence
ggtgtcccacacaagtgtgaccaat

SEQ ID NO: 261932 - DNA, 25 bp, Probe Sequence
ggtctaccccacatgggagcagcat

SEQ ID NO: 261933 - DNA, 25 bp, Probe Sequence
ggtctaagaccaaggaagcacgcaa

SEQ ID NO: 261934 - DNA, 25 bp, Probe Sequence
ggtggaagtccaagtcaaacgcaga

SEQ ID NO: 261935 - DNA, 25 bp, Probe Sequence
ggggaagaatctgtcatgaatcttg

SEQ ID NO: 261936 - DNA, 25 bp, Probe Sequence
ggggaagaatccaactgatgagtat

SEQ ID NO: 261937 - DNA, 25 bp, Probe Sequence
ggggaagaaaatccatgacatgtga

SEQ ID NO: 261938 - DNA, 25 bp, Probe Sequence
ggggaggatcaagtccagcacatgg

SEQ ID NO: 261939 - DNA, 25 bp, Probe Sequence
ggggcaagataacctctcaagtgtg

SEQ ID NO: 261940 - DNA, 25 bp, Probe Sequence
ggggccagaccacatgggagtgggc

SEQ ID NO: 261941 - DNA, 25 bp, Probe Sequence
ggggaagactatcaggaaggcaagc

SEQ ID NO: 261942 - DNA, 25 bp, Probe Sequence
ggggaagcattaaaggactgactga

SEQ ID NO: 261943 - DNA, 25 bp, Probe Sequence
ggggaacatcccagaatgcatatcg

SEQ ID NO: 261944 - DNA, 25 bp, Probe Sequence
ggggatatcacactcctgaatacat

SEQ ID NO: 261945 - DNA, 25 bp, Probe Sequence
ggggaaccatgccattagaactgaa

SEQ ID NO: 261946 - DNA, 25 bp, Probe Sequence
ggggaagcccccaagagatgaggac

SEQ ID NO: 261947 - DNA, 25 bp, Probe Sequence
ggggaaccccaagagtgatgagatg

SEQ ID NO: 261948 - DNA, 25 bp, Probe Sequence
ggggaaccccaagagtgatgagatg

SEQ ID NO: 261949 - DNA, 25 bp, Probe Sequence
ggggatattcccacaaggatgaggt

SEQ ID NO: 261950 - DNA, 25 bp, Probe Sequence
ggtggaaatactgccaaggctgggg

SEQ ID NO: 261951 - DNA, 25 bp, Probe Sequence
ggtgcgagttacaccaaccaggaca

SEQ ID NO: 261952 - DNA, 25 bp, Probe Sequence
ggtgggtgtcaccggaaccggattg

SEQ ID NO: 261953 - DNA, 25 bp, Probe Sequence
ggggcagtgtcagcgaggaagcgag

SEQ ID NO: 261954 - DNA, 25 bp, Probe Sequence
ggggcagtgtcagcgaggaagcgag

SEQ ID NO: 261955 - DNA, 25 bp, Probe Sequence
ggggcagcgtcaccaaaaagcgcaa

SEQ ID NO: 261956 - DNA, 25 bp, Probe Sequence
ggggctgcagaacaaatcaagcaca

SEQ ID NO: 261957 - DNA, 25 bp, Probe Sequence
ggggagcagagacactaacgacttc

SEQ ID NO: 261958 - DNA, 25 bp, Probe Sequence
ggggaatgtgaccctgaaggagctg

SEQ ID NO: 261959 - DNA, 25 bp, Probe Sequence
ggtggagtggacgcatgtcagggtg

SEQ ID NO: 261960 - DNA, 25 bp, Probe Sequence
ggtgaggtggactgcattacagggg

SEQ ID NO: 261961 - DNA, 25 bp, Probe Sequence
ggtggggaacatcacacactggggc

SEQ ID NO: 261962 - DNA, 25 bp, Probe Sequence
ggtggagcaaacacaacctctggtc

SEQ ID NO: 261963 - DNA, 25 bp, Probe Sequence
ggtggacaaaagcaaccctacctca

SEQ ID NO: 261964 - DNA, 25 bp, Probe Sequence
ggtgcggacgaacaaaccatatcca

SEQ ID NO: 261965 - DNA, 25 bp, Probe Sequence
ggggctttgaaataacaccaccagt

SEQ ID NO: 261966 - DNA, 25 bp, Probe Sequence
ggggctttcttgaaagacagtccaa

SEQ ID NO: 261967 - DNA, 25 bp, Probe Sequence
ggggatctatttctagtgaaccaca

SEQ ID NO: 261968 - DNA, 25 bp, Probe Sequence
ggggatttattctaagagaagtgca

SEQ ID NO: 261969 - DNA, 25 bp, Probe Sequence
ggggctgttatggcaagtggggctg

SEQ ID NO: 261970 - DNA, 25 bp, Probe Sequence
ggggctatattggcgagggcgacat

SEQ ID NO: 261971 - DNA, 25 bp, Probe Sequence
ggggcttaccaggctgggcgaatag

SEQ ID NO: 261972 - DNA, 25 bp, Probe Sequence
ggggctttccagggaatgaagaagc

SEQ ID NO: 261973 - DNA, 25 bp, Probe Sequence
ggtggttccccctaagatatatatc

SEQ ID NO: 261974 - DNA, 25 bp, Probe Sequence
ggtgttcttcaagaaagtttctcaa

SEQ ID NO: 261975 - DNA, 25 bp, Probe Sequence
ggtgttattaccaaaggtactgtca

SEQ ID NO: 261976 - DNA, 25 bp, Probe Sequence
ggtggtacttacgaaggatattaat

SEQ ID NO: 261977 - DNA, 25 bp, Probe Sequence
ggtggttcgtagggaaattgattat

SEQ ID NO: 261978 - DNA, 25 bp, Probe Sequence
ggtggttcgaatttacattttggtg

SEQ ID NO: 261979 - DNA, 25 bp, Probe Sequence
ggtgccttcaaaaaatcctttggat

SEQ ID NO: 261980 - DNA, 25 bp, Probe Sequence
ggtccgtcaagcctaagtccttgag

SEQ ID NO: 261981 - DNA, 25 bp, Probe Sequence
ggtggctctacagttaagatccatt

SEQ ID NO: 261982 - DNA, 25 bp, Probe Sequence
ggtggcctatgaaggacaatcctgg

SEQ ID NO: 261983 - DNA, 25 bp, Probe Sequence
ggtgccacataaaggctcaacagat

SEQ ID NO: 261984 - DNA, 25 bp, Probe Sequence
ggtgtacatcatacaggcctgtcga

SEQ ID NO: 261985 - DNA, 25 bp, Probe Sequence
ggtgattcagctacttgaggtcggt

SEQ ID NO: 261986 - DNA, 25 bp, Probe Sequence
ggtgattcagctacttgaggtcggt

SEQ ID NO: 261987 - DNA, 25 bp, Probe Sequence
ggtgttctgcatttgaggtgtagtg

SEQ ID NO: 261988 - DNA, 25 bp, Probe Sequence
ggtggcagcagaagtaggcgtatgg

SEQ ID NO: 261989 - DNA, 25 bp, Probe Sequence
ggggagcaagggtagccaatggcag

SEQ ID NO: 261990 - DNA, 25 bp, Probe Sequence
ggggcacaagagcaaagagatgggc

SEQ ID NO: 261991 - DNA, 25 bp, Probe Sequence
ggtcacccagacacaaagatgggta

SEQ ID NO: 261992 - DNA, 25 bp, Probe Sequence
ggtaccacacgtccaaagttagatt

SEQ ID NO: 261993 - DNA, 25 bp, Probe Sequence
ggtggtcccggtggaatgttcagag

SEQ ID NO: 261994 - DNA, 25 bp, Probe Sequence
ggggaccaaggtgcacatgaaatgc

SEQ ID NO: 261995 - DNA, 25 bp, Probe Sequence
ggggaccaaggcatactgaacacat

SEQ ID NO: 261996 - DNA, 25 bp, Probe Sequence
ggggaccaaggcatactgaacacat

SEQ ID NO: 261997 - DNA, 25 bp, Probe Sequence
ggggaccaaggcatactgaacacat

SEQ ID NO: 261998 - DNA, 25 bp, Probe Sequence
ggacgacaaaggacagactagtaca

SEQ ID NO: 261999 - DNA, 25 bp, Probe Sequence
ggggacaaagcgagactctgtctca

SEQ ID NO: 262000 - DNA, 25 bp, Probe Sequence
ggtggaccaaggagatggcagctca

SEQ ID NO: 262001 - DNA, 25 bp, Probe Sequence
ggggatggaaatgtgtggcatgcac

SEQ ID NO: 262002 - DNA, 25 bp, Probe Sequence
ggggaggaagaggaggaggaagaag

SEQ ID NO: 262003 - DNA, 25 bp, Probe Sequence
ggggaggctgaagcaggaggatcac

SEQ ID NO: 262004 - DNA, 25 bp, Probe Sequence
ggggaggggaatgggcaggcaagcc

SEQ ID NO: 262005 - DNA, 25 bp, Probe Sequence
ggggaggagagaggtaggagctgga

SEQ ID NO: 262006 - DNA, 25 bp, Probe Sequence
ggggaggaagcttttgaggatgagg

SEQ ID NO: 262007 - DNA, 25 bp, Probe Sequence
ggggcagcgatagactctggggatg

SEQ ID NO: 262008 - DNA, 25 bp, Probe Sequence
ggggctggagacgacgaggaggagg

SEQ ID NO: 262009 - DNA, 25 bp, Probe Sequence
ggggctgagcccggctgataaagca

SEQ ID NO: 262010 - DNA, 25 bp, Probe Sequence
ggggaagcactcgtgtgcaacagac

SEQ ID NO: 262011 - DNA, 25 bp, Probe Sequence
ggggaagcttccatgatgcacagta

SEQ ID NO: 262012 - DNA, 25 bp, Probe Sequence
ggggattctctagagatccagtgac

SEQ ID NO: 262013 - DNA, 25 bp, Probe Sequence
ggggagtgcctgttaatacagatgc

SEQ ID NO: 262014 - DNA, 25 bp, Probe Sequence
ggtggagcgcctgaaatcacatcgg

SEQ ID NO: 262015 - DNA, 25 bp, Probe Sequence
ggtgtgacgcctgtatattccagtt

SEQ ID NO: 262016 - DNA, 25 bp, Probe Sequence
ggggagctacatgtgtcaatgccgt

SEQ ID NO: 262017 - DNA, 25 bp, Probe Sequence
ggggagctcttggatatcattggcc

SEQ ID NO: 262018 - DNA, 25 bp, Probe Sequence
ggggagctcttggatatcattggcc

SEQ ID NO: 262019 - DNA, 25 bp, Probe Sequence
ggggagctcttggatatcattggcc

SEQ ID NO: 262020 - DNA, 25 bp, Probe Sequence
ggggatgcctgtgacaactgtcccc

SEQ ID NO: 262021 - DNA, 25 bp, Probe Sequence
ggggctgaatgggcaaatctgtcca

SEQ ID NO: 262022 - DNA, 25 bp, Probe Sequence
ggggagaggcgatgctattggccat

SEQ ID NO: 262023 - DNA, 25 bp, Probe Sequence
ggtgaggcaagggagcataatagca

SEQ ID NO: 262024 - DNA, 25 bp, Probe Sequence
ggtgggaggttctataataagccat

SEQ ID NO: 262025 - DNA, 25 bp, Probe Sequence
ggtggtgaatgtgactaagaagcct

SEQ ID NO: 262026 - DNA, 25 bp, Probe Sequence
ggggaagatggccaaaacacagcct

SEQ ID NO: 262027 - DNA, 25 bp, Probe Sequence
ggggacaggacagaaagcctgcact

SEQ ID NO: 262028 - DNA, 25 bp, Probe Sequence
ggggaatgtccagcatcaaccccta

SEQ ID NO: 262029 - DNA, 25 bp, Probe Sequence
ggtggttgtggagttgacacccctg

SEQ ID NO: 262030 - DNA, 25 bp, Probe Sequence
ggtgtgtgtattagaatcccttcct

SEQ ID NO: 262031 - DNA, 25 bp, Probe Sequence
ggtttaattttatgctttccctgat

SEQ ID NO: 262032 - DNA, 25 bp, Probe Sequence
ggtttagtatttttgcctgttagtg

SEQ ID NO: 262033 - DNA, 25 bp, Probe Sequence
ggtgtttgtttttggtcctgataag

SEQ ID NO: 262034 - DNA, 25 bp, Probe Sequence
ggggctcagagtgttgtactcgtaa

SEQ ID NO: 262035 - DNA, 25 bp, Probe Sequence
ggggctcagagtgttgtactcgtaa

SEQ ID NO: 262036 - DNA, 25 bp, Probe Sequence
ggaggctaagtgtggtacagggagt

SEQ ID NO: 262037 - DNA, 25 bp, Probe Sequence
ggggcttagtgtctggacagggaca

SEQ ID NO: 262038 - DNA, 25 bp, Probe Sequence
ggtggttatggtcctagaggtggca

SEQ ID NO: 262039 - DNA, 25 bp, Probe Sequence
ggtggtcttggacaaagggagcgta

SEQ ID NO: 262040 - DNA, 25 bp, Probe Sequence
ggtggctgttggtcaggacgggaag

SEQ ID NO: 262041 - DNA, 25 bp, Probe Sequence
ggggcttgtggaggcagcaggtgaa

SEQ ID NO: 262042 - DNA, 25 bp, Probe Sequence
ggggcttgtggaggcagcaggtgaa

SEQ ID NO: 262043 - DNA, 25 bp, Probe Sequence
ggggctgttgagatgcctgttgaag

SEQ ID NO: 262044 - DNA, 25 bp, Probe Sequence
ggggagtgaaggcctcgttgagaga

SEQ ID NO: 262045 - DNA, 25 bp, Probe Sequence
ggcggacaagcatggttttaggcag

SEQ ID NO: 262046 - DNA, 25 bp, Probe Sequence
ggggacaacttgtatctttctagca

SEQ ID NO: 262047 - DNA, 25 bp, Probe Sequence
ggggaaacgtgtactgattgcagcc

SEQ ID NO: 262048 - DNA, 25 bp, Probe Sequence
ggggagaccaatccagcagattcaa

SEQ ID NO: 262049 - DNA, 25 bp, Probe Sequence
ggggaggagcaatagagatatcgat

SEQ ID NO: 262050 - DNA, 25 bp, Probe Sequence
ggggcggagcagacacagactatgc

SEQ ID NO: 262051 - DNA, 25 bp, Probe Sequence
ggggcgtgggtcaaatcatagccaa

SEQ ID NO: 262052 - DNA, 25 bp, Probe Sequence
ggggcgggtgtatgatgacctcaag

SEQ ID NO: 262053 - DNA, 25 bp, Probe Sequence
ggtggcctgggtttaatactcaaga

SEQ ID NO: 262054 - DNA, 25 bp, Probe Sequence
ggggagaggcttttataacaataga

SEQ ID NO: 262055 - DNA, 25 bp, Probe Sequence
ggggagtggttaattgaaatagtca

SEQ ID NO: 262056 - DNA, 25 bp, Probe Sequence
ggggagtggtctatgtggccaaata

SEQ ID NO: 262057 - DNA, 25 bp, Probe Sequence
ggggcagagtgtgcttggagtcaga

SEQ ID NO: 262058 - DNA, 25 bp, Probe Sequence
ggggactgtgctacttggcagtaca

SEQ ID NO: 262059 - DNA, 25 bp, Probe Sequence
ggggcctcgctaattgaatgtggaa

SEQ ID NO: 262060 - DNA, 25 bp, Probe Sequence
ggggcctgagagattatagtgagaa

SEQ ID NO: 262061 - DNA, 25 bp, Probe Sequence
ggggctcctggcatgaacatgtgaa

SEQ ID NO: 262062 - DNA, 25 bp, Probe Sequence
ggggcttctatgggatcctggaagt

SEQ ID NO: 262063 - DNA, 25 bp, Probe Sequence
ggggcttctgaaatgacctggtatt

SEQ ID NO: 262064 - DNA, 25 bp, Probe Sequence
ggtggcttgctgattttctttatct

SEQ ID NO: 262065 - DNA, 25 bp, Probe Sequence
ggtggcttggttactgtgactgtag

SEQ ID NO: 262066 - DNA, 25 bp, Probe Sequence
ggggcttattgcaagcttgacgggt

SEQ ID NO: 262067 - DNA, 25 bp, Probe Sequence
ggggcagtattgacagtggcccagc

SEQ ID NO: 262068 - DNA, 25 bp, Probe Sequence
ggggcagatgtttagggacattgca

SEQ ID NO: 262069 - DNA, 25 bp, Probe Sequence
ggggcagatggatcagtgtactgtc

SEQ ID NO: 262070 - DNA, 25 bp, Probe Sequence
ggggctgtgcgagagcagcgacttc

SEQ ID NO: 262071 - DNA, 25 bp, Probe Sequence
ggtggtggagacaactgccacttgc

SEQ ID NO: 262072 - DNA, 25 bp, Probe Sequence
ggtggagtgagaagtctccgctgct

SEQ ID NO: 262073 - DNA, 25 bp, Probe Sequence
ggggagaaatcatctcccagcaata

SEQ ID NO: 262074 - DNA, 25 bp, Probe Sequence
ggggagaagctgaaacgccagaaat

SEQ ID NO: 262075 - DNA, 25 bp, Probe Sequence
ggggagttgctggaagccatcaaac

SEQ ID NO: 262076 - DNA, 25 bp, Probe Sequence
ggggaatctgcaacaacaaacaaca

SEQ ID NO: 262077 - DNA, 25 bp, Probe Sequence
ggggcagacgcaaagtgaaataaac

SEQ ID NO: 262078 - DNA, 25 bp, Probe Sequence
ggggagccacaaatcttcaataaac

SEQ ID NO: 262079 - DNA, 25 bp, Probe Sequence
ggggagccacaaatcttcaataaac

SEQ ID NO: 262080 - DNA, 25 bp, Probe Sequence
ggggagacaccaatttctatggcaa

SEQ ID NO: 262081 - DNA, 25 bp, Probe Sequence
ggggacacaggcaaattatatcagc

SEQ ID NO: 262082 - DNA, 25 bp, Probe Sequence
ggggactcaggcaaccaaatacaat

SEQ ID NO: 262083 - DNA, 25 bp, Probe Sequence
ggggagccatggactctcaattaca

SEQ ID NO: 262084 - DNA, 25 bp, Probe Sequence
ggggaactttgccagcattgatgaa

SEQ ID NO: 262085 - DNA, 25 bp, Probe Sequence
ggggaatctaagcacaatgcattca

SEQ ID NO: 262086 - DNA, 25 bp, Probe Sequence
ggggagttaatgcatctacaccact

SEQ ID NO: 262087 - DNA, 25 bp, Probe Sequence
ggggaagtacatcattgaactcaac

SEQ ID NO: 262088 - DNA, 25 bp, Probe Sequence
ggggaatttgcactattacacttga

SEQ ID NO: 262089 - DNA, 25 bp, Probe Sequence
ggggcaattaagtcaaatagcttga

SEQ ID NO: 262090 - DNA, 25 bp, Probe Sequence
ggggacattaaggagcctggtctgc

SEQ ID NO: 262091 - DNA, 25 bp, Probe Sequence
ggggaagttacaggcctgagtgtga

SEQ ID NO: 262092 - DNA, 25 bp, Probe Sequence
ggggacagttaagtgggcagtattt

SEQ ID NO: 262093 - DNA, 25 bp, Probe Sequence
ggggccatattagcagcggttattc

SEQ ID NO: 262094 - DNA, 25 bp, Probe Sequence
ggggactaagagacaggacgtagct

SEQ ID NO: 262095 - DNA, 25 bp, Probe Sequence
ggggaaaatgagaagaccgtgagtt

SEQ ID NO: 262096 - DNA, 25 bp, Probe Sequence
ggggaaatgctgggcaatgctcggg

SEQ ID NO: 262097 - DNA, 25 bp, Probe Sequence
ggggcgactggaggaagccaggcga

SEQ ID NO: 262098 - DNA, 25 bp, Probe Sequence
ggggccgcatgtccatgaaggaggt

SEQ ID NO: 262099 - DNA, 25 bp, Probe Sequence
ggggccgcatgtccatgaaggaggt

SEQ ID NO: 262100 - DNA, 25 bp, Probe Sequence
ggggcacctgcgcagatagagacaa

SEQ ID NO: 262101 - DNA, 25 bp, Probe Sequence
ggggaatctctgtgatagtaataga

SEQ ID NO: 262102 - DNA, 25 bp, Probe Sequence
ggggcaaccttggtgtgtaccagga

SEQ ID NO: 262103 - DNA, 25 bp, Probe Sequence
ggggccacttggatgagaacgtgag

SEQ ID NO: 262104 - DNA, 25 bp, Probe Sequence
ggtcagccacctcagtaaaactgga

SEQ ID NO: 262105 - DNA, 25 bp, Probe Sequence
ggtggccaccactgtttagaatgac

SEQ ID NO: 262106 - DNA, 25 bp, Probe Sequence
ggggcacatgccttggatttgaaga

SEQ ID NO: 262107 - DNA, 25 bp, Probe Sequence
ggggacctactggatgatgatgata

SEQ ID NO: 262108 - DNA, 25 bp, Probe Sequence
ggtggccccactgatatatgcaaac

SEQ ID NO: 262109 - DNA, 25 bp, Probe Sequence
ggtggctaacctgaccataaagtta

SEQ ID NO: 262110 - DNA, 25 bp, Probe Sequence
ggtggctaacctgaccaataaagtt

SEQ ID NO: 262111 - DNA, 25 bp, Probe Sequence
ggtggttaatctgacatacattgca

SEQ ID NO: 262112 - DNA, 25 bp, Probe Sequence
ggtggttaatgtggacggttatgac

SEQ ID NO: 262113 - DNA, 25 bp, Probe Sequence
ggtgggatcaatcttaggaaaagca

SEQ ID NO: 262114 - DNA, 25 bp, Probe Sequence
ggtggagaccatctccaaggaactg

SEQ ID NO: 262115 - DNA, 25 bp, Probe Sequence
ggggaaggagcatcttaggaactgc

SEQ ID NO: 262116 - DNA, 25 bp, Probe Sequence
ggggaaggaaaaatcgctgctacag

SEQ ID NO: 262117 - DNA, 25 bp, Probe Sequence
ggggaagggaagtgcgctggagaaa

SEQ ID NO: 262118 - DNA, 25 bp, Probe Sequence
ggggctagaggagggtgctgtggta

SEQ ID NO: 262119 - DNA, 25 bp, Probe Sequence
ggggctagaggagggtgctgtggta

SEQ ID NO: 262120 - DNA, 25 bp, Probe Sequence
ggggctgacaggtgagcttggtctg

SEQ ID NO: 262121 - DNA, 25 bp, Probe Sequence
ggggctgcatcaccatcataggtgg

SEQ ID NO: 262122 - DNA, 25 bp, Probe Sequence
ggggcagcaagcatctatgctgcca

SEQ ID NO: 262123 - DNA, 25 bp, Probe Sequence
ggggccagaattcgtgcatgcccac

SEQ ID NO: 262124 - DNA, 25 bp, Probe Sequence
ggggcacactacagagcagctcccc

SEQ ID NO: 262125 - DNA, 25 bp, Probe Sequence
ggggcagagccaggaagatccccca

SEQ ID NO: 262126 - DNA, 25 bp, Probe Sequence
ggtgccgagctataaacctccagaa

SEQ ID NO: 262127 - DNA, 25 bp, Probe Sequence
tggtgcctcctacaaacgggcagaa

SEQ ID NO: 262128 - DNA, 25 bp, Probe Sequence
ggccccctaaagacctgggctacat

SEQ ID NO: 262129 - DNA, 25 bp, Probe Sequence
ggcgcccagtaacctttggaaacat

SEQ ID NO: 262130 - DNA, 25 bp, Probe Sequence
tagccgggttgtatttggaaacgcg

SEQ ID NO: 262131 - DNA, 25 bp, Probe Sequence
ggtcgggtttctattgggaatgctc

SEQ ID NO: 262132 - DNA, 25 bp, Probe Sequence
ggtgcggagtttttcgtggatccag

SEQ ID NO: 262133 - DNA, 25 bp, Probe Sequence
ggggacagctttttgcagtggactc

SEQ ID NO: 262134 - DNA, 25 bp, Probe Sequence
ggggaagtgcttaggtgtggagcta

SEQ ID NO: 262135 - DNA, 25 bp, Probe Sequence
ggggaacgtgtcagagggagctggt

SEQ ID NO: 262136 - DNA, 25 bp, Probe Sequence
ggggcaagcggaaaagggtgtctgt

SEQ ID NO: 262137 - DNA, 25 bp, Probe Sequence
ggggcaactccagaagtggagtttt

SEQ ID NO: 262138 - DNA, 25 bp, Probe Sequence
ggggaacccacggagtgctggtggg

SEQ ID NO: 262139 - DNA, 25 bp, Probe Sequence
tgagtgaaaccatcccggggtggaa

SEQ ID NO: 262140 - DNA, 25 bp, Probe Sequence
ggtacagagagatccccgaggggaa

SEQ ID NO: 262141 - DNA, 25 bp, Probe Sequence
ggcgacaagaagagcccgaccaggc

SEQ ID NO: 262142 - DNA, 25 bp, Probe Sequence
ggagtaaatggttggctctacgggc

SEQ ID NO: 262143 - DNA, 25 bp, Probe Sequence
ggagtcaaattgggtatccctggtc

SEQ ID NO: 262144 - DNA, 25 bp, Probe Sequence
ggtgtatggattggggatgccccgc

SEQ ID NO: 262145 - DNA, 25 bp, Probe Sequence
ggtgtcatggctattgagcatgcag

SEQ ID NO: 262146 - DNA, 25 bp, Probe Sequence
ggtgtctactgcttcagagcataca

SEQ ID NO: 262147 - DNA, 25 bp, Probe Sequence
ggtgttatctctgatggcaactcct

SEQ ID NO: 262148 - DNA, 25 bp, Probe Sequence
ggtgtgtattctcatgtggtttgca

SEQ ID NO: 262149 - DNA, 25 bp, Probe Sequence
ggggctgttcatattatgattcaga

SEQ ID NO: 262150 - DNA, 25 bp, Probe Sequence
ggggctgtatctctaatgaaccatg

SEQ ID NO: 262151 - DNA, 25 bp, Probe Sequence
ggggctgtatctctaatgaaccatg

SEQ ID NO: 262152 - DNA, 25 bp, Probe Sequence
ggtggtatgttcctaatgatattat

SEQ ID NO: 262153 - DNA, 25 bp, Probe Sequence
ggtggattgttctagtactgtattg

SEQ ID NO: 262154 - DNA, 25 bp, Probe Sequence
ggggaatgctgtcgggactgagcag

SEQ ID NO: 262155 - DNA, 25 bp, Probe Sequence
ggggaagtgctcaagacctacaatg

SEQ ID NO: 262156 - DNA, 25 bp, Probe Sequence
ggggaagtgctcaagacctacaatg

SEQ ID NO: 262157 - DNA, 25 bp, Probe Sequence
tggaggaggagcaggggcgtggagg

SEQ ID NO: 262158 - DNA, 25 bp, Probe Sequence
ggggacagtgataggcccaaggtcc

SEQ ID NO: 262159 - DNA, 25 bp, Probe Sequence
ggtggacaagtatgacccaggtgct

SEQ ID NO: 262160 - DNA, 25 bp, Probe Sequence
ggtggacaaggcaagcgtccggcat

SEQ ID NO: 262161 - DNA, 25 bp, Probe Sequence
ggtggacaagtccacgtggctgctc

SEQ ID NO: 262162 - DNA, 25 bp, Probe Sequence
ggtggacaaagtacttggtttgcta

SEQ ID NO: 262163 - DNA, 25 bp, Probe Sequence
ggggcacaactgttttctgtttgct

SEQ ID NO: 262164 - DNA, 25 bp, Probe Sequence
ggtggcatgcaacagcatttttttg

SEQ ID NO: 262165 - DNA, 25 bp, Probe Sequence
ggtggctctatttgttctgatatct

SEQ ID NO: 262166 - DNA, 25 bp, Probe Sequence
ggggctcatctcatgtaggcagagt

SEQ ID NO: 262167 - DNA, 25 bp, Probe Sequence
ggggcatatgccaaggcaggagtgt

SEQ ID NO: 262168 - DNA, 25 bp, Probe Sequence
ggggcagatcacagatggcatggtc

SEQ ID NO: 262169 - DNA, 25 bp, Probe Sequence
ggggcaggagcatgatgagctgagc

SEQ ID NO: 262170 - DNA, 25 bp, Probe Sequence
ggtggcattctggacatgaggagca

SEQ ID NO: 262171 - DNA, 25 bp, Probe Sequence
ggtggcaccagcgaagggagtgcga

SEQ ID NO: 262172 - DNA, 25 bp, Probe Sequence
ggtggactgagtggtgcgaggtgga

SEQ ID NO: 262173 - DNA, 25 bp, Probe Sequence
ggggcactgaccatgctgagtgaaa

SEQ ID NO: 262174 - DNA, 25 bp, Probe Sequence
ggggcatatacactacttggaaacc

SEQ ID NO: 262175 - DNA, 25 bp, Probe Sequence
ggggcaagatgcccaagtggaccag

SEQ ID NO: 262176 - DNA, 25 bp, Probe Sequence
ggtggaggcagccagggcttacctg

SEQ ID NO: 262177 - DNA, 25 bp, Probe Sequence
ggtgtggggtagcttgtcctgctac

SEQ ID NO: 262178 - DNA, 25 bp, Probe Sequence
ggtgtttagatacgtgttcctgaat

SEQ ID NO: 262179 - DNA, 25 bp, Probe Sequence
ggtggtccaaaaggcttacatgaag

SEQ ID NO: 262180 - DNA, 25 bp, Probe Sequence
ggtggattcagataagcataagaca

SEQ ID NO: 262181 - DNA, 25 bp, Probe Sequence
ggtggcagctcagaaacaaggacag

SEQ ID NO: 262182 - DNA, 25 bp, Probe Sequence
ggtggagtcaaatttgcaaaagtgc

SEQ ID NO: 262183 - DNA, 25 bp, Probe Sequence
ggtgacattaaatcccaaagcccat

SEQ ID NO: 262184 - DNA, 25 bp, Probe Sequence
ggtgatattttcaaccctacttcct

SEQ ID NO: 262185 - DNA, 25 bp, Probe Sequence
ggtgtttttaactgtgactattgta

SEQ ID NO: 262186 - DNA, 25 bp, Probe Sequence
ggtcccttaaactgatgtcttttct

SEQ ID NO: 262187 - DNA, 25 bp, Probe Sequence
ggtcccattattctagggtcttact

SEQ ID NO: 262188 - DNA, 25 bp, Probe Sequence
ggtcccattattggtcctggtggta

SEQ ID NO: 262189 - DNA, 25 bp, Probe Sequence
ggggccattcgtaggatgggtgagt

SEQ ID NO: 262190 - DNA, 25 bp, Probe Sequence
ggtggccatacctggtttgtgaatg

SEQ ID NO: 262191 - DNA, 25 bp, Probe Sequence
ggggcttacactatgatgtttgagt

SEQ ID NO: 262192 - DNA, 25 bp, Probe Sequence
ggggccttacttaagtaatgatctg

SEQ ID NO: 262193 - DNA, 25 bp, Probe Sequence
ggggccttgagcatcaggcccagac

SEQ ID NO: 262194 - DNA, 25 bp, Probe Sequence
ggggctctacagagaggccacagag

SEQ ID NO: 262195 - DNA, 25 bp, Probe Sequence
ggggctatagaggcaaagccaaagg

SEQ ID NO: 262196 - DNA, 25 bp, Probe Sequence
ggggcattgtgaggaactgtgcaaa

SEQ ID NO: 262197 - DNA, 25 bp, Probe Sequence
ggtggacgatgcctgcaacgtgaac

SEQ ID NO: 262198 - DNA, 25 bp, Probe Sequence
ggtggacgagcgtccgcatgctaat

SEQ ID NO: 262199 - DNA, 25 bp, Probe Sequence
ggggcacggcgagagcctaagaaca

SEQ ID NO: 262200 - DNA, 25 bp, Probe Sequence
ggggcacagggattagttatgagca

SEQ ID NO: 262201 - DNA, 25 bp, Probe Sequence
ggggcatcaggtcaagctggatgac

SEQ ID NO: 262202 - DNA, 25 bp, Probe Sequence
ggggcctcagctgcaatggggcagc

SEQ ID NO: 262203 - DNA, 25 bp, Probe Sequence
ggggcctgcaggcaagtcatgagag

SEQ ID NO: 262204 - DNA, 25 bp, Probe Sequence
ggggctctgagggaaattgaggccc

SEQ ID NO: 262205 - DNA, 25 bp, Probe Sequence
ggtggttaaggagagctgcgagccc

SEQ ID NO: 262206 - DNA, 25 bp, Probe Sequence
ggtgtgattgaagaccactcgaatc

SEQ ID NO: 262207 - DNA, 25 bp, Probe Sequence
ggtggcaaagagaattcccgcaatg

SEQ ID NO: 262208 - DNA, 25 bp, Probe Sequence
ggggcacagaggatgtcgctaaaga

SEQ ID NO: 262209 - DNA, 25 bp, Probe Sequence
ggaggacggggtggcagaccaaaca

SEQ ID NO: 262210 - DNA, 25 bp, Probe Sequence
ggtggacgagtcgggaaccagagca

SEQ ID NO: 262211 - DNA, 25 bp, Probe Sequence
ggggaagctgtatggaatccgagat

SEQ ID NO: 262212 - DNA, 25 bp, Probe Sequence
ggtggaactgaatgttaactgctgt

SEQ ID NO: 262213 - DNA, 25 bp, Probe Sequence
ggtgtgaacgaattttgcaagttta

SEQ ID NO: 262214 - DNA, 25 bp, Probe Sequence
ggtggcagacgactcatttgctagt

SEQ ID NO: 262215 - DNA, 25 bp, Probe Sequence
ggggctgaggaggttcctcagctcc

SEQ ID NO: 262216 - DNA, 25 bp, Probe Sequence
ggggctgaggggaacattctcacgt

SEQ ID NO: 262217 - DNA, 25 bp, Probe Sequence
ggggcatgagctgattcacattctg

SEQ ID NO: 262218 - DNA, 25 bp, Probe Sequence
ggggcatagctctaatctaatatat

SEQ ID NO: 262219 - DNA, 25 bp, Probe Sequence
ggggctgaccagtagagaatttcct

SEQ ID NO: 262220 - DNA, 25 bp, Probe Sequence
ggtggctttcagaagaggattgtcc

SEQ ID NO: 262221 - DNA, 25 bp, Probe Sequence
ggggcagttagaatgttgatttcct

SEQ ID NO: 262222 - DNA, 25 bp, Probe Sequence
ggggcaggtggaagtgtgatcccgt

SEQ ID NO: 262223 - DNA, 25 bp, Probe Sequence
ggtggcaggtggaggtgtcaggctg

SEQ ID NO: 262224 - DNA, 25 bp, Probe Sequence
ggtggacgtggttggtgattggcag

SEQ ID NO: 262225 - DNA, 25 bp, Probe Sequence
ggtggaagctgggtgagccaaggac

SEQ ID NO: 262226 - DNA, 25 bp, Probe Sequence
ggtggaagctgggtgagccaaggac

SEQ ID NO: 262227 - DNA, 25 bp, Probe Sequence
ggtggaagctgggtgagccaaggac

SEQ ID NO: 262228 - DNA, 25 bp, Probe Sequence
ggtgggctctgggtgggcaaggagc

SEQ ID NO: 262229 - DNA, 25 bp, Probe Sequence
ggtggcgcctggttgaggcatgaga

SEQ ID NO: 262230 - DNA, 25 bp, Probe Sequence
ggggctctggtgtagaccatggacc

SEQ ID NO: 262231 - DNA, 25 bp, Probe Sequence
ggggctcggggaggcagagaatctc

SEQ ID NO: 262232 - DNA, 25 bp, Probe Sequence
ggggcctggtggtacaggaactgcc

SEQ ID NO: 262233 - DNA, 25 bp, Probe Sequence
ggtggcgaccatggagaggaaactg

SEQ ID NO: 262234 - DNA, 25 bp, Probe Sequence
ggtggcgaccatggagaggaaactg

SEQ ID NO: 262235 - DNA, 25 bp, Probe Sequence
ggtggaggcccataggaagatcagc

SEQ ID NO: 262236 - DNA, 25 bp, Probe Sequence
ggggaagctgaccagaaaggctcat

SEQ ID NO: 262237 - DNA, 25 bp, Probe Sequence
ggggaagctgacagagatacctaca

SEQ ID NO: 262238 - DNA, 25 bp, Probe Sequence
ggggaaggaggggaacatgcttgca

SEQ ID NO: 262239 - DNA, 25 bp, Probe Sequence
ggtggacgaggacatgaacagcttt

SEQ ID NO: 262240 - DNA, 25 bp, Probe Sequence
ggggaagcaggtcagtatggagtct

SEQ ID NO: 262241 - DNA, 25 bp, Probe Sequence
ggtgtaacaggaccctatgtactcg

SEQ ID NO: 262242 - DNA, 25 bp, Probe Sequence
ggtgtgtaaggtggcctattcctct

SEQ ID NO: 262243 - DNA, 25 bp, Probe Sequence
ggtgtgtaaactactcttatcctaa

SEQ ID NO: 262244 - DNA, 25 bp, Probe Sequence
ggtgctgttaagtatttgtacctaa

SEQ ID NO: 262245 - DNA, 25 bp, Probe Sequence
ggttggtaagttcttccagctgaag

SEQ ID NO: 262246 - DNA, 25 bp, Probe Sequence
ggtggcgtaagtgttcgggcaggaa

SEQ ID NO: 262247 - DNA, 25 bp, Probe Sequence
ggggcctgaagacattcctggagga

SEQ ID NO: 262248 - DNA, 25 bp, Probe Sequence
ggggctgggagatgttcctggagga

SEQ ID NO: 262249 - DNA, 25 bp, Probe Sequence
ggggctgttggatttccatttcagg

SEQ ID NO: 262250 - DNA, 25 bp, Probe Sequence
ggtggtcttggacgtggtttcagtg

SEQ ID NO: 262251 - DNA, 25 bp, Probe Sequence
ggtggaatgttcagaggtggccgtg

SEQ ID NO: 262252 - DNA, 25 bp, Probe Sequence
ggtggagtactagagcctggccaag

SEQ ID NO: 262253 - DNA, 25 bp, Probe Sequence
ggtgaatgttaaggagcactcccgg

SEQ ID NO: 262254 - DNA, 25 bp, Probe Sequence
ggggccagtgaaggaagctcccgga

SEQ ID NO: 262255 - DNA, 25 bp, Probe Sequence
ggtggcgcagatgcagctgaagtac

SEQ ID NO: 262256 - DNA, 25 bp, Probe Sequence
ggtggcgatgtcagcggatgtcacg

SEQ ID NO: 262257 - DNA, 25 bp, Probe Sequence
ggtggcagagaaggaggcagtcaat

SEQ ID NO: 262258 - DNA, 25 bp, Probe Sequence
ggtggctgagaagcagctcatccct

SEQ ID NO: 262259 - DNA, 25 bp, Probe Sequence
ggtcagcaggaagccatcgaccttc

SEQ ID NO: 262260 - DNA, 25 bp, Probe Sequence
ggtggcaggggttactgtcacattc

SEQ ID NO: 262261 - DNA, 25 bp, Probe Sequence
ggtggcatggtggtagactacccta

SEQ ID NO: 262262 - DNA, 25 bp, Probe Sequence
ggggcttggtggcagcatagccccc

SEQ ID NO: 262263 - DNA, 25 bp, Probe Sequence
ggggctgaggcacgtggtagccctc

SEQ ID NO: 262264 - DNA, 25 bp, Probe Sequence
ggggctagtgcaagctagggccatt

SEQ ID NO: 262265 - DNA, 25 bp, Probe Sequence
ggtggctgggaggcatcagttgcta

SEQ ID NO: 262266 - DNA, 25 bp, Probe Sequence
ggtggatggactgaagtgtgtatat

SEQ ID NO: 262267 - DNA, 25 bp, Probe Sequence
ggtgtatacctccaactttatagac

SEQ ID NO: 262268 - DNA, 25 bp, Probe Sequence
ggtgatttcctcatacttttgatac

SEQ ID NO: 262269 - DNA, 25 bp, Probe Sequence
ggtgattccggtttttgtcagtaca

SEQ ID NO: 262270 - DNA, 25 bp, Probe Sequence
ggtgagacgggtactttggtggaca

SEQ ID NO: 262271 - DNA, 25 bp, Probe Sequence
ggtgggtggatgaactttgaggtag

SEQ ID NO: 262272 - DNA, 25 bp, Probe Sequence
ggtgggccgtggagtcggagtggac

SEQ ID NO: 262273 - DNA, 25 bp, Probe Sequence
ggggcccaaggaattcgcaagatgg

SEQ ID NO: 262274 - DNA, 25 bp, Probe Sequence
ggggcaccagaaggattggccaggg

SEQ ID NO: 262275 - DNA, 25 bp, Probe Sequence
ggggcacgaagagcactggagtagg

SEQ ID NO: 262276 - DNA, 25 bp, Probe Sequence
ggggcactatgatcaatcttggtag

SEQ ID NO: 262277 - DNA, 25 bp, Probe Sequence
ggggccatttcaggatttggtctct

SEQ ID NO: 262278 - DNA, 25 bp, Probe Sequence
ggggcctctgtcatgcatattgggc

SEQ ID NO: 262279 - DNA, 25 bp, Probe Sequence
ggggcctcatgtttacatttgcttc

SEQ ID NO: 262280 - DNA, 25 bp, Probe Sequence
ggtggcttcattctagatgtagctt

SEQ ID NO: 262281 - DNA, 25 bp, Probe Sequence
ggggcttatatgactcatgtgtgtt

SEQ ID NO: 262282 - DNA, 25 bp, Probe Sequence
ggggcttttggaattcgcattgaga

SEQ ID NO: 262283 - DNA, 25 bp, Probe Sequence
ggggctgttttgttgtggcactagc

SEQ ID NO: 262284 - DNA, 25 bp, Probe Sequence
ggggctttgggtttgtcacatatgc

SEQ ID NO: 262285 - DNA, 25 bp, Probe Sequence
ggggcctgtgggtaacatcagaatg

SEQ ID NO: 262286 - DNA, 25 bp, Probe Sequence
ggtcgttggaggtcagaatggaagt

SEQ ID NO: 262287 - DNA, 25 bp, Probe Sequence
ggtctttaagtggacaggagataat

SEQ ID NO: 262288 - DNA, 25 bp, Probe Sequence
ggtgtttcacaaaagcagtagtaag

SEQ ID NO: 262289 - DNA, 25 bp, Probe Sequence
ggtgtttacaccaacgtggtcgagt

SEQ ID NO: 262290 - DNA, 25 bp, Probe Sequence
ggtggttactccatctgtggttgga

SEQ ID NO: 262291 - DNA, 25 bp, Probe Sequence
ggtgttgtactgtttaattttggca

SEQ ID NO: 262292 - DNA, 25 bp, Probe Sequence
ggtggcttttgctttatagtttggc

SEQ ID NO: 262293 - DNA, 25 bp, Probe Sequence
ggtggcttttgctttatagtttggc

SEQ ID NO: 262294 - DNA, 25 bp, Probe Sequence
ggggcttctcgaatttatgtatttc

SEQ ID NO: 262295 - DNA, 25 bp, Probe Sequence
ggtgggtcaaggagctagtttacag

SEQ ID NO: 262296 - DNA, 25 bp, Probe Sequence
ggtggtttagagagagatgacttga

SEQ ID NO: 262297 - DNA, 25 bp, Probe Sequence
ggtggagtatagaagaatatccttg

SEQ ID NO: 262298 - DNA, 25 bp, Probe Sequence
ggtggatgtaaataaccccattctt

SEQ ID NO: 262299 - DNA, 25 bp, Probe Sequence
ggtggatgtaaataaccccattctt

SEQ ID NO: 262300 - DNA, 25 bp, Probe Sequence
ggtggatgtaaataaccccattctt

SEQ ID NO: 262301 - DNA, 25 bp, Probe Sequence
ggtggctttggatatagccccttcc

SEQ ID NO: 262302 - DNA, 25 bp, Probe Sequence
ggtggctagggatgtactcatgctc

SEQ ID NO: 262303 - DNA, 25 bp, Probe Sequence
ggtggaaatggctctgcctatgctc

SEQ ID NO: 262304 - DNA, 25 bp, Probe Sequence
ggtggacgtagtgatgcttctccat

SEQ ID NO: 262305 - DNA, 25 bp, Probe Sequence
ggggcacgtagaggatagtacacac

SEQ ID NO: 262306 - DNA, 25 bp, Probe Sequence
ggtggacggagaggtactgaggaca

SEQ ID NO: 262307 - DNA, 25 bp, Probe Sequence
ggtggacggagaggtactgaggaca

SEQ ID NO: 262308 - DNA, 25 bp, Probe Sequence
ggtggaatccgaagtcctgggactg

SEQ ID NO: 262309 - DNA, 25 bp, Probe Sequence
ggtggtgaaatgaggccgggactgc

SEQ ID NO: 262310 - DNA, 25 bp, Probe Sequence
ggtggagcaaagtgagggccgagtg

SEQ ID NO: 262311 - DNA, 25 bp, Probe Sequence
ggtggaagaaaccatgggcaggagt

SEQ ID NO: 262312 - DNA, 25 bp, Probe Sequence
ggggcagagacagcatggggaagga

SEQ ID NO: 262313 - DNA, 25 bp, Probe Sequence
ggggcatcaaaggtgtggtgacaga

SEQ ID NO: 262314 - DNA, 25 bp, Probe Sequence
ggggccacaactttggtgaagaagg

SEQ ID NO: 262315 - DNA, 25 bp, Probe Sequence
ggtggctacaccatctggtgaggaa

SEQ ID NO: 262316 - DNA, 25 bp, Probe Sequence
ggtggaagagtttgtggtagcagaa

SEQ ID NO: 262317 - DNA, 25 bp, Probe Sequence
ggtggcacatggcttgtaatcacag

SEQ ID NO: 262318 - DNA, 25 bp, Probe Sequence
ggggcgccagtgaattaataaggcc

SEQ ID NO: 262319 - DNA, 25 bp, Probe Sequence
ggtggcccagctcaaacagaaggtc

SEQ ID NO: 262320 - DNA, 25 bp, Probe Sequence
ggggcatacagcctaatgacaaaga

SEQ ID NO: 262321 - DNA, 25 bp, Probe Sequence
ggggcccatgggaatgacttcagaa

SEQ ID NO: 262322 - DNA, 25 bp, Probe Sequence
ggggcctgttccaagactaaggata

SEQ ID NO: 262323 - DNA, 25 bp, Probe Sequence
ggggcctgttccggaatatcaaata

SEQ ID NO: 262324 - DNA, 25 bp, Probe Sequence
ggggcccttctgagacagtaaagaa

SEQ ID NO: 262325 - DNA, 25 bp, Probe Sequence
ggggcctgtttgggacgaacagagc

SEQ ID NO: 262326 - DNA, 25 bp, Probe Sequence
ggtggacagtttggccgtaaagatg

SEQ ID NO: 262327 - DNA, 25 bp, Probe Sequence
ggtgtcatagatatcccgttttgtg

SEQ ID NO: 262328 - DNA, 25 bp, Probe Sequence
ggtgtcatagatatcccgttttgtg

SEQ ID NO: 262329 - DNA, 25 bp, Probe Sequence
ggtgtgtcagatttcctcagattag

SEQ ID NO: 262330 - DNA, 25 bp, Probe Sequence
ggtggccagataaggctgacttcag

SEQ ID NO: 262331 - DNA, 25 bp, Probe Sequence
ggtggggtttggaagcttctggaat

SEQ ID NO: 262332 - DNA, 25 bp, Probe Sequence
ggtggggtttattgggatgctggag

SEQ ID NO: 262333 - DNA, 25 bp, Probe Sequence
ggtggggttgtcagttatctcatat

SEQ ID NO: 262334 - DNA, 25 bp, Probe Sequence
ggtggggctgttgatatttcatcaa

SEQ ID NO: 262335 - DNA, 25 bp, Probe Sequence
ggtggggctggtgaaaggcagtata

SEQ ID NO: 262336 - DNA, 25 bp, Probe Sequence
ggtggtgttccagttcaaggcagta

SEQ ID NO: 262337 - DNA, 25 bp, Probe Sequence
ggtgtggattctgttgaaggagagg

SEQ ID NO: 262338 - DNA, 25 bp, Probe Sequence
ggtgtctaggtttctgataaaaggg

SEQ ID NO: 262339 - DNA, 25 bp, Probe Sequence
ggtgttactgtgtttttcaaatgga

SEQ ID NO: 262340 - DNA, 25 bp, Probe Sequence
ggtgtattttgacctacgaattgga

SEQ ID NO: 262341 - DNA, 25 bp, Probe Sequence
ggtgtctttaaagtacaggttaatg

SEQ ID NO: 262342 - DNA, 25 bp, Probe Sequence
ggatttttaaaccacagtctggagt

SEQ ID NO: 262343 - DNA, 25 bp, Probe Sequence
ggtgtacacatttacccagttgagc

SEQ ID NO: 262344 - DNA, 25 bp, Probe Sequence
ggtgttagacaaacccagtaggcta

SEQ ID NO: 262345 - DNA, 25 bp, Probe Sequence
ggtggtagactaccctaacagtgcc

SEQ ID NO: 262346 - DNA, 25 bp, Probe Sequence
ggtggttggctacagctatgaagga

SEQ ID NO: 262347 - DNA, 25 bp, Probe Sequence
ggggctctgtatatagctatgaaga

SEQ ID NO: 262348 - DNA, 25 bp, Probe Sequence
ggggctctgtgctgagatgcaatga

SEQ ID NO: 262349 - DNA, 25 bp, Probe Sequence
ggtggcactctctgagtgcatcatg

SEQ ID NO: 262350 - DNA, 25 bp, Probe Sequence
ggtggcattgcttcggcatatgcaa

SEQ ID NO: 262351 - DNA, 25 bp, Probe Sequence
ggtcatgcagatgatctgagcgaga

SEQ ID NO: 262352 - DNA, 25 bp, Probe Sequence
ggtgctcagagtttcagcaagcagt

SEQ ID NO: 262353 - DNA, 25 bp, Probe Sequence
ggtgatagcgcctaagcatagtgtt

SEQ ID NO: 262354 - DNA, 25 bp, Probe Sequence
ggtgtgggccaatatggtgtttaca

SEQ ID NO: 262355 - DNA, 25 bp, Probe Sequence
ggagtaattcagtataggttcgttt

SEQ ID NO: 262356 - DNA, 25 bp, Probe Sequence
ggagtaaccgtattgttcgcgtcat

SEQ ID NO: 262357 - DNA, 25 bp, Probe Sequence
ggtgataaccctatgtctgacgtat

SEQ ID NO: 262358 - DNA, 25 bp, Probe Sequence
ggtgatagaaactgacttgaggcca

SEQ ID NO: 262359 - DNA, 25 bp, Probe Sequence
ggtgtgagggaggagacgtgaggca

SEQ ID NO: 262360 - DNA, 25 bp, Probe Sequence
ggtgtgtgtcctggaactagagccc

SEQ ID NO: 262361 - DNA, 25 bp, Probe Sequence
ggtgttgactgcagctcactgtaac

SEQ ID NO: 262362 - DNA, 25 bp, Probe Sequence
ggtggagactgagctccagggcgtg

SEQ ID NO: 262363 - DNA, 25 bp, Probe Sequence
ggtaaggctaactcctgatcgtttc

SEQ ID NO: 262364 - DNA, 25 bp, Probe Sequence
ggtttgtctaactccagagtccttc

SEQ ID NO: 262365 - DNA, 25 bp, Probe Sequence
ggtgttggtacctgtggatttttct

SEQ ID NO: 262366 - DNA, 25 bp, Probe Sequence
ggtgtcaggtacggagaggattctc

SEQ ID NO: 262367 - DNA, 25 bp, Probe Sequence
ggtgtgatggttgcaagaggactct

SEQ ID NO: 262368 - DNA, 25 bp, Probe Sequence
ggtgggaggtgatagaggtttcttt

SEQ ID NO: 262369 - DNA, 25 bp, Probe Sequence
ggtgggatagtgcaaaggtctacaa

SEQ ID NO: 262370 - DNA, 25 bp, Probe Sequence
ggtgtggctaatctacatttatcaa

SEQ ID NO: 262371 - DNA, 25 bp, Probe Sequence
ggtggctgtaatcatgaacctaggc

SEQ ID NO: 262372 - DNA, 25 bp, Probe Sequence
ggtggcttaatattcacaagtcagt

SEQ ID NO: 262373 - DNA, 25 bp, Probe Sequence
ggtggtaaaattacacgcctgtaat

SEQ ID NO: 262374 - DNA, 25 bp, Probe Sequence
ggtggtgcaaaaattactctattta

SEQ ID NO: 262375 - DNA, 25 bp, Probe Sequence
ggtggagactacattttctctttgt

SEQ ID NO: 262376 - DNA, 25 bp, Probe Sequence
ggtggaaagacattcttgtggcttt

SEQ ID NO: 262377 - DNA, 25 bp, Probe Sequence
ggtggtgattattccttgtggcatt

SEQ ID NO: 262378 - DNA, 25 bp, Probe Sequence
ggtggctgggattcgttagtgatga

SEQ ID NO: 262379 - DNA, 25 bp, Probe Sequence
ggggctgagtgactccttgagtagc

SEQ ID NO: 262380 - DNA, 25 bp, Probe Sequence
ggggctgagaagatcctgagtacac

SEQ ID NO: 262381 - DNA, 25 bp, Probe Sequence
ggggctggattgatggaggctggca

SEQ ID NO: 262382 - DNA, 25 bp, Probe Sequence
ggtggcgcgattgggacagtcgcca

SEQ ID NO: 262383 - DNA, 25 bp, Probe Sequence
ggggcggatgtggagaagctggcca

SEQ ID NO: 262384 - DNA, 25 bp, Probe Sequence
ggtgagcggagggagacctgtgtcc

SEQ ID NO: 262385 - DNA, 25 bp, Probe Sequence
ggtggccaaggtattgctgtcatca

SEQ ID NO: 262386 - DNA, 25 bp, Probe Sequence
ggggccaatgagagtgtctcactga

SEQ ID NO: 262387 - DNA, 25 bp, Probe Sequence
ggggccactgagattgtctctgagt

SEQ ID NO: 262388 - DNA, 25 bp, Probe Sequence
ggggccgtgaggaagatccgcagcc

SEQ ID NO: 262389 - DNA, 25 bp, Probe Sequence
ggtggcaggagcctgtaatcccagc

SEQ ID NO: 262390 - DNA, 25 bp, Probe Sequence
ggtggaagacgtgatgacagctggc

SEQ ID NO: 262391 - DNA, 25 bp, Probe Sequence
ggtgatgaaatcctggttagcggag

SEQ ID NO: 262392 - DNA, 25 bp, Probe Sequence
ggtgaacattgactggtaagggaac

SEQ ID NO: 262393 - DNA, 25 bp, Probe Sequence
ggtgaagattacggtaacggccact

SEQ ID NO: 262394 - DNA, 25 bp, Probe Sequence
ggtgaagtcttgagaaactggccgc

SEQ ID NO: 262395 - DNA, 25 bp, Probe Sequence
ggtgacagatctcttcaaccaggtc

SEQ ID NO: 262396 - DNA, 25 bp, Probe Sequence
ggtgcactgatcgctgccaatgcac

SEQ ID NO: 262397 - DNA, 25 bp, Probe Sequence
ggtgatgccactgggcgtgatgcac

SEQ ID NO: 262398 - DNA, 25 bp, Probe Sequence
ggtgatgatgccgaggacttcctat

SEQ ID NO: 262399 - DNA, 25 bp, Probe Sequence
ggtgcatatgcatgtctcaatttct

SEQ ID NO: 262400 - DNA, 25 bp, Probe Sequence
ggtgtatgcttactgcagagttgtt

SEQ ID NO: 262401 - DNA, 25 bp, Probe Sequence
ggtggtgttcatcgtggtagtgtcg

SEQ ID NO: 262402 - DNA, 25 bp, Probe Sequence
ggtgtgtgccctagggtatgtaccc

SEQ ID NO: 262403 - DNA, 25 bp, Probe Sequence
ggtgtgtgccctagggtatgtaccc

SEQ ID NO: 262404 - DNA, 25 bp, Probe Sequence
ggtgtgtgccctagggtatgtaccc

SEQ ID NO: 262405 - DNA, 25 bp, Probe Sequence
ggtgtgtgccctagggtatgtaccc

SEQ ID NO: 262406 - DNA, 25 bp, Probe Sequence
ggtggactctcaagggtgcacatca

SEQ ID NO: 262407 - DNA, 25 bp, Probe Sequence
ggtggcctgccatgggtatccatgg

SEQ ID NO: 262408 - DNA, 25 bp, Probe Sequence
ggtggtcagacatggaaatggtggg

SEQ ID NO: 262409 - DNA, 25 bp, Probe Sequence
ggtggtcagagcagtatgagtggat

SEQ ID NO: 262410 - DNA, 25 bp, Probe Sequence
ggtgggcaactggtaactgaagtca

SEQ ID NO: 262411 - DNA, 25 bp, Probe Sequence
ggtgggctttgcctaaggacacaca

SEQ ID NO: 262412 - DNA, 25 bp, Probe Sequence
ggtggtgttgggtgagtacaacctt

SEQ ID NO: 262413 - DNA, 25 bp, Probe Sequence
ggtggggtggaaatactgccaaggc

SEQ ID NO: 262414 - DNA, 25 bp, Probe Sequence
ggtggaggaggagatccccaagttt

SEQ ID NO: 262415 - DNA, 25 bp, Probe Sequence
ggtgtgtaagtatatccccaatgtt

SEQ ID NO: 262416 - DNA, 25 bp, Probe Sequence
ggttgctaaagataacgccacgtgt

SEQ ID NO: 262417 - DNA, 25 bp, Probe Sequence
ggtgggaggagatcaacagggctgg

SEQ ID NO: 262418 - DNA, 25 bp, Probe Sequence
ggtggagaggggtgcaaggccctgc

SEQ ID NO: 262419 - DNA, 25 bp, Probe Sequence
ggtggagaggggtgcaaggccctgc

SEQ ID NO: 262420 - DNA, 25 bp, Probe Sequence
ggtggagaggggtgcaaggccctgc

SEQ ID NO: 262421 - DNA, 25 bp, Probe Sequence
ggtggacacgggagacagcgagccc

SEQ ID NO: 262422 - DNA, 25 bp, Probe Sequence
ggtggcacctggctatgtggtgacc

SEQ ID NO: 262423 - DNA, 25 bp, Probe Sequence
ggtggcaaggagtttgtggaagctg

SEQ ID NO: 262424 - DNA, 25 bp, Probe Sequence
ggtggcaaatgtttggtagaactgt

SEQ ID NO: 262425 - DNA, 25 bp, Probe Sequence
ggtggcaatagttccgggagaattg

SEQ ID NO: 262426 - DNA, 25 bp, Probe Sequence
ggttctaacttcaggggaatcgaag

SEQ ID NO: 262427 - DNA, 25 bp, Probe Sequence
ggtccttaacacagtcgtgaacaaa

SEQ ID NO: 262428 - DNA, 25 bp, Probe Sequence
ggtggcttcatattaagtagtaaca

SEQ ID NO: 262429 - DNA, 25 bp, Probe Sequence
ggtggctttacattgcagataggaa

SEQ ID NO: 262430 - DNA, 25 bp, Probe Sequence
ggtgtctttacttcacatctgaaat

SEQ ID NO: 262431 - DNA, 25 bp, Probe Sequence
ggtgtctctagtgagcacatgtaca

SEQ ID NO: 262432 - DNA, 25 bp, Probe Sequence
ggtgttctaattttctgtgagcaca

SEQ ID NO: 262433 - DNA, 25 bp, Probe Sequence
ggtgttagaactctgcggtgacctt

SEQ ID NO: 262434 - DNA, 25 bp, Probe Sequence
ggtactgacaaccctagtgtcacct

SEQ ID NO: 262435 - DNA, 25 bp, Probe Sequence
ggtccatagtacccattaggacttc

SEQ ID NO: 262436 - DNA, 25 bp, Probe Sequence
ggtccagaggactaaaactacctct

SEQ ID NO: 262437 - DNA, 25 bp, Probe Sequence
ggtggcaagcgagaaaactgtgtcc

SEQ ID NO: 262438 - DNA, 25 bp, Probe Sequence
ggtggatgacgacaagaactttagc

SEQ ID NO: 262439 - DNA, 25 bp, Probe Sequence
ggtggacagccaaacagaagcttta

SEQ ID NO: 262440 - DNA, 25 bp, Probe Sequence
ggtggacagccaaacagaagcttta

SEQ ID NO: 262441 - DNA, 25 bp, Probe Sequence
ggtggccaggtatgcagatgatgac

SEQ ID NO: 262442 - DNA, 25 bp, Probe Sequence
ggtggccaggagatagtgagcagct

SEQ ID NO: 262443 - DNA, 25 bp, Probe Sequence
ggtggcctgggaatatggacgctga

SEQ ID NO: 262444 - DNA, 25 bp, Probe Sequence
ggtggcctcttaaaggacagcgagc

SEQ ID NO: 262445 - DNA, 25 bp, Probe Sequence
ggtggattgcttgaacccaggagtt

SEQ ID NO: 262446 - DNA, 25 bp, Probe Sequence
ggtgcaactgtgtgtacaccaggga

SEQ ID NO: 262447 - DNA, 25 bp, Probe Sequence
ggtgatttgtgaagtagcccagtat

SEQ ID NO: 262448 - DNA, 25 bp, Probe Sequence
ggtggctggtgagatgggccagaat

SEQ ID NO: 262449 - DNA, 25 bp, Probe Sequence
ggtggggtacagtggatgtgaatac

SEQ ID NO: 262450 - DNA, 25 bp, Probe Sequence
ggtggggggcagggagtgtaccaca

SEQ ID NO: 262451 - DNA, 25 bp, Probe Sequence
ggtgagggggggtaggataacatga

SEQ ID NO: 262452 - DNA, 25 bp, Probe Sequence
ggctggggcaagaccaagtacaacg

SEQ ID NO: 262453 - DNA, 25 bp, Probe Sequence
ggtggaggctgagtcgcaggacaca

SEQ ID NO: 262454 - DNA, 25 bp, Probe Sequence
ggtggaatgatgccacctggaccag

SEQ ID NO: 262455 - DNA, 25 bp, Probe Sequence
ggtgtgaaagtgtcatcttcactgc

SEQ ID NO: 262456 - DNA, 25 bp, Probe Sequence
ggtggagtctggtctgctccactaa

SEQ ID NO: 262457 - DNA, 25 bp, Probe Sequence
ggtggagtctaggctgctgatcagt

SEQ ID NO: 262458 - DNA, 25 bp, Probe Sequence
ggtggcagttatgctgttactagtg

SEQ ID NO: 262459 - DNA, 25 bp, Probe Sequence
ggtggcacttctatgttgccaggat

SEQ ID NO: 262460 - DNA, 25 bp, Probe Sequence
ggtgatcactgagggatttccgcga

SEQ ID NO: 262461 - DNA, 25 bp, Probe Sequence
ggtggcaagtggccttatgccggga

SEQ ID NO: 262462 - DNA, 25 bp, Probe Sequence
ggtggcaaatatctcatctgccggc

SEQ ID NO: 262463 - DNA, 25 bp, Probe Sequence
ggtggcagagctgagtctggccgac

SEQ ID NO: 262464 - DNA, 25 bp, Probe Sequence
ggtggcggtaattttgtccatcaaa

SEQ ID NO: 262465 - DNA, 25 bp, Probe Sequence
ggtggcggtaattttgtccatcaaa

SEQ ID NO: 262466 - DNA, 25 bp, Probe Sequence
ggtggcagggacatgtttgcctctg

SEQ ID NO: 262467 - DNA, 25 bp, Probe Sequence
ggtggatgtacagtttgttcggatg

SEQ ID NO: 262468 - DNA, 25 bp, Probe Sequence
ggtggactacttaatcaacgggatg

SEQ ID NO: 262469 - DNA, 25 bp, Probe Sequence
ggtggactacttaatcaacgggatg

SEQ ID NO: 262470 - DNA, 25 bp, Probe Sequence
ggtggtcaaattagagaaacggctg

SEQ ID NO: 262471 - DNA, 25 bp, Probe Sequence
ggtggatcagatatacgagaacgcc

SEQ ID NO: 262472 - DNA, 25 bp, Probe Sequence
ggtggatcagatatacgagaacgcc

SEQ ID NO: 262473 - DNA, 25 bp, Probe Sequence
ggtggacgatggctctgatgaccgt

SEQ ID NO: 262474 - DNA, 25 bp, Probe Sequence
ggtgcacactttgtctgtgaccgaa

SEQ ID NO: 262475 - DNA, 25 bp, Probe Sequence
ggtgacctgcttggatctagacagc

SEQ ID NO: 262476 - DNA, 25 bp, Probe Sequence
ggtgtctgcctatgcttaaagccaa

SEQ ID NO: 262477 - DNA, 25 bp, Probe Sequence
ggtggctgcctcatttagagaggaa

SEQ ID NO: 262478 - DNA, 25 bp, Probe Sequence
ggtggtgccttctggagaggagcag

SEQ ID NO: 262479 - DNA, 25 bp, Probe Sequence
ggtggtgccttctggagaggagcag

SEQ ID NO: 262480 - DNA, 25 bp, Probe Sequence
ggtggtgccttctggagaggagcag

SEQ ID NO: 262481 - DNA, 25 bp, Probe Sequence
ggtcggcctcctgaaatgatagcag

SEQ ID NO: 262482 - DNA, 25 bp, Probe Sequence
ggtagcacctcctaacagattaaat

SEQ ID NO: 262483 - DNA, 25 bp, Probe Sequence
ggtgcagcccatactgaacgaacac

SEQ ID NO: 262484 - DNA, 25 bp, Probe Sequence
ggtgcagcccatactgaacgaacac

SEQ ID NO: 262485 - DNA, 25 bp, Probe Sequence
ggtgtcaccttgtatgtcgaactgc

SEQ ID NO: 262486 - DNA, 25 bp, Probe Sequence
ggtggaccttgtagccgagggctac

SEQ ID NO: 262487 - DNA, 25 bp, Probe Sequence
ggtgagcaaccagttggctagggga

SEQ ID NO: 262488 - DNA, 25 bp, Probe Sequence
ggtgtaagacaattggtagggggtg

SEQ ID NO: 262489 - DNA, 25 bp, Probe Sequence
ggtgtccaagcaacatggtagggca

SEQ ID NO: 262490 - DNA, 25 bp, Probe Sequence
ggtggaggactattgctttgctgac

SEQ ID NO: 262491 - DNA, 25 bp, Probe Sequence
ggatggcgtttctgtgttcagagta

SEQ ID NO: 262492 - DNA, 25 bp, Probe Sequence
ggtgtcctttgaaggacccgtatgt

SEQ ID NO: 262493 - DNA, 25 bp, Probe Sequence
ggttcctggactaagtccggctcgt

SEQ ID NO: 262494 - DNA, 25 bp, Probe Sequence
ggtgtcgggagcagcagtcacacct

SEQ ID NO: 262495 - DNA, 25 bp, Probe Sequence
ggtgtgagacgagacaatcctgccc

SEQ ID NO: 262496 - DNA, 25 bp, Probe Sequence
ggtgtgatcaaggccacacccacca

SEQ ID NO: 262497 - DNA, 25 bp, Probe Sequence
ggtgtgactaggccacaccaactct

SEQ ID NO: 262498 - DNA, 25 bp, Probe Sequence
ggtgtgacaagacagaacaaggctt

SEQ ID NO: 262499 - DNA, 25 bp, Probe Sequence
ggtgtaaatgctccaggactaactt

SEQ ID NO: 262500 - DNA, 25 bp, Probe Sequence
ggtgccaatttcaagttccaagttg

SEQ ID NO: 262501 - DNA, 25 bp, Probe Sequence
ggtctaattaccttcacgaatgatg

SEQ ID NO: 262502 - DNA, 25 bp, Probe Sequence
ggtgttatttcgttaccactgcatg

SEQ ID NO: 262503 - DNA, 25 bp, Probe Sequence
ggtggtaccgagtctaagcactgcg

SEQ ID NO: 262504 - DNA, 25 bp, Probe Sequence
ggtggatgagcggaactttcactgc

SEQ ID NO: 262505 - DNA, 25 bp, Probe Sequence
ggtggagcatggtacagtcttggtg

SEQ ID NO: 262506 - DNA, 25 bp, Probe Sequence
ggtggacatggtgcgagtgatggag

SEQ ID NO: 262507 - DNA, 25 bp, Probe Sequence
ggtgtatcggtatgggatgcagaac

SEQ ID NO: 262508 - DNA, 25 bp, Probe Sequence
ggtgtttgaggatgacgtgcgcttt

SEQ ID NO: 262509 - DNA, 25 bp, Probe Sequence
ggtgtattgcaaggggagaggcttt

SEQ ID NO: 262510 - DNA, 25 bp, Probe Sequence
ggtgagacggagccggaagttattt

SEQ ID NO: 262511 - DNA, 25 bp, Probe Sequence
ggtgcagcagggtcccaaaggtagc

SEQ ID NO: 262512 - DNA, 25 bp, Probe Sequence
ggtgtcagggtcaaagaagggcagc

SEQ ID NO: 262513 - DNA, 25 bp, Probe Sequence
ggtgtagggcccagagaagcagaac

SEQ ID NO: 262514 - DNA, 25 bp, Probe Sequence
ggtgtagggcccagagaagcagaac

SEQ ID NO: 262515 - DNA, 25 bp, Probe Sequence
ggtggaggttacagtgagcagagat

SEQ ID NO: 262516 - DNA, 25 bp, Probe Sequence
ggtgggtttcatgctgtaccgcatg

SEQ ID NO: 262517 - DNA, 25 bp, Probe Sequence
ggtggtgtttgagcttgaaggagga

SEQ ID NO: 262518 - DNA, 25 bp, Probe Sequence
ggtgagtgggttgagggaggcagta

SEQ ID NO: 262519 - DNA, 25 bp, Probe Sequence
ggtggtggagttcctggtgaagcac

SEQ ID NO: 262520 - DNA, 25 bp, Probe Sequence
ggtggctgaggcaccagggctaagc

SEQ ID NO: 262521 - DNA, 25 bp, Probe Sequence
ggtgagggcagccctcagggtcggc

SEQ ID NO: 262522 - DNA, 25 bp, Probe Sequence
ggtggggactttgtttgctgtgccc

SEQ ID NO: 262523 - DNA, 25 bp, Probe Sequence
ggtgaggaattagcaatttcttgcc

SEQ ID NO: 262524 - DNA, 25 bp, Probe Sequence
ggtgagtttctagaatactggtcca

SEQ ID NO: 262525 - DNA, 25 bp, Probe Sequence
ggtggacttccaagagtactgtgtc

SEQ ID NO: 262526 - DNA, 25 bp, Probe Sequence
ggtggcacatttaatggcttttttt

SEQ ID NO: 262527 - DNA, 25 bp, Probe Sequence
ggtggacatcttttggatatctttt

SEQ ID NO: 262528 - DNA, 25 bp, Probe Sequence
ggtggagcacatctttgatcatcta

SEQ ID NO: 262529 - DNA, 25 bp, Probe Sequence
ggtggagcagcacattgtggagtgt

SEQ ID NO: 262530 - DNA, 25 bp, Probe Sequence
ggtggatgacatcaagcgggtctac

SEQ ID NO: 262531 - DNA, 25 bp, Probe Sequence
ggtggatgtcagcacgaatgtgtca

SEQ ID NO: 262532 - DNA, 25 bp, Probe Sequence
ggtgcaggtcagcacgttgctgtcg

SEQ ID NO: 262533 - DNA, 25 bp, Probe Sequence
ggtgcaagtaggtctgattgagctt

SEQ ID NO: 262534 - DNA, 25 bp, Probe Sequence
ggtggaggaatgactgttgctttta

SEQ ID NO: 262535 - DNA, 25 bp, Probe Sequence
ggtggatggaagccgtctgatgcag

SEQ ID NO: 262536 - DNA, 25 bp, Probe Sequence
ggtggaggcaacctgaccagaaaca

SEQ ID NO: 262537 - DNA, 25 bp, Probe Sequence
ggtggggcagcaccgtgaagacgaa

SEQ ID NO: 262538 - DNA, 25 bp, Probe Sequence
ggtggggcagcagcgtgaaaaccag

SEQ ID NO: 262539 - DNA, 25 bp, Probe Sequence
ggtgggagcaccacgacaaacacag

SEQ ID NO: 262540 - DNA, 25 bp, Probe Sequence
ggtggcagtaccagcgaagcacctc

SEQ ID NO: 262541 - DNA, 25 bp, Probe Sequence
ggtgggtgcaggaggcagaccctcc

SEQ ID NO: 262542 - DNA, 25 bp, Probe Sequence
ggtggtggctggaaacagcccctct

SEQ ID NO: 262543 - DNA, 25 bp, Probe Sequence
ggtggcatgtgcctgtaatcccacc

SEQ ID NO: 262544 - DNA, 25 bp, Probe Sequence
ggtggtgcatgcttgtaatcccagc

SEQ ID NO: 262545 - DNA, 25 bp, Probe Sequence
ggtggctgccatagtgaacttcatc

SEQ ID NO: 262546 - DNA, 25 bp, Probe Sequence
ggtgggcacataagattccgatcag

SEQ ID NO: 262547 - DNA, 25 bp, Probe Sequence
ggtgggaaataattgccgaagatga

SEQ ID NO: 262548 - DNA, 25 bp, Probe Sequence
ggtgggtcagaacatgttaagataa

SEQ ID NO: 262549 - DNA, 25 bp, Probe Sequence
ggtggctgtctttccattaaagaaa

SEQ ID NO: 262550 - DNA, 25 bp, Probe Sequence
ggtgttgcattttttggagcaaaaa

SEQ ID NO: 262551 - DNA, 25 bp, Probe Sequence
ggtgttcggatctttggaattaata

SEQ ID NO: 262552 - DNA, 25 bp, Probe Sequence
ggtgttttgcacttctgtaaactta

SEQ ID NO: 262553 - DNA, 25 bp, Probe Sequence
ggtgttttgcacttctgtaaactta

SEQ ID NO: 262554 - DNA, 25 bp, Probe Sequence
ggtggcatctgtcctatttaaagct

SEQ ID NO: 262555 - DNA, 25 bp, Probe Sequence
ggtggtcgtacgctgtgaaggcatc

SEQ ID NO: 262556 - DNA, 25 bp, Probe Sequence
ggtggttgtgggcattgtgggctac

SEQ ID NO: 262557 - DNA, 25 bp, Probe Sequence
ggtggtccgggaagtgagggctcac

SEQ ID NO: 262558 - DNA, 25 bp, Probe Sequence
ggtggctgacggaaagtccgtgaca

SEQ ID NO: 262559 - DNA, 25 bp, Probe Sequence
ggtggcggtggaaatttcggaccag

SEQ ID NO: 262560 - DNA, 25 bp, Probe Sequence
ggtacaagggcaagttccaggtcca

SEQ ID NO: 262561 - DNA, 25 bp, Probe Sequence
ggtgaagtgaactagacccggacca

SEQ ID NO: 262562 - DNA, 25 bp, Probe Sequence
ggtgaatgtgactaagaagcctggg

SEQ ID NO: 262563 - DNA, 25 bp, Probe Sequence
ggtgagtgtatcctgaaatatctgg

SEQ ID NO: 262564 - DNA, 25 bp, Probe Sequence
ggtgtgtttcgtgggaacaactggg

SEQ ID NO: 262565 - DNA, 25 bp, Probe Sequence
ggtggatcctcactgggaaacatca

SEQ ID NO: 262566 - DNA, 25 bp, Probe Sequence
ggtggttcaactgctgcaaacaagc

SEQ ID NO: 262567 - DNA, 25 bp, Probe Sequence
ggtggcttaagctttgaaaccacag

SEQ ID NO: 262568 - DNA, 25 bp, Probe Sequence
ggtggtccaccattggataaaccac

SEQ ID NO: 262569 - DNA, 25 bp, Probe Sequence
ggtggctccaagtaccatagaacct

SEQ ID NO: 262570 - DNA, 25 bp, Probe Sequence
ggtaccccagaacctgaaacatcgt

SEQ ID NO: 262571 - DNA, 25 bp, Probe Sequence
ggtgacatccactatagtcttaaaa

SEQ ID NO: 262572 - DNA, 25 bp, Probe Sequence
ggtggcacctactgacattgaagaa

SEQ ID NO: 262573 - DNA, 25 bp, Probe Sequence
ggtggcatcccatggacatatgcag

SEQ ID NO: 262574 - DNA, 25 bp, Probe Sequence
ggtggacctcatggcccacatggcc

SEQ ID NO: 262575 - DNA, 25 bp, Probe Sequence
ggtggagcccatgggagcaagggcg

SEQ ID NO: 262576 - DNA, 25 bp, Probe Sequence
ggtggagcccatgtgcaaggagagc

SEQ ID NO: 262577 - DNA, 25 bp, Probe Sequence
ggtggagcagtcaagagccaaggag

SEQ ID NO: 262578 - DNA, 25 bp, Probe Sequence
ggtgtgccggaaacgcaagggtaca

SEQ ID NO: 262579 - DNA, 25 bp, Probe Sequence
ggtgtgcgaggatcacagcgaggag

SEQ ID NO: 262580 - DNA, 25 bp, Probe Sequence
ggcgtccagatgatgacacggtcca

SEQ ID NO: 262581 - DNA, 25 bp, Probe Sequence
ggagtactgcatggtgaccggctac

SEQ ID NO: 262582 - DNA, 25 bp, Probe Sequence
ggaccaccatcgtacatgcagtcca

SEQ ID NO: 262583 - DNA, 25 bp, Probe Sequence
ggtggaactcagaacacagctccta

SEQ ID NO: 262584 - DNA, 25 bp, Probe Sequence
ggtggaacacaattcaagccgattc

SEQ ID NO: 262585 - DNA, 25 bp, Probe Sequence
ggtggcaatcaccaaaacaattacc

SEQ ID NO: 262586 - DNA, 25 bp, Probe Sequence
ggtggaaatccatagacaaatgaaa

SEQ ID NO: 262587 - DNA, 25 bp, Probe Sequence
ggtggaacactcaagatccagaata

SEQ ID NO: 262588 - DNA, 25 bp, Probe Sequence
ggtggcaaacctaaacagtcatatt

SEQ ID NO: 262589 - DNA, 25 bp, Probe Sequence
ggtggtagaccttacagcagccaga

SEQ ID NO: 262590 - DNA, 25 bp, Probe Sequence
ggtgtgtaaatcagtcaagcctgcc

SEQ ID NO: 262591 - DNA, 25 bp, Probe Sequence
ggtgtggaacatggcgatgcccctc

SEQ ID NO: 262592 - DNA, 25 bp, Probe Sequence
ggtggtgcaacaaagatgcctcgca

SEQ ID NO: 262593 - DNA, 25 bp, Probe Sequence
ggtgggaaaggaactgctcgcagaa

SEQ ID NO: 262594 - DNA, 25 bp, Probe Sequence
ggtgtggtatagcatcctcaaggac

SEQ ID NO: 262595 - DNA, 25 bp, Probe Sequence
ggtgtggtgtcacatgccagtaacc

SEQ ID NO: 262596 - DNA, 25 bp, Probe Sequence
ggtgtggtgttgcaccgctatactc

SEQ ID NO: 262597 - DNA, 25 bp, Probe Sequence
ggtgtaatgttgtaccatttgcact

SEQ ID NO: 262598 - DNA, 25 bp, Probe Sequence
ggtgtaattaaactatctcagccgt

SEQ ID NO: 262599 - DNA, 25 bp, Probe Sequence
ggtggaaatatctagtagccaggga

SEQ ID NO: 262600 - DNA, 25 bp, Probe Sequence
ggtggagaaattgtaccattgctga

SEQ ID NO: 262601 - DNA, 25 bp, Probe Sequence
ggtgcagagaaatgttaatgtcttc

SEQ ID NO: 262602 - DNA, 25 bp, Probe Sequence
ggtggagaacaagaaagctcagctg

SEQ ID NO: 262603 - DNA, 25 bp, Probe Sequence
ggtgggataaacaatgaagcctgca

SEQ ID NO: 262604 - DNA, 25 bp, Probe Sequence
ggtgcagagtcagaatatgaactgt

SEQ ID NO: 262605 - DNA, 25 bp, Probe Sequence
ggtgtagctgcaaggattgagaatg

SEQ ID NO: 262606 - DNA, 25 bp, Probe Sequence
ggtggactctatgtatgcatgaata

SEQ ID NO: 262607 - DNA, 25 bp, Probe Sequence
ggtgcccactgtgtacatgaaggtg

SEQ ID NO: 262608 - DNA, 25 bp, Probe Sequence
ggtgcccactgtgtacatgaaggtg

SEQ ID NO: 262609 - DNA, 25 bp, Probe Sequence
ggtctccaattacatcgactggatc

SEQ ID NO: 262610 - DNA, 25 bp, Probe Sequence
ggtcccgataactcgggcagcaccc

SEQ ID NO: 262611 - DNA, 25 bp, Probe Sequence
ggtcccggggcatcaggagaaaggc

SEQ ID NO: 262612 - DNA, 25 bp, Probe Sequence
ggacccaggcccggagggaatgagg

SEQ ID NO: 262613 - DNA, 25 bp, Probe Sequence
ggtctcgttccgtgctggagaatgc

SEQ ID NO: 262614 - DNA, 25 bp, Probe Sequence
ggtgtctgtctccagaggggaggga

SEQ ID NO: 262615 - DNA, 25 bp, Probe Sequence
ggtgtgctcaccaatgagtgaaagg

SEQ ID NO: 262616 - DNA, 25 bp, Probe Sequence
ggtgttgccgcttcattaagtggtt

SEQ ID NO: 262617 - DNA, 25 bp, Probe Sequence
ggtgcttgacgtattattgtccttt

SEQ ID NO: 262618 - DNA, 25 bp, Probe Sequence
ggtgtctaccatgattattttttta

SEQ ID NO: 262619 - DNA, 25 bp, Probe Sequence
ggtgagcccactgttatttattaaa

SEQ ID NO: 262620 - DNA, 25 bp, Probe Sequence
ggtgagccacaatagtttgtgcatt

SEQ ID NO: 262621 - DNA, 25 bp, Probe Sequence
ggtgaccattaagcttgagatgttc

SEQ ID NO: 262622 - DNA, 25 bp, Probe Sequence
ggtgacacattaacccagcttttct

SEQ ID NO: 262623 - DNA, 25 bp, Probe Sequence
ggtgagacattttgccaccttcttg

SEQ ID NO: 262624 - DNA, 25 bp, Probe Sequence
ggtgagtcatttgcatcactcgacc

SEQ ID NO: 262625 - DNA, 25 bp, Probe Sequence
ggtgaattgaatcctgcagctctga

SEQ ID NO: 262626 - DNA, 25 bp, Probe Sequence
ggtgatcacgaaactcgctggcatg

SEQ ID NO: 262627 - DNA, 25 bp, Probe Sequence
ggtgtccgagaagtcaggcacgtag

SEQ ID NO: 262628 - DNA, 25 bp, Probe Sequence
ggtgcccacagtgtcaggcactggg

SEQ ID NO: 262629 - DNA, 25 bp, Probe Sequence
ggtggatcacgaggtcaggatattg

SEQ ID NO: 262630 - DNA, 25 bp, Probe Sequence
ggtggatcacaaggtcaggagattg

SEQ ID NO: 262631 - DNA, 25 bp, Probe Sequence
ggtggatcacaaggccaggagttcg

SEQ ID NO: 262632 - DNA, 25 bp, Probe Sequence
ggtgggacaactgcagccagagact

SEQ ID NO: 262633 - DNA, 25 bp, Probe Sequence
ggtggtgaaattgcctctacctttg

SEQ ID NO: 262634 - DNA, 25 bp, Probe Sequence
ggtggtcaacatgttctctgaactt

SEQ ID NO: 262635 - DNA, 25 bp, Probe Sequence
ggtgggagacatgttcaattacttc

SEQ ID NO: 262636 - DNA, 25 bp, Probe Sequence
ggtgggtgacatgtggatcttgttt

SEQ ID NO: 262637 - DNA, 25 bp, Probe Sequence
ggtggagcaacagtatggttggtct

SEQ ID NO: 262638 - DNA, 25 bp, Probe Sequence
ggtgaggcttcaggggatgctgggc

SEQ ID NO: 262639 - DNA, 25 bp, Probe Sequence
ggtggaggaagacgaggtggcccct

SEQ ID NO: 262640 - DNA, 25 bp, Probe Sequence
ggtcctggaggagagccaggccggt

SEQ ID NO: 262641 - DNA, 25 bp, Probe Sequence
ggtggtgctgggactgagccagtcc

SEQ ID NO: 262642 - DNA, 25 bp, Probe Sequence
ggtggtgctgggaatggggtgcccc

SEQ ID NO: 262643 - DNA, 25 bp, Probe Sequence
ggtgttggatagatgccagggcccc

SEQ ID NO: 262644 - DNA, 25 bp, Probe Sequence
ggtgataagggaatccgggatccgc

SEQ ID NO: 262645 - DNA, 25 bp, Probe Sequence
ggtaacctagcaacgcagggaccgc

SEQ ID NO: 262646 - DNA, 25 bp, Probe Sequence
ggtgacaacggcaggaggggacgct

SEQ ID NO: 262647 - DNA, 25 bp, Probe Sequence
ggtcgatacggccggaagggtgtgg

SEQ ID NO: 262648 - DNA, 25 bp, Probe Sequence
ggtcagaacccaaggaagtggagtg

SEQ ID NO: 262649 - DNA, 25 bp, Probe Sequence
ggtgaaagctccagtgaggatgaag

SEQ ID NO: 262650 - DNA, 25 bp, Probe Sequence
ggtgtttgctcactaagcagggtcg

SEQ ID NO: 262651 - DNA, 25 bp, Probe Sequence
ggtggttctacaatagctgctggtg

SEQ ID NO: 262652 - DNA, 25 bp, Probe Sequence
ggtggatccaccatatcatgggatt

SEQ ID NO: 262653 - DNA, 25 bp, Probe Sequence
ggtggattacctgatgatgggagtt

SEQ ID NO: 262654 - DNA, 25 bp, Probe Sequence
ggtggacatacctgctgtgaaagtg

SEQ ID NO: 262655 - DNA, 25 bp, Probe Sequence
ggtggacagtcctgcggaaatgtgt

SEQ ID NO: 262656 - DNA, 25 bp, Probe Sequence
ggtggtttgatcaacaagaaatgtt

SEQ ID NO: 262657 - DNA, 25 bp, Probe Sequence
ggtggttatgacgagagagtcctgg

SEQ ID NO: 262658 - DNA, 25 bp, Probe Sequence
ggtgattctatgtccaagacttgat

SEQ ID NO: 262659 - DNA, 25 bp, Probe Sequence
ggtgtgttcatgggaaactgatgta

SEQ ID NO: 262660 - DNA, 25 bp, Probe Sequence
ggtggtgccaggaatgcttatggta

SEQ ID NO: 262661 - DNA, 25 bp, Probe Sequence
ggtggtgccaggaagaaatggagcg

SEQ ID NO: 262662 - DNA, 25 bp, Probe Sequence
ggtgtgaacaggtcaagaataacac

SEQ ID NO: 262663 - DNA, 25 bp, Probe Sequence
ggtgttaagcatgaaacaaacagca

SEQ ID NO: 262664 - DNA, 25 bp, Probe Sequence
ggtgttcagagcctcaacaaaacca

SEQ ID NO: 262665 - DNA, 25 bp, Probe Sequence
ggtgaccagagcccaagagaatcca

SEQ ID NO: 262666 - DNA, 25 bp, Probe Sequence
ggtgtcaatggcccgaaacacatat

SEQ ID NO: 262667 - DNA, 25 bp, Probe Sequence
ggtggtatggccaggacaacacatg

SEQ ID NO: 262668 - DNA, 25 bp, Probe Sequence
ggtggtggtgtcattccacacatcc

SEQ ID NO: 262669 - DNA, 25 bp, Probe Sequence
ggtggtggtcatatcaatcatagca

SEQ ID NO: 262670 - DNA, 25 bp, Probe Sequence
ggtggtttcattaaatgcagcactt

SEQ ID NO: 262671 - DNA, 25 bp, Probe Sequence
ggtgttttcttaatgcctcacattg

SEQ ID NO: 262672 - DNA, 25 bp, Probe Sequence
ggtgtttccatctatgtttcaatct

SEQ ID NO: 262673 - DNA, 25 bp, Probe Sequence
ggtggtcgtgcatatttaatctttg

SEQ ID NO: 262674 - DNA, 25 bp, Probe Sequence
ggtggtcttgtggtggtacatttgg

SEQ ID NO: 262675 - DNA, 25 bp, Probe Sequence
ggtggtgtgatgggtgtgtgcacat

SEQ ID NO: 262676 - DNA, 25 bp, Probe Sequence
ggtggttgtgcagtggctggaacag

SEQ ID NO: 262677 - DNA, 25 bp, Probe Sequence
ggtgaggtgtgagggaggagacgtg

SEQ ID NO: 262678 - DNA, 25 bp, Probe Sequence
ggtggtgctggagttggcaagactg

SEQ ID NO: 262679 - DNA, 25 bp, Probe Sequence
ggtgggtgtattttgcacaacagta

SEQ ID NO: 262680 - DNA, 25 bp, Probe Sequence
ggtgggttttcaggcaatagaggag

SEQ ID NO: 262681 - DNA, 25 bp, Probe Sequence
ggtgcaggttttgcagcatttggac

SEQ ID NO: 262682 - DNA, 25 bp, Probe Sequence
ggtgctgaggagagccgagttggac

SEQ ID NO: 262683 - DNA, 25 bp, Probe Sequence
ggtgcaaggagaagcgtcattttaa

SEQ ID NO: 262684 - DNA, 25 bp, Probe Sequence
ggtgataaaaatgtgttcctaaggt

SEQ ID NO: 262685 - DNA, 25 bp, Probe Sequence
ggtgacaaaagtgttgtcttcactg

SEQ ID NO: 262686 - DNA, 25 bp, Probe Sequence
ggtgactcctttatattcgtactgc

SEQ ID NO: 262687 - DNA, 25 bp, Probe Sequence
ggtggtttatttaagtctgtacatc

SEQ ID NO: 262688 - DNA, 25 bp, Probe Sequence
ggtggtttcagtttcatttgcataa

SEQ ID NO: 262689 - DNA, 25 bp, Probe Sequence
ggtggtttcagtttcatttgcataa

SEQ ID NO: 262690 - DNA, 25 bp, Probe Sequence
ggtggtcagggaaatcttctataag

SEQ ID NO: 262691 - DNA, 25 bp, Probe Sequence
ggtggtgctgggtgatttattataa

SEQ ID NO: 262692 - DNA, 25 bp, Probe Sequence
ggtgaggcttggattagcgtttaga

SEQ ID NO: 262693 - DNA, 25 bp, Probe Sequence
ggtgggcatttgatgcgggaggtgg

SEQ ID NO: 262694 - DNA, 25 bp, Probe Sequence
ggtgggatgtgtgtgggctgaaatt

SEQ ID NO: 262695 - DNA, 25 bp, Probe Sequence
ggtgtggattggagggtagaaaagt

SEQ ID NO: 262696 - DNA, 25 bp, Probe Sequence
ggtgcgaggtggagggctaacaaga

SEQ ID NO: 262697 - DNA, 25 bp, Probe Sequence
ggtggaggggtggtgaccatcgaaa

SEQ ID NO: 262698 - DNA, 25 bp, Probe Sequence
ggtggaggggtggtgaccatcgaaa

SEQ ID NO: 262699 - DNA, 25 bp, Probe Sequence
ggtggaggcaagttggtcaatgctg

SEQ ID NO: 262700 - DNA, 25 bp, Probe Sequence
ggtggtggcaaggatgtgtctgcac

SEQ ID NO: 262701 - DNA, 25 bp, Probe Sequence
ggtggtgtctgaggaggtctgcagt

SEQ ID NO: 262702 - DNA, 25 bp, Probe Sequence
ggtgcctgtgcttgaaggttgctgt

SEQ ID NO: 262703 - DNA, 25 bp, Probe Sequence
ggtgtctggcatgaaattactgtaa

SEQ ID NO: 262704 - DNA, 25 bp, Probe Sequence
ggtgtctggcatgaaattactgtaa

SEQ ID NO: 262705 - DNA, 25 bp, Probe Sequence
ggtggtgagatagcaattcagcgaa

SEQ ID NO: 262706 - DNA, 25 bp, Probe Sequence
ggtggtgatcaaaggttacagcaga

SEQ ID NO: 262707 - DNA, 25 bp, Probe Sequence
ggtggtgtcagaagcttatcaaaaa

SEQ ID NO: 262708 - DNA, 25 bp, Probe Sequence
ggtggtctcagtagcatctgtcaca

SEQ ID NO: 262709 - DNA, 25 bp, Probe Sequence
ggtgatgtctcaatagatgctgtta

SEQ ID NO: 262710 - DNA, 25 bp, Probe Sequence
ggtgggctgtcaagacgtgtcatgt

SEQ ID NO: 262711 - DNA, 25 bp, Probe Sequence
ggtggaggtgatggatccttccttc

SEQ ID NO: 262712 - DNA, 25 bp, Probe Sequence
ggtgggaatgtggatcagtccttcc

SEQ ID NO: 262713 - DNA, 25 bp, Probe Sequence
ggtggtagatgtgtgactcttatca

SEQ ID NO: 262714 - DNA, 25 bp, Probe Sequence
ggtcctcaagtcatgaccgtcacac

SEQ ID NO: 262715 - DNA, 25 bp, Probe Sequence
ggtgctgcagaagtttgttccaaac

SEQ ID NO: 262716 - DNA, 25 bp, Probe Sequence
ggtgtcctatctggttttgaaacca

SEQ ID NO: 262717 - DNA, 25 bp, Probe Sequence
ggtgtactggctgttctgtggaaaa

SEQ ID NO: 262718 - DNA, 25 bp, Probe Sequence
ggtgatagcattgctttcgtgtaaa

SEQ ID NO: 262719 - DNA, 25 bp, Probe Sequence
ggtgtgacatgttcattataatctc

SEQ ID NO: 262720 - DNA, 25 bp, Probe Sequence
ggtgtgcactgtctatttacatccg

SEQ ID NO: 262721 - DNA, 25 bp, Probe Sequence
ggtcgagcgatggatttccgtctct

SEQ ID NO: 262722 - DNA, 25 bp, Probe Sequence
ggtggatcactggaggtcaggtctt

SEQ ID NO: 262723 - DNA, 25 bp, Probe Sequence
ggtggtgacggacgagcaaggcatc

SEQ ID NO: 262724 - DNA, 25 bp, Probe Sequence
ggtgggttggagactcagcaggctc

SEQ ID NO: 262725 - DNA, 25 bp, Probe Sequence
ggatgaaattgacaccgactctgcc

SEQ ID NO: 262726 - DNA, 25 bp, Probe Sequence
ggtgacaattgacacgatttcctgc

SEQ ID NO: 262727 - DNA, 25 bp, Probe Sequence
ggtaatctggaagagtttcctgacc

SEQ ID NO: 262728 - DNA, 25 bp, Probe Sequence
ggtgtcactgtgtaaagtttttgac

SEQ ID NO: 262729 - DNA, 25 bp, Probe Sequence
ggtgtcactgtgtaaagtttttgac

SEQ ID NO: 262730 - DNA, 25 bp, Probe Sequence
ggtgtcacagtgtttggttcttttg

SEQ ID NO: 262731 - DNA, 25 bp, Probe Sequence
ggtgtgaagtctccggtggttattg

SEQ ID NO: 262732 - DNA, 25 bp, Probe Sequence
ggtgtgaacctgggagtgcttttat

SEQ ID NO: 262733 - DNA, 25 bp, Probe Sequence
ggtgtgaacctgggagtgcttttat

SEQ ID NO: 262734 - DNA, 25 bp, Probe Sequence
ggtgggacctgacgagttggtggca

SEQ ID NO: 262735 - DNA, 25 bp, Probe Sequence
ggtgggacctgacgagttggtggca

SEQ ID NO: 262736 - DNA, 25 bp, Probe Sequence
ggtggttcactggaggttgagttcg

SEQ ID NO: 262737 - DNA, 25 bp, Probe Sequence
ggtggtctgactgacagcttgggta

SEQ ID NO: 262738 - DNA, 25 bp, Probe Sequence
ggtggtcctctgcatcacaaggaaa

SEQ ID NO: 262739 - DNA, 25 bp, Probe Sequence
ggtgcgaccatctcctaaaggaata

SEQ ID NO: 262740 - DNA, 25 bp, Probe Sequence
ggtgcagaccgttccgtaaggagga

SEQ ID NO: 262741 - DNA, 25 bp, Probe Sequence
ggtgcagccccttttgaaaggggtg

SEQ ID NO: 262742 - DNA, 25 bp, Probe Sequence
ggtgcaccgcggcattaagggggtg

SEQ ID NO: 262743 - DNA, 25 bp, Probe Sequence
ggtccccaaggcattaggatggggg

SEQ ID NO: 262744 - DNA, 25 bp, Probe Sequence
ggtccatctggagttttgaggggtg

SEQ ID NO: 262745 - DNA, 25 bp, Probe Sequence
ggtctcgctggacgttggaggaaag

SEQ ID NO: 262746 - DNA, 25 bp, Probe Sequence
ggtgtcctatcccatatggagaaga

SEQ ID NO: 262747 - DNA, 25 bp, Probe Sequence
ggtgccttgactcagatggtgcata

SEQ ID NO: 262748 - DNA, 25 bp, Probe Sequence
ggtgagcatgaacgtgcagggtgat

SEQ ID NO: 262749 - DNA, 25 bp, Probe Sequence
ggtgtgcagtacctcaacgagatca

SEQ ID NO: 262750 - DNA, 25 bp, Probe Sequence
ggtcgagtacgtggactggattctg

SEQ ID NO: 262751 - DNA, 25 bp, Probe Sequence
ggtgggaaggtggcttgagttcagg

SEQ ID NO: 262752 - DNA, 25 bp, Probe Sequence
ggtgggaggattgcttgaggccagg

SEQ ID NO: 262753 - DNA, 25 bp, Probe Sequence
ggtgggaggatcacttgagcccagg

SEQ ID NO: 262754 - DNA, 25 bp, Probe Sequence
ggtgggggaaaagtagctccagctc

SEQ ID NO: 262755 - DNA, 25 bp, Probe Sequence
ggtgggggaaagtatggctgcgatg

SEQ ID NO: 262756 - DNA, 25 bp, Probe Sequence
ggtggtggcaagacaactggctttg

SEQ ID NO: 262757 - DNA, 25 bp, Probe Sequence
ggtggtggcaagacaactggctttg

SEQ ID NO: 262758 - DNA, 25 bp, Probe Sequence
ggtgaggcatctggttactggttat

SEQ ID NO: 262759 - DNA, 25 bp, Probe Sequence
ggtgaggcatcagggaacgggaatc

SEQ ID NO: 262760 - DNA, 25 bp, Probe Sequence
ggtgtgctcatacttggactgggaa

SEQ ID NO: 262761 - DNA, 25 bp, Probe Sequence
ggtgtgcttcagttgggtggcaaat

SEQ ID NO: 262762 - DNA, 25 bp, Probe Sequence
ggtgatgcatgccagatcgggaggc

SEQ ID NO: 262763 - DNA, 25 bp, Probe Sequence
ggtgctgctgcgtaaggaatctcgg

SEQ ID NO: 262764 - DNA, 25 bp, Probe Sequence
ggtgctcttccaaggatatttgggc

SEQ ID NO: 262765 - DNA, 25 bp, Probe Sequence
ggtcagagtctcaggatcgttggtg

SEQ ID NO: 262766 - DNA, 25 bp, Probe Sequence
ggtgctagtgtatgagttgttgttg

SEQ ID NO: 262767 - DNA, 25 bp, Probe Sequence
ggtgttttagagtttctgtgtagtt

SEQ ID NO: 262768 - DNA, 25 bp, Probe Sequence
ggtgggtgattattttttatactgt

SEQ ID NO: 262769 - DNA, 25 bp, Probe Sequence
ggtgggtgattattttttatactgt

SEQ ID NO: 262770 - DNA, 25 bp, Probe Sequence
ggtgggtgattattttttatactgt

SEQ ID NO: 262771 - DNA, 25 bp, Probe Sequence
ggtgagtgcgtactttttctacctg

SEQ ID NO: 262772 - DNA, 25 bp, Probe Sequence
ggtgagcggctatagtgttcatccc

SEQ ID NO: 262773 - DNA, 25 bp, Probe Sequence
ggtgtcgatgcactacagtgacccc

SEQ ID NO: 262774 - DNA, 25 bp, Probe Sequence
ggtgattatgagccaactgatgcca

SEQ ID NO: 262775 - DNA, 25 bp, Probe Sequence
ggtggtcatcatcaaggcatgccag

SEQ ID NO: 262776 - DNA, 25 bp, Probe Sequence
ggtgtgtccagagtcagctgagggc

SEQ ID NO: 262777 - DNA, 25 bp, Probe Sequence
ggtgtctcacagttggtaggtgcct

SEQ ID NO: 262778 - DNA, 25 bp, Probe Sequence
ggtgatctacagtacccaggaggcg

SEQ ID NO: 262779 - DNA, 25 bp, Probe Sequence
ggtactacaagaacatcggtctggg

SEQ ID NO: 262780 - DNA, 25 bp, Probe Sequence
ggtctggacacagtgcccgtgtcgg

SEQ ID NO: 262781 - DNA, 25 bp, Probe Sequence
ggtcaggagatcgagaccatcccgg

SEQ ID NO: 262782 - DNA, 25 bp, Probe Sequence
ggtcaggagatcgagaccatcccgg

SEQ ID NO: 262783 - DNA, 25 bp, Probe Sequence
ggtgactgagctgcagactcacccg

SEQ ID NO: 262784 - DNA, 25 bp, Probe Sequence
ggtgtgcagagtgaactgccgccga

SEQ ID NO: 262785 - DNA, 25 bp, Probe Sequence
ggtgtcatgaccaaactgattccaa

SEQ ID NO: 262786 - DNA, 25 bp, Probe Sequence
ggtgtattccatggacatgttccac

SEQ ID NO: 262787 - DNA, 25 bp, Probe Sequence
ggtgaagtccatgcagatgttccac

SEQ ID NO: 262788 - DNA, 25 bp, Probe Sequence
ggtgaggtccagagatatatccaga

SEQ ID NO: 262789 - DNA, 25 bp, Probe Sequence
ggtgggtcacagtctgtatttccac

SEQ ID NO: 262790 - DNA, 25 bp, Probe Sequence
ggtggtgtgacgcctgtatattcca

SEQ ID NO: 262791 - DNA, 25 bp, Probe Sequence
ggtgtgatatgaaccagtccattca

SEQ ID NO: 262792 - DNA, 25 bp, Probe Sequence
ggtgatgaaaggtctgtcctgtgca

SEQ ID NO: 262793 - DNA, 25 bp, Probe Sequence
ggtgtgagagtgatctgtcctgtga

SEQ ID NO: 262794 - DNA, 25 bp, Probe Sequence
ggtgtggtggctcatacctgtaatc

SEQ ID NO: 262795 - DNA, 25 bp, Probe Sequence
ggtgtggtggttcatgcctgtaatc

SEQ ID NO: 262796 - DNA, 25 bp, Probe Sequence
ggtgtaggtgttgtgagcttttgct

SEQ ID NO: 262797 - DNA, 25 bp, Probe Sequence
ggtgtacttgtggttggctatggtg

SEQ ID NO: 262798 - DNA, 25 bp, Probe Sequence
ggtgaacggtgcctgggtgcaggct

SEQ ID NO: 262799 - DNA, 25 bp, Probe Sequence
ggtgaacgcagacgagggggagccg

SEQ ID NO: 262800 - DNA, 25 bp, Probe Sequence
ggtgcagacaagtgggcggtgtcca

SEQ ID NO: 262801 - DNA, 25 bp, Probe Sequence
ggttgacaagggtgtggtgcctcta

SEQ ID NO: 262802 - DNA, 25 bp, Probe Sequence
ggtctgacaaggacccgtgtcacat

SEQ ID NO: 262803 - DNA, 25 bp, Probe Sequence
ggtgtgtctacgacttcgagataat

SEQ ID NO: 262804 - DNA, 25 bp, Probe Sequence
ggtgtattgcctacattgggtttga

SEQ ID NO: 262805 - DNA, 25 bp, Probe Sequence
ggtgtcaacgctgcagggagttgtg

SEQ ID NO: 262806 - DNA, 25 bp, Probe Sequence
ggtgtcattttaagacgagtaggcg

SEQ ID NO: 262807 - DNA, 25 bp, Probe Sequence
ggtgatatggatgatagtcgaggag

SEQ ID NO: 262808 - DNA, 25 bp, Probe Sequence
ggtgtgagccatgcaatgggaggga

SEQ ID NO: 262809 - DNA, 25 bp, Probe Sequence
ggtgtccattgccatatcggctcgc

SEQ ID NO: 262810 - DNA, 25 bp, Probe Sequence
ggtgtcaatgacttttggctgggca

SEQ ID NO: 262811 - DNA, 25 bp, Probe Sequence
ggtgtaaacgctggtgtctgaatca

SEQ ID NO: 262812 - DNA, 25 bp, Probe Sequence
ggtgttacagcagtggcatttaata

SEQ ID NO: 262813 - DNA, 25 bp, Probe Sequence
ggtgtcaagcaggcgctcttgtgaa

SEQ ID NO: 262814 - DNA, 25 bp, Probe Sequence
ggtgagtacaaccttgctgtgaagg

SEQ ID NO: 262815 - DNA, 25 bp, Probe Sequence
ggtggggacagacttgctggaggag

SEQ ID NO: 262816 - DNA, 25 bp, Probe Sequence
ggtggggacaaggctgtcgtggcaa

SEQ ID NO: 262817 - DNA, 25 bp, Probe Sequence
ggtggtggacggactgtaattgata

SEQ ID NO: 262818 - DNA, 25 bp, Probe Sequence
ggtggtggaagatctgaattccaga

SEQ ID NO: 262819 - DNA, 25 bp, Probe Sequence
ggtgtggtgacagataaattcggca

SEQ ID NO: 262820 - DNA, 25 bp, Probe Sequence
ggtgggcatgaagaggaggtagaga

SEQ ID NO: 262821 - DNA, 25 bp, Probe Sequence
ggtgtacatcaaaagaaggctagca

SEQ ID NO: 262822 - DNA, 25 bp, Probe Sequence
ggtgtactcatccataaagtcatcc

SEQ ID NO: 262823 - DNA, 25 bp, Probe Sequence
ggtgttctctcaataacccaccttt

SEQ ID NO: 262824 - DNA, 25 bp, Probe Sequence
ggtgttctctcaataacccaccttt

SEQ ID NO: 262825 - DNA, 25 bp, Probe Sequence
ggtcccttcagtatcttcaaggttt

SEQ ID NO: 262826 - DNA, 25 bp, Probe Sequence
ggtcccttcagtatcttcaaggttt

SEQ ID NO: 262827 - DNA, 25 bp, Probe Sequence
ggtcccttcagtatcttcaaggttt

SEQ ID NO: 262828 - DNA, 25 bp, Probe Sequence
ggtgccctactgattttgctgaggt

SEQ ID NO: 262829 - DNA, 25 bp, Probe Sequence
ggtgcccattagatttctttagtac

SEQ ID NO: 262830 - DNA, 25 bp, Probe Sequence
ggtgtgctttagatttctcattaga

SEQ ID NO: 262831 - DNA, 25 bp, Probe Sequence
ggtgtctgataaccctttgtggaga

SEQ ID NO: 262832 - DNA, 25 bp, Probe Sequence
ggtgattgtcaagtaactgtgtggg

SEQ ID NO: 262833 - DNA, 25 bp, Probe Sequence
ggtgatggtcaagtaaactatgaag

SEQ ID NO: 262834 - DNA, 25 bp, Probe Sequence
ggtgaggtgaagggcactctatata

SEQ ID NO: 262835 - DNA, 25 bp, Probe Sequence
ggtgtggtggaggtgacccatgacc

SEQ ID NO: 262836 - DNA, 25 bp, Probe Sequence
ggtgtggtgcgaccagagacacgac

SEQ ID NO: 262837 - DNA, 25 bp, Probe Sequence
ggtgcgcaggctgcgcgagttctac

SEQ ID NO: 262838 - DNA, 25 bp, Probe Sequence
ggtgtgtaccccaatgtatgctatc

SEQ ID NO: 262839 - DNA, 25 bp, Probe Sequence
ggtgtgtacctgtaatctcagctac

SEQ ID NO: 262840 - DNA, 25 bp, Probe Sequence
ggtgtgtcaacttcatatcttgagt

SEQ ID NO: 262841 - DNA, 25 bp, Probe Sequence
ggtgtataactctagagcttgaatt

SEQ ID NO: 262842 - DNA, 25 bp, Probe Sequence
ggtgtatagcaccaaggtctgggca

SEQ ID NO: 262843 - DNA, 25 bp, Probe Sequence
ggtgtacagatctgaggtcatcaag

SEQ ID NO: 262844 - DNA, 25 bp, Probe Sequence
ggtgttcgacaatggcagcatctac

SEQ ID NO: 262845 - DNA, 25 bp, Probe Sequence
ggtcctggcaaatgtagcctacatc

SEQ ID NO: 262846 - DNA, 25 bp, Probe Sequence
ggtggggcaggatctcagccataaa

SEQ ID NO: 262847 - DNA, 25 bp, Probe Sequence
ggtggggcaggagcagatgaggaaa

SEQ ID NO: 262848 - DNA, 25 bp, Probe Sequence
ggtggggcaggagcagatgaggaaa

SEQ ID NO: 262849 - DNA, 25 bp, Probe Sequence
ggtggggcgaggaagagcattagga

SEQ ID NO: 262850 - DNA, 25 bp, Probe Sequence
ggtgaagatggaggtatgagttagt

SEQ ID NO: 262851 - DNA, 25 bp, Probe Sequence
ggtgtctgaggaggtctgcagtaag

SEQ ID NO: 262852 - DNA, 25 bp, Probe Sequence
ggtgaccaggaaactcagctagatc

SEQ ID NO: 262853 - DNA, 25 bp, Probe Sequence
ggtgcccaggacatgaagtgcgtca

SEQ ID NO: 262854 - DNA, 25 bp, Probe Sequence
ggtgccagcagccgcggtaattcca

SEQ ID NO: 262855 - DNA, 25 bp, Probe Sequence
ggtgacagagccagatcctatctca

SEQ ID NO: 262856 - DNA, 25 bp, Probe Sequence
ggtgacataccaagactctgtctca

SEQ ID NO: 262857 - DNA, 25 bp, Probe Sequence
ggtgcctaccaagaagtctcagatc

SEQ ID NO: 262858 - DNA, 25 bp, Probe Sequence
ggtgttggcccagaagatgcttgaa

SEQ ID NO: 262859 - DNA, 25 bp, Probe Sequence
ggtgatcattgggttcaggagttga

SEQ ID NO: 262860 - DNA, 25 bp, Probe Sequence
ggtgatccggttttggcagtacatc

SEQ ID NO: 262861 - DNA, 25 bp, Probe Sequence
ggtgatccggttttggcagtacatc

SEQ ID NO: 262862 - DNA, 25 bp, Probe Sequence
ggtgtccctgaattctgggtaccac

SEQ ID NO: 262863 - DNA, 25 bp, Probe Sequence
ggtgctgcccgagttatcgggaccc

SEQ ID NO: 262864 - DNA, 25 bp, Probe Sequence
ggtgtgccatccagtgccgggtcac

SEQ ID NO: 262865 - DNA, 25 bp, Probe Sequence
ggtgtgctcttgaggcgagaggccc

SEQ ID NO: 262866 - DNA, 25 bp, Probe Sequence
ggtgatgcttttccggaagagtccc

SEQ ID NO: 262867 - DNA, 25 bp, Probe Sequence
ggtgtccctttcttgtaagattctc

SEQ ID NO: 262868 - DNA, 25 bp, Probe Sequence
ggtgtcttctttgacttaatgtctt

SEQ ID NO: 262869 - DNA, 25 bp, Probe Sequence
ggtgtcttctttgacttaatgtctt

SEQ ID NO: 262870 - DNA, 25 bp, Probe Sequence
ggtgccttggttgaaagtattctca

SEQ ID NO: 262871 - DNA, 25 bp, Probe Sequence
ggtcctggtcctaaagagttattca

SEQ ID NO: 262872 - DNA, 25 bp, Probe Sequence
ggtctgtggccttaagagaatgtag

SEQ ID NO: 262873 - DNA, 25 bp, Probe Sequence
ggtctgtggccttaagagaatgtag

SEQ ID NO: 262874 - DNA, 25 bp, Probe Sequence
ggtgttggtgctgtaagaggtcact

SEQ ID NO: 262875 - DNA, 25 bp, Probe Sequence
ggtgttgagtgtataaacctccatt

SEQ ID NO: 262876 - DNA, 25 bp, Probe Sequence
ggtgttgggtgagtacaaccttgct

SEQ ID NO: 262877 - DNA, 25 bp, Probe Sequence
ggtgtggctggtcgtaaacagtttt

SEQ ID NO: 262878 - DNA, 25 bp, Probe Sequence
ggtgggcgagggaatagtcagaggg

SEQ ID NO: 262879 - DNA, 25 bp, Probe Sequence
ggtgaaaaggacaatggctggagta

SEQ ID NO: 262880 - DNA, 25 bp, Probe Sequence
ggtgcaatcaatagtccaggggtct

SEQ ID NO: 262881 - DNA, 25 bp, Probe Sequence
ggtgcctttagtgatggcctggctc

SEQ ID NO: 262882 - DNA, 25 bp, Probe Sequence
ggtgtgccttagtggccttgatgcc

SEQ ID NO: 262883 - DNA, 25 bp, Probe Sequence
ggtgcggtatagtggactcgactgc

SEQ ID NO: 262884 - DNA, 25 bp, Probe Sequence
ggtgcaggtaccagtgtctgtgacg

SEQ ID NO: 262885 - DNA, 25 bp, Probe Sequence
ggtctgggatccacgtctagggacc

SEQ ID NO: 262886 - DNA, 25 bp, Probe Sequence
ggtccggccgcaaagtctttgcaga

SEQ ID NO: 262887 - DNA, 25 bp, Probe Sequence
ggtccccaggagagatgctttgagg

SEQ ID NO: 262888 - DNA, 25 bp, Probe Sequence
ggtccccaggagagatgctttgagg

SEQ ID NO: 262889 - DNA, 25 bp, Probe Sequence
ggtaatcgggaaaggtctgctaggg

SEQ ID NO: 262890 - DNA, 25 bp, Probe Sequence
ggtgacaggagttacaggttctaag

SEQ ID NO: 262891 - DNA, 25 bp, Probe Sequence
ggtgaaggacagaaaagtctttatg

SEQ ID NO: 262892 - DNA, 25 bp, Probe Sequence
ggtgcaaaccagtgaacacctttgt

SEQ ID NO: 262893 - DNA, 25 bp, Probe Sequence
ggtcattgagcccaaggacatccat

SEQ ID NO: 262894 - DNA, 25 bp, Probe Sequence
ggtgttgatgcccaaggtgatgcac

SEQ ID NO: 262895 - DNA, 25 bp, Probe Sequence
ggtgtatgagctccagaggctgctc

SEQ ID NO: 262896 - DNA, 25 bp, Probe Sequence
ggtgcatctggccaatgagtctgct

SEQ ID NO: 262897 - DNA, 25 bp, Probe Sequence
ggtgcagtgggcaggatcatgcctc

SEQ ID NO: 262898 - DNA, 25 bp, Probe Sequence
ggtgtgtgaggaagtcactactcct

SEQ ID NO: 262899 - DNA, 25 bp, Probe Sequence
ggtgagctgggaaacctcacccttg

SEQ ID NO: 262900 - DNA, 25 bp, Probe Sequence
ggtgactttgcagatctgctcaccc

SEQ ID NO: 262901 - DNA, 25 bp, Probe Sequence
ggtgtttggcatcgatgctctcacc

SEQ ID NO: 262902 - DNA, 25 bp, Probe Sequence
ggtgtggtggcatgcatctgtggcc

SEQ ID NO: 262903 - DNA, 25 bp, Probe Sequence
ggtgtgagtggattgcttatggcta

SEQ ID NO: 262904 - DNA, 25 bp, Probe Sequence
ggtgtgcgggtgcactatggcttgt

SEQ ID NO: 262905 - DNA, 25 bp, Probe Sequence
ggtgatgggttgtgttatgcttgta

SEQ ID NO: 262906 - DNA, 25 bp, Probe Sequence
ggtgatgggttgtgttatgcttgta

SEQ ID NO: 262907 - DNA, 25 bp, Probe Sequence
ggtgtggtcttgtacattttggcta

SEQ ID NO: 262908 - DNA, 25 bp, Probe Sequence
ggtgaagttttagtctttgtgtagc

SEQ ID NO: 262909 - DNA, 25 bp, Probe Sequence
ggtgaatatggtaattgttatgtta

SEQ ID NO: 262910 - DNA, 25 bp, Probe Sequence
ggtgaagctgagtttctgtccaatg

SEQ ID NO: 262911 - DNA, 25 bp, Probe Sequence
ggtgaagctgagtttctgtccaatg

SEQ ID NO: 262912 - DNA, 25 bp, Probe Sequence
ggtgtcagaaggatcatgtgccaca

SEQ ID NO: 262913 - DNA, 25 bp, Probe Sequence
ggtgtgccagggaatgcagggcccc

SEQ ID NO: 262914 - DNA, 25 bp, Probe Sequence
ggtgatgccgggaagactgaggcta

SEQ ID NO: 262915 - DNA, 25 bp, Probe Sequence
ggtgtctctgtgtatagtctttgct

SEQ ID NO: 262916 - DNA, 25 bp, Probe Sequence
ggtgtccatggttagaatttgatct

SEQ ID NO: 262917 - DNA, 25 bp, Probe Sequence
ggtgtctctggtatagtctttgcta

SEQ ID NO: 262918 - DNA, 25 bp, Probe Sequence
ggtgattctggtatcatggtgttta

SEQ ID NO: 262919 - DNA, 25 bp, Probe Sequence
ggtgatttggatgctgttctgtgat

SEQ ID NO: 262920 - DNA, 25 bp, Probe Sequence
ggtgtctttattagactcatgctga

SEQ ID NO: 262921 - DNA, 25 bp, Probe Sequence
ggtgtgcttttgggactgcatggat

SEQ ID NO: 262922 - DNA, 25 bp, Probe Sequence
ggtgttttagatcactgagtgtaca

SEQ ID NO: 262923 - DNA, 25 bp, Probe Sequence
ggtcactcctcaggaccatgaggta

SEQ ID NO: 262924 - DNA, 25 bp, Probe Sequence
ggtccagctgtaataccagggtact

SEQ ID NO: 262925 - DNA, 25 bp, Probe Sequence
ggtccactttattctcaaaattcaa

SEQ ID NO: 262926 - DNA, 25 bp, Probe Sequence
ggtgaactggtctcactggaaccag

SEQ ID NO: 262927 - DNA, 25 bp, Probe Sequence
ggtgaattgctgcctatactgagag

SEQ ID NO: 262928 - DNA, 25 bp, Probe Sequence
ggtgatttgttgatatctgtaacac

SEQ ID NO: 262929 - DNA, 25 bp, Probe Sequence
ggtgtttgtagcatttttatcatac

SEQ ID NO: 262930 - DNA, 25 bp, Probe Sequence
ggtgtttgtagcatttttatcatac

SEQ ID NO: 262931 - DNA, 25 bp, Probe Sequence
ggtgtttgtagcatttttatcatac

SEQ ID NO: 262932 - DNA, 25 bp, Probe Sequence
ggtgcaaattagctttttatcttct

SEQ ID NO: 262933 - DNA, 25 bp, Probe Sequence
ggtaggactatggttgatatttttc

SEQ ID NO: 262934 - DNA, 25 bp, Probe Sequence
ggtgatgtagtatgttgtcttattt

SEQ ID NO: 262935 - DNA, 25 bp, Probe Sequence
ggtgagaggctacagtgtgtatatt

SEQ ID NO: 262936 - DNA, 25 bp, Probe Sequence
ggtgagtttagttgtgcatgccttt

SEQ ID NO: 262937 - DNA, 25 bp, Probe Sequence
ggtgttattacttagcgttattcta

SEQ ID NO: 262938 - DNA, 25 bp, Probe Sequence
ggtgtttgagaaatactgttaatta

SEQ ID NO: 262939 - DNA, 25 bp, Probe Sequence
ggtgttatgggaatgagatcctact

SEQ ID NO: 262940 - DNA, 25 bp, Probe Sequence
ggtcgtgaggaaaagcacctggttt

SEQ ID NO: 262941 - DNA, 25 bp, Probe Sequence
ggtcggaacgatgagcaccatgcca

SEQ ID NO: 262942 - DNA, 25 bp, Probe Sequence
ggtgcagtggaggattacttcatgc

SEQ ID NO: 262943 - DNA, 25 bp, Probe Sequence
ggtagaggacgatactctgaccgtt

SEQ ID NO: 262944 - DNA, 25 bp, Probe Sequence
ggtcgagctgtgcagttttagcggg

SEQ ID NO: 262945 - DNA, 25 bp, Probe Sequence
ggtgcagactgtgttggtggtggta

SEQ ID NO: 262946 - DNA, 25 bp, Probe Sequence
ggtgcagtaattctggctgatgtgg

SEQ ID NO: 262947 - DNA, 25 bp, Probe Sequence
ggtgcagtgtaacgatgcactttgg

SEQ ID NO: 262948 - DNA, 25 bp, Probe Sequence
ggtgcagcattatatggcctactgg

SEQ ID NO: 262949 - DNA, 25 bp, Probe Sequence
ggtgcaacaaagatgcctcgcagcg

SEQ ID NO: 262950 - DNA, 25 bp, Probe Sequence
ggtgcaaagaacggcttggcttggc

SEQ ID NO: 262951 - DNA, 25 bp, Probe Sequence
ggtgcaagggacgcttggacaacgg

SEQ ID NO: 262952 - DNA, 25 bp, Probe Sequence
ggtgagagaagacctctgtgaggaa

SEQ ID NO: 262953 - DNA, 25 bp, Probe Sequence
ggtgagtagcactctctgagagctc

SEQ ID NO: 262954 - DNA, 25 bp, Probe Sequence
ggtgagatagcaattcagcgaacaa

SEQ ID NO: 262955 - DNA, 25 bp, Probe Sequence
ggtgatgacatagctctgctgaagc

SEQ ID NO: 262956 - DNA, 25 bp, Probe Sequence
ggtgtgacatgaagctactcagcac

SEQ ID NO: 262957 - DNA, 25 bp, Probe Sequence
ggtgttagaagtaccagcacaattt

SEQ ID NO: 262958 - DNA, 25 bp, Probe Sequence
ggtgtctgaaagtcacggacaattg

SEQ ID NO: 262959 - DNA, 25 bp, Probe Sequence
ggtgtcgaataggaggacccatgta

SEQ ID NO: 262960 - DNA, 25 bp, Probe Sequence
ggtgtcagaaacaaggacctctccc

SEQ ID NO: 262961 - DNA, 25 bp, Probe Sequence
ggtgtactggacaggagacatcccc

SEQ ID NO: 262962 - DNA, 25 bp, Probe Sequence
ggtgtacttgagctgtgaggtcatc

SEQ ID NO: 262963 - DNA, 25 bp, Probe Sequence
ggagaacttcgtcctgaggttactc

SEQ ID NO: 262964 - DNA, 25 bp, Probe Sequence
ggtgtcctttgtcgaagtggtcagc

SEQ ID NO: 262965 - DNA, 25 bp, Probe Sequence
ggtgtgacttttaattagttcaggt

SEQ ID NO: 262966 - DNA, 25 bp, Probe Sequence
ggtgtgaattttgaagatcttgggt

SEQ ID NO: 262967 - DNA, 25 bp, Probe Sequence
ggtgcttgcagttttaaatattgtg

SEQ ID NO: 262968 - DNA, 25 bp, Probe Sequence
ggtgtctagctgttgtggactttag

SEQ ID NO: 262969 - DNA, 25 bp, Probe Sequence
ggtgcttagtgattgcggtttcggt

SEQ ID NO: 262970 - DNA, 25 bp, Probe Sequence
ggtgctctggtgctaggttacgagg

SEQ ID NO: 262971 - DNA, 25 bp, Probe Sequence
ggtgcaatatgctgctagaattacg

SEQ ID NO: 262972 - DNA, 25 bp, Probe Sequence
ggtgtaatcctgagagattcacatg

SEQ ID NO: 262973 - DNA, 25 bp, Probe Sequence
ggtgtccctgtgagagttctgcaga

SEQ ID NO: 262974 - DNA, 25 bp, Probe Sequence
ggtgttctcttgagagcaagtgaga

SEQ ID NO: 262975 - DNA, 25 bp, Probe Sequence
ggtgtacttcgctgagaaggtgacg

SEQ ID NO: 262976 - DNA, 25 bp, Probe Sequence
ggtgtttacgcccgagatgaaacag

SEQ ID NO: 262977 - DNA, 25 bp, Probe Sequence
ggtgctttcacctgctggtaaaagg

SEQ ID NO: 262978 - DNA, 25 bp, Probe Sequence
ggtgctgattctggggggcattaaa

SEQ ID NO: 262979 - DNA, 25 bp, Probe Sequence
ggtctgactcacggggaatttccaa

SEQ ID NO: 262980 - DNA, 25 bp, Probe Sequence
ggactactttccagaatttgctcgc

SEQ ID NO: 262981 - DNA, 25 bp, Probe Sequence
ggtaactgttccaggattgctccag

SEQ ID NO: 262982 - DNA, 25 bp, Probe Sequence
ggtgtacagacttcttggtacccag

SEQ ID NO: 262983 - DNA, 25 bp, Probe Sequence
ggtctatttctagttattacccaga

SEQ ID NO: 262984 - DNA, 25 bp, Probe Sequence
ggtgtttgttaggatcacctcccag

SEQ ID NO: 262985 - DNA, 25 bp, Probe Sequence
ggtgtctcttttgacaagacttcag

SEQ ID NO: 262986 - DNA, 25 bp, Probe Sequence
ggtgctctttttgctacagaatctg

SEQ ID NO: 262987 - DNA, 25 bp, Probe Sequence
ggtgactctcatagacgctacaact

SEQ ID NO: 262988 - DNA, 25 bp, Probe Sequence
ggtgccttctcggctcttgacactt

SEQ ID NO: 262989 - DNA, 25 bp, Probe Sequence
ggtgcgatttgggcacctgactgtc

SEQ ID NO: 262990 - DNA, 25 bp, Probe Sequence
ggtgcggtcataacacgctacagcc

SEQ ID NO: 262991 - DNA, 25 bp, Probe Sequence
ggtgctgctgatacaacaatcatac

SEQ ID NO: 262992 - DNA, 25 bp, Probe Sequence
ggtgctgtggccaacaagctatgcc

SEQ ID NO: 262993 - DNA, 25 bp, Probe Sequence
ggtgataagccgtcaagcattgctg

SEQ ID NO: 262994 - DNA, 25 bp, Probe Sequence
ggtgtccatgagctctatgatctgg

SEQ ID NO: 262995 - DNA, 25 bp, Probe Sequence
ggtgtccatgagctctatgatctgg

SEQ ID NO: 262996 - DNA, 25 bp, Probe Sequence
ggtgtccatacatatgaactggcta

SEQ ID NO: 262997 - DNA, 25 bp, Probe Sequence
ggtgctggtgaagatgaccgcccag

SEQ ID NO: 262998 - DNA, 25 bp, Probe Sequence
ggtgctgctgatgtaatacctgggc

SEQ ID NO: 262999 - DNA, 25 bp, Probe Sequence
ggtgctcatgtcttgacaacgtaat

SEQ ID NO: 263000 - DNA, 25 bp, Probe Sequence
ggtcgatgacatgaaaggtgaagta

SEQ ID NO: 263001 - DNA, 25 bp, Probe Sequence
ggtagaggcacaaagaggcaaacta

SEQ ID NO: 263002 - DNA, 25 bp, Probe Sequence
ggtgcggtgccaacagggaaactct

SEQ ID NO: 263003 - DNA, 25 bp, Probe Sequence
ggtgctgtgggaactgggatccaat

SEQ ID NO: 263004 - DNA, 25 bp, Probe Sequence
ggtgctggtttggctatggccacaa

SEQ ID NO: 263005 - DNA, 25 bp, Probe Sequence
ggtcaggtcttggtaggtgcctgca

SEQ ID NO: 263006 - DNA, 25 bp, Probe Sequence
ggtgcagggtgggtaggttgctctg

SEQ ID NO: 263007 - DNA, 25 bp, Probe Sequence
ggtgcgggagggaagacctctcact

SEQ ID NO: 263008 - DNA, 25 bp, Probe Sequence
ggtgctgggaagacaacacttctga

SEQ ID NO: 263009 - DNA, 25 bp, Probe Sequence
ggtgtagtgaagaagcagactggct

SEQ ID NO: 263010 - DNA, 25 bp, Probe Sequence
ggtgtctataagaagctcacgggca

SEQ ID NO: 263011 - DNA, 25 bp, Probe Sequence
ggacttaaacgaatcatcagggacc

SEQ ID NO: 263012 - DNA, 25 bp, Probe Sequence
ggactgttaactgtccccagatact

SEQ ID NO: 263013 - DNA, 25 bp, Probe Sequence
ggtcggtaacagaccttccattcct

SEQ ID NO: 263014 - DNA, 25 bp, Probe Sequence
ggtcggtaacagaccttccattcct

SEQ ID NO: 263015 - DNA, 25 bp, Probe Sequence
ggtccgggattgcccgggatctcac

SEQ ID NO: 263016 - DNA, 25 bp, Probe Sequence
ggtccggaattcccgggatggcgct

SEQ ID NO: 263017 - DNA, 25 bp, Probe Sequence
ggtccggaattcccgggatatcgcg

SEQ ID NO: 263018 - DNA, 25 bp, Probe Sequence
ggtccggaattcccgggatctggca

SEQ ID NO: 263019 - DNA, 25 bp, Probe Sequence
ggtccggaattcccgggatctgctt

SEQ ID NO: 263020 - DNA, 25 bp, Probe Sequence
ggtccggaattcccgggatcataat

SEQ ID NO: 263021 - DNA, 25 bp, Probe Sequence
ggtccggaattcccgggatcatcac

SEQ ID NO: 263022 - DNA, 25 bp, Probe Sequence
ggtgacggaataagactcggtctcc

SEQ ID NO: 263023 - DNA, 25 bp, Probe Sequence
ggtgtaccaaaatctcagaatcacc

SEQ ID NO: 263024 - DNA, 25 bp, Probe Sequence
ggtgacacctggagaccaaatgcag

SEQ ID NO: 263025 - DNA, 25 bp, Probe Sequence
ggtgccacctacaacgtcatagtgg

SEQ ID NO: 263026 - DNA, 25 bp, Probe Sequence
ggtgtcacgctgacaaagctccact

SEQ ID NO: 263027 - DNA, 25 bp, Probe Sequence
ggtgacaagagcaaaactccatctc

SEQ ID NO: 263028 - DNA, 25 bp, Probe Sequence
ggtgaaggagctgaaccgtctgggg

SEQ ID NO: 263029 - DNA, 25 bp, Probe Sequence
tgttgagaaaccgaaactactgggg

SEQ ID NO: 263030 - DNA, 25 bp, Probe Sequence
tgttgagaaaacggaactactgggg

SEQ ID NO: 263031 - DNA, 25 bp, Probe Sequence
ggtagaaaacctgactcttcgtgtc

SEQ ID NO: 263032 - DNA, 25 bp, Probe Sequence
ggtgcaaatgcatctgtccacctta

SEQ ID NO: 263033 - DNA, 25 bp, Probe Sequence
ggtgcataccagtcttaccaattat

SEQ ID NO: 263034 - DNA, 25 bp, Probe Sequence
ggtgcatcgccagcatttcgatcct

SEQ ID NO: 263035 - DNA, 25 bp, Probe Sequence
ggtgcatgggcattcttgctagacc

SEQ ID NO: 263036 - DNA, 25 bp, Probe Sequence
ggtcagggactgaatcttgcccgtt

SEQ ID NO: 263037 - DNA, 25 bp, Probe Sequence
ggatcgggagtggcagttttactgt

SEQ ID NO: 263038 - DNA, 25 bp, Probe Sequence
ggtgattgggaggcagttggtacct

SEQ ID NO: 263039 - DNA, 25 bp, Probe Sequence
ggtgagctggtagaggggagacatt

SEQ ID NO: 263040 - DNA, 25 bp, Probe Sequence
ggtgatgggtattagtgggggactg

SEQ ID NO: 263041 - DNA, 25 bp, Probe Sequence
ggtgatggggattgagttgggggca

SEQ ID NO: 263042 - DNA, 25 bp, Probe Sequence
ggtgatggggattgagttgggggca

SEQ ID NO: 263043 - DNA, 25 bp, Probe Sequence
ggtgatcgcggtggagttgtgtgac

SEQ ID NO: 263044 - DNA, 25 bp, Probe Sequence
ggtgttggtgatggggctgttgaga

SEQ ID NO: 263045 - DNA, 25 bp, Probe Sequence
ggtctgtggagctgtagttctgatg

SEQ ID NO: 263046 - DNA, 25 bp, Probe Sequence
ggtcgatgcaacgagtgatgaggtt

SEQ ID NO: 263047 - DNA, 25 bp, Probe Sequence
ggtgctagaggcttgtgtgcacgtg

SEQ ID NO: 263048 - DNA, 25 bp, Probe Sequence
ggctgcaatgggcctaggccggagt

SEQ ID NO: 263049 - DNA, 25 bp, Probe Sequence
ggtgcacgtcggcgacgaggacttc

SEQ ID NO: 263050 - DNA, 25 bp, Probe Sequence
ggtgcggttggggatgaggtaatac

SEQ ID NO: 263051 - DNA, 25 bp, Probe Sequence
ggtcctgtctgttagaaggaaaact

SEQ ID NO: 263052 - DNA, 25 bp, Probe Sequence
ggtgccttctgtccagtatgtggac

SEQ ID NO: 263053 - DNA, 25 bp, Probe Sequence
ggtcctccagaggcatgttttcaca

SEQ ID NO: 263054 - DNA, 25 bp, Probe Sequence
ggtctcccacagacgagattgccaa

SEQ ID NO: 263055 - DNA, 25 bp, Probe Sequence
ggtaccccagatagacatggaaggg

SEQ ID NO: 263056 - DNA, 25 bp, Probe Sequence
ggtgaactcagccattagaggaaga

SEQ ID NO: 263057 - DNA, 25 bp, Probe Sequence
ggtgtcactctctaaatgaccaaag

SEQ ID NO: 263058 - DNA, 25 bp, Probe Sequence
ggtgtaattggcaaataactcaaga

SEQ ID NO: 263059 - DNA, 25 bp, Probe Sequence
ggtgtacattgtgacaaagtgcatc

SEQ ID NO: 263060 - DNA, 25 bp, Probe Sequence
ggtgtacactgttactcagatctac

SEQ ID NO: 263061 - DNA, 25 bp, Probe Sequence
ggtgatcacacacaacttcagcaac

SEQ ID NO: 263062 - DNA, 25 bp, Probe Sequence
ggtgcagacatggccaagtccaaga

SEQ ID NO: 263063 - DNA, 25 bp, Probe Sequence
ggtgagaatggctacttccggatcc

SEQ ID NO: 263064 - DNA, 25 bp, Probe Sequence
ggtgagaaagctactttgtggtgtc

SEQ ID NO: 263065 - DNA, 25 bp, Probe Sequence
ggtcaaatattactgccttggtagc

SEQ ID NO: 263066 - DNA, 25 bp, Probe Sequence
ggtcgaacttgactatctagaggaa

SEQ ID NO: 263067 - DNA, 25 bp, Probe Sequence
ggtgcgacactgtgcattgcattat

SEQ ID NO: 263068 - DNA, 25 bp, Probe Sequence
ggtgccatttgatattcatggatat

SEQ ID NO: 263069 - DNA, 25 bp, Probe Sequence
ggtccatctggttggtattgacatc

SEQ ID NO: 263070 - DNA, 25 bp, Probe Sequence
ggtgtactgtgtttgatttgtctca

SEQ ID NO: 263071 - DNA, 25 bp, Probe Sequence
ggtgtacaggacgtctggtgaccat

SEQ ID NO: 263072 - DNA, 25 bp, Probe Sequence
ggtgcaccagtatcttagtgaccct

SEQ ID NO: 263073 - DNA, 25 bp, Probe Sequence
ggtgaacatgtatgagtgtgtgcac

SEQ ID NO: 263074 - DNA, 25 bp, Probe Sequence
ggtgcaaagtgattaaggctctgcc

SEQ ID NO: 263075 - DNA, 25 bp, Probe Sequence
ggtgaagcgaatccaaagcatcccg

SEQ ID NO: 263076 - DNA, 25 bp, Probe Sequence
ggtgaagaaagtcaggctgccctcc

SEQ ID NO: 263077 - DNA, 25 bp, Probe Sequence
ggtgaaatccctaagggctctgctg

SEQ ID NO: 263078 - DNA, 25 bp, Probe Sequence
ggtgaaagccacctaatcagttatg

SEQ ID NO: 263079 - DNA, 25 bp, Probe Sequence
ggtgaagacggccagaacttggaga

SEQ ID NO: 263080 - DNA, 25 bp, Probe Sequence
ggtgaagaggcccaaggatgtcgga

SEQ ID NO: 263081 - DNA, 25 bp, Probe Sequence
ggtgaacagtgctcttgtggtaggt

SEQ ID NO: 263082 - DNA, 25 bp, Probe Sequence
ggtgaaatgtttaaggagctaattc

SEQ ID NO: 263083 - DNA, 25 bp, Probe Sequence
ggtgaacagtctacaaggtctttta

SEQ ID NO: 263084 - DNA, 25 bp, Probe Sequence
ggtgaactttagtggacttctgtga

SEQ ID NO: 263085 - DNA, 25 bp, Probe Sequence
ggtgaccctatagtaccagtttgta

SEQ ID NO: 263086 - DNA, 25 bp, Probe Sequence
ggtgacacctatatgaacacagttt

SEQ ID NO: 263087 - DNA, 25 bp, Probe Sequence
ggtgaggtctatataagcagagctc

SEQ ID NO: 263088 - DNA, 25 bp, Probe Sequence
ggtgagggattagtgaagccaataa

SEQ ID NO: 263089 - DNA, 25 bp, Probe Sequence
ggtgtaggtataggaggtcaagaaa

SEQ ID NO: 263090 - DNA, 25 bp, Probe Sequence
ggtgtagagtgatcaccctccaagc

SEQ ID NO: 263091 - DNA, 25 bp, Probe Sequence
ggtgctatggatttaccattcctta

SEQ ID NO: 263092 - DNA, 25 bp, Probe Sequence
ggtgattagattgcctctaccatgt

SEQ ID NO: 263093 - DNA, 25 bp, Probe Sequence
ggtgataaatgttgtttcaaattac

SEQ ID NO: 263094 - DNA, 25 bp, Probe Sequence
ggtgtagaatggcatctttgtttat

SEQ ID NO: 263095 - DNA, 25 bp, Probe Sequence
ggtgtagaatatcagtttgctattt

SEQ ID NO: 263096 - DNA, 25 bp, Probe Sequence
ggtgcattatttcagctgtggcttt

SEQ ID NO: 263097 - DNA, 25 bp, Probe Sequence
ggtgtatgtacattttgtgccttga

SEQ ID NO: 263098 - DNA, 25 bp, Probe Sequence
ggtgctaatactggatttcgtctca

SEQ ID NO: 263099 - DNA, 25 bp, Probe Sequence
ggtgctccaagcagtttgaagccca

SEQ ID NO: 263100 - DNA, 25 bp, Probe Sequence
ggtgccgaagtgtttctgaagtctc

SEQ ID NO: 263101 - DNA, 25 bp, Probe Sequence
ggtccgtcttagtcatgtgcaagac

SEQ ID NO: 263102 - DNA, 25 bp, Probe Sequence
ggtcaccgtagagtttgcagatgaa

SEQ ID NO: 263103 - DNA, 25 bp, Probe Sequence
ggtgcaccgtaactgcttgtgtatc

SEQ ID NO: 263104 - DNA, 25 bp, Probe Sequence
ggtgactgggaattgcttgtgtgca

SEQ ID NO: 263105 - DNA, 25 bp, Probe Sequence
ggtgacagtggaatctttgtctctt

SEQ ID NO: 263106 - DNA, 25 bp, Probe Sequence
ggtgacatgtggatcttgttttttt

SEQ ID NO: 263107 - DNA, 25 bp, Probe Sequence
ggtgatatgctgattttcattgtgc

SEQ ID NO: 263108 - DNA, 25 bp, Probe Sequence
ggtgatgcatgtaattgtgaatttg

SEQ ID NO: 263109 - DNA, 25 bp, Probe Sequence
ggtgatctctcttgattgaaatagc

SEQ ID NO: 263110 - DNA, 25 bp, Probe Sequence
ggtgatctgcttttatctaaatgca

SEQ ID NO: 263111 - DNA, 25 bp, Probe Sequence
ggtgattgcttaattctgcaggaca

SEQ ID NO: 263112 - DNA, 25 bp, Probe Sequence
ggtgacggtgatcgtgctgcagtac

SEQ ID NO: 263113 - DNA, 25 bp, Probe Sequence
ggtgatgcggttttggcagtacatc

SEQ ID NO: 263114 - DNA, 25 bp, Probe Sequence
ggtgatgcggttttggcagtacatc

SEQ ID NO: 263115 - DNA, 25 bp, Probe Sequence
ggtgatgcggttttggcagtacatc

SEQ ID NO: 263116 - DNA, 25 bp, Probe Sequence
ggtgatgcggttttggcagtacatc

SEQ ID NO: 263117 - DNA, 25 bp, Probe Sequence
ggtgatgcggttttggcagtacatc

SEQ ID NO: 263118 - DNA, 25 bp, Probe Sequence
ggtgctgcagactgatttggttgac

SEQ ID NO: 263119 - DNA, 25 bp, Probe Sequence
ggtgcacagcacaaattagttatat

SEQ ID NO: 263120 - DNA, 25 bp, Probe Sequence
ggtgccgaagagaaagtgattaaca

SEQ ID NO: 263121 - DNA, 25 bp, Probe Sequence
ggtccgaatcagtggtgggaacgac

SEQ ID NO: 263122 - DNA, 25 bp, Probe Sequence
ggtccgaatcagtaggtgaccccgc

SEQ ID NO: 263123 - DNA, 25 bp, Probe Sequence
ggtgcaactgacatgggtgaacccc

SEQ ID NO: 263124 - DNA, 25 bp, Probe Sequence
ggtgccaatattgacctggactccc

SEQ ID NO: 263125 - DNA, 25 bp, Probe Sequence
ggtgacaaatcagacgctaagtttt

SEQ ID NO: 263126 - DNA, 25 bp, Probe Sequence
ggtgcaaaatcagcctcacaagagt

SEQ ID NO: 263127 - DNA, 25 bp, Probe Sequence
ggtgcaaagacatgcatcgcaacgg

SEQ ID NO: 263128 - DNA, 25 bp, Probe Sequence
ggtataatgattacacaggttacta

SEQ ID NO: 263129 - DNA, 25 bp, Probe Sequence
ggtcccattttctgttagatgtcat

SEQ ID NO: 263130 - DNA, 25 bp, Probe Sequence
ggtcccttgtaagaaatgtccattc

SEQ ID NO: 263131 - DNA, 25 bp, Probe Sequence
ggtctccgtgtataacagctatcct

SEQ ID NO: 263132 - DNA, 25 bp, Probe Sequence
ggtgcccgtcagtgagaagcaacgt

SEQ ID NO: 263133 - DNA, 25 bp, Probe Sequence
ggtccaggtgttcgagaacacgcct

SEQ ID NO: 263134 - DNA, 25 bp, Probe Sequence
ggtgcgtcctgaggagagaaccggc

SEQ ID NO: 263135 - DNA, 25 bp, Probe Sequence
ggtgcttctggactggataaccaac

SEQ ID NO: 263136 - DNA, 25 bp, Probe Sequence
ggtgcattcaagagtatccaacttc

SEQ ID NO: 263137 - DNA, 25 bp, Probe Sequence
ggtgctacaagagcatagccaactt

SEQ ID NO: 263138 - DNA, 25 bp, Probe Sequence
ggtgcagacaaggacagcagtcaca

SEQ ID NO: 263139 - DNA, 25 bp, Probe Sequence
ggtgcagcagctagtggaagacatc

SEQ ID NO: 263140 - DNA, 25 bp, Probe Sequence
ggtgagagtatttacacctcagcaa

SEQ ID NO: 263141 - DNA, 25 bp, Probe Sequence
ggtgaagaagcctcatcgctacagg

SEQ ID NO: 263142 - DNA, 25 bp, Probe Sequence
ggtgaagatgcgcaaacgctacagc

SEQ ID NO: 263143 - DNA, 25 bp, Probe Sequence
ggtgaagcagtgggagcagcgctgg

SEQ ID NO: 263144 - DNA, 25 bp, Probe Sequence
ggtgcagagtgcagaggcggctctg

SEQ ID NO: 263145 - DNA, 25 bp, Probe Sequence
ggtgcagaggctgtggctggtgagc

SEQ ID NO: 263146 - DNA, 25 bp, Probe Sequence
ggtgagaggatgggaaggagcagcc

SEQ ID NO: 263147 - DNA, 25 bp, Probe Sequence
ggtgagaggcaaggcatgagagggc

SEQ ID NO: 263148 - DNA, 25 bp, Probe Sequence
ggtgattccgcagtgagagagtggc

SEQ ID NO: 263149 - DNA, 25 bp, Probe Sequence
ggtgacatccgcagggagatgagcg

SEQ ID NO: 263150 - DNA, 25 bp, Probe Sequence
ggtgacagaggcgggagagcaggcg

SEQ ID NO: 263151 - DNA, 25 bp, Probe Sequence
ggtgaatggcacctggctacaggcg

SEQ ID NO: 263152 - DNA, 25 bp, Probe Sequence
ggctgaaggcggggctaaaggaagc

SEQ ID NO: 263153 - DNA, 25 bp, Probe Sequence
ggtgagaggctgggcacctacatgg

SEQ ID NO: 263154 - DNA, 25 bp, Probe Sequence
ggtgcagtggctcatgcctgtaatc

SEQ ID NO: 263155 - DNA, 25 bp, Probe Sequence
ggtgcagtggctcatgcctgtaatc

SEQ ID NO: 263156 - DNA, 25 bp, Probe Sequence
ggtgattggcaggatcctggtatcc

SEQ ID NO: 263157 - DNA, 25 bp, Probe Sequence
ggtgcaggtcagtatcctgggactt

SEQ ID NO: 263158 - DNA, 25 bp, Probe Sequence
ggtgaatgtcagcacctggcagctt

SEQ ID NO: 263159 - DNA, 25 bp, Probe Sequence
ggtgaagtcaggccagggccttcca

SEQ ID NO: 263160 - DNA, 25 bp, Probe Sequence
ggtgaaatgaggccgggactgctac

SEQ ID NO: 263161 - DNA, 25 bp, Probe Sequence
ggtgaaaaagcccaaatgctgctgt

SEQ ID NO: 263162 - DNA, 25 bp, Probe Sequence
ggtgcaaatgggtccagaattttca

SEQ ID NO: 263163 - DNA, 25 bp, Probe Sequence
ggtgagactgggagagcacaacgtc

SEQ ID NO: 263164 - DNA, 25 bp, Probe Sequence
ggtgctggttaaacaaacacgtctg

SEQ ID NO: 263165 - DNA, 25 bp, Probe Sequence
ggtgctattctgtgtcaaacacctc

SEQ ID NO: 263166 - DNA, 25 bp, Probe Sequence
ggtgaagctcgtgggcagagacccc

SEQ ID NO: 263167 - DNA, 25 bp, Probe Sequence
ggtgataaagatgggctggcagccc

SEQ ID NO: 263168 - DNA, 25 bp, Probe Sequence
ggtctagaacaaacgcagcagcctc

SEQ ID NO: 263169 - DNA, 25 bp, Probe Sequence
ggtctgagaaatgcggacaccccga

SEQ ID NO: 263170 - DNA, 25 bp, Probe Sequence
ggtcgggagttcgagaccagcctga

SEQ ID NO: 263171 - DNA, 25 bp, Probe Sequence
ggccggtagttcgagaagctccggc

SEQ ID NO: 263172 - DNA, 25 bp, Probe Sequence
ggtcggaagattgctggactcgctg

SEQ ID NO: 263173 - DNA, 25 bp, Probe Sequence
ggtccgcaaaggctgatgacatcac

SEQ ID NO: 263174 - DNA, 25 bp, Probe Sequence
ggtcgcgcggatcatgatgccaacc

SEQ ID NO: 263175 - DNA, 25 bp, Probe Sequence
ggtcgtgctagaaaatgctgcaaag

SEQ ID NO: 263176 - DNA, 25 bp, Probe Sequence
ggtcgtgctagaaaatgctgcaaag

SEQ ID NO: 263177 - DNA, 25 bp, Probe Sequence
ggtcgtgtggacagctggcgaaact

SEQ ID NO: 263178 - DNA, 25 bp, Probe Sequence
ggtcgctctgagtcgaccggaagcc

SEQ ID NO: 263179 - DNA, 25 bp, Probe Sequence
ggtcctccagggtcctgaagagcac

SEQ ID NO: 263180 - DNA, 25 bp, Probe Sequence
ggtgacccagagccaccaaagtcac

SEQ ID NO: 263181 - DNA, 25 bp, Probe Sequence
ggtgacttggcatatccaaagactg

SEQ ID NO: 263182 - DNA, 25 bp, Probe Sequence
ggtgactggcgataaatacaatgtg

SEQ ID NO: 263183 - DNA, 25 bp, Probe Sequence
ggtcctggccaagagctacaatgag

SEQ ID NO: 263184 - DNA, 25 bp, Probe Sequence
ggtctgggccaagcacattacaagt

SEQ ID NO: 263185 - DNA, 25 bp, Probe Sequence
ggtgatgggaaagcattgtaaatgt

SEQ ID NO: 263186 - DNA, 25 bp, Probe Sequence
tgttgggtggaatggttaaggtaat

SEQ ID NO: 263187 - DNA, 25 bp, Probe Sequence
ggtgcgggagtatgagttaagaaaa

SEQ ID NO: 263188 - DNA, 25 bp, Probe Sequence
ggtgcccggtggtgtgtagagaaaa

SEQ ID NO: 263189 - DNA, 25 bp, Probe Sequence
ggtcctgggcggtggtcaggaagcc

SEQ ID NO: 263190 - DNA, 25 bp, Probe Sequence
ggtgcctacctaacggaagggagca

SEQ ID NO: 263191 - DNA, 25 bp, Probe Sequence
ggtgcctaattccttaaaggccaag

SEQ ID NO: 263192 - DNA, 25 bp, Probe Sequence
ggatactaatcccttataagataca

SEQ ID NO: 263193 - DNA, 25 bp, Probe Sequence
ggtgcctacttccactgtaagaaag

SEQ ID NO: 263194 - DNA, 25 bp, Probe Sequence
ggtgcacttaggtcactgtaaggtt

SEQ ID NO: 263195 - DNA, 25 bp, Probe Sequence
ggtcctcggtgtctgtgaaggtgcc

SEQ ID NO: 263196 - DNA, 25 bp, Probe Sequence
ggtcaccaaggtcctgggcaggacc

SEQ ID NO: 263197 - DNA, 25 bp, Probe Sequence
ggtccaggcggaccttgtggtgacc

SEQ ID NO: 263198 - DNA, 25 bp, Probe Sequence
ggtccaggcggaccttgtggtgacc

SEQ ID NO: 263199 - DNA, 25 bp, Probe Sequence
ggtccaggcggaccttgtggtgacc

SEQ ID NO: 263200 - DNA, 25 bp, Probe Sequence
ggtgccatggagcggctctgattgg

SEQ ID NO: 263201 - DNA, 25 bp, Probe Sequence
ggtgactggatggggctatactgga

SEQ ID NO: 263202 - DNA, 25 bp, Probe Sequence
ggtgactggaggtgctaacctagga

SEQ ID NO: 263203 - DNA, 25 bp, Probe Sequence
ggtgattggtggagccaacctcggt

SEQ ID NO: 263204 - DNA, 25 bp, Probe Sequence
ggtgatgggtgtaacaaaatctcag

SEQ ID NO: 263205 - DNA, 25 bp, Probe Sequence
ggtgcaggttaatataaattagcag

SEQ ID NO: 263206 - DNA, 25 bp, Probe Sequence
ggtgcagccttagataaatacgcca

SEQ ID NO: 263207 - DNA, 25 bp, Probe Sequence
ggtcagccctaggataaaaagccag

SEQ ID NO: 263208 - DNA, 25 bp, Probe Sequence
ggtcccatgccggagaaagacgccg

SEQ ID NO: 263209 - DNA, 25 bp, Probe Sequence
ggtccccagcgtgggagtgaaccgg

SEQ ID NO: 263210 - DNA, 25 bp, Probe Sequence
ggtcctcacggagaagaacaccagg

SEQ ID NO: 263211 - DNA, 25 bp, Probe Sequence
ggtgcctcactgcaacaagaaacct

SEQ ID NO: 263212 - DNA, 25 bp, Probe Sequence
ggtgctgacctagacagagatgaac

SEQ ID NO: 263213 - DNA, 25 bp, Probe Sequence
ggtgctgacccaggctgagtgtaaa

SEQ ID NO: 263214 - DNA, 25 bp, Probe Sequence
ggtgctccacttggatgaattaaca

SEQ ID NO: 263215 - DNA, 25 bp, Probe Sequence
ggtgctcagcaggtgagaacaaaaa

SEQ ID NO: 263216 - DNA, 25 bp, Probe Sequence
ggtcctgcgggagtacaatgaagtg

SEQ ID NO: 263217 - DNA, 25 bp, Probe Sequence
ggtgccgagtggattgagtgccagg

SEQ ID NO: 263218 - DNA, 25 bp, Probe Sequence
ggtgctcaagagtgtggtggccaag

SEQ ID NO: 263219 - DNA, 25 bp, Probe Sequence
ggtccagatcagttgacagtggcaa

SEQ ID NO: 263220 - DNA, 25 bp, Probe Sequence
ggtccagatcagttgacagtggcaa

SEQ ID NO: 263221 - DNA, 25 bp, Probe Sequence
ggtgcatcaaatctacagtcacaca

SEQ ID NO: 263222 - DNA, 25 bp, Probe Sequence
ggtgatcaattcacaaggccatctt

SEQ ID NO: 263223 - DNA, 25 bp, Probe Sequence
ggtgatgccttctcagagtcaacct

SEQ ID NO: 263224 - DNA, 25 bp, Probe Sequence
ggtgaccttcaccagagtcattaca

SEQ ID NO: 263225 - DNA, 25 bp, Probe Sequence
ggtgatatcttctcatgattttata

SEQ ID NO: 263226 - DNA, 25 bp, Probe Sequence
ggtgaatttttgtatgtctgtcata

SEQ ID NO: 263227 - DNA, 25 bp, Probe Sequence
ggtgctgttggtttattgctggcaa

SEQ ID NO: 263228 - DNA, 25 bp, Probe Sequence
ggtgctgaaggttcgagactggagt

SEQ ID NO: 263229 - DNA, 25 bp, Probe Sequence
ggtgctggaccatcgagacaaggta

SEQ ID NO: 263230 - DNA, 25 bp, Probe Sequence
ggtgctctgaactgccatgcaaaag

SEQ ID NO: 263231 - DNA, 25 bp, Probe Sequence
ggtgctgggagagggcgctacagag

SEQ ID NO: 263232 - DNA, 25 bp, Probe Sequence
ggtgctggtagagccagctccacgc

SEQ ID NO: 263233 - DNA, 25 bp, Probe Sequence
ggtgcttggaggtccagacacaaga

SEQ ID NO: 263234 - DNA, 25 bp, Probe Sequence
ggtgcttgtagttccagctactcag

SEQ ID NO: 263235 - DNA, 25 bp, Probe Sequence
ggtgcttttgtgttgcagtactgca

SEQ ID NO: 263236 - DNA, 25 bp, Probe Sequence
ggtgcatactctggtcatttttcaa

SEQ ID NO: 263237 - DNA, 25 bp, Probe Sequence
ggtgagacttgcatttatccagaca

SEQ ID NO: 263238 - DNA, 25 bp, Probe Sequence
ggtgatgaagtattctgtacacaga

SEQ ID NO: 263239 - DNA, 25 bp, Probe Sequence
ggtgctcaagtgaatgctgtcaatc

SEQ ID NO: 263240 - DNA, 25 bp, Probe Sequence
ggtccatgattgaatgtgcacacag

SEQ ID NO: 263241 - DNA, 25 bp, Probe Sequence
ggtcttacataaacagccagctgga

SEQ ID NO: 263242 - DNA, 25 bp, Probe Sequence
ggtgctatgaaggaacatgccagga

SEQ ID NO: 263243 - DNA, 25 bp, Probe Sequence
ggtgcatctgcgtgaacgtaggaag

SEQ ID NO: 263244 - DNA, 25 bp, Probe Sequence
ggtgatccatgtaactgcctagaaa

SEQ ID NO: 263245 - DNA, 25 bp, Probe Sequence
ggtgcatgcctgtaatctcagctac

SEQ ID NO: 263246 - DNA, 25 bp, Probe Sequence
ggtgatgcgcttttgtcagctacat

SEQ ID NO: 263247 - DNA, 25 bp, Probe Sequence
ggtgatgccgatttccattataggg

SEQ ID NO: 263248 - DNA, 25 bp, Probe Sequence
ggtgatccgatgtacaacaggagga

SEQ ID NO: 263249 - DNA, 25 bp, Probe Sequence
ggtgcacctgactcctgaggagaag

SEQ ID NO: 263250 - DNA, 25 bp, Probe Sequence
ggtgcacctgactcctgaggagaag

SEQ ID NO: 263251 - DNA, 25 bp, Probe Sequence
ggtcacgtcgtcgcggtagaaatgg

SEQ ID NO: 263252 - DNA, 25 bp, Probe Sequence
ggtccctcctaggcgaggacgaaga

SEQ ID NO: 263253 - DNA, 25 bp, Probe Sequence
ggtgccttccaatggaaatgcgaag

SEQ ID NO: 263254 - DNA, 25 bp, Probe Sequence
ggtcctcccaagccagcaaaggaga

SEQ ID NO: 263255 - DNA, 25 bp, Probe Sequence
ggtgcctagccatgtgcgaggagat

SEQ ID NO: 263256 - DNA, 25 bp, Probe Sequence
ggtcgctatgtgcagcagctgcagc

SEQ ID NO: 263257 - DNA, 25 bp, Probe Sequence
ggtagcaatgcatcaagctcagctt

SEQ ID NO: 263258 - DNA, 25 bp, Probe Sequence
ggtagcaatgcatcaagctcagctt

SEQ ID NO: 263259 - DNA, 25 bp, Probe Sequence
ggtgacactgcagaactacatctcc

SEQ ID NO: 263260 - DNA, 25 bp, Probe Sequence
ggtgaagctggaaaccatcattctc

SEQ ID NO: 263261 - DNA, 25 bp, Probe Sequence
ggtgagcctatgaaactatctggag

SEQ ID NO: 263262 - DNA, 25 bp, Probe Sequence
ggtgaccatctgcaattacgaagca

SEQ ID NO: 263263 - DNA, 25 bp, Probe Sequence
ggttcgtgccaaattccgaagcaat

SEQ ID NO: 263264 - DNA, 25 bp, Probe Sequence
ggttcctagaaaactcaataccatc

SEQ ID NO: 263265 - DNA, 25 bp, Probe Sequence
ggtgctcaataaacaattcaatgaa

SEQ ID NO: 263266 - DNA, 25 bp, Probe Sequence
ggtgcatcccaagacttcaattgaa

SEQ ID NO: 263267 - DNA, 25 bp, Probe Sequence
ggtgcatcccaagacttcaattgaa

SEQ ID NO: 263268 - DNA, 25 bp, Probe Sequence
ggtgactccaactatggatagctta

SEQ ID NO: 263269 - DNA, 25 bp, Probe Sequence
ggtacatgcctatacagaacttaac

SEQ ID NO: 263270 - DNA, 25 bp, Probe Sequence
ggtgacagccttcactaaggacaca

SEQ ID NO: 263271 - DNA, 25 bp, Probe Sequence
ggtgagcagaacttccacaaggccc

SEQ ID NO: 263272 - DNA, 25 bp, Probe Sequence
ggtgagcagaacttccacaaggccc

SEQ ID NO: 263273 - DNA, 25 bp, Probe Sequence
ggtctgaaactttccaatgctgccc

SEQ ID NO: 263274 - DNA, 25 bp, Probe Sequence
ggtcaggaacctttgactgcttcca

SEQ ID NO: 263275 - DNA, 25 bp, Probe Sequence
ggtcaggaacctttgactgcttcca

SEQ ID NO: 263276 - DNA, 25 bp, Probe Sequence
ggtgcagtaccactgaggactgttg

SEQ ID NO: 263277 - DNA, 25 bp, Probe Sequence
ggtgcatgccatgagaggggtgctg

SEQ ID NO: 263278 - DNA, 25 bp, Probe Sequence
ggtgcacccaaagtgggtgctgacg

SEQ ID NO: 263279 - DNA, 25 bp, Probe Sequence
ggtcctgccagagtctgcaggggac

SEQ ID NO: 263280 - DNA, 25 bp, Probe Sequence
ggtcctggccaaatatgggggcctg

SEQ ID NO: 263281 - DNA, 25 bp, Probe Sequence
ggtgcccgacaaatgggctgggcct

SEQ ID NO: 263282 - DNA, 25 bp, Probe Sequence
ggtgcccgacaaatgggctgggcct

SEQ ID NO: 263283 - DNA, 25 bp, Probe Sequence
ggtgcccgacaaatgggctgggcct

SEQ ID NO: 263284 - DNA, 25 bp, Probe Sequence
ggtgaccatgatcccaggggatggc

SEQ ID NO: 263285 - DNA, 25 bp, Probe Sequence
ggtgacagctactgaggggatggat

SEQ ID NO: 263286 - DNA, 25 bp, Probe Sequence
ggtgaatgaacctagagcggtgaca

SEQ ID NO: 263287 - DNA, 25 bp, Probe Sequence
ggtgaggagccctgacatggtgacc

SEQ ID NO: 263288 - DNA, 25 bp, Probe Sequence
ggtgcagggaactccagagctgccc

SEQ ID NO: 263289 - DNA, 25 bp, Probe Sequence
ggtgcgcccgactactcgggcgcag

SEQ ID NO: 263290 - DNA, 25 bp, Probe Sequence
ggtccaccaacagctgtggagcacg

SEQ ID NO: 263291 - DNA, 25 bp, Probe Sequence
ggtcccatctactcgggagactggg

SEQ ID NO: 263292 - DNA, 25 bp, Probe Sequence
ggtgcccaggactcggaaggggcgc

SEQ ID NO: 263293 - DNA, 25 bp, Probe Sequence
ggtcaccagggatcggggaggaagg

SEQ ID NO: 263294 - DNA, 25 bp, Probe Sequence
ggtcgtggaggtcctgggagagggg

SEQ ID NO: 263295 - DNA, 25 bp, Probe Sequence
ggtgactgtgggccacgagcaggag

SEQ ID NO: 263296 - DNA, 25 bp, Probe Sequence
ggtactgggcaggattggcaacacc

SEQ ID NO: 263297 - DNA, 25 bp, Probe Sequence
ggtcctttgcaagagcgcagaccac

SEQ ID NO: 263298 - DNA, 25 bp, Probe Sequence
ggtcctctctattcgtgttgaccac

SEQ ID NO: 263299 - DNA, 25 bp, Probe Sequence
ggtcctgccttgtgagatgtggccc

SEQ ID NO: 263300 - DNA, 25 bp, Probe Sequence
ggtcctcctgaagtgataattgcct

SEQ ID NO: 263301 - DNA, 25 bp, Probe Sequence
ggtgcctctctattggtaatgttaa

SEQ ID NO: 263302 - DNA, 25 bp, Probe Sequence
ggtgactcaatctgccaaatgtgct

SEQ ID NO: 263303 - DNA, 25 bp, Probe Sequence
ggtgactcaatctgccaaatgtgct

SEQ ID NO: 263304 - DNA, 25 bp, Probe Sequence
ggtgagctcagactttgaaaagata

SEQ ID NO: 263305 - DNA, 25 bp, Probe Sequence
ggtgcactatggcttgtacaaccag

SEQ ID NO: 263306 - DNA, 25 bp, Probe Sequence
ggtgccagtggcttattaattccga

SEQ ID NO: 263307 - DNA, 25 bp, Probe Sequence
ggtccatgtctcttcaaagcttgac

SEQ ID NO: 263308 - DNA, 25 bp, Probe Sequence
ggtgacatttcatgaagtgtagatc

SEQ ID NO: 263309 - DNA, 25 bp, Probe Sequence
ggtgaattgctctgggttagatcgc

SEQ ID NO: 263310 - DNA, 25 bp, Probe Sequence
ggtgctttgcacagagagttagtta

SEQ ID NO: 263311 - DNA, 25 bp, Probe Sequence
ggtgctgctttcagatgtttatctt

SEQ ID NO: 263312 - DNA, 25 bp, Probe Sequence
ggtgccttatgcggtgattttaatg

SEQ ID NO: 263313 - DNA, 25 bp, Probe Sequence
ggtgcctgtgtgggcattttccaga

SEQ ID NO: 263314 - DNA, 25 bp, Probe Sequence
ggtgctctggagggactcggcacca

SEQ ID NO: 263315 - DNA, 25 bp, Probe Sequence
ggtgccggaacatcagcggcactct

SEQ ID NO: 263316 - DNA, 25 bp, Probe Sequence
ggtgcacggaacctgaggatcagct

SEQ ID NO: 263317 - DNA, 25 bp, Probe Sequence
ggtcgcatggagccctgagaataga

SEQ ID NO: 263318 - DNA, 25 bp, Probe Sequence
ggtctgggatggacaggaaagggca

SEQ ID NO: 263319 - DNA, 25 bp, Probe Sequence
ggtctgggatggacaggaaagggca

SEQ ID NO: 263320 - DNA, 25 bp, Probe Sequence
ggtctgacagggtaggaatatgtgg

SEQ ID NO: 263321 - DNA, 25 bp, Probe Sequence
ggtgcgagcccggggctatattggc

SEQ ID NO: 263322 - DNA, 25 bp, Probe Sequence
ggtgcagacacacaagccttacttg

SEQ ID NO: 263323 - DNA, 25 bp, Probe Sequence
ggtacaacgagatgcagttactatc

SEQ ID NO: 263324 - DNA, 25 bp, Probe Sequence
ggtgaacctgaatggttgttgcaca

SEQ ID NO: 263325 - DNA, 25 bp, Probe Sequence
ggtgaacctgaattcagactgatta

SEQ ID NO: 263326 - DNA, 25 bp, Probe Sequence
ggtgaccgtggttagagcaatgctg

SEQ ID NO: 263327 - DNA, 25 bp, Probe Sequence
ggtgactctttgtacagacctgctt

SEQ ID NO: 263328 - DNA, 25 bp, Probe Sequence
ggtgcagctcttaaacacattgcct

SEQ ID NO: 263329 - DNA, 25 bp, Probe Sequence
ggtgagcattattaaatcttgtttg

SEQ ID NO: 263330 - DNA, 25 bp, Probe Sequence
ggtgacactatagaacaagtttgta

SEQ ID NO: 263331 - DNA, 25 bp, Probe Sequence
ggtgacactatagcacaaggtttgt

SEQ ID NO: 263332 - DNA, 25 bp, Probe Sequence
ggtcagcccagtgcaaagcttgtta

SEQ ID NO: 263333 - DNA, 25 bp, Probe Sequence
ggtccagcccaggaaacttgtgcaa

SEQ ID NO: 263334 - DNA, 25 bp, Probe Sequence
ggtccagtacatggaactcttcaac

SEQ ID NO: 263335 - DNA, 25 bp, Probe Sequence
ggtccagttggagaccgtcaacctt

SEQ ID NO: 263336 - DNA, 25 bp, Probe Sequence
ggataaggtggagctaccgaacagc

SEQ ID NO: 263337 - DNA, 25 bp, Probe Sequence
ggatggagaaggacggtccggaatg

SEQ ID NO: 263338 - DNA, 25 bp, Probe Sequence
ggtccaaacaccctgtctcagggag

SEQ ID NO: 263339 - DNA, 25 bp, Probe Sequence
ggtccaaccagctgtacatttggaa

SEQ ID NO: 263340 - DNA, 25 bp, Probe Sequence
ggtctcattcggtgttttgggaaga

SEQ ID NO: 263341 - DNA, 25 bp, Probe Sequence
ggtgacatcatgaagttttttggaa

SEQ ID NO: 263342 - DNA, 25 bp, Probe Sequence
ggtgacttaaagaatgctattgaaa

SEQ ID NO: 263343 - DNA, 25 bp, Probe Sequence
ggtgacgtggaaccgtcacgcaaac

SEQ ID NO: 263344 - DNA, 25 bp, Probe Sequence
ggtgacttagatacctggcaggaaa

SEQ ID NO: 263345 - DNA, 25 bp, Probe Sequence
ggtgacctatatcccatgtgagtgg

SEQ ID NO: 263346 - DNA, 25 bp, Probe Sequence
ggtgctcctctttcacaggagataa

SEQ ID NO: 263347 - DNA, 25 bp, Probe Sequence
ggtgcttccattggtctgggtaact

SEQ ID NO: 263348 - DNA, 25 bp, Probe Sequence
ggtgcccgctatggacggggcattc

SEQ ID NO: 263349 - DNA, 25 bp, Probe Sequence
ggtgcccctatggggctgaccagta

SEQ ID NO: 263350 - DNA, 25 bp, Probe Sequence
ggtcctatcattcctagtactagta

SEQ ID NO: 263351 - DNA, 25 bp, Probe Sequence
ggtccaaattccaagcctgtagtgt

SEQ ID NO: 263352 - DNA, 25 bp, Probe Sequence
ggtcctaaatctaatgactgatacc

SEQ ID NO: 263353 - DNA, 25 bp, Probe Sequence
ggtgcctatataattttccattccc

SEQ ID NO: 263354 - DNA, 25 bp, Probe Sequence
ggtgctatgcttctgttattattcc

SEQ ID NO: 263355 - DNA, 25 bp, Probe Sequence
ggtctagctatcgttatttgatacc

SEQ ID NO: 263356 - DNA, 25 bp, Probe Sequence
ggtctggcttcaatttggaagacag

SEQ ID NO: 263357 - DNA, 25 bp, Probe Sequence
ggtctcctgttctctggaattcaga

SEQ ID NO: 263358 - DNA, 25 bp, Probe Sequence
ggtgctcactgtgcacctgtgtacc

SEQ ID NO: 263359 - DNA, 25 bp, Probe Sequence
ggtctgactttaggcatagcttcca

SEQ ID NO: 263360 - DNA, 25 bp, Probe Sequence
ggtgcagagttgcaagcaagtttat

SEQ ID NO: 263361 - DNA, 25 bp, Probe Sequence
ggtgaagatgtgtgggcacatgtta

SEQ ID NO: 263362 - DNA, 25 bp, Probe Sequence
ggtgaagagtgaggttgtcatggcc

SEQ ID NO: 263363 - DNA, 25 bp, Probe Sequence
ggtgaagatggtgctgtgctgagga

SEQ ID NO: 263364 - DNA, 25 bp, Probe Sequence
ggtgacagagttcatgttgtgtgct

SEQ ID NO: 263365 - DNA, 25 bp, Probe Sequence
ggtgactagtgtttgttttgcctga

SEQ ID NO: 263366 - DNA, 25 bp, Probe Sequence
ggtaacggtttgattgtgcctggtt

SEQ ID NO: 263367 - DNA, 25 bp, Probe Sequence
ggtgcaacgggtttttgttgtgtgt

SEQ ID NO: 263368 - DNA, 25 bp, Probe Sequence
ggtcttcggaattttttctgtgtgt

SEQ ID NO: 263369 - DNA, 25 bp, Probe Sequence
ggtcctgggaatttattttcatggc

SEQ ID NO: 263370 - DNA, 25 bp, Probe Sequence
ggtccagccggagtttatttaatga

SEQ ID NO: 263371 - DNA, 25 bp, Probe Sequence
ggtccatacggcgttgttctggatt

SEQ ID NO: 263372 - DNA, 25 bp, Probe Sequence
ggtccaaggccatttttgctggcta

SEQ ID NO: 263373 - DNA, 25 bp, Probe Sequence
ggtaaaactgattattatgctcgga

SEQ ID NO: 263374 - DNA, 25 bp, Probe Sequence
ggtgaatgaacttaaattctcagtc

SEQ ID NO: 263375 - DNA, 25 bp, Probe Sequence
ggtgaatagactgtacttctggatg

SEQ ID NO: 263376 - DNA, 25 bp, Probe Sequence
ggtgaaggctcgatcctgtcgagaa

SEQ ID NO: 263377 - DNA, 25 bp, Probe Sequence
ggtccaggctgggcccagtgaaaag

SEQ ID NO: 263378 - DNA, 25 bp, Probe Sequence
ggtgctgcagagcgacaccatggac

SEQ ID NO: 263379 - DNA, 25 bp, Probe Sequence
ggtccagatgatagacaggttgaac

SEQ ID NO: 263380 - DNA, 25 bp, Probe Sequence
ggtgcacagagattgacttgattca

SEQ ID NO: 263381 - DNA, 25 bp, Probe Sequence
ggtgccaggaatgcttatggtagcg

SEQ ID NO: 263382 - DNA, 25 bp, Probe Sequence
ggtgcgacgaaggagtaggtggtgg

SEQ ID NO: 263383 - DNA, 25 bp, Probe Sequence
ggtgccctgaaaggggagctgtgga

SEQ ID NO: 263384 - DNA, 25 bp, Probe Sequence
ggtgcagtctatgatggaggaaggg

SEQ ID NO: 263385 - DNA, 25 bp, Probe Sequence
ggtgcggctgatgaagaggattgca

SEQ ID NO: 263386 - DNA, 25 bp, Probe Sequence
ggtgcgctcagtgactgtggttgag

SEQ ID NO: 263387 - DNA, 25 bp, Probe Sequence
ggtctccagtcagtccaggttgacc

SEQ ID NO: 263388 - DNA, 25 bp, Probe Sequence
ggtctcaggctctcagattgttgac

SEQ ID NO: 263389 - DNA, 25 bp, Probe Sequence
ggtgctgcggttcacatgtgtaatc

SEQ ID NO: 263390 - DNA, 25 bp, Probe Sequence
ggtgctgtgtttctagctgaacatc

SEQ ID NO: 263391 - DNA, 25 bp, Probe Sequence
ggtgctgtgaggcttcacaacctgc

SEQ ID NO: 263392 - DNA, 25 bp, Probe Sequence
ggtgctgctgggcaaacaggccatc

SEQ ID NO: 263393 - DNA, 25 bp, Probe Sequence
ggtctgtgtgggacagaagcccaga

SEQ ID NO: 263394 - DNA, 25 bp, Probe Sequence
ggtctgtggggttagagcccagagc

SEQ ID NO: 263395 - DNA, 25 bp, Probe Sequence
ggtcgtggaatgagaagccgtggca

SEQ ID NO: 263396 - DNA, 25 bp, Probe Sequence
ggtcctggacagcaggaggctctac

SEQ ID NO: 263397 - DNA, 25 bp, Probe Sequence
ggtccagcgcaaggaggggctgctt

SEQ ID NO: 263398 - DNA, 25 bp, Probe Sequence
ggtgcacgaggtggaggtggtcatc

SEQ ID NO: 263399 - DNA, 25 bp, Probe Sequence
ggtgctggacgtgtgctgtggcacc

SEQ ID NO: 263400 - DNA, 25 bp, Probe Sequence
ggtgctgcatgatgttagctgtggc

SEQ ID NO: 263401 - DNA, 25 bp, Probe Sequence
ggtctcaagtgtaagtgtggggcca

SEQ ID NO: 263402 - DNA, 25 bp, Probe Sequence
ggtcgaattgttcgtgaaggctggc

SEQ ID NO: 263403 - DNA, 25 bp, Probe Sequence
ggtccacttgtctgtaatggtgtgc

SEQ ID NO: 263404 - DNA, 25 bp, Probe Sequence
ggtctatcttgtgacatttggttgg

SEQ ID NO: 263405 - DNA, 25 bp, Probe Sequence
ggtgctactggggaaactggccatg

SEQ ID NO: 263406 - DNA, 25 bp, Probe Sequence
ggtgctgtgctgaggaaaggggatg

SEQ ID NO: 263407 - DNA, 25 bp, Probe Sequence
ggtgctccgtcttagaggtgggatg

SEQ ID NO: 263408 - DNA, 25 bp, Probe Sequence
ggtgcactggtttaattgtgttggt

SEQ ID NO: 263409 - DNA, 25 bp, Probe Sequence
ggtaccagtgttttgtctttagctt

SEQ ID NO: 263410 - DNA, 25 bp, Probe Sequence
ggtaccagtgttttgtctttagctt

SEQ ID NO: 263411 - DNA, 25 bp, Probe Sequence
ggcttccagttaaagacggtagatt

SEQ ID NO: 263412 - DNA, 25 bp, Probe Sequence
ggtctccttggaaatccgtctagtt

SEQ ID NO: 263413 - DNA, 25 bp, Probe Sequence
ggtgcgcctgctggaagatgccgat

SEQ ID NO: 263414 - DNA, 25 bp, Probe Sequence
ggtgcccattggcagatggcgactt

SEQ ID NO: 263415 - DNA, 25 bp, Probe Sequence
ggtcctactggcggaactactttga

SEQ ID NO: 263416 - DNA, 25 bp, Probe Sequence
ggtcctagaggtggcaagaaggatg

SEQ ID NO: 263417 - DNA, 25 bp, Probe Sequence
ggtacttgaactggcaggaaatgca

SEQ ID NO: 263418 - DNA, 25 bp, Probe Sequence
ggtccttatcacagccagggtgacc

SEQ ID NO: 263419 - DNA, 25 bp, Probe Sequence
ggtgctcagattgcaaaagtgggcc

SEQ ID NO: 263420 - DNA, 25 bp, Probe Sequence
ggtgctcagagctcattagacatcg

SEQ ID NO: 263421 - DNA, 25 bp, Probe Sequence
ggtctgcaggatccaaggacatctt

SEQ ID NO: 263422 - DNA, 25 bp, Probe Sequence
ggtctgcaggacgaggatggctaca

SEQ ID NO: 263423 - DNA, 25 bp, Probe Sequence
ggtctgcaggacgaggatggctaca

SEQ ID NO: 263424 - DNA, 25 bp, Probe Sequence
ggtacatggcagccaggggcttcat

SEQ ID NO: 263425 - DNA, 25 bp, Probe Sequence
ggtacatggcagccaggggcttcat

SEQ ID NO: 263426 - DNA, 25 bp, Probe Sequence
ggtacatccagcagtggtcattcga

SEQ ID NO: 263427 - DNA, 25 bp, Probe Sequence
ggtcagtggcagggggtatttcagt

SEQ ID NO: 263428 - DNA, 25 bp, Probe Sequence
ggtcgggcaggttgacatatttatt

SEQ ID NO: 263429 - DNA, 25 bp, Probe Sequence
ggtgctggatagaggagccttattt

SEQ ID NO: 263430 - DNA, 25 bp, Probe Sequence
ggtctaattgcgctgagccttgagc

SEQ ID NO: 263431 - DNA, 25 bp, Probe Sequence
ggtcttcagcgccctgggcgctgcc

SEQ ID NO: 263432 - DNA, 25 bp, Probe Sequence
ggtttgcagctgccactgagctgta

SEQ ID NO: 263433 - DNA, 25 bp, Probe Sequence
ggtttgatgtggaatcacagctgca

SEQ ID NO: 263434 - DNA, 25 bp, Probe Sequence
ggtcttgggggacctgctcattgat

SEQ ID NO: 263435 - DNA, 25 bp, Probe Sequence
ggtcactgaggggttagctttatct

SEQ ID NO: 263436 - DNA, 25 bp, Probe Sequence
ggtcaatggaaggtgtagagtttac

SEQ ID NO: 263437 - DNA, 25 bp, Probe Sequence
ggtccagtgaaagggcacagtagta

SEQ ID NO: 263438 - DNA, 25 bp, Probe Sequence
ggtccaagcatcaggagcaggcaag

SEQ ID NO: 263439 - DNA, 25 bp, Probe Sequence
ggtcgacagagtggctgagcaggac

SEQ ID NO: 263440 - DNA, 25 bp, Probe Sequence
ggtcaaaagttgcaggtgctcaggc

SEQ ID NO: 263441 - DNA, 25 bp, Probe Sequence
ggtacttagagtcgggatgcacaac

SEQ ID NO: 263442 - DNA, 25 bp, Probe Sequence
ggtacttagccacctgatgactaat

SEQ ID NO: 263443 - DNA, 25 bp, Probe Sequence
ggctatttccccagtagcattgtcc

SEQ ID NO: 263444 - DNA, 25 bp, Probe Sequence
ggatttcccagtaggggtttctgca

SEQ ID NO: 263445 - DNA, 25 bp, Probe Sequence
ggatataccaaaagggttctgctta

SEQ ID NO: 263446 - DNA, 25 bp, Probe Sequence
ggtgcataccatgataggggtgctg

SEQ ID NO: 263447 - DNA, 25 bp, Probe Sequence
ggtgcatgccgtgataggggtgctg

SEQ ID NO: 263448 - DNA, 25 bp, Probe Sequence
ggtgcatgccgtgataggggtgctg

SEQ ID NO: 263449 - DNA, 25 bp, Probe Sequence
ggtgcaggctggcattgtgagctgg

SEQ ID NO: 263450 - DNA, 25 bp, Probe Sequence
ggtgccatcacgcttgtgatgtggt

SEQ ID NO: 263451 - DNA, 25 bp, Probe Sequence
ggtgccatgaagccaggtgactggt

SEQ ID NO: 263452 - DNA, 25 bp, Probe Sequence
ggtcctttggagttactgcagttac

SEQ ID NO: 263453 - DNA, 25 bp, Probe Sequence
ggtcctttgcggtgagctatgttta

SEQ ID NO: 263454 - DNA, 25 bp, Probe Sequence
ggtcctataccgtgggtgtcatgat

SEQ ID NO: 263455 - DNA, 25 bp, Probe Sequence
ggtccatttttgtctgtttctatga

SEQ ID NO: 263456 - DNA, 25 bp, Probe Sequence
ggtccatttttgtctgtttctatga

SEQ ID NO: 263457 - DNA, 25 bp, Probe Sequence
ggtccgtgtctttgtatattcaata

SEQ ID NO: 263458 - DNA, 25 bp, Probe Sequence
ggtccagtgctcagatgtgtttaag

SEQ ID NO: 263459 - DNA, 25 bp, Probe Sequence
ggtcaagtcatcaaggggatatagc

SEQ ID NO: 263460 - DNA, 25 bp, Probe Sequence
ggtaaactgccactggcagtcatca

SEQ ID NO: 263461 - DNA, 25 bp, Probe Sequence
ggtactagctgctgtagcagtgccc

SEQ ID NO: 263462 - DNA, 25 bp, Probe Sequence
ggtccttctgctggatacaggcacc

SEQ ID NO: 263463 - DNA, 25 bp, Probe Sequence
ggtcgctttgctgtacatcgtatta

SEQ ID NO: 263464 - DNA, 25 bp, Probe Sequence
ggtcgctttgctgtacatcgtatta

SEQ ID NO: 263465 - DNA, 25 bp, Probe Sequence
ggtcgctttgctgttcgtgatatga

SEQ ID NO: 263466 - DNA, 25 bp, Probe Sequence
ggtcgctttgctgttcgtgatatga

SEQ ID NO: 263467 - DNA, 25 bp, Probe Sequence
ggtcgctttgctgttcgtgatatga

SEQ ID NO: 263468 - DNA, 25 bp, Probe Sequence
ggtgctctatttttttggatgtaca

SEQ ID NO: 263469 - DNA, 25 bp, Probe Sequence
ggtgctctatttttttggatgtaca

SEQ ID NO: 263470 - DNA, 25 bp, Probe Sequence
ggtgcaggtatttctttgagatagt

SEQ ID NO: 263471 - DNA, 25 bp, Probe Sequence
ggtgcaggaactcttccagatagat

SEQ ID NO: 263472 - DNA, 25 bp, Probe Sequence
ggtgcaggagaattttgacgtgaat

SEQ ID NO: 263473 - DNA, 25 bp, Probe Sequence
ggtgctggagaaccttgaatctaag

SEQ ID NO: 263474 - DNA, 25 bp, Probe Sequence
ggtgcagtgggacgtcagagactat

SEQ ID NO: 263475 - DNA, 25 bp, Probe Sequence
ggtctgctggctgggaaggcacaga

SEQ ID NO: 263476 - DNA, 25 bp, Probe Sequence
ggtctgctggctgggaaggcacaga

SEQ ID NO: 263477 - DNA, 25 bp, Probe Sequence
ggtgccatgagggttaatcacatag

SEQ ID NO: 263478 - DNA, 25 bp, Probe Sequence
ggtgcagctgggaatcaagatctgt

SEQ ID NO: 263479 - DNA, 25 bp, Probe Sequence
ggtcagtgaggtaaagtgcgtgctt

SEQ ID NO: 263480 - DNA, 25 bp, Probe Sequence
ggtcgagatgggacattgtgcggct

SEQ ID NO: 263481 - DNA, 25 bp, Probe Sequence
ggtcgagtgtgggcatagcattagc

SEQ ID NO: 263482 - DNA, 25 bp, Probe Sequence
ggtctggatggggccacctatgacc

SEQ ID NO: 263483 - DNA, 25 bp, Probe Sequence
ggtccaggagggacgcctgagacgc

SEQ ID NO: 263484 - DNA, 25 bp, Probe Sequence
ggtgcagcagagggtgtccctgtga

SEQ ID NO: 263485 - DNA, 25 bp, Probe Sequence
ggtgcagctgggcttcattagtgag

SEQ ID NO: 263486 - DNA, 25 bp, Probe Sequence
ggtgcgcatgaatgtcctggcagat

SEQ ID NO: 263487 - DNA, 25 bp, Probe Sequence
ggtcgctgagaagttcatcgatgac

SEQ ID NO: 263488 - DNA, 25 bp, Probe Sequence
ggtcgctgagaagttcatcgatgac

SEQ ID NO: 263489 - DNA, 25 bp, Probe Sequence
ggtgccagctgatctatcaagtgca

SEQ ID NO: 263490 - DNA, 25 bp, Probe Sequence
ggtgccgctgtagtacacaatgtga

SEQ ID NO: 263491 - DNA, 25 bp, Probe Sequence
ggtccttaggcttacaatgtgcact

SEQ ID NO: 263492 - DNA, 25 bp, Probe Sequence
ggtccttaggcttacaatgtgcact

SEQ ID NO: 263493 - DNA, 25 bp, Probe Sequence
ggtgccatcaaggagaacaagtgcc

SEQ ID NO: 263494 - DNA, 25 bp, Probe Sequence
ggtgcaccaacaggacaatttccaa

SEQ ID NO: 263495 - DNA, 25 bp, Probe Sequence
ggtcaccaacaccaaagtgtctcag

SEQ ID NO: 263496 - DNA, 25 bp, Probe Sequence
ggtgctaaacctccaagtgtcatga

SEQ ID NO: 263497 - DNA, 25 bp, Probe Sequence
ggtgctattgctgcttaagagacat

SEQ ID NO: 263498 - DNA, 25 bp, Probe Sequence
ggtctgatagtcctctgctaaaaca

SEQ ID NO: 263499 - DNA, 25 bp, Probe Sequence
ggtctacgtgcgtgtggaaacatca

SEQ ID NO: 263500 - DNA, 25 bp, Probe Sequence
ggtaactggctgggggcgaagacac

SEQ ID NO: 263501 - DNA, 25 bp, Probe Sequence
ggtccctgactcctaagagaaccac

SEQ ID NO: 263502 - DNA, 25 bp, Probe Sequence
ggtctccggccgaacaagcagacct

SEQ ID NO: 263503 - DNA, 25 bp, Probe Sequence
ggtcttcggacgcaagaagacagcg

SEQ ID NO: 263504 - DNA, 25 bp, Probe Sequence
ggtgcttcggcctggataagagccc

SEQ ID NO: 263505 - DNA, 25 bp, Probe Sequence
ggtcccagtgccagagttagcagtc

SEQ ID NO: 263506 - DNA, 25 bp, Probe Sequence
ggtcccgtgtcactgtttacatgac

SEQ ID NO: 263507 - DNA, 25 bp, Probe Sequence
ggtcccgtgtcactgtttacatgac

SEQ ID NO: 263508 - DNA, 25 bp, Probe Sequence
ggtcctctgattctgatgtctaatg

SEQ ID NO: 263509 - DNA, 25 bp, Probe Sequence
ggtcgtctgatctttgataacttga

SEQ ID NO: 263510 - DNA, 25 bp, Probe Sequence
ggtcggcaggcttctgtaacattac

SEQ ID NO: 263511 - DNA, 25 bp, Probe Sequence
ggtcccctctatatatacatcatac

SEQ ID NO: 263512 - DNA, 25 bp, Probe Sequence
ggtcctctgagcttactatacatca

SEQ ID NO: 263513 - DNA, 25 bp, Probe Sequence
ggtctctggagggacaaactcactc

SEQ ID NO: 263514 - DNA, 25 bp, Probe Sequence
ggtccaccattggataaaccactat

SEQ ID NO: 263515 - DNA, 25 bp, Probe Sequence
ggtccacatcctgctaagacgttta

SEQ ID NO: 263516 - DNA, 25 bp, Probe Sequence
ggtcccctcagtcaaggcagtggga

SEQ ID NO: 263517 - DNA, 25 bp, Probe Sequence
ggtgcatacactagacgaagggagg

SEQ ID NO: 263518 - DNA, 25 bp, Probe Sequence
ggtcaaagtcattcgaagccctgcg

SEQ ID NO: 263519 - DNA, 25 bp, Probe Sequence
ggtcctgagtcagagacacctggtg

SEQ ID NO: 263520 - DNA, 25 bp, Probe Sequence
ggtgcccatgttgatgacatctttg

SEQ ID NO: 263521 - DNA, 25 bp, Probe Sequence
ggtgcctctattgaagactttgccc

SEQ ID NO: 263522 - DNA, 25 bp, Probe Sequence
ggtgcctctattgaagactttgccc

SEQ ID NO: 263523 - DNA, 25 bp, Probe Sequence
ggtcttgaagctgacccatttgccc

SEQ ID NO: 263524 - DNA, 25 bp, Probe Sequence
ggtcattgaggagacaccatagtgg

SEQ ID NO: 263525 - DNA, 25 bp, Probe Sequence
ggtgcagatgggaaacctctttgtg

SEQ ID NO: 263526 - DNA, 25 bp, Probe Sequence
ggtgctgaccaggaattctttgtgg

SEQ ID NO: 263527 - DNA, 25 bp, Probe Sequence
ggtctgactgacaaattctgtatta

SEQ ID NO: 263528 - DNA, 25 bp, Probe Sequence
ggataactacattacctgttcttgc

SEQ ID NO: 263529 - DNA, 25 bp, Probe Sequence
ggtccactgagctataacttacttc

SEQ ID NO: 263530 - DNA, 25 bp, Probe Sequence
ggtacacgagaaaacccagctttca

SEQ ID NO: 263531 - DNA, 25 bp, Probe Sequence
ggtaaaagaattatctgacattatc

SEQ ID NO: 263532 - DNA, 25 bp, Probe Sequence
ggtcgaagagaccactttggcttta

SEQ ID NO: 263533 - DNA, 25 bp, Probe Sequence
ggatgccaaaggcagctttccctgg

SEQ ID NO: 263534 - DNA, 25 bp, Probe Sequence
ggtccagaagctccatgctggtcac

SEQ ID NO: 263535 - DNA, 25 bp, Probe Sequence
ggtcaagctagcttctcatgttccc

SEQ ID NO: 263536 - DNA, 25 bp, Probe Sequence
ggtcagagtgaaatacgtgtccacc

SEQ ID NO: 263537 - DNA, 25 bp, Probe Sequence
ggtgcgcgtggaattcatggacgac

SEQ ID NO: 263538 - DNA, 25 bp, Probe Sequence
ggtgcctgctgggttgcaggggcag

SEQ ID NO: 263539 - DNA, 25 bp, Probe Sequence
ggtgcctctggacagcatggggaac

SEQ ID NO: 263540 - DNA, 25 bp, Probe Sequence
ggtgcgcaaggacatcgacgagcag

SEQ ID NO: 263541 - DNA, 25 bp, Probe Sequence
ggtgctgatgcagatgcgtttcgac

SEQ ID NO: 263542 - DNA, 25 bp, Probe Sequence
ggtgctgcagcagatgttctttggc

SEQ ID NO: 263543 - DNA, 25 bp, Probe Sequence
ggtgctgagtgctatgtgtgcttat

SEQ ID NO: 263544 - DNA, 25 bp, Probe Sequence
ggtgctgagaataatgtgtatcctg

SEQ ID NO: 263545 - DNA, 25 bp, Probe Sequence
ggtgctggcattgttgctgattctg

SEQ ID NO: 263546 - DNA, 25 bp, Probe Sequence
ggtcgcgattgtagatgttattgat

SEQ ID NO: 263547 - DNA, 25 bp, Probe Sequence
ggtcgcgattgtagatgttattgat

SEQ ID NO: 263548 - DNA, 25 bp, Probe Sequence
ggtccctgatgcagtgcttcagatg

SEQ ID NO: 263549 - DNA, 25 bp, Probe Sequence
ggtccctgatgcagtgcttcagatg

SEQ ID NO: 263550 - DNA, 25 bp, Probe Sequence
ggtctctgctgaaggttgtaagtgg

SEQ ID NO: 263551 - DNA, 25 bp, Probe Sequence
ggtcttcaatggttagcagaaggga

SEQ ID NO: 263552 - DNA, 25 bp, Probe Sequence
ggtctcatcaaggtgaacgggcggc

SEQ ID NO: 263553 - DNA, 25 bp, Probe Sequence
ggtgctcttgacaaagactggtccc

SEQ ID NO: 263554 - DNA, 25 bp, Probe Sequence
ggtctctcatgacttaactggcttc

SEQ ID NO: 263555 - DNA, 25 bp, Probe Sequence
ggtgcatcttggtttatgctggctc

SEQ ID NO: 263556 - DNA, 25 bp, Probe Sequence
ggtctcttggtgttagtgatgctgg

SEQ ID NO: 263557 - DNA, 25 bp, Probe Sequence
ggtgctttggatactcggatggagt

SEQ ID NO: 263558 - DNA, 25 bp, Probe Sequence
ggtgctgtgttattcatggggcaga

SEQ ID NO: 263559 - DNA, 25 bp, Probe Sequence
ggtgctgcttttacagggaagctta

SEQ ID NO: 263560 - DNA, 25 bp, Probe Sequence
ggtgcttttttaaaatcgttcatag

SEQ ID NO: 263561 - DNA, 25 bp, Probe Sequence
ggtgcctttctccaaaaggtatttg

SEQ ID NO: 263562 - DNA, 25 bp, Probe Sequence
ggtgcctttctccaaaaggtatttg

SEQ ID NO: 263563 - DNA, 25 bp, Probe Sequence
ggtctctgtttctccaaagtaagtg

SEQ ID NO: 263564 - DNA, 25 bp, Probe Sequence
ggtcaatttatatgccaataggcca

SEQ ID NO: 263565 - DNA, 25 bp, Probe Sequence
ggtaactctacctcagaaggaaaat

SEQ ID NO: 263566 - DNA, 25 bp, Probe Sequence
ggtaagtagccctctaagacaagat

SEQ ID NO: 263567 - DNA, 25 bp, Probe Sequence
ggtaggtttgcctctgcagaactaa

SEQ ID NO: 263568 - DNA, 25 bp, Probe Sequence
ggtaaggttatctgtctgatactga

SEQ ID NO: 263569 - DNA, 25 bp, Probe Sequence
ggtccaggttctgttctgatgagta

SEQ ID NO: 263570 - DNA, 25 bp, Probe Sequence
ggtcaaggctttgcttcttgttggc

SEQ ID NO: 263571 - DNA, 25 bp, Probe Sequence
ggtaatgtgtggagtatcttggtgt

SEQ ID NO: 263572 - DNA, 25 bp, Probe Sequence
ggaagtttggcagattcctatttag

SEQ ID NO: 263573 - DNA, 25 bp, Probe Sequence
ggtagtttgaccgctagtatgttgg

SEQ ID NO: 263574 - DNA, 25 bp, Probe Sequence
ggtcagatttcagagttcaggagcc

SEQ ID NO: 263575 - DNA, 25 bp, Probe Sequence
ggtcaatttatctagtccatgtact

SEQ ID NO: 263576 - DNA, 25 bp, Probe Sequence
ggtcgcataaatttgtctgtgtact

SEQ ID NO: 263577 - DNA, 25 bp, Probe Sequence
ggtccataaagatttactgctatgt

SEQ ID NO: 263578 - DNA, 25 bp, Probe Sequence
ggtccatcatagaattctcactgtg

SEQ ID NO: 263579 - DNA, 25 bp, Probe Sequence
ggtcgcatgaagatcagcctctagt

SEQ ID NO: 263580 - DNA, 25 bp, Probe Sequence
ggtcctgaagcactaccttcagagg

SEQ ID NO: 263581 - DNA, 25 bp, Probe Sequence
ggtcctgaacaaagactctgaaagt

SEQ ID NO: 263582 - DNA, 25 bp, Probe Sequence
ggtccgtaggagccactatgaggag

SEQ ID NO: 263583 - DNA, 25 bp, Probe Sequence
ggtgccgccaggtgcctggcggagc

SEQ ID NO: 263584 - DNA, 25 bp, Probe Sequence
ggtcgcccagagtggtggatggact

SEQ ID NO: 263585 - DNA, 25 bp, Probe Sequence
ggtcccaaggaacgccataggactt

SEQ ID NO: 263586 - DNA, 25 bp, Probe Sequence
ggtcgcaaaggataccctggagttt

SEQ ID NO: 263587 - DNA, 25 bp, Probe Sequence
ggtcatcaaggatttcccctggatc

SEQ ID NO: 263588 - DNA, 25 bp, Probe Sequence
ggtcaaagagaaaccccgagacact

SEQ ID NO: 263589 - DNA, 25 bp, Probe Sequence
ggtcatcaaagacagcccacaaacc

SEQ ID NO: 263590 - DNA, 25 bp, Probe Sequence
ggtcaataaaggccctaaattgcaa

SEQ ID NO: 263591 - DNA, 25 bp, Probe Sequence
ggtcaaagacagcgctcaaaactcg

SEQ ID NO: 263592 - DNA, 25 bp, Probe Sequence
ggtcgggcagtccactcaagagacc

SEQ ID NO: 263593 - DNA, 25 bp, Probe Sequence
ggtgcggtaccagtgcacagagggg

SEQ ID NO: 263594 - DNA, 25 bp, Probe Sequence
ggtgcctatatcgacaaagagtgag

SEQ ID NO: 263595 - DNA, 25 bp, Probe Sequence
ggtaccatccgcctagagcaggatg

SEQ ID NO: 263596 - DNA, 25 bp, Probe Sequence
ggtcctaaatgcccagaaggctgga

SEQ ID NO: 263597 - DNA, 25 bp, Probe Sequence
ggtgccaagaagcccaacaatggaa

SEQ ID NO: 263598 - DNA, 25 bp, Probe Sequence
ggtctccatggacacagaagatgtg

SEQ ID NO: 263599 - DNA, 25 bp, Probe Sequence
ggtctccgaggcccaggagactcca

SEQ ID NO: 263600 - DNA, 25 bp, Probe Sequence
ggttcctaggactagggcccatcac

SEQ ID NO: 263601 - DNA, 25 bp, Probe Sequence
ggtaaccatggtgagaccctatctc

SEQ ID NO: 263602 - DNA, 25 bp, Probe Sequence
ggtccacctggtgaagtcattcagc

SEQ ID NO: 263603 - DNA, 25 bp, Probe Sequence
ggtctcacactgtgaaccacttagg

SEQ ID NO: 263604 - DNA, 25 bp, Probe Sequence
ggtatgcaactatgccccaaagggc

SEQ ID NO: 263605 - DNA, 25 bp, Probe Sequence
ggtctatagtatacctctcacaagg

SEQ ID NO: 263606 - DNA, 25 bp, Probe Sequence
ggtcttagagaccctatctcagaca

SEQ ID NO: 263607 - DNA, 25 bp, Probe Sequence
ggtcttagagaccctatctcagaca

SEQ ID NO: 263608 - DNA, 25 bp, Probe Sequence
ggtcctgggagccgctttaaaggca

SEQ ID NO: 263609 - DNA, 25 bp, Probe Sequence
ggtccttgcggcatcagttacaaaa

SEQ ID NO: 263610 - DNA, 25 bp, Probe Sequence
ggtacttgccacatagtttcctttt

SEQ ID NO: 263611 - DNA, 25 bp, Probe Sequence
ggtccctggccaaagatttatttct

SEQ ID NO: 263612 - DNA, 25 bp, Probe Sequence
ggtacactcctgggagttttgttca

SEQ ID NO: 263613 - DNA, 25 bp, Probe Sequence
ggtaacatctcctgaaaagcttgta

SEQ ID NO: 263614 - DNA, 25 bp, Probe Sequence
ggtcaaggccctcagaaagcgtgtg

SEQ ID NO: 263615 - DNA, 25 bp, Probe Sequence
ggtctcgtgcccagatgaaaccatt

SEQ ID NO: 263616 - DNA, 25 bp, Probe Sequence
ggtctttcagccatgctgatgacca

SEQ ID NO: 263617 - DNA, 25 bp, Probe Sequence
ggtctgtgatgcccttagatgtccg

SEQ ID NO: 263618 - DNA, 25 bp, Probe Sequence
ggtcagctgcaggttgtaaatagtg

SEQ ID NO: 263619 - DNA, 25 bp, Probe Sequence
ggtcagcaaattggcaaagtagtcc

SEQ ID NO: 263620 - DNA, 25 bp, Probe Sequence
ggtccgtattccagatggagtcgct

SEQ ID NO: 263621 - DNA, 25 bp, Probe Sequence
ggtccgtgtttatgatccagcatcc

SEQ ID NO: 263622 - DNA, 25 bp, Probe Sequence
ggtacatttctgaagacccatctca

SEQ ID NO: 263623 - DNA, 25 bp, Probe Sequence
ggtatgcttactatgaccttccaag

SEQ ID NO: 263624 - DNA, 25 bp, Probe Sequence
ggtcagcttttcagatacaaatcca

SEQ ID NO: 263625 - DNA, 25 bp, Probe Sequence
ggtcgctttctacggacagacgtta

SEQ ID NO: 263626 - DNA, 25 bp, Probe Sequence
ggtcctgtctcatagagaagccgct

SEQ ID NO: 263627 - DNA, 25 bp, Probe Sequence
ggtcggattgcaagaaaagctagcc

SEQ ID NO: 263628 - DNA, 25 bp, Probe Sequence
ggtcggagcatctagaacaagcgtc

SEQ ID NO: 263629 - DNA, 25 bp, Probe Sequence
ggtgctgggcatgagaccaagggtg

SEQ ID NO: 263630 - DNA, 25 bp, Probe Sequence
ggtctggcagctgaaagcagtgttt

SEQ ID NO: 263631 - DNA, 25 bp, Probe Sequence
ggtgctggagctgttatcatagcta

SEQ ID NO: 263632 - DNA, 25 bp, Probe Sequence
ggtctggcagatgacttaaccactc

SEQ ID NO: 263633 - DNA, 25 bp, Probe Sequence
ggtctggcaactacttcacggagac

SEQ ID NO: 263634 - DNA, 25 bp, Probe Sequence
ggtgctggcaaaaagtgagctggag

SEQ ID NO: 263635 - DNA, 25 bp, Probe Sequence
ggtgctgagctagccaggactgatg

SEQ ID NO: 263636 - DNA, 25 bp, Probe Sequence
ggtgctgagtattcactagagtggc

SEQ ID NO: 263637 - DNA, 25 bp, Probe Sequence
ggtgctgggattacaagcgtgagcc

SEQ ID NO: 263638 - DNA, 25 bp, Probe Sequence
ggtgctgggattacaggcgtgaacc

SEQ ID NO: 263639 - DNA, 25 bp, Probe Sequence
ggtcgtggtcagaaggcagtaatgc

SEQ ID NO: 263640 - DNA, 25 bp, Probe Sequence
ggtcgtgctatgatatggagtcctc

SEQ ID NO: 263641 - DNA, 25 bp, Probe Sequence
ggtgctgtgtctttatgaatgtttt

SEQ ID NO: 263642 - DNA, 25 bp, Probe Sequence
ggtctgtactccttggatttgcatt

SEQ ID NO: 263643 - DNA, 25 bp, Probe Sequence
ggtgcggactccaaggaggtgcact

SEQ ID NO: 263644 - DNA, 25 bp, Probe Sequence
ggtcgaggtgccaaggtgagtgagt

SEQ ID NO: 263645 - DNA, 25 bp, Probe Sequence
ggtgcgagagaggtgggcagcagct

SEQ ID NO: 263646 - DNA, 25 bp, Probe Sequence
ggtgctggggcagtagtcatggcag

SEQ ID NO: 263647 - DNA, 25 bp, Probe Sequence
ggtcatggtgactcagtgatcagca

SEQ ID NO: 263648 - DNA, 25 bp, Probe Sequence
ggtctgcttcaaggaggtcgacctt

SEQ ID NO: 263649 - DNA, 25 bp, Probe Sequence
ggtcttgtaaagagtctgccttctg

SEQ ID NO: 263650 - DNA, 25 bp, Probe Sequence
ggtctttgaaataggattccttact

SEQ ID NO: 263651 - DNA, 25 bp, Probe Sequence
ggacgttaaaggcattttattccag

SEQ ID NO: 263652 - DNA, 25 bp, Probe Sequence
ggtcttttaagtctgttttgctcta

SEQ ID NO: 263653 - DNA, 25 bp, Probe Sequence
ggtctgttgtatctctagtcagttc

SEQ ID NO: 263654 - DNA, 25 bp, Probe Sequence
ggtctaactcattaccattcgttcc

SEQ ID NO: 263655 - DNA, 25 bp, Probe Sequence
ggtttcatccatccgacattgaagt

SEQ ID NO: 263656 - DNA, 25 bp, Probe Sequence
ggtctcgaacatctgacctcgtgat

SEQ ID NO: 263657 - DNA, 25 bp, Probe Sequence
ggtctcgagaagcttcccatgcttc

SEQ ID NO: 263658 - DNA, 25 bp, Probe Sequence
ggctacgaaatgcttgctcaggctc

SEQ ID NO: 263659 - DNA, 25 bp, Probe Sequence
ggtccggcctgggatccaggctaag

SEQ ID NO: 263660 - DNA, 25 bp, Probe Sequence
ggtcaaggtatggaacctggctaac

SEQ ID NO: 263661 - DNA, 25 bp, Probe Sequence
ggattagttagaaccctggaagacg

SEQ ID NO: 263662 - DNA, 25 bp, Probe Sequence
ggtgccagtttggagctcctggaag

SEQ ID NO: 263663 - DNA, 25 bp, Probe Sequence
ggtccaatatccaagcccaagagga

SEQ ID NO: 263664 - DNA, 25 bp, Probe Sequence
ggttaatacccactcgcaatttgaa

SEQ ID NO: 263665 - DNA, 25 bp, Probe Sequence
ggttaataaagcactgacttgttaa

SEQ ID NO: 263666 - DNA, 25 bp, Probe Sequence
ggttagaacagtgaatactagtgga

SEQ ID NO: 263667 - DNA, 25 bp, Probe Sequence
ggtataccaaggttacctcagtggt

SEQ ID NO: 263668 - DNA, 25 bp, Probe Sequence
ggtaaaaagcctcacccagatgacc

SEQ ID NO: 263669 - DNA, 25 bp, Probe Sequence
ggtagaaaagtctttcctacagaag

SEQ ID NO: 263670 - DNA, 25 bp, Probe Sequence
ggtagaacatagtacttcaggaaaa

SEQ ID NO: 263671 - DNA, 25 bp, Probe Sequence
ggtcgtacataacttccggtaaatg

SEQ ID NO: 263672 - DNA, 25 bp, Probe Sequence
ggtcgtgccatgttcttagtggcca

SEQ ID NO: 263673 - DNA, 25 bp, Probe Sequence
ggtcagatctagttttatgcaggct

SEQ ID NO: 263674 - DNA, 25 bp, Probe Sequence
ggtcctgctgtttttgatgagcctt

SEQ ID NO: 263675 - DNA, 25 bp, Probe Sequence
ggtcacgctgggtaagaatgccttt

SEQ ID NO: 263676 - DNA, 25 bp, Probe Sequence
ggtatcctggcacaataattttatg

SEQ ID NO: 263677 - DNA, 25 bp, Probe Sequence
ggtaccggccaagaggctgtttggt

SEQ ID NO: 263678 - DNA, 25 bp, Probe Sequence
ggtaccagtgcacagaggggtttgt

SEQ ID NO: 263679 - DNA, 25 bp, Probe Sequence
ggtatgctgcagacatttggtgggt

SEQ ID NO: 263680 - DNA, 25 bp, Probe Sequence
ggtactgagtctaagcactgcggtg

SEQ ID NO: 263681 - DNA, 25 bp, Probe Sequence
ggtcctggtgcttgatggtcgaggc

SEQ ID NO: 263682 - DNA, 25 bp, Probe Sequence
ggtcttgttgattgattatcgacag

SEQ ID NO: 263683 - DNA, 25 bp, Probe Sequence
ggtcttggctatgaatttccaggac

SEQ ID NO: 263684 - DNA, 25 bp, Probe Sequence
ggtcttgacctgaatgatggccggg

SEQ ID NO: 263685 - DNA, 25 bp, Probe Sequence
ggtcttctgcagactcatgcagccc

SEQ ID NO: 263686 - DNA, 25 bp, Probe Sequence
ggtctattggtattgagcctggggc

SEQ ID NO: 263687 - DNA, 25 bp, Probe Sequence
ggtctcttcagtgtgagctggggcc

SEQ ID NO: 263688 - DNA, 25 bp, Probe Sequence
ggtctggtctgtgcagaagtgggga

SEQ ID NO: 263689 - DNA, 25 bp, Probe Sequence
ggtccctcattgcaggggggagcag

SEQ ID NO: 263690 - DNA, 25 bp, Probe Sequence
ggtccttcagcacagcaggaggggc

SEQ ID NO: 263691 - DNA, 25 bp, Probe Sequence
ggtccttctatgcagcagactggga

SEQ ID NO: 263692 - DNA, 25 bp, Probe Sequence
ggtccatctcaaaggcagaagcgaa

SEQ ID NO: 263693 - DNA, 25 bp, Probe Sequence
ggtctcctctgacttcaacagcgac

SEQ ID NO: 263694 - DNA, 25 bp, Probe Sequence
ggtcctctctgctttcaggaggagc

SEQ ID NO: 263695 - DNA, 25 bp, Probe Sequence
ggtgccacgcatcttcatgaagggc

SEQ ID NO: 263696 - DNA, 25 bp, Probe Sequence
ggtgccacgctgatcaatgaacaat

SEQ ID NO: 263697 - DNA, 25 bp, Probe Sequence
ggtccagagcagaacctgaactctg

SEQ ID NO: 263698 - DNA, 25 bp, Probe Sequence
ggtccagcagctacatttacacatc

SEQ ID NO: 263699 - DNA, 25 bp, Probe Sequence
ggtctacctctcaatttgcatatcc

SEQ ID NO: 263700 - DNA, 25 bp, Probe Sequence
ggtctgacactactgattttggctc

SEQ ID NO: 263701 - DNA, 25 bp, Probe Sequence
ggtctgacactactgattttggctc

SEQ ID NO: 263702 - DNA, 25 bp, Probe Sequence
ggtctgacactactgattttggctc

SEQ ID NO: 263703 - DNA, 25 bp, Probe Sequence
ggtctgacactactgattttggctc

SEQ ID NO: 263704 - DNA, 25 bp, Probe Sequence
ggtctgacactactgattttggctc

SEQ ID NO: 263705 - DNA, 25 bp, Probe Sequence
ggtctgacactactgattttggctc

SEQ ID NO: 263706 - DNA, 25 bp, Probe Sequence
ggtctgcaagggaattcttgtgtgc

SEQ ID NO: 263707 - DNA, 25 bp, Probe Sequence
ggtccagggctagtgacttgtgtcc

SEQ ID NO: 263708 - DNA, 25 bp, Probe Sequence
ggtcatcattgtcatctacctgtcc

SEQ ID NO: 263709 - DNA, 25 bp, Probe Sequence
ggtaattgatggtctccgagtccta

SEQ ID NO: 263710 - DNA, 25 bp, Probe Sequence
ggtagactggagacgtcgtgtcctt

SEQ ID NO: 263711 - DNA, 25 bp, Probe Sequence
ggtagatcggaccgttcatgctgcc

SEQ ID NO: 263712 - DNA, 25 bp, Probe Sequence
ggtagatcggaccgttcatgctgcc

SEQ ID NO: 263713 - DNA, 25 bp, Probe Sequence
ggtagactgagtggggtctctctgc

SEQ ID NO: 263714 - DNA, 25 bp, Probe Sequence
ggtatgaatagggggttgtccatcc

SEQ ID NO: 263715 - DNA, 25 bp, Probe Sequence
ggtagagagacgctgggtgacctgc

SEQ ID NO: 263716 - DNA, 25 bp, Probe Sequence
ggtacagacccctagggtcctgaca

SEQ ID NO: 263717 - DNA, 25 bp, Probe Sequence
ggtaaactgcccacttggcagtaca

SEQ ID NO: 263718 - DNA, 25 bp, Probe Sequence
ggtaaactgcccacttggcagtaca

SEQ ID NO: 263719 - DNA, 25 bp, Probe Sequence
ggtaactggcccactgggcaggaca

SEQ ID NO: 263720 - DNA, 25 bp, Probe Sequence
ggtaacagaccgcaggggcaagaca

SEQ ID NO: 263721 - DNA, 25 bp, Probe Sequence
ggtaaagcactatgtctgggttgac

SEQ ID NO: 263722 - DNA, 25 bp, Probe Sequence
aaacctcttgggatgaggattgtct

SEQ ID NO: 263723 - DNA, 25 bp, Probe Sequence
ggtatatactaatagtaggtgtata

SEQ ID NO: 263724 - DNA, 25 bp, Probe Sequence
ggtactagctacaaattcggtttca

SEQ ID NO: 263725 - DNA, 25 bp, Probe Sequence
ggtagggctagaaacctgcgcttta

SEQ ID NO: 263726 - DNA, 25 bp, Probe Sequence
ggtagggtaacgacttagatgtcaa

SEQ ID NO: 263727 - DNA, 25 bp, Probe Sequence
ggtagagttagtcactgtcaagtca

SEQ ID NO: 263728 - DNA, 25 bp, Probe Sequence
ggtcaagaataacacttcaaagtca

SEQ ID NO: 263729 - DNA, 25 bp, Probe Sequence
ggttcaagtttccaattaaagtcat

SEQ ID NO: 263730 - DNA, 25 bp, Probe Sequence
ggttccacttcctaatactatacct

SEQ ID NO: 263731 - DNA, 25 bp, Probe Sequence
tggttcccttaatagactcttgtcc

SEQ ID NO: 263732 - DNA, 25 bp, Probe Sequence
ggtctccaattagatagtcctttcc

SEQ ID NO: 263733 - DNA, 25 bp, Probe Sequence
ggtcttgcaatttttcaccttttct

SEQ ID NO: 263734 - DNA, 25 bp, Probe Sequence
ggtcttgatattgggccaggttttt

SEQ ID NO: 263735 - DNA, 25 bp, Probe Sequence
ggtcttcaacatggtctagagctta

SEQ ID NO: 263736 - DNA, 25 bp, Probe Sequence
ggtctgaaacatgattctgagcttc

SEQ ID NO: 263737 - DNA, 25 bp, Probe Sequence
ggtctatagactgtactggtgatgt

SEQ ID NO: 263738 - DNA, 25 bp, Probe Sequence
ggtctcggcttgattcagcaggtgt

SEQ ID NO: 263739 - DNA, 25 bp, Probe Sequence
ggtctgtggtttaccagcagagtgc

SEQ ID NO: 263740 - DNA, 25 bp, Probe Sequence
ggtctggggattgcagcagagaaga

SEQ ID NO: 263741 - DNA, 25 bp, Probe Sequence
ggtctggtggcactctctgagtgca

SEQ ID NO: 263742 - DNA, 25 bp, Probe Sequence
ggtctgatgtggctgttgatgtgga

SEQ ID NO: 263743 - DNA, 25 bp, Probe Sequence
ggtactgttggagttgatgggcacc

SEQ ID NO: 263744 - DNA, 25 bp, Probe Sequence
ggtactgggtgtttttgtgaccact

SEQ ID NO: 263745 - DNA, 25 bp, Probe Sequence
ggtacaggctggagattttcacata

SEQ ID NO: 263746 - DNA, 25 bp, Probe Sequence
ggtagggctgggttattaagataca

SEQ ID NO: 263747 - DNA, 25 bp, Probe Sequence
tggaaacctggtgtttgaaaatctc

SEQ ID NO: 263748 - DNA, 25 bp, Probe Sequence
ggtaaatcctgtgttaggaaactgc

SEQ ID NO: 263749 - DNA, 25 bp, Probe Sequence
ggtaattttgttctgatttaactag

SEQ ID NO: 263750 - DNA, 25 bp, Probe Sequence
ggtaatgttcagctagtgagtcata

SEQ ID NO: 263751 - DNA, 25 bp, Probe Sequence
ggataatgcctagtccaggcaatct

SEQ ID NO: 263752 - DNA, 25 bp, Probe Sequence
ggtaagcactagtccatgagcctgc

SEQ ID NO: 263753 - DNA, 25 bp, Probe Sequence
ggtaatagctagcacagatgttgac

SEQ ID NO: 263754 - DNA, 25 bp, Probe Sequence
ggtcaattgtcactgtcatcagaat

SEQ ID NO: 263755 - DNA, 25 bp, Probe Sequence
ggtccgtgtagattgatgcagattt

SEQ ID NO: 263756 - DNA, 25 bp, Probe Sequence
ggtccgtgtagattgatgcagattt

SEQ ID NO: 263757 - DNA, 25 bp, Probe Sequence
ggtccgtgtagattgatgcagattt

SEQ ID NO: 263758 - DNA, 25 bp, Probe Sequence
ggtccgtgtagattgatgcagattt

SEQ ID NO: 263759 - DNA, 25 bp, Probe Sequence
ggtcctgcatgggatctgatggatc

SEQ ID NO: 263760 - DNA, 25 bp, Probe Sequence
ggtctcgcggaattgagagatccac

SEQ ID NO: 263761 - DNA, 25 bp, Probe Sequence
ggtctacggagttgaggtgcccgcc

SEQ ID NO: 263762 - DNA, 25 bp, Probe Sequence
ggtctaaggaagcggtagccatgcc

SEQ ID NO: 263763 - DNA, 25 bp, Probe Sequence
ggtccaaggtatctggaagcctctg

SEQ ID NO: 263764 - DNA, 25 bp, Probe Sequence
ggtcataaggatagacttgaagcac

SEQ ID NO: 263765 - DNA, 25 bp, Probe Sequence
ggtcaaatggtagtgctcaagagaa

SEQ ID NO: 263766 - DNA, 25 bp, Probe Sequence
ggtaaacatgtcccgctgtgtagaa

SEQ ID NO: 263767 - DNA, 25 bp, Probe Sequence
ggtccccagattctgctctaagggg

SEQ ID NO: 263768 - DNA, 25 bp, Probe Sequence
ggtcccggtggaatgttcagaggtg

SEQ ID NO: 263769 - DNA, 25 bp, Probe Sequence
ggtcccggtggaatgttcagaggtg

SEQ ID NO: 263770 - DNA, 25 bp, Probe Sequence
ggtcccggtggaatgttcagaggtg

SEQ ID NO: 263771 - DNA, 25 bp, Probe Sequence
ggtccgcgttaaatgtacacgattt

SEQ ID NO: 263772 - DNA, 25 bp, Probe Sequence
ggtccgcgttaaatgcaacacggat

SEQ ID NO: 263773 - DNA, 25 bp, Probe Sequence
ggtccctgtaagaaataccagagtt

SEQ ID NO: 263774 - DNA, 25 bp, Probe Sequence
ggtcgtcattaaggagtgacccctt

SEQ ID NO: 263775 - DNA, 25 bp, Probe Sequence
ggtagtcatatgtccaagtacgccc

SEQ ID NO: 263776 - DNA, 25 bp, Probe Sequence
ggtccatcttggtcaaggacaccca

SEQ ID NO: 263777 - DNA, 25 bp, Probe Sequence
ggtccctttggaacgagcaaaagat

SEQ ID NO: 263778 - DNA, 25 bp, Probe Sequence
ggtcaccatcttaaacaacaccagg

SEQ ID NO: 263779 - DNA, 25 bp, Probe Sequence
ggtacaactggaaacagccaccgga

SEQ ID NO: 263780 - DNA, 25 bp, Probe Sequence
ggtaaagctgagatcacaggaacag

SEQ ID NO: 263781 - DNA, 25 bp, Probe Sequence
ggtcaggactgcattctcagggacc

SEQ ID NO: 263782 - DNA, 25 bp, Probe Sequence
ggtaagttgcagagtaggagtccaa

SEQ ID NO: 263783 - DNA, 25 bp, Probe Sequence
ggtcaggtttgaggttggactccac

SEQ ID NO: 263784 - DNA, 25 bp, Probe Sequence
ggtagcagtctagggattaacttcc

SEQ ID NO: 263785 - DNA, 25 bp, Probe Sequence
ggattggtttggcaagaacttgttt

SEQ ID NO: 263786 - DNA, 25 bp, Probe Sequence
ggttggcgtttctaaaatgtttatg

SEQ ID NO: 263787 - DNA, 25 bp, Probe Sequence
ggtcgtcgcgtctgagaaagttttc

SEQ ID NO: 263788 - DNA, 25 bp, Probe Sequence
ggtccctgtgtctcaacagagtttt

SEQ ID NO: 263789 - DNA, 25 bp, Probe Sequence
ggtcgccgtctgtgaacaagattcc

SEQ ID NO: 263790 - DNA, 25 bp, Probe Sequence
ggtaccggcgcatcatcaaaaatcc

SEQ ID NO: 263791 - DNA, 25 bp, Probe Sequence
ggtagcacgggagtacaaaggccaa

SEQ ID NO: 263792 - DNA, 25 bp, Probe Sequence
ggtactcagtgtttatccaaagaca

SEQ ID NO: 263793 - DNA, 25 bp, Probe Sequence
ggtagcaaggttccacagaaaaaag

SEQ ID NO: 263794 - DNA, 25 bp, Probe Sequence
ggtagagggttgcctgagtttaaga

SEQ ID NO: 263795 - DNA, 25 bp, Probe Sequence
ggtaagagagttgtcactactagat

SEQ ID NO: 263796 - DNA, 25 bp, Probe Sequence
ggtaagtggcccatgcacgtttatt

SEQ ID NO: 263797 - DNA, 25 bp, Probe Sequence
ggtaacggccacttggccagtacat

SEQ ID NO: 263798 - DNA, 25 bp, Probe Sequence
ggtaaggagtactgcagaggtcaca

SEQ ID NO: 263799 - DNA, 25 bp, Probe Sequence
ggtacagtgaaactgcgaatggctc

SEQ ID NO: 263800 - DNA, 25 bp, Probe Sequence
ggtaagtaagctctgacttggctcc

SEQ ID NO: 263801 - DNA, 25 bp, Probe Sequence
ggtcaacgaggtcacctttgtcacc

SEQ ID NO: 263802 - DNA, 25 bp, Probe Sequence
ggtcgaagatggtgccacactttca

SEQ ID NO: 263803 - DNA, 25 bp, Probe Sequence
ggtacaaatggaatcccaatctatc

SEQ ID NO: 263804 - DNA, 25 bp, Probe Sequence
ggtacacaactagcaccattcttga

SEQ ID NO: 263805 - DNA, 25 bp, Probe Sequence
ggtagaagactcgcccattttggaa

SEQ ID NO: 263806 - DNA, 25 bp, Probe Sequence
ggtaataacatttagcctcttagga

SEQ ID NO: 263807 - DNA, 25 bp, Probe Sequence
ggtaatgaaacttttagcctaggat

SEQ ID NO: 263808 - DNA, 25 bp, Probe Sequence
ggtactaaatacctcaacctatggt

SEQ ID NO: 263809 - DNA, 25 bp, Probe Sequence
ggccgctaaatagctcacgttaggc

SEQ ID NO: 263810 - DNA, 25 bp, Probe Sequence
tggccttgcaaagccttcgctttgg

SEQ ID NO: 263811 - DNA, 25 bp, Probe Sequence
ggtcttgcataaggcagttcctgga

SEQ ID NO: 263812 - DNA, 25 bp, Probe Sequence
ggtctcttagatgattacctggagg

SEQ ID NO: 263813 - DNA, 25 bp, Probe Sequence
ggtctcacggccaaggaactggagg

SEQ ID NO: 263814 - DNA, 25 bp, Probe Sequence
ggtcatcactgacaaagagaaggca

SEQ ID NO: 263815 - DNA, 25 bp, Probe Sequence
ggtcatcatgaacatgcaggggcag

SEQ ID NO: 263816 - DNA, 25 bp, Probe Sequence
ggtctataaaaagcaggagttcgtt

SEQ ID NO: 263817 - DNA, 25 bp, Probe Sequence
ggtcctcataaagaaaagtgtcgtt

SEQ ID NO: 263818 - DNA, 25 bp, Probe Sequence
ggtctccttggagaaaggttctgtt

SEQ ID NO: 263819 - DNA, 25 bp, Probe Sequence
ggtccctgggaagcaggggtggatc

SEQ ID NO: 263820 - DNA, 25 bp, Probe Sequence
ggttattcggtgagcggtggtggtt

SEQ ID NO: 263821 - DNA, 25 bp, Probe Sequence
ggtattccagaatcacaggggggat

SEQ ID NO: 263822 - DNA, 25 bp, Probe Sequence
ggtatccgaaaacagcagtggacga

SEQ ID NO: 263823 - DNA, 25 bp, Probe Sequence
ggtatcaggtaagcaggcatttaaa

SEQ ID NO: 263824 - DNA, 25 bp, Probe Sequence
ggtacagtagaagaggatctgggta

SEQ ID NO: 263825 - DNA, 25 bp, Probe Sequence
ggtaaatcaaacaggtagggacact

SEQ ID NO: 263826 - DNA, 25 bp, Probe Sequence
ggtcccaccaacagttcagaaacct

SEQ ID NO: 263827 - DNA, 25 bp, Probe Sequence
ggtcccaccaacagttcagaaacct

SEQ ID NO: 263828 - DNA, 25 bp, Probe Sequence
ggtcctagccaatggtctggacaac

SEQ ID NO: 263829 - DNA, 25 bp, Probe Sequence
ggtcctccaaaataatggacagacc

SEQ ID NO: 263830 - DNA, 25 bp, Probe Sequence
ggtagcctcacttttaatgaacaaa

SEQ ID NO: 263831 - DNA, 25 bp, Probe Sequence
ggtatccacctttctgaatcagaca

SEQ ID NO: 263832 - DNA, 25 bp, Probe Sequence
ggtacctcaagcattgatacgacat

SEQ ID NO: 263833 - DNA, 25 bp, Probe Sequence
ggatcaccttagggtcaggggctgg

SEQ ID NO: 263834 - DNA, 25 bp, Probe Sequence
ggtcactgtaaggttctagggctgg

SEQ ID NO: 263835 - DNA, 25 bp, Probe Sequence
ggtcctgtggtagcttgagggtcag

SEQ ID NO: 263836 - DNA, 25 bp, Probe Sequence
ggttctgggaatgcaataggggcct

SEQ ID NO: 263837 - DNA, 25 bp, Probe Sequence
ggtctccggaaccaaagggagcaca

SEQ ID NO: 263838 - DNA, 25 bp, Probe Sequence
ggtctccggaacccaagggagcaca

SEQ ID NO: 263839 - DNA, 25 bp, Probe Sequence
ggtcctcgagcagctccaagggaat

SEQ ID NO: 263840 - DNA, 25 bp, Probe Sequence
ggtagatgaacagcccctggagaac

SEQ ID NO: 263841 - DNA, 25 bp, Probe Sequence
ggtcaaaagagatccactgttgccc

SEQ ID NO: 263842 - DNA, 25 bp, Probe Sequence
ggtaagattgtaaccacgtctctgc

SEQ ID NO: 263843 - DNA, 25 bp, Probe Sequence
ggtaagtcttaagcttgttggaaat

SEQ ID NO: 263844 - DNA, 25 bp, Probe Sequence
ggtatcactgttgacccttgtggaa

SEQ ID NO: 263845 - DNA, 25 bp, Probe Sequence
ggtcagcctttggagcacgtaagat

SEQ ID NO: 263846 - DNA, 25 bp, Probe Sequence
ggtcggctcttgcaaggtaacatct

SEQ ID NO: 263847 - DNA, 25 bp, Probe Sequence
ggtcccctttgatggcgatgacatt

SEQ ID NO: 263848 - DNA, 25 bp, Probe Sequence
ggtccccacaagctgagggaatgtc

SEQ ID NO: 263849 - DNA, 25 bp, Probe Sequence
ggtcccaagtagcgagataaattcc

SEQ ID NO: 263850 - DNA, 25 bp, Probe Sequence
ggtcctgcacatgagtggaaataca

SEQ ID NO: 263851 - DNA, 25 bp, Probe Sequence
ggatccgactgctttggacctaaat

SEQ ID NO: 263852 - DNA, 25 bp, Probe Sequence
ggtcgatgactctggagatccgaga

SEQ ID NO: 263853 - DNA, 25 bp, Probe Sequence
ggtcgagagctgctgagaaatggaa

SEQ ID NO: 263854 - DNA, 25 bp, Probe Sequence
ggtcaggttgccaaaaaggaagatc

SEQ ID NO: 263855 - DNA, 25 bp, Probe Sequence
ggtcgttgctcgaaatgaccgcaag

SEQ ID NO: 263856 - DNA, 25 bp, Probe Sequence
ggtcgttgtgagagtgaggcctggg

SEQ ID NO: 263857 - DNA, 25 bp, Probe Sequence
ggtcagcttgtgggtgtggacctga

SEQ ID NO: 263858 - DNA, 25 bp, Probe Sequence
ggtcatatgatgctgggggtgccta

SEQ ID NO: 263859 - DNA, 25 bp, Probe Sequence
ggtcatcatgggtgaggtgcgcgat

SEQ ID NO: 263860 - DNA, 25 bp, Probe Sequence
ggtcaatggctgtctgcttgaccct

SEQ ID NO: 263861 - DNA, 25 bp, Probe Sequence
ggtcaatcatcttttgtgacatccc

SEQ ID NO: 263862 - DNA, 25 bp, Probe Sequence
ggtactgcagtaaagaacatccctc

SEQ ID NO: 263863 - DNA, 25 bp, Probe Sequence
ggtcacagaccaggtgaactgcccc

SEQ ID NO: 263864 - DNA, 25 bp, Probe Sequence
ggtacagtctcaggacaacttagcc

SEQ ID NO: 263865 - DNA, 25 bp, Probe Sequence
ggtatctttcacacaaggtatgagc

SEQ ID NO: 263866 - DNA, 25 bp, Probe Sequence
ggtcttgttgccggaaatggatgtc

SEQ ID NO: 263867 - DNA, 25 bp, Probe Sequence
ggttatgtggtccgaatcagtggtg

SEQ ID NO: 263868 - DNA, 25 bp, Probe Sequence
ggtcttgtacacccaatgcagaggt

SEQ ID NO: 263869 - DNA, 25 bp, Probe Sequence
ggtctgtctacacccagatggtagc

SEQ ID NO: 263870 - DNA, 25 bp, Probe Sequence
ggtcagactgaggcaccaagtatag

SEQ ID NO: 263871 - DNA, 25 bp, Probe Sequence
ggttcctgagccttcaaattcagta

SEQ ID NO: 263872 - DNA, 25 bp, Probe Sequence
ggtctcctgtgtgtcaagactcagt

SEQ ID NO: 263873 - DNA, 25 bp, Probe Sequence
ggtcttcttgtgctagaactcaggc

SEQ ID NO: 263874 - DNA, 25 bp, Probe Sequence
ggtctttctgtccttagactagtgg

SEQ ID NO: 263875 - DNA, 25 bp, Probe Sequence
ggtaggcctgatctttgaatagtgg

SEQ ID NO: 263876 - DNA, 25 bp, Probe Sequence
ggtagcaggcttgttaaatagtgga

SEQ ID NO: 263877 - DNA, 25 bp, Probe Sequence
ggtacagtcttggtgccatagaagg

SEQ ID NO: 263878 - DNA, 25 bp, Probe Sequence
ggtcagcttgttggtgccaagaagc

SEQ ID NO: 263879 - DNA, 25 bp, Probe Sequence
ggtctgcatctgcttactgaaggca

SEQ ID NO: 263880 - DNA, 25 bp, Probe Sequence
ggtctggtgccaatcctgtaggcac

SEQ ID NO: 263881 - DNA, 25 bp, Probe Sequence
ggtcttctcaggaccgtagtgccta

SEQ ID NO: 263882 - DNA, 25 bp, Probe Sequence
ggttactattgaacatgctagggct

SEQ ID NO: 263883 - DNA, 25 bp, Probe Sequence
ggtttccaatgtgtataggtcggaa

SEQ ID NO: 263884 - DNA, 25 bp, Probe Sequence
ggtacttatattgttagtaattgca

SEQ ID NO: 263885 - DNA, 25 bp, Probe Sequence
ggtactcgtactgataagggattat

SEQ ID NO: 263886 - DNA, 25 bp, Probe Sequence
ggtaccttaccaatgagggtatcca

SEQ ID NO: 263887 - DNA, 25 bp, Probe Sequence
ggtaccttaccaatgagggtatcca

SEQ ID NO: 263888 - DNA, 25 bp, Probe Sequence
ggtaccttaccaatgagggtagcca

SEQ ID NO: 263889 - DNA, 25 bp, Probe Sequence
ggtacagcctaccaagaggccagaa

SEQ ID NO: 263890 - DNA, 25 bp, Probe Sequence
ggtacagcgtacctggagggatgca

SEQ ID NO: 263891 - DNA, 25 bp, Probe Sequence
ggtcatccctgagctgaacgggaag

SEQ ID NO: 263892 - DNA, 25 bp, Probe Sequence
ggtctccagcaagggattcgggcga

SEQ ID NO: 263893 - DNA, 25 bp, Probe Sequence
ggtcccagacaggtggttgtagcag

SEQ ID NO: 263894 - DNA, 25 bp, Probe Sequence
ggtcgtctacgaatggtttagcgcc

SEQ ID NO: 263895 - DNA, 25 bp, Probe Sequence
ggtcgttaccagagatttacccatc

SEQ ID NO: 263896 - DNA, 25 bp, Probe Sequence
ggtaggtatccacagagttccttca

SEQ ID NO: 263897 - DNA, 25 bp, Probe Sequence
ggtactaacaaactgaattctttca

SEQ ID NO: 263898 - DNA, 25 bp, Probe Sequence
ggtacgaggtaaccaattcttgtca

SEQ ID NO: 263899 - DNA, 25 bp, Probe Sequence
ggtacgttataacatcaattataga

SEQ ID NO: 263900 - DNA, 25 bp, Probe Sequence
ggtctcggtgcaaatgttagttatg

SEQ ID NO: 263901 - DNA, 25 bp, Probe Sequence
ggtctgcttgtcaaagtgtccttaa

SEQ ID NO: 263902 - DNA, 25 bp, Probe Sequence
ggtacttggcaaatctccctaaact

SEQ ID NO: 263903 - DNA, 25 bp, Probe Sequence
ggtcacagtggatttcttttcaaac

SEQ ID NO: 263904 - DNA, 25 bp, Probe Sequence
ggtactgcggaaattcttgtgcgca

SEQ ID NO: 263905 - DNA, 25 bp, Probe Sequence
ggtcacctaaatactcatattctcg

SEQ ID NO: 263906 - DNA, 25 bp, Probe Sequence
ggatcacctacttactgtattctac

SEQ ID NO: 263907 - DNA, 25 bp, Probe Sequence
ggtcacactctttacatttctgtaa

SEQ ID NO: 263908 - DNA, 25 bp, Probe Sequence
ggtaccctataattgttctataaga

SEQ ID NO: 263909 - DNA, 25 bp, Probe Sequence
ggtactctcatattcaacttgtaca

SEQ ID NO: 263910 - DNA, 25 bp, Probe Sequence
ggtcactgtgatttcaagcatgttt

SEQ ID NO: 263911 - DNA, 25 bp, Probe Sequence
ggtcatgtggatttccagactgtgc

SEQ ID NO: 263912 - DNA, 25 bp, Probe Sequence
ggtcatgatcaacctcaagacggag

SEQ ID NO: 263913 - DNA, 25 bp, Probe Sequence
ggtcatgatcaacctcaagacggag

SEQ ID NO: 263914 - DNA, 25 bp, Probe Sequence
ggtcatgatcaacctcaagacggag

SEQ ID NO: 263915 - DNA, 25 bp, Probe Sequence
ggtctatgcctctcagcgaatgaga

SEQ ID NO: 263916 - DNA, 25 bp, Probe Sequence
ggtcccagctattcaggaggctgag

SEQ ID NO: 263917 - DNA, 25 bp, Probe Sequence
ggtctccagatacgtgaaggctgga

SEQ ID NO: 263918 - DNA, 25 bp, Probe Sequence
ggtccctcacctggctagggagata

SEQ ID NO: 263919 - DNA, 25 bp, Probe Sequence
ggtctcctatccgagctttgggagc

SEQ ID NO: 263920 - DNA, 25 bp, Probe Sequence
ggatcctaaccggaactgggatgca

SEQ ID NO: 263921 - DNA, 25 bp, Probe Sequence
ggaccccaacaggaactgggacgct

SEQ ID NO: 263922 - DNA, 25 bp, Probe Sequence
ggacggaaacctcgacttggaggtg

SEQ ID NO: 263923 - DNA, 25 bp, Probe Sequence
ggatcgcgaaacgtgggttggaagg

SEQ ID NO: 263924 - DNA, 25 bp, Probe Sequence
ggtcagaggagggcatgggttggca

SEQ ID NO: 263925 - DNA, 25 bp, Probe Sequence
ggtcagggaccatgcactgttgtga

SEQ ID NO: 263926 - DNA, 25 bp, Probe Sequence
ggtcgggaacaaggcagatctggag

SEQ ID NO: 263927 - DNA, 25 bp, Probe Sequence
ggtcgggagacagcagctttggaga

SEQ ID NO: 263928 - DNA, 25 bp, Probe Sequence
ggtcagggtgaatcagatgggggac

SEQ ID NO: 263929 - DNA, 25 bp, Probe Sequence
ggtcggctggacgaggggaggagcc

SEQ ID NO: 263930 - DNA, 25 bp, Probe Sequence
ggttcggtaccacacgaaggtgcgc

SEQ ID NO: 263931 - DNA, 25 bp, Probe Sequence
ggttggggtctacacggaggttgtg

SEQ ID NO: 263932 - DNA, 25 bp, Probe Sequence
ggttggggtggttgaggctaagttg

SEQ ID NO: 263933 - DNA, 25 bp, Probe Sequence
ggtcacgaggtggaagaggtagagg

SEQ ID NO: 263934 - DNA, 25 bp, Probe Sequence
ggtcacagggatcaacgaatagtaa

SEQ ID NO: 263935 - DNA, 25 bp, Probe Sequence
ggtcttgcagtacaactggaagcca

SEQ ID NO: 263936 - DNA, 25 bp, Probe Sequence
ggtcttccttgagaggttgagccag

SEQ ID NO: 263937 - DNA, 25 bp, Probe Sequence
tggggtccgtgggcaagttgcccag

SEQ ID NO: 263938 - DNA, 25 bp, Probe Sequence
ggtttcatttgggatcaattcccag

SEQ ID NO: 263939 - DNA, 25 bp, Probe Sequence
ggtctctttagaggatcctgtacac

SEQ ID NO: 263940 - DNA, 25 bp, Probe Sequence
ggtcgtatttacgccttcataattg

SEQ ID NO: 263941 - DNA, 25 bp, Probe Sequence
ggctggtttacgccgctttctgaca

SEQ ID NO: 263942 - DNA, 25 bp, Probe Sequence
ggctggtttttctgtttgtaagaat

SEQ ID NO: 263943 - DNA, 25 bp, Probe Sequence
ggtcttttaatctgatgttctcaga

SEQ ID NO: 263944 - DNA, 25 bp, Probe Sequence
ggtctacttggttaatctttctgaa

SEQ ID NO: 263945 - DNA, 25 bp, Probe Sequence
ggtctacttggttaatctttctgaa

SEQ ID NO: 263946 - DNA, 25 bp, Probe Sequence
ggtctcttcggaaagactgttccaa

SEQ ID NO: 263947 - DNA, 25 bp, Probe Sequence
ggtttacggatgtgactgattcact

SEQ ID NO: 263948 - DNA, 25 bp, Probe Sequence
ggtcgtcacgttaacacaatgtcac

SEQ ID NO: 263949 - DNA, 25 bp, Probe Sequence
ggtcttcacgttaaacttgtcttat

SEQ ID NO: 263950 - DNA, 25 bp, Probe Sequence
ggtctttctgctatgaaacgtgttt

SEQ ID NO: 263951 - DNA, 25 bp, Probe Sequence
ggtctccctgctagaaaacacattg

SEQ ID NO: 263952 - DNA, 25 bp, Probe Sequence
ggtcattcctgctcagatagtactg

SEQ ID NO: 263953 - DNA, 25 bp, Probe Sequence
ggtcattgcttgtaccaggtaattt

SEQ ID NO: 263954 - DNA, 25 bp, Probe Sequence
ggtcatcgtcatcagcctggtgatg

SEQ ID NO: 263955 - DNA, 25 bp, Probe Sequence
ggtctgcctcaaccgtgagatagga

SEQ ID NO: 263956 - DNA, 25 bp, Probe Sequence
ggtcacccaggaggatggcaaagag

SEQ ID NO: 263957 - DNA, 25 bp, Probe Sequence
ggtacccgagaagaaagcagggcca

SEQ ID NO: 263958 - DNA, 25 bp, Probe Sequence
ggtttcgcccaataaaggtggactg

SEQ ID NO: 263959 - DNA, 25 bp, Probe Sequence
ggtttccctccagaactggctgaac

SEQ ID NO: 263960 - DNA, 25 bp, Probe Sequence
ggtttcccttgacatacgtgaaaca

SEQ ID NO: 263961 - DNA, 25 bp, Probe Sequence
ggcttttcggtggagttcctatata

SEQ ID NO: 263962 - DNA, 25 bp, Probe Sequence
ggatctcccggggagttacgctgtg

SEQ ID NO: 263963 - DNA, 25 bp, Probe Sequence
ggactccctggttcagtatttaatg

SEQ ID NO: 263964 - DNA, 25 bp, Probe Sequence
ggacatcccgttacagattttctgg

SEQ ID NO: 263965 - DNA, 25 bp, Probe Sequence
ggtctccctattaatgatttctcac

SEQ ID NO: 263966 - DNA, 25 bp, Probe Sequence
ggtctcaatccttaacatatttgca

SEQ ID NO: 263967 - DNA, 25 bp, Probe Sequence
ggtctatacagagtcaatatatttt

SEQ ID NO: 263968 - DNA, 25 bp, Probe Sequence
ggtcatatttatgaatacgttgtac

SEQ ID NO: 263969 - DNA, 25 bp, Probe Sequence
ggtcagccttattgaaaggttgtat

SEQ ID NO: 263970 - DNA, 25 bp, Probe Sequence
ggtacaaaatgctgaagatgtttat

SEQ ID NO: 263971 - DNA, 25 bp, Probe Sequence
ggtaatctgaacccaaatttgtata

SEQ ID NO: 263972 - DNA, 25 bp, Probe Sequence
ggtctgcatctaagactaacttttt

SEQ ID NO: 263973 - DNA, 25 bp, Probe Sequence
ggtctgggtaactagccatttcttc

SEQ ID NO: 263974 - DNA, 25 bp, Probe Sequence
ggtctggttagaccccaatgagacc

SEQ ID NO: 263975 - DNA, 25 bp, Probe Sequence
ggtctggcaaagtcaggctcaggga

SEQ ID NO: 263976 - DNA, 25 bp, Probe Sequence
ggttgccaagagcaggctcgggtgc

SEQ ID NO: 263977 - DNA, 25 bp, Probe Sequence
ggtacaagcagtcagttctcggcag

SEQ ID NO: 263978 - DNA, 25 bp, Probe Sequence
ggtcagttcaggaagtatatctgga

SEQ ID NO: 263979 - DNA, 25 bp, Probe Sequence
ggtacttagagttgtttctggaata

SEQ ID NO: 263980 - DNA, 25 bp, Probe Sequence
ggtactgtaattgagcatccggaat

SEQ ID NO: 263981 - DNA, 25 bp, Probe Sequence
ggtacagaagatgtcgtccgagtat

SEQ ID NO: 263982 - DNA, 25 bp, Probe Sequence
ggtacggagatgtttcacgaagttt

SEQ ID NO: 263983 - DNA, 25 bp, Probe Sequence
ggtacgcttcagttttcaaaggttg

SEQ ID NO: 263984 - DNA, 25 bp, Probe Sequence
ggttgccttagaggttagacttttg

SEQ ID NO: 263985 - DNA, 25 bp, Probe Sequence
ggtctgtttgtgagcttagttttct

SEQ ID NO: 263986 - DNA, 25 bp, Probe Sequence
ggtctacacggaggttgtgtttaca

SEQ ID NO: 263987 - DNA, 25 bp, Probe Sequence
ggtctccacgtggtgtgtttcgtgg

SEQ ID NO: 263988 - DNA, 25 bp, Probe Sequence
ggtctccacgtggtgtgtttcgtgg

SEQ ID NO: 263989 - DNA, 25 bp, Probe Sequence
ggtaggacctgactggtcttggctg

SEQ ID NO: 263990 - DNA, 25 bp, Probe Sequence
ggtacagtagtgttggactgttgcc

SEQ ID NO: 263991 - DNA, 25 bp, Probe Sequence
ggtatcagaatggtgttccttctcc

SEQ ID NO: 263992 - DNA, 25 bp, Probe Sequence
ggtcactccatcgatgttcttcttc

SEQ ID NO: 263993 - DNA, 25 bp, Probe Sequence
ggtcatcttccaatttctttacctg

SEQ ID NO: 263994 - DNA, 25 bp, Probe Sequence
ggtcatgttccatatatgttatacc

SEQ ID NO: 263995 - DNA, 25 bp, Probe Sequence
ggtctcttgagatcttgtggattcc

SEQ ID NO: 263996 - DNA, 25 bp, Probe Sequence
ggtctcctggatcatgtggtacgcc

SEQ ID NO: 263997 - DNA, 25 bp, Probe Sequence
ggtagaaatgcaaaatggtacagcc

SEQ ID NO: 263998 - DNA, 25 bp, Probe Sequence
ggtagcaactgaaagaagacatcct

SEQ ID NO: 263999 - DNA, 25 bp, Probe Sequence
ggtaatacatactgacaacccattc

SEQ ID NO: 264000 - DNA, 25 bp, Probe Sequence
ggtcaacagatctttgacaaggcca

SEQ ID NO: 264001 - DNA, 25 bp, Probe Sequence
ggtcagcagcacctaagatcaagga

SEQ ID NO: 264002 - DNA, 25 bp, Probe Sequence
ggagaagcaccatataaagtagggg

SEQ ID NO: 264003 - DNA, 25 bp, Probe Sequence
ggtagatcaccagttcaagactagc

SEQ ID NO: 264004 - DNA, 25 bp, Probe Sequence
ggtaagcaaatcaatataaccagca

SEQ ID NO: 264005 - DNA, 25 bp, Probe Sequence
ggtacagcagagataaaactctgag

SEQ ID NO: 264006 - DNA, 25 bp, Probe Sequence
ggtacagcggtgaaagaaccaacaa

SEQ ID NO: 264007 - DNA, 25 bp, Probe Sequence
ggttctggagttcaaagcccacgaa

SEQ ID NO: 264008 - DNA, 25 bp, Probe Sequence
ggttctggagttcaaagcccacgaa

SEQ ID NO: 264009 - DNA, 25 bp, Probe Sequence
ggtctcatacagagtctaaactatc

SEQ ID NO: 264010 - DNA, 25 bp, Probe Sequence
ggtctctgaatgacgttacaccctc

SEQ ID NO: 264011 - DNA, 25 bp, Probe Sequence
ggtttgacattggagatacgctagt

SEQ ID NO: 264012 - DNA, 25 bp, Probe Sequence
ggtaatgcatatttagagcactgta

SEQ ID NO: 264013 - DNA, 25 bp, Probe Sequence
ggtaagcaacctgggcatcttagga

SEQ ID NO: 264014 - DNA, 25 bp, Probe Sequence
ggtagagatccagcatggcttccag

SEQ ID NO: 264015 - DNA, 25 bp, Probe Sequence
ggtaagatgtcgatccttagctgaa

SEQ ID NO: 264016 - DNA, 25 bp, Probe Sequence
ggtaatgagggatcctgcaagcaaa

SEQ ID NO: 264017 - DNA, 25 bp, Probe Sequence
ggtagatggaagaatcctggacttg

SEQ ID NO: 264018 - DNA, 25 bp, Probe Sequence
ggtagcggaaaattctcactcagtg

SEQ ID NO: 264019 - DNA, 25 bp, Probe Sequence
ggtcaagcctgacagaatactcagg

SEQ ID NO: 264020 - DNA, 25 bp, Probe Sequence
ggtcattcaggacagctaagtcagt

SEQ ID NO: 264021 - DNA, 25 bp, Probe Sequence
ggtctacaagttctagagtatgttc

SEQ ID NO: 264022 - DNA, 25 bp, Probe Sequence
ggtctgaagatctccgagcaaagct

SEQ ID NO: 264023 - DNA, 25 bp, Probe Sequence
ggtctgaagtccttaagagaactta

SEQ ID NO: 264024 - DNA, 25 bp, Probe Sequence
ggtctgaagtccttgcaagacgctg

SEQ ID NO: 264025 - DNA, 25 bp, Probe Sequence
ggattacgtcactgcaggaactgct

SEQ ID NO: 264026 - DNA, 25 bp, Probe Sequence
ggtctactgtgattcgaaaagctgc

SEQ ID NO: 264027 - DNA, 25 bp, Probe Sequence
ggtctctgtgtattaagctaactca

SEQ ID NO: 264028 - DNA, 25 bp, Probe Sequence
ggtctgatgggaaggacttgactcc

SEQ ID NO: 264029 - DNA, 25 bp, Probe Sequence
ggtctgtatgtgaggagtgctgtgc

SEQ ID NO: 264030 - DNA, 25 bp, Probe Sequence
ggtctgctaatgaagccctgtggcc

SEQ ID NO: 264031 - DNA, 25 bp, Probe Sequence
ggtcactaggtgttcgcattggcct

SEQ ID NO: 264032 - DNA, 25 bp, Probe Sequence
ggtcttaggagggtgctaggctgca

SEQ ID NO: 264033 - DNA, 25 bp, Probe Sequence
ggtagtggaagggagctgaggatgg

SEQ ID NO: 264034 - DNA, 25 bp, Probe Sequence
ggtacatggatgaggcaggtgggtg

SEQ ID NO: 264035 - DNA, 25 bp, Probe Sequence
ggtagctgcaagggcagggatggga

SEQ ID NO: 264036 - DNA, 25 bp, Probe Sequence
ggtcagctcaggtcaaatgtgtggg

SEQ ID NO: 264037 - DNA, 25 bp, Probe Sequence
ggtcttgggttcctgtatggtggaa

SEQ ID NO: 264038 - DNA, 25 bp, Probe Sequence
ggtcttgggttcctgtatggtggaa

SEQ ID NO: 264039 - DNA, 25 bp, Probe Sequence
ggtcttgggttcctgtatggtggaa

SEQ ID NO: 264040 - DNA, 25 bp, Probe Sequence
ggtcttggacgtggtttcagtggga

SEQ ID NO: 264041 - DNA, 25 bp, Probe Sequence
ggtctgttatggggctttgcagcgt

SEQ ID NO: 264042 - DNA, 25 bp, Probe Sequence
ggtctctatctgggagctgggccag

SEQ ID NO: 264043 - DNA, 25 bp, Probe Sequence
ggtcacttctgacagagtgtgccgt

SEQ ID NO: 264044 - DNA, 25 bp, Probe Sequence
ggtcaccatgctgataagtggccgg

SEQ ID NO: 264045 - DNA, 25 bp, Probe Sequence
ggtacaattctattcatgggacgag

SEQ ID NO: 264046 - DNA, 25 bp, Probe Sequence
ggtactttcttatgctggatcaggt

SEQ ID NO: 264047 - DNA, 25 bp, Probe Sequence
ggtaaaattttgtctggcatgaggt

SEQ ID NO: 264048 - DNA, 25 bp, Probe Sequence
ggtaattttttgtttcatggactat

SEQ ID NO: 264049 - DNA, 25 bp, Probe Sequence
ggtaattcttgtaaagcctgtggct

SEQ ID NO: 264050 - DNA, 25 bp, Probe Sequence
ggtaattcttgtaaagcctgtggct

SEQ ID NO: 264051 - DNA, 25 bp, Probe Sequence
ggtagcaatccaggataaggtgttg

SEQ ID NO: 264052 - DNA, 25 bp, Probe Sequence
ggtagatatctagagtagagttgct

SEQ ID NO: 264053 - DNA, 25 bp, Probe Sequence
ggtagttcttgcagtaggcacttta

SEQ ID NO: 264054 - DNA, 25 bp, Probe Sequence
ggtagttaatgcagtagaaagtagt

SEQ ID NO: 264055 - DNA, 25 bp, Probe Sequence
ggtagtctaacctgatacaagtagt

SEQ ID NO: 264056 - DNA, 25 bp, Probe Sequence
ggtcatttaccctcagaaagactct

SEQ ID NO: 264057 - DNA, 25 bp, Probe Sequence
ggtctattatcccaacagaagagaa

SEQ ID NO: 264058 - DNA, 25 bp, Probe Sequence
ggtctctttgactaatcaccaaaaa

SEQ ID NO: 264059 - DNA, 25 bp, Probe Sequence
ggtctctctctgaccactaatcaaa

SEQ ID NO: 264060 - DNA, 25 bp, Probe Sequence
ggttggctatgcagagtaaaaatgt

SEQ ID NO: 264061 - DNA, 25 bp, Probe Sequence
ggtaaccatgtatgtaaacagatgt

SEQ ID NO: 264062 - DNA, 25 bp, Probe Sequence
ggtaagccagggatcaaactgcatc

SEQ ID NO: 264063 - DNA, 25 bp, Probe Sequence
ggttagtcatcgcgtagtagccatg

SEQ ID NO: 264064 - DNA, 25 bp, Probe Sequence
ggttatgtcacgcatctgatgaagc

SEQ ID NO: 264065 - DNA, 25 bp, Probe Sequence
ggtaaatgcatccattttgaatcct

SEQ ID NO: 264066 - DNA, 25 bp, Probe Sequence
ggtagaagcagcctaccttttctct

SEQ ID NO: 264067 - DNA, 25 bp, Probe Sequence
ggtagaaggtagttccatgttccat

SEQ ID NO: 264068 - DNA, 25 bp, Probe Sequence
ggtcagaatatggacttccttttat

SEQ ID NO: 264069 - DNA, 25 bp, Probe Sequence
ggtctaatctcttttgtgtttttgt

SEQ ID NO: 264070 - DNA, 25 bp, Probe Sequence
ggtctattttatttgcttaagttga

SEQ ID NO: 264071 - DNA, 25 bp, Probe Sequence
ggtctattttaccctgtgacattta

SEQ ID NO: 264072 - DNA, 25 bp, Probe Sequence
ggtctttattgagcacctactatat

SEQ ID NO: 264073 - DNA, 25 bp, Probe Sequence
ggtcatttgttgccttctaagttga

SEQ ID NO: 264074 - DNA, 25 bp, Probe Sequence
ggtataggcttgccttgctgagagc

SEQ ID NO: 264075 - DNA, 25 bp, Probe Sequence
ggtctcaggcaaactatcacagtcc

SEQ ID NO: 264076 - DNA, 25 bp, Probe Sequence
ggtctacgccgagtgacagagacgc

SEQ ID NO: 264077 - DNA, 25 bp, Probe Sequence
ggtctgcagcagctgcggacagagc

SEQ ID NO: 264078 - DNA, 25 bp, Probe Sequence
ggtcatggaggtcgagaccagcctg

SEQ ID NO: 264079 - DNA, 25 bp, Probe Sequence
ggtcaggatatttggattagccaga

SEQ ID NO: 264080 - DNA, 25 bp, Probe Sequence
ggtaggtatttgccaggcccaatgc

SEQ ID NO: 264081 - DNA, 25 bp, Probe Sequence
ggtaggtatggttgcaggcacctgt

SEQ ID NO: 264082 - DNA, 25 bp, Probe Sequence
ggtcactgttggtgcgagacttgtt

SEQ ID NO: 264083 - DNA, 25 bp, Probe Sequence
ggtacttgctgggacggattcttgc

SEQ ID NO: 264084 - DNA, 25 bp, Probe Sequence
ggtctgctacatcaaaggtgctctt

SEQ ID NO: 264085 - DNA, 25 bp, Probe Sequence
ggtctctgcagtgtaaggtccttag

SEQ ID NO: 264086 - DNA, 25 bp, Probe Sequence
ggtcatcgcagtgaaggttttggga

SEQ ID NO: 264087 - DNA, 25 bp, Probe Sequence
ggtagcagagtcgaggctgtcttgt

SEQ ID NO: 264088 - DNA, 25 bp, Probe Sequence
ggtcacagatagagccttctgtgtt

SEQ ID NO: 264089 - DNA, 25 bp, Probe Sequence
ggtctatgatagagccgagctcgtt

SEQ ID NO: 264090 - DNA, 25 bp, Probe Sequence
ggtctatataagcggagctcgctta

SEQ ID NO: 264091 - DNA, 25 bp, Probe Sequence
ggtcttatgcaaagggacttcctca

SEQ ID NO: 264092 - DNA, 25 bp, Probe Sequence
ggtttggcaccaagggcttggctat

SEQ ID NO: 264093 - DNA, 25 bp, Probe Sequence
ggtatcaggcggggaggttgggagg

SEQ ID NO: 264094 - DNA, 25 bp, Probe Sequence
ggtagatgtgggcggtgtttggagg

SEQ ID NO: 264095 - DNA, 25 bp, Probe Sequence
ggtacatttctttgggtttctagag

SEQ ID NO: 264096 - DNA, 25 bp, Probe Sequence
ggtcagctatttttggttgcataaa

SEQ ID NO: 264097 - DNA, 25 bp, Probe Sequence
ggtcttgtgttagttgtatctgaaa

SEQ ID NO: 264098 - DNA, 25 bp, Probe Sequence
ggtcattggtgctgttcaacaggaa

SEQ ID NO: 264099 - DNA, 25 bp, Probe Sequence
ggtttggtacgtcaacaggaacagc

SEQ ID NO: 264100 - DNA, 25 bp, Probe Sequence
ggatttggtccgtcataacccaagg

SEQ ID NO: 264101 - DNA, 25 bp, Probe Sequence
ggcttaggcagctgtagaaccccag

SEQ ID NO: 264102 - DNA, 25 bp, Probe Sequence
ggtttggccagacagtatacccaaa

SEQ ID NO: 264103 - DNA, 25 bp, Probe Sequence
ggtttgcctgagctttgaacagtca

SEQ ID NO: 264104 - DNA, 25 bp, Probe Sequence
ggtagtcatctggtgtttgtactat

SEQ ID NO: 264105 - DNA, 25 bp, Probe Sequence
ggtcatgatggccctttagtacgaa

SEQ ID NO: 264106 - DNA, 25 bp, Probe Sequence
ggtctcatactcacttatgttggaa

SEQ ID NO: 264107 - DNA, 25 bp, Probe Sequence
ggtctatcacttgttgctgggtaaa

SEQ ID NO: 264108 - DNA, 25 bp, Probe Sequence
ggtcatgaactttctagtgcggata

SEQ ID NO: 264109 - DNA, 25 bp, Probe Sequence
ggtctagcacttcctagtaggatag

SEQ ID NO: 264110 - DNA, 25 bp, Probe Sequence
ggtataccatacctttaggaaggcg

SEQ ID NO: 264111 - DNA, 25 bp, Probe Sequence
ggtcaggccaagcctctctaaatga

SEQ ID NO: 264112 - DNA, 25 bp, Probe Sequence
ggtcaggccaatggtcacagaccta

SEQ ID NO: 264113 - DNA, 25 bp, Probe Sequence
ggtcatcaccgtagtcacagacaca

SEQ ID NO: 264114 - DNA, 25 bp, Probe Sequence
ggtcatctcctctgaggagaccacc

SEQ ID NO: 264115 - DNA, 25 bp, Probe Sequence
ggtatctagccctagaatgcctaga

SEQ ID NO: 264116 - DNA, 25 bp, Probe Sequence
ggtatgttgggccagagcatccgga

SEQ ID NO: 264117 - DNA, 25 bp, Probe Sequence
ggtcatgaaggagccgcatggctgt

SEQ ID NO: 264118 - DNA, 25 bp, Probe Sequence
ggtcatggtgtgtacctgtaatctc

SEQ ID NO: 264119 - DNA, 25 bp, Probe Sequence
ggtcacgtgtgctccagataaaaaa

SEQ ID NO: 264120 - DNA, 25 bp, Probe Sequence
ggtagctcggcaccaactaagaaaa

SEQ ID NO: 264121 - DNA, 25 bp, Probe Sequence
ggtcaggggctttatctatgaaaaa

SEQ ID NO: 264122 - DNA, 25 bp, Probe Sequence
ggtaggaggccttctttgggattga

SEQ ID NO: 264123 - DNA, 25 bp, Probe Sequence
ggtcagcgtggtttttatgtgtatt

SEQ ID NO: 264124 - DNA, 25 bp, Probe Sequence
ggtcagagatggattgttggtgcaa

SEQ ID NO: 264125 - DNA, 25 bp, Probe Sequence
ggtagcagatggagtaatggtcacg

SEQ ID NO: 264126 - DNA, 25 bp, Probe Sequence
ggtcagccatttttaatgatctcgg

SEQ ID NO: 264127 - DNA, 25 bp, Probe Sequence
ggtaggccttggtacatgatgctgg

SEQ ID NO: 264128 - DNA, 25 bp, Probe Sequence
ggtacctcatgggaagcatgtggat

SEQ ID NO: 264129 - DNA, 25 bp, Probe Sequence
ggtcatcaccattggcaatgagcgg

SEQ ID NO: 264130 - DNA, 25 bp, Probe Sequence
ggtcactgcaatggtgctaaggctg

SEQ ID NO: 264131 - DNA, 25 bp, Probe Sequence
ggtcagtgcgacctgtgaggatgtg

SEQ ID NO: 264132 - DNA, 25 bp, Probe Sequence
ggtcatggagaccttgaacgaaggc

SEQ ID NO: 264133 - DNA, 25 bp, Probe Sequence
ggtctacatcaactattacgacatg

SEQ ID NO: 264134 - DNA, 25 bp, Probe Sequence
ggtctaatcccatctgggcacatgc

SEQ ID NO: 264135 - DNA, 25 bp, Probe Sequence
ggtcattacacctactctgagaatc

SEQ ID NO: 264136 - DNA, 25 bp, Probe Sequence
ggtcaaagccactatcatctgatgt

SEQ ID NO: 264137 - DNA, 25 bp, Probe Sequence
ggtcaagagccccaattatgtacaa

SEQ ID NO: 264138 - DNA, 25 bp, Probe Sequence
ggtaaagccacgtgtcagtacagag

SEQ ID NO: 264139 - DNA, 25 bp, Probe Sequence
ggtaaaatcacttcagatctctaaa

SEQ ID NO: 264140 - DNA, 25 bp, Probe Sequence
ggtaagtgactttcagactaatcaa

SEQ ID NO: 264141 - DNA, 25 bp, Probe Sequence
ggtacgtccatttggactacaagaa

SEQ ID NO: 264142 - DNA, 25 bp, Probe Sequence
ggtttgtctatcaggcaaccaaaac

SEQ ID NO: 264143 - DNA, 25 bp, Probe Sequence
ggtttattactctcacccataaaca

SEQ ID NO: 264144 - DNA, 25 bp, Probe Sequence
ggttcagttacttacccaggatcac

SEQ ID NO: 264145 - DNA, 25 bp, Probe Sequence
ggtcacgttcttggatcctcagaac

SEQ ID NO: 264146 - DNA, 25 bp, Probe Sequence
ggtcacctttgtcaccatagacact

SEQ ID NO: 264147 - DNA, 25 bp, Probe Sequence
ggtcacctgttggctacacagaccc

SEQ ID NO: 264148 - DNA, 25 bp, Probe Sequence
ggtcacggatggtgtgaagcactcc

SEQ ID NO: 264149 - DNA, 25 bp, Probe Sequence
ggtcacccagcgagtgctgagaccc

SEQ ID NO: 264150 - DNA, 25 bp, Probe Sequence
ggtacaccagttggtgtcagacccg

SEQ ID NO: 264151 - DNA, 25 bp, Probe Sequence
ggtaatgtggttgtgatagccccgc

SEQ ID NO: 264152 - DNA, 25 bp, Probe Sequence
ggtcttgttcttatggactaccatg

SEQ ID NO: 264153 - DNA, 25 bp, Probe Sequence
ggtttggtttctaacctgactctca

SEQ ID NO: 264154 - DNA, 25 bp, Probe Sequence
ggttctggttttcagtccattgtga

SEQ ID NO: 264155 - DNA, 25 bp, Probe Sequence
ggtatacagttgctgcaagacctat

SEQ ID NO: 264156 - DNA, 25 bp, Probe Sequence
ggtctacatcttactcagaatcact

SEQ ID NO: 264157 - DNA, 25 bp, Probe Sequence
ggtcttgatcttacaggacatcttt

SEQ ID NO: 264158 - DNA, 25 bp, Probe Sequence
ggtctttccatcatggccatttgta

SEQ ID NO: 264159 - DNA, 25 bp, Probe Sequence
ggtcattaccacagactcttttttc

SEQ ID NO: 264160 - DNA, 25 bp, Probe Sequence
ggtctatataagcagagcctcgttt

SEQ ID NO: 264161 - DNA, 25 bp, Probe Sequence
ggtctatataagcagagctcgtttt

SEQ ID NO: 264162 - DNA, 25 bp, Probe Sequence
ggtctatataagcgagctctttagt

SEQ ID NO: 264163 - DNA, 25 bp, Probe Sequence
ggtctatgaattaaatgcctatcta

SEQ ID NO: 264164 - DNA, 25 bp, Probe Sequence
ggtctaggttaggatgcttgtcttt

SEQ ID NO: 264165 - DNA, 25 bp, Probe Sequence
ggtcagaatgcttacgggtgttatt

SEQ ID NO: 264166 - DNA, 25 bp, Probe Sequence
ggtcaagatctctaatttgtttata

SEQ ID NO: 264167 - DNA, 25 bp, Probe Sequence
ggtcttgctctcaaatttttctgta

SEQ ID NO: 264168 - DNA, 25 bp, Probe Sequence
ggtaggctagcaatattttggttaa

SEQ ID NO: 264169 - DNA, 25 bp, Probe Sequence
ggtacgcaataactgtttggtattt

SEQ ID NO: 264170 - DNA, 25 bp, Probe Sequence
ggtctaggctaacctttggtcattt

SEQ ID NO: 264171 - DNA, 25 bp, Probe Sequence
ggtctagaatctggcactttactca

SEQ ID NO: 264172 - DNA, 25 bp, Probe Sequence
ggtctagacatttgctgctgaatac

SEQ ID NO: 264173 - DNA, 25 bp, Probe Sequence
ggtaagctcatttgcatgcatataa

SEQ ID NO: 264174 - DNA, 25 bp, Probe Sequence
ggtaagtgcagcttgaatttcaaat

SEQ ID NO: 264175 - DNA, 25 bp, Probe Sequence
ggtagcgctggtatatggtcaaatg

SEQ ID NO: 264176 - DNA, 25 bp, Probe Sequence
ggtagccatggaaatcgggagtgaa

SEQ ID NO: 264177 - DNA, 25 bp, Probe Sequence
ggtaccagagagcatctgcgggaga

SEQ ID NO: 264178 - DNA, 25 bp, Probe Sequence
ggtaccagcagaaacctgggcaggc

SEQ ID NO: 264179 - DNA, 25 bp, Probe Sequence
ggtcacccagaattgcttgaagggc

SEQ ID NO: 264180 - DNA, 25 bp, Probe Sequence
ggtactacgatgtcatgtctgatga

SEQ ID NO: 264181 - DNA, 25 bp, Probe Sequence
ggtctttcctgttgatcatgatgat

SEQ ID NO: 264182 - DNA, 25 bp, Probe Sequence
ggtcattccctgagtcagacatgcc

SEQ ID NO: 264183 - DNA, 25 bp, Probe Sequence
ggtctatcggttttgcagtgtgtcc

SEQ ID NO: 264184 - DNA, 25 bp, Probe Sequence
ggtcttacgatgttatgagtctgat

SEQ ID NO: 264185 - DNA, 25 bp, Probe Sequence
ggtcatgtgacttttctgtactgtt

SEQ ID NO: 264186 - DNA, 25 bp, Probe Sequence
ggtcatagcctctttgctattctat

SEQ ID NO: 264187 - DNA, 25 bp, Probe Sequence
ggtcatagattcttgagctgttgtg

SEQ ID NO: 264188 - DNA, 25 bp, Probe Sequence
ggtcttgattcaacagctgtggggc

SEQ ID NO: 264189 - DNA, 25 bp, Probe Sequence
ggtcttttcagagcgtggaggtgtg

SEQ ID NO: 264190 - DNA, 25 bp, Probe Sequence
ggtcttaaacatgagggagcgtggg

SEQ ID NO: 264191 - DNA, 25 bp, Probe Sequence
ggtatgttaacctaggcagtgggag

SEQ ID NO: 264192 - DNA, 25 bp, Probe Sequence
ggtatttagagcgcagcggctgacg

SEQ ID NO: 264193 - DNA, 25 bp, Probe Sequence
ggatcacttggggtcagggtttgag

SEQ ID NO: 264194 - DNA, 25 bp, Probe Sequence
ggatcacttggggtcagggtttgag

SEQ ID NO: 264195 - DNA, 25 bp, Probe Sequence
ggatcacttaaggtcaggagtttga

SEQ ID NO: 264196 - DNA, 25 bp, Probe Sequence
ggtcatttacaattgggagatttca

SEQ ID NO: 264197 - DNA, 25 bp, Probe Sequence
ggtttcttcatattgaggggcaact

SEQ ID NO: 264198 - DNA, 25 bp, Probe Sequence
ggtcttctaatgtctggaaagcaac

SEQ ID NO: 264199 - DNA, 25 bp, Probe Sequence
ggtttcaaattgggtaactacattg

SEQ ID NO: 264200 - DNA, 25 bp, Probe Sequence
ggttttgccattgtaaatgggtctg

SEQ ID NO: 264201 - DNA, 25 bp, Probe Sequence
ggtcattttttcctaacttactctg

SEQ ID NO: 264202 - DNA, 25 bp, Probe Sequence
ggtctttcttgaatccaaaattcca

SEQ ID NO: 264203 - DNA, 25 bp, Probe Sequence
ggtctttctactccacaaaataatt

SEQ ID NO: 264204 - DNA, 25 bp, Probe Sequence
ggtcattttcagtcctctagaagaa

SEQ ID NO: 264205 - DNA, 25 bp, Probe Sequence
ggtattttgagcccttcagaagaca

SEQ ID NO: 264206 - DNA, 25 bp, Probe Sequence
ggtaccttctcacctgtgagaccaa

SEQ ID NO: 264207 - DNA, 25 bp, Probe Sequence
ggtaagttcttccagctgaagccac

SEQ ID NO: 264208 - DNA, 25 bp, Probe Sequence
ggtaaggattatgctggcatcccct

SEQ ID NO: 264209 - DNA, 25 bp, Probe Sequence
ggtcaagaatgttgcgtttcccttc

SEQ ID NO: 264210 - DNA, 25 bp, Probe Sequence
ggtcatggcaattggcttttgctct

SEQ ID NO: 264211 - DNA, 25 bp, Probe Sequence
ggtcatgtctaaaggtcatcgtatt

SEQ ID NO: 264212 - DNA, 25 bp, Probe Sequence
ggtcatgtctgaataattctcattt

SEQ ID NO: 264213 - DNA, 25 bp, Probe Sequence
ggtagtgctaataactctcctgtct

SEQ ID NO: 264214 - DNA, 25 bp, Probe Sequence
ggtacatgcaaatactccctgtgga

SEQ ID NO: 264215 - DNA, 25 bp, Probe Sequence
ggtaatgaaaacttcctttctgaga

SEQ ID NO: 264216 - DNA, 25 bp, Probe Sequence
ggtaatgaaaacttcctttctgaga

SEQ ID NO: 264217 - DNA, 25 bp, Probe Sequence
ggtagaagaaaactcccacttgtga

SEQ ID NO: 264218 - DNA, 25 bp, Probe Sequence
ggtaggagtcaatctgccacagaag

SEQ ID NO: 264219 - DNA, 25 bp, Probe Sequence
ggtaagagtaaagtctccaccagaa

SEQ ID NO: 264220 - DNA, 25 bp, Probe Sequence
ggtcaagctggagaatctcttcgag

SEQ ID NO: 264221 - DNA, 25 bp, Probe Sequence
ggtacgggaggatcacattgcggtc

SEQ ID NO: 264222 - DNA, 25 bp, Probe Sequence
ggtacctaagtatatgattgcgagt

SEQ ID NO: 264223 - DNA, 25 bp, Probe Sequence
ggtacctaagtatatgattgcgagt

SEQ ID NO: 264224 - DNA, 25 bp, Probe Sequence
ggtacctaagtatatgattgcgagt

SEQ ID NO: 264225 - DNA, 25 bp, Probe Sequence
ggtaccccagtatctataccagcta

SEQ ID NO: 264226 - DNA, 25 bp, Probe Sequence
ggtaacccaattgcgaatgccacca

SEQ ID NO: 264227 - DNA, 25 bp, Probe Sequence
ggatgaacccaatcccaatagtcca

SEQ ID NO: 264228 - DNA, 25 bp, Probe Sequence
ggaaagaccaagatcataaatatta

SEQ ID NO: 264229 - DNA, 25 bp, Probe Sequence
ggtcaaaccatagcacaaaatcatt

SEQ ID NO: 264230 - DNA, 25 bp, Probe Sequence
ggtcaagagcgtgcctgaaaacctt

SEQ ID NO: 264231 - DNA, 25 bp, Probe Sequence
ggtaggaaaccttagaacatcattt

SEQ ID NO: 264232 - DNA, 25 bp, Probe Sequence
ggtacgaaaccatcaatggacaact

SEQ ID NO: 264233 - DNA, 25 bp, Probe Sequence
ggtaaagacacctggatcagactcc

SEQ ID NO: 264234 - DNA, 25 bp, Probe Sequence
ggtagaaaactctgcacacacttac

SEQ ID NO: 264235 - DNA, 25 bp, Probe Sequence
ggtacaatgatagtgcactacaacc

SEQ ID NO: 264236 - DNA, 25 bp, Probe Sequence
ggtaccatcatggacaccacagtgg

SEQ ID NO: 264237 - DNA, 25 bp, Probe Sequence
ggtcatcctctggcacagaacgaac

SEQ ID NO: 264238 - DNA, 25 bp, Probe Sequence
ggtcatcctctggcacagaacgaac

SEQ ID NO: 264239 - DNA, 25 bp, Probe Sequence
ggtatcctgtaggcaagatcgacac

SEQ ID NO: 264240 - DNA, 25 bp, Probe Sequence
ggtcaccattatgcagaatccacgc

SEQ ID NO: 264241 - DNA, 25 bp, Probe Sequence
ggtcataatgtcacaatctccttgc

SEQ ID NO: 264242 - DNA, 25 bp, Probe Sequence
ggtaagatcataacaatgtctcatg

SEQ ID NO: 264243 - DNA, 25 bp, Probe Sequence
ggtaacatctgtaatgatgctgtta

SEQ ID NO: 264244 - DNA, 25 bp, Probe Sequence
ggtaacctgatcgtggagagtgagg

SEQ ID NO: 264245 - DNA, 25 bp, Probe Sequence
ggtaatcctgctcagtacgagagga

SEQ ID NO: 264246 - DNA, 25 bp, Probe Sequence
ggtttgccgctggagtatcaagaga

SEQ ID NO: 264247 - DNA, 25 bp, Probe Sequence
ggctgttcttcggggaaaagataat

SEQ ID NO: 264248 - DNA, 25 bp, Probe Sequence
ggtagttctcttgggcagaaacata

SEQ ID NO: 264249 - DNA, 25 bp, Probe Sequence
ggtagcagtgtggtaggatagagac

SEQ ID NO: 264250 - DNA, 25 bp, Probe Sequence
ggtactcatgttgaggtcaatgtga

SEQ ID NO: 264251 - DNA, 25 bp, Probe Sequence
ggtaccatggagctgagctataggc

SEQ ID NO: 264252 - DNA, 25 bp, Probe Sequence
ggtactgatgcttgctggatttagg

SEQ ID NO: 264253 - DNA, 25 bp, Probe Sequence
ggtcaagatctagcgataatgacga

SEQ ID NO: 264254 - DNA, 25 bp, Probe Sequence
ggtcaagtcacagtccaagatggca

SEQ ID NO: 264255 - DNA, 25 bp, Probe Sequence
ggtcattgtgccctgccaaggcaca

SEQ ID NO: 264256 - DNA, 25 bp, Probe Sequence
ggtcataggccttctctgaaaatgt

SEQ ID NO: 264257 - DNA, 25 bp, Probe Sequence
ggtcatcgactacgccgtgaagatc

SEQ ID NO: 264258 - DNA, 25 bp, Probe Sequence
ggcccggatccgggtacagatctca

SEQ ID NO: 264259 - DNA, 25 bp, Probe Sequence
ggtcttggatgtcgggttcgaccac

SEQ ID NO: 264260 - DNA, 25 bp, Probe Sequence
ggctttgggtttggtacgtcaacag

SEQ ID NO: 264261 - DNA, 25 bp, Probe Sequence
ggtttgggtttcacatcttcaatgc

SEQ ID NO: 264262 - DNA, 25 bp, Probe Sequence
ggtaggttttcaatacatccacaag

SEQ ID NO: 264263 - DNA, 25 bp, Probe Sequence
ggtagtgttctatatcagcccagta

SEQ ID NO: 264264 - DNA, 25 bp, Probe Sequence
ggtacgtatattgtcatgacggtcc

SEQ ID NO: 264265 - DNA, 25 bp, Probe Sequence
ggtagatgttattttcagggttgcc

SEQ ID NO: 264266 - DNA, 25 bp, Probe Sequence
ggtaatgttaagactgctgggtggg

SEQ ID NO: 264267 - DNA, 25 bp, Probe Sequence
tggtttctctactcctagggaggca

SEQ ID NO: 264268 - DNA, 25 bp, Probe Sequence
ggtttcaccatgttagccgggatgg

SEQ ID NO: 264269 - DNA, 25 bp, Probe Sequence
ggtatgtagctatttagtcttgggc

SEQ ID NO: 264270 - DNA, 25 bp, Probe Sequence
ggtagtgaattggcttccttgacgc

SEQ ID NO: 264271 - DNA, 25 bp, Probe Sequence
ggtagtaacaggatccactcaccct

SEQ ID NO: 264272 - DNA, 25 bp, Probe Sequence
ggtagtgaatcaggaagccagtaac

SEQ ID NO: 264273 - DNA, 25 bp, Probe Sequence
ggatctgtaaccgaccgtgtaaggg

SEQ ID NO: 264274 - DNA, 25 bp, Probe Sequence
ggacatgaaatagcccgtaaagagt

SEQ ID NO: 264275 - DNA, 25 bp, Probe Sequence
ggtataaaacccagtaatgcgatgc

SEQ ID NO: 264276 - DNA, 25 bp, Probe Sequence
ggttatttaccgagatagatttcca

SEQ ID NO: 264277 - DNA, 25 bp, Probe Sequence
ggtttcttgagtgtgggtacttcca

SEQ ID NO: 264278 - DNA, 25 bp, Probe Sequence
ggtattttgattctatggttccctc

SEQ ID NO: 264279 - DNA, 25 bp, Probe Sequence
ggtagttctgaacgttagatatttt

SEQ ID NO: 264280 - DNA, 25 bp, Probe Sequence
ggtagttctgaacgttagatatttt

SEQ ID NO: 264281 - DNA, 25 bp, Probe Sequence
ggtagttctgaacgttagatatttt

SEQ ID NO: 264282 - DNA, 25 bp, Probe Sequence
ggtagtctctgatagttattggtat

SEQ ID NO: 264283 - DNA, 25 bp, Probe Sequence
ggtacctctgcattgcagtagcagc

SEQ ID NO: 264284 - DNA, 25 bp, Probe Sequence
ggtagcgcttgcagcatggctgacc

SEQ ID NO: 264285 - DNA, 25 bp, Probe Sequence
ggtacagatctcagcagtgcatagc

SEQ ID NO: 264286 - DNA, 25 bp, Probe Sequence
ggtactgcatagacgcagctgcaca

SEQ ID NO: 264287 - DNA, 25 bp, Probe Sequence
ggtcactcatggaatcctgcagctt

SEQ ID NO: 264288 - DNA, 25 bp, Probe Sequence
ggtcactagagattgggacttaccc

SEQ ID NO: 264289 - DNA, 25 bp, Probe Sequence
ggtcactagaggagggcttccagca

SEQ ID NO: 264290 - DNA, 25 bp, Probe Sequence
ggtttggagcagaccgtttctacct

SEQ ID NO: 264291 - DNA, 25 bp, Probe Sequence
ggtttgggcatatgctttcatcatt

SEQ ID NO: 264292 - DNA, 25 bp, Probe Sequence
ggttgaaacatatctcttatcttac

SEQ ID NO: 264293 - DNA, 25 bp, Probe Sequence
ggtttaaagtcggctgtgacctcct

SEQ ID NO: 264294 - DNA, 25 bp, Probe Sequence
ggtacataaagcagggtggctgtcc

SEQ ID NO: 264295 - DNA, 25 bp, Probe Sequence
ggtacagaatagagcgtgtgctgtt

SEQ ID NO: 264296 - DNA, 25 bp, Probe Sequence
ggtacaattcagttgttggcttgtt

SEQ ID NO: 264297 - DNA, 25 bp, Probe Sequence
ggtcagcaacctcttttgattttgt

SEQ ID NO: 264298 - DNA, 25 bp, Probe Sequence
ggtaaactctctataagtgttcagt

SEQ ID NO: 264299 - DNA, 25 bp, Probe Sequence
ggtaaactgtcatctaaggaacttc

SEQ ID NO: 264300 - DNA, 25 bp, Probe Sequence
ggtagagacttcaaataatggcata

SEQ ID NO: 264301 - DNA, 25 bp, Probe Sequence
ggtaagatctacaatgctccataat

SEQ ID NO: 264302 - DNA, 25 bp, Probe Sequence
ggtaaatatcacctgctcaacatgt

SEQ ID NO: 264303 - DNA, 25 bp, Probe Sequence
ggtacatattatccttcaaatctga

SEQ ID NO: 264304 - DNA, 25 bp, Probe Sequence
ggttcagtgaatcctcctaatctgt

SEQ ID NO: 264305 - DNA, 25 bp, Probe Sequence
ggttattgcaagttccaacctggaa

SEQ ID NO: 264306 - DNA, 25 bp, Probe Sequence
ggtatttgccaggcccaatgcttta

SEQ ID NO: 264307 - DNA, 25 bp, Probe Sequence
ggatactgagtctcctaatcttatc

SEQ ID NO: 264308 - DNA, 25 bp, Probe Sequence
ggtacttctacagtctaatcgtcat

SEQ ID NO: 264309 - DNA, 25 bp, Probe Sequence
ggtagtacaacagctccaagtattc

SEQ ID NO: 264310 - DNA, 25 bp, Probe Sequence
ggtttgccaatcctcttaagtattc

SEQ ID NO: 264311 - DNA, 25 bp, Probe Sequence
ggtattggcagtttttccattttca

SEQ ID NO: 264312 - DNA, 25 bp, Probe Sequence
ggtattggcagtttttccattttca

SEQ ID NO: 264313 - DNA, 25 bp, Probe Sequence
ggtattggcagtttttccattttca

SEQ ID NO: 264314 - DNA, 25 bp, Probe Sequence
ggataaggccttctgtactttgctt

SEQ ID NO: 264315 - DNA, 25 bp, Probe Sequence
ggtacgaactggagggcttgtgtgt

SEQ ID NO: 264316 - DNA, 25 bp, Probe Sequence
ggtacttactggataccaggttgac

SEQ ID NO: 264317 - DNA, 25 bp, Probe Sequence
ggtacttactagagcctgagaacag

SEQ ID NO: 264318 - DNA, 25 bp, Probe Sequence
ggtactttgtatctccggtaagtag

SEQ ID NO: 264319 - DNA, 25 bp, Probe Sequence
ggtattttctcacatcctgtgggac

SEQ ID NO: 264320 - DNA, 25 bp, Probe Sequence
ggttttctaccatttcgactggatc

SEQ ID NO: 264321 - DNA, 25 bp, Probe Sequence
ggttttctaccatttcgactggatc

SEQ ID NO: 264322 - DNA, 25 bp, Probe Sequence
ggttttcaattcaatacgcgggata

SEQ ID NO: 264323 - DNA, 25 bp, Probe Sequence
ggtatttcagtttccctagggagag

SEQ ID NO: 264324 - DNA, 25 bp, Probe Sequence
ggtattgtcctttaggcggggaatg

SEQ ID NO: 264325 - DNA, 25 bp, Probe Sequence
ggtatttacctatgttggtgccttg

SEQ ID NO: 264326 - DNA, 25 bp, Probe Sequence
ggtatgtggcctcaggaatggtggc

SEQ ID NO: 264327 - DNA, 25 bp, Probe Sequence
ggataatatattcagggtgcagggt

SEQ ID NO: 264328 - DNA, 25 bp, Probe Sequence
ggtacatgattgatttggtggtcgt

SEQ ID NO: 264329 - DNA, 25 bp, Probe Sequence
ggtagcatttgggtctgagatcggc

SEQ ID NO: 264330 - DNA, 25 bp, Probe Sequence
ggtcagcaactgtgtcgtgagcagc

SEQ ID NO: 264331 - DNA, 25 bp, Probe Sequence
ggtcacacatctaagacgtgatagt

SEQ ID NO: 264332 - DNA, 25 bp, Probe Sequence
ggtacaactggccacagagatagtc

SEQ ID NO: 264333 - DNA, 25 bp, Probe Sequence
ggtaagacatggccaatgataaagc

SEQ ID NO: 264334 - DNA, 25 bp, Probe Sequence
ggtacgcagatcccagaataaagca

SEQ ID NO: 264335 - DNA, 25 bp, Probe Sequence
ggtatctgagtaccagcagtaccag

SEQ ID NO: 264336 - DNA, 25 bp, Probe Sequence
ggtactgcacaactgtagtcccagc

SEQ ID NO: 264337 - DNA, 25 bp, Probe Sequence
ggtagcacattcctatatttccagc

SEQ ID NO: 264338 - DNA, 25 bp, Probe Sequence
ggtacacctgcttatgtgttgcctc

SEQ ID NO: 264339 - DNA, 25 bp, Probe Sequence
ggtaatgttctgtgagttatctcgt

SEQ ID NO: 264340 - DNA, 25 bp, Probe Sequence
ggtacctttacgtatatttgcagat

SEQ ID NO: 264341 - DNA, 25 bp, Probe Sequence
ggtagactttcaactattgttagat

SEQ ID NO: 264342 - DNA, 25 bp, Probe Sequence
ggtaagctattaattattgcctcaa

SEQ ID NO: 264343 - DNA, 25 bp, Probe Sequence
ggtaacagtttaatcatctcacttg

SEQ ID NO: 264344 - DNA, 25 bp, Probe Sequence
ggtacaacttgccaatcatactgtt

SEQ ID NO: 264345 - DNA, 25 bp, Probe Sequence
ggtaagaggctgcatgatcttttta

SEQ ID NO: 264346 - DNA, 25 bp, Probe Sequence
ggtaagatctgccaagaatttctct

SEQ ID NO: 264347 - DNA, 25 bp, Probe Sequence
ggtaaatctcaagtagcatcaatct

SEQ ID NO: 264348 - DNA, 25 bp, Probe Sequence
ggtaattctatgtctatctcaactc

SEQ ID NO: 264349 - DNA, 25 bp, Probe Sequence
ggtcaatttgagccgcgtcgagctc

SEQ ID NO: 264350 - DNA, 25 bp, Probe Sequence
ggtcaccttgagctgtggtggctcc

SEQ ID NO: 264351 - DNA, 25 bp, Probe Sequence
ggtcactcattgacagggctggcct

SEQ ID NO: 264352 - DNA, 25 bp, Probe Sequence
ggtttaagtcagagctagttcccca

SEQ ID NO: 264353 - DNA, 25 bp, Probe Sequence
ggttataagggttcctgctttcaca

SEQ ID NO: 264354 - DNA, 25 bp, Probe Sequence
ggtactacagggcacacgtgtttca

SEQ ID NO: 264355 - DNA, 25 bp, Probe Sequence
ggtactgccagcaggaccatgttct

SEQ ID NO: 264356 - DNA, 25 bp, Probe Sequence
ggtatccagcacgaggacctggtct

SEQ ID NO: 264357 - DNA, 25 bp, Probe Sequence
ggttccgatccaggaactggaagtt

SEQ ID NO: 264358 - DNA, 25 bp, Probe Sequence
ggtcaccgtctcgctgagggacggt

SEQ ID NO: 264359 - DNA, 25 bp, Probe Sequence
ggtttcagtatctactagggaaggt

SEQ ID NO: 264360 - DNA, 25 bp, Probe Sequence
ggtttagtggtcctaggagacttgg

SEQ ID NO: 264361 - DNA, 25 bp, Probe Sequence
ggttttgtggatctagattcattag

SEQ ID NO: 264362 - DNA, 25 bp, Probe Sequence
ggttgttgtagtatgtgttagtaaa

SEQ ID NO: 264363 - DNA, 25 bp, Probe Sequence
ggttaatgtggtaaatggggtccag

SEQ ID NO: 264364 - DNA, 25 bp, Probe Sequence
ggtataatggttgactgggtttctc

SEQ ID NO: 264365 - DNA, 25 bp, Probe Sequence
ggttacaggtggatcttcttgttcc

SEQ ID NO: 264366 - DNA, 25 bp, Probe Sequence
ggtttcctctggaagcttactgttc

SEQ ID NO: 264367 - DNA, 25 bp, Probe Sequence
ggtttctgtctgtaagttaagacct

SEQ ID NO: 264368 - DNA, 25 bp, Probe Sequence
ggttttctatgaacgattccggcct

SEQ ID NO: 264369 - DNA, 25 bp, Probe Sequence
ggttttctatgaacgattccggcct

SEQ ID NO: 264370 - DNA, 25 bp, Probe Sequence
ggttcccattaaggatgtcgaggcg

SEQ ID NO: 264371 - DNA, 25 bp, Probe Sequence
ggttccttgtacgattgtagatact

SEQ ID NO: 264372 - DNA, 25 bp, Probe Sequence
ggttcagtttccacagtagatgagt

SEQ ID NO: 264373 - DNA, 25 bp, Probe Sequence
ggttcagtctgtcctagaggttggt

SEQ ID NO: 264374 - DNA, 25 bp, Probe Sequence
ggttagatgcctcctggggtttata

SEQ ID NO: 264375 - DNA, 25 bp, Probe Sequence
ggttgaagaccaggcctggttttat

SEQ ID NO: 264376 - DNA, 25 bp, Probe Sequence
ggttagaatctcaccatggtttagt

SEQ ID NO: 264377 - DNA, 25 bp, Probe Sequence
ggttatggaccaactcagtgcttca

SEQ ID NO: 264378 - DNA, 25 bp, Probe Sequence
ggtacaggcaaaacgaggaatcatc

SEQ ID NO: 264379 - DNA, 25 bp, Probe Sequence
ggtagaggaaatgcggggctccctg

SEQ ID NO: 264380 - DNA, 25 bp, Probe Sequence
ggtagattggtagattgggctgcgc

SEQ ID NO: 264381 - DNA, 25 bp, Probe Sequence
ggtactgtggctcaagggagtcacc

SEQ ID NO: 264382 - DNA, 25 bp, Probe Sequence
ggtactggcgcttagaaccagaccc

SEQ ID NO: 264383 - DNA, 25 bp, Probe Sequence
ggtttaccgtatttccagacacacg

SEQ ID NO: 264384 - DNA, 25 bp, Probe Sequence
ggtttaccgtatttccagacacacg

SEQ ID NO: 264385 - DNA, 25 bp, Probe Sequence
tggtttccctttgctccagaaacac

SEQ ID NO: 264386 - DNA, 25 bp, Probe Sequence
tggtttccctttgctccagaaacac

SEQ ID NO: 264387 - DNA, 25 bp, Probe Sequence
tggtttccctttgctccagaaacac

SEQ ID NO: 264388 - DNA, 25 bp, Probe Sequence
ggtttccgtgtctgtgtagaaagaa

SEQ ID NO: 264389 - DNA, 25 bp, Probe Sequence
ggtttccctgccatgagtattaaaa

SEQ ID NO: 264390 - DNA, 25 bp, Probe Sequence
ggtatgtccagagcagtcgctactg

SEQ ID NO: 264391 - DNA, 25 bp, Probe Sequence
ggtagtccatggccacattgtaggt

SEQ ID NO: 264392 - DNA, 25 bp, Probe Sequence
ggtagactagggacatagtattgga

SEQ ID NO: 264393 - DNA, 25 bp, Probe Sequence
ggtagaagtggcatcatttattgtg

SEQ ID NO: 264394 - DNA, 25 bp, Probe Sequence
ggtagataggatcgccatttatttc

SEQ ID NO: 264395 - DNA, 25 bp, Probe Sequence
ggtagcagatggtcccattattcta

SEQ ID NO: 264396 - DNA, 25 bp, Probe Sequence
ggtatgcagatgatgacctgatcat

SEQ ID NO: 264397 - DNA, 25 bp, Probe Sequence
ggtatgcaacggtcactgatgcgcc

SEQ ID NO: 264398 - DNA, 25 bp, Probe Sequence
ggtagacagcgcaatctgtggagct

SEQ ID NO: 264399 - DNA, 25 bp, Probe Sequence
ggtagacccattagtgtcactgatg

SEQ ID NO: 264400 - DNA, 25 bp, Probe Sequence
ggtagcaaccaaagattccagtgtt

SEQ ID NO: 264401 - DNA, 25 bp, Probe Sequence
ggtaaagcctcattactgtagagtt

SEQ ID NO: 264402 - DNA, 25 bp, Probe Sequence
ggtacaagcaccttatctatcacag

SEQ ID NO: 264403 - DNA, 25 bp, Probe Sequence
ggtacaatgagctctcttacaagac

SEQ ID NO: 264404 - DNA, 25 bp, Probe Sequence
ggtacagagggcacgctatgaggca

SEQ ID NO: 264405 - DNA, 25 bp, Probe Sequence
ggatacggtttgactcacggggatt

SEQ ID NO: 264406 - DNA, 25 bp, Probe Sequence
ggatacggtttgactcacggggatt

SEQ ID NO: 264407 - DNA, 25 bp, Probe Sequence
ggatacggtttgactcacggggatt

SEQ ID NO: 264408 - DNA, 25 bp, Probe Sequence
ggatacggtttgactcacggggatt

SEQ ID NO: 264409 - DNA, 25 bp, Probe Sequence
ggatacggtttgactcacggggatt

SEQ ID NO: 264410 - DNA, 25 bp, Probe Sequence
ggataccgtttgactcacggggatt

SEQ ID NO: 264411 - DNA, 25 bp, Probe Sequence
ggatatacgttaattatccgggcat

SEQ ID NO: 264412 - DNA, 25 bp, Probe Sequence
ggaaattcctaatgtcctgagtatt

SEQ ID NO: 264413 - DNA, 25 bp, Probe Sequence
ggaaacttacaatgtccctttatat

SEQ ID NO: 264414 - DNA, 25 bp, Probe Sequence
ggaatatttaagaggcccctctagc

SEQ ID NO: 264415 - DNA, 25 bp, Probe Sequence
ggtatccttaagtggaccccacaga

SEQ ID NO: 264416 - DNA, 25 bp, Probe Sequence
ggtacttggaggctcaacctcccag

SEQ ID NO: 264417 - DNA, 25 bp, Probe Sequence
ggtactaaggtgctcagtccttgca

SEQ ID NO: 264418 - DNA, 25 bp, Probe Sequence
ggtacaaaagtgcctcaacgacatg

SEQ ID NO: 264419 - DNA, 25 bp, Probe Sequence
ggtagcagaagagtgctctccatgc

SEQ ID NO: 264420 - DNA, 25 bp, Probe Sequence
ggtacagccacaggcacattcacag

SEQ ID NO: 264421 - DNA, 25 bp, Probe Sequence
ggtaatgccagctcaggtgacaacc

SEQ ID NO: 264422 - DNA, 25 bp, Probe Sequence
ggtacatgaccttatgggactttcc

SEQ ID NO: 264423 - DNA, 25 bp, Probe Sequence
ggttcagactctgttaatccttcct

SEQ ID NO: 264424 - DNA, 25 bp, Probe Sequence
ggttcattttccttaatactttgct

SEQ ID NO: 264425 - DNA, 25 bp, Probe Sequence
ggttcattttccttaatactttgct

SEQ ID NO: 264426 - DNA, 25 bp, Probe Sequence
ggttcattttccttaatactttgct

SEQ ID NO: 264427 - DNA, 25 bp, Probe Sequence
ggattgtttgctcaaaaagcttgga

SEQ ID NO: 264428 - DNA, 25 bp, Probe Sequence
ggtttttccaaatcgcacaatggca

SEQ ID NO: 264429 - DNA, 25 bp, Probe Sequence
ggtaattggaattaactccacacca

SEQ ID NO: 264430 - DNA, 25 bp, Probe Sequence
ggtaattggcaagaggctctgcaat

SEQ ID NO: 264431 - DNA, 25 bp, Probe Sequence
ggtaattggctaaccagccaagatc

SEQ ID NO: 264432 - DNA, 25 bp, Probe Sequence
ggtagtgtggttgctcacgcaagta

SEQ ID NO: 264433 - DNA, 25 bp, Probe Sequence
ggtaggctatgcttttgaccaggta

SEQ ID NO: 264434 - DNA, 25 bp, Probe Sequence
ggtaggtactctcaactctggatga

SEQ ID NO: 264435 - DNA, 25 bp, Probe Sequence
ggtaatctagttccagagtctgtat

SEQ ID NO: 264436 - DNA, 25 bp, Probe Sequence
ggtactgcagagttacaggatcgtg

SEQ ID NO: 264437 - DNA, 25 bp, Probe Sequence
ggtactatcagagtagggcaggctc

SEQ ID NO: 264438 - DNA, 25 bp, Probe Sequence
ggtactctcaactctggatgagttg

SEQ ID NO: 264439 - DNA, 25 bp, Probe Sequence
ggtacccagtgctgatggggtgtgc

SEQ ID NO: 264440 - DNA, 25 bp, Probe Sequence
ggtagacgatgttggtgtcagggtc

SEQ ID NO: 264441 - DNA, 25 bp, Probe Sequence
ggtagacattgttctgtggaaggct

SEQ ID NO: 264442 - DNA, 25 bp, Probe Sequence
ggtagactactttgggaatgagaac

SEQ ID NO: 264443 - DNA, 25 bp, Probe Sequence
ggtagaccagtgaggcagatatgta

SEQ ID NO: 264444 - DNA, 25 bp, Probe Sequence
ggtagcactaatatggagattatcc

SEQ ID NO: 264445 - DNA, 25 bp, Probe Sequence
ggtaggctaaataggagttacagaa

SEQ ID NO: 264446 - DNA, 25 bp, Probe Sequence
ggtatggtaatagtatgttttagga

SEQ ID NO: 264447 - DNA, 25 bp, Probe Sequence
ggtatggctgtaactatctctgtga

SEQ ID NO: 264448 - DNA, 25 bp, Probe Sequence
ggtagctctgacactttcagttcta

SEQ ID NO: 264449 - DNA, 25 bp, Probe Sequence
ggttccaaatgcctttcagctacca

SEQ ID NO: 264450 - DNA, 25 bp, Probe Sequence
ggtattacacaggatttgccatagc

SEQ ID NO: 264451 - DNA, 25 bp, Probe Sequence
ggtattcccattatgttaagcagga

SEQ ID NO: 264452 - DNA, 25 bp, Probe Sequence
ggtatattgaaatcgttgaagcgag

SEQ ID NO: 264453 - DNA, 25 bp, Probe Sequence
ggtattgaaactgctggtggagtca

SEQ ID NO: 264454 - DNA, 25 bp, Probe Sequence
ggtttaacaggtaaggagtgccaat

SEQ ID NO: 264455 - DNA, 25 bp, Probe Sequence
ggtttgttacttggattgagggaat

SEQ ID NO: 264456 - DNA, 25 bp, Probe Sequence
ggttgtgttgtagggttgcaggttt

SEQ ID NO: 264457 - DNA, 25 bp, Probe Sequence
ggttaggttacagctggaggtgtgt

SEQ ID NO: 264458 - DNA, 25 bp, Probe Sequence
ggttattgtcggtatcggagttctt

SEQ ID NO: 264459 - DNA, 25 bp, Probe Sequence
ggttcttgcgcgtctatcgcaggag

SEQ ID NO: 264460 - DNA, 25 bp, Probe Sequence
ggtatcgtagcggcgacacgagaga

SEQ ID NO: 264461 - DNA, 25 bp, Probe Sequence
ggttcagtggcagtgggtctgggac

SEQ ID NO: 264462 - DNA, 25 bp, Probe Sequence
ggttcgtgggatgttcagctggaaa

SEQ ID NO: 264463 - DNA, 25 bp, Probe Sequence
ggtttgcaagttcttctgtgtggaa

SEQ ID NO: 264464 - DNA, 25 bp, Probe Sequence
ggttctgaatgacaaaggtgttaaa

SEQ ID NO: 264465 - DNA, 25 bp, Probe Sequence
ggtactccataaaaggtgtgttgaa

SEQ ID NO: 264466 - DNA, 25 bp, Probe Sequence
ggtaaccaattaagcttgagattgt

SEQ ID NO: 264467 - DNA, 25 bp, Probe Sequence
ggtactccagttacaattgagaatt

SEQ ID NO: 264468 - DNA, 25 bp, Probe Sequence
ggtactccgggaagactagatgact

SEQ ID NO: 264469 - DNA, 25 bp, Probe Sequence
ggtagctctcctgaatagctaaatc

SEQ ID NO: 264470 - DNA, 25 bp, Probe Sequence
ggtagcttctatgtaattcgcaatg

SEQ ID NO: 264471 - DNA, 25 bp, Probe Sequence
ggtagttccatgttccatttgtaga

SEQ ID NO: 264472 - DNA, 25 bp, Probe Sequence
ggtagtgttagctctctgctaggag

SEQ ID NO: 264473 - DNA, 25 bp, Probe Sequence
ggtaatgtttgcactcatctgacag

SEQ ID NO: 264474 - DNA, 25 bp, Probe Sequence
ggtttgctgtatgaccttgcacaag

SEQ ID NO: 264475 - DNA, 25 bp, Probe Sequence
ggttttgaatcgtccttataacagc

SEQ ID NO: 264476 - DNA, 25 bp, Probe Sequence
tggtctttaatctcctttaagtctt

SEQ ID NO: 264477 - DNA, 25 bp, Probe Sequence
ggtttctaatttctatgtggaattt

SEQ ID NO: 264478 - DNA, 25 bp, Probe Sequence
ggtagtaaacctattgatggcaatt

SEQ ID NO: 264479 - DNA, 25 bp, Probe Sequence
ggtatttaaaccattgcattgcagt

SEQ ID NO: 264480 - DNA, 25 bp, Probe Sequence
ggtaagtaacttatttctgcactgt

SEQ ID NO: 264481 - DNA, 25 bp, Probe Sequence
ggtagttttttcatcttcagttgtc

SEQ ID NO: 264482 - DNA, 25 bp, Probe Sequence
ggttgactttttgcacttctgtata

SEQ ID NO: 264483 - DNA, 25 bp, Probe Sequence
ggttgactttttgcacttctgtata

SEQ ID NO: 264484 - DNA, 25 bp, Probe Sequence
ggtttcattttgggccttgctaaat

SEQ ID NO: 264485 - DNA, 25 bp, Probe Sequence
ggcatttttcttgacctggtataat

SEQ ID NO: 264486 - DNA, 25 bp, Probe Sequence
ggtttgttcaagcacacttaataag

SEQ ID NO: 264487 - DNA, 25 bp, Probe Sequence
ggtttaaatacgtcacttttacatg

SEQ ID NO: 264488 - DNA, 25 bp, Probe Sequence
ggtttcataatcctggaccgatcga

SEQ ID NO: 264489 - DNA, 25 bp, Probe Sequence
ggtattgctatcatttgaactaaga

SEQ ID NO: 264490 - DNA, 25 bp, Probe Sequence
ggttcacccagaattgacaccaaag

SEQ ID NO: 264491 - DNA, 25 bp, Probe Sequence
ggtaacgcttatcaacacagcaaag

SEQ ID NO: 264492 - DNA, 25 bp, Probe Sequence
ggtatctcctctaagtaaggaagat

SEQ ID NO: 264493 - DNA, 25 bp, Probe Sequence
ggtatctcctctaagtaaggaagat

SEQ ID NO: 264494 - DNA, 25 bp, Probe Sequence
ggtactactctccagcttgggagga

SEQ ID NO: 264495 - DNA, 25 bp, Probe Sequence
ggtacatttcataagcttgggtaaa

SEQ ID NO: 264496 - DNA, 25 bp, Probe Sequence
ggtatatctgtaagtggacgttaag

SEQ ID NO: 264497 - DNA, 25 bp, Probe Sequence
ggtattagtgggggactgagttcag

SEQ ID NO: 264498 - DNA, 25 bp, Probe Sequence
ggtacaagttgtgggactgcatgct

SEQ ID NO: 264499 - DNA, 25 bp, Probe Sequence
ggtaaaggatgtgggcagcagcagg

SEQ ID NO: 264500 - DNA, 25 bp, Probe Sequence
ggtatgtaagtgtgatcctgcaggt

SEQ ID NO: 264501 - DNA, 25 bp, Probe Sequence
ggttgaaactttttctggtgtctat

SEQ ID NO: 264502 - DNA, 25 bp, Probe Sequence
ggttacaactctgaacctatcctcg

SEQ ID NO: 264503 - DNA, 25 bp, Probe Sequence
ggttaaatcctcaaacgcaattgca

SEQ ID NO: 264504 - DNA, 25 bp, Probe Sequence
ggtaaattcctaacaggagaccaca

SEQ ID NO: 264505 - DNA, 25 bp, Probe Sequence
ggttgtttcccttgcatgggacgaa

SEQ ID NO: 264506 - DNA, 25 bp, Probe Sequence
ggtttctcccccttgaagaggatat

SEQ ID NO: 264507 - DNA, 25 bp, Probe Sequence
ggtttcctccaccaagaatgagaac

SEQ ID NO: 264508 - DNA, 25 bp, Probe Sequence
ggtatggccatcaccaaaatggagc

SEQ ID NO: 264509 - DNA, 25 bp, Probe Sequence
ggtaggcctttgtaaaattgacaga

SEQ ID NO: 264510 - DNA, 25 bp, Probe Sequence
ggtactgttttggagaacttgtcta

SEQ ID NO: 264511 - DNA, 25 bp, Probe Sequence
ggtacatgtttgataatgacttgat

SEQ ID NO: 264512 - DNA, 25 bp, Probe Sequence
ggtattggttggaagagaatctgag

SEQ ID NO: 264513 - DNA, 25 bp, Probe Sequence
ggtagtatgtagagcagaaatctgg

SEQ ID NO: 264514 - DNA, 25 bp, Probe Sequence
ggtagaagtagaaagcaatccaatg

SEQ ID NO: 264515 - DNA, 25 bp, Probe Sequence
ggtagattgtatgaacatacccaca

SEQ ID NO: 264516 - DNA, 25 bp, Probe Sequence
ggtacaatttcagtccaaccagcca

SEQ ID NO: 264517 - DNA, 25 bp, Probe Sequence
ggtagccacttaaccataccagcaa

SEQ ID NO: 264518 - DNA, 25 bp, Probe Sequence
ggtatggccttagctcttagccaaa

SEQ ID NO: 264519 - DNA, 25 bp, Probe Sequence
ggattagccttcgcggggcaaaatg

SEQ ID NO: 264520 - DNA, 25 bp, Probe Sequence
ggttacgtgtctggctggggacaaa

SEQ ID NO: 264521 - DNA, 25 bp, Probe Sequence
ggttttggtgtgggggtgacaggag

SEQ ID NO: 264522 - DNA, 25 bp, Probe Sequence
ggtttttgctgggctggagaggagg

SEQ ID NO: 264523 - DNA, 25 bp, Probe Sequence
ggtacgttggtgtattgcaagggga

SEQ ID NO: 264524 - DNA, 25 bp, Probe Sequence
ggtacgatggtgctttgcaaggatg

SEQ ID NO: 264525 - DNA, 25 bp, Probe Sequence
ggtaccttgctgtgtaggaggatga

SEQ ID NO: 264526 - DNA, 25 bp, Probe Sequence
ggtaccagtgtctgtgacgagctca

SEQ ID NO: 264527 - DNA, 25 bp, Probe Sequence
ggtaccactgcttgagtacaggctt

SEQ ID NO: 264528 - DNA, 25 bp, Probe Sequence
ggtaccagctttggaacgagatgct

SEQ ID NO: 264529 - DNA, 25 bp, Probe Sequence
ggtaccagctttggaacgagatgct

SEQ ID NO: 264530 - DNA, 25 bp, Probe Sequence
ggtaccttgttggagtagtgagctg

SEQ ID NO: 264531 - DNA, 25 bp, Probe Sequence
ggtaccttggctggcattatgggaa

SEQ ID NO: 264532 - DNA, 25 bp, Probe Sequence
ggtattcttcgtgtttttgaaatgt

SEQ ID NO: 264533 - DNA, 25 bp, Probe Sequence
ggttttatcgcagatttttatgttt

SEQ ID NO: 264534 - DNA, 25 bp, Probe Sequence
ggtttttgcgagtgctttgtttact

SEQ ID NO: 264535 - DNA, 25 bp, Probe Sequence
ggtttagaggaatctggtcattcta

SEQ ID NO: 264536 - DNA, 25 bp, Probe Sequence
ggtttagaaagaatccccattccag

SEQ ID NO: 264537 - DNA, 25 bp, Probe Sequence
ggttttacaacaacccactcttgag

SEQ ID NO: 264538 - DNA, 25 bp, Probe Sequence
ggttttctaagtgctccttatgtga

SEQ ID NO: 264539 - DNA, 25 bp, Probe Sequence
ggttcctgaaagagtccctcagagg

SEQ ID NO: 264540 - DNA, 25 bp, Probe Sequence
ggttattagaagagtcccatgaaag

SEQ ID NO: 264541 - DNA, 25 bp, Probe Sequence
ggttagtatgtcctatgttaataaa

SEQ ID NO: 264542 - DNA, 25 bp, Probe Sequence
ggtatagtggatgctatttatgatc

SEQ ID NO: 264543 - DNA, 25 bp, Probe Sequence
ggttggtcatgaactttctagtgcg

SEQ ID NO: 264544 - DNA, 25 bp, Probe Sequence
ggattggtctaaacttcaagtctca

SEQ ID NO: 264545 - DNA, 25 bp, Probe Sequence
ggttagccatagatcattcctttca

SEQ ID NO: 264546 - DNA, 25 bp, Probe Sequence
ggtatactccagggattggtttcag

SEQ ID NO: 264547 - DNA, 25 bp, Probe Sequence
ggttagtctcacagttgctgtctat

SEQ ID NO: 264548 - DNA, 25 bp, Probe Sequence
ggatcagggtcagtctttggcttat

SEQ ID NO: 264549 - DNA, 25 bp, Probe Sequence
ggatcagggtcagtctttggcttat

SEQ ID NO: 264550 - DNA, 25 bp, Probe Sequence
ggtactggtcccactgtgcagtaca

SEQ ID NO: 264551 - DNA, 25 bp, Probe Sequence
tggtactaacccacgattctgagcc

SEQ ID NO: 264552 - DNA, 25 bp, Probe Sequence
ggatataaacccagacattcgagct

SEQ ID NO: 264553 - DNA, 25 bp, Probe Sequence
ggcttaacacccaggtgatgggttg

SEQ ID NO: 264554 - DNA, 25 bp, Probe Sequence
ggcttaaaagccagcgagtgggtgc

SEQ ID NO: 264555 - DNA, 25 bp, Probe Sequence
ggtatcaaaatgtctgaagggcgga

SEQ ID NO: 264556 - DNA, 25 bp, Probe Sequence
ggtatcaaaatgtctgaagggcgga

SEQ ID NO: 264557 - DNA, 25 bp, Probe Sequence
ggtatcagtatttcagaatcctgcg

SEQ ID NO: 264558 - DNA, 25 bp, Probe Sequence
ggtatatcttcatcagtgacgaggt

SEQ ID NO: 264559 - DNA, 25 bp, Probe Sequence
ggtactctgccagcagatgggagga

SEQ ID NO: 264560 - DNA, 25 bp, Probe Sequence
ggtactgtccgcaaggttcatgtga

SEQ ID NO: 264561 - DNA, 25 bp, Probe Sequence
ggtacttcccacagtgtgctggaat

SEQ ID NO: 264562 - DNA, 25 bp, Probe Sequence
ggtacttcccacagtgtgctggaat

SEQ ID NO: 264563 - DNA, 25 bp, Probe Sequence
ggtacttcccaaaatacagagaatg

SEQ ID NO: 264564 - DNA, 25 bp, Probe Sequence
ggtacttttcaacgtggcagagggc

SEQ ID NO: 264565 - DNA, 25 bp, Probe Sequence
ggtaggcgtgtacggtggtgaggtc

SEQ ID NO: 264566 - DNA, 25 bp, Probe Sequence
ggtaggcgtgtacggtgggaggtct

SEQ ID NO: 264567 - DNA, 25 bp, Probe Sequence
ggtaggcgtgtacggtgggaggtct

SEQ ID NO: 264568 - DNA, 25 bp, Probe Sequence
ggtaggcgtgtacggtgggaggtct

SEQ ID NO: 264569 - DNA, 25 bp, Probe Sequence
ggtaggcgtgtacggtgggaggtct

SEQ ID NO: 264570 - DNA, 25 bp, Probe Sequence
ggtaggcgtgtacggtgggaggtct

SEQ ID NO: 264571 - DNA, 25 bp, Probe Sequence
ggtagggcgtgtacggtgcgagttc

SEQ ID NO: 264572 - DNA, 25 bp, Probe Sequence
ggtaggcgggaaaggatggagtgtt

SEQ ID NO: 264573 - DNA, 25 bp, Probe Sequence
ggtaggggagaaatggcgaatgtca

SEQ ID NO: 264574 - DNA, 25 bp, Probe Sequence
ggtatccggaggattgtggctgtca

SEQ ID NO: 264575 - DNA, 25 bp, Probe Sequence
ggtttgggggctcagatgggacaag

SEQ ID NO: 264576 - DNA, 25 bp, Probe Sequence
ggtttagtggaccaacattgcgcca

SEQ ID NO: 264577 - DNA, 25 bp, Probe Sequence
ggacctagtggaagtactaccagca

SEQ ID NO: 264578 - DNA, 25 bp, Probe Sequence
ggaattagttgtgtcctaacaaagc

SEQ ID NO: 264579 - DNA, 25 bp, Probe Sequence
ggtatttgacttgcacctataaaat

SEQ ID NO: 264580 - DNA, 25 bp, Probe Sequence
ggttggttctgtgaccttaagcaaa

SEQ ID NO: 264581 - DNA, 25 bp, Probe Sequence
ggtttgtttgaatgcctctaaagcc

SEQ ID NO: 264582 - DNA, 25 bp, Probe Sequence
ggtttgacttgagttggttcttagt

SEQ ID NO: 264583 - DNA, 25 bp, Probe Sequence
ggtttgaagggcagtcttctctggc

SEQ ID NO: 264584 - DNA, 25 bp, Probe Sequence
ggtttggctggaggagttttgtgac

SEQ ID NO: 264585 - DNA, 25 bp, Probe Sequence
ggtttgtttgagggtattatcttct

SEQ ID NO: 264586 - DNA, 25 bp, Probe Sequence
ggttttcctctgcagtattatccgt

SEQ ID NO: 264587 - DNA, 25 bp, Probe Sequence
ggtattaccttgtatgctgttactt

SEQ ID NO: 264588 - DNA, 25 bp, Probe Sequence
ggatttgaccttttctgagctagtt

SEQ ID NO: 264589 - DNA, 25 bp, Probe Sequence
ggtattagcagctggttagcctggt

SEQ ID NO: 264590 - DNA, 25 bp, Probe Sequence
ggtatgaactgcgggaattcctgga

SEQ ID NO: 264591 - DNA, 25 bp, Probe Sequence
ggttgacctaggccaattcttggta

SEQ ID NO: 264592 - DNA, 25 bp, Probe Sequence
ggtatacctggggctggtcttagga

SEQ ID NO: 264593 - DNA, 25 bp, Probe Sequence
ggtttctctgaaggctggactaatt

SEQ ID NO: 264594 - DNA, 25 bp, Probe Sequence
ggtttcttgtgcactggcaccaagt

SEQ ID NO: 264595 - DNA, 25 bp, Probe Sequence
ggtaccaatggtactgtacaaagtg

SEQ ID NO: 264596 - DNA, 25 bp, Probe Sequence
ggttctcactctgtttacagaagtg

SEQ ID NO: 264597 - DNA, 25 bp, Probe Sequence
ggaatttcccgggattcgagtgtgg

SEQ ID NO: 264598 - DNA, 25 bp, Probe Sequence
ggaattcccgggattgcggagcggc

SEQ ID NO: 264599 - DNA, 25 bp, Probe Sequence
ggaattcccgggatcacggtgaaga

SEQ ID NO: 264600 - DNA, 25 bp, Probe Sequence
ggagatcccgggagaaaagtgaagg

SEQ ID NO: 264601 - DNA, 25 bp, Probe Sequence
ggcccgacgggaggccaaggtcaag

SEQ ID NO: 264602 - DNA, 25 bp, Probe Sequence
ggccctactttctgccaatgttgaa

SEQ ID NO: 264603 - DNA, 25 bp, Probe Sequence
ggttcccttgtgtgatctgtttgga

SEQ ID NO: 264604 - DNA, 25 bp, Probe Sequence
ggttccatccaaatacactttctgg

SEQ ID NO: 264605 - DNA, 25 bp, Probe Sequence
ggttcaaccaggcaagatcatccgg

SEQ ID NO: 264606 - DNA, 25 bp, Probe Sequence
ggattcatatccttcgaaaacgacg

SEQ ID NO: 264607 - DNA, 25 bp, Probe Sequence
ggtagctgattctggaagcaacgtt

SEQ ID NO: 264608 - DNA, 25 bp, Probe Sequence
ggtactatgattaaaagccactgtt

SEQ ID NO: 264609 - DNA, 25 bp, Probe Sequence
ggtactatgtttgcaactctcgtct

SEQ ID NO: 264610 - DNA, 25 bp, Probe Sequence
ggtagctttttctacatcttactcc

SEQ ID NO: 264611 - DNA, 25 bp, Probe Sequence
ggttttttcataactgcagtccttc

SEQ ID NO: 264612 - DNA, 25 bp, Probe Sequence
ggttggttaataaacagtacctgct

SEQ ID NO: 264613 - DNA, 25 bp, Probe Sequence
ggttttagaagacactggcatccca

SEQ ID NO: 264614 - DNA, 25 bp, Probe Sequence
ggttcccaaagatcttggtgctcca

SEQ ID NO: 264615 - DNA, 25 bp, Probe Sequence
ggtatcccaggaggcgttggttcac

SEQ ID NO: 264616 - DNA, 25 bp, Probe Sequence
ggtacccagacagtcaggatggtgt

SEQ ID NO: 264617 - DNA, 25 bp, Probe Sequence
ggttcccaagctacaggtggggtgg

SEQ ID NO: 264618 - DNA, 25 bp, Probe Sequence
ggttctaataattatttggggctgg

SEQ ID NO: 264619 - DNA, 25 bp, Probe Sequence
ggtactgaatacttaatatgtggga

SEQ ID NO: 264620 - DNA, 25 bp, Probe Sequence
ggttctgactacatcacctatggga

SEQ ID NO: 264621 - DNA, 25 bp, Probe Sequence
ggtattagtagctcatccatctagg

SEQ ID NO: 264622 - DNA, 25 bp, Probe Sequence
ggtattcctgaggccttgatttcag

SEQ ID NO: 264623 - DNA, 25 bp, Probe Sequence
ggttatcattggtcgttgagttatg

SEQ ID NO: 264624 - DNA, 25 bp, Probe Sequence
ggttatctttctttatgttcttaag

SEQ ID NO: 264625 - DNA, 25 bp, Probe Sequence
ggtatccttttaatagtactgataa

SEQ ID NO: 264626 - DNA, 25 bp, Probe Sequence
ggttcacctgtgtactgagtattga

SEQ ID NO: 264627 - DNA, 25 bp, Probe Sequence
ggtagccctctttctgtgaatgggg

SEQ ID NO: 264628 - DNA, 25 bp, Probe Sequence
ggtagattcctttgttgtatggctg

SEQ ID NO: 264629 - DNA, 25 bp, Probe Sequence
ggtatgtgtttctgattgcttcctg

SEQ ID NO: 264630 - DNA, 25 bp, Probe Sequence
ggtatgtgcttgaaggaattttgct

SEQ ID NO: 264631 - DNA, 25 bp, Probe Sequence
ggtagctgcttgctgaggtctttta

SEQ ID NO: 264632 - DNA, 25 bp, Probe Sequence
ggtagctctctgatggagtttatat

SEQ ID NO: 264633 - DNA, 25 bp, Probe Sequence
ggtagccttgaaaatgtcagtgtga

SEQ ID NO: 264634 - DNA, 25 bp, Probe Sequence
ggtagcctggaaagtaatgaatgac

SEQ ID NO: 264635 - DNA, 25 bp, Probe Sequence
ggtaggaggcagtgtagtataagca

SEQ ID NO: 264636 - DNA, 25 bp, Probe Sequence
ggtagagagaagccaaaggaacaca

SEQ ID NO: 264637 - DNA, 25 bp, Probe Sequence
ggtatgagtaaccagatagagcaca

SEQ ID NO: 264638 - DNA, 25 bp, Probe Sequence
ggtatatgcatgtcactgcatgata

SEQ ID NO: 264639 - DNA, 25 bp, Probe Sequence
ggtagatcagccttatgctaatgaa

SEQ ID NO: 264640 - DNA, 25 bp, Probe Sequence
ggtagctgcagccaaatcataaacg

SEQ ID NO: 264641 - DNA, 25 bp, Probe Sequence
ggtagtggccaaatgtaacacatca

SEQ ID NO: 264642 - DNA, 25 bp, Probe Sequence
ggtatcctgtgacatgtaacagcca

SEQ ID NO: 264643 - DNA, 25 bp, Probe Sequence
ggtaccgttgtaagacacagcacat

SEQ ID NO: 264644 - DNA, 25 bp, Probe Sequence
ggtaccttgtgaaagcaggctgccc

SEQ ID NO: 264645 - DNA, 25 bp, Probe Sequence
ggttccttgtgtcaaagcacctcat

SEQ ID NO: 264646 - DNA, 25 bp, Probe Sequence
ggtttgtatattgaaagacctaaca

SEQ ID NO: 264647 - DNA, 25 bp, Probe Sequence
ggtttgtttggttgaatacctagat

SEQ ID NO: 264648 - DNA, 25 bp, Probe Sequence
ggtttgtgactggttatatcctcta

SEQ ID NO: 264649 - DNA, 25 bp, Probe Sequence
ggtttgtcctggatgtccacattga

SEQ ID NO: 264650 - DNA, 25 bp, Probe Sequence
ggtttactgctgtcattgtccatgc

SEQ ID NO: 264651 - DNA, 25 bp, Probe Sequence
ggtactcaattgtcagtgttccatg

SEQ ID NO: 264652 - DNA, 25 bp, Probe Sequence
ggtagctcacttggatgctgttaca

SEQ ID NO: 264653 - DNA, 25 bp, Probe Sequence
ggtatgctgcagttcagccgttgaa

SEQ ID NO: 264654 - DNA, 25 bp, Probe Sequence
ggtagcatctggtagaccttagaat

SEQ ID NO: 264655 - DNA, 25 bp, Probe Sequence
ggtatgatgtgaaagcacctgctat

SEQ ID NO: 264656 - DNA, 25 bp, Probe Sequence
ggtagaggaaagagtgatctggtgt

SEQ ID NO: 264657 - DNA, 25 bp, Probe Sequence
ggataggggaggttagactggagat

SEQ ID NO: 264658 - DNA, 25 bp, Probe Sequence
ggtagggaggtcttgaagccaatga

SEQ ID NO: 264659 - DNA, 25 bp, Probe Sequence
ggtaccaatgttgtgaagctcttca

SEQ ID NO: 264660 - DNA, 25 bp, Probe Sequence
ggtaccaaggtagtggactgctgct

SEQ ID NO: 264661 - DNA, 25 bp, Probe Sequence
ggtagccgggaagttgattcactct

SEQ ID NO: 264662 - DNA, 25 bp, Probe Sequence
ggtagggaacaaatgtgatctgacc

SEQ ID NO: 264663 - DNA, 25 bp, Probe Sequence
ggtatgggaagaagtgtgagcaccc

SEQ ID NO: 264664 - DNA, 25 bp, Probe Sequence
ggttgaccaagtagttaacggcata

SEQ ID NO: 264665 - DNA, 25 bp, Probe Sequence
ggtttctgcaaatttgtaactgcct

SEQ ID NO: 264666 - DNA, 25 bp, Probe Sequence
ggtatttcttagttgctagactccc

SEQ ID NO: 264667 - DNA, 25 bp, Probe Sequence
ggtatttctataatggtacatccat

SEQ ID NO: 264668 - DNA, 25 bp, Probe Sequence
ggcttatacagtaccctaacctgct

SEQ ID NO: 264669 - DNA, 25 bp, Probe Sequence
ggtataaggtattcctgaggccttg

SEQ ID NO: 264670 - DNA, 25 bp, Probe Sequence
ggtatttggatttgctcaaggacac

SEQ ID NO: 264671 - DNA, 25 bp, Probe Sequence
ggttgcctgagtcactcgaggagct

SEQ ID NO: 264672 - DNA, 25 bp, Probe Sequence
ggtagcgatgactgactgtggggtg

SEQ ID NO: 264673 - DNA, 25 bp, Probe Sequence
ggtaccaacatcaagcttggtgtga

SEQ ID NO: 264674 - DNA, 25 bp, Probe Sequence
ggtaccatagccaaatctgggacaa

SEQ ID NO: 264675 - DNA, 25 bp, Probe Sequence
ggtttatctggcaagactgaggcaa

SEQ ID NO: 264676 - DNA, 25 bp, Probe Sequence
ggttttctgagcagggggctgaact

SEQ ID NO: 264677 - DNA, 25 bp, Probe Sequence
ggactttgggttaggaaggaatcat

SEQ ID NO: 264678 - DNA, 25 bp, Probe Sequence
ggttcttgagcgtgggtagggatat

SEQ ID NO: 264679 - DNA, 25 bp, Probe Sequence
ggtttgtgtggatggcctggaggca

SEQ ID NO: 264680 - DNA, 25 bp, Probe Sequence
ggtttgtgtggatggcctggagggc

SEQ ID NO: 264681 - DNA, 25 bp, Probe Sequence
ggttctttaaagtctctggtgggct

SEQ ID NO: 264682 - DNA, 25 bp, Probe Sequence
ggttttgtaagatgctgggttggtg

SEQ ID NO: 264683 - DNA, 25 bp, Probe Sequence
ggtatattggaaacactggagaagg

SEQ ID NO: 264684 - DNA, 25 bp, Probe Sequence
ggttgcttgttatccgggcaatgga

SEQ ID NO: 264685 - DNA, 25 bp, Probe Sequence
ggttttttttaatgacaatgaagtg

SEQ ID NO: 264686 - DNA, 25 bp, Probe Sequence
ggtttccttattgaaaaatcagtgt

SEQ ID NO: 264687 - DNA, 25 bp, Probe Sequence
ggttatctctttaaggacaattaat

SEQ ID NO: 264688 - DNA, 25 bp, Probe Sequence
ggttttcttctatagccattttatt

SEQ ID NO: 264689 - DNA, 25 bp, Probe Sequence
ggttcttatctttaatggctattta

SEQ ID NO: 264690 - DNA, 25 bp, Probe Sequence
ggttatttctcctttgtgtaagtga

SEQ ID NO: 264691 - DNA, 25 bp, Probe Sequence
ggtttttcagcacttgggattgggg

SEQ ID NO: 264692 - DNA, 25 bp, Probe Sequence
ggttatcccaggagggactggattg

SEQ ID NO: 264693 - DNA, 25 bp, Probe Sequence
ggtattcccagacaggcaactatga

SEQ ID NO: 264694 - DNA, 25 bp, Probe Sequence
ggtttcacgcctcaggcaattagac

SEQ ID NO: 264695 - DNA, 25 bp, Probe Sequence
ggtttcccatctaatcaacttaagg

SEQ ID NO: 264696 - DNA, 25 bp, Probe Sequence
ggtatttaatgctgatctactataa

SEQ ID NO: 264697 - DNA, 25 bp, Probe Sequence
ggtatgttaagctactgcgacagat

SEQ ID NO: 264698 - DNA, 25 bp, Probe Sequence
ggtagttacaattcccaaatgcaga

SEQ ID NO: 264699 - DNA, 25 bp, Probe Sequence
ggataggctatctttgtccaaagga

SEQ ID NO: 264700 - DNA, 25 bp, Probe Sequence
ggtagagcttggtttccaaagcgcc

SEQ ID NO: 264701 - DNA, 25 bp, Probe Sequence
ggttagcctggtatcagcagaaacc

SEQ ID NO: 264702 - DNA, 25 bp, Probe Sequence
ggtttcataggtagatagaaggact

SEQ ID NO: 264703 - DNA, 25 bp, Probe Sequence
ggtttgaatgcggtgtagaaatgtt

SEQ ID NO: 264704 - DNA, 25 bp, Probe Sequence
ggtttgagatggtattgctaaattt

SEQ ID NO: 264705 - DNA, 25 bp, Probe Sequence
ggtagtgaggtttatgcctacattt

SEQ ID NO: 264706 - DNA, 25 bp, Probe Sequence
ggtagtgtcagtcttcctaatttga

SEQ ID NO: 264707 - DNA, 25 bp, Probe Sequence
ggtatgtacagtccttcctgtttag

SEQ ID NO: 264708 - DNA, 25 bp, Probe Sequence
ggtattaagtcgttgcctttatttg

SEQ ID NO: 264709 - DNA, 25 bp, Probe Sequence
ggtttaatgtgtatgcctattttat

SEQ ID NO: 264710 - DNA, 25 bp, Probe Sequence
ggttttcttgagagcctgtagattt

SEQ ID NO: 264711 - DNA, 25 bp, Probe Sequence
ggtatttctgagtgtcctattgtct

SEQ ID NO: 264712 - DNA, 25 bp, Probe Sequence
ggttattctgggctgccagcagtac

SEQ ID NO: 264713 - DNA, 25 bp, Probe Sequence
ggttcaatgcttggcccacaggaaa

SEQ ID NO: 264714 - DNA, 25 bp, Probe Sequence
ggattaagcgctgtccagtaacaaa

SEQ ID NO: 264715 - DNA, 25 bp, Probe Sequence
ggtatccactgcattgccagaaaaa

SEQ ID NO: 264716 - DNA, 25 bp, Probe Sequence
ggtattcattggtgcctaaagaact

SEQ ID NO: 264717 - DNA, 25 bp, Probe Sequence
ggtatatcatgcagataacatacaa

SEQ ID NO: 264718 - DNA, 25 bp, Probe Sequence
ggtttcatttctagccatacaattg

SEQ ID NO: 264719 - DNA, 25 bp, Probe Sequence
ggtttctgattgtggcaacgtttgc

SEQ ID NO: 264720 - DNA, 25 bp, Probe Sequence
tgagtttcgattgttaacgtgtttt

SEQ ID NO: 264721 - DNA, 25 bp, Probe Sequence
tgagttttcacctcgaattttgttt

SEQ ID NO: 264722 - DNA, 25 bp, Probe Sequence
ggatttgactcctccaaggttttgt

SEQ ID NO: 264723 - DNA, 25 bp, Probe Sequence
ggagttactcactctgattcttcct

SEQ ID NO: 264724 - DNA, 25 bp, Probe Sequence
ggtttgagtcaaagctgttttccca

SEQ ID NO: 264725 - DNA, 25 bp, Probe Sequence
ggtttgactcacggggatttccaca

SEQ ID NO: 264726 - DNA, 25 bp, Probe Sequence
ggtttgactcacggggatttccaag

SEQ ID NO: 264727 - DNA, 25 bp, Probe Sequence
ggtttgactcacggggatttccaag

SEQ ID NO: 264728 - DNA, 25 bp, Probe Sequence
ggtttgactcacggggatttccaag

SEQ ID NO: 264729 - DNA, 25 bp, Probe Sequence
ggtttgactcacggggatttccaag

SEQ ID NO: 264730 - DNA, 25 bp, Probe Sequence
ggtttgactcacggggatttccaag

SEQ ID NO: 264731 - DNA, 25 bp, Probe Sequence
ggtttgactcacggggatttccaag

SEQ ID NO: 264732 - DNA, 25 bp, Probe Sequence
ggtttgactcacggggatttccaag

SEQ ID NO: 264733 - DNA, 25 bp, Probe Sequence
ggtttgactcacggggatttccaag

SEQ ID NO: 264734 - DNA, 25 bp, Probe Sequence
ggtttgactcacggggatttccaag

SEQ ID NO: 264735 - DNA, 25 bp, Probe Sequence
ggtttgactcacggggatttccaag

SEQ ID NO: 264736 - DNA, 25 bp, Probe Sequence
ggtttgactcacggggatttccaag

SEQ ID NO: 264737 - DNA, 25 bp, Probe Sequence
ggtttgactcacggggatttccaag

SEQ ID NO: 264738 - DNA, 25 bp, Probe Sequence
ggtttgactcacggggatttccaag

SEQ ID NO: 264739 - DNA, 25 bp, Probe Sequence
ggtttgactcacggggatttccaag

SEQ ID NO: 264740 - DNA, 25 bp, Probe Sequence
ggtttgactcacggggatttccaag

SEQ ID NO: 264741 - DNA, 25 bp, Probe Sequence
ggtttgactcacggggatttccaag

SEQ ID NO: 264742 - DNA, 25 bp, Probe Sequence
ggtttattacttgggtgtcacacaa

SEQ ID NO: 264743 - DNA, 25 bp, Probe Sequence
ggtttatgcagctttatggttccac

SEQ ID NO: 264744 - DNA, 25 bp, Probe Sequence
ggtttagacagtccatgaaatcgac

SEQ ID NO: 264745 - DNA, 25 bp, Probe Sequence
ggtattaaaggccaccatttgcaca

SEQ ID NO: 264746 - DNA, 25 bp, Probe Sequence
ggttttaatagccagccagtcataa

SEQ ID NO: 264747 - DNA, 25 bp, Probe Sequence
ggttaataaacaagccattgcagcg

SEQ ID NO: 264748 - DNA, 25 bp, Probe Sequence
ggtatgaaaacattcctagtgatca

SEQ ID NO: 264749 - DNA, 25 bp, Probe Sequence
ggtatagagcaaggtccatggataa

SEQ ID NO: 264750 - DNA, 25 bp, Probe Sequence
ggtatcactagaggtcaagagttca

SEQ ID NO: 264751 - DNA, 25 bp, Probe Sequence
ggtatcactctgtctggcaatggtg

SEQ ID NO: 264752 - DNA, 25 bp, Probe Sequence
ggtatctccatcaagctgcaggagg

SEQ ID NO: 264753 - DNA, 25 bp, Probe Sequence
ggtatctgagcacagacagagggtg

SEQ ID NO: 264754 - DNA, 25 bp, Probe Sequence
ggtatctatgcagggaagggggcag

SEQ ID NO: 264755 - DNA, 25 bp, Probe Sequence
ggtatcaaggagcctgggacgtgag

SEQ ID NO: 264756 - DNA, 25 bp, Probe Sequence
ggttgagaggagctctggtcgtttg

SEQ ID NO: 264757 - DNA, 25 bp, Probe Sequence
ggttggggagtcagggagctagggc

SEQ ID NO: 264758 - DNA, 25 bp, Probe Sequence
ggttgccgggtcatgttaattggga

SEQ ID NO: 264759 - DNA, 25 bp, Probe Sequence
ggttgccaggacgaattgagataat

SEQ ID NO: 264760 - DNA, 25 bp, Probe Sequence
ggtatgcagaggcacagatgtaagg

SEQ ID NO: 264761 - DNA, 25 bp, Probe Sequence
ggtagctaaccatcttatgagtgcc

SEQ ID NO: 264762 - DNA, 25 bp, Probe Sequence
ggtagtagacagtgatattgatgat

SEQ ID NO: 264763 - DNA, 25 bp, Probe Sequence
ggtatgaaggagtctgcaatcgagt

SEQ ID NO: 264764 - DNA, 25 bp, Probe Sequence
ggtatgaaacagcctaatgcattag

SEQ ID NO: 264765 - DNA, 25 bp, Probe Sequence
ggtataaatgcccatcagatatgct

SEQ ID NO: 264766 - DNA, 25 bp, Probe Sequence
ggtataatactctagaattgtgtaa

SEQ ID NO: 264767 - DNA, 25 bp, Probe Sequence
ggtatactacggtcaatgctctgaa

SEQ ID NO: 264768 - DNA, 25 bp, Probe Sequence
ggtagtcagtgacttaacctgaatt

SEQ ID NO: 264769 - DNA, 25 bp, Probe Sequence
ggtagtggtgctgtgcaacctgaaa

SEQ ID NO: 264770 - DNA, 25 bp, Probe Sequence
ggttgtgtaggtggaaccagtacat

SEQ ID NO: 264771 - DNA, 25 bp, Probe Sequence
ggttttgcagtgtgtccgacgaatc

SEQ ID NO: 264772 - DNA, 25 bp, Probe Sequence
ggtatttcactttggcactgactga

SEQ ID NO: 264773 - DNA, 25 bp, Probe Sequence
ggttttcactatgctgcacaggctg

SEQ ID NO: 264774 - DNA, 25 bp, Probe Sequence
ggtttacgcaatagcgacgcgctgg

SEQ ID NO: 264775 - DNA, 25 bp, Probe Sequence
ggttatgccggaatcgttgcaggtg

SEQ ID NO: 264776 - DNA, 25 bp, Probe Sequence
ggttcacgggtgagggcatggatga

SEQ ID NO: 264777 - DNA, 25 bp, Probe Sequence
ggttgcaactttgagaatctggata

SEQ ID NO: 264778 - DNA, 25 bp, Probe Sequence
ggttcaactgtcaaaattccaatga

SEQ ID NO: 264779 - DNA, 25 bp, Probe Sequence
ggtatgggcttactggactccaaca

SEQ ID NO: 264780 - DNA, 25 bp, Probe Sequence
ggtatgtatattcctgagttcccac

SEQ ID NO: 264781 - DNA, 25 bp, Probe Sequence
ggtttattcccaagtatgccttaag

SEQ ID NO: 264782 - DNA, 25 bp, Probe Sequence
ggttctacttgccaattctggttcc

SEQ ID NO: 264783 - DNA, 25 bp, Probe Sequence
ggttctacttgccaattctggttcc

SEQ ID NO: 264784 - DNA, 25 bp, Probe Sequence
ggttctcacttccaacttaggacca

SEQ ID NO: 264785 - DNA, 25 bp, Probe Sequence
ggtttagtcatccaacaagaagaaa

SEQ ID NO: 264786 - DNA, 25 bp, Probe Sequence
ggttatggctgtggcaaaggcaaaa

SEQ ID NO: 264787 - DNA, 25 bp, Probe Sequence
ggaccaggccgacaaggcatctacc

SEQ ID NO: 264788 - DNA, 25 bp, Probe Sequence
ggaaagacctttgagagcctagccc

SEQ ID NO: 264789 - DNA, 25 bp, Probe Sequence
ggaaatacagttgttggcctccggc

SEQ ID NO: 264790 - DNA, 25 bp, Probe Sequence
ggataaaaagtggttcactcccagg

SEQ ID NO: 264791 - DNA, 25 bp, Probe Sequence
ggaggaacacagttttgattcccca

SEQ ID NO: 264792 - DNA, 25 bp, Probe Sequence
ggaagtaattttgtgtctgctggta

SEQ ID NO: 264793 - DNA, 25 bp, Probe Sequence
ggagtctgaattctcaagtttgaat

SEQ ID NO: 264794 - DNA, 25 bp, Probe Sequence
ggaaccaagtttgagtcttgccagg

SEQ ID NO: 264795 - DNA, 25 bp, Probe Sequence
ggaaccaagtttgagtcttgccagg

SEQ ID NO: 264796 - DNA, 25 bp, Probe Sequence
ggatcccaagtcaaccattgttgcc

SEQ ID NO: 264797 - DNA, 25 bp, Probe Sequence
ggatcattcaccttaacttttcctt

SEQ ID NO: 264798 - DNA, 25 bp, Probe Sequence
ggttctacagcataagccttatcct

SEQ ID NO: 264799 - DNA, 25 bp, Probe Sequence
ggctcatgggcctaaattctttcct

SEQ ID NO: 264800 - DNA, 25 bp, Probe Sequence
ggttaagccaacaatgttttgcatt

SEQ ID NO: 264801 - DNA, 25 bp, Probe Sequence
ggttagcgtgacttcagttttgact

SEQ ID NO: 264802 - DNA, 25 bp, Probe Sequence
ggttaggtcacaaaggttttatctg

SEQ ID NO: 264803 - DNA, 25 bp, Probe Sequence
ggttttgctcacaaaagtctacttt

SEQ ID NO: 264804 - DNA, 25 bp, Probe Sequence
ggttttgctcacaaaagtctacttt

SEQ ID NO: 264805 - DNA, 25 bp, Probe Sequence
ggttttgcaacaataggtctattat

SEQ ID NO: 264806 - DNA, 25 bp, Probe Sequence
ggttttaacttctgatcattttcac

SEQ ID NO: 264807 - DNA, 25 bp, Probe Sequence
ggtttttagtatttacttcttcatg

SEQ ID NO: 264808 - DNA, 25 bp, Probe Sequence
ggttttctaggagctatggtctcat

SEQ ID NO: 264809 - DNA, 25 bp, Probe Sequence
ggtatcagtccacatactatggctc

SEQ ID NO: 264810 - DNA, 25 bp, Probe Sequence
ggtatccgcacattatgattatgtt

SEQ ID NO: 264811 - DNA, 25 bp, Probe Sequence
ggtataccacaaatgattcatgcaa

SEQ ID NO: 264812 - DNA, 25 bp, Probe Sequence
ggtatcatcaacaggttctcaatta

SEQ ID NO: 264813 - DNA, 25 bp, Probe Sequence
ggtatacataccccagttcaaatta

SEQ ID NO: 264814 - DNA, 25 bp, Probe Sequence
ggaatcaattccccgttaatggagc

SEQ ID NO: 264815 - DNA, 25 bp, Probe Sequence
ggttagcaccgcaggtgtagagaag

SEQ ID NO: 264816 - DNA, 25 bp, Probe Sequence
ggtatacagaccagttttaggactg

SEQ ID NO: 264817 - DNA, 25 bp, Probe Sequence
ggtatccgaggttcttaatatgaga

SEQ ID NO: 264818 - DNA, 25 bp, Probe Sequence
ggttccaggaagtctttatctaggt

SEQ ID NO: 264819 - DNA, 25 bp, Probe Sequence
ggttcacttacagatagtatctagc

SEQ ID NO: 264820 - DNA, 25 bp, Probe Sequence
ggttatccactatgtcagatacacc

SEQ ID NO: 264821 - DNA, 25 bp, Probe Sequence
ggtttgccgtgatctagtgtgcact

SEQ ID NO: 264822 - DNA, 25 bp, Probe Sequence
ggtttccatgtattctaggccaggt

SEQ ID NO: 264823 - DNA, 25 bp, Probe Sequence
ggtttccatgtattctaggccaggt

SEQ ID NO: 264824 - DNA, 25 bp, Probe Sequence
ggtagatactgtgttaaccagagaa

SEQ ID NO: 264825 - DNA, 25 bp, Probe Sequence
ggtttattggcgataatcacagaaa

SEQ ID NO: 264826 - DNA, 25 bp, Probe Sequence
ggtattctctcctatggaaacaaaa

SEQ ID NO: 264827 - DNA, 25 bp, Probe Sequence
ggtttcctcccacgaggacatttga

SEQ ID NO: 264828 - DNA, 25 bp, Probe Sequence
ggtttcctcctaagaggcagcttct

SEQ ID NO: 264829 - DNA, 25 bp, Probe Sequence
ggtttctcactgcatataagagtta

SEQ ID NO: 264830 - DNA, 25 bp, Probe Sequence
ggttggctacagctatgaaggagca

SEQ ID NO: 264831 - DNA, 25 bp, Probe Sequence
ggttgcaggcagggtgcgaatggaa

SEQ ID NO: 264832 - DNA, 25 bp, Probe Sequence
ggttgaggctctgggaaatggttat

SEQ ID NO: 264833 - DNA, 25 bp, Probe Sequence
ggttgggtatgaaagatgagtgtct

SEQ ID NO: 264834 - DNA, 25 bp, Probe Sequence
ggttttataccaagcagcagtgttc

SEQ ID NO: 264835 - DNA, 25 bp, Probe Sequence
ggtattgttgcagcatctggcagtg

SEQ ID NO: 264836 - DNA, 25 bp, Probe Sequence
ggtttgattcacctgctgcgaaaaa

SEQ ID NO: 264837 - DNA, 25 bp, Probe Sequence
ggttaataattcatgccaaaaatag

SEQ ID NO: 264838 - DNA, 25 bp, Probe Sequence
ggttttaagctttactaaacatatg

SEQ ID NO: 264839 - DNA, 25 bp, Probe Sequence
ggttttttttgctacgcaattctcg

SEQ ID NO: 264840 - DNA, 25 bp, Probe Sequence
ggttatttccttgaagaactcctgg

SEQ ID NO: 264841 - DNA, 25 bp, Probe Sequence
ggtttcattcgctcaaattatccct

SEQ ID NO: 264842 - DNA, 25 bp, Probe Sequence
ggtatttgtcgaccaaaatgatgcc

SEQ ID NO: 264843 - DNA, 25 bp, Probe Sequence
ggtattttctctgcaccaagagcac

SEQ ID NO: 264844 - DNA, 25 bp, Probe Sequence
ggttggcttcttgtctgcaagccag

SEQ ID NO: 264845 - DNA, 25 bp, Probe Sequence
ggattgagttctttgtctcagccca

SEQ ID NO: 264846 - DNA, 25 bp, Probe Sequence
ggattgagaccatatctcgatcctc

SEQ ID NO: 264847 - DNA, 25 bp, Probe Sequence
ggtatgagcagattcaccttgtccc

SEQ ID NO: 264848 - DNA, 25 bp, Probe Sequence
ggtatgtcagaggaccgtgtctcaa

SEQ ID NO: 264849 - DNA, 25 bp, Probe Sequence
ggtagtgatagacctagctttcata

SEQ ID NO: 264850 - DNA, 25 bp, Probe Sequence
ggtatgtcacaacttgtgcttttgc

SEQ ID NO: 264851 - DNA, 25 bp, Probe Sequence
ggtatggtgaacagtgctcttgtgg

SEQ ID NO: 264852 - DNA, 25 bp, Probe Sequence
ggtattaaacaagtcaattctgtgt

SEQ ID NO: 264853 - DNA, 25 bp, Probe Sequence
ggatttgagaacgtcctttttgctc

SEQ ID NO: 264854 - DNA, 25 bp, Probe Sequence
ggtattacaaccagattatattctt

SEQ ID NO: 264855 - DNA, 25 bp, Probe Sequence
ggttaaaacctggcactatatccta

SEQ ID NO: 264856 - DNA, 25 bp, Probe Sequence
ggttaagctaccttcattaagcagc

SEQ ID NO: 264857 - DNA, 25 bp, Probe Sequence
ggtataatgtaacttcaccccagcc

SEQ ID NO: 264858 - DNA, 25 bp, Probe Sequence
ggtatcaatggatttatcccccgca

SEQ ID NO: 264859 - DNA, 25 bp, Probe Sequence
ggtatcaatggatttatcccccgca

SEQ ID NO: 264860 - DNA, 25 bp, Probe Sequence
ggtatagatgaagttagaccattag

SEQ ID NO: 264861 - DNA, 25 bp, Probe Sequence
ggagattgacaagttcgagtttggg

SEQ ID NO: 264862 - DNA, 25 bp, Probe Sequence
ggagtagagccagttaacatttagg

SEQ ID NO: 264863 - DNA, 25 bp, Probe Sequence
ggatccaggccagttagttaccaga

SEQ ID NO: 264864 - DNA, 25 bp, Probe Sequence
ggatttaccagttaccataccagaa

SEQ ID NO: 264865 - DNA, 25 bp, Probe Sequence
ggtatttccacctcggaacatcaca

SEQ ID NO: 264866 - DNA, 25 bp, Probe Sequence
ggttgttaatcctggagccaatcaa

SEQ ID NO: 264867 - DNA, 25 bp, Probe Sequence
ggatcagttaacacacaagcccaaa

SEQ ID NO: 264868 - DNA, 25 bp, Probe Sequence
ggaccgggaacctaagagtgccaga

SEQ ID NO: 264869 - DNA, 25 bp, Probe Sequence
ggacccaggaaataaatgccgatga

SEQ ID NO: 264870 - DNA, 25 bp, Probe Sequence
ggatccgaaaacacatactgcccga

SEQ ID NO: 264871 - DNA, 25 bp, Probe Sequence
ggatctaaaacatttgaagcgcccg

SEQ ID NO: 264872 - DNA, 25 bp, Probe Sequence
ggttatgaaacttggaaatcccgag

SEQ ID NO: 264873 - DNA, 25 bp, Probe Sequence
ggttaaatactaccagcacatccct

SEQ ID NO: 264874 - DNA, 25 bp, Probe Sequence
ggttaagattaatcccatgcagctc

SEQ ID NO: 264875 - DNA, 25 bp, Probe Sequence
ggttcagatcatcaagtcccagatg

SEQ ID NO: 264876 - DNA, 25 bp, Probe Sequence
ggtatcactaggaggcccagatgac

SEQ ID NO: 264877 - DNA, 25 bp, Probe Sequence
ggattcccagtgtggtctgagagac

SEQ ID NO: 264878 - DNA, 25 bp, Probe Sequence
ggttccacatggtatagttactgag

SEQ ID NO: 264879 - DNA, 25 bp, Probe Sequence
ggttgcaacatttaacttctcgcac

SEQ ID NO: 264880 - DNA, 25 bp, Probe Sequence
ggtatcaaatattttttgcatcccc

SEQ ID NO: 264881 - DNA, 25 bp, Probe Sequence
ggattaattttcattcatcaacctc

SEQ ID NO: 264882 - DNA, 25 bp, Probe Sequence
ggttctttttcttgtcattaacaca

SEQ ID NO: 264883 - DNA, 25 bp, Probe Sequence
ggttctcttgttggtgccagtatta

SEQ ID NO: 264884 - DNA, 25 bp, Probe Sequence
ggtatttagctcaggccaaactgcc

SEQ ID NO: 264885 - DNA, 25 bp, Probe Sequence
ggtttaatgtcagggtcaaactaca

SEQ ID NO: 264886 - DNA, 25 bp, Probe Sequence
ggttgtggtgtctgggaaactccga

SEQ ID NO: 264887 - DNA, 25 bp, Probe Sequence
ggttgtggtgtctgggaaactccga

SEQ ID NO: 264888 - DNA, 25 bp, Probe Sequence
ggtttagtgactggtagatagctat

SEQ ID NO: 264889 - DNA, 25 bp, Probe Sequence
ggttctcatgcggtgcgtaattgta

SEQ ID NO: 264890 - DNA, 25 bp, Probe Sequence
ggttctcatgcggtgcgtaattgta

SEQ ID NO: 264891 - DNA, 25 bp, Probe Sequence
ggtatgcatgagctgtgtaaatttt

SEQ ID NO: 264892 - DNA, 25 bp, Probe Sequence
ggtatgctgcctctgtaaattcatg

SEQ ID NO: 264893 - DNA, 25 bp, Probe Sequence
ggtttgatctcagtgtaacgacatg

SEQ ID NO: 264894 - DNA, 25 bp, Probe Sequence
ggtattggcctgttcaacaatcagt

SEQ ID NO: 264895 - DNA, 25 bp, Probe Sequence
ggtatgttcttgggcaagcaatcac

SEQ ID NO: 264896 - DNA, 25 bp, Probe Sequence
ggtttgtcatgggggaactgccctt

SEQ ID NO: 264897 - DNA, 25 bp, Probe Sequence
ggtatttctgtggggtcactggtaa

SEQ ID NO: 264898 - DNA, 25 bp, Probe Sequence
ggttttagtgttggtcacaggtgac

SEQ ID NO: 264899 - DNA, 25 bp, Probe Sequence
ggtttttggataattctctcgatac

SEQ ID NO: 264900 - DNA, 25 bp, Probe Sequence
ggtttttggaattatgtctgctgaa

SEQ ID NO: 264901 - DNA, 25 bp, Probe Sequence
ggtattttctaattcagatcatcaa

SEQ ID NO: 264902 - DNA, 25 bp, Probe Sequence
ggtattgaatttatagcatcagcag

SEQ ID NO: 264903 - DNA, 25 bp, Probe Sequence
ggtattgaatttatgcattagtctg

SEQ ID NO: 264904 - DNA, 25 bp, Probe Sequence
ggtattgttgtttctgctattgttg

SEQ ID NO: 264905 - DNA, 25 bp, Probe Sequence
ggtttcttgccttgatgtactggag

SEQ ID NO: 264906 - DNA, 25 bp, Probe Sequence
ggtttttcatcttgctgggtggcag

SEQ ID NO: 264907 - DNA, 25 bp, Probe Sequence
ggttgtgttccttatggagatggag

SEQ ID NO: 264908 - DNA, 25 bp, Probe Sequence
ggttgtgtacctttcacgagacctg

SEQ ID NO: 264909 - DNA, 25 bp, Probe Sequence
ggttgtgtacctttcacgagacctg

SEQ ID NO: 264910 - DNA, 25 bp, Probe Sequence
ggttgtgtacctttcacgagacctg

SEQ ID NO: 264911 - DNA, 25 bp, Probe Sequence
ggattggttagccttcattgagccc

SEQ ID NO: 264912 - DNA, 25 bp, Probe Sequence
ggatagtccaagctttgtggatccc

SEQ ID NO: 264913 - DNA, 25 bp, Probe Sequence
ggtatgttcaagccacttgtgcaac

SEQ ID NO: 264914 - DNA, 25 bp, Probe Sequence
ggttgctaaaccctggtacatcgta

SEQ ID NO: 264915 - DNA, 25 bp, Probe Sequence
ggttttaacagctttgtaatttatg

SEQ ID NO: 264916 - DNA, 25 bp, Probe Sequence
ggactttccaatgttgtaacaactc

SEQ ID NO: 264917 - DNA, 25 bp, Probe Sequence
ggttttcataatgcaatgtaacata

SEQ ID NO: 264918 - DNA, 25 bp, Probe Sequence
ggttatttcagagcagttcgccagg

SEQ ID NO: 264919 - DNA, 25 bp, Probe Sequence
ggtatgttgtaggcctgttctgaca

SEQ ID NO: 264920 - DNA, 25 bp, Probe Sequence
ggtatgttctaaagctgtgtctgag

SEQ ID NO: 264921 - DNA, 25 bp, Probe Sequence
ggtattatgtgcttagcttgcttga

SEQ ID NO: 264922 - DNA, 25 bp, Probe Sequence
ggtattgatgtcttcagctggtatc

SEQ ID NO: 264923 - DNA, 25 bp, Probe Sequence
ggtattgatgtcttcagctggtatc

SEQ ID NO: 264924 - DNA, 25 bp, Probe Sequence
ggtattgatgtcttcagctggtatc

SEQ ID NO: 264925 - DNA, 25 bp, Probe Sequence
ggtatctttctgaagtggcatctgg

SEQ ID NO: 264926 - DNA, 25 bp, Probe Sequence
ggtatctttctgaagtggcatctgg

SEQ ID NO: 264927 - DNA, 25 bp, Probe Sequence
ggattcttcaggcgtcgcttggaac

SEQ ID NO: 264928 - DNA, 25 bp, Probe Sequence
ggttttcagtcacttcttgttgcaa

SEQ ID NO: 264929 - DNA, 25 bp, Probe Sequence
ggttaatgcagtttcacttatgtta

SEQ ID NO: 264930 - DNA, 25 bp, Probe Sequence
ggttgtgatgttatccttcttatat

SEQ ID NO: 264931 - DNA, 25 bp, Probe Sequence
ggtttgtgtctttgctatgcttttt

SEQ ID NO: 264932 - DNA, 25 bp, Probe Sequence
ggactttctttagatgtcgtatccg

SEQ ID NO: 264933 - DNA, 25 bp, Probe Sequence
ggtttgactttctttgtcaatacca

SEQ ID NO: 264934 - DNA, 25 bp, Probe Sequence
ggttttcctgattgcttgacaaaca

SEQ ID NO: 264935 - DNA, 25 bp, Probe Sequence
ggtttgtccgcatgttgtaatcgtg

SEQ ID NO: 264936 - DNA, 25 bp, Probe Sequence
ggttgatcacctgagttgggatttt

SEQ ID NO: 264937 - DNA, 25 bp, Probe Sequence
ggtttctgtgttattgaggatttgt

SEQ ID NO: 264938 - DNA, 25 bp, Probe Sequence
ggtttcgtgttcaccatggaacatt

SEQ ID NO: 264939 - DNA, 25 bp, Probe Sequence
ggttatgttgttattctcggactgt

SEQ ID NO: 264940 - DNA, 25 bp, Probe Sequence
ggatgtattttcttttccgaaatgt

SEQ ID NO: 264941 - DNA, 25 bp, Probe Sequence
ggttcagttgtacttgtcctgcaaa

SEQ ID NO: 264942 - DNA, 25 bp, Probe Sequence
ggtatagtagaacctaccacagaga

SEQ ID NO: 264943 - DNA, 25 bp, Probe Sequence
ggttgtgtacaactccacgaggtga

SEQ ID NO: 264944 - DNA, 25 bp, Probe Sequence
ggtatttgacaactgccagactttc

SEQ ID NO: 264945 - DNA, 25 bp, Probe Sequence
ggtattgcgataactgtagatttta

SEQ ID NO: 264946 - DNA, 25 bp, Probe Sequence
ggtattgtgaagattagttcatgtt

SEQ ID NO: 264947 - DNA, 25 bp, Probe Sequence
ggtattggagaacttgtttcctgct

SEQ ID NO: 264948 - DNA, 25 bp, Probe Sequence
ggtttgccaaacaattgagtgactt

SEQ ID NO: 264949 - DNA, 25 bp, Probe Sequence
ggttgaccaataaatttatgactac

SEQ ID NO: 264950 - DNA, 25 bp, Probe Sequence
ggttaccattttttgtcagagtgtc

SEQ ID NO: 264951 - DNA, 25 bp, Probe Sequence
ggttagccttagtttctcagacttg

SEQ ID NO: 264952 - DNA, 25 bp, Probe Sequence
ggtttggcttgtttttcttgcatgg

SEQ ID NO: 264953 - DNA, 25 bp, Probe Sequence
ggtttggcttgtttttcttgcatgg

SEQ ID NO: 264954 - DNA, 25 bp, Probe Sequence
ggtttcaccgtgttagtcaggatgg

SEQ ID NO: 264955 - DNA, 25 bp, Probe Sequence
ggtttcaccgtgttagccaggatgg

SEQ ID NO: 264956 - DNA, 25 bp, Probe Sequence
ggcttctccatcgtgttggggtaac

SEQ ID NO: 264957 - DNA, 25 bp, Probe Sequence
ggttcctctctacttggggaaatca

SEQ ID NO: 264958 - DNA, 25 bp, Probe Sequence
ggttccatgtttctgatggggaaga

SEQ ID NO: 264959 - DNA, 25 bp, Probe Sequence
ggttcgattttcatttgagcagcca

SEQ ID NO: 264960 - DNA, 25 bp, Probe Sequence
ggttagacttgtagtcactgggctt

SEQ ID NO: 264961 - DNA, 25 bp, Probe Sequence
ggttcttctttagactgggcttatg

SEQ ID NO: 264962 - DNA, 25 bp, Probe Sequence
ggtttcttttgagggcatggcgtta

SEQ ID NO: 264963 - DNA, 25 bp, Probe Sequence
ggttcttttgtaggatgtggccctg

SEQ ID NO: 264964 - DNA, 25 bp, Probe Sequence
ggttttcctgaagcagctggctagt

SEQ ID NO: 264965 - DNA, 25 bp, Probe Sequence
ggttttcgtccaggagtcggaggag

SEQ ID NO: 264966 - DNA, 25 bp, Probe Sequence
ggttttagtctcgaggatgtgggct

SEQ ID NO: 264967 - DNA, 25 bp, Probe Sequence
ggattattcggctgcggaagggctt

SEQ ID NO: 264968 - DNA, 25 bp, Probe Sequence
ggatatacccagttggtcaagtggt

SEQ ID NO: 264969 - DNA, 25 bp, Probe Sequence
ggatcacacccacgggtgctactgc

SEQ ID NO: 264970 - DNA, 25 bp, Probe Sequence
ggtatatcgcatgcggggcgacatg

SEQ ID NO: 264971 - DNA, 25 bp, Probe Sequence
ggttctgagaaggtgggccactgac

SEQ ID NO: 264972 - DNA, 25 bp, Probe Sequence
ggttcatacattgctgaggacctga

SEQ ID NO: 264973 - DNA, 25 bp, Probe Sequence
ggtttcatcattgctggtgtggctg

SEQ ID NO: 264974 - DNA, 25 bp, Probe Sequence
ggtttcactatattgtgtcaggctg

SEQ ID NO: 264975 - DNA, 25 bp, Probe Sequence
ggtttctctagtagattagcagcta

SEQ ID NO: 264976 - DNA, 25 bp, Probe Sequence
ggtttctcagatcctgtatatgcag

SEQ ID NO: 264977 - DNA, 25 bp, Probe Sequence
ggttagccagtgtgactatgcacct

SEQ ID NO: 264978 - DNA, 25 bp, Probe Sequence
ggtatacctgtcatgttggatcctg

SEQ ID NO: 264979 - DNA, 25 bp, Probe Sequence
ggtatagccttatgtgctttcctac

SEQ ID NO: 264980 - DNA, 25 bp, Probe Sequence
ggtttgcctcattgtgctatttgcc

SEQ ID NO: 264981 - DNA, 25 bp, Probe Sequence
ggtttgcacatgttgttattgcctt

SEQ ID NO: 264982 - DNA, 25 bp, Probe Sequence
ggttctatcagtagtgtaatccatt

SEQ ID NO: 264983 - DNA, 25 bp, Probe Sequence
ggtttgctcagtatatctatcttta

SEQ ID NO: 264984 - DNA, 25 bp, Probe Sequence
ggtttgcaagtgaacagaacattct

SEQ ID NO: 264985 - DNA, 25 bp, Probe Sequence
ggtattctagttccaatatattttg

SEQ ID NO: 264986 - DNA, 25 bp, Probe Sequence
ggtttacatgttccaatatgattcc

SEQ ID NO: 264987 - DNA, 25 bp, Probe Sequence
ggtttacatgttccaatatgattcc

SEQ ID NO: 264988 - DNA, 25 bp, Probe Sequence
ggtttgactatttctgtatgtctcc

SEQ ID NO: 264989 - DNA, 25 bp, Probe Sequence
ggtattgatttcacagtcagctgct

SEQ ID NO: 264990 - DNA, 25 bp, Probe Sequence
ggtttattatcactcagatcagtcc

SEQ ID NO: 264991 - DNA, 25 bp, Probe Sequence
ggtttgatcttagaatactcagttc

SEQ ID NO: 264992 - DNA, 25 bp, Probe Sequence
ggtttggctgtttgaataatggtta

SEQ ID NO: 264993 - DNA, 25 bp, Probe Sequence
ggtattggatgctttaatcaagatt

SEQ ID NO: 264994 - DNA, 25 bp, Probe Sequence
ggtatttgatgctaaactagaagtc

SEQ ID NO: 264995 - DNA, 25 bp, Probe Sequence
ggttttatccatgtctctagcaatc

SEQ ID NO: 264996 - DNA, 25 bp, Probe Sequence
ggagttttcactctcttagcaaggt

SEQ ID NO: 264997 - DNA, 25 bp, Probe Sequence
ggatttgggaatcttcttgaagggc

SEQ ID NO: 264998 - DNA, 25 bp, Probe Sequence
ggatatttggttcatttagaagttc

SEQ ID NO: 264999 - DNA, 25 bp, Probe Sequence
ggatttctgggtctttcctgagact

SEQ ID NO: 265000 - DNA, 25 bp, Probe Sequence
ggtttctgcaggttttactctgcaa

SEQ ID NO: 265001 - DNA, 25 bp, Probe Sequence
ggtttctgagtatttctggtctatt

SEQ ID NO: 265002 - DNA, 25 bp, Probe Sequence
ggtttatggtgatcttggaattttc

SEQ ID NO: 265003 - DNA, 25 bp, Probe Sequence
ggtttgaggtgatctcgcaaagtta

SEQ ID NO: 265004 - DNA, 25 bp, Probe Sequence
ggttctggggtgcctgacaaagttc

SEQ ID NO: 265005 - DNA, 25 bp, Probe Sequence
ggttgctgtgctatttgacaaactt

SEQ ID NO: 265006 - DNA, 25 bp, Probe Sequence
ggttctgatctacaatggccaactg

SEQ ID NO: 265007 - DNA, 25 bp, Probe Sequence
ggtttatctagttgaggctcacaag

SEQ ID NO: 265008 - DNA, 25 bp, Probe Sequence
ggtttggaagcatcaggctcacggg

SEQ ID NO: 265009 - DNA, 25 bp, Probe Sequence
ggttcccataaccagtcacacggga

SEQ ID NO: 265010 - DNA, 25 bp, Probe Sequence
ggttttcaataccagaagcacagga

SEQ ID NO: 265011 - DNA, 25 bp, Probe Sequence
ggttttcaataccagaagcacagga

SEQ ID NO: 265012 - DNA, 25 bp, Probe Sequence
ggttatcatcttactgcaaagccac

SEQ ID NO: 265013 - DNA, 25 bp, Probe Sequence
ggttatttctcaacaaagcacagtg

SEQ ID NO: 265014 - DNA, 25 bp, Probe Sequence
ggtttcaactcagaagaggcatgtt

SEQ ID NO: 265015 - DNA, 25 bp, Probe Sequence
ggttctcacaccatccagataatgt

SEQ ID NO: 265016 - DNA, 25 bp, Probe Sequence
ggttctgaccacatccgtgagaaag

SEQ ID NO: 265017 - DNA, 25 bp, Probe Sequence
ggctttgagaccaccgtgagaacgg

SEQ ID NO: 265018 - DNA, 25 bp, Probe Sequence
ggcctaggatcccctaggactgggg

SEQ ID NO: 265019 - DNA, 25 bp, Probe Sequence
ggttgaggtccctgggaagcagggg

SEQ ID NO: 265020 - DNA, 25 bp, Probe Sequence
ggttggccagagatggggaacagcc

SEQ ID NO: 265021 - DNA, 25 bp, Probe Sequence
ggttgagccagggttcgggagagcc

SEQ ID NO: 265022 - DNA, 25 bp, Probe Sequence
ggatcggagaatgctcccgaaggcc

SEQ ID NO: 265023 - DNA, 25 bp, Probe Sequence
ggatcggagccatcatcgcgccaaa

SEQ ID NO: 265024 - DNA, 25 bp, Probe Sequence
ggattggccgcttgtcgggaaaatc

SEQ ID NO: 265025 - DNA, 25 bp, Probe Sequence
ggattccccaatgcagcaggaaacc

SEQ ID NO: 265026 - DNA, 25 bp, Probe Sequence
ggtttccctgcagtatgagaaaagc

SEQ ID NO: 265027 - DNA, 25 bp, Probe Sequence
ggtttgccctcctatgagtgagagg

SEQ ID NO: 265028 - DNA, 25 bp, Probe Sequence
ggtttggcctgtagaggtgacagag

SEQ ID NO: 265029 - DNA, 25 bp, Probe Sequence
ggttttcaggcaatagaggaggacg

SEQ ID NO: 265030 - DNA, 25 bp, Probe Sequence
ggattttagatcttaatgggttcga

SEQ ID NO: 265031 - DNA, 25 bp, Probe Sequence
ggttgcctgagtttaagaggttgag

SEQ ID NO: 265032 - DNA, 25 bp, Probe Sequence
ggttaccgtttctaagagttgtgct

SEQ ID NO: 265033 - DNA, 25 bp, Probe Sequence
ggttcatgggttttaagtgcttgtg

SEQ ID NO: 265034 - DNA, 25 bp, Probe Sequence
ggttatgggtcaattaatctctttt

SEQ ID NO: 265035 - DNA, 25 bp, Probe Sequence
ggtttggggacattgagatcacttg

SEQ ID NO: 265036 - DNA, 25 bp, Probe Sequence
ggctaggtcagttcggaaacttgaa

SEQ ID NO: 265037 - DNA, 25 bp, Probe Sequence
ggcggccgcagaacggtcaatttga

SEQ ID NO: 265038 - DNA, 25 bp, Probe Sequence
tgagggccggacagagactacagta

SEQ ID NO: 265039 - DNA, 25 bp, Probe Sequence
tggtgaacggccacagttactgata

SEQ ID NO: 265040 - DNA, 25 bp, Probe Sequence
tggtgaacggccacagttactgata

SEQ ID NO: 265041 - DNA, 25 bp, Probe Sequence
ggttcagggccagtgcatattagtg

SEQ ID NO: 265042 - DNA, 25 bp, Probe Sequence
ggttcaaggtgctgctttgcatgcc

SEQ ID NO: 265043 - DNA, 25 bp, Probe Sequence
ggttacctggtgctcactgtgcacc

SEQ ID NO: 265044 - DNA, 25 bp, Probe Sequence
ggttaaacgtagcatgtggcatcgc

SEQ ID NO: 265045 - DNA, 25 bp, Probe Sequence
ggttacaaggtacacgagtcgatga

SEQ ID NO: 265046 - DNA, 25 bp, Probe Sequence
ggataacaaggtaacacaaggctta

SEQ ID NO: 265047 - DNA, 25 bp, Probe Sequence
ggttacaggagtaccagacgtggct

SEQ ID NO: 265048 - DNA, 25 bp, Probe Sequence
ggttgatgcgggttttggcagtagc

SEQ ID NO: 265049 - DNA, 25 bp, Probe Sequence
ggatgagtgcagtgaatttcgaaac

SEQ ID NO: 265050 - DNA, 25 bp, Probe Sequence
ggatgatggaggtagacagtcgact

SEQ ID NO: 265051 - DNA, 25 bp, Probe Sequence
ggatagcatgagctcagacaccgcc

SEQ ID NO: 265052 - DNA, 25 bp, Probe Sequence
ggttgaggctcaagacagctcaccc

SEQ ID NO: 265053 - DNA, 25 bp, Probe Sequence
ggttctgtgtacacagcatgccgcc

SEQ ID NO: 265054 - DNA, 25 bp, Probe Sequence
ggttgctgtagagcatctgacccct

SEQ ID NO: 265055 - DNA, 25 bp, Probe Sequence
ggttgggagatttctcagtccctga

SEQ ID NO: 265056 - DNA, 25 bp, Probe Sequence
ggttccagatcaaagacaggccgtg

SEQ ID NO: 265057 - DNA, 25 bp, Probe Sequence
ggttctacaagctgcacgagcggag

SEQ ID NO: 265058 - DNA, 25 bp, Probe Sequence
ggttcattcaagctcacgatgctgt

SEQ ID NO: 265059 - DNA, 25 bp, Probe Sequence
ggttgcagtaagccgagttcactcc

SEQ ID NO: 265060 - DNA, 25 bp, Probe Sequence
ggttatagtagactgtgtgccctcc

SEQ ID NO: 265061 - DNA, 25 bp, Probe Sequence
ggattcataaacttcttccctacct

SEQ ID NO: 265062 - DNA, 25 bp, Probe Sequence
ggattaaaagcctcatccacgaccg

SEQ ID NO: 265063 - DNA, 25 bp, Probe Sequence
ggttaactggactgacctaaacgtg

SEQ ID NO: 265064 - DNA, 25 bp, Probe Sequence
ggttcaccgaagtgactctatgacc

SEQ ID NO: 265065 - DNA, 25 bp, Probe Sequence
ggttatcttaaatagatcttaggca

SEQ ID NO: 265066 - DNA, 25 bp, Probe Sequence
ggttatcttaaatagatcttaggca

SEQ ID NO: 265067 - DNA, 25 bp, Probe Sequence
ggttattcgaacctcaagcctagga

SEQ ID NO: 265068 - DNA, 25 bp, Probe Sequence
ggtttatggatacaatgctgcctat

SEQ ID NO: 265069 - DNA, 25 bp, Probe Sequence
ggttttcctagctacatctggtacc

SEQ ID NO: 265070 - DNA, 25 bp, Probe Sequence
ggttttgaaatcccatcaggtcacc

SEQ ID NO: 265071 - DNA, 25 bp, Probe Sequence
ggttttgacaacttcgagcagctgc

SEQ ID NO: 265072 - DNA, 25 bp, Probe Sequence
ggttgtctgacactatatactggcc

SEQ ID NO: 265073 - DNA, 25 bp, Probe Sequence
ggttacgaagtgacagtgctggtgc

SEQ ID NO: 265074 - DNA, 25 bp, Probe Sequence
ggttttggcagtacagtcatgggcg

SEQ ID NO: 265075 - DNA, 25 bp, Probe Sequence
ggttttggcagtagcatcgatgtgc

SEQ ID NO: 265076 - DNA, 25 bp, Probe Sequence
ggttctccgagaagacagcagagct

SEQ ID NO: 265077 - DNA, 25 bp, Probe Sequence
ggttctccgagaagacagcagagct

SEQ ID NO: 265078 - DNA, 25 bp, Probe Sequence
ggttctccgagaagacagcagagct

SEQ ID NO: 265079 - DNA, 25 bp, Probe Sequence
ggttgctgccgaaatgggcaagttc

SEQ ID NO: 265080 - DNA, 25 bp, Probe Sequence
ggttgtaccatttcggcaacttcca

SEQ ID NO: 265081 - DNA, 25 bp, Probe Sequence
ggatgcattaattttcaggaactat

SEQ ID NO: 265082 - DNA, 25 bp, Probe Sequence
ggagttcaacaatggtacctacaac

SEQ ID NO: 265083 - DNA, 25 bp, Probe Sequence
ggtttcataagatggttgcattcta

SEQ ID NO: 265084 - DNA, 25 bp, Probe Sequence
ggtttcatcaatcatgcctatttaa

SEQ ID NO: 265085 - DNA, 25 bp, Probe Sequence
ggtttctctgagtcatcattattac

SEQ ID NO: 265086 - DNA, 25 bp, Probe Sequence
ggtttcatcatatctctttgcatac

SEQ ID NO: 265087 - DNA, 25 bp, Probe Sequence
ggtttctcacatcgtttgttcatgc

SEQ ID NO: 265088 - DNA, 25 bp, Probe Sequence
ggtttgtcatcaccatattttctcc

SEQ ID NO: 265089 - DNA, 25 bp, Probe Sequence
ggttttcaactatttcttcacaatt

SEQ ID NO: 265090 - DNA, 25 bp, Probe Sequence
ggttttcaaaacggctcacaaaatg

SEQ ID NO: 265091 - DNA, 25 bp, Probe Sequence
ggtttgcacaagttccctggagaaa

SEQ ID NO: 265092 - DNA, 25 bp, Probe Sequence
ggttgacaaatggtggggtaacaga

SEQ ID NO: 265093 - DNA, 25 bp, Probe Sequence
ggttacatggaggggattgatcaaa

SEQ ID NO: 265094 - DNA, 25 bp, Probe Sequence
ggtttcatggacactgttgagcaat

SEQ ID NO: 265095 - DNA, 25 bp, Probe Sequence
ggttacgtgcaaacgctatgccatt

SEQ ID NO: 265096 - DNA, 25 bp, Probe Sequence
ggatttcgtgaacagtagacatttt

SEQ ID NO: 265097 - DNA, 25 bp, Probe Sequence
ggatctctttaacagtagcaaggct

SEQ ID NO: 265098 - DNA, 25 bp, Probe Sequence
ggttcatttggacaaagcacagcag

SEQ ID NO: 265099 - DNA, 25 bp, Probe Sequence
ggttattggtcagttatgatcccag

SEQ ID NO: 265100 - DNA, 25 bp, Probe Sequence
ggttactgggcaatttctatatcag

SEQ ID NO: 265101 - DNA, 25 bp, Probe Sequence
ggttgactgggtttctctgtatagt

SEQ ID NO: 265102 - DNA, 25 bp, Probe Sequence
ggttagaggtgttggcagtttagga

SEQ ID NO: 265103 - DNA, 25 bp, Probe Sequence
ggtttgaagtgatagcctttcaggg

SEQ ID NO: 265104 - DNA, 25 bp, Probe Sequence
ggtttccagccatacctgttctgga

SEQ ID NO: 265105 - DNA, 25 bp, Probe Sequence
ggtttgccagtacatcaatgggctg

SEQ ID NO: 265106 - DNA, 25 bp, Probe Sequence
ggtttcctgtggcataatgtgatgg

SEQ ID NO: 265107 - DNA, 25 bp, Probe Sequence
ggttctccagttaataatgtaggca

SEQ ID NO: 265108 - DNA, 25 bp, Probe Sequence
ggtttccactctgcacattgtagag

SEQ ID NO: 265109 - DNA, 25 bp, Probe Sequence
ggttatggaacagcacatttctaga

SEQ ID NO: 265110 - DNA, 25 bp, Probe Sequence
ggattaccagaagactttccgcgtg

SEQ ID NO: 265111 - DNA, 25 bp, Probe Sequence
ggttatccaagaggcatccataccc

SEQ ID NO: 265112 - DNA, 25 bp, Probe Sequence
ggtttcggattcgtgacatccaccc

SEQ ID NO: 265113 - DNA, 25 bp, Probe Sequence
ggtttcagcagtattacaccacctc

SEQ ID NO: 265114 - DNA, 25 bp, Probe Sequence
ggatttggaatgattcaaccccttt

SEQ ID NO: 265115 - DNA, 25 bp, Probe Sequence
ggatttcgaagtttgcaacctttat

SEQ ID NO: 265116 - DNA, 25 bp, Probe Sequence
ggtttcagcgagtcgtatttctttt

SEQ ID NO: 265117 - DNA, 25 bp, Probe Sequence
ggttccacagaagctttgtttcttg

SEQ ID NO: 265118 - DNA, 25 bp, Probe Sequence
ggataattcatgaggctttttccat

SEQ ID NO: 265119 - DNA, 25 bp, Probe Sequence
ggtttttgaatgtctttcactcctt

SEQ ID NO: 265120 - DNA, 25 bp, Probe Sequence
ggtttcttcaattagtctcagttct

SEQ ID NO: 265121 - DNA, 25 bp, Probe Sequence
ggtttcctcaaactgtgatttttct

SEQ ID NO: 265122 - DNA, 25 bp, Probe Sequence
ggtttctgtaaccattgtttggatt

SEQ ID NO: 265123 - DNA, 25 bp, Probe Sequence
ggtttttaaccattgtcttgttctg

SEQ ID NO: 265124 - DNA, 25 bp, Probe Sequence
ggttttaatacctgctttgcatatt

SEQ ID NO: 265125 - DNA, 25 bp, Probe Sequence
ggattttaaatagcgtattgtatat

SEQ ID NO: 265126 - DNA, 25 bp, Probe Sequence
ggattctaagaagaggcaatgtgaa

SEQ ID NO: 265127 - DNA, 25 bp, Probe Sequence
ggttctatttaatggacatgagata

SEQ ID NO: 265128 - DNA, 25 bp, Probe Sequence
ggtttgccttaatggagacaatagc

SEQ ID NO: 265129 - DNA, 25 bp, Probe Sequence
ggttcccattgagacgacgcaaagc

SEQ ID NO: 265130 - DNA, 25 bp, Probe Sequence
ggttcccatagttacgtccaatagt

SEQ ID NO: 265131 - DNA, 25 bp, Probe Sequence
ggatttccaaggcacgtgcagcaaa

SEQ ID NO: 265132 - DNA, 25 bp, Probe Sequence
ggttctcaccaggaggtgtcgcact

SEQ ID NO: 265133 - DNA, 25 bp, Probe Sequence
ggttcattcgcataggtgtgagctt

SEQ ID NO: 265134 - DNA, 25 bp, Probe Sequence
ggttgcttacatgtggtagcagctc

SEQ ID NO: 265135 - DNA, 25 bp, Probe Sequence
ggttgattgatgtgggacagcagcc

SEQ ID NO: 265136 - DNA, 25 bp, Probe Sequence
ggttgctgtgtcttgaacaaagctg

SEQ ID NO: 265137 - DNA, 25 bp, Probe Sequence
ggttgatgggatgattcacaagtca

SEQ ID NO: 265138 - DNA, 25 bp, Probe Sequence
ggttgaggaggaactctgcaagcag

SEQ ID NO: 265139 - DNA, 25 bp, Probe Sequence
ggttgaggaggatgccttgaggcca

SEQ ID NO: 265140 - DNA, 25 bp, Probe Sequence
ggttggagaacaaacttgggcagcc

SEQ ID NO: 265141 - DNA, 25 bp, Probe Sequence
ggttagagcccagagcaagatggag

SEQ ID NO: 265142 - DNA, 25 bp, Probe Sequence
ggttagatcccaaatgctagaagcc

SEQ ID NO: 265143 - DNA, 25 bp, Probe Sequence
ggttattacctaatggagatccatc

SEQ ID NO: 265144 - DNA, 25 bp, Probe Sequence
ggttattacctaatggagatccatc

SEQ ID NO: 265145 - DNA, 25 bp, Probe Sequence
ggttttcatccttagagaagccatg

SEQ ID NO: 265146 - DNA, 25 bp, Probe Sequence
ggttttcatccttagagaagccatg

SEQ ID NO: 265147 - DNA, 25 bp, Probe Sequence
ggttggccgccttgaaaatgcaatc

SEQ ID NO: 265148 - DNA, 25 bp, Probe Sequence
ggttcagtccacttgaaagtaactt

SEQ ID NO: 265149 - DNA, 25 bp, Probe Sequence
ggttggtctgcatctaagactaact

SEQ ID NO: 265150 - DNA, 25 bp, Probe Sequence
ggtttatctcaagtctcaattgaac

SEQ ID NO: 265151 - DNA, 25 bp, Probe Sequence
ggtttatctacaatctcaaatccta

SEQ ID NO: 265152 - DNA, 25 bp, Probe Sequence
ggttccagaagcttccaaatcctga

SEQ ID NO: 265153 - DNA, 25 bp, Probe Sequence
ggttgtcaaatgttaagtcctctat

SEQ ID NO: 265154 - DNA, 25 bp, Probe Sequence
ggattccaaatgcaaggtcctcctc

SEQ ID NO: 265155 - DNA, 25 bp, Probe Sequence
ggttccaactgtaaggacacactac

SEQ ID NO: 265156 - DNA, 25 bp, Probe Sequence
ggttctcaggctttcagcttgaact

SEQ ID NO: 265157 - DNA, 25 bp, Probe Sequence
ggttccagtgcctgacttgggatag

SEQ ID NO: 265158 - DNA, 25 bp, Probe Sequence
ggttaactgcctcatatgtgggaca

SEQ ID NO: 265159 - DNA, 25 bp, Probe Sequence
ggttacctgttcaagaatcaagcac

SEQ ID NO: 265160 - DNA, 25 bp, Probe Sequence
ggtttcggattgagttgcaagcagg

SEQ ID NO: 265161 - DNA, 25 bp, Probe Sequence
ggttaaggtttcctcatgagcaagg

SEQ ID NO: 265162 - DNA, 25 bp, Probe Sequence
ggttaagagcatatctcgccaggat

SEQ ID NO: 265163 - DNA, 25 bp, Probe Sequence
tgggaccaggctgcccaaaggtact

SEQ ID NO: 265164 - DNA, 25 bp, Probe Sequence
ggatacctctgtgtcctaagtgttt

SEQ ID NO: 265165 - DNA, 25 bp, Probe Sequence
ggttgttgctgtgatcgcataccgt

SEQ ID NO: 265166 - DNA, 25 bp, Probe Sequence
ggttgagtctggactcctaccgaac

SEQ ID NO: 265167 - DNA, 25 bp, Probe Sequence
ggttggactggactaccagaaggag

SEQ ID NO: 265168 - DNA, 25 bp, Probe Sequence
ggttccttgtgaaactagaagggct

SEQ ID NO: 265169 - DNA, 25 bp, Probe Sequence
ggttggctatggtgatcttaatggg

SEQ ID NO: 265170 - DNA, 25 bp, Probe Sequence
ggttactttttgtcttattgatgga

SEQ ID NO: 265171 - DNA, 25 bp, Probe Sequence
ggtttcttctaattcttattgctta

SEQ ID NO: 265172 - DNA, 25 bp, Probe Sequence
ggtttcttctaattcttattgctta

SEQ ID NO: 265173 - DNA, 25 bp, Probe Sequence
ggttttatctattcttgctatttta

SEQ ID NO: 265174 - DNA, 25 bp, Probe Sequence
ggtttcttgtttttgctgtatttag

SEQ ID NO: 265175 - DNA, 25 bp, Probe Sequence
ggttattttagtttctgttctgtgg

SEQ ID NO: 265176 - DNA, 25 bp, Probe Sequence
ggttatcttgctaatattacttctg

SEQ ID NO: 265177 - DNA, 25 bp, Probe Sequence
ggtttttggaatctacatgtcttgg

SEQ ID NO: 265178 - DNA, 25 bp, Probe Sequence
ggttattaaaatcaggcaattcagg

SEQ ID NO: 265179 - DNA, 25 bp, Probe Sequence
ggttatgtaaatatagtcgactaag

SEQ ID NO: 265180 - DNA, 25 bp, Probe Sequence
ggttaataaacagtacctgctctca

SEQ ID NO: 265181 - DNA, 25 bp, Probe Sequence
ggttgagatgtgaaactaccaatca

SEQ ID NO: 265182 - DNA, 25 bp, Probe Sequence
ggttggcaggaacatcattcatggc

SEQ ID NO: 265183 - DNA, 25 bp, Probe Sequence
ggttacagtgagtgcacagctcatt

SEQ ID NO: 265184 - DNA, 25 bp, Probe Sequence
ggttgacatttcttacagcaattac

SEQ ID NO: 265185 - DNA, 25 bp, Probe Sequence
ggttgatgtttcttatagcaattaa

SEQ ID NO: 265186 - DNA, 25 bp, Probe Sequence
ggttggtgattagattgcctctacc

SEQ ID NO: 265187 - DNA, 25 bp, Probe Sequence
ggttggtgatggattcgccttgagc

SEQ ID NO: 265188 - DNA, 25 bp, Probe Sequence
ggttcaggaggttttggttccactg

SEQ ID NO: 265189 - DNA, 25 bp, Probe Sequence
ggttcaggaggttttggttccactg

SEQ ID NO: 265190 - DNA, 25 bp, Probe Sequence
ggttaggaaatgtttagttggagat

SEQ ID NO: 265191 - DNA, 25 bp, Probe Sequence
ggttcggacctgcaaagtggcggac

SEQ ID NO: 265192 - DNA, 25 bp, Probe Sequence
ggttcgaacctctgacatgggtggc

SEQ ID NO: 265193 - DNA, 25 bp, Probe Sequence
ggttcgaacctctgacatgggtggc

SEQ ID NO: 265194 - DNA, 25 bp, Probe Sequence
ggttcgaacctctgacatgggtggc

SEQ ID NO: 265195 - DNA, 25 bp, Probe Sequence
ggttcagaacttagaagggcgtggc

SEQ ID NO: 265196 - DNA, 25 bp, Probe Sequence
ggattagcgtttagaagggcgatcg

SEQ ID NO: 265197 - DNA, 25 bp, Probe Sequence
ggttatggtcctagaggtggcaaga

SEQ ID NO: 265198 - DNA, 25 bp, Probe Sequence
ggttgtgaacgtcgtaacgcaaggc

SEQ ID NO: 265199 - DNA, 25 bp, Probe Sequence
ggttgcagaagctgcagtgaaccaa

SEQ ID NO: 265200 - DNA, 25 bp, Probe Sequence
ggttgaaccctcggatacgatagaa

SEQ ID NO: 265201 - DNA, 25 bp, Probe Sequence
ggtttaccgagctgatacccagaca

SEQ ID NO: 265202 - DNA, 25 bp, Probe Sequence
ggtttacctgcctgtagacaagtct

SEQ ID NO: 265203 - DNA, 25 bp, Probe Sequence
ggttttctcctcagtcaaaagcatt

SEQ ID NO: 265204 - DNA, 25 bp, Probe Sequence
ggtttttacagcattgcaaaatctg

SEQ ID NO: 265205 - DNA, 25 bp, Probe Sequence
ggttttggtggctgataaatactgg

SEQ ID NO: 265206 - DNA, 25 bp, Probe Sequence
ggttctttgaagtgatggtagccgg

SEQ ID NO: 265207 - DNA, 25 bp, Probe Sequence
ggttcctgtaacttggcgtcagtag

SEQ ID NO: 265208 - DNA, 25 bp, Probe Sequence
taggccctgtaatttaaccagtctt

SEQ ID NO: 265209 - DNA, 25 bp, Probe Sequence
tgagagcccaaggtttaaacttctt

SEQ ID NO: 265210 - DNA, 25 bp, Probe Sequence
ggatgcaccacgggcttttaatttt

SEQ ID NO: 265211 - DNA, 25 bp, Probe Sequence
ggatcaccagggattgtgcttttcc

SEQ ID NO: 265212 - DNA, 25 bp, Probe Sequence
ggttcacagttgatacgttctgctc

SEQ ID NO: 265213 - DNA, 25 bp, Probe Sequence
ggttcaggagctgtaagtgctcgcc

SEQ ID NO: 265214 - DNA, 25 bp, Probe Sequence
ggttcagcagcgggtcaatgctgtc

SEQ ID NO: 265215 - DNA, 25 bp, Probe Sequence
ggttcaaggcatttgttgctatcgg

SEQ ID NO: 265216 - DNA, 25 bp, Probe Sequence
ggttcaaggctgtgtctgccaagag

SEQ ID NO: 265217 - DNA, 25 bp, Probe Sequence
ggttctcagggattcctgccaatac

SEQ ID NO: 265218 - DNA, 25 bp, Probe Sequence
ggttcttttgagtcacacacaaagc

SEQ ID NO: 265219 - DNA, 25 bp, Probe Sequence
ggttctttgtgaacccttcagactc

SEQ ID NO: 265220 - DNA, 25 bp, Probe Sequence
ggagtttgttgacatcgttcagccc

SEQ ID NO: 265221 - DNA, 25 bp, Probe Sequence
ggaactttcggctataattccgcca

SEQ ID NO: 265222 - DNA, 25 bp, Probe Sequence
ggactcttccgtcaatttcgcggaa

SEQ ID NO: 265223 - DNA, 25 bp, Probe Sequence
ggatattttggacatgtttacggaa

SEQ ID NO: 265224 - DNA, 25 bp, Probe Sequence
ggattgttggggtacatttactgtg

SEQ ID NO: 265225 - DNA, 25 bp, Probe Sequence
ggatcgaaggggtattttgccactg

SEQ ID NO: 265226 - DNA, 25 bp, Probe Sequence
ggacgaaggtaaatgagatgtaact

SEQ ID NO: 265227 - DNA, 25 bp, Probe Sequence
ggatggaagcaaaagccaaccaaat

SEQ ID NO: 265228 - DNA, 25 bp, Probe Sequence
ggaggaagccagggcctaattaaag

SEQ ID NO: 265229 - DNA, 25 bp, Probe Sequence
ggatacaacttggtcattaattaaa

SEQ ID NO: 265230 - DNA, 25 bp, Probe Sequence
ggcataacctgggtcctggtttaca

SEQ ID NO: 265231 - DNA, 25 bp, Probe Sequence
ggcataacctgggtcctggtttaca

SEQ ID NO: 265232 - DNA, 25 bp, Probe Sequence
ggatattttggcacctactgttcaa

SEQ ID NO: 265233 - DNA, 25 bp, Probe Sequence
ggatattattggtctctctaggttt

SEQ ID NO: 265234 - DNA, 25 bp, Probe Sequence
ggtttagctgcttcttttggattgt

SEQ ID NO: 265235 - DNA, 25 bp, Probe Sequence
ggttttccgtttactgtgatgtgct

SEQ ID NO: 265236 - DNA, 25 bp, Probe Sequence
ggttttccactattctctattggct

SEQ ID NO: 265237 - DNA, 25 bp, Probe Sequence
ggttttgccattttgttgtgtgtat

SEQ ID NO: 265238 - DNA, 25 bp, Probe Sequence
ggttgccccttatttaatgctgtaa

SEQ ID NO: 265239 - DNA, 25 bp, Probe Sequence
ggttccctcagtattacatcttgac

SEQ ID NO: 265240 - DNA, 25 bp, Probe Sequence
ggttctttttcacttgacatgctta

SEQ ID NO: 265241 - DNA, 25 bp, Probe Sequence
ggttcttcttgtgtagtcacatcaa

SEQ ID NO: 265242 - DNA, 25 bp, Probe Sequence
ggttctgccctttatattaatcgag

SEQ ID NO: 265243 - DNA, 25 bp, Probe Sequence
ggatatccccttggacaaaactgtc

SEQ ID NO: 265244 - DNA, 25 bp, Probe Sequence
ggataacaccttggacaaactgtgg

SEQ ID NO: 265245 - DNA, 25 bp, Probe Sequence
ggagtacagtctttatgaagttgtt

SEQ ID NO: 265246 - DNA, 25 bp, Probe Sequence
ggttctagatctttcaggaattggc

SEQ ID NO: 265247 - DNA, 25 bp, Probe Sequence
ggttctgaattatgcaactgtttgc

SEQ ID NO: 265248 - DNA, 25 bp, Probe Sequence
ggttgccaataatacactaattcct

SEQ ID NO: 265249 - DNA, 25 bp, Probe Sequence
ggttatctttaatcactctttctct

SEQ ID NO: 265250 - DNA, 25 bp, Probe Sequence
ggttattttatatagcatattcttt

SEQ ID NO: 265251 - DNA, 25 bp, Probe Sequence
ggttttttgttacgctgctgtcact

SEQ ID NO: 265252 - DNA, 25 bp, Probe Sequence
ggtttttttctacttgtgtgtctgg

SEQ ID NO: 265253 - DNA, 25 bp, Probe Sequence
ggttcttcttgggagtatgttgtca

SEQ ID NO: 265254 - DNA, 25 bp, Probe Sequence
ggttctgttctgatgagtagtatgt

SEQ ID NO: 265255 - DNA, 25 bp, Probe Sequence
ggttttctccattcaggattctgtt

SEQ ID NO: 265256 - DNA, 25 bp, Probe Sequence
ggtttttacagattcaactgtgttg

SEQ ID NO: 265257 - DNA, 25 bp, Probe Sequence
ggttcacttacgatgatatgcgggt

SEQ ID NO: 265258 - DNA, 25 bp, Probe Sequence
ggttcagttactggtgcaagcaggt

SEQ ID NO: 265259 - DNA, 25 bp, Probe Sequence
ggttcatagaacagccacagcagat

SEQ ID NO: 265260 - DNA, 25 bp, Probe Sequence
ggttctataataagccatgagcttc

SEQ ID NO: 265261 - DNA, 25 bp, Probe Sequence
ggttaaaagcaagtcatagttctgc

SEQ ID NO: 265262 - DNA, 25 bp, Probe Sequence
ggttaaatacatcctttgtttgcca

SEQ ID NO: 265263 - DNA, 25 bp, Probe Sequence
ggccctttacatagtggttattcga

SEQ ID NO: 265264 - DNA, 25 bp, Probe Sequence
ggttccttcagtagtgagtatttct

SEQ ID NO: 265265 - DNA, 25 bp, Probe Sequence
ggttccttcagtagtgagtatttct

SEQ ID NO: 265266 - DNA, 25 bp, Probe Sequence
ggttctaacgctttgcgtatgattc

SEQ ID NO: 265267 - DNA, 25 bp, Probe Sequence
ggattctaaagttctgtatagctcg

SEQ ID NO: 265268 - DNA, 25 bp, Probe Sequence
ggatactaggaatgagtctactcag

SEQ ID NO: 265269 - DNA, 25 bp, Probe Sequence
ggttctctggattggagtctggcca

SEQ ID NO: 265270 - DNA, 25 bp, Probe Sequence
ggttttgtgtagcatcttgtctatc

SEQ ID NO: 265271 - DNA, 25 bp, Probe Sequence
ggattggctgtatgagcaccgttac

SEQ ID NO: 265272 - DNA, 25 bp, Probe Sequence
ggattggctgtatgagcaccgttac

SEQ ID NO: 265273 - DNA, 25 bp, Probe Sequence
ggttgagctggatctgtcctataac

SEQ ID NO: 265274 - DNA, 25 bp, Probe Sequence
ggttgatgagaatttacgtctgcaa

SEQ ID NO: 265275 - DNA, 25 bp, Probe Sequence
ggttatggcatctataaagccacta

SEQ ID NO: 265276 - DNA, 25 bp, Probe Sequence
ggttgtgcatgagaatacacccttc

SEQ ID NO: 265277 - DNA, 25 bp, Probe Sequence
ggattggcatggggaccaaacagcc

SEQ ID NO: 265278 - DNA, 25 bp, Probe Sequence
ggttggcagtatgaccagaatcatg

SEQ ID NO: 265279 - DNA, 25 bp, Probe Sequence
ggatatggagtacttcggcactatc

SEQ ID NO: 265280 - DNA, 25 bp, Probe Sequence
ggattcaagtgattctcctacctca

SEQ ID NO: 265281 - DNA, 25 bp, Probe Sequence
ggttcaagtttgttatgcagatcta

SEQ ID NO: 265282 - DNA, 25 bp, Probe Sequence
ggattgaagctttgcctgtggcatt

SEQ ID NO: 265283 - DNA, 25 bp, Probe Sequence
ggttacatgatatgctttatgctca

SEQ ID NO: 265284 - DNA, 25 bp, Probe Sequence
ggttactgaagagcaatagccactt

SEQ ID NO: 265285 - DNA, 25 bp, Probe Sequence
ggattacaagggccagaagctagct

SEQ ID NO: 265286 - DNA, 25 bp, Probe Sequence
ggttaatagtgcctcatagtctact

SEQ ID NO: 265287 - DNA, 25 bp, Probe Sequence
ggttttacatgcctgctagaaattc

SEQ ID NO: 265288 - DNA, 25 bp, Probe Sequence
ggttttactgtcttaaagctgtctt

SEQ ID NO: 265289 - DNA, 25 bp, Probe Sequence
ggttctccaatgagtagaagagttt

SEQ ID NO: 265290 - DNA, 25 bp, Probe Sequence
ggttctcctctagattgaagtttgt

SEQ ID NO: 265291 - DNA, 25 bp, Probe Sequence
ggttctccaacagagtggtgtctag

SEQ ID NO: 265292 - DNA, 25 bp, Probe Sequence
ggttcctgcatgaagacagtggctg

SEQ ID NO: 265293 - DNA, 25 bp, Probe Sequence
ggttagctcagaagacgtgcgatgg

SEQ ID NO: 265294 - DNA, 25 bp, Probe Sequence
ggattatgccacaacagtctgcggg

SEQ ID NO: 265295 - DNA, 25 bp, Probe Sequence
ggatacaggcaccaagaggcggggg

SEQ ID NO: 265296 - DNA, 25 bp, Probe Sequence
ggattgggggaatggagctggggct

SEQ ID NO: 265297 - DNA, 25 bp, Probe Sequence
ggttcgaaggatatggactattgca

SEQ ID NO: 265298 - DNA, 25 bp, Probe Sequence
ggttccaagctgaagggattcctgc

SEQ ID NO: 265299 - DNA, 25 bp, Probe Sequence
ggttgctcagggacaaggtgccttc

SEQ ID NO: 265300 - DNA, 25 bp, Probe Sequence
ggttgggaggtggaggcccagcatc

SEQ ID NO: 265301 - DNA, 25 bp, Probe Sequence
ggttgtggtggatgagagccctcct

SEQ ID NO: 265302 - DNA, 25 bp, Probe Sequence
ggttgctgaaggttggagtggccgt

SEQ ID NO: 265303 - DNA, 25 bp, Probe Sequence
ggttgctgatgagctttgaggtcct

SEQ ID NO: 265304 - DNA, 25 bp, Probe Sequence
ggttcattgctattattgcagtgtc

SEQ ID NO: 265305 - DNA, 25 bp, Probe Sequence
ggttcttcttgttctgagattcaat

SEQ ID NO: 265306 - DNA, 25 bp, Probe Sequence
ggttttcgttcactgagacacactg

SEQ ID NO: 265307 - DNA, 25 bp, Probe Sequence
ggttttggttaccatgaacaatggg

SEQ ID NO: 265308 - DNA, 25 bp, Probe Sequence
ggttttggccaagttacagtcaatg

SEQ ID NO: 265309 - DNA, 25 bp, Probe Sequence
ggttattgcaggaactttaggaatt

SEQ ID NO: 265310 - DNA, 25 bp, Probe Sequence
ggttactgctagaacattaaggtgt

SEQ ID NO: 265311 - DNA, 25 bp, Probe Sequence
ggttacttgatttctatataggcag

SEQ ID NO: 265312 - DNA, 25 bp, Probe Sequence
ggttgaccatgactaactggagcca

SEQ ID NO: 265313 - DNA, 25 bp, Probe Sequence
ggttccaagccttaggggatgccgc

SEQ ID NO: 265314 - DNA, 25 bp, Probe Sequence
ggttccaagccttaggggatgccgc

SEQ ID NO: 265315 - DNA, 25 bp, Probe Sequence
ggttccaagccttaggggatgccgc

SEQ ID NO: 265316 - DNA, 25 bp, Probe Sequence
ggttctgacaggaaaggggctccgg

SEQ ID NO: 265317 - DNA, 25 bp, Probe Sequence
ggttctaccagattgagggggatcg

SEQ ID NO: 265318 - DNA, 25 bp, Probe Sequence
ggttgctgagggatgagggggagga

SEQ ID NO: 265319 - DNA, 25 bp, Probe Sequence
ggttcaaggctcatagagggccagg

SEQ ID NO: 265320 - DNA, 25 bp, Probe Sequence
ggttgaagtcacatagctgggccac

SEQ ID NO: 265321 - DNA, 25 bp, Probe Sequence
ggttgatgattaatttgcgagacta

SEQ ID NO: 265322 - DNA, 25 bp, Probe Sequence
ggttgaatgtaaatcttgaagcaaa

SEQ ID NO: 265323 - DNA, 25 bp, Probe Sequence
ggttgcgcgtagttgctaacagcaa

SEQ ID NO: 265324 - DNA, 25 bp, Probe Sequence
ggttgcgcgtagttgctaacagcaa

SEQ ID NO: 265325 - DNA, 25 bp, Probe Sequence
ggttgcgcgtagttgctaacagcaa

SEQ ID NO: 265326 - DNA, 25 bp, Probe Sequence
ggttcctttgatagccattcagtga

SEQ ID NO: 265327 - DNA, 25 bp, Probe Sequence
ggttctttttgacctgttgacaaat

SEQ ID NO: 265328 - DNA, 25 bp, Probe Sequence
ggttctttttgacctgttgacaaat

SEQ ID NO: 265329 - DNA, 25 bp, Probe Sequence
ggttcctgttgtgctcttgtaaaag

SEQ ID NO: 265330 - DNA, 25 bp, Probe Sequence
ggttcccttgtgagcttgaatcaac

SEQ ID NO: 265331 - DNA, 25 bp, Probe Sequence
ggttaagctttgacactggaatgag

SEQ ID NO: 265332 - DNA, 25 bp, Probe Sequence
ggatttagcagtaaactgagagtag

SEQ ID NO: 265333 - DNA, 25 bp, Probe Sequence
ggatttgtcctacagcttagtattg

SEQ ID NO: 265334 - DNA, 25 bp, Probe Sequence
ggattgttttgattagttagtatgc

SEQ ID NO: 265335 - DNA, 25 bp, Probe Sequence
ggttgttgccgtaatagtatattgc

SEQ ID NO: 265336 - DNA, 25 bp, Probe Sequence
ggttcccacaatcataggtatcagc

SEQ ID NO: 265337 - DNA, 25 bp, Probe Sequence
ggttaccaaagccaaggagagagca

SEQ ID NO: 265338 - DNA, 25 bp, Probe Sequence
ggatgtacaaacctccagggaacct

SEQ ID NO: 265339 - DNA, 25 bp, Probe Sequence
ggattaaaagcagtctcggaaacac

SEQ ID NO: 265340 - DNA, 25 bp, Probe Sequence
ggattggataacttcgtgataaacc

SEQ ID NO: 265341 - DNA, 25 bp, Probe Sequence
ggttctgtaatatttgggcaatgac

SEQ ID NO: 265342 - DNA, 25 bp, Probe Sequence
ggttatgttgaattttggtcagatg

SEQ ID NO: 265343 - DNA, 25 bp, Probe Sequence
ggttatgttgtgtgtgtgcgtgagt

SEQ ID NO: 265344 - DNA, 25 bp, Probe Sequence
ggttatgttgtgtgtgtgcgtgagt

SEQ ID NO: 265345 - DNA, 25 bp, Probe Sequence
ggttatgttgtgtgtgtgcgtgagt

SEQ ID NO: 265346 - DNA, 25 bp, Probe Sequence
ggttcattcttttgtgttgtagttt

SEQ ID NO: 265347 - DNA, 25 bp, Probe Sequence
ggttattctctttttttgtggctat

SEQ ID NO: 265348 - DNA, 25 bp, Probe Sequence
ggttgttttattttctgtatgactt

SEQ ID NO: 265349 - DNA, 25 bp, Probe Sequence
ggttgttcaggttttctgttgactt

SEQ ID NO: 265350 - DNA, 25 bp, Probe Sequence
ggttactcagagtgtgacatggtac

SEQ ID NO: 265351 - DNA, 25 bp, Probe Sequence
ggttaccaaatcggccaagaagctc

SEQ ID NO: 265352 - DNA, 25 bp, Probe Sequence
ggattaccagtaaccaccagaacaa

SEQ ID NO: 265353 - DNA, 25 bp, Probe Sequence
ggatctaacgaaatcacaacgtaac

SEQ ID NO: 265354 - DNA, 25 bp, Probe Sequence
ggttacaggatagcaaatatggaat

SEQ ID NO: 265355 - DNA, 25 bp, Probe Sequence
ggataccgcagctaggaataatgga

SEQ ID NO: 265356 - DNA, 25 bp, Probe Sequence
ggttccatgccaagtaacagcagag

SEQ ID NO: 265357 - DNA, 25 bp, Probe Sequence
ggttccagcagatatatgcacgaca

SEQ ID NO: 265358 - DNA, 25 bp, Probe Sequence
ggttcccagaaatgacgcaagttgt

SEQ ID NO: 265359 - DNA, 25 bp, Probe Sequence
ggttccccaagatacgctgaagtgt

SEQ ID NO: 265360 - DNA, 25 bp, Probe Sequence
ggttctcccaaaccaagtatactgt

SEQ ID NO: 265361 - DNA, 25 bp, Probe Sequence
ggatctgtcctataacaagcttaaa

SEQ ID NO: 265362 - DNA, 25 bp, Probe Sequence
ggatgacacttacaaaagctttcaa

SEQ ID NO: 265363 - DNA, 25 bp, Probe Sequence
ggttacattgaatactacatatgtc

SEQ ID NO: 265364 - DNA, 25 bp, Probe Sequence
ggaaagtagtatctcaacaatctgg

SEQ ID NO: 265365 - DNA, 25 bp, Probe Sequence
ggatgaactatttaaacccactggg

SEQ ID NO: 265366 - DNA, 25 bp, Probe Sequence
ggatagcagttcctaatacctactt

SEQ ID NO: 265367 - DNA, 25 bp, Probe Sequence
ggatgtcgtggaccaaacgccagaa

SEQ ID NO: 265368 - DNA, 25 bp, Probe Sequence
ggatcttctggacagacaaccgtga

SEQ ID NO: 265369 - DNA, 25 bp, Probe Sequence
ggatctgtagtgatatcccctcttt

SEQ ID NO: 265370 - DNA, 25 bp, Probe Sequence
ggatattagtcatcatcacgccgtt

SEQ ID NO: 265371 - DNA, 25 bp, Probe Sequence
ggatatcgtctttcatcacgttctc

SEQ ID NO: 265372 - DNA, 25 bp, Probe Sequence
ggttcgtgcacaacatagcttctgt

SEQ ID NO: 265373 - DNA, 25 bp, Probe Sequence
ggttcgtgcacaacatagcttctgt

SEQ ID NO: 265374 - DNA, 25 bp, Probe Sequence
ggttcagtcttaaatgcctgcatgg

SEQ ID NO: 265375 - DNA, 25 bp, Probe Sequence
ggttcgggtatattcagcatgcagc

SEQ ID NO: 265376 - DNA, 25 bp, Probe Sequence
ggttggggataagtcgctggcattt

SEQ ID NO: 265377 - DNA, 25 bp, Probe Sequence
ggttcagctgaaacagtcctggact

SEQ ID NO: 265378 - DNA, 25 bp, Probe Sequence
ggttagatgccaccatgtagggatt

SEQ ID NO: 265379 - DNA, 25 bp, Probe Sequence
ggttatgacacacctccgtgtgatt

SEQ ID NO: 265380 - DNA, 25 bp, Probe Sequence
ggttaacagcagtcctttgtaaaca

SEQ ID NO: 265381 - DNA, 25 bp, Probe Sequence
ggttagataagtccttgtgtagcaa

SEQ ID NO: 265382 - DNA, 25 bp, Probe Sequence
ggttcatgataactgccctgaaaag

SEQ ID NO: 265383 - DNA, 25 bp, Probe Sequence
ggttcataaatggctgatttataag

SEQ ID NO: 265384 - DNA, 25 bp, Probe Sequence
ggttcatggattacttctctataaa

SEQ ID NO: 265385 - DNA, 25 bp, Probe Sequence
ggttcagcagtttcttcatcaaagg

SEQ ID NO: 265386 - DNA, 25 bp, Probe Sequence
ggatctacggagtcttctaagagat

SEQ ID NO: 265387 - DNA, 25 bp, Probe Sequence
ggatatgaacagacacttctcaaaa

SEQ ID NO: 265388 - DNA, 25 bp, Probe Sequence
ggttgacatcataggcatgacgatg

SEQ ID NO: 265389 - DNA, 25 bp, Probe Sequence
ggttgccgctgagtgtgcaggatgt

SEQ ID NO: 265390 - DNA, 25 bp, Probe Sequence
ggattgccagtgtggggatcatata

SEQ ID NO: 265391 - DNA, 25 bp, Probe Sequence
ggatatccagtctgacaaaatacgc

SEQ ID NO: 265392 - DNA, 25 bp, Probe Sequence
ggttgccattgctgacaggctaagg

SEQ ID NO: 265393 - DNA, 25 bp, Probe Sequence
ggttgaatgcatactaaggcttagg

SEQ ID NO: 265394 - DNA, 25 bp, Probe Sequence
ggttaatgcactaatcatggatttt

SEQ ID NO: 265395 - DNA, 25 bp, Probe Sequence
ggttgagtgagatgttggatattgc

SEQ ID NO: 265396 - DNA, 25 bp, Probe Sequence
ggttcctggacatttggtattctgc

SEQ ID NO: 265397 - DNA, 25 bp, Probe Sequence
ggttcctggaaaacgcagatttgca

SEQ ID NO: 265398 - DNA, 25 bp, Probe Sequence
ggttcacgtgaaagatgccaatggc

SEQ ID NO: 265399 - DNA, 25 bp, Probe Sequence
ggttcctgagaactgcttcaatgtg

SEQ ID NO: 265400 - DNA, 25 bp, Probe Sequence
ggttcttgtgaacgcaatctatttc

SEQ ID NO: 265401 - DNA, 25 bp, Probe Sequence
ggttcttgtgaacgcaatctatttc

SEQ ID NO: 265402 - DNA, 25 bp, Probe Sequence
ggttctttcagattggatttgtcct

SEQ ID NO: 265403 - DNA, 25 bp, Probe Sequence
ggttccaggcaaatggattgttcca

SEQ ID NO: 265404 - DNA, 25 bp, Probe Sequence
ggatttcacgaatggtttggcacag

SEQ ID NO: 265405 - DNA, 25 bp, Probe Sequence
ggattacatagtcaagtctctgtca

SEQ ID NO: 265406 - DNA, 25 bp, Probe Sequence
ggttgaaagtggccaatctctatca

SEQ ID NO: 265407 - DNA, 25 bp, Probe Sequence
ggattatgggtcctgcaattctaca

SEQ ID NO: 265408 - DNA, 25 bp, Probe Sequence
ggttcttgagtcctgaattcattcc

SEQ ID NO: 265409 - DNA, 25 bp, Probe Sequence
ggttcttgaacctttctattatata

SEQ ID NO: 265410 - DNA, 25 bp, Probe Sequence
ggttgcatataatctttgctctttt

SEQ ID NO: 265411 - DNA, 25 bp, Probe Sequence
ggcttgcaacaatatgggctacatt

SEQ ID NO: 265412 - DNA, 25 bp, Probe Sequence
ggttcacagcctttgtggaacattc

SEQ ID NO: 265413 - DNA, 25 bp, Probe Sequence
ggattcaccctgtgttcaaattcac

SEQ ID NO: 265414 - DNA, 25 bp, Probe Sequence
ggattcaccgtttggctcgatatta

SEQ ID NO: 265415 - DNA, 25 bp, Probe Sequence
ggattcaccgtttggctcgatatta

SEQ ID NO: 265416 - DNA, 25 bp, Probe Sequence
ggattaccgtttattccatatctgg

SEQ ID NO: 265417 - DNA, 25 bp, Probe Sequence
ggttgatgccttttttttcatgaca

SEQ ID NO: 265418 - DNA, 25 bp, Probe Sequence
ggttgttttagccttattgcacacc

SEQ ID NO: 265419 - DNA, 25 bp, Probe Sequence
ggattgtttcaaccttttcactaag

SEQ ID NO: 265420 - DNA, 25 bp, Probe Sequence
ggatatgtatcgatgccttttagtt

SEQ ID NO: 265421 - DNA, 25 bp, Probe Sequence
ggatttctggatgattttgtagttc

SEQ ID NO: 265422 - DNA, 25 bp, Probe Sequence
ggatcttacgatgacttttaactca

SEQ ID NO: 265423 - DNA, 25 bp, Probe Sequence
ggatcctcagtatagccggtgaacc

SEQ ID NO: 265424 - DNA, 25 bp, Probe Sequence
ggttctcagtgtcagccacgatgag

SEQ ID NO: 265425 - DNA, 25 bp, Probe Sequence
ggttccagtgggccaaggttgtgcc

SEQ ID NO: 265426 - DNA, 25 bp, Probe Sequence
ggttcaagccttccagggatttgcc

SEQ ID NO: 265427 - DNA, 25 bp, Probe Sequence
ggattctacgattccggtttgctcc

SEQ ID NO: 265428 - DNA, 25 bp, Probe Sequence
ggaggaacaactgtggaattgccac

SEQ ID NO: 265429 - DNA, 25 bp, Probe Sequence
ggaggaacaactgtggaattgccac

SEQ ID NO: 265430 - DNA, 25 bp, Probe Sequence
ggatcgaaacctgccagacatgatg

SEQ ID NO: 265431 - DNA, 25 bp, Probe Sequence
ggatgccaaagcctgctcaagttat

SEQ ID NO: 265432 - DNA, 25 bp, Probe Sequence
ggttcaagagccctctgacttgtga

SEQ ID NO: 265433 - DNA, 25 bp, Probe Sequence
ggttccagagcccaaaatcattgat

SEQ ID NO: 265434 - DNA, 25 bp, Probe Sequence
ggttccagagcccaaaatcattgat

SEQ ID NO: 265435 - DNA, 25 bp, Probe Sequence
ggttcatcgacaagaagattgcata

SEQ ID NO: 265436 - DNA, 25 bp, Probe Sequence
ggttgcacgagccagaaatcttctg

SEQ ID NO: 265437 - DNA, 25 bp, Probe Sequence
ggttgctttgctgaatgtttctggg

SEQ ID NO: 265438 - DNA, 25 bp, Probe Sequence
ggttgtctccataagtcattttgcg

SEQ ID NO: 265439 - DNA, 25 bp, Probe Sequence
ggttgtctggcaaggactttgtaca

SEQ ID NO: 265440 - DNA, 25 bp, Probe Sequence
ggttgggctggatatctttgtagat

SEQ ID NO: 265441 - DNA, 25 bp, Probe Sequence
ggttgtgtgctggagttccttcaag

SEQ ID NO: 265442 - DNA, 25 bp, Probe Sequence
ggatttgtccgagaccttcaaggta

SEQ ID NO: 265443 - DNA, 25 bp, Probe Sequence
ggattttacgagtctcttgccaagg

SEQ ID NO: 265444 - DNA, 25 bp, Probe Sequence
ggatttccaccagactgtcttgagt

SEQ ID NO: 265445 - DNA, 25 bp, Probe Sequence
ggatttgggctgtaacttcttcgtt

SEQ ID NO: 265446 - DNA, 25 bp, Probe Sequence
ggatttgttaaatgttttctgtctt

SEQ ID NO: 265447 - DNA, 25 bp, Probe Sequence
ggttcattccaaatagttttgtgcc

SEQ ID NO: 265448 - DNA, 25 bp, Probe Sequence
ggttgctcatcttaatagttttctt

SEQ ID NO: 265449 - DNA, 25 bp, Probe Sequence
ggattctctcatcaaggctacaatt

SEQ ID NO: 265450 - DNA, 25 bp, Probe Sequence
ggattctctcatcaaggctacaatt

SEQ ID NO: 265451 - DNA, 25 bp, Probe Sequence
ggattccttccaatagttagatcta

SEQ ID NO: 265452 - DNA, 25 bp, Probe Sequence
ggatttatcccagagattcaaggat

SEQ ID NO: 265453 - DNA, 25 bp, Probe Sequence
ggatactgtcccttatttgaaggca

SEQ ID NO: 265454 - DNA, 25 bp, Probe Sequence
ggatgctagctactctttttaagga

SEQ ID NO: 265455 - DNA, 25 bp, Probe Sequence
ggattcagaactcattttggtggtg

SEQ ID NO: 265456 - DNA, 25 bp, Probe Sequence
ggttcaaatagcaattctttcggaa

SEQ ID NO: 265457 - DNA, 25 bp, Probe Sequence
ggttcatttacattaattatcaaaa

SEQ ID NO: 265458 - DNA, 25 bp, Probe Sequence
ggttcatctctatttaaaggaacga

SEQ ID NO: 265459 - DNA, 25 bp, Probe Sequence
ggttgatctccatgtttagtgtaaa

SEQ ID NO: 265460 - DNA, 25 bp, Probe Sequence
ggatattctccaagactatatggat

SEQ ID NO: 265461 - DNA, 25 bp, Probe Sequence
ggattgttgtgaaatttaggtgagt

SEQ ID NO: 265462 - DNA, 25 bp, Probe Sequence
ggatttattgacattgctacttgag

SEQ ID NO: 265463 - DNA, 25 bp, Probe Sequence
ggatttattgacattgctacttgag

SEQ ID NO: 265464 - DNA, 25 bp, Probe Sequence
ggatttcagggcaattgctatcgcc

SEQ ID NO: 265465 - DNA, 25 bp, Probe Sequence
ggatttcattgaaaatgcccgtctc

SEQ ID NO: 265466 - DNA, 25 bp, Probe Sequence
ggatcccaatgacaagaccaaattc

SEQ ID NO: 265467 - DNA, 25 bp, Probe Sequence
ggatacccatgactgcaagaatact

SEQ ID NO: 265468 - DNA, 25 bp, Probe Sequence
ggttcgctctactatggagatcaac

SEQ ID NO: 265469 - DNA, 25 bp, Probe Sequence
ggttcagctctctactggagttgag

SEQ ID NO: 265470 - DNA, 25 bp, Probe Sequence
ggttcattgtccggagagtatattg

SEQ ID NO: 265471 - DNA, 25 bp, Probe Sequence
ggttcagtgttttgaaaatattgac

SEQ ID NO: 265472 - DNA, 25 bp, Probe Sequence
ggattggtgtcttagtacacttgtg

SEQ ID NO: 265473 - DNA, 25 bp, Probe Sequence
ggttggttgcattacatgacacaga

SEQ ID NO: 265474 - DNA, 25 bp, Probe Sequence
ggttgatcccacctatgagatcaga

SEQ ID NO: 265475 - DNA, 25 bp, Probe Sequence
ggttgcacccacatataaaaggaga

SEQ ID NO: 265476 - DNA, 25 bp, Probe Sequence
ggttgacccagcattatttaggaat

SEQ ID NO: 265477 - DNA, 25 bp, Probe Sequence
ggttcaccacagttgtatttaagtg

SEQ ID NO: 265478 - DNA, 25 bp, Probe Sequence
ggttcaggctcgtctgtatggaaac

SEQ ID NO: 265479 - DNA, 25 bp, Probe Sequence
ggatttgactcgggccttagaactt

SEQ ID NO: 265480 - DNA, 25 bp, Probe Sequence
ggatttgacttcagccaggtgaact

SEQ ID NO: 265481 - DNA, 25 bp, Probe Sequence
ggatatttttcaatccactttagca

SEQ ID NO: 265482 - DNA, 25 bp, Probe Sequence
ggatcaatttcaaaccctgcttatg

SEQ ID NO: 265483 - DNA, 25 bp, Probe Sequence
ggatcaatttcaaaccctgcttatg

SEQ ID NO: 265484 - DNA, 25 bp, Probe Sequence
ggattgattacataggcactccttt

SEQ ID NO: 265485 - DNA, 25 bp, Probe Sequence
ggttgattcgcatagattctccaga

SEQ ID NO: 265486 - DNA, 25 bp, Probe Sequence
ggttgatcagtctaagcttcctaag

SEQ ID NO: 265487 - DNA, 25 bp, Probe Sequence
ggttgtgggcatgggcttcattgaa

SEQ ID NO: 265488 - DNA, 25 bp, Probe Sequence
ggttgcatggaaaagttcttcagtg

SEQ ID NO: 265489 - DNA, 25 bp, Probe Sequence
ggttggtgatgaaaggtctgtcctg

SEQ ID NO: 265490 - DNA, 25 bp, Probe Sequence
ggacgagcgcaaaagcgccttctcg

SEQ ID NO: 265491 - DNA, 25 bp, Probe Sequence
ggacagtggctatcggcctaatctt

SEQ ID NO: 265492 - DNA, 25 bp, Probe Sequence
ggatcaggtaaagggccccttctgc

SEQ ID NO: 265493 - DNA, 25 bp, Probe Sequence
tggtactgtacagctggctctactt

SEQ ID NO: 265494 - DNA, 25 bp, Probe Sequence
ggttcttagatttggcatctgaagc

SEQ ID NO: 265495 - DNA, 25 bp, Probe Sequence
ggattcttatatgtggcctacagcg

SEQ ID NO: 265496 - DNA, 25 bp, Probe Sequence
ggatttatatctatacctagcacca

SEQ ID NO: 265497 - DNA, 25 bp, Probe Sequence
ggttcattttgcatcactcagaccc

SEQ ID NO: 265498 - DNA, 25 bp, Probe Sequence
tactaaaatgtatcagccaaccaga

SEQ ID NO: 265499 - DNA, 25 bp, Probe Sequence
tacgtacctgggtgcctatatcgac

SEQ ID NO: 265500 - DNA, 25 bp, Probe Sequence
ttcggacggatggatccctttcgtc

SEQ ID NO: 265501 - DNA, 25 bp, Probe Sequence
tgtaggacggggtggtttcagttca

SEQ ID NO: 265502 - DNA, 25 bp, Probe Sequence
tgaaggacccgtatgtttccagttt

SEQ ID NO: 265503 - DNA, 25 bp, Probe Sequence
tgaaggacccttgtttacacatacc

SEQ ID NO: 265504 - DNA, 25 bp, Probe Sequence
tggggaccctgagatagacaaaaaa

SEQ ID NO: 265505 - DNA, 25 bp, Probe Sequence
ggaggattaccagtaaccaccagaa

SEQ ID NO: 265506 - DNA, 25 bp, Probe Sequence
ggaggactttgagaaagccgcagga

SEQ ID NO: 265507 - DNA, 25 bp, Probe Sequence
ggagaacttcctatactacgaggag

SEQ ID NO: 265508 - DNA, 25 bp, Probe Sequence
ggataaatgatcacttactggggaa

SEQ ID NO: 265509 - DNA, 25 bp, Probe Sequence
ggatcaaaaacctgatgccttggca

SEQ ID NO: 265510 - DNA, 25 bp, Probe Sequence
ggatcagatcagccagccatgagac

SEQ ID NO: 265511 - DNA, 25 bp, Probe Sequence
ggataacacggcgatgaacgtctta

SEQ ID NO: 265512 - DNA, 25 bp, Probe Sequence
ggatacaacagggaccaatttattt

SEQ ID NO: 265513 - DNA, 25 bp, Probe Sequence
ggattcaagcaaggcccatatattg

SEQ ID NO: 265514 - DNA, 25 bp, Probe Sequence
ggatgtcaaagttcaggtaatgggt

SEQ ID NO: 265515 - DNA, 25 bp, Probe Sequence
ggatgtaactggagagctacgggca

SEQ ID NO: 265516 - DNA, 25 bp, Probe Sequence
ggattacactggctgcagtacatca

SEQ ID NO: 265517 - DNA, 25 bp, Probe Sequence
ggatttcctgtgctgttacactacc

SEQ ID NO: 265518 - DNA, 25 bp, Probe Sequence
ggatttcctgtgctgttacactacc

SEQ ID NO: 265519 - DNA, 25 bp, Probe Sequence
ggatttatagtaccttatactaagg

SEQ ID NO: 265520 - DNA, 25 bp, Probe Sequence
ggacgttcagtctcatttattaaaa

SEQ ID NO: 265521 - DNA, 25 bp, Probe Sequence
ggatcctaagactgttgcctttaaa

SEQ ID NO: 265522 - DNA, 25 bp, Probe Sequence
ggccacgaagcgtgttactttgaaa

SEQ ID NO: 265523 - DNA, 25 bp, Probe Sequence
ggagggaatctgcggtactttgagc

SEQ ID NO: 265524 - DNA, 25 bp, Probe Sequence
ggatggggtatgaggtttcctagca

SEQ ID NO: 265525 - DNA, 25 bp, Probe Sequence
ggatcgtgggtcagggacaccgaga

SEQ ID NO: 265526 - DNA, 25 bp, Probe Sequence
ggttgtgggtctggaaacctggcag

SEQ ID NO: 265527 - DNA, 25 bp, Probe Sequence
ggattgtgggtcagtcacaacaagc

SEQ ID NO: 265528 - DNA, 25 bp, Probe Sequence
ggttctctccgcaagtataaaagca

SEQ ID NO: 265529 - DNA, 25 bp, Probe Sequence
ggatttcgcctaagtgatattacag

SEQ ID NO: 265530 - DNA, 25 bp, Probe Sequence
ggatttggctctttgggttgcagga

SEQ ID NO: 265531 - DNA, 25 bp, Probe Sequence
ggatttgagctcataggaacaggta

SEQ ID NO: 265532 - DNA, 25 bp, Probe Sequence
ggattgcttgacatcaggagacttg

SEQ ID NO: 265533 - DNA, 25 bp, Probe Sequence
ggttgttcctgattctgaacattgc

SEQ ID NO: 265534 - DNA, 25 bp, Probe Sequence
ggattttctctcactgaaagtgctt

SEQ ID NO: 265535 - DNA, 25 bp, Probe Sequence
ggattttctgatgtctgacgaggtg

SEQ ID NO: 265536 - DNA, 25 bp, Probe Sequence
ggatttttcatcttctaccgtatgt

SEQ ID NO: 265537 - DNA, 25 bp, Probe Sequence
ggttcttggtgctgtacctttgaga

SEQ ID NO: 265538 - DNA, 25 bp, Probe Sequence
ggttggggctgcaaggatgccttta

SEQ ID NO: 265539 - DNA, 25 bp, Probe Sequence
ggttggctggtcactgatggttata

SEQ ID NO: 265540 - DNA, 25 bp, Probe Sequence
ggttgttttgcaccgagtgtggaag

SEQ ID NO: 265541 - DNA, 25 bp, Probe Sequence
ggttggaaggatcctggttggaagg

SEQ ID NO: 265542 - DNA, 25 bp, Probe Sequence
ggatttgggaatcctagcttggctg

SEQ ID NO: 265543 - DNA, 25 bp, Probe Sequence
ggattatggatgcggttgcttgcgt

SEQ ID NO: 265544 - DNA, 25 bp, Probe Sequence
ggattaggaggtcctcgtgctcgta

SEQ ID NO: 265545 - DNA, 25 bp, Probe Sequence
ggatttccgtctctggtgtagctga

SEQ ID NO: 265546 - DNA, 25 bp, Probe Sequence
ggataccccattctgaggaacaaaa

SEQ ID NO: 265547 - DNA, 25 bp, Probe Sequence
ggatatgaatccagaagggaacaag

SEQ ID NO: 265548 - DNA, 25 bp, Probe Sequence
ggattgagtccttgcaacagaaacc

SEQ ID NO: 265549 - DNA, 25 bp, Probe Sequence
ggattgtgtcgtgccaatgagaaca

SEQ ID NO: 265550 - DNA, 25 bp, Probe Sequence
ggattgtcacaagttcagctggaac

SEQ ID NO: 265551 - DNA, 25 bp, Probe Sequence
ggttgatctataaacactgtcagac

SEQ ID NO: 265552 - DNA, 25 bp, Probe Sequence
ggttcttcatattccagagtcaccc

SEQ ID NO: 265553 - DNA, 25 bp, Probe Sequence
ggattttaacacatagctacaccaa

SEQ ID NO: 265554 - DNA, 25 bp, Probe Sequence
ggttctagtaccacagataacacac

SEQ ID NO: 265555 - DNA, 25 bp, Probe Sequence
ggttctcagaagccaaaatacacaa

SEQ ID NO: 265556 - DNA, 25 bp, Probe Sequence
ggttctcaacagacccagtgagccc

SEQ ID NO: 265557 - DNA, 25 bp, Probe Sequence
ggttctgaaatgtactgcgggagcc

SEQ ID NO: 265558 - DNA, 25 bp, Probe Sequence
ggttctatagatgccatggggagac

SEQ ID NO: 265559 - DNA, 25 bp, Probe Sequence
ggttctgatatggactaggagagag

SEQ ID NO: 265560 - DNA, 25 bp, Probe Sequence
ggatccagacaggagtagtaagctg

SEQ ID NO: 265561 - DNA, 25 bp, Probe Sequence
ggatcaagagctggaatagctactc

SEQ ID NO: 265562 - DNA, 25 bp, Probe Sequence
ggatatggtgcaaaatcagcctcac

SEQ ID NO: 265563 - DNA, 25 bp, Probe Sequence
ggatttgtgcgagatgcagcctcag

SEQ ID NO: 265564 - DNA, 25 bp, Probe Sequence
ggatattgtcccgagatgtgtcagg

SEQ ID NO: 265565 - DNA, 25 bp, Probe Sequence
ggttgttcctgcagtgctgtgagga

SEQ ID NO: 265566 - DNA, 25 bp, Probe Sequence
ggttgttcctgcagtgctgtgagga

SEQ ID NO: 265567 - DNA, 25 bp, Probe Sequence
ggttggtgactgaggcagcaagaaa

SEQ ID NO: 265568 - DNA, 25 bp, Probe Sequence
ggttcgtgtctttggcatcaacaaa

SEQ ID NO: 265569 - DNA, 25 bp, Probe Sequence
ggttctgtgttgcaggatttgcata

SEQ ID NO: 265570 - DNA, 25 bp, Probe Sequence
ggttgtgtcttgtagccagtatgct

SEQ ID NO: 265571 - DNA, 25 bp, Probe Sequence
ggattgtgtctttccctgttgaaaa

SEQ ID NO: 265572 - DNA, 25 bp, Probe Sequence
ggatactttctagcttgtgaaaaag

SEQ ID NO: 265573 - DNA, 25 bp, Probe Sequence
ggatttttgccagtgcttgtaagga

SEQ ID NO: 265574 - DNA, 25 bp, Probe Sequence
ggattattactgtagttgaaaggag

SEQ ID NO: 265575 - DNA, 25 bp, Probe Sequence
ggattttgcattcagtgtagttgga

SEQ ID NO: 265576 - DNA, 25 bp, Probe Sequence
ggattttgattcctatctcgttcaa

SEQ ID NO: 265577 - DNA, 25 bp, Probe Sequence
ggttgtaattaatttctgctacaga

SEQ ID NO: 265578 - DNA, 25 bp, Probe Sequence
ggttggataatcaaattcaggaaat

SEQ ID NO: 265579 - DNA, 25 bp, Probe Sequence
ggttgcagaaatagaacatgcggaa

SEQ ID NO: 265580 - DNA, 25 bp, Probe Sequence
ggttccaataagaatccaagaaaca

SEQ ID NO: 265581 - DNA, 25 bp, Probe Sequence
ggattccaaaagcctccaagaatga

SEQ ID NO: 265582 - DNA, 25 bp, Probe Sequence
ggatttttcaagcctccaaacatca

SEQ ID NO: 265583 - DNA, 25 bp, Probe Sequence
ggatcaatggtcttgttgccggaaa

SEQ ID NO: 265584 - DNA, 25 bp, Probe Sequence
ggattggctgtaatttgcctcgaag

SEQ ID NO: 265585 - DNA, 25 bp, Probe Sequence
ggattgggaaagaagttgctaagtg

SEQ ID NO: 265586 - DNA, 25 bp, Probe Sequence
ggttgggatcaggggtaggaatgga

SEQ ID NO: 265587 - DNA, 25 bp, Probe Sequence
ggttgggagatgtggctggaaagta

SEQ ID NO: 265588 - DNA, 25 bp, Probe Sequence
ggttgcagtgaatgggctgggggtg

SEQ ID NO: 265589 - DNA, 25 bp, Probe Sequence
ggttgagctgaatgagggccgagat

SEQ ID NO: 265590 - DNA, 25 bp, Probe Sequence
ggttggtgattggcaggatcctggt

SEQ ID NO: 265591 - DNA, 25 bp, Probe Sequence
ggttgctctattggactaccgtgag

SEQ ID NO: 265592 - DNA, 25 bp, Probe Sequence
ggttgctctattggactaccgtgag

SEQ ID NO: 265593 - DNA, 25 bp, Probe Sequence
ggttgtatttggaaacgcggagtga

SEQ ID NO: 265594 - DNA, 25 bp, Probe Sequence
ggttgctgttgggtagacaggtggg

SEQ ID NO: 265595 - DNA, 25 bp, Probe Sequence
ggttctggctgtgtgatagcggagg

SEQ ID NO: 265596 - DNA, 25 bp, Probe Sequence
ggttctgactggcgtgtgggagacc

SEQ ID NO: 265597 - DNA, 25 bp, Probe Sequence
ggttgcattctgtgcatttgggcaa

SEQ ID NO: 265598 - DNA, 25 bp, Probe Sequence
ggttgatcctcttgtactgggagag

SEQ ID NO: 265599 - DNA, 25 bp, Probe Sequence
ggattctcctccctacagtgaggat

SEQ ID NO: 265600 - DNA, 25 bp, Probe Sequence
ggagctgacttcgccaagtggcgtt

SEQ ID NO: 265601 - DNA, 25 bp, Probe Sequence
ggagctgacttcgccaagtggcgtt

SEQ ID NO: 265602 - DNA, 25 bp, Probe Sequence
ggattacttcatgcgcaatgctgac

SEQ ID NO: 265603 - DNA, 25 bp, Probe Sequence
ggattaatgctactctccattgcac

SEQ ID NO: 265604 - DNA, 25 bp, Probe Sequence
ggattcaatggactcatccatttgt

SEQ ID NO: 265605 - DNA, 25 bp, Probe Sequence
ggattagtgggctattttctgctag

SEQ ID NO: 265606 - DNA, 25 bp, Probe Sequence
ggattcgtaggattgatttcagatt

SEQ ID NO: 265607 - DNA, 25 bp, Probe Sequence
ggattaccaggtacatttgatgtta

SEQ ID NO: 265608 - DNA, 25 bp, Probe Sequence
ggatattgcctgattctgtggactg

SEQ ID NO: 265609 - DNA, 25 bp, Probe Sequence
ggttggctttgttgggtgagcttgt

SEQ ID NO: 265610 - DNA, 25 bp, Probe Sequence
ggttgagctttttttatgtgcttat

SEQ ID NO: 265611 - DNA, 25 bp, Probe Sequence
ggttgagatgtgtttatatctggtt

SEQ ID NO: 265612 - DNA, 25 bp, Probe Sequence
ggttgcaagatgtttttttgtggat

SEQ ID NO: 265613 - DNA, 25 bp, Probe Sequence
ggttgcaagctttcgttatctgtga

SEQ ID NO: 265614 - DNA, 25 bp, Probe Sequence
ggttgtagcatgggcagtttcagtt

SEQ ID NO: 265615 - DNA, 25 bp, Probe Sequence
ggttgagcacaggctggtttaccat

SEQ ID NO: 265616 - DNA, 25 bp, Probe Sequence
ggattcatcactgtggtgttctcca

SEQ ID NO: 265617 - DNA, 25 bp, Probe Sequence
ggattcagactaaggagcctctccc

SEQ ID NO: 265618 - DNA, 25 bp, Probe Sequence
ggattcagactaaggagcctctccc

SEQ ID NO: 265619 - DNA, 25 bp, Probe Sequence
ggatcgcaggtatgcagacctcaca

SEQ ID NO: 265620 - DNA, 25 bp, Probe Sequence
ggattgctgaggtggatcctcactg

SEQ ID NO: 265621 - DNA, 25 bp, Probe Sequence
ggttgatgtggttcgaactcgcatg

SEQ ID NO: 265622 - DNA, 25 bp, Probe Sequence
ggattgtgcagaccacgaaaggctg

SEQ ID NO: 265623 - DNA, 25 bp, Probe Sequence
ggattgtgcagaccacgaaaggctg

SEQ ID NO: 265624 - DNA, 25 bp, Probe Sequence
ggatctggtgcctccagacatgtgc

SEQ ID NO: 265625 - DNA, 25 bp, Probe Sequence
ggattcgttagtgatgagcagctgc

SEQ ID NO: 265626 - DNA, 25 bp, Probe Sequence
ggattagtgctagaatagagctatg

SEQ ID NO: 265627 - DNA, 25 bp, Probe Sequence
ggatcgccatccggatcacggcaat

SEQ ID NO: 265628 - DNA, 25 bp, Probe Sequence
ggatagctcattaagaagtgcagca

SEQ ID NO: 265629 - DNA, 25 bp, Probe Sequence
ggatcgcttcttaggagtatcctaa

SEQ ID NO: 265630 - DNA, 25 bp, Probe Sequence
ggatcttgactgagcggtgactctt

SEQ ID NO: 265631 - DNA, 25 bp, Probe Sequence
ggatcaatggtgccacggagcacat

SEQ ID NO: 265632 - DNA, 25 bp, Probe Sequence
ggataatctggcaaatgagacagca

SEQ ID NO: 265633 - DNA, 25 bp, Probe Sequence
ggatttctgatcagtgttgcaaaaa

SEQ ID NO: 265634 - DNA, 25 bp, Probe Sequence
ggatttcttgctccgattgcaaaat

SEQ ID NO: 265635 - DNA, 25 bp, Probe Sequence
ggatcttcttgttccaaccaaagtg

SEQ ID NO: 265636 - DNA, 25 bp, Probe Sequence
ggatctcacattttcttaaaaagtg

SEQ ID NO: 265637 - DNA, 25 bp, Probe Sequence
ggatctccggatattagtagcaagg

SEQ ID NO: 265638 - DNA, 25 bp, Probe Sequence
ggatctcccgaaattggccagtgac

SEQ ID NO: 265639 - DNA, 25 bp, Probe Sequence
ggattcccacgtatgcggagtgagc

SEQ ID NO: 265640 - DNA, 25 bp, Probe Sequence
ggttgcccctgtacgtggattgggc

SEQ ID NO: 265641 - DNA, 25 bp, Probe Sequence
ggttccagggtgacgtgaaggggca

SEQ ID NO: 265642 - DNA, 25 bp, Probe Sequence
ggatccccaacaacgtgaagacggc

SEQ ID NO: 265643 - DNA, 25 bp, Probe Sequence
ggatccaagaaatcatggagaactg

SEQ ID NO: 265644 - DNA, 25 bp, Probe Sequence
ggattggaaaatccagcgtgacctc

SEQ ID NO: 265645 - DNA, 25 bp, Probe Sequence
ggatttgctcaaggacacgaacctt

SEQ ID NO: 265646 - DNA, 25 bp, Probe Sequence
ggattgtggcattcacgcacgagaa

SEQ ID NO: 265647 - DNA, 25 bp, Probe Sequence
ggattcggccactcaggcatgaagg

SEQ ID NO: 265648 - DNA, 25 bp, Probe Sequence
ggatcatcacctacttcaactaatg

SEQ ID NO: 265649 - DNA, 25 bp, Probe Sequence
ggatcaaactgcatccaaaccagtg

SEQ ID NO: 265650 - DNA, 25 bp, Probe Sequence
ggatcaggacttgccataactactt

SEQ ID NO: 265651 - DNA, 25 bp, Probe Sequence
ggatcaggtttcatgctagagctaa

SEQ ID NO: 265652 - DNA, 25 bp, Probe Sequence
ggatagtcttgcttcttgaggtaga

SEQ ID NO: 265653 - DNA, 25 bp, Probe Sequence
ggatattcaatgttcatggatagga

SEQ ID NO: 265654 - DNA, 25 bp, Probe Sequence
ggatagatctattgttggcaagggt

SEQ ID NO: 265655 - DNA, 25 bp, Probe Sequence
ggatcagtggatattaagatgaggt

SEQ ID NO: 265656 - DNA, 25 bp, Probe Sequence
ggaagggaccgctcagttatgtgaa

SEQ ID NO: 265657 - DNA, 25 bp, Probe Sequence
ggaatgggacccacgtggagtaggt

SEQ ID NO: 265658 - DNA, 25 bp, Probe Sequence
ggaggctggactgtacgggagccac

SEQ ID NO: 265659 - DNA, 25 bp, Probe Sequence
ggataaggagggaaggtggaccaga

SEQ ID NO: 265660 - DNA, 25 bp, Probe Sequence
ggataaggagtggatgcccgtcacc

SEQ ID NO: 265661 - DNA, 25 bp, Probe Sequence
ggataagggacaagctgcctctccc

SEQ ID NO: 265662 - DNA, 25 bp, Probe Sequence
ggattaaggcaatctgcttctactc

SEQ ID NO: 265663 - DNA, 25 bp, Probe Sequence
ggttggggcagaattgcttgaaccc

SEQ ID NO: 265664 - DNA, 25 bp, Probe Sequence
ggttggggcagaattgcttgaaccc

SEQ ID NO: 265665 - DNA, 25 bp, Probe Sequence
ggttggagcctgctctttgaactcc

SEQ ID NO: 265666 - DNA, 25 bp, Probe Sequence
ggttgtggtctgaagctttgaagcg

SEQ ID NO: 265667 - DNA, 25 bp, Probe Sequence
ggttggtgtggattctgttgaagga

SEQ ID NO: 265668 - DNA, 25 bp, Probe Sequence
ggttggtgggcatgaagaggaggta

SEQ ID NO: 265669 - DNA, 25 bp, Probe Sequence
ggattcgggcgaagacaaacggatg

SEQ ID NO: 265670 - DNA, 25 bp, Probe Sequence
ggattcccggatagcaacctcggga

SEQ ID NO: 265671 - DNA, 25 bp, Probe Sequence
ggataccggtttgactcacgggatt

SEQ ID NO: 265672 - DNA, 25 bp, Probe Sequence
ggattacggtttgactcacggggat

SEQ ID NO: 265673 - DNA, 25 bp, Probe Sequence
ggattatgcgggtttgactcacggg

SEQ ID NO: 265674 - DNA, 25 bp, Probe Sequence
ggatgtatggtttttatcaactgtc

SEQ ID NO: 265675 - DNA, 25 bp, Probe Sequence
ggagtgacgtatttttcacctgttt

SEQ ID NO: 265676 - DNA, 25 bp, Probe Sequence
ggagatgcctgtgcagttccaggtg

SEQ ID NO: 265677 - DNA, 25 bp, Probe Sequence
ggatatcctgggtattgccaaatgc

SEQ ID NO: 265678 - DNA, 25 bp, Probe Sequence
ggataaaggtgctgatgttaatgcc

SEQ ID NO: 265679 - DNA, 25 bp, Probe Sequence
ggattaaggtcaccgttgcaggcct

SEQ ID NO: 265680 - DNA, 25 bp, Probe Sequence
ggattaagactgttaaatcagccag

SEQ ID NO: 265681 - DNA, 25 bp, Probe Sequence
ggattacaggcgtgagccactgcgc

SEQ ID NO: 265682 - DNA, 25 bp, Probe Sequence
ggattacaggcgtgagccactgcgc

SEQ ID NO: 265683 - DNA, 25 bp, Probe Sequence
ggattacaggcgtgagccactgcgc

SEQ ID NO: 265684 - DNA, 25 bp, Probe Sequence
ggattacaggtgtgagccactgcgc

SEQ ID NO: 265685 - DNA, 25 bp, Probe Sequence
ggattacaggtatgagccaccgcgc

SEQ ID NO: 265686 - DNA, 25 bp, Probe Sequence
ggattacaggtgtgcaccaccacgc

SEQ ID NO: 265687 - DNA, 25 bp, Probe Sequence
ggattacaggcgtgagccaccacac

SEQ ID NO: 265688 - DNA, 25 bp, Probe Sequence
ggattacaagcgtgagccaccgcac

SEQ ID NO: 265689 - DNA, 25 bp, Probe Sequence
ggatccaaagccttgaggccaccat

SEQ ID NO: 265690 - DNA, 25 bp, Probe Sequence
ggttgcagtgagccatgatagcgcc

SEQ ID NO: 265691 - DNA, 25 bp, Probe Sequence
ggttgcagtgagccaggatcgcacc

SEQ ID NO: 265692 - DNA, 25 bp, Probe Sequence
ggttgcagtgagccaagatcgcacc

SEQ ID NO: 265693 - DNA, 25 bp, Probe Sequence
ggttgcagtgagccaagatcatgcc

SEQ ID NO: 265694 - DNA, 25 bp, Probe Sequence
ggttgcagtgagccaagatcacgcc

SEQ ID NO: 265695 - DNA, 25 bp, Probe Sequence
ggttgcagtgagccaagatcacgcc

SEQ ID NO: 265696 - DNA, 25 bp, Probe Sequence
ggttgcagtgagctgagatcgtgct

SEQ ID NO: 265697 - DNA, 25 bp, Probe Sequence
ggttggctacgaaatgcttgctcag

SEQ ID NO: 265698 - DNA, 25 bp, Probe Sequence
ggttgactacaagtcttgtgctcat

SEQ ID NO: 265699 - DNA, 25 bp, Probe Sequence
ggatagacatagacactcctgtgtc

SEQ ID NO: 265700 - DNA, 25 bp, Probe Sequence
ggatcaaacagaagcagccgtgggc

SEQ ID NO: 265701 - DNA, 25 bp, Probe Sequence
ggatcataacggagcccggagggcg

SEQ ID NO: 265702 - DNA, 25 bp, Probe Sequence
ggatgctaacaggggcgccgtaaag

SEQ ID NO: 265703 - DNA, 25 bp, Probe Sequence
ggatatgagccggtggccgtgttag

SEQ ID NO: 265704 - DNA, 25 bp, Probe Sequence
ggatgacaccgaaaggggttcagga

SEQ ID NO: 265705 - DNA, 25 bp, Probe Sequence
ggatgacaccgaaaggggttcagga

SEQ ID NO: 265706 - DNA, 25 bp, Probe Sequence
ggattaaatgattggataggttcaa

SEQ ID NO: 265707 - DNA, 25 bp, Probe Sequence
ggattcacacactggtatctgtaaa

SEQ ID NO: 265708 - DNA, 25 bp, Probe Sequence
ggatttcgacaaggtcattgtgccc

SEQ ID NO: 265709 - DNA, 25 bp, Probe Sequence
ggattttgacaacttcatcagctgc

SEQ ID NO: 265710 - DNA, 25 bp, Probe Sequence
ggattatggaaacttcgctgtcccc

SEQ ID NO: 265711 - DNA, 25 bp, Probe Sequence
ggatttgggatactgctctcttccc

SEQ ID NO: 265712 - DNA, 25 bp, Probe Sequence
ggataagggatactcagcttgtacc

SEQ ID NO: 265713 - DNA, 25 bp, Probe Sequence
ggataagggatactcagcttgtacc

SEQ ID NO: 265714 - DNA, 25 bp, Probe Sequence
ggatcgaggagatgccctctgaacg

SEQ ID NO: 265715 - DNA, 25 bp, Probe Sequence
ggattggggctagctcgatgacact

SEQ ID NO: 265716 - DNA, 25 bp, Probe Sequence
ggattctggtccgagccagtgactc

SEQ ID NO: 265717 - DNA, 25 bp, Probe Sequence
ggatcagtttgcagcagcaagtaca

SEQ ID NO: 265718 - DNA, 25 bp, Probe Sequence
ggatcagtttgattactatgtacat

SEQ ID NO: 265719 - DNA, 25 bp, Probe Sequence
ggatgcatatttgtatcgttaccta

SEQ ID NO: 265720 - DNA, 25 bp, Probe Sequence
ggagatataaacaacagtaaccaac

SEQ ID NO: 265721 - DNA, 25 bp, Probe Sequence
tgggattaataatacttacctacct

SEQ ID NO: 265722 - DNA, 25 bp, Probe Sequence
ttggtaacaaacgccaccttacact

SEQ ID NO: 265723 - DNA, 25 bp, Probe Sequence
ggataaaaagactacccctctgaag

SEQ ID NO: 265724 - DNA, 25 bp, Probe Sequence
ggatatgaaaagacccttctcaaaa

SEQ ID NO: 265725 - DNA, 25 bp, Probe Sequence
ggattgaaaggtgcattttccccat

SEQ ID NO: 265726 - DNA, 25 bp, Probe Sequence
ggttggcagttaactctttcaccct

SEQ ID NO: 265727 - DNA, 25 bp, Probe Sequence
ggttgtgaaccaactgccttaacct

SEQ ID NO: 265728 - DNA, 25 bp, Probe Sequence
ggttgtgaaataactccccataaat

SEQ ID NO: 265729 - DNA, 25 bp, Probe Sequence
ggatttcacaaaacactcctataaa

SEQ ID NO: 265730 - DNA, 25 bp, Probe Sequence
ggattgccacagttatcactgctta

SEQ ID NO: 265731 - DNA, 25 bp, Probe Sequence
ggattctctgtcctatacatttact

SEQ ID NO: 265732 - DNA, 25 bp, Probe Sequence
ggattcactgtactcatttggtcac

SEQ ID NO: 265733 - DNA, 25 bp, Probe Sequence
ggattcacgcaagtttcagtgtcaa

SEQ ID NO: 265734 - DNA, 25 bp, Probe Sequence
ggattcagtgcaggtttggatacat

SEQ ID NO: 265735 - DNA, 25 bp, Probe Sequence
ggatccggcaagatggcagaagtag

SEQ ID NO: 265736 - DNA, 25 bp, Probe Sequence
ggatcaactaagaaatggaaggcag

SEQ ID NO: 265737 - DNA, 25 bp, Probe Sequence
ggataactgattaccaacaaggctg

SEQ ID NO: 265738 - DNA, 25 bp, Probe Sequence
ggataactatctacctcactggttt

SEQ ID NO: 265739 - DNA, 25 bp, Probe Sequence
ggatgaacttgcagactctgcgctt

SEQ ID NO: 265740 - DNA, 25 bp, Probe Sequence
ggatgataccatcggggaccttaag

SEQ ID NO: 265741 - DNA, 25 bp, Probe Sequence
ggatcaaaagggatgacacttgggg

SEQ ID NO: 265742 - DNA, 25 bp, Probe Sequence
ggacgtaacggaggcaggttggagc

SEQ ID NO: 265743 - DNA, 25 bp, Probe Sequence
ggatctgtgcaaaggggggctgggc

SEQ ID NO: 265744 - DNA, 25 bp, Probe Sequence
ggttgatgcaacaggggacatgtcc

SEQ ID NO: 265745 - DNA, 25 bp, Probe Sequence
ggattgaaagtgtggagacaggcct

SEQ ID NO: 265746 - DNA, 25 bp, Probe Sequence
ggttgacacgtatagaatcaagttt

SEQ ID NO: 265747 - DNA, 25 bp, Probe Sequence
ggataaaaatcacaagtcggtacta

SEQ ID NO: 265748 - DNA, 25 bp, Probe Sequence
ggatcaaaaagaccactgccaggga

SEQ ID NO: 265749 - DNA, 25 bp, Probe Sequence
ggatacaaaagacatctgcaccatg

SEQ ID NO: 265750 - DNA, 25 bp, Probe Sequence
ggataacaaaaactccctcattagc

SEQ ID NO: 265751 - DNA, 25 bp, Probe Sequence
ggatgaaaaacttattcgtctaatg

SEQ ID NO: 265752 - DNA, 25 bp, Probe Sequence
ggagcaaagtacattatcttctaaa

SEQ ID NO: 265753 - DNA, 25 bp, Probe Sequence
ggagacaaaacgagacttcatttaa

SEQ ID NO: 265754 - DNA, 25 bp, Probe Sequence
ggatccaaatacgagtgtttttctt

SEQ ID NO: 265755 - DNA, 25 bp, Probe Sequence
ggattcgcaaaatggacttttcatt

SEQ ID NO: 265756 - DNA, 25 bp, Probe Sequence
ggataccctaagcaaattctctcat

SEQ ID NO: 265757 - DNA, 25 bp, Probe Sequence
ggattccctaatatgtatactatct

SEQ ID NO: 265758 - DNA, 25 bp, Probe Sequence
ggatcccttttatgtatactttaag

SEQ ID NO: 265759 - DNA, 25 bp, Probe Sequence
ggatcccctttctggtaggattgat

SEQ ID NO: 265760 - DNA, 25 bp, Probe Sequence
ggatccttagttacagtgttggtta

SEQ ID NO: 265761 - DNA, 25 bp, Probe Sequence
ggatcctgtaatcacagttttccct

SEQ ID NO: 265762 - DNA, 25 bp, Probe Sequence
ggcatacttgaaggagccctttccc

SEQ ID NO: 265763 - DNA, 25 bp, Probe Sequence
ggatatttgaactccatgcttgatg

SEQ ID NO: 265764 - DNA, 25 bp, Probe Sequence
ggatacctactggccacagttgaca

SEQ ID NO: 265765 - DNA, 25 bp, Probe Sequence
ggatactccatttaccgtgatgtga

SEQ ID NO: 265766 - DNA, 25 bp, Probe Sequence
ggatccccttctagtgaggattcaa

SEQ ID NO: 265767 - DNA, 25 bp, Probe Sequence
ggatcccctctgtctacaaatataa

SEQ ID NO: 265768 - DNA, 25 bp, Probe Sequence
ggatcccctggtcacagtgatgaag

SEQ ID NO: 265769 - DNA, 25 bp, Probe Sequence
ggatcccctggtcacagtgatgaag

SEQ ID NO: 265770 - DNA, 25 bp, Probe Sequence
ggattcttgctggtgtagagttaga

SEQ ID NO: 265771 - DNA, 25 bp, Probe Sequence
ggattctgttgaaggagagggtgag

SEQ ID NO: 265772 - DNA, 25 bp, Probe Sequence
ggttgtgttgagagggggatgcccc

SEQ ID NO: 265773 - DNA, 25 bp, Probe Sequence
ggttgggagaattggctagccatgt

SEQ ID NO: 265774 - DNA, 25 bp, Probe Sequence
ggttgaggtgaataaagctgcatgg

SEQ ID NO: 265775 - DNA, 25 bp, Probe Sequence
ggattggggtctcaaatgctgctgg

SEQ ID NO: 265776 - DNA, 25 bp, Probe Sequence
ggttggggtgggcatttgatgcggg

SEQ ID NO: 265777 - DNA, 25 bp, Probe Sequence
ggatatgggagggggtttggctgcc

SEQ ID NO: 265778 - DNA, 25 bp, Probe Sequence
ggaggcagaaccagctctttggtgc

SEQ ID NO: 265779 - DNA, 25 bp, Probe Sequence
ggaggcagaaccagctctttggtgc

SEQ ID NO: 265780 - DNA, 25 bp, Probe Sequence
ggagatcaacccacattagagtgtc

SEQ ID NO: 265781 - DNA, 25 bp, Probe Sequence
ggataagagaccacttagccttccc

SEQ ID NO: 265782 - DNA, 25 bp, Probe Sequence
ggatacagtgaaatagctaacctct

SEQ ID NO: 265783 - DNA, 25 bp, Probe Sequence
ggatcacgtagacatgtaacccagc

SEQ ID NO: 265784 - DNA, 25 bp, Probe Sequence
ggatcctatggacaggaaacccact

SEQ ID NO: 265785 - DNA, 25 bp, Probe Sequence
ggatcttaacatcaggaattctccc

SEQ ID NO: 265786 - DNA, 25 bp, Probe Sequence
ggattatgaaatgcacgacaccctg

SEQ ID NO: 265787 - DNA, 25 bp, Probe Sequence
ggattgcagaaggtacagagcctcc

SEQ ID NO: 265788 - DNA, 25 bp, Probe Sequence
ggactaaggaattctgcagcttgca

SEQ ID NO: 265789 - DNA, 25 bp, Probe Sequence
ggactaaggaattctgcagcttgca

SEQ ID NO: 265790 - DNA, 25 bp, Probe Sequence
ggatcccgaacattgctcacaatac

SEQ ID NO: 265791 - DNA, 25 bp, Probe Sequence
ggatccccaacaatgtcaagacagc

SEQ ID NO: 265792 - DNA, 25 bp, Probe Sequence
ggattcacaatttgattccacaact

SEQ ID NO: 265793 - DNA, 25 bp, Probe Sequence
ggattcagcccttcattgctaagac

SEQ ID NO: 265794 - DNA, 25 bp, Probe Sequence
ggatatgaacctcactctggagcct

SEQ ID NO: 265795 - DNA, 25 bp, Probe Sequence
ggatcaaagtctgttctggcggcat

SEQ ID NO: 265796 - DNA, 25 bp, Probe Sequence
ggagaaaggctgggtcttgggacct

SEQ ID NO: 265797 - DNA, 25 bp, Probe Sequence
ggatctaacgtgggatcttctggac

SEQ ID NO: 265798 - DNA, 25 bp, Probe Sequence
ggataaatcagtggttatttaggga

SEQ ID NO: 265799 - DNA, 25 bp, Probe Sequence
ggatactccagtcttgtctatgggg

SEQ ID NO: 265800 - DNA, 25 bp, Probe Sequence
ggattccagcagattttggcaggtg

SEQ ID NO: 265801 - DNA, 25 bp, Probe Sequence
ggatggccggggaaatggcggcttc

SEQ ID NO: 265802 - DNA, 25 bp, Probe Sequence
ggatagcctcagcgtcaacgagttc

SEQ ID NO: 265803 - DNA, 25 bp, Probe Sequence
ggatactttggagtccacacacatt

SEQ ID NO: 265804 - DNA, 25 bp, Probe Sequence
ggattgctgcatatggttctactca

SEQ ID NO: 265805 - DNA, 25 bp, Probe Sequence
ggttgtgactggctttggtgcaaat

SEQ ID NO: 265806 - DNA, 25 bp, Probe Sequence
ggatttgagttacttagggaaacat

SEQ ID NO: 265807 - DNA, 25 bp, Probe Sequence
ggatcaggtgattgagtacagggat

SEQ ID NO: 265808 - DNA, 25 bp, Probe Sequence
ggatctttataaatgacaggtaggc

SEQ ID NO: 265809 - DNA, 25 bp, Probe Sequence
ggatctttgaccagcactgtttatg

SEQ ID NO: 265810 - DNA, 25 bp, Probe Sequence
ggatcttgttggatgcacttagata

SEQ ID NO: 265811 - DNA, 25 bp, Probe Sequence
ggatcttttatggccctatgatcta

SEQ ID NO: 265812 - DNA, 25 bp, Probe Sequence
ggatatcttttggccaaagttcagc

SEQ ID NO: 265813 - DNA, 25 bp, Probe Sequence
ggatttttctcagtcaatttgccag

SEQ ID NO: 265814 - DNA, 25 bp, Probe Sequence
ggattatttcaatgttactgcactg

SEQ ID NO: 265815 - DNA, 25 bp, Probe Sequence
ggattatttcaatgttactgcactg

SEQ ID NO: 265816 - DNA, 25 bp, Probe Sequence
ggatatcatctataaggtgcctcac

SEQ ID NO: 265817 - DNA, 25 bp, Probe Sequence
ggatttgccaaatgctatggccatc

SEQ ID NO: 265818 - DNA, 25 bp, Probe Sequence
ggattgacaaaatcatgaggctcac

SEQ ID NO: 265819 - DNA, 25 bp, Probe Sequence
ggattatcaaaaactgagcagcaac

SEQ ID NO: 265820 - DNA, 25 bp, Probe Sequence
ggattgtggaaaatggagccatgac

SEQ ID NO: 265821 - DNA, 25 bp, Probe Sequence
ggttgtggcatgacatctgggtcat

SEQ ID NO: 265822 - DNA, 25 bp, Probe Sequence
ggttgtcacagttcatgaggtcaga

SEQ ID NO: 265823 - DNA, 25 bp, Probe Sequence
ggttgtcacttaatgggctgagtaa

SEQ ID NO: 265824 - DNA, 25 bp, Probe Sequence
ggattgctacttttggtgcaactat

SEQ ID NO: 265825 - DNA, 25 bp, Probe Sequence
ggttggtctttattgagcacctact

SEQ ID NO: 265826 - DNA, 25 bp, Probe Sequence
ggttggtagttgttactcattttga

SEQ ID NO: 265827 - DNA, 25 bp, Probe Sequence
ggattgggtgtttcattccatttct

SEQ ID NO: 265828 - DNA, 25 bp, Probe Sequence
tggaagggtttaatctccttttgtg

SEQ ID NO: 265829 - DNA, 25 bp, Probe Sequence
ggattgtggatgtggacttttttgt

SEQ ID NO: 265830 - DNA, 25 bp, Probe Sequence
ggttgtgggagtggagctcattttt

SEQ ID NO: 265831 - DNA, 25 bp, Probe Sequence
ggatttgggtgttagctcaattccc

SEQ ID NO: 265832 - DNA, 25 bp, Probe Sequence
ggattagacctgtggcacacttccc

SEQ ID NO: 265833 - DNA, 25 bp, Probe Sequence
ggattagaccatagttgacccatct

SEQ ID NO: 265834 - DNA, 25 bp, Probe Sequence
ggattagaatatagctaggtccaat

SEQ ID NO: 265835 - DNA, 25 bp, Probe Sequence
ggatcttgtgtacctgatggtccag

SEQ ID NO: 265836 - DNA, 25 bp, Probe Sequence
ggattgctgctgggtcatgatttcc

SEQ ID NO: 265837 - DNA, 25 bp, Probe Sequence
ggattctgaggaccagcagatggcc

SEQ ID NO: 265838 - DNA, 25 bp, Probe Sequence
ggatctgatgaaagcgccaatggtc

SEQ ID NO: 265839 - DNA, 25 bp, Probe Sequence
ggattgcatccaatgctggcagcat

SEQ ID NO: 265840 - DNA, 25 bp, Probe Sequence
ggattgcatcaagtggcatgtgctg

SEQ ID NO: 265841 - DNA, 25 bp, Probe Sequence
ggatgtctcaaagcttgtgccaaag

SEQ ID NO: 265842 - DNA, 25 bp, Probe Sequence
ggatgtctcaaagcttgtgccaaag

SEQ ID NO: 265843 - DNA, 25 bp, Probe Sequence
ggatttcagcaaggcatttaacaga

SEQ ID NO: 265844 - DNA, 25 bp, Probe Sequence
ggatactccagacagttgacaagca

SEQ ID NO: 265845 - DNA, 25 bp, Probe Sequence
ggatctcttatacagacgcaccaaa

SEQ ID NO: 265846 - DNA, 25 bp, Probe Sequence
ggatctatttgtaaaggccagcagc

SEQ ID NO: 265847 - DNA, 25 bp, Probe Sequence
ggatctttatttttagccatgcact

SEQ ID NO: 265848 - DNA, 25 bp, Probe Sequence
ggatccttatcttttaggtacctca

SEQ ID NO: 265849 - DNA, 25 bp, Probe Sequence
ggatccctctttgtgttgtagtcca

SEQ ID NO: 265850 - DNA, 25 bp, Probe Sequence
ggatcacccatatttgtttgatggt

SEQ ID NO: 265851 - DNA, 25 bp, Probe Sequence
ggatagatcctattctttgagttgt

SEQ ID NO: 265852 - DNA, 25 bp, Probe Sequence
ggattatccatcttgctaatggcct

SEQ ID NO: 265853 - DNA, 25 bp, Probe Sequence
ggatcttcctcaagagaatgccctc

SEQ ID NO: 265854 - DNA, 25 bp, Probe Sequence
ggatcttgcaactgaatctgcccgt

SEQ ID NO: 265855 - DNA, 25 bp, Probe Sequence
ggattgtgcagattgtcaactccaa

SEQ ID NO: 265856 - DNA, 25 bp, Probe Sequence
ggattgatattgctgcagaccacaa

SEQ ID NO: 265857 - DNA, 25 bp, Probe Sequence
ggattttgtgccttgagcaccaaga

SEQ ID NO: 265858 - DNA, 25 bp, Probe Sequence
ggattttgtgcctgtgcagattgca

SEQ ID NO: 265859 - DNA, 25 bp, Probe Sequence
ggattgctgcgtcctagctagagga

SEQ ID NO: 265860 - DNA, 25 bp, Probe Sequence
ggattctcaacctaacagagagaca

SEQ ID NO: 265861 - DNA, 25 bp, Probe Sequence
ggattctttctccagagcaatgctg

SEQ ID NO: 265862 - DNA, 25 bp, Probe Sequence
ggattcaagttcgaaatatggcaac

SEQ ID NO: 265863 - DNA, 25 bp, Probe Sequence
ggatcacgaggtcaggatattgaga

SEQ ID NO: 265864 - DNA, 25 bp, Probe Sequence
ggatcacgaggtcaggagatggaga

SEQ ID NO: 265865 - DNA, 25 bp, Probe Sequence
ggatcacaaggtcaggagttcgaga

SEQ ID NO: 265866 - DNA, 25 bp, Probe Sequence
ggatcacaaggtcaggagttcgaga

SEQ ID NO: 265867 - DNA, 25 bp, Probe Sequence
ggatgcccacgacaggatttggaga

SEQ ID NO: 265868 - DNA, 25 bp, Probe Sequence
ggatcccacataacactgcattgga

SEQ ID NO: 265869 - DNA, 25 bp, Probe Sequence
ggatcttcacacactctttgttaga

SEQ ID NO: 265870 - DNA, 25 bp, Probe Sequence
ggattcttacatactctttccacaa

SEQ ID NO: 265871 - DNA, 25 bp, Probe Sequence
ggattctgtaatgttcctccataca

SEQ ID NO: 265872 - DNA, 25 bp, Probe Sequence
ggatttcaaatccttcctgcttaag

SEQ ID NO: 265873 - DNA, 25 bp, Probe Sequence
ggatcataaaattttcccttgacaa

SEQ ID NO: 265874 - DNA, 25 bp, Probe Sequence
ggattaaagatccatcatcaccttc

SEQ ID NO: 265875 - DNA, 25 bp, Probe Sequence
ggatttatcagagcatgtcaccctt

SEQ ID NO: 265876 - DNA, 25 bp, Probe Sequence
ggattctcatgactgtcttacctct

SEQ ID NO: 265877 - DNA, 25 bp, Probe Sequence
ggatttaattgtgtatcctcattac

SEQ ID NO: 265878 - DNA, 25 bp, Probe Sequence
ggatttgcatttttgtattttgtac

SEQ ID NO: 265879 - DNA, 25 bp, Probe Sequence
ggatttgctattttacttcagcatg

SEQ ID NO: 265880 - DNA, 25 bp, Probe Sequence
ggattttgactggcattgttagctg

SEQ ID NO: 265881 - DNA, 25 bp, Probe Sequence
ggatcttgatgcttgctttattagt

SEQ ID NO: 265882 - DNA, 25 bp, Probe Sequence
ggatctatcacctgtcatcataact

SEQ ID NO: 265883 - DNA, 25 bp, Probe Sequence
ggatctagctcctgtatatatattt

SEQ ID NO: 265884 - DNA, 25 bp, Probe Sequence
ggattcatgtcctgcatacatacat

SEQ ID NO: 265885 - DNA, 25 bp, Probe Sequence
ggatctcagatataacctacatggt

SEQ ID NO: 265886 - DNA, 25 bp, Probe Sequence
ggatcttaaaatatgctaaggtgct

SEQ ID NO: 265887 - DNA, 25 bp, Probe Sequence
ggatcttaaaaatgcctaattgtga

SEQ ID NO: 265888 - DNA, 25 bp, Probe Sequence
ggatcttataatctaatcaacttct

SEQ ID NO: 265889 - DNA, 25 bp, Probe Sequence
ggatcatgtaaatgctcaaagatgt

SEQ ID NO: 265890 - DNA, 25 bp, Probe Sequence
ggatctggaacatatgagctatttg

SEQ ID NO: 265891 - DNA, 25 bp, Probe Sequence
ggattgggatctttagctctgtatg

SEQ ID NO: 265892 - DNA, 25 bp, Probe Sequence
ggattgggagctgatagtgagttat

SEQ ID NO: 265893 - DNA, 25 bp, Probe Sequence
ggatatgttcccttgcatggatgtt

SEQ ID NO: 265894 - DNA, 25 bp, Probe Sequence
ggattttctgccaggcgtgtgttac

SEQ ID NO: 265895 - DNA, 25 bp, Probe Sequence
ggattgaatttcttgtggctggtta

SEQ ID NO: 265896 - DNA, 25 bp, Probe Sequence
ggattaattcttgtgattgcagtaa

SEQ ID NO: 265897 - DNA, 25 bp, Probe Sequence
ggattataatttctgcttgagtatg

SEQ ID NO: 265898 - DNA, 25 bp, Probe Sequence
ggatgatcaaacttggtctgggtat

SEQ ID NO: 265899 - DNA, 25 bp, Probe Sequence
ggatatcaaagctctgtttgtgtct

SEQ ID NO: 265900 - DNA, 25 bp, Probe Sequence
ggatagaaagcccacttctgtgtcc

SEQ ID NO: 265901 - DNA, 25 bp, Probe Sequence
ggacgaattccaacttgtttcacgc

SEQ ID NO: 265902 - DNA, 25 bp, Probe Sequence
ggatcggaatttacctgatttcttc

SEQ ID NO: 265903 - DNA, 25 bp, Probe Sequence
ggatctggtttggtaatatttgttc

SEQ ID NO: 265904 - DNA, 25 bp, Probe Sequence
ggattttctctgattttattttctt

SEQ ID NO: 265905 - DNA, 25 bp, Probe Sequence
ggatactttcctttttatcatcgta

SEQ ID NO: 265906 - DNA, 25 bp, Probe Sequence
ggatatatccatcatatttttcagg

SEQ ID NO: 265907 - DNA, 25 bp, Probe Sequence
ggatttctccacagattgcttgcag

SEQ ID NO: 265908 - DNA, 25 bp, Probe Sequence
ggatttctccacagattgcttgcag

SEQ ID NO: 265909 - DNA, 25 bp, Probe Sequence
ggattcttcacaggtgttcatagct

SEQ ID NO: 265910 - DNA, 25 bp, Probe Sequence
ggatttctgcattctggaacaagcc

SEQ ID NO: 265911 - DNA, 25 bp, Probe Sequence
ggattccgtgaaggaacaacaccta

SEQ ID NO: 265912 - DNA, 25 bp, Probe Sequence
ggattcacagaaaatagacggccgt

SEQ ID NO: 265913 - DNA, 25 bp, Probe Sequence
ggattatagcaaaatggaccagggt

SEQ ID NO: 265914 - DNA, 25 bp, Probe Sequence
ggattatagcaaaatggaccagggt

SEQ ID NO: 265915 - DNA, 25 bp, Probe Sequence
ggatatagaccacgattccgcaggg

SEQ ID NO: 265916 - DNA, 25 bp, Probe Sequence
ggatgctggaaacaacgtggaggta

SEQ ID NO: 265917 - DNA, 25 bp, Probe Sequence
ggagggaaaggctgtcggaagtagg

SEQ ID NO: 265918 - DNA, 25 bp, Probe Sequence
ggaggaagaaccagtacgtcagtaa

SEQ ID NO: 265919 - DNA, 25 bp, Probe Sequence
ggataaaacatctcggcacctagta

SEQ ID NO: 265920 - DNA, 25 bp, Probe Sequence
ggatgaacaactggcctgtgaactg

SEQ ID NO: 265921 - DNA, 25 bp, Probe Sequence
ggataacaacctgcttggcaagttt

SEQ ID NO: 265922 - DNA, 25 bp, Probe Sequence
ggatacacaacgttgcaagatgcaa

SEQ ID NO: 265923 - DNA, 25 bp, Probe Sequence
ggatagcacagctcttaaagcagca

SEQ ID NO: 265924 - DNA, 25 bp, Probe Sequence
ggattgcatctgggcttaaacccat

SEQ ID NO: 265925 - DNA, 25 bp, Probe Sequence
ggatccttgacgcataatacctgag

SEQ ID NO: 265926 - DNA, 25 bp, Probe Sequence
ggatgccttgaataataagcaggat

SEQ ID NO: 265927 - DNA, 25 bp, Probe Sequence
ggatcctggtatccgctaacaggtc

SEQ ID NO: 265928 - DNA, 25 bp, Probe Sequence
ggatcatgatgccaacctcttacgt

SEQ ID NO: 265929 - DNA, 25 bp, Probe Sequence
ggatatagctatgcctttatggtta

SEQ ID NO: 265930 - DNA, 25 bp, Probe Sequence
ggatattctatgacctctgtcggtg

SEQ ID NO: 265931 - DNA, 25 bp, Probe Sequence
ggatcatgcctttaccagtgtgtgg

SEQ ID NO: 265932 - DNA, 25 bp, Probe Sequence
ggatcaggcttcaaagctgtctggg

SEQ ID NO: 265933 - DNA, 25 bp, Probe Sequence
ggatcaggcttcaaagctgtctggg

SEQ ID NO: 265934 - DNA, 25 bp, Probe Sequence
ggatcagtggtggaatgagggtggt

SEQ ID NO: 265935 - DNA, 25 bp, Probe Sequence
ggattctggtggtaggggttgtttg

SEQ ID NO: 265936 - DNA, 25 bp, Probe Sequence
ggattccaggagtcgtggtttcttg

SEQ ID NO: 265937 - DNA, 25 bp, Probe Sequence
ggattccaggcagctgaatgggtcg

SEQ ID NO: 265938 - DNA, 25 bp, Probe Sequence
ggattaatgggcaaacgggatgctg

SEQ ID NO: 265939 - DNA, 25 bp, Probe Sequence
ggattcttgcgggaagcgcggactc

SEQ ID NO: 265940 - DNA, 25 bp, Probe Sequence
ggattctggggactcagggtgaagc

SEQ ID NO: 265941 - DNA, 25 bp, Probe Sequence
ggattcatgaccctctcagggtaca

SEQ ID NO: 265942 - DNA, 25 bp, Probe Sequence
ggattatctgctattcgggtaatct

SEQ ID NO: 265943 - DNA, 25 bp, Probe Sequence
ggataactttcacagggtaattggt

SEQ ID NO: 265944 - DNA, 25 bp, Probe Sequence
ggataactgttacgaatgaaaatga

SEQ ID NO: 265945 - DNA, 25 bp, Probe Sequence
ggagttctgtttccgaagaaagagc

SEQ ID NO: 265946 - DNA, 25 bp, Probe Sequence
ggagttcactgcccaaaacttaggc

SEQ ID NO: 265947 - DNA, 25 bp, Probe Sequence
ggatggatacggttaatctcttaac

SEQ ID NO: 265948 - DNA, 25 bp, Probe Sequence
ggatcgattctacatgagtcgcatt

SEQ ID NO: 265949 - DNA, 25 bp, Probe Sequence
ggatcgatattatatgctgtaacca

SEQ ID NO: 265950 - DNA, 25 bp, Probe Sequence
ggatcaatcttgaaatactcaacca

SEQ ID NO: 265951 - DNA, 25 bp, Probe Sequence
ggataaccttgaaacattatgctca

SEQ ID NO: 265952 - DNA, 25 bp, Probe Sequence
ggatacaggttgtaccatttcggca

SEQ ID NO: 265953 - DNA, 25 bp, Probe Sequence
ggatacactttgtgacttgtacgag

SEQ ID NO: 265954 - DNA, 25 bp, Probe Sequence
ggaccaggttgttactggttcagca

SEQ ID NO: 265955 - DNA, 25 bp, Probe Sequence
ggatcacgatttcacactgggtaca

SEQ ID NO: 265956 - DNA, 25 bp, Probe Sequence
ggatcgcaagtcctacagctggaaa

SEQ ID NO: 265957 - DNA, 25 bp, Probe Sequence
ggatcgcaagtcctacagctggaaa

SEQ ID NO: 265958 - DNA, 25 bp, Probe Sequence
ggatcgcaagtcctacagctggaaa

SEQ ID NO: 265959 - DNA, 25 bp, Probe Sequence
ggatcagtcctaatctattggagaa

SEQ ID NO: 265960 - DNA, 25 bp, Probe Sequence
ggatgcagtctgtatttttgaaaaa

SEQ ID NO: 265961 - DNA, 25 bp, Probe Sequence
ggatgacctggtgtcccattataaa

SEQ ID NO: 265962 - DNA, 25 bp, Probe Sequence
ggatgtcgggcagttcccattagat

SEQ ID NO: 265963 - DNA, 25 bp, Probe Sequence
ggatgtccttaagttccttgcagca

SEQ ID NO: 265964 - DNA, 25 bp, Probe Sequence
ggatccctagaagtttatgagagag

SEQ ID NO: 265965 - DNA, 25 bp, Probe Sequence
ggatcacctcacagtttcaggagat

SEQ ID NO: 265966 - DNA, 25 bp, Probe Sequence
ggataccagcttggatgtctacaga

SEQ ID NO: 265967 - DNA, 25 bp, Probe Sequence
ggatttctttggatgctgaatgcag

SEQ ID NO: 265968 - DNA, 25 bp, Probe Sequence
ggattcctttatgagcatgaagcat

SEQ ID NO: 265969 - DNA, 25 bp, Probe Sequence
ggatgccgcctttaactggagcaaa

SEQ ID NO: 265970 - DNA, 25 bp, Probe Sequence
ggatgccggcacaaaactgccttaa

SEQ ID NO: 265971 - DNA, 25 bp, Probe Sequence
ggagggtgcacataacccttaccct

SEQ ID NO: 265972 - DNA, 25 bp, Probe Sequence
ggaggttttaacatcttctcccact

SEQ ID NO: 265973 - DNA, 25 bp, Probe Sequence
tggggtttttactgttacctgatca

SEQ ID NO: 265974 - DNA, 25 bp, Probe Sequence
ggaggagtttaatagttacacattc

SEQ ID NO: 265975 - DNA, 25 bp, Probe Sequence
ggataaactaaacacgtgacacaaa

SEQ ID NO: 265976 - DNA, 25 bp, Probe Sequence
ggagagaaatcacaagccgtcccga

SEQ ID NO: 265977 - DNA, 25 bp, Probe Sequence
ggagggaaaataagcgaggcaccgc

SEQ ID NO: 265978 - DNA, 25 bp, Probe Sequence
ggatgggaaacagcctgtgggccgc

SEQ ID NO: 265979 - DNA, 25 bp, Probe Sequence
ggatgggaagagggctctgtaagcc

SEQ ID NO: 265980 - DNA, 25 bp, Probe Sequence
ggatagcagagaagcctgtctgtac

SEQ ID NO: 265981 - DNA, 25 bp, Probe Sequence
ggatagagtcatggcccattgatat

SEQ ID NO: 265982 - DNA, 25 bp, Probe Sequence
ggatagtgtgatggtccttccaacc

SEQ ID NO: 265983 - DNA, 25 bp, Probe Sequence
ggatgagttcatgtcctttgtagga

SEQ ID NO: 265984 - DNA, 25 bp, Probe Sequence
ggatgagttcatgtcttttgtaggg

SEQ ID NO: 265985 - DNA, 25 bp, Probe Sequence
ggaggtcttcgtattggctttggaa

SEQ ID NO: 265986 - DNA, 25 bp, Probe Sequence
ggatttttctgtatggttctgtggc

SEQ ID NO: 265987 - DNA, 25 bp, Probe Sequence
ggattttatacccttgtgtctgtgt

SEQ ID NO: 265988 - DNA, 25 bp, Probe Sequence
ggatttctaacaggttttgctttat

SEQ ID NO: 265989 - DNA, 25 bp, Probe Sequence
ggattacataactgctcttttattc

SEQ ID NO: 265990 - DNA, 25 bp, Probe Sequence
ggattaccacaatgccttgtgatga

SEQ ID NO: 265991 - DNA, 25 bp, Probe Sequence
ggatacaccgaatgaccaggtaaca

SEQ ID NO: 265992 - DNA, 25 bp, Probe Sequence
ggatcccacgacaccaagggaagca

SEQ ID NO: 265993 - DNA, 25 bp, Probe Sequence
ggatccacaggcagagccaagggaa

SEQ ID NO: 265994 - DNA, 25 bp, Probe Sequence
ggatctaagcaatgaggccagagga

SEQ ID NO: 265995 - DNA, 25 bp, Probe Sequence
ggatgtgaacaaggtcgcctactgc

SEQ ID NO: 265996 - DNA, 25 bp, Probe Sequence
ggatcgaacaagctgggtatgtgct

SEQ ID NO: 265997 - DNA, 25 bp, Probe Sequence
ggatcactacaaggaggagaagttt

SEQ ID NO: 265998 - DNA, 25 bp, Probe Sequence
ggatactcggatggagtgaagggtt

SEQ ID NO: 265999 - DNA, 25 bp, Probe Sequence
ggatcatctccggaatggaagaggt

SEQ ID NO: 266000 - DNA, 25 bp, Probe Sequence
ggatacctctggcatgagacagtgg

SEQ ID NO: 266001 - DNA, 25 bp, Probe Sequence
ggataatcttggaagagtcactgat

SEQ ID NO: 266002 - DNA, 25 bp, Probe Sequence
ggatcaactctgctagataccacat

SEQ ID NO: 266003 - DNA, 25 bp, Probe Sequence
ggatgacgtcggacagatactctcg

SEQ ID NO: 266004 - DNA, 25 bp, Probe Sequence
ggatcatgcttccttaatatctttg

SEQ ID NO: 266005 - DNA, 25 bp, Probe Sequence
ggatctggtgaagaatcatctgatg

SEQ ID NO: 266006 - DNA, 25 bp, Probe Sequence
ggatctttagatgagatcacgctgg

SEQ ID NO: 266007 - DNA, 25 bp, Probe Sequence
ggatatgtttgagatgcacagttgg

SEQ ID NO: 266008 - DNA, 25 bp, Probe Sequence
ggatattatctacgtcatctttgaa

SEQ ID NO: 266009 - DNA, 25 bp, Probe Sequence
ggatgttacttcctcagtttacaag

SEQ ID NO: 266010 - DNA, 25 bp, Probe Sequence
ggatttagctttgcacttctaactg

SEQ ID NO: 266011 - DNA, 25 bp, Probe Sequence
ggatcatgtggcaattctatttcta

SEQ ID NO: 266012 - DNA, 25 bp, Probe Sequence
ggatatgagagttcctttctctgaa

SEQ ID NO: 266013 - DNA, 25 bp, Probe Sequence
ggatcataagtttttactgccagta

SEQ ID NO: 266014 - DNA, 25 bp, Probe Sequence
ggattttgctgttagtactccaatg

SEQ ID NO: 266015 - DNA, 25 bp, Probe Sequence
ggatttgtgatgaacttttccaatg

SEQ ID NO: 266016 - DNA, 25 bp, Probe Sequence
ggatgttttcataattttcagagat

SEQ ID NO: 266017 - DNA, 25 bp, Probe Sequence
ggatttgtacagcatttggtgtgtg

SEQ ID NO: 266018 - DNA, 25 bp, Probe Sequence
ggattatgaggaggttggtgtggat

SEQ ID NO: 266019 - DNA, 25 bp, Probe Sequence
ggattatgtgaaaggcatgtggtta

SEQ ID NO: 266020 - DNA, 25 bp, Probe Sequence
ggatctctgtattcagcctttgttc

SEQ ID NO: 266021 - DNA, 25 bp, Probe Sequence
ggatatcatgttagctctcttggta

SEQ ID NO: 266022 - DNA, 25 bp, Probe Sequence
ggatattgactactctgctattatg

SEQ ID NO: 266023 - DNA, 25 bp, Probe Sequence
ggatcacgatgctatactccactag

SEQ ID NO: 266024 - DNA, 25 bp, Probe Sequence
ggatatctgaggaacattcatcaaa

SEQ ID NO: 266025 - DNA, 25 bp, Probe Sequence
ggatcttcaagtcccatcatagaaa

SEQ ID NO: 266026 - DNA, 25 bp, Probe Sequence
ggattacaggaggcaatcaatgacc

SEQ ID NO: 266027 - DNA, 25 bp, Probe Sequence
ggatataccaaggcagaggagccca

SEQ ID NO: 266028 - DNA, 25 bp, Probe Sequence
ggattacctgatgatgggagttcaa

SEQ ID NO: 266029 - DNA, 25 bp, Probe Sequence
ggatattcctcagatagggtataca

SEQ ID NO: 266030 - DNA, 25 bp, Probe Sequence
ggataacatgctgacataggcttaa

SEQ ID NO: 266031 - DNA, 25 bp, Probe Sequence
ggataactgatttctatggctttca

SEQ ID NO: 266032 - DNA, 25 bp, Probe Sequence
ggatcaactactttgaggattgtac

SEQ ID NO: 266033 - DNA, 25 bp, Probe Sequence
ggataagctggttgatgggatgatt

SEQ ID NO: 266034 - DNA, 25 bp, Probe Sequence
ggaagaggggtgtggtgactccttt

SEQ ID NO: 266035 - DNA, 25 bp, Probe Sequence
ggataagggcagaaacggttcacat

SEQ ID NO: 266036 - DNA, 25 bp, Probe Sequence
ggattagcggaatgtatggttcaac

SEQ ID NO: 266037 - DNA, 25 bp, Probe Sequence
ggatttgggatgtcaggggaagaac

SEQ ID NO: 266038 - DNA, 25 bp, Probe Sequence
ggattttgttgggcaccgaaatcac

SEQ ID NO: 266039 - DNA, 25 bp, Probe Sequence
tggattttgttgggcaccgaaatca

SEQ ID NO: 266040 - DNA, 25 bp, Probe Sequence
ggatttatcctggcccacaaagcca

SEQ ID NO: 266041 - DNA, 25 bp, Probe Sequence
ggatttactgcgttggcacttacca

SEQ ID NO: 266042 - DNA, 25 bp, Probe Sequence
ggatttagggagggcattttgctac

SEQ ID NO: 266043 - DNA, 25 bp, Probe Sequence
ggatttagggtcacatgctgcaggc

SEQ ID NO: 266044 - DNA, 25 bp, Probe Sequence
ggatttgatgagcgggctgatgcag

SEQ ID NO: 266045 - DNA, 25 bp, Probe Sequence
ggatttcatgagcagatcaggacac

SEQ ID NO: 266046 - DNA, 25 bp, Probe Sequence
ggatttctgcagctcatgaagcctt

SEQ ID NO: 266047 - DNA, 25 bp, Probe Sequence
ggatctcctgcatgtcaggagcatc

SEQ ID NO: 266048 - DNA, 25 bp, Probe Sequence
ggatccaatcaaccatcatggcagc

SEQ ID NO: 266049 - DNA, 25 bp, Probe Sequence
ggatcctgcacaaaatcaagcacct

SEQ ID NO: 266050 - DNA, 25 bp, Probe Sequence
ggatctcatgaggcgaataagctgc

SEQ ID NO: 266051 - DNA, 25 bp, Probe Sequence
ggatctcatgaggcgaataagctgc

SEQ ID NO: 266052 - DNA, 25 bp, Probe Sequence
ggatctcattgttgatatacctgaa

SEQ ID NO: 266053 - DNA, 25 bp, Probe Sequence
ggatctcattgttgatatacctgaa

SEQ ID NO: 266054 - DNA, 25 bp, Probe Sequence
ggatctacagatgaatatttaactc

SEQ ID NO: 266055 - DNA, 25 bp, Probe Sequence
ggatctatccttgataatatacaca

SEQ ID NO: 266056 - DNA, 25 bp, Probe Sequence
ggatctatctcatcaaacaacacaa

SEQ ID NO: 266057 - DNA, 25 bp, Probe Sequence
ggatttcttaaatgagattgcaaaa

SEQ ID NO: 266058 - DNA, 25 bp, Probe Sequence
ggaattacaaacacagttgaaagac

SEQ ID NO: 266059 - DNA, 25 bp, Probe Sequence
ggacgtttgaactctgttaataaca

SEQ ID NO: 266060 - DNA, 25 bp, Probe Sequence
ggcactttggcataccgaaaaaaca

SEQ ID NO: 266061 - DNA, 25 bp, Probe Sequence
ggatttcatctgcaacctaaaaaac

SEQ ID NO: 266062 - DNA, 25 bp, Probe Sequence
ggatcccttctgtagcctaaagtat

SEQ ID NO: 266063 - DNA, 25 bp, Probe Sequence
ggatcccggcagaagctatgaaagg

SEQ ID NO: 266064 - DNA, 25 bp, Probe Sequence
ggatctcaggggagctgtgggtctc

SEQ ID NO: 266065 - DNA, 25 bp, Probe Sequence
ggatttgctgggggcaaggtgtctc

SEQ ID NO: 266066 - DNA, 25 bp, Probe Sequence
ggagtccaacgatcacgtgtgtctc

SEQ ID NO: 266067 - DNA, 25 bp, Probe Sequence
ggaggagcaaccttcaggtggcctc

SEQ ID NO: 266068 - DNA, 25 bp, Probe Sequence
ggagcagacagggttccctgggccc

SEQ ID NO: 266069 - DNA, 25 bp, Probe Sequence
ggatcagaaccggtacctggatggc

SEQ ID NO: 266070 - DNA, 25 bp, Probe Sequence
ggataatatcctgatacagcttgat

SEQ ID NO: 266071 - DNA, 25 bp, Probe Sequence
ggatcagatatacgagaacgccatg

SEQ ID NO: 266072 - DNA, 25 bp, Probe Sequence
ggatcatccatacagaaccaacaat

SEQ ID NO: 266073 - DNA, 25 bp, Probe Sequence
ggatcatccagactaaagccctgca

SEQ ID NO: 266074 - DNA, 25 bp, Probe Sequence
ggatagctcagacaagatacccaga

SEQ ID NO: 266075 - DNA, 25 bp, Probe Sequence
ggatacttcccaggatatttcagaa

SEQ ID NO: 266076 - DNA, 25 bp, Probe Sequence
ggatagttgcaagggtgattctgga

SEQ ID NO: 266077 - DNA, 25 bp, Probe Sequence
ggatttgtcaaggggatggtggcaa

SEQ ID NO: 266078 - DNA, 25 bp, Probe Sequence
ggatatagcccggaggagggaagca

SEQ ID NO: 266079 - DNA, 25 bp, Probe Sequence
ggatatagtctggttggggaaatga

SEQ ID NO: 266080 - DNA, 25 bp, Probe Sequence
ggatgtgggcagcttagggccctgg

SEQ ID NO: 266081 - DNA, 25 bp, Probe Sequence
ggatggatgtagggcaggggcccgg

SEQ ID NO: 266082 - DNA, 25 bp, Probe Sequence
ggataagtgacacctaggacccagg

SEQ ID NO: 266083 - DNA, 25 bp, Probe Sequence
ggataagatcctccagaaatcccct

SEQ ID NO: 266084 - DNA, 25 bp, Probe Sequence
ggataatttctatgaaatcgcgctt

SEQ ID NO: 266085 - DNA, 25 bp, Probe Sequence
ggatatatttctttaagtctgcaga

SEQ ID NO: 266086 - DNA, 25 bp, Probe Sequence
ggatatgattccagtaggctctagc

SEQ ID NO: 266087 - DNA, 25 bp, Probe Sequence
ggatgattgtcaccggaggtatagc

SEQ ID NO: 266088 - DNA, 25 bp, Probe Sequence
ggatcagtgctgccctaagtgaata

SEQ ID NO: 266089 - DNA, 25 bp, Probe Sequence
ggatcacctgacctttgtaatgtta

SEQ ID NO: 266090 - DNA, 25 bp, Probe Sequence
ggatatactaggattgtaattcaga

SEQ ID NO: 266091 - DNA, 25 bp, Probe Sequence
ggataatcgaggcttgtcaaggaca

SEQ ID NO: 266092 - DNA, 25 bp, Probe Sequence
ggatcacacgatttctttaagggaa

SEQ ID NO: 266093 - DNA, 25 bp, Probe Sequence
ggatacaagcaagttttttgggaga

SEQ ID NO: 266094 - DNA, 25 bp, Probe Sequence
ggataaaaggtatttcactggagaa

SEQ ID NO: 266095 - DNA, 25 bp, Probe Sequence
ggatacaaaaattatacccagagaa

SEQ ID NO: 266096 - DNA, 25 bp, Probe Sequence
ggataactagaataaccgatgcaga

SEQ ID NO: 266097 - DNA, 25 bp, Probe Sequence
ggatacaattaaaaatctcgtcaaa

SEQ ID NO: 266098 - DNA, 25 bp, Probe Sequence
ggatacttatatggaaattctgctc

SEQ ID NO: 266099 - DNA, 25 bp, Probe Sequence
ggatcacttgtaaggacagtgcctg

SEQ ID NO: 266100 - DNA, 25 bp, Probe Sequence
ggatcacttgtcaagatgcgccctc

SEQ ID NO: 266101 - DNA, 25 bp, Probe Sequence
ggatacttgctgccagattctgttc

SEQ ID NO: 266102 - DNA, 25 bp, Probe Sequence
ggatactccatggaattcgagctcc

SEQ ID NO: 266103 - DNA, 25 bp, Probe Sequence
ggatattcagatgtatgtgcccttc

SEQ ID NO: 266104 - DNA, 25 bp, Probe Sequence
ggatattcagaggtaggcagccaaa

SEQ ID NO: 266105 - DNA, 25 bp, Probe Sequence
ggatcacctgaggtcaggagttcaa

SEQ ID NO: 266106 - DNA, 25 bp, Probe Sequence
ggatcatctaaggtcaggaattcaa

SEQ ID NO: 266107 - DNA, 25 bp, Probe Sequence
ggatcattggatctcaggagttgga

SEQ ID NO: 266108 - DNA, 25 bp, Probe Sequence
ggatcttgtgtttgggagccatggg

SEQ ID NO: 266109 - DNA, 25 bp, Probe Sequence
ggatttcttatctgagagacctgga

SEQ ID NO: 266110 - DNA, 25 bp, Probe Sequence
ggatgcaggttttggaggacctgga

SEQ ID NO: 266111 - DNA, 25 bp, Probe Sequence
ggatgctggtgtggggcccacagct

SEQ ID NO: 266112 - DNA, 25 bp, Probe Sequence
ggatgctggagaagggcgtcatatc

SEQ ID NO: 266113 - DNA, 25 bp, Probe Sequence
ggatgagaactaatcgctgatcgtc

SEQ ID NO: 266114 - DNA, 25 bp, Probe Sequence
ggaggaactcatcactatcttccga

SEQ ID NO: 266115 - DNA, 25 bp, Probe Sequence
ggatcaagagccagatgttcttcac

SEQ ID NO: 266116 - DNA, 25 bp, Probe Sequence
ggatacaggctgaagagattctgca

SEQ ID NO: 266117 - DNA, 25 bp, Probe Sequence
ggatgacggatgaggactctgggct

SEQ ID NO: 266118 - DNA, 25 bp, Probe Sequence
ggatatctaatgtgatgcccggaat

SEQ ID NO: 266119 - DNA, 25 bp, Probe Sequence
ggatataatttgcagcccatggata

SEQ ID NO: 266120 - DNA, 25 bp, Probe Sequence
ggatgttcagttcacctctggataa

SEQ ID NO: 266121 - DNA, 25 bp, Probe Sequence
ggagccaagttcgacccttatgaac

SEQ ID NO: 266122 - DNA, 25 bp, Probe Sequence
ggatacaaatccaaactcttataat

SEQ ID NO: 266123 - DNA, 25 bp, Probe Sequence
ggagattaatcaccaacttcttatt

SEQ ID NO: 266124 - DNA, 25 bp, Probe Sequence
ggatgactaatcccatttctttatc

SEQ ID NO: 266125 - DNA, 25 bp, Probe Sequence
ggatgttgacgccaatgttcagttt

SEQ ID NO: 266126 - DNA, 25 bp, Probe Sequence
ggatgtctactggaatgttggcttt

SEQ ID NO: 266127 - DNA, 25 bp, Probe Sequence
ggatgtggacttggagttcctggct

SEQ ID NO: 266128 - DNA, 25 bp, Probe Sequence
ggaggagagcttcgggaccggttct

SEQ ID NO: 266129 - DNA, 25 bp, Probe Sequence
ggcaaggcctgtttaggccggttgc

SEQ ID NO: 266130 - DNA, 25 bp, Probe Sequence
ggatcaggacttttgttccaggttg

SEQ ID NO: 266131 - DNA, 25 bp, Probe Sequence
ggatcagtaccacttttgctacgat

SEQ ID NO: 266132 - DNA, 25 bp, Probe Sequence
ggatgcagatactctggtcctagca

SEQ ID NO: 266133 - DNA, 25 bp, Probe Sequence
ggatatgcacacatttacctagcac

SEQ ID NO: 266134 - DNA, 25 bp, Probe Sequence
ggataacatttgttgacatctatca

SEQ ID NO: 266135 - DNA, 25 bp, Probe Sequence
ggatctgagtttttcactgcatcac

SEQ ID NO: 266136 - DNA, 25 bp, Probe Sequence
ggatcgatggtgttctcaacaaccc

SEQ ID NO: 266137 - DNA, 25 bp, Probe Sequence
ggatgtgaagtctttaaaacctgaa

SEQ ID NO: 266138 - DNA, 25 bp, Probe Sequence
ggaggaagagttacagactaccgga

SEQ ID NO: 266139 - DNA, 25 bp, Probe Sequence
ggaggaagacttggcgttttcgaca

SEQ ID NO: 266140 - DNA, 25 bp, Probe Sequence
ggagggaactttgatcttcctaaga

SEQ ID NO: 266141 - DNA, 25 bp, Probe Sequence
ggaggccacactgatgttctaaaaa

SEQ ID NO: 266142 - DNA, 25 bp, Probe Sequence
ggaggtccatgctggtcctaaaaga

SEQ ID NO: 266143 - DNA, 25 bp, Probe Sequence
ggatgggcgcagagaacctcaagaa

SEQ ID NO: 266144 - DNA, 25 bp, Probe Sequence
ggaggatcgcttgaacccaggaagc

SEQ ID NO: 266145 - DNA, 25 bp, Probe Sequence
ggaggcttgtttaaactacggatgc

SEQ ID NO: 266146 - DNA, 25 bp, Probe Sequence
ggaagtttgtgatgtacggccgacc

SEQ ID NO: 266147 - DNA, 25 bp, Probe Sequence
ggatagttacggtgtcgttcatgat

SEQ ID NO: 266148 - DNA, 25 bp, Probe Sequence
ggataatctcaccgaaatcttttga

SEQ ID NO: 266149 - DNA, 25 bp, Probe Sequence
ggataaacacgcctagattgttttt

SEQ ID NO: 266150 - DNA, 25 bp, Probe Sequence
ggataaagcatccctaatttctctt

SEQ ID NO: 266151 - DNA, 25 bp, Probe Sequence
ggatgatatagctaggttatttcct

SEQ ID NO: 266152 - DNA, 25 bp, Probe Sequence
ggatgcaataaaaggttatatcagc

SEQ ID NO: 266153 - DNA, 25 bp, Probe Sequence
ggatgttaacactgtttaccgcttt

SEQ ID NO: 266154 - DNA, 25 bp, Probe Sequence
ggatattgacacctctatgtatgac

SEQ ID NO: 266155 - DNA, 25 bp, Probe Sequence
ggatttgacatcttctggttattac

SEQ ID NO: 266156 - DNA, 25 bp, Probe Sequence
ggatttgcctgttctgggcatttca

SEQ ID NO: 266157 - DNA, 25 bp, Probe Sequence
ggatgtcctgcggattttatttgca

SEQ ID NO: 266158 - DNA, 25 bp, Probe Sequence
ggagttcttggctttaatcattcat

SEQ ID NO: 266159 - DNA, 25 bp, Probe Sequence
ggatgactttcgcttaactctttcc

SEQ ID NO: 266160 - DNA, 25 bp, Probe Sequence
ggaactatccgtgtcaagatttgtc

SEQ ID NO: 266161 - DNA, 25 bp, Probe Sequence
ggaggttctcagagccaagtcctcc

SEQ ID NO: 266162 - DNA, 25 bp, Probe Sequence
ggaggttggcagtggcctttgtcaa

SEQ ID NO: 266163 - DNA, 25 bp, Probe Sequence
ggatgaatggggttggcctgttggt

SEQ ID NO: 266164 - DNA, 25 bp, Probe Sequence
ggatgctgggggaggacgtcatgag

SEQ ID NO: 266165 - DNA, 25 bp, Probe Sequence
ggatcatggtggtattaacctcaca

SEQ ID NO: 266166 - DNA, 25 bp, Probe Sequence
ggatctgtcttggcattaaaccaca

SEQ ID NO: 266167 - DNA, 25 bp, Probe Sequence
ggatattgttgccatcaatgacccc

SEQ ID NO: 266168 - DNA, 25 bp, Probe Sequence
ggatttgagatgctaaggccccaga

SEQ ID NO: 266169 - DNA, 25 bp, Probe Sequence
ggatctcaggtgctagagtccacgc

SEQ ID NO: 266170 - DNA, 25 bp, Probe Sequence
ggatgacattgaggacgagtccacg

SEQ ID NO: 266171 - DNA, 25 bp, Probe Sequence
ggatcacattgcggtcagagctgct

SEQ ID NO: 266172 - DNA, 25 bp, Probe Sequence
ggatacatgacaggccagcctttgg

SEQ ID NO: 266173 - DNA, 25 bp, Probe Sequence
ggatatataattccacatatttggg

SEQ ID NO: 266174 - DNA, 25 bp, Probe Sequence
ggatataaactgcatcattagtgaa

SEQ ID NO: 266175 - DNA, 25 bp, Probe Sequence
ggatatttgaggccatgcttaatat

SEQ ID NO: 266176 - DNA, 25 bp, Probe Sequence
ggatattggagcccagcttatcgtg

SEQ ID NO: 266177 - DNA, 25 bp, Probe Sequence
ggatactgaggcatagctgtactgt

SEQ ID NO: 266178 - DNA, 25 bp, Probe Sequence
ggatatcgacgagtgccgagagctg

SEQ ID NO: 266179 - DNA, 25 bp, Probe Sequence
ggaggccaaggtccgagtgctggac

SEQ ID NO: 266180 - DNA, 25 bp, Probe Sequence
ggatccgcagaggaactgatgagtg

SEQ ID NO: 266181 - DNA, 25 bp, Probe Sequence
ggatgccgcagaccattatctggcg

SEQ ID NO: 266182 - DNA, 25 bp, Probe Sequence
ggatcaacatgacattctcaggctt

SEQ ID NO: 266183 - DNA, 25 bp, Probe Sequence
ggatcaacaggactttagtggttaa

SEQ ID NO: 266184 - DNA, 25 bp, Probe Sequence
ggatataactgaattgtagatggta

SEQ ID NO: 266185 - DNA, 25 bp, Probe Sequence
ggataaatcagagttacagcaggga

SEQ ID NO: 266186 - DNA, 25 bp, Probe Sequence
ggatccacggatgtacagcagagag

SEQ ID NO: 266187 - DNA, 25 bp, Probe Sequence
ggatccatgtaatcaccagaatgca

SEQ ID NO: 266188 - DNA, 25 bp, Probe Sequence
ggatatgcattaaccactctacaga

SEQ ID NO: 266189 - DNA, 25 bp, Probe Sequence
ggatacctatgagtgcacctgtcaa

SEQ ID NO: 266190 - DNA, 25 bp, Probe Sequence
ggatacctatgagtgcacctgtcaa

SEQ ID NO: 266191 - DNA, 25 bp, Probe Sequence
ggatatacatatactgcctgcttct

SEQ ID NO: 266192 - DNA, 25 bp, Probe Sequence
ggatctcatctaatctcatggcttt

SEQ ID NO: 266193 - DNA, 25 bp, Probe Sequence
ggatctactgataggcaggttacca

SEQ ID NO: 266194 - DNA, 25 bp, Probe Sequence
ggatctatcattactgcaaaaacct

SEQ ID NO: 266195 - DNA, 25 bp, Probe Sequence
ggatctatcattactgcaaaaacct

SEQ ID NO: 266196 - DNA, 25 bp, Probe Sequence
ggatcttcagtcacattgacgacct

SEQ ID NO: 266197 - DNA, 25 bp, Probe Sequence
ggatcattgttcacatggaagagcc

SEQ ID NO: 266198 - DNA, 25 bp, Probe Sequence
ggatcaggccacaggagagagtgcc

SEQ ID NO: 266199 - DNA, 25 bp, Probe Sequence
ggatcatggacagggaagaatcgcg

SEQ ID NO: 266200 - DNA, 25 bp, Probe Sequence
ggatcagcacagggagaggtccaca

SEQ ID NO: 266201 - DNA, 25 bp, Probe Sequence
ggatctgcagctctcagaggacgac

SEQ ID NO: 266202 - DNA, 25 bp, Probe Sequence
ggatgctgctggctagagatgaggc

SEQ ID NO: 266203 - DNA, 25 bp, Probe Sequence
ggatgctgctgctcttcgcaagctg

SEQ ID NO: 266204 - DNA, 25 bp, Probe Sequence
ggatctgtctttccgagtgtgagca

SEQ ID NO: 266205 - DNA, 25 bp, Probe Sequence
ggatcttgttcccgatttgagcaac

SEQ ID NO: 266206 - DNA, 25 bp, Probe Sequence
ggatctcatttcccagtttaatcat

SEQ ID NO: 266207 - DNA, 25 bp, Probe Sequence
ggatctattcttcagatattcaaaa

SEQ ID NO: 266208 - DNA, 25 bp, Probe Sequence
ggatgctgtctcagaaggagttaaa

SEQ ID NO: 266209 - DNA, 25 bp, Probe Sequence
ggatctgttttccaagagattctga

SEQ ID NO: 266210 - DNA, 25 bp, Probe Sequence
ggatcgtttccagatgagaattcac

SEQ ID NO: 266211 - DNA, 25 bp, Probe Sequence
ggatctgattaaaggtcagcactta

SEQ ID NO: 266212 - DNA, 25 bp, Probe Sequence
ggatgctgttacaagtctagcagta

SEQ ID NO: 266213 - DNA, 25 bp, Probe Sequence
ggatgttgtccgcatcaacagtgat

SEQ ID NO: 266214 - DNA, 25 bp, Probe Sequence
ggatatgtgtgtgctcaaacgtgta

SEQ ID NO: 266215 - DNA, 25 bp, Probe Sequence
ggatctggattttgcataactggta

SEQ ID NO: 266216 - DNA, 25 bp, Probe Sequence
ggatctggattttgcataactggta

SEQ ID NO: 266217 - DNA, 25 bp, Probe Sequence
ggatctggactcagcagagcacagc

SEQ ID NO: 266218 - DNA, 25 bp, Probe Sequence
ggactgaactggcagacacaacctg

SEQ ID NO: 266219 - DNA, 25 bp, Probe Sequence
ggagaaactgggaaacaaacgatat

SEQ ID NO: 266220 - DNA, 25 bp, Probe Sequence
ggagaaaccgagacccaaactcact

SEQ ID NO: 266221 - DNA, 25 bp, Probe Sequence
tggaaaaccaggaccgacagtaatt

SEQ ID NO: 266222 - DNA, 25 bp, Probe Sequence
ggataagcactagatctcccttaat

SEQ ID NO: 266223 - DNA, 25 bp, Probe Sequence
ggatatacatcaaaactgccaccta

SEQ ID NO: 266224 - DNA, 25 bp, Probe Sequence
ggataattaaacatgctcagcctga

SEQ ID NO: 266225 - DNA, 25 bp, Probe Sequence
ggatgaaatgaatgactgtcccaga

SEQ ID NO: 266226 - DNA, 25 bp, Probe Sequence
ggatatcagtgaaggtctctccctc

SEQ ID NO: 266227 - DNA, 25 bp, Probe Sequence
ggatctcagtcaaaggcattcgcca

SEQ ID NO: 266228 - DNA, 25 bp, Probe Sequence
ggatctagtgcaacaagtgcatccc

SEQ ID NO: 266229 - DNA, 25 bp, Probe Sequence
ggatccagctggacaagcagatcac

SEQ ID NO: 266230 - DNA, 25 bp, Probe Sequence
ggatctcctgtggatggctgaagcc

SEQ ID NO: 266231 - DNA, 25 bp, Probe Sequence
ggatcatactgggggccaatgccat

SEQ ID NO: 266232 - DNA, 25 bp, Probe Sequence
ggatgatagttcgtgtgacaaacag

SEQ ID NO: 266233 - DNA, 25 bp, Probe Sequence
ggatgatggattgtggataactctg

SEQ ID NO: 266234 - DNA, 25 bp, Probe Sequence
ggataggactgagtggtaggaggag

SEQ ID NO: 266235 - DNA, 25 bp, Probe Sequence
ggatatcctctgttgggggagaagc

SEQ ID NO: 266236 - DNA, 25 bp, Probe Sequence
ggatgtcccagggtagatggggagc

SEQ ID NO: 266237 - DNA, 25 bp, Probe Sequence
ggatacaccagggcgagcattttcg

SEQ ID NO: 266238 - DNA, 25 bp, Probe Sequence
ggatacccaggacagcatgtccctg

SEQ ID NO: 266239 - DNA, 25 bp, Probe Sequence
ggatcgcccaataaacattcccttg

SEQ ID NO: 266240 - DNA, 25 bp, Probe Sequence
ggatcatgcccatttagattttcct

SEQ ID NO: 266241 - DNA, 25 bp, Probe Sequence
ggatctgtacataaaagtttctttc

SEQ ID NO: 266242 - DNA, 25 bp, Probe Sequence
ggatgtaaataaccccattctttgc

SEQ ID NO: 266243 - DNA, 25 bp, Probe Sequence
ggatatgaaataagtgccctgtgta

SEQ ID NO: 266244 - DNA, 25 bp, Probe Sequence
ggatagcaaatgaactgtgttggtt

SEQ ID NO: 266245 - DNA, 25 bp, Probe Sequence
ggcagaaaagttggtttggtttgca

SEQ ID NO: 266246 - DNA, 25 bp, Probe Sequence
ggagaagacagattttttactttga

SEQ ID NO: 266247 - DNA, 25 bp, Probe Sequence
ggatgatgagtcaacaggtttcact

SEQ ID NO: 266248 - DNA, 25 bp, Probe Sequence
ggataggcattatggtttccacttt

SEQ ID NO: 266249 - DNA, 25 bp, Probe Sequence
ggatctggaatatggttctcccctc

SEQ ID NO: 266250 - DNA, 25 bp, Probe Sequence
ggatctgcacagtttggtttttgca

SEQ ID NO: 266251 - DNA, 25 bp, Probe Sequence
ggatctgccagtaaggttccttgca

SEQ ID NO: 266252 - DNA, 25 bp, Probe Sequence
ggatatggagtatgttttgctatgt

SEQ ID NO: 266253 - DNA, 25 bp, Probe Sequence
ggatatgggatttggtctctttgac

SEQ ID NO: 266254 - DNA, 25 bp, Probe Sequence
ggatctaaatcttttctcttgctac

SEQ ID NO: 266255 - DNA, 25 bp, Probe Sequence
ggatctaaatcttttctcttgctac

SEQ ID NO: 266256 - DNA, 25 bp, Probe Sequence
ggatgctaaattccgtctgattcta

SEQ ID NO: 266257 - DNA, 25 bp, Probe Sequence
ggatgaaggaccagatcttgatcta

SEQ ID NO: 266258 - DNA, 25 bp, Probe Sequence
ggatgaagaggccggatctgccctc

SEQ ID NO: 266259 - DNA, 25 bp, Probe Sequence
ggatcacgaagcagcagaatgccca

SEQ ID NO: 266260 - DNA, 25 bp, Probe Sequence
ggatcatcagcaaacacaaagacct

SEQ ID NO: 266261 - DNA, 25 bp, Probe Sequence
ggatcacagcgaggagaaaacttct

SEQ ID NO: 266262 - DNA, 25 bp, Probe Sequence
ggatacgctgaatgaagagtcttat

SEQ ID NO: 266263 - DNA, 25 bp, Probe Sequence
ggatacgctgaatgaagagtcttat

SEQ ID NO: 266264 - DNA, 25 bp, Probe Sequence
ggatgtcagcggagaaatggctttg

SEQ ID NO: 266265 - DNA, 25 bp, Probe Sequence
ggatgcatcacactcaaggacagga

SEQ ID NO: 266266 - DNA, 25 bp, Probe Sequence
ggatgctgcacatacaggaacaact

SEQ ID NO: 266267 - DNA, 25 bp, Probe Sequence
ggatctgcagatagtagagggccct

SEQ ID NO: 266268 - DNA, 25 bp, Probe Sequence
ggatctgcagtctgacggggcagca

SEQ ID NO: 266269 - DNA, 25 bp, Probe Sequence
ggatgatcagtccggggcgctgcat

SEQ ID NO: 266270 - DNA, 25 bp, Probe Sequence
ggatagatgcaggcgggtgagctgc

SEQ ID NO: 266271 - DNA, 25 bp, Probe Sequence
ggatagagtggcctgagagcagtgc

SEQ ID NO: 266272 - DNA, 25 bp, Probe Sequence
ggatcacttgagcccaggagatcaa

SEQ ID NO: 266273 - DNA, 25 bp, Probe Sequence
ggatcacttgaggtcaggagctcga

SEQ ID NO: 266274 - DNA, 25 bp, Probe Sequence
ggatcaatgtgggtcagctacataa

SEQ ID NO: 266275 - DNA, 25 bp, Probe Sequence
ggatcagcctggatgcctagaggac

SEQ ID NO: 266276 - DNA, 25 bp, Probe Sequence
ggatcagcctggatgcctagaggac

SEQ ID NO: 266277 - DNA, 25 bp, Probe Sequence
ggatcagcctggatgcctagaggac

SEQ ID NO: 266278 - DNA, 25 bp, Probe Sequence
ggaccctagttcctagaggcatctg

SEQ ID NO: 266279 - DNA, 25 bp, Probe Sequence
ggatcccatgagctccttaaggctc

SEQ ID NO: 266280 - DNA, 25 bp, Probe Sequence
ggatcccgaggtatggcagaggtgc

SEQ ID NO: 266281 - DNA, 25 bp, Probe Sequence
ggatccatcaaccaagtgggaggtc

SEQ ID NO: 266282 - DNA, 25 bp, Probe Sequence
ggatccttacagtagaggtgacccc

SEQ ID NO: 266283 - DNA, 25 bp, Probe Sequence
ggatgcctggaagagagcagaagcc

SEQ ID NO: 266284 - DNA, 25 bp, Probe Sequence
ggatcgcttgaacccaggaagcaga

SEQ ID NO: 266285 - DNA, 25 bp, Probe Sequence
ggatgcagttgaacaccagaggaag

SEQ ID NO: 266286 - DNA, 25 bp, Probe Sequence
ggatgcgcctgatcaccaggtgaac

SEQ ID NO: 266287 - DNA, 25 bp, Probe Sequence
ggatctctcttctcatcaattgaat

SEQ ID NO: 266288 - DNA, 25 bp, Probe Sequence
ggatgccctgtgtagatcatcattc

SEQ ID NO: 266289 - DNA, 25 bp, Probe Sequence
ggatgcacgttgtgctacattctct

SEQ ID NO: 266290 - DNA, 25 bp, Probe Sequence
ggatcataattgtctctacagtctg

SEQ ID NO: 266291 - DNA, 25 bp, Probe Sequence
ggatcatcgatgttgtctacaatgc

SEQ ID NO: 266292 - DNA, 25 bp, Probe Sequence
ggatcatcgatgttgtctacaatgc

SEQ ID NO: 266293 - DNA, 25 bp, Probe Sequence
ggatcatcgatgttgtctacaatgc

SEQ ID NO: 266294 - DNA, 25 bp, Probe Sequence
ggatgaccctggtcttcaatggtta

SEQ ID NO: 266295 - DNA, 25 bp, Probe Sequence
ggatgaccctggtcttcaatggtta

SEQ ID NO: 266296 - DNA, 25 bp, Probe Sequence
ggatgtcttatttttagatggttac

SEQ ID NO: 266297 - DNA, 25 bp, Probe Sequence
ggatgtcttatttttagatggttac

SEQ ID NO: 266298 - DNA, 25 bp, Probe Sequence
ggatggatttttttacattctgttc

SEQ ID NO: 266299 - DNA, 25 bp, Probe Sequence
ggatgttttaattccatgaatcgct

SEQ ID NO: 266300 - DNA, 25 bp, Probe Sequence
ggatcttctctaatagtctgtattc

SEQ ID NO: 266301 - DNA, 25 bp, Probe Sequence
ggatgcctattaatgttggagatgg

SEQ ID NO: 266302 - DNA, 25 bp, Probe Sequence
ggatcaaagctgtcatgttggagat

SEQ ID NO: 266303 - DNA, 25 bp, Probe Sequence
ggataaagcggctgctcgaacagat

SEQ ID NO: 266304 - DNA, 25 bp, Probe Sequence
ggagaaagcttctctcggagttccc

SEQ ID NO: 266305 - DNA, 25 bp, Probe Sequence
ggagttagttgacctcttagttgcc

SEQ ID NO: 266306 - DNA, 25 bp, Probe Sequence
ggagtagggtgtcccagtggggttg

SEQ ID NO: 266307 - DNA, 25 bp, Probe Sequence
ggatgccagtggaatcacctgtggg

SEQ ID NO: 266308 - DNA, 25 bp, Probe Sequence
ggatcttctgcaggacaactggtcc

SEQ ID NO: 266309 - DNA, 25 bp, Probe Sequence
ggatgctgtggagatgataatggtc

SEQ ID NO: 266310 - DNA, 25 bp, Probe Sequence
ggatctgatggatatggcagtggac

SEQ ID NO: 266311 - DNA, 25 bp, Probe Sequence
ggatcagtgcagtaaggcctgtcat

SEQ ID NO: 266312 - DNA, 25 bp, Probe Sequence
ggatcgtgcagaaactcgctgtgcc

SEQ ID NO: 266313 - DNA, 25 bp, Probe Sequence
ggatgtggcagctgattccatgtct

SEQ ID NO: 266314 - DNA, 25 bp, Probe Sequence
ggatgctggcagtctgatatctgga

SEQ ID NO: 266315 - DNA, 25 bp, Probe Sequence
ggatgtagcatgactggatttgaga

SEQ ID NO: 266316 - DNA, 25 bp, Probe Sequence
ggatgtagagaccgcttcattactc

SEQ ID NO: 266317 - DNA, 25 bp, Probe Sequence
ggatgattctggagctctattagga

SEQ ID NO: 266318 - DNA, 25 bp, Probe Sequence
ggatgtcaagatgaaatttagcaat

SEQ ID NO: 266319 - DNA, 25 bp, Probe Sequence
ggatcaacgctcagaaggtagcctc

SEQ ID NO: 266320 - DNA, 25 bp, Probe Sequence
ggaccagctctgtgtaggtaaccag

SEQ ID NO: 266321 - DNA, 25 bp, Probe Sequence
ggatccgcctaagatgggagacctg

SEQ ID NO: 266322 - DNA, 25 bp, Probe Sequence
ggatctcccaaagtgctgggattac

SEQ ID NO: 266323 - DNA, 25 bp, Probe Sequence
ggctacccagagacgctggtcaacc

SEQ ID NO: 266324 - DNA, 25 bp, Probe Sequence
ggatcccaagaaagccgctcagatc

SEQ ID NO: 266325 - DNA, 25 bp, Probe Sequence
ggatcccagcagggggaggcaatcc

SEQ ID NO: 266326 - DNA, 25 bp, Probe Sequence
ggatgctccgaggtgggcatccctc

SEQ ID NO: 266327 - DNA, 25 bp, Probe Sequence
ggatgctccaggccataaggacttc

SEQ ID NO: 266328 - DNA, 25 bp, Probe Sequence
ggatcccaaggcagaagaatttttc

SEQ ID NO: 266329 - DNA, 25 bp, Probe Sequence
ggatcacctagtcttcactatattg

SEQ ID NO: 266330 - DNA, 25 bp, Probe Sequence
ggatgacactaattgttagctgttt

SEQ ID NO: 266331 - DNA, 25 bp, Probe Sequence
ggatctgccatatttgtgttggttt

SEQ ID NO: 266332 - DNA, 25 bp, Probe Sequence
ggatcggcattgcctgtgtgcaggt

SEQ ID NO: 266333 - DNA, 25 bp, Probe Sequence
ggatctggtgctgctttcagatgtt

SEQ ID NO: 266334 - DNA, 25 bp, Probe Sequence
ggatctcagctggacatactaattg

SEQ ID NO: 266335 - DNA, 25 bp, Probe Sequence
ggatgctctgctggagcggatacat

SEQ ID NO: 266336 - DNA, 25 bp, Probe Sequence
ggatgctctgtaatggagatatgcc

SEQ ID NO: 266337 - DNA, 25 bp, Probe Sequence
ggatctctaaagagcatctgattct

SEQ ID NO: 266338 - DNA, 25 bp, Probe Sequence
ggactctatccattgagcacatttt

SEQ ID NO: 266339 - DNA, 25 bp, Probe Sequence
ggatcctgtcaattggccttaaaga

SEQ ID NO: 266340 - DNA, 25 bp, Probe Sequence
ggataagatcaatgccctcattaaa

SEQ ID NO: 266341 - DNA, 25 bp, Probe Sequence
ggatgaagtctctagtcctgtcaaa

SEQ ID NO: 266342 - DNA, 25 bp, Probe Sequence
ggatgatacccattgtctatgtaaa

SEQ ID NO: 266343 - DNA, 25 bp, Probe Sequence
ggatgaatgcctgtatttggtctag

SEQ ID NO: 266344 - DNA, 25 bp, Probe Sequence
ggagaacattataattcggttacac

SEQ ID NO: 266345 - DNA, 25 bp, Probe Sequence
ggatgagacactacgtttggttcaa

SEQ ID NO: 266346 - DNA, 25 bp, Probe Sequence
ggatgcagagaaactttaggttcat

SEQ ID NO: 266347 - DNA, 25 bp, Probe Sequence
ggatgcagcaaaccaatatcagatt

SEQ ID NO: 266348 - DNA, 25 bp, Probe Sequence
ggatgcacaacatgaatcaggacag

SEQ ID NO: 266349 - DNA, 25 bp, Probe Sequence
ggatgacatatccatggctaagaag

SEQ ID NO: 266350 - DNA, 25 bp, Probe Sequence
ggatcacatatcctgcctaaagcag

SEQ ID NO: 266351 - DNA, 25 bp, Probe Sequence
ggataatgaagtactaagcagctac

SEQ ID NO: 266352 - DNA, 25 bp, Probe Sequence
ggatgaagatgagacccagcatcaa

SEQ ID NO: 266353 - DNA, 25 bp, Probe Sequence
ggatgacagagacagcgccaatgga

SEQ ID NO: 266354 - DNA, 25 bp, Probe Sequence
ggatgcctgagtccggaaagaacag

SEQ ID NO: 266355 - DNA, 25 bp, Probe Sequence
ggatctgctgtgtccaaaaaagaaa

SEQ ID NO: 266356 - DNA, 25 bp, Probe Sequence
ggatccgtctccactaaaataaata

SEQ ID NO: 266357 - DNA, 25 bp, Probe Sequence
ggagccttcgccatgtaaacattga

SEQ ID NO: 266358 - DNA, 25 bp, Probe Sequence
ggaggcttggatattgcaaacttta

SEQ ID NO: 266359 - DNA, 25 bp, Probe Sequence
ggaggctgaaatgttcaaacgctac

SEQ ID NO: 266360 - DNA, 25 bp, Probe Sequence
ggagtgagtgaaactcccaccctac

SEQ ID NO: 266361 - DNA, 25 bp, Probe Sequence
ggagtgagtgaaactcccaccctac

SEQ ID NO: 266362 - DNA, 25 bp, Probe Sequence
ggaggaataatttccccacattcac

SEQ ID NO: 266363 - DNA, 25 bp, Probe Sequence
ggaggaaaactcttaaccaatcatc

SEQ ID NO: 266364 - DNA, 25 bp, Probe Sequence
ggaggccaatactttgcaaaaccac

SEQ ID NO: 266365 - DNA, 25 bp, Probe Sequence
ggaggccaatactttgcaaaaccac

SEQ ID NO: 266366 - DNA, 25 bp, Probe Sequence
ggatgttcaaactttgacttggcca

SEQ ID NO: 266367 - DNA, 25 bp, Probe Sequence
ggatgttccaaatctgacctataat

SEQ ID NO: 266368 - DNA, 25 bp, Probe Sequence
ggatgctcaccaaagatccaccata

SEQ ID NO: 266369 - DNA, 25 bp, Probe Sequence
ggatgctagccaaacttcaaattct

SEQ ID NO: 266370 - DNA, 25 bp, Probe Sequence
ggatgtcatctatactgtcatacac

SEQ ID NO: 266371 - DNA, 25 bp, Probe Sequence
ggatgatgcttatgacttcagtaca

SEQ ID NO: 266372 - DNA, 25 bp, Probe Sequence
ggatgattgtaactttactgccatt

SEQ ID NO: 266373 - DNA, 25 bp, Probe Sequence
ggatgactgtcaggatgttgcttca

SEQ ID NO: 266374 - DNA, 25 bp, Probe Sequence
ggatgacagtcagtgtgaagcagtt

SEQ ID NO: 266375 - DNA, 25 bp, Probe Sequence
ggatgaagctgccagaaacgaacct

SEQ ID NO: 266376 - DNA, 25 bp, Probe Sequence
ggatgaagtgcacaccataccagcc

SEQ ID NO: 266377 - DNA, 25 bp, Probe Sequence
ggataaggatgctaaattccgtctg

SEQ ID NO: 266378 - DNA, 25 bp, Probe Sequence
ggatggagctatgaagttcctgccg

SEQ ID NO: 266379 - DNA, 25 bp, Probe Sequence
ggaggcagccagggcttacctgtac

SEQ ID NO: 266380 - DNA, 25 bp, Probe Sequence
ggaggcaccacaggtctatgtgtgc

SEQ ID NO: 266381 - DNA, 25 bp, Probe Sequence
ggatgtcaccagtcggactgtgctg

SEQ ID NO: 266382 - DNA, 25 bp, Probe Sequence
ggatctgagcccttggggtgtttca

SEQ ID NO: 266383 - DNA, 25 bp, Probe Sequence
ggatgtggcccagtaaggtgcctcc

SEQ ID NO: 266384 - DNA, 25 bp, Probe Sequence
ggctgtggtcctagaagttcagttt

SEQ ID NO: 266385 - DNA, 25 bp, Probe Sequence
ggatgccttcactgaattttggtat

SEQ ID NO: 266386 - DNA, 25 bp, Probe Sequence
ggatcgagtcactgagtttggaggt

SEQ ID NO: 266387 - DNA, 25 bp, Probe Sequence
ggatcgcgtgcgggatgtttttgag

SEQ ID NO: 266388 - DNA, 25 bp, Probe Sequence
ggatcgcctccaagattggttctaa

SEQ ID NO: 266389 - DNA, 25 bp, Probe Sequence
ggaggactccaaaatggtagaaaag

SEQ ID NO: 266390 - DNA, 25 bp, Probe Sequence
ggaggcgaccaaaagttgttgagta

SEQ ID NO: 266391 - DNA, 25 bp, Probe Sequence
ggagggtcctaatgccttatttcaa

SEQ ID NO: 266392 - DNA, 25 bp, Probe Sequence
ggaggggccacctgtagtatttgcc

SEQ ID NO: 266393 - DNA, 25 bp, Probe Sequence
ggacgggcccaaagttatttatgat

SEQ ID NO: 266394 - DNA, 25 bp, Probe Sequence
ggaggggctccaaagtttcattata

SEQ ID NO: 266395 - DNA, 25 bp, Probe Sequence
ggatcgggctgcaaagggttagaag

SEQ ID NO: 266396 - DNA, 25 bp, Probe Sequence
ggatgcggtgagccagagggttcca

SEQ ID NO: 266397 - DNA, 25 bp, Probe Sequence
ggatcgcttgcagtaaggagttcga

SEQ ID NO: 266398 - DNA, 25 bp, Probe Sequence
ggatcgcttgagcccaggagttgaa

SEQ ID NO: 266399 - DNA, 25 bp, Probe Sequence
ggatcacttgaggccaggagttcga

SEQ ID NO: 266400 - DNA, 25 bp, Probe Sequence
ggatcacttgagcccaggagtttga

SEQ ID NO: 266401 - DNA, 25 bp, Probe Sequence
ggatcacttgagcccaggagttgga

SEQ ID NO: 266402 - DNA, 25 bp, Probe Sequence
ggatcacttgagcccaggagttgga

SEQ ID NO: 266403 - DNA, 25 bp, Probe Sequence
ggatcacttgaggtcaggagttgga

SEQ ID NO: 266404 - DNA, 25 bp, Probe Sequence
gctgatggacacttgagtgttcaga

SEQ ID NO: 266405 - DNA, 25 bp, Probe Sequence
ggatcctaacgctgcttatgtgaac

SEQ ID NO: 266406 - DNA, 25 bp, Probe Sequence
ggatcctaacagtaatatcagtgtc

SEQ ID NO: 266407 - DNA, 25 bp, Probe Sequence
ggatgccaaccagaaaagtgtgctg

SEQ ID NO: 266408 - DNA, 25 bp, Probe Sequence
ggaccactgcctgaaaggtttgtac

SEQ ID NO: 266409 - DNA, 25 bp, Probe Sequence
ggagcctctccgtgaagaattttac

SEQ ID NO: 266410 - DNA, 25 bp, Probe Sequence
ggagtccattggtgaagggtccaac

SEQ ID NO: 266411 - DNA, 25 bp, Probe Sequence
ggagtccagaggtgtcagtaattaa

SEQ ID NO: 266412 - DNA, 25 bp, Probe Sequence
ggagttcgggagagaatactaggaa

SEQ ID NO: 266413 - DNA, 25 bp, Probe Sequence
ggaggccgtgggagaatggctgggc

SEQ ID NO: 266414 - DNA, 25 bp, Probe Sequence
ggagagggagggagtcgaggtagct

SEQ ID NO: 266415 - DNA, 25 bp, Probe Sequence
ggaggggaacgtgtcagagggagct

SEQ ID NO: 266416 - DNA, 25 bp, Probe Sequence
tggaggggaacgtgtcagagggagc

SEQ ID NO: 266417 - DNA, 25 bp, Probe Sequence
ggaggggtcagggggctaaggatgc

SEQ ID NO: 266418 - DNA, 25 bp, Probe Sequence
ggaggaagataagctactaattgaa

SEQ ID NO: 266419 - DNA, 25 bp, Probe Sequence
ggatggtatatggtggatttgactt

SEQ ID NO: 266420 - DNA, 25 bp, Probe Sequence
ggatgatgacattgacctgtttggc

SEQ ID NO: 266421 - DNA, 25 bp, Probe Sequence
ggatgatgacattgacctgtttggc

SEQ ID NO: 266422 - DNA, 25 bp, Probe Sequence
ggatgctgacatcatttgtattatg

SEQ ID NO: 266423 - DNA, 25 bp, Probe Sequence
ggatgctgcctactttggtgagatc

SEQ ID NO: 266424 - DNA, 25 bp, Probe Sequence
ggatgctctctatttagcggagaaa

SEQ ID NO: 266425 - DNA, 25 bp, Probe Sequence
ggatctggccatctacgagccaaag

SEQ ID NO: 266426 - DNA, 25 bp, Probe Sequence
ggatctgggatcattggcagccaca

SEQ ID NO: 266427 - DNA, 25 bp, Probe Sequence
ggatgctaggatgttgctgctccgg

SEQ ID NO: 266428 - DNA, 25 bp, Probe Sequence
ggatctagacagcatctgttcaaag

SEQ ID NO: 266429 - DNA, 25 bp, Probe Sequence
ggatccacagcaccattgtttactg

SEQ ID NO: 266430 - DNA, 25 bp, Probe Sequence
ggatgccacagccaatgatgtgcct

SEQ ID NO: 266431 - DNA, 25 bp, Probe Sequence
ggatccagcacgtagtatctatata

SEQ ID NO: 266432 - DNA, 25 bp, Probe Sequence
ggatgccaacaatgtgacttatgtc

SEQ ID NO: 266433 - DNA, 25 bp, Probe Sequence
ggatgccaacgatgaggctgctgtc

SEQ ID NO: 266434 - DNA, 25 bp, Probe Sequence
ggatgaacaggtcaactgcttcaac

SEQ ID NO: 266435 - DNA, 25 bp, Probe Sequence
ggaggccagcgtctgacgttatgag

SEQ ID NO: 266436 - DNA, 25 bp, Probe Sequence
ggagtcaccgtggtccatttgggtg

SEQ ID NO: 266437 - DNA, 25 bp, Probe Sequence
ggaggtcctgtggtagcttgagggt

SEQ ID NO: 266438 - DNA, 25 bp, Probe Sequence
ggaggcctggccatataggagggtg

SEQ ID NO: 266439 - DNA, 25 bp, Probe Sequence
ggaggcgttgcgattattgaccagt

SEQ ID NO: 266440 - DNA, 25 bp, Probe Sequence
ggagcaggaaagataactactgagt

SEQ ID NO: 266441 - DNA, 25 bp, Probe Sequence
ggagagcttaggataggaaccagga

SEQ ID NO: 266442 - DNA, 25 bp, Probe Sequence
ggaggctttggtgggagagacgcga

SEQ ID NO: 266443 - DNA, 25 bp, Probe Sequence
ggatggaatgggggaagaggaggag

SEQ ID NO: 266444 - DNA, 25 bp, Probe Sequence
ggatgtaattctagcccagggaaga

SEQ ID NO: 266445 - DNA, 25 bp, Probe Sequence
ggatgaatttctgggccaggtgcac

SEQ ID NO: 266446 - DNA, 25 bp, Probe Sequence
ggatcctgttctttcagcaggtgaa

SEQ ID NO: 266447 - DNA, 25 bp, Probe Sequence
ggatcctgttctttcagcaggtgaa

SEQ ID NO: 266448 - DNA, 25 bp, Probe Sequence
ggatccgtttgaccaatttgcacca

SEQ ID NO: 266449 - DNA, 25 bp, Probe Sequence
ggatccctatatcctaacattgccc

SEQ ID NO: 266450 - DNA, 25 bp, Probe Sequence
ggatgtaactagtctaccagtgacc

SEQ ID NO: 266451 - DNA, 25 bp, Probe Sequence
ggatgtattgtttccactcgtgtcc

SEQ ID NO: 266452 - DNA, 25 bp, Probe Sequence
ggatggatttgtcacttagttcacg

SEQ ID NO: 266453 - DNA, 25 bp, Probe Sequence
ggatcagttcttcagcctggtacat

SEQ ID NO: 266454 - DNA, 25 bp, Probe Sequence
ggatctgttctccaagtgggctgac

SEQ ID NO: 266455 - DNA, 25 bp, Probe Sequence
ggatcttatcatggaggtgggaaca

SEQ ID NO: 266456 - DNA, 25 bp, Probe Sequence
ggatgttcaccatgttgggcaacca

SEQ ID NO: 266457 - DNA, 25 bp, Probe Sequence
ggaggtcccaccatgtggacagaca

SEQ ID NO: 266458 - DNA, 25 bp, Probe Sequence
ggagcggcccgtgtatgaacgaagc

SEQ ID NO: 266459 - DNA, 25 bp, Probe Sequence
ggacgtgcccatttttactgtaaat

SEQ ID NO: 266460 - DNA, 25 bp, Probe Sequence
ggaatgatgacctggttacggaaca

SEQ ID NO: 266461 - DNA, 25 bp, Probe Sequence
tggagaggaccatgtggtaaggaac

SEQ ID NO: 266462 - DNA, 25 bp, Probe Sequence
ggcaagaagcctgtggtaggtaaga

SEQ ID NO: 266463 - DNA, 25 bp, Probe Sequence
ggaggaactttttaagctgctgaag

SEQ ID NO: 266464 - DNA, 25 bp, Probe Sequence
ggaggtgatccttttaatggaacag

SEQ ID NO: 266465 - DNA, 25 bp, Probe Sequence
tggggtaggtttagtaggaactgat

SEQ ID NO: 266466 - DNA, 25 bp, Probe Sequence
tctggcagggcgtttttaaaaggca

SEQ ID NO: 266467 - DNA, 25 bp, Probe Sequence
ggaggagagggtattacaatcaaca

SEQ ID NO: 266468 - DNA, 25 bp, Probe Sequence
ggagcagggggatgggtaattacag

SEQ ID NO: 266469 - DNA, 25 bp, Probe Sequence
ggatgaggtaggtaggcaggaaaac

SEQ ID NO: 266470 - DNA, 25 bp, Probe Sequence
ggatgaagacaggtgggaggaatgg

SEQ ID NO: 266471 - DNA, 25 bp, Probe Sequence
ggatgagaaatgtgctggggtcgcg

SEQ ID NO: 266472 - DNA, 25 bp, Probe Sequence
ggatgtgaatcaggactcggagctc

SEQ ID NO: 266473 - DNA, 25 bp, Probe Sequence
ggatgtgatcatcgcagactgcggc

SEQ ID NO: 266474 - DNA, 25 bp, Probe Sequence
ggatgatgtcatcgtgctcaatggc

SEQ ID NO: 266475 - DNA, 25 bp, Probe Sequence
ggatgatgagaccatgtatgtgagt

SEQ ID NO: 266476 - DNA, 25 bp, Probe Sequence
ggatgtgaaatgcccaggatgctat

SEQ ID NO: 266477 - DNA, 25 bp, Probe Sequence
ggatgtgaaatgcccaggatgctat

SEQ ID NO: 266478 - DNA, 25 bp, Probe Sequence
ggatgtgaaatgcccaggatgctat

SEQ ID NO: 266479 - DNA, 25 bp, Probe Sequence
ggatgtcaactgcctacagatgttt

SEQ ID NO: 266480 - DNA, 25 bp, Probe Sequence
ggaggcagacatcctgacattgtga

SEQ ID NO: 266481 - DNA, 25 bp, Probe Sequence
ggaggaactgggccttgacaaagtg

SEQ ID NO: 266482 - DNA, 25 bp, Probe Sequence
ggaggaactgggccttgacaaagtg

SEQ ID NO: 266483 - DNA, 25 bp, Probe Sequence
tggagtcgacaggggcctacaacag

SEQ ID NO: 266484 - DNA, 25 bp, Probe Sequence
ggcggcaatcaacagtcttacacag

SEQ ID NO: 266485 - DNA, 25 bp, Probe Sequence
ggaggattcctgcaggcttaacagt

SEQ ID NO: 266486 - DNA, 25 bp, Probe Sequence
ggagcttccctatagtgaatacttc

SEQ ID NO: 266487 - DNA, 25 bp, Probe Sequence
ggagcttccctatagtgaatacttc

SEQ ID NO: 266488 - DNA, 25 bp, Probe Sequence
ggatcctccagtaaagtgaaattca

SEQ ID NO: 266489 - DNA, 25 bp, Probe Sequence
ggatgcacccaaaccattaaatgac

SEQ ID NO: 266490 - DNA, 25 bp, Probe Sequence
ggatgaactagattccctaattaca

SEQ ID NO: 266491 - DNA, 25 bp, Probe Sequence
ggagacctaattgggctgatttgcc

SEQ ID NO: 266492 - DNA, 25 bp, Probe Sequence
ggatgattctaagagtctggtgtgc

SEQ ID NO: 266493 - DNA, 25 bp, Probe Sequence
ggatgatggtgaggtaactgaggac

SEQ ID NO: 266494 - DNA, 25 bp, Probe Sequence
ggatgatggtgaggtaactgaggac

SEQ ID NO: 266495 - DNA, 25 bp, Probe Sequence
ggatgacgtgcgctttgagagcaac

SEQ ID NO: 266496 - DNA, 25 bp, Probe Sequence
ggatgacgctggctgatgatacaac

SEQ ID NO: 266497 - DNA, 25 bp, Probe Sequence
ggatgacgctggctgatgatacaac

SEQ ID NO: 266498 - DNA, 25 bp, Probe Sequence
ggatgacagtaccgaaacagacaca

SEQ ID NO: 266499 - DNA, 25 bp, Probe Sequence
ggatgacagtcagcgtgaagcagtt

SEQ ID NO: 266500 - DNA, 25 bp, Probe Sequence
ggatgatctgtttctaaagcgttac

SEQ ID NO: 266501 - DNA, 25 bp, Probe Sequence
ggatgactatgtgcccaaactgtac

SEQ ID NO: 266502 - DNA, 25 bp, Probe Sequence
ggaggctggctggaataaaggtaca

SEQ ID NO: 266503 - DNA, 25 bp, Probe Sequence
ggagacccaggatttagggtcacat

SEQ ID NO: 266504 - DNA, 25 bp, Probe Sequence
ggaaccctgcggagggacttcaatc

SEQ ID NO: 266505 - DNA, 25 bp, Probe Sequence
ggaccgccggcgagcggagtgaaca

SEQ ID NO: 266506 - DNA, 25 bp, Probe Sequence
ggagccccgaagactcggagggagc

SEQ ID NO: 266507 - DNA, 25 bp, Probe Sequence
ggatgactcggatgtctggtggggc

SEQ ID NO: 266508 - DNA, 25 bp, Probe Sequence
ggatgcactggagagcttggtggca

SEQ ID NO: 266509 - DNA, 25 bp, Probe Sequence
ggatgcactggagagcttggtggca

SEQ ID NO: 266510 - DNA, 25 bp, Probe Sequence
ggatgcctggattccttgttatctc

SEQ ID NO: 266511 - DNA, 25 bp, Probe Sequence
ggatgccaggcatactttttcatgt

SEQ ID NO: 266512 - DNA, 25 bp, Probe Sequence
ggatgctagtgaggtctttcctttg

SEQ ID NO: 266513 - DNA, 25 bp, Probe Sequence
ggatggttgagttctatgctccttg

SEQ ID NO: 266514 - DNA, 25 bp, Probe Sequence
ggagctgttttactgtctacttttc

SEQ ID NO: 266515 - DNA, 25 bp, Probe Sequence
ggagctgttttactgtctacttttc

SEQ ID NO: 266516 - DNA, 25 bp, Probe Sequence
ggagctgttttactgtctacttttc

SEQ ID NO: 266517 - DNA, 25 bp, Probe Sequence
ggactgttttttataatatggccta

SEQ ID NO: 266518 - DNA, 25 bp, Probe Sequence
ggatgctttcattgtctttaagatg

SEQ ID NO: 266519 - DNA, 25 bp, Probe Sequence
ggatgctttcattgtctttaagatg

SEQ ID NO: 266520 - DNA, 25 bp, Probe Sequence
ggatgaaatcattgtccccaagaag

SEQ ID NO: 266521 - DNA, 25 bp, Probe Sequence
ggatgacaatattccacttagggta

SEQ ID NO: 266522 - DNA, 25 bp, Probe Sequence
ggatgatttctgtccacacaaaggt

SEQ ID NO: 266523 - DNA, 25 bp, Probe Sequence
ggatgctttcggaaaacacgctgta

SEQ ID NO: 266524 - DNA, 25 bp, Probe Sequence
ggactttcaggaacttaactattct

SEQ ID NO: 266525 - DNA, 25 bp, Probe Sequence
ggacttaataaagcacaacttgttg

SEQ ID NO: 266526 - DNA, 25 bp, Probe Sequence
ggagtggaaaaataccgtgtctgtt

SEQ ID NO: 266527 - DNA, 25 bp, Probe Sequence
ggatgcttgacaaactaacgggtgt

SEQ ID NO: 266528 - DNA, 25 bp, Probe Sequence
ggatctggtgatcacggagctgggg

SEQ ID NO: 266529 - DNA, 25 bp, Probe Sequence
ggatctgctgtttgaagcgcagcag

SEQ ID NO: 266530 - DNA, 25 bp, Probe Sequence
ggatctgtgtggcgacgtgcagttt

SEQ ID NO: 266531 - DNA, 25 bp, Probe Sequence
ggatctgctggtcagctcaggcagt

SEQ ID NO: 266532 - DNA, 25 bp, Probe Sequence
ggatcccttgaggccaggagtttga

SEQ ID NO: 266533 - DNA, 25 bp, Probe Sequence
ggatggcttgggcctaggaggttga

SEQ ID NO: 266534 - DNA, 25 bp, Probe Sequence
ggaggcctagggggagaggtcacag

SEQ ID NO: 266535 - DNA, 25 bp, Probe Sequence
ggatccgcgcagggaggagggtcgg

SEQ ID NO: 266536 - DNA, 25 bp, Probe Sequence
ggatgcggggggatgagggtaggag

SEQ ID NO: 266537 - DNA, 25 bp, Probe Sequence
ggaggggtcccagagggtagagctc

SEQ ID NO: 266538 - DNA, 25 bp, Probe Sequence
ggagggaccccagaggtgaagcact

SEQ ID NO: 266539 - DNA, 25 bp, Probe Sequence
ggaggaacctgaacctgggaaccat

SEQ ID NO: 266540 - DNA, 25 bp, Probe Sequence
ggaggtaactggatctcgggtctca

SEQ ID NO: 266541 - DNA, 25 bp, Probe Sequence
ggatggtgatttgtttcatggtttt

SEQ ID NO: 266542 - DNA, 25 bp, Probe Sequence
ggatgaagtttttctttgttttgat

SEQ ID NO: 266543 - DNA, 25 bp, Probe Sequence
ggaaacttgcctctgttttttgcaa

SEQ ID NO: 266544 - DNA, 25 bp, Probe Sequence
ggatctcatttgactttgttttgat

SEQ ID NO: 266545 - DNA, 25 bp, Probe Sequence
ggatccatttgtgtggtgcatcttt

SEQ ID NO: 266546 - DNA, 25 bp, Probe Sequence
ggatgccctgtggcttgaggcattt

SEQ ID NO: 266547 - DNA, 25 bp, Probe Sequence
ggatctccttcctataggctgatgt

SEQ ID NO: 266548 - DNA, 25 bp, Probe Sequence
ggatctctctcactaaaggcataca

SEQ ID NO: 266549 - DNA, 25 bp, Probe Sequence
ggatctcctctggaagagactatca

SEQ ID NO: 266550 - DNA, 25 bp, Probe Sequence
ggatggccctgacaagtatgatcat

SEQ ID NO: 266551 - DNA, 25 bp, Probe Sequence
ggaggcacgtgataagacaaaagac

SEQ ID NO: 266552 - DNA, 25 bp, Probe Sequence
ggaggaaggctataccacagaacat

SEQ ID NO: 266553 - DNA, 25 bp, Probe Sequence
ggaggatgaggcaccattccaggag

SEQ ID NO: 266554 - DNA, 25 bp, Probe Sequence
ggaggtagacgagctgttcgacgta

SEQ ID NO: 266555 - DNA, 25 bp, Probe Sequence
ggatggctggaacactgtactgagg

SEQ ID NO: 266556 - DNA, 25 bp, Probe Sequence
ggaggcggaacaagtccacggagtc

SEQ ID NO: 266557 - DNA, 25 bp, Probe Sequence
ggaggcgcggaaagccgacgcgcgt

SEQ ID NO: 266558 - DNA, 25 bp, Probe Sequence
ggaggagctgagcaacgtactggcc

SEQ ID NO: 266559 - DNA, 25 bp, Probe Sequence
ggatgtcacgagctcgttagctgcg

SEQ ID NO: 266560 - DNA, 25 bp, Probe Sequence
ggatgatgacgatctcgaggacctg

SEQ ID NO: 266561 - DNA, 25 bp, Probe Sequence
ggatgatgacgatctcgaggacctg

SEQ ID NO: 266562 - DNA, 25 bp, Probe Sequence
ggagtccaaagctcaggacctgact

SEQ ID NO: 266563 - DNA, 25 bp, Probe Sequence
ggagtcagagaacaaggacgctggt

SEQ ID NO: 266564 - DNA, 25 bp, Probe Sequence
ggaggagtgagacaggtgataatgg

SEQ ID NO: 266565 - DNA, 25 bp, Probe Sequence
ggatgggggcagggtggaagcggct

SEQ ID NO: 266566 - DNA, 25 bp, Probe Sequence
tacagagggagcaggggaaagttaa

SEQ ID NO: 266567 - DNA, 25 bp, Probe Sequence
taaaggaagcccccgaaggctggca

SEQ ID NO: 266568 - DNA, 25 bp, Probe Sequence
taaaggaataccttccgcgaggcgg

SEQ ID NO: 266569 - DNA, 25 bp, Probe Sequence
ggcaaggattacatctccctgaacg

SEQ ID NO: 266570 - DNA, 25 bp, Probe Sequence
tggaaggattaagatctcccccagg

SEQ ID NO: 266571 - DNA, 25 bp, Probe Sequence
ggaagagttaagaagtcgtggctag

SEQ ID NO: 266572 - DNA, 25 bp, Probe Sequence
ggaggggtgtggcagtggttttggc

SEQ ID NO: 266573 - DNA, 25 bp, Probe Sequence
ggaggtggtggacggactgtaattg

SEQ ID NO: 266574 - DNA, 25 bp, Probe Sequence
ggagtaggggactgagccttcactt

SEQ ID NO: 266575 - DNA, 25 bp, Probe Sequence
ggagataaaccctgaccattccatt

SEQ ID NO: 266576 - DNA, 25 bp, Probe Sequence
tgaagaaaaccccgaggtggccgtg

SEQ ID NO: 266577 - DNA, 25 bp, Probe Sequence
tgattcttacaagccgggggcctgg

SEQ ID NO: 266578 - DNA, 25 bp, Probe Sequence
tttcgctccccagcggggggaggct

SEQ ID NO: 266579 - DNA, 25 bp, Probe Sequence
tgtttccccgactggggcagggtgt

SEQ ID NO: 266580 - DNA, 25 bp, Probe Sequence
tgtaagcacttttacggggcgggtg

SEQ ID NO: 266581 - DNA, 25 bp, Probe Sequence
tggaggacattctccgggttggggt

SEQ ID NO: 266582 - DNA, 25 bp, Probe Sequence
ggaggacatttaggggagggcagag

SEQ ID NO: 266583 - DNA, 25 bp, Probe Sequence
ggagtaatggtcacgaggtccagac

SEQ ID NO: 266584 - DNA, 25 bp, Probe Sequence
ggagtacaggaacagcaggttcggc

SEQ ID NO: 266585 - DNA, 25 bp, Probe Sequence
ggaggaaggggaccagccttggact

SEQ ID NO: 266586 - DNA, 25 bp, Probe Sequence
ggaggaattgggacctggttatgtt

SEQ ID NO: 266587 - DNA, 25 bp, Probe Sequence
ggaggcagttggtacctttcaagat

SEQ ID NO: 266588 - DNA, 25 bp, Probe Sequence
ggatggcaattctgacactcttaaa

SEQ ID NO: 266589 - DNA, 25 bp, Probe Sequence
ggatgaaactcataacctgtcatca

SEQ ID NO: 266590 - DNA, 25 bp, Probe Sequence
ggatgacgacaagaactttagcaaa

SEQ ID NO: 266591 - DNA, 25 bp, Probe Sequence
ggaggagctcaagcaacttcgaagc

SEQ ID NO: 266592 - DNA, 25 bp, Probe Sequence
ggatgtagtatatacctgggcaact

SEQ ID NO: 266593 - DNA, 25 bp, Probe Sequence
ggatgaagattgaaccctggctgaa

SEQ ID NO: 266594 - DNA, 25 bp, Probe Sequence
ggatgacacaatatcacctagctgg

SEQ ID NO: 266595 - DNA, 25 bp, Probe Sequence
ggatgatacagtctccatcaggcag

SEQ ID NO: 266596 - DNA, 25 bp, Probe Sequence
ggatgacacagtctacatgggcaaa

SEQ ID NO: 266597 - DNA, 25 bp, Probe Sequence
ggatgcgcaattcatacttgccaaa

SEQ ID NO: 266598 - DNA, 25 bp, Probe Sequence
ggatgcagcagtgacctgttccaaa

SEQ ID NO: 266599 - DNA, 25 bp, Probe Sequence
ggatgcatggatgacccatctcacc

SEQ ID NO: 266600 - DNA, 25 bp, Probe Sequence
ggatgcagaaggagatcaccgccct

SEQ ID NO: 266601 - DNA, 25 bp, Probe Sequence
ggatgaggatggagatgacctgctc

SEQ ID NO: 266602 - DNA, 25 bp, Probe Sequence
ggatgagcaatgcaagtgatttctt

SEQ ID NO: 266603 - DNA, 25 bp, Probe Sequence
ggatgacgacgatgtgttcattgga

SEQ ID NO: 266604 - DNA, 25 bp, Probe Sequence
ggatgaacacgtgggctccaagtgc

SEQ ID NO: 266605 - DNA, 25 bp, Probe Sequence
ggatgtaagcctggcccataatgtg

SEQ ID NO: 266606 - DNA, 25 bp, Probe Sequence
ggatgtttgccccgaatgagaggtt

SEQ ID NO: 266607 - DNA, 25 bp, Probe Sequence
ggatgtactccaggaaatagaaaat

SEQ ID NO: 266608 - DNA, 25 bp, Probe Sequence
ggatgtccaccatgactccaaaaat

SEQ ID NO: 266609 - DNA, 25 bp, Probe Sequence
ggatgcaaaaacgattccgaaacat

SEQ ID NO: 266610 - DNA, 25 bp, Probe Sequence
ggagcaaataaccatgtcaaatacc

SEQ ID NO: 266611 - DNA, 25 bp, Probe Sequence
ggagggataatttgatcgaatcacc

SEQ ID NO: 266612 - DNA, 25 bp, Probe Sequence
ggatgggatcttaaaccctcacgct

SEQ ID NO: 266613 - DNA, 25 bp, Probe Sequence
ggatggtgatttataacctacccaa

SEQ ID NO: 266614 - DNA, 25 bp, Probe Sequence
ggaggtctctgaggttactgtaccc

SEQ ID NO: 266615 - DNA, 25 bp, Probe Sequence
ggaggggatgatggttcctgtaact

SEQ ID NO: 266616 - DNA, 25 bp, Probe Sequence
ggaggttgaggtgagccgaaattgc

SEQ ID NO: 266617 - DNA, 25 bp, Probe Sequence
ggaggctggaggaaggggggttgca

SEQ ID NO: 266618 - DNA, 25 bp, Probe Sequence
ggaggtggaggccggaaaggtcgca

SEQ ID NO: 266619 - DNA, 25 bp, Probe Sequence
ggagggtggtcgcagcaaagggttt

SEQ ID NO: 266620 - DNA, 25 bp, Probe Sequence
ggagggtgtcctgaacagcaaggtt

SEQ ID NO: 266621 - DNA, 25 bp, Probe Sequence
ggagggtgccaggtagaagctaggg

SEQ ID NO: 266622 - DNA, 25 bp, Probe Sequence
ggagctggtcgtattacctcagagg

SEQ ID NO: 266623 - DNA, 25 bp, Probe Sequence
ggaggagaagcttttggctctacag

SEQ ID NO: 266624 - DNA, 25 bp, Probe Sequence
ggatggaaactttctacctgcttgg

SEQ ID NO: 266625 - DNA, 25 bp, Probe Sequence
ggatggaaaatcactaaagcctgac

SEQ ID NO: 266626 - DNA, 25 bp, Probe Sequence
ggagaggaaaaggtataggcttgcc

SEQ ID NO: 266627 - DNA, 25 bp, Probe Sequence
ggagggctaaggctttagcattgtg

SEQ ID NO: 266628 - DNA, 25 bp, Probe Sequence
ggatggagtgaagggttttcaattc

SEQ ID NO: 266629 - DNA, 25 bp, Probe Sequence
ggagaaggaatgggaccttctaatc

SEQ ID NO: 266630 - DNA, 25 bp, Probe Sequence
ggaggagcggaccgaccgctccaag

SEQ ID NO: 266631 - DNA, 25 bp, Probe Sequence
ggaggagctggaagaggccgtgggc

SEQ ID NO: 266632 - DNA, 25 bp, Probe Sequence
ggaggagctggaagaggccgtgggc

SEQ ID NO: 266633 - DNA, 25 bp, Probe Sequence
ggaggagacgtgaggcaactgtggc

SEQ ID NO: 266634 - DNA, 25 bp, Probe Sequence
ggaggagactcttgatgtcaccttc

SEQ ID NO: 266635 - DNA, 25 bp, Probe Sequence
ggaggacacgagtatgtacccacta

SEQ ID NO: 266636 - DNA, 25 bp, Probe Sequence
ggaggacaagagttgcttcaaggca

SEQ ID NO: 266637 - DNA, 25 bp, Probe Sequence
ggagtaccagattgtgttcgaggga

SEQ ID NO: 266638 - DNA, 25 bp, Probe Sequence
ggagtaccagattgtgttcgaggga

SEQ ID NO: 266639 - DNA, 25 bp, Probe Sequence
ggatgaatctagaaggtatggggta

SEQ ID NO: 266640 - DNA, 25 bp, Probe Sequence
ggagaatcatcggggtcaggtcagt

SEQ ID NO: 266641 - DNA, 25 bp, Probe Sequence
ggaggaatcggagaagcagctctgt

SEQ ID NO: 266642 - DNA, 25 bp, Probe Sequence
ggatgacacttgcaaaagcttgtga

SEQ ID NO: 266643 - DNA, 25 bp, Probe Sequence
ggatgacatcttcaaacatgccatt

SEQ ID NO: 266644 - DNA, 25 bp, Probe Sequence
ggatgataatctcaagacaccttcc

SEQ ID NO: 266645 - DNA, 25 bp, Probe Sequence
ggatgataatctcaagacacctgcc

SEQ ID NO: 266646 - DNA, 25 bp, Probe Sequence
ggatgataatctcaagactcctccc

SEQ ID NO: 266647 - DNA, 25 bp, Probe Sequence
ggatgataatctcaagactcctccc

SEQ ID NO: 266648 - DNA, 25 bp, Probe Sequence
ggatgataatctcaagactcctccc

SEQ ID NO: 266649 - DNA, 25 bp, Probe Sequence
ggatgataatctcaagactcctccc

SEQ ID NO: 266650 - DNA, 25 bp, Probe Sequence
ggatgagaactgaataatctttgcc

SEQ ID NO: 266651 - DNA, 25 bp, Probe Sequence
ggaggaatttacaatttccagctta

SEQ ID NO: 266652 - DNA, 25 bp, Probe Sequence
ggatgctgtttttccattctacacc

SEQ ID NO: 266653 - DNA, 25 bp, Probe Sequence
ggatggttttgttcatcttccacca

SEQ ID NO: 266654 - DNA, 25 bp, Probe Sequence
ggatgtgttatgttgtatgtacgca

SEQ ID NO: 266655 - DNA, 25 bp, Probe Sequence
ggatgctggtacaagttgtgggact

SEQ ID NO: 266656 - DNA, 25 bp, Probe Sequence
ggatggagaagaggtcgtgggtctt

SEQ ID NO: 266657 - DNA, 25 bp, Probe Sequence
ggatggagacgatgacctggtgatc

SEQ ID NO: 266658 - DNA, 25 bp, Probe Sequence
ggatggcggcatgagtatctgggat

SEQ ID NO: 266659 - DNA, 25 bp, Probe Sequence
ggatgacagtatggacttccagtga

SEQ ID NO: 266660 - DNA, 25 bp, Probe Sequence
ggatgaaggtagcctgcatcacaga

SEQ ID NO: 266661 - DNA, 25 bp, Probe Sequence
ggatgccatgcagaactgcacactc

SEQ ID NO: 266662 - DNA, 25 bp, Probe Sequence
ggatgtcatgcaggaccacttcagc

SEQ ID NO: 266663 - DNA, 25 bp, Probe Sequence
ggatgctgcagctgattcagagtag

SEQ ID NO: 266664 - DNA, 25 bp, Probe Sequence
ggatgtatgcggactcagaaatgtg

SEQ ID NO: 266665 - DNA, 25 bp, Probe Sequence
ggatgcaatgtgcatgcctaaatgg

SEQ ID NO: 266666 - DNA, 25 bp, Probe Sequence
ggatgtctggcttgcctgaagggag

SEQ ID NO: 266667 - DNA, 25 bp, Probe Sequence
ggaggtcctttcaaaggctgcttcc

SEQ ID NO: 266668 - DNA, 25 bp, Probe Sequence
ggatgtgttcttaccaagaggcttc

SEQ ID NO: 266669 - DNA, 25 bp, Probe Sequence
ggagtgaccttacccaagtttgata

SEQ ID NO: 266670 - DNA, 25 bp, Probe Sequence
ggaggactcgtacttaggtgtctta

SEQ ID NO: 266671 - DNA, 25 bp, Probe Sequence
ggaggtgctcgagcctgaagattct

SEQ ID NO: 266672 - DNA, 25 bp, Probe Sequence
ggagaggggaccctaagactcctcg

SEQ ID NO: 266673 - DNA, 25 bp, Probe Sequence
ggagtgggggccattaattactctg

SEQ ID NO: 266674 - DNA, 25 bp, Probe Sequence
ggagtgggggaggttggtggaccat

SEQ ID NO: 266675 - DNA, 25 bp, Probe Sequence
ggatggggaggtgattggagtgaac

SEQ ID NO: 266676 - DNA, 25 bp, Probe Sequence
ggagggaggagtcagacgaggatat

SEQ ID NO: 266677 - DNA, 25 bp, Probe Sequence
ggagtgggttcatacacggagaatg

SEQ ID NO: 266678 - DNA, 25 bp, Probe Sequence
ggagttctttccgaccagtgagaat

SEQ ID NO: 266679 - DNA, 25 bp, Probe Sequence
ggagatattttaggcccctgcaact

SEQ ID NO: 266680 - DNA, 25 bp, Probe Sequence
ggaggatagggagcccctcatgact

SEQ ID NO: 266681 - DNA, 25 bp, Probe Sequence
ggatggagaggcggcctcgtgccat

SEQ ID NO: 266682 - DNA, 25 bp, Probe Sequence
ggatggatcaggtgcggctgatgaa

SEQ ID NO: 266683 - DNA, 25 bp, Probe Sequence
ggatgtgatcaactggaagctgaga

SEQ ID NO: 266684 - DNA, 25 bp, Probe Sequence
ggatgtatatcagtggagaaaatgg

SEQ ID NO: 266685 - DNA, 25 bp, Probe Sequence
ggatccaatcagatgcagagaatgt

SEQ ID NO: 266686 - DNA, 25 bp, Probe Sequence
ggatccaggcgggagcagaagctaa

SEQ ID NO: 266687 - DNA, 25 bp, Probe Sequence
ggagctcaagcaacttcgaagccaa

SEQ ID NO: 266688 - DNA, 25 bp, Probe Sequence
ggaccaactgtcctcgaaaagacac

SEQ ID NO: 266689 - DNA, 25 bp, Probe Sequence
ggagctagccgaattcgaaaaactc

SEQ ID NO: 266690 - DNA, 25 bp, Probe Sequence
ggagtacacaaaccagagaatgaca

SEQ ID NO: 266691 - DNA, 25 bp, Probe Sequence
ggatgtgcatcctagggaagataaa

SEQ ID NO: 266692 - DNA, 25 bp, Probe Sequence
ggaggctcagacaggaagattacct

SEQ ID NO: 266693 - DNA, 25 bp, Probe Sequence
ggaggccgaggcagaaaaatcactg

SEQ ID NO: 266694 - DNA, 25 bp, Probe Sequence
ggaggccgaggcagaaaaatcactg

SEQ ID NO: 266695 - DNA, 25 bp, Probe Sequence
ggagggcttgccatgaaaatgcaac

SEQ ID NO: 266696 - DNA, 25 bp, Probe Sequence
ggatgaggagactggcaacctgaaa

SEQ ID NO: 266697 - DNA, 25 bp, Probe Sequence
ggatgaggatgttacccaaagcaaa

SEQ ID NO: 266698 - DNA, 25 bp, Probe Sequence
ggagagagggaagctcaataaatca

SEQ ID NO: 266699 - DNA, 25 bp, Probe Sequence
ggatggtgggaagccaaagacaaac

SEQ ID NO: 266700 - DNA, 25 bp, Probe Sequence
ggaggtgggcgaggaaaaagctaga

SEQ ID NO: 266701 - DNA, 25 bp, Probe Sequence
ggatgggggcgtgggatgaaagtgg

SEQ ID NO: 266702 - DNA, 25 bp, Probe Sequence
ggatgaagggagactgggcaagact

SEQ ID NO: 266703 - DNA, 25 bp, Probe Sequence
ggatgcggggagcatggtgctggac

SEQ ID NO: 266704 - DNA, 25 bp, Probe Sequence
ggatgtggcccacgtgggtgtgaag

SEQ ID NO: 266705 - DNA, 25 bp, Probe Sequence
ggatgttggacaggtgggagtgaat

SEQ ID NO: 266706 - DNA, 25 bp, Probe Sequence
ggatgtaatgcactttgggaggcca

SEQ ID NO: 266707 - DNA, 25 bp, Probe Sequence
ggatgtgaagagcttggagtcagcc

SEQ ID NO: 266708 - DNA, 25 bp, Probe Sequence
ggaggaacagctgtggaattgccac

SEQ ID NO: 266709 - DNA, 25 bp, Probe Sequence
tgggactagagggggctttggcaac

SEQ ID NO: 266710 - DNA, 25 bp, Probe Sequence
ggagcaaagaaggggttaatgaagc

SEQ ID NO: 266711 - DNA, 25 bp, Probe Sequence
ggagttagaaggcctcccggagagc

SEQ ID NO: 266712 - DNA, 25 bp, Probe Sequence
ggaggctggaaaagcaccccaagaa

SEQ ID NO: 266713 - DNA, 25 bp, Probe Sequence
ggaggtggtagcaaggttccacaga

SEQ ID NO: 266714 - DNA, 25 bp, Probe Sequence
ggatggggctaggagggagctgcag

SEQ ID NO: 266715 - DNA, 25 bp, Probe Sequence
ggatgaggtgctaccaggagagtgg

SEQ ID NO: 266716 - DNA, 25 bp, Probe Sequence
ggatgcagggatttgggagcagtgg

SEQ ID NO: 266717 - DNA, 25 bp, Probe Sequence
ggatgcagcagttttgctggagcag

SEQ ID NO: 266718 - DNA, 25 bp, Probe Sequence
ggaggcatggctttgcggcatgcag

SEQ ID NO: 266719 - DNA, 25 bp, Probe Sequence
ggaggatggtcatggtggccaagaa

SEQ ID NO: 266720 - DNA, 25 bp, Probe Sequence
ggagtgaggaatagttgagccccaa

SEQ ID NO: 266721 - DNA, 25 bp, Probe Sequence
ggaggaaggtggactggctcaccga

SEQ ID NO: 266722 - DNA, 25 bp, Probe Sequence
ggaggaagcattgactggtcctatg

SEQ ID NO: 266723 - DNA, 25 bp, Probe Sequence
ggaggatgagtacacggtctatgac

SEQ ID NO: 266724 - DNA, 25 bp, Probe Sequence
ggaggagagcttccgcaagtttgcc

SEQ ID NO: 266725 - DNA, 25 bp, Probe Sequence
ggatgtgggtggccagaagtccctg

SEQ ID NO: 266726 - DNA, 25 bp, Probe Sequence
ggatgagggtggccgatgatgtaac

SEQ ID NO: 266727 - DNA, 25 bp, Probe Sequence
ggatgaggagggcgtgtggtgctat

SEQ ID NO: 266728 - DNA, 25 bp, Probe Sequence
ggatggagtggggatggtcgagtat

SEQ ID NO: 266729 - DNA, 25 bp, Probe Sequence
ggatgagatgcgagccttggcaggc

SEQ ID NO: 266730 - DNA, 25 bp, Probe Sequence
ggatggagctgaggtgcttgggact

SEQ ID NO: 266731 - DNA, 25 bp, Probe Sequence
ggatgggtgcatgggcattcttgct

SEQ ID NO: 266732 - DNA, 25 bp, Probe Sequence
ggatgtggctgatgcacttctacag

SEQ ID NO: 266733 - DNA, 25 bp, Probe Sequence
ggatgagctggatcagctttccaag

SEQ ID NO: 266734 - DNA, 25 bp, Probe Sequence
ggaggcttgagccattattgctaag

SEQ ID NO: 266735 - DNA, 25 bp, Probe Sequence
ggatgagcaatctgatatatatcaa

SEQ ID NO: 266736 - DNA, 25 bp, Probe Sequence
ggatgacacatgcatgttcaaacat

SEQ ID NO: 266737 - DNA, 25 bp, Probe Sequence
ggatgcacagagttgttacattttt

SEQ ID NO: 266738 - DNA, 25 bp, Probe Sequence
ggatgcatctcagttttatgctttt

SEQ ID NO: 266739 - DNA, 25 bp, Probe Sequence
ggatgacttccttgttgttgtgcat

SEQ ID NO: 266740 - DNA, 25 bp, Probe Sequence
ggatgaatcccaaatgtgttatgct

SEQ ID NO: 266741 - DNA, 25 bp, Probe Sequence
ggatgactgaccaagaggctattca

SEQ ID NO: 266742 - DNA, 25 bp, Probe Sequence
ggatgacgatggcacaggccagaaa

SEQ ID NO: 266743 - DNA, 25 bp, Probe Sequence
ggagtagcatgcccaaggctacaaa

SEQ ID NO: 266744 - DNA, 25 bp, Probe Sequence
ggagtgaaggcctcgttgagagaag

SEQ ID NO: 266745 - DNA, 25 bp, Probe Sequence
ggatgatgaggagctagcgtatgta

SEQ ID NO: 266746 - DNA, 25 bp, Probe Sequence
ggatgacagtgagcacgctggtgct

SEQ ID NO: 266747 - DNA, 25 bp, Probe Sequence
ggaggcggggcaggctgaggcctcc

SEQ ID NO: 266748 - DNA, 25 bp, Probe Sequence
ggaggctgggttgagaggtcgccgg

SEQ ID NO: 266749 - DNA, 25 bp, Probe Sequence
ggagggtgtcctgaggagtccaagg

SEQ ID NO: 266750 - DNA, 25 bp, Probe Sequence
ggatgggactctgggagtgaaccaa

SEQ ID NO: 266751 - DNA, 25 bp, Probe Sequence
ggaggaagctccggagctggacgag

SEQ ID NO: 266752 - DNA, 25 bp, Probe Sequence
ggaggaacccatggatacagatcaa

SEQ ID NO: 266753 - DNA, 25 bp, Probe Sequence
ggaggaagccctggattcagtgagt

SEQ ID NO: 266754 - DNA, 25 bp, Probe Sequence
ggaggcgatccagtgatgagtcggg

SEQ ID NO: 266755 - DNA, 25 bp, Probe Sequence
ggaggcgacggagagcctgggaggt

SEQ ID NO: 266756 - DNA, 25 bp, Probe Sequence
ggagggactgaggccctctaggagg

SEQ ID NO: 266757 - DNA, 25 bp, Probe Sequence
ggaggcaattaggattgcccaggag

SEQ ID NO: 266758 - DNA, 25 bp, Probe Sequence
ggatggcaaagagagtcgcatctca

SEQ ID NO: 266759 - DNA, 25 bp, Probe Sequence
ggaggcaaatgggctgtctagtatg

SEQ ID NO: 266760 - DNA, 25 bp, Probe Sequence
ggaggaaatggcctagctatttgat

SEQ ID NO: 266761 - DNA, 25 bp, Probe Sequence
ggatgggaagtactggcgattctct

SEQ ID NO: 266762 - DNA, 25 bp, Probe Sequence
ggatgcttaatgattccagcctctc

SEQ ID NO: 266763 - DNA, 25 bp, Probe Sequence
ggatgtcttcagagatcctgctctt

SEQ ID NO: 266764 - DNA, 25 bp, Probe Sequence
ggatgactacagtgtgatcggccgc

SEQ ID NO: 266765 - DNA, 25 bp, Probe Sequence
ggatgacgacggatgagggcacagg

SEQ ID NO: 266766 - DNA, 25 bp, Probe Sequence
ggatgttgacgaaggaagcggcggc

SEQ ID NO: 266767 - DNA, 25 bp, Probe Sequence
ggatgtcggtgaattacgcggcggg

SEQ ID NO: 266768 - DNA, 25 bp, Probe Sequence
ggatgtggggtatgaggtggggctg

SEQ ID NO: 266769 - DNA, 25 bp, Probe Sequence
ggatgtgtgggtacttggtggggac

SEQ ID NO: 266770 - DNA, 25 bp, Probe Sequence
ggatggtgtcctactgtggatgagg

SEQ ID NO: 266771 - DNA, 25 bp, Probe Sequence
ggatgtgggctctcttgatgagaag

SEQ ID NO: 266772 - DNA, 25 bp, Probe Sequence
ggatggaagccgtctgatgcaggaa

SEQ ID NO: 266773 - DNA, 25 bp, Probe Sequence
ggaggcatcatgtctgttagggaaa

SEQ ID NO: 266774 - DNA, 25 bp, Probe Sequence
ggatggcactgggcattcagaaaag

SEQ ID NO: 266775 - DNA, 25 bp, Probe Sequence
ggatggcaatcgcatctcagaaacc

SEQ ID NO: 266776 - DNA, 25 bp, Probe Sequence
ggaggcaacctgaccagaaacactt

SEQ ID NO: 266777 - DNA, 25 bp, Probe Sequence
ggaggactactacaaaagcattaaa

SEQ ID NO: 266778 - DNA, 25 bp, Probe Sequence
ggaggacaagtagcacaaactgtat

SEQ ID NO: 266779 - DNA, 25 bp, Probe Sequence
ggaggcacagaaagggcaaccattc

SEQ ID NO: 266780 - DNA, 25 bp, Probe Sequence
ggaggtgcacttcgtggaacactac

SEQ ID NO: 266781 - DNA, 25 bp, Probe Sequence
ggagtcatgcttaggatggatccct

SEQ ID NO: 266782 - DNA, 25 bp, Probe Sequence
ggagtgcatctggaccataacggtc

SEQ ID NO: 266783 - DNA, 25 bp, Probe Sequence
ggaggcttggatggaaacacggtaa

SEQ ID NO: 266784 - DNA, 25 bp, Probe Sequence
ggatgagttgtgtgaataccccaag

SEQ ID NO: 266785 - DNA, 25 bp, Probe Sequence
ggatgagttgtgtgaataccccaag

SEQ ID NO: 266786 - DNA, 25 bp, Probe Sequence
ggaggtttcaagatagtcctgtcag

SEQ ID NO: 266787 - DNA, 25 bp, Probe Sequence
ggaggttcacaacctctgtggtccg

SEQ ID NO: 266788 - DNA, 25 bp, Probe Sequence
ggaggtcccaaatatgtggtctatc

SEQ ID NO: 266789 - DNA, 25 bp, Probe Sequence
ggaggaaaagtatgagtcggtgaca

SEQ ID NO: 266790 - DNA, 25 bp, Probe Sequence
ggatggataaggtggaacgcctgaa

SEQ ID NO: 266791 - DNA, 25 bp, Probe Sequence
ggatgttcaaggaggaccactcgct

SEQ ID NO: 266792 - DNA, 25 bp, Probe Sequence
ggagttcaagtccgacaacaccgtg

SEQ ID NO: 266793 - DNA, 25 bp, Probe Sequence
ggaggtaaatcccagaatcaacagt

SEQ ID NO: 266794 - DNA, 25 bp, Probe Sequence
ggaggtcacactccgggatttcagc

SEQ ID NO: 266795 - DNA, 25 bp, Probe Sequence
ggaggctgaactacaggaatctctg

SEQ ID NO: 266796 - DNA, 25 bp, Probe Sequence
ggatgatgctcatcgcataggaatg

SEQ ID NO: 266797 - DNA, 25 bp, Probe Sequence
ggatgactctgaagtaggcaaggct

SEQ ID NO: 266798 - DNA, 25 bp, Probe Sequence
ggatgagctcaaatcgaccaaattt

SEQ ID NO: 266799 - DNA, 25 bp, Probe Sequence
ggaggtaatctgggcgcacagaatt

SEQ ID NO: 266800 - DNA, 25 bp, Probe Sequence
ggaggctattgagggcacctacatt

SEQ ID NO: 266801 - DNA, 25 bp, Probe Sequence
ggaggctgatgcaagaggatcgctt

SEQ ID NO: 266802 - DNA, 25 bp, Probe Sequence
ggaggcatggcaagggacctctgct

SEQ ID NO: 266803 - DNA, 25 bp, Probe Sequence
ggaggctgttagctaacttgcacag

SEQ ID NO: 266804 - DNA, 25 bp, Probe Sequence
ggatggctttaattatggcccaagc

SEQ ID NO: 266805 - DNA, 25 bp, Probe Sequence
ggaggttaaatactaccagcacatc

SEQ ID NO: 266806 - DNA, 25 bp, Probe Sequence
ggatggtaaatatcctccctgcatg

SEQ ID NO: 266807 - DNA, 25 bp, Probe Sequence
ggatggcgatgttatagccccactc

SEQ ID NO: 266808 - DNA, 25 bp, Probe Sequence
ggatgactatgtgaaggcactgccc

SEQ ID NO: 266809 - DNA, 25 bp, Probe Sequence
ggatgactcagttacagagcctcac

SEQ ID NO: 266810 - DNA, 25 bp, Probe Sequence
ggatggccgctaaatagctcacgtt

SEQ ID NO: 266811 - DNA, 25 bp, Probe Sequence
ggatggacctatcacaataggctgt

SEQ ID NO: 266812 - DNA, 25 bp, Probe Sequence
ggatgtactgtctggaaaggtgtca

SEQ ID NO: 266813 - DNA, 25 bp, Probe Sequence
ggatgttcagtctgcagcaaagaag

SEQ ID NO: 266814 - DNA, 25 bp, Probe Sequence
ggatgagccggttgcagctaagagg

SEQ ID NO: 266815 - DNA, 25 bp, Probe Sequence
ggatgaggcaggtatcactagaggt

SEQ ID NO: 266816 - DNA, 25 bp, Probe Sequence
ggatgggagaattactgagaggcag

SEQ ID NO: 266817 - DNA, 25 bp, Probe Sequence
ggaggtagaatatcagagtggggct

SEQ ID NO: 266818 - DNA, 25 bp, Probe Sequence
ggaggaagatgaagaccaggactac

SEQ ID NO: 266819 - DNA, 25 bp, Probe Sequence
ggatggggatgaaggcacaggcgtc

SEQ ID NO: 266820 - DNA, 25 bp, Probe Sequence
ggatggggcaaaagaagcagcgacc

SEQ ID NO: 266821 - DNA, 25 bp, Probe Sequence
ggatgagggcaagatgaagctggat

SEQ ID NO: 266822 - DNA, 25 bp, Probe Sequence
ggatgggcgatagagatatatttat

SEQ ID NO: 266823 - DNA, 25 bp, Probe Sequence
ggagagggtgaattctatgcattta

SEQ ID NO: 266824 - DNA, 25 bp, Probe Sequence
ggatggcgggtttcagatgcattat

SEQ ID NO: 266825 - DNA, 25 bp, Probe Sequence
ggaggcagaatgaatacagtgtttc

SEQ ID NO: 266826 - DNA, 25 bp, Probe Sequence
ggcagtgcagttataaccatttggc

SEQ ID NO: 266827 - DNA, 25 bp, Probe Sequence
ggatgtgcttatataatcgcttagt

SEQ ID NO: 266828 - DNA, 25 bp, Probe Sequence
ggatggatacatactgatttcttac

SEQ ID NO: 266829 - DNA, 25 bp, Probe Sequence
ggatgtaccatttgtttcttatttg

SEQ ID NO: 266830 - DNA, 25 bp, Probe Sequence
ggatgtactctttgtgtatgctgtc

SEQ ID NO: 266831 - DNA, 25 bp, Probe Sequence
ggatgtgatctttggctgtgaagtg

SEQ ID NO: 266832 - DNA, 25 bp, Probe Sequence
ggatggtgcatcaatggcagtggag

SEQ ID NO: 266833 - DNA, 25 bp, Probe Sequence
ggatggatctcaatgacctggcgaa

SEQ ID NO: 266834 - DNA, 25 bp, Probe Sequence
ggatggatctcaatgacctggcgaa

SEQ ID NO: 266835 - DNA, 25 bp, Probe Sequence
ggatgagagctcctgaggggcagag

SEQ ID NO: 266836 - DNA, 25 bp, Probe Sequence
ggatgaggccgctagaggcctgagg

SEQ ID NO: 266837 - DNA, 25 bp, Probe Sequence
ggatgggccagcgatgaagaatgtg

SEQ ID NO: 266838 - DNA, 25 bp, Probe Sequence
ggatggctccaggataaggatcact

SEQ ID NO: 266839 - DNA, 25 bp, Probe Sequence
ggatggtacagattgcagagagttt

SEQ ID NO: 266840 - DNA, 25 bp, Probe Sequence
ggatgggcctgatagaagtgcattc

SEQ ID NO: 266841 - DNA, 25 bp, Probe Sequence
ggatggctggctaatagacactgaa

SEQ ID NO: 266842 - DNA, 25 bp, Probe Sequence
ggatggtgtcagaaaggccatgtag

SEQ ID NO: 266843 - DNA, 25 bp, Probe Sequence
ggatgtggtgcggaaggagtgtgaa

SEQ ID NO: 266844 - DNA, 25 bp, Probe Sequence
ggatgtgaatcccaagcgtgttata

SEQ ID NO: 266845 - DNA, 25 bp, Probe Sequence
ggatgtgttcattcaagctatttaa

SEQ ID NO: 266846 - DNA, 25 bp, Probe Sequence
ggatgtgtgctttaattcagcttta

SEQ ID NO: 266847 - DNA, 25 bp, Probe Sequence
ggatggctgttgggattaggagtgg

SEQ ID NO: 266848 - DNA, 25 bp, Probe Sequence
ggaggtttgccgtgatctagtgtgc

SEQ ID NO: 266849 - DNA, 25 bp, Probe Sequence
ggaggctttggcaactgactagttc

SEQ ID NO: 266850 - DNA, 25 bp, Probe Sequence
ggaggtcttacaactaaagtccaag

SEQ ID NO: 266851 - DNA, 25 bp, Probe Sequence
ggaggctcttagcttaagctgtaaa

SEQ ID NO: 266852 - DNA, 25 bp, Probe Sequence
ggaggtattagccaacacagttaga

SEQ ID NO: 266853 - DNA, 25 bp, Probe Sequence
ggatgagtatcttgcaatacacagt

SEQ ID NO: 266854 - DNA, 25 bp, Probe Sequence
ggatgagtatctgcaagaccagctg

SEQ ID NO: 266855 - DNA, 25 bp, Probe Sequence
ggatgtgttctctgagacccatgat

SEQ ID NO: 266856 - DNA, 25 bp, Probe Sequence
ggatgtgttctctcaaaacatgttc

SEQ ID NO: 266857 - DNA, 25 bp, Probe Sequence
ggatggctaccagctaagcctggcc

SEQ ID NO: 266858 - DNA, 25 bp, Probe Sequence
ggaggccatcgagctcagggaggcc

SEQ ID NO: 266859 - DNA, 25 bp, Probe Sequence
ggaggccatcaagatggggcagtac

SEQ ID NO: 266860 - DNA, 25 bp, Probe Sequence
ggagttccctcattcagggcagtaa

SEQ ID NO: 266861 - DNA, 25 bp, Probe Sequence
ggatgtgttacctaggagggtcaga

SEQ ID NO: 266862 - DNA, 25 bp, Probe Sequence
ggatgtgattaagacccggatgcag

SEQ ID NO: 266863 - DNA, 25 bp, Probe Sequence
ggagtatgtaccgacggccgatgct

SEQ ID NO: 266864 - DNA, 25 bp, Probe Sequence
ggatgtattatctgcacagacccac

SEQ ID NO: 266865 - DNA, 25 bp, Probe Sequence
ggatgtagtctagcagcaacccacc

SEQ ID NO: 266866 - DNA, 25 bp, Probe Sequence
ggaggagttacttgcagaccttcac

SEQ ID NO: 266867 - DNA, 25 bp, Probe Sequence
ggagagatgctctatctggctactc

SEQ ID NO: 266868 - DNA, 25 bp, Probe Sequence
ggatgagatttttcaggagctcgag

SEQ ID NO: 266869 - DNA, 25 bp, Probe Sequence
ggaggactgccaccagaagatcgat

SEQ ID NO: 266870 - DNA, 25 bp, Probe Sequence
ggaggatttctgcatgaagattcac

SEQ ID NO: 266871 - DNA, 25 bp, Probe Sequence
ggatgggcctctagtgacagatcca

SEQ ID NO: 266872 - DNA, 25 bp, Probe Sequence
ggatgtggccttagagcaagaacag

SEQ ID NO: 266873 - DNA, 25 bp, Probe Sequence
ggatgttccttcaggaggaagcagc

SEQ ID NO: 266874 - DNA, 25 bp, Probe Sequence
ggatgttccttcaggaggaagcagc

SEQ ID NO: 266875 - DNA, 25 bp, Probe Sequence
ggatgttccttcaggaggaagcagc

SEQ ID NO: 266876 - DNA, 25 bp, Probe Sequence
ggatgttcctacaggagtgtccata

SEQ ID NO: 266877 - DNA, 25 bp, Probe Sequence
ggatgtggccattcttgtgggctcc

SEQ ID NO: 266878 - DNA, 25 bp, Probe Sequence
ggatgatgtcttccttagtgttcct

SEQ ID NO: 266879 - DNA, 25 bp, Probe Sequence
ggagtacttccaacagttgctgact

SEQ ID NO: 266880 - DNA, 25 bp, Probe Sequence
ggagtagggttgagttctactttga

SEQ ID NO: 266881 - DNA, 25 bp, Probe Sequence
ggatgttgtgtattgtggtttattt

SEQ ID NO: 266882 - DNA, 25 bp, Probe Sequence
ggatgtggttaatctgtttcacctg

SEQ ID NO: 266883 - DNA, 25 bp, Probe Sequence
ggagtagtttagttgtttgacagga

SEQ ID NO: 266884 - DNA, 25 bp, Probe Sequence
ggagtaattgtttttggcaccagta

SEQ ID NO: 266885 - DNA, 25 bp, Probe Sequence
ggaggaactgatatctctggccaaa

SEQ ID NO: 266886 - DNA, 25 bp, Probe Sequence
ggagggggcagaaattggctcaaca

SEQ ID NO: 266887 - DNA, 25 bp, Probe Sequence
ggagtggtagaagagatcgccagac

SEQ ID NO: 266888 - DNA, 25 bp, Probe Sequence
ggaggcttaaaattgactgccaggc

SEQ ID NO: 266889 - DNA, 25 bp, Probe Sequence
ggatggctctgttaacttcttcagg

SEQ ID NO: 266890 - DNA, 25 bp, Probe Sequence
ggatggtggtagttgctgtttaatg

SEQ ID NO: 266891 - DNA, 25 bp, Probe Sequence
ggatgggactggtcgtgtttgtgct

SEQ ID NO: 266892 - DNA, 25 bp, Probe Sequence
ggagaaaataaggtgtttgcgatta

SEQ ID NO: 266893 - DNA, 25 bp, Probe Sequence
ggagtagaattagatgttaggttgg

SEQ ID NO: 266894 - DNA, 25 bp, Probe Sequence
ggagtagacctgaccttgttattta

SEQ ID NO: 266895 - DNA, 25 bp, Probe Sequence
ggagtggagcctgcggcttaatttg

SEQ ID NO: 266896 - DNA, 25 bp, Probe Sequence
ggagttgaggtgcgagttacaccaa

SEQ ID NO: 266897 - DNA, 25 bp, Probe Sequence
ggatggcatggactcggatttcaca

SEQ ID NO: 266898 - DNA, 25 bp, Probe Sequence
ggaggatgcagcttaagatattact

SEQ ID NO: 266899 - DNA, 25 bp, Probe Sequence
ggatgttgctgctgagaagattgac

SEQ ID NO: 266900 - DNA, 25 bp, Probe Sequence
ggatggtgccaagaagactgacttc

SEQ ID NO: 266901 - DNA, 25 bp, Probe Sequence
ggaggcgctcaattaaaagcctatc

SEQ ID NO: 266902 - DNA, 25 bp, Probe Sequence
ggatgtcacgtcttgaaaagcctat

SEQ ID NO: 266903 - DNA, 25 bp, Probe Sequence
ggatgtacctgcagaaagatgacct

SEQ ID NO: 266904 - DNA, 25 bp, Probe Sequence
ggatgtaacataatgaaacacacct

SEQ ID NO: 266905 - DNA, 25 bp, Probe Sequence
ggatggaaatatatctggcacattt

SEQ ID NO: 266906 - DNA, 25 bp, Probe Sequence
ggatggataaaacttgatcacaaat

SEQ ID NO: 266907 - DNA, 25 bp, Probe Sequence
ggatggtttaatgtgtatgcctatt

SEQ ID NO: 266908 - DNA, 25 bp, Probe Sequence
ggagggattaccacaatgccttgtg

SEQ ID NO: 266909 - DNA, 25 bp, Probe Sequence
ggaggaattcctagacattgcgttt

SEQ ID NO: 266910 - DNA, 25 bp, Probe Sequence
ggaggaatttcttgattaatgttga

SEQ ID NO: 266911 - DNA, 25 bp, Probe Sequence
ggaggttttatagccacatggtacg

SEQ ID NO: 266912 - DNA, 25 bp, Probe Sequence
ggaggagttcaaagcccaatttggg

SEQ ID NO: 266913 - DNA, 25 bp, Probe Sequence
ggaggacttcatgaagccagtcatt

SEQ ID NO: 266914 - DNA, 25 bp, Probe Sequence
ggaggatctctaaagcagtagccaa

SEQ ID NO: 266915 - DNA, 25 bp, Probe Sequence
ggaggtctgacaatgaggtagacga

SEQ ID NO: 266916 - DNA, 25 bp, Probe Sequence
ggaggttagattgggaggaaagctt

SEQ ID NO: 266917 - DNA, 25 bp, Probe Sequence
ggaggcctaagtgggtggatcacgt

SEQ ID NO: 266918 - DNA, 25 bp, Probe Sequence
ggaggccaaggcaggtggatcacct

SEQ ID NO: 266919 - DNA, 25 bp, Probe Sequence
ggaggccaaggcaggtggatcacct

SEQ ID NO: 266920 - DNA, 25 bp, Probe Sequence
ggaggccaaggcaggtggatcacct

SEQ ID NO: 266921 - DNA, 25 bp, Probe Sequence
ggaggccgaggcaggaagatcactt

SEQ ID NO: 266922 - DNA, 25 bp, Probe Sequence
ggaggccaaggcacaagaatcactt

SEQ ID NO: 266923 - DNA, 25 bp, Probe Sequence
ggagggcaagagtacaccaatttgt

SEQ ID NO: 266924 - DNA, 25 bp, Probe Sequence
ggagggaacagaccatggaaattta

SEQ ID NO: 266925 - DNA, 25 bp, Probe Sequence
ggatggttacagcacggtaatgttt

SEQ ID NO: 266926 - DNA, 25 bp, Probe Sequence
ggatgtttatcacagtgctgtttgt

SEQ ID NO: 266927 - DNA, 25 bp, Probe Sequence
ggagttgtgcaacagctcttttgag

SEQ ID NO: 266928 - DNA, 25 bp, Probe Sequence
ggagttgtgtgaccacgtgcatgtc

SEQ ID NO: 266929 - DNA, 25 bp, Probe Sequence
ggatgtggtgttccacatgtgcctg

SEQ ID NO: 266930 - DNA, 25 bp, Probe Sequence
ggatgtcgatgacttcatcaacacg

SEQ ID NO: 266931 - DNA, 25 bp, Probe Sequence
ggatgtcgatgacttcatcaacacg

SEQ ID NO: 266932 - DNA, 25 bp, Probe Sequence
ggatggagatggtatcatcaagctc

SEQ ID NO: 266933 - DNA, 25 bp, Probe Sequence
ggatggcttggacatccagctgcca

SEQ ID NO: 266934 - DNA, 25 bp, Probe Sequence
ggaggttgagcaactacactgcgct

SEQ ID NO: 266935 - DNA, 25 bp, Probe Sequence
ggaggttgggaattcttgctgttaa

SEQ ID NO: 266936 - DNA, 25 bp, Probe Sequence
ggatggacttactattcttgtttat

SEQ ID NO: 266937 - DNA, 25 bp, Probe Sequence
ggaggtcttttaatctgatgttctc

SEQ ID NO: 266938 - DNA, 25 bp, Probe Sequence
ggatgtcatctttgtatttggattc

SEQ ID NO: 266939 - DNA, 25 bp, Probe Sequence
ggatgtatgcataaaatcataggac

SEQ ID NO: 266940 - DNA, 25 bp, Probe Sequence
ggatggatgcatcacactcaaggac

SEQ ID NO: 266941 - DNA, 25 bp, Probe Sequence
ggatggtgtgtagcccagtgactgt

SEQ ID NO: 266942 - DNA, 25 bp, Probe Sequence
ggatggtgtgtagcccagtgactct

SEQ ID NO: 266943 - DNA, 25 bp, Probe Sequence
ggagggagtagaactttgactctaa

SEQ ID NO: 266944 - DNA, 25 bp, Probe Sequence
ggagggagtttattattgagtcttt

SEQ ID NO: 266945 - DNA, 25 bp, Probe Sequence
ggagggtttatcaactgtgggcttt

SEQ ID NO: 266946 - DNA, 25 bp, Probe Sequence
ggagcagggaaaacctgaggtgctt

SEQ ID NO: 266947 - DNA, 25 bp, Probe Sequence
ggatggggacaagctgcgggtactc

SEQ ID NO: 266948 - DNA, 25 bp, Probe Sequence
ggaggacgacaaggtggggacagac

SEQ ID NO: 266949 - DNA, 25 bp, Probe Sequence
ggaggacaaactgtgatgtgggtac

SEQ ID NO: 266950 - DNA, 25 bp, Probe Sequence
ggaggctaaaccctgtctggatttc

SEQ ID NO: 266951 - DNA, 25 bp, Probe Sequence
ggatgtccagcagcctgttctggat

SEQ ID NO: 266952 - DNA, 25 bp, Probe Sequence
ggagtccagatcccatgaatagccc

SEQ ID NO: 266953 - DNA, 25 bp, Probe Sequence
ggaggccgtgctggaaaaggcagcc

SEQ ID NO: 266954 - DNA, 25 bp, Probe Sequence
ggaggcaggccaggacatcaaagtc

SEQ ID NO: 266955 - DNA, 25 bp, Probe Sequence
ggaggagcggcaggactatatcaac

SEQ ID NO: 266956 - DNA, 25 bp, Probe Sequence
ggagaataacttcttgctacagcat

SEQ ID NO: 266957 - DNA, 25 bp, Probe Sequence
ggacgttccggagagattgccattg

SEQ ID NO: 266958 - DNA, 25 bp, Probe Sequence
ggacgttccggagagattgccattg

SEQ ID NO: 266959 - DNA, 25 bp, Probe Sequence
ggaggcttcaagaggagggcactag

SEQ ID NO: 266960 - DNA, 25 bp, Probe Sequence
ggaggctccaggattaggaaatgtg

SEQ ID NO: 266961 - DNA, 25 bp, Probe Sequence
ggaggcccaggcaagtagatgcaag

SEQ ID NO: 266962 - DNA, 25 bp, Probe Sequence
ggaggccaaggcagccagatcatga

SEQ ID NO: 266963 - DNA, 25 bp, Probe Sequence
ggaggccgaggtgggcagatcatct

SEQ ID NO: 266964 - DNA, 25 bp, Probe Sequence
ggaggccaaggcgggcagatcacaa

SEQ ID NO: 266965 - DNA, 25 bp, Probe Sequence
ggaggccaaggcaggcagatcacct

SEQ ID NO: 266966 - DNA, 25 bp, Probe Sequence
ggaggccaaggcgggaggattgctt

SEQ ID NO: 266967 - DNA, 25 bp, Probe Sequence
ggaggccgaggtgggaggattgctt

SEQ ID NO: 266968 - DNA, 25 bp, Probe Sequence
ggaggccgaggtgggaggatcattg

SEQ ID NO: 266969 - DNA, 25 bp, Probe Sequence
ggaggccggattgtactgtatgggg

SEQ ID NO: 266970 - DNA, 25 bp, Probe Sequence
ggaggttggtgtggattctgttgaa

SEQ ID NO: 266971 - DNA, 25 bp, Probe Sequence
ggaggttgtgtttacaatgtagaaa

SEQ ID NO: 266972 - DNA, 25 bp, Probe Sequence
ggaggtcgaccttctaatgtatgaa

SEQ ID NO: 266973 - DNA, 25 bp, Probe Sequence
ggagtctctgacagacaaatctaag

SEQ ID NO: 266974 - DNA, 25 bp, Probe Sequence
ggagatcctgaaggagcagatccga

SEQ ID NO: 266975 - DNA, 25 bp, Probe Sequence
ggagcaccaaaggaccttcgttaag

SEQ ID NO: 266976 - DNA, 25 bp, Probe Sequence
ggagaccaaggttcagttcttaaag

SEQ ID NO: 266977 - DNA, 25 bp, Probe Sequence
ggagaccacagcctacagaataaag

SEQ ID NO: 266978 - DNA, 25 bp, Probe Sequence
ggagacatcaaatttctgactaaag

SEQ ID NO: 266979 - DNA, 25 bp, Probe Sequence
ggagtatccaacttgtgcaaaaaga

SEQ ID NO: 266980 - DNA, 25 bp, Probe Sequence
ggagactcgcccttcaataaaaaat

SEQ ID NO: 266981 - DNA, 25 bp, Probe Sequence
ggagactcgcccttcaataaaaaat

SEQ ID NO: 266982 - DNA, 25 bp, Probe Sequence
ggaaatcgttttcattagatgtaca

SEQ ID NO: 266983 - DNA, 25 bp, Probe Sequence
ggaaatacccttcttttatgagcag

SEQ ID NO: 266984 - DNA, 25 bp, Probe Sequence
ggagagaacccttacaaattcgaag

SEQ ID NO: 266985 - DNA, 25 bp, Probe Sequence
ggagagaaaccctacaaatgtgaaa

SEQ ID NO: 266986 - DNA, 25 bp, Probe Sequence
tgggagaaactgggaaacaaacgat

SEQ ID NO: 266987 - DNA, 25 bp, Probe Sequence
ggaggaaactcgcagataccgacct

SEQ ID NO: 266988 - DNA, 25 bp, Probe Sequence
ggatggaaactacttgaagccgccc

SEQ ID NO: 266989 - DNA, 25 bp, Probe Sequence
ggaggtaattggctaaccagccaag

SEQ ID NO: 266990 - DNA, 25 bp, Probe Sequence
ggatggggagggccatacccaggac

SEQ ID NO: 266991 - DNA, 25 bp, Probe Sequence
ggagggggtggtcatcacgaggaac

SEQ ID NO: 266992 - DNA, 25 bp, Probe Sequence
ggagggggtggtcatcacgaggaac

SEQ ID NO: 266993 - DNA, 25 bp, Probe Sequence
ggagggtgggacacaacagtacaga

SEQ ID NO: 266994 - DNA, 25 bp, Probe Sequence
ggagggttgcagtttctaagtgaaa

SEQ ID NO: 266995 - DNA, 25 bp, Probe Sequence
ggatgggttgctttataaatgtgcc

SEQ ID NO: 266996 - DNA, 25 bp, Probe Sequence
ggagggttgcttgagactagcctag

SEQ ID NO: 266997 - DNA, 25 bp, Probe Sequence
ggaggctgacgcataagacttgctt

SEQ ID NO: 266998 - DNA, 25 bp, Probe Sequence
ggatggctgcacgaaacataccggt

SEQ ID NO: 266999 - DNA, 25 bp, Probe Sequence
ggatggtgacaactacacacagcag

SEQ ID NO: 267000 - DNA, 25 bp, Probe Sequence
ggatggtgatgaggtagaggaagag

SEQ ID NO: 267001 - DNA, 25 bp, Probe Sequence
ggatggactgagataaggccacaga

SEQ ID NO: 267002 - DNA, 25 bp, Probe Sequence
ggagtcaatagtacaagccaaagat

SEQ ID NO: 267003 - DNA, 25 bp, Probe Sequence
ggaggcatcaattagcaaagacaag

SEQ ID NO: 267004 - DNA, 25 bp, Probe Sequence
ggagtataagcccatcaagaaagtc

SEQ ID NO: 267005 - DNA, 25 bp, Probe Sequence
ggaggtccagacacaagaagaggat

SEQ ID NO: 267006 - DNA, 25 bp, Probe Sequence
ggaggtcttgaagccaatgagggat

SEQ ID NO: 267007 - DNA, 25 bp, Probe Sequence
ggatgggctgatgaccataaaggaa

SEQ ID NO: 267008 - DNA, 25 bp, Probe Sequence
ggaggagatgaggaagctacaaaag

SEQ ID NO: 267009 - DNA, 25 bp, Probe Sequence
ggagggatatagccagtaccaacgt

SEQ ID NO: 267010 - DNA, 25 bp, Probe Sequence
ggagggataagctcgacacagtcgt

SEQ ID NO: 267011 - DNA, 25 bp, Probe Sequence
ggagaattcaagtgtgaccctcatg

SEQ ID NO: 267012 - DNA, 25 bp, Probe Sequence
ggagacagtcacatagtcacgtcaa

SEQ ID NO: 267013 - DNA, 25 bp, Probe Sequence
ggagaactgccagaaactgaccaaa

SEQ ID NO: 267014 - DNA, 25 bp, Probe Sequence
ggaggagatgctccaaaccatacca

SEQ ID NO: 267015 - DNA, 25 bp, Probe Sequence
ggatggagatctgaagactcaaatt

SEQ ID NO: 267016 - DNA, 25 bp, Probe Sequence
ggatgggctatcataattcaagtat

SEQ ID NO: 267017 - DNA, 25 bp, Probe Sequence
ggaggacccatgtagattcgcagat

SEQ ID NO: 267018 - DNA, 25 bp, Probe Sequence
ggaggacacacagtctcagtccaga

SEQ ID NO: 267019 - DNA, 25 bp, Probe Sequence
ggagtcacacagacctggctgtgcg

SEQ ID NO: 267020 - DNA, 25 bp, Probe Sequence
ggatggaacatcagtggatggcagg

SEQ ID NO: 267021 - DNA, 25 bp, Probe Sequence
ggatggtgacacagaggatggctct

SEQ ID NO: 267022 - DNA, 25 bp, Probe Sequence
ggatggtgtccactgggaccagcat

SEQ ID NO: 267023 - DNA, 25 bp, Probe Sequence
ggatggtgattactggagattgctt

SEQ ID NO: 267024 - DNA, 25 bp, Probe Sequence
ggaggatgagccagggttgctacta

SEQ ID NO: 267025 - DNA, 25 bp, Probe Sequence
ggaggctgaggcaggtggttcactg

SEQ ID NO: 267026 - DNA, 25 bp, Probe Sequence
ggaggccaggcaaggtggctcgtgc

SEQ ID NO: 267027 - DNA, 25 bp, Probe Sequence
ggaggctgcattgagctatggtcgt

SEQ ID NO: 267028 - DNA, 25 bp, Probe Sequence
ggaggctgcagtgagctgagattgt

SEQ ID NO: 267029 - DNA, 25 bp, Probe Sequence
ggaggatctgatggatatggcagtg

SEQ ID NO: 267030 - DNA, 25 bp, Probe Sequence
ggaggtgcctaattggcaggaatta

SEQ ID NO: 267031 - DNA, 25 bp, Probe Sequence
ggaggggctatttttggagcattac

SEQ ID NO: 267032 - DNA, 25 bp, Probe Sequence
ggaggggctatttttggagcattac

SEQ ID NO: 267033 - DNA, 25 bp, Probe Sequence
ggaggggcaaattgggggtatgatc

SEQ ID NO: 267034 - DNA, 25 bp, Probe Sequence
ggaggaagcaaggggtgtggttgag

SEQ ID NO: 267035 - DNA, 25 bp, Probe Sequence
ggaggaggcctagtagtggggtgag

SEQ ID NO: 267036 - DNA, 25 bp, Probe Sequence
ggaggagaccccaagctgggagcac

SEQ ID NO: 267037 - DNA, 25 bp, Probe Sequence
ggaggaagccaggcgagtggggccc

SEQ ID NO: 267038 - DNA, 25 bp, Probe Sequence
ggaggaagaagcttaggcagggctc

SEQ ID NO: 267039 - DNA, 25 bp, Probe Sequence
ggaggaacaagaggaggaccgctca

SEQ ID NO: 267040 - DNA, 25 bp, Probe Sequence
ggaggtaaagcgaaggattcagcaa

SEQ ID NO: 267041 - DNA, 25 bp, Probe Sequence
ggaggggaatgtcaggattcgcaaa

SEQ ID NO: 267042 - DNA, 25 bp, Probe Sequence
ggaggagtaagggggctgtcacaaa

SEQ ID NO: 267043 - DNA, 25 bp, Probe Sequence
ggaggaacaagaggcggatgaagaa

SEQ ID NO: 267044 - DNA, 25 bp, Probe Sequence
ggaggggaagatggtcagtaggaca

SEQ ID NO: 267045 - DNA, 25 bp, Probe Sequence
ggagggtcacataggtagatggtaa

SEQ ID NO: 267046 - DNA, 25 bp, Probe Sequence
ggagggctgcctgggggaggcagac

SEQ ID NO: 267047 - DNA, 25 bp, Probe Sequence
ggaggcctgcctggtaagataagat

SEQ ID NO: 267048 - DNA, 25 bp, Probe Sequence
ggaggcattgctgtgaaagataatt

SEQ ID NO: 267049 - DNA, 25 bp, Probe Sequence
ggagataggataggagagagtagtt

SEQ ID NO: 267050 - DNA, 25 bp, Probe Sequence
ggaggccgagatgagcggatagctt

SEQ ID NO: 267051 - DNA, 25 bp, Probe Sequence
ggaggccgaagttggagagagctcg

SEQ ID NO: 267052 - DNA, 25 bp, Probe Sequence
ggaggcggaagttgcagtgagccga

SEQ ID NO: 267053 - DNA, 25 bp, Probe Sequence
ggaggcggaagttgcagtgagccaa

SEQ ID NO: 267054 - DNA, 25 bp, Probe Sequence
ggatggaggtagctgcaggctcaga

SEQ ID NO: 267055 - DNA, 25 bp, Probe Sequence
ggatggaggtagctgcaggctcaga

SEQ ID NO: 267056 - DNA, 25 bp, Probe Sequence
ggaggaagtaggcatggctgaatta

SEQ ID NO: 267057 - DNA, 25 bp, Probe Sequence
ggatggtacttgcatatggtgaatt

SEQ ID NO: 267058 - DNA, 25 bp, Probe Sequence
ggatggtgttctcttgagagcaagt

SEQ ID NO: 267059 - DNA, 25 bp, Probe Sequence
ggaggtgtgtggctggcaagcgagc

SEQ ID NO: 267060 - DNA, 25 bp, Probe Sequence
ggaggagctggtcgctctcaaagag

SEQ ID NO: 267061 - DNA, 25 bp, Probe Sequence
ggaggagttgtcctttgctgaagac

SEQ ID NO: 267062 - DNA, 25 bp, Probe Sequence
ggaggatgttgtttatcgaggagac

SEQ ID NO: 267063 - DNA, 25 bp, Probe Sequence
ggaggatgagagtccctgcaaggga

SEQ ID NO: 267064 - DNA, 25 bp, Probe Sequence
ggaggatggagacccagacgcagag

SEQ ID NO: 267065 - DNA, 25 bp, Probe Sequence
ggaggagggtgcttagctccagagc

SEQ ID NO: 267066 - DNA, 25 bp, Probe Sequence
ggagatgagggtagcggcccagcat

SEQ ID NO: 267067 - DNA, 25 bp, Probe Sequence
ggagggggctacatgaccaatgcct

SEQ ID NO: 267068 - DNA, 25 bp, Probe Sequence
ggaggcggagcttgcagtgagctga

SEQ ID NO: 267069 - DNA, 25 bp, Probe Sequence
ggaggcagaggcagaagcagcagag

SEQ ID NO: 267070 - DNA, 25 bp, Probe Sequence
ggaggcagaagtctacagtgagtct

SEQ ID NO: 267071 - DNA, 25 bp, Probe Sequence
ggaggcagggatcaacgtgacggtg

SEQ ID NO: 267072 - DNA, 25 bp, Probe Sequence
ggaggcttgagtggaactgtacagg

SEQ ID NO: 267073 - DNA, 25 bp, Probe Sequence
ggaggttgcagtgagtcgagatcat

SEQ ID NO: 267074 - DNA, 25 bp, Probe Sequence
ggaggcttagtccagtctgtgctcc

SEQ ID NO: 267075 - DNA, 25 bp, Probe Sequence
ggaggcttcagtgagctgtgatcac

SEQ ID NO: 267076 - DNA, 25 bp, Probe Sequence
ggaggcgttgtcaatatgtaccaca

SEQ ID NO: 267077 - DNA, 25 bp, Probe Sequence
ggagagtttgttttgctaccaatat

SEQ ID NO: 267078 - DNA, 25 bp, Probe Sequence
ggagagggtagtcagcatctccaat

SEQ ID NO: 267079 - DNA, 25 bp, Probe Sequence
ggaggtggtaggcaggacctctggg

SEQ ID NO: 267080 - DNA, 25 bp, Probe Sequence
ggaggtggatagcaaatgaactgtg

SEQ ID NO: 267081 - DNA, 25 bp, Probe Sequence
ggaggttgaagccaagtggggtgct

SEQ ID NO: 267082 - DNA, 25 bp, Probe Sequence
ggaggtctacatcaagaatggggat

SEQ ID NO: 267083 - DNA, 25 bp, Probe Sequence
ggaggcttatctcactgagtgagca

SEQ ID NO: 267084 - DNA, 25 bp, Probe Sequence
ggatggctattcagataacatggca

SEQ ID NO: 267085 - DNA, 25 bp, Probe Sequence
ggagggattcgagaatgagagcaag

SEQ ID NO: 267086 - DNA, 25 bp, Probe Sequence
ggaggttttgcacatatggacacag

SEQ ID NO: 267087 - DNA, 25 bp, Probe Sequence
ggaggtctattataagcagagctcg

SEQ ID NO: 267088 - DNA, 25 bp, Probe Sequence
ggaggtcttatataagcagagctcg

SEQ ID NO: 267089 - DNA, 25 bp, Probe Sequence
ggaggtcttatataagcagagctcg

SEQ ID NO: 267090 - DNA, 25 bp, Probe Sequence
ggaggtctatattataagagtttgc

SEQ ID NO: 267091 - DNA, 25 bp, Probe Sequence
ggaggtctatataaccagagctcgt

SEQ ID NO: 267092 - DNA, 25 bp, Probe Sequence
ggagtgtcattaatgggcaggcttt

SEQ ID NO: 267093 - DNA, 25 bp, Probe Sequence
ggaggtatgtctagggggcagtgtc

SEQ ID NO: 267094 - DNA, 25 bp, Probe Sequence
ggaggtttctatggaggctgcaatg

SEQ ID NO: 267095 - DNA, 25 bp, Probe Sequence
ggaggtgttctaacatgggcaagtg

SEQ ID NO: 267096 - DNA, 25 bp, Probe Sequence
ggaggccctcgtcatggagaagtgt

SEQ ID NO: 267097 - DNA, 25 bp, Probe Sequence
ggaggcccatggcattgtggtgacg

SEQ ID NO: 267098 - DNA, 25 bp, Probe Sequence
ggaggccagtgggagtgaggtgagc

SEQ ID NO: 267099 - DNA, 25 bp, Probe Sequence
ggaggctggcctgtgtggatatggc

SEQ ID NO: 267100 - DNA, 25 bp, Probe Sequence
ggaggtgacgctgagtggcatggac

SEQ ID NO: 267101 - DNA, 25 bp, Probe Sequence
ggaggatcacttgaggccaggactt

SEQ ID NO: 267102 - DNA, 25 bp, Probe Sequence
ggaggatcacttgaggccaggagtt

SEQ ID NO: 267103 - DNA, 25 bp, Probe Sequence
ggaggatacgtggttctagatgaat

SEQ ID NO: 267104 - DNA, 25 bp, Probe Sequence
ggcagcaggaccatttttcagaatc

SEQ ID NO: 267105 - DNA, 25 bp, Probe Sequence
ggagaggaagctttatttacaacca

SEQ ID NO: 267106 - DNA, 25 bp, Probe Sequence
ggagcaggaagagggttgttcaaat

SEQ ID NO: 267107 - DNA, 25 bp, Probe Sequence
ggagtggaaggtctattggccaaca

SEQ ID NO: 267108 - DNA, 25 bp, Probe Sequence
ggagggagctggtattaggggagac

SEQ ID NO: 267109 - DNA, 25 bp, Probe Sequence
ggagaggggtgagcggagggagacc

SEQ ID NO: 267110 - DNA, 25 bp, Probe Sequence
ggaggcaggtgtcaagctagggatg

SEQ ID NO: 267111 - DNA, 25 bp, Probe Sequence
ggaggctgggatctagcgagagaga

SEQ ID NO: 267112 - DNA, 25 bp, Probe Sequence
ggaggggtgttgtatggctgagcaa

SEQ ID NO: 267113 - DNA, 25 bp, Probe Sequence
ggagtcgctggtgattgggagctca

SEQ ID NO: 267114 - DNA, 25 bp, Probe Sequence
ggaggctgagttgcatggggcctag

SEQ ID NO: 267115 - DNA, 25 bp, Probe Sequence
ggaggtgacttgcatggtggggaca

SEQ ID NO: 267116 - DNA, 25 bp, Probe Sequence
ggaggatgagagagaggtaggtaag

SEQ ID NO: 267117 - DNA, 25 bp, Probe Sequence
ggagtggacagggaaggtcttacag

SEQ ID NO: 267118 - DNA, 25 bp, Probe Sequence
ggaggagaagggacatagtatataa

SEQ ID NO: 267119 - DNA, 25 bp, Probe Sequence
ggagtggaggggcatagcctttccc

SEQ ID NO: 267120 - DNA, 25 bp, Probe Sequence
ggaggggtgtggcaacactcattct

SEQ ID NO: 267121 - DNA, 25 bp, Probe Sequence
ggagattggtgctgtaaaatacctg

SEQ ID NO: 267122 - DNA, 25 bp, Probe Sequence
ggagaagctgcgcgaggtttaccgc

SEQ ID NO: 267123 - DNA, 25 bp, Probe Sequence
ggaggaccgtgggagtgttcacacc

SEQ ID NO: 267124 - DNA, 25 bp, Probe Sequence
ggaggacgcggggaggatcctgatc

SEQ ID NO: 267125 - DNA, 25 bp, Probe Sequence
ggaggacgtctccaagtatccagac

SEQ ID NO: 267126 - DNA, 25 bp, Probe Sequence
ggaggcagccttgagaaaccggcag

SEQ ID NO: 267127 - DNA, 25 bp, Probe Sequence
ggagggctcactgagtaaccatccc

SEQ ID NO: 267128 - DNA, 25 bp, Probe Sequence
ggagaatgaactgcccacaactccc

SEQ ID NO: 267129 - DNA, 25 bp, Probe Sequence
ggagatagagacacgtaaacccttc

SEQ ID NO: 267130 - DNA, 25 bp, Probe Sequence
ggagattggatcacagccgaaggag

SEQ ID NO: 267131 - DNA, 25 bp, Probe Sequence
ggagtgctgttcatcgacgaggtcc

SEQ ID NO: 267132 - DNA, 25 bp, Probe Sequence
ggagtttctcgacatcgaggaccca

SEQ ID NO: 267133 - DNA, 25 bp, Probe Sequence
ggagtttctcgacatcgaggaccca

SEQ ID NO: 267134 - DNA, 25 bp, Probe Sequence
ggagtttcttaaatctgaacagcac

SEQ ID NO: 267135 - DNA, 25 bp, Probe Sequence
ggaggtgcttatgttcaaaagctgt

SEQ ID NO: 267136 - DNA, 25 bp, Probe Sequence
ggagggtccagagtatgaagaactt

SEQ ID NO: 267137 - DNA, 25 bp, Probe Sequence
ggaggcgtgctcaagtatcggtacg

SEQ ID NO: 267138 - DNA, 25 bp, Probe Sequence
ggaggcaagctcaatgtacatctta

SEQ ID NO: 267139 - DNA, 25 bp, Probe Sequence
ggaggcatagtgctgacatatattc

SEQ ID NO: 267140 - DNA, 25 bp, Probe Sequence
ggaggctaggtatgcatctagtaag

SEQ ID NO: 267141 - DNA, 25 bp, Probe Sequence
ggaggctaagtattgctttctacaa

SEQ ID NO: 267142 - DNA, 25 bp, Probe Sequence
ggaggctgggtattgtcctgcctct

SEQ ID NO: 267143 - DNA, 25 bp, Probe Sequence
ggaggcaagagttgttcctgccctt

SEQ ID NO: 267144 - DNA, 25 bp, Probe Sequence
ggaggcataggccatttcaggcagc

SEQ ID NO: 267145 - DNA, 25 bp, Probe Sequence
ggaggcacgcagaaagctcagccag

SEQ ID NO: 267146 - DNA, 25 bp, Probe Sequence
ggaggcgtgcaatatctgccagcag

SEQ ID NO: 267147 - DNA, 25 bp, Probe Sequence
ggaggcagtcagccaattgcctggc

SEQ ID NO: 267148 - DNA, 25 bp, Probe Sequence
ggaggcttagcatattgcttggatt

SEQ ID NO: 267149 - DNA, 25 bp, Probe Sequence
ggaggccccaaagttttgattcttg

SEQ ID NO: 267150 - DNA, 25 bp, Probe Sequence
ggagagcgtcgttaatttatttctt

SEQ ID NO: 267151 - DNA, 25 bp, Probe Sequence
ggaggggctttctatttcatggagc

SEQ ID NO: 267152 - DNA, 25 bp, Probe Sequence
ggaggggctttctatttcatggagc

SEQ ID NO: 267153 - DNA, 25 bp, Probe Sequence
ggagtaggctttcagttcttggatc

SEQ ID NO: 267154 - DNA, 25 bp, Probe Sequence
ggcactaagtttacactcactttat

SEQ ID NO: 267155 - DNA, 25 bp, Probe Sequence
ggagcgattgtatttcctcctttgt

SEQ ID NO: 267156 - DNA, 25 bp, Probe Sequence
ggagggctgtgatttttccagtatt

SEQ ID NO: 267157 - DNA, 25 bp, Probe Sequence
ggagggctgtgatttttccagtatt

SEQ ID NO: 267158 - DNA, 25 bp, Probe Sequence
ggagggattattcttccagtagttg

SEQ ID NO: 267159 - DNA, 25 bp, Probe Sequence
ggaggaatgtaacctggaagtcatg

SEQ ID NO: 267160 - DNA, 25 bp, Probe Sequence
ggaggacttcaacagcaaacacatg

SEQ ID NO: 267161 - DNA, 25 bp, Probe Sequence
ggagtttgtcaacaacaatgcccaa

SEQ ID NO: 267162 - DNA, 25 bp, Probe Sequence
ggagtttatcacccatacaaccaac

SEQ ID NO: 267163 - DNA, 25 bp, Probe Sequence
ggagtaaatcaaccaaaacgaattg

SEQ ID NO: 267164 - DNA, 25 bp, Probe Sequence
ggagtaatggaacaaaacggccagc

SEQ ID NO: 267165 - DNA, 25 bp, Probe Sequence
ggagtaaggaaatctaggggcctgt

SEQ ID NO: 267166 - DNA, 25 bp, Probe Sequence
ggactaaggaacactttcgtgcaca

SEQ ID NO: 267167 - DNA, 25 bp, Probe Sequence
ggacccatgtaatacttttatccat

SEQ ID NO: 267168 - DNA, 25 bp, Probe Sequence
ggagccctgtacacaggcttttcca

SEQ ID NO: 267169 - DNA, 25 bp, Probe Sequence
ggagttcctgaagctggcttgagtc

SEQ ID NO: 267170 - DNA, 25 bp, Probe Sequence
ggagactttggatcggttggtgcca

SEQ ID NO: 267171 - DNA, 25 bp, Probe Sequence
ggagacttgggggggattgtagcag

SEQ ID NO: 267172 - DNA, 25 bp, Probe Sequence
ggaggttgggaggtggaggcccagc

SEQ ID NO: 267173 - DNA, 25 bp, Probe Sequence
ggaggcggaggaggaggtggcctag

SEQ ID NO: 267174 - DNA, 25 bp, Probe Sequence
ggagtcagtgggtgaggtgttccgc

SEQ ID NO: 267175 - DNA, 25 bp, Probe Sequence
ggagtcagtgggtgaggtgttccgc

SEQ ID NO: 267176 - DNA, 25 bp, Probe Sequence
ggaggcggaggacagggtcacagcc

SEQ ID NO: 267177 - DNA, 25 bp, Probe Sequence
ggagggggagtggaggggcatagcc

SEQ ID NO: 267178 - DNA, 25 bp, Probe Sequence
ggaggtggagaggtaccggcttctc

SEQ ID NO: 267179 - DNA, 25 bp, Probe Sequence
ggagggattgatcttcagggctgtt

SEQ ID NO: 267180 - DNA, 25 bp, Probe Sequence
ggaggagtaatcattgggtcattcg

SEQ ID NO: 267181 - DNA, 25 bp, Probe Sequence
ggagaggtacctttgagttttcagc

SEQ ID NO: 267182 - DNA, 25 bp, Probe Sequence
ggagattcttccagggtttatactt

SEQ ID NO: 267183 - DNA, 25 bp, Probe Sequence
ggagtttttcattgtcgctattgat

SEQ ID NO: 267184 - DNA, 25 bp, Probe Sequence
ggagtgctttctttgcaacttgtgt

SEQ ID NO: 267185 - DNA, 25 bp, Probe Sequence
ggagatgccttcagaaagctttgta

SEQ ID NO: 267186 - DNA, 25 bp, Probe Sequence
ggagattctgatgaagaagttattc

SEQ ID NO: 267187 - DNA, 25 bp, Probe Sequence
ggagattctgatgaagaagttattc

SEQ ID NO: 267188 - DNA, 25 bp, Probe Sequence
ggagattccttcaaagtttactgta

SEQ ID NO: 267189 - DNA, 25 bp, Probe Sequence
ggagaccctgttaactactacgttg

SEQ ID NO: 267190 - DNA, 25 bp, Probe Sequence
ggagactccgaagactgacaatact

SEQ ID NO: 267191 - DNA, 25 bp, Probe Sequence
ggaggatacggagattcacaataca

SEQ ID NO: 267192 - DNA, 25 bp, Probe Sequence
ggaggtcaccgatgcttgaacattc

SEQ ID NO: 267193 - DNA, 25 bp, Probe Sequence
ggaggaaaagaccttgacatattcc

SEQ ID NO: 267194 - DNA, 25 bp, Probe Sequence
ggagggaaacacgttagcaagcaac

SEQ ID NO: 267195 - DNA, 25 bp, Probe Sequence
ggagggcaggacacttagcaggcac

SEQ ID NO: 267196 - DNA, 25 bp, Probe Sequence
ggagggcaggacacttagcaggcac

SEQ ID NO: 267197 - DNA, 25 bp, Probe Sequence
ggagggcaggacacttagcaggcac

SEQ ID NO: 267198 - DNA, 25 bp, Probe Sequence
ggagggcaggcacgaagaacagtga

SEQ ID NO: 267199 - DNA, 25 bp, Probe Sequence
ggaggctgaggcacgagaatcactt

SEQ ID NO: 267200 - DNA, 25 bp, Probe Sequence
ggaggctgaggtgggaggatggctt

SEQ ID NO: 267201 - DNA, 25 bp, Probe Sequence
ggaggctgaggtgggaggatgactt

SEQ ID NO: 267202 - DNA, 25 bp, Probe Sequence
ggaggctgaggtgggaggatcactt

SEQ ID NO: 267203 - DNA, 25 bp, Probe Sequence
ggaggctgaggcaggtggatcactg

SEQ ID NO: 267204 - DNA, 25 bp, Probe Sequence
ggaggctgaggcaggggaatcatct

SEQ ID NO: 267205 - DNA, 25 bp, Probe Sequence
ggagtagggcacagggacatctttc

SEQ ID NO: 267206 - DNA, 25 bp, Probe Sequence
ggaggaggtgacagggagctaggca

SEQ ID NO: 267207 - DNA, 25 bp, Probe Sequence
ggagtggggaagtgagagctgagct

SEQ ID NO: 267208 - DNA, 25 bp, Probe Sequence
ggaggtttgaagtccacctgagcca

SEQ ID NO: 267209 - DNA, 25 bp, Probe Sequence
ggaggttctataataagccatgagc

SEQ ID NO: 267210 - DNA, 25 bp, Probe Sequence
ggaggcatgctttaatatcacaata

SEQ ID NO: 267211 - DNA, 25 bp, Probe Sequence
ggaggcagagattgcagtgagccaa

SEQ ID NO: 267212 - DNA, 25 bp, Probe Sequence
ggaggcagatgttgcagtgagcgga

SEQ ID NO: 267213 - DNA, 25 bp, Probe Sequence
ggagtatcttacttgggtgattcct

SEQ ID NO: 267214 - DNA, 25 bp, Probe Sequence
ggagtatcttacttgggtgattcct

SEQ ID NO: 267215 - DNA, 25 bp, Probe Sequence
ggagtatcttacttgggtgattcct

SEQ ID NO: 267216 - DNA, 25 bp, Probe Sequence
ggaatgtcctactggtggaggccgt

SEQ ID NO: 267217 - DNA, 25 bp, Probe Sequence
ggagatttacaactgggggagggtg

SEQ ID NO: 267218 - DNA, 25 bp, Probe Sequence
ggacttcctcaaccaggagggggct

SEQ ID NO: 267219 - DNA, 25 bp, Probe Sequence
ggaggatatctactccggtgggggt

SEQ ID NO: 267220 - DNA, 25 bp, Probe Sequence
ggaggatattgatgggggtggaggt

SEQ ID NO: 267221 - DNA, 25 bp, Probe Sequence
ggaggcattagtgggaaggatggaa

SEQ ID NO: 267222 - DNA, 25 bp, Probe Sequence
ggaggcttgagaatggaaggatcct

SEQ ID NO: 267223 - DNA, 25 bp, Probe Sequence
ggaggttagagaggaaggcttgtat

SEQ ID NO: 267224 - DNA, 25 bp, Probe Sequence
ggagtagtaagtggcgaattcgaat

SEQ ID NO: 267225 - DNA, 25 bp, Probe Sequence
ggaggttacagaggctgacttcaga

SEQ ID NO: 267226 - DNA, 25 bp, Probe Sequence
ggaggttacagtggtcatcataatt

SEQ ID NO: 267227 - DNA, 25 bp, Probe Sequence
ggaggacaacgtgatcactgtattc

SEQ ID NO: 267228 - DNA, 25 bp, Probe Sequence
ggagaggcaaacttacttgtattga

SEQ ID NO: 267229 - DNA, 25 bp, Probe Sequence
ggaggaaaactcaactgtttctctt

SEQ ID NO: 267230 - DNA, 25 bp, Probe Sequence
ggaggacaataatagctgatctttt

SEQ ID NO: 267231 - DNA, 25 bp, Probe Sequence
ggagggcagttcatgagctgattgt

SEQ ID NO: 267232 - DNA, 25 bp, Probe Sequence
ggaggatagtgatctactatgtgcc

SEQ ID NO: 267233 - DNA, 25 bp, Probe Sequence
ggaggaagcagctacccgaatacct

SEQ ID NO: 267234 - DNA, 25 bp, Probe Sequence
ggaggatccagctgcctatgaaaat

SEQ ID NO: 267235 - DNA, 25 bp, Probe Sequence
ggagtgcaatccttacttgagaact

SEQ ID NO: 267236 - DNA, 25 bp, Probe Sequence
ggagtgcaactcaaatgtgttgaag

SEQ ID NO: 267237 - DNA, 25 bp, Probe Sequence
ggagtggaccaatgtctatcaagag

SEQ ID NO: 267238 - DNA, 25 bp, Probe Sequence
ggagtggaggcattgtttttaagaa

SEQ ID NO: 267239 - DNA, 25 bp, Probe Sequence
ggagtggcagggattgggcttagat

SEQ ID NO: 267240 - DNA, 25 bp, Probe Sequence
ggaggtggggatttgaatgcttcgt

SEQ ID NO: 267241 - DNA, 25 bp, Probe Sequence
ggagggagagagatgtactttttaa

SEQ ID NO: 267242 - DNA, 25 bp, Probe Sequence
ggaggatgaggtctggggttcttta

SEQ ID NO: 267243 - DNA, 25 bp, Probe Sequence
ggaggataggtcaggtgcgttatct

SEQ ID NO: 267244 - DNA, 25 bp, Probe Sequence
ggaggataggtcaggtgcgttatct

SEQ ID NO: 267245 - DNA, 25 bp, Probe Sequence
ggaggaaatgccagtgtacacaact

SEQ ID NO: 267246 - DNA, 25 bp, Probe Sequence
ggagtctacaccaaggtctacaact

SEQ ID NO: 267247 - DNA, 25 bp, Probe Sequence
ggagtctacaccaaggtctacaact

SEQ ID NO: 267248 - DNA, 25 bp, Probe Sequence
ggagtctaacatatgaccaatacca

SEQ ID NO: 267249 - DNA, 25 bp, Probe Sequence
ggagtcgagtctagaattcacacag

SEQ ID NO: 267250 - DNA, 25 bp, Probe Sequence
ggaggagaggataatttccactgtg

SEQ ID NO: 267251 - DNA, 25 bp, Probe Sequence
ggaggataagatcaatgccctcatt

SEQ ID NO: 267252 - DNA, 25 bp, Probe Sequence
ggaggaagattgccactctccaact

SEQ ID NO: 267253 - DNA, 25 bp, Probe Sequence
ggaggaagagtcccactcattacaa

SEQ ID NO: 267254 - DNA, 25 bp, Probe Sequence
ggaggatctgcagcttactcataac

SEQ ID NO: 267255 - DNA, 25 bp, Probe Sequence
ggaggatgtatcctccagccaatca

SEQ ID NO: 267256 - DNA, 25 bp, Probe Sequence
ggagtgctctatggtcctggaaaga

SEQ ID NO: 267257 - DNA, 25 bp, Probe Sequence
ggaggtgatgatgtttcttagagag

SEQ ID NO: 267258 - DNA, 25 bp, Probe Sequence
ggaggtagatgacttctttgagcaa

SEQ ID NO: 267259 - DNA, 25 bp, Probe Sequence
ggaggggcatagctagtgagacaga

SEQ ID NO: 267260 - DNA, 25 bp, Probe Sequence
ggagttggctatgttggaccagcag

SEQ ID NO: 267261 - DNA, 25 bp, Probe Sequence
ggagtcttcagtgtgtgagcctcca

SEQ ID NO: 267262 - DNA, 25 bp, Probe Sequence
ggagtttgagttagtcacctcgggg

SEQ ID NO: 267263 - DNA, 25 bp, Probe Sequence
ggagttctagttagctcagggcctg

SEQ ID NO: 267264 - DNA, 25 bp, Probe Sequence
ggagttcatcagagttatggtgccg

SEQ ID NO: 267265 - DNA, 25 bp, Probe Sequence
ggaggagcacagcagatggagggac

SEQ ID NO: 267266 - DNA, 25 bp, Probe Sequence
ggaggaccatgggagtgatgttcac

SEQ ID NO: 267267 - DNA, 25 bp, Probe Sequence
ggaggaccagagtgacattgtcagc

SEQ ID NO: 267268 - DNA, 25 bp, Probe Sequence
ggaggagccagatgtacacctaccc

SEQ ID NO: 267269 - DNA, 25 bp, Probe Sequence
ggaggagctagattcatatcctaag

SEQ ID NO: 267270 - DNA, 25 bp, Probe Sequence
ggaggagattatccatatcgctgag

SEQ ID NO: 267271 - DNA, 25 bp, Probe Sequence
ggaggatgactcttaagcacatagt

SEQ ID NO: 267272 - DNA, 25 bp, Probe Sequence
ggagggaccaatgagcaatggcaga

SEQ ID NO: 267273 - DNA, 25 bp, Probe Sequence
ggagggacttgagttgagtgacgct

SEQ ID NO: 267274 - DNA, 25 bp, Probe Sequence
ggaggggctggagtcaagatagcgg

SEQ ID NO: 267275 - DNA, 25 bp, Probe Sequence
ggaggaggcgtgctcaagtatcggt

SEQ ID NO: 267276 - DNA, 25 bp, Probe Sequence
ggagaacgctgaagtcacgctcacc

SEQ ID NO: 267277 - DNA, 25 bp, Probe Sequence
ggagccgggaagtacttcctctggg

SEQ ID NO: 267278 - DNA, 25 bp, Probe Sequence
ggagtagaggaaggtcgtctgatct

SEQ ID NO: 267279 - DNA, 25 bp, Probe Sequence
ggaggagggagagggaggtcactgg

SEQ ID NO: 267280 - DNA, 25 bp, Probe Sequence
ggaggagggaagcatagagaacggg

SEQ ID NO: 267281 - DNA, 25 bp, Probe Sequence
ggaggaggaggacgacgacgacgac

SEQ ID NO: 267282 - DNA, 25 bp, Probe Sequence
ggaggaggaagatgaggaggacgag

SEQ ID NO: 267283 - DNA, 25 bp, Probe Sequence
ggaggaggaagaagaaggtgatggt

SEQ ID NO: 267284 - DNA, 25 bp, Probe Sequence
ggacgttgacaaaggacctgggtct

SEQ ID NO: 267285 - DNA, 25 bp, Probe Sequence
ggagagggaaaaatacctccagctt

SEQ ID NO: 267286 - DNA, 25 bp, Probe Sequence
ggaggggaacattccatccccagtg

SEQ ID NO: 267287 - DNA, 25 bp, Probe Sequence
ggagaagagaattacttccccactg

SEQ ID NO: 267288 - DNA, 25 bp, Probe Sequence
ggagggagcagatcactttagccac

SEQ ID NO: 267289 - DNA, 25 bp, Probe Sequence
ggaggagatctatctcttctccctg

SEQ ID NO: 267290 - DNA, 25 bp, Probe Sequence
ggaggagatctatgacttcctggac

SEQ ID NO: 267291 - DNA, 25 bp, Probe Sequence
ggagggataaaacatctcggcacct

SEQ ID NO: 267292 - DNA, 25 bp, Probe Sequence
ggaggtgctaagtgagtacaggact

SEQ ID NO: 267293 - DNA, 25 bp, Probe Sequence
ggagtggtgtcatggagtggcagga

SEQ ID NO: 267294 - DNA, 25 bp, Probe Sequence
ggagtgagttcattgaccagtcacg

SEQ ID NO: 267295 - DNA, 25 bp, Probe Sequence
ggaggagagaaaagccatggccgac

SEQ ID NO: 267296 - DNA, 25 bp, Probe Sequence
ggagggagcacagatacaggcaaac

SEQ ID NO: 267297 - DNA, 25 bp, Probe Sequence
ggagtgcgagaagcattcccaaccc

SEQ ID NO: 267298 - DNA, 25 bp, Probe Sequence
ggagagcaagatagccttccactga

SEQ ID NO: 267299 - DNA, 25 bp, Probe Sequence
ggaggagcagatctgctgacctcag

SEQ ID NO: 267300 - DNA, 25 bp, Probe Sequence
ggaggagcagaggggctcacatctc

SEQ ID NO: 267301 - DNA, 25 bp, Probe Sequence
ggagggagagattcctgcactatgc

SEQ ID NO: 267302 - DNA, 25 bp, Probe Sequence
ggaggtggcagagagctcactggga

SEQ ID NO: 267303 - DNA, 25 bp, Probe Sequence
ggaggtggcagagagctcactggga

SEQ ID NO: 267304 - DNA, 25 bp, Probe Sequence
ggagtgggcaaggcagatattggag

SEQ ID NO: 267305 - DNA, 25 bp, Probe Sequence
ggagtgtgtccggagatgagatgaa

SEQ ID NO: 267306 - DNA, 25 bp, Probe Sequence
ggagttgatcaagtccatcaatgaa

SEQ ID NO: 267307 - DNA, 25 bp, Probe Sequence
ggagattgtaattgccatctaggca

SEQ ID NO: 267308 - DNA, 25 bp, Probe Sequence
ggagacgtacaagcaagggtttggg

SEQ ID NO: 267309 - DNA, 25 bp, Probe Sequence
ggagagcgtgaattgctcaggttgt

SEQ ID NO: 267310 - DNA, 25 bp, Probe Sequence
ggaggtggagaagtagatgtggtca

SEQ ID NO: 267311 - DNA, 25 bp, Probe Sequence
ggaggggagggtccatgtagtcaga

SEQ ID NO: 267312 - DNA, 25 bp, Probe Sequence
ggaggttggtggaccatggagtccc

SEQ ID NO: 267313 - DNA, 25 bp, Probe Sequence
ggaggataggcgttgcactgggtac

SEQ ID NO: 267314 - DNA, 25 bp, Probe Sequence
ggaggttgaggctgcagtgagctgt

SEQ ID NO: 267315 - DNA, 25 bp, Probe Sequence
ggaggtggaggctgcagtgagctga

SEQ ID NO: 267316 - DNA, 25 bp, Probe Sequence
ggaggtggaggatgcagtgagtcga

SEQ ID NO: 267317 - DNA, 25 bp, Probe Sequence
ggagttggcaggtgtgcgcaggcca

SEQ ID NO: 267318 - DNA, 25 bp, Probe Sequence
ggaggtgaaggacctggggctcagc

SEQ ID NO: 267319 - DNA, 25 bp, Probe Sequence
ggaggtgatggaggccatggggatc

SEQ ID NO: 267320 - DNA, 25 bp, Probe Sequence
ggaggtatgtgaggagggctggaac

SEQ ID NO: 267321 - DNA, 25 bp, Probe Sequence
ggaggatgacagtgaaggcgaggag

SEQ ID NO: 267322 - DNA, 25 bp, Probe Sequence
ggaggatgacagtgaaggcgaggag

SEQ ID NO: 267323 - DNA, 25 bp, Probe Sequence
ggagggacagatccaggacgaggtc

SEQ ID NO: 267324 - DNA, 25 bp, Probe Sequence
ggagggtcagctaagagaagtggga

SEQ ID NO: 267325 - DNA, 25 bp, Probe Sequence
ggaggaccgctcaggaagtggcagc

SEQ ID NO: 267326 - DNA, 25 bp, Probe Sequence
ggaggaccgctcaggaagtggcagc

SEQ ID NO: 267327 - DNA, 25 bp, Probe Sequence
ggaggagcccctggtgatagagaag

SEQ ID NO: 267328 - DNA, 25 bp, Probe Sequence
ggaggagccctgtgagtgcaaggag

SEQ ID NO: 267329 - DNA, 25 bp, Probe Sequence
ggagaggcccgaggaaggagtggct

SEQ ID NO: 267330 - DNA, 25 bp, Probe Sequence
ggaggtggccaaggatgctggagct

SEQ ID NO: 267331 - DNA, 25 bp, Probe Sequence
ggaggatgtgcctaggttatatgca

SEQ ID NO: 267332 - DNA, 25 bp, Probe Sequence
ggagtcattcccagataatagaact

SEQ ID NO: 267333 - DNA, 25 bp, Probe Sequence
ggaggttctgcctgtaattgagcct

SEQ ID NO: 267334 - DNA, 25 bp, Probe Sequence
ggagagtgtctgcggatacttccac

SEQ ID NO: 267335 - DNA, 25 bp, Probe Sequence
ggagagtgtctgcggatacttccac

SEQ ID NO: 267336 - DNA, 25 bp, Probe Sequence
ggagagtgtctgcggatacttccac

SEQ ID NO: 267337 - DNA, 25 bp, Probe Sequence
ggagagcttcgatcagaactagcac

SEQ ID NO: 267338 - DNA, 25 bp, Probe Sequence
ggagactattgttctaagtgaagta

SEQ ID NO: 267339 - DNA, 25 bp, Probe Sequence
ggagattaagttcaaatgcaatgta

SEQ ID NO: 267340 - DNA, 25 bp, Probe Sequence
ggagggaaatgtcagccatgcaagt

SEQ ID NO: 267341 - DNA, 25 bp, Probe Sequence
ggaggaggacactcccatcagaact

SEQ ID NO: 267342 - DNA, 25 bp, Probe Sequence
ggagaaggaacaccattctgatacc

SEQ ID NO: 267343 - DNA, 25 bp, Probe Sequence
ggagggagacacctcttcatagacg

SEQ ID NO: 267344 - DNA, 25 bp, Probe Sequence
ggagtagagccagaggtataactga

SEQ ID NO: 267345 - DNA, 25 bp, Probe Sequence
ggagggagactgtggagatatcctg

SEQ ID NO: 267346 - DNA, 25 bp, Probe Sequence
ggagggcgagtgcctggagttgctc

SEQ ID NO: 267347 - DNA, 25 bp, Probe Sequence
ggaggtcatgaatgtggtgttgcca

SEQ ID NO: 267348 - DNA, 25 bp, Probe Sequence
ggaggtagaatgatggttaccagag

SEQ ID NO: 267349 - DNA, 25 bp, Probe Sequence
ggaggtagtaggacgtccctgagag

SEQ ID NO: 267350 - DNA, 25 bp, Probe Sequence
ggaggtcagtagctttcatccagaa

SEQ ID NO: 267351 - DNA, 25 bp, Probe Sequence
ggagttgttagcaatttcattcaaa

SEQ ID NO: 267352 - DNA, 25 bp, Probe Sequence
ggagtttaagtttgtagtgcactat

SEQ ID NO: 267353 - DNA, 25 bp, Probe Sequence
ggagttgtaactctgcgtggactat

SEQ ID NO: 267354 - DNA, 25 bp, Probe Sequence
ggagtttaagtctgcagtgaactat

SEQ ID NO: 267355 - DNA, 25 bp, Probe Sequence
ggagtgttaagcgttcagtgatgtg

SEQ ID NO: 267356 - DNA, 25 bp, Probe Sequence
ggaggattgcaaacgtgcatgtgca

SEQ ID NO: 267357 - DNA, 25 bp, Probe Sequence
ggaggatggcaaagagagtcgcatc

SEQ ID NO: 267358 - DNA, 25 bp, Probe Sequence
ggaggattcagacgagtgtcgctgc

SEQ ID NO: 267359 - DNA, 25 bp, Probe Sequence
ggaggtgcacgacatgcttcacacc

SEQ ID NO: 267360 - DNA, 25 bp, Probe Sequence
ggaggtcagcttgagctaagagctc

SEQ ID NO: 267361 - DNA, 25 bp, Probe Sequence
ggaggtagcactcaaaacagcacca

SEQ ID NO: 267362 - DNA, 25 bp, Probe Sequence
ggaggagtgcctcaagaaatgtgcc

SEQ ID NO: 267363 - DNA, 25 bp, Probe Sequence
ggaggagtgttcaaagatgtttcca

SEQ ID NO: 267364 - DNA, 25 bp, Probe Sequence
ggaggagtctgctactagtcttatc

SEQ ID NO: 267365 - DNA, 25 bp, Probe Sequence
ggagtgtatcagtgcttgtcttatt

SEQ ID NO: 267366 - DNA, 25 bp, Probe Sequence
ggaggatgtaccttgtgtctctttc

SEQ ID NO: 267367 - DNA, 25 bp, Probe Sequence
ggaggaggagaatttgcgctttggc

SEQ ID NO: 267368 - DNA, 25 bp, Probe Sequence
ggaggaggaagatcagcccatctac

SEQ ID NO: 267369 - DNA, 25 bp, Probe Sequence
ggaggggaatgagcagttcatcaat

SEQ ID NO: 267370 - DNA, 25 bp, Probe Sequence
ggagggtgacgcgcagattgacccc

SEQ ID NO: 267371 - DNA, 25 bp, Probe Sequence
ggaggtggacgacccactgaaggcc

SEQ ID NO: 267372 - DNA, 25 bp, Probe Sequence
ggaggggatctgtgtcactgtaggt

SEQ ID NO: 267373 - DNA, 25 bp, Probe Sequence
ggaggggattgatcaaataagtata

SEQ ID NO: 267374 - DNA, 25 bp, Probe Sequence
ggagggagaggtgcagaaaagataa

SEQ ID NO: 267375 - DNA, 25 bp, Probe Sequence
ggagttgagggtgcacagacacaca

SEQ ID NO: 267376 - DNA, 25 bp, Probe Sequence
ggagtacgctttggactgagaagca

SEQ ID NO: 267377 - DNA, 25 bp, Probe Sequence
ggagtccacatgtttgggcagaatc

SEQ ID NO: 267378 - DNA, 25 bp, Probe Sequence
ggagtgtcagcagctatagtgaagt

SEQ ID NO: 267379 - DNA, 25 bp, Probe Sequence
ggagtgtagcactgaagaactgtca

SEQ ID NO: 267380 - DNA, 25 bp, Probe Sequence
ggagagtcaggaagggccacgacaa

SEQ ID NO: 267381 - DNA, 25 bp, Probe Sequence
ggagagacagctacaggacaagcta

SEQ ID NO: 267382 - DNA, 25 bp, Probe Sequence
ggagagaagggcatggatagctgta

SEQ ID NO: 267383 - DNA, 25 bp, Probe Sequence
ggaggatgggagatgcgtgcagagc

SEQ ID NO: 267384 - DNA, 25 bp, Probe Sequence
ggaggaggatctactgctgtacagc

SEQ ID NO: 267385 - DNA, 25 bp, Probe Sequence
ggaggaggatgactcggatgtctgg

SEQ ID NO: 267386 - DNA, 25 bp, Probe Sequence
ggagtggctgtgctgaaggttggtg

SEQ ID NO: 267387 - DNA, 25 bp, Probe Sequence
ggaggattgctgccagagaagtctg

SEQ ID NO: 267388 - DNA, 25 bp, Probe Sequence
ggaggtgatgccgggaagactgagg

SEQ ID NO: 267389 - DNA, 25 bp, Probe Sequence
ggagaggacctgggactggtgttgg

SEQ ID NO: 267390 - DNA, 25 bp, Probe Sequence
ggagaggaaccggtgtgcgatgctc

SEQ ID NO: 267391 - DNA, 25 bp, Probe Sequence
ggagaggaaccggtgtgcgatgctc

SEQ ID NO: 267392 - DNA, 25 bp, Probe Sequence
ggagggcaacagccactgggtgagc

SEQ ID NO: 267393 - DNA, 25 bp, Probe Sequence
ggagggccacaccaagcgtgtgggc

SEQ ID NO: 267394 - DNA, 25 bp, Probe Sequence
ggagtgtgcccagaaccagggtgac

SEQ ID NO: 267395 - DNA, 25 bp, Probe Sequence
ggaggtgattgagaagccggagaac

SEQ ID NO: 267396 - DNA, 25 bp, Probe Sequence
ggaggtaagaccagctgggatgacc

SEQ ID NO: 267397 - DNA, 25 bp, Probe Sequence
ggaggtaggactgggctggatgaga

SEQ ID NO: 267398 - DNA, 25 bp, Probe Sequence
ggagtgatgaaactggagtaatgaa

SEQ ID NO: 267399 - DNA, 25 bp, Probe Sequence
ggaggatgatagtggccttcatgat

SEQ ID NO: 267400 - DNA, 25 bp, Probe Sequence
ggagtgtatagatgcagccgttgca

SEQ ID NO: 267401 - DNA, 25 bp, Probe Sequence
ggagtttcatgttatgcctgttgca

SEQ ID NO: 267402 - DNA, 25 bp, Probe Sequence
ggagatttatattctggcctacaca

SEQ ID NO: 267403 - DNA, 25 bp, Probe Sequence
ggagaccaatatgtggcacagatca

SEQ ID NO: 267404 - DNA, 25 bp, Probe Sequence
ggagtcgatatgtgctggaagctgc

SEQ ID NO: 267405 - DNA, 25 bp, Probe Sequence
ggagtcgttgggaatgaagctgcag

SEQ ID NO: 267406 - DNA, 25 bp, Probe Sequence
ggagtatgctggaggcagagggcaa

SEQ ID NO: 267407 - DNA, 25 bp, Probe Sequence
ggagtgatgcagccacatggcaagg

SEQ ID NO: 267408 - DNA, 25 bp, Probe Sequence
ggaggatgcagtgagtcgagatggt

SEQ ID NO: 267409 - DNA, 25 bp, Probe Sequence
ggagtgcatcggtacttgagcaatg

SEQ ID NO: 267410 - DNA, 25 bp, Probe Sequence
ggagtacggcagcctggagaggagc

SEQ ID NO: 267411 - DNA, 25 bp, Probe Sequence
ggaggatccaggtcttggggagctc

SEQ ID NO: 267412 - DNA, 25 bp, Probe Sequence
ggaggggcagtgttagagcagggct

SEQ ID NO: 267413 - DNA, 25 bp, Probe Sequence
ggagggctcggatgcagagatcggc

SEQ ID NO: 267414 - DNA, 25 bp, Probe Sequence
ggcggcaatcgtgcgcaatgaagtg

SEQ ID NO: 267415 - DNA, 25 bp, Probe Sequence
ggagtgcctcaagccaagatagtga

SEQ ID NO: 267416 - DNA, 25 bp, Probe Sequence
ggagattctagtgctcatgaaagtt

SEQ ID NO: 267417 - DNA, 25 bp, Probe Sequence
ggaggtcaatcaacttgagaagttt

SEQ ID NO: 267418 - DNA, 25 bp, Probe Sequence
ggaggtcatataaccagagctcgtt

SEQ ID NO: 267419 - DNA, 25 bp, Probe Sequence
ggaggtctatataagcagagctcgt

SEQ ID NO: 267420 - DNA, 25 bp, Probe Sequence
ggaggtctatataagcagagctcgt

SEQ ID NO: 267421 - DNA, 25 bp, Probe Sequence
ggaggtctatataagcagagctcgt

SEQ ID NO: 267422 - DNA, 25 bp, Probe Sequence
ggaggtctatataagcagagctcgt

SEQ ID NO: 267423 - DNA, 25 bp, Probe Sequence
ggaggtctatataagcagagctcgt

SEQ ID NO: 267424 - DNA, 25 bp, Probe Sequence
ggaggtctatataagcagagctcgt

SEQ ID NO: 267425 - DNA, 25 bp, Probe Sequence
ggaggtctatataagcagagctcgt

SEQ ID NO: 267426 - DNA, 25 bp, Probe Sequence
ggaggtctatataagcagagctcgt

SEQ ID NO: 267427 - DNA, 25 bp, Probe Sequence
ggaggtctatataagcagagctcgt

SEQ ID NO: 267428 - DNA, 25 bp, Probe Sequence
ggaggtctatataagcagagctcgt

SEQ ID NO: 267429 - DNA, 25 bp, Probe Sequence
ggaggtctatataagcagagctcgt

SEQ ID NO: 267430 - DNA, 25 bp, Probe Sequence
ggaggtctatataagcagagctcgt

SEQ ID NO: 267431 - DNA, 25 bp, Probe Sequence
ggaggtctatataagcagagctcgt

SEQ ID NO: 267432 - DNA, 25 bp, Probe Sequence
ggaggtctatataagcagagctcgt

SEQ ID NO: 267433 - DNA, 25 bp, Probe Sequence
ggaggtctatataagcagagctcgt

SEQ ID NO: 267434 - DNA, 25 bp, Probe Sequence
ggaggtctatataagcagagctcgt

SEQ ID NO: 267435 - DNA, 25 bp, Probe Sequence
ggaggtctatataagcagagctcgt

SEQ ID NO: 267436 - DNA, 25 bp, Probe Sequence
ggaggtctatataagcagagctcgt

SEQ ID NO: 267437 - DNA, 25 bp, Probe Sequence
ggaggtctatataagcagagctcgt

SEQ ID NO: 267438 - DNA, 25 bp, Probe Sequence
ggaggtctatataagcagagctcgt

SEQ ID NO: 267439 - DNA, 25 bp, Probe Sequence
ggaggtctatataagcagagctcgt

SEQ ID NO: 267440 - DNA, 25 bp, Probe Sequence
ggaggtctatataagcagagctcgt

SEQ ID NO: 267441 - DNA, 25 bp, Probe Sequence
ggaggtctatataagcagagctcgt

SEQ ID NO: 267442 - DNA, 25 bp, Probe Sequence
ggaggtctatataagcagagctcgt

SEQ ID NO: 267443 - DNA, 25 bp, Probe Sequence
ggaggtctatataagcagagctcgt

SEQ ID NO: 267444 - DNA, 25 bp, Probe Sequence
ggaggtctatataagcagagctcgt

SEQ ID NO: 267445 - DNA, 25 bp, Probe Sequence
ggaggtctatataagcagagctcgt

SEQ ID NO: 267446 - DNA, 25 bp, Probe Sequence
ggaggtctatataagcagagctcgt

SEQ ID NO: 267447 - DNA, 25 bp, Probe Sequence
ggaggtctatataagcagagctcgt

SEQ ID NO: 267448 - DNA, 25 bp, Probe Sequence
ggaggtctatataagcagagctcgt

SEQ ID NO: 267449 - DNA, 25 bp, Probe Sequence
ggaggtctatataagcagagctcgt

SEQ ID NO: 267450 - DNA, 25 bp, Probe Sequence
ggaggtctatataagcagagctcgt

SEQ ID NO: 267451 - DNA, 25 bp, Probe Sequence
ggaggtctatataagcagagctcgt

SEQ ID NO: 267452 - DNA, 25 bp, Probe Sequence
ggaggtctatataagcagagctcgt

SEQ ID NO: 267453 - DNA, 25 bp, Probe Sequence
ggaggtctatataagcagagctcgt

SEQ ID NO: 267454 - DNA, 25 bp, Probe Sequence
ggaggtctatataagcagagctcgt

SEQ ID NO: 267455 - DNA, 25 bp, Probe Sequence
ggaggtctatataagcagagctcgt

SEQ ID NO: 267456 - DNA, 25 bp, Probe Sequence
ggaggtctatataagcagagctcgt

SEQ ID NO: 267457 - DNA, 25 bp, Probe Sequence
ggaggtctatataagcagagctcgt

SEQ ID NO: 267458 - DNA, 25 bp, Probe Sequence
ggaggtctatataagcagagctcgt

SEQ ID NO: 267459 - DNA, 25 bp, Probe Sequence
ggaggtctatataagcagagctcgt

SEQ ID NO: 267460 - DNA, 25 bp, Probe Sequence
ggaggtctatataagcagagctcgt

SEQ ID NO: 267461 - DNA, 25 bp, Probe Sequence
ggaggtctatataagcagagctcgt

SEQ ID NO: 267462 - DNA, 25 bp, Probe Sequence
ggaggtctatataagcagagctcgt

SEQ ID NO: 267463 - DNA, 25 bp, Probe Sequence
ggaggtctatataagcagagctcgt

SEQ ID NO: 267464 - DNA, 25 bp, Probe Sequence
ggaggtctatataagcagagctcgt

SEQ ID NO: 267465 - DNA, 25 bp, Probe Sequence
ggaggtctatataagcagagctcgt

SEQ ID NO: 267466 - DNA, 25 bp, Probe Sequence
ggaggtctatataagcagagctcgt

SEQ ID NO: 267467 - DNA, 25 bp, Probe Sequence
ggaggtctatataagcagagctcgt

SEQ ID NO: 267468 - DNA, 25 bp, Probe Sequence
ggaggtctatataagcagagctcgt

SEQ ID NO: 267469 - DNA, 25 bp, Probe Sequence
ggaggtctatataagcagagctcgt

SEQ ID NO: 267470 - DNA, 25 bp, Probe Sequence
ggaggtctatataagcagagctcgt

SEQ ID NO: 267471 - DNA, 25 bp, Probe Sequence
ggaggtctatataagcagagctcgt

SEQ ID NO: 267472 - DNA, 25 bp, Probe Sequence
ggaggtctatataagcagagctcgt

SEQ ID NO: 267473 - DNA, 25 bp, Probe Sequence
ggaggtctatataagcagagctcgt

SEQ ID NO: 267474 - DNA, 25 bp, Probe Sequence
ggaggtctatataagcagagctcgt

SEQ ID NO: 267475 - DNA, 25 bp, Probe Sequence
ggaggtctatataagcagagctcgt

SEQ ID NO: 267476 - DNA, 25 bp, Probe Sequence
ggaggtctatataagcagagctcgt

SEQ ID NO: 267477 - DNA, 25 bp, Probe Sequence
ggaggtctatataagcagagctcgt

SEQ ID NO: 267478 - DNA, 25 bp, Probe Sequence
ggaggtctatataagcagagctcgt

SEQ ID NO: 267479 - DNA, 25 bp, Probe Sequence
ggaggtctatataagcagagctcgt

SEQ ID NO: 267480 - DNA, 25 bp, Probe Sequence
ggaggtctatataagcagagctcgt

SEQ ID NO: 267481 - DNA, 25 bp, Probe Sequence
ggaggtctatataagcagagctcgt

SEQ ID NO: 267482 - DNA, 25 bp, Probe Sequence
ggaggtctatataagcagagctcgt

SEQ ID NO: 267483 - DNA, 25 bp, Probe Sequence
ggaggtctatataagcagagctcgt

SEQ ID NO: 267484 - DNA, 25 bp, Probe Sequence
ggaggtctatataagcagagctcgt

SEQ ID NO: 267485 - DNA, 25 bp, Probe Sequence
ggaggtctatataagcagagctcgt

SEQ ID NO: 267486 - DNA, 25 bp, Probe Sequence
ggaggtctatataagcagagctcgt

SEQ ID NO: 267487 - DNA, 25 bp, Probe Sequence
ggaggtctatataagcagagctcgt

SEQ ID NO: 267488 - DNA, 25 bp, Probe Sequence
ggaggtctatataagcagagctcgt

SEQ ID NO: 267489 - DNA, 25 bp, Probe Sequence
ggaggtctatataagcagagctcgt

SEQ ID NO: 267490 - DNA, 25 bp, Probe Sequence
ggaggtctatataagcagagctcgt

SEQ ID NO: 267491 - DNA, 25 bp, Probe Sequence
ggaggtctatataagcagagctcgt

SEQ ID NO: 267492 - DNA, 25 bp, Probe Sequence
ggaggtctatataagcagagctcgt

SEQ ID NO: 267493 - DNA, 25 bp, Probe Sequence
ggaggtctatataagcagagctcgt

SEQ ID NO: 267494 - DNA, 25 bp, Probe Sequence
ggaggtctatataagcagagctcgt

SEQ ID NO: 267495 - DNA, 25 bp, Probe Sequence
ggaggtctatataagcagagctcgt

SEQ ID NO: 267496 - DNA, 25 bp, Probe Sequence
ggaggtctatataagcagagctcgt

SEQ ID NO: 267497 - DNA, 25 bp, Probe Sequence
ggaggtctatataagcagagctcgt

SEQ ID NO: 267498 - DNA, 25 bp, Probe Sequence
ggaggtctatataagcagagctcgt

SEQ ID NO: 267499 - DNA, 25 bp, Probe Sequence
ggaggtctatataagcagagctcgt

SEQ ID NO: 267500 - DNA, 25 bp, Probe Sequence
ggaggtctatataagcagagctcgt

SEQ ID NO: 267501 - DNA, 25 bp, Probe Sequence
ggaggtctatataagcagagctcgt

SEQ ID NO: 267502 - DNA, 25 bp, Probe Sequence
ggaggtctatataagcagagctcgt

SEQ ID NO: 267503 - DNA, 25 bp, Probe Sequence
ggaggtctatataagcagagctcgt

SEQ ID NO: 267504 - DNA, 25 bp, Probe Sequence
ggaggtctatataagcagagctcgt

SEQ ID NO: 267505 - DNA, 25 bp, Probe Sequence
ggaggtctatataagcagagctcgt

SEQ ID NO: 267506 - DNA, 25 bp, Probe Sequence
ggaggtctatataagcagagctcgt

SEQ ID NO: 267507 - DNA, 25 bp, Probe Sequence
ggaggtctatataagcagagctcgt

SEQ ID NO: 267508 - DNA, 25 bp, Probe Sequence
ggaggtctatataagcagagctcgt

SEQ ID NO: 267509 - DNA, 25 bp, Probe Sequence
ggaggtctatataagcagagctcgt

SEQ ID NO: 267510 - DNA, 25 bp, Probe Sequence
ggaggtctatataagcagagctcgt

SEQ ID NO: 267511 - DNA, 25 bp, Probe Sequence
ggaggtctatataagcagagctcgt

SEQ ID NO: 267512 - DNA, 25 bp, Probe Sequence
ggaggtctatataagcagagctcgt

SEQ ID NO: 267513 - DNA, 25 bp, Probe Sequence
ggaggtctatatcatgagaatatgc

SEQ ID NO: 267514 - DNA, 25 bp, Probe Sequence
ggaggtctatatcatgagaatatgc

SEQ ID NO: 267515 - DNA, 25 bp, Probe Sequence
ggaggtctatgatagagccgagctc

SEQ ID NO: 267516 - DNA, 25 bp, Probe Sequence
ggaggtcctatataagcagagctcg

SEQ ID NO: 267517 - DNA, 25 bp, Probe Sequence
ggagtgacttattctaagcctcatc

SEQ ID NO: 267518 - DNA, 25 bp, Probe Sequence
ggagtatgcctttccagtatcttcc

SEQ ID NO: 267519 - DNA, 25 bp, Probe Sequence
ggagattattttaggtatctttctg

SEQ ID NO: 267520 - DNA, 25 bp, Probe Sequence
ggagattattttaggtatctttctg

SEQ ID NO: 267521 - DNA, 25 bp, Probe Sequence
ggagaatttttagtcttctttcatg

SEQ ID NO: 267522 - DNA, 25 bp, Probe Sequence
ggagtttccattatttctactgctt

SEQ ID NO: 267523 - DNA, 25 bp, Probe Sequence
ggagggctccatgatgattggctac

SEQ ID NO: 267524 - DNA, 25 bp, Probe Sequence
ggagggccggaggcatgtggcctcc

SEQ ID NO: 267525 - DNA, 25 bp, Probe Sequence
ggagggccggaaggatagcctcagc

SEQ ID NO: 267526 - DNA, 25 bp, Probe Sequence
ggagggctcatgcaatcagattgcc

SEQ ID NO: 267527 - DNA, 25 bp, Probe Sequence
ggaggtgctgtgaagactgagggcg

SEQ ID NO: 267528 - DNA, 25 bp, Probe Sequence
ggaggtcgtggtcttgtggaggaga

SEQ ID NO: 267529 - DNA, 25 bp, Probe Sequence
ggaggggctcgttttgatgatggtg

SEQ ID NO: 267530 - DNA, 25 bp, Probe Sequence
ggagggccctatcttgtgagtgggg

SEQ ID NO: 267531 - DNA, 25 bp, Probe Sequence
ggagggccctatcttgtgagtgggg

SEQ ID NO: 267532 - DNA, 25 bp, Probe Sequence
ggagaggagcctgttttggggtggg

SEQ ID NO: 267533 - DNA, 25 bp, Probe Sequence
ggagaggagcctgttttggggtggg

SEQ ID NO: 267534 - DNA, 25 bp, Probe Sequence
ggagggaggatgagtttggcacggg

SEQ ID NO: 267535 - DNA, 25 bp, Probe Sequence
ggagggagaggtgtcttaagctgta

SEQ ID NO: 267536 - DNA, 25 bp, Probe Sequence
ggaggtggcggtggatcttactcct

SEQ ID NO: 267537 - DNA, 25 bp, Probe Sequence
ggagtaggtggtgggatctcaccgt

SEQ ID NO: 267538 - DNA, 25 bp, Probe Sequence
ggagaactcatgccatcggcatcca

SEQ ID NO: 267539 - DNA, 25 bp, Probe Sequence
ggagaacatctgccatcaaggccct

SEQ ID NO: 267540 - DNA, 25 bp, Probe Sequence
ggagaacatctgccatcaaggccct

SEQ ID NO: 267541 - DNA, 25 bp, Probe Sequence
ggagtacatttgtcacattcagctt

SEQ ID NO: 267542 - DNA, 25 bp, Probe Sequence
ggagtacaaaggccaatgcagcctc

SEQ ID NO: 267543 - DNA, 25 bp, Probe Sequence
ggagtaagaattcaatgcagcagct

SEQ ID NO: 267544 - DNA, 25 bp, Probe Sequence
ggagtcataaatagctttgctcact

SEQ ID NO: 267545 - DNA, 25 bp, Probe Sequence
ggaaatcatagaatgccatagatcc

SEQ ID NO: 267546 - DNA, 25 bp, Probe Sequence
ggagaaaagatatcacaactctatg

SEQ ID NO: 267547 - DNA, 25 bp, Probe Sequence
ggagaaatatggtacacctctttac

SEQ ID NO: 267548 - DNA, 25 bp, Probe Sequence
ggagataattttgcaactcatgtta

SEQ ID NO: 267549 - DNA, 25 bp, Probe Sequence
ggagatgatgttgaacacactgcat

SEQ ID NO: 267550 - DNA, 25 bp, Probe Sequence
ggagtgtgttctaacccaattcaag

SEQ ID NO: 267551 - DNA, 25 bp, Probe Sequence
ggagtgagggctacacccaattcca

SEQ ID NO: 267552 - DNA, 25 bp, Probe Sequence
ggaggtggcaattcaccgaattcga

SEQ ID NO: 267553 - DNA, 25 bp, Probe Sequence
ggactgggcacttgccctgatatcc

SEQ ID NO: 267554 - DNA, 25 bp, Probe Sequence
ggagatgcggcagttctgccagtcc

SEQ ID NO: 267555 - DNA, 25 bp, Probe Sequence
ggagaggtgaatccccagtacgata

SEQ ID NO: 267556 - DNA, 25 bp, Probe Sequence
ggaggtggaacactcaagatccaga

SEQ ID NO: 267557 - DNA, 25 bp, Probe Sequence
ggaggtgaaggagcatgcattccag

SEQ ID NO: 267558 - DNA, 25 bp, Probe Sequence
ggaggtgacgtggccagatggcaag

SEQ ID NO: 267559 - DNA, 25 bp, Probe Sequence
ggaggtgccagggcagcaaacatcc

SEQ ID NO: 267560 - DNA, 25 bp, Probe Sequence
ggaggtgacagggagctaggcagcc

SEQ ID NO: 267561 - DNA, 25 bp, Probe Sequence
ggagagggagggactcacagctgca

SEQ ID NO: 267562 - DNA, 25 bp, Probe Sequence
ggaggggaggagtccagggagaggc

SEQ ID NO: 267563 - DNA, 25 bp, Probe Sequence
tggagaaggacggtccggaatggga

SEQ ID NO: 267564 - DNA, 25 bp, Probe Sequence
ggagaagaatcagtaagtgtaaggt

SEQ ID NO: 267565 - DNA, 25 bp, Probe Sequence
ggagtagaactttgactctaagagt

SEQ ID NO: 267566 - DNA, 25 bp, Probe Sequence
ggagtaggactgaatgaaatgaaat

SEQ ID NO: 267567 - DNA, 25 bp, Probe Sequence
ggagtacaattgcaaggatgagatt

SEQ ID NO: 267568 - DNA, 25 bp, Probe Sequence
ggagtccacaggacaatggagatct

SEQ ID NO: 267569 - DNA, 25 bp, Probe Sequence
ggagttcagagctatcaagacagac

SEQ ID NO: 267570 - DNA, 25 bp, Probe Sequence
ggagtacgtgcatctgcaacagcag

SEQ ID NO: 267571 - DNA, 25 bp, Probe Sequence
ggagttagtatgttcaacagacccc

SEQ ID NO: 267572 - DNA, 25 bp, Probe Sequence
ggagtattacggtaactggcccact

SEQ ID NO: 267573 - DNA, 25 bp, Probe Sequence
ggagtttgaggccaaccttgacaac

SEQ ID NO: 267574 - DNA, 25 bp, Probe Sequence
ggagtactgagtcttctgtaacttc

SEQ ID NO: 267575 - DNA, 25 bp, Probe Sequence
ggagtactcagttttcaggttcttc

SEQ ID NO: 267576 - DNA, 25 bp, Probe Sequence
ggagtcagtcggatttgcagcttct

SEQ ID NO: 267577 - DNA, 25 bp, Probe Sequence
ggagtggtgggcatctcgatgcttc

SEQ ID NO: 267578 - DNA, 25 bp, Probe Sequence
ggaggtgtgagccagcaatcagatg

SEQ ID NO: 267579 - DNA, 25 bp, Probe Sequence
ggagtggaatgcccacacagtgacc

SEQ ID NO: 267580 - DNA, 25 bp, Probe Sequence
ggagaggtcacagcaacacagcacc

SEQ ID NO: 267581 - DNA, 25 bp, Probe Sequence
ggagggttaacagctcagatccttg

SEQ ID NO: 267582 - DNA, 25 bp, Probe Sequence
ggaggggtttatgctcaatccatgt

SEQ ID NO: 267583 - DNA, 25 bp, Probe Sequence
ggagggagttacactcaggctgcaa

SEQ ID NO: 267584 - DNA, 25 bp, Probe Sequence
ggagaggagtcactgtcaccaggtc

SEQ ID NO: 267585 - DNA, 25 bp, Probe Sequence
ggaggggaccatcgaacagagctcg

SEQ ID NO: 267586 - DNA, 25 bp, Probe Sequence
ggagtcatcgacaacgaaaagccga

SEQ ID NO: 267587 - DNA, 25 bp, Probe Sequence
ggagacacggccagaacggcaagag

SEQ ID NO: 267588 - DNA, 25 bp, Probe Sequence
ggagatcatgaagaggactcggaag

SEQ ID NO: 267589 - DNA, 25 bp, Probe Sequence
ggagatagcaaccaagtcatgcatg

SEQ ID NO: 267590 - DNA, 25 bp, Probe Sequence
ggagatggctgacaagtgctcgccc

SEQ ID NO: 267591 - DNA, 25 bp, Probe Sequence
ggagtccaatgcaaagctgtaccac

SEQ ID NO: 267592 - DNA, 25 bp, Probe Sequence
ggagggcatcagagactggaccaca

SEQ ID NO: 267593 - DNA, 25 bp, Probe Sequence
ggagggcaagcatgactatgacgac

SEQ ID NO: 267594 - DNA, 25 bp, Probe Sequence
ggagatagagttatttgctagagat

SEQ ID NO: 267595 - DNA, 25 bp, Probe Sequence
ggagctttgctttctattgaaggct

SEQ ID NO: 267596 - DNA, 25 bp, Probe Sequence
ggactttccttgacgtcatgggtgg

SEQ ID NO: 267597 - DNA, 25 bp, Probe Sequence
ggagtttttatgagtgtgtctctgg

SEQ ID NO: 267598 - DNA, 25 bp, Probe Sequence
ggagatgtttaaagttggcctctat

SEQ ID NO: 267599 - DNA, 25 bp, Probe Sequence
ggagtcttcagactggtttgcctga

SEQ ID NO: 267600 - DNA, 25 bp, Probe Sequence
ggagatttagcagctttgtcgtcat

SEQ ID NO: 267601 - DNA, 25 bp, Probe Sequence
ggagtctacacagtctttgctccca

SEQ ID NO: 267602 - DNA, 25 bp, Probe Sequence
ggagtctacaccaatgtaatctact

SEQ ID NO: 267603 - DNA, 25 bp, Probe Sequence
ggagtcttcaccaaagagctcccat

SEQ ID NO: 267604 - DNA, 25 bp, Probe Sequence
ggagtccatcatgaaggagttccgg

SEQ ID NO: 267605 - DNA, 25 bp, Probe Sequence
ggagtccacattccaggagctgtgc

SEQ ID NO: 267606 - DNA, 25 bp, Probe Sequence
ggagtccacattccaggagctgtgc

SEQ ID NO: 267607 - DNA, 25 bp, Probe Sequence
ggagtcagcacattcacgatactgt

SEQ ID NO: 267608 - DNA, 25 bp, Probe Sequence
ggagatgcgccagcaagtaatgctt

SEQ ID NO: 267609 - DNA, 25 bp, Probe Sequence
ggagtaccccagatacattttagac

SEQ ID NO: 267610 - DNA, 25 bp, Probe Sequence
ggagtcccacaaaccacagtttgca

SEQ ID NO: 267611 - DNA, 25 bp, Probe Sequence
ggcttcgacccaacaaagttcatta

SEQ ID NO: 267612 - DNA, 25 bp, Probe Sequence
ggcatacgacccagagacgtacaca

SEQ ID NO: 267613 - DNA, 25 bp, Probe Sequence
ggagacaggccgagtgaccaagaca

SEQ ID NO: 267614 - DNA, 25 bp, Probe Sequence
ggagaaaaccatcgatgacctagaa

SEQ ID NO: 267615 - DNA, 25 bp, Probe Sequence
ggagaaacccagcacatttatcagt

SEQ ID NO: 267616 - DNA, 25 bp, Probe Sequence
ggagatattcaccgaggtttccagt

SEQ ID NO: 267617 - DNA, 25 bp, Probe Sequence
ggagatgaccttcaggccattaaga

SEQ ID NO: 267618 - DNA, 25 bp, Probe Sequence
ggagaaccccaaccaaagaaatctg

SEQ ID NO: 267619 - DNA, 25 bp, Probe Sequence
ggagtaccctcctaataagaactgt

SEQ ID NO: 267620 - DNA, 25 bp, Probe Sequence
tggtttcccttatatcttgaccgtg

SEQ ID NO: 267621 - DNA, 25 bp, Probe Sequence
ggaaatcccttcatacttgaacgtt

SEQ ID NO: 267622 - DNA, 25 bp, Probe Sequence
ggagaatcccttgaacctgggtggc

SEQ ID NO: 267623 - DNA, 25 bp, Probe Sequence
ggagaagggtctaaaggtgcgggag

SEQ ID NO: 267624 - DNA, 25 bp, Probe Sequence
ggaaatggcgcagataacggaggga

SEQ ID NO: 267625 - DNA, 25 bp, Probe Sequence
ggagaatggcatgaacccgggaggc

SEQ ID NO: 267626 - DNA, 25 bp, Probe Sequence
ggagcgatccatctacgtaggtggt

SEQ ID NO: 267627 - DNA, 25 bp, Probe Sequence
ggagcagtcctgcgttaactgcggc

SEQ ID NO: 267628 - DNA, 25 bp, Probe Sequence
ggagatatcctgaggctgattcggg

SEQ ID NO: 267629 - DNA, 25 bp, Probe Sequence
ggagttttactgcctgtagcaatgg

SEQ ID NO: 267630 - DNA, 25 bp, Probe Sequence
ggagatgcgtagggggtcataagga

SEQ ID NO: 267631 - DNA, 25 bp, Probe Sequence
ggagtgcgtgaagagccgcaagagg

SEQ ID NO: 267632 - DNA, 25 bp, Probe Sequence
ggagttgcggacaatcctcaatagg

SEQ ID NO: 267633 - DNA, 25 bp, Probe Sequence
ggagtcggcgacgatccaaaagccc

SEQ ID NO: 267634 - DNA, 25 bp, Probe Sequence
ggagatggtggatgatccccacgcc

SEQ ID NO: 267635 - DNA, 25 bp, Probe Sequence
ggagtgttcagattacatccctcct

SEQ ID NO: 267636 - DNA, 25 bp, Probe Sequence
ggagtgttcagattacatccctcct

SEQ ID NO: 267637 - DNA, 25 bp, Probe Sequence
ggagtgttcaatagataccacgaat

SEQ ID NO: 267638 - DNA, 25 bp, Probe Sequence
ggagatttcacaatttagcactgag

SEQ ID NO: 267639 - DNA, 25 bp, Probe Sequence
ggagatcttagatagcaagcgcgga

SEQ ID NO: 267640 - DNA, 25 bp, Probe Sequence
ggagatcttagatagcaagcgcgga

SEQ ID NO: 267641 - DNA, 25 bp, Probe Sequence
ggagatcgtggaacgagtggcccgc

SEQ ID NO: 267642 - DNA, 25 bp, Probe Sequence
ggagtcagtggcagcatgcagcgcc

SEQ ID NO: 267643 - DNA, 25 bp, Probe Sequence
ggagacatggtgaaataggccaaag

SEQ ID NO: 267644 - DNA, 25 bp, Probe Sequence
ggagagtgtttcacaggcaaaagta

SEQ ID NO: 267645 - DNA, 25 bp, Probe Sequence
ggagactgtcttacgctgacaaaga

SEQ ID NO: 267646 - DNA, 25 bp, Probe Sequence
ggagacagtgtaatggaccaaaggc

SEQ ID NO: 267647 - DNA, 25 bp, Probe Sequence
ggagacaacatcaaggatacagcag

SEQ ID NO: 267648 - DNA, 25 bp, Probe Sequence
ggagactgatgcaggcctaccagtc

SEQ ID NO: 267649 - DNA, 25 bp, Probe Sequence
ggagatcagtatgggcgctatcccc

SEQ ID NO: 267650 - DNA, 25 bp, Probe Sequence
ggagacaggtggcagtgatcgctac

SEQ ID NO: 267651 - DNA, 25 bp, Probe Sequence
ggagacaggtctgtcttctgccaga

SEQ ID NO: 267652 - DNA, 25 bp, Probe Sequence
ggagaagaagctgactcccatcacc

SEQ ID NO: 267653 - DNA, 25 bp, Probe Sequence
ggagaagagtttttcccaacatcca

SEQ ID NO: 267654 - DNA, 25 bp, Probe Sequence
ggagatgagttttattctcagcaaa

SEQ ID NO: 267655 - DNA, 25 bp, Probe Sequence
ggagagagctttgcatactctgaga

SEQ ID NO: 267656 - DNA, 25 bp, Probe Sequence
ggagatgacgacacatcacgcatgg

SEQ ID NO: 267657 - DNA, 25 bp, Probe Sequence
ggagtccagagcatcagacctggcc

SEQ ID NO: 267658 - DNA, 25 bp, Probe Sequence
ggagctcaaaaagtaccaggccatt

SEQ ID NO: 267659 - DNA, 25 bp, Probe Sequence
ggagcctgcaaatctattcctactt

SEQ ID NO: 267660 - DNA, 25 bp, Probe Sequence
ggagaattcagggtttccatgactt

SEQ ID NO: 267661 - DNA, 25 bp, Probe Sequence
ggagattattgaagtagatcctgac

SEQ ID NO: 267662 - DNA, 25 bp, Probe Sequence
ggagattctttcctgaacactgact

SEQ ID NO: 267663 - DNA, 25 bp, Probe Sequence
ggagttcgtatgttgatgacatctg

SEQ ID NO: 267664 - DNA, 25 bp, Probe Sequence
ggagtactgtatcatggtcattggg

SEQ ID NO: 267665 - DNA, 25 bp, Probe Sequence
ggagatgagctggtttggccttggg

SEQ ID NO: 267666 - DNA, 25 bp, Probe Sequence
ggacattgtgggatcgctttgaggt

SEQ ID NO: 267667 - DNA, 25 bp, Probe Sequence
ggagaagtgggcttcagatttaagg

SEQ ID NO: 267668 - DNA, 25 bp, Probe Sequence
ggagagacttgggtcagacttagag

SEQ ID NO: 267669 - DNA, 25 bp, Probe Sequence
ggagatgggtgccccaaatgcttgg

SEQ ID NO: 267670 - DNA, 25 bp, Probe Sequence
ggagggcctggtgcataatggctgg

SEQ ID NO: 267671 - DNA, 25 bp, Probe Sequence
ggagggccggaggcaggaggtggaa

SEQ ID NO: 267672 - DNA, 25 bp, Probe Sequence
ggcagggtggggtggggatggaaat

SEQ ID NO: 267673 - DNA, 25 bp, Probe Sequence
ggagggtggttactgtgggtggaat

SEQ ID NO: 267674 - DNA, 25 bp, Probe Sequence
ggagggtggttactgtgggtggaat

SEQ ID NO: 267675 - DNA, 25 bp, Probe Sequence
ggagtcgctgacataggtgggagga

SEQ ID NO: 267676 - DNA, 25 bp, Probe Sequence
ggagggtgaagatggtgctgtgctg

SEQ ID NO: 267677 - DNA, 25 bp, Probe Sequence
ggaaagtcgagatggtcgtgtggac

SEQ ID NO: 267678 - DNA, 25 bp, Probe Sequence
ggaagttaaaaatcgattggcaaat

SEQ ID NO: 267679 - DNA, 25 bp, Probe Sequence
ggagcacttaaataccgtatgtgca

SEQ ID NO: 267680 - DNA, 25 bp, Probe Sequence
ggactttaaagctccttttggcata

SEQ ID NO: 267681 - DNA, 25 bp, Probe Sequence
ggacttccaaagtggtcacctacag

SEQ ID NO: 267682 - DNA, 25 bp, Probe Sequence
ggaatttgaaactgcaggacttaag

SEQ ID NO: 267683 - DNA, 25 bp, Probe Sequence
ggagtttaaggctgcagtgagctat

SEQ ID NO: 267684 - DNA, 25 bp, Probe Sequence
ggagtttcacagcctggagaaattg

SEQ ID NO: 267685 - DNA, 25 bp, Probe Sequence
ggagtttgaccatttggaatttgga

SEQ ID NO: 267686 - DNA, 25 bp, Probe Sequence
ggagtgtattcttattggaatgatt

SEQ ID NO: 267687 - DNA, 25 bp, Probe Sequence
ggagagtgtcttcaagctgaatgaa

SEQ ID NO: 267688 - DNA, 25 bp, Probe Sequence
ggagagtgtcttcaagctgaatgaa

SEQ ID NO: 267689 - DNA, 25 bp, Probe Sequence
ggagggcataattagagtgaagcat

SEQ ID NO: 267690 - DNA, 25 bp, Probe Sequence
ggagtggcaacttcaggatgacaaa

SEQ ID NO: 267691 - DNA, 25 bp, Probe Sequence
ggagggcaatttggcaatacacacc

SEQ ID NO: 267692 - DNA, 25 bp, Probe Sequence
ggagggacatgcttagcagtcccct

SEQ ID NO: 267693 - DNA, 25 bp, Probe Sequence
ggagggcattgcatgaggtctgcca

SEQ ID NO: 267694 - DNA, 25 bp, Probe Sequence
ggagaggatgctctctgaactgcca

SEQ ID NO: 267695 - DNA, 25 bp, Probe Sequence
ggagatgaacatccctaattgacat

SEQ ID NO: 267696 - DNA, 25 bp, Probe Sequence
ggagaaactcctaaattgcatcagt

SEQ ID NO: 267697 - DNA, 25 bp, Probe Sequence
ggagaatactcagttccaacttgtg

SEQ ID NO: 267698 - DNA, 25 bp, Probe Sequence
ggagaattctgttctcccagagctg

SEQ ID NO: 267699 - DNA, 25 bp, Probe Sequence
ggagagtactctgtgacggagctga

SEQ ID NO: 267700 - DNA, 25 bp, Probe Sequence
ggagggtctctctgaagaggctatc

SEQ ID NO: 267701 - DNA, 25 bp, Probe Sequence
ggagtgtgttcctgaagagcagcca

SEQ ID NO: 267702 - DNA, 25 bp, Probe Sequence
ggagtgatgttagcagacccagctt

SEQ ID NO: 267703 - DNA, 25 bp, Probe Sequence
ggagataggaagccagactacactg

SEQ ID NO: 267704 - DNA, 25 bp, Probe Sequence
ggagatgagtgaggacgcctacacg

SEQ ID NO: 267705 - DNA, 25 bp, Probe Sequence
ggagaggtcattaccttgatcctgc

SEQ ID NO: 267706 - DNA, 25 bp, Probe Sequence
ggagggctgattttcgagagccgaa

SEQ ID NO: 267707 - DNA, 25 bp, Probe Sequence
ggagaggcaggtatcagaggcagag

SEQ ID NO: 267708 - DNA, 25 bp, Probe Sequence
ggagggcaggtgtactcagtgccta

SEQ ID NO: 267709 - DNA, 25 bp, Probe Sequence
ggagggctggtctacaagttctaga

SEQ ID NO: 267710 - DNA, 25 bp, Probe Sequence
ggagtgcgctggtcggaagattgct

SEQ ID NO: 267711 - DNA, 25 bp, Probe Sequence
ggagtgcagtggtgcagtcttggct

SEQ ID NO: 267712 - DNA, 25 bp, Probe Sequence
ggagtgcaggtaaatgctcattccc

SEQ ID NO: 267713 - DNA, 25 bp, Probe Sequence
ggagtgattgaacctgctcatctcc

SEQ ID NO: 267714 - DNA, 25 bp, Probe Sequence
ggagagttgatacctgcagtcagcc

SEQ ID NO: 267715 - DNA, 25 bp, Probe Sequence
ggagagctttatacaattaccgatg

SEQ ID NO: 267716 - DNA, 25 bp, Probe Sequence
ggagagttattagcactaccgatgc

SEQ ID NO: 267717 - DNA, 25 bp, Probe Sequence
ggagatgtaacttccactatccttc

SEQ ID NO: 267718 - DNA, 25 bp, Probe Sequence
ggagattatcctttcattgagcctt

SEQ ID NO: 267719 - DNA, 25 bp, Probe Sequence
ggagtgttgctcatttgtgagcctt

SEQ ID NO: 267720 - DNA, 25 bp, Probe Sequence
ggagttcatgccatttgtcaaggaa

SEQ ID NO: 267721 - DNA, 25 bp, Probe Sequence
ggagactcacacatttgcatgaagg

SEQ ID NO: 267722 - DNA, 25 bp, Probe Sequence
ggagcattcctctagattgcacaag

SEQ ID NO: 267723 - DNA, 25 bp, Probe Sequence
ggagcattcctctagattgcacaag

SEQ ID NO: 267724 - DNA, 25 bp, Probe Sequence
ggagagtgactctgttggcagaagg

SEQ ID NO: 267725 - DNA, 25 bp, Probe Sequence
ggagagggctgaggtggccgagagc

SEQ ID NO: 267726 - DNA, 25 bp, Probe Sequence
ggagagggctgaggtggccgagagt

SEQ ID NO: 267727 - DNA, 25 bp, Probe Sequence
ggagagtgtggaggtctgacagggt

SEQ ID NO: 267728 - DNA, 25 bp, Probe Sequence
ggagattgtggtgagctgagattgc

SEQ ID NO: 267729 - DNA, 25 bp, Probe Sequence
ggagattgctggctactccatgtct

SEQ ID NO: 267730 - DNA, 25 bp, Probe Sequence
ggagatctggaactttgcacatgtc

SEQ ID NO: 267731 - DNA, 25 bp, Probe Sequence
ggagatcgctgaccttggagaggcc

SEQ ID NO: 267732 - DNA, 25 bp, Probe Sequence
ggagaactgcaaatagggaggccct

SEQ ID NO: 267733 - DNA, 25 bp, Probe Sequence
ggagacctccattgacgaagggctg

SEQ ID NO: 267734 - DNA, 25 bp, Probe Sequence
ggagcaccccaatggcacaggggtc

SEQ ID NO: 267735 - DNA, 25 bp, Probe Sequence
ggactccccaagcggaatgaggcca

SEQ ID NO: 267736 - DNA, 25 bp, Probe Sequence
ggactccactagaggggtagccaag

SEQ ID NO: 267737 - DNA, 25 bp, Probe Sequence
ggagtcccttgcgggaagactgcca

SEQ ID NO: 267738 - DNA, 25 bp, Probe Sequence
ggagtggactggagcgtaactgcca

SEQ ID NO: 267739 - DNA, 25 bp, Probe Sequence
ggagtgtacctaagcagtaagcgta

SEQ ID NO: 267740 - DNA, 25 bp, Probe Sequence
ggagtggacttcgagatggaacgat

SEQ ID NO: 267741 - DNA, 25 bp, Probe Sequence
ggagtgcgacgtgagtctgagtctg

SEQ ID NO: 267742 - DNA, 25 bp, Probe Sequence
ggagtgcgacgagggtggagaagac

SEQ ID NO: 267743 - DNA, 25 bp, Probe Sequence
ggagggaagcagcctttagaaaaga

SEQ ID NO: 267744 - DNA, 25 bp, Probe Sequence
ggagtggaagaccaattgaacggag

SEQ ID NO: 267745 - DNA, 25 bp, Probe Sequence
ggagcagaaaacccttgggccagaa

SEQ ID NO: 267746 - DNA, 25 bp, Probe Sequence
ggagagagagaaacctttgggaagg

SEQ ID NO: 267747 - DNA, 25 bp, Probe Sequence
tgagagggtaggagggtgggaagga

SEQ ID NO: 267748 - DNA, 25 bp, Probe Sequence
ggagggcgagcgagggagaggaggg

SEQ ID NO: 267749 - DNA, 25 bp, Probe Sequence
ggagcttggagtttggggagtgggg

SEQ ID NO: 267750 - DNA, 25 bp, Probe Sequence
ggagcaggggtaggtagggctgtgg

SEQ ID NO: 267751 - DNA, 25 bp, Probe Sequence
ggagacggtgattttgggcctattg

SEQ ID NO: 267752 - DNA, 25 bp, Probe Sequence
ggagaccatggatcagtaccacttt

SEQ ID NO: 267753 - DNA, 25 bp, Probe Sequence
ggagtttgctgctgatgtacggctt

SEQ ID NO: 267754 - DNA, 25 bp, Probe Sequence
ggagtgtatactcgagtgacagcct

SEQ ID NO: 267755 - DNA, 25 bp, Probe Sequence
ggagatgtatactgagaaggcctga

SEQ ID NO: 267756 - DNA, 25 bp, Probe Sequence
ggagagctcaaccagtatagtgcca

SEQ ID NO: 267757 - DNA, 25 bp, Probe Sequence
ggagatcttacgccatgatcctcac

SEQ ID NO: 267758 - DNA, 25 bp, Probe Sequence
ggagtttgacaggcgattctcccct

SEQ ID NO: 267759 - DNA, 25 bp, Probe Sequence
ggagctttgacaaggaactttccta

SEQ ID NO: 267760 - DNA, 25 bp, Probe Sequence
ggagctaagaatgggccctttgccc

SEQ ID NO: 267761 - DNA, 25 bp, Probe Sequence
ggagatagccactggccaggcattc

SEQ ID NO: 267762 - DNA, 25 bp, Probe Sequence
ggagaagccacaggcctgagatttc

SEQ ID NO: 267763 - DNA, 25 bp, Probe Sequence
ggagaactccgcgacgatgttgtcc

SEQ ID NO: 267764 - DNA, 25 bp, Probe Sequence
ggagatgaccctcaaacagttcctc

SEQ ID NO: 267765 - DNA, 25 bp, Probe Sequence
ggcaggactcctccaaaattacgtg

SEQ ID NO: 267766 - DNA, 25 bp, Probe Sequence
ggagcgagatccctccaaaatcaag

SEQ ID NO: 267767 - DNA, 25 bp, Probe Sequence
ggagtagacccagaaatacacagtt

SEQ ID NO: 267768 - DNA, 25 bp, Probe Sequence
ggagtgcgacttggccaaaagaagt

SEQ ID NO: 267769 - DNA, 25 bp, Probe Sequence
ggagtgcgccattccaggaaagaaa

SEQ ID NO: 267770 - DNA, 25 bp, Probe Sequence
ggagtctgacattgacagggatgga

SEQ ID NO: 267771 - DNA, 25 bp, Probe Sequence
ggagcatctacacagcttgggtgaa

SEQ ID NO: 267772 - DNA, 25 bp, Probe Sequence
ggagtccagctctacatattggtaa

SEQ ID NO: 267773 - DNA, 25 bp, Probe Sequence
ggagttcattcatctcaatataaat

SEQ ID NO: 267774 - DNA, 25 bp, Probe Sequence
ggagttcctcattctggtgataaag

SEQ ID NO: 267775 - DNA, 25 bp, Probe Sequence
ggagcagtcctatgcttttattcag

SEQ ID NO: 267776 - DNA, 25 bp, Probe Sequence
ggagagatgcctctcttatgtcttc

SEQ ID NO: 267777 - DNA, 25 bp, Probe Sequence
ggagatgtgcacaatggcacttact

SEQ ID NO: 267778 - DNA, 25 bp, Probe Sequence
ggagcagtccattcagacattggga

SEQ ID NO: 267779 - DNA, 25 bp, Probe Sequence
ggagatgcccattctacttttgaat

SEQ ID NO: 267780 - DNA, 25 bp, Probe Sequence
ggagtgccagcagtgtgataattta

SEQ ID NO: 267781 - DNA, 25 bp, Probe Sequence
ggagagccaggggatttgttcctta

SEQ ID NO: 267782 - DNA, 25 bp, Probe Sequence
ggagatgtcaggatgttgctccatc

SEQ ID NO: 267783 - DNA, 25 bp, Probe Sequence
ggagtctcatggacttgcttacagc

SEQ ID NO: 267784 - DNA, 25 bp, Probe Sequence
ggagtcactggacatgttcatccta

SEQ ID NO: 267785 - DNA, 25 bp, Probe Sequence
ggagtcactggacatgttcatccta

SEQ ID NO: 267786 - DNA, 25 bp, Probe Sequence
ggagtccgaactagtctcaggcttc

SEQ ID NO: 267787 - DNA, 25 bp, Probe Sequence
ggagtccgaactagtctcaggcttc

SEQ ID NO: 267788 - DNA, 25 bp, Probe Sequence
ggagagggagtcagtcttcacttgc

SEQ ID NO: 267789 - DNA, 25 bp, Probe Sequence
ggagaggaatactaattatccattc

SEQ ID NO: 267790 - DNA, 25 bp, Probe Sequence
ggagtgatatgatctgaattacatt

SEQ ID NO: 267791 - DNA, 25 bp, Probe Sequence
ggagtagcatgactgcttatttctt

SEQ ID NO: 267792 - DNA, 25 bp, Probe Sequence
ggagaatctgttttatgtttgttgg

SEQ ID NO: 267793 - DNA, 25 bp, Probe Sequence
ggagcaacttcgtgatgtggctgtt

SEQ ID NO: 267794 - DNA, 25 bp, Probe Sequence
ggagaagatttgccaatggtgcttt

SEQ ID NO: 267795 - DNA, 25 bp, Probe Sequence
ggagaagtttacatggtgattgttc

SEQ ID NO: 267796 - DNA, 25 bp, Probe Sequence
ggagaagtttctgtttgacgtttga

SEQ ID NO: 267797 - DNA, 25 bp, Probe Sequence
ggagaatgttttgtggaccaccttt

SEQ ID NO: 267798 - DNA, 25 bp, Probe Sequence
ggagtcctatttgcagaaccacttt

SEQ ID NO: 267799 - DNA, 25 bp, Probe Sequence
ggagtacttttctacaatgcctgct

SEQ ID NO: 267800 - DNA, 25 bp, Probe Sequence
ggagtacatttctaaaataccacat

SEQ ID NO: 267801 - DNA, 25 bp, Probe Sequence
tggtgtaattggcaaataactcaag

SEQ ID NO: 267802 - DNA, 25 bp, Probe Sequence
ggagtaatcaggtggaaatccatag

SEQ ID NO: 267803 - DNA, 25 bp, Probe Sequence
ggagctaaaggaagggcaggcccac

SEQ ID NO: 267804 - DNA, 25 bp, Probe Sequence
ggagctaaaggaagggcaggcccac

SEQ ID NO: 267805 - DNA, 25 bp, Probe Sequence
ggagtccagggagaggcgggatcac

SEQ ID NO: 267806 - DNA, 25 bp, Probe Sequence
ggagtccagggagaggcgggatcac

SEQ ID NO: 267807 - DNA, 25 bp, Probe Sequence
ggagtccagggagaggcgggatcac

SEQ ID NO: 267808 - DNA, 25 bp, Probe Sequence
ggagttgagggagcagacggtgcac

SEQ ID NO: 267809 - DNA, 25 bp, Probe Sequence
ggagccagaggggctcaaaaggccc

SEQ ID NO: 267810 - DNA, 25 bp, Probe Sequence
ggagcacaagcgggctcctgaggtc

SEQ ID NO: 267811 - DNA, 25 bp, Probe Sequence
ggagacggacatagtcgtggatcac

SEQ ID NO: 267812 - DNA, 25 bp, Probe Sequence
ggagacggcgagactgcgtcaaccc

SEQ ID NO: 267813 - DNA, 25 bp, Probe Sequence
ggagacaggctggactcagctacat

SEQ ID NO: 267814 - DNA, 25 bp, Probe Sequence
ggagcagtggccgactggtaattga

SEQ ID NO: 267815 - DNA, 25 bp, Probe Sequence
ggagcctggcttgtggtaggtactt

SEQ ID NO: 267816 - DNA, 25 bp, Probe Sequence
ggagtctggaggctgttagctaact

SEQ ID NO: 267817 - DNA, 25 bp, Probe Sequence
ggagtcggacgaggatatgggattt

SEQ ID NO: 267818 - DNA, 25 bp, Probe Sequence
ggacggcagacgagttgggagtttc

SEQ ID NO: 267819 - DNA, 25 bp, Probe Sequence
ggacggagaagtctgttttgttaca

SEQ ID NO: 267820 - DNA, 25 bp, Probe Sequence
ggagcgtagcacatggagtttggta

SEQ ID NO: 267821 - DNA, 25 bp, Probe Sequence
ggacttccctgcagcacgtcgctta

SEQ ID NO: 267822 - DNA, 25 bp, Probe Sequence
ggactttccagtgacgtcaatgggt

SEQ ID NO: 267823 - DNA, 25 bp, Probe Sequence
ggaccttccactgaagctacggagt

SEQ ID NO: 267824 - DNA, 25 bp, Probe Sequence
ggcgtttacaccaaagtcagccgct

SEQ ID NO: 267825 - DNA, 25 bp, Probe Sequence
ggagttgtacccaacagtctcattg

SEQ ID NO: 267826 - DNA, 25 bp, Probe Sequence
ggagtattactcataatgtcatatt

SEQ ID NO: 267827 - DNA, 25 bp, Probe Sequence
ggagtaccagcgcatatcatctcat

SEQ ID NO: 267828 - DNA, 25 bp, Probe Sequence
ggagataccgatacatcttctgcat

SEQ ID NO: 267829 - DNA, 25 bp, Probe Sequence
ggagtaagatgaaatattatgctat

SEQ ID NO: 267830 - DNA, 25 bp, Probe Sequence
ggagatgaagctgcaatccttgttt

SEQ ID NO: 267831 - DNA, 25 bp, Probe Sequence
ggagatacgtaaagccttgttttct

SEQ ID NO: 267832 - DNA, 25 bp, Probe Sequence
ggagaatggtgtaccctttatttct

SEQ ID NO: 267833 - DNA, 25 bp, Probe Sequence
ggagaagctttgaccaatttgactt

SEQ ID NO: 267834 - DNA, 25 bp, Probe Sequence
ggagttcttgagaccttgtggatca

SEQ ID NO: 267835 - DNA, 25 bp, Probe Sequence
ggagtccattgagaccgtggtcacc

SEQ ID NO: 267836 - DNA, 25 bp, Probe Sequence
ggagtcatcatggaggagcggtgag

SEQ ID NO: 267837 - DNA, 25 bp, Probe Sequence
ggagtcatcatggaggagcggtgag

SEQ ID NO: 267838 - DNA, 25 bp, Probe Sequence
ggagatatctgatgcccagtgggaa

SEQ ID NO: 267839 - DNA, 25 bp, Probe Sequence
ggagacttgatttccagtggaacaa

SEQ ID NO: 267840 - DNA, 25 bp, Probe Sequence
ggagactggttttcggagcaaagga

SEQ ID NO: 267841 - DNA, 25 bp, Probe Sequence
ggagaccgttattctaactcaggga

SEQ ID NO: 267842 - DNA, 25 bp, Probe Sequence
ggagcaaggcttccctagactaata

SEQ ID NO: 267843 - DNA, 25 bp, Probe Sequence
ggagctcagagcacataatcagact

SEQ ID NO: 267844 - DNA, 25 bp, Probe Sequence
ggacttggtattagaagactttact

SEQ ID NO: 267845 - DNA, 25 bp, Probe Sequence
ggacttcagtcaaaatgtagccgtg

SEQ ID NO: 267846 - DNA, 25 bp, Probe Sequence
ggagtccatctgataagaaccggca

SEQ ID NO: 267847 - DNA, 25 bp, Probe Sequence
ggagttctctatataaactggatac

SEQ ID NO: 267848 - DNA, 25 bp, Probe Sequence
ggagttgcttacaagttagatggtg

SEQ ID NO: 267849 - DNA, 25 bp, Probe Sequence
ggagaggttactttgataatgggaa

SEQ ID NO: 267850 - DNA, 25 bp, Probe Sequence
ggagaggattaggtacttaggagca

SEQ ID NO: 267851 - DNA, 25 bp, Probe Sequence
ggagacgaaagagactgtctggcag

SEQ ID NO: 267852 - DNA, 25 bp, Probe Sequence
ggagactaaagcttcaatacttggc

SEQ ID NO: 267853 - DNA, 25 bp, Probe Sequence
ggagctctaaaattaaacatcgggg

SEQ ID NO: 267854 - DNA, 25 bp, Probe Sequence
ggacttactaggtttgaatgcggtg

SEQ ID NO: 267855 - DNA, 25 bp, Probe Sequence
ggagttctcggttgttgtaggaggt

SEQ ID NO: 267856 - DNA, 25 bp, Probe Sequence
ggagcttctctgttagtctattggg

SEQ ID NO: 267857 - DNA, 25 bp, Probe Sequence
ggagatctttggcagcgccattggc

SEQ ID NO: 267858 - DNA, 25 bp, Probe Sequence
ggagtctgagtatagagagaatggc

SEQ ID NO: 267859 - DNA, 25 bp, Probe Sequence
ggagactgtctcaagagggcactgg

SEQ ID NO: 267860 - DNA, 25 bp, Probe Sequence
ggagacgatataagggcggctcccc

SEQ ID NO: 267861 - DNA, 25 bp, Probe Sequence
ggagaccttgaacgaaggccggctc

SEQ ID NO: 267862 - DNA, 25 bp, Probe Sequence
ggaccctctgatccgaaagccggat

SEQ ID NO: 267863 - DNA, 25 bp, Probe Sequence
ggagctcttcagcactgaaaccgag

SEQ ID NO: 267864 - DNA, 25 bp, Probe Sequence
ggagcttaaggtcaagctgcaggag

SEQ ID NO: 267865 - DNA, 25 bp, Probe Sequence
ggacctcaaagtgaacctgagtgcc

SEQ ID NO: 267866 - DNA, 25 bp, Probe Sequence
ggagagacagaatctagtcctgggc

SEQ ID NO: 267867 - DNA, 25 bp, Probe Sequence
ggagagaagggctatttccggctgc

SEQ ID NO: 267868 - DNA, 25 bp, Probe Sequence
ggagacaaggaccattgtgcgtttc

SEQ ID NO: 267869 - DNA, 25 bp, Probe Sequence
ggagtacagtgctcttgttgatctt

SEQ ID NO: 267870 - DNA, 25 bp, Probe Sequence
ggagaaagtggacttcgatgacatc

SEQ ID NO: 267871 - DNA, 25 bp, Probe Sequence
ggagaaagaaagccggacaatcagc

SEQ ID NO: 267872 - DNA, 25 bp, Probe Sequence
ggagaactggaacgctgagaagagg

SEQ ID NO: 267873 - DNA, 25 bp, Probe Sequence
ggagatgaatactacagctacgacg

SEQ ID NO: 267874 - DNA, 25 bp, Probe Sequence
ggcaggatcgacgcgcttctgtatg

SEQ ID NO: 267875 - DNA, 25 bp, Probe Sequence
ggagttgcaggagctgtatttgatg

SEQ ID NO: 267876 - DNA, 25 bp, Probe Sequence
ggagttgcaggagctgtatttgatg

SEQ ID NO: 267877 - DNA, 25 bp, Probe Sequence
ggagtatgagtcttctgtaattcat

SEQ ID NO: 267878 - DNA, 25 bp, Probe Sequence
ggagcctgagctctggtgaaatgct

SEQ ID NO: 267879 - DNA, 25 bp, Probe Sequence
ggagactgagctgcatggtagttgg

SEQ ID NO: 267880 - DNA, 25 bp, Probe Sequence
ggagatcagcgtgaaggagttgcgg

SEQ ID NO: 267881 - DNA, 25 bp, Probe Sequence
ggagtctcaggccaaggatgtcatt

SEQ ID NO: 267882 - DNA, 25 bp, Probe Sequence
ggagtctcagagcaaggtgcgttct

SEQ ID NO: 267883 - DNA, 25 bp, Probe Sequence
ggagtctagagtacagttgagagta

SEQ ID NO: 267884 - DNA, 25 bp, Probe Sequence
ggagtctgaagagtcagatgatgac

SEQ ID NO: 267885 - DNA, 25 bp, Probe Sequence
ggagatcgacacgtcatggaccatg

SEQ ID NO: 267886 - DNA, 25 bp, Probe Sequence
ggagtctgcaacttgtggacctggc

SEQ ID NO: 267887 - DNA, 25 bp, Probe Sequence
ggagtctgcaacttgtggacctggc

SEQ ID NO: 267888 - DNA, 25 bp, Probe Sequence
ggagtcaggacaaatggatcgggct

SEQ ID NO: 267889 - DNA, 25 bp, Probe Sequence
ggagtctatataacagagctcgttt

SEQ ID NO: 267890 - DNA, 25 bp, Probe Sequence
ggagagtgaattacacgctggttct

SEQ ID NO: 267891 - DNA, 25 bp, Probe Sequence
tggagctatgaagttcctgccgttt

SEQ ID NO: 267892 - DNA, 25 bp, Probe Sequence
ggagatagagaccatcctggctaac

SEQ ID NO: 267893 - DNA, 25 bp, Probe Sequence
ggagattgagaccatcctggctaac

SEQ ID NO: 267894 - DNA, 25 bp, Probe Sequence
ggagttctacgtgctgagcgagacc

SEQ ID NO: 267895 - DNA, 25 bp, Probe Sequence
ggagagttcacgaactgtgcccaac

SEQ ID NO: 267896 - DNA, 25 bp, Probe Sequence
ggagattaacgtactgtggctgcac

SEQ ID NO: 267897 - DNA, 25 bp, Probe Sequence
ggagttggaggctgcattgagctat

SEQ ID NO: 267898 - DNA, 25 bp, Probe Sequence
ggagttggagatcagcatgggccac

SEQ ID NO: 267899 - DNA, 25 bp, Probe Sequence
ggagttgagactgatgatgtcccat

SEQ ID NO: 267900 - DNA, 25 bp, Probe Sequence
ggagaaatgaccgtatgtcaccaag

SEQ ID NO: 267901 - DNA, 25 bp, Probe Sequence
ggagaaatggatctgactgcccgga

SEQ ID NO: 267902 - DNA, 25 bp, Probe Sequence
ggagttatgagggtactgtggctgg

SEQ ID NO: 267903 - DNA, 25 bp, Probe Sequence
ggagtaagagggaatgcggtgaggc

SEQ ID NO: 267904 - DNA, 25 bp, Probe Sequence
ggagaaatgaagtgtgggtgggggt

SEQ ID NO: 267905 - DNA, 25 bp, Probe Sequence
ggagaaatattatgtctggctgcag

SEQ ID NO: 267906 - DNA, 25 bp, Probe Sequence
ggagaagcaatgtacagaatgcctg

SEQ ID NO: 267907 - DNA, 25 bp, Probe Sequence
ggagcagacattaatatccatgcca

SEQ ID NO: 267908 - DNA, 25 bp, Probe Sequence
ggagcagcagagaagccatcctcca

SEQ ID NO: 267909 - DNA, 25 bp, Probe Sequence
ggagaggaatagcatcgacatcacg

SEQ ID NO: 267910 - DNA, 25 bp, Probe Sequence
ggagaggacaagtgcagcctgtcag

SEQ ID NO: 267911 - DNA, 25 bp, Probe Sequence
ggagaaacaaatatcctgccacctc

SEQ ID NO: 267912 - DNA, 25 bp, Probe Sequence
ggagagaaagtttctgcctggccct

SEQ ID NO: 267913 - DNA, 25 bp, Probe Sequence
ggagacggagtttcactcttgctgc

SEQ ID NO: 267914 - DNA, 25 bp, Probe Sequence
ggagcagaggtttgtactttcccca

SEQ ID NO: 267915 - DNA, 25 bp, Probe Sequence
tggtgaagggtccaactttccctgg

SEQ ID NO: 267916 - DNA, 25 bp, Probe Sequence
ggagaaaggtcacgaagtcccctga

SEQ ID NO: 267917 - DNA, 25 bp, Probe Sequence
ggagagaagatgaggcctgtcccct

SEQ ID NO: 267918 - DNA, 25 bp, Probe Sequence
ggagatgaagtgaaggtctgaggga

SEQ ID NO: 267919 - DNA, 25 bp, Probe Sequence
ggagtacatgtgagactatgggagg

SEQ ID NO: 267920 - DNA, 25 bp, Probe Sequence
ggagtagcattattatttggaggag

SEQ ID NO: 267921 - DNA, 25 bp, Probe Sequence
ggagctaaggagtctcttgtgggag

SEQ ID NO: 267922 - DNA, 25 bp, Probe Sequence
ggactatagtgcaacctatttgggt

SEQ ID NO: 267923 - DNA, 25 bp, Probe Sequence
ggagttgtttgagctattctggaga

SEQ ID NO: 267924 - DNA, 25 bp, Probe Sequence
ggagtatgttttgctatgtaataat

SEQ ID NO: 267925 - DNA, 25 bp, Probe Sequence
ggagattgcttatacctggaaacta

SEQ ID NO: 267926 - DNA, 25 bp, Probe Sequence
ggagattcgcaagaccttcaatatc

SEQ ID NO: 267927 - DNA, 25 bp, Probe Sequence
ggagaccacaaaggtttcacttctt

SEQ ID NO: 267928 - DNA, 25 bp, Probe Sequence
ggagaccacatttggttctcgaacc

SEQ ID NO: 267929 - DNA, 25 bp, Probe Sequence
ggagaccacatttggttctcgaacc

SEQ ID NO: 267930 - DNA, 25 bp, Probe Sequence
ggagattctaaatggcttccagacc

SEQ ID NO: 267931 - DNA, 25 bp, Probe Sequence
ggagtttacatatactgaacatgaa

SEQ ID NO: 267932 - DNA, 25 bp, Probe Sequence
ggagtttcacaagcctgatccatat

SEQ ID NO: 267933 - DNA, 25 bp, Probe Sequence
ggagtttcaacatccagcttcatct

SEQ ID NO: 267934 - DNA, 25 bp, Probe Sequence
ggagatttgcaagatgctcagtccc

SEQ ID NO: 267935 - DNA, 25 bp, Probe Sequence
ggagtataaagttgtcacccatcga

SEQ ID NO: 267936 - DNA, 25 bp, Probe Sequence
ggagtaaatttgttccacgtcaagt

SEQ ID NO: 267937 - DNA, 25 bp, Probe Sequence
ggagaacaatgttggtgaacgtcaa

SEQ ID NO: 267938 - DNA, 25 bp, Probe Sequence
ggagaagcaagcaggcgaatcgtaa

SEQ ID NO: 267939 - DNA, 25 bp, Probe Sequence
ggagaagatacaaagcgcacttgct

SEQ ID NO: 267940 - DNA, 25 bp, Probe Sequence
ggagagagatactgagctcaaatct

SEQ ID NO: 267941 - DNA, 25 bp, Probe Sequence
ggagagactcacggagctcagagag

SEQ ID NO: 267942 - DNA, 25 bp, Probe Sequence
ggagatgtgtcaagggctcaagagg

SEQ ID NO: 267943 - DNA, 25 bp, Probe Sequence
ggagagctatatacggctgttgcag

SEQ ID NO: 267944 - DNA, 25 bp, Probe Sequence
ggagatgttatcaaggctgcctata

SEQ ID NO: 267945 - DNA, 25 bp, Probe Sequence
ggagatcttagcaagcctgcagata

SEQ ID NO: 267946 - DNA, 25 bp, Probe Sequence
ggagcactgccatgaggcatgcaga

SEQ ID NO: 267947 - DNA, 25 bp, Probe Sequence
ggagagcgacagtaggctgcatctg

SEQ ID NO: 267948 - DNA, 25 bp, Probe Sequence
ggagacggcagttctgctactgcga

SEQ ID NO: 267949 - DNA, 25 bp, Probe Sequence
ggagaagtgcagctgctgcgcctga

SEQ ID NO: 267950 - DNA, 25 bp, Probe Sequence
ggagaatgaggatgctcgctctatg

SEQ ID NO: 267951 - DNA, 25 bp, Probe Sequence
ggagttgaggcagtgcatcacctga

SEQ ID NO: 267952 - DNA, 25 bp, Probe Sequence
ggagtatgaggatgacactgtgatg

SEQ ID NO: 267953 - DNA, 25 bp, Probe Sequence
ggagttggaatccagcctgagcaac

SEQ ID NO: 267954 - DNA, 25 bp, Probe Sequence
ggagtttgagaccagcctagacaac

SEQ ID NO: 267955 - DNA, 25 bp, Probe Sequence
ggagtttgacaccagcctgggcaac

SEQ ID NO: 267956 - DNA, 25 bp, Probe Sequence
ggagtttgagacaagcctgggcaac

SEQ ID NO: 267957 - DNA, 25 bp, Probe Sequence
ggagtttgagaccagcctgggcaac

SEQ ID NO: 267958 - DNA, 25 bp, Probe Sequence
ggagttcaagaccagcctggccaac

SEQ ID NO: 267959 - DNA, 25 bp, Probe Sequence
ggagttcaagaccaggctgggcaac

SEQ ID NO: 267960 - DNA, 25 bp, Probe Sequence
ggagttcacagaagcggtggaagcc

SEQ ID NO: 267961 - DNA, 25 bp, Probe Sequence
ggagttcacagaagcggtggaagcc

SEQ ID NO: 267962 - DNA, 25 bp, Probe Sequence
ggagttccagagtgtgaggagatgg

SEQ ID NO: 267963 - DNA, 25 bp, Probe Sequence
ggagttcaccgaggctgagagcaac

SEQ ID NO: 267964 - DNA, 25 bp, Probe Sequence
ggacttcccagaggtcagcagtgga

SEQ ID NO: 267965 - DNA, 25 bp, Probe Sequence
ggactccccagggctgaagctggga

SEQ ID NO: 267966 - DNA, 25 bp, Probe Sequence
ggacctccgagagctggaggggaag

SEQ ID NO: 267967 - DNA, 25 bp, Probe Sequence
ggagaagccaaacctaagcggcgga

SEQ ID NO: 267968 - DNA, 25 bp, Probe Sequence
ggagaagtctaacgctgaactgaca

SEQ ID NO: 267969 - DNA, 25 bp, Probe Sequence
ggagaagtctaacgctgaactgaca

SEQ ID NO: 267970 - DNA, 25 bp, Probe Sequence
ggagtagtaaagcctcaaggacatc

SEQ ID NO: 267971 - DNA, 25 bp, Probe Sequence
ggagcgagagaaacgtcgggagcac

SEQ ID NO: 267972 - DNA, 25 bp, Probe Sequence
ggagcggggagacctgggatagcaa

SEQ ID NO: 267973 - DNA, 25 bp, Probe Sequence
ggagcaggtggctggtttgaagccc

SEQ ID NO: 267974 - DNA, 25 bp, Probe Sequence
ggagagcgaggtggcttcaataagc

SEQ ID NO: 267975 - DNA, 25 bp, Probe Sequence
ggagatggaggcacgtgataagaca

SEQ ID NO: 267976 - DNA, 25 bp, Probe Sequence
ggagctgaaggcaggtggcctgaga

SEQ ID NO: 267977 - DNA, 25 bp, Probe Sequence
ggactctagtctaggtccgcggtta

SEQ ID NO: 267978 - DNA, 25 bp, Probe Sequence
ggacttagccggcgcctgcacgtgt

SEQ ID NO: 267979 - DNA, 25 bp, Probe Sequence
ggagcggaccgaccgctccaagttt

SEQ ID NO: 267980 - DNA, 25 bp, Probe Sequence
ggaatggaacaaccagtaaactgtt

SEQ ID NO: 267981 - DNA, 25 bp, Probe Sequence
ggagagggaacatgctgagaaactg

SEQ ID NO: 267982 - DNA, 25 bp, Probe Sequence
ggagaagaagcctgctgcataaact

SEQ ID NO: 267983 - DNA, 25 bp, Probe Sequence
ggagaagatgacccgtggaacactt

SEQ ID NO: 267984 - DNA, 25 bp, Probe Sequence
ggagaagcacagcagccggaagatc

SEQ ID NO: 267985 - DNA, 25 bp, Probe Sequence
ggagaacgaggatcaggtggtcaag

SEQ ID NO: 267986 - DNA, 25 bp, Probe Sequence
ggagaccaagactattggttgccta

SEQ ID NO: 267987 - DNA, 25 bp, Probe Sequence
ggagatctaaatgatgtacttgtta

SEQ ID NO: 267988 - DNA, 25 bp, Probe Sequence
ggagtatagaagaatatccttggaa

SEQ ID NO: 267989 - DNA, 25 bp, Probe Sequence
ggagttaaagattagcctggctgat

SEQ ID NO: 267990 - DNA, 25 bp, Probe Sequence
ggagttataaactgcatctgctgga

SEQ ID NO: 267991 - DNA, 25 bp, Probe Sequence
ggagttatgcatagacccactctag

SEQ ID NO: 267992 - DNA, 25 bp, Probe Sequence
ggagtttatatggctctctgttagc

SEQ ID NO: 267993 - DNA, 25 bp, Probe Sequence
ggagattttagccctgatgaattca

SEQ ID NO: 267994 - DNA, 25 bp, Probe Sequence
ggagtttatagttctgatgtctttg

SEQ ID NO: 267995 - DNA, 25 bp, Probe Sequence
ggagtttgaagttgtgactctcctg

SEQ ID NO: 267996 - DNA, 25 bp, Probe Sequence
ggagccacaaagaggtccatcgctg

SEQ ID NO: 267997 - DNA, 25 bp, Probe Sequence
ggagcgccaagatttggtccaagtc

SEQ ID NO: 267998 - DNA, 25 bp, Probe Sequence
ggagcagccagtttttgttaattac

SEQ ID NO: 267999 - DNA, 25 bp, Probe Sequence
ggagttatgtttatgggaattattg

SEQ ID NO: 268000 - DNA, 25 bp, Probe Sequence
ggagttatgtttatgagaattgttg

SEQ ID NO: 268001 - DNA, 25 bp, Probe Sequence
ggagctcaagttcaatgagtactgg

SEQ ID NO: 268002 - DNA, 25 bp, Probe Sequence
ggaccaaattgactaattcctgtta

SEQ ID NO: 268003 - DNA, 25 bp, Probe Sequence
ggactacaagaagagcttcctttaa

SEQ ID NO: 268004 - DNA, 25 bp, Probe Sequence
ggagttggtccagtatgcttacttt

SEQ ID NO: 268005 - DNA, 25 bp, Probe Sequence
ggagcgtggactggttggttttgcc

SEQ ID NO: 268006 - DNA, 25 bp, Probe Sequence
ggagcagggaatgttgtatctttgg

SEQ ID NO: 268007 - DNA, 25 bp, Probe Sequence
ggagcaggaggggccggagtattgg

SEQ ID NO: 268008 - DNA, 25 bp, Probe Sequence
ggagatggtatcccctggagtagag

SEQ ID NO: 268009 - DNA, 25 bp, Probe Sequence
ggagaattcacatcctgggtgggac

SEQ ID NO: 268010 - DNA, 25 bp, Probe Sequence
ggagaagtctcattcgtggttgagc

SEQ ID NO: 268011 - DNA, 25 bp, Probe Sequence
ggagaggctgcgtacagtgtttcac

SEQ ID NO: 268012 - DNA, 25 bp, Probe Sequence
ggagcagggcagtgaggatttctca

SEQ ID NO: 268013 - DNA, 25 bp, Probe Sequence
ggagcatagacagtgtggagacatt

SEQ ID NO: 268014 - DNA, 25 bp, Probe Sequence
ggagaagacagtggcgaccaagacg

SEQ ID NO: 268015 - DNA, 25 bp, Probe Sequence
ggagaagaatgtgatgcggcagaag

SEQ ID NO: 268016 - DNA, 25 bp, Probe Sequence
ggagataagaaccatgcagatgcag

SEQ ID NO: 268017 - DNA, 25 bp, Probe Sequence
ggagatctagagagaagacactcat

SEQ ID NO: 268018 - DNA, 25 bp, Probe Sequence
ggagatctatggaagaaccatctct

SEQ ID NO: 268019 - DNA, 25 bp, Probe Sequence
ggagaccacggagttcatcatctcg

SEQ ID NO: 268020 - DNA, 25 bp, Probe Sequence
ggagaacagagccatgtcatatcac

SEQ ID NO: 268021 - DNA, 25 bp, Probe Sequence
ggagagacatgaatgcagtgccttc

SEQ ID NO: 268022 - DNA, 25 bp, Probe Sequence
ggagagaatgacttctgccttcatc

SEQ ID NO: 268023 - DNA, 25 bp, Probe Sequence
ggagagaagcactacagttgtcaag

SEQ ID NO: 268024 - DNA, 25 bp, Probe Sequence
ggagagacagatctgaatgttcagt

SEQ ID NO: 268025 - DNA, 25 bp, Probe Sequence
ggagcagatcggctgagcagatctc

SEQ ID NO: 268026 - DNA, 25 bp, Probe Sequence
ggagcgcatggtcggagaactccgg

SEQ ID NO: 268027 - DNA, 25 bp, Probe Sequence
ggagacgggatggagacacggggca

SEQ ID NO: 268028 - DNA, 25 bp, Probe Sequence
ggagacagggcaggtgttagggcga

SEQ ID NO: 268029 - DNA, 25 bp, Probe Sequence
ggagagcaggctgagtttggagcag

SEQ ID NO: 268030 - DNA, 25 bp, Probe Sequence
ggagatgcagcagaagttggtggag

SEQ ID NO: 268031 - DNA, 25 bp, Probe Sequence
ggagatgctgctgaagcgcgaggag

SEQ ID NO: 268032 - DNA, 25 bp, Probe Sequence
ggagatcatgcagcagaagcagaaa

SEQ ID NO: 268033 - DNA, 25 bp, Probe Sequence
ggagattgagctggaagaagacatg

SEQ ID NO: 268034 - DNA, 25 bp, Probe Sequence
ggagactgcagaaatcagacgacag

SEQ ID NO: 268035 - DNA, 25 bp, Probe Sequence
ggagaccagcaaatcggtgcactga

SEQ ID NO: 268036 - DNA, 25 bp, Probe Sequence
ggagatcaacagttactgtgactga

SEQ ID NO: 268037 - DNA, 25 bp, Probe Sequence
ggagatcatggctttgggtattatt

SEQ ID NO: 268038 - DNA, 25 bp, Probe Sequence
ggagatctggggctgttatttttaa

SEQ ID NO: 268039 - DNA, 25 bp, Probe Sequence
ggagttggcttgcttcatattgtct

SEQ ID NO: 268040 - DNA, 25 bp, Probe Sequence
ggagattgtattcatatctatttgc

SEQ ID NO: 268041 - DNA, 25 bp, Probe Sequence
ggagattagagaaatatgctatgag

SEQ ID NO: 268042 - DNA, 25 bp, Probe Sequence
ggagattcatgggagaagtatgtgc

SEQ ID NO: 268043 - DNA, 25 bp, Probe Sequence
ggagatgctctcgggaaaagtgcaa

SEQ ID NO: 268044 - DNA, 25 bp, Probe Sequence
ggagatgctcacggggcaggagcgc

SEQ ID NO: 268045 - DNA, 25 bp, Probe Sequence
ggagatgccacctgatgcagtagaa

SEQ ID NO: 268046 - DNA, 25 bp, Probe Sequence
ggagatggcagctcagatctgtgag

SEQ ID NO: 268047 - DNA, 25 bp, Probe Sequence
ggagatgacgcttgagttgatgaac

SEQ ID NO: 268048 - DNA, 25 bp, Probe Sequence
ggagatatgccagatgcttaaacac

SEQ ID NO: 268049 - DNA, 25 bp, Probe Sequence
ggagatatgccagatgcttaaacac

SEQ ID NO: 268050 - DNA, 25 bp, Probe Sequence
ggagatcgcgcaggatttcaaaacc

SEQ ID NO: 268051 - DNA, 25 bp, Probe Sequence
ggagcagcgcaagattgatcagaaa

SEQ ID NO: 268052 - DNA, 25 bp, Probe Sequence
ggagagctgtccctagacagtagtg

SEQ ID NO: 268053 - DNA, 25 bp, Probe Sequence
ggagatgctttcccaagaaagtgaa

SEQ ID NO: 268054 - DNA, 25 bp, Probe Sequence
ggagaattgttgcaaagtagtgaat

SEQ ID NO: 268055 - DNA, 25 bp, Probe Sequence
ggagaaaactctaaagtcagccaaa

SEQ ID NO: 268056 - DNA, 25 bp, Probe Sequence
ggagcaatacctacaaagtcaggca

SEQ ID NO: 268057 - DNA, 25 bp, Probe Sequence
ggagacatgaccactgaagaattca

SEQ ID NO: 268058 - DNA, 25 bp, Probe Sequence
ggagacatgaccactgaagaattca

SEQ ID NO: 268059 - DNA, 25 bp, Probe Sequence
ggagatcatgggaagctacagagtt

SEQ ID NO: 268060 - DNA, 25 bp, Probe Sequence
ggagctgatgctcttgccaaagtat

SEQ ID NO: 268061 - DNA, 25 bp, Probe Sequence
ggagctatcaggcctgcacagaagt

SEQ ID NO: 268062 - DNA, 25 bp, Probe Sequence
ggagcttaagtcccatgcatttgct

SEQ ID NO: 268063 - DNA, 25 bp, Probe Sequence
ggagctgaaagtgggagatattatt

SEQ ID NO: 268064 - DNA, 25 bp, Probe Sequence
ggagctgagggtaggagaatcactt

SEQ ID NO: 268065 - DNA, 25 bp, Probe Sequence
ggagactgaggcaggaggatcactt

SEQ ID NO: 268066 - DNA, 25 bp, Probe Sequence
ggagactgaggcaggagaattgctt

SEQ ID NO: 268067 - DNA, 25 bp, Probe Sequence
ggagacgtcgctttgaacgtgctat

SEQ ID NO: 268068 - DNA, 25 bp, Probe Sequence
ggagcggcggcagatgaagcggtta

SEQ ID NO: 268069 - DNA, 25 bp, Probe Sequence
ggagctgcgggaagaagcctggtct

SEQ ID NO: 268070 - DNA, 25 bp, Probe Sequence
ggagacgcaggcacaactctttata

SEQ ID NO: 268071 - DNA, 25 bp, Probe Sequence
ggagatggaggcatcatgtctgtta

SEQ ID NO: 268072 - DNA, 25 bp, Probe Sequence
ggagatgaacgcccagttgagtgtt

SEQ ID NO: 268073 - DNA, 25 bp, Probe Sequence
ggagatgacaccacagactgttcct

SEQ ID NO: 268074 - DNA, 25 bp, Probe Sequence
ggagatgtacgatgcagacctttta

SEQ ID NO: 268075 - DNA, 25 bp, Probe Sequence
ggagatgtacgatgcagacctttta

SEQ ID NO: 268076 - DNA, 25 bp, Probe Sequence
ggagattattattggagcctaattg

SEQ ID NO: 268077 - DNA, 25 bp, Probe Sequence
ggagttgttttgcacctaaatcgac

SEQ ID NO: 268078 - DNA, 25 bp, Probe Sequence
ggagttgtgatgggtacctgtaatc

SEQ ID NO: 268079 - DNA, 25 bp, Probe Sequence
ggagaggatgagggtgaagagtatt

SEQ ID NO: 268080 - DNA, 25 bp, Probe Sequence
ggagagagagcggaaagtgagtatg

SEQ ID NO: 268081 - DNA, 25 bp, Probe Sequence
ggagagggcgttcaggatggcatga

SEQ ID NO: 268082 - DNA, 25 bp, Probe Sequence
ggagagaggttttcaggctggtgcc

SEQ ID NO: 268083 - DNA, 25 bp, Probe Sequence
ggagcaattgctgtacataccctcc

SEQ ID NO: 268084 - DNA, 25 bp, Probe Sequence
ggagaatctatgcgaatcaaccttt

SEQ ID NO: 268085 - DNA, 25 bp, Probe Sequence
ggagaaggtggacactaccattatg

SEQ ID NO: 268086 - DNA, 25 bp, Probe Sequence
ggagagaacttacaggacacagatt

SEQ ID NO: 268087 - DNA, 25 bp, Probe Sequence
ggagagaagcttttgaccacggagt

SEQ ID NO: 268088 - DNA, 25 bp, Probe Sequence
ggagcagtacgttcaactcccaaga

SEQ ID NO: 268089 - DNA, 25 bp, Probe Sequence
ggagatggacgagaatccccagcag

SEQ ID NO: 268090 - DNA, 25 bp, Probe Sequence
ggagcatggacgtggagtcccacgt

SEQ ID NO: 268091 - DNA, 25 bp, Probe Sequence
ggagcagagtgcggaggattcctac

SEQ ID NO: 268092 - DNA, 25 bp, Probe Sequence
ggagcaggaggtggagattcccagt

SEQ ID NO: 268093 - DNA, 25 bp, Probe Sequence
ggagaggaaggagcaagccacagtg

SEQ ID NO: 268094 - DNA, 25 bp, Probe Sequence
ggcagaaaaggagacaaactggcct

SEQ ID NO: 268095 - DNA, 25 bp, Probe Sequence
ggagaaaaggtcttcaatcgtggaa

SEQ ID NO: 268096 - DNA, 25 bp, Probe Sequence
ggagatacacatttcgacaatcctg

SEQ ID NO: 268097 - DNA, 25 bp, Probe Sequence
ggagctcgccaatggaattcctgac

SEQ ID NO: 268098 - DNA, 25 bp, Probe Sequence
ggagcacctgcttcaggaagctccc

SEQ ID NO: 268099 - DNA, 25 bp, Probe Sequence
ggagatttctaagaagtcccaatgt

SEQ ID NO: 268100 - DNA, 25 bp, Probe Sequence
ggcaggttattagaagagtcccatg

SEQ ID NO: 268101 - DNA, 25 bp, Probe Sequence
ggagagtttctattaaaggtcattt

SEQ ID NO: 268102 - DNA, 25 bp, Probe Sequence
ggagaaggcctaaaaaatgtcattt

SEQ ID NO: 268103 - DNA, 25 bp, Probe Sequence
ggagataccacaaagaagaacgagt

SEQ ID NO: 268104 - DNA, 25 bp, Probe Sequence
ggagaagccattaaaagccactggt

SEQ ID NO: 268105 - DNA, 25 bp, Probe Sequence
ggagaatctttatcagaaactggtt

SEQ ID NO: 268106 - DNA, 25 bp, Probe Sequence
ggagaactttgctatcaaaacggaa

SEQ ID NO: 268107 - DNA, 25 bp, Probe Sequence
ggagctgacttcggaactaaaggag

SEQ ID NO: 268108 - DNA, 25 bp, Probe Sequence
ggcagttgttgaaaccaaaatggag

SEQ ID NO: 268109 - DNA, 25 bp, Probe Sequence
ggcaacatctttatccgtagtgggt

SEQ ID NO: 268110 - DNA, 25 bp, Probe Sequence
ggagctactttcatccttaggaatg

SEQ ID NO: 268111 - DNA, 25 bp, Probe Sequence
ggagctaattcataaaaaggatctt

SEQ ID NO: 268112 - DNA, 25 bp, Probe Sequence
ggagccaatatgcgaacagaatttc

SEQ ID NO: 268113 - DNA, 25 bp, Probe Sequence
ggagaacagtggcagaaggaatatc

SEQ ID NO: 268114 - DNA, 25 bp, Probe Sequence
ggagaacagtggcagaaggaatatc

SEQ ID NO: 268115 - DNA, 25 bp, Probe Sequence
ggagaacagtggcagaaggaatatc

SEQ ID NO: 268116 - DNA, 25 bp, Probe Sequence
ggagaagcgggcgttccgtgagatc

SEQ ID NO: 268117 - DNA, 25 bp, Probe Sequence
ggagaagcgggcgttccgtgagatc

SEQ ID NO: 268118 - DNA, 25 bp, Probe Sequence
ggagaaggaggtttgccgtgatcta

SEQ ID NO: 268119 - DNA, 25 bp, Probe Sequence
ggagagtggggtgtgcaaggttgac

SEQ ID NO: 268120 - DNA, 25 bp, Probe Sequence
ggacgtgagggtctgggtgtttcct

SEQ ID NO: 268121 - DNA, 25 bp, Probe Sequence
ggagaaggggctcctgggtgtctgt

SEQ ID NO: 268122 - DNA, 25 bp, Probe Sequence
ggagaactgtgagacctggggtgta

SEQ ID NO: 268123 - DNA, 25 bp, Probe Sequence
ggagacaggtggaatcctgggggaa

SEQ ID NO: 268124 - DNA, 25 bp, Probe Sequence
ggagagtgggcaggtcctgggggac

SEQ ID NO: 268125 - DNA, 25 bp, Probe Sequence
ggagaggggcaaatgcctccgggac

SEQ ID NO: 268126 - DNA, 25 bp, Probe Sequence
ggagcaggtgaagaggcccaaggat

SEQ ID NO: 268127 - DNA, 25 bp, Probe Sequence
ggagcggatcatgaaagcccaggca

SEQ ID NO: 268128 - DNA, 25 bp, Probe Sequence
ggagcaggcacatagtgagcccggg

SEQ ID NO: 268129 - DNA, 25 bp, Probe Sequence
ggacggccctgaagagtgcaaggat

SEQ ID NO: 268130 - DNA, 25 bp, Probe Sequence
ggacggtcacgaagccgagagagaa

SEQ ID NO: 268131 - DNA, 25 bp, Probe Sequence
ggaccagatccagagccggaagggt

SEQ ID NO: 268132 - DNA, 25 bp, Probe Sequence
ggagcaagaaccacctgagaaaagt

SEQ ID NO: 268133 - DNA, 25 bp, Probe Sequence
ggagaactaatcacccagagagagc

SEQ ID NO: 268134 - DNA, 25 bp, Probe Sequence
ggaaaatatctgaacccatggaggc

SEQ ID NO: 268135 - DNA, 25 bp, Probe Sequence
ggagaaatcagtcatcctgatggaa

SEQ ID NO: 268136 - DNA, 25 bp, Probe Sequence
ggagaacttatggattgtgatggaa

SEQ ID NO: 268137 - DNA, 25 bp, Probe Sequence
ggagaaccaagtatgtattgcatga

SEQ ID NO: 268138 - DNA, 25 bp, Probe Sequence
ggagaaacaaaattgctatttacca

SEQ ID NO: 268139 - DNA, 25 bp, Probe Sequence
ggagcaagaaaaacaggtttgcacc

SEQ ID NO: 268140 - DNA, 25 bp, Probe Sequence
ggagaaaatgattgtcggtttgctc

SEQ ID NO: 268141 - DNA, 25 bp, Probe Sequence
ggagacaagggagtcggtgtccctg

SEQ ID NO: 268142 - DNA, 25 bp, Probe Sequence
ggagatcaagaccatcctggctaac

SEQ ID NO: 268143 - DNA, 25 bp, Probe Sequence
ggagatcaagaccatcctggctaac

SEQ ID NO: 268144 - DNA, 25 bp, Probe Sequence
ggagcaggcagataccgttaagcgc

SEQ ID NO: 268145 - DNA, 25 bp, Probe Sequence
ggagagggatcgtcctcattcagac

SEQ ID NO: 268146 - DNA, 25 bp, Probe Sequence
ggagagtgtgaaatccagcaactga

SEQ ID NO: 268147 - DNA, 25 bp, Probe Sequence
ggagaattgtgaatgtatgtactgt

SEQ ID NO: 268148 - DNA, 25 bp, Probe Sequence
ggagcagctttaggtatggattgat

SEQ ID NO: 268149 - DNA, 25 bp, Probe Sequence
ggagcactgattcctggaggtggtc

SEQ ID NO: 268150 - DNA, 25 bp, Probe Sequence
ggagcatccttttggaggtggcaac

SEQ ID NO: 268151 - DNA, 25 bp, Probe Sequence
ggagcccctgggggtgtgggatgga

SEQ ID NO: 268152 - DNA, 25 bp, Probe Sequence
ggagcccttgggggataaagagcct

SEQ ID NO: 268153 - DNA, 25 bp, Probe Sequence
ggagccttttatgggacaatctggg

SEQ ID NO: 268154 - DNA, 25 bp, Probe Sequence
ggagcggtctatactagtgcagatt

SEQ ID NO: 268155 - DNA, 25 bp, Probe Sequence
ggagcagtgttctctaagcgttctc

SEQ ID NO: 268156 - DNA, 25 bp, Probe Sequence
ggagcaatgttggcctatacgcccc

SEQ ID NO: 268157 - DNA, 25 bp, Probe Sequence
ggagcagcatgtcacatcttacatg

SEQ ID NO: 268158 - DNA, 25 bp, Probe Sequence
ggagcacgctgccaatgatgtttca

SEQ ID NO: 268159 - DNA, 25 bp, Probe Sequence
ggagacctgaataattctgtgtaat

SEQ ID NO: 268160 - DNA, 25 bp, Probe Sequence
ggagacttccatgcttttgatggca

SEQ ID NO: 268161 - DNA, 25 bp, Probe Sequence
ggagatgctatcaatgttatttgta

SEQ ID NO: 268162 - DNA, 25 bp, Probe Sequence
ggagatggactaattgacttgcaaa

SEQ ID NO: 268163 - DNA, 25 bp, Probe Sequence
ggagatgtgccaaacatggcaagaa

SEQ ID NO: 268164 - DNA, 25 bp, Probe Sequence
ggagagcacttggagatggcaatgc

SEQ ID NO: 268165 - DNA, 25 bp, Probe Sequence
ggagagcatcttccaggctgagatg

SEQ ID NO: 268166 - DNA, 25 bp, Probe Sequence
ggagagcatcaagcaggctgtgagg

SEQ ID NO: 268167 - DNA, 25 bp, Probe Sequence
ggagatgctccagctgctggtgaag

SEQ ID NO: 268168 - DNA, 25 bp, Probe Sequence
ggagctctacaggctgaactgggag

SEQ ID NO: 268169 - DNA, 25 bp, Probe Sequence
ggcagaggacgatgacctgggaggc

SEQ ID NO: 268170 - DNA, 25 bp, Probe Sequence
ggagaatcgctggaacctgggaggc

SEQ ID NO: 268171 - DNA, 25 bp, Probe Sequence
ggagaatcgcttgaatctgggaggt

SEQ ID NO: 268172 - DNA, 25 bp, Probe Sequence
ggagagccgcgggatttgcggccgc

SEQ ID NO: 268173 - DNA, 25 bp, Probe Sequence
ggagagtggggatttctgtcagcgc

SEQ ID NO: 268174 - DNA, 25 bp, Probe Sequence
ggagagaggggatttctgtcagcgc

SEQ ID NO: 268175 - DNA, 25 bp, Probe Sequence
ggagagaggagtgttctgtccagga

SEQ ID NO: 268176 - DNA, 25 bp, Probe Sequence
ggagacgtgaggcaactgtggcagg

SEQ ID NO: 268177 - DNA, 25 bp, Probe Sequence
ggagacgtcattgaagaggctgcag

SEQ ID NO: 268178 - DNA, 25 bp, Probe Sequence
ggagactaattgccaaggccatgca

SEQ ID NO: 268179 - DNA, 25 bp, Probe Sequence
ggagaatagttgtcaaccttcattc

SEQ ID NO: 268180 - DNA, 25 bp, Probe Sequence
ggagaagagtattaaaccatattta

SEQ ID NO: 268181 - DNA, 25 bp, Probe Sequence
ggagaaatgttcatggtatcaattt

SEQ ID NO: 268182 - DNA, 25 bp, Probe Sequence
ggagaaacttttttatgcagttcat

SEQ ID NO: 268183 - DNA, 25 bp, Probe Sequence
ggagaaactcattcctgattggctt

SEQ ID NO: 268184 - DNA, 25 bp, Probe Sequence
ggagaacagccattccacatgtgtt

SEQ ID NO: 268185 - DNA, 25 bp, Probe Sequence
ggagaaacaagtcacatcgttacat

SEQ ID NO: 268186 - DNA, 25 bp, Probe Sequence
ggagaaggaagtcatcatcctgaac

SEQ ID NO: 268187 - DNA, 25 bp, Probe Sequence
ggagaaggccagtaacatcgtcatg

SEQ ID NO: 268188 - DNA, 25 bp, Probe Sequence
ggagaatggcccaaacctgacatgg

SEQ ID NO: 268189 - DNA, 25 bp, Probe Sequence
ggagaattctgcctaagccaactcg

SEQ ID NO: 268190 - DNA, 25 bp, Probe Sequence
ggagacacatgcaggacctaactcg

SEQ ID NO: 268191 - DNA, 25 bp, Probe Sequence
ggagacagtgtctcactctgtcacc

SEQ ID NO: 268192 - DNA, 25 bp, Probe Sequence
ggagaattgattgcctctgctccca

SEQ ID NO: 268193 - DNA, 25 bp, Probe Sequence
ggagaatgtatattgcctctgctcc

SEQ ID NO: 268194 - DNA, 25 bp, Probe Sequence
ggagagtgtgaacctgctcatgtcc

SEQ ID NO: 268195 - DNA, 25 bp, Probe Sequence
ggagagtgtgacccaagctgtgtcc

SEQ ID NO: 268196 - DNA, 25 bp, Probe Sequence
ggagaatggtcctaagctggcaagc

SEQ ID NO: 268197 - DNA, 25 bp, Probe Sequence
ggagacaggcctgaagctggccctg

SEQ ID NO: 268198 - DNA, 25 bp, Probe Sequence
ggagagaggccgcagccaggcctct

SEQ ID NO: 268199 - DNA, 25 bp, Probe Sequence
ggagaacaaggccatccatgacctg

SEQ ID NO: 268200 - DNA, 25 bp, Probe Sequence
ggagaacaaggccatccatgacctg

SEQ ID NO: 268201 - DNA, 25 bp, Probe Sequence
ggagaagaactcaatcactggactg

SEQ ID NO: 268202 - DNA, 25 bp, Probe Sequence
ggagaagaactcccagctagagcgt

SEQ ID NO: 268203 - DNA, 25 bp, Probe Sequence
ggagcgtaactgccacttaagcggc

SEQ ID NO: 268204 - DNA, 25 bp, Probe Sequence
ggagcgaacactgcactaagatttg

SEQ ID NO: 268205 - DNA, 25 bp, Probe Sequence
ggagcgaacactgcactaagatttg

SEQ ID NO: 268206 - DNA, 25 bp, Probe Sequence
ggagcaaaagcccactgacgctcca

SEQ ID NO: 268207 - DNA, 25 bp, Probe Sequence
ggagctaagagcatcactgatccct

SEQ ID NO: 268208 - DNA, 25 bp, Probe Sequence
ggagcatgaaccagtcatatcctgt

SEQ ID NO: 268209 - DNA, 25 bp, Probe Sequence
ggactaagcctgttcataagttacc

SEQ ID NO: 268210 - DNA, 25 bp, Probe Sequence
ggactaagtcgaaaactgtaaactg

SEQ ID NO: 268211 - DNA, 25 bp, Probe Sequence
ggacgatgaacgcaaacttcgtact

SEQ ID NO: 268212 - DNA, 25 bp, Probe Sequence
ggaccattaggggaccattctgttc

SEQ ID NO: 268213 - DNA, 25 bp, Probe Sequence
ggacttgtagggatgcctttctagt

SEQ ID NO: 268214 - DNA, 25 bp, Probe Sequence
ggactgtacgggagccacttatatg

SEQ ID NO: 268215 - DNA, 25 bp, Probe Sequence
ggactggagcgtaactgccacttaa

SEQ ID NO: 268216 - DNA, 25 bp, Probe Sequence
ggacggaggttaatggctgctcctg

SEQ ID NO: 268217 - DNA, 25 bp, Probe Sequence
ggagctggaggagatgctggtcccc

SEQ ID NO: 268218 - DNA, 25 bp, Probe Sequence
ggagcagtggaagagggtgcccaac

SEQ ID NO: 268219 - DNA, 25 bp, Probe Sequence
ggagcgggacaggggggaccgagat

SEQ ID NO: 268220 - DNA, 25 bp, Probe Sequence
ggacaggggggaccgagatcgggat

SEQ ID NO: 268221 - DNA, 25 bp, Probe Sequence
ggaaggggtgtacctagagccaagg

SEQ ID NO: 268222 - DNA, 25 bp, Probe Sequence
ggaacgggagtccctgaatgccagc

SEQ ID NO: 268223 - DNA, 25 bp, Probe Sequence
tggaacgtgagcctcggatttcctg

SEQ ID NO: 268224 - DNA, 25 bp, Probe Sequence
ggagccggaggtggcaattcaccga

SEQ ID NO: 268225 - DNA, 25 bp, Probe Sequence
ggagagcttgggggaatctaatcaa

SEQ ID NO: 268226 - DNA, 25 bp, Probe Sequence
ggagacacggaggaagtcaaaagca

SEQ ID NO: 268227 - DNA, 25 bp, Probe Sequence
ggagagctcgacggagagctcagaa

SEQ ID NO: 268228 - DNA, 25 bp, Probe Sequence
ggagcagctcagaaaacatgtcaga

SEQ ID NO: 268229 - DNA, 25 bp, Probe Sequence
ggagactgagctaaacattatgcgt

SEQ ID NO: 268230 - DNA, 25 bp, Probe Sequence
ggagaagagtgacacagttgctgat

SEQ ID NO: 268231 - DNA, 25 bp, Probe Sequence
ggagaaggatgaaactgtgagtgac

SEQ ID NO: 268232 - DNA, 25 bp, Probe Sequence
ggagcataaggtttatctcaagtct

SEQ ID NO: 268233 - DNA, 25 bp, Probe Sequence
ggagcgtcttatattctgaaacttg

SEQ ID NO: 268234 - DNA, 25 bp, Probe Sequence
ggagcttctttatctgccagagaat

SEQ ID NO: 268235 - DNA, 25 bp, Probe Sequence
ggcagctttttaacgcgctgacgtt

SEQ ID NO: 268236 - DNA, 25 bp, Probe Sequence
ggaccaatgcttaaggtggaccttg

SEQ ID NO: 268237 - DNA, 25 bp, Probe Sequence
ggaccactccgaagtgtgtgggttg

SEQ ID NO: 268238 - DNA, 25 bp, Probe Sequence
ggaacttacatgtgtcctggtttga

SEQ ID NO: 268239 - DNA, 25 bp, Probe Sequence
ggagacattacttcattcctgttgt

SEQ ID NO: 268240 - DNA, 25 bp, Probe Sequence
ggcaggaaactgcatatcttctggt

SEQ ID NO: 268241 - DNA, 25 bp, Probe Sequence
ggagaacaactcttatcctcgtttc

SEQ ID NO: 268242 - DNA, 25 bp, Probe Sequence
ggagaacaacaaagacgccctcctc

SEQ ID NO: 268243 - DNA, 25 bp, Probe Sequence
ggagaagcaataaacctcagccctc

SEQ ID NO: 268244 - DNA, 25 bp, Probe Sequence
ggagaacaataacctaccatccgca

SEQ ID NO: 268245 - DNA, 25 bp, Probe Sequence
ggagaacaaactctgtcactgggca

SEQ ID NO: 268246 - DNA, 25 bp, Probe Sequence
ggagaccagaacagcatggcccgaa

SEQ ID NO: 268247 - DNA, 25 bp, Probe Sequence
ggaatcccagaacaggccttaagtc

SEQ ID NO: 268248 - DNA, 25 bp, Probe Sequence
ggcaacccaaactgatagtttattc

SEQ ID NO: 268249 - DNA, 25 bp, Probe Sequence
ggaccccaatgtcagtaggaatctt

SEQ ID NO: 268250 - DNA, 25 bp, Probe Sequence
ggaccccagtctaggaattaaatct

SEQ ID NO: 268251 - DNA, 25 bp, Probe Sequence
ggaccgtcattgaggggtaactcct

SEQ ID NO: 268252 - DNA, 25 bp, Probe Sequence
ggaccagtacagcgaggttaatgcc

SEQ ID NO: 268253 - DNA, 25 bp, Probe Sequence
ggagcagcacttcaggaggttacat

SEQ ID NO: 268254 - DNA, 25 bp, Probe Sequence
ggagaattttgatgaggcttccaag

SEQ ID NO: 268255 - DNA, 25 bp, Probe Sequence
ggagaattttgatgaggcttccaag

SEQ ID NO: 268256 - DNA, 25 bp, Probe Sequence
ggagaatctcttgaacctgggaggt

SEQ ID NO: 268257 - DNA, 25 bp, Probe Sequence
ggagaatctcttgaacctgggaggt

SEQ ID NO: 268258 - DNA, 25 bp, Probe Sequence
ggagaatctcttgaacccagaaggc

SEQ ID NO: 268259 - DNA, 25 bp, Probe Sequence
ggagaatctcttgaacccagaaggc

SEQ ID NO: 268260 - DNA, 25 bp, Probe Sequence
ggagaatcacttgaacccaggaggc

SEQ ID NO: 268261 - DNA, 25 bp, Probe Sequence
ggagaattgcttgaacccaggaggc

SEQ ID NO: 268262 - DNA, 25 bp, Probe Sequence
ggagaattgcttgaactcaggaggc

SEQ ID NO: 268263 - DNA, 25 bp, Probe Sequence
ggagaatcacttgagcccaggaggt

SEQ ID NO: 268264 - DNA, 25 bp, Probe Sequence
ggagaatcacttgagcccaggaggt

SEQ ID NO: 268265 - DNA, 25 bp, Probe Sequence
ggagcaaactggcactaagcaaggc

SEQ ID NO: 268266 - DNA, 25 bp, Probe Sequence
ggagaacactgcctactttgcaagc

SEQ ID NO: 268267 - DNA, 25 bp, Probe Sequence
ggagaattctactctgtctgcaagt

SEQ ID NO: 268268 - DNA, 25 bp, Probe Sequence
ggagagatcccctggcttgcagaaa

SEQ ID NO: 268269 - DNA, 25 bp, Probe Sequence
ggagcaggtccctttctagagatag

SEQ ID NO: 268270 - DNA, 25 bp, Probe Sequence
ggagccggagccttttgaagttgga

SEQ ID NO: 268271 - DNA, 25 bp, Probe Sequence
ggagctccgaatgtgcttaagtgga

SEQ ID NO: 268272 - DNA, 25 bp, Probe Sequence
ggagctgccgggaatctagacttgg

SEQ ID NO: 268273 - DNA, 25 bp, Probe Sequence
ggagcaccgaggattcaagctgaac

SEQ ID NO: 268274 - DNA, 25 bp, Probe Sequence
ggagcagcttgcagatggacaagcg

SEQ ID NO: 268275 - DNA, 25 bp, Probe Sequence
ggagcaggtgtttgagatgaaggtc

SEQ ID NO: 268276 - DNA, 25 bp, Probe Sequence
ggagcagtttattcctggagggccc

SEQ ID NO: 268277 - DNA, 25 bp, Probe Sequence
ggacatggtgaatgacggcgtggag

SEQ ID NO: 268278 - DNA, 25 bp, Probe Sequence
ggagcactgtaaaactggtaggagc

SEQ ID NO: 268279 - DNA, 25 bp, Probe Sequence
ggagcacagtggaccatcagggagt

SEQ ID NO: 268280 - DNA, 25 bp, Probe Sequence
ggagacttgtgtccacagtgaggtg

SEQ ID NO: 268281 - DNA, 25 bp, Probe Sequence
ggagcacttgttccgggatggtgtg

SEQ ID NO: 268282 - DNA, 25 bp, Probe Sequence
ggagcttatttctggaaagggtcaa

SEQ ID NO: 268283 - DNA, 25 bp, Probe Sequence
ggagcacgttgctgagtaaagaggt

SEQ ID NO: 268284 - DNA, 25 bp, Probe Sequence
ggagcacgttgctgagtaaagaggt

SEQ ID NO: 268285 - DNA, 25 bp, Probe Sequence
ggagagctttgctgagatgaacagg

SEQ ID NO: 268286 - DNA, 25 bp, Probe Sequence
ggagactttgaatgatcacactgtt

SEQ ID NO: 268287 - DNA, 25 bp, Probe Sequence
ggagacttggagaagcactcctctt

SEQ ID NO: 268288 - DNA, 25 bp, Probe Sequence
ggagcagccttagtccagttgctcc

SEQ ID NO: 268289 - DNA, 25 bp, Probe Sequence
ggagacactgtgacttgcgtctgtc

SEQ ID NO: 268290 - DNA, 25 bp, Probe Sequence
ggagaatctgagacatcttgcctac

SEQ ID NO: 268291 - DNA, 25 bp, Probe Sequence
ggagaaccagattctatcctcatct

SEQ ID NO: 268292 - DNA, 25 bp, Probe Sequence
ggagaactatgatgccatccgagtt

SEQ ID NO: 268293 - DNA, 25 bp, Probe Sequence
ggagaacttgattgaacgtgagatt

SEQ ID NO: 268294 - DNA, 25 bp, Probe Sequence
ggagaacatctttgacactctgcag

SEQ ID NO: 268295 - DNA, 25 bp, Probe Sequence
ggagcttcaggtgagcactgctcat

SEQ ID NO: 268296 - DNA, 25 bp, Probe Sequence
ggagcttaggatcagacctagaatg

SEQ ID NO: 268297 - DNA, 25 bp, Probe Sequence
ggagctccatttccgagctcctaag

SEQ ID NO: 268298 - DNA, 25 bp, Probe Sequence
ggaccacttacattgtaccaaatgt

SEQ ID NO: 268299 - DNA, 25 bp, Probe Sequence
ggactgcatttaattgtaccattca

SEQ ID NO: 268300 - DNA, 25 bp, Probe Sequence
ggagcagtggaaatggttccttgca

SEQ ID NO: 268301 - DNA, 25 bp, Probe Sequence
ggagcagttatgatgtcattccctc

SEQ ID NO: 268302 - DNA, 25 bp, Probe Sequence
ggagacatgttcaattacttcctct

SEQ ID NO: 268303 - DNA, 25 bp, Probe Sequence
ggagagctatggtttacattcaatt

SEQ ID NO: 268304 - DNA, 25 bp, Probe Sequence
ggagacttggttttgacttatatac

SEQ ID NO: 268305 - DNA, 25 bp, Probe Sequence
ggagacccgttatgacctaatccat

SEQ ID NO: 268306 - DNA, 25 bp, Probe Sequence
ggagacgcctgttaggatcttcaag

SEQ ID NO: 268307 - DNA, 25 bp, Probe Sequence
ggagaccatctgaaaatatcttagg

SEQ ID NO: 268308 - DNA, 25 bp, Probe Sequence
ggagagctggctaaattatttgaag

SEQ ID NO: 268309 - DNA, 25 bp, Probe Sequence
ggagagcttcttagatgctgattct

SEQ ID NO: 268310 - DNA, 25 bp, Probe Sequence
ggagagctttcaaggcactattagg

SEQ ID NO: 268311 - DNA, 25 bp, Probe Sequence
ggagacaagtctgagaatgttcaag

SEQ ID NO: 268312 - DNA, 25 bp, Probe Sequence
ggagaccagtatgatgtctgtgcca

SEQ ID NO: 268313 - DNA, 25 bp, Probe Sequence
ggagacacgtttagatggtgccaga

SEQ ID NO: 268314 - DNA, 25 bp, Probe Sequence
ggagacagctgctttaatacccagc

SEQ ID NO: 268315 - DNA, 25 bp, Probe Sequence
ggagaagctcatggtcaagatcggg

SEQ ID NO: 268316 - DNA, 25 bp, Probe Sequence
ggagaactcactgaggatgaggtgg

SEQ ID NO: 268317 - DNA, 25 bp, Probe Sequence
ggagacttaccacggcaagtttgcc

SEQ ID NO: 268318 - DNA, 25 bp, Probe Sequence
ggactcttaacacttaagttactct

SEQ ID NO: 268319 - DNA, 25 bp, Probe Sequence
ggacgggaaagtgaagcccagccgg

SEQ ID NO: 268320 - DNA, 25 bp, Probe Sequence
ggaccaggaaagagcaagcctagcc

SEQ ID NO: 268321 - DNA, 25 bp, Probe Sequence
ggagccgggaggacaaacagctcac

SEQ ID NO: 268322 - DNA, 25 bp, Probe Sequence
ggagccagccaggtgtaatacagtc

SEQ ID NO: 268323 - DNA, 25 bp, Probe Sequence
ggagctactcaggaaggtacgtctg

SEQ ID NO: 268324 - DNA, 25 bp, Probe Sequence
ggacttctaaaaggaactatgtctg

SEQ ID NO: 268325 - DNA, 25 bp, Probe Sequence
ggacgttatataaagaactgaactc

SEQ ID NO: 268326 - DNA, 25 bp, Probe Sequence
ggaccttcttagtgataccaacatg

SEQ ID NO: 268327 - DNA, 25 bp, Probe Sequence
ggactcttctatgaggaacgaacgt

SEQ ID NO: 268328 - DNA, 25 bp, Probe Sequence
ggagaactgtcaaaggtcaccaaag

SEQ ID NO: 268329 - DNA, 25 bp, Probe Sequence
ggagaagatctatgggtcagacaga

SEQ ID NO: 268330 - DNA, 25 bp, Probe Sequence
ggagaaatccttagctgtcagccaa

SEQ ID NO: 268331 - DNA, 25 bp, Probe Sequence
ggagaaatccttagctgtcagccaa

SEQ ID NO: 268332 - DNA, 25 bp, Probe Sequence
ggagcaatacctgtggcatcaccaa

SEQ ID NO: 268333 - DNA, 25 bp, Probe Sequence
ggagcagattcctttgacaacatca

SEQ ID NO: 268334 - DNA, 25 bp, Probe Sequence
ggagcagattcctttgacaacatca

SEQ ID NO: 268335 - DNA, 25 bp, Probe Sequence
ggagcagattcctttgacaacatca

SEQ ID NO: 268336 - DNA, 25 bp, Probe Sequence
ggagcagaattcttgtcatctatga

SEQ ID NO: 268337 - DNA, 25 bp, Probe Sequence
ggagaatcatcttgatgtcattaga

SEQ ID NO: 268338 - DNA, 25 bp, Probe Sequence
ggagaatccctatcactcaagacca

SEQ ID NO: 268339 - DNA, 25 bp, Probe Sequence
ggagaaacttgcagtcagaagccca

SEQ ID NO: 268340 - DNA, 25 bp, Probe Sequence
ggagcaaaccacagtttcatgccca

SEQ ID NO: 268341 - DNA, 25 bp, Probe Sequence
ggagaagctgacgttgttatcccca

SEQ ID NO: 268342 - DNA, 25 bp, Probe Sequence
ggagacaatggcgactttacccttc

SEQ ID NO: 268343 - DNA, 25 bp, Probe Sequence
ggagacagatggtactttacctcgt

SEQ ID NO: 268344 - DNA, 25 bp, Probe Sequence
ggagaagatggtgtcaatggcccga

SEQ ID NO: 268345 - DNA, 25 bp, Probe Sequence
ggagcaagaggtttagtggaccaac

SEQ ID NO: 268346 - DNA, 25 bp, Probe Sequence
ggagacaccagttctgactgaacca

SEQ ID NO: 268347 - DNA, 25 bp, Probe Sequence
ggagaccgcctagatcagagactca

SEQ ID NO: 268348 - DNA, 25 bp, Probe Sequence
ggagaccccaaggcatgtgagcatc

SEQ ID NO: 268349 - DNA, 25 bp, Probe Sequence
ggagaagtccacagtgctgcagtct

SEQ ID NO: 268350 - DNA, 25 bp, Probe Sequence
ggagaagacaccttgtgctcatggg

SEQ ID NO: 268351 - DNA, 25 bp, Probe Sequence
ggagaagaatgggtcatgccggggc

SEQ ID NO: 268352 - DNA, 25 bp, Probe Sequence
ggagaagaaagggcactgggggctg

SEQ ID NO: 268353 - DNA, 25 bp, Probe Sequence
ggagacagagaatccagtgggaaat

SEQ ID NO: 268354 - DNA, 25 bp, Probe Sequence
ggagacacaaaagagctagaagcct

SEQ ID NO: 268355 - DNA, 25 bp, Probe Sequence
ggagcccaagatctgacggaagctg

SEQ ID NO: 268356 - DNA, 25 bp, Probe Sequence
ggacccaaggtagtgctagagctgt

SEQ ID NO: 268357 - DNA, 25 bp, Probe Sequence
ggacttcgagttgggttgcagctta

SEQ ID NO: 268358 - DNA, 25 bp, Probe Sequence
ggagcattcagacttgtctttcagc

SEQ ID NO: 268359 - DNA, 25 bp, Probe Sequence
ggagcttctgactagttcagactgc

SEQ ID NO: 268360 - DNA, 25 bp, Probe Sequence
ggagcatctcttgagcctgagaagt

SEQ ID NO: 268361 - DNA, 25 bp, Probe Sequence
ggagcatcttaggaactgctgaagt

SEQ ID NO: 268362 - DNA, 25 bp, Probe Sequence
ggagcataatagcaactgagagaat

SEQ ID NO: 268363 - DNA, 25 bp, Probe Sequence
ggagcaggtggtcaggcagcaagag

SEQ ID NO: 268364 - DNA, 25 bp, Probe Sequence
ggagcaggaggtctgacaatgaggt

SEQ ID NO: 268365 - DNA, 25 bp, Probe Sequence
ggagcagtgacgtgtgtaagaggta

SEQ ID NO: 268366 - DNA, 25 bp, Probe Sequence
ggacctagcatgattgtaagggtga

SEQ ID NO: 268367 - DNA, 25 bp, Probe Sequence
ggagccaaatttagcatgaatggtg

SEQ ID NO: 268368 - DNA, 25 bp, Probe Sequence
ggagcagcaagagatagcatgacat

SEQ ID NO: 268369 - DNA, 25 bp, Probe Sequence
ggagcacgcaacgtagatgcatcac

SEQ ID NO: 268370 - DNA, 25 bp, Probe Sequence
ggagactcagaagtaggacatgcca

SEQ ID NO: 268371 - DNA, 25 bp, Probe Sequence
ggagactgctacttagaggtgctaa

SEQ ID NO: 268372 - DNA, 25 bp, Probe Sequence
ggacgccaacatgagacctgtaata

SEQ ID NO: 268373 - DNA, 25 bp, Probe Sequence
ggacgcctacgacggcaaggattac

SEQ ID NO: 268374 - DNA, 25 bp, Probe Sequence
ggactttgccgtcggcgagtacaac

SEQ ID NO: 268375 - DNA, 25 bp, Probe Sequence
ggaccattccgaggggagtccagag

SEQ ID NO: 268376 - DNA, 25 bp, Probe Sequence
ggaccagtactgtggggactatgag

SEQ ID NO: 268377 - DNA, 25 bp, Probe Sequence
ggacggaacttctgaaacatgtgag

SEQ ID NO: 268378 - DNA, 25 bp, Probe Sequence
ggacggaacttctgaaacatgtgag

SEQ ID NO: 268379 - DNA, 25 bp, Probe Sequence
ggactgcggaattacgagggctggc

SEQ ID NO: 268380 - DNA, 25 bp, Probe Sequence
ggacctggcgtctagagatgtggtg

SEQ ID NO: 268381 - DNA, 25 bp, Probe Sequence
ggacctgaccgatgcaatcgaggaa

SEQ ID NO: 268382 - DNA, 25 bp, Probe Sequence
ggacctgacaggacaacctaggggc

SEQ ID NO: 268383 - DNA, 25 bp, Probe Sequence
ggacctaaggcccactggagggcgc

SEQ ID NO: 268384 - DNA, 25 bp, Probe Sequence
ggaccgaggtggctttggtggagga

SEQ ID NO: 268385 - DNA, 25 bp, Probe Sequence
ggaccgaggtggctttggtggagga

SEQ ID NO: 268386 - DNA, 25 bp, Probe Sequence
ggacctgagtgctggagggttggag

SEQ ID NO: 268387 - DNA, 25 bp, Probe Sequence
ggaactgggagggaagggtgagacg

SEQ ID NO: 268388 - DNA, 25 bp, Probe Sequence
ggacccgaagtccaagtggcgaagc

SEQ ID NO: 268389 - DNA, 25 bp, Probe Sequence
ggacaccgtagtaagaggacttcca

SEQ ID NO: 268390 - DNA, 25 bp, Probe Sequence
ggagctccttagtaaaggacttatc

SEQ ID NO: 268391 - DNA, 25 bp, Probe Sequence
ggactgcttatagagcacagacctt

SEQ ID NO: 268392 - DNA, 25 bp, Probe Sequence
ggactcttatgtgagagacccggcc

SEQ ID NO: 268393 - DNA, 25 bp, Probe Sequence
ggactcctacacgaagatctgcagt

SEQ ID NO: 268394 - DNA, 25 bp, Probe Sequence
ggacctcaaccaggacttcagtgga

SEQ ID NO: 268395 - DNA, 25 bp, Probe Sequence
ggacctcaaccaggacttcagtgga

SEQ ID NO: 268396 - DNA, 25 bp, Probe Sequence
ggactctgaaaacacttcaggcgcc

SEQ ID NO: 268397 - DNA, 25 bp, Probe Sequence
ggacttgagactttggtcccagccc

SEQ ID NO: 268398 - DNA, 25 bp, Probe Sequence
ggacctggaataggcgccaagaccc

SEQ ID NO: 268399 - DNA, 25 bp, Probe Sequence
ggaccatggggcaggcttagccccg

SEQ ID NO: 268400 - DNA, 25 bp, Probe Sequence
ggaccagggcggcgagtggaagcac

SEQ ID NO: 268401 - DNA, 25 bp, Probe Sequence
ggaccagggcggcgagtggaagcac

SEQ ID NO: 268402 - DNA, 25 bp, Probe Sequence
ggagcaggggggcaagactgaagat

SEQ ID NO: 268403 - DNA, 25 bp, Probe Sequence
ggcagggggtgcagaaaatgattga

SEQ ID NO: 268404 - DNA, 25 bp, Probe Sequence
ggagcggtggctgagaaaatgtaag

SEQ ID NO: 268405 - DNA, 25 bp, Probe Sequence
ggagcttgggctcacagaaagagaa

SEQ ID NO: 268406 - DNA, 25 bp, Probe Sequence
ggactggttcagcacataaaagatg

SEQ ID NO: 268407 - DNA, 25 bp, Probe Sequence
ggactggttcagcacataaaagatg

SEQ ID NO: 268408 - DNA, 25 bp, Probe Sequence
ggagcctgacctgaattaaagtact

SEQ ID NO: 268409 - DNA, 25 bp, Probe Sequence
ggagcttgtccggaagattgcaaat

SEQ ID NO: 268410 - DNA, 25 bp, Probe Sequence
ggagcttggctgaagacatgtttaa

SEQ ID NO: 268411 - DNA, 25 bp, Probe Sequence
ggagcttctctggaatcatttgcca

SEQ ID NO: 268412 - DNA, 25 bp, Probe Sequence
ggagcattccgatattgtctcaaaa

SEQ ID NO: 268413 - DNA, 25 bp, Probe Sequence
ggagcagttggctacttgattacaa

SEQ ID NO: 268414 - DNA, 25 bp, Probe Sequence
ggagcagcgctagttcataatttaa

SEQ ID NO: 268415 - DNA, 25 bp, Probe Sequence
ggagcagcagcaaattcacatattt

SEQ ID NO: 268416 - DNA, 25 bp, Probe Sequence
ggagcagcagctatctgtcttttgc

SEQ ID NO: 268417 - DNA, 25 bp, Probe Sequence
ggagcagcttagtctcacagtttgc

SEQ ID NO: 268418 - DNA, 25 bp, Probe Sequence
ggagcccatggcatcatagttgtgt

SEQ ID NO: 268419 - DNA, 25 bp, Probe Sequence
ggagcagccaggctcagtttgtggc

SEQ ID NO: 268420 - DNA, 25 bp, Probe Sequence
ggagcagccaggctcagtttgtggc

SEQ ID NO: 268421 - DNA, 25 bp, Probe Sequence
ggagcgccaggaatggattagccac

SEQ ID NO: 268422 - DNA, 25 bp, Probe Sequence
ggagcccacacaagcagatattgcc

SEQ ID NO: 268423 - DNA, 25 bp, Probe Sequence
ggagcacctgaaccatgattctgtc

SEQ ID NO: 268424 - DNA, 25 bp, Probe Sequence
ggaccgctgataagcattgacttgc

SEQ ID NO: 268425 - DNA, 25 bp, Probe Sequence
ggagccgctgaaagttcttggcatt

SEQ ID NO: 268426 - DNA, 25 bp, Probe Sequence
ggagcactgtggaacgtctgtaaat

SEQ ID NO: 268427 - DNA, 25 bp, Probe Sequence
ggagcaggtgatgccgatttccatt

SEQ ID NO: 268428 - DNA, 25 bp, Probe Sequence
ggagcggatgtattggatttagcag

SEQ ID NO: 268429 - DNA, 25 bp, Probe Sequence
ggagcagagcagatcttgagtgtac

SEQ ID NO: 268430 - DNA, 25 bp, Probe Sequence
ggagcagatgcagatttaggtggca

SEQ ID NO: 268431 - DNA, 25 bp, Probe Sequence
ggagcgtggttttctgattgtgatc

SEQ ID NO: 268432 - DNA, 25 bp, Probe Sequence
ggagctctggttactctttgagatt

SEQ ID NO: 268433 - DNA, 25 bp, Probe Sequence
ggagctctcagtttcttagggatgg

SEQ ID NO: 268434 - DNA, 25 bp, Probe Sequence
ggagcttttactctgttgtgagggg

SEQ ID NO: 268435 - DNA, 25 bp, Probe Sequence
ggcagtttttccattttcatttgtg

SEQ ID NO: 268436 - DNA, 25 bp, Probe Sequence
ggcagtttttccattttcatttgtg

SEQ ID NO: 268437 - DNA, 25 bp, Probe Sequence
ggcagtttttccattttcatttgtg

SEQ ID NO: 268438 - DNA, 25 bp, Probe Sequence
ggagcttttcttacctattcaagga

SEQ ID NO: 268439 - DNA, 25 bp, Probe Sequence
ggactttcgttaacattgaccaaga

SEQ ID NO: 268440 - DNA, 25 bp, Probe Sequence
ggaactttgtacacaaaccaagaca

SEQ ID NO: 268441 - DNA, 25 bp, Probe Sequence
ggaccgtctgtggctataatgacca

SEQ ID NO: 268442 - DNA, 25 bp, Probe Sequence
ggaccgaataccaattcaaccacca

SEQ ID NO: 268443 - DNA, 25 bp, Probe Sequence
ggacccataactaaggaaacatcac

SEQ ID NO: 268444 - DNA, 25 bp, Probe Sequence
ggaccaaaggtcagggacacatccc

SEQ ID NO: 268445 - DNA, 25 bp, Probe Sequence
ggagccaagacgagagggacacacg

SEQ ID NO: 268446 - DNA, 25 bp, Probe Sequence
ggagccaagacgagagggacacacg

SEQ ID NO: 268447 - DNA, 25 bp, Probe Sequence
ggacctgcagggtgtgcggaacatc

SEQ ID NO: 268448 - DNA, 25 bp, Probe Sequence
ggaccagagcggtatctctggcacc

SEQ ID NO: 268449 - DNA, 25 bp, Probe Sequence
ggaccagcagatggctctttgtaca

SEQ ID NO: 268450 - DNA, 25 bp, Probe Sequence
ggagcacacagctcttcttaaaatt

SEQ ID NO: 268451 - DNA, 25 bp, Probe Sequence
ggagccctgctcatcaatgaaaaac

SEQ ID NO: 268452 - DNA, 25 bp, Probe Sequence
ggagccctgctcatcaatgaaaaac

SEQ ID NO: 268453 - DNA, 25 bp, Probe Sequence
ggagcatctggctttcaagggaaca

SEQ ID NO: 268454 - DNA, 25 bp, Probe Sequence
ggagcctggatggctggcggaaaga

SEQ ID NO: 268455 - DNA, 25 bp, Probe Sequence
ggagcagtatgcagaggggaagatg

SEQ ID NO: 268456 - DNA, 25 bp, Probe Sequence
ggagcggcagcaaggggtgtaatgg

SEQ ID NO: 268457 - DNA, 25 bp, Probe Sequence
ggacgccctggtggatcttaattgt

SEQ ID NO: 268458 - DNA, 25 bp, Probe Sequence
ggacgcccttgtggaatttgggtca

SEQ ID NO: 268459 - DNA, 25 bp, Probe Sequence
ggactggcctttgaagctctggcca

SEQ ID NO: 268460 - DNA, 25 bp, Probe Sequence
ggactccttcctcaagatctggaac

SEQ ID NO: 268461 - DNA, 25 bp, Probe Sequence
ggacacttggactaaagattgggac

SEQ ID NO: 268462 - DNA, 25 bp, Probe Sequence
ggaccatgttaattacacttacgac

SEQ ID NO: 268463 - DNA, 25 bp, Probe Sequence
ggactgtgttgctgtaccttagctg

SEQ ID NO: 268464 - DNA, 25 bp, Probe Sequence
ggactattccatattaaaagctgtt

SEQ ID NO: 268465 - DNA, 25 bp, Probe Sequence
ggacgattcgtttatgagaagactg

SEQ ID NO: 268466 - DNA, 25 bp, Probe Sequence
ggagctctcacgattcaaacatgac

SEQ ID NO: 268467 - DNA, 25 bp, Probe Sequence
ggagctaagaggtatataatcatga

SEQ ID NO: 268468 - DNA, 25 bp, Probe Sequence
ggagctagactaccataacaatgct

SEQ ID NO: 268469 - DNA, 25 bp, Probe Sequence
ggagcaggttagtctcacagttgct

SEQ ID NO: 268470 - DNA, 25 bp, Probe Sequence
ggagcaagtgtatcccatcattgcc

SEQ ID NO: 268471 - DNA, 25 bp, Probe Sequence
ggaccaattttcccaattgacctct

SEQ ID NO: 268472 - DNA, 25 bp, Probe Sequence
ggaccaattttcccaattgacctct

SEQ ID NO: 268473 - DNA, 25 bp, Probe Sequence
ggaccaagatttaccaattcaccca

SEQ ID NO: 268474 - DNA, 25 bp, Probe Sequence
ggacgaagtaagagccatcatcccc

SEQ ID NO: 268475 - DNA, 25 bp, Probe Sequence
ggactgcataaagattggtatggcc

SEQ ID NO: 268476 - DNA, 25 bp, Probe Sequence
ggacatgaaaaccagcaggaaggcc

SEQ ID NO: 268477 - DNA, 25 bp, Probe Sequence
ggacttagatacctgcaagggcctc
